United States Patent Application Publication US 2018/0305689 A1 - sequence listing, part 46

SEQ ID NO: 594829 - RNA, 19 nt, Artificial Sequence
  Description of Artificial Sequence: Synthetic oligonucleotide
  Antisense strand to SEQ ID NO: 594828
cauaaggacaauaaucucu

SEQ ID NO: 594830 - RNA, 19 nt, Artificial Sequence
  Description of Artificial Sequence: Synthetic oligonucleotide
  Sense strand starting at position 1120 of SEQ ID NO: 584858
guccuuaugcccuuagugu

SEQ ID NO: 594831 - RNA, 19 nt, Artificial Sequence
  Description of Artificial Sequence: Synthetic oligonucleotide
  Antisense strand to SEQ ID NO: 594830
acacuaagggcauaaggac

SEQ ID NO: 594832 - RNA, 19 nt, Artificial Sequence
  Description of Artificial Sequence: Synthetic oligonucleotide
  Sense strand starting at position 1162 of SEQ ID NO: 584858
uaaugagggcguugggauu

SEQ ID NO: 594833 - RNA, 19 nt, Artificial Sequence
  Description of Artificial Sequence: Synthetic oligonucleotide
  Antisense strand to SEQ ID NO: 594832
aaucccaacgcccucauua

SEQ ID NO: 594834 - RNA, 19 nt, Artificial Sequence
  Description of Artificial Sequence: Synthetic oligonucleotide
  Sense strand starting at position 1291 of SEQ ID NO: 584858
gcuccagacuccuugaacu

SEQ ID NO: 594835 - RNA, 19 nt, Artificial Sequence
  Description of Artificial Sequence: Synthetic oligonucleotide
  Antisense strand to SEQ ID NO: 594834
aguucaaggagucuggagc

SEQ ID NO: 594836 - RNA, 19 nt, Artificial Sequence
  Description of Artificial Sequence: Synthetic oligonucleotide
  Sense strand starting at position 1828 of SEQ ID NO: 584858
gugguuucgcaguccugga

SEQ ID NO: 594837 - RNA, 19 nt, Artificial Sequence
  Description of Artificial Sequence: Synthetic oligonucleotide
  Antisense strand to SEQ ID NO: 594836
uccaggacugcgaaaccac

SEQ ID NO: 594838 - RNA, 19 nt, Artificial Sequence
  Description of Artificial Sequence: Synthetic oligonucleotide
  Sense strand starting at position 2049 of SEQ ID NO: 584858
ggcugcuauguuggaucaa

SEQ ID NO: 594839 - RNA, 19 nt, Artificial Sequence
  Description of Artificial Sequence: Synthetic oligonucleotide
  Antisense strand to SEQ ID NO: 594838
uugauccaacauagcagcc

SEQ ID NO: 594840 - RNA, 19 nt, Artificial Sequence
  Description of Artificial Sequence: Synthetic oligonucleotide
  Sense strand starting at position 2112 of SEQ ID NO: 584858
uaggaaguguauuugcuuu

SEQ ID NO: 594841 - RNA, 19 nt, Artificial Sequence
  Description of Artificial Sequence: Synthetic oligonucleotide
  Antisense strand to SEQ ID NO: 594840
aaagcaaauacacuuccua

SEQ ID NO: 594842 - RNA, 19 nt, Artificial Sequence
  Description of Artificial Sequence: Synthetic oligonucleotide
  Sense strand starting at position 2204 of SEQ ID NO: 584858
gaaauuaguguuggugaag

SEQ ID NO: 594843 - RNA, 19 nt, Artificial Sequence
  Description of Artificial Sequence: Synthetic oligonucleotide
  Antisense strand to SEQ ID NO: 594842
cuucaccaacacuaauuuc

SEQ ID NO: 594844 - RNA, 19 nt, Artificial Sequence
  Description of Artificial Sequence: Synthetic oligonucleotide
  Sense strand starting at position 2275 of SEQ ID NO: 584858
cagccaugugaugaacaau

SEQ ID NO: 594845 - RNA, 19 nt, Artificial Sequence
  Description of Artificial Sequence: Synthetic oligonucleotide
  Antisense strand to SEQ ID NO: 594844
auuguucaucacauggcug

SEQ ID NO: 594846 - RNA, 19 nt, Artificial Sequence
  Description of Artificial Sequence: Synthetic oligonucleotide
  Sense strand starting at position 2297 of SEQ ID NO: 584858
gcgguuccucaacaaauca

SEQ ID NO: 594847 - RNA, 19 nt, Artificial Sequence
  Description of Artificial Sequence: Synthetic oligonucleotide
  Antisense strand to SEQ ID NO: 594846
ugauuuguugaggaaccgc

SEQ ID NO: 594848 - RNA, 19 nt, Artificial Sequence
  Description of Artificial Sequence: Synthetic oligonucleotide
  Sense strand starting at position 2313 of SEQ ID NO: 584858
ucaguuauaugauccagca

SEQ ID NO: 594849 - RNA, 19 nt, Artificial Sequence
  Description of Artificial Sequence: Synthetic oligonucleotide
  Antisense strand to SEQ ID NO: 594848
ugcuggaucauauaacuga

SEQ ID NO: 594850 - RNA, 19 nt, Artificial Sequence
  Description of Artificial Sequence: Synthetic oligonucleotide
  Sense strand starting at position 2738 of SEQ ID NO: 584858
agaguuucaguuuggagag

SEQ ID NO: 594851 - RNA, 19 nt, Artificial Sequence
  Description of Artificial Sequence: Synthetic oligonucleotide
  Antisense strand to SEQ ID NO: 594850
cucuccaaacugaaacucu

SEQ ID NO: 594852 - RNA, 19 nt, Artificial Sequence
  Description of Artificial Sequence: Synthetic oligonucleotide
  Sense strand starting at position 2782 of SEQ ID NO: 584858
uggugaugccugcauuaca

SEQ ID NO: 594853 - RNA, 19 nt, Artificial Sequence
  Description of Artificial Sequence: Synthetic oligonucleotide
  Antisense strand to SEQ ID NO: 594852
uguaaugcaggcaucacca

SEQ ID NO: 594854 - RNA, 19 nt, Artificial Sequence
  Description of Artificial Sequence: Synthetic oligonucleotide
  Sense strand starting at position 2795 of SEQ ID NO: 584858
auuacauugugaguguacu

SEQ ID NO: 594855 - RNA, 19 nt, Artificial Sequence
  Description of Artificial Sequence: Synthetic oligonucleotide
  Antisense strand to SEQ ID NO: 594854
aguacacucacaauguaau

SEQ ID NO: 594856 - RNA, 19 nt, Artificial Sequence
  Description of Artificial Sequence: Synthetic oligonucleotide
  Sense strand starting at position 2796 of SEQ ID NO: 584858
uuacauugugaguguacuu

SEQ ID NO: 594857 - RNA, 19 nt, Artificial Sequence
  Description of Artificial Sequence: Synthetic oligonucleotide
  Antisense strand to SEQ ID NO: 594856
aaguacacucacaauguaa

SEQ ID NO: 594858 - RNA, 19 nt, Artificial Sequence
  Description of Artificial Sequence: Synthetic oligonucleotide
  Sense strand starting at position 2940 of SEQ ID NO: 584858
auugaaagcucaguggaga

SEQ ID NO: 594859 - RNA, 19 nt, Artificial Sequence
  Description of Artificial Sequence: Synthetic oligonucleotide
  Antisense strand to SEQ ID NO: 594858
ucuccacugagcuuucaau

SEQ ID NO: 594860 - RNA, 19 nt, Artificial Sequence
  Description of Artificial Sequence: Synthetic oligonucleotide
  Sense strand starting at position 2941 of SEQ ID NO: 584858
uugaaagcucaguggagaa

SEQ ID NO: 594861 - RNA, 19 nt, Artificial Sequence
  Description of Artificial Sequence: Synthetic oligonucleotide
  Antisense strand to SEQ ID NO: 594860
uucuccacugagcuuucaa

SEQ ID NO: 594862 - RNA, 19 nt, Artificial Sequence
  Description of Artificial Sequence: Synthetic oligonucleotide
  Sense strand starting at position 3004 of SEQ ID NO: 584858
ggaaauaacuggcagauuu

SEQ ID NO: 594863 - RNA, 19 nt, Artificial Sequence
  Description of Artificial Sequence: Synthetic oligonucleotide
  Antisense strand to SEQ ID NO: 594862
aaaucugccaguuauuucc

SEQ ID NO: 594864 - RNA, 19 nt, Artificial Sequence
  Description of Artificial Sequence: Synthetic oligonucleotide
  Sense strand starting at position 3015 of SEQ ID NO: 584858
gcagauuuguggcuacugu

SEQ ID NO: 594865 - RNA, 19 nt, Artificial Sequence
  Description of Artificial Sequence: Synthetic oligonucleotide
  Antisense strand to SEQ ID NO: 594864
acaguagccacaaaucugc

SEQ ID NO: 594866 - RNA, 19 nt, Artificial Sequence
  Description of Artificial Sequence: Synthetic oligonucleotide
  Sense strand starting at position 3035 of SEQ ID NO: 584858
guagccuuggcuugaauaa

SEQ ID NO: 594867 - RNA, 19 nt, Artificial Sequence
  Description of Artificial Sequence: Synthetic oligonucleotide
  Antisense strand to SEQ ID NO: 594866
uuauucaagccaaggcuac

SEQ ID NO: 594868 - RNA, 19 nt, Artificial Sequence
  Description of Artificial Sequence: Synthetic oligonucleotide
  Sense strand starting at position 3042 of SEQ ID NO: 584858
uggcuugaauaauuggaga

SEQ ID NO: 594869 - RNA, 19 nt, Artificial Sequence
  Description of Artificial Sequence: Synthetic oligonucleotide
  Antisense strand to SEQ ID NO: 594868
ucuccaauuauucaagcca

SEQ ID NO: 594870 - RNA, 19 nt, Artificial Sequence
  Description of Artificial Sequence: Synthetic oligonucleotide
  Sense strand starting at position 3045 of SEQ ID NO: 584858
cuugaauaauuggagacaa

SEQ ID NO: 594871 - RNA, 19 nt, Artificial Sequence
  Description of Artificial Sequence: Synthetic oligonucleotide
  Antisense strand to SEQ ID NO: 594870
uugucuccaauuauucaag

SEQ ID NO: 594872 - RNA, 19 nt, Artificial Sequence
  Description of Artificial Sequence: Synthetic oligonucleotide
  Sense strand starting at position 3197 of SEQ ID NO: 584858
uuggacuuucuugaguagu

SEQ ID NO: 594873 - RNA, 19 nt, Artificial Sequence
  Description of Artificial Sequence: Synthetic oligonucleotide
  Antisense strand to SEQ ID NO: 594872
acuacucaagaaaguccaa

SEQ ID NO: 594874 - RNA, 19 nt, Artificial Sequence
  Description of Artificial Sequence: Synthetic oligonucleotide
  Sense strand starting at position 3199 of SEQ ID NO: 584858
ggacuuucuugaguaguaa

SEQ ID NO: 594875 - RNA, 19 nt, Artificial Sequence
  Description of Artificial Sequence: Synthetic oligonucleotide
  Antisense strand to SEQ ID NO: 594874
uuacuacucaagaaagucc

SEQ ID NO: 594876 - RNA, 19 nt, Artificial Sequence
  Description of Artificial Sequence: Synthetic oligonucleotide
  Sense strand starting at position 3200 of SEQ ID NO: 584858
gacuuucuugaguaguaaa

SEQ ID NO: 594877 - RNA, 19 nt, Artificial Sequence
  Description of Artificial Sequence: Synthetic oligonucleotide
  Antisense strand to SEQ ID NO: 594876
uuuacuacucaagaaaguc

SEQ ID NO: 594878 - RNA, 19 nt, Artificial Sequence
  Description of Artificial Sequence: Synthetic oligonucleotide
  Sense strand starting at position 3329 of SEQ ID NO: 584858
aguuuaauaucguuugacu

SEQ ID NO: 594879 - RNA, 19 nt, Artificial Sequence
  Description of Artificial Sequence: Synthetic oligonucleotide
  Antisense strand to SEQ ID NO: 594878
agucaaacgauauuaaacu

SEQ ID NO: 594880 - RNA, 19 nt, Artificial Sequence
  Description of Artificial Sequence: Synthetic oligonucleotide
  Sense strand starting at position 3350 of SEQ ID NO: 584858
cagaaaucuuuggugaggu

SEQ ID NO: 594881 - RNA, 19 nt, Artificial Sequence
  Description of Artificial Sequence: Synthetic oligonucleotide
  Antisense strand to SEQ ID NO: 594880
accucaccaaagauuucug

SEQ ID NO: 594882 - RNA, 19 nt, Artificial Sequence
  Description of Artificial Sequence: Synthetic oligonucleotide
  Sense strand starting at position 3352 of SEQ ID NO: 584858
gaaaucuuuggugagguca

SEQ ID NO: 594883 - RNA, 19 nt, Artificial Sequence
  Description of Artificial Sequence: Synthetic oligonucleotide
  Antisense strand to SEQ ID NO: 594882
ugaccucaccaaagauuuc

SEQ ID NO: 594884 - RNA, 19 nt, Artificial Sequence
  Description of Artificial Sequence: Synthetic oligonucleotide
  Sense strand starting at position 3425 of SEQ ID NO: 584858
aauagcugucuguacaguu

SEQ ID NO: 594885 - RNA, 19 nt, Artificial Sequence
  Description of Artificial Sequence: Synthetic oligonucleotide
  Antisense strand to SEQ ID NO: 594884
aacuguacagacagcuauu

SEQ ID NO: 594886 - RNA, 19 nt, Artificial Sequence
  Description of Artificial Sequence: Synthetic oligonucleotide
  Sense strand starting at position 3452 of SEQ ID NO: 584858
aguuacccuugugcuaaua

SEQ ID NO: 594887 - RNA, 19 nt, Artificial Sequence
  Description of Artificial Sequence: Synthetic oligonucleotide
  Antisense strand to SEQ ID NO: 594886
uauuagcacaaggguaacu

SEQ ID NO: 594888 - RNA, 19 nt, Artificial Sequence
  Description of Artificial Sequence: Synthetic oligonucleotide
  Sense strand starting at position 1419 of SEQ ID NO: 584859
uugccagagucuuauaaua

SEQ ID NO: 594889 - RNA, 19 nt, Artificial Sequence
  Description of Artificial Sequence: Synthetic oligonucleotide
  Antisense strand to SEQ ID NO: 594888
uauuauaagacucuggcaa

SEQ ID NO: 594890 - RNA, 19 nt, Artificial Sequence
  Description of Artificial Sequence: Synthetic oligonucleotide
  Sense strand starting at position 1421 of SEQ ID NO: 584859
gccagagucuuauaauacu

SEQ ID NO: 594891 - RNA, 19 nt, Artificial Sequence
  Description of Artificial Sequence: Synthetic oligonucleotide
  Antisense strand to SEQ ID NO: 594890
aguauuauaagacucuggc

SEQ ID NO: 594892 - RNA, 19 nt, Artificial Sequence
  Description of Artificial Sequence: Synthetic oligonucleotide
  Sense strand starting at position 1490 of SEQ ID NO: 584859
acuacuguuuagucccaaa

SEQ ID NO: 594893 - RNA, 19 nt, Artificial Sequence
  Description of Artificial Sequence: Synthetic oligonucleotide
  Antisense strand to SEQ ID NO: 594892
uuugggacuaaacaguagu

SEQ ID NO: 594894 - RNA, 19 nt, Artificial Sequence
  Description of Artificial Sequence: Synthetic oligonucleotide
  Sense strand starting at position 1493 of SEQ ID NO: 584859
acuguuuagucccaaagac

SEQ ID NO: 594895 - RNA, 19 nt, Artificial Sequence
  Description of Artificial Sequence: Synthetic oligonucleotide
  Antisense strand to SEQ ID NO: 594894
gucuuugggacuaaacagu

SEQ ID NO: 594896 - RNA, 19 nt, Artificial Sequence
  Description of Artificial Sequence: Synthetic oligonucleotide
  Sense strand starting at position 1533 of SEQ ID NO: 584859
cccaaauuugcacguccaa

SEQ ID NO: 594897 - RNA, 19 nt, Artificial Sequence
  Description of Artificial Sequence: Synthetic oligonucleotide
  Antisense strand to SEQ ID NO: 594896
uuggacgugcaaauuuggg

SEQ ID NO: 594898 - RNA, 19 nt, Artificial Sequence
  Description of Artificial Sequence: Synthetic oligonucleotide
  Sense strand starting at position 1594 of SEQ ID NO: 584859
uacauuucugcucguucga

SEQ ID NO: 594899 - RNA, 19 nt, Artificial Sequence
  Description of Artificial Sequence: Synthetic oligonucleotide
  Antisense strand to SEQ ID NO: 594898
ucgaacgagcagaaaugua

SEQ ID NO: 594900 - RNA, 19 nt, Artificial Sequence
  Description of Artificial Sequence: Synthetic oligonucleotide
  Sense strand starting at position 1596 of SEQ ID NO: 584859
cauuucugcucguucgaaa

SEQ ID NO: 594901 - RNA, 19 nt, Artificial Sequence
  Description of Artificial Sequence: Synthetic oligonucleotide
  Antisense strand to SEQ ID NO: 594900
uuucgaacgagcagaaaug

SEQ ID NO: 594902 - RNA, 19 nt, Artificial Sequence
  Description of Artificial Sequence: Synthetic oligonucleotide
  Sense strand starting at position 2128 of SEQ ID NO: 584859
gggugcagacucugugaau

SEQ ID NO: 594903 - RNA, 19 nt, Artificial Sequence
  Description of Artificial Sequence: Synthetic oligonucleotide
  Antisense strand to SEQ ID NO: 594902
auucacagagucugcaccc

SEQ ID NO: 594904 - RNA, 19 nt, Artificial Sequence
  Description of Artificial Sequence: Synthetic oligonucleotide
  Sense strand starting at position 2129 of SEQ ID NO: 584859
ggugcagacucugugaauc

SEQ ID NO: 594905 - RNA, 19 nt, Artificial Sequence
  Description of Artificial Sequence: Synthetic oligonucleotide
  Antisense strand to SEQ ID NO: 594904
gauucacagagucugcacc

SEQ ID NO: 594906 - RNA, 19 nt, Artificial Sequence
  Description of Artificial Sequence: Synthetic oligonucleotide
  Sense strand starting at position 2131 of SEQ ID NO: 584859
ugcagacucugugaaucaa

SEQ ID NO: 594907 - RNA, 19 nt, Artificial Sequence
  Description of Artificial Sequence: Synthetic oligonucleotide
  Antisense strand to SEQ ID NO: 594906
uugauucacagagucugca

SEQ ID NO: 594908 - RNA, 19 nt, Artificial Sequence
  Description of Artificial Sequence: Synthetic oligonucleotide
  Sense strand starting at position 2282 of SEQ ID NO: 584859
cuucgcuaccagggagaaa

SEQ ID NO: 594909 - RNA, 19 nt, Artificial Sequence
  Description of Artificial Sequence: Synthetic oligonucleotide
  Antisense strand to SEQ ID NO: 594908
uuucucccugguagcgaag

SEQ ID NO: 594910 - RNA, 19 nt, Artificial Sequence
  Description of Artificial Sequence: Synthetic oligonucleotide
  Sense strand starting at position 2299 of SEQ ID NO: 584859
aaacaaacuuguguacgua

SEQ ID NO: 594911 - RNA, 19 nt, Artificial Sequence
  Description of Artificial Sequence: Synthetic oligonucleotide
  Antisense strand to SEQ ID NO: 594910
uacguacacaaguuuguuu

SEQ ID NO: 594912 - RNA, 19 nt, Artificial Sequence
  Description of Artificial Sequence: Synthetic oligonucleotide
  Sense strand starting at position 2300 of SEQ ID NO: 584859
aacaaacuuguguacguau

SEQ ID NO: 594913 - RNA, 19 nt, Artificial Sequence
  Description of Artificial Sequence: Synthetic oligonucleotide
  Antisense strand to SEQ ID NO: 594912
auacguacacaaguuuguu

SEQ ID NO: 594914 - RNA, 19 nt, Artificial Sequence
  Description of Artificial Sequence: Synthetic oligonucleotide
  Sense strand starting at position 2307 of SEQ ID NO: 584859
uuguguacguaucugggaa

SEQ ID NO: 594915 - RNA, 19 nt, Artificial Sequence
  Description of Artificial Sequence: Synthetic oligonucleotide
  Antisense strand to SEQ ID NO: 594914
uucccagauacguacacaa

SEQ ID NO: 594916 - RNA, 19 nt, Artificial Sequence
  Description of Artificial Sequence: Synthetic oligonucleotide
  Sense strand starting at position 2308 of SEQ ID NO: 584859
uguguacguaucugggaaa

SEQ ID NO: 594917 - RNA, 19 nt, Artificial Sequence
  Description of Artificial Sequence: Synthetic oligonucleotide
  Antisense strand to SEQ ID NO: 594916
uuucccagauacguacaca

SEQ ID NO: 594918 - RNA, 19 nt, Artificial Sequence
  Description of Artificial Sequence: Synthetic oligonucleotide
  Sense strand starting at position 2343 of SEQ ID NO: 584859
gaacaaauauacgguaaga

SEQ ID NO: 594919 - RNA, 19 nt, Artificial Sequence
  Description of Artificial Sequence: Synthetic oligonucleotide
  Antisense strand to SEQ ID NO: 594918
ucuuaccguauauuuguuc

SEQ ID NO: 594920 - RNA, 19 nt, Artificial Sequence
  Description of Artificial Sequence: Synthetic oligonucleotide
  Sense strand starting at position 2456 of SEQ ID NO: 584859
cucgguuacugcgucuaaa

SEQ ID NO: 594921 - RNA, 19 nt, Artificial Sequence
  Description of Artificial Sequence: Synthetic oligonucleotide
  Antisense strand to SEQ ID NO: 594920
uuuagacgcaguaaccgag

SEQ ID NO: 594922 - RNA, 19 nt, Artificial Sequence
  Description of Artificial Sequence: Synthetic oligonucleotide
  Sense strand starting at position 2813 of SEQ ID NO: 584859
gccagacauugcucucguu

SEQ ID NO: 594923 - RNA, 19 nt, Artificial Sequence
  Description of Artificial Sequence: Synthetic oligonucleotide
  Antisense strand to SEQ ID NO: 594922
aacgagagcaaugucuggc

SEQ ID NO: 594924 - RNA, 19 nt, Artificial Sequence
  Description of Artificial Sequence: Synthetic oligonucleotide
  Sense strand starting at position 2816 of SEQ ID NO: 584859
agacauugcucucguuuau

SEQ ID NO: 594925 - RNA, 19 nt, Artificial Sequence
  Description of Artificial Sequence: Synthetic oligonucleotide
  Antisense strand to SEQ ID NO: 594924
auaaacgagagcaaugucu

SEQ ID NO: 594926 - RNA, 19 nt, Artificial Sequence
  Description of Artificial Sequence: Synthetic oligonucleotide
  Sense strand starting at position 2826 of SEQ ID NO: 584859
cucguuuauucccugcauu

SEQ ID NO: 594927 - RNA, 19 nt, Artificial Sequence
  Description of Artificial Sequence: Synthetic oligonucleotide
  Antisense strand to SEQ ID NO: 594926
aaugcagggaauaaacgag

SEQ ID NO: 594928 - RNA, 19 nt, Artificial Sequence
  Description of Artificial Sequence: Synthetic oligonucleotide
  Sense strand starting at position 2827 of SEQ ID NO: 584859
ucguuuauucccugcauuc

SEQ ID NO: 594929 - RNA, 19 nt, Artificial Sequence
  Description of Artificial Sequence: Synthetic oligonucleotide
  Antisense strand to SEQ ID NO: 594928
gaaugcagggaauaaacga

SEQ ID NO: 594930 - RNA, 19 nt, Artificial Sequence
  Description of Artificial Sequence: Synthetic oligonucleotide
  Sense strand starting at position 2905 of SEQ ID NO: 584859
ggcuacugcuacucaguaa

SEQ ID NO: 594931 - RNA, 19 nt, Artificial Sequence
  Description of Artificial Sequence: Synthetic oligonucleotide
  Antisense strand to SEQ ID NO: 594930
uuacugaguagcaguagcc

SEQ ID NO: 594932 - RNA, 19 nt, Artificial Sequence
  Description of Artificial Sequence: Synthetic oligonucleotide
  Sense strand starting at position 2916 of SEQ ID NO: 584859
cucaguaauuugggaaagu

SEQ ID NO: 594933 - RNA, 19 nt, Artificial Sequence
  Description of Artificial Sequence: Synthetic oligonucleotide
  Antisense strand to SEQ ID NO: 594932
acuuucccaaauuacugag

SEQ ID NO: 594934 - RNA, 19 nt, Artificial Sequence
  Description of Artificial Sequence: Synthetic oligonucleotide
  Sense strand starting at position 2917 of SEQ ID NO: 584859
ucaguaauuugggaaagua

SEQ ID NO: 594935 - RNA, 19 nt, Artificial Sequence
  Description of Artificial Sequence: Synthetic oligonucleotide
  Antisense strand to SEQ ID NO: 594934
uacuuucccaaauuacuga

SEQ ID NO: 594936 - RNA, 19 nt, Artificial Sequence
  Description of Artificial Sequence: Synthetic oligonucleotide
  Sense strand starting at position 3144 of SEQ ID NO: 584859
ugguuucuguuccuaagca

SEQ ID NO: 594937 - RNA, 19 nt, Artificial Sequence
  Description of Artificial Sequence: Synthetic oligonucleotide
  Antisense strand to SEQ ID NO: 594936
ugcuuaggaacagaaacca

SEQ ID NO: 594938 - RNA, 19 nt, Artificial Sequence
  Description of Artificial Sequence: Synthetic oligonucleotide
  Sense strand starting at position 3201 of SEQ ID NO: 584859
guagacacgugcucaguaa

SEQ ID NO: 594939 - RNA, 19 nt, Artificial Sequence
  Description of Artificial Sequence: Synthetic oligonucleotide
  Antisense strand to SEQ ID NO: 594938
uuacugagcacgugucuac

SEQ ID NO: 594940 - RNA, 19 nt, Artificial Sequence
  Description of Artificial Sequence: Synthetic oligonucleotide
  Sense strand starting at position 3202 of SEQ ID NO: 584859
uagacacgugcucaguaaa

SEQ ID NO: 594941 - RNA, 19 nt, Artificial Sequence
  Description of Artificial Sequence: Synthetic oligonucleotide
  Antisense strand to SEQ ID NO: 594940
uuuacugagcacgugucua

SEQ ID NO: 594942 - RNA, 19 nt, Artificial Sequence
  Description of Artificial Sequence: Synthetic oligonucleotide
  Sense strand starting at position 3205 of SEQ ID NO: 584859
acacgugcucaguaaagac

SEQ ID NO: 594943 - RNA, 19 nt, Artificial Sequence
  Description of Artificial Sequence: Synthetic oligonucleotide
  Antisense strand to SEQ ID NO: 594942
gucuuuacugagcacgugu

SEQ ID NO: 594944 - RNA, 19 nt, Artificial Sequence
  Description of Artificial Sequence: Synthetic oligonucleotide
  Sense strand starting at position 3248 of SEQ ID NO: 584859
ggccguguccacgugaaug

SEQ ID NO: 594945 - RNA, 19 nt, Artificial Sequence
  Description of Artificial Sequence: Synthetic oligonucleotide
  Antisense strand to SEQ ID NO: 594944
cauucacguggacacggcc

SEQ ID NO: 594946 - RNA, 19 nt, Artificial Sequence
  Description of Artificial Sequence: Synthetic oligonucleotide
  Sense strand starting at position 3268 of SEQ ID NO: 584859
acacaaauucgguaagcga

SEQ ID NO: 594947 - RNA, 19 nt, Artificial Sequence
  Description of Artificial Sequence: Synthetic oligonucleotide
  Antisense strand to SEQ ID NO: 594946
ucgcuuaccgaauuugugu

SEQ ID NO: 594948 - RNA, 19 nt, Artificial Sequence
  Description of Artificial Sequence: Synthetic oligonucleotide
  Sense strand starting at position 3733 of SEQ ID NO: 584859
ucaggauucuuuccugaac

SEQ ID NO: 594949 - RNA, 19 nt, Artificial Sequence
  Description of Artificial Sequence: Synthetic oligonucleotide
  Antisense strand to SEQ ID NO: 594948
guucaggaaagaauccuga

SEQ ID NO: 594950 - RNA, 19 nt, Artificial Sequence
  Description of Artificial Sequence: Synthetic oligonucleotide
  Sense strand starting at position 3784 of SEQ ID NO: 584859
ugguuaagcacuugacuga

SEQ ID NO: 594951 - RNA, 19 nt, Artificial Sequence
  Description of Artificial Sequence: Synthetic oligonucleotide
  Antisense strand to SEQ ID NO: 594950
ucagucaagugcuuaacca

SEQ ID NO: 594952 - RNA, 19 nt, Artificial Sequence
  Description of Artificial Sequence: Synthetic oligonucleotide
  Sense strand starting at position 22 of SEQ ID NO: 584860
augggaaucucauuguuua

SEQ ID NO: 594953 - RNA, 19 nt, Artificial Sequence
  Description of Artificial Sequence: Synthetic oligonucleotide
  Antisense strand to SEQ ID NO: 594952
uaaacaaugagauucccau

SEQ ID NO: 594954 - RNA, 19 nt, Artificial Sequence
  Description of Artificial Sequence: Synthetic oligonucleotide
  Sense strand starting at position 23 of SEQ ID NO: 584860
ugggaaucucauuguuuac

SEQ ID NO: 594955 - RNA, 19 nt, Artificial Sequence
  Description of Artificial Sequence: Synthetic oligonucleotide
  Antisense strand to SEQ ID NO: 594954
guaaacaaugagauuccca

SEQ ID NO: 594956 - RNA, 19 nt, Artificial Sequence
  Description of Artificial Sequence: Synthetic oligonucleotide
  Sense strand starting at position 25 of SEQ ID NO: 584860
ggaaucucauuguuuacau

SEQ ID NO: 594957 - RNA, 19 nt, Artificial Sequence
  Description of Artificial Sequence: Synthetic oligonucleotide
  Antisense strand to SEQ ID NO: 594956
auguaaacaaugagauucc

SEQ ID NO: 594958 - RNA, 19 nt, Artificial Sequence
  Description of Artificial Sequence: Synthetic oligonucleotide
  Sense strand starting at position 175 of SEQ ID NO: 584860
augacauacccugggcauu

SEQ ID NO: 594959 - RNA, 19 nt, Artificial Sequence
  Description of Artificial Sequence: Synthetic oligonucleotide
  Antisense strand to SEQ ID NO: 594958
aaugcccaggguaugucau

SEQ ID NO: 594960 - RNA, 19 nt, Artificial Sequence
  Description of Artificial Sequence: Synthetic oligonucleotide
  Sense strand starting at position 176 of SEQ ID NO: 584860
ugacauacccugggcauua

SEQ ID NO: 594961 - RNA, 19 nt, Artificial Sequence
  Description of Artificial Sequence: Synthetic oligonucleotide
  Antisense strand to SEQ ID NO: 594960
uaaugcccaggguauguca

SEQ ID NO: 594962 - RNA, 19 nt, Artificial Sequence
  Description of Artificial Sequence: Synthetic oligonucleotide
  Sense strand starting at position 208 of SEQ ID NO: 584860
acgggagagugaucccuuu

SEQ ID NO: 594963 - RNA, 19 nt, Artificial Sequence
  Description of Artificial Sequence: Synthetic oligonucleotide
  Antisense strand to SEQ ID NO: 594962
aaagggaucacucucccgu

SEQ ID NO: 594964 - RNA, 19 nt, Artificial Sequence
  Description of Artificial Sequence: Synthetic oligonucleotide
  Sense strand starting at position 224 of SEQ ID NO: 584860
uuuacccuucucugggaau

SEQ ID NO: 594965 - RNA, 19 nt, Artificial Sequence
  Description of Artificial Sequence: Synthetic oligonucleotide
  Antisense strand to SEQ ID NO: 594964
auucccagagaaggguaaa

SEQ ID NO: 594966 - RNA, 19 nt, Artificial Sequence
  Description of Artificial Sequence: Synthetic oligonucleotide
  Sense strand starting at position 293 of SEQ ID NO: 584860
cgcuagagguguccgugaa

SEQ ID NO: 594967 - RNA, 19 nt, Artificial Sequence
  Description of Artificial Sequence: Synthetic oligonucleotide
  Antisense strand to SEQ ID NO: 594966
uucacggacaccucuagcg

SEQ ID NO: 594968 - RNA, 19 nt, Artificial Sequence
  Description of Artificial Sequence: Synthetic oligonucleotide
  Sense strand starting at position 294 of SEQ ID NO: 584860
gcuagagguguccgugaau

SEQ ID NO: 594969 - RNA, 19 nt, Artificial Sequence
  Description of Artificial Sequence: Synthetic oligonucleotide
  Antisense strand to SEQ ID NO: 594968
auucacggacaccucuagc

SEQ ID NO: 594970 - RNA, 19 nt, Artificial Sequence
  Description of Artificial Sequence: Synthetic oligonucleotide
  Sense strand starting at position 409 of SEQ ID NO: 584860
cugccugacucgguuaaga

SEQ ID NO: 594971 - RNA, 19 nt, Artificial Sequence
  Description of Artificial Sequence: Synthetic oligonucleotide
  Antisense strand to SEQ ID NO: 594970
ucuuaaccgagucaggcag

SEQ ID NO: 594972 - RNA, 19 nt, Artificial Sequence
  Description of Artificial Sequence: Synthetic oligonucleotide
  Sense strand starting at position 411 of SEQ ID NO: 584860
gccugacucgguuaagacu

SEQ ID NO: 594973 - RNA, 19 nt, Artificial Sequence
  Description of Artificial Sequence: Synthetic oligonucleotide
  Antisense strand to SEQ ID NO: 594972
agucuuaaccgagucaggc

SEQ ID NO: 594974 - RNA, 19 nt, Artificial Sequence
  Description of Artificial Sequence: Synthetic oligonucleotide
  Sense strand starting at position 438 of SEQ ID NO: 584860
gcggcauuaauagcguaua

SEQ ID NO: 594975 - RNA, 19 nt, Artificial Sequence
  Description of Artificial Sequence: Synthetic oligonucleotide
  Antisense strand to SEQ ID NO: 594974
uauacgcuauuaaugccgc

SEQ ID NO: 594976 - RNA, 19 nt, Artificial Sequence
  Description of Artificial Sequence: Synthetic oligonucleotide
  Sense strand starting at position 441 of SEQ ID NO: 584860
gcauuaauagcguauaaau

SEQ ID NO: 594977 - RNA, 19 nt, Artificial Sequence
  Description of Artificial Sequence: Synthetic oligonucleotide
  Antisense strand to SEQ ID NO: 594976
auuuauacgcuauuaaugc

SEQ ID NO: 594978 - RNA, 19 nt, Artificial Sequence
  Description of Artificial Sequence: Synthetic oligonucleotide
  Sense strand starting at position 657 of SEQ ID NO: 584860
gcggaaacguacuuauugu

SEQ ID NO: 594979 - RNA, 19 nt, Artificial Sequence
  Description of Artificial Sequence: Synthetic oligonucleotide
  Antisense strand to SEQ ID NO: 594978
acaauaaguacguuuccgc

SEQ ID NO: 594980 - RNA, 19 nt, Artificial Sequence
  Description of Artificial Sequence: Synthetic oligonucleotide
  Sense strand starting at position 2197 of SEQ ID NO: 584860
acuacuguuuagucccaaa

SEQ ID NO: 594981 - RNA, 19 nt, Artificial Sequence
  Description of Artificial Sequence: Synthetic oligonucleotide
  Antisense strand to SEQ ID NO: 594980
uuugggacuaaacaguagu

SEQ ID NO: 594982 - RNA, 19 nt, Artificial Sequence
  Description of Artificial Sequence: Synthetic oligonucleotide
  Sense strand starting at position 2200 of SEQ ID NO: 584860
acuguuuagucccaaagac

SEQ ID NO: 594983 - RNA, 19 nt, Artificial Sequence
  Description of Artificial Sequence: Synthetic oligonucleotide
  Antisense strand to SEQ ID NO: 594982
gucuuugggacuaaacagu

SEQ ID NO: 594984 - RNA, 19 nt, Artificial Sequence
  Description of Artificial Sequence: Synthetic oligonucleotide
  Sense strand starting at position 2240 of SEQ ID NO: 584860
cccaaauuugcacguccaa

SEQ ID NO: 594985 - RNA, 19 nt, Artificial Sequence
  Description of Artificial Sequence: Synthetic oligonucleotide
  Antisense strand to SEQ ID NO: 594984
uuggacgugcaaauuuggg

SEQ ID NO: 594986 - RNA, 19 nt, Artificial Sequence
  Description of Artificial Sequence: Synthetic oligonucleotide
  Sense strand starting at position 2301 of SEQ ID NO: 584860
uacauuucugcucguucga

SEQ ID NO: 594987 - RNA, 19 nt, Artificial Sequence
  Description of Artificial Sequence: Synthetic oligonucleotide
  Antisense strand to SEQ ID NO: 594986
ucgaacgagcagaaaugua

SEQ ID NO: 594988 - RNA, 19 nt, Artificial Sequence
  Description of Artificial Sequence: Synthetic oligonucleotide
  Sense strand starting at position 2303 of SEQ ID NO: 584860
cauuucugcucguucgaaa

SEQ ID NO: 594989 - RNA, 19 nt, Artificial Sequence
  Description of Artificial Sequence: Synthetic oligonucleotide
  Antisense strand to SEQ ID NO: 594988
uuucgaacgagcagaaaug

SEQ ID NO: 594990 - RNA, 19 nt, Artificial Sequence
  Description of Artificial Sequence: Synthetic oligonucleotide
  Sense strand starting at position 2835 of SEQ ID NO: 584860
gggugcagacucugugaau

SEQ ID NO: 594991 - RNA, 19 nt, Artificial Sequence
  Description of Artificial Sequence: Synthetic oligonucleotide
  Antisense strand to SEQ ID NO: 594990
auucacagagucugcaccc

SEQ ID NO: 594992 - RNA, 19 nt, Artificial Sequence
  Description of Artificial Sequence: Synthetic oligonucleotide
  Sense strand starting at position 2836 of SEQ ID NO: 584860
ggugcagacucugugaauc

SEQ ID NO: 594993 - RNA, 19 nt, Artificial Sequence
  Description of Artificial Sequence: Synthetic oligonucleotide
  Antisense strand to SEQ ID NO: 594992
gauucacagagucugcacc

SEQ ID NO: 594994 - RNA, 19 nt, Artificial Sequence
  Description of Artificial Sequence: Synthetic oligonucleotide
  Sense strand starting at position 2989 of SEQ ID NO: 584860
cuucgcuaccagggagaaa

SEQ ID NO: 594995 - RNA, 19 nt, Artificial Sequence
  Description of Artificial Sequence: Synthetic oligonucleotide
  Antisense strand to SEQ ID NO: 594994
uuucucccugguagcgaag

SEQ ID NO: 594996 - RNA, 19 nt, Artificial Sequence
  Description of Artificial Sequence: Synthetic oligonucleotide
  Sense strand starting at position 3006 of SEQ ID NO: 584860
aaacaaacuuguguacgua

SEQ ID NO: 594997 - RNA, 19 nt, Artificial Sequence
  Description of Artificial Sequence: Synthetic oligonucleotide
  Antisense strand to SEQ ID NO: 594996
uacguacacaaguuuguuu

SEQ ID NO: 594998 - RNA, 19 nt, Artificial Sequence
  Description of Artificial Sequence: Synthetic oligonucleotide
  Sense strand starting at position 3007 of SEQ ID NO: 584860
aacaaacuuguguacguau

SEQ ID NO: 594999 - RNA, 19 nt, Artificial Sequence
  Description of Artificial Sequence: Synthetic oligonucleotide
  Antisense strand to SEQ ID NO: 594998
auacguacacaaguuuguu

SEQ ID NO: 595000 - RNA, 19 nt, Artificial Sequence
  Description of Artificial Sequence: Synthetic oligonucleotide
  Sense strand starting at position 3014 of SEQ ID NO: 584860
uuguguacguaucugggaa

SEQ ID NO: 595001 - RNA, 19 nt, Artificial Sequence
  Description of Artificial Sequence: Synthetic oligonucleotide
  Antisense strand to SEQ ID NO: 595000
uucccagauacguacacaa

SEQ ID NO: 595002 - RNA, 19 nt, Artificial Sequence
  Description of Artificial Sequence: Synthetic oligonucleotide
  Sense strand starting at position 3015 of SEQ ID NO: 584860
uguguacguaucugggaaa

SEQ ID NO: 595003 - RNA, 19 nt, Artificial Sequence
  Description of Artificial Sequence: Synthetic oligonucleotide
  Antisense strand to SEQ ID NO: 595002
uuucccagauacguacaca

SEQ ID NO: 595004 - RNA, 19 nt, Artificial Sequence
  Description of Artificial Sequence: Synthetic oligonucleotide
  Sense strand starting at position 3050 of SEQ ID NO: 584860
gaacaaauauacgguaaga

SEQ ID NO: 595005 - RNA, 19 nt, Artificial Sequence
  Description of Artificial Sequence: Synthetic oligonucleotide
  Antisense strand to SEQ ID NO: 595004
ucuuaccguauauuuguuc

SEQ ID NO: 595006 - RNA, 19 nt, Artificial Sequence
  Description of Artificial Sequence: Synthetic oligonucleotide
  Sense strand starting at position 3163 of SEQ ID NO: 584860
cucgguuacugcgucuaaa

SEQ ID NO: 595007 - RNA, 19 nt, Artificial Sequence
  Description of Artificial Sequence: Synthetic oligonucleotide
  Antisense strand to SEQ ID NO: 595006
uuuagacgcaguaaccgag

SEQ ID NO: 595008 - RNA, 19 nt, Artificial Sequence
  Description of Artificial Sequence: Synthetic oligonucleotide
  Sense strand starting at position 3520 of SEQ ID NO: 584860
gccagacauugcucucguu

SEQ ID NO: 595009 - RNA, 19 nt, Artificial Sequence
  Description of Artificial Sequence: Synthetic oligonucleotide
  Antisense strand to SEQ ID NO: 595008
aacgagagcaaugucuggc

SEQ ID NO: 595010 - RNA, 19 nt, Artificial Sequence
  Description of Artificial Sequence: Synthetic oligonucleotide
  Sense strand starting at position 3533 of SEQ ID NO: 584860
cucguuuauucccugcauu

SEQ ID NO: 595011 - RNA, 19 nt, Artificial Sequence
  Description of Artificial Sequence: Synthetic oligonucleotide
  Antisense strand to SEQ ID NO: 595010
aaugcagggaauaaacgag

SEQ ID NO: 595012 - RNA, 19 nt, Artificial Sequence
  Description of Artificial Sequence: Synthetic oligonucleotide
  Sense strand starting at position 3534 of SEQ ID NO: 584860
ucguuuauucccugcauuc

SEQ ID NO: 595013 - RNA, 19 nt, Artificial Sequence
  Description of Artificial Sequence: Synthetic oligonucleotide
  Antisense strand to SEQ ID NO: 595012
gaaugcagggaauaaacga

SEQ ID NO: 595014 - RNA, 19 nt, Artificial Sequence
  Description of Artificial Sequence: Synthetic oligonucleotide
  Sense strand starting at position 3612 of SEQ ID NO: 584860
ggcuacugcuacucaguaa

SEQ ID NO: 595015 - RNA, 19 nt, Artificial Sequence
  Description of Artificial Sequence: Synthetic oligonucleotide
  Antisense strand to SEQ ID NO: 595014
uuacugaguagcaguagcc

SEQ ID NO: 595016 - RNA, 19 nt, Artificial Sequence
  Description of Artificial Sequence: Synthetic oligonucleotide
  Sense strand starting at position 3623 of SEQ ID NO: 584860
cucaguaauuugggaaagu

SEQ ID NO: 595017 - RNA, 19 nt, Artificial Sequence
  Description of Artificial Sequence: Synthetic oligonucleotide
  Antisense strand to SEQ ID NO: 595016
acuuucccaaauuacugag

SEQ ID NO: 595018 - RNA, 19 nt, Artificial Sequence
  Description of Artificial Sequence: Synthetic oligonucleotide
  Sense strand starting at position 3624 of SEQ ID NO: 584860
ucaguaauuugggaaagua

SEQ ID NO: 595019 - RNA, 19 nt, Artificial Sequence
  Description of Artificial Sequence: Synthetic oligonucleotide
  Antisense strand to SEQ ID NO: 595018
uacuuucccaaauuacuga

SEQ ID NO: 595020 - RNA, 19 nt, Artificial Sequence
  Description of Artificial Sequence: Synthetic oligonucleotide
  Sense strand starting at position 3851 of SEQ ID NO: 584860
ugguuucuguuccuaagca

SEQ ID NO: 595021 - RNA, 19 nt, Artificial Sequence
  Description of Artificial Sequence: Synthetic oligonucleotide
  Antisense strand to SEQ ID NO: 595020
ugcuuaggaacagaaacca

SEQ ID NO: 595022 - RNA, 19 nt, Artificial Sequence
  Description of Artificial Sequence: Synthetic oligonucleotide
  Sense strand starting at position 3908 of SEQ ID NO: 584860
guagacacgugcucaguaa

SEQ ID NO: 595023 - RNA, 19 nt, Artificial Sequence
  Description of Artificial Sequence: Synthetic oligonucleotide
  Antisense strand to SEQ ID NO: 595022
uuacugagcacgugucuac

SEQ ID NO: 595024 - RNA, 19 nt, Artificial Sequence
  Description of Artificial Sequence: Synthetic oligonucleotide
  Sense strand starting at position 3909 of SEQ ID NO: 584860
uagacacgugcucaguaaa

SEQ ID NO: 595025 - RNA, 19 nt, Artificial Sequence
  Description of Artificial Sequence: Synthetic oligonucleotide
  Antisense strand to SEQ ID NO: 595024
uuuacugagcacgugucua

SEQ ID NO: 595026 - RNA, 19 nt, Artificial Sequence
  Description of Artificial Sequence: Synthetic oligonucleotide
  Sense strand starting at position 3912 of SEQ ID NO: 584860
acacgugcucaguaaagac

SEQ ID NO: 595027 - RNA, 19 nt, Artificial Sequence
  Description of Artificial Sequence: Synthetic oligonucleotide
  Antisense strand to SEQ ID NO: 595026
gucuuuacugagcacgugu

SEQ ID NO: 595028 - RNA, 19 nt, Artificial Sequence
  Description of Artificial Sequence: Synthetic oligonucleotide
  Sense strand starting at position 3955 of SEQ ID NO: 584860
ggccguguccacgugaaug

SEQ ID NO: 595029 - RNA, 19 nt, Artificial Sequence
  Description of Artificial Sequence: Synthetic oligonucleotide
  Antisense strand to SEQ ID NO: 595028
cauucacguggacacggcc

SEQ ID NO: 595030 - RNA, 19 nt, Artificial Sequence
  Description of Artificial Sequence: Synthetic oligonucleotide
  Sense strand starting at position 3975 of SEQ ID NO: 584860
acacaaauucgguaagcga

SEQ ID NO: 595031 - RNA, 19 nt, Artificial Sequence
  Description of Artificial Sequence: Synthetic oligonucleotide
  Antisense strand to SEQ ID NO: 595030
ucgcuuaccgaauuugugu

SEQ ID NO: 595032 - RNA, 19 nt, Artificial Sequence
  Description of Artificial Sequence: Synthetic oligonucleotide
  Sense strand starting at position 117 of SEQ ID NO: 584861
aaggaaagaugccaagaua

SEQ ID NO: 595033 - RNA, 19 nt, Artificial Sequence
  Description of Artificial Sequence: Synthetic oligonucleotide
  Antisense strand to SEQ ID NO: 595032
uaucuuggcaucuuuccuu

SEQ ID NO: 595034 - RNA, 19 nt, Artificial Sequence
  Description of Artificial Sequence: Synthetic oligonucleotide
  Sense strand starting at position 308 of SEQ ID NO: 584861
gucucuacucaccgguaga

SEQ ID NO: 595035 - RNA, 19 nt, Artificial Sequence
  Description of Artificial Sequence: Synthetic oligonucleotide
  Antisense strand to SEQ ID NO: 595034
ucuaccggugaguagagac

SEQ ID NO: 595036 - RNA, 19 nt, Artificial Sequence
  Description of Artificial Sequence: Synthetic oligonucleotide
  Sense strand starting at position 622 of SEQ ID NO: 584861
gccuguaaagaugggaaca

SEQ ID NO: 595037 - RNA, 19 nt, Artificial Sequence
  Description of Artificial Sequence: Synthetic oligonucleotide
  Antisense strand to SEQ ID NO: 595036
uguucccaucuuuacaggc

SEQ ID NO: 595038 - RNA, 19 nt, Artificial Sequence
  Description of Artificial Sequence: Synthetic oligonucleotide
  Sense strand starting at position 624 of SEQ ID NO: 584861
cuguaaagaugggaacaaa

SEQ ID NO: 595039 - RNA, 19 nt, Artificial Sequence
  Description of Artificial Sequence: Synthetic oligonucleotide
  Antisense strand to SEQ ID NO: 595038
uuuguucccaucuuuacag

SEQ ID NO: 595040 - RNA, 19 nt, Artificial Sequence
  Description of Artificial Sequence: Synthetic oligonucleotide
  Sense strand starting at position 646 of SEQ ID NO: 584861
agggcaauaucguccaaau

SEQ ID NO: 595041 - RNA, 19 nt, Artificial Sequence
  Description of Artificial Sequence: Synthetic oligonucleotide
  Antisense strand to SEQ ID NO: 595040
auuuggacgauauugcccu

SEQ ID NO: 595042 - RNA, 19 nt, Artificial Sequence
  Description of Artificial Sequence: Synthetic oligonucleotide
  Sense strand starting at position 648 of SEQ ID NO: 584861
ggcaauaucguccaaauga

SEQ ID NO: 595043 - RNA, 19 nt, Artificial Sequence
  Description of Artificial Sequence: Synthetic oligonucleotide
  Antisense strand to SEQ ID NO: 595042
ucauuuggacgauauugcc

SEQ ID NO: 595044 - RNA, 19 nt, Artificial Sequence
  Description of Artificial Sequence: Synthetic oligonucleotide
  Sense strand starting at position 673 of SEQ ID NO: 584861
agugcaucugcacaauagu

SEQ ID NO: 595045 - RNA, 19 nt, Artificial Sequence
  Description of Artificial Sequence: Synthetic oligonucleotide
  Antisense strand to SEQ ID NO: 595044
acuauugugcagaugcacu

SEQ ID NO: 595046 - RNA, 19 nt, Artificial Sequence
  Description of Artificial Sequence: Synthetic oligonucleotide
  Sense strand starting at position 681 of SEQ ID NO: 584861
ugcacaauagucugaugaa

SEQ ID NO: 595047 - RNA, 19 nt, Artificial Sequence
  Description of Artificial Sequence: Synthetic oligonucleotide
  Antisense strand to SEQ ID NO: 595046
uucaucagacuauugugca

SEQ ID NO: 595048 - RNA, 19 nt, Artificial Sequence
  Description of Artificial Sequence: Synthetic oligonucleotide
  Sense strand starting at position 682 of SEQ ID NO: 584861
gcacaauagucugaugaau

SEQ ID NO: 595049 - RNA, 19 nt, Artificial Sequence
  Description of Artificial Sequence: Synthetic oligonucleotide
  Antisense strand to SEQ ID NO: 595048
auucaucagacuauugugc

SEQ ID NO: 595050 - RNA, 19 nt, Artificial Sequence
  Description of Artificial Sequence: Synthetic oligonucleotide
  Sense strand starting at position 711 of SEQ ID NO: 584861
gcccuagugaggugguuaa

SEQ ID NO: 595051 - RNA, 19 nt, Artificial Sequence
  Description of Artificial Sequence: Synthetic oligonucleotide
  Antisense strand to SEQ ID NO: 595050
uuaaccaccucacuagggc

SEQ ID NO: 595052 - RNA, 19 nt, Artificial Sequence
  Description of Artificial Sequence: Synthetic oligonucleotide
  Sense strand starting at position 715 of SEQ ID NO: 584861
uagugaggugguuaagcuu

SEQ ID NO: 595053 - RNA, 19 nt, Artificial Sequence
  Description of Artificial Sequence: Synthetic oligonucleotide
  Antisense strand to SEQ ID NO: 595052
aagcuuaaccaccucacua

SEQ ID NO: 595054 - RNA, 19 nt, Artificial Sequence
  Description of Artificial Sequence: Synthetic oligonucleotide
  Sense strand starting at position 721 of SEQ ID NO: 584861
ggugguuaagcuuaugcca

SEQ ID NO: 595055 - RNA, 19 nt, Artificial Sequence
  Description of Artificial Sequence: Synthetic oligonucleotide
  Antisense strand to SEQ ID NO: 595054
uggcauaagcuuaaccacc

SEQ ID NO: 595056 - RNA, 19 nt, Artificial Sequence
  Description of Artificial Sequence: Synthetic oligonucleotide
  Sense strand starting at position 740 of SEQ ID NO: 584861
agugcuucuuaagcagaaa

SEQ ID NO: 595057 - RNA, 19 nt, Artificial Sequence
  Description of Artificial Sequence: Synthetic oligonucleotide
  Antisense strand to SEQ ID NO: 595056
uuucugcuuaagaagcacu

SEQ ID NO: 595058 - RNA, 19 nt, Artificial Sequence
  Description of Artificial Sequence: Synthetic oligonucleotide
  Sense strand starting at position 767 of SEQ ID NO: 584861
aaacaaucuguggagcuuu

SEQ ID NO: 595059 - RNA, 19 nt, Artificial Sequence
  Description of Artificial Sequence: Synthetic oligonucleotide
  Antisense strand to SEQ ID NO: 595058
aaagcuccacagauuguuu

SEQ ID NO: 595060 - RNA, 19 nt, Artificial Sequence
  Description of Artificial Sequence: Synthetic oligonucleotide
  Sense strand starting at position 820 of SEQ ID NO: 584861
uuaguauacuaucuagauc

SEQ ID NO: 595061 - RNA, 19 nt, Artificial Sequence
  Description of Artificial Sequence: Synthetic oligonucleotide
  Antisense strand to SEQ ID NO: 595060
gaucuagauaguauacuaa

SEQ ID NO: 595062 - RNA, 19 nt, Artificial Sequence
  Description of Artificial Sequence: Synthetic oligonucleotide
  Sense strand starting at position 898 of SEQ ID NO: 584861
aauuguuucugacaaggca

SEQ ID NO: 595063 - RNA, 19 nt, Artificial Sequence
  Description of Artificial Sequence: Synthetic oligonucleotide
  Antisense strand to SEQ ID NO: 595062
ugccuugucagaaacaauu

SEQ ID NO: 595064 - RNA, 19 nt, Artificial Sequence
  Description of Artificial Sequence: Synthetic oligonucleotide
  Sense strand starting at position 1053 of SEQ ID NO: 584861
agaacaaauuauggcuaua

SEQ ID NO: 595065 - RNA, 19 nt, Artificial Sequence
  Description of Artificial Sequence: Synthetic oligonucleotide
  Antisense strand to SEQ ID NO: 595064
uauagccauaauuuguucu

SEQ ID NO: 595066 - RNA, 19 nt, Artificial Sequence
  Description of Artificial Sequence: Synthetic oligonucleotide
  Sense strand starting at position 1139 of SEQ ID NO: 584861
ccacaaggucuggguaguu

SEQ ID NO: 595067 - RNA, 19 nt, Artificial Sequence
  Description of Artificial Sequence: Synthetic oligonucleotide
  Antisense strand to SEQ ID NO: 595066
aacuacccagaccuugugg

SEQ ID NO: 595068 - RNA, 19 nt, Artificial Sequence
  Description of Artificial Sequence: Synthetic oligonucleotide
  Sense strand starting at position 1229 of SEQ ID NO: 584861
ggaagaauuugucagacuu

SEQ ID NO: 595069 - RNA, 19 nt, Artificial Sequence
  Description of Artificial Sequence: Synthetic oligonucleotide
  Antisense strand to SEQ ID NO: 595068
aagucugacaaauucuucc

SEQ ID NO: 595070 - RNA, 19 nt, Artificial Sequence
  Description of Artificial Sequence: Synthetic oligonucleotide
  Sense strand starting at position 1382 of SEQ ID NO: 584861
acacgauuccacuaccagu

SEQ ID NO: 595071 - RNA, 19 nt, Artificial Sequence
  Description of Artificial Sequence: Synthetic oligonucleotide
  Antisense strand to SEQ ID NO: 595070
acugguaguggaaucgugu

SEQ ID NO: 595072 - RNA, 19 nt, Artificial Sequence
  Description of Artificial Sequence: Synthetic oligonucleotide
  Sense strand starting at position 1472 of SEQ ID NO: 584861
cgaucagucuuuccuacca

SEQ ID NO: 595073 - RNA, 19 nt, Artificial Sequence
  Description of Artificial Sequence: Synthetic oligonucleotide
  Antisense strand to SEQ ID NO: 595072
ugguaggaaagacugaucg

SEQ ID NO: 595074 - RNA, 19 nt, Artificial Sequence
  Description of Artificial Sequence: Synthetic oligonucleotide
  Sense strand starting at position 1511 of SEQ ID NO: 584861
augggaaucucauuguuua

SEQ ID NO: 595075 - RNA, 19 nt, Artificial Sequence
  Description of Artificial Sequence: Synthetic oligonucleotide
  Antisense strand to SEQ ID NO: 595074
uaaacaaugagauucccau

SEQ ID NO: 595076 - RNA, 19 nt, Artificial Sequence
  Description of Artificial Sequence: Synthetic oligonucleotide
  Sense strand starting at position 1512 of SEQ ID NO: 584861
ugggaaucucauuguuuac

SEQ ID NO: 595077 - RNA, 19 nt, Artificial Sequence
  Description of Artificial Sequence: Synthetic oligonucleotide
  Antisense strand to SEQ ID NO: 595076
guaaacaaugagauuccca

SEQ ID NO: 595078 - RNA, 19 nt, Artificial Sequence
  Description of Artificial Sequence: Synthetic oligonucleotide
  Sense strand starting at position 1514 of SEQ ID NO: 584861
ggaaucucauuguuuacau

SEQ ID NO: 595079 - RNA, 19 nt, Artificial Sequence
  Description of Artificial Sequence: Synthetic oligonucleotide
  Antisense strand to SEQ ID NO: 595078
auguaaacaaugagauucc

SEQ ID NO: 595080 - RNA, 19 nt, Artificial Sequence
  Description of Artificial Sequence: Synthetic oligonucleotide
  Sense strand starting at position 1664 of SEQ ID NO: 584861
augacauacccugggcauu

SEQ ID NO: 595081 - RNA, 19 nt, Artificial Sequence
  Description of Artificial Sequence: Synthetic oligonucleotide
  Antisense strand to SEQ ID NO: 595080
aaugcccaggguaugucau

SEQ ID NO: 595082 - RNA, 19 nt, Artificial Sequence
  Description of Artificial Sequence: Synthetic oligonucleotide
  Sense strand starting at position 1665 of SEQ ID NO: 584861
ugacauacccugggcauua

SEQ ID NO: 595083 - RNA, 19 nt, Artificial Sequence
  Description of Artificial Sequence: Synthetic oligonucleotide
  Antisense strand to SEQ ID NO: 595082
uaaugcccaggguauguca

SEQ ID NO: 595084 - RNA, 19 nt, Artificial Sequence
  Description of Artificial Sequence: Synthetic oligonucleotide
  Sense strand starting at position 1697 of SEQ ID NO: 584861
acgggagagugaucccuuu

SEQ ID NO: 595085 - RNA, 19 nt, Artificial Sequence
  Description of Artificial Sequence: Synthetic oligonucleotide
  Antisense strand to SEQ ID NO: 595084
aaagggaucacucucccgu

SEQ ID NO: 595086 - RNA, 19 nt, Artificial Sequence
  Description of Artificial Sequence: Synthetic oligonucleotide
  Sense strand starting at position 1713 of SEQ ID NO: 584861
uuuacccuucucugggaau

SEQ ID NO: 595087 - RNA, 19 nt, Artificial Sequence
  Description of Artificial Sequence: Synthetic oligonucleotide
  Antisense strand to SEQ ID NO: 595086
auucccagagaaggguaaa

SEQ ID NO: 595088 - RNA, 19 nt, Artificial Sequence
  Description of Artificial Sequence: Synthetic oligonucleotide
  Sense strand starting at position 1782 of SEQ ID NO: 584861
cgcuagagguguccgugaa

SEQ ID NO: 595089 - RNA, 19 nt, Artificial Sequence
  Description of Artificial Sequence: Synthetic oligonucleotide
  Antisense strand to SEQ ID NO: 595088
uucacggacaccucuagcg

SEQ ID NO: 595090 - RNA, 19 nt, Artificial Sequence
  Description of Artificial Sequence: Synthetic oligonucleotide
  Sense strand starting at position 1783 of SEQ ID NO: 584861
gcuagagguguccgugaau

SEQ ID NO: 595091 - RNA, 19 nt, Artificial Sequence
  Description of Artificial Sequence: Synthetic oligonucleotide
  Antisense strand to SEQ ID NO: 595090
auucacggacaccucuagc

SEQ ID NO: 595092 - RNA, 19 nt, Artificial Sequence
  Description of Artificial Sequence: Synthetic oligonucleotide
  Sense strand starting at position 1898 of SEQ ID NO: 584861
cugccugacucgguuaaga

SEQ ID NO: 595093 - RNA, 19 nt, Artificial Sequence
  Description of Artificial Sequence: Synthetic oligonucleotide
  Antisense strand to SEQ ID NO: 595092
ucuuaaccgagucaggcag

SEQ ID NO: 595094 - RNA, 19 nt, Artificial Sequence
  Description of Artificial Sequence: Synthetic oligonucleotide
  Sense strand starting at position 1900 of SEQ ID NO: 584861
gccugacucgguuaagacu

SEQ ID NO: 595095 - RNA, 19 nt, Artificial Sequence
  Description of Artificial Sequence: Synthetic oligonucleotide
  Antisense strand to SEQ ID NO: 595094
agucuuaaccgagucaggc

SEQ ID NO: 595096 - RNA, 19 nt, Artificial Sequence
  Description of Artificial Sequence: Synthetic oligonucleotide
  Sense strand starting at position 1927 of SEQ ID NO: 584861
gcggcauuaauagcguaua

SEQ ID NO: 595097 - RNA, 19 nt, Artificial Sequence
  Description of Artificial Sequence: Synthetic oligonucleotide
  Antisense strand to SEQ ID NO: 595096
uauacgcuauuaaugccgc

SEQ ID NO: 595098 - RNA, 19 nt, Artificial Sequence
  Description of Artificial Sequence: Synthetic oligonucleotide
  Sense strand starting at position 1930 of SEQ ID NO: 584861
gcauuaauagcguauaaau

SEQ ID NO: 595099 - RNA, 19 nt, Artificial Sequence
  Description of Artificial Sequence: Synthetic oligonucleotide
  Antisense strand to SEQ ID NO: 595098
auuuauacgcuauuaaugc

SEQ ID NO: 595100 - RNA, 19 nt, Artificial Sequence
  Description of Artificial Sequence: Synthetic oligonucleotide
  Sense strand starting at position 2146 of SEQ ID NO: 584861
gcggaaacguacuuauugu

SEQ ID NO: 595101 - RNA, 19 nt, Artificial Sequence
  Description of Artificial Sequence: Synthetic oligonucleotide
  Antisense strand to SEQ ID NO: 595100
acaauaaguacguuuccgc

SEQ ID NO: 595102 - RNA, 19 nt, Artificial Sequence
  Description of Artificial Sequence: Synthetic oligonucleotide
  Sense strand starting at position 3686 of SEQ ID NO: 584861
acuacuguuuagucccaaa

SEQ ID NO: 595103 - RNA, 19 nt, Artificial Sequence
  Description of Artificial Sequence: Synthetic oligonucleotide
  Antisense strand to SEQ ID NO: 595102
uuugggacuaaacaguagu

SEQ ID NO: 595104 - RNA, 19 nt, Artificial Sequence
  Description of Artificial Sequence: Synthetic oligonucleotide
  Sense strand starting at position 3689 of SEQ ID NO: 584861
acuguuuagucccaaagac

SEQ ID NO: 595105 - RNA, 19 nt, Artificial Sequence
  Description of Artificial Sequence: Synthetic oligonucleotide
  Antisense strand to SEQ ID NO: 595104
gucuuugggacuaaacagu

SEQ ID NO: 595106 - RNA, 19 nt, Artificial Sequence
  Description of Artificial Sequence: Synthetic oligonucleotide
  Sense strand starting at position 3729 of SEQ ID NO: 584861
cccaaauuugcacguccaa

SEQ ID NO: 595107 - RNA, 19 nt, Artificial Sequence
  Description of Artificial Sequence: Synthetic oligonucleotide
  Antisense strand to SEQ ID NO: 595106
uuggacgugcaaauuuggg

SEQ ID NO: 595108 - RNA, 19 nt, Artificial Sequence
  Description of Artificial Sequence: Synthetic oligonucleotide
  Sense strand starting at position 3790 of SEQ ID NO: 584861
uacauuucugcucguucga

SEQ ID NO: 595109 - RNA, 19 nt, Artificial Sequence
  Description of Artificial Sequence: Synthetic oligonucleotide
  Antisense strand to SEQ ID NO: 595108
ucgaacgagcagaaaugua

SEQ ID NO: 595110 - RNA, 19 nt, Artificial Sequence
  Description of Artificial Sequence: Synthetic oligonucleotide
  Sense strand starting at position 3792 of SEQ ID NO: 584861
cauuucugcucguucgaaa

SEQ ID NO: 595111 - RNA, 19 nt, Artificial Sequence
  Description of Artificial Sequence: Synthetic oligonucleotide
  Antisense strand to SEQ ID NO: 595110
uuucgaacgagcagaaaug

SEQ ID NO: 595112 - RNA, 19 nt, Artificial Sequence
  Description of Artificial Sequence: Synthetic oligonucleotide
  Sense strand starting at position 54 of SEQ ID NO: 584862
cuucgcuaccagggagaaa

SEQ ID NO: 595113 - RNA, 19 nt, Artificial Sequence
  Description of Artificial Sequence: Synthetic oligonucleotide
  Antisense strand to SEQ ID NO: 595112
uuucucccugguagcgaag

SEQ ID NO: 595114 - RNA, 19 nt, Artificial Sequence
  Description of Artificial Sequence: Synthetic oligonucleotide
  Sense strand starting at position 71 of SEQ ID NO: 584862
aaacaaacuuguguacgua

SEQ ID NO: 595115 - RNA, 19 nt, Artificial Sequence
  Description of Artificial Sequence: Synthetic oligonucleotide
  Antisense strand to SEQ ID NO: 595114
uacguacacaaguuuguuu

SEQ ID NO: 595116 - RNA, 19 nt, Artificial Sequence
  Description of Artificial Sequence: Synthetic oligonucleotide
  Sense strand starting at position 72 of SEQ ID NO: 584862
aacaaacuuguguacguau

SEQ ID NO: 595117 - RNA, 19 nt, Artificial Sequence
  Description of Artificial Sequence: Synthetic oligonucleotide
  Antisense strand to SEQ ID NO: 595116
auacguacacaaguuuguu

SEQ ID NO: 595118 - RNA, 19 nt, Artificial Sequence
  Description of Artificial Sequence: Synthetic oligonucleotide
  Sense strand starting at position 80 of SEQ ID NO: 584862
uguguacguaucugggaaa

SEQ ID NO: 595119 - RNA, 19 nt, Artificial Sequence
  Description of Artificial Sequence: Synthetic oligonucleotide
  Antisense strand to SEQ ID NO: 595118
uuucccagauacguacaca

SEQ ID NO: 595120 - RNA, 19 nt, Artificial Sequence
  Description of Artificial Sequence: Synthetic oligonucleotide
  Sense strand starting at position 688 of SEQ ID NO: 584862
cucaguaauuugggaaagu

SEQ ID NO: 595121 - RNA, 19 nt, Artificial Sequence
  Description of Artificial Sequence: Synthetic oligonucleotide
  Antisense strand to SEQ ID NO: 595120
acuuucccaaauuacugag

SEQ ID NO: 595122 - RNA, 19 nt, Artificial Sequence
  Description of Artificial Sequence: Synthetic oligonucleotide
  Sense strand starting at position 689 of SEQ ID NO: 584862
ucaguaauuugggaaagua

SEQ ID NO: 595123 - RNA, 19 nt, Artificial Sequence
  Description of Artificial Sequence: Synthetic oligonucleotide
  Antisense strand to SEQ ID NO: 595122
uacuuucccaaauuacuga

SEQ ID NO: 595124 - RNA, 19 nt, Artificial Sequence
  Description of Artificial Sequence: Synthetic oligonucleotide
  Sense strand starting at position 974 of SEQ ID NO: 584862
uagacacgugcucaguaaa

SEQ ID NO: 595125 - RNA, 19 nt, Artificial Sequence
  Description of Artificial Sequence: Synthetic oligonucleotide
  Antisense strand to SEQ ID NO: 595124
uuuacugagcacgugucua

SEQ ID NO: 595126 - RNA, 19 nt, Artificial Sequence
  Description of Artificial Sequence: Synthetic oligonucleotide
  Sense strand starting at position 977 of SEQ ID NO: 584862
acacgugcucaguaaagac

SEQ ID NO: 595127 - RNA, 19 nt, Artificial Sequence
  Description of Artificial Sequence: Synthetic oligonucleotide
  Antisense strand to SEQ ID NO: 595126
gucuuuacugagcacgugu

SEQ ID NO: 595128 - RNA, 19 nt, Artificial Sequence
  Description of Artificial Sequence: Synthetic oligonucleotide
  Sense strand starting at position 1020 of SEQ ID NO: 584862
ggccguguccacgugaaug

SEQ ID NO: 595129 - RNA, 19 nt, Artificial Sequence
  Description of Artificial Sequence: Synthetic oligonucleotide
  Antisense strand to SEQ ID NO: 595128
cauucacguggacacggcc

SEQ ID NO: 595130 - RNA, 19 nt, Artificial Sequence
  Description of Artificial Sequence: Synthetic oligonucleotide
  Sense strand starting at position 1040 of SEQ ID NO: 584862
acacaaauucgguaagcga

SEQ ID NO: 595131 - RNA, 19 nt, Artificial Sequence
  Description of Artificial Sequence: Synthetic oligonucleotide
  Antisense strand to SEQ ID NO: 595130
ucgcuuaccgaauuugugu

SEQ ID NO: 595132 - RNA, 19 nt, Artificial Sequence
  Description of Artificial Sequence: Synthetic oligonucleotide
  Sense strand starting at position 1505 of SEQ ID NO: 584862
ucaggauucuuuccugaac

SEQ ID NO: 595133 - RNA, 19 nt, Artificial Sequence
  Description of Artificial Sequence: Synthetic oligonucleotide
  Antisense strand to SEQ ID NO: 595132
guucaggaaagaauccuga

SEQ ID NO: 595134 - RNA, 19 nt, Artificial Sequence
  Description of Artificial Sequence: Synthetic oligonucleotide
  Sense strand starting at position 1556 of SEQ ID NO: 584862
ugguuaagcacuugacuga

SEQ ID NO: 595135 - RNA, 19 nt, Artificial Sequence
  Description of Artificial Sequence: Synthetic oligonucleotide
  Antisense strand to SEQ ID NO: 595134
ucagucaagugcuuaacca

SEQ ID NO: 595136 - RNA, 19 nt, Artificial Sequence
  Description of Artificial Sequence: Synthetic oligonucleotide
  Sense strand starting at position 2374 of SEQ ID NO: 584862
ugagcugucagcggaggaa

SEQ ID NO: 595137 - RNA, 19 nt, Artificial Sequence
  Description of Artificial Sequence: Synthetic oligonucleotide
  Antisense strand to SEQ ID NO: 595136
uuccuccgcugacagcuca

SEQ ID NO: 595138 - RNA, 19 nt, Artificial Sequence
  Description of Artificial Sequence: Synthetic oligonucleotide
  Sense strand starting at position 2397 of SEQ ID NO: 584862
gggccuggaccuggagaua

SEQ ID NO: 595139 - RNA, 19 nt, Artificial Sequence
  Description of Artificial Sequence: Synthetic oligonucleotide
  Antisense strand to SEQ ID NO: 595138
uaucuccagguccaggccc

SEQ ID NO: 595140 - RNA, 19 nt, Artificial Sequence
  Description of Artificial Sequence: Synthetic oligonucleotide
  Sense strand starting at position 2528 of SEQ ID NO: 584862
agauguggacuucguauuu

SEQ ID NO: 595141 - RNA, 19 nt, Artificial Sequence
  Description of Artificial Sequence: Synthetic oligonucleotide
  Antisense strand to SEQ ID NO: 595140
aaauacgaaguccacaucu

SEQ ID NO: 595142 - RNA, 19 nt, Artificial Sequence
  Description of Artificial Sequence: Synthetic oligonucleotide
  Sense strand starting at position 2537 of SEQ ID NO: 584862
cuucguauuuggcuuuagu

SEQ ID NO: 595143 - RNA, 19 nt, Artificial Sequence
  Description of Artificial Sequence: Synthetic oligonucleotide
  Antisense strand to SEQ ID NO: 595142
acuaaagccaaauacgaag

SEQ ID NO: 595144 - RNA, 19 nt, Artificial Sequence
  Description of Artificial Sequence: Synthetic oligonucleotide
  Sense strand starting at position 2646 of SEQ ID NO: 584862
uacgauauuuaccagcuga

SEQ ID NO: 595145 - RNA, 19 nt, Artificial Sequence
  Description of Artificial Sequence: Synthetic oligonucleotide
  Antisense strand to SEQ ID NO: 595144
ucagcugguaaauaucgua

SEQ ID NO: 595146 - RNA, 19 nt, Artificial Sequence
  Description of Artificial Sequence: Synthetic oligonucleotide
  Sense strand starting at position 2679 of SEQ ID NO: 584862
cuauuuauuucguagugga

SEQ ID NO: 595147 - RNA, 19 nt, Artificial Sequence
  Description of Artificial Sequence: Synthetic oligonucleotide
  Antisense strand to SEQ ID NO: 595146
uccacuacgaaauaaauag

SEQ ID NO: 595148 - RNA, 19 nt, Artificial Sequence
  Description of Artificial Sequence: Synthetic oligonucleotide
  Sense strand starting at position 2740 of SEQ ID NO: 584862
ucccaagcuugagugaauu

SEQ ID NO: 595149 - RNA, 19 nt, Artificial Sequence
  Description of Artificial Sequence: Synthetic oligonucleotide
  Antisense strand to SEQ ID NO: 595148
aauucacucaagcuuggga

SEQ ID NO: 595150 - RNA, 19 nt, Artificial Sequence
  Description of Artificial Sequence: Synthetic oligonucleotide
  Sense strand starting at position 2821 of SEQ ID NO: 584862
guaagccuuuaauuuguca

SEQ ID NO: 595151 - RNA, 19 nt, Artificial Sequence
  Description of Artificial Sequence: Synthetic oligonucleotide
  Antisense strand to SEQ ID NO: 595150
ugacaaauuaaaggcuuac

SEQ ID NO: 595152 - RNA, 19 nt, Artificial Sequence
  Description of Artificial Sequence: Synthetic oligonucleotide
  Sense strand starting at position 2825 of SEQ ID NO: 584862
gccuuuaauuugucauuag

SEQ ID NO: 595153 - RNA, 19 nt, Artificial Sequence
  Description of Artificial Sequence: Synthetic oligonucleotide
  Antisense strand to SEQ ID NO: 595152
cuaaugacaaauuaaaggc

SEQ ID NO: 595154 - RNA, 19 nt, Artificial Sequence
  Description of Artificial Sequence: Synthetic oligonucleotide
  Sense strand starting at position 2844 of SEQ ID NO: 584862
ccgauaaccucucccuuga

SEQ ID NO: 595155 - RNA, 19 nt, Artificial Sequence
  Description of Artificial Sequence: Synthetic oligonucleotide
  Antisense strand to SEQ ID NO: 595154
ucaagggagagguuaucgg

SEQ ID NO: 595156 - RNA, 19 nt, Artificial Sequence
  Description of Artificial Sequence: Synthetic oligonucleotide
  Sense strand starting at position 2866 of SEQ ID NO: 584862
cccagaguaugguccagau

SEQ ID NO: 595157 - RNA, 19 nt, Artificial Sequence
  Description of Artificial Sequence: Synthetic oligonucleotide
  Antisense strand to SEQ ID NO: 595156
aucuggaccauacucuggg

SEQ ID NO: 595158 - RNA, 19 nt, Artificial Sequence
  Description of Artificial Sequence: Synthetic oligonucleotide
  Sense strand starting at position 2977 of SEQ ID NO: 584862
ccugcaaacugggucaauu

SEQ ID NO: 595159 - RNA, 19 nt, Artificial Sequence
  Description of Artificial Sequence: Synthetic oligonucleotide
  Antisense strand to SEQ ID NO: 595158
aauugacccaguuugcagg

SEQ ID NO: 595160 - RNA, 19 nt, Artificial Sequence
  Description of Artificial Sequence: Synthetic oligonucleotide
  Sense strand starting at position 2987 of SEQ ID NO: 584862
gggucaauuguguauuccu

SEQ ID NO: 595161 - RNA, 19 nt, Artificial Sequence
  Description of Artificial Sequence: Synthetic oligonucleotide
  Antisense strand to SEQ ID NO: 595160
aggaauacacaauugaccc

SEQ ID NO: 595162 - RNA, 19 nt, Artificial Sequence
  Description of Artificial Sequence: Synthetic oligonucleotide
  Sense strand starting at position 2996 of SEQ ID NO: 584862
guguauuccuuucucauuu

SEQ ID NO: 595163 - RNA, 19 nt, Artificial Sequence
  Description of Artificial Sequence: Synthetic oligonucleotide
  Antisense strand to SEQ ID NO: 595162
aaaugagaaaggaauacac

SEQ ID NO: 595164 - RNA, 19 nt, Artificial Sequence
  Description of Artificial Sequence: Synthetic oligonucleotide
  Sense strand starting at position 3026 of SEQ ID NO: 584862
cucccuucgguuugaggaa

SEQ ID NO: 595165 - RNA, 19 nt, Artificial Sequence
  Description of Artificial Sequence: Synthetic oligonucleotide
  Antisense strand to SEQ ID NO: 595164
uuccucaaaccgaagggag

SEQ ID NO: 595166 - RNA, 19 nt, Artificial Sequence
  Description of Artificial Sequence: Synthetic oligonucleotide
  Sense strand starting at position 3062 of SEQ ID NO: 584862
uggucaaccuucucuguua

SEQ ID NO: 595167 - RNA, 19 nt, Artificial Sequence
  Description of Artificial Sequence: Synthetic oligonucleotide
  Antisense strand to SEQ ID NO: 595166
uaacagagaagguugacca

SEQ ID NO: 595168 - RNA, 19 nt, Artificial Sequence
  Description of Artificial Sequence: Synthetic oligonucleotide
  Sense strand starting at position 3400 of SEQ ID NO: 584862
cucugaggcauucgacauu

SEQ ID NO: 595169 - RNA, 19 nt, Artificial Sequence
  Description of Artificial Sequence: Synthetic oligonucleotide
  Antisense strand to SEQ ID NO: 595168
aaugucgaaugccucagag

SEQ ID NO: 595170 - RNA, 19 nt, Artificial Sequence
  Description of Artificial Sequence: Synthetic oligonucleotide
  Sense strand starting at position 3506 of SEQ ID NO: 584862
ucuccagucucaguagauu

SEQ ID NO: 595171 - RNA, 19 nt, Artificial Sequence
  Description of Artificial Sequence: Synthetic oligonucleotide
  Antisense strand to SEQ ID NO: 595170
aaucuacugagacuggaga

SEQ ID NO: 595172 - RNA, 19 nt, Artificial Sequence
  Description of Artificial Sequence: Synthetic oligonucleotide
  Sense strand starting at position 3549 of SEQ ID NO: 584862
uguugauauuugcugugau

SEQ ID NO: 595173 - RNA, 19 nt, Artificial Sequence
  Description of Artificial Sequence: Synthetic oligonucleotide
  Antisense strand to SEQ ID NO: 595172
aucacagcaaauaucaaca

SEQ ID NO: 595174 - RNA, 19 nt, Artificial Sequence
  Description of Artificial Sequence: Synthetic oligonucleotide
  Sense strand starting at position 3552 of SEQ ID NO: 584862
ugauauuugcugugauucu

SEQ ID NO: 595175 - RNA, 19 nt, Artificial Sequence
  Description of Artificial Sequence: Synthetic oligonucleotide
  Antisense strand to SEQ ID NO: 595174
agaaucacagcaaauauca

SEQ ID NO: 595176 - RNA, 19 nt, Artificial Sequence
  Description of Artificial Sequence: Synthetic oligonucleotide
  Sense strand starting at position 3600 of SEQ ID NO: 584862
uagguaaucugacuccaug

SEQ ID NO: 595177 - RNA, 19 nt, Artificial Sequence
  Description of Artificial Sequence: Synthetic oligonucleotide
  Antisense strand to SEQ ID NO: 595176
cauggagucagauuaccua

SEQ ID NO: 595178 - RNA, 19 nt, Artificial Sequence
  Description of Artificial Sequence: Synthetic oligonucleotide
  Sense strand starting at position 3765 of SEQ ID NO: 584862
uucuguuguccugaguaau

SEQ ID NO: 595179 - RNA, 19 nt, Artificial Sequence
  Description of Artificial Sequence: Synthetic oligonucleotide
  Antisense strand to SEQ ID NO: 595178
auuacucaggacaacagaa

SEQ ID NO: 595180 - RNA, 19 nt, Artificial Sequence
  Description of Artificial Sequence: Synthetic oligonucleotide
  Sense strand starting at position 3768 of SEQ ID NO: 584862
uguuguccugaguaauggu

SEQ ID NO: 595181 - RNA, 19 nt, Artificial Sequence
  Description of Artificial Sequence: Synthetic oligonucleotide
  Antisense strand to SEQ ID NO: 595180
accauuacucaggacaaca

SEQ ID NO: 595182 - RNA, 19 nt, Artificial Sequence
  Description of Artificial Sequence: Synthetic oligonucleotide
  Sense strand starting at position 3785 of SEQ ID NO: 584862
guggcuguuuaaccacaaa

SEQ ID NO: 595183 - RNA, 19 nt, Artificial Sequence
  Description of Artificial Sequence: Synthetic oligonucleotide
  Antisense strand to SEQ ID NO: 595182
uuugugguuaaacagccac

SEQ ID NO: 595184 - RNA, 19 nt, Artificial Sequence
  Description of Artificial Sequence: Synthetic oligonucleotide
  Sense strand starting at position 3796 of SEQ ID NO: 584862
accacaaagucuguaaucu

SEQ ID NO: 595185 - RNA, 19 nt, Artificial Sequence
  Description of Artificial Sequence: Synthetic oligonucleotide
  Antisense strand to SEQ ID NO: 595184
agauuacagacuuuguggu

SEQ ID NO: 595186 - RNA, 19 nt, Artificial Sequence
  Description of Artificial Sequence: Synthetic oligonucleotide
  Sense strand starting at position 3797 of SEQ ID NO: 584862
ccacaaagucuguaaucug

SEQ ID NO: 595187 - RNA, 19 nt, Artificial Sequence
  Description of Artificial Sequence: Synthetic oligonucleotide
  Antisense strand to SEQ ID NO: 595186
cagauuacagacuuugugg

SEQ ID NO: 595188 - RNA, 19 nt, Artificial Sequence
  Description of Artificial Sequence: Synthetic oligonucleotide
  Sense strand starting at position 3800 of SEQ ID NO: 584862
caaagucuguaaucuggga

SEQ ID NO: 595189 - RNA, 19 nt, Artificial Sequence
  Description of Artificial Sequence: Synthetic oligonucleotide
  Antisense strand to SEQ ID NO: 595188
ucccagauuacagacuuug

SEQ ID NO: 595190 - RNA, 19 nt, Artificial Sequence
  Description of Artificial Sequence: Synthetic oligonucleotide
  Sense strand starting at position 3813 of SEQ ID NO: 584862
cugggagccuguucuugau

SEQ ID NO: 595191 - RNA, 19 nt, Artificial Sequence
  Description of Artificial Sequence: Synthetic oligonucleotide
  Antisense strand to SEQ ID NO: 595190
aucaagaacaggcucccag

SEQ ID NO: 595192 - RNA, 19 nt, Artificial Sequence
  Description of Artificial Sequence: Synthetic oligonucleotide
  Sense strand starting at position 107 of SEQ ID NO: 584863
uaaaguagagacggugaua

SEQ ID NO: 595193 - RNA, 19 nt, Artificial Sequence
  Description of Artificial Sequence: Synthetic oligonucleotide
  Antisense strand to SEQ ID NO: 595192
uaucaccgucucuacuuua

SEQ ID NO: 595194 - RNA, 19 nt, Artificial Sequence
  Description of Artificial Sequence: Synthetic oligonucleotide
  Sense strand starting at position 182 of SEQ ID NO: 584863
uaccuuaggagauggugua

SEQ ID NO: 595195 - RNA, 19 nt, Artificial Sequence
  Description of Artificial Sequence: Synthetic oligonucleotide
  Antisense strand to SEQ ID NO: 595194
uacaccaucuccuaaggua

SEQ ID NO: 595196 - RNA, 19 nt, Artificial Sequence
  Description of Artificial Sequence: Synthetic oligonucleotide
  Sense strand starting at position 245 of SEQ ID NO: 584863
uaaagcuaguaagugauaa

SEQ ID NO: 595197 - RNA, 19 nt, Artificial Sequence
  Description of Artificial Sequence: Synthetic oligonucleotide
  Antisense strand to SEQ ID NO: 595196
uuaucacuuacuagcuuua

SEQ ID NO: 595198 - RNA, 19 nt, Artificial Sequence
  Description of Artificial Sequence: Synthetic oligonucleotide
  Sense strand starting at position 296 of SEQ ID NO: 584863
caauuccucucagugggaa

SEQ ID NO: 595199 - RNA, 19 nt, Artificial Sequence
  Description of Artificial Sequence: Synthetic oligonucleotide
  Antisense strand to SEQ ID NO: 595198
uucccacugagaggaauug

SEQ ID NO: 595200 - RNA, 19 nt, Artificial Sequence
  Description of Artificial Sequence: Synthetic oligonucleotide
  Sense strand starting at position 297 of SEQ ID NO: 584863
aauuccucucagugggaau

SEQ ID NO: 595201 - RNA, 19 nt, Artificial Sequence
  Description of Artificial Sequence: Synthetic oligonucleotide
  Antisense strand to SEQ ID NO: 595200
auucccacugagaggaauu

SEQ ID NO: 595202 - RNA, 19 nt, Artificial Sequence
  Description of Artificial Sequence: Synthetic oligonucleotide
  Sense strand starting at position 299 of SEQ ID NO: 584863
uuccucucagugggaauua

SEQ ID NO: 595203 - RNA, 19 nt, Artificial Sequence
  Description of Artificial Sequence: Synthetic oligonucleotide
  Antisense strand to SEQ ID NO: 595202
uaauucccacugagaggaa

SEQ ID NO: 595204 - RNA, 19 nt, Artificial Sequence
  Description of Artificial Sequence: Synthetic oligonucleotide
  Sense strand starting at position 401 of SEQ ID NO: 584863
gagaaagucccuuaagcuc

SEQ ID NO: 595205 - RNA, 19 nt, Artificial Sequence
  Description of Artificial Sequence: Synthetic oligonucleotide
  Antisense strand to SEQ ID NO: 595204
gagcuuaagggacuuucuc

SEQ ID NO: 595206 - RNA, 19 nt, Artificial Sequence
  Description of Artificial Sequence: Synthetic oligonucleotide
  Sense strand starting at position 473 of SEQ ID NO: 584863
aggugcuacuuguuaauaa

SEQ ID NO: 595207 - RNA, 19 nt, Artificial Sequence
  Description of Artificial Sequence: Synthetic oligonucleotide
  Antisense strand to SEQ ID NO: 595206
uuauuaacaaguagcaccu

SEQ ID NO: 595208 - RNA, 19 nt, Artificial Sequence
  Description of Artificial Sequence: Synthetic oligonucleotide
  Sense strand starting at position 631 of SEQ ID NO: 584863
gcagcaauucuguccgggu

SEQ ID NO: 595209 - RNA, 19 nt, Artificial Sequence
  Description of Artificial Sequence: Synthetic oligonucleotide
  Antisense strand to SEQ ID NO: 595208
acccggacagaauugcugc

SEQ ID NO: 595210 - RNA, 19 nt, Artificial Sequence
  Description of Artificial Sequence: Synthetic oligonucleotide
  Sense strand starting at position 664 of SEQ ID NO: 584863
gcuacuggauuccuuacaa

SEQ ID NO: 595211 - RNA, 19 nt, Artificial Sequence
  Description of Artificial Sequence: Synthetic oligonucleotide
  Antisense strand to SEQ ID NO: 595210
uuguaaggaauccaguagc

SEQ ID NO: 595212 - RNA, 19 nt, Artificial Sequence
  Description of Artificial Sequence: Synthetic oligonucleotide
  Sense strand starting at position 883 of SEQ ID NO: 584863
gcaucucucgaccaugcaa

SEQ ID NO: 595213 - RNA, 19 nt, Artificial Sequence
  Description of Artificial Sequence: Synthetic oligonucleotide
  Antisense strand to SEQ ID NO: 595212
uugcauggucgagagaugc

SEQ ID NO: 595214 - RNA, 19 nt, Artificial Sequence
  Description of Artificial Sequence: Synthetic oligonucleotide
  Sense strand starting at position 1012 of SEQ ID NO: 584863
gagcuuacagucuagacga

SEQ ID NO: 595215 - RNA, 19 nt, Artificial Sequence
  Description of Artificial Sequence: Synthetic oligonucleotide
  Antisense strand to SEQ ID NO: 595214
ucgucuagacuguaagcuc

SEQ ID NO: 595216 - RNA, 19 nt, Artificial Sequence
  Description of Artificial Sequence: Synthetic oligonucleotide
  Sense strand starting at position 1175 of SEQ ID NO: 584863
ugaggagcuucugcaauua

SEQ ID NO: 595217 - RNA, 19 nt, Artificial Sequence
  Description of Artificial Sequence: Synthetic oligonucleotide
  Antisense strand to SEQ ID NO: 595216
uaauugcagaagcuccuca

SEQ ID NO: 595218 - RNA, 19 nt, Artificial Sequence
  Description of Artificial Sequence: Synthetic oligonucleotide
  Sense strand starting at position 1216 of SEQ ID NO: 584863
acaagauacucaggagaca

SEQ ID NO: 595219 - RNA, 19 nt, Artificial Sequence
  Description of Artificial Sequence: Synthetic oligonucleotide
  Antisense strand to SEQ ID NO: 595218
ugucuccugaguaucuugu

SEQ ID NO: 595220 - RNA, 19 nt, Artificial Sequence
  Description of Artificial Sequence: Synthetic oligonucleotide
  Sense strand starting at position 1273 of SEQ ID NO: 584863
gcaccucuuccagaagaau

SEQ ID NO: 595221 - RNA, 19 nt, Artificial Sequence
  Description of Artificial Sequence: Synthetic oligonucleotide
  Antisense strand to SEQ ID NO: 595220
auucuucuggaagaggugc

SEQ ID NO: 595222 - RNA, 19 nt, Artificial Sequence
  Description of Artificial Sequence: Synthetic oligonucleotide
  Sense strand starting at position 1542 of SEQ ID NO: 584863
gggcuuagcggcucggaau

SEQ ID NO: 595223 - RNA, 19 nt, Artificial Sequence
  Description of Artificial Sequence: Synthetic oligonucleotide
  Antisense strand to SEQ ID NO: 595222
auuccgagccgcuaagccc

SEQ ID NO: 595224 - RNA, 19 nt, Artificial Sequence
  Description of Artificial Sequence: Synthetic oligonucleotide
  Sense strand starting at position 2661 of SEQ ID NO: 584863
aggacaaaggucuagcgau

SEQ ID NO: 595225 - RNA, 19 nt, Artificial Sequence
  Description of Artificial Sequence: Synthetic oligonucleotide
  Antisense strand to SEQ ID NO: 595224
aucgcuagaccuuuguccu

SEQ ID NO: 595226 - RNA, 19 nt, Artificial Sequence
  Description of Artificial Sequence: Synthetic oligonucleotide
  Sense strand starting at position 2787 of SEQ ID NO: 584863
aucugacuuuccguuuaaa

SEQ ID NO: 595227 - RNA, 19 nt, Artificial Sequence
  Description of Artificial Sequence: Synthetic oligonucleotide
  Antisense strand to SEQ ID NO: 595226
uuuaaacggaaagucagau

SEQ ID NO: 595228 - RNA, 19 nt, Artificial Sequence
  Description of Artificial Sequence: Synthetic oligonucleotide
  Sense strand starting at position 2820 of SEQ ID NO: 584863
guuugacagucugcuuaag

SEQ ID NO: 595229 - RNA, 19 nt, Artificial Sequence
  Description of Artificial Sequence: Synthetic oligonucleotide
  Antisense strand to SEQ ID NO: 595228
cuuaagcagacugucaaac

SEQ ID NO: 595230 - RNA, 19 nt, Artificial Sequence
  Description of Artificial Sequence: Synthetic oligonucleotide
  Sense strand starting at position 2822 of SEQ ID NO: 584863
uugacagucugcuuaagca

SEQ ID NO: 595231 - RNA, 19 nt, Artificial Sequence
  Description of Artificial Sequence: Synthetic oligonucleotide
  Antisense strand to SEQ ID NO: 595230
ugcuuaagcagacugucaa

SEQ ID NO: 595232 - RNA, 19 nt, Artificial Sequence
  Description of Artificial Sequence: Synthetic oligonucleotide
  Sense strand starting at position 2880 of SEQ ID NO: 584863
cuuuaaaccugacuugguu

SEQ ID NO: 595233 - RNA, 19 nt, Artificial Sequence
  Description of Artificial Sequence: Synthetic oligonucleotide
  Antisense strand to SEQ ID NO: 595232
aaccaagucagguuuaaag

SEQ ID NO: 595234 - RNA, 19 nt, Artificial Sequence
  Description of Artificial Sequence: Synthetic oligonucleotide
  Sense strand starting at position 3025 of SEQ ID NO: 584863
gccuguaaacuggaaagcu

SEQ ID NO: 595235 - RNA, 19 nt, Artificial Sequence
  Description of Artificial Sequence: Synthetic oligonucleotide
  Antisense strand to SEQ ID NO: 595234
agcuuuccaguuuacaggc

SEQ ID NO: 595236 - RNA, 19 nt, Artificial Sequence
  Description of Artificial Sequence: Synthetic oligonucleotide
  Sense strand starting at position 3037 of SEQ ID NO: 584863
gaaagcuuaccucauguga

SEQ ID NO: 595237 - RNA, 19 nt, Artificial Sequence
  Description of Artificial Sequence: Synthetic oligonucleotide
  Antisense strand to SEQ ID NO: 595236
ucacaugagguaagcuuuc

SEQ ID NO: 595238 - RNA, 19 nt, Artificial Sequence
  Description of Artificial Sequence: Synthetic oligonucleotide
  Sense strand starting at position 3083 of SEQ ID NO: 584863
gauguuuauaaaggacgua

SEQ ID NO: 595239 - RNA, 19 nt, Artificial Sequence
  Description of Artificial Sequence: Synthetic oligonucleotide
  Antisense strand to SEQ ID NO: 595238
uacguccuuuauaaacauc

SEQ ID NO: 595240 - RNA, 19 nt, Artificial Sequence
  Description of Artificial Sequence: Synthetic oligonucleotide
  Sense strand starting at position 3102 of SEQ ID NO: 584863
uggauaagcugccuguaaa

SEQ ID NO: 595241 - RNA, 19 nt, Artificial Sequence
  Description of Artificial Sequence: Synthetic oligonucleotide
  Antisense strand to SEQ ID NO: 595240
uuuacaggcagcuuaucca

SEQ ID NO: 595242 - RNA, 19 nt, Artificial Sequence
  Description of Artificial Sequence: Synthetic oligonucleotide
  Sense strand starting at position 3103 of SEQ ID NO: 584863
ggauaagcugccuguaaau

SEQ ID NO: 595243 - RNA, 19 nt, Artificial Sequence
  Description of Artificial Sequence: Synthetic oligonucleotide
  Antisense strand to SEQ ID NO: 595242
auuuacaggcagcuuaucc

SEQ ID NO: 595244 - RNA, 19 nt, Artificial Sequence
  Description of Artificial Sequence: Synthetic oligonucleotide
  Sense strand starting at position 3105 of SEQ ID NO: 584863
auaagcugccuguaaaugu

SEQ ID NO: 595245 - RNA, 19 nt, Artificial Sequence
  Description of Artificial Sequence: Synthetic oligonucleotide
  Antisense strand to SEQ ID NO: 595244
acauuuacaggcagcuuau

SEQ ID NO: 595246 - RNA, 19 nt, Artificial Sequence
  Description of Artificial Sequence: Synthetic oligonucleotide
  Sense strand starting at position 3115 of SEQ ID NO: 584863
uguaaaugugaaggugagu

SEQ ID NO: 595247 - RNA, 19 nt, Artificial Sequence
  Description of Artificial Sequence: Synthetic oligonucleotide
  Antisense strand to SEQ ID NO: 595246
acucaccuucacauuuaca

SEQ ID NO: 595248 - RNA, 19 nt, Artificial Sequence
  Description of Artificial Sequence: Synthetic oligonucleotide
  Sense strand starting at position 3199 of SEQ ID NO: 584863
ugguucugaugaucaagga

SEQ ID NO: 595249 - RNA, 19 nt, Artificial Sequence
  Description of Artificial Sequence: Synthetic oligonucleotide
  Antisense strand to SEQ ID NO: 595248
uccuugaucaucagaacca

SEQ ID NO: 595250 - RNA, 19 nt, Artificial Sequence
  Description of Artificial Sequence: Synthetic oligonucleotide
  Sense strand starting at position 3217 of SEQ ID NO: 584863
acauguauucuagagucag

SEQ ID NO: 595251 - RNA, 19 nt, Artificial Sequence
  Description of Artificial Sequence: Synthetic oligonucleotide
  Antisense strand to SEQ ID NO: 595250
cugacucuagaauacaugu

SEQ ID NO: 595252 - RNA, 19 nt, Artificial Sequence
  Description of Artificial Sequence: Synthetic oligonucleotide
  Sense strand starting at position 3372 of SEQ ID NO: 584863
gcuaauuuguuuccaagua

SEQ ID NO: 595253 - RNA, 19 nt, Artificial Sequence
  Description of Artificial Sequence: Synthetic oligonucleotide
  Antisense strand to SEQ ID NO: 595252
uacuuggaaacaaauuagc

SEQ ID NO: 595254 - RNA, 19 nt, Artificial Sequence
  Description of Artificial Sequence: Synthetic oligonucleotide
  Sense strand starting at position 3528 of SEQ ID NO: 584863
aaugucaaguguucugaag

SEQ ID NO: 595255 - RNA, 19 nt, Artificial Sequence
  Description of Artificial Sequence: Synthetic oligonucleotide
  Antisense strand to SEQ ID NO: 595254
cuucagaacacuugacauu

SEQ ID NO: 595256 - RNA, 19 nt, Artificial Sequence
  Description of Artificial Sequence: Synthetic oligonucleotide
  Sense strand starting at position 3554 of SEQ ID NO: 584863
gaauaaucauuuggaggga

SEQ ID NO: 595257 - RNA, 19 nt, Artificial Sequence
  Description of Artificial Sequence: Synthetic oligonucleotide
  Antisense strand to SEQ ID NO: 595256
ucccuccaaaugauuauuc

SEQ ID NO: 595258 - RNA, 19 nt, Artificial Sequence
  Description of Artificial Sequence: Synthetic oligonucleotide
  Sense strand starting at position 3641 of SEQ ID NO: 584863
caguacuuguaguuaagaa

SEQ ID NO: 595259 - RNA, 19 nt, Artificial Sequence
  Description of Artificial Sequence: Synthetic oligonucleotide
  Antisense strand to SEQ ID NO: 595258
uucuuaacuacaaguacug

SEQ ID NO: 595260 - RNA, 19 nt, Artificial Sequence
  Description of Artificial Sequence: Synthetic oligonucleotide
  Sense strand starting at position 3742 of SEQ ID NO: 584863
cuugauggauguucucaaa

SEQ ID NO: 595261 - RNA, 19 nt, Artificial Sequence
  Description of Artificial Sequence: Synthetic oligonucleotide
  Antisense strand to SEQ ID NO: 595260
uuugagaacauccaucaag

SEQ ID NO: 595262 - RNA, 19 nt, Artificial Sequence
  Description of Artificial Sequence: Synthetic oligonucleotide
  Sense strand starting at position 3776 of SEQ ID NO: 584863
uucccauuugcgugaucag

SEQ ID NO: 595263 - RNA, 19 nt, Artificial Sequence
  Description of Artificial Sequence: Synthetic oligonucleotide
  Antisense strand to SEQ ID NO: 595262
cugaucacgcaaaugggaa

SEQ ID NO: 595264 - RNA, 19 nt, Artificial Sequence
  Description of Artificial Sequence: Synthetic oligonucleotide
  Sense strand starting at position 3783 of SEQ ID NO: 584863
uugcgugaucaggagcuau

SEQ ID NO: 595265 - RNA, 19 nt, Artificial Sequence
  Description of Artificial Sequence: Synthetic oligonucleotide
  Antisense strand to SEQ ID NO: 595264
auagcuccugaucacgcaa

SEQ ID NO: 595266 - RNA, 19 nt, Artificial Sequence
  Description of Artificial Sequence: Synthetic oligonucleotide
  Sense strand starting at position 3787 of SEQ ID NO: 584863
gugaucaggagcuaucuuu

SEQ ID NO: 595267 - RNA, 19 nt, Artificial Sequence
  Description of Artificial Sequence: Synthetic oligonucleotide
  Antisense strand to SEQ ID NO: 595266
aaagauagcuccugaucac

SEQ ID NO: 595268 - RNA, 19 nt, Artificial Sequence
  Description of Artificial Sequence: Synthetic oligonucleotide
  Sense strand starting at position 3845 of SEQ ID NO: 584863
auugguuucuacuuguaag

SEQ ID NO: 595269 - RNA, 19 nt, Artificial Sequence
  Description of Artificial Sequence: Synthetic oligonucleotide
  Antisense strand to SEQ ID NO: 595268
cuuacaaguagaaaccaau

SEQ ID NO: 595270 - RNA, 19 nt, Artificial Sequence
  Description of Artificial Sequence: Synthetic oligonucleotide
  Sense strand starting at position 3967 of SEQ ID NO: 584863
cuaaguguuucucuuccau

SEQ ID NO: 595271 - RNA, 19 nt, Artificial Sequence
  Description of Artificial Sequence: Synthetic oligonucleotide
  Antisense strand to SEQ ID NO: 595270
auggaagagaaacacuuag

SEQ ID NO: 595272 - RNA, 19 nt, Artificial Sequence
  Description of Artificial Sequence: Synthetic oligonucleotide
  Sense strand starting at position 154 of SEQ ID NO: 584864
aaagacaggucuucuaugu

SEQ ID NO: 595273 - RNA, 19 nt, Artificial Sequence
  Description of Artificial Sequence: Synthetic oligonucleotide
  Antisense strand to SEQ ID NO: 595272
acauagaagaccugucuuu

SEQ ID NO: 595274 - RNA, 19 nt, Artificial Sequence
  Description of Artificial Sequence: Synthetic oligonucleotide
  Sense strand starting at position 235 of SEQ ID NO: 584864
guauuaaguacuugaugga

SEQ ID NO: 595275 - RNA, 19 nt, Artificial Sequence
  Description of Artificial Sequence: Synthetic oligonucleotide
  Antisense strand to SEQ ID NO: 595274
uccaucaaguacuuaauac

SEQ ID NO: 595276 - RNA, 19 nt, Artificial Sequence
  Description of Artificial Sequence: Synthetic oligonucleotide
  Sense strand starting at position 356 of SEQ ID NO: 584864
auguguuagacauagggca

SEQ ID NO: 595277 - RNA, 19 nt, Artificial Sequence
  Description of Artificial Sequence: Synthetic oligonucleotide
  Antisense strand to SEQ ID NO: 595276
ugcccuaugucuaacacau

SEQ ID NO: 595278 - RNA, 19 nt, Artificial Sequence
  Description of Artificial Sequence: Synthetic oligonucleotide
  Sense strand starting at position 436 of SEQ ID NO: 584864
uugaauuccgaguaaucua

SEQ ID NO: 595279 - RNA, 19 nt, Artificial Sequence
  Description of Artificial Sequence: Synthetic oligonucleotide
  Antisense strand to SEQ ID NO: 595278
uagauuacucggaauucaa

SEQ ID NO: 595280 - RNA, 19 nt, Artificial Sequence
  Description of Artificial Sequence: Synthetic oligonucleotide
  Sense strand starting at position 473 of SEQ ID NO: 584864
gguuauuacugguuccaag

SEQ ID NO: 595281 - RNA, 19 nt, Artificial Sequence
  Description of Artificial Sequence: Synthetic oligonucleotide
  Antisense strand to SEQ ID NO: 595280
cuuggaaccaguaauaacc

SEQ ID NO: 595282 - RNA, 19 nt, Artificial Sequence
  Description of Artificial Sequence: Synthetic oligonucleotide
  Sense strand starting at position 502 of SEQ ID NO: 584864
cuuuacagauucucaguua

SEQ ID NO: 595283 - RNA, 19 nt, Artificial Sequence
  Description of Artificial Sequence: Synthetic oligonucleotide
  Antisense strand to SEQ ID NO: 595282
uaacugagaaucuguaaag

SEQ ID NO: 595284 - RNA, 19 nt, Artificial Sequence
  Description of Artificial Sequence: Synthetic oligonucleotide
  Sense strand starting at position 872 of SEQ ID NO: 584864
cuguacugccuuuaggaaa

SEQ ID NO: 595285 - RNA, 19 nt, Artificial Sequence
  Description of Artificial Sequence: Synthetic oligonucleotide
  Antisense strand to SEQ ID NO: 595284
uuuccuaaaggcaguacag

SEQ ID NO: 595286 - RNA, 19 nt, Artificial Sequence
  Description of Artificial Sequence: Synthetic oligonucleotide
  Sense strand starting at position 2200 of SEQ ID NO: 584864
ugcuaagugaugcucguua

SEQ ID NO: 595287 - RNA, 19 nt, Artificial Sequence
  Description of Artificial Sequence: Synthetic oligonucleotide
  Antisense strand to SEQ ID NO: 595286
uaacgagcaucacuuagca

SEQ ID NO: 595288 - RNA, 19 nt, Artificial Sequence
  Description of Artificial Sequence: Synthetic oligonucleotide
  Sense strand starting at position 2204 of SEQ ID NO: 584864
aagugaugcucguuaauuu

SEQ ID NO: 595289 - RNA, 19 nt, Artificial Sequence
  Description of Artificial Sequence: Synthetic oligonucleotide
  Antisense strand to SEQ ID NO: 595288
aaauuaacgagcaucacuu

SEQ ID NO: 595290 - RNA, 19 nt, Artificial Sequence
  Description of Artificial Sequence: Synthetic oligonucleotide
  Sense strand starting at position 2205 of SEQ ID NO: 584864
agugaugcucguuaauuuc

SEQ ID NO: 595291 - RNA, 19 nt, Artificial Sequence
  Description of Artificial Sequence: Synthetic oligonucleotide
  Antisense strand to SEQ ID NO: 595290
gaaauuaacgagcaucacu

SEQ ID NO: 595292 - RNA, 19 nt, Artificial Sequence
  Description of Artificial Sequence: Synthetic oligonucleotide
  Sense strand starting at position 2268 of SEQ ID NO: 584864
cucaguaaaugggcauaau

SEQ ID NO: 595293 - RNA, 19 nt, Artificial Sequence
  Description of Artificial Sequence: Synthetic oligonucleotide
  Antisense strand to SEQ ID NO: 595292
auuaugcccauuuacugag

SEQ ID NO: 595294 - RNA, 19 nt, Artificial Sequence
  Description of Artificial Sequence: Synthetic oligonucleotide
  Sense strand starting at position 2297 of SEQ ID NO: 584864
cagccuacgcuggagaauu

SEQ ID NO: 595295 - RNA, 19 nt, Artificial Sequence
  Description of Artificial Sequence: Synthetic oligonucleotide
  Antisense strand to SEQ ID NO: 595294
aauucuccagcguaggcug

SEQ ID NO: 595296 - RNA, 19 nt, Artificial Sequence
  Description of Artificial Sequence: Synthetic oligonucleotide
  Sense strand starting at position 2346 of SEQ ID NO: 584864
gguacuuuguaaguauaaa

SEQ ID NO: 595297 - RNA, 19 nt, Artificial Sequence
  Description of Artificial Sequence: Synthetic oligonucleotide
  Antisense strand to SEQ ID NO: 595296
uuuauacuuacaaaguacc

SEQ ID NO: 595298 - RNA, 19 nt, Artificial Sequence
  Description of Artificial Sequence: Synthetic oligonucleotide
  Sense strand starting at position 2804 of SEQ ID NO: 584864
gacuuaauuccgggcaaag

SEQ ID NO: 595299 - RNA, 19 nt, Artificial Sequence
  Description of Artificial Sequence: Synthetic oligonucleotide
  Antisense strand to SEQ ID NO: 595298
cuuugcccggaauuaaguc

SEQ ID NO: 595300 - RNA, 19 nt, Artificial Sequence
  Description of Artificial Sequence: Synthetic oligonucleotide
  Sense strand starting at position 2806 of SEQ ID NO: 584864
cuuaauuccgggcaaagga

SEQ ID NO: 595301 - RNA, 19 nt, Artificial Sequence
  Description of Artificial Sequence: Synthetic oligonucleotide
  Antisense strand to SEQ ID NO: 595300
uccuuugcccggaauuaag

SEQ ID NO: 595302 - RNA, 19 nt, Artificial Sequence
  Description of Artificial Sequence: Synthetic oligonucleotide
  Sense strand starting at position 2902 of SEQ ID NO: 584864
auugcaguacuccagacaa

SEQ ID NO: 595303 - RNA, 19 nt, Artificial Sequence
  Description of Artificial Sequence: Synthetic oligonucleotide
  Antisense strand to SEQ ID NO: 595302
uugucuggaguacugcaau

SEQ ID NO: 595304 - RNA, 19 nt, Artificial Sequence
  Description of Artificial Sequence: Synthetic oligonucleotide
  Sense strand starting at position 2904 of SEQ ID NO: 584864
ugcaguacuccagacaagu

SEQ ID NO: 595305 - RNA, 19 nt, Artificial Sequence
  Description of Artificial Sequence: Synthetic oligonucleotide
  Antisense strand to SEQ ID NO: 595304
acuugucuggaguacugca

SEQ ID NO: 595306 - RNA, 19 nt, Artificial Sequence
  Description of Artificial Sequence: Synthetic oligonucleotide
  Sense strand starting at position 3020 of SEQ ID NO: 584864
aaaugaguaggccagguuu

SEQ ID NO: 595307 - RNA, 19 nt, Artificial Sequence
  Description of Artificial Sequence: Synthetic oligonucleotide
  Antisense strand to SEQ ID NO: 595306
aaaccuggccuacucauuu

SEQ ID NO: 595308 - RNA, 19 nt, Artificial Sequence
  Description of Artificial Sequence: Synthetic oligonucleotide
  Sense strand starting at position 3053 of SEQ ID NO: 584864
gagguagacagugguaaca

SEQ ID NO: 595309 - RNA, 19 nt, Artificial Sequence
  Description of Artificial Sequence: Synthetic oligonucleotide
  Antisense strand to SEQ ID NO: 595308
uguuaccacugucuaccuc

SEQ ID NO: 595310 - RNA, 19 nt, Artificial Sequence
  Description of Artificial Sequence: Synthetic oligonucleotide
  Sense strand starting at position 3065 of SEQ ID NO: 584864
gguaacauuuagcaagaug

SEQ ID NO: 595311 - RNA, 19 nt, Artificial Sequence
  Description of Artificial Sequence: Synthetic oligonucleotide
  Antisense strand to SEQ ID NO: 595310
caucuugcuaaauguuacc

SEQ ID NO: 595312 - RNA, 19 nt, Artificial Sequence
  Description of Artificial Sequence: Synthetic oligonucleotide
  Sense strand starting at position 3096 of SEQ ID NO: 584864
agucuugauuauccacaag

SEQ ID NO: 595313 - RNA, 19 nt, Artificial Sequence
  Description of Artificial Sequence: Synthetic oligonucleotide
  Antisense strand to SEQ ID NO: 595312
cuuguggauaaucaagacu

SEQ ID NO: 595314 - RNA, 19 nt, Artificial Sequence
  Description of Artificial Sequence: Synthetic oligonucleotide
  Sense strand starting at position 3099 of SEQ ID NO: 584864
cuugauuauccacaagugu

SEQ ID NO: 595315 - RNA, 19 nt, Artificial Sequence
  Description of Artificial Sequence: Synthetic oligonucleotide
  Antisense strand to SEQ ID NO: 595314
acacuuguggauaaucaag

SEQ ID NO: 595316 - RNA, 19 nt, Artificial Sequence
  Description of Artificial Sequence: Synthetic oligonucleotide
  Sense strand starting at position 3107 of SEQ ID NO: 584864
uccacaagugucuaaguua

SEQ ID NO: 595317 - RNA, 19 nt, Artificial Sequence
  Description of Artificial Sequence: Synthetic oligonucleotide
  Antisense strand to SEQ ID NO: 595316
uaacuuagacacuugugga

SEQ ID NO: 595318 - RNA, 19 nt, Artificial Sequence
  Description of Artificial Sequence: Synthetic oligonucleotide
  Sense strand starting at position 3131 of SEQ ID NO: 584864
auagauagugauggugaca

SEQ ID NO: 595319 - RNA, 19 nt, Artificial Sequence
  Description of Artificial Sequence: Synthetic oligonucleotide
  Antisense strand to SEQ ID NO: 595318
ugucaccaucacuaucuau

SEQ ID NO: 595320 - RNA, 19 nt, Artificial Sequence
  Description of Artificial Sequence: Synthetic oligonucleotide
  Sense strand starting at position 3145 of SEQ ID NO: 584864
ugacauuucuuaggaggau

SEQ ID NO: 595321 - RNA, 19 nt, Artificial Sequence
  Description of Artificial Sequence: Synthetic oligonucleotide
  Antisense strand to SEQ ID NO: 595320
auccuccuaagaaauguca

SEQ ID NO: 595322 - RNA, 19 nt, Artificial Sequence
  Description of Artificial Sequence: Synthetic oligonucleotide
  Sense strand starting at position 3146 of SEQ ID NO: 584864
gacauuucuuaggaggaug

SEQ ID NO: 595323 - RNA, 19 nt, Artificial Sequence
  Description of Artificial Sequence: Synthetic oligonucleotide
  Antisense strand to SEQ ID NO: 595322
cauccuccuaagaaauguc

SEQ ID NO: 595324 - RNA, 19 nt, Artificial Sequence
  Description of Artificial Sequence: Synthetic oligonucleotide
  Sense strand starting at position 3163 of SEQ ID NO: 584864
ugaccagauauguggagua

SEQ ID NO: 595325 - RNA, 19 nt, Artificial Sequence
  Description of Artificial Sequence: Synthetic oligonucleotide
  Antisense strand to SEQ ID NO: 595324
uacuccacauaucugguca

SEQ ID NO: 595326 - RNA, 19 nt, Artificial Sequence
  Description of Artificial Sequence: Synthetic oligonucleotide
  Sense strand starting at position 3170 of SEQ ID NO: 584864
auauguggaguaugaugau

SEQ ID NO: 595327 - RNA, 19 nt, Artificial Sequence
  Description of Artificial Sequence: Synthetic oligonucleotide
  Antisense strand to SEQ ID NO: 595326
aucaucauacuccacauau

SEQ ID NO: 595328 - RNA, 19 nt, Artificial Sequence
  Description of Artificial Sequence: Synthetic oligonucleotide
  Sense strand starting at position 3200 of SEQ ID NO: 584864
uggauauguuuguuaggga

SEQ ID NO: 595329 - RNA, 19 nt, Artificial Sequence
  Description of Artificial Sequence: Synthetic oligonucleotide
  Antisense strand to SEQ ID NO: 595328
ucccuaacaaacauaucca

SEQ ID NO: 595330 - RNA, 19 nt, Artificial Sequence
  Description of Artificial Sequence: Synthetic oligonucleotide
  Sense strand starting at position 3242 of SEQ ID NO: 584864
gucuuucuuccauauggaa

SEQ ID NO: 595331 - RNA, 19 nt, Artificial Sequence
  Description of Artificial Sequence: Synthetic oligonucleotide
  Antisense strand to SEQ ID NO: 595330
uuccauauggaagaaagac

SEQ ID NO: 595332 - RNA, 19 nt, Artificial Sequence
  Description of Artificial Sequence: Synthetic oligonucleotide
  Sense strand starting at position 3249 of SEQ ID NO: 584864
uuccauauggaaugauauc

SEQ ID NO: 595333 - RNA, 19 nt, Artificial Sequence
  Description of Artificial Sequence: Synthetic oligonucleotide
  Antisense strand to SEQ ID NO: 595332
gauaucauuccauauggaa

SEQ ID NO: 595334 - RNA, 19 nt, Artificial Sequence
  Description of Artificial Sequence: Synthetic oligonucleotide
  Sense strand starting at position 3261 of SEQ ID NO: 584864
ugauauccauuaguguaau

SEQ ID NO: 595335 - RNA, 19 nt, Artificial Sequence
  Description of Artificial Sequence: Synthetic oligonucleotide
  Antisense strand to SEQ ID NO: 595334
auuacacuaauggauauca

SEQ ID NO: 595336 - RNA, 19 nt, Artificial Sequence
  Description of Artificial Sequence: Synthetic oligonucleotide
  Sense strand starting at position 3312 of SEQ ID NO: 584864
cucacucuugccuagagga

SEQ ID NO: 595337 - RNA, 19 nt, Artificial Sequence
  Description of Artificial Sequence: Synthetic oligonucleotide
  Antisense strand to SEQ ID NO: 595336
uccucuaggcaagagugag

SEQ ID NO: 595338 - RNA, 19 nt, Artificial Sequence
  Description of Artificial Sequence: Synthetic oligonucleotide
  Sense strand starting at position 3314 of SEQ ID NO: 584864
cacucuugccuagaggagu

SEQ ID NO: 595339 - RNA, 19 nt, Artificial Sequence
  Description of Artificial Sequence: Synthetic oligonucleotide
  Antisense strand to SEQ ID NO: 595338
acuccucuaggcaagagug

SEQ ID NO: 595340 - RNA, 19 nt, Artificial Sequence
  Description of Artificial Sequence: Synthetic oligonucleotide
  Sense strand starting at position 3327 of SEQ ID NO: 584864
aggagugacuuccugauug

SEQ ID NO: 595341 - RNA, 19 nt, Artificial Sequence
  Description of Artificial Sequence: Synthetic oligonucleotide
  Antisense strand to SEQ ID NO: 595340
caaucaggaagucacuccu

SEQ ID NO: 595342 - RNA, 19 nt, Artificial Sequence
  Description of Artificial Sequence: Synthetic oligonucleotide
  Sense strand starting at position 3329 of SEQ ID NO: 584864
gagugacuuccugauuggu

SEQ ID NO: 595343 - RNA, 19 nt, Artificial Sequence
  Description of Artificial Sequence: Synthetic oligonucleotide
  Antisense strand to SEQ ID NO: 595342
accaaucaggaagucacuc

SEQ ID NO: 595344 - RNA, 19 nt, Artificial Sequence
  Description of Artificial Sequence: Synthetic oligonucleotide
  Sense strand starting at position 3332 of SEQ ID NO: 584864
ugacuuccugauuggugaa

SEQ ID NO: 595345 - RNA, 19 nt, Artificial Sequence
  Description of Artificial Sequence: Synthetic oligonucleotide
  Antisense strand to SEQ ID NO: 595344
uucaccaaucaggaaguca

SEQ ID NO: 595346 - RNA, 19 nt, Artificial Sequence
  Description of Artificial Sequence: Synthetic oligonucleotide
  Sense strand starting at position 3544 of SEQ ID NO: 584864
gcugucuguccacagauaa

SEQ ID NO: 595347 - RNA, 19 nt, Artificial Sequence
  Description of Artificial Sequence: Synthetic oligonucleotide
  Antisense strand to SEQ ID NO: 595346
uuaucuguggacagacagc

SEQ ID NO: 595348 - RNA, 19 nt, Artificial Sequence
  Description of Artificial Sequence: Synthetic oligonucleotide
  Sense strand starting at position 3573 of SEQ ID NO: 584864
cagcuuugucagcuguguu

SEQ ID NO: 595349 - RNA, 19 nt, Artificial Sequence
  Description of Artificial Sequence: Synthetic oligonucleotide
  Antisense strand to SEQ ID NO: 595348
aacacagcugacaaagcug

SEQ ID NO: 595350 - RNA, 19 nt, Artificial Sequence
  Description of Artificial Sequence: Synthetic oligonucleotide
  Sense strand starting at position 3956 of SEQ ID NO: 584864
cuucuagaacugcgagaua

SEQ ID NO: 595351 - RNA, 19 nt, Artificial Sequence
  Description of Artificial Sequence: Synthetic oligonucleotide
  Antisense strand to SEQ ID NO: 595350
uaucucgcaguucuagaag

SEQ ID NO: 595352 - RNA, 19 nt, Artificial Sequence
  Description of Artificial Sequence: Synthetic oligonucleotide
  Sense strand starting at position 19 of SEQ ID NO: 584865
agacauucugaauguuaag

SEQ ID NO: 595353 - RNA, 19 nt, Artificial Sequence
  Description of Artificial Sequence: Synthetic oligonucleotide
  Antisense strand to SEQ ID NO: 595352
cuuaacauucagaaugucu

SEQ ID NO: 595354 - RNA, 19 nt, Artificial Sequence
  Description of Artificial Sequence: Synthetic oligonucleotide
  Sense strand starting at position 33 of SEQ ID NO: 584865
uuaaguauggugcagagau

SEQ ID NO: 595355 - RNA, 19 nt, Artificial Sequence
  Description of Artificial Sequence: Synthetic oligonucleotide
  Antisense strand to SEQ ID NO: 595354
aucucugcaccauacuuaa

SEQ ID NO: 595356 - RNA, 19 nt, Artificial Sequence
  Description of Artificial Sequence: Synthetic oligonucleotide
  Sense strand starting at position 57 of SEQ ID NO: 584865
gagguagaauccucuagcu

SEQ ID NO: 595357 - RNA, 19 nt, Artificial Sequence
  Description of Artificial Sequence: Synthetic oligonucleotide
  Antisense strand to SEQ ID NO: 595356
agcuagaggauucuaccuc

SEQ ID NO: 595358 - RNA, 19 nt, Artificial Sequence
  Description of Artificial Sequence: Synthetic oligonucleotide
  Sense strand starting at position 59 of SEQ ID NO: 584865
gguagaauccucuagcucu

SEQ ID NO: 595359 - RNA, 19 nt, Artificial Sequence
  Description of Artificial Sequence: Synthetic oligonucleotide
  Antisense strand to SEQ ID NO: 595358
agagcuagaggauucuacc

SEQ ID NO: 595360 - RNA, 19 nt, Artificial Sequence
  Description of Artificial Sequence: Synthetic oligonucleotide
  Sense strand starting at position 65 of SEQ ID NO: 584865
auccucuagcucuggaaau

SEQ ID NO: 595361 - RNA, 19 nt, Artificial Sequence
  Description of Artificial Sequence: Synthetic oligonucleotide
  Antisense strand to SEQ ID NO: 595360
auuuccagagcuagaggau

SEQ ID NO: 595362 - RNA, 19 nt, Artificial Sequence
  Description of Artificial Sequence: Synthetic oligonucleotide
  Sense strand starting at position 490 of SEQ ID NO: 584865
cugaaagcucaagauaugu

SEQ ID NO: 595363 - RNA, 19 nt, Artificial Sequence
  Description of Artificial Sequence: Synthetic oligonucleotide
  Antisense strand to SEQ ID NO: 595362
acauaucuugagcuuucag

SEQ ID NO: 595364 - RNA, 19 nt, Artificial Sequence
  Description of Artificial Sequence: Synthetic oligonucleotide
  Sense strand starting at position 496 of SEQ ID NO: 584865
gcucaagauaugugacaga

SEQ ID NO: 595365 - RNA, 19 nt, Artificial Sequence
  Description of Artificial Sequence: Synthetic oligonucleotide
  Antisense strand to SEQ ID NO: 595364
ucugucacauaucuugagc

SEQ ID NO: 595366 - RNA, 19 nt, Artificial Sequence
  Description of Artificial Sequence: Synthetic oligonucleotide
  Sense strand starting at position 574 of SEQ ID NO: 584865
guuaaaggucaauaaggca

SEQ ID NO: 595367 - RNA, 19 nt, Artificial Sequence
  Description of Artificial Sequence: Synthetic oligonucleotide
  Antisense strand to SEQ ID NO: 595366
ugccuuauugaccuuuaac

SEQ ID NO: 595368 - RNA, 19 nt, Artificial Sequence
  Description of Artificial Sequence: Synthetic oligonucleotide
  Sense strand starting at position 658 of SEQ ID NO: 584865
cccuguaagacuggcagaa

SEQ ID NO: 595369 - RNA, 19 nt, Artificial Sequence
  Description of Artificial Sequence: Synthetic oligonucleotide
  Antisense strand to SEQ ID NO: 595368
uucugccagucuuacaggg

SEQ ID NO: 595370 - RNA, 19 nt, Artificial Sequence
  Description of Artificial Sequence: Synthetic oligonucleotide
  Sense strand starting at position 738 of SEQ ID NO: 584865
cugcuuugagaguauaaau

SEQ ID NO: 595371 - RNA, 19 nt, Artificial Sequence
  Description of Artificial Sequence: Synthetic oligonucleotide
  Antisense strand to SEQ ID NO: 595370
auuuauacucucaaagcag

SEQ ID NO: 595372 - RNA, 19 nt, Artificial Sequence
  Description of Artificial Sequence: Synthetic oligonucleotide
  Sense strand starting at position 755 of SEQ ID NO: 584865
auggcagcccuuuauggaa

SEQ ID NO: 595373 - RNA, 19 nt, Artificial Sequence
  Description of Artificial Sequence: Synthetic oligonucleotide
  Antisense strand to SEQ ID NO: 595372
uuccauaaagggcugccau

SEQ ID NO: 595374 - RNA, 19 nt, Artificial Sequence
  Description of Artificial Sequence: Synthetic oligonucleotide
  Sense strand starting at position 1023 of SEQ ID NO: 584865
aggauaugguaggcaagua

SEQ ID NO: 595375 - RNA, 19 nt, Artificial Sequence
  Description of Artificial Sequence: Synthetic oligonucleotide
  Antisense strand to SEQ ID NO: 595374
uacuugccuaccauauccu

SEQ ID NO: 595376 - RNA, 19 nt, Artificial Sequence
  Description of Artificial Sequence: Synthetic oligonucleotide
  Sense strand starting at position 1024 of SEQ ID NO: 584865
ggauaugguaggcaaguaa

SEQ ID NO: 595377 - RNA, 19 nt, Artificial Sequence
  Description of Artificial Sequence: Synthetic oligonucleotide
  Antisense strand to SEQ ID NO: 595376
uuacuugccuaccauaucc

SEQ ID NO: 595378 - RNA, 19 nt, Artificial Sequence
  Description of Artificial Sequence: Synthetic oligonucleotide
  Sense strand starting at position 1048 of SEQ ID NO: 584865
auugcagauccauauguac

SEQ ID NO: 595379 - RNA, 19 nt, Artificial Sequence
  Description of Artificial Sequence: Synthetic oligonucleotide
  Antisense strand to SEQ ID NO: 595378
guacauauggaucugcaau

SEQ ID NO: 595380 - RNA, 19 nt, Artificial Sequence
  Description of Artificial Sequence: Synthetic oligonucleotide
  Sense strand starting at position 1180 of SEQ ID NO: 584865
acuuauuucugggaaaugg

SEQ ID NO: 595381 - RNA, 19 nt, Artificial Sequence
  Description of Artificial Sequence: Synthetic oligonucleotide
  Antisense strand to SEQ ID NO: 595380
ccauuucccagaaauaagu

SEQ ID NO: 595382 - RNA, 19 nt, Artificial Sequence
  Description of Artificial Sequence: Synthetic oligonucleotide
  Sense strand starting at position 1198 of SEQ ID NO: 584865
guauuagauggcugggaga

SEQ ID NO: 595383 - RNA, 19 nt, Artificial Sequence
  Description of Artificial Sequence: Synthetic oligonucleotide
  Antisense strand to SEQ ID NO: 595382
ucucccagccaucuaauac

SEQ ID NO: 595384 - RNA, 19 nt, Artificial Sequence
  Description of Artificial Sequence: Synthetic oligonucleotide
  Sense strand starting at position 1200 of SEQ ID NO: 584865
auuagauggcugggagaca

SEQ ID NO: 595385 - RNA, 19 nt, Artificial Sequence
  Description of Artificial Sequence: Synthetic oligonucleotide
  Antisense strand to SEQ ID NO: 595384
ugucucccagccaucuaau

SEQ ID NO: 595386 - RNA, 19 nt, Artificial Sequence
  Description of Artificial Sequence: Synthetic oligonucleotide
  Sense strand starting at position 1685 of SEQ ID NO: 584865
ugaauauucugagcauacc

SEQ ID NO: 595387 - RNA, 19 nt, Artificial Sequence
  Description of Artificial Sequence: Synthetic oligonucleotide
  Antisense strand to SEQ ID NO: 595386
gguaugcucagaauauuca

SEQ ID NO: 595388 - RNA, 19 nt, Artificial Sequence
  Description of Artificial Sequence: Synthetic oligonucleotide
  Sense strand starting at position 1736 of SEQ ID NO: 584865
cccugaagguuuccauuaa

SEQ ID NO: 595389 - RNA, 19 nt, Artificial Sequence
  Description of Artificial Sequence: Synthetic oligonucleotide
  Antisense strand to SEQ ID NO: 595388
uuaauggaaaccuucaggg

SEQ ID NO: 595390 - RNA, 19 nt, Artificial Sequence
  Description of Artificial Sequence: Synthetic oligonucleotide
  Sense strand starting at position 1892 of SEQ ID NO: 584865
ugaugaggcucccuuggaa

SEQ ID NO: 595391 - RNA, 19 nt, Artificial Sequence
  Description of Artificial Sequence: Synthetic oligonucleotide
  Antisense strand to SEQ ID NO: 595390
uuccaagggagccucauca

SEQ ID NO: 595392 - RNA, 19 nt, Artificial Sequence
  Description of Artificial Sequence: Synthetic oligonucleotide
  Sense strand starting at position 1990 of SEQ ID NO: 584865
auuccuuaucugggaauug

SEQ ID NO: 595393 - RNA, 19 nt, Artificial Sequence
  Description of Artificial Sequence: Synthetic oligonucleotide
  Antisense strand to SEQ ID NO: 595392
caauucccagauaaggaau

SEQ ID NO: 595394 - RNA, 19 nt, Artificial Sequence
  Description of Artificial Sequence: Synthetic oligonucleotide
  Sense strand starting at position 2000 of SEQ ID NO: 584865
ugggaauugauaggcuauu

SEQ ID NO: 595395 - RNA, 19 nt, Artificial Sequence
  Description of Artificial Sequence: Synthetic oligonucleotide
  Antisense strand to SEQ ID NO: 595394
aauagccuaucaauuccca

SEQ ID NO: 595396 - RNA, 19 nt, Artificial Sequence
  Description of Artificial Sequence: Synthetic oligonucleotide
  Sense strand starting at position 2001 of SEQ ID NO: 584865
gggaauugauaggcuauua

SEQ ID NO: 595397 - RNA, 19 nt, Artificial Sequence
  Description of Artificial Sequence: Synthetic oligonucleotide
  Antisense strand to SEQ ID NO: 595396
uaauagccuaucaauuccc

SEQ ID NO: 595398 - RNA, 19 nt, Artificial Sequence
  Description of Artificial Sequence: Synthetic oligonucleotide
  Sense strand starting at position 2072 of SEQ ID NO: 584865
ugaauacagucagcauuga

SEQ ID NO: 595399 - RNA, 19 nt, Artificial Sequence
  Description of Artificial Sequence: Synthetic oligonucleotide
  Antisense strand to SEQ ID NO: 595398
ucaaugcugacuguauuca

SEQ ID NO: 595400 - RNA, 19 nt, Artificial Sequence
  Description of Artificial Sequence: Synthetic oligonucleotide
  Sense strand starting at position 2076 of SEQ ID NO: 584865
uacagucagcauugagaac

SEQ ID NO: 595401 - RNA, 19 nt, Artificial Sequence
  Description of Artificial Sequence: Synthetic oligonucleotide
  Antisense strand to SEQ ID NO: 595400
guucucaaugcugacugua

SEQ ID NO: 595402 - RNA, 19 nt, Artificial Sequence
  Description of Artificial Sequence: Synthetic oligonucleotide
  Sense strand starting at position 2087 of SEQ ID NO: 584865
uugagaaccugucuaaggu

SEQ ID NO: 595403 - RNA, 19 nt, Artificial Sequence
  Description of Artificial Sequence: Synthetic oligonucleotide
  Antisense strand to SEQ ID NO: 595402
accuuagacagguucucaa

SEQ ID NO: 595404 - RNA, 19 nt, Artificial Sequence
  Description of Artificial Sequence: Synthetic oligonucleotide
  Sense strand starting at position 2111 of SEQ ID NO: 584865
ugagcuuagcucuaaggua

SEQ ID NO: 595405 - RNA, 19 nt, Artificial Sequence
  Description of Artificial Sequence: Synthetic oligonucleotide
  Antisense strand to SEQ ID NO: 595404
uaccuuagagcuaagcuca

SEQ ID NO: 595406 - RNA, 19 nt, Artificial Sequence
  Description of Artificial Sequence: Synthetic oligonucleotide
  Sense strand starting at position 2141 of SEQ ID NO: 584865
agagcuuagcucuaagaua

SEQ ID NO: 595407 - RNA, 19 nt, Artificial Sequence
  Description of Artificial Sequence: Synthetic oligonucleotide
  Antisense strand to SEQ ID NO: 595406
uaucuuagagcuaagcucu

SEQ ID NO: 595408 - RNA, 19 nt, Artificial Sequence
  Description of Artificial Sequence: Synthetic oligonucleotide
  Sense strand starting at position 2163 of SEQ ID NO: 584865
uaagguagacucugagcuu

SEQ ID NO: 595409 - RNA, 19 nt, Artificial Sequence
  Description of Artificial Sequence: Synthetic oligonucleotide
  Antisense strand to SEQ ID NO: 595408
aagcucagagucuaccuua

SEQ ID NO: 595410 - RNA, 19 nt, Artificial Sequence
  Description of Artificial Sequence: Synthetic oligonucleotide
  Sense strand starting at position 2982 of SEQ ID NO: 584865
auguguaagauuggaaguu

SEQ ID NO: 595411 - RNA, 19 nt, Artificial Sequence
  Description of Artificial Sequence: Synthetic oligonucleotide
  Antisense strand to SEQ ID NO: 595410
aacuuccaaucuuacacau

SEQ ID NO: 595412 - RNA, 19 nt, Artificial Sequence
  Description of Artificial Sequence: Synthetic oligonucleotide
  Sense strand starting at position 3021 of SEQ ID NO: 584865
cuagcuacagaguaaauau

SEQ ID NO: 595413 - RNA, 19 nt, Artificial Sequence
  Description of Artificial Sequence: Synthetic oligonucleotide
  Antisense strand to SEQ ID NO: 595412
auauuuacucuguagcuag

SEQ ID NO: 595414 - RNA, 19 nt, Artificial Sequence
  Description of Artificial Sequence: Synthetic oligonucleotide
  Sense strand starting at position 3031 of SEQ ID NO: 584865
aguaaauauuuccaggaga

SEQ ID NO: 595415 - RNA, 19 nt, Artificial Sequence
  Description of Artificial Sequence: Synthetic oligonucleotide
  Antisense strand to SEQ ID NO: 595414
ucuccuggaaauauuuacu

SEQ ID NO: 595416 - RNA, 19 nt, Artificial Sequence
  Description of Artificial Sequence: Synthetic oligonucleotide
  Sense strand starting at position 3079 of SEQ ID NO: 584865
gguguugcugucuugcuua

SEQ ID NO: 595417 - RNA, 19 nt, Artificial Sequence
  Description of Artificial Sequence: Synthetic oligonucleotide
  Antisense strand to SEQ ID NO: 595416
uaagcaagacagcaacacc

SEQ ID NO: 595418 - RNA, 19 nt, Artificial Sequence
  Description of Artificial Sequence: Synthetic oligonucleotide
  Sense strand starting at position 3081 of SEQ ID NO: 584865
uguugcugucuugcuuaau

SEQ ID NO: 595419 - RNA, 19 nt, Artificial Sequence
  Description of Artificial Sequence: Synthetic oligonucleotide
  Antisense strand to SEQ ID NO: 595418
auuaagcaagacagcaaca

SEQ ID NO: 595420 - RNA, 19 nt, Artificial Sequence
  Description of Artificial Sequence: Synthetic oligonucleotide
  Sense strand starting at position 3324 of SEQ ID NO: 584865
aauguagaguaguuaaaga

SEQ ID NO: 595421 - RNA, 19 nt, Artificial Sequence
  Description of Artificial Sequence: Synthetic oligonucleotide
  Antisense strand to SEQ ID NO: 595420
ucuuuaacuacucuacauu

SEQ ID NO: 595422 - RNA, 19 nt, Artificial Sequence
  Description of Artificial Sequence: Synthetic oligonucleotide
  Sense strand starting at position 3332 of SEQ ID NO: 584865
guaguuaaagaucagcuua

SEQ ID NO: 595423 - RNA, 19 nt, Artificial Sequence
  Description of Artificial Sequence: Synthetic oligonucleotide
  Antisense strand to SEQ ID NO: 595422
uaagcugaucuuuaacuac

SEQ ID NO: 595424 - RNA, 19 nt, Artificial Sequence
  Description of Artificial Sequence: Synthetic oligonucleotide
  Sense strand starting at position 3334 of SEQ ID NO: 584865
aguuaaagaucagcuuaag

SEQ ID NO: 595425 - RNA, 19 nt, Artificial Sequence
  Description of Artificial Sequence: Synthetic oligonucleotide
  Antisense strand to SEQ ID NO: 595424
cuuaagcugaucuuuaacu

SEQ ID NO: 595426 - RNA, 19 nt, Artificial Sequence
  Description of Artificial Sequence: Synthetic oligonucleotide
  Sense strand starting at position 3340 of SEQ ID NO: 584865
agaucagcuuaagauuuau

SEQ ID NO: 595427 - RNA, 19 nt, Artificial Sequence
  Description of Artificial Sequence: Synthetic oligonucleotide
  Antisense strand to SEQ ID NO: 595426
auaaaucuuaagcugaucu

SEQ ID NO: 595428 - RNA, 19 nt, Artificial Sequence
  Description of Artificial Sequence: Synthetic oligonucleotide
  Sense strand starting at position 3741 of SEQ ID NO: 584865
agacuuugucauuauacuu

SEQ ID NO: 595429 - RNA, 19 nt, Artificial Sequence
  Description of Artificial Sequence: Synthetic oligonucleotide
  Antisense strand to SEQ ID NO: 595428
aaguauaaugacaaagucu

SEQ ID NO: 595430 - RNA, 19 nt, Artificial Sequence
  Description of Artificial Sequence: Synthetic oligonucleotide
  Sense strand starting at position 3906 of SEQ ID NO: 584865
acgaaugugacgucgccau

SEQ ID NO: 595431 - RNA, 19 nt, Artificial Sequence
  Description of Artificial Sequence: Synthetic oligonucleotide
  Antisense strand to SEQ ID NO: 595430
auggcgacgucacauucgu

SEQ ID NO: 595432 - RNA, 19 nt, Artificial Sequence
  Description of Artificial Sequence: Synthetic oligonucleotide
  Sense strand starting at position 371 of SEQ ID NO: 584866
cuuuauuguuucccuuuga

SEQ ID NO: 595433 - RNA, 19 nt, Artificial Sequence
  Description of Artificial Sequence: Synthetic oligonucleotide
  Antisense strand to SEQ ID NO: 595432
ucaaagggaaacaauaaag

SEQ ID NO: 595434 - RNA, 19 nt, Artificial Sequence
  Description of Artificial Sequence: Synthetic oligonucleotide
  Sense strand starting at position 385 of SEQ ID NO: 584866
uuugaauucuggcuugaag

SEQ ID NO: 595435 - RNA, 19 nt, Artificial Sequence
  Description of Artificial Sequence: Synthetic oligonucleotide
  Antisense strand to SEQ ID NO: 595434
cuucaagccagaauucaaa

SEQ ID NO: 595436 - RNA, 19 nt, Artificial Sequence
  Description of Artificial Sequence: Synthetic oligonucleotide
  Sense strand starting at position 388 of SEQ ID NO: 584866
gaauucuggcuugaagcaa

SEQ ID NO: 595437 - RNA, 19 nt, Artificial Sequence
  Description of Artificial Sequence: Synthetic oligonucleotide
  Antisense strand to SEQ ID NO: 595436
uugcuucaagccagaauuc

SEQ ID NO: 595438 - RNA, 19 nt, Artificial Sequence
  Description of Artificial Sequence: Synthetic oligonucleotide
  Sense strand starting at position 470 of SEQ ID NO: 584866
cuaaucuuaggaugucagu

SEQ ID NO: 595439 - RNA, 19 nt, Artificial Sequence
  Description of Artificial Sequence: Synthetic oligonucleotide
  Antisense strand to SEQ ID NO: 595438
acugacauccuaagauuag

SEQ ID NO: 595440 - RNA, 19 nt, Artificial Sequence
  Description of Artificial Sequence: Synthetic oligonucleotide
  Sense strand starting at position 479 of SEQ ID NO: 584866
ggaugucagucuuuagaaa

SEQ ID NO: 595441 - RNA, 19 nt, Artificial Sequence
  Description of Artificial Sequence: Synthetic oligonucleotide
  Antisense strand to SEQ ID NO: 595440
uuucuaaagacugacaucc

SEQ ID NO: 595442 - RNA, 19 nt, Artificial Sequence
  Description of Artificial Sequence: Synthetic oligonucleotide
  Sense strand starting at position 480 of SEQ ID NO: 584866
gaugucagucuuuagaaac

SEQ ID NO: 595443 - RNA, 19 nt, Artificial Sequence
  Description of Artificial Sequence: Synthetic oligonucleotide
  Antisense strand to SEQ ID NO: 595442
guuucuaaagacugacauc

SEQ ID NO: 595444 - RNA, 19 nt, Artificial Sequence
  Description of Artificial Sequence: Synthetic oligonucleotide
  Sense strand starting at position 541 of SEQ ID NO: 584866
agccauaagauguguaaug

SEQ ID NO: 595445 - RNA, 19 nt, Artificial Sequence
  Description of Artificial Sequence: Synthetic oligonucleotide
  Antisense strand to SEQ ID NO: 595444
cauuacacaucuuauggcu

SEQ ID NO: 595446 - RNA, 19 nt, Artificial Sequence
  Description of Artificial Sequence: Synthetic oligonucleotide
  Sense strand starting at position 543 of SEQ ID NO: 584866
ccauaagauguguaauggu

SEQ ID NO: 595447 - RNA, 19 nt, Artificial Sequence
  Description of Artificial Sequence: Synthetic oligonucleotide
  Antisense strand to SEQ ID NO: 595446
accauuacacaucuuaugg

SEQ ID NO: 595448 - RNA, 19 nt, Artificial Sequence
  Description of Artificial Sequence: Synthetic oligonucleotide
  Sense strand starting at position 550 of SEQ ID NO: 584866
auguguaauggugagaaau

SEQ ID NO: 595449 - RNA, 19 nt, Artificial Sequence
  Description of Artificial Sequence: Synthetic oligonucleotide
  Antisense strand to SEQ ID NO: 595448
auuucucaccauuacacau

SEQ ID NO: 595450 - RNA, 19 nt, Artificial Sequence
  Description of Artificial Sequence: Synthetic oligonucleotide
  Sense strand starting at position 1144 of SEQ ID NO: 584866
cuuuacaacugucuuggua

SEQ ID NO: 595451 - RNA, 19 nt, Artificial Sequence
  Description of Artificial Sequence: Synthetic oligonucleotide
  Antisense strand to SEQ ID NO: 595450
uaccaagacaguuguaaag

SEQ ID NO: 595452 - RNA, 19 nt, Artificial Sequence
  Description of Artificial Sequence: Synthetic oligonucleotide
  Sense strand starting at position 1242 of SEQ ID NO: 584866
ugaaucugaugguuuccaa

SEQ ID NO: 595453 - RNA, 19 nt, Artificial Sequence
  Description of Artificial Sequence: Synthetic oligonucleotide
  Antisense strand to SEQ ID NO: 595452
uuggaaaccaucagauuca

SEQ ID NO: 595454 - RNA, 19 nt, Artificial Sequence
  Description of Artificial Sequence: Synthetic oligonucleotide
  Sense strand starting at position 1245 of SEQ ID NO: 584866
aucugaugguuuccaaagu

SEQ ID NO: 595455 - RNA, 19 nt, Artificial Sequence
  Description of Artificial Sequence: Synthetic oligonucleotide
  Antisense strand to SEQ ID NO: 595454
acuuuggaaaccaucagau

SEQ ID NO: 595456 - RNA, 19 nt, Artificial Sequence
  Description of Artificial Sequence: Synthetic oligonucleotide
  Sense strand starting at position 1295 of SEQ ID NO: 584866
ggagucgucggagaaaguc

SEQ ID NO: 595457 - RNA, 19 nt, Artificial Sequence
  Description of Artificial Sequence: Synthetic oligonucleotide
  Antisense strand to SEQ ID NO: 595456
gacuuucuccgacgacucc

SEQ ID NO: 595458 - RNA, 19 nt, Artificial Sequence
  Description of Artificial Sequence: Synthetic oligonucleotide
  Sense strand starting at position 2028 of SEQ ID NO: 584866
ggagcuucagccuaggaga

SEQ ID NO: 595459 - RNA, 19 nt, Artificial Sequence
  Description of Artificial Sequence: Synthetic oligonucleotide
  Antisense strand to SEQ ID NO: 595458
ucuccuaggcugaagcucc

SEQ ID NO: 595460 - RNA, 19 nt, Artificial Sequence
  Description of Artificial Sequence: Synthetic oligonucleotide
  Sense strand starting at position 2119 of SEQ ID NO: 584866
gcugcaaguguucugguca

SEQ ID NO: 595461 - RNA, 19 nt, Artificial Sequence
  Description of Artificial Sequence: Synthetic oligonucleotide
  Antisense strand to SEQ ID NO: 595460
ugaccagaacacuugcagc

SEQ ID NO: 595462 - RNA, 19 nt, Artificial Sequence
  Description of Artificial Sequence: Synthetic oligonucleotide
  Sense strand starting at position 2248 of SEQ ID NO: 584866
aacugugaggcauaacacu

SEQ ID NO: 595463 - RNA, 19 nt, Artificial Sequence
  Description of Artificial Sequence: Synthetic oligonucleotide
  Antisense strand to SEQ ID NO: 595462
aguguuaugccucacaguu

SEQ ID NO: 595464 - RNA, 19 nt, Artificial Sequence
  Description of Artificial Sequence: Synthetic oligonucleotide
  Sense strand starting at position 2257 of SEQ ID NO: 584866
gcauaacacucauuaguug

SEQ ID NO: 595465 - RNA, 19 nt, Artificial Sequence
  Description of Artificial Sequence: Synthetic oligonucleotide
  Antisense strand to SEQ ID NO: 595464
caacuaaugaguguuaugc

SEQ ID NO: 595466 - RNA, 19 nt, Artificial Sequence
  Description of Artificial Sequence: Synthetic oligonucleotide
  Sense strand starting at position 2276 of SEQ ID NO: 584866
guugcauaucgaugaacaa

SEQ ID NO: 595467 - RNA, 19 nt, Artificial Sequence
  Description of Artificial Sequence: Synthetic oligonucleotide
  Antisense strand to SEQ ID NO: 595466
uuguucaucgauaugcaac

SEQ ID NO: 595468 - RNA, 19 nt, Artificial Sequence
  Description of Artificial Sequence: Synthetic oligonucleotide
  Sense strand starting at position 2277 of SEQ ID NO: 584866
uugcauaucgaugaacaaa

SEQ ID NO: 595469 - RNA, 19 nt, Artificial Sequence
  Description of Artificial Sequence: Synthetic oligonucleotide
  Antisense strand to SEQ ID NO: 595468
uuuguucaucgauaugcaa

SEQ ID NO: 595470 - RNA, 19 nt, Artificial Sequence
  Description of Artificial Sequence: Synthetic oligonucleotide
  Sense strand starting at position 2903 of SEQ ID NO: 584866
uacugaccugggugaucuu

SEQ ID NO: 595471 - RNA, 19 nt, Artificial Sequence
  Description of Artificial Sequence: Synthetic oligonucleotide
  Antisense strand to SEQ ID NO: 595470
aagaucacccaggucagua

SEQ ID NO: 595472 - RNA, 19 nt, Artificial Sequence
  Description of Artificial Sequence: Synthetic oligonucleotide
  Sense strand starting at position 2910 of SEQ ID NO: 584866
cugggugaucuuggagaaa

SEQ ID NO: 595473 - RNA, 19 nt, Artificial Sequence
  Description of Artificial Sequence: Synthetic oligonucleotide
  Antisense strand to SEQ ID NO: 595472
uuucuccaagaucacccag

SEQ ID NO: 595474 - RNA, 19 nt, Artificial Sequence
  Description of Artificial Sequence: Synthetic oligonucleotide
  Sense strand starting at position 3141 of SEQ ID NO: 584866
caagauaugcauugaugag

SEQ ID NO: 595475 - RNA, 19 nt, Artificial Sequence
  Description of Artificial Sequence: Synthetic oligonucleotide
  Antisense strand to SEQ ID NO: 595474
cucaucaaugcauaucuug

SEQ ID NO: 595476 - RNA, 19 nt, Artificial Sequence
  Description of Artificial Sequence: Synthetic oligonucleotide
  Sense strand starting at position 3150 of SEQ ID NO: 584866
cauugaugagcuggaccaa

SEQ ID NO: 595477 - RNA, 19 nt, Artificial Sequence
  Description of Artificial Sequence: Synthetic oligonucleotide
  Antisense strand to SEQ ID NO: 595476
uugguccagcucaucaaug

SEQ ID NO: 595478 - RNA, 19 nt, Artificial Sequence
  Description of Artificial Sequence: Synthetic oligonucleotide
  Sense strand starting at position 3218 of SEQ ID NO: 584866
augagaugugauggcuuca

SEQ ID NO: 595479 - RNA, 19 nt, Artificial Sequence
  Description of Artificial Sequence: Synthetic oligonucleotide
  Antisense strand to SEQ ID NO: 595478
ugaagccaucacaucucau

SEQ ID NO: 595480 - RNA, 19 nt, Artificial Sequence
  Description of Artificial Sequence: Synthetic oligonucleotide
  Sense strand starting at position 3325 of SEQ ID NO: 584866
aggauuaagugagauuaag

SEQ ID NO: 595481 - RNA, 19 nt, Artificial Sequence
  Description of Artificial Sequence: Synthetic oligonucleotide
  Antisense strand to SEQ ID NO: 595480
cuuaaucucacuuaauccu

SEQ ID NO: 595482 - RNA, 19 nt, Artificial Sequence
  Description of Artificial Sequence: Synthetic oligonucleotide
  Sense strand starting at position 3331 of SEQ ID NO: 584866
aagugagauuaagcaggua

SEQ ID NO: 595483 - RNA, 19 nt, Artificial Sequence
  Description of Artificial Sequence: Synthetic oligonucleotide
  Antisense strand to SEQ ID NO: 595482
uaccugcuuaaucucacuu

SEQ ID NO: 595484 - RNA, 19 nt, Artificial Sequence
  Description of Artificial Sequence: Synthetic oligonucleotide
  Sense strand starting at position 3334 of SEQ ID NO: 584866
ugagauuaagcagguaaag

SEQ ID NO: 595485 - RNA, 19 nt, Artificial Sequence
  Description of Artificial Sequence: Synthetic oligonucleotide
  Antisense strand to SEQ ID NO: 595484
cuuuaccugcuuaaucuca

SEQ ID NO: 595486 - RNA, 19 nt, Artificial Sequence
  Description of Artificial Sequence: Synthetic oligonucleotide
  Sense strand starting at position 3370 of SEQ ID NO: 584866
gaacucagcggaggauaaa

SEQ ID NO: 595487 - RNA, 19 nt, Artificial Sequence
  Description of Artificial Sequence: Synthetic oligonucleotide
  Antisense strand to SEQ ID NO: 595486
uuuauccuccgcugaguuc

SEQ ID NO: 595488 - RNA, 19 nt, Artificial Sequence
  Description of Artificial Sequence: Synthetic oligonucleotide
  Sense strand starting at position 3380 of SEQ ID NO: 584866
gaggauaaauuguuauucu

SEQ ID NO: 595489 - RNA, 19 nt, Artificial Sequence
  Description of Artificial Sequence: Synthetic oligonucleotide
  Antisense strand to SEQ ID NO: 595488
agaauaacaauuuauccuc

SEQ ID NO: 595490 - RNA, 19 nt, Artificial Sequence
  Description of Artificial Sequence: Synthetic oligonucleotide
  Sense strand starting at position 3399 of SEQ ID NO: 584866
auuauuauuucugcggguu

SEQ ID NO: 595491 - RNA, 19 nt, Artificial Sequence
  Description of Artificial Sequence: Synthetic oligonucleotide
  Antisense strand to SEQ ID NO: 595490
aacccgcagaaauaauaau

SEQ ID NO: 595492 - RNA, 19 nt, Artificial Sequence
  Description of Artificial Sequence: Synthetic oligonucleotide
  Sense strand starting at position 3400 of SEQ ID NO: 584866
uuauuauuucugcggguug

SEQ ID NO: 595493 - RNA, 19 nt, Artificial Sequence
  Description of Artificial Sequence: Synthetic oligonucleotide
  Antisense strand to SEQ ID NO: 595492
caacccgcagaaauaauaa

SEQ ID NO: 595494 - RNA, 19 nt, Artificial Sequence
  Description of Artificial Sequence: Synthetic oligonucleotide
  Sense strand starting at position 3402 of SEQ ID NO: 584866
auuauuucugcggguugaa

SEQ ID NO: 595495 - RNA, 19 nt, Artificial Sequence
  Description of Artificial Sequence: Synthetic oligonucleotide
  Antisense strand to SEQ ID NO: 595494
uucaacccgcagaaauaau

SEQ ID NO: 595496 - RNA, 19 nt, Artificial Sequence
  Description of Artificial Sequence: Synthetic oligonucleotide
  Sense strand starting at position 3464 of SEQ ID NO: 584866
agccaucuucguuauugga

SEQ ID NO: 595497 - RNA, 19 nt, Artificial Sequence
  Description of Artificial Sequence: Synthetic oligonucleotide
  Antisense strand to SEQ ID NO: 595496
uccaauaacgaagauggcu

SEQ ID NO: 595498 - RNA, 19 nt, Artificial Sequence
  Description of Artificial Sequence: Synthetic oligonucleotide
  Sense strand starting at position 3541 of SEQ ID NO: 584866
aaggguaggcugugaauuc

SEQ ID NO: 595499 - RNA, 19 nt, Artificial Sequence
  Description of Artificial Sequence: Synthetic oligonucleotide
  Antisense strand to SEQ ID NO: 595498
gaauucacagccuacccuu

SEQ ID NO: 595500 - RNA, 19 nt, Artificial Sequence
  Description of Artificial Sequence: Synthetic oligonucleotide
  Sense strand starting at position 3551 of SEQ ID NO: 584866
ugugaauucuguuuacagg

SEQ ID NO: 595501 - RNA, 19 nt, Artificial Sequence
  Description of Artificial Sequence: Synthetic oligonucleotide
  Antisense strand to SEQ ID NO: 595500
ccuguaaacagaauucaca

SEQ ID NO: 595502 - RNA, 19 nt, Artificial Sequence
  Description of Artificial Sequence: Synthetic oligonucleotide
  Sense strand starting at position 3577 of SEQ ID NO: 584866
aguugccucccugacaauu

SEQ ID NO: 595503 - RNA, 19 nt, Artificial Sequence
  Description of Artificial Sequence: Synthetic oligonucleotide
  Antisense strand to SEQ ID NO: 595502
aauugucagggaggcaacu

SEQ ID NO: 595504 - RNA, 19 nt, Artificial Sequence
  Description of Artificial Sequence: Synthetic oligonucleotide
  Sense strand starting at position 3846 of SEQ ID NO: 584866
guuguauaauugccaugau

SEQ ID NO: 595505 - RNA, 19 nt, Artificial Sequence
  Description of Artificial Sequence: Synthetic oligonucleotide
  Antisense strand to SEQ ID NO: 595504
aucauggcaauuauacaac

SEQ ID NO: 595506 - RNA, 19 nt, Artificial Sequence
  Description of Artificial Sequence: Synthetic oligonucleotide
  Sense strand starting at position 3849 of SEQ ID NO: 584866
guauaauugccaugauugu

SEQ ID NO: 595507 - RNA, 19 nt, Artificial Sequence
  Description of Artificial Sequence: Synthetic oligonucleotide
  Antisense strand to SEQ ID NO: 595506
acaaucauggcaauuauac

SEQ ID NO: 595508 - RNA, 19 nt, Artificial Sequence
  Description of Artificial Sequence: Synthetic oligonucleotide
  Sense strand starting at position 3858 of SEQ ID NO: 584866
ccaugauugugggacauuu

SEQ ID NO: 595509 - RNA, 19 nt, Artificial Sequence
  Description of Artificial Sequence: Synthetic oligonucleotide
  Antisense strand to SEQ ID NO: 595508
aaaugucccacaaucaugg

SEQ ID NO: 595510 - RNA, 19 nt, Artificial Sequence
  Description of Artificial Sequence: Synthetic oligonucleotide
  Sense strand starting at position 3932 of SEQ ID NO: 584866
auuggauaauguccugaua

SEQ ID NO: 595511 - RNA, 19 nt, Artificial Sequence
  Description of Artificial Sequence: Synthetic oligonucleotide
  Antisense strand to SEQ ID NO: 595510
uaucaggacauuauccaau

SEQ ID NO: 595512 - RNA, 19 nt, Artificial Sequence
  Description of Artificial Sequence: Synthetic oligonucleotide
  Sense strand starting at position 491 of SEQ ID NO: 584867
gcagauauucuagggacaa

SEQ ID NO: 595513 - RNA, 19 nt, Artificial Sequence
  Description of Artificial Sequence: Synthetic oligonucleotide
  Antisense strand to SEQ ID NO: 595512
uugucccuagaauaucugc

SEQ ID NO: 595514 - RNA, 19 nt, Artificial Sequence
  Description of Artificial Sequence: Synthetic oligonucleotide
  Sense strand starting at position 532 of SEQ ID NO: 584867
gggucucuuugggcugaga

SEQ ID NO: 595515 - RNA, 19 nt, Artificial Sequence
  Description of Artificial Sequence: Synthetic oligonucleotide
  Antisense strand to SEQ ID NO: 595514
ucucagcccaaagagaccc

SEQ ID NO: 595516 - RNA, 19 nt, Artificial Sequence
  Description of Artificial Sequence: Synthetic oligonucleotide
  Sense strand starting at position 534 of SEQ ID NO: 584867
gucucuuugggcugagaaa

SEQ ID NO: 595517 - RNA, 19 nt, Artificial Sequence
  Description of Artificial Sequence: Synthetic oligonucleotide
  Antisense strand to SEQ ID NO: 595516
uuucucagcccaaagagac

SEQ ID NO: 595518 - RNA, 19 nt, Artificial Sequence
  Description of Artificial Sequence: Synthetic oligonucleotide
  Sense strand starting at position 535 of SEQ ID NO: 584867
ucucuuugggcugagaaau

SEQ ID NO: 595519 - RNA, 19 nt, Artificial Sequence
  Description of Artificial Sequence: Synthetic oligonucleotide
  Antisense strand to SEQ ID NO: 595518
auuucucagcccaaagaga

SEQ ID NO: 595520 - RNA, 19 nt, Artificial Sequence
  Description of Artificial Sequence: Synthetic oligonucleotide
  Sense strand starting at position 709 of SEQ ID NO: 584867
agugcugugccugagugua

SEQ ID NO: 595521 - RNA, 19 nt, Artificial Sequence
  Description of Artificial Sequence: Synthetic oligonucleotide
  Antisense strand to SEQ ID NO: 595520
uacacucaggcacagcacu

SEQ ID NO: 595522 - RNA, 19 nt, Artificial Sequence
  Description of Artificial Sequence: Synthetic oligonucleotide
  Sense strand starting at position 719 of SEQ ID NO: 584867
cugaguguacuguaaacuu

SEQ ID NO: 595523 - RNA, 19 nt, Artificial Sequence
  Description of Artificial Sequence: Synthetic oligonucleotide
  Antisense strand to SEQ ID NO: 595522
aaguuuacaguacacucag

SEQ ID NO: 595524 - RNA, 19 nt, Artificial Sequence
  Description of Artificial Sequence: Synthetic oligonucleotide
  Sense strand starting at position 742 of SEQ ID NO: 584867
cgugcaauaggacacauau

SEQ ID NO: 595525 - RNA, 19 nt, Artificial Sequence
  Description of Artificial Sequence: Synthetic oligonucleotide
  Antisense strand to SEQ ID NO: 595524
auauguguccuauugcacg

SEQ ID NO: 595526 - RNA, 19 nt, Artificial Sequence
  Description of Artificial Sequence: Synthetic oligonucleotide
  Sense strand starting at position 777 of SEQ ID NO: 584867
acugaaaugagcuguaagu

SEQ ID NO: 595527 - RNA, 19 nt, Artificial Sequence
  Description of Artificial Sequence: Synthetic oligonucleotide
  Antisense strand to SEQ ID NO: 595526
acuuacagcucauuucagu

SEQ ID NO: 595528 - RNA, 19 nt, Artificial Sequence
  Description of Artificial Sequence: Synthetic oligonucleotide
  Sense strand starting at position 779 of SEQ ID NO: 584867
ugaaaugagcuguaagugu

SEQ ID NO: 595529 - RNA, 19 nt, Artificial Sequence
  Description of Artificial Sequence: Synthetic oligonucleotide
  Antisense strand to SEQ ID NO: 595528
acacuuacagcucauuuca

SEQ ID NO: 595530 - RNA, 19 nt, Artificial Sequence
  Description of Artificial Sequence: Synthetic oligonucleotide
  Sense strand starting at position 839 of SEQ ID NO: 584867
uugacuaucucauugguaa

SEQ ID NO: 595531 - RNA, 19 nt, Artificial Sequence
  Description of Artificial Sequence: Synthetic oligonucleotide
  Antisense strand to SEQ ID NO: 595530
uuaccaaugagauagucaa

SEQ ID NO: 595532 - RNA, 19 nt, Artificial Sequence
  Description of Artificial Sequence: Synthetic oligonucleotide
  Sense strand starting at position 840 of SEQ ID NO: 584867
ugacuaucucauugguaau

SEQ ID NO: 595533 - RNA, 19 nt, Artificial Sequence
  Description of Artificial Sequence: Synthetic oligonucleotide
  Antisense strand to SEQ ID NO: 595532
auuaccaaugagauaguca

SEQ ID NO: 595534 - RNA, 19 nt, Artificial Sequence
  Description of Artificial Sequence: Synthetic oligonucleotide
  Sense strand starting at position 843 of SEQ ID NO: 584867
cuaucucauugguaauaug

SEQ ID NO: 595535 - RNA, 19 nt, Artificial Sequence
  Description of Artificial Sequence: Synthetic oligonucleotide
  Antisense strand to SEQ ID NO: 595534
cauauuaccaaugagauag

SEQ ID NO: 595536 - RNA, 19 nt, Artificial Sequence
  Description of Artificial Sequence: Synthetic oligonucleotide
  Sense strand starting at position 1013 of SEQ ID NO: 584867
gccuuugugccucacugua

SEQ ID NO: 595537 - RNA, 19 nt, Artificial Sequence
  Description of Artificial Sequence: Synthetic oligonucleotide
  Antisense strand to SEQ ID NO: 595536
uacagugaggcacaaaggc

SEQ ID NO: 595538 - RNA, 19 nt, Artificial Sequence
  Description of Artificial Sequence: Synthetic oligonucleotide
  Sense strand starting at position 1015 of SEQ ID NO: 584867
cuuugugccucacuguauu

SEQ ID NO: 595539 - RNA, 19 nt, Artificial Sequence
  Description of Artificial Sequence: Synthetic oligonucleotide
  Antisense strand to SEQ ID NO: 595538
aauacagugaggcacaaag

SEQ ID NO: 595540 - RNA, 19 nt, Artificial Sequence
  Description of Artificial Sequence: Synthetic oligonucleotide
  Sense strand starting at position 1138 of SEQ ID NO: 584867
ugauguuccuuucugauag

SEQ ID NO: 595541 - RNA, 19 nt, Artificial Sequence
  Description of Artificial Sequence: Synthetic oligonucleotide
  Antisense strand to SEQ ID NO: 595540
cuaucagaaaggaacauca

SEQ ID NO: 595542 - RNA, 19 nt, Artificial Sequence
  Description of Artificial Sequence: Synthetic oligonucleotide
  Sense strand starting at position 1428 of SEQ ID NO: 584867
cagguaugucccgagagag

SEQ ID NO: 595543 - RNA, 19 nt, Artificial Sequence
  Description of Artificial Sequence: Synthetic oligonucleotide
  Antisense strand to SEQ ID NO: 595542
cucucucgggacauaccug

SEQ ID NO: 595544 - RNA, 19 nt, Artificial Sequence
  Description of Artificial Sequence: Synthetic oligonucleotide
  Sense strand starting at position 2054 of SEQ ID NO: 584867
agcaguugcuggguagaau

SEQ ID NO: 595545 - RNA, 19 nt, Artificial Sequence
  Description of Artificial Sequence: Synthetic oligonucleotide
  Antisense strand to SEQ ID NO: 595544
auucuacccagcaacugcu

SEQ ID NO: 595546 - RNA, 19 nt, Artificial Sequence
  Description of Artificial Sequence: Synthetic oligonucleotide
  Sense strand starting at position 2284 of SEQ ID NO: 584867
ucucuauguagagggcaau

SEQ ID NO: 595547 - RNA, 19 nt, Artificial Sequence
  Description of Artificial Sequence: Synthetic oligonucleotide
  Antisense strand to SEQ ID NO: 595546
auugcccucuacauagaga

SEQ ID NO: 595548 - RNA, 19 nt, Artificial Sequence
  Description of Artificial Sequence: Synthetic oligonucleotide
  Sense strand starting at position 2484 of SEQ ID NO: 584867
uuaugaaggccuugccauu

SEQ ID NO: 595549 - RNA, 19 nt, Artificial Sequence
  Description of Artificial Sequence: Synthetic oligonucleotide
  Antisense strand to SEQ ID NO: 595548
aauggcaaggccuucauaa

SEQ ID NO: 595550 - RNA, 19 nt, Artificial Sequence
  Description of Artificial Sequence: Synthetic oligonucleotide
  Sense strand starting at position 2764 of SEQ ID NO: 584867
ccagaauaaucuucccgag

SEQ ID NO: 595551 - RNA, 19 nt, Artificial Sequence
  Description of Artificial Sequence: Synthetic oligonucleotide
  Antisense strand to SEQ ID NO: 595550
cucgggaagauuauucugg

SEQ ID NO: 595552 - RNA, 19 nt, Artificial Sequence
  Description of Artificial Sequence: Synthetic oligonucleotide
  Sense strand starting at position 2780 of SEQ ID NO: 584867
gaggcccaguugucaauau

SEQ ID NO: 595553 - RNA, 19 nt, Artificial Sequence
  Description of Artificial Sequence: Synthetic oligonucleotide
  Antisense strand to SEQ ID NO: 595552
auauugacaacugggccuc

SEQ ID NO: 595554 - RNA, 19 nt, Artificial Sequence
  Description of Artificial Sequence: Synthetic oligonucleotide
  Sense strand starting at position 3095 of SEQ ID NO: 584867
ccacguccugucuuguauu

SEQ ID NO: 595555 - RNA, 19 nt, Artificial Sequence
  Description of Artificial Sequence: Synthetic oligonucleotide
  Antisense strand to SEQ ID NO: 595554
aauacaagacaggacgugg

SEQ ID NO: 595556 - RNA, 19 nt, Artificial Sequence
  Description of Artificial Sequence: Synthetic oligonucleotide
  Sense strand starting at position 3106 of SEQ ID NO: 584867
cuuguauuauuguuacuca

SEQ ID NO: 595557 - RNA, 19 nt, Artificial Sequence
  Description of Artificial Sequence: Synthetic oligonucleotide
  Antisense strand to SEQ ID NO: 595556
ugaguaacaauaauacaag

SEQ ID NO: 595558 - RNA, 19 nt, Artificial Sequence
  Description of Artificial Sequence: Synthetic oligonucleotide
  Sense strand starting at position 3109 of SEQ ID NO: 584867
guauuauuguuacucaggu

SEQ ID NO: 595559 - RNA, 19 nt, Artificial Sequence
  Description of Artificial Sequence: Synthetic oligonucleotide
  Antisense strand to SEQ ID NO: 595558
accugaguaacaauaauac

SEQ ID NO: 595560 - RNA, 19 nt, Artificial Sequence
  Description of Artificial Sequence: Synthetic oligonucleotide
  Sense strand starting at position 3122 of SEQ ID NO: 584867
ucagguauccacugugucu

SEQ ID NO: 595561 - RNA, 19 nt, Artificial Sequence
  Description of Artificial Sequence: Synthetic oligonucleotide
  Antisense strand to SEQ ID NO: 595560
agacacaguggauaccuga

SEQ ID NO: 595562 - RNA, 19 nt, Artificial Sequence
  Description of Artificial Sequence: Synthetic oligonucleotide
  Sense strand starting at position 3184 of SEQ ID NO: 584867
ggaugugauuccucucacc

SEQ ID NO: 595563 - RNA, 19 nt, Artificial Sequence
  Description of Artificial Sequence: Synthetic oligonucleotide
  Antisense strand to SEQ ID NO: 595562
ggugagaggaaucacaucc

SEQ ID NO: 595564 - RNA, 19 nt, Artificial Sequence
  Description of Artificial Sequence: Synthetic oligonucleotide
  Sense strand starting at position 3222 of SEQ ID NO: 584867
gcucuaagcucugcucuua

SEQ ID NO: 595565 - RNA, 19 nt, Artificial Sequence
  Description of Artificial Sequence: Synthetic oligonucleotide
  Antisense strand to SEQ ID NO: 595564
uaagagcagagcuuagagc

SEQ ID NO: 595566 - RNA, 19 nt, Artificial Sequence
  Description of Artificial Sequence: Synthetic oligonucleotide
  Sense strand starting at position 3278 of SEQ ID NO: 584867
ggucauucccaccacauca

SEQ ID NO: 595567 - RNA, 19 nt, Artificial Sequence
  Description of Artificial Sequence: Synthetic oligonucleotide
  Antisense strand to SEQ ID NO: 595566
ugauguggugggaaugacc

SEQ ID NO: 595568 - RNA, 19 nt, Artificial Sequence
  Description of Artificial Sequence: Synthetic oligonucleotide
  Sense strand starting at position 3298 of SEQ ID NO: 584867
ggcccaguuccuggaguca

SEQ ID NO: 595569 - RNA, 19 nt, Artificial Sequence
  Description of Artificial Sequence: Synthetic oligonucleotide
  Antisense strand to SEQ ID NO: 595568
ugacuccaggaacugggcc

SEQ ID NO: 595570 - RNA, 19 nt, Artificial Sequence
  Description of Artificial Sequence: Synthetic oligonucleotide
  Sense strand starting at position 3310 of SEQ ID NO: 584867
ggagucauuuggcaccaga

SEQ ID NO: 595571 - RNA, 19 nt, Artificial Sequence
  Description of Artificial Sequence: Synthetic oligonucleotide
  Antisense strand to SEQ ID NO: 595570
ucuggugccaaaugacucc

SEQ ID NO: 595572 - RNA, 19 nt, Artificial Sequence
  Description of Artificial Sequence: Synthetic oligonucleotide
  Sense strand starting at position 3548 of SEQ ID NO: 584867
aaauaagauucuggguuga

SEQ ID NO: 595573 - RNA, 19 nt, Artificial Sequence
  Description of Artificial Sequence: Synthetic oligonucleotide
  Antisense strand to SEQ ID NO: 595572
ucaacccagaaucuuauuu

SEQ ID NO: 595574 - RNA, 19 nt, Artificial Sequence
  Description of Artificial Sequence: Synthetic oligonucleotide
  Sense strand starting at position 3550 of SEQ ID NO: 584867
auaagauucuggguugagu

SEQ ID NO: 595575 - RNA, 19 nt, Artificial Sequence
  Description of Artificial Sequence: Synthetic oligonucleotide
  Antisense strand to SEQ ID NO: 595574
acucaacccagaaucuuau

SEQ ID NO: 595576 - RNA, 19 nt, Artificial Sequence
  Description of Artificial Sequence: Synthetic oligonucleotide
  Sense strand starting at position 3559 of SEQ ID NO: 584867
uggguugaguggcuuauga

SEQ ID NO: 595577 - RNA, 19 nt, Artificial Sequence
  Description of Artificial Sequence: Synthetic oligonucleotide
  Antisense strand to SEQ ID NO: 595576
ucauaagccacucaaccca

SEQ ID NO: 595578 - RNA, 19 nt, Artificial Sequence
  Description of Artificial Sequence: Synthetic oligonucleotide
  Sense strand starting at position 3567 of SEQ ID NO: 584867
guggcuuaugaggguaaau

SEQ ID NO: 595579 - RNA, 19 nt, Artificial Sequence
  Description of Artificial Sequence: Synthetic oligonucleotide
  Antisense strand to SEQ ID NO: 595578
auuuacccucauaagccac

SEQ ID NO: 595580 - RNA, 19 nt, Artificial Sequence
  Description of Artificial Sequence: Synthetic oligonucleotide
  Sense strand starting at position 3580 of SEQ ID NO: 584867
guaaauacaucaguauuag

SEQ ID NO: 595581 - RNA, 19 nt, Artificial Sequence
  Description of Artificial Sequence: Synthetic oligonucleotide
  Antisense strand to SEQ ID NO: 595580
cuaauacugauguauuuac

SEQ ID NO: 595582 - RNA, 19 nt, Artificial Sequence
  Description of Artificial Sequence: Synthetic oligonucleotide
  Sense strand starting at position 3592 of SEQ ID NO: 584867
guauuagaacuguauguau

SEQ ID NO: 595583 - RNA, 19 nt, Artificial Sequence
  Description of Artificial Sequence: Synthetic oligonucleotide
  Antisense strand to SEQ ID NO: 595582
auacauacaguucuaauac

SEQ ID NO: 595584 - RNA, 19 nt, Artificial Sequence
  Description of Artificial Sequence: Synthetic oligonucleotide
  Sense strand starting at position 3607 of SEQ ID NO: 584867
guauaugaauuccaaacag

SEQ ID NO: 595585 - RNA, 19 nt, Artificial Sequence
  Description of Artificial Sequence: Synthetic oligonucleotide
  Antisense strand to SEQ ID NO: 595584
cuguuuggaauucauauac

SEQ ID NO: 595586 - RNA, 19 nt, Artificial Sequence
  Description of Artificial Sequence: Synthetic oligonucleotide
  Sense strand starting at position 3732 of SEQ ID NO: 584867
ggcccagggcuuugaagua

SEQ ID NO: 595587 - RNA, 19 nt, Artificial Sequence
  Description of Artificial Sequence: Synthetic oligonucleotide
  Antisense strand to SEQ ID NO: 595586
uacuucaaagcccugggcc

SEQ ID NO: 595588 - RNA, 19 nt, Artificial Sequence
  Description of Artificial Sequence: Synthetic oligonucleotide
  Sense strand starting at position 3904 of SEQ ID NO: 584867
guuagauaguaacaaccua

SEQ ID NO: 595589 - RNA, 19 nt, Artificial Sequence
  Description of Artificial Sequence: Synthetic oligonucleotide
  Antisense strand to SEQ ID NO: 595588
uagguuguuacuaucuaac

SEQ ID NO: 595590 - RNA, 19 nt, Artificial Sequence
  Description of Artificial Sequence: Synthetic oligonucleotide
  Sense strand starting at position 3972 of SEQ ID NO: 584867
uggcaagguucuuuaugga

SEQ ID NO: 595591 - RNA, 19 nt, Artificial Sequence
  Description of Artificial Sequence: Synthetic oligonucleotide
  Antisense strand to SEQ ID NO: 595590
uccauaaagaaccuugcca

SEQ ID NO: 595592 - RNA, 19 nt, Artificial Sequence
  Description of Artificial Sequence: Synthetic oligonucleotide
  Sense strand starting at position 219 of SEQ ID NO: 584868
agacaaggaugccaguuau

SEQ ID NO: 595593 - RNA, 19 nt, Artificial Sequence
  Description of Artificial Sequence: Synthetic oligonucleotide
  Antisense strand to SEQ ID NO: 595592
auaacuggcauccuugucu

SEQ ID NO: 595594 - RNA, 19 nt, Artificial Sequence
  Description of Artificial Sequence: Synthetic oligonucleotide
  Sense strand starting at position 332 of SEQ ID NO: 584868
ggguucuugggcugagaac

SEQ ID NO: 595595 - RNA, 19 nt, Artificial Sequence
  Description of Artificial Sequence: Synthetic oligonucleotide
  Antisense strand to SEQ ID NO: 595594
guucucagcccaagaaccc

SEQ ID NO: 595596 - RNA, 19 nt, Artificial Sequence
  Description of Artificial Sequence: Synthetic oligonucleotide
  Sense strand starting at position 500 of SEQ ID NO: 584868
agcacugugccugagugua

SEQ ID NO: 595597 - RNA, 19 nt, Artificial Sequence
  Description of Artificial Sequence: Synthetic oligonucleotide
  Antisense strand to SEQ ID NO: 595596
uacacucaggcacagugcu

SEQ ID NO: 595598 - RNA, 19 nt, Artificial Sequence
  Description of Artificial Sequence: Synthetic oligonucleotide
  Sense strand starting at position 517 of SEQ ID NO: 584868
uaguguaaacuugaacugu

SEQ ID NO: 595599 - RNA, 19 nt, Artificial Sequence
  Description of Artificial Sequence: Synthetic oligonucleotide
  Antisense strand to SEQ ID NO: 595598
acaguucaaguuuacacua

SEQ ID NO: 595600 - RNA, 19 nt, Artificial Sequence
  Description of Artificial Sequence: Synthetic oligonucleotide
  Sense strand starting at position 528 of SEQ ID NO: 584868
ugaacuguccauuagggua

SEQ ID NO: 595601 - RNA, 19 nt, Artificial Sequence
  Description of Artificial Sequence: Synthetic oligonucleotide
  Antisense strand to SEQ ID NO: 595600
uacccuaauggacaguuca

SEQ ID NO: 595602 - RNA, 19 nt, Artificial Sequence
  Description of Artificial Sequence: Synthetic oligonucleotide
  Sense strand starting at position 533 of SEQ ID NO: 584868
uguccauuaggguaucuau

SEQ ID NO: 595603 - RNA, 19 nt, Artificial Sequence
  Description of Artificial Sequence: Synthetic oligonucleotide
  Antisense strand to SEQ ID NO: 595602
auagauacccuaauggaca

SEQ ID NO: 595604 - RNA, 19 nt, Artificial Sequence
  Description of Artificial Sequence: Synthetic oligonucleotide
  Sense strand starting at position 544 of SEQ ID NO: 584868
guaucuauccacuagcuau

SEQ ID NO: 595605 - RNA, 19 nt, Artificial Sequence
  Description of Artificial Sequence: Synthetic oligonucleotide
  Antisense strand to SEQ ID NO: 595604
auagcuaguggauagauac

SEQ ID NO: 595606 - RNA, 19 nt, Artificial Sequence
  Description of Artificial Sequence: Synthetic oligonucleotide
  Sense strand starting at position 774 of SEQ ID NO: 584868
cagggucuugcgccuguaa

SEQ ID NO: 595607 - RNA, 19 nt, Artificial Sequence
  Description of Artificial Sequence: Synthetic oligonucleotide
  Antisense strand to SEQ ID NO: 595606
uuacaggcgcaagacccug

SEQ ID NO: 595608 - RNA, 19 nt, Artificial Sequence
  Description of Artificial Sequence: Synthetic oligonucleotide
  Sense strand starting at position 775 of SEQ ID NO: 584868
agggucuugcgccuguaau

SEQ ID NO: 595609 - RNA, 19 nt, Artificial Sequence
  Description of Artificial Sequence: Synthetic oligonucleotide
  Antisense strand to SEQ ID NO: 595608
auuacaggcgcaagacccu

SEQ ID NO: 595610 - RNA, 19 nt, Artificial Sequence
  Description of Artificial Sequence: Synthetic oligonucleotide
  Sense strand starting at position 777 of SEQ ID NO: 584868
ggucuugcgccuguaauug

SEQ ID NO: 595611 - RNA, 19 nt, Artificial Sequence
  Description of Artificial Sequence: Synthetic oligonucleotide
  Antisense strand to SEQ ID NO: 595610
caauuacaggcgcaagacc

SEQ ID NO: 595612 - RNA, 19 nt, Artificial Sequence
  Description of Artificial Sequence: Synthetic oligonucleotide
  Sense strand starting at position 783 of SEQ ID NO: 584868
gcgccuguaauugcagaua

SEQ ID NO: 595613 - RNA, 19 nt, Artificial Sequence
  Description of Artificial Sequence: Synthetic oligonucleotide
  Antisense strand to SEQ ID NO: 595612
uaucugcaauuacaggcgc

SEQ ID NO: 595614 - RNA, 19 nt, Artificial Sequence
  Description of Artificial Sequence: Synthetic oligonucleotide
  Sense strand starting at position 795 of SEQ ID NO: 584868
gcagauauuugggaggcca

SEQ ID NO: 595615 - RNA, 19 nt, Artificial Sequence
  Description of Artificial Sequence: Synthetic oligonucleotide
  Antisense strand to SEQ ID NO: 595614
uggccucccaaauaucugc

SEQ ID NO: 595616 - RNA, 19 nt, Artificial Sequence
  Description of Artificial Sequence: Synthetic oligonucleotide
  Sense strand starting at position 826 of SEQ ID NO: 584868
ccuuaacagcuaggaguuu

SEQ ID NO: 595617 - RNA, 19 nt, Artificial Sequence
  Description of Artificial Sequence: Synthetic oligonucleotide
  Antisense strand to SEQ ID NO: 595616
aaacuccuagcuguuaagg

SEQ ID NO: 595618 - RNA, 19 nt, Artificial Sequence
  Description of Artificial Sequence: Synthetic oligonucleotide
  Sense strand starting at position 1026 of SEQ ID NO: 584868
cuggcaacagagcaauaua

SEQ ID NO: 595619 - RNA, 19 nt, Artificial Sequence
  Description of Artificial Sequence: Synthetic oligonucleotide
  Antisense strand to SEQ ID NO: 595618
uauauugcucuguugccag

SEQ ID NO: 595620 - RNA, 19 nt, Artificial Sequence
  Description of Artificial Sequence: Synthetic oligonucleotide
  Sense strand starting at position 1254 of SEQ ID NO: 584868
uccuuucugagaggugaca

SEQ ID NO: 595621 - RNA, 19 nt, Artificial Sequence
  Description of Artificial Sequence: Synthetic oligonucleotide
  Antisense strand to SEQ ID NO: 595620
ugucaccucucagaaagga

SEQ ID NO: 595622 - RNA, 19 nt, Artificial Sequence
  Description of Artificial Sequence: Synthetic oligonucleotide
  Sense strand starting at position 1597 of SEQ ID NO: 584868
gccaucaaugcagagauca

SEQ ID NO: 595623 - RNA, 19 nt, Artificial Sequence
  Description of Artificial Sequence: Synthetic oligonucleotide
  Antisense strand to SEQ ID NO: 595622
ugaucucugcauugauggc

SEQ ID NO: 595624 - RNA, 19 nt, Artificial Sequence
  Description of Artificial Sequence: Synthetic oligonucleotide
  Sense strand starting at position 1671 of SEQ ID NO: 584868
ucaguugucccuggauucu

SEQ ID NO: 595625 - RNA, 19 nt, Artificial Sequence
  Description of Artificial Sequence: Synthetic oligonucleotide
  Antisense strand to SEQ ID NO: 595624
agaauccagggacaacuga

SEQ ID NO: 595626 - RNA, 19 nt, Artificial Sequence
  Description of Artificial Sequence: Synthetic oligonucleotide
  Sense strand starting at position 1733 of SEQ ID NO: 584868
ucgggacacucgagguaaa

SEQ ID NO: 595627 - RNA, 19 nt, Artificial Sequence
  Description of Artificial Sequence: Synthetic oligonucleotide
  Antisense strand to SEQ ID NO: 595626
uuuaccucgagugucccga

SEQ ID NO: 595628 - RNA, 19 nt, Artificial Sequence
  Description of Artificial Sequence: Synthetic oligonucleotide
  Sense strand starting at position 2120 of SEQ ID NO: 584868
caguuuagagcccaggauu

SEQ ID NO: 595629 - RNA, 19 nt, Artificial Sequence
  Description of Artificial Sequence: Synthetic oligonucleotide
  Antisense strand to SEQ ID NO: 595628
aauccugggcucuaaacug

SEQ ID NO: 595630 - RNA, 19 nt, Artificial Sequence
  Description of Artificial Sequence: Synthetic oligonucleotide
  Sense strand starting at position 2176 of SEQ ID NO: 584868
ccuuauuucucagcuguua

SEQ ID NO: 595631 - RNA, 19 nt, Artificial Sequence
  Description of Artificial Sequence: Synthetic oligonucleotide
  Antisense strand to SEQ ID NO: 595630
uaacagcugagaaauaagg

SEQ ID NO: 595632 - RNA, 19 nt, Artificial Sequence
  Description of Artificial Sequence: Synthetic oligonucleotide
  Sense strand starting at position 2187 of SEQ ID NO: 584868
agcuguuacuagguagaau

SEQ ID NO: 595633 - RNA, 19 nt, Artificial Sequence
  Description of Artificial Sequence: Synthetic oligonucleotide
  Antisense strand to SEQ ID NO: 595632
auucuaccuaguaacagcu

SEQ ID NO: 595634 - RNA, 19 nt, Artificial Sequence
  Description of Artificial Sequence: Synthetic oligonucleotide
  Sense strand starting at position 2188 of SEQ ID NO: 584868
gcuguuacuagguagaaua

SEQ ID NO: 595635 - RNA, 19 nt, Artificial Sequence
  Description of Artificial Sequence: Synthetic oligonucleotide
  Antisense strand to SEQ ID NO: 595634
uauucuaccuaguaacagc

SEQ ID NO: 595636 - RNA, 19 nt, Artificial Sequence
  Description of Artificial Sequence: Synthetic oligonucleotide
  Sense strand starting at position 2251 of SEQ ID NO: 584868
uugggauuauuagguauuu

SEQ ID NO: 595637 - RNA, 19 nt, Artificial Sequence
  Description of Artificial Sequence: Synthetic oligonucleotide
  Antisense strand to SEQ ID NO: 595636
aaauaccuaauaaucccaa

SEQ ID NO: 595638 - RNA, 19 nt, Artificial Sequence
  Description of Artificial Sequence: Synthetic oligonucleotide
  Sense strand starting at position 2284 of SEQ ID NO: 584868
ugucuuuggaagcaagacu

SEQ ID NO: 595639 - RNA, 19 nt, Artificial Sequence
  Description of Artificial Sequence: Synthetic oligonucleotide
  Antisense strand to SEQ ID NO: 595638
agucuugcuuccaaagaca

SEQ ID NO: 595640 - RNA, 19 nt, Artificial Sequence
  Description of Artificial Sequence: Synthetic oligonucleotide
  Sense strand starting at position 2628 of SEQ ID NO: 584868
uuuacaaagccuugagauc

SEQ ID NO: 595641 - RNA, 19 nt, Artificial Sequence
  Description of Artificial Sequence: Synthetic oligonucleotide
  Antisense strand to SEQ ID NO: 595640
gaucucaaggcuuuguaaa

SEQ ID NO: 595642 - RNA, 19 nt, Artificial Sequence
  Description of Artificial Sequence: Synthetic oligonucleotide
  Sense strand starting at position 2659 of SEQ ID NO: 584868
guggcuuugcugguguaga

SEQ ID NO: 595643 - RNA, 19 nt, Artificial Sequence
  Description of Artificial Sequence: Synthetic oligonucleotide
  Antisense strand to SEQ ID NO: 595642
ucuacaccagcaaagccac

SEQ ID NO: 595644 - RNA, 19 nt, Artificial Sequence
  Description of Artificial Sequence: Synthetic oligonucleotide
  Sense strand starting at position 2688 of SEQ ID NO: 584868
gcucucuauguagagugau

SEQ ID NO: 595645 - RNA, 19 nt, Artificial Sequence
  Description of Artificial Sequence: Synthetic oligonucleotide
  Antisense strand to SEQ ID NO: 595644
aucacucuacauagagagc

SEQ ID NO: 595646 - RNA, 19 nt, Artificial Sequence
  Description of Artificial Sequence: Synthetic oligonucleotide
  Sense strand starting at position 2924 of SEQ ID NO: 584868
auaagacgugcugagaaua

SEQ ID NO: 595647 - RNA, 19 nt, Artificial Sequence
  Description of Artificial Sequence: Synthetic oligonucleotide
  Antisense strand to SEQ ID NO: 595646
uauucucagcacgucuuau

SEQ ID NO: 595648 - RNA, 19 nt, Artificial Sequence
  Description of Artificial Sequence: Synthetic oligonucleotide
  Sense strand starting at position 2939 of SEQ ID NO: 584868
aauacugagugaggauuaa

SEQ ID NO: 595649 - RNA, 19 nt, Artificial Sequence
  Description of Artificial Sequence: Synthetic oligonucleotide
  Antisense strand to SEQ ID NO: 595648
uuaauccucacucaguauu

SEQ ID NO: 595650 - RNA, 19 nt, Artificial Sequence
  Description of Artificial Sequence: Synthetic oligonucleotide
  Sense strand starting at position 3135 of SEQ ID NO: 584868
ccaaucuugucauuguaua

SEQ ID NO: 595651 - RNA, 19 nt, Artificial Sequence
  Description of Artificial Sequence: Synthetic oligonucleotide
  Antisense strand to SEQ ID NO: 595650
uauacaaugacaagauugg

SEQ ID NO: 595652 - RNA, 19 nt, Artificial Sequence
  Description of Artificial Sequence: Synthetic oligonucleotide
  Sense strand starting at position 3140 of SEQ ID NO: 584868
cuugucauuguauagauau

SEQ ID NO: 595653 - RNA, 19 nt, Artificial Sequence
  Description of Artificial Sequence: Synthetic oligonucleotide
  Antisense strand to SEQ ID NO: 595652
auaucuauacaaugacaag

SEQ ID NO: 595654 - RNA, 19 nt, Artificial Sequence
  Description of Artificial Sequence: Synthetic oligonucleotide
  Sense strand starting at position 3178 of SEQ ID NO: 584868
aaggcccaguugucaauaa

SEQ ID NO: 595655 - RNA, 19 nt, Artificial Sequence
  Description of Artificial Sequence: Synthetic oligonucleotide
  Antisense strand to SEQ ID NO: 595654
uuauugacaacugggccuu

SEQ ID NO: 595656 - RNA, 19 nt, Artificial Sequence
  Description of Artificial Sequence: Synthetic oligonucleotide
  Sense strand starting at position 3210 of SEQ ID NO: 584868
cuaaauacuuagucuggaa

SEQ ID NO: 595657 - RNA, 19 nt, Artificial Sequence
  Description of Artificial Sequence: Synthetic oligonucleotide
  Antisense strand to SEQ ID NO: 595656
uuccagacuaaguauuuag

SEQ ID NO: 595658 - RNA, 19 nt, Artificial Sequence
  Description of Artificial Sequence: Synthetic oligonucleotide
  Sense strand starting at position 3550 of SEQ ID NO: 584868
auaaaugcuuagucuagag

SEQ ID NO: 595659 - RNA, 19 nt, Artificial Sequence
  Description of Artificial Sequence: Synthetic oligonucleotide
  Antisense strand to SEQ ID NO: 595658
cucuagacuaagcauuuau

SEQ ID NO: 595660 - RNA, 19 nt, Artificial Sequence
  Description of Artificial Sequence: Synthetic oligonucleotide
  Sense strand starting at position 3698 of SEQ ID NO: 584868
acuugaauugcuugcucca

SEQ ID NO: 595661 - RNA, 19 nt, Artificial Sequence
  Description of Artificial Sequence: Synthetic oligonucleotide
  Antisense strand to SEQ ID NO: 595660
uggagcaagcaauucaagu

SEQ ID NO: 595662 - RNA, 19 nt, Artificial Sequence
  Description of Artificial Sequence: Synthetic oligonucleotide
  Sense strand starting at position 3775 of SEQ ID NO: 584868
gaaugcuccugccugaagu

SEQ ID NO: 595663 - RNA, 19 nt, Artificial Sequence
  Description of Artificial Sequence: Synthetic oligonucleotide
  Antisense strand to SEQ ID NO: 595662
acuucaggcaggagcauuc

SEQ ID NO: 595664 - RNA, 19 nt, Artificial Sequence
  Description of Artificial Sequence: Synthetic oligonucleotide
  Sense strand starting at position 3847 of SEQ ID NO: 584868
cuauuauuguuauccaggu

SEQ ID NO: 595665 - RNA, 19 nt, Artificial Sequence
  Description of Artificial Sequence: Synthetic oligonucleotide
  Antisense strand to SEQ ID NO: 595664
accuggauaacaauaauag

SEQ ID NO: 595666 - RNA, 19 nt, Artificial Sequence
  Description of Artificial Sequence: Synthetic oligonucleotide
  Sense strand starting at position 3860 of SEQ ID NO: 584868
ccagguaucaacugugucu

SEQ ID NO: 595667 - RNA, 19 nt, Artificial Sequence
  Description of Artificial Sequence: Synthetic oligonucleotide
  Antisense strand to SEQ ID NO: 595666
agacacaguugauaccugg

SEQ ID NO: 595668 - RNA, 19 nt, Artificial Sequence
  Description of Artificial Sequence: Synthetic oligonucleotide
  Sense strand starting at position 3877 of SEQ ID NO: 584868
cuuugcugugacuggagua

SEQ ID NO: 595669 - RNA, 19 nt, Artificial Sequence
  Description of Artificial Sequence: Synthetic oligonucleotide
  Antisense strand to SEQ ID NO: 595668
uacuccagucacagcaaag

SEQ ID NO: 595670 - RNA, 19 nt, Artificial Sequence
  Description of Artificial Sequence: Synthetic oligonucleotide
  Sense strand starting at position 3893 of SEQ ID NO: 584868
guaccuguuccucaggaca

SEQ ID NO: 595671 - RNA, 19 nt, Artificial Sequence
  Description of Artificial Sequence: Synthetic oligonucleotide
  Antisense strand to SEQ ID NO: 595670
uguccugaggaacagguac

SEQ ID NO: 595672 - RNA, 19 nt, Artificial Sequence
  Description of Artificial Sequence: Synthetic oligonucleotide
  Sense strand starting at position 217 of SEQ ID NO: 584869
ggguucuugggcugagaac

SEQ ID NO: 595673 - RNA, 19 nt, Artificial Sequence
  Description of Artificial Sequence: Synthetic oligonucleotide
  Antisense strand to SEQ ID NO: 595672
guucucagcccaagaaccc

SEQ ID NO: 595674 - RNA, 19 nt, Artificial Sequence
  Description of Artificial Sequence: Synthetic oligonucleotide
  Sense strand starting at position 385 of SEQ ID NO: 584869
agcacugugccugagugua

SEQ ID NO: 595675 - RNA, 19 nt, Artificial Sequence
  Description of Artificial Sequence: Synthetic oligonucleotide
  Antisense strand to SEQ ID NO: 595674
uacacucaggcacagugcu

SEQ ID NO: 595676 - RNA, 19 nt, Artificial Sequence
  Description of Artificial Sequence: Synthetic oligonucleotide
  Sense strand starting at position 402 of SEQ ID NO: 584869
uaguguaaacuugaacugu

SEQ ID NO: 595677 - RNA, 19 nt, Artificial Sequence
  Description of Artificial Sequence: Synthetic oligonucleotide
  Antisense strand to SEQ ID NO: 595676
acaguucaaguuuacacua

SEQ ID NO: 595678 - RNA, 19 nt, Artificial Sequence
  Description of Artificial Sequence: Synthetic oligonucleotide
  Sense strand starting at position 413 of SEQ ID NO: 584869
ugaacuguccauuagggua

SEQ ID NO: 595679 - RNA, 19 nt, Artificial Sequence
  Description of Artificial Sequence: Synthetic oligonucleotide
  Antisense strand to SEQ ID NO: 595678
uacccuaauggacaguuca

SEQ ID NO: 595680 - RNA, 19 nt, Artificial Sequence
  Description of Artificial Sequence: Synthetic oligonucleotide
  Sense strand starting at position 418 of SEQ ID NO: 584869
uguccauuaggguaucuau

SEQ ID NO: 595681 - RNA, 19 nt, Artificial Sequence
  Description of Artificial Sequence: Synthetic oligonucleotide
  Antisense strand to SEQ ID NO: 595680
auagauacccuaauggaca

SEQ ID NO: 595682 - RNA, 19 nt, Artificial Sequence
  Description of Artificial Sequence: Synthetic oligonucleotide
  Sense strand starting at position 429 of SEQ ID NO: 584869
guaucuauccacuagcuau

SEQ ID NO: 595683 - RNA, 19 nt, Artificial Sequence
  Description of Artificial Sequence: Synthetic oligonucleotide
  Antisense strand to SEQ ID NO: 595682
auagcuaguggauagauac

SEQ ID NO: 595684 - RNA, 19 nt, Artificial Sequence
  Description of Artificial Sequence: Synthetic oligonucleotide
  Sense strand starting at position 659 of SEQ ID NO: 584869
cagggucuugcgccuguaa

SEQ ID NO: 595685 - RNA, 19 nt, Artificial Sequence
  Description of Artificial Sequence: Synthetic oligonucleotide
  Antisense strand to SEQ ID NO: 595684
uuacaggcgcaagacccug

SEQ ID NO: 595686 - RNA, 19 nt, Artificial Sequence
  Description of Artificial Sequence: Synthetic oligonucleotide
  Sense strand starting at position 660 of SEQ ID NO: 584869
agggucuugcgccuguaau

SEQ ID NO: 595687 - RNA, 19 nt, Artificial Sequence
  Description of Artificial Sequence: Synthetic oligonucleotide
  Antisense strand to SEQ ID NO: 595686
auuacaggcgcaagacccu

SEQ ID NO: 595688 - RNA, 19 nt, Artificial Sequence
  Description of Artificial Sequence: Synthetic oligonucleotide
  Sense strand starting at position 662 of SEQ ID NO: 584869
ggucuugcgccuguaauug

SEQ ID NO: 595689 - RNA, 19 nt, Artificial Sequence
  Description of Artificial Sequence: Synthetic oligonucleotide
  Antisense strand to SEQ ID NO: 595688
caauuacaggcgcaagacc

SEQ ID NO: 595690 - RNA, 19 nt, Artificial Sequence
  Description of Artificial Sequence: Synthetic oligonucleotide
  Sense strand starting at position 668 of SEQ ID NO: 584869
gcgccuguaauugcagaua

SEQ ID NO: 595691 - RNA, 19 nt, Artificial Sequence
  Description of Artificial Sequence: Synthetic oligonucleotide
  Antisense strand to SEQ ID NO: 595690
uaucugcaauuacaggcgc

SEQ ID NO: 595692 - RNA, 19 nt, Artificial Sequence
  Description of Artificial Sequence: Synthetic oligonucleotide
  Sense strand starting at position 680 of SEQ ID NO: 584869
gcagauauuugggaggcca

SEQ ID NO: 595693 - RNA, 19 nt, Artificial Sequence
  Description of Artificial Sequence: Synthetic oligonucleotide
  Antisense strand to SEQ ID NO: 595692
uggccucccaaauaucugc

SEQ ID NO: 595694 - RNA, 19 nt, Artificial Sequence
  Description of Artificial Sequence: Synthetic oligonucleotide
  Sense strand starting at position 711 of SEQ ID NO: 584869
ccuuaacagcuaggaguuu

SEQ ID NO: 595695 - RNA, 19 nt, Artificial Sequence
  Description of Artificial Sequence: Synthetic oligonucleotide
  Antisense strand to SEQ ID NO: 595694
aaacuccuagcuguuaagg

SEQ ID NO: 595696 - RNA, 19 nt, Artificial Sequence
  Description of Artificial Sequence: Synthetic oligonucleotide
  Sense strand starting at position 911 of SEQ ID NO: 584869
cuggcaacagagcaauaua

SEQ ID NO: 595697 - RNA, 19 nt, Artificial Sequence
  Description of Artificial Sequence: Synthetic oligonucleotide
  Antisense strand to SEQ ID NO: 595696
uauauugcucuguugccag

SEQ ID NO: 595698 - RNA, 19 nt, Artificial Sequence
  Description of Artificial Sequence: Synthetic oligonucleotide
  Sense strand starting at position 1139 of SEQ ID NO: 584869
uccuuucugagaggugaca

SEQ ID NO: 595699 - RNA, 19 nt, Artificial Sequence
  Description of Artificial Sequence: Synthetic oligonucleotide
  Antisense strand to SEQ ID NO: 595698
ugucaccucucagaaagga

SEQ ID NO: 595700 - RNA, 19 nt, Artificial Sequence
  Description of Artificial Sequence: Synthetic oligonucleotide
  Sense strand starting at position 1482 of SEQ ID NO: 584869
gccaucaaugcagagauca

SEQ ID NO: 595701 - RNA, 19 nt, Artificial Sequence
  Description of Artificial Sequence: Synthetic oligonucleotide
  Antisense strand to SEQ ID NO: 595700
ugaucucugcauugauggc

SEQ ID NO: 595702 - RNA, 19 nt, Artificial Sequence
  Description of Artificial Sequence: Synthetic oligonucleotide
  Sense strand starting at position 1556 of SEQ ID NO: 584869
ucaguugucccuggauucu

SEQ ID NO: 595703 - RNA, 19 nt, Artificial Sequence
  Description of Artificial Sequence: Synthetic oligonucleotide
  Antisense strand to SEQ ID NO: 595702
agaauccagggacaacuga

SEQ ID NO: 595704 - RNA, 19 nt, Artificial Sequence
  Description of Artificial Sequence: Synthetic oligonucleotide
  Sense strand starting at position 1618 of SEQ ID NO: 584869
ucgggacacucgagguaaa

SEQ ID NO: 595705 - RNA, 19 nt, Artificial Sequence
  Description of Artificial Sequence: Synthetic oligonucleotide
  Antisense strand to SEQ ID NO: 595704
uuuaccucgagugucccga

SEQ ID NO: 595706 - RNA, 19 nt, Artificial Sequence
  Description of Artificial Sequence: Synthetic oligonucleotide
  Sense strand starting at position 2005 of SEQ ID NO: 584869
caguuuagagcccaggauu

SEQ ID NO: 595707 - RNA, 19 nt, Artificial Sequence
  Description of Artificial Sequence: Synthetic oligonucleotide
  Antisense strand to SEQ ID NO: 595706
aauccugggcucuaaacug

SEQ ID NO: 595708 - RNA, 19 nt, Artificial Sequence
  Description of Artificial Sequence: Synthetic oligonucleotide
  Sense strand starting at position 2061 of SEQ ID NO: 584869
ccuuauuucucagcuguua

SEQ ID NO: 595709 - RNA, 19 nt, Artificial Sequence
  Description of Artificial Sequence: Synthetic oligonucleotide
  Antisense strand to SEQ ID NO: 595708
uaacagcugagaaauaagg

SEQ ID NO: 595710 - RNA, 19 nt, Artificial Sequence
  Description of Artificial Sequence: Synthetic oligonucleotide
  Sense strand starting at position 2072 of SEQ ID NO: 584869
agcuguuacuagguagaau

SEQ ID NO: 595711 - RNA, 19 nt, Artificial Sequence
  Description of Artificial Sequence: Synthetic oligonucleotide
  Antisense strand to SEQ ID NO: 595710
auucuaccuaguaacagcu

SEQ ID NO: 595712 - RNA, 19 nt, Artificial Sequence
  Description of Artificial Sequence: Synthetic oligonucleotide
  Sense strand starting at position 2073 of SEQ ID NO: 584869
gcuguuacuagguagaaua

SEQ ID NO: 595713 - RNA, 19 nt, Artificial Sequence
  Description of Artificial Sequence: Synthetic oligonucleotide
  Antisense strand to SEQ ID NO: 595712
uauucuaccuaguaacagc

SEQ ID NO: 595714 - RNA, 19 nt, Artificial Sequence
  Description of Artificial Sequence: Synthetic oligonucleotide
  Sense strand starting at position 2136 of SEQ ID NO: 584869
uugggauuauuagguauuu

SEQ ID NO: 595715 - RNA, 19 nt, Artificial Sequence
  Description of Artificial Sequence: Synthetic oligonucleotide
  Antisense strand to SEQ ID NO: 595714
aaauaccuaauaaucccaa

SEQ ID NO: 595716 - RNA, 19 nt, Artificial Sequence
  Description of Artificial Sequence: Synthetic oligonucleotide
  Sense strand starting at position 2169 of SEQ ID NO: 584869
ugucuuuggaagcaagacu

SEQ ID NO: 595717 - RNA, 19 nt, Artificial Sequence
  Description of Artificial Sequence: Synthetic oligonucleotide
  Antisense strand to SEQ ID NO: 595716
agucuugcuuccaaagaca

SEQ ID NO: 595718 - RNA, 19 nt, Artificial Sequence
  Description of Artificial Sequence: Synthetic oligonucleotide
  Sense strand starting at position 2513 of SEQ ID NO: 584869
uuuacaaagccuugagauc

SEQ ID NO: 595719 - RNA, 19 nt, Artificial Sequence
  Description of Artificial Sequence: Synthetic oligonucleotide
  Antisense strand to SEQ ID NO: 595718
gaucucaaggcuuuguaaa

SEQ ID NO: 595720 - RNA, 19 nt, Artificial Sequence
  Description of Artificial Sequence: Synthetic oligonucleotide
  Sense strand starting at position 2544 of SEQ ID NO: 584869
guggcuuugcugguguaga

SEQ ID NO: 595721 - RNA, 19 nt, Artificial Sequence
  Description of Artificial Sequence: Synthetic oligonucleotide
  Antisense strand to SEQ ID NO: 595720
ucuacaccagcaaagccac

SEQ ID NO: 595722 - RNA, 19 nt, Artificial Sequence
  Description of Artificial Sequence: Synthetic oligonucleotide
  Sense strand starting at position 2573 of SEQ ID NO: 584869
gcucucuauguagagugau

SEQ ID NO: 595723 - RNA, 19 nt, Artificial Sequence
  Description of Artificial Sequence: Synthetic oligonucleotide
  Antisense strand to SEQ ID NO: 595722
aucacucuacauagagagc

SEQ ID NO: 595724 - RNA, 19 nt, Artificial Sequence
  Description of Artificial Sequence: Synthetic oligonucleotide
  Sense strand starting at position 2809 of SEQ ID NO: 584869
auaagacgugcugagaaua

SEQ ID NO: 595725 - RNA, 19 nt, Artificial Sequence
  Description of Artificial Sequence: Synthetic oligonucleotide
  Antisense strand to SEQ ID NO: 595724
uauucucagcacgucuuau

SEQ ID NO: 595726 - RNA, 19 nt, Artificial Sequence
  Description of Artificial Sequence: Synthetic oligonucleotide
  Sense strand starting at position 2824 of SEQ ID NO: 584869
aauacugagugaggauuaa

SEQ ID NO: 595727 - RNA, 19 nt, Artificial Sequence
  Description of Artificial Sequence: Synthetic oligonucleotide
  Antisense strand to SEQ ID NO: 595726
uuaauccucacucaguauu

SEQ ID NO: 595728 - RNA, 19 nt, Artificial Sequence
  Description of Artificial Sequence: Synthetic oligonucleotide
  Sense strand starting at position 3020 of SEQ ID NO: 584869
ccaaucuugucauuguaua

SEQ ID NO: 595729 - RNA, 19 nt, Artificial Sequence
  Description of Artificial Sequence: Synthetic oligonucleotide
  Antisense strand to SEQ ID NO: 595728
uauacaaugacaagauugg

SEQ ID NO: 595730 - RNA, 19 nt, Artificial Sequence
  Description of Artificial Sequence: Synthetic oligonucleotide
  Sense strand starting at position 3025 of SEQ ID NO: 584869
cuugucauuguauagauau

SEQ ID NO: 595731 - RNA, 19 nt, Artificial Sequence
  Description of Artificial Sequence: Synthetic oligonucleotide
  Antisense strand to SEQ ID NO: 595730
auaucuauacaaugacaag

SEQ ID NO: 595732 - RNA, 19 nt, Artificial Sequence
  Description of Artificial Sequence: Synthetic oligonucleotide
  Sense strand starting at position 3063 of SEQ ID NO: 584869
aaggcccaguugucaauaa

SEQ ID NO: 595733 - RNA, 19 nt, Artificial Sequence
  Description of Artificial Sequence: Synthetic oligonucleotide
  Antisense strand to SEQ ID NO: 595732
uuauugacaacugggccuu

SEQ ID NO: 595734 - RNA, 19 nt, Artificial Sequence
  Description of Artificial Sequence: Synthetic oligonucleotide
  Sense strand starting at position 3095 of SEQ ID NO: 584869
cuaaauacuuagucuggaa

SEQ ID NO: 595735 - RNA, 19 nt, Artificial Sequence
  Description of Artificial Sequence: Synthetic oligonucleotide
  Antisense strand to SEQ ID NO: 595734
uuccagacuaaguauuuag

SEQ ID NO: 595736 - RNA, 19 nt, Artificial Sequence
  Description of Artificial Sequence: Synthetic oligonucleotide
  Sense strand starting at position 3435 of SEQ ID NO: 584869
auaaaugcuuagucuagag

SEQ ID NO: 595737 - RNA, 19 nt, Artificial Sequence
  Description of Artificial Sequence: Synthetic oligonucleotide
  Antisense strand to SEQ ID NO: 595736
cucuagacuaagcauuuau

SEQ ID NO: 595738 - RNA, 19 nt, Artificial Sequence
  Description of Artificial Sequence: Synthetic oligonucleotide
  Sense strand starting at position 3583 of SEQ ID NO: 584869
acuugaauugcuugcucca

SEQ ID NO: 595739 - RNA, 19 nt, Artificial Sequence
  Description of Artificial Sequence: Synthetic oligonucleotide
  Antisense strand to SEQ ID NO: 595738
uggagcaagcaauucaagu

SEQ ID NO: 595740 - RNA, 19 nt, Artificial Sequence
  Description of Artificial Sequence: Synthetic oligonucleotide
  Sense strand starting at position 3660 of SEQ ID NO: 584869
gaaugcuccugccugaagu

SEQ ID NO: 595741 - RNA, 19 nt, Artificial Sequence
  Description of Artificial Sequence: Synthetic oligonucleotide
  Antisense strand to SEQ ID NO: 595740
acuucaggcaggagcauuc

SEQ ID NO: 595742 - RNA, 19 nt, Artificial Sequence
  Description of Artificial Sequence: Synthetic oligonucleotide
  Sense strand starting at position 3732 of SEQ ID NO: 584869
cuauuauuguuauccaggu

SEQ ID NO: 595743 - RNA, 19 nt, Artificial Sequence
  Description of Artificial Sequence: Synthetic oligonucleotide
  Antisense strand to SEQ ID NO: 595742
accuggauaacaauaauag

SEQ ID NO: 595744 - RNA, 19 nt, Artificial Sequence
  Description of Artificial Sequence: Synthetic oligonucleotide
  Sense strand starting at position 3745 of SEQ ID NO: 584869
ccagguaucaacugugucu

SEQ ID NO: 595745 - RNA, 19 nt, Artificial Sequence
  Description of Artificial Sequence: Synthetic oligonucleotide
  Antisense strand to SEQ ID NO: 595744
agacacaguugauaccugg

SEQ ID NO: 595746 - RNA, 19 nt, Artificial Sequence
  Description of Artificial Sequence: Synthetic oligonucleotide
  Sense strand starting at position 3762 of SEQ ID NO: 584869
cuuugcugugacuggagua

SEQ ID NO: 595747 - RNA, 19 nt, Artificial Sequence
  Description of Artificial Sequence: Synthetic oligonucleotide
  Antisense strand to SEQ ID NO: 595746
uacuccagucacagcaaag

SEQ ID NO: 595748 - RNA, 19 nt, Artificial Sequence
  Description of Artificial Sequence: Synthetic oligonucleotide
  Sense strand starting at position 3778 of SEQ ID NO: 584869
guaccuguuccucaggaca

SEQ ID NO: 595749 - RNA, 19 nt, Artificial Sequence
  Description of Artificial Sequence: Synthetic oligonucleotide
  Antisense strand to SEQ ID NO: 595748
uguccugaggaacagguac

SEQ ID NO: 595750 - RNA, 19 nt, Artificial Sequence
  Description of Artificial Sequence: Synthetic oligonucleotide
  Sense strand starting at position 3926 of SEQ ID NO: 584869
ggaaucauucggcaccaga

SEQ ID NO: 595751 - RNA, 19 nt, Artificial Sequence
  Description of Artificial Sequence: Synthetic oligonucleotide
  Antisense strand to SEQ ID NO: 595750
ucuggugccgaaugauucc

SEQ ID NO: 595752 - RNA, 19 nt, Artificial Sequence
  Description of Artificial Sequence: Synthetic oligonucleotide
  Sense strand starting at position 222 of SEQ ID NO: 584870
ggguucuugggcugagaac

SEQ ID NO: 595753 - RNA, 19 nt, Artificial Sequence
  Description of Artificial Sequence: Synthetic oligonucleotide
  Antisense strand to SEQ ID NO: 595752
guucucagcccaagaaccc

SEQ ID NO: 595754 - RNA, 19 nt, Artificial Sequence
  Description of Artificial Sequence: Synthetic oligonucleotide
  Sense strand starting at position 390 of SEQ ID NO: 584870
agcacugugccugagugua

SEQ ID NO: 595755 - RNA, 19 nt, Artificial Sequence
  Description of Artificial Sequence: Synthetic oligonucleotide
  Antisense strand to SEQ ID NO: 595754
uacacucaggcacagugcu

SEQ ID NO: 595756 - RNA, 19 nt, Artificial Sequence
  Description of Artificial Sequence: Synthetic oligonucleotide
  Sense strand starting at position 407 of SEQ ID NO: 584870
uaguguaaacuugaacugu

SEQ ID NO: 595757 - RNA, 19 nt, Artificial Sequence
  Description of Artificial Sequence: Synthetic oligonucleotide
  Antisense strand to SEQ ID NO: 595756
acaguucaaguuuacacua

SEQ ID NO: 595758 - RNA, 19 nt, Artificial Sequence
  Description of Artificial Sequence: Synthetic oligonucleotide
  Sense strand starting at position 418 of SEQ ID NO: 584870
ugaacuguccauuagggua

SEQ ID NO: 595759 - RNA, 19 nt, Artificial Sequence
  Description of Artificial Sequence: Synthetic oligonucleotide
  Antisense strand to SEQ ID NO: 595758
uacccuaauggacaguuca

SEQ ID NO: 595760 - RNA, 19 nt, Artificial Sequence
  Description of Artificial Sequence: Synthetic oligonucleotide
  Sense strand starting at position 423 of SEQ ID NO: 584870
uguccauuaggguaucuau

SEQ ID NO: 595761 - RNA, 19 nt, Artificial Sequence
  Description of Artificial Sequence: Synthetic oligonucleotide
  Antisense strand to SEQ ID NO: 595760
auagauacccuaauggaca

SEQ ID NO: 595762 - RNA, 19 nt, Artificial Sequence
  Description of Artificial Sequence: Synthetic oligonucleotide
  Sense strand starting at position 434 of SEQ ID NO: 584870
guaucuauccacuagcuau

SEQ ID NO: 595763 - RNA, 19 nt, Artificial Sequence
  Description of Artificial Sequence: Synthetic oligonucleotide
  Antisense strand to SEQ ID NO: 595762
auagcuaguggauagauac

SEQ ID NO: 595764 - RNA, 19 nt, Artificial Sequence
  Description of Artificial Sequence: Synthetic oligonucleotide
  Sense strand starting at position 664 of SEQ ID NO: 584870
cagggucuugcgccuguaa

SEQ ID NO: 595765 - RNA, 19 nt, Artificial Sequence
  Description of Artificial Sequence: Synthetic oligonucleotide
  Antisense strand to SEQ ID NO: 595764
uuacaggcgcaagacccug

SEQ ID NO: 595766 - RNA, 19 nt, Artificial Sequence
  Description of Artificial Sequence: Synthetic oligonucleotide
  Sense strand starting at position 665 of SEQ ID NO: 584870
agggucuugcgccuguaau

SEQ ID NO: 595767 - RNA, 19 nt, Artificial Sequence
  Description of Artificial Sequence: Synthetic oligonucleotide
  Antisense strand to SEQ ID NO: 595766
auuacaggcgcaagacccu

SEQ ID NO: 595768 - RNA, 19 nt, Artificial Sequence
  Description of Artificial Sequence: Synthetic oligonucleotide
  Sense strand starting at position 667 of SEQ ID NO: 584870
ggucuugcgccuguaauug

SEQ ID NO: 595769 - RNA, 19 nt, Artificial Sequence
  Description of Artificial Sequence: Synthetic oligonucleotide
  Antisense strand to SEQ ID NO: 595768
caauuacaggcgcaagacc

SEQ ID NO: 595770 - RNA, 19 nt, Artificial Sequence
  Description of Artificial Sequence: Synthetic oligonucleotide
  Sense strand starting at position 673 of SEQ ID NO: 584870
gcgccuguaauugcagaua

SEQ ID NO: 595771 - RNA, 19 nt, Artificial Sequence
  Description of Artificial Sequence: Synthetic oligonucleotide
  Antisense strand to SEQ ID NO: 595770
uaucugcaauuacaggcgc

SEQ ID NO: 595772 - RNA, 19 nt, Artificial Sequence
  Description of Artificial Sequence: Synthetic oligonucleotide
  Sense strand starting at position 685 of SEQ ID NO: 584870
gcagauauuugggaggcca

SEQ ID NO: 595773 - RNA, 19 nt, Artificial Sequence
  Description of Artificial Sequence: Synthetic oligonucleotide
  Antisense strand to SEQ ID NO: 595772
uggccucccaaauaucugc

SEQ ID NO: 595774 - RNA, 19 nt, Artificial Sequence
  Description of Artificial Sequence: Synthetic oligonucleotide
  Sense strand starting at position 716 of SEQ ID NO: 584870
ccuuaacagcuaggaguuu

SEQ ID NO: 595775 - RNA, 19 nt, Artificial Sequence
  Description of Artificial Sequence: Synthetic oligonucleotide
  Antisense strand to SEQ ID NO: 595774
aaacuccuagcuguuaagg

SEQ ID NO: 595776 - RNA, 19 nt, Artificial Sequence
  Description of Artificial Sequence: Synthetic oligonucleotide
  Sense strand starting at position 916 of SEQ ID NO: 584870
cuggcaacagagcaauaua

SEQ ID NO: 595777 - RNA, 19 nt, Artificial Sequence
  Description of Artificial Sequence: Synthetic oligonucleotide
  Antisense strand to SEQ ID NO: 595776
uauauugcucuguugccag

SEQ ID NO: 595778 - RNA, 19 nt, Artificial Sequence
  Description of Artificial Sequence: Synthetic oligonucleotide
  Sense strand starting at position 1144 of SEQ ID NO: 584870
uccuuucugagaggugaca

SEQ ID NO: 595779 - RNA, 19 nt, Artificial Sequence
  Description of Artificial Sequence: Synthetic oligonucleotide
  Antisense strand to SEQ ID NO: 595778
ugucaccucucagaaagga

SEQ ID NO: 595780 - RNA, 19 nt, Artificial Sequence
  Description of Artificial Sequence: Synthetic oligonucleotide
  Sense strand starting at position 1487 of SEQ ID NO: 584870
gccaucaaugcagagauca

SEQ ID NO: 595781 - RNA, 19 nt, Artificial Sequence
  Description of Artificial Sequence: Synthetic oligonucleotide
  Antisense strand to SEQ ID NO: 595780
ugaucucugcauugauggc

SEQ ID NO: 595782 - RNA, 19 nt, Artificial Sequence
  Description of Artificial Sequence: Synthetic oligonucleotide
  Sense strand starting at position 1561 of SEQ ID NO: 584870
ucaguugucccuggauucu

SEQ ID NO: 595783 - RNA, 19 nt, Artificial Sequence
  Description of Artificial Sequence: Synthetic oligonucleotide
  Antisense strand to SEQ ID NO: 595782
agaauccagggacaacuga

SEQ ID NO: 595784 - RNA, 19 nt, Artificial Sequence
  Description of Artificial Sequence: Synthetic oligonucleotide
  Sense strand starting at position 1623 of SEQ ID NO: 584870
ucgggacacucgagguaaa

SEQ ID NO: 595785 - RNA, 19 nt, Artificial Sequence
  Description of Artificial Sequence: Synthetic oligonucleotide
  Antisense strand to SEQ ID NO: 595784
uuuaccucgagugucccga

SEQ ID NO: 595786 - RNA, 19 nt, Artificial Sequence
  Description of Artificial Sequence: Synthetic oligonucleotide
  Sense strand starting at position 2010 of SEQ ID NO: 584870
caguuuagagcccaggauu

SEQ ID NO: 595787 - RNA, 19 nt, Artificial Sequence
  Description of Artificial Sequence: Synthetic oligonucleotide
  Antisense strand to SEQ ID NO: 595786
aauccugggcucuaaacug

SEQ ID NO: 595788 - RNA, 19 nt, Artificial Sequence
  Description of Artificial Sequence: Synthetic oligonucleotide
  Sense strand starting at position 2066 of SEQ ID NO: 584870
ccuuauuucucagcuguua

SEQ ID NO: 595789 - RNA, 19 nt, Artificial Sequence
  Description of Artificial Sequence: Synthetic oligonucleotide
  Antisense strand to SEQ ID NO: 595788
uaacagcugagaaauaagg

SEQ ID NO: 595790 - RNA, 19 nt, Artificial Sequence
  Description of Artificial Sequence: Synthetic oligonucleotide
  Sense strand starting at position 2077 of SEQ ID NO: 584870
agcuguuacuagguagaau

SEQ ID NO: 595791 - RNA, 19 nt, Artificial Sequence
  Description of Artificial Sequence: Synthetic oligonucleotide
  Antisense strand to SEQ ID NO: 595790
auucuaccuaguaacagcu

SEQ ID NO: 595792 - RNA, 19 nt, Artificial Sequence
  Description of Artificial Sequence: Synthetic oligonucleotide
  Sense strand starting at position 2078 of SEQ ID NO: 584870
gcuguuacuagguagaaua

SEQ ID NO: 595793 - RNA, 19 nt, Artificial Sequence
  Description of Artificial Sequence: Synthetic oligonucleotide
  Antisense strand to SEQ ID NO: 595792
uauucuaccuaguaacagc

SEQ ID NO: 595794 - RNA, 19 nt, Artificial Sequence
  Description of Artificial Sequence: Synthetic oligonucleotide
  Sense strand starting at position 2141 of SEQ ID NO: 584870
uugggauuauuagguauuu

SEQ ID NO: 595795 - RNA, 19 nt, Artificial Sequence
  Description of Artificial Sequence: Synthetic oligonucleotide
  Antisense strand to SEQ ID NO: 595794
aaauaccuaauaaucccaa

SEQ ID NO: 595796 - RNA, 19 nt, Artificial Sequence
  Description of Artificial Sequence: Synthetic oligonucleotide
  Sense strand starting at position 2174 of SEQ ID NO: 584870
ugucuuuggaagcaagacu

SEQ ID NO: 595797 - RNA, 19 nt, Artificial Sequence
  Description of Artificial Sequence: Synthetic oligonucleotide
  Antisense strand to SEQ ID NO: 595796
agucuugcuuccaaagaca

SEQ ID NO: 595798 - RNA, 19 nt, Artificial Sequence
  Description of Artificial Sequence: Synthetic oligonucleotide
  Sense strand starting at position 2518 of SEQ ID NO: 584870
uuuacaaagccuugagauc

SEQ ID NO: 595799 - RNA, 19 nt, Artificial Sequence
  Description of Artificial Sequence: Synthetic oligonucleotide
  Antisense strand to SEQ ID NO: 595798
gaucucaaggcuuuguaaa

SEQ ID NO: 595800 - RNA, 19 nt, Artificial Sequence
  Description of Artificial Sequence: Synthetic oligonucleotide
  Sense strand starting at position 2549 of SEQ ID NO: 584870
guggcuuugcugguguaga

SEQ ID NO: 595801 - RNA, 19 nt, Artificial Sequence
  Description of Artificial Sequence: Synthetic oligonucleotide
  Antisense strand to SEQ ID NO: 595800
ucuacaccagcaaagccac

SEQ ID NO: 595802 - RNA, 19 nt, Artificial Sequence
  Description of Artificial Sequence: Synthetic oligonucleotide
  Sense strand starting at position 2578 of SEQ ID NO: 584870
gcucucuauguagagugau

SEQ ID NO: 595803 - RNA, 19 nt, Artificial Sequence
  Description of Artificial Sequence: Synthetic oligonucleotide
  Antisense strand to SEQ ID NO: 595802
aucacucuacauagagagc

SEQ ID NO: 595804 - RNA, 19 nt, Artificial Sequence
  Description of Artificial Sequence: Synthetic oligonucleotide
  Sense strand starting at position 2814 of SEQ ID NO: 584870
auaagacgugcugagaaua

SEQ ID NO: 595805 - RNA, 19 nt, Artificial Sequence
  Description of Artificial Sequence: Synthetic oligonucleotide
  Antisense strand to SEQ ID NO: 595804
uauucucagcacgucuuau

SEQ ID NO: 595806 - RNA, 19 nt, Artificial Sequence
  Description of Artificial Sequence: Synthetic oligonucleotide
  Sense strand starting at position 2829 of SEQ ID NO: 584870
aauacugagugaggauuaa

SEQ ID NO: 595807 - RNA, 19 nt, Artificial Sequence
  Description of Artificial Sequence: Synthetic oligonucleotide
  Antisense strand to SEQ ID NO: 595806
uuaauccucacucaguauu

SEQ ID NO: 595808 - RNA, 19 nt, Artificial Sequence
  Description of Artificial Sequence: Synthetic oligonucleotide
  Sense strand starting at position 3025 of SEQ ID NO: 584870
ccaaucuugucauuguaua

SEQ ID NO: 595809 - RNA, 19 nt, Artificial Sequence
  Description of Artificial Sequence: Synthetic oligonucleotide
  Antisense strand to SEQ ID NO: 595808
uauacaaugacaagauugg

SEQ ID NO: 595810 - RNA, 19 nt, Artificial Sequence
  Description of Artificial Sequence: Synthetic oligonucleotide
  Sense strand starting at position 3030 of SEQ ID NO: 584870
cuugucauuguauagauau

SEQ ID NO: 595811 - RNA, 19 nt, Artificial Sequence
  Description of Artificial Sequence: Synthetic oligonucleotide
  Antisense strand to SEQ ID NO: 595810
auaucuauacaaugacaag

SEQ ID NO: 595812 - RNA, 19 nt, Artificial Sequence
  Description of Artificial Sequence: Synthetic oligonucleotide
  Sense strand starting at position 3068 of SEQ ID NO: 584870
aaggcccaguugucaauaa

SEQ ID NO: 595813 - RNA, 19 nt, Artificial Sequence
  Description of Artificial Sequence: Synthetic oligonucleotide
  Antisense strand to SEQ ID NO: 595812
uuauugacaacugggccuu

SEQ ID NO: 595814 - RNA, 19 nt, Artificial Sequence
  Description of Artificial Sequence: Synthetic oligonucleotide
  Sense strand starting at position 3100 of SEQ ID NO: 584870
cuaaauacuuagucuggaa

SEQ ID NO: 595815 - RNA, 19 nt, Artificial Sequence
  Description of Artificial Sequence: Synthetic oligonucleotide
  Antisense strand to SEQ ID NO: 595814
uuccagacuaaguauuuag

SEQ ID NO: 595816 - RNA, 19 nt, Artificial Sequence
  Description of Artificial Sequence: Synthetic oligonucleotide
  Sense strand starting at position 3440 of SEQ ID NO: 584870
auaaaugcuuagucuagag

SEQ ID NO: 595817 - RNA, 19 nt, Artificial Sequence
  Description of Artificial Sequence: Synthetic oligonucleotide
  Antisense strand to SEQ ID NO: 595816
cucuagacuaagcauuuau

SEQ ID NO: 595818 - RNA, 19 nt, Artificial Sequence
  Description of Artificial Sequence: Synthetic oligonucleotide
  Sense strand starting at position 3588 of SEQ ID NO: 584870
acuugaauugcuugcucca

SEQ ID NO: 595819 - RNA, 19 nt, Artificial Sequence
  Description of Artificial Sequence: Synthetic oligonucleotide
  Antisense strand to SEQ ID NO: 595818
uggagcaagcaauucaagu

SEQ ID NO: 595820 - RNA, 19 nt, Artificial Sequence
  Description of Artificial Sequence: Synthetic oligonucleotide
  Sense strand starting at position 3665 of SEQ ID NO: 584870
gaaugcuccugccugaagu

SEQ ID NO: 595821 - RNA, 19 nt, Artificial Sequence
  Description of Artificial Sequence: Synthetic oligonucleotide
  Antisense strand to SEQ ID NO: 595820
acuucaggcaggagcauuc

SEQ ID NO: 595822 - RNA, 19 nt, Artificial Sequence
  Description of Artificial Sequence: Synthetic oligonucleotide
  Sense strand starting at position 3737 of SEQ ID NO: 584870
cuauuauuguuauccaggu

SEQ ID NO: 595823 - RNA, 19 nt, Artificial Sequence
  Description of Artificial Sequence: Synthetic oligonucleotide
  Antisense strand to SEQ ID NO: 595822
accuggauaacaauaauag

SEQ ID NO: 595824 - RNA, 19 nt, Artificial Sequence
  Description of Artificial Sequence: Synthetic oligonucleotide
  Sense strand starting at position 3750 of SEQ ID NO: 584870
ccagguaucaacugugucu

SEQ ID NO: 595825 - RNA, 19 nt, Artificial Sequence
  Description of Artificial Sequence: Synthetic oligonucleotide
  Antisense strand to SEQ ID NO: 595824
agacacaguugauaccugg

SEQ ID NO: 595826 - RNA, 19 nt, Artificial Sequence
  Description of Artificial Sequence: Synthetic oligonucleotide
  Sense strand starting at position 3767 of SEQ ID NO: 584870
cuuugcugugacuggagua

SEQ ID NO: 595827 - RNA, 19 nt, Artificial Sequence
  Description of Artificial Sequence: Synthetic oligonucleotide
  Antisense strand to SEQ ID NO: 595826
uacuccagucacagcaaag

SEQ ID NO: 595828 - RNA, 19 nt, Artificial Sequence
  Description of Artificial Sequence: Synthetic oligonucleotide
  Sense strand starting at position 3783 of SEQ ID NO: 584870
guaccuguuccucaggaca

SEQ ID NO: 595829 - RNA, 19 nt, Artificial Sequence
  Description of Artificial Sequence: Synthetic oligonucleotide
  Antisense strand to SEQ ID NO: 595828
uguccugaggaacagguac

SEQ ID NO: 595830 - RNA, 19 nt, Artificial Sequence
  Description of Artificial Sequence: Synthetic oligonucleotide
  Sense strand starting at position 3931 of SEQ ID NO: 584870
ggaaucauucggcaccaga

SEQ ID NO: 595831 - RNA, 19 nt, Artificial Sequence
  Description of Artificial Sequence: Synthetic oligonucleotide
  Antisense strand to SEQ ID NO: 595830
ucuggugccgaaugauucc

SEQ ID NO: 595832 - RNA, 19 nt, Artificial Sequence
  Description of Artificial Sequence: Synthetic oligonucleotide
  Sense strand starting at position 308 of SEQ ID NO: 584871
cucugcuguccuuagaaug

SEQ ID NO: 595833 - RNA, 19 nt, Artificial Sequence
  Description of Artificial Sequence: Synthetic oligonucleotide
  Antisense strand to SEQ ID NO: 595832
cauucuaaggacagcagag

SEQ ID NO: 595834 - RNA, 19 nt, Artificial Sequence
  Description of Artificial Sequence: Synthetic oligonucleotide
  Sense strand starting at position 313 of SEQ ID NO: 584871
cuguccuuagaaugagaca

SEQ ID NO: 595835 - RNA, 19 nt, Artificial Sequence
  Description of Artificial Sequence: Synthetic oligonucleotide
  Antisense strand to SEQ ID NO: 595834
ugucucauucuaaggacag

SEQ ID NO: 595836 - RNA, 19 nt, Artificial Sequence
  Description of Artificial Sequence: Synthetic oligonucleotide
  Sense strand starting at position 567 of SEQ ID NO: 584871
guaguagucauauacuuug

SEQ ID NO: 595837 - RNA, 19 nt, Artificial Sequence
  Description of Artificial Sequence: Synthetic oligonucleotide
  Antisense strand to SEQ ID NO: 595836
caaaguauaugacuacuac

SEQ ID NO: 595838 - RNA, 19 nt, Artificial Sequence
  Description of Artificial Sequence: Synthetic oligonucleotide
  Sense strand starting at position 570 of SEQ ID NO: 584871
guagucauauacuuuggua

SEQ ID NO: 595839 - RNA, 19 nt, Artificial Sequence
  Description of Artificial Sequence: Synthetic oligonucleotide
  Antisense strand to SEQ ID NO: 595838
uaccaaaguauaugacuac

SEQ ID NO: 595840 - RNA, 19 nt, Artificial Sequence
  Description of Artificial Sequence: Synthetic oligonucleotide
  Sense strand starting at position 572 of SEQ ID NO: 584871
agucauauacuuugguagu

SEQ ID NO: 595841 - RNA, 19 nt, Artificial Sequence
  Description of Artificial Sequence: Synthetic oligonucleotide
  Antisense strand to SEQ ID NO: 595840
acuaccaaaguauaugacu

SEQ ID NO: 595842 - RNA, 19 nt, Artificial Sequence
  Description of Artificial Sequence: Synthetic oligonucleotide
  Sense strand starting at position 574 of SEQ ID NO: 584871
ucauauacuuugguaguga

SEQ ID NO: 595843 - RNA, 19 nt, Artificial Sequence
  Description of Artificial Sequence: Synthetic oligonucleotide
  Antisense strand to SEQ ID NO: 595842
ucacuaccaaaguauauga

SEQ ID NO: 595844 - RNA, 19 nt, Artificial Sequence
  Description of Artificial Sequence: Synthetic oligonucleotide
  Sense strand starting at position 716 of SEQ ID NO: 584871
guuccacuuguaggaauua

SEQ ID NO: 595845 - RNA, 19 nt, Artificial Sequence
  Description of Artificial Sequence: Synthetic oligonucleotide
  Antisense strand to SEQ ID NO: 595844
uaauuccuacaaguggaac

SEQ ID NO: 595846 - RNA, 19 nt, Artificial Sequence
  Description of Artificial Sequence: Synthetic oligonucleotide
  Sense strand starting at position 1194 of SEQ ID NO: 584871
gauuguauccauuggauag

SEQ ID NO: 595847 - RNA, 19 nt, Artificial Sequence
  Description of Artificial Sequence: Synthetic oligonucleotide
  Antisense strand to SEQ ID NO: 595846
cuauccaauggauacaauc

SEQ ID NO: 595848 - RNA, 19 nt, Artificial Sequence
  Description of Artificial Sequence: Synthetic oligonucleotide
  Sense strand starting at position 1198 of SEQ ID NO: 584871
guauccauuggauagcauu

SEQ ID NO: 595849 - RNA, 19 nt, Artificial Sequence
  Description of Artificial Sequence: Synthetic oligonucleotide
  Antisense strand to SEQ ID NO: 595848
aaugcuauccaauggauac

SEQ ID NO: 595850 - RNA, 19 nt, Artificial Sequence
  Description of Artificial Sequence: Synthetic oligonucleotide
  Sense strand starting at position 1208 of SEQ ID NO: 584871
gauagcauucguuagguuu

SEQ ID NO: 595851 - RNA, 19 nt, Artificial Sequence
  Description of Artificial Sequence: Synthetic oligonucleotide
  Antisense strand to SEQ ID NO: 595850
aaaccuaacgaaugcuauc

SEQ ID NO: 595852 - RNA, 19 nt, Artificial Sequence
  Description of Artificial Sequence: Synthetic oligonucleotide
  Sense strand starting at position 1296 of SEQ ID NO: 584871
uggaucuaacauugcuaaa

SEQ ID NO: 595853 - RNA, 19 nt, Artificial Sequence
  Description of Artificial Sequence: Synthetic oligonucleotide
  Antisense strand to SEQ ID NO: 595852
uuuagcaauguuagaucca

SEQ ID NO: 595854 - RNA, 19 nt, Artificial Sequence
  Description of Artificial Sequence: Synthetic oligonucleotide
  Sense strand starting at position 1517 of SEQ ID NO: 584871
uagaauagaugccuugagu

SEQ ID NO: 595855 - RNA, 19 nt, Artificial Sequence
  Description of Artificial Sequence: Synthetic oligonucleotide
  Antisense strand to SEQ ID NO: 595854
acucaaggcaucuauucua

SEQ ID NO: 595856 - RNA, 19 nt, Artificial Sequence
  Description of Artificial Sequence: Synthetic oligonucleotide
  Sense strand starting at position 1520 of SEQ ID NO: 584871
aauagaugccuugaguugu

SEQ ID NO: 595857 - RNA, 19 nt, Artificial Sequence
  Description of Artificial Sequence: Synthetic oligonucleotide
  Antisense strand to SEQ ID NO: 595856
acaacucaaggcaucuauu

SEQ ID NO: 595858 - RNA, 19 nt, Artificial Sequence
  Description of Artificial Sequence: Synthetic oligonucleotide
  Sense strand starting at position 1528 of SEQ ID NO: 584871
ccuugaguuguccagaaca

SEQ ID NO: 595859 - RNA, 19 nt, Artificial Sequence
  Description of Artificial Sequence: Synthetic oligonucleotide
  Antisense strand to SEQ ID NO: 595858
uguucuggacaacucaagg

SEQ ID NO: 595860 - RNA, 19 nt, Artificial Sequence
  Description of Artificial Sequence: Synthetic oligonucleotide
  Sense strand starting at position 1573 of SEQ ID NO: 584871
ugacuacaauacguucuua

SEQ ID NO: 595861 - RNA, 19 nt, Artificial Sequence
  Description of Artificial Sequence: Synthetic oligonucleotide
  Antisense strand to SEQ ID NO: 595860
uaagaacguauuguaguca

SEQ ID NO: 595862 - RNA, 19 nt, Artificial Sequence
  Description of Artificial Sequence: Synthetic oligonucleotide
  Sense strand starting at position 1714 of SEQ ID NO: 584871
cccuuucucugggugagua

SEQ ID NO: 595863 - RNA, 19 nt, Artificial Sequence
  Description of Artificial Sequence: Synthetic oligonucleotide
  Antisense strand to SEQ ID NO: 595862
uacucacccagagaaaggg

SEQ ID NO: 595864 - RNA, 19 nt, Artificial Sequence
  Description of Artificial Sequence: Synthetic oligonucleotide
  Sense strand starting at position 2078 of SEQ ID NO: 584871
uugaauuguacacguugaa

SEQ ID NO: 595865 - RNA, 19 nt, Artificial Sequence
  Description of Artificial Sequence: Synthetic oligonucleotide
  Antisense strand to SEQ ID NO: 595864
uucaacguguacaauucaa

SEQ ID NO: 595866 - RNA, 19 nt, Artificial Sequence
  Description of Artificial Sequence: Synthetic oligonucleotide
  Sense strand starting at position 2081 of SEQ ID NO: 584871
aauuguacacguugaagaa

SEQ ID NO: 595867 - RNA, 19 nt, Artificial Sequence
  Description of Artificial Sequence: Synthetic oligonucleotide
  Antisense strand to SEQ ID NO: 595866
uucuucaacguguacaauu

SEQ ID NO: 595868 - RNA, 19 nt, Artificial Sequence
  Description of Artificial Sequence: Synthetic oligonucleotide
  Sense strand starting at position 2082 of SEQ ID NO: 584871
auuguacacguugaagaaa

SEQ ID NO: 595869 - RNA, 19 nt, Artificial Sequence
  Description of Artificial Sequence: Synthetic oligonucleotide
  Antisense strand to SEQ ID NO: 595868
uuucuucaacguguacaau

SEQ ID NO: 595870 - RNA, 19 nt, Artificial Sequence
  Description of Artificial Sequence: Synthetic oligonucleotide
  Sense strand starting at position 2166 of SEQ ID NO: 584871
auagucacuugucuuaagu

SEQ ID NO: 595871 - RNA, 19 nt, Artificial Sequence
  Description of Artificial Sequence: Synthetic oligonucleotide
  Antisense strand to SEQ ID NO: 595870
acuuaagacaagugacuau

SEQ ID NO: 595872 - RNA, 19 nt, Artificial Sequence
  Description of Artificial Sequence: Synthetic oligonucleotide
  Sense strand starting at position 2301 of SEQ ID NO: 584871
gcaugaauauggguacaug

SEQ ID NO: 595873 - RNA, 19 nt, Artificial Sequence
  Description of Artificial Sequence: Synthetic oligonucleotide
  Antisense strand to SEQ ID NO: 595872
cauguacccauauucaugc

SEQ ID NO: 595874 - RNA, 19 nt, Artificial Sequence
  Description of Artificial Sequence: Synthetic oligonucleotide
  Sense strand starting at position 2492 of SEQ ID NO: 584871
gccucagcuccugaauaac

SEQ ID NO: 595875 - RNA, 19 nt, Artificial Sequence
  Description of Artificial Sequence: Synthetic oligonucleotide
  Antisense strand to SEQ ID NO: 595874
guuauucaggagcugaggc

SEQ ID NO: 595876 - RNA, 19 nt, Artificial Sequence
  Description of Artificial Sequence: Synthetic oligonucleotide
  Sense strand starting at position 2710 of SEQ ID NO: 584871
aggcuuaggaucuguuauc

SEQ ID NO: 595877 - RNA, 19 nt, Artificial Sequence
  Description of Artificial Sequence: Synthetic oligonucleotide
  Antisense strand to SEQ ID NO: 595876
gauaacagauccuaagccu

SEQ ID NO: 595878 - RNA, 19 nt, Artificial Sequence
  Description of Artificial Sequence: Synthetic oligonucleotide
  Sense strand starting at position 2711 of SEQ ID NO: 584871
ggcuuaggaucuguuauca

SEQ ID NO: 595879 - RNA, 19 nt, Artificial Sequence
  Description of Artificial Sequence: Synthetic oligonucleotide
  Antisense strand to SEQ ID NO: 595878
ugauaacagauccuaagcc

SEQ ID NO: 595880 - RNA, 19 nt, Artificial Sequence
  Description of Artificial Sequence: Synthetic oligonucleotide
  Sense strand starting at position 2933 of SEQ ID NO: 584871
gaaugcugucucuguaaga

SEQ ID NO: 595881 - RNA, 19 nt, Artificial Sequence
  Description of Artificial Sequence: Synthetic oligonucleotide
  Antisense strand to SEQ ID NO: 595880
ucuuacagagacagcauuc

SEQ ID NO: 595882 - RNA, 19 nt, Artificial Sequence
  Description of Artificial Sequence: Synthetic oligonucleotide
  Sense strand starting at position 2943 of SEQ ID NO: 584871
ucuguaagaugucuauaaa

SEQ ID NO: 595883 - RNA, 19 nt, Artificial Sequence
  Description of Artificial Sequence: Synthetic oligonucleotide
  Antisense strand to SEQ ID NO: 595882
uuuauagacaucuuacaga

SEQ ID NO: 595884 - RNA, 19 nt, Artificial Sequence
  Description of Artificial Sequence: Synthetic oligonucleotide
  Sense strand starting at position 3011 of SEQ ID NO: 584871
auugcaagucaaugaucga

SEQ ID NO: 595885 - RNA, 19 nt, Artificial Sequence
  Description of Artificial Sequence: Synthetic oligonucleotide
  Antisense strand to SEQ ID NO: 595884
ucgaucauugacuugcaau

SEQ ID NO: 595886 - RNA, 19 nt, Artificial Sequence
  Description of Artificial Sequence: Synthetic oligonucleotide
  Sense strand starting at position 3012 of SEQ ID NO: 584871
uugcaagucaaugaucgaa

SEQ ID NO: 595887 - RNA, 19 nt, Artificial Sequence
  Description of Artificial Sequence: Synthetic oligonucleotide
  Antisense strand to SEQ ID NO: 595886
uucgaucauugacuugcaa

SEQ ID NO: 595888 - RNA, 19 nt, Artificial Sequence
  Description of Artificial Sequence: Synthetic oligonucleotide
  Sense strand starting at position 3014 of SEQ ID NO: 584871
gcaagucaaugaucgaagu

SEQ ID NO: 595889 - RNA, 19 nt, Artificial Sequence
  Description of Artificial Sequence: Synthetic oligonucleotide
  Antisense strand to SEQ ID NO: 595888
acuucgaucauugacuugc

SEQ ID NO: 595890 - RNA, 19 nt, Artificial Sequence
  Description of Artificial Sequence: Synthetic oligonucleotide
  Sense strand starting at position 3015 of SEQ ID NO: 584871
caagucaaugaucgaaguu

SEQ ID NO: 595891 - RNA, 19 nt, Artificial Sequence
  Description of Artificial Sequence: Synthetic oligonucleotide
  Antisense strand to SEQ ID NO: 595890
aacuucgaucauugacuug

SEQ ID NO: 595892 - RNA, 19 nt, Artificial Sequence
  Description of Artificial Sequence: Synthetic oligonucleotide
  Sense strand starting at position 3098 of SEQ ID NO: 584871
cuguguaguaucugauuga

SEQ ID NO: 595893 - RNA, 19 nt, Artificial Sequence
  Description of Artificial Sequence: Synthetic oligonucleotide
  Antisense strand to SEQ ID NO: 595892
ucaaucagauacuacacag

SEQ ID NO: 595894 - RNA, 19 nt, Artificial Sequence
  Description of Artificial Sequence: Synthetic oligonucleotide
  Sense strand starting at position 3101 of SEQ ID NO: 584871
uguaguaucugauugagau

SEQ ID NO: 595895 - RNA, 19 nt, Artificial Sequence
  Description of Artificial Sequence: Synthetic oligonucleotide
  Antisense strand to SEQ ID NO: 595894
aucucaaucagauacuaca

SEQ ID NO: 595896 - RNA, 19 nt, Artificial Sequence
  Description of Artificial Sequence: Synthetic oligonucleotide
  Sense strand starting at position 3102 of SEQ ID NO: 584871
guaguaucugauugagaug

SEQ ID NO: 595897 - RNA, 19 nt, Artificial Sequence
  Description of Artificial Sequence: Synthetic oligonucleotide
  Antisense strand to SEQ ID NO: 595896
caucucaaucagauacuac

SEQ ID NO: 595898 - RNA, 19 nt, Artificial Sequence
  Description of Artificial Sequence: Synthetic oligonucleotide
  Sense strand starting at position 3268 of SEQ ID NO: 584871
ggcuuaugcuucuccaaga

SEQ ID NO: 595899 - RNA, 19 nt, Artificial Sequence
  Description of Artificial Sequence: Synthetic oligonucleotide
  Antisense strand to SEQ ID NO: 595898
ucuuggagaagcauaagcc

SEQ ID NO: 595900 - RNA, 19 nt, Artificial Sequence
  Description of Artificial Sequence: Synthetic oligonucleotide
  Sense strand starting at position 3269 of SEQ ID NO: 584871
gcuuaugcuucuccaagag

SEQ ID NO: 595901 - RNA, 19 nt, Artificial Sequence
  Description of Artificial Sequence: Synthetic oligonucleotide
  Antisense strand to SEQ ID NO: 595900
cucuuggagaagcauaagc

SEQ ID NO: 595902 - RNA, 19 nt, Artificial Sequence
  Description of Artificial Sequence: Synthetic oligonucleotide
  Sense strand starting at position 3326 of SEQ ID NO: 584871
ggguacacucucuguacuu

SEQ ID NO: 595903 - RNA, 19 nt, Artificial Sequence
  Description of Artificial Sequence: Synthetic oligonucleotide
  Antisense strand to SEQ ID NO: 595902
aaguacagagaguguaccc

SEQ ID NO: 595904 - RNA, 19 nt, Artificial Sequence
  Description of Artificial Sequence: Synthetic oligonucleotide
  Sense strand starting at position 3479 of SEQ ID NO: 584871
gaaugacaccucugaggug

SEQ ID NO: 595905 - RNA, 19 nt, Artificial Sequence
  Description of Artificial Sequence: Synthetic oligonucleotide
  Antisense strand to SEQ ID NO: 595904
caccucagaggugucauuc

SEQ ID NO: 595906 - RNA, 19 nt, Artificial Sequence
  Description of Artificial Sequence: Synthetic oligonucleotide
  Sense strand starting at position 3588 of SEQ ID NO: 584871
guuuaagccagugguauuu

SEQ ID NO: 595907 - RNA, 19 nt, Artificial Sequence
  Description of Artificial Sequence: Synthetic oligonucleotide
  Antisense strand to SEQ ID NO: 595906
aaauaccacuggcuuaaac

SEQ ID NO: 595908 - RNA, 19 nt, Artificial Sequence
  Description of Artificial Sequence: Synthetic oligonucleotide
  Sense strand starting at position 3614 of SEQ ID NO: 584871
cuguuaucagcagaaguac

SEQ ID NO: 595909 - RNA, 19 nt, Artificial Sequence
  Description of Artificial Sequence: Synthetic oligonucleotide
  Antisense strand to SEQ ID NO: 595908
guacuucugcugauaacag

SEQ ID NO: 595910 - RNA, 19 nt, Artificial Sequence
  Description of Artificial Sequence: Synthetic oligonucleotide
  Sense strand starting at position 3891 of SEQ ID NO: 584871
cugugucucccagacuaga

SEQ ID NO: 595911 - RNA, 19 nt, Artificial Sequence
  Description of Artificial Sequence: Synthetic oligonucleotide
  Antisense strand to SEQ ID NO: 595910
ucuagucugggagacacag

SEQ ID NO: 595912 - RNA, 19 nt, Artificial Sequence
  Description of Artificial Sequence: Synthetic oligonucleotide
  Sense strand starting at position 21 of SEQ ID NO: 584872
gcaguaucccagggucaga

SEQ ID NO: 595913 - RNA, 19 nt, Artificial Sequence
  Description of Artificial Sequence: Synthetic oligonucleotide
  Antisense strand to SEQ ID NO: 595912
ucugacccugggauacugc

SEQ ID NO: 595914 - RNA, 19 nt, Artificial Sequence
  Description of Artificial Sequence: Synthetic oligonucleotide
  Sense strand starting at position 186 of SEQ ID NO: 584872
gguaacuugcaguaaggaa

SEQ ID NO: 595915 - RNA, 19 nt, Artificial Sequence
  Description of Artificial Sequence: Synthetic oligonucleotide
  Antisense strand to SEQ ID NO: 595914
uuccuuacugcaaguuacc

SEQ ID NO: 595916 - RNA, 19 nt, Artificial Sequence
  Description of Artificial Sequence: Synthetic oligonucleotide
  Sense strand starting at position 198 of SEQ ID NO: 584872
uaaggaagccagugaauaa

SEQ ID NO: 595917 - RNA, 19 nt, Artificial Sequence
  Description of Artificial Sequence: Synthetic oligonucleotide
  Antisense strand to SEQ ID NO: 595916
uuauucacuggcuuccuua

SEQ ID NO: 595918 - RNA, 19 nt, Artificial Sequence
  Description of Artificial Sequence: Synthetic oligonucleotide
  Sense strand starting at position 247 of SEQ ID NO: 584872
cuaugauugucugcuagag

SEQ ID NO: 595919 - RNA, 19 nt, Artificial Sequence
  Description of Artificial Sequence: Synthetic oligonucleotide
  Antisense strand to SEQ ID NO: 595918
cucuagcagacaaucauag

SEQ ID NO: 595920 - RNA, 19 nt, Artificial Sequence
  Description of Artificial Sequence: Synthetic oligonucleotide
  Sense strand starting at position 366 of SEQ ID NO: 584872
ugucauccuguugaacaua

SEQ ID NO: 595921 - RNA, 19 nt, Artificial Sequence
  Description of Artificial Sequence: Synthetic oligonucleotide
  Antisense strand to SEQ ID NO: 595920
uauguucaacaggaugaca

SEQ ID NO: 595922 - RNA, 19 nt, Artificial Sequence
  Description of Artificial Sequence: Synthetic oligonucleotide
  Sense strand starting at position 457 of SEQ ID NO: 584872
caucauaugugagcauaga

SEQ ID NO: 595923 - RNA, 19 nt, Artificial Sequence
  Description of Artificial Sequence: Synthetic oligonucleotide
  Antisense strand to SEQ ID NO: 595922
ucuaugcucacauaugaug

SEQ ID NO: 595924 - RNA, 19 nt, Artificial Sequence
  Description of Artificial Sequence: Synthetic oligonucleotide
  Sense strand starting at position 668 of SEQ ID NO: 584872
gggcuaagucuaugaacuc

SEQ ID NO: 595925 - RNA, 19 nt, Artificial Sequence
  Description of Artificial Sequence: Synthetic oligonucleotide
  Antisense strand to SEQ ID NO: 595924
gaguucauagacuuagccc

SEQ ID NO: 595926 - RNA, 19 nt, Artificial Sequence
  Description of Artificial Sequence: Synthetic oligonucleotide
  Sense strand starting at position 816 of SEQ ID NO: 584872
cuaguucuacuacaggagu

SEQ ID NO: 595927 - RNA, 19 nt, Artificial Sequence
  Description of Artificial Sequence: Synthetic oligonucleotide
  Antisense strand to SEQ ID NO: 595926
acuccuguaguagaacuag

SEQ ID NO: 595928 - RNA, 19 nt, Artificial Sequence
  Description of Artificial Sequence: Synthetic oligonucleotide
  Sense strand starting at position 819 of SEQ ID NO: 584872
guucuacuacaggaguauu

SEQ ID NO: 595929 - RNA, 19 nt, Artificial Sequence
  Description of Artificial Sequence: Synthetic oligonucleotide
  Antisense strand to SEQ ID NO: 595928
aauacuccuguaguagaac

SEQ ID NO: 595930 - RNA, 19 nt, Artificial Sequence
  Description of Artificial Sequence: Synthetic oligonucleotide
  Sense strand starting at position 846 of SEQ ID NO: 584872
uggcuaguuggagaacacu

SEQ ID NO: 595931 - RNA, 19 nt, Artificial Sequence
  Description of Artificial Sequence: Synthetic oligonucleotide
  Antisense strand to SEQ ID NO: 595930
aguguucuccaacuagcca

SEQ ID NO: 595932 - RNA, 19 nt, Artificial Sequence
  Description of Artificial Sequence: Synthetic oligonucleotide
  Sense strand starting at position 964 of SEQ ID NO: 584872
cuguguaccagucacugaa

SEQ ID NO: 595933 - RNA, 19 nt, Artificial Sequence
  Description of Artificial Sequence: Synthetic oligonucleotide
  Antisense strand to SEQ ID NO: 595932
uucagugacugguacacag

SEQ ID NO: 595934 - RNA, 19 nt, Artificial Sequence
  Description of Artificial Sequence: Synthetic oligonucleotide
  Sense strand starting at position 982 of SEQ ID NO: 584872
agagaugguuucuuaugcu

SEQ ID NO: 595935 - RNA, 19 nt, Artificial Sequence
  Description of Artificial Sequence: Synthetic oligonucleotide
  Antisense strand to SEQ ID NO: 595934
agcauaagaaaccaucucu

SEQ ID NO: 595936 - RNA, 19 nt, Artificial Sequence
  Description of Artificial Sequence: Synthetic oligonucleotide
  Sense strand starting at position 1750 of SEQ ID NO: 584872
cucuuugugacaggugauc

SEQ ID NO: 595937 - RNA, 19 nt, Artificial Sequence
  Description of Artificial Sequence: Synthetic oligonucleotide
  Antisense strand to SEQ ID NO: 595936
gaucaccugucacaaagag

SEQ ID NO: 595938 - RNA, 19 nt, Artificial Sequence
  Description of Artificial Sequence: Synthetic oligonucleotide
  Sense strand starting at position 2060 of SEQ ID NO: 584872
uaggauucugcauggaaau

SEQ ID NO: 595939 - RNA, 19 nt, Artificial Sequence
  Description of Artificial Sequence: Synthetic oligonucleotide
  Antisense strand to SEQ ID NO: 595938
auuuccaugcagaauccua

SEQ ID NO: 595940 - RNA, 19 nt, Artificial Sequence
  Description of Artificial Sequence: Synthetic oligonucleotide
  Sense strand starting at position 2061 of SEQ ID NO: 584872
aggauucugcauggaaaug

SEQ ID NO: 595941 - RNA, 19 nt, Artificial Sequence
  Description of Artificial Sequence: Synthetic oligonucleotide
  Antisense strand to SEQ ID NO: 595940
cauuuccaugcagaauccu

SEQ ID NO: 595942 - RNA, 19 nt, Artificial Sequence
  Description of Artificial Sequence: Synthetic oligonucleotide
  Sense strand starting at position 2062 of SEQ ID NO: 584872
ggauucugcauggaaaugu

SEQ ID NO: 595943 - RNA, 19 nt, Artificial Sequence
  Description of Artificial Sequence: Synthetic oligonucleotide
  Antisense strand to SEQ ID NO: 595942
acauuuccaugcagaaucc

SEQ ID NO: 595944 - RNA, 19 nt, Artificial Sequence
  Description of Artificial Sequence: Synthetic oligonucleotide
  Sense strand starting at position 2406 of SEQ ID NO: 584872
gucaaacucuuggccauua

SEQ ID NO: 595945 - RNA, 19 nt, Artificial Sequence
  Description of Artificial Sequence: Synthetic oligonucleotide
  Antisense strand to SEQ ID NO: 595944
uaauggccaagaguuugac

SEQ ID NO: 595946 - RNA, 19 nt, Artificial Sequence
  Description of Artificial Sequence: Synthetic oligonucleotide
  Sense strand starting at position 2551 of SEQ ID NO: 584872
ugaauaagaccaggcuuua

SEQ ID NO: 595947 - RNA, 19 nt, Artificial Sequence
  Description of Artificial Sequence: Synthetic oligonucleotide
  Antisense strand to SEQ ID NO: 595946
uaaagccuggucuuauuca

SEQ ID NO: 595948 - RNA, 19 nt, Artificial Sequence
  Description of Artificial Sequence: Synthetic oligonucleotide
  Sense strand starting at position 2681 of SEQ ID NO: 584872
agguaaaggcucuacaagu

SEQ ID NO: 595949 - RNA, 19 nt, Artificial Sequence
  Description of Artificial Sequence: Synthetic oligonucleotide
  Antisense strand to SEQ ID NO: 595948
acuuguagagccuuuaccu

SEQ ID NO: 595950 - RNA, 19 nt, Artificial Sequence
  Description of Artificial Sequence: Synthetic oligonucleotide
  Sense strand starting at position 2696 of SEQ ID NO: 584872
aagucacaagcuugaugau

SEQ ID NO: 595951 - RNA, 19 nt, Artificial Sequence
  Description of Artificial Sequence: Synthetic oligonucleotide
  Antisense strand to SEQ ID NO: 595950
aucaucaagcuugugacuu

SEQ ID NO: 595952 - RNA, 19 nt, Artificial Sequence
  Description of Artificial Sequence: Synthetic oligonucleotide
  Sense strand starting at position 2702 of SEQ ID NO: 584872
caagcuugaugaucucagu

SEQ ID NO: 595953 - RNA, 19 nt, Artificial Sequence
  Description of Artificial Sequence: Synthetic oligonucleotide
  Antisense strand to SEQ ID NO: 595952
acugagaucaucaagcuug

SEQ ID NO: 595954 - RNA, 19 nt, Artificial Sequence
  Description of Artificial Sequence: Synthetic oligonucleotide
  Sense strand starting at position 2712 of SEQ ID NO: 584872
gaucucagucaugggacaa

SEQ ID NO: 595955 - RNA, 19 nt, Artificial Sequence
  Description of Artificial Sequence: Synthetic oligonucleotide
  Antisense strand to SEQ ID NO: 595954
uugucccaugacugagauc

SEQ ID NO: 595956 - RNA, 19 nt, Artificial Sequence
  Description of Artificial Sequence: Synthetic oligonucleotide
  Sense strand starting at position 2756 of SEQ ID NO: 584872
aaauaucgaguaugagacu

SEQ ID NO: 595957 - RNA, 19 nt, Artificial Sequence
  Description of Artificial Sequence: Synthetic oligonucleotide
  Antisense strand to SEQ ID NO: 595956
agucucauacucgauauuu

SEQ ID NO: 595958 - RNA, 19 nt, Artificial Sequence
  Description of Artificial Sequence: Synthetic oligonucleotide
  Sense strand starting at position 2783 of SEQ ID NO: 584872
ucacaauuggcccagcaau

SEQ ID NO: 595959 - RNA, 19 nt, Artificial Sequence
  Description of Artificial Sequence: Synthetic oligonucleotide
  Antisense strand to SEQ ID NO: 595958
auugcugggccaauuguga

SEQ ID NO: 595960 - RNA, 19 nt, Artificial Sequence
  Description of Artificial Sequence: Synthetic oligonucleotide
  Sense strand starting at position 2847 of SEQ ID NO: 584872
gagagaagccucuguggga

SEQ ID NO: 595961 - RNA, 19 nt, Artificial Sequence
  Description of Artificial Sequence: Synthetic oligonucleotide
  Antisense strand to SEQ ID NO: 595960
ucccacagaggcuucucuc

SEQ ID NO: 595962 - RNA, 19 nt, Artificial Sequence
  Description of Artificial Sequence: Synthetic oligonucleotide
  Sense strand starting at position 2848 of SEQ ID NO: 584872
agagaagccucugugggaa

SEQ ID NO: 595963 - RNA, 19 nt, Artificial Sequence
  Description of Artificial Sequence: Synthetic oligonucleotide
  Antisense strand to SEQ ID NO: 595962
uucccacagaggcuucucu

SEQ ID NO: 595964 - RNA, 19 nt, Artificial Sequence
  Description of Artificial Sequence: Synthetic oligonucleotide
  Sense strand starting at position 2851 of SEQ ID NO: 584872
gaagccucugugggaauga

SEQ ID NO: 595965 - RNA, 19 nt, Artificial Sequence
  Description of Artificial Sequence: Synthetic oligonucleotide
  Antisense strand to SEQ ID NO: 595964
ucauucccacagaggcuuc

SEQ ID NO: 595966 - RNA, 19 nt, Artificial Sequence
  Description of Artificial Sequence: Synthetic oligonucleotide
  Sense strand starting at position 2950 of SEQ ID NO: 584872
ggcucaucccuaggaggaa

SEQ ID NO: 595967 - RNA, 19 nt, Artificial Sequence
  Description of Artificial Sequence: Synthetic oligonucleotide
  Antisense strand to SEQ ID NO: 595966
uuccuccuagggaugagcc

SEQ ID NO: 595968 - RNA, 19 nt, Artificial Sequence
  Description of Artificial Sequence: Synthetic oligonucleotide
  Sense strand starting at position 3000 of SEQ ID NO: 584872
augucacuagccuggauaa

SEQ ID NO: 595969 - RNA, 19 nt, Artificial Sequence
  Description of Artificial Sequence: Synthetic oligonucleotide
  Antisense strand to SEQ ID NO: 595968
uuauccaggcuagugacau

SEQ ID NO: 595970 - RNA, 19 nt, Artificial Sequence
  Description of Artificial Sequence: Synthetic oligonucleotide
  Sense strand starting at position 3001 of SEQ ID NO: 584872
ugucacuagccuggauaau

SEQ ID NO: 595971 - RNA, 19 nt, Artificial Sequence
  Description of Artificial Sequence: Synthetic oligonucleotide
  Antisense strand to SEQ ID NO: 595970
auuauccaggcuagugaca

SEQ ID NO: 595972 - RNA, 19 nt, Artificial Sequence
  Description of Artificial Sequence: Synthetic oligonucleotide
  Sense strand starting at position 3002 of SEQ ID NO: 584872
gucacuagccuggauaaug

SEQ ID NO: 595973 - RNA, 19 nt, Artificial Sequence
  Description of Artificial Sequence: Synthetic oligonucleotide
  Antisense strand to SEQ ID NO: 595972
cauuauccaggcuagugac

SEQ ID NO: 595974 - RNA, 19 nt, Artificial Sequence
  Description of Artificial Sequence: Synthetic oligonucleotide
  Sense strand starting at position 3223 of SEQ ID NO: 584872
auuggaaugcuuuaaguuu

SEQ ID NO: 595975 - RNA, 19 nt, Artificial Sequence
  Description of Artificial Sequence: Synthetic oligonucleotide
  Antisense strand to SEQ ID NO: 595974
aaacuuaaagcauuccaau

SEQ ID NO: 595976 - RNA, 19 nt, Artificial Sequence
  Description of Artificial Sequence: Synthetic oligonucleotide
  Sense strand starting at position 3408 of SEQ ID NO: 584872
gagaacaaggucugcagau

SEQ ID NO: 595977 - RNA, 19 nt, Artificial Sequence
  Description of Artificial Sequence: Synthetic oligonucleotide
  Antisense strand to SEQ ID NO: 595976
aucugcagaccuuguucuc

SEQ ID NO: 595978 - RNA, 19 nt, Artificial Sequence
  Description of Artificial Sequence: Synthetic oligonucleotide
  Sense strand starting at position 3619 of SEQ ID NO: 584872
gcuguccucagagggagaa

SEQ ID NO: 595979 - RNA, 19 nt, Artificial Sequence
  Description of Artificial Sequence: Synthetic oligonucleotide
  Antisense strand to SEQ ID NO: 595978
uucucccucugaggacagc

SEQ ID NO: 595980 - RNA, 19 nt, Artificial Sequence
  Description of Artificial Sequence: Synthetic oligonucleotide
  Sense strand starting at position 3719 of SEQ ID NO: 584872
ccuuaaauacucuguaguu

SEQ ID NO: 595981 - RNA, 19 nt, Artificial Sequence
  Description of Artificial Sequence: Synthetic oligonucleotide
  Antisense strand to SEQ ID NO: 595980
aacuacagaguauuuaagg

SEQ ID NO: 595982 - RNA, 19 nt, Artificial Sequence
  Description of Artificial Sequence: Synthetic oligonucleotide
  Sense strand starting at position 3720 of SEQ ID NO: 584872
cuuaaauacucuguaguua

SEQ ID NO: 595983 - RNA, 19 nt, Artificial Sequence
  Description of Artificial Sequence: Synthetic oligonucleotide
  Antisense strand to SEQ ID NO: 595982
uaacuacagaguauuuaag

SEQ ID NO: 595984 - RNA, 19 nt, Artificial Sequence
  Description of Artificial Sequence: Synthetic oligonucleotide
  Sense strand starting at position 3735 of SEQ ID NO: 584872
guuauauacuuugcuaaug

SEQ ID NO: 595985 - RNA, 19 nt, Artificial Sequence
  Description of Artificial Sequence: Synthetic oligonucleotide
  Antisense strand to SEQ ID NO: 595984
cauuagcaaaguauauaac

SEQ ID NO: 595986 - RNA, 19 nt, Artificial Sequence
  Description of Artificial Sequence: Synthetic oligonucleotide
  Sense strand starting at position 3746 of SEQ ID NO: 584872
ugcuaauggaaguggaaau

SEQ ID NO: 595987 - RNA, 19 nt, Artificial Sequence
  Description of Artificial Sequence: Synthetic oligonucleotide
  Antisense strand to SEQ ID NO: 595986
auuuccacuuccauuagca

SEQ ID NO: 595988 - RNA, 19 nt, Artificial Sequence
  Description of Artificial Sequence: Synthetic oligonucleotide
  Sense strand starting at position 3757 of SEQ ID NO: 584872
guggaaauguuucuggaag

SEQ ID NO: 595989 - RNA, 19 nt, Artificial Sequence
  Description of Artificial Sequence: Synthetic oligonucleotide
  Antisense strand to SEQ ID NO: 595988
cuuccagaaacauuuccac

SEQ ID NO: 595990 - RNA, 19 nt, Artificial Sequence
  Description of Artificial Sequence: Synthetic oligonucleotide
  Sense strand starting at position 3882 of SEQ ID NO: 584872
gcaaauauuuauggauaag

SEQ ID NO: 595991 - RNA, 19 nt, Artificial Sequence
  Description of Artificial Sequence: Synthetic oligonucleotide
  Antisense strand to SEQ ID NO: 595990
cuuauccauaaauauuugc

SEQ ID NO: 595992 - RNA, 19 nt, Artificial Sequence
  Description of Artificial Sequence: Synthetic oligonucleotide
  Sense strand starting at position 204 of SEQ ID NO: 584873
auuggaaugcuuuaaguuu

SEQ ID NO: 595993 - RNA, 19 nt, Artificial Sequence
  Description of Artificial Sequence: Synthetic oligonucleotide
  Antisense strand to SEQ ID NO: 595992
aaacuuaaagcauuccaau

SEQ ID NO: 595994 - RNA, 19 nt, Artificial Sequence
  Description of Artificial Sequence: Synthetic oligonucleotide
  Sense strand starting at position 389 of SEQ ID NO: 584873
gagaacaaggucugcagau

SEQ ID NO: 595995 - RNA, 19 nt, Artificial Sequence
  Description of Artificial Sequence: Synthetic oligonucleotide
  Antisense strand to SEQ ID NO: 595994
aucugcagaccuuguucuc

SEQ ID NO: 595996 - RNA, 19 nt, Artificial Sequence
  Description of Artificial Sequence: Synthetic oligonucleotide
  Sense strand starting at position 600 of SEQ ID NO: 584873
gcuguccucagagggagaa

SEQ ID NO: 595997 - RNA, 19 nt, Artificial Sequence
  Description of Artificial Sequence: Synthetic oligonucleotide
  Antisense strand to SEQ ID NO: 595996
uucucccucugaggacagc

SEQ ID NO: 595998 - RNA, 19 nt, Artificial Sequence
  Description of Artificial Sequence: Synthetic oligonucleotide
  Sense strand starting at position 701 of SEQ ID NO: 584873
cuuaaauacucuguaguua

SEQ ID NO: 595999 - RNA, 19 nt, Artificial Sequence
  Description of Artificial Sequence: Synthetic oligonucleotide
  Antisense strand to SEQ ID NO: 595998
uaacuacagaguauuuaag

SEQ ID NO: 596000 - RNA, 19 nt, Artificial Sequence
  Description of Artificial Sequence: Synthetic oligonucleotide
  Sense strand starting at position 716 of SEQ ID NO: 584873
guuauauacuuugcuaaug

SEQ ID NO: 596001 - RNA, 19 nt, Artificial Sequence
  Description of Artificial Sequence: Synthetic oligonucleotide
  Antisense strand to SEQ ID NO: 596000
cauuagcaaaguauauaac

SEQ ID NO: 596002 - RNA, 19 nt, Artificial Sequence
  Description of Artificial Sequence: Synthetic oligonucleotide
  Sense strand starting at position 727 of SEQ ID NO: 584873
ugcuaauggaaguggaaau

SEQ ID NO: 596003 - RNA, 19 nt, Artificial Sequence
  Description of Artificial Sequence: Synthetic oligonucleotide
  Antisense strand to SEQ ID NO: 596002
auuuccacuuccauuagca

SEQ ID NO: 596004 - RNA, 19 nt, Artificial Sequence
  Description of Artificial Sequence: Synthetic oligonucleotide
  Sense strand starting at position 738 of SEQ ID NO: 584873
guggaaauguuucuggaag

SEQ ID NO: 596005 - RNA, 19 nt, Artificial Sequence
  Description of Artificial Sequence: Synthetic oligonucleotide
  Antisense strand to SEQ ID NO: 596004
cuuccagaaacauuuccac

SEQ ID NO: 596006 - RNA, 19 nt, Artificial Sequence
  Description of Artificial Sequence: Synthetic oligonucleotide
  Sense strand starting at position 863 of SEQ ID NO: 584873
gcaaauauuuauggauaag

SEQ ID NO: 596007 - RNA, 19 nt, Artificial Sequence
  Description of Artificial Sequence: Synthetic oligonucleotide
  Antisense strand to SEQ ID NO: 596006
cuuauccauaaauauuugc

SEQ ID NO: 596008 - RNA, 19 nt, Artificial Sequence
  Description of Artificial Sequence: Synthetic oligonucleotide
  Sense strand starting at position 1005 of SEQ ID NO: 584873
ggcuuucugagucagagua

SEQ ID NO: 596009 - RNA, 19 nt, Artificial Sequence
  Description of Artificial Sequence: Synthetic oligonucleotide
  Antisense strand to SEQ ID NO: 596008
uacucugacucagaaagcc

SEQ ID NO: 596010 - RNA, 19 nt, Artificial Sequence
  Description of Artificial Sequence: Synthetic oligonucleotide
  Sense strand starting at position 1066 of SEQ ID NO: 584873
guagcuuguaaccauggga

SEQ ID NO: 596011 - RNA, 19 nt, Artificial Sequence
  Description of Artificial Sequence: Synthetic oligonucleotide
  Antisense strand to SEQ ID NO: 596010
ucccaugguuacaagcuac

SEQ ID NO: 596012 - RNA, 19 nt, Artificial Sequence
  Description of Artificial Sequence: Synthetic oligonucleotide
  Sense strand starting at position 1069 of SEQ ID NO: 584873
gcuuguaaccaugggaaau

SEQ ID NO: 596013 - RNA, 19 nt, Artificial Sequence
  Description of Artificial Sequence: Synthetic oligonucleotide
  Antisense strand to SEQ ID NO: 596012
auuucccaugguuacaagc

SEQ ID NO: 596014 - RNA, 19 nt, Artificial Sequence
  Description of Artificial Sequence: Synthetic oligonucleotide
  Sense strand starting at position 1081 of SEQ ID NO: 584873
gggaaaucaugcuuuaggu

SEQ ID NO: 596015 - RNA, 19 nt, Artificial Sequence
  Description of Artificial Sequence: Synthetic oligonucleotide
  Antisense strand to SEQ ID NO: 596014
accuaaagcaugauuuccc

SEQ ID NO: 596016 - RNA, 19 nt, Artificial Sequence
  Description of Artificial Sequence: Synthetic oligonucleotide
  Sense strand starting at position 1083 of SEQ ID NO: 584873
gaaaucaugcuuuagguuu

SEQ ID NO: 596017 - RNA, 19 nt, Artificial Sequence
  Description of Artificial Sequence: Synthetic oligonucleotide
  Antisense strand to SEQ ID NO: 596016
aaaccuaaagcaugauuuc

SEQ ID NO: 596018 - RNA, 19 nt, Artificial Sequence
  Description of Artificial Sequence: Synthetic oligonucleotide
  Sense strand starting at position 1281 of SEQ ID NO: 584873
ccaccuguugaauauguau

SEQ ID NO: 596019 - RNA, 19 nt, Artificial Sequence
  Description of Artificial Sequence: Synthetic oligonucleotide
  Antisense strand to SEQ ID NO: 596018
auacauauucaacaggugg

SEQ ID NO: 596020 - RNA, 19 nt, Artificial Sequence
  Description of Artificial Sequence: Synthetic oligonucleotide
  Sense strand starting at position 1404 of SEQ ID NO: 584873
cagaauagaugccuugagu

SEQ ID NO: 596021 - RNA, 19 nt, Artificial Sequence
  Description of Artificial Sequence: Synthetic oligonucleotide
  Antisense strand to SEQ ID NO: 596020
acucaaggcaucuauucug

SEQ ID NO: 596022 - RNA, 19 nt, Artificial Sequence
  Description of Artificial Sequence: Synthetic oligonucleotide
  Sense strand starting at position 1415 of SEQ ID NO: 584873
ccuugaguuggccagaaca

SEQ ID NO: 596023 - RNA, 19 nt, Artificial Sequence
  Description of Artificial Sequence: Synthetic oligonucleotide
  Antisense strand to SEQ ID NO: 596022
uguucuggccaacucaagg

SEQ ID NO: 596024 - RNA, 19 nt, Artificial Sequence
  Description of Artificial Sequence: Synthetic oligonucleotide
  Sense strand starting at position 2070 of SEQ ID NO: 584873
aauuguacacguugaggaa

SEQ ID NO: 596025 - RNA, 19 nt, Artificial Sequence
  Description of Artificial Sequence: Synthetic oligonucleotide
  Antisense strand to SEQ ID NO: 596024
uuccucaacguguacaauu

SEQ ID NO: 596026 - RNA, 19 nt, Artificial Sequence
  Description of Artificial Sequence: Synthetic oligonucleotide
  Sense strand starting at position 2071 of SEQ ID NO: 584873
auuguacacguugaggaaa

SEQ ID NO: 596027 - RNA, 19 nt, Artificial Sequence
  Description of Artificial Sequence: Synthetic oligonucleotide
  Antisense strand to SEQ ID NO: 596026
uuuccucaacguguacaau

SEQ ID NO: 596028 - RNA, 19 nt, Artificial Sequence
  Description of Artificial Sequence: Synthetic oligonucleotide
  Sense strand starting at position 2154 of SEQ ID NO: 584873
cguggauguauauaaguau

SEQ ID NO: 596029 - RNA, 19 nt, Artificial Sequence
  Description of Artificial Sequence: Synthetic oligonucleotide
  Antisense strand to SEQ ID NO: 596028
auacuuauauacauccacg

SEQ ID NO: 596030 - RNA, 19 nt, Artificial Sequence
  Description of Artificial Sequence: Synthetic oligonucleotide
  Sense strand starting at position 2217 of SEQ ID NO: 584873
auauuagcagaauggagua

SEQ ID NO: 596031 - RNA, 19 nt, Artificial Sequence
  Description of Artificial Sequence: Synthetic oligonucleotide
  Antisense strand to SEQ ID NO: 596030
uacuccauucugcuaauau

SEQ ID NO: 596032 - RNA, 19 nt, Artificial Sequence
  Description of Artificial Sequence: Synthetic oligonucleotide
  Sense strand starting at position 2264 of SEQ ID NO: 584873
agaggaagaugugcacuaa

SEQ ID NO: 596033 - RNA, 19 nt, Artificial Sequence
  Description of Artificial Sequence: Synthetic oligonucleotide
  Antisense strand to SEQ ID NO: 596032
uuagugcacaucuuccucu

SEQ ID NO: 596034 - RNA, 19 nt, Artificial Sequence
  Description of Artificial Sequence: Synthetic oligonucleotide
  Sense strand starting at position 2298 of SEQ ID NO: 584873
ggcaguuugcuugcaugua

SEQ ID NO: 596035 - RNA, 19 nt, Artificial Sequence
  Description of Artificial Sequence: Synthetic oligonucleotide
  Antisense strand to SEQ ID NO: 596034
uacaugcaagcaaacugcc

SEQ ID NO: 596036 - RNA, 19 nt, Artificial Sequence
  Description of Artificial Sequence: Synthetic oligonucleotide
  Sense strand starting at position 2313 of SEQ ID NO: 584873
uguagauagguacguagaa

SEQ ID NO: 596037 - RNA, 19 nt, Artificial Sequence
  Description of Artificial Sequence: Synthetic oligonucleotide
  Antisense strand to SEQ ID NO: 596036
uucuacguaccuaucuaca

SEQ ID NO: 596038 - RNA, 19 nt, Artificial Sequence
  Description of Artificial Sequence: Synthetic oligonucleotide
  Sense strand starting at position 2500 of SEQ ID NO: 584873
aggaaauucuuacugcaga

SEQ ID NO: 596039 - RNA, 19 nt, Artificial Sequence
  Description of Artificial Sequence: Synthetic oligonucleotide
  Antisense strand to SEQ ID NO: 596038
ucugcaguaagaauuuccu

SEQ ID NO: 596040 - RNA, 19 nt, Artificial Sequence
  Description of Artificial Sequence: Synthetic oligonucleotide
  Sense strand starting at position 2579 of SEQ ID NO: 584873
gguauuuguuucucacgcu

SEQ ID NO: 596041 - RNA, 19 nt, Artificial Sequence
  Description of Artificial Sequence: Synthetic oligonucleotide
  Antisense strand to SEQ ID NO: 596040
agcgugagaaacaaauacc

SEQ ID NO: 596042 - RNA, 19 nt, Artificial Sequence
  Description of Artificial Sequence: Synthetic oligonucleotide
  Sense strand starting at position 2605 of SEQ ID NO: 584873
gaguacauauucucugaag

SEQ ID NO: 596043 - RNA, 19 nt, Artificial Sequence
  Description of Artificial Sequence: Synthetic oligonucleotide
  Antisense strand to SEQ ID NO: 596042
cuucagagaauauguacuc

SEQ ID NO: 596044 - RNA, 19 nt, Artificial Sequence
  Description of Artificial Sequence: Synthetic oligonucleotide
  Sense strand starting at position 2770 of SEQ ID NO: 584873
cuaauaugugacuggagcu

SEQ ID NO: 596045 - RNA, 19 nt, Artificial Sequence
  Description of Artificial Sequence: Synthetic oligonucleotide
  Antisense strand to SEQ ID NO: 596044
agcuccagucacauauuag

SEQ ID NO: 596046 - RNA, 19 nt, Artificial Sequence
  Description of Artificial Sequence: Synthetic oligonucleotide
  Sense strand starting at position 2792 of SEQ ID NO: 584873
gggauuugauuauauugca

SEQ ID NO: 596047 - RNA, 19 nt, Artificial Sequence
  Description of Artificial Sequence: Synthetic oligonucleotide
  Antisense strand to SEQ ID NO: 596046
ugcaauauaaucaaauccc

SEQ ID NO: 596048 - RNA, 19 nt, Artificial Sequence
  Description of Artificial Sequence: Synthetic oligonucleotide
  Sense strand starting at position 2818 of SEQ ID NO: 584873
gaauuuaggcuguguggua

SEQ ID NO: 596049 - RNA, 19 nt, Artificial Sequence
  Description of Artificial Sequence: Synthetic oligonucleotide
  Antisense strand to SEQ ID NO: 596048
uaccacacagccuaaauuc

SEQ ID NO: 596050 - RNA, 19 nt, Artificial Sequence
  Description of Artificial Sequence: Synthetic oligonucleotide
  Sense strand starting at position 2819 of SEQ ID NO: 584873
aauuuaggcugugugguau

SEQ ID NO: 596051 - RNA, 19 nt, Artificial Sequence
  Description of Artificial Sequence: Synthetic oligonucleotide
  Antisense strand to SEQ ID NO: 596050
auaccacacagccuaaauu

SEQ ID NO: 596052 - RNA, 19 nt, Artificial Sequence
  Description of Artificial Sequence: Synthetic oligonucleotide
  Sense strand starting at position 3213 of SEQ ID NO: 584873
acauaucugaggugccaga

SEQ ID NO: 596053 - RNA, 19 nt, Artificial Sequence
  Description of Artificial Sequence: Synthetic oligonucleotide
  Antisense strand to SEQ ID NO: 596052
ucuggcaccucagauaugu

SEQ ID NO: 596054 - RNA, 19 nt, Artificial Sequence
  Description of Artificial Sequence: Synthetic oligonucleotide
  Sense strand starting at position 3238 of SEQ ID NO: 584873
cuggacugucaccaucuaa

SEQ ID NO: 596055 - RNA, 19 nt, Artificial Sequence
  Description of Artificial Sequence: Synthetic oligonucleotide
  Antisense strand to SEQ ID NO: 596054
uuagauggugacaguccag

SEQ ID NO: 596056 - RNA, 19 nt, Artificial Sequence
  Description of Artificial Sequence: Synthetic oligonucleotide
  Sense strand starting at position 3295 of SEQ ID NO: 584873
auauauuaguacucagggu

SEQ ID NO: 596057 - RNA, 19 nt, Artificial Sequence
  Description of Artificial Sequence: Synthetic oligonucleotide
  Antisense strand to SEQ ID NO: 596056
acccugaguacuaauauau

SEQ ID NO: 596058 - RNA, 19 nt, Artificial Sequence
  Description of Artificial Sequence: Synthetic oligonucleotide
  Sense strand starting at position 3299 of SEQ ID NO: 584873
auuaguacucaggguaaau

SEQ ID NO: 596059 - RNA, 19 nt, Artificial Sequence
  Description of Artificial Sequence: Synthetic oligonucleotide
  Antisense strand to SEQ ID NO: 596058
auuuacccugaguacuaau

SEQ ID NO: 596060 - RNA, 19 nt, Artificial Sequence
  Description of Artificial Sequence: Synthetic oligonucleotide
  Sense strand starting at position 3309 of SEQ ID NO: 584873
aggguaaauuuccaaauaa

SEQ ID NO: 596061 - RNA, 19 nt, Artificial Sequence
  Description of Artificial Sequence: Synthetic oligonucleotide
  Antisense strand to SEQ ID NO: 596060
uuauuuggaaauuuacccu

SEQ ID NO: 596062 - RNA, 19 nt, Artificial Sequence
  Description of Artificial Sequence: Synthetic oligonucleotide
  Sense strand starting at position 3364 of SEQ ID NO: 584873
uauuuaagccagugguacu

SEQ ID NO: 596063 - RNA, 19 nt, Artificial Sequence
  Description of Artificial Sequence: Synthetic oligonucleotide
  Antisense strand to SEQ ID NO: 596062
aguaccacuggcuuaaaua

SEQ ID NO: 596064 - RNA, 19 nt, Artificial Sequence
  Description of Artificial Sequence: Synthetic oligonucleotide
  Sense strand starting at position 3502 of SEQ ID NO: 584873
auauaucuaccauguagau

SEQ ID NO: 596065 - RNA, 19 nt, Artificial Sequence
  Description of Artificial Sequence: Synthetic oligonucleotide
  Antisense strand to SEQ ID NO: 596064
aucuacaugguagauauau

SEQ ID NO: 596066 - RNA, 19 nt, Artificial Sequence
  Description of Artificial Sequence: Synthetic oligonucleotide
  Sense strand starting at position 3656 of SEQ ID NO: 584873
gagaucguauuaguaagaa

SEQ ID NO: 596067 - RNA, 19 nt, Artificial Sequence
  Description of Artificial Sequence: Synthetic oligonucleotide
  Antisense strand to SEQ ID NO: 596066
uucuuacuaauacgaucuc

SEQ ID NO: 596068 - RNA, 19 nt, Artificial Sequence
  Description of Artificial Sequence: Synthetic oligonucleotide
  Sense strand starting at position 3751 of SEQ ID NO: 584873
aggaguuucugagcccaac

SEQ ID NO: 596069 - RNA, 19 nt, Artificial Sequence
  Description of Artificial Sequence: Synthetic oligonucleotide
  Antisense strand to SEQ ID NO: 596068
guugggcucagaaacuccu

SEQ ID NO: 596070 - RNA, 19 nt, Artificial Sequence
  Description of Artificial Sequence: Synthetic oligonucleotide
  Sense strand starting at position 3950 of SEQ ID NO: 584873
augaaagguucgguaucag

SEQ ID NO: 596071 - RNA, 19 nt, Artificial Sequence
  Description of Artificial Sequence: Synthetic oligonucleotide
  Antisense strand to SEQ ID NO: 596070
cugauaccgaaccuuucau

SEQ ID NO: 596072 - RNA, 19 nt, Artificial Sequence
  Description of Artificial Sequence: Synthetic oligonucleotide
  Sense strand starting at position 73 of SEQ ID NO: 584874
ucggaaguuaagugagcaa

SEQ ID NO: 596073 - RNA, 19 nt, Artificial Sequence
  Description of Artificial Sequence: Synthetic oligonucleotide
  Antisense strand to SEQ ID NO: 596072
uugcucacuuaacuuccga

SEQ ID NO: 596074 - RNA, 19 nt, Artificial Sequence
  Description of Artificial Sequence: Synthetic oligonucleotide
  Sense strand starting at position 208 of SEQ ID NO: 584874
auauaagcugcucaguaaa

SEQ ID NO: 596075 - RNA, 19 nt, Artificial Sequence
  Description of Artificial Sequence: Synthetic oligonucleotide
  Antisense strand to SEQ ID NO: 596074
uuuacugagcagcuuauau

SEQ ID NO: 596076 - RNA, 19 nt, Artificial Sequence
  Description of Artificial Sequence: Synthetic oligonucleotide
  Sense strand starting at position 210 of SEQ ID NO: 584874
auaagcugcucaguaaaua

SEQ ID NO: 596077 - RNA, 19 nt, Artificial Sequence
  Description of Artificial Sequence: Synthetic oligonucleotide
  Antisense strand to SEQ ID NO: 596076
uauuuacugagcagcuuau

SEQ ID NO: 596078 - RNA, 19 nt, Artificial Sequence
  Description of Artificial Sequence: Synthetic oligonucleotide
  Sense strand starting at position 298 of SEQ ID NO: 584874
gcuaccugagucugggaau

SEQ ID NO: 596079 - RNA, 19 nt, Artificial Sequence
  Description of Artificial Sequence: Synthetic oligonucleotide
  Antisense strand to SEQ ID NO: 596078
auucccagacucagguagc

SEQ ID NO: 596080 - RNA, 19 nt, Artificial Sequence
  Description of Artificial Sequence: Synthetic oligonucleotide
  Sense strand starting at position 542 of SEQ ID NO: 584874
cucugcuuagagugagaca

SEQ ID NO: 596081 - RNA, 19 nt, Artificial Sequence
  Description of Artificial Sequence: Synthetic oligonucleotide
  Antisense strand to SEQ ID NO: 596080
ugucucacucuaagcagag

SEQ ID NO: 596082 - RNA, 19 nt, Artificial Sequence
  Description of Artificial Sequence: Synthetic oligonucleotide
  Sense strand starting at position 543 of SEQ ID NO: 584874
ucugcuuagagugagacau

SEQ ID NO: 596083 - RNA, 19 nt, Artificial Sequence
  Description of Artificial Sequence: Synthetic oligonucleotide
  Antisense strand to SEQ ID NO: 596082
augucucacucuaagcaga

SEQ ID NO: 596084 - RNA, 19 nt, Artificial Sequence
  Description of Artificial Sequence: Synthetic oligonucleotide
  Sense strand starting at position 798 of SEQ ID NO: 584874
guaaucauauacuuuggua

SEQ ID NO: 596085 - RNA, 19 nt, Artificial Sequence
  Description of Artificial Sequence: Synthetic oligonucleotide
  Antisense strand to SEQ ID NO: 596084
uaccaaaguauaugauuac

SEQ ID NO: 596086 - RNA, 19 nt, Artificial Sequence
  Description of Artificial Sequence: Synthetic oligonucleotide
  Sense strand starting at position 916 of SEQ ID NO: 584874
aguuguaugcuuuacccaa

SEQ ID NO: 596087 - RNA, 19 nt, Artificial Sequence
  Description of Artificial Sequence: Synthetic oligonucleotide
  Antisense strand to SEQ ID NO: 596086
uuggguaaagcauacaacu

SEQ ID NO: 596088 - RNA, 19 nt, Artificial Sequence
  Description of Artificial Sequence: Synthetic oligonucleotide
  Sense strand starting at position 993 of SEQ ID NO: 584874
aaauuuaugucugagguug

SEQ ID NO: 596089 - RNA, 19 nt, Artificial Sequence
  Description of Artificial Sequence: Synthetic oligonucleotide
  Antisense strand to SEQ ID NO: 596088
caaccucagacauaaauuu

SEQ ID NO: 596090 - RNA, 19 nt, Artificial Sequence
  Description of Artificial Sequence: Synthetic oligonucleotide
  Sense strand starting at position 998 of SEQ ID NO: 584874
uaugucugagguuguuaaa

SEQ ID NO: 596091 - RNA, 19 nt, Artificial Sequence
  Description of Artificial Sequence: Synthetic oligonucleotide
  Antisense strand to SEQ ID NO: 596090
uuuaacaaccucagacaua

SEQ ID NO: 596092 - RNA, 19 nt, Artificial Sequence
  Description of Artificial Sequence: Synthetic oligonucleotide
  Sense strand starting at position 1107 of SEQ ID NO: 584874
gaaauagauuguguccauu

SEQ ID NO: 596093 - RNA, 19 nt, Artificial Sequence
  Description of Artificial Sequence: Synthetic oligonucleotide
  Antisense strand to SEQ ID NO: 596092
aauggacacaaucuauuuc

SEQ ID NO: 596094 - RNA, 19 nt, Artificial Sequence
  Description of Artificial Sequence: Synthetic oligonucleotide
  Sense strand starting at position 1109 of SEQ ID NO: 584874
aauagauuguguccauuga

SEQ ID NO: 596095 - RNA, 19 nt, Artificial Sequence
  Description of Artificial Sequence: Synthetic oligonucleotide
  Antisense strand to SEQ ID NO: 596094
ucaauggacacaaucuauu

SEQ ID NO: 596096 - RNA, 19 nt, Artificial Sequence
  Description of Artificial Sequence: Synthetic oligonucleotide
  Sense strand starting at position 1110 of SEQ ID NO: 584874
auagauuguguccauugaa

SEQ ID NO: 596097 - RNA, 19 nt, Artificial Sequence
  Description of Artificial Sequence: Synthetic oligonucleotide
  Antisense strand to SEQ ID NO: 596096
uucaauggacacaaucuau

SEQ ID NO: 596098 - RNA, 19 nt, Artificial Sequence
  Description of Artificial Sequence: Synthetic oligonucleotide
  Sense strand starting at position 1130 of SEQ ID NO: 584874
cacauauauuggguuauga

SEQ ID NO: 596099 - RNA, 19 nt, Artificial Sequence
  Description of Artificial Sequence: Synthetic oligonucleotide
  Antisense strand to SEQ ID NO: 596098
ucauaacccaauauaugug

SEQ ID NO: 596100 - RNA, 19 nt, Artificial Sequence
  Description of Artificial Sequence: Synthetic oligonucleotide
  Sense strand starting at position 1410 of SEQ ID NO: 584874
aggcacaucucuuucuaga

SEQ ID NO: 596101 - RNA, 19 nt, Artificial Sequence
  Description of Artificial Sequence: Synthetic oligonucleotide
  Antisense strand to SEQ ID NO: 596100
ucuagaaagagaugugccu

SEQ ID NO: 596102 - RNA, 19 nt, Artificial Sequence
  Description of Artificial Sequence: Synthetic oligonucleotide
  Sense strand starting at position 2067 of SEQ ID NO: 584874
gugaaaguacauugaauug

SEQ ID NO: 596103 - RNA, 19 nt, Artificial Sequence
  Description of Artificial Sequence: Synthetic oligonucleotide
  Antisense strand to SEQ ID NO: 596102
caauucaauguacuuucac

SEQ ID NO: 596104 - RNA, 19 nt, Artificial Sequence
  Description of Artificial Sequence: Synthetic oligonucleotide
  Sense strand starting at position 2155 of SEQ ID NO: 584874
cauuauugcguguccaugu

SEQ ID NO: 596105 - RNA, 19 nt, Artificial Sequence
  Description of Artificial Sequence: Synthetic oligonucleotide
  Antisense strand to SEQ ID NO: 596104
acauggacacgcaauaaug

SEQ ID NO: 596106 - RNA, 19 nt, Artificial Sequence
  Description of Artificial Sequence: Synthetic oligonucleotide
  Sense strand starting at position 2160 of SEQ ID NO: 584874
uugcguguccauguauaua

SEQ ID NO: 596107 - RNA, 19 nt, Artificial Sequence
  Description of Artificial Sequence: Synthetic oligonucleotide
  Antisense strand to SEQ ID NO: 596106
uauauacauggacacgcaa

SEQ ID NO: 596108 - RNA, 19 nt, Artificial Sequence
  Description of Artificial Sequence: Synthetic oligonucleotide
  Sense strand starting at position 2264 of SEQ ID NO: 584874
agagaaaguugugcacuaa

SEQ ID NO: 596109 - RNA, 19 nt, Artificial Sequence
  Description of Artificial Sequence: Synthetic oligonucleotide
  Antisense strand to SEQ ID NO: 596108
uuagugcacaacuuucucu

SEQ ID NO: 596110 - RNA, 19 nt, Artificial Sequence
  Description of Artificial Sequence: Synthetic oligonucleotide
  Sense strand starting at position 2265 of SEQ ID NO: 584874
gagaaaguugugcacuaau

SEQ ID NO: 596111 - RNA, 19 nt, Artificial Sequence
  Description of Artificial Sequence: Synthetic oligonucleotide
  Antisense strand to SEQ ID NO: 596110
auuagugcacaacuuucuc

SEQ ID NO: 596112 - RNA, 19 nt, Artificial Sequence
  Description of Artificial Sequence: Synthetic oligonucleotide
  Sense strand starting at position 2351 of SEQ ID NO: 584874
uuacuacagcgucaaauaa

SEQ ID NO: 596113 - RNA, 19 nt, Artificial Sequence
  Description of Artificial Sequence: Synthetic oligonucleotide
  Antisense strand to SEQ ID NO: 596112
uuauuugacgcuguaguaa

SEQ ID NO: 596114 - RNA, 19 nt, Artificial Sequence
  Description of Artificial Sequence: Synthetic oligonucleotide
  Sense strand starting at position 2429 of SEQ ID NO: 584874
gacuuaggaucuguuauca

SEQ ID NO: 596115 - RNA, 19 nt, Artificial Sequence
  Description of Artificial Sequence: Synthetic oligonucleotide
  Antisense strand to SEQ ID NO: 596114
ugauaacagauccuaaguc

SEQ ID NO: 596116 - RNA, 19 nt, Artificial Sequence
  Description of Artificial Sequence: Synthetic oligonucleotide
  Sense strand starting at position 2605 of SEQ ID NO: 584874
gccaguggaguacauauua

SEQ ID NO: 596117 - RNA, 19 nt, Artificial Sequence
  Description of Artificial Sequence: Synthetic oligonucleotide
  Antisense strand to SEQ ID NO: 596116
uaauauguacuccacuggc

SEQ ID NO: 596118 - RNA, 19 nt, Artificial Sequence
  Description of Artificial Sequence: Synthetic oligonucleotide
  Sense strand starting at position 2612 of SEQ ID NO: 584874
gaguacauauuaucugaag

SEQ ID NO: 596119 - RNA, 19 nt, Artificial Sequence
  Description of Artificial Sequence: Synthetic oligonucleotide
  Antisense strand to SEQ ID NO: 596118
cuucagauaauauguacuc

SEQ ID NO: 596120 - RNA, 19 nt, Artificial Sequence
  Description of Artificial Sequence: Synthetic oligonucleotide
  Sense strand starting at position 2662 of SEQ ID NO: 584874
cuguaagaggucugugaga

SEQ ID NO: 596121 - RNA, 19 nt, Artificial Sequence
  Description of Artificial Sequence: Synthetic oligonucleotide
  Antisense strand to SEQ ID NO: 596120
ucucacagaccucuuacag

SEQ ID NO: 596122 - RNA, 19 nt, Artificial Sequence
  Description of Artificial Sequence: Synthetic oligonucleotide
  Sense strand starting at position 2664 of SEQ ID NO: 584874
guaagaggucugugagaca

SEQ ID NO: 596123 - RNA, 19 nt, Artificial Sequence
  Description of Artificial Sequence: Synthetic oligonucleotide
  Antisense strand to SEQ ID NO: 596122
ugucucacagaccucuuac

SEQ ID NO: 596124 - RNA, 19 nt, Artificial Sequence
  Description of Artificial Sequence: Synthetic oligonucleotide
  Sense strand starting at position 2675 of SEQ ID NO: 584874
gugagacaaacugguucuu

SEQ ID NO: 596125 - RNA, 19 nt, Artificial Sequence
  Description of Artificial Sequence: Synthetic oligonucleotide
  Antisense strand to SEQ ID NO: 596124
aagaaccaguuugucucac

SEQ ID NO: 596126 - RNA, 19 nt, Artificial Sequence
  Description of Artificial Sequence: Synthetic oligonucleotide
  Sense strand starting at position 2807 of SEQ ID NO: 584874
gaauuuaggcugugcagua

SEQ ID NO: 596127 - RNA, 19 nt, Artificial Sequence
  Description of Artificial Sequence: Synthetic oligonucleotide
  Antisense strand to SEQ ID NO: 596126
uacugcacagccuaaauuc

SEQ ID NO: 596128 - RNA, 19 nt, Artificial Sequence
  Description of Artificial Sequence: Synthetic oligonucleotide
  Sense strand starting at position 2820 of SEQ ID NO: 584874
gcaguaucugguugagaug

SEQ ID NO: 596129 - RNA, 19 nt, Artificial Sequence
  Description of Artificial Sequence: Synthetic oligonucleotide
  Antisense strand to SEQ ID NO: 596128
caucucaaccagauacugc

SEQ ID NO: 596130 - RNA, 19 nt, Artificial Sequence
  Description of Artificial Sequence: Synthetic oligonucleotide
  Sense strand starting at position 2869 of SEQ ID NO: 584874
uuucuucuuggugauaaag

SEQ ID NO: 596131 - RNA, 19 nt, Artificial Sequence
  Description of Artificial Sequence: Synthetic oligonucleotide
  Antisense strand to SEQ ID NO: 596130
cuuuaucaccaagaagaaa

SEQ ID NO: 596132 - RNA, 19 nt, Artificial Sequence
  Description of Artificial Sequence: Synthetic oligonucleotide
  Sense strand starting at position 2957 of SEQ ID NO: 584874
gaaucaauaguuuguaggu

SEQ ID NO: 596133 - RNA, 19 nt, Artificial Sequence
  Description of Artificial Sequence: Synthetic oligonucleotide
  Antisense strand to SEQ ID NO: 596132
accuacaaacuauugauuc

SEQ ID NO: 596134 - RNA, 19 nt, Artificial Sequence
  Description of Artificial Sequence: Synthetic oligonucleotide
  Sense strand starting at position 2958 of SEQ ID NO: 584874
aaucaauaguuuguaggua

SEQ ID NO: 596135 - RNA, 19 nt, Artificial Sequence
  Description of Artificial Sequence: Synthetic oligonucleotide
  Antisense strand to SEQ ID NO: 596134
uaccuacaaacuauugauu

SEQ ID NO: 596136 - RNA, 19 nt, Artificial Sequence
  Description of Artificial Sequence: Synthetic oligonucleotide
  Sense strand starting at position 2962 of SEQ ID NO: 584874
aauaguuuguagguaaagu

SEQ ID NO: 596137 - RNA, 19 nt, Artificial Sequence
  Description of Artificial Sequence: Synthetic oligonucleotide
  Antisense strand to SEQ ID NO: 596136
acuuuaccuacaaacuauu

SEQ ID NO: 596138 - RNA, 19 nt, Artificial Sequence
  Description of Artificial Sequence: Synthetic oligonucleotide
  Sense strand starting at position 2963 of SEQ ID NO: 584874
auaguuuguagguaaaguu

SEQ ID NO: 596139 - RNA, 19 nt, Artificial Sequence
  Description of Artificial Sequence: Synthetic oligonucleotide
  Antisense strand to SEQ ID NO: 596138
aacuuuaccuacaaacuau

SEQ ID NO: 596140 - RNA, 19 nt, Artificial Sequence
  Description of Artificial Sequence: Synthetic oligonucleotide
  Sense strand starting at position 2990 of SEQ ID NO: 584874
guguuucucccagagaucc

SEQ ID NO: 596141 - RNA, 19 nt, Artificial Sequence
  Description of Artificial Sequence: Synthetic oligonucleotide
  Antisense strand to SEQ ID NO: 596140
ggaucucugggagaaacac

SEQ ID NO: 596142 - RNA, 19 nt, Artificial Sequence
  Description of Artificial Sequence: Synthetic oligonucleotide
  Sense strand starting at position 3022 of SEQ ID NO: 584874
ccaagauagcugggagugu

SEQ ID NO: 596143 - RNA, 19 nt, Artificial Sequence
  Description of Artificial Sequence: Synthetic oligonucleotide
  Antisense strand to SEQ ID NO: 596142
acacucccagcuaucuugg

SEQ ID NO: 596144 - RNA, 19 nt, Artificial Sequence
  Description of Artificial Sequence: Synthetic oligonucleotide
  Sense strand starting at position 3197 of SEQ ID NO: 584874
gaaugacaucucugagcug

SEQ ID NO: 596145 - RNA, 19 nt, Artificial Sequence
  Description of Artificial Sequence: Synthetic oligonucleotide
  Antisense strand to SEQ ID NO: 596144
cagcucagagaugucauuc

SEQ ID NO: 596146 - RNA, 19 nt, Artificial Sequence
  Description of Artificial Sequence: Synthetic oligonucleotide
  Sense strand starting at position 3431 of SEQ ID NO: 584874
ggugaauaccaauaugccu

SEQ ID NO: 596147 - RNA, 19 nt, Artificial Sequence
  Description of Artificial Sequence: Synthetic oligonucleotide
  Antisense strand to SEQ ID NO: 596146
aggcauauugguauucacc

SEQ ID NO: 596148 - RNA, 19 nt, Artificial Sequence
  Description of Artificial Sequence: Synthetic oligonucleotide
  Sense strand starting at position 3446 of SEQ ID NO: 584874
gccuaccauguagauuaua

SEQ ID NO: 596149 - RNA, 19 nt, Artificial Sequence
  Description of Artificial Sequence: Synthetic oligonucleotide
  Antisense strand to SEQ ID NO: 596148
uauaaucuacaugguaggc

SEQ ID NO: 596150 - RNA, 19 nt, Artificial Sequence
  Description of Artificial Sequence: Synthetic oligonucleotide
  Sense strand starting at position 3975 of SEQ ID NO: 584874
gccugaaggauccaaguca

SEQ ID NO: 596151 - RNA, 19 nt, Artificial Sequence
  Description of Artificial Sequence: Synthetic oligonucleotide
  Antisense strand to SEQ ID NO: 596150
ugacuuggauccuucaggc

SEQ ID NO: 596152 - RNA, 19 nt, Artificial Sequence
  Description of Artificial Sequence: Synthetic oligonucleotide
  Sense strand starting at position 143 of SEQ ID NO: 584875
ggccaaugacucuaaaguc

SEQ ID NO: 596153 - RNA, 19 nt, Artificial Sequence
  Description of Artificial Sequence: Synthetic oligonucleotide
  Antisense strand to SEQ ID NO: 596152
gacuuuagagucauuggcc

SEQ ID NO: 596154 - RNA, 19 nt, Artificial Sequence
  Description of Artificial Sequence: Synthetic oligonucleotide
  Sense strand starting at position 291 of SEQ ID NO: 584875
agaaauccagcaugaugau

SEQ ID NO: 596155 - RNA, 19 nt, Artificial Sequence
  Description of Artificial Sequence: Synthetic oligonucleotide
  Antisense strand to SEQ ID NO: 596154
aucaucaugcuggauuucu

SEQ ID NO: 596156 - RNA, 19 nt, Artificial Sequence
  Description of Artificial Sequence: Synthetic oligonucleotide
  Sense strand starting at position 318 of SEQ ID NO: 584875
cuguuuguuacagagucaa

SEQ ID NO: 596157 - RNA, 19 nt, Artificial Sequence
  Description of Artificial Sequence: Synthetic oligonucleotide
  Antisense strand to SEQ ID NO: 596156
uugacucuguaacaaacag

SEQ ID NO: 596158 - RNA, 19 nt, Artificial Sequence
  Description of Artificial Sequence: Synthetic oligonucleotide
  Sense strand starting at position 422 of SEQ ID NO: 584875
ucuauuacucuugguaaga

SEQ ID NO: 596159 - RNA, 19 nt, Artificial Sequence
  Description of Artificial Sequence: Synthetic oligonucleotide
  Antisense strand to SEQ ID NO: 596158
ucuuaccaagaguaauaga

SEQ ID NO: 596160 - RNA, 19 nt, Artificial Sequence
  Description of Artificial Sequence: Synthetic oligonucleotide
  Sense strand starting at position 423 of SEQ ID NO: 584875
cuauuacucuugguaagau

SEQ ID NO: 596161 - RNA, 19 nt, Artificial Sequence
  Description of Artificial Sequence: Synthetic oligonucleotide
  Antisense strand to SEQ ID NO: 596160
aucuuaccaagaguaauag

SEQ ID NO: 596162 - RNA, 19 nt, Artificial Sequence
  Description of Artificial Sequence: Synthetic oligonucleotide
  Sense strand starting at position 571 of SEQ ID NO: 584875
uggaaaccuuauucuuguu

SEQ ID NO: 596163 - RNA, 19 nt, Artificial Sequence
  Description of Artificial Sequence: Synthetic oligonucleotide
  Antisense strand to SEQ ID NO: 596162
aacaagaauaagguuucca

SEQ ID NO: 596164 - RNA, 19 nt, Artificial Sequence
  Description of Artificial Sequence: Synthetic oligonucleotide
  Sense strand starting at position 655 of SEQ ID NO: 584875
ggauuccucuucucuuaga

SEQ ID NO: 596165 - RNA, 19 nt, Artificial Sequence
  Description of Artificial Sequence: Synthetic oligonucleotide
  Antisense strand to SEQ ID NO: 596164
ucuaagagaagaggaaucc

SEQ ID NO: 596166 - RNA, 19 nt, Artificial Sequence
  Description of Artificial Sequence: Synthetic oligonucleotide
  Sense strand starting at position 737 of SEQ ID NO: 584875
aggccaauuacugggacua

SEQ ID NO: 596167 - RNA, 19 nt, Artificial Sequence
  Description of Artificial Sequence: Synthetic oligonucleotide
  Antisense strand to SEQ ID NO: 596166
uagucccaguaauuggccu

SEQ ID NO: 596168 - RNA, 19 nt, Artificial Sequence
  Description of Artificial Sequence: Synthetic oligonucleotide
  Sense strand starting at position 738 of SEQ ID NO: 584875
ggccaauuacugggacuau

SEQ ID NO: 596169 - RNA, 19 nt, Artificial Sequence
  Description of Artificial Sequence: Synthetic oligonucleotide
  Antisense strand to SEQ ID NO: 596168
auagucccaguaauuggcc

SEQ ID NO: 596170 - RNA, 19 nt, Artificial Sequence
  Description of Artificial Sequence: Synthetic oligonucleotide
  Sense strand starting at position 798 of SEQ ID NO: 584875
ggacacugguuugucuaga

SEQ ID NO: 596171 - RNA, 19 nt, Artificial Sequence
  Description of Artificial Sequence: Synthetic oligonucleotide
  Antisense strand to SEQ ID NO: 596170
ucuagacaaaccagugucc

SEQ ID NO: 596172 - RNA, 19 nt, Artificial Sequence
  Description of Artificial Sequence: Synthetic oligonucleotide
  Sense strand starting at position 842 of SEQ ID NO: 584875
cuaagacaugucugaucuc

SEQ ID NO: 596173 - RNA, 19 nt, Artificial Sequence
  Description of Artificial Sequence: Synthetic oligonucleotide
  Antisense strand to SEQ ID NO: 596172
gagaucagacaugucuuag

SEQ ID NO: 596174 - RNA, 19 nt, Artificial Sequence
  Description of Artificial Sequence: Synthetic oligonucleotide
  Sense strand starting at position 845 of SEQ ID NO: 584875
agacaugucugaucucuuc

SEQ ID NO: 596175 - RNA, 19 nt, Artificial Sequence
  Description of Artificial Sequence: Synthetic oligonucleotide
  Antisense strand to SEQ ID NO: 596174
gaagagaucagacaugucu

SEQ ID NO: 596176 - RNA, 19 nt, Artificial Sequence
  Description of Artificial Sequence: Synthetic oligonucleotide
  Sense strand starting at position 863 of SEQ ID NO: 584875
ccuuguuaucugcaaauug

SEQ ID NO: 596177 - RNA, 19 nt, Artificial Sequence
  Description of Artificial Sequence: Synthetic oligonucleotide
  Antisense strand to SEQ ID NO: 596176
caauuugcagauaacaagg

SEQ ID NO: 596178 - RNA, 19 nt, Artificial Sequence
  Description of Artificial Sequence: Synthetic oligonucleotide
  Sense strand starting at position 925 of SEQ ID NO: 584875
uuaugucauguaugauaug

SEQ ID NO: 596179 - RNA, 19 nt, Artificial Sequence
  Description of Artificial Sequence: Synthetic oligonucleotide
  Antisense strand to SEQ ID NO: 596178
cauaucauacaugacauaa

SEQ ID NO: 596180 - RNA, 19 nt, Artificial Sequence
  Description of Artificial Sequence: Synthetic oligonucleotide
  Sense strand starting at position 996 of SEQ ID NO: 584875
ccaauccugcuaggaagaa

SEQ ID NO: 596181 - RNA, 19 nt, Artificial Sequence
  Description of Artificial Sequence: Synthetic oligonucleotide
  Antisense strand to SEQ ID NO: 596180
uucuuccuagcaggauugg

SEQ ID NO: 596182 - RNA, 19 nt, Artificial Sequence
  Description of Artificial Sequence: Synthetic oligonucleotide
  Sense strand starting at position 1565 of SEQ ID NO: 584875
aaaguacuagagugaauua

SEQ ID NO: 596183 - RNA, 19 nt, Artificial Sequence
  Description of Artificial Sequence: Synthetic oligonucleotide
  Antisense strand to SEQ ID NO: 596182
uaauucacucuaguacuuu

SEQ ID NO: 596184 - RNA, 19 nt, Artificial Sequence
  Description of Artificial Sequence: Synthetic oligonucleotide
  Sense strand starting at position 1584 of SEQ ID NO: 584875
auaauuuaacguggugcaa

SEQ ID NO: 596185 - RNA, 19 nt, Artificial Sequence
  Description of Artificial Sequence: Synthetic oligonucleotide
  Antisense strand to SEQ ID NO: 596184
uugcaccacguuaaauuau

SEQ ID NO: 596186 - RNA, 19 nt, Artificial Sequence
  Description of Artificial Sequence: Synthetic oligonucleotide
  Sense strand starting at position 1709 of SEQ ID NO: 584875
guaugaggugcucaaguaa

SEQ ID NO: 596187 - RNA, 19 nt, Artificial Sequence
  Description of Artificial Sequence: Synthetic oligonucleotide
  Antisense strand to SEQ ID NO: 596186
uuacuugagcaccucauac

SEQ ID NO: 596188 - RNA, 19 nt, Artificial Sequence
  Description of Artificial Sequence: Synthetic oligonucleotide
  Sense strand starting at position 1734 of SEQ ID NO: 584875
aaaggugacucagcuagga

SEQ ID NO: 596189 - RNA, 19 nt, Artificial Sequence
  Description of Artificial Sequence: Synthetic oligonucleotide
  Antisense strand to SEQ ID NO: 596188
uccuagcugagucaccuuu

SEQ ID NO: 596190 - RNA, 19 nt, Artificial Sequence
  Description of Artificial Sequence: Synthetic oligonucleotide
  Sense strand starting at position 1736 of SEQ ID NO: 584875
aggugacucagcuaggagu

SEQ ID NO: 596191 - RNA, 19 nt, Artificial Sequence
  Description of Artificial Sequence: Synthetic oligonucleotide
  Antisense strand to SEQ ID NO: 596190
acuccuagcugagucaccu

SEQ ID NO: 596192 - RNA, 19 nt, Artificial Sequence
  Description of Artificial Sequence: Synthetic oligonucleotide
  Sense strand starting at position 1932 of SEQ ID NO: 584875
cauugucagcaggaugaau

SEQ ID NO: 596193 - RNA, 19 nt, Artificial Sequence
  Description of Artificial Sequence: Synthetic oligonucleotide
  Antisense strand to SEQ ID NO: 596192
auucauccugcugacaaug

SEQ ID NO: 596194 - RNA, 19 nt, Artificial Sequence
  Description of Artificial Sequence: Synthetic oligonucleotide
  Sense strand starting at position 1972 of SEQ ID NO: 584875
gacagauuguagccuggaa

SEQ ID NO: 596195 - RNA, 19 nt, Artificial Sequence
  Description of Artificial Sequence: Synthetic oligonucleotide
  Antisense strand to SEQ ID NO: 596194
uuccaggcuacaaucuguc

SEQ ID NO: 596196 - RNA, 19 nt, Artificial Sequence
  Description of Artificial Sequence: Synthetic oligonucleotide
  Sense strand starting at position 2085 of SEQ ID NO: 584875
gcagucuuagcagagaauc

SEQ ID NO: 596197 - RNA, 19 nt, Artificial Sequence
  Description of Artificial Sequence: Synthetic oligonucleotide
  Antisense strand to SEQ ID NO: 596196
gauucucugcuaagacugc

SEQ ID NO: 596198 - RNA, 19 nt, Artificial Sequence
  Description of Artificial Sequence: Synthetic oligonucleotide
  Sense strand starting at position 2139 of SEQ ID NO: 584875
ggcuccauuucucugcaau

SEQ ID NO: 596199 - RNA, 19 nt, Artificial Sequence
  Description of Artificial Sequence: Synthetic oligonucleotide
  Antisense strand to SEQ ID NO: 596198
auugcagagaaauggagcc

SEQ ID NO: 596200 - RNA, 19 nt, Artificial Sequence
  Description of Artificial Sequence: Synthetic oligonucleotide
  Sense strand starting at position 2280 of SEQ ID NO: 584875
accugcaguucuccagaaa

SEQ ID NO: 596201 - RNA, 19 nt, Artificial Sequence
  Description of Artificial Sequence: Synthetic oligonucleotide
  Antisense strand to SEQ ID NO: 596200
uuucuggagaacugcaggu

SEQ ID NO: 596202 - RNA, 19 nt, Artificial Sequence
  Description of Artificial Sequence: Synthetic oligonucleotide
  Sense strand starting at position 2281 of SEQ ID NO: 584875
ccugcaguucuccagaaag

SEQ ID NO: 596203 - RNA, 19 nt, Artificial Sequence
  Description of Artificial Sequence: Synthetic oligonucleotide
  Antisense strand to SEQ ID NO: 596202
cuuucuggagaacugcagg

SEQ ID NO: 596204 - RNA, 19 nt, Artificial Sequence
  Description of Artificial Sequence: Synthetic oligonucleotide
  Sense strand starting at position 2283 of SEQ ID NO: 584875
ugcaguucuccagaaagau

SEQ ID NO: 596205 - RNA, 19 nt, Artificial Sequence
  Description of Artificial Sequence: Synthetic oligonucleotide
  Antisense strand to SEQ ID NO: 596204
aucuuucuggagaacugca

SEQ ID NO: 596206 - RNA, 19 nt, Artificial Sequence
  Description of Artificial Sequence: Synthetic oligonucleotide
  Sense strand starting at position 2409 of SEQ ID NO: 584875
uaagauaacgucugauuga

SEQ ID NO: 596207 - RNA, 19 nt, Artificial Sequence
  Description of Artificial Sequence: Synthetic oligonucleotide
  Antisense strand to SEQ ID NO: 596206
ucaaucagacguuaucuua

SEQ ID NO: 596208 - RNA, 19 nt, Artificial Sequence
  Description of Artificial Sequence: Synthetic oligonucleotide
  Sense strand starting at position 2423 of SEQ ID NO: 584875
auugaaggauaccucugua

SEQ ID NO: 596209 - RNA, 19 nt, Artificial Sequence
  Description of Artificial Sequence: Synthetic oligonucleotide
  Antisense strand to SEQ ID NO: 596208
uacagagguauccuucaau

SEQ ID NO: 596210 - RNA, 19 nt, Artificial Sequence
  Description of Artificial Sequence: Synthetic oligonucleotide
  Sense strand starting at position 2426 of SEQ ID NO: 584875
gaaggauaccucuguaacc

SEQ ID NO: 596211 - RNA, 19 nt, Artificial Sequence
  Description of Artificial Sequence: Synthetic oligonucleotide
  Antisense strand to SEQ ID NO: 596210
gguuacagagguauccuuc

SEQ ID NO: 596212 - RNA, 19 nt, Artificial Sequence
  Description of Artificial Sequence: Synthetic oligonucleotide
  Sense strand starting at position 2479 of SEQ ID NO: 584875
uguaguucggcuucaaugu

SEQ ID NO: 596213 - RNA, 19 nt, Artificial Sequence
  Description of Artificial Sequence: Synthetic oligonucleotide
  Antisense strand to SEQ ID NO: 596212
acauugaagccgaacuaca

SEQ ID NO: 596214 - RNA, 19 nt, Artificial Sequence
  Description of Artificial Sequence: Synthetic oligonucleotide
  Sense strand starting at position 2514 of SEQ ID NO: 584875
ugauguagugguuaauaug

SEQ ID NO: 596215 - RNA, 19 nt, Artificial Sequence
  Description of Artificial Sequence: Synthetic oligonucleotide
  Antisense strand to SEQ ID NO: 596214
cauauuaaccacuacauca

SEQ ID NO: 596216 - RNA, 19 nt, Artificial Sequence
  Description of Artificial Sequence: Synthetic oligonucleotide
  Sense strand starting at position 2626 of SEQ ID NO: 584875
gucaucuguguccaaugau

SEQ ID NO: 596217 - RNA, 19 nt, Artificial Sequence
  Description of Artificial Sequence: Synthetic oligonucleotide
  Antisense strand to SEQ ID NO: 596216
aucauuggacacagaugac

SEQ ID NO: 596218 - RNA, 19 nt, Artificial Sequence
  Description of Artificial Sequence: Synthetic oligonucleotide
  Sense strand starting at position 2895 of SEQ ID NO: 584875
gaagucuugugacugaaau

SEQ ID NO: 596219 - RNA, 19 nt, Artificial Sequence
  Description of Artificial Sequence: Synthetic oligonucleotide
  Antisense strand to SEQ ID NO: 596218
auuucagucacaagacuuc

SEQ ID NO: 596220 - RNA, 19 nt, Artificial Sequence
  Description of Artificial Sequence: Synthetic oligonucleotide
  Sense strand starting at position 2896 of SEQ ID NO: 584875
aagucuugugacugaaaug

SEQ ID NO: 596221 - RNA, 19 nt, Artificial Sequence
  Description of Artificial Sequence: Synthetic oligonucleotide
  Antisense strand to SEQ ID NO: 596220
cauuucagucacaagacuu

SEQ ID NO: 596222 - RNA, 19 nt, Artificial Sequence
  Description of Artificial Sequence: Synthetic oligonucleotide
  Sense strand starting at position 3218 of SEQ ID NO: 584875
guagaaagauagucgggaa

SEQ ID NO: 596223 - RNA, 19 nt, Artificial Sequence
  Description of Artificial Sequence: Synthetic oligonucleotide
  Antisense strand to SEQ ID NO: 596222
uucccgacuaucuuucuac

SEQ ID NO: 596224 - RNA, 19 nt, Artificial Sequence
  Description of Artificial Sequence: Synthetic oligonucleotide
  Sense strand starting at position 3448 of SEQ ID NO: 584875
gucuaagacuuauuauaug

SEQ ID NO: 596225 - RNA, 19 nt, Artificial Sequence
  Description of Artificial Sequence: Synthetic oligonucleotide
  Antisense strand to SEQ ID NO: 596224
cauauaauaagucuuagac

SEQ ID NO: 596226 - RNA, 19 nt, Artificial Sequence
  Description of Artificial Sequence: Synthetic oligonucleotide
  Sense strand starting at position 3454 of SEQ ID NO: 584875
gacuuauuauaugugaugu

SEQ ID NO: 596227 - RNA, 19 nt, Artificial Sequence
  Description of Artificial Sequence: Synthetic oligonucleotide
  Antisense strand to SEQ ID NO: 596226
acaucacauauaauaaguc

SEQ ID NO: 596228 - RNA, 19 nt, Artificial Sequence
  Description of Artificial Sequence: Synthetic oligonucleotide
  Sense strand starting at position 3648 of SEQ ID NO: 584875
aggagauuguuguuacaca

SEQ ID NO: 596229 - RNA, 19 nt, Artificial Sequence
  Description of Artificial Sequence: Synthetic oligonucleotide
  Antisense strand to SEQ ID NO: 596228
uguguaacaacaaucuccu

SEQ ID NO: 596230 - RNA, 19 nt, Artificial Sequence
  Description of Artificial Sequence: Synthetic oligonucleotide
  Sense strand starting at position 3971 of SEQ ID NO: 584875
auuucucagccuugugaac

SEQ ID NO: 596231 - RNA, 19 nt, Artificial Sequence
  Description of Artificial Sequence: Synthetic oligonucleotide
  Antisense strand to SEQ ID NO: 596230
guucacaaggcugagaaau

SEQ ID NO: 596232 - RNA, 19 nt, Artificial Sequence
  Description of Artificial Sequence: Synthetic oligonucleotide
  Sense strand starting at position 234 of SEQ ID NO: 584876
ucuguuucuuccuuggaau

SEQ ID NO: 596233 - RNA, 19 nt, Artificial Sequence
  Description of Artificial Sequence: Synthetic oligonucleotide
  Antisense strand to SEQ ID NO: 596232
auuccaaggaagaaacaga

SEQ ID NO: 596234 - RNA, 19 nt, Artificial Sequence
  Description of Artificial Sequence: Synthetic oligonucleotide
  Sense strand starting at position 236 of SEQ ID NO: 584876
uguuucuuccuuggaauag

SEQ ID NO: 596235 - RNA, 19 nt, Artificial Sequence
  Description of Artificial Sequence: Synthetic oligonucleotide
  Antisense strand to SEQ ID NO: 596234
cuauuccaaggaagaaaca

SEQ ID NO: 596236 - RNA, 19 nt, Artificial Sequence
  Description of Artificial Sequence: Synthetic oligonucleotide
  Sense strand starting at position 260 of SEQ ID NO: 584876
acuuuaauagccuaugguu

SEQ ID NO: 596237 - RNA, 19 nt, Artificial Sequence
  Description of Artificial Sequence: Synthetic oligonucleotide
  Antisense strand to SEQ ID NO: 596236
aaccauaggcuauuaaagu

SEQ ID NO: 596238 - RNA, 19 nt, Artificial Sequence
  Description of Artificial Sequence: Synthetic oligonucleotide
  Sense strand starting at position 496 of SEQ ID NO: 584876
aagguacggucauccuaaa

SEQ ID NO: 596239 - RNA, 19 nt, Artificial Sequence
  Description of Artificial Sequence: Synthetic oligonucleotide
  Antisense strand to SEQ ID NO: 596238
uuuaggaugaccguaccuu

SEQ ID NO: 596240 - RNA, 19 nt, Artificial Sequence
  Description of Artificial Sequence: Synthetic oligonucleotide
  Sense strand starting at position 631 of SEQ ID NO: 584876
uugaucagaucaguuuacu

SEQ ID NO: 596241 - RNA, 19 nt, Artificial Sequence
  Description of Artificial Sequence: Synthetic oligonucleotide
  Antisense strand to SEQ ID NO: 596240
aguaaacugaucugaucaa

SEQ ID NO: 596242 - RNA, 19 nt, Artificial Sequence
  Description of Artificial Sequence: Synthetic oligonucleotide
  Sense strand starting at position 637 of SEQ ID NO: 584876
agaucaguuuacuuugauu

SEQ ID NO: 596243 - RNA, 19 nt, Artificial Sequence
  Description of Artificial Sequence: Synthetic oligonucleotide
  Antisense strand to SEQ ID NO: 596242
aaucaaaguaaacugaucu

SEQ ID NO: 596244 - RNA, 19 nt, Artificial Sequence
  Description of Artificial Sequence: Synthetic oligonucleotide
  Sense strand starting at position 639 of SEQ ID NO: 584876
aucaguuuacuuugauuac

SEQ ID NO: 596245 - RNA, 19 nt, Artificial Sequence
  Description of Artificial Sequence: Synthetic oligonucleotide
  Antisense strand to SEQ ID NO: 596244
guaaucaaaguaaacugau

SEQ ID NO: 596246 - RNA, 19 nt, Artificial Sequence
  Description of Artificial Sequence: Synthetic oligonucleotide
  Sense strand starting at position 656 of SEQ ID NO: 584876
accacuuaaucguuaagug

SEQ ID NO: 596247 - RNA, 19 nt, Artificial Sequence
  Description of Artificial Sequence: Synthetic oligonucleotide
  Antisense strand to SEQ ID NO: 596246
cacuuaacgauuaaguggu

SEQ ID NO: 596248 - RNA, 19 nt, Artificial Sequence
  Description of Artificial Sequence: Synthetic oligonucleotide
  Sense strand starting at position 804 of SEQ ID NO: 584876
aguugaaguccuuaaauua

SEQ ID NO: 596249 - RNA, 19 nt, Artificial Sequence
  Description of Artificial Sequence: Synthetic oligonucleotide
  Antisense strand to SEQ ID NO: 596248
uaauuuaaggacuucaacu

SEQ ID NO: 596250 - RNA, 19 nt, Artificial Sequence
  Description of Artificial Sequence: Synthetic oligonucleotide
  Sense strand starting at position 983 of SEQ ID NO: 584876
cuaacugaaucuucgcaca

SEQ ID NO: 596251 - RNA, 19 nt, Artificial Sequence
  Description of Artificial Sequence: Synthetic oligonucleotide
  Antisense strand to SEQ ID NO: 596250
ugugcgaagauucaguuag

SEQ ID NO: 596252 - RNA, 19 nt, Artificial Sequence
  Description of Artificial Sequence: Synthetic oligonucleotide
  Sense strand starting at position 1019 of SEQ ID NO: 584876
ggcauuacauugcuaagag

SEQ ID NO: 596253 - RNA, 19 nt, Artificial Sequence
  Description of Artificial Sequence: Synthetic oligonucleotide
  Antisense strand to SEQ ID NO: 596252
cucuuagcaauguaaugcc

SEQ ID NO: 596254 - RNA, 19 nt, Artificial Sequence
  Description of Artificial Sequence: Synthetic oligonucleotide
  Sense strand starting at position 1079 of SEQ ID NO: 584876
ggacuugucuggccaacaa

SEQ ID NO: 596255 - RNA, 19 nt, Artificial Sequence
  Description of Artificial Sequence: Synthetic oligonucleotide
  Antisense strand to SEQ ID NO: 596254
uuguuggccagacaagucc

SEQ ID NO: 596256 - RNA, 19 nt, Artificial Sequence
  Description of Artificial Sequence: Synthetic oligonucleotide
  Sense strand starting at position 1186 of SEQ ID NO: 584876
gaccucgcuccuuaaagga

SEQ ID NO: 596257 - RNA, 19 nt, Artificial Sequence
  Description of Artificial Sequence: Synthetic oligonucleotide
  Antisense strand to SEQ ID NO: 596256
uccuuuaaggagcgagguc

SEQ ID NO: 596258 - RNA, 19 nt, Artificial Sequence
  Description of Artificial Sequence: Synthetic oligonucleotide
  Sense strand starting at position 2279 of SEQ ID NO: 584876
gggauaauucgagaagugc

SEQ ID NO: 596259 - RNA, 19 nt, Artificial Sequence
  Description of Artificial Sequence: Synthetic oligonucleotide
  Antisense strand to SEQ ID NO: 596258
gcacuucucgaauuauccc

SEQ ID NO: 596260 - RNA, 19 nt, Artificial Sequence
  Description of Artificial Sequence: Synthetic oligonucleotide
  Sense strand starting at position 2334 of SEQ ID NO: 584876
gaaagagaauccucguuuc

SEQ ID NO: 596261 - RNA, 19 nt, Artificial Sequence
  Description of Artificial Sequence: Synthetic oligonucleotide
  Antisense strand to SEQ ID NO: 596260
gaaacgaggauucucuuuc

SEQ ID NO: 596262 - RNA, 19 nt, Artificial Sequence
  Description of Artificial Sequence: Synthetic oligonucleotide
  Sense strand starting at position 2364 of SEQ ID NO: 584876
ggacgacccacucguauau

SEQ ID NO: 596263 - RNA, 19 nt, Artificial Sequence
  Description of Artificial Sequence: Synthetic oligonucleotide
  Antisense strand to SEQ ID NO: 596262
auauacgagugggucgucc

SEQ ID NO: 596264 - RNA, 19 nt, Artificial Sequence
  Description of Artificial Sequence: Synthetic oligonucleotide
  Sense strand starting at position 2390 of SEQ ID NO: 584876
uugggagauucgcccauaa

SEQ ID NO: 596265 - RNA, 19 nt, Artificial Sequence
  Description of Artificial Sequence: Synthetic oligonucleotide
  Antisense strand to SEQ ID NO: 596264
uuaugggcgaaucucccaa

SEQ ID NO: 596266 - RNA, 19 nt, Artificial Sequence
  Description of Artificial Sequence: Synthetic oligonucleotide
  Sense strand starting at position 2392 of SEQ ID NO: 584876
gggagauucgcccauaacu

SEQ ID NO: 596267 - RNA, 19 nt, Artificial Sequence
  Description of Artificial Sequence: Synthetic oligonucleotide
  Antisense strand to SEQ ID NO: 596266
aguuaugggcgaaucuccc

SEQ ID NO: 596268 - RNA, 19 nt, Artificial Sequence
  Description of Artificial Sequence: Synthetic oligonucleotide
  Sense strand starting at position 2441 of SEQ ID NO: 584876
cgcgaguucccguccgauu

SEQ ID NO: 596269 - RNA, 19 nt, Artificial Sequence
  Description of Artificial Sequence: Synthetic oligonucleotide
  Antisense strand to SEQ ID NO: 596268
aaucggacgggaacucgcg

SEQ ID NO: 596270 - RNA, 19 nt, Artificial Sequence
  Description of Artificial Sequence: Synthetic oligonucleotide
  Sense strand starting at position 2784 of SEQ ID NO: 584876
cguuguugggaguugucuu

SEQ ID NO: 596271 - RNA, 19 nt, Artificial Sequence
  Description of Artificial Sequence: Synthetic oligonucleotide
  Antisense strand to SEQ ID NO: 596270
aagacaacucccaacaacg

SEQ ID NO: 596272 - RNA, 19 nt, Artificial Sequence
  Description of Artificial Sequence: Synthetic oligonucleotide
  Sense strand starting at position 2794 of SEQ ID NO: 584876
aguugucuuguaggacaau

SEQ ID NO: 596273 - RNA, 19 nt, Artificial Sequence
  Description of Artificial Sequence: Synthetic oligonucleotide
  Antisense strand to SEQ ID NO: 596272
auuguccuacaagacaacu

SEQ ID NO: 596274 - RNA, 19 nt, Artificial Sequence
  Description of Artificial Sequence: Synthetic oligonucleotide
  Sense strand starting at position 2872 of SEQ ID NO: 584876
uggcaucaguuauuagauu

SEQ ID NO: 596275 - RNA, 19 nt, Artificial Sequence
  Description of Artificial Sequence: Synthetic oligonucleotide
  Antisense strand to SEQ ID NO: 596274
aaucuaauaacugaugcca

SEQ ID NO: 596276 - RNA, 19 nt, Artificial Sequence
  Description of Artificial Sequence: Synthetic oligonucleotide
  Sense strand starting at position 2903 of SEQ ID NO: 584876
augcaugugaaaugugauc

SEQ ID NO: 596277 - RNA, 19 nt, Artificial Sequence
  Description of Artificial Sequence: Synthetic oligonucleotide
  Antisense strand to SEQ ID NO: 596276
gaucacauuucacaugcau

SEQ ID NO: 596278 - RNA, 19 nt, Artificial Sequence
  Description of Artificial Sequence: Synthetic oligonucleotide
  Sense strand starting at position 2908 of SEQ ID NO: 584876
ugugaaaugugaucucaau

SEQ ID NO: 596279 - RNA, 19 nt, Artificial Sequence
  Description of Artificial Sequence: Synthetic oligonucleotide
  Antisense strand to SEQ ID NO: 596278
auugagaucacauuucaca

SEQ ID NO: 596280 - RNA, 19 nt, Artificial Sequence
  Description of Artificial Sequence: Synthetic oligonucleotide
  Sense strand starting at position 2989 of SEQ ID NO: 584876
uggacaagucucugguuga

SEQ ID NO: 596281 - RNA, 19 nt, Artificial Sequence
  Description of Artificial Sequence: Synthetic oligonucleotide
  Antisense strand to SEQ ID NO: 596280
ucaaccagagacuugucca

SEQ ID NO: 596282 - RNA, 19 nt, Artificial Sequence
  Description of Artificial Sequence: Synthetic oligonucleotide
  Sense strand starting at position 2992 of SEQ ID NO: 584876
acaagucucugguugaaga

SEQ ID NO: 596283 - RNA, 19 nt, Artificial Sequence
  Description of Artificial Sequence: Synthetic oligonucleotide
  Antisense strand to SEQ ID NO: 596282
ucuucaaccagagacuugu

SEQ ID NO: 596284 - RNA, 19 nt, Artificial Sequence
  Description of Artificial Sequence: Synthetic oligonucleotide
  Sense strand starting at position 3104 of SEQ ID NO: 584876
ggagaaguuaccuagcccu

SEQ ID NO: 596285 - RNA, 19 nt, Artificial Sequence
  Description of Artificial Sequence: Synthetic oligonucleotide
  Antisense strand to SEQ ID NO: 596284
agggcuagguaacuucucc

SEQ ID NO: 596286 - RNA, 19 nt, Artificial Sequence
  Description of Artificial Sequence: Synthetic oligonucleotide
  Sense strand starting at position 3193 of SEQ ID NO: 584876
ugauaauuguaccugcacu

SEQ ID NO: 596287 - RNA, 19 nt, Artificial Sequence
  Description of Artificial Sequence: Synthetic oligonucleotide
  Antisense strand to SEQ ID NO: 596286
agugcagguacaauuauca

SEQ ID NO: 596288 - RNA, 19 nt, Artificial Sequence
  Description of Artificial Sequence: Synthetic oligonucleotide
  Sense strand starting at position 3226 of SEQ ID NO: 584876
ugaggacuaaaugguguaa

SEQ ID NO: 596289 - RNA, 19 nt, Artificial Sequence
  Description of Artificial Sequence: Synthetic oligonucleotide
  Antisense strand to SEQ ID NO: 596288
uuacaccauuuaguccuca

SEQ ID NO: 596290 - RNA, 19 nt, Artificial Sequence
  Description of Artificial Sequence: Synthetic oligonucleotide
  Sense strand starting at position 3266 of SEQ ID NO: 584876
ugguguuugggacauaagu

SEQ ID NO: 596291 - RNA, 19 nt, Artificial Sequence
  Description of Artificial Sequence: Synthetic oligonucleotide
  Antisense strand to SEQ ID NO: 596290
acuuaugucccaaacacca

SEQ ID NO: 596292 - RNA, 19 nt, Artificial Sequence
  Description of Artificial Sequence: Synthetic oligonucleotide
  Sense strand starting at position 3268 of SEQ ID NO: 584876
guguuugggacauaaguuc

SEQ ID NO: 596293 - RNA, 19 nt, Artificial Sequence
  Description of Artificial Sequence: Synthetic oligonucleotide
  Antisense strand to SEQ ID NO: 596292
gaacuuaugucccaaacac

SEQ ID NO: 596294 - RNA, 19 nt, Artificial Sequence
  Description of Artificial Sequence: Synthetic oligonucleotide
  Sense strand starting at position 3319 of SEQ ID NO: 584876
uucuaauacgucugaacuu

SEQ ID NO: 596295 - RNA, 19 nt, Artificial Sequence
  Description of Artificial Sequence: Synthetic oligonucleotide
  Antisense strand to SEQ ID NO: 596294
aaguucagacguauuagaa

SEQ ID NO: 596296 - RNA, 19 nt, Artificial Sequence
  Description of Artificial Sequence: Synthetic oligonucleotide
  Sense strand starting at position 3364 of SEQ ID NO: 584876
ugagauuacuucuuuagag

SEQ ID NO: 596297 - RNA, 19 nt, Artificial Sequence
  Description of Artificial Sequence: Synthetic oligonucleotide
  Antisense strand to SEQ ID NO: 596296
cucuaaagaaguaaucuca

SEQ ID NO: 596298 - RNA, 19 nt, Artificial Sequence
  Description of Artificial Sequence: Synthetic oligonucleotide
  Sense strand starting at position 3365 of SEQ ID NO: 584876
gagauuacuucuuuagagu

SEQ ID NO: 596299 - RNA, 19 nt, Artificial Sequence
  Description of Artificial Sequence: Synthetic oligonucleotide
  Antisense strand to SEQ ID NO: 596298
acucuaaagaaguaaucuc

SEQ ID NO: 596300 - RNA, 19 nt, Artificial Sequence
  Description of Artificial Sequence: Synthetic oligonucleotide
  Sense strand starting at position 3366 of SEQ ID NO: 584876
agauuacuucuuuagaguc

SEQ ID NO: 596301 - RNA, 19 nt, Artificial Sequence
  Description of Artificial Sequence: Synthetic oligonucleotide
  Antisense strand to SEQ ID NO: 596300
gacucuaaagaaguaaucu

SEQ ID NO: 596302 - RNA, 19 nt, Artificial Sequence
  Description of Artificial Sequence: Synthetic oligonucleotide
  Sense strand starting at position 3380 of SEQ ID NO: 584876
gagucuguuucuuucuaga

SEQ ID NO: 596303 - RNA, 19 nt, Artificial Sequence
  Description of Artificial Sequence: Synthetic oligonucleotide
  Antisense strand to SEQ ID NO: 596302
ucuagaaagaaacagacuc

SEQ ID NO: 596304 - RNA, 19 nt, Artificial Sequence
  Description of Artificial Sequence: Synthetic oligonucleotide
  Sense strand starting at position 3649 of SEQ ID NO: 584876
acuggagggugaguuauaa

SEQ ID NO: 596305 - RNA, 19 nt, Artificial Sequence
  Description of Artificial Sequence: Synthetic oligonucleotide
  Antisense strand to SEQ ID NO: 596304
uuauaacucacccuccagu

SEQ ID NO: 596306 - RNA, 19 nt, Artificial Sequence
  Description of Artificial Sequence: Synthetic oligonucleotide
  Sense strand starting at position 3730 of SEQ ID NO: 584876
cagacagucuuguuuauga

SEQ ID NO: 596307 - RNA, 19 nt, Artificial Sequence
  Description of Artificial Sequence: Synthetic oligonucleotide
  Antisense strand to SEQ ID NO: 596306
ucauaaacaagacugucug

SEQ ID NO: 596308 - RNA, 19 nt, Artificial Sequence
  Description of Artificial Sequence: Synthetic oligonucleotide
  Sense strand starting at position 3732 of SEQ ID NO: 584876
gacagucuuguuuaugaaa

SEQ ID NO: 596309 - RNA, 19 nt, Artificial Sequence
  Description of Artificial Sequence: Synthetic oligonucleotide
  Antisense strand to SEQ ID NO: 596308
uuucauaaacaagacuguc

SEQ ID NO: 596310 - RNA, 19 nt, Artificial Sequence
  Description of Artificial Sequence: Synthetic oligonucleotide
  Sense strand starting at position 3876 of SEQ ID NO: 584876
cuagaaagauauuauagac

SEQ ID NO: 596311 - RNA, 19 nt, Artificial Sequence
  Description of Artificial Sequence: Synthetic oligonucleotide
  Antisense strand to SEQ ID NO: 596310
gucuauaauaucuuucuag

SEQ ID NO: 596312 - RNA, 19 nt, Artificial Sequence
  Description of Artificial Sequence: Synthetic oligonucleotide
  Sense strand starting at position 148 of SEQ ID NO: 584877
aguaauaguugacuuagau

SEQ ID NO: 596313 - RNA, 19 nt, Artificial Sequence
  Description of Artificial Sequence: Synthetic oligonucleotide
  Antisense strand to SEQ ID NO: 596312
aucuaagucaacuauuacu

SEQ ID NO: 596314 - RNA, 19 nt, Artificial Sequence
  Description of Artificial Sequence: Synthetic oligonucleotide
  Sense strand starting at position 157 of SEQ ID NO: 584877
ugacuuagauauugauuug

SEQ ID NO: 596315 - RNA, 19 nt, Artificial Sequence
  Description of Artificial Sequence: Synthetic oligonucleotide
  Antisense strand to SEQ ID NO: 596314
caaaucaauaucuaaguca

SEQ ID NO: 596316 - RNA, 19 nt, Artificial Sequence
  Description of Artificial Sequence: Synthetic oligonucleotide
  Sense strand starting at position 218 of SEQ ID NO: 584877
gucugaaaucagcaaauau

SEQ ID NO: 596317 - RNA, 19 nt, Artificial Sequence
  Description of Artificial Sequence: Synthetic oligonucleotide
  Antisense strand to SEQ ID NO: 596316
auauuugcugauuucagac

SEQ ID NO: 596318 - RNA, 19 nt, Artificial Sequence
  Description of Artificial Sequence: Synthetic oligonucleotide
  Sense strand starting at position 329 of SEQ ID NO: 584877
ucguaacuucugcaggaca

SEQ ID NO: 596319 - RNA, 19 nt, Artificial Sequence
  Description of Artificial Sequence: Synthetic oligonucleotide
  Antisense strand to SEQ ID NO: 596318
uguccugcagaaguuacga

SEQ ID NO: 596320 - RNA, 19 nt, Artificial Sequence
  Description of Artificial Sequence: Synthetic oligonucleotide
  Sense strand starting at position 331 of SEQ ID NO: 584877
guaacuucugcaggacaga

SEQ ID NO: 596321 - RNA, 19 nt, Artificial Sequence
  Description of Artificial Sequence: Synthetic oligonucleotide
  Antisense strand to SEQ ID NO: 596320
ucuguccugcagaaguuac

SEQ ID NO: 596322 - RNA, 19 nt, Artificial Sequence
  Description of Artificial Sequence: Synthetic oligonucleotide
  Sense strand starting at position 358 of SEQ ID NO: 584877
ugagguauccucuaucacu

SEQ ID NO: 596323 - RNA, 19 nt, Artificial Sequence
  Description of Artificial Sequence: Synthetic oligonucleotide
  Antisense strand to SEQ ID NO: 596322
agugauagaggauaccuca

SEQ ID NO: 596324 - RNA, 19 nt, Artificial Sequence
  Description of Artificial Sequence: Synthetic oligonucleotide
  Sense strand starting at position 400 of SEQ ID NO: 584877
agcauuacauagguuaaua

SEQ ID NO: 596325 - RNA, 19 nt, Artificial Sequence
  Description of Artificial Sequence: Synthetic oligonucleotide
  Antisense strand to SEQ ID NO: 596324
uauuaaccuauguaaugcu

SEQ ID NO: 596326 - RNA, 19 nt, Artificial Sequence
  Description of Artificial Sequence: Synthetic oligonucleotide
  Sense strand starting at position 441 of SEQ ID NO: 584877
uguagaauguaccuacacu

SEQ ID NO: 596327 - RNA, 19 nt, Artificial Sequence
  Description of Artificial Sequence: Synthetic oligonucleotide
  Antisense strand to SEQ ID NO: 596326
aguguagguacauucuaca

SEQ ID NO: 596328 - RNA, 19 nt, Artificial Sequence
  Description of Artificial Sequence: Synthetic oligonucleotide
  Sense strand starting at position 742 of SEQ ID NO: 584877
uguuucuuccuuggaauag

SEQ ID NO: 596329 - RNA, 19 nt, Artificial Sequence
  Description of Artificial Sequence: Synthetic oligonucleotide
  Antisense strand to SEQ ID NO: 596328
cuauuccaaggaagaaaca

SEQ ID NO: 596330 - RNA, 19 nt, Artificial Sequence
  Description of Artificial Sequence: Synthetic oligonucleotide
  Sense strand starting at position 766 of SEQ ID NO: 584877
acuuuaauagccuaugguu

SEQ ID NO: 596331 - RNA, 19 nt, Artificial Sequence
  Description of Artificial Sequence: Synthetic oligonucleotide
  Antisense strand to SEQ ID NO: 596330
aaccauaggcuauuaaagu

SEQ ID NO: 596332 - RNA, 19 nt, Artificial Sequence
  Description of Artificial Sequence: Synthetic oligonucleotide
  Sense strand starting at position 1002 of SEQ ID NO: 584877
aagguacggucauccuaaa

SEQ ID NO: 596333 - RNA, 19 nt, Artificial Sequence
  Description of Artificial Sequence: Synthetic oligonucleotide
  Antisense strand to SEQ ID NO: 596332
uuuaggaugaccguaccuu

SEQ ID NO: 596334 - RNA, 19 nt, Artificial Sequence
  Description of Artificial Sequence: Synthetic oligonucleotide
  Sense strand starting at position 1137 of SEQ ID NO: 584877
uugaucagaucaguuuacu

SEQ ID NO: 596335 - RNA, 19 nt, Artificial Sequence
  Description of Artificial Sequence: Synthetic oligonucleotide
  Antisense strand to SEQ ID NO: 596334
aguaaacugaucugaucaa

SEQ ID NO: 596336 - RNA, 19 nt, Artificial Sequence
  Description of Artificial Sequence: Synthetic oligonucleotide
  Sense strand starting at position 1143 of SEQ ID NO: 584877
agaucaguuuacuuugauu

SEQ ID NO: 596337 - RNA, 19 nt, Artificial Sequence
  Description of Artificial Sequence: Synthetic oligonucleotide
  Antisense strand to SEQ ID NO: 596336
aaucaaaguaaacugaucu

SEQ ID NO: 596338 - RNA, 19 nt, Artificial Sequence
  Description of Artificial Sequence: Synthetic oligonucleotide
  Sense strand starting at position 1145 of SEQ ID NO: 584877
aucaguuuacuuugauuac

SEQ ID NO: 596339 - RNA, 19 nt, Artificial Sequence
  Description of Artificial Sequence: Synthetic oligonucleotide
  Antisense strand to SEQ ID NO: 596338
guaaucaaaguaaacugau

SEQ ID NO: 596340 - RNA, 19 nt, Artificial Sequence
  Description of Artificial Sequence: Synthetic oligonucleotide
  Sense strand starting at position 1162 of SEQ ID NO: 584877
accacuuaaucguuaagug

SEQ ID NO: 596341 - RNA, 19 nt, Artificial Sequence
  Description of Artificial Sequence: Synthetic oligonucleotide
  Antisense strand to SEQ ID NO: 596340
cacuuaacgauuaaguggu

SEQ ID NO: 596342 - RNA, 19 nt, Artificial Sequence
  Description of Artificial Sequence: Synthetic oligonucleotide
  Sense strand starting at position 1310 of SEQ ID NO: 584877
aguugaaguccuuaaauua

SEQ ID NO: 596343 - RNA, 19 nt, Artificial Sequence
  Description of Artificial Sequence: Synthetic oligonucleotide
  Antisense strand to SEQ ID NO: 596342
uaauuuaaggacuucaacu

SEQ ID NO: 596344 - RNA, 19 nt, Artificial Sequence
  Description of Artificial Sequence: Synthetic oligonucleotide
  Sense strand starting at position 1489 of SEQ ID NO: 584877
cuaacugaaucuucgcaca

SEQ ID NO: 596345 - RNA, 19 nt, Artificial Sequence
  Description of Artificial Sequence: Synthetic oligonucleotide
  Antisense strand to SEQ ID NO: 596344
ugugcgaagauucaguuag

SEQ ID NO: 596346 - RNA, 19 nt, Artificial Sequence
  Description of Artificial Sequence: Synthetic oligonucleotide
  Sense strand starting at position 1525 of SEQ ID NO: 584877
ggcauuacauugcuaagag

SEQ ID NO: 596347 - RNA, 19 nt, Artificial Sequence
  Description of Artificial Sequence: Synthetic oligonucleotide
  Antisense strand to SEQ ID NO: 596346
cucuuagcaauguaaugcc

SEQ ID NO: 596348 - RNA, 19 nt, Artificial Sequence
  Description of Artificial Sequence: Synthetic oligonucleotide
  Sense strand starting at position 1585 of SEQ ID NO: 584877
ggacuugucuggccaacaa

SEQ ID NO: 596349 - RNA, 19 nt, Artificial Sequence
  Description of Artificial Sequence: Synthetic oligonucleotide
  Antisense strand to SEQ ID NO: 596348
uuguuggccagacaagucc

SEQ ID NO: 596350 - RNA, 19 nt, Artificial Sequence
  Description of Artificial Sequence: Synthetic oligonucleotide
  Sense strand starting at position 1692 of SEQ ID NO: 584877
gaccucgcuccuuaaagga

SEQ ID NO: 596351 - RNA, 19 nt, Artificial Sequence
  Description of Artificial Sequence: Synthetic oligonucleotide
  Antisense strand to SEQ ID NO: 596350
uccuuuaaggagcgagguc

SEQ ID NO: 596352 - RNA, 19 nt, Artificial Sequence
  Description of Artificial Sequence: Synthetic oligonucleotide
  Sense strand starting at position 2785 of SEQ ID NO: 584877
gggauaauucgagaagugc

SEQ ID NO: 596353 - RNA, 19 nt, Artificial Sequence
  Description of Artificial Sequence: Synthetic oligonucleotide
  Antisense strand to SEQ ID NO: 596352
gcacuucucgaauuauccc

SEQ ID NO: 596354 - RNA, 19 nt, Artificial Sequence
  Description of Artificial Sequence: Synthetic oligonucleotide
  Sense strand starting at position 2840 of SEQ ID NO: 584877
gaaagagaauccucguuuc

SEQ ID NO: 596355 - RNA, 19 nt, Artificial Sequence
  Description of Artificial Sequence: Synthetic oligonucleotide
  Antisense strand to SEQ ID NO: 596354
gaaacgaggauucucuuuc

SEQ ID NO: 596356 - RNA, 19 nt, Artificial Sequence
  Description of Artificial Sequence: Synthetic oligonucleotide
  Sense strand starting at position 2896 of SEQ ID NO: 584877
uugggagauucgcccauaa

SEQ ID NO: 596357 - RNA, 19 nt, Artificial Sequence
  Description of Artificial Sequence: Synthetic oligonucleotide
  Antisense strand to SEQ ID NO: 596356
uuaugggcgaaucucccaa

SEQ ID NO: 596358 - RNA, 19 nt, Artificial Sequence
  Description of Artificial Sequence: Synthetic oligonucleotide
  Sense strand starting at position 2898 of SEQ ID NO: 584877
gggagauucgcccauaacu

SEQ ID NO: 596359 - RNA, 19 nt, Artificial Sequence
  Description of Artificial Sequence: Synthetic oligonucleotide
  Antisense strand to SEQ ID NO: 596358
aguuaugggcgaaucuccc

SEQ ID NO: 596360 - RNA, 19 nt, Artificial Sequence
  Description of Artificial Sequence: Synthetic oligonucleotide
  Sense strand starting at position 2947 of SEQ ID NO: 584877
cgcgaguucccguccgauu

SEQ ID NO: 596361 - RNA, 19 nt, Artificial Sequence
  Description of Artificial Sequence: Synthetic oligonucleotide
  Antisense strand to SEQ ID NO: 596360
aaucggacgggaacucgcg

SEQ ID NO: 596362 - RNA, 19 nt, Artificial Sequence
  Description of Artificial Sequence: Synthetic oligonucleotide
  Sense strand starting at position 3290 of SEQ ID NO: 584877
cguuguugggaguugucuu

SEQ ID NO: 596363 - RNA, 19 nt, Artificial Sequence
  Description of Artificial Sequence: Synthetic oligonucleotide
  Antisense strand to SEQ ID NO: 596362
aagacaacucccaacaacg

SEQ ID NO: 596364 - RNA, 19 nt, Artificial Sequence
  Description of Artificial Sequence: Synthetic oligonucleotide
  Sense strand starting at position 3300 of SEQ ID NO: 584877
aguugucuuguaggacaau

SEQ ID NO: 596365 - RNA, 19 nt, Artificial Sequence
  Description of Artificial Sequence: Synthetic oligonucleotide
  Antisense strand to SEQ ID NO: 596364
auuguccuacaagacaacu

SEQ ID NO: 596366 - RNA, 19 nt, Artificial Sequence
  Description of Artificial Sequence: Synthetic oligonucleotide
  Sense strand starting at position 3378 of SEQ ID NO: 584877
uggcaucaguuauuagauu

SEQ ID NO: 596367 - RNA, 19 nt, Artificial Sequence
  Description of Artificial Sequence: Synthetic oligonucleotide
  Antisense strand to SEQ ID NO: 596366
aaucuaauaacugaugcca

SEQ ID NO: 596368 - RNA, 19 nt, Artificial Sequence
  Description of Artificial Sequence: Synthetic oligonucleotide
  Sense strand starting at position 3409 of SEQ ID NO: 584877
augcaugugaaaugugauc

SEQ ID NO: 596369 - RNA, 19 nt, Artificial Sequence
  Description of Artificial Sequence: Synthetic oligonucleotide
  Antisense strand to SEQ ID NO: 596368
gaucacauuucacaugcau

SEQ ID NO: 596370 - RNA, 19 nt, Artificial Sequence
  Description of Artificial Sequence: Synthetic oligonucleotide
  Sense strand starting at position 3414 of SEQ ID NO: 584877
ugugaaaugugaucucaau

SEQ ID NO: 596371 - RNA, 19 nt, Artificial Sequence
  Description of Artificial Sequence: Synthetic oligonucleotide
  Antisense strand to SEQ ID NO: 596370
auugagaucacauuucaca

SEQ ID NO: 596372 - RNA, 19 nt, Artificial Sequence
  Description of Artificial Sequence: Synthetic oligonucleotide
  Sense strand starting at position 3495 of SEQ ID NO: 584877
uggacaagucucugguuga

SEQ ID NO: 596373 - RNA, 19 nt, Artificial Sequence
  Description of Artificial Sequence: Synthetic oligonucleotide
  Antisense strand to SEQ ID NO: 596372
ucaaccagagacuugucca

SEQ ID NO: 596374 - RNA, 19 nt, Artificial Sequence
  Description of Artificial Sequence: Synthetic oligonucleotide
  Sense strand starting at position 3498 of SEQ ID NO: 584877
acaagucucugguugaaga

SEQ ID NO: 596375 - RNA, 19 nt, Artificial Sequence
  Description of Artificial Sequence: Synthetic oligonucleotide
  Antisense strand to SEQ ID NO: 596374
ucuucaaccagagacuugu

SEQ ID NO: 596376 - RNA, 19 nt, Artificial Sequence
  Description of Artificial Sequence: Synthetic oligonucleotide
  Sense strand starting at position 3610 of SEQ ID NO: 584877
ggagaaguuaccuagcccu

SEQ ID NO: 596377 - RNA, 19 nt, Artificial Sequence
  Description of Artificial Sequence: Synthetic oligonucleotide
  Antisense strand to SEQ ID NO: 596376
agggcuagguaacuucucc

SEQ ID NO: 596378 - RNA, 19 nt, Artificial Sequence
  Description of Artificial Sequence: Synthetic oligonucleotide
  Sense strand starting at position 3699 of SEQ ID NO: 584877
ugauaauuguaccugcacu

SEQ ID NO: 596379 - RNA, 19 nt, Artificial Sequence
  Description of Artificial Sequence: Synthetic oligonucleotide
  Antisense strand to SEQ ID NO: 596378
agugcagguacaauuauca

SEQ ID NO: 596380 - RNA, 19 nt, Artificial Sequence
  Description of Artificial Sequence: Synthetic oligonucleotide
  Sense strand starting at position 3732 of SEQ ID NO: 584877
ugaggacuaaaugguguaa

SEQ ID NO: 596381 - RNA, 19 nt, Artificial Sequence
  Description of Artificial Sequence: Synthetic oligonucleotide
  Antisense strand to SEQ ID NO: 596380
uuacaccauuuaguccuca

SEQ ID NO: 596382 - RNA, 19 nt, Artificial Sequence
  Description of Artificial Sequence: Synthetic oligonucleotide
  Sense strand starting at position 3772 of SEQ ID NO: 584877
ugguguuugggacauaagu

SEQ ID NO: 596383 - RNA, 19 nt, Artificial Sequence
  Description of Artificial Sequence: Synthetic oligonucleotide
  Antisense strand to SEQ ID NO: 596382
acuuaugucccaaacacca

SEQ ID NO: 596384 - RNA, 19 nt, Artificial Sequence
  Description of Artificial Sequence: Synthetic oligonucleotide
  Sense strand starting at position 3774 of SEQ ID NO: 584877
guguuugggacauaaguuc

SEQ ID NO: 596385 - RNA, 19 nt, Artificial Sequence
  Description of Artificial Sequence: Synthetic oligonucleotide
  Antisense strand to SEQ ID NO: 596384
gaacuuaugucccaaacac

SEQ ID NO: 596386 - RNA, 19 nt, Artificial Sequence
  Description of Artificial Sequence: Synthetic oligonucleotide
  Sense strand starting at position 3870 of SEQ ID NO: 584877
ugagauuacuucuuuagag

SEQ ID NO: 596387 - RNA, 19 nt, Artificial Sequence
  Description of Artificial Sequence: Synthetic oligonucleotide
  Antisense strand to SEQ ID NO: 596386
cucuaaagaaguaaucuca

SEQ ID NO: 596388 - RNA, 19 nt, Artificial Sequence
  Description of Artificial Sequence: Synthetic oligonucleotide
  Sense strand starting at position 3871 of SEQ ID NO: 584877
gagauuacuucuuuagagu

SEQ ID NO: 596389 - RNA, 19 nt, Artificial Sequence
  Description of Artificial Sequence: Synthetic oligonucleotide
  Antisense strand to SEQ ID NO: 596388
acucuaaagaaguaaucuc

SEQ ID NO: 596390 - RNA, 19 nt, Artificial Sequence
  Description of Artificial Sequence: Synthetic oligonucleotide
  Sense strand starting at position 3872 of SEQ ID NO: 584877
agauuacuucuuuagaguc

SEQ ID NO: 596391 - RNA, 19 nt, Artificial Sequence
  Description of Artificial Sequence: Synthetic oligonucleotide
  Antisense strand to SEQ ID NO: 596390
gacucuaaagaaguaaucu

SEQ ID NO: 596392 - RNA, 19 nt, Artificial Sequence
  Description of Artificial Sequence: Synthetic oligonucleotide
  Sense strand starting at position 470 of SEQ ID NO: 584878
aguaauaguugacuuagau

SEQ ID NO: 596393 - RNA, 19 nt, Artificial Sequence
  Description of Artificial Sequence: Synthetic oligonucleotide
  Antisense strand to SEQ ID NO: 596392
aucuaagucaacuauuacu

SEQ ID NO: 596394 - RNA, 19 nt, Artificial Sequence
  Description of Artificial Sequence: Synthetic oligonucleotide
  Sense strand starting at position 479 of SEQ ID NO: 584878
ugacuuagauauugauuug

SEQ ID NO: 596395 - RNA, 19 nt, Artificial Sequence
  Description of Artificial Sequence: Synthetic oligonucleotide
  Antisense strand to SEQ ID NO: 596394
caaaucaauaucuaaguca

SEQ ID NO: 596396 - RNA, 19 nt, Artificial Sequence
  Description of Artificial Sequence: Synthetic oligonucleotide
  Sense strand starting at position 540 of SEQ ID NO: 584878
gucugaaaucagcaaauau

SEQ ID NO: 596397 - RNA, 19 nt, Artificial Sequence
  Description of Artificial Sequence: Synthetic oligonucleotide
  Antisense strand to SEQ ID NO: 596396
auauuugcugauuucagac

SEQ ID NO: 596398 - RNA, 19 nt, Artificial Sequence
  Description of Artificial Sequence: Synthetic oligonucleotide
  Sense strand starting at position 651 of SEQ ID NO: 584878
ucguaacuucugcaggaca

SEQ ID NO: 596399 - RNA, 19 nt, Artificial Sequence
  Description of Artificial Sequence: Synthetic oligonucleotide
  Antisense strand to SEQ ID NO: 596398
uguccugcagaaguuacga

SEQ ID NO: 596400 - RNA, 19 nt, Artificial Sequence
  Description of Artificial Sequence: Synthetic oligonucleotide
  Sense strand starting at position 653 of SEQ ID NO: 584878
guaacuucugcaggacaga

SEQ ID NO: 596401 - RNA, 19 nt, Artificial Sequence
  Description of Artificial Sequence: Synthetic oligonucleotide
  Antisense strand to SEQ ID NO: 596400
ucuguccugcagaaguuac

SEQ ID NO: 596402 - RNA, 19 nt, Artificial Sequence
  Description of Artificial Sequence: Synthetic oligonucleotide
  Sense strand starting at position 669 of SEQ ID NO: 584878
agagaaugauaugagguau

SEQ ID NO: 596403 - RNA, 19 nt, Artificial Sequence
  Description of Artificial Sequence: Synthetic oligonucleotide
  Antisense strand to SEQ ID NO: 596402
auaccucauaucauucucu

SEQ ID NO: 596404 - RNA, 19 nt, Artificial Sequence
  Description of Artificial Sequence: Synthetic oligonucleotide
  Sense strand starting at position 680 of SEQ ID NO: 584878
ugagguauccucuaucacu

SEQ ID NO: 596405 - RNA, 19 nt, Artificial Sequence
  Description of Artificial Sequence: Synthetic oligonucleotide
  Antisense strand to SEQ ID NO: 596404
agugauagaggauaccuca

SEQ ID NO: 596406 - RNA, 19 nt, Artificial Sequence
  Description of Artificial Sequence: Synthetic oligonucleotide
  Sense strand starting at position 722 of SEQ ID NO: 584878
agcauuacauagguuaaua

SEQ ID NO: 596407 - RNA, 19 nt, Artificial Sequence
  Description of Artificial Sequence: Synthetic oligonucleotide
  Antisense strand to SEQ ID NO: 596406
uauuaaccuauguaaugcu

SEQ ID NO: 596408 - RNA, 19 nt, Artificial Sequence
  Description of Artificial Sequence: Synthetic oligonucleotide
  Sense strand starting at position 751 of SEQ ID NO: 584878
uuucgacagcacuguagaa

SEQ ID NO: 596409 - RNA, 19 nt, Artificial Sequence
  Description of Artificial Sequence: Synthetic oligonucleotide
  Antisense strand to SEQ ID NO: 596408
uucuacagugcugucgaaa

SEQ ID NO: 596410 - RNA, 19 nt, Artificial Sequence
  Description of Artificial Sequence: Synthetic oligonucleotide
  Sense strand starting at position 763 of SEQ ID NO: 584878
uguagaauguaccuacacu

SEQ ID NO: 596411 - RNA, 19 nt, Artificial Sequence
  Description of Artificial Sequence: Synthetic oligonucleotide
  Antisense strand to SEQ ID NO: 596410
aguguagguacauucuaca

SEQ ID NO: 596412 - RNA, 19 nt, Artificial Sequence
  Description of Artificial Sequence: Synthetic oligonucleotide
  Sense strand starting at position 789 of SEQ ID NO: 584878
uccuguuuguccucuagga

SEQ ID NO: 596413 - RNA, 19 nt, Artificial Sequence
  Description of Artificial Sequence: Synthetic oligonucleotide
  Antisense strand to SEQ ID NO: 596412
uccuagaggacaaacagga

SEQ ID NO: 596414 - RNA, 19 nt, Artificial Sequence
  Description of Artificial Sequence: Synthetic oligonucleotide
  Sense strand starting at position 1061 of SEQ ID NO: 584878
gucuguuucuuccuuggaa

SEQ ID NO: 596415 - RNA, 19 nt, Artificial Sequence
  Description of Artificial Sequence: Synthetic oligonucleotide
  Antisense strand to SEQ ID NO: 596414
uuccaaggaagaaacagac

SEQ ID NO: 596416 - RNA, 19 nt, Artificial Sequence
  Description of Artificial Sequence: Synthetic oligonucleotide
  Sense strand starting at position 1062 of SEQ ID NO: 584878
ucuguuucuuccuuggaau

SEQ ID NO: 596417 - RNA, 19 nt, Artificial Sequence
  Description of Artificial Sequence: Synthetic oligonucleotide
  Antisense strand to SEQ ID NO: 596416
auuccaaggaagaaacaga

SEQ ID NO: 596418 - RNA, 19 nt, Artificial Sequence
  Description of Artificial Sequence: Synthetic oligonucleotide
  Sense strand starting at position 1064 of SEQ ID NO: 584878
uguuucuuccuuggaauag

SEQ ID NO: 596419 - RNA, 19 nt, Artificial Sequence
  Description of Artificial Sequence: Synthetic oligonucleotide
  Antisense strand to SEQ ID NO: 596418
cuauuccaaggaagaaaca

SEQ ID NO: 596420 - RNA, 19 nt, Artificial Sequence
  Description of Artificial Sequence: Synthetic oligonucleotide
  Sense strand starting at position 1088 of SEQ ID NO: 584878
acuuuaauagccuaugguu

SEQ ID NO: 596421 - RNA, 19 nt, Artificial Sequence
  Description of Artificial Sequence: Synthetic oligonucleotide
  Antisense strand to SEQ ID NO: 596420
aaccauaggcuauuaaagu

SEQ ID NO: 596422 - RNA, 19 nt, Artificial Sequence
  Description of Artificial Sequence: Synthetic oligonucleotide
  Sense strand starting at position 1324 of SEQ ID NO: 584878
aagguacggucauccuaaa

SEQ ID NO: 596423 - RNA, 19 nt, Artificial Sequence
  Description of Artificial Sequence: Synthetic oligonucleotide
  Antisense strand to SEQ ID NO: 596422
uuuaggaugaccguaccuu

SEQ ID NO: 596424 - RNA, 19 nt, Artificial Sequence
  Description of Artificial Sequence: Synthetic oligonucleotide
  Sense strand starting at position 1459 of SEQ ID NO: 584878
uugaucagaucaguuuacu

SEQ ID NO: 596425 - RNA, 19 nt, Artificial Sequence
  Description of Artificial Sequence: Synthetic oligonucleotide
  Antisense strand to SEQ ID NO: 596424
aguaaacugaucugaucaa

SEQ ID NO: 596426 - RNA, 19 nt, Artificial Sequence
  Description of Artificial Sequence: Synthetic oligonucleotide
  Sense strand starting at position 1465 of SEQ ID NO: 584878
agaucaguuuacuuugauu

SEQ ID NO: 596427 - RNA, 19 nt, Artificial Sequence
  Description of Artificial Sequence: Synthetic oligonucleotide
  Antisense strand to SEQ ID NO: 596426
aaucaaaguaaacugaucu

SEQ ID NO: 596428 - RNA, 19 nt, Artificial Sequence
  Description of Artificial Sequence: Synthetic oligonucleotide
  Sense strand starting at position 1467 of SEQ ID NO: 584878
aucaguuuacuuugauuac

SEQ ID NO: 596429 - RNA, 19 nt, Artificial Sequence
  Description of Artificial Sequence: Synthetic oligonucleotide
  Antisense strand to SEQ ID NO: 596428
guaaucaaaguaaacugau

SEQ ID NO: 596430 - RNA, 19 nt, Artificial Sequence
  Description of Artificial Sequence: Synthetic oligonucleotide
  Sense strand starting at position 1484 of SEQ ID NO: 584878
accacuuaaucguuaagug

SEQ ID NO: 596431 - RNA, 19 nt, Artificial Sequence
  Description of Artificial Sequence: Synthetic oligonucleotide
  Antisense strand to SEQ ID NO: 596430
cacuuaacgauuaaguggu

SEQ ID NO: 596432 - RNA, 19 nt, Artificial Sequence
  Description of Artificial Sequence: Synthetic oligonucleotide
  Sense strand starting at position 1632 of SEQ ID NO: 584878
aguugaaguccuuaaauua

SEQ ID NO: 596433 - RNA, 19 nt, Artificial Sequence
  Description of Artificial Sequence: Synthetic oligonucleotide
  Antisense strand to SEQ ID NO: 596432
uaauuuaaggacuucaacu

SEQ ID NO: 596434 - RNA, 19 nt, Artificial Sequence
  Description of Artificial Sequence: Synthetic oligonucleotide
  Sense strand starting at position 1811 of SEQ ID NO: 584878
cuaacugaaucuucgcaca

SEQ ID NO: 596435 - RNA, 19 nt, Artificial Sequence
  Description of Artificial Sequence: Synthetic oligonucleotide
  Antisense strand to SEQ ID NO: 596434
ugugcgaagauucaguuag

SEQ ID NO: 596436 - RNA, 19 nt, Artificial Sequence
  Description of Artificial Sequence: Synthetic oligonucleotide
  Sense strand starting at position 1847 of SEQ ID NO: 584878
ggcauuacauugcuaagag

SEQ ID NO: 596437 - RNA, 19 nt, Artificial Sequence
  Description of Artificial Sequence: Synthetic oligonucleotide
  Antisense strand to SEQ ID NO: 596436
cucuuagcaauguaaugcc

SEQ ID NO: 596438 - RNA, 19 nt, Artificial Sequence
  Description of Artificial Sequence: Synthetic oligonucleotide
  Sense strand starting at position 1907 of SEQ ID NO: 584878
ggacuugucuggccaacaa

SEQ ID NO: 596439 - RNA, 19 nt, Artificial Sequence
  Description of Artificial Sequence: Synthetic oligonucleotide
  Antisense strand to SEQ ID NO: 596438
uuguuggccagacaagucc

SEQ ID NO: 596440 - RNA, 19 nt, Artificial Sequence
  Description of Artificial Sequence: Synthetic oligonucleotide
  Sense strand starting at position 2014 of SEQ ID NO: 584878
gaccucgcuccuuaaagga

SEQ ID NO: 596441 - RNA, 19 nt, Artificial Sequence
  Description of Artificial Sequence: Synthetic oligonucleotide
  Antisense strand to SEQ ID NO: 596440
uccuuuaaggagcgagguc

SEQ ID NO: 596442 - RNA, 19 nt, Artificial Sequence
  Description of Artificial Sequence: Synthetic oligonucleotide
  Sense strand starting at position 3107 of SEQ ID NO: 584878
gggauaauucgagaagugc

SEQ ID NO: 596443 - RNA, 19 nt, Artificial Sequence
  Description of Artificial Sequence: Synthetic oligonucleotide
  Antisense strand to SEQ ID NO: 596442
gcacuucucgaauuauccc

SEQ ID NO: 596444 - RNA, 19 nt, Artificial Sequence
  Description of Artificial Sequence: Synthetic oligonucleotide
  Sense strand starting at position 3162 of SEQ ID NO: 584878
gaaagagaauccucguuuc

SEQ ID NO: 596445 - RNA, 19 nt, Artificial Sequence
  Description of Artificial Sequence: Synthetic oligonucleotide
  Antisense strand to SEQ ID NO: 596444
gaaacgaggauucucuuuc

SEQ ID NO: 596446 - RNA, 19 nt, Artificial Sequence
  Description of Artificial Sequence: Synthetic oligonucleotide
  Sense strand starting at position 3192 of SEQ ID NO: 584878
ggacgacccacucguauau

SEQ ID NO: 596447 - RNA, 19 nt, Artificial Sequence
  Description of Artificial Sequence: Synthetic oligonucleotide
  Antisense strand to SEQ ID NO: 596446
auauacgagugggucgucc

SEQ ID NO: 596448 - RNA, 19 nt, Artificial Sequence
  Description of Artificial Sequence: Synthetic oligonucleotide
  Sense strand starting at position 3218 of SEQ ID NO: 584878
uugggagauucgcccauaa

SEQ ID NO: 596449 - RNA, 19 nt, Artificial Sequence
  Description of Artificial Sequence: Synthetic oligonucleotide
  Antisense strand to SEQ ID NO: 596448
uuaugggcgaaucucccaa

SEQ ID NO: 596450 - RNA, 19 nt, Artificial Sequence
  Description of Artificial Sequence: Synthetic oligonucleotide
  Sense strand starting at position 3220 of SEQ ID NO: 584878
gggagauucgcccauaacu

SEQ ID NO: 596451 - RNA, 19 nt, Artificial Sequence
  Description of Artificial Sequence: Synthetic oligonucleotide
  Antisense strand to SEQ ID NO: 596450
aguuaugggcgaaucuccc

SEQ ID NO: 596452 - RNA, 19 nt, Artificial Sequence
  Description of Artificial Sequence: Synthetic oligonucleotide
  Sense strand starting at position 3269 of SEQ ID NO: 584878
cgcgaguucccguccgauu

SEQ ID NO: 596453 - RNA, 19 nt, Artificial Sequence
  Description of Artificial Sequence: Synthetic oligonucleotide
  Antisense strand to SEQ ID NO: 596452
aaucggacgggaacucgcg

SEQ ID NO: 596454 - RNA, 19 nt, Artificial Sequence
  Description of Artificial Sequence: Synthetic oligonucleotide
  Sense strand starting at position 3612 of SEQ ID NO: 584878
cguuguugggaguugucuu

SEQ ID NO: 596455 - RNA, 19 nt, Artificial Sequence
  Description of Artificial Sequence: Synthetic oligonucleotide
  Antisense strand to SEQ ID NO: 596454
aagacaacucccaacaacg

SEQ ID NO: 596456 - RNA, 19 nt, Artificial Sequence
  Description of Artificial Sequence: Synthetic oligonucleotide
  Sense strand starting at position 3622 of SEQ ID NO: 584878
aguugucuuguaggacaau

SEQ ID NO: 596457 - RNA, 19 nt, Artificial Sequence
  Description of Artificial Sequence: Synthetic oligonucleotide
  Antisense strand to SEQ ID NO: 596456
auuguccuacaagacaacu

SEQ ID NO: 596458 - RNA, 19 nt, Artificial Sequence
  Description of Artificial Sequence: Synthetic oligonucleotide
  Sense strand starting at position 3700 of SEQ ID NO: 584878
uggcaucaguuauuagauu

SEQ ID NO: 596459 - RNA, 19 nt, Artificial Sequence
  Description of Artificial Sequence: Synthetic oligonucleotide
  Antisense strand to SEQ ID NO: 596458
aaucuaauaacugaugcca

SEQ ID NO: 596460 - RNA, 19 nt, Artificial Sequence
  Description of Artificial Sequence: Synthetic oligonucleotide
  Sense strand starting at position 3731 of SEQ ID NO: 584878
augcaugugaaaugugauc

SEQ ID NO: 596461 - RNA, 19 nt, Artificial Sequence
  Description of Artificial Sequence: Synthetic oligonucleotide
  Antisense strand to SEQ ID NO: 596460
gaucacauuucacaugcau

SEQ ID NO: 596462 - RNA, 19 nt, Artificial Sequence
  Description of Artificial Sequence: Synthetic oligonucleotide
  Sense strand starting at position 3733 of SEQ ID NO: 584878
gcaugugaaaugugaucuc

SEQ ID NO: 596463 - RNA, 19 nt, Artificial Sequence
  Description of Artificial Sequence: Synthetic oligonucleotide
  Antisense strand to SEQ ID NO: 596462
gagaucacauuucacaugc

SEQ ID NO: 596464 - RNA, 19 nt, Artificial Sequence
  Description of Artificial Sequence: Synthetic oligonucleotide
  Sense strand starting at position 3736 of SEQ ID NO: 584878
ugugaaaugugaucucaau

SEQ ID NO: 596465 - RNA, 19 nt, Artificial Sequence
  Description of Artificial Sequence: Synthetic oligonucleotide
  Antisense strand to SEQ ID NO: 596464
auugagaucacauuucaca

SEQ ID NO: 596466 - RNA, 19 nt, Artificial Sequence
  Description of Artificial Sequence: Synthetic oligonucleotide
  Sense strand starting at position 3817 of SEQ ID NO: 584878
uggacaagucucugguuga

SEQ ID NO: 596467 - RNA, 19 nt, Artificial Sequence
  Description of Artificial Sequence: Synthetic oligonucleotide
  Antisense strand to SEQ ID NO: 596466
ucaaccagagacuugucca

SEQ ID NO: 596468 - RNA, 19 nt, Artificial Sequence
  Description of Artificial Sequence: Synthetic oligonucleotide
  Sense strand starting at position 3820 of SEQ ID NO: 584878
acaagucucugguugaaga

SEQ ID NO: 596469 - RNA, 19 nt, Artificial Sequence
  Description of Artificial Sequence: Synthetic oligonucleotide
  Antisense strand to SEQ ID NO: 596468
ucuucaaccagagacuugu

SEQ ID NO: 596470 - RNA, 19 nt, Artificial Sequence
  Description of Artificial Sequence: Synthetic oligonucleotide
  Sense strand starting at position 3932 of SEQ ID NO: 584878
ggagaaguuaccuagcccu

SEQ ID NO: 596471 - RNA, 19 nt, Artificial Sequence
  Description of Artificial Sequence: Synthetic oligonucleotide
  Antisense strand to SEQ ID NO: 596470
agggcuagguaacuucucc

SEQ ID NO: 596472 - RNA, 19 nt, Artificial Sequence
  Description of Artificial Sequence: Synthetic oligonucleotide
  Sense strand starting at position 167 of SEQ ID NO: 584879
acaggaugguguuccaaag

SEQ ID NO: 596473 - RNA, 19 nt, Artificial Sequence
  Description of Artificial Sequence: Synthetic oligonucleotide
  Antisense strand to SEQ ID NO: 596472
cuuuggaacaccauccugu

SEQ ID NO: 596474 - RNA, 19 nt, Artificial Sequence
  Description of Artificial Sequence: Synthetic oligonucleotide
  Sense strand starting at position 312 of SEQ ID NO: 584879
aaaguuuaucucgagcaaa

SEQ ID NO: 596475 - RNA, 19 nt, Artificial Sequence
  Description of Artificial Sequence: Synthetic oligonucleotide
  Antisense strand to SEQ ID NO: 596474
uuugcucgagauaaacuuu

SEQ ID NO: 596476 - RNA, 19 nt, Artificial Sequence
  Description of Artificial Sequence: Synthetic oligonucleotide
  Sense strand starting at position 315 of SEQ ID NO: 584879
guuuaucucgagcaaauga

SEQ ID NO: 596477 - RNA, 19 nt, Artificial Sequence
  Description of Artificial Sequence: Synthetic oligonucleotide
  Antisense strand to SEQ ID NO: 596476
ucauuugcucgagauaaac

SEQ ID NO: 596478 - RNA, 19 nt, Artificial Sequence
  Description of Artificial Sequence: Synthetic oligonucleotide
  Sense strand starting at position 418 of SEQ ID NO: 584879
uguuaaauuugagcugucu

SEQ ID NO: 596479 - RNA, 19 nt, Artificial Sequence
  Description of Artificial Sequence: Synthetic oligonucleotide
  Antisense strand to SEQ ID NO: 596478
agacagcucaaauuuaaca

SEQ ID NO: 596480 - RNA, 19 nt, Artificial Sequence
  Description of Artificial Sequence: Synthetic oligonucleotide
  Sense strand starting at position 424 of SEQ ID NO: 584879
auuugagcugucuguuaga

SEQ ID NO: 596481 - RNA, 19 nt, Artificial Sequence
  Description of Artificial Sequence: Synthetic oligonucleotide
  Antisense strand to SEQ ID NO: 596480
ucuaacagacagcucaaau

SEQ ID NO: 596482 - RNA, 19 nt, Artificial Sequence
  Description of Artificial Sequence: Synthetic oligonucleotide
  Sense strand starting at position 475 of SEQ ID NO: 584879
auauaagaaucuggauuuc

SEQ ID NO: 596483 - RNA, 19 nt, Artificial Sequence
  Description of Artificial Sequence: Synthetic oligonucleotide
  Antisense strand to SEQ ID NO: 596482
gaaauccagauucuuauau

SEQ ID NO: 596484 - RNA, 19 nt, Artificial Sequence
  Description of Artificial Sequence: Synthetic oligonucleotide
  Sense strand starting at position 532 of SEQ ID NO: 584879
gucacucaaggaugguauu

SEQ ID NO: 596485 - RNA, 19 nt, Artificial Sequence
  Description of Artificial Sequence: Synthetic oligonucleotide
  Antisense strand to SEQ ID NO: 596484
aauaccauccuugagugac

SEQ ID NO: 596486 - RNA, 19 nt, Artificial Sequence
  Description of Artificial Sequence: Synthetic oligonucleotide
  Sense strand starting at position 535 of SEQ ID NO: 584879
acucaaggaugguauuuaa

SEQ ID NO: 596487 - RNA, 19 nt, Artificial Sequence
  Description of Artificial Sequence: Synthetic oligonucleotide
  Antisense strand to SEQ ID NO: 596486
uuaaauaccauccuugagu

SEQ ID NO: 596488 - RNA, 19 nt, Artificial Sequence
  Description of Artificial Sequence: Synthetic oligonucleotide
  Sense strand starting at position 667 of SEQ ID NO: 584879
gaguguugaugucuuagaa

SEQ ID NO: 596489 - RNA, 19 nt, Artificial Sequence
  Description of Artificial Sequence: Synthetic oligonucleotide
  Antisense strand to SEQ ID NO: 596488
uucuaagacaucaacacuc

SEQ ID NO: 596490 - RNA, 19 nt, Artificial Sequence
  Description of Artificial Sequence: Synthetic oligonucleotide
  Sense strand starting at position 728 of SEQ ID NO: 584879
ugucaaauauugcuuuaga

SEQ ID NO: 596491 - RNA, 19 nt, Artificial Sequence
  Description of Artificial Sequence: Synthetic oligonucleotide
  Antisense strand to SEQ ID NO: 596490
ucuaaagcaauauuugaca

SEQ ID NO: 596492 - RNA, 19 nt, Artificial Sequence
  Description of Artificial Sequence: Synthetic oligonucleotide
  Sense strand starting at position 729 of SEQ ID NO: 584879
gucaaauauugcuuuagau

SEQ ID NO: 596493 - RNA, 19 nt, Artificial Sequence
  Description of Artificial Sequence: Synthetic oligonucleotide
  Antisense strand to SEQ ID NO: 596492
aucuaaagcaauauuugac

SEQ ID NO: 596494 - RNA, 19 nt, Artificial Sequence
  Description of Artificial Sequence: Synthetic oligonucleotide
  Sense strand starting at position 736 of SEQ ID NO: 584879
auugcuuuagaugagaucu

SEQ ID NO: 596495 - RNA, 19 nt, Artificial Sequence
  Description of Artificial Sequence: Synthetic oligonucleotide
  Antisense strand to SEQ ID NO: 596494
agaucucaucuaaagcaau

SEQ ID NO: 596496 - RNA, 19 nt, Artificial Sequence
  Description of Artificial Sequence: Synthetic oligonucleotide
  Sense strand starting at position 892 of SEQ ID NO: 584879
caguucucagcuuaaaggu

SEQ ID NO: 596497 - RNA, 19 nt, Artificial Sequence
  Description of Artificial Sequence: Synthetic oligonucleotide
  Antisense strand to SEQ ID NO: 596496
accuuuaagcugagaacug

SEQ ID NO: 596498 - RNA, 19 nt, Artificial Sequence
  Description of Artificial Sequence: Synthetic oligonucleotide
  Sense strand starting at position 922 of SEQ ID NO: 584879
cggagaagcuucucaagac

SEQ ID NO: 596499 - RNA, 19 nt, Artificial Sequence
  Description of Artificial Sequence: Synthetic oligonucleotide
  Antisense strand to SEQ ID NO: 596498
gucuugagaagcuucuccg

SEQ ID NO: 596500 - RNA, 19 nt, Artificial Sequence
  Description of Artificial Sequence: Synthetic oligonucleotide
  Sense strand starting at position 943 of SEQ ID NO: 584879
augcuauuguuaccaggga

SEQ ID NO: 596501 - RNA, 19 nt, Artificial Sequence
  Description of Artificial Sequence: Synthetic oligonucleotide
  Antisense strand to SEQ ID NO: 596500
ucccugguaacaauagcau

SEQ ID NO: 596502 - RNA, 19 nt, Artificial Sequence
  Description of Artificial Sequence: Synthetic oligonucleotide
  Sense strand starting at position 958 of SEQ ID NO: 584879
gggaaacgauacuuuauca

SEQ ID NO: 596503 - RNA, 19 nt, Artificial Sequence
  Description of Artificial Sequence: Synthetic oligonucleotide
  Antisense strand to SEQ ID NO: 596502
ugauaaaguaucguuuccc

SEQ ID NO: 596504 - RNA, 19 nt, Artificial Sequence
  Description of Artificial Sequence: Synthetic oligonucleotide
  Sense strand starting at position 992 of SEQ ID NO: 584879
cuaagagucuacuuaauug

SEQ ID NO: 596505 - RNA, 19 nt, Artificial Sequence
  Description of Artificial Sequence: Synthetic oligonucleotide
  Antisense strand to SEQ ID NO: 596504
caauuaaguagacucuuag

SEQ ID NO: 596506 - RNA, 19 nt, Artificial Sequence
  Description of Artificial Sequence: Synthetic oligonucleotide
  Sense strand starting at position 1029 of SEQ ID NO: 584879
cuguaagguccuuaaguua

SEQ ID NO: 596507 - RNA, 19 nt, Artificial Sequence
  Description of Artificial Sequence: Synthetic oligonucleotide
  Antisense strand to SEQ ID NO: 596506
uaacuuaaggaccuuacag

SEQ ID NO: 596508 - RNA, 19 nt, Artificial Sequence
  Description of Artificial Sequence: Synthetic oligonucleotide
  Sense strand starting at position 1061 of SEQ ID NO: 584879
uguuuacuucuguacccaa

SEQ ID NO: 596509 - RNA, 19 nt, Artificial Sequence
  Description of Artificial Sequence: Synthetic oligonucleotide
  Antisense strand to SEQ ID NO: 596508
uuggguacagaaguaaaca

SEQ ID NO: 596510 - RNA, 19 nt, Artificial Sequence
  Description of Artificial Sequence: Synthetic oligonucleotide
  Sense strand starting at position 1118 of SEQ ID NO: 584879
guggguaucccauaaauau

SEQ ID NO: 596511 - RNA, 19 nt, Artificial Sequence
  Description of Artificial Sequence: Synthetic oligonucleotide
  Antisense strand to SEQ ID NO: 596510
auauuuaugggauacccac

SEQ ID NO: 596512 - RNA, 19 nt, Artificial Sequence
  Description of Artificial Sequence: Synthetic oligonucleotide
  Sense strand starting at position 1296 of SEQ ID NO: 584879
cuuuguugacucgaagcaa

SEQ ID NO: 596513 - RNA, 19 nt, Artificial Sequence
  Description of Artificial Sequence: Synthetic oligonucleotide
  Antisense strand to SEQ ID NO: 596512
uugcuucgagucaacaaag

SEQ ID NO: 596514 - RNA, 19 nt, Artificial Sequence
  Description of Artificial Sequence: Synthetic oligonucleotide
  Sense strand starting at position 1989 of SEQ ID NO: 584879
ggcgggaauccgcagauga

SEQ ID NO: 596515 - RNA, 19 nt, Artificial Sequence
  Description of Artificial Sequence: Synthetic oligonucleotide
  Antisense strand to SEQ ID NO: 596514
ucaucugcggauucccgcc

SEQ ID NO: 596516 - RNA, 19 nt, Artificial Sequence
  Description of Artificial Sequence: Synthetic oligonucleotide
  Sense strand starting at position 1991 of SEQ ID NO: 584879
cgggaauccgcagaugaug

SEQ ID NO: 596517 - RNA, 19 nt, Artificial Sequence
  Description of Artificial Sequence: Synthetic oligonucleotide
  Antisense strand to SEQ ID NO: 596516
caucaucugcggauucccg

SEQ ID NO: 596518 - RNA, 19 nt, Artificial Sequence
  Description of Artificial Sequence: Synthetic oligonucleotide
  Sense strand starting at position 2166 of SEQ ID NO: 584879
ugcguuucuacugugugau

SEQ ID NO: 596519 - RNA, 19 nt, Artificial Sequence
  Description of Artificial Sequence: Synthetic oligonucleotide
  Antisense strand to SEQ ID NO: 596518
aucacacaguagaaacgca

SEQ ID NO: 596520 - RNA, 19 nt, Artificial Sequence
  Description of Artificial Sequence: Synthetic oligonucleotide
  Sense strand starting at position 2317 of SEQ ID NO: 584879
agggagauguccucggguu

SEQ ID NO: 596521 - RNA, 19 nt, Artificial Sequence
  Description of Artificial Sequence: Synthetic oligonucleotide
  Antisense strand to SEQ ID NO: 596520
aacccgaggacaucucccu

SEQ ID NO: 596522 - RNA, 19 nt, Artificial Sequence
  Description of Artificial Sequence: Synthetic oligonucleotide
  Sense strand starting at position 2329 of SEQ ID NO: 584879
ucggguuguguagaugaga

SEQ ID NO: 596523 - RNA, 19 nt, Artificial Sequence
  Description of Artificial Sequence: Synthetic oligonucleotide
  Antisense strand to SEQ ID NO: 596522
ucucaucuacacaacccga

SEQ ID NO: 596524 - RNA, 19 nt, Artificial Sequence
  Description of Artificial Sequence: Synthetic oligonucleotide
  Sense strand starting at position 2682 of SEQ ID NO: 584879
accuaucaaugguuguaua

SEQ ID NO: 596525 - RNA, 19 nt, Artificial Sequence
  Description of Artificial Sequence: Synthetic oligonucleotide
  Antisense strand to SEQ ID NO: 596524
uauacaaccauugauaggu

SEQ ID NO: 596526 - RNA, 19 nt, Artificial Sequence
  Description of Artificial Sequence: Synthetic oligonucleotide
  Sense strand starting at position 2773 of SEQ ID NO: 584879
gaaauagggucuuuggacu

SEQ ID NO: 596527 - RNA, 19 nt, Artificial Sequence
  Description of Artificial Sequence: Synthetic oligonucleotide
  Antisense strand to SEQ ID NO: 596526
aguccaaagacccuauuuc

SEQ ID NO: 596528 - RNA, 19 nt, Artificial Sequence
  Description of Artificial Sequence: Synthetic oligonucleotide
  Sense strand starting at position 2818 of SEQ ID NO: 584879
gggagugggccauaagcaa

SEQ ID NO: 596529 - RNA, 19 nt, Artificial Sequence
  Description of Artificial Sequence: Synthetic oligonucleotide
  Antisense strand to SEQ ID NO: 596528
uugcuuauggcccacuccc

SEQ ID NO: 596530 - RNA, 19 nt, Artificial Sequence
  Description of Artificial Sequence: Synthetic oligonucleotide
  Sense strand starting at position 2931 of SEQ ID NO: 584879
uuaagaucuugggucuaga

SEQ ID NO: 596531 - RNA, 19 nt, Artificial Sequence
  Description of Artificial Sequence: Synthetic oligonucleotide
  Antisense strand to SEQ ID NO: 596530
ucuagacccaagaucuuaa

SEQ ID NO: 596532 - RNA, 19 nt, Artificial Sequence
  Description of Artificial Sequence: Synthetic oligonucleotide
  Sense strand starting at position 3175 of SEQ ID NO: 584879
uuucuuaucucaguagaug

SEQ ID NO: 596533 - RNA, 19 nt, Artificial Sequence
  Description of Artificial Sequence: Synthetic oligonucleotide
  Antisense strand to SEQ ID NO: 596532
caucuacugagauaagaaa

SEQ ID NO: 596534 - RNA, 19 nt, Artificial Sequence
  Description of Artificial Sequence: Synthetic oligonucleotide
  Sense strand starting at position 3234 of SEQ ID NO: 584879
uuugaagccaguggauaua

SEQ ID NO: 596535 - RNA, 19 nt, Artificial Sequence
  Description of Artificial Sequence: Synthetic oligonucleotide
  Antisense strand to SEQ ID NO: 596534
uauauccacuggcuucaaa

SEQ ID NO: 596536 - RNA, 19 nt, Artificial Sequence
  Description of Artificial Sequence: Synthetic oligonucleotide
  Sense strand starting at position 3316 of SEQ ID NO: 584879
agguuucucagugauugca

SEQ ID NO: 596537 - RNA, 19 nt, Artificial Sequence
  Description of Artificial Sequence: Synthetic oligonucleotide
  Antisense strand to SEQ ID NO: 596536
ugcaaucacugagaaaccu

SEQ ID NO: 596538 - RNA, 19 nt, Artificial Sequence
  Description of Artificial Sequence: Synthetic oligonucleotide
  Sense strand starting at position 3363 of SEQ ID NO: 584879
uccuguguuccuuaaugga

SEQ ID NO: 596539 - RNA, 19 nt, Artificial Sequence
  Description of Artificial Sequence: Synthetic oligonucleotide
  Antisense strand to SEQ ID NO: 596538
uccauuaaggaacacagga

SEQ ID NO: 596540 - RNA, 19 nt, Artificial Sequence
  Description of Artificial Sequence: Synthetic oligonucleotide
  Sense strand starting at position 3542 of SEQ ID NO: 584879
aaguauuggcauuauagac

SEQ ID NO: 596541 - RNA, 19 nt, Artificial Sequence
  Description of Artificial Sequence: Synthetic oligonucleotide
  Antisense strand to SEQ ID NO: 596540
gucuauaaugccaauacuu

SEQ ID NO: 596542 - RNA, 19 nt, Artificial Sequence
  Description of Artificial Sequence: Synthetic oligonucleotide
  Sense strand starting at position 3662 of SEQ ID NO: 584879
ggacuucugucacuuguag

SEQ ID NO: 596543 - RNA, 19 nt, Artificial Sequence
  Description of Artificial Sequence: Synthetic oligonucleotide
  Antisense strand to SEQ ID NO: 596542
cuacaagugacagaagucc

SEQ ID NO: 596544 - RNA, 19 nt, Artificial Sequence
  Description of Artificial Sequence: Synthetic oligonucleotide
  Sense strand starting at position 3671 of SEQ ID NO: 584879
ucacuuguagcgucaguuu

SEQ ID NO: 596545 - RNA, 19 nt, Artificial Sequence
  Description of Artificial Sequence: Synthetic oligonucleotide
  Antisense strand to SEQ ID NO: 596544
aaacugacgcuacaaguga

SEQ ID NO: 596546 - RNA, 19 nt, Artificial Sequence
  Description of Artificial Sequence: Synthetic oligonucleotide
  Sense strand starting at position 3942 of SEQ ID NO: 584879
ggcagucuaguuagugguu

SEQ ID NO: 596547 - RNA, 19 nt, Artificial Sequence
  Description of Artificial Sequence: Synthetic oligonucleotide
  Antisense strand to SEQ ID NO: 596546
aaccacuaacuagacugcc

SEQ ID NO: 596548 - RNA, 19 nt, Artificial Sequence
  Description of Artificial Sequence: Synthetic oligonucleotide
  Sense strand starting at position 3947 of SEQ ID NO: 584879
ucuaguuagugguuaagag

SEQ ID NO: 596549 - RNA, 19 nt, Artificial Sequence
  Description of Artificial Sequence: Synthetic oligonucleotide
  Antisense strand to SEQ ID NO: 596548
cucuuaaccacuaacuaga

SEQ ID NO: 596550 - RNA, 19 nt, Artificial Sequence
  Description of Artificial Sequence: Synthetic oligonucleotide
  Sense strand starting at position 3956 of SEQ ID NO: 584879
ugguuaagagcauggacau

SEQ ID NO: 596551 - RNA, 19 nt, Artificial Sequence
  Description of Artificial Sequence: Synthetic oligonucleotide
  Antisense strand to SEQ ID NO: 596550
auguccaugcucuuaacca

SEQ ID NO: 596552 - RNA, 19 nt, Artificial Sequence
  Description of Artificial Sequence: Synthetic oligonucleotide
  Sense strand starting at position 43 of SEQ ID NO: 584880
guuguauaugcuuacuaau

SEQ ID NO: 596553 - RNA, 19 nt, Artificial Sequence
  Description of Artificial Sequence: Synthetic oligonucleotide
  Antisense strand to SEQ ID NO: 596552
auuaguaagcauauacaac

SEQ ID NO: 596554 - RNA, 19 nt, Artificial Sequence
  Description of Artificial Sequence: Synthetic oligonucleotide
  Sense strand starting at position 111 of SEQ ID NO: 584880
uugucuuacagaugggaaa

SEQ ID NO: 596555 - RNA, 19 nt, Artificial Sequence
  Description of Artificial Sequence: Synthetic oligonucleotide
  Antisense strand to SEQ ID NO: 596554
uuucccaucuguaagacaa

SEQ ID NO: 596556 - RNA, 19 nt, Artificial Sequence
  Description of Artificial Sequence: Synthetic oligonucleotide
  Sense strand starting at position 156 of SEQ ID NO: 584880
cuucccaaagucugucaaa

SEQ ID NO: 596557 - RNA, 19 nt, Artificial Sequence
  Description of Artificial Sequence: Synthetic oligonucleotide
  Antisense strand to SEQ ID NO: 596556
uuugacagacuuugggaag

SEQ ID NO: 596558 - RNA, 19 nt, Artificial Sequence
  Description of Artificial Sequence: Synthetic oligonucleotide
  Sense strand starting at position 165 of SEQ ID NO: 584880
gucugucaaagucagagua

SEQ ID NO: 596559 - RNA, 19 nt, Artificial Sequence
  Description of Artificial Sequence: Synthetic oligonucleotide
  Antisense strand to SEQ ID NO: 596558
uacucugacuuugacagac

SEQ ID NO: 596560 - RNA, 19 nt, Artificial Sequence
  Description of Artificial Sequence: Synthetic oligonucleotide
  Sense strand starting at position 284 of SEQ ID NO: 584880
uaugaagucuugcuuugag

SEQ ID NO: 596561 - RNA, 19 nt, Artificial Sequence
  Description of Artificial Sequence: Synthetic oligonucleotide
  Antisense strand to SEQ ID NO: 596560
cucaaagcaagacuucaua

SEQ ID NO: 596562 - RNA, 19 nt, Artificial Sequence
  Description of Artificial Sequence: Synthetic oligonucleotide
  Sense strand starting at position 334 of SEQ ID NO: 584880
ggcuuuaugcuacaucuga

SEQ ID NO: 596563 - RNA, 19 nt, Artificial Sequence
  Description of Artificial Sequence: Synthetic oligonucleotide
  Antisense strand to SEQ ID NO: 596562
ucagauguagcauaaagcc

SEQ ID NO: 596564 - RNA, 19 nt, Artificial Sequence
  Description of Artificial Sequence: Synthetic oligonucleotide
  Sense strand starting at position 539 of SEQ ID NO: 584880
gcccaucagccagagaacu

SEQ ID NO: 596565 - RNA, 19 nt, Artificial Sequence
  Description of Artificial Sequence: Synthetic oligonucleotide
  Antisense strand to SEQ ID NO: 596564
aguucucuggcugaugggc

SEQ ID NO: 596566 - RNA, 19 nt, Artificial Sequence
  Description of Artificial Sequence: Synthetic oligonucleotide
  Sense strand starting at position 865 of SEQ ID NO: 584880
cugaaauauuagguugcaa

SEQ ID NO: 596567 - RNA, 19 nt, Artificial Sequence
  Description of Artificial Sequence: Synthetic oligonucleotide
  Antisense strand to SEQ ID NO: 596566
uugcaaccuaauauuucag

SEQ ID NO: 596568 - RNA, 19 nt, Artificial Sequence
  Description of Artificial Sequence: Synthetic oligonucleotide
  Sense strand starting at position 867 of SEQ ID NO: 584880
gaaauauuagguugcaaca

SEQ ID NO: 596569 - RNA, 19 nt, Artificial Sequence
  Description of Artificial Sequence: Synthetic oligonucleotide
  Antisense strand to SEQ ID NO: 596568
uguugcaaccuaauauuuc

SEQ ID NO: 596570 - RNA, 19 nt, Artificial Sequence
  Description of Artificial Sequence: Synthetic oligonucleotide
  Sense strand starting at position 876 of SEQ ID NO: 584880
gguugcaacaugugaaauu

SEQ ID NO: 596571 - RNA, 19 nt, Artificial Sequence
  Description of Artificial Sequence: Synthetic oligonucleotide
  Antisense strand to SEQ ID NO: 596570
aauuucacauguugcaacc

SEQ ID NO: 596572 - RNA, 19 nt, Artificial Sequence
  Description of Artificial Sequence: Synthetic oligonucleotide
  Sense strand starting at position 901 of SEQ ID NO: 584880
uuuggcaacugauugaaua

SEQ ID NO: 596573 - RNA, 19 nt, Artificial Sequence
  Description of Artificial Sequence: Synthetic oligonucleotide
  Antisense strand to SEQ ID NO: 596572
uauucaaucaguugccaaa

SEQ ID NO: 596574 - RNA, 19 nt, Artificial Sequence
  Description of Artificial Sequence: Synthetic oligonucleotide
  Sense strand starting at position 902 of SEQ ID NO: 584880
uuggcaacugauugaauau

SEQ ID NO: 596575 - RNA, 19 nt, Artificial Sequence
  Description of Artificial Sequence: Synthetic oligonucleotide
  Antisense strand to SEQ ID NO: 596574
auauucaaucaguugccaa

SEQ ID NO: 596576 - RNA, 19 nt, Artificial Sequence
  Description of Artificial Sequence: Synthetic oligonucleotide
  Sense strand starting at position 936 of SEQ ID NO: 584880
gucuaagcgaacugauuga

SEQ ID NO: 596577 - RNA, 19 nt, Artificial Sequence
  Description of Artificial Sequence: Synthetic oligonucleotide
  Antisense strand to SEQ ID NO: 596576
ucaaucaguucgcuuagac

SEQ ID NO: 596578 - RNA, 19 nt, Artificial Sequence
  Description of Artificial Sequence: Synthetic oligonucleotide
  Sense strand starting at position 940 of SEQ ID NO: 584880
aagcgaacugauugauaaa

SEQ ID NO: 596579 - RNA, 19 nt, Artificial Sequence
  Description of Artificial Sequence: Synthetic oligonucleotide
  Antisense strand to SEQ ID NO: 596578
uuuaucaaucaguucgcuu

SEQ ID NO: 596580 - RNA, 19 nt, Artificial Sequence
  Description of Artificial Sequence: Synthetic oligonucleotide
  Sense strand starting at position 1058 of SEQ ID NO: 584880
ucugaauggucacuacuag

SEQ ID NO: 596581 - RNA, 19 nt, Artificial Sequence
  Description of Artificial Sequence: Synthetic oligonucleotide
  Antisense strand to SEQ ID NO: 596580
cuaguagugaccauucaga

SEQ ID NO: 596582 - RNA, 19 nt, Artificial Sequence
  Description of Artificial Sequence: Synthetic oligonucleotide
  Sense strand starting at position 2101 of SEQ ID NO: 584880
uugugugaauagucaauag

SEQ ID NO: 596583 - RNA, 19 nt, Artificial Sequence
  Description of Artificial Sequence: Synthetic oligonucleotide
  Antisense strand to SEQ ID NO: 596582
cuauugacuauucacacaa

SEQ ID NO: 596584 - RNA, 19 nt, Artificial Sequence
  Description of Artificial Sequence: Synthetic oligonucleotide
  Sense strand starting at position 2105 of SEQ ID NO: 584880
gugaauagucaauagucua

SEQ ID NO: 596585 - RNA, 19 nt, Artificial Sequence
  Description of Artificial Sequence: Synthetic oligonucleotide
  Antisense strand to SEQ ID NO: 596584
uagacuauugacuauucac

SEQ ID NO: 596586 - RNA, 19 nt, Artificial Sequence
  Description of Artificial Sequence: Synthetic oligonucleotide
  Sense strand starting at position 2235 of SEQ ID NO: 584880
acaguucugucuucuugaa

SEQ ID NO: 596587 - RNA, 19 nt, Artificial Sequence
  Description of Artificial Sequence: Synthetic oligonucleotide
  Antisense strand to SEQ ID NO: 596586
uucaagaagacagaacugu

SEQ ID NO: 596588 - RNA, 19 nt, Artificial Sequence
  Description of Artificial Sequence: Synthetic oligonucleotide
  Sense strand starting at position 2237 of SEQ ID NO: 584880
aguucugucuucuugaaga

SEQ ID NO: 596589 - RNA, 19 nt, Artificial Sequence
  Description of Artificial Sequence: Synthetic oligonucleotide
  Antisense strand to SEQ ID NO: 596588
ucuucaagaagacagaacu

SEQ ID NO: 596590 - RNA, 19 nt, Artificial Sequence
  Description of Artificial Sequence: Synthetic oligonucleotide
  Sense strand starting at position 2533 of SEQ ID NO: 584880
ccuacacuuguaugaaaug

SEQ ID NO: 596591 - RNA, 19 nt, Artificial Sequence
  Description of Artificial Sequence: Synthetic oligonucleotide
  Antisense strand to SEQ ID NO: 596590
cauuucauacaaguguagg

SEQ ID NO: 596592 - RNA, 19 nt, Artificial Sequence
  Description of Artificial Sequence: Synthetic oligonucleotide
  Sense strand starting at position 2538 of SEQ ID NO: 584880
acuuguaugaaaugcagga

SEQ ID NO: 596593 - RNA, 19 nt, Artificial Sequence
  Description of Artificial Sequence: Synthetic oligonucleotide
  Antisense strand to SEQ ID NO: 596592
uccugcauuucauacaagu

SEQ ID NO: 596594 - RNA, 19 nt, Artificial Sequence
  Description of Artificial Sequence: Synthetic oligonucleotide
  Sense strand starting at position 2668 of SEQ ID NO: 584880
augaaaccucucugaagug

SEQ ID NO: 596595 - RNA, 19 nt, Artificial Sequence
  Description of Artificial Sequence: Synthetic oligonucleotide
  Antisense strand to SEQ ID NO: 596594
cacuucagagagguuucau

SEQ ID NO: 596596 - RNA, 19 nt, Artificial Sequence
  Description of Artificial Sequence: Synthetic oligonucleotide
  Sense strand starting at position 2684 of SEQ ID NO: 584880
gugaucauuuagguucgua

SEQ ID NO: 596597 - RNA, 19 nt, Artificial Sequence
  Description of Artificial Sequence: Synthetic oligonucleotide
  Antisense strand to SEQ ID NO: 596596
uacgaaccuaaaugaucac

SEQ ID NO: 596598 - RNA, 19 nt, Artificial Sequence
  Description of Artificial Sequence: Synthetic oligonucleotide
  Sense strand starting at position 2719 of SEQ ID NO: 584880
auaagugaguccuuagaga

SEQ ID NO: 596599 - RNA, 19 nt, Artificial Sequence
  Description of Artificial Sequence: Synthetic oligonucleotide
  Antisense strand to SEQ ID NO: 596598
ucucuaaggacucacuuau

SEQ ID NO: 596600 - RNA, 19 nt, Artificial Sequence
  Description of Artificial Sequence: Synthetic oligonucleotide
  Sense strand starting at position 3191 of SEQ ID NO: 584880
ucaggacauccugguguua

SEQ ID NO: 596601 - RNA, 19 nt, Artificial Sequence
  Description of Artificial Sequence: Synthetic oligonucleotide
  Antisense strand to SEQ ID NO: 596600
uaacaccaggauguccuga

SEQ ID NO: 596602 - RNA, 19 nt, Artificial Sequence
  Description of Artificial Sequence: Synthetic oligonucleotide
  Sense strand starting at position 3393 of SEQ ID NO: 584880
guuaguagaacuuauguau

SEQ ID NO: 596603 - RNA, 19 nt, Artificial Sequence
  Description of Artificial Sequence: Synthetic oligonucleotide
  Antisense strand to SEQ ID NO: 596602
auacauaaguucuacuaac

SEQ ID NO: 596604 - RNA, 19 nt, Artificial Sequence
  Description of Artificial Sequence: Synthetic oligonucleotide
  Sense strand starting at position 3397 of SEQ ID NO: 584880
guagaacuuauguauguca

SEQ ID NO: 596605 - RNA, 19 nt, Artificial Sequence
  Description of Artificial Sequence: Synthetic oligonucleotide
  Antisense strand to SEQ ID NO: 596604
ugacauacauaaguucuac

SEQ ID NO: 596606 - RNA, 19 nt, Artificial Sequence
  Description of Artificial Sequence: Synthetic oligonucleotide
  Sense strand starting at position 3399 of SEQ ID NO: 584880
agaacuuauguaugucauu

SEQ ID NO: 596607 - RNA, 19 nt, Artificial Sequence
  Description of Artificial Sequence: Synthetic oligonucleotide
  Antisense strand to SEQ ID NO: 596606
aaugacauacauaaguucu

SEQ ID NO: 596608 - RNA, 19 nt, Artificial Sequence
  Description of Artificial Sequence: Synthetic oligonucleotide
  Sense strand starting at position 3488 of SEQ ID NO: 584880
ggagauccgucuuccacca

SEQ ID NO: 596609 - RNA, 19 nt, Artificial Sequence
  Description of Artificial Sequence: Synthetic oligonucleotide
  Antisense strand to SEQ ID NO: 596608
ugguggaagacggaucucc

SEQ ID NO: 596610 - RNA, 19 nt, Artificial Sequence
  Description of Artificial Sequence: Synthetic oligonucleotide
  Sense strand starting at position 3560 of SEQ ID NO: 584880
gggugucugacacaguguu

SEQ ID NO: 596611 - RNA, 19 nt, Artificial Sequence
  Description of Artificial Sequence: Synthetic oligonucleotide
  Antisense strand to SEQ ID NO: 596610
aacacugugucagacaccc

SEQ ID NO: 596612 - RNA, 19 nt, Artificial Sequence
  Description of Artificial Sequence: Synthetic oligonucleotide
  Sense strand starting at position 3600 of SEQ ID NO: 584880
agccacuuagauuguuaca

SEQ ID NO: 596613 - RNA, 19 nt, Artificial Sequence
  Description of Artificial Sequence: Synthetic oligonucleotide
  Antisense strand to SEQ ID NO: 596612
uguaacaaucuaaguggcu

SEQ ID NO: 596614 - RNA, 19 nt, Artificial Sequence
  Description of Artificial Sequence: Synthetic oligonucleotide
  Sense strand starting at position 3602 of SEQ ID NO: 584880
ccacuuagauuguuacaag

SEQ ID NO: 596615 - RNA, 19 nt, Artificial Sequence
  Description of Artificial Sequence: Synthetic oligonucleotide
  Antisense strand to SEQ ID NO: 596614
cuuguaacaaucuaagugg

SEQ ID NO: 596616 - RNA, 19 nt, Artificial Sequence
  Description of Artificial Sequence: Synthetic oligonucleotide
  Sense strand starting at position 3734 of SEQ ID NO: 584880
gccaauaagaugugaguac

SEQ ID NO: 596617 - RNA, 19 nt, Artificial Sequence
  Description of Artificial Sequence: Synthetic oligonucleotide
  Antisense strand to SEQ ID NO: 596616
guacucacaucuuauuggc

SEQ ID NO: 596618 - RNA, 19 nt, Artificial Sequence
  Description of Artificial Sequence: Synthetic oligonucleotide
  Sense strand starting at position 3745 of SEQ ID NO: 584880
gugaguacaagugauaugu

SEQ ID NO: 596619 - RNA, 19 nt, Artificial Sequence
  Description of Artificial Sequence: Synthetic oligonucleotide
  Antisense strand to SEQ ID NO: 596618
acauaucacuuguacucac

SEQ ID NO: 596620 - RNA, 19 nt, Artificial Sequence
  Description of Artificial Sequence: Synthetic oligonucleotide
  Sense strand starting at position 3749 of SEQ ID NO: 584880
guacaagugauauguauca

SEQ ID NO: 596621 - RNA, 19 nt, Artificial Sequence
  Description of Artificial Sequence: Synthetic oligonucleotide
  Antisense strand to SEQ ID NO: 596620
ugauacauaucacuuguac

SEQ ID NO: 596622 - RNA, 19 nt, Artificial Sequence
  Description of Artificial Sequence: Synthetic oligonucleotide
  Sense strand starting at position 3816 of SEQ ID NO: 584880
uaugguaacgucugagaug

SEQ ID NO: 596623 - RNA, 19 nt, Artificial Sequence
  Description of Artificial Sequence: Synthetic oligonucleotide
  Antisense strand to SEQ ID NO: 596622
caucucagacguuaccaua

SEQ ID NO: 596624 - RNA, 19 nt, Artificial Sequence
  Description of Artificial Sequence: Synthetic oligonucleotide
  Sense strand starting at position 3849 of SEQ ID NO: 584880
agccaagaucccuggguga

SEQ ID NO: 596625 - RNA, 19 nt, Artificial Sequence
  Description of Artificial Sequence: Synthetic oligonucleotide
  Antisense strand to SEQ ID NO: 596624
ucacccagggaucuuggcu

SEQ ID NO: 596626 - RNA, 19 nt, Artificial Sequence
  Description of Artificial Sequence: Synthetic oligonucleotide
  Sense strand starting at position 3851 of SEQ ID NO: 584880
ccaagaucccugggugaua

SEQ ID NO: 596627 - RNA, 19 nt, Artificial Sequence
  Description of Artificial Sequence: Synthetic oligonucleotide
  Antisense strand to SEQ ID NO: 596626
uaucacccagggaucuugg

SEQ ID NO: 596628 - RNA, 19 nt, Artificial Sequence
  Description of Artificial Sequence: Synthetic oligonucleotide
  Sense strand starting at position 3852 of SEQ ID NO: 584880
caagaucccugggugauau

SEQ ID NO: 596629 - RNA, 19 nt, Artificial Sequence
  Description of Artificial Sequence: Synthetic oligonucleotide
  Antisense strand to SEQ ID NO: 596628
auaucacccagggaucuug

SEQ ID NO: 596630 - RNA, 19 nt, Artificial Sequence
  Description of Artificial Sequence: Synthetic oligonucleotide
  Sense strand starting at position 3860 of SEQ ID NO: 584880
cugggugauaucgaaagca

SEQ ID NO: 596631 - RNA, 19 nt, Artificial Sequence
  Description of Artificial Sequence: Synthetic oligonucleotide
  Antisense strand to SEQ ID NO: 596630
ugcuuucgauaucacccag

SEQ ID NO: 596632 - RNA, 19 nt, Artificial Sequence
  Description of Artificial Sequence: Synthetic oligonucleotide
  Sense strand starting at position 76 of SEQ ID NO: 584881
gguggaagauuagaguaga

SEQ ID NO: 596633 - RNA, 19 nt, Artificial Sequence
  Description of Artificial Sequence: Synthetic oligonucleotide
  Antisense strand to SEQ ID NO: 596632
ucuacucuaaucuuccacc

SEQ ID NO: 596634 - RNA, 19 nt, Artificial Sequence
  Description of Artificial Sequence: Synthetic oligonucleotide
  Sense strand starting at position 87 of SEQ ID NO: 584881
agaguagaaucauacuaac

SEQ ID NO: 596635 - RNA, 19 nt, Artificial Sequence
  Description of Artificial Sequence: Synthetic oligonucleotide
  Antisense strand to SEQ ID NO: 596634
guuaguaugauucuacucu

SEQ ID NO: 596636 - RNA, 19 nt, Artificial Sequence
  Description of Artificial Sequence: Synthetic oligonucleotide
  Sense strand starting at position 125 of SEQ ID NO: 584881
aaauuaguccuaggguuaa

SEQ ID NO: 596637 - RNA, 19 nt, Artificial Sequence
  Description of Artificial Sequence: Synthetic oligonucleotide
  Antisense strand to SEQ ID NO: 596636
uuaacccuaggacuaauuu

SEQ ID NO: 596638 - RNA, 19 nt, Artificial Sequence
  Description of Artificial Sequence: Synthetic oligonucleotide
  Sense strand starting at position 129 of SEQ ID NO: 584881
uaguccuaggguuaauuau

SEQ ID NO: 596639 - RNA, 19 nt, Artificial Sequence
  Description of Artificial Sequence: Synthetic oligonucleotide
  Antisense strand to SEQ ID NO: 596638
auaauuaacccuaggacua

SEQ ID NO: 596640 - RNA, 19 nt, Artificial Sequence
  Description of Artificial Sequence: Synthetic oligonucleotide
  Sense strand starting at position 167 of SEQ ID NO: 584881
caaggucaucgauagcaca

SEQ ID NO: 596641 - RNA, 19 nt, Artificial Sequence
  Description of Artificial Sequence: Synthetic oligonucleotide
  Antisense strand to SEQ ID NO: 596640
ugugcuaucgaugaccuug

SEQ ID NO: 596642 - RNA, 19 nt, Artificial Sequence
  Description of Artificial Sequence: Synthetic oligonucleotide
  Sense strand starting at position 194 of SEQ ID NO: 584881
gcgacugccuuggcaagaa

SEQ ID NO: 596643 - RNA, 19 nt, Artificial Sequence
  Description of Artificial Sequence: Synthetic oligonucleotide
  Antisense strand to SEQ ID NO: 596642
uucuugccaaggcagucgc

SEQ ID NO: 596644 - RNA, 19 nt, Artificial Sequence
  Description of Artificial Sequence: Synthetic oligonucleotide
  Sense strand starting at position 206 of SEQ ID NO: 584881
gcaagaaguugggaucaau

SEQ ID NO: 596645 - RNA, 19 nt, Artificial Sequence
  Description of Artificial Sequence: Synthetic oligonucleotide
  Antisense strand to SEQ ID NO: 596644
auugaucccaacuucuugc

SEQ ID NO: 596646 - RNA, 19 nt, Artificial Sequence
  Description of Artificial Sequence: Synthetic oligonucleotide
  Sense strand starting at position 215 of SEQ ID NO: 584881
ugggaucaauccugagaau

SEQ ID NO: 596647 - RNA, 19 nt, Artificial Sequence
  Description of Artificial Sequence: Synthetic oligonucleotide
  Antisense strand to SEQ ID NO: 596646
auucucaggauugauccca

SEQ ID NO: 596648 - RNA, 19 nt, Artificial Sequence
  Description of Artificial Sequence: Synthetic oligonucleotide
  Sense strand starting at position 218 of SEQ ID NO: 584881
gaucaauccugagaaugga

SEQ ID NO: 596649 - RNA, 19 nt, Artificial Sequence
  Description of Artificial Sequence: Synthetic oligonucleotide
  Antisense strand to SEQ ID NO: 596648
uccauucucaggauugauc

SEQ ID NO: 596650 - RNA, 19 nt, Artificial Sequence
  Description of Artificial Sequence: Synthetic oligonucleotide
  Sense strand starting at position 299 of SEQ ID NO: 584881
ucgucuggcuuuguggaaa

SEQ ID NO: 596651 - RNA, 19 nt, Artificial Sequence
  Description of Artificial Sequence: Synthetic oligonucleotide
  Antisense strand to SEQ ID NO: 596650
uuuccacaaagccagacga

SEQ ID NO: 596652 - RNA, 19 nt, Artificial Sequence
  Description of Artificial Sequence: Synthetic oligonucleotide
  Sense strand starting at position 307 of SEQ ID NO: 584881
cuuuguggaaagugaaauc

SEQ ID NO: 596653 - RNA, 19 nt, Artificial Sequence
  Description of Artificial Sequence: Synthetic oligonucleotide
  Antisense strand to SEQ ID NO: 596652
gauuucacuuuccacaaag

SEQ ID NO: 596654 - RNA, 19 nt, Artificial Sequence
  Description of Artificial Sequence: Synthetic oligonucleotide
  Sense strand starting at position 349 of SEQ ID NO: 584881
ggcgguuacuagcuuuaca

SEQ ID NO: 596655 - RNA, 19 nt, Artificial Sequence
  Description of Artificial Sequence: Synthetic oligonucleotide
  Antisense strand to SEQ ID NO: 596654
uguaaagcuaguaaccgcc

SEQ ID NO: 596656 - RNA, 19 nt, Artificial Sequence
  Description of Artificial Sequence: Synthetic oligonucleotide
  Sense strand starting at position 352 of SEQ ID NO: 584881
gguuacuagcuuuacaaga

SEQ ID NO: 596657 - RNA, 19 nt, Artificial Sequence
  Description of Artificial Sequence: Synthetic oligonucleotide
  Antisense strand to SEQ ID NO: 596656
ucuuguaaagcuaguaacc

SEQ ID NO: 596658 - RNA, 19 nt, Artificial Sequence
  Description of Artificial Sequence: Synthetic oligonucleotide
  Sense strand starting at position 383 of SEQ ID NO: 584881
ugggaaugugucuggagca

SEQ ID NO: 596659 - RNA, 19 nt, Artificial Sequence
  Description of Artificial Sequence: Synthetic oligonucleotide
  Antisense strand to SEQ ID NO: 596658
ugcuccagacacauuccca

SEQ ID NO: 596660 - RNA, 19 nt, Artificial Sequence
  Description of Artificial Sequence: Synthetic oligonucleotide
  Sense strand starting at position 424 of SEQ ID NO: 584881
gaggcaggcguggguaaua

SEQ ID NO: 596661 - RNA, 19 nt, Artificial Sequence
  Description of Artificial Sequence: Synthetic oligonucleotide
  Antisense strand to SEQ ID NO: 596660
uauuacccacgccugccuc

SEQ ID NO: 596662 - RNA, 19 nt, Artificial Sequence
  Description of Artificial Sequence: Synthetic oligonucleotide
  Sense strand starting at position 784 of SEQ ID NO: 584881
uccgcucuggcggacaaau

SEQ ID NO: 596663 - RNA, 19 nt, Artificial Sequence
  Description of Artificial Sequence: Synthetic oligonucleotide
  Antisense strand to SEQ ID NO: 596662
auuuguccgccagagcgga

SEQ ID NO: 596664 - RNA, 19 nt, Artificial Sequence
  Description of Artificial Sequence: Synthetic oligonucleotide
  Sense strand starting at position 786 of SEQ ID NO: 584881
cgcucuggcggacaaauaa

SEQ ID NO: 596665 - RNA, 19 nt, Artificial Sequence
  Description of Artificial Sequence: Synthetic oligonucleotide
  Antisense strand to SEQ ID NO: 596664
uuauuuguccgccagagcg

SEQ ID NO: 596666 - RNA, 19 nt, Artificial Sequence
  Description of Artificial Sequence: Synthetic oligonucleotide
  Sense strand starting at position 797 of SEQ ID NO: 584881
acaaauaaucccggccaaa

SEQ ID NO: 596667 - RNA, 19 nt, Artificial Sequence
  Description of Artificial Sequence: Synthetic oligonucleotide
  Antisense strand to SEQ ID NO: 596666
uuuggccgggauuauuugu

SEQ ID NO: 596668 - RNA, 19 nt, Artificial Sequence
  Description of Artificial Sequence: Synthetic oligonucleotide
  Sense strand starting at position 886 of SEQ ID NO: 584881
ggauccugcuccuuuaauu

SEQ ID NO: 596669 - RNA, 19 nt, Artificial Sequence
  Description of Artificial Sequence: Synthetic oligonucleotide
  Antisense strand to SEQ ID NO: 596668
aauuaaaggagcaggaucc

SEQ ID NO: 596670 - RNA, 19 nt, Artificial Sequence
  Description of Artificial Sequence: Synthetic oligonucleotide
  Sense strand starting at position 1634 of SEQ ID NO: 584881
gccagagaccuuugucucu

SEQ ID NO: 596671 - RNA, 19 nt, Artificial Sequence
  Description of Artificial Sequence: Synthetic oligonucleotide
  Antisense strand to SEQ ID NO: 596670
agagacaaaggucucuggc

SEQ ID NO: 596672 - RNA, 19 nt, Artificial Sequence
  Description of Artificial Sequence: Synthetic oligonucleotide
  Sense strand starting at position 1636 of SEQ ID NO: 584881
cagagaccuuugucucuga

SEQ ID NO: 596673 - RNA, 19 nt, Artificial Sequence
  Description of Artificial Sequence: Synthetic oligonucleotide
  Antisense strand to SEQ ID NO: 596672
ucagagacaaaggucucug

SEQ ID NO: 596674 - RNA, 19 nt, Artificial Sequence
  Description of Artificial Sequence: Synthetic oligonucleotide
  Sense strand starting at position 2240 of SEQ ID NO: 584881
ggaguucccacuggaugaa

SEQ ID NO: 596675 - RNA, 19 nt, Artificial Sequence
  Description of Artificial Sequence: Synthetic oligonucleotide
  Antisense strand to SEQ ID NO: 596674
uucauccagugggaacucc

SEQ ID NO: 596676 - RNA, 19 nt, Artificial Sequence
  Description of Artificial Sequence: Synthetic oligonucleotide
  Sense strand starting at position 2300 of SEQ ID NO: 584881
ugaggacgugucugacauc

SEQ ID NO: 596677 - RNA, 19 nt, Artificial Sequence
  Description of Artificial Sequence: Synthetic oligonucleotide
  Antisense strand to SEQ ID NO: 596676
gaugucagacacguccuca

SEQ ID NO: 596678 - RNA, 19 nt, Artificial Sequence
  Description of Artificial Sequence: Synthetic oligonucleotide
  Sense strand starting at position 2660 of SEQ ID NO: 584881
gggcuucucagguggaaac

SEQ ID NO: 596679 - RNA, 19 nt, Artificial Sequence
  Description of Artificial Sequence: Synthetic oligonucleotide
  Antisense strand to SEQ ID NO: 596678
guuuccaccugagaagccc

SEQ ID NO: 596680 - RNA, 19 nt, Artificial Sequence
  Description of Artificial Sequence: Synthetic oligonucleotide
  Sense strand starting at position 3038 of SEQ ID NO: 584881
ggccaguguggccgagauu

SEQ ID NO: 596681 - RNA, 19 nt, Artificial Sequence
  Description of Artificial Sequence: Synthetic oligonucleotide
  Antisense strand to SEQ ID NO: 596680
aaucucggccacacuggcc

SEQ ID NO: 596682 - RNA, 19 nt, Artificial Sequence
  Description of Artificial Sequence: Synthetic oligonucleotide
  Sense strand starting at position 3039 of SEQ ID NO: 584881
gccaguguggccgagauua

SEQ ID NO: 596683 - RNA, 19 nt, Artificial Sequence
  Description of Artificial Sequence: Synthetic oligonucleotide
  Antisense strand to SEQ ID NO: 596682
uaaucucggccacacuggc

SEQ ID NO: 596684 - RNA, 19 nt, Artificial Sequence
  Description of Artificial Sequence: Synthetic oligonucleotide
  Sense strand starting at position 3041 of SEQ ID NO: 584881
caguguggccgagauuaac

SEQ ID NO: 596685 - RNA, 19 nt, Artificial Sequence
  Description of Artificial Sequence: Synthetic oligonucleotide
  Antisense strand to SEQ ID NO: 596684
guuaaucucggccacacug

SEQ ID NO: 596686 - RNA, 19 nt, Artificial Sequence
  Description of Artificial Sequence: Synthetic oligonucleotide
  Sense strand starting at position 3231 of SEQ ID NO: 584881
cuuggagagacuugcucuu

SEQ ID NO: 596687 - RNA, 19 nt, Artificial Sequence
  Description of Artificial Sequence: Synthetic oligonucleotide
  Antisense strand to SEQ ID NO: 596686
aagagcaagucucuccaag

SEQ ID NO: 596688 - RNA, 19 nt, Artificial Sequence
  Description of Artificial Sequence: Synthetic oligonucleotide
  Sense strand starting at position 3233 of SEQ ID NO: 584881
uggagagacuugcucuuga

SEQ ID NO: 596689 - RNA, 19 nt, Artificial Sequence
  Description of Artificial Sequence: Synthetic oligonucleotide
  Antisense strand to SEQ ID NO: 596688
ucaagagcaagucucucca

SEQ ID NO: 596690 - RNA, 19 nt, Artificial Sequence
  Description of Artificial Sequence: Synthetic oligonucleotide
  Sense strand starting at position 3328 of SEQ ID NO: 584881
cucuuagaagugcauguau

SEQ ID NO: 596691 - RNA, 19 nt, Artificial Sequence
  Description of Artificial Sequence: Synthetic oligonucleotide
  Antisense strand to SEQ ID NO: 596690
auacaugcacuucuaagag

SEQ ID NO: 596692 - RNA, 19 nt, Artificial Sequence
  Description of Artificial Sequence: Synthetic oligonucleotide
  Sense strand starting at position 3330 of SEQ ID NO: 584881
cuuagaagugcauguauau

SEQ ID NO: 596693 - RNA, 19 nt, Artificial Sequence
  Description of Artificial Sequence: Synthetic oligonucleotide
  Antisense strand to SEQ ID NO: 596692
auauacaugcacuucuaag

SEQ ID NO: 596694 - RNA, 19 nt, Artificial Sequence
  Description of Artificial Sequence: Synthetic oligonucleotide
  Sense strand starting at position 3497 of SEQ ID NO: 584881
acaugcuccugcuuagaau

SEQ ID NO: 596695 - RNA, 19 nt, Artificial Sequence
  Description of Artificial Sequence: Synthetic oligonucleotide
  Antisense strand to SEQ ID NO: 596694
auucuaagcaggagcaugu

SEQ ID NO: 596696 - RNA, 19 nt, Artificial Sequence
  Description of Artificial Sequence: Synthetic oligonucleotide
  Sense strand starting at position 3500 of SEQ ID NO: 584881
ugcuccugcuuagaauaga

SEQ ID NO: 596697 - RNA, 19 nt, Artificial Sequence
  Description of Artificial Sequence: Synthetic oligonucleotide
  Antisense strand to SEQ ID NO: 596696
ucuauucuaagcaggagca

SEQ ID NO: 596698 - RNA, 19 nt, Artificial Sequence
  Description of Artificial Sequence: Synthetic oligonucleotide
  Sense strand starting at position 3596 of SEQ ID NO: 584881
gggaaaugagacugcgagu

SEQ ID NO: 596699 - RNA, 19 nt, Artificial Sequence
  Description of Artificial Sequence: Synthetic oligonucleotide
  Antisense strand to SEQ ID NO: 596698
acucgcagucucauuuccc

SEQ ID NO: 596700 - RNA, 19 nt, Artificial Sequence
  Description of Artificial Sequence: Synthetic oligonucleotide
  Sense strand starting at position 3611 of SEQ ID NO: 584881
gaguaugaggcuugcugaa

SEQ ID NO: 596701 - RNA, 19 nt, Artificial Sequence
  Description of Artificial Sequence: Synthetic oligonucleotide
  Antisense strand to SEQ ID NO: 596700
uucagcaagccucauacuc

SEQ ID NO: 596702 - RNA, 19 nt, Artificial Sequence
  Description of Artificial Sequence: Synthetic oligonucleotide
  Sense strand starting at position 3674 of SEQ ID NO: 584881
gugcgcauccuggguagau

SEQ ID NO: 596703 - RNA, 19 nt, Artificial Sequence
  Description of Artificial Sequence: Synthetic oligonucleotide
  Antisense strand to SEQ ID NO: 596702
aucuacccaggaugcgcac

SEQ ID NO: 596704 - RNA, 19 nt, Artificial Sequence
  Description of Artificial Sequence: Synthetic oligonucleotide
  Sense strand starting at position 3675 of SEQ ID NO: 584881
ugcgcauccuggguagaua

SEQ ID NO: 596705 - RNA, 19 nt, Artificial Sequence
  Description of Artificial Sequence: Synthetic oligonucleotide
  Antisense strand to SEQ ID NO: 596704
uaucuacccaggaugcgca

SEQ ID NO: 596706 - RNA, 19 nt, Artificial Sequence
  Description of Artificial Sequence: Synthetic oligonucleotide
  Sense strand starting at position 3676 of SEQ ID NO: 584881
gcgcauccuggguagauau

SEQ ID NO: 596707 - RNA, 19 nt, Artificial Sequence
  Description of Artificial Sequence: Synthetic oligonucleotide
  Antisense strand to SEQ ID NO: 596706
auaucuacccaggaugcgc

SEQ ID NO: 596708 - RNA, 19 nt, Artificial Sequence
  Description of Artificial Sequence: Synthetic oligonucleotide
  Sense strand starting at position 3684 of SEQ ID NO: 584881
uggguagauauugggaagu

SEQ ID NO: 596709 - RNA, 19 nt, Artificial Sequence
  Description of Artificial Sequence: Synthetic oligonucleotide
  Antisense strand to SEQ ID NO: 596708
acuucccaauaucuaccca

SEQ ID NO: 596710 - RNA, 19 nt, Artificial Sequence
  Description of Artificial Sequence: Synthetic oligonucleotide
  Sense strand starting at position 3715 of SEQ ID NO: 584881
gcaagaaacaauggauagu

SEQ ID NO: 596711 - RNA, 19 nt, Artificial Sequence
  Description of Artificial Sequence: Synthetic oligonucleotide
  Antisense strand to SEQ ID NO: 596710
acuauccauuguuucuugc

SEQ ID NO: 596712 - RNA, 19 nt, Artificial Sequence
  Description of Artificial Sequence: Synthetic oligonucleotide
  Sense strand starting at position 17 of SEQ ID NO: 584882
cuuggagagacuugcucuu

SEQ ID NO: 596713 - RNA, 19 nt, Artificial Sequence
  Description of Artificial Sequence: Synthetic oligonucleotide
  Antisense strand to SEQ ID NO: 596712
aagagcaagucucuccaag

SEQ ID NO: 596714 - RNA, 19 nt, Artificial Sequence
  Description of Artificial Sequence: Synthetic oligonucleotide
  Sense strand starting at position 19 of SEQ ID NO: 584882
uggagagacuugcucuuga

SEQ ID NO: 596715 - RNA, 19 nt, Artificial Sequence
  Description of Artificial Sequence: Synthetic oligonucleotide
  Antisense strand to SEQ ID NO: 596714
ucaagagcaagucucucca

SEQ ID NO: 596716 - RNA, 19 nt, Artificial Sequence
  Description of Artificial Sequence: Synthetic oligonucleotide
  Sense strand starting at position 114 of SEQ ID NO: 584882
cucuuagaagugcauguau

SEQ ID NO: 596717 - RNA, 19 nt, Artificial Sequence
  Description of Artificial Sequence: Synthetic oligonucleotide
  Antisense strand to SEQ ID NO: 596716
auacaugcacuucuaagag

SEQ ID NO: 596718 - RNA, 19 nt, Artificial Sequence
  Description of Artificial Sequence: Synthetic oligonucleotide
  Sense strand starting at position 116 of SEQ ID NO: 584882
cuuagaagugcauguauau

SEQ ID NO: 596719 - RNA, 19 nt, Artificial Sequence
  Description of Artificial Sequence: Synthetic oligonucleotide
  Antisense strand to SEQ ID NO: 596718
auauacaugcacuucuaag

SEQ ID NO: 596720 - RNA, 19 nt, Artificial Sequence
  Description of Artificial Sequence: Synthetic oligonucleotide
  Sense strand starting at position 283 of SEQ ID NO: 584882
acaugcuccugcuuagaau

SEQ ID NO: 596721 - RNA, 19 nt, Artificial Sequence
  Description of Artificial Sequence: Synthetic oligonucleotide
  Antisense strand to SEQ ID NO: 596720
auucuaagcaggagcaugu

SEQ ID NO: 596722 - RNA, 19 nt, Artificial Sequence
  Description of Artificial Sequence: Synthetic oligonucleotide
  Sense strand starting at position 382 of SEQ ID NO: 584882
gggaaaugagacugcgagu

SEQ ID NO: 596723 - RNA, 19 nt, Artificial Sequence
  Description of Artificial Sequence: Synthetic oligonucleotide
  Antisense strand to SEQ ID NO: 596722
acucgcagucucauuuccc

SEQ ID NO: 596724 - RNA, 19 nt, Artificial Sequence
  Description of Artificial Sequence: Synthetic oligonucleotide
  Sense strand starting at position 397 of SEQ ID NO: 584882
gaguaugaggcuugcugaa

SEQ ID NO: 596725 - RNA, 19 nt, Artificial Sequence
  Description of Artificial Sequence: Synthetic oligonucleotide
  Antisense strand to SEQ ID NO: 596724
uucagcaagccucauacuc

SEQ ID NO: 596726 - RNA, 19 nt, Artificial Sequence
  Description of Artificial Sequence: Synthetic oligonucleotide
  Sense strand starting at position 462 of SEQ ID NO: 584882
gcgcauccuggguagauau

SEQ ID NO: 596727 - RNA, 19 nt, Artificial Sequence
  Description of Artificial Sequence: Synthetic oligonucleotide
  Antisense strand to SEQ ID NO: 596726
auaucuacccaggaugcgc

SEQ ID NO: 596728 - RNA, 19 nt, Artificial Sequence
  Description of Artificial Sequence: Synthetic oligonucleotide
  Sense strand starting at position 470 of SEQ ID NO: 584882
uggguagauauugggaagu

SEQ ID NO: 596729 - RNA, 19 nt, Artificial Sequence
  Description of Artificial Sequence: Synthetic oligonucleotide
  Antisense strand to SEQ ID NO: 596728
acuucccaauaucuaccca

SEQ ID NO: 596730 - RNA, 19 nt, Artificial Sequence
  Description of Artificial Sequence: Synthetic oligonucleotide
  Sense strand starting at position 501 of SEQ ID NO: 584882
gcaagaaacaauggauagu

SEQ ID NO: 596731 - RNA, 19 nt, Artificial Sequence
  Description of Artificial Sequence: Synthetic oligonucleotide
  Antisense strand to SEQ ID NO: 596730
acuauccauuguuucuugc

SEQ ID NO: 596732 - RNA, 19 nt, Artificial Sequence
  Description of Artificial Sequence: Synthetic oligonucleotide
  Sense strand starting at position 774 of SEQ ID NO: 584882
ugugaugcugcguucuuaa

SEQ ID NO: 596733 - RNA, 19 nt, Artificial Sequence
  Description of Artificial Sequence: Synthetic oligonucleotide
  Antisense strand to SEQ ID NO: 596732
uuaagaacgcagcaucaca

SEQ ID NO: 596734 - RNA, 19 nt, Artificial Sequence
  Description of Artificial Sequence: Synthetic oligonucleotide
  Sense strand starting at position 800 of SEQ ID NO: 584882
aggucacaacucugcauau

SEQ ID NO: 596735 - RNA, 19 nt, Artificial Sequence
  Description of Artificial Sequence: Synthetic oligonucleotide
  Antisense strand to SEQ ID NO: 596734
auaugcagaguugugaccu

SEQ ID NO: 596736 - RNA, 19 nt, Artificial Sequence
  Description of Artificial Sequence: Synthetic oligonucleotide
  Sense strand starting at position 957 of SEQ ID NO: 584882
aguacaagugauuggcagu

SEQ ID NO: 596737 - RNA, 19 nt, Artificial Sequence
  Description of Artificial Sequence: Synthetic oligonucleotide
  Antisense strand to SEQ ID NO: 596736
acugccaaucacuuguacu

SEQ ID NO: 596738 - RNA, 19 nt, Artificial Sequence
  Description of Artificial Sequence: Synthetic oligonucleotide
  Sense strand starting at position 1055 of SEQ ID NO: 584882
ggaaauuguaagcaggagu

SEQ ID NO: 596739 - RNA, 19 nt, Artificial Sequence
  Description of Artificial Sequence: Synthetic oligonucleotide
  Antisense strand to SEQ ID NO: 596738
acuccugcuuacaauuucc

SEQ ID NO: 596740 - RNA, 19 nt, Artificial Sequence
  Description of Artificial Sequence: Synthetic oligonucleotide
  Sense strand starting at position 1096 of SEQ ID NO: 584882
ggguaaauaggucaugucu

SEQ ID NO: 596741 - RNA, 19 nt, Artificial Sequence
  Description of Artificial Sequence: Synthetic oligonucleotide
  Antisense strand to SEQ ID NO: 596740
agacaugaccuauuuaccc

SEQ ID NO: 596742 - RNA, 19 nt, Artificial Sequence
  Description of Artificial Sequence: Synthetic oligonucleotide
  Sense strand starting at position 1266 of SEQ ID NO: 584882
ucaaauacugcgugugaaa

SEQ ID NO: 596743 - RNA, 19 nt, Artificial Sequence
  Description of Artificial Sequence: Synthetic oligonucleotide
  Antisense strand to SEQ ID NO: 596742
uuucacacgcaguauuuga

SEQ ID NO: 596744 - RNA, 19 nt, Artificial Sequence
  Description of Artificial Sequence: Synthetic oligonucleotide
  Sense strand starting at position 1268 of SEQ ID NO: 584882
aaauacugcgugugaaauc

SEQ ID NO: 596745 - RNA, 19 nt, Artificial Sequence
  Description of Artificial Sequence: Synthetic oligonucleotide
  Antisense strand to SEQ ID NO: 596744
gauuucacacgcaguauuu

SEQ ID NO: 596746 - RNA, 19 nt, Artificial Sequence
  Description of Artificial Sequence: Synthetic oligonucleotide
  Sense strand starting at position 1348 of SEQ ID NO: 584882
agcuaucgagauugucuau

SEQ ID NO: 596747 - RNA, 19 nt, Artificial Sequence
  Description of Artificial Sequence: Synthetic oligonucleotide
  Antisense strand to SEQ ID NO: 596746
auagacaaucucgauagcu

SEQ ID NO: 596748 - RNA, 19 nt, Artificial Sequence
  Description of Artificial Sequence: Synthetic oligonucleotide
  Sense strand starting at position 1351 of SEQ ID NO: 584882
uaucgagauugucuaucuu

SEQ ID NO: 596749 - RNA, 19 nt, Artificial Sequence
  Description of Artificial Sequence: Synthetic oligonucleotide
  Antisense strand to SEQ ID NO: 596748
aagauagacaaucucgaua

SEQ ID NO: 596750 - RNA, 19 nt, Artificial Sequence
  Description of Artificial Sequence: Synthetic oligonucleotide
  Sense strand starting at position 1362 of SEQ ID NO: 584882
ucuaucuugguguauauca

SEQ ID NO: 596751 - RNA, 19 nt, Artificial Sequence
  Description of Artificial Sequence: Synthetic oligonucleotide
  Antisense strand to SEQ ID NO: 596750
ugauauacaccaagauaga

SEQ ID NO: 596752 - RNA, 19 nt, Artificial Sequence
  Description of Artificial Sequence: Synthetic oligonucleotide
  Sense strand starting at position 1403 of SEQ ID NO: 584882
ggcuaugacccacggagua

SEQ ID NO: 596753 - RNA, 19 nt, Artificial Sequence
  Description of Artificial Sequence: Synthetic oligonucleotide
  Antisense strand to SEQ ID NO: 596752
uacuccgugggucauagcc

SEQ ID NO: 596754 - RNA, 19 nt, Artificial Sequence
  Description of Artificial Sequence: Synthetic oligonucleotide
  Sense strand starting at position 1421 of SEQ ID NO: 584882
accugacugugcuuaugaa

SEQ ID NO: 596755 - RNA, 19 nt, Artificial Sequence
  Description of Artificial Sequence: Synthetic oligonucleotide
  Antisense strand to SEQ ID NO: 596754
uucauaagcacagucaggu

SEQ ID NO: 596756 - RNA, 19 nt, Artificial Sequence
  Description of Artificial Sequence: Synthetic oligonucleotide
  Sense strand starting at position 1433 of SEQ ID NO: 584882
uuaugaaguguucggcaaa

SEQ ID NO: 596757 - RNA, 19 nt, Artificial Sequence
  Description of Artificial Sequence: Synthetic oligonucleotide
  Antisense strand to SEQ ID NO: 596756
uuugccgaacacuucauaa

SEQ ID NO: 596758 - RNA, 19 nt, Artificial Sequence
  Description of Artificial Sequence: Synthetic oligonucleotide
  Sense strand starting at position 1469 of SEQ ID NO: 584882
agugucaccagucaguaau

SEQ ID NO: 596759 - RNA, 19 nt, Artificial Sequence
  Description of Artificial Sequence: Synthetic oligonucleotide
  Antisense strand to SEQ ID NO: 596758
auuacugacuggugacacu

SEQ ID NO: 596760 - RNA, 19 nt, Artificial Sequence
  Description of Artificial Sequence: Synthetic oligonucleotide
  Sense strand starting at position 1535 of SEQ ID NO: 584882
uguaacacgccugauauaa

SEQ ID NO: 596761 - RNA, 19 nt, Artificial Sequence
  Description of Artificial Sequence: Synthetic oligonucleotide
  Antisense strand to SEQ ID NO: 596760
uuauaucaggcguguuaca

SEQ ID NO: 596762 - RNA, 19 nt, Artificial Sequence
  Description of Artificial Sequence: Synthetic oligonucleotide
  Sense strand starting at position 1665 of SEQ ID NO: 584882
cccuucgugcucguuagaa

SEQ ID NO: 596763 - RNA, 19 nt, Artificial Sequence
  Description of Artificial Sequence: Synthetic oligonucleotide
  Antisense strand to SEQ ID NO: 596762
uucuaacgagcacgaaggg

SEQ ID NO: 596764 - RNA, 19 nt, Artificial Sequence
  Description of Artificial Sequence: Synthetic oligonucleotide
  Sense strand starting at position 1673 of SEQ ID NO: 584882
gcucguuagaaagagcaaa

SEQ ID NO: 596765 - RNA, 19 nt, Artificial Sequence
  Description of Artificial Sequence: Synthetic oligonucleotide
  Antisense strand to SEQ ID NO: 596764
uuugcucuuucuaacgagc

SEQ ID NO: 596766 - RNA, 19 nt, Artificial Sequence
  Description of Artificial Sequence: Synthetic oligonucleotide
  Sense strand starting at position 1806 of SEQ ID NO: 584882
ugccgagagccgagaaguu

SEQ ID NO: 596767 - RNA, 19 nt, Artificial Sequence
  Description of Artificial Sequence: Synthetic oligonucleotide
  Antisense strand to SEQ ID NO: 596766
aacuucucggcucucggca

SEQ ID NO: 596768 - RNA, 19 nt, Artificial Sequence
  Description of Artificial Sequence: Synthetic oligonucleotide
  Sense strand starting at position 2010 of SEQ ID NO: 584882
gcauguagcggcuccuuua

SEQ ID NO: 596769 - RNA, 19 nt, Artificial Sequence
  Description of Artificial Sequence: Synthetic oligonucleotide
  Antisense strand to SEQ ID NO: 596768
uaaaggagccgcuacaugc

SEQ ID NO: 596770 - RNA, 19 nt, Artificial Sequence
  Description of Artificial Sequence: Synthetic oligonucleotide
  Sense strand starting at position 3122 of SEQ ID NO: 584882
ggaugaaucugagaaucuu

SEQ ID NO: 596771 - RNA, 19 nt, Artificial Sequence
  Description of Artificial Sequence: Synthetic oligonucleotide
  Antisense strand to SEQ ID NO: 596770
aagauucucagauucaucc

SEQ ID NO: 596772 - RNA, 19 nt, Artificial Sequence
  Description of Artificial Sequence: Synthetic oligonucleotide
  Sense strand starting at position 3210 of SEQ ID NO: 584882
ugggaaauuucugacucuu

SEQ ID NO: 596773 - RNA, 19 nt, Artificial Sequence
  Description of Artificial Sequence: Synthetic oligonucleotide
  Antisense strand to SEQ ID NO: 596772
aagagucagaaauuuccca

SEQ ID NO: 596774 - RNA, 19 nt, Artificial Sequence
  Description of Artificial Sequence: Synthetic oligonucleotide
  Sense strand starting at position 3362 of SEQ ID NO: 584882
ccuccaucuguccagaguu

SEQ ID NO: 596775 - RNA, 19 nt, Artificial Sequence
  Description of Artificial Sequence: Synthetic oligonucleotide
  Antisense strand to SEQ ID NO: 596774
aacucuggacagauggagg

SEQ ID NO: 596776 - RNA, 19 nt, Artificial Sequence
  Description of Artificial Sequence: Synthetic oligonucleotide
  Sense strand starting at position 3372 of SEQ ID NO: 584882
uccagaguuuggcuaugag

SEQ ID NO: 596777 - RNA, 19 nt, Artificial Sequence
  Description of Artificial Sequence: Synthetic oligonucleotide
  Antisense strand to SEQ ID NO: 596776
cucauagccaaacucugga

SEQ ID NO: 596778 - RNA, 19 nt, Artificial Sequence
  Description of Artificial Sequence: Synthetic oligonucleotide
  Sense strand starting at position 3375 of SEQ ID NO: 584882
agaguuuggcuaugaggcu

SEQ ID NO: 596779 - RNA, 19 nt, Artificial Sequence
  Description of Artificial Sequence: Synthetic oligonucleotide
  Antisense strand to SEQ ID NO: 596778
agccucauagccaaacucu

SEQ ID NO: 596780 - RNA, 19 nt, Artificial Sequence
  Description of Artificial Sequence: Synthetic oligonucleotide
  Sense strand starting at position 3649 of SEQ ID NO: 584882
aauauuaggcugugcuuga

SEQ ID NO: 596781 - RNA, 19 nt, Artificial Sequence
  Description of Artificial Sequence: Synthetic oligonucleotide
  Antisense strand to SEQ ID NO: 596780
ucaagcacagccuaauauu

SEQ ID NO: 596782 - RNA, 19 nt, Artificial Sequence
  Description of Artificial Sequence: Synthetic oligonucleotide
  Sense strand starting at position 3660 of SEQ ID NO: 584882
gugcuugaucugugaacca

SEQ ID NO: 596783 - RNA, 19 nt, Artificial Sequence
  Description of Artificial Sequence: Synthetic oligonucleotide
  Antisense strand to SEQ ID NO: 596782
ugguucacagaucaagcac

SEQ ID NO: 596784 - RNA, 19 nt, Artificial Sequence
  Description of Artificial Sequence: Synthetic oligonucleotide
  Sense strand starting at position 3706 of SEQ ID NO: 584882
uuacauucuugggugguga

SEQ ID NO: 596785 - RNA, 19 nt, Artificial Sequence
  Description of Artificial Sequence: Synthetic oligonucleotide
  Antisense strand to SEQ ID NO: 596784
ucaccacccaagaauguaa

SEQ ID NO: 596786 - RNA, 19 nt, Artificial Sequence
  Description of Artificial Sequence: Synthetic oligonucleotide
  Sense strand starting at position 3708 of SEQ ID NO: 584882
acauucuuggguggugaaa

SEQ ID NO: 596787 - RNA, 19 nt, Artificial Sequence
  Description of Artificial Sequence: Synthetic oligonucleotide
  Antisense strand to SEQ ID NO: 596786
uuucaccacccaagaaugu

SEQ ID NO: 596788 - RNA, 19 nt, Artificial Sequence
  Description of Artificial Sequence: Synthetic oligonucleotide
  Sense strand starting at position 3847 of SEQ ID NO: 584882
aucugucacugcucuauuu

SEQ ID NO: 596789 - RNA, 19 nt, Artificial Sequence
  Description of Artificial Sequence: Synthetic oligonucleotide
  Antisense strand to SEQ ID NO: 596788
aaauagagcagugacagau

SEQ ID NO: 596790 - RNA, 19 nt, Artificial Sequence
  Description of Artificial Sequence: Synthetic oligonucleotide
  Sense strand starting at position 3948 of SEQ ID NO: 584882
gaagcuuuaugaccaaguu

SEQ ID NO: 596791 - RNA, 19 nt, Artificial Sequence
  Description of Artificial Sequence: Synthetic oligonucleotide
  Antisense strand to SEQ ID NO: 596790
aacuuggucauaaagcuuc

SEQ ID NO: 596792 - RNA, 19 nt, Artificial Sequence
  Description of Artificial Sequence: Synthetic oligonucleotide
  Sense strand starting at position 3617 of SEQ ID NO: 584883
gugggaagccagcagagau

SEQ ID NO: 596793 - RNA, 19 nt, Artificial Sequence
  Description of Artificial Sequence: Synthetic oligonucleotide
  Antisense strand to SEQ ID NO: 596792
aucucugcuggcuucccac

SEQ ID NO: 596794 - RNA, 19 nt, Artificial Sequence
  Description of Artificial Sequence: Synthetic oligonucleotide
  Sense strand starting at position 3751 of SEQ ID NO: 584883
gguucugugcucgcaccaa

SEQ ID NO: 596795 - RNA, 19 nt, Artificial Sequence
  Description of Artificial Sequence: Synthetic oligonucleotide
  Antisense strand to SEQ ID NO: 596794
uuggugcgagcacagaacc

SEQ ID NO: 596796 - RNA, 19 nt, Artificial Sequence
  Description of Artificial Sequence: Synthetic oligonucleotide
  Sense strand starting at position 3982 of SEQ ID NO: 584883
accacaucucucugagagu

SEQ ID NO: 596797 - RNA, 19 nt, Artificial Sequence
  Description of Artificial Sequence: Synthetic oligonucleotide
  Antisense strand to SEQ ID NO: 596796
acucucagagagauguggu

SEQ ID NO: 596798 - RNA, 19 nt, Artificial Sequence
  Description of Artificial Sequence: Synthetic oligonucleotide
  Sense strand starting at position 3617 of SEQ ID NO: 584884
gugggaagccagcagagau

SEQ ID NO: 596799 - RNA, 19 nt, Artificial Sequence
  Description of Artificial Sequence: Synthetic oligonucleotide
  Antisense strand to SEQ ID NO: 596798
aucucugcuggcuucccac

SEQ ID NO: 596800 - RNA, 19 nt, Artificial Sequence
  Description of Artificial Sequence: Synthetic oligonucleotide
  Sense strand starting at position 3751 of SEQ ID NO: 584884
gguucugugcucgcaccaa

SEQ ID NO: 596801 - RNA, 19 nt, Artificial Sequence
  Description of Artificial Sequence: Synthetic oligonucleotide
  Antisense strand to SEQ ID NO: 596800
uuggugcgagcacagaacc

SEQ ID NO: 596802 - RNA, 19 nt, Artificial Sequence
  Description of Artificial Sequence: Synthetic oligonucleotide
  Sense strand starting at position 3982 of SEQ ID NO: 584884
accacaucucucugagagu

SEQ ID NO: 596803 - RNA, 19 nt, Artificial Sequence
  Description of Artificial Sequence: Synthetic oligonucleotide
  Antisense strand to SEQ ID NO: 596802
acucucagagagauguggu

SEQ ID NO: 596804 - RNA, 19 nt, Artificial Sequence
  Description of Artificial Sequence: Synthetic oligonucleotide
  Sense strand starting at position 3526 of SEQ ID NO: 584885
gugcauuuggucugaagac

SEQ ID NO: 596805 - RNA, 19 nt, Artificial Sequence
  Description of Artificial Sequence: Synthetic oligonucleotide
  Antisense strand to SEQ ID NO: 596804
gucuucagaccaaaugcac

SEQ ID NO: 596806 - RNA, 19 nt, Artificial Sequence
  Description of Artificial Sequence: Synthetic oligonucleotide
  Sense strand starting at position 3527 of SEQ ID NO: 584885
ugcauuuggucugaagaca

SEQ ID NO: 596807 - RNA, 19 nt, Artificial Sequence
  Description of Artificial Sequence: Synthetic oligonucleotide
  Antisense strand to SEQ ID NO: 596806
ugucuucagaccaaaugca

SEQ ID NO: 596808 - RNA, 19 nt, Artificial Sequence
  Description of Artificial Sequence: Synthetic oligonucleotide
  Sense strand starting at position 3617 of SEQ ID NO: 584886
gugggaagccagcagagau

SEQ ID NO: 596809 - RNA, 19 nt, Artificial Sequence
  Description of Artificial Sequence: Synthetic oligonucleotide
  Antisense strand to SEQ ID NO: 596808
aucucugcuggcuucccac

SEQ ID NO: 596810 - RNA, 19 nt, Artificial Sequence
  Description of Artificial Sequence: Synthetic oligonucleotide
  Sense strand starting at position 3751 of SEQ ID NO: 584886
gguucugugcucgcaccaa

SEQ ID NO: 596811 - RNA, 19 nt, Artificial Sequence
  Description of Artificial Sequence: Synthetic oligonucleotide
  Antisense strand to SEQ ID NO: 596810
uuggugcgagcacagaacc

SEQ ID NO: 596812 - RNA, 19 nt, Artificial Sequence
  Description of Artificial Sequence: Synthetic oligonucleotide
  Sense strand starting at position 3982 of SEQ ID NO: 584886
accacaucucucugagagu

SEQ ID NO: 596813 - RNA, 19 nt, Artificial Sequence
  Description of Artificial Sequence: Synthetic oligonucleotide
  Antisense strand to SEQ ID NO: 596812
acucucagagagauguggu

SEQ ID NO: 596814 - RNA, 19 nt, Artificial Sequence
  Description of Artificial Sequence: Synthetic oligonucleotide
  Sense strand starting at position 3526 of SEQ ID NO: 584887
gugcauuuggucugaagac

SEQ ID NO: 596815 - RNA, 19 nt, Artificial Sequence
  Description of Artificial Sequence: Synthetic oligonucleotide
  Antisense strand to SEQ ID NO: 596814
gucuucagaccaaaugcac

SEQ ID NO: 596816 - RNA, 19 nt, Artificial Sequence
  Description of Artificial Sequence: Synthetic oligonucleotide
  Sense strand starting at position 3527 of SEQ ID NO: 584887
ugcauuuggucugaagaca

SEQ ID NO: 596817 - RNA, 19 nt, Artificial Sequence
  Description of Artificial Sequence: Synthetic oligonucleotide
  Antisense strand to SEQ ID NO: 596816
ugucuucagaccaaaugca

SEQ ID NO: 596818 - RNA, 19 nt, Artificial Sequence
  Description of Artificial Sequence: Synthetic oligonucleotide
  Sense strand starting at position 543 of SEQ ID NO: 584888
ggugucuguguguauauga

SEQ ID NO: 596819 - RNA, 19 nt, Artificial Sequence
  Description of Artificial Sequence: Synthetic oligonucleotide
  Antisense strand to SEQ ID NO: 596818
ucauauacacacagacacc

SEQ ID NO: 596820 - RNA, 19 nt, Artificial Sequence
  Description of Artificial Sequence: Synthetic oligonucleotide
  Sense strand starting at position 669 of SEQ ID NO: 584888
agugguguuacucaugaca

SEQ ID NO: 596821 - RNA, 19 nt, Artificial Sequence
  Description of Artificial Sequence: Synthetic oligonucleotide
  Antisense strand to SEQ ID NO: 596820
ugucaugaguaacaccacu

SEQ ID NO: 596822 - RNA, 19 nt, Artificial Sequence
  Description of Artificial Sequence: Synthetic oligonucleotide
  Sense strand starting at position 671 of SEQ ID NO: 584888
ugguguuacucaugacauc

SEQ ID NO: 596823 - RNA, 19 nt, Artificial Sequence
  Description of Artificial Sequence: Synthetic oligonucleotide
  Antisense strand to SEQ ID NO: 596822
gaugucaugaguaacacca

SEQ ID NO: 596824 - RNA, 19 nt, Artificial Sequence
  Description of Artificial Sequence: Synthetic oligonucleotide
  Sense strand starting at position 672 of SEQ ID NO: 584888
gguguuacucaugacauca

SEQ ID NO: 596825 - RNA, 19 nt, Artificial Sequence
  Description of Artificial Sequence: Synthetic oligonucleotide
  Antisense strand to SEQ ID NO: 596824
ugaugucaugaguaacacc

SEQ ID NO: 596826 - RNA, 19 nt, Artificial Sequence
  Description of Artificial Sequence: Synthetic oligonucleotide
  Sense strand starting at position 870 of SEQ ID NO: 584888
agggauccuccagguagau

SEQ ID NO: 596827 - RNA, 19 nt, Artificial Sequence
  Description of Artificial Sequence: Synthetic oligonucleotide
  Antisense strand to SEQ ID NO: 596826
aucuaccuggaggaucccu

SEQ ID NO: 596828 - RNA, 19 nt, Artificial Sequence
  Description of Artificial Sequence: Synthetic oligonucleotide
  Sense strand starting at position 872 of SEQ ID NO: 584888
ggauccuccagguagaugu

SEQ ID NO: 596829 - RNA, 19 nt, Artificial Sequence
  Description of Artificial Sequence: Synthetic oligonucleotide
  Antisense strand to SEQ ID NO: 596828
acaucuaccuggaggaucc

SEQ ID NO: 596830 - RNA, 19 nt, Artificial Sequence
  Description of Artificial Sequence: Synthetic oligonucleotide
  Sense strand starting at position 883 of SEQ ID NO: 584888
guagauguacuggguguga

SEQ ID NO: 596831 - RNA, 19 nt, Artificial Sequence
  Description of Artificial Sequence: Synthetic oligonucleotide
  Antisense strand to SEQ ID NO: 596830
ucacacccaguacaucuac

SEQ ID NO: 596832 - RNA, 19 nt, Artificial Sequence
  Description of Artificial Sequence: Synthetic oligonucleotide
  Sense strand starting at position 907 of SEQ ID NO: 584888
cagugagucuuggcaaauc

SEQ ID NO: 596833 - RNA, 19 nt, Artificial Sequence
  Description of Artificial Sequence: Synthetic oligonucleotide
  Antisense strand to SEQ ID NO: 596832
gauuugccaagacucacug

SEQ ID NO: 596834 - RNA, 19 nt, Artificial Sequence
  Description of Artificial Sequence: Synthetic oligonucleotide
  Sense strand starting at position 918 of SEQ ID NO: 584888
ggcaaauccuggcaggaaa

SEQ ID NO: 596835 - RNA, 19 nt, Artificial Sequence
  Description of Artificial Sequence: Synthetic oligonucleotide
  Antisense strand to SEQ ID NO: 596834
uuuccugccaggauuugcc

SEQ ID NO: 596836 - RNA, 19 nt, Artificial Sequence
  Description of Artificial Sequence: Synthetic oligonucleotide
  Sense strand starting at position 964 of SEQ ID NO: 584888
ggcugagucuugcccaacu

SEQ ID NO: 596837 - RNA, 19 nt, Artificial Sequence
  Description of Artificial Sequence: Synthetic oligonucleotide
  Antisense strand to SEQ ID NO: 596836
aguugggcaagacucagcc

SEQ ID NO: 596838 - RNA, 19 nt, Artificial Sequence
  Description of Artificial Sequence: Synthetic oligonucleotide
  Sense strand starting at position 1133 of SEQ ID NO: 584888
auggauaaaugaggucuaa

SEQ ID NO: 596839 - RNA, 19 nt, Artificial Sequence
  Description of Artificial Sequence: Synthetic oligonucleotide
  Antisense strand to SEQ ID NO: 596838
uuagaccucauuuauccau

SEQ ID NO: 596840 - RNA, 19 nt, Artificial Sequence
  Description of Artificial Sequence: Synthetic oligonucleotide
  Sense strand starting at position 1242 of SEQ ID NO: 584888
cuccaugccugaguucuau

SEQ ID NO: 596841 - RNA, 19 nt, Artificial Sequence
  Description of Artificial Sequence: Synthetic oligonucleotide
  Antisense strand to SEQ ID NO: 596840
auagaacucaggcauggag

SEQ ID NO: 596842 - RNA, 19 nt, Artificial Sequence
  Description of Artificial Sequence: Synthetic oligonucleotide
  Sense strand starting at position 1248 of SEQ ID NO: 584888
gccugaguucuaugcccuu

SEQ ID NO: 596843 - RNA, 19 nt, Artificial Sequence
  Description of Artificial Sequence: Synthetic oligonucleotide
  Antisense strand to SEQ ID NO: 596842
aagggcauagaacucaggc

SEQ ID NO: 596844 - RNA, 19 nt, Artificial Sequence
  Description of Artificial Sequence: Synthetic oligonucleotide
  Sense strand starting at position 1273 of SEQ ID NO: 584888
ggugucaccucagacauac

SEQ ID NO: 596845 - RNA, 19 nt, Artificial Sequence
  Description of Artificial Sequence: Synthetic oligonucleotide
  Antisense strand to SEQ ID NO: 596844
guaugucugaggugacacc

SEQ ID NO: 596846 - RNA, 19 nt, Artificial Sequence
  Description of Artificial Sequence: Synthetic oligonucleotide
  Sense strand starting at position 1343 of SEQ ID NO: 584888
uggguaaagcuggauugua

SEQ ID NO: 596847 - RNA, 19 nt, Artificial Sequence
  Description of Artificial Sequence: Synthetic oligonucleotide
  Antisense strand to SEQ ID NO: 596846
uacaauccagcuuuaccca

SEQ ID NO: 596848 - RNA, 19 nt, Artificial Sequence
  Description of Artificial Sequence: Synthetic oligonucleotide
  Sense strand starting at position 1930 of SEQ ID NO: 584888
ccgucaggcgcgugaucaa

SEQ ID NO: 596849 - RNA, 19 nt, Artificial Sequence
  Description of Artificial Sequence: Synthetic oligonucleotide
  Antisense strand to SEQ ID NO: 596848
uugaucacgcgccugacgg

SEQ ID NO: 596850 - RNA, 19 nt, Artificial Sequence
  Description of Artificial Sequence: Synthetic oligonucleotide
  Sense strand starting at position 1931 of SEQ ID NO: 584888
cgucaggcgcgugaucaaa

SEQ ID NO: 596851 - RNA, 19 nt, Artificial Sequence
  Description of Artificial Sequence: Synthetic oligonucleotide
  Antisense strand to SEQ ID NO: 596850
uuugaucacgcgccugacg

SEQ ID NO: 596852 - RNA, 19 nt, Artificial Sequence
  Description of Artificial Sequence: Synthetic oligonucleotide
  Sense strand starting at position 2009 of SEQ ID NO: 584888
gccgguggccuggagauuu

SEQ ID NO: 596853 - RNA, 19 nt, Artificial Sequence
  Description of Artificial Sequence: Synthetic oligonucleotide
  Antisense strand to SEQ ID NO: 596852
aaaucuccaggccaccggc

SEQ ID NO: 596854 - RNA, 19 nt, Artificial Sequence
  Description of Artificial Sequence: Synthetic oligonucleotide
  Sense strand starting at position 2264 of SEQ ID NO: 584888
ucucguugcagccagaaua

SEQ ID NO: 596855 - RNA, 19 nt, Artificial Sequence
  Description of Artificial Sequence: Synthetic oligonucleotide
  Antisense strand to SEQ ID NO: 596854
uauucuggcugcaacgaga

SEQ ID NO: 596856 - RNA, 19 nt, Artificial Sequence
  Description of Artificial Sequence: Synthetic oligonucleotide
  Sense strand starting at position 2360 of SEQ ID NO: 584888
guguuuguucccuggccuu

SEQ ID NO: 596857 - RNA, 19 nt, Artificial Sequence
  Description of Artificial Sequence: Synthetic oligonucleotide
  Antisense strand to SEQ ID NO: 596856
aaggccagggaacaaacac

SEQ ID NO: 596858 - RNA, 19 nt, Artificial Sequence
  Description of Artificial Sequence: Synthetic oligonucleotide
  Sense strand starting at position 2451 of SEQ ID NO: 584888
gccugucuuaacgucugua

SEQ ID NO: 596859 - RNA, 19 nt, Artificial Sequence
  Description of Artificial Sequence: Synthetic oligonucleotide
  Antisense strand to SEQ ID NO: 596858
uacagacguuaagacaggc

SEQ ID NO: 596860 - RNA, 19 nt, Artificial Sequence
  Description of Artificial Sequence: Synthetic oligonucleotide
  Sense strand starting at position 2470 of SEQ ID NO: 584888
aaacaagcugugugaggau

SEQ ID NO: 596861 - RNA, 19 nt, Artificial Sequence
  Description of Artificial Sequence: Synthetic oligonucleotide
  Antisense strand to SEQ ID NO: 596860
auccucacacagcuuguuu

SEQ ID NO: 596862 - RNA, 19 nt, Artificial Sequence
  Description of Artificial Sequence: Synthetic oligonucleotide
  Sense strand starting at position 2477 of SEQ ID NO: 584888
cugugugaggauuauuauu

SEQ ID NO: 596863 - RNA, 19 nt, Artificial Sequence
  Description of Artificial Sequence: Synthetic oligonucleotide
  Antisense strand to SEQ ID NO: 596862
aauaauaauccucacacag

SEQ ID NO: 596864 - RNA, 19 nt, Artificial Sequence
  Description of Artificial Sequence: Synthetic oligonucleotide
  Sense strand starting at position 2479 of SEQ ID NO: 584888
gugugaggauuauuauuau

SEQ ID NO: 596865 - RNA, 19 nt, Artificial Sequence
  Description of Artificial Sequence: Synthetic oligonucleotide
  Antisense strand to SEQ ID NO: 596864
auaauaauaauccucacac

SEQ ID NO: 596866 - RNA, 19 nt, Artificial Sequence
  Description of Artificial Sequence: Synthetic oligonucleotide
  Sense strand starting at position 2820 of SEQ ID NO: 584888
agaacacccuugugagcua

SEQ ID NO: 596867 - RNA, 19 nt, Artificial Sequence
  Description of Artificial Sequence: Synthetic oligonucleotide
  Antisense strand to SEQ ID NO: 596866
uagcucacaaggguguucu

SEQ ID NO: 596868 - RNA, 19 nt, Artificial Sequence
  Description of Artificial Sequence: Synthetic oligonucleotide
  Sense strand starting at position 2869 of SEQ ID NO: 584888
agaugaguuaauugaugcu

SEQ ID NO: 596869 - RNA, 19 nt, Artificial Sequence
  Description of Artificial Sequence: Synthetic oligonucleotide
  Antisense strand to SEQ ID NO: 596868
agcaucaauuaacucaucu

SEQ ID NO: 596870 - RNA, 19 nt, Artificial Sequence
  Description of Artificial Sequence: Synthetic oligonucleotide
  Sense strand starting at position 2872 of SEQ ID NO: 584888
ugaguuaauugaugcucaa

SEQ ID NO: 596871 - RNA, 19 nt, Artificial Sequence
  Description of Artificial Sequence: Synthetic oligonucleotide
  Antisense strand to SEQ ID NO: 596870
uugagcaucaauuaacuca

SEQ ID NO: 596872 - RNA, 19 nt, Artificial Sequence
  Description of Artificial Sequence: Synthetic oligonucleotide
  Sense strand starting at position 2875 of SEQ ID NO: 584888
guuaauugaugcucaagca

SEQ ID NO: 596873 - RNA, 19 nt, Artificial Sequence
  Description of Artificial Sequence: Synthetic oligonucleotide
  Antisense strand to SEQ ID NO: 596872
ugcuugagcaucaauuaac

SEQ ID NO: 596874 - RNA, 19 nt, Artificial Sequence
  Description of Artificial Sequence: Synthetic oligonucleotide
  Sense strand starting at position 2876 of SEQ ID NO: 584888
uuaauugaugcucaagcaa

SEQ ID NO: 596875 - RNA, 19 nt, Artificial Sequence
  Description of Artificial Sequence: Synthetic oligonucleotide
  Antisense strand to SEQ ID NO: 596874
uugcuugagcaucaauuaa

SEQ ID NO: 596876 - RNA, 19 nt, Artificial Sequence
  Description of Artificial Sequence: Synthetic oligonucleotide
  Sense strand starting at position 2910 of SEQ ID NO: 584888
gggcccuuggccugaucau

SEQ ID NO: 596877 - RNA, 19 nt, Artificial Sequence
  Description of Artificial Sequence: Synthetic oligonucleotide
  Antisense strand to SEQ ID NO: 596876
augaucaggccaagggccc

SEQ ID NO: 596878 - RNA, 19 nt, Artificial Sequence
  Description of Artificial Sequence: Synthetic oligonucleotide
  Sense strand starting at position 2958 of SEQ ID NO: 584888
gggccucucuucuuggaca

SEQ ID NO: 596879 - RNA, 19 nt, Artificial Sequence
  Description of Artificial Sequence: Synthetic oligonucleotide
  Antisense strand to SEQ ID NO: 596878
uguccaagaagagaggccc

SEQ ID NO: 596880 - RNA, 19 nt, Artificial Sequence
  Description of Artificial Sequence: Synthetic oligonucleotide
  Sense strand starting at position 3156 of SEQ ID NO: 584888
gugcuaccaugcucgaguu

SEQ ID NO: 596881 - RNA, 19 nt, Artificial Sequence
  Description of Artificial Sequence: Synthetic oligonucleotide
  Antisense strand to SEQ ID NO: 596880
aacucgagcaugguagcac

SEQ ID NO: 596882 - RNA, 19 nt, Artificial Sequence
  Description of Artificial Sequence: Synthetic oligonucleotide
  Sense strand starting at position 3201 of SEQ ID NO: 584888
gugguuagugccuggacuu

SEQ ID NO: 596883 - RNA, 19 nt, Artificial Sequence
  Description of Artificial Sequence: Synthetic oligonucleotide
  Antisense strand to SEQ ID NO: 596882
aaguccaggcacuaaccac

SEQ ID NO: 596884 - RNA, 19 nt, Artificial Sequence
  Description of Artificial Sequence: Synthetic oligonucleotide
  Sense strand starting at position 3348 of SEQ ID NO: 584888
gaagauuuauaggaaggca

SEQ ID NO: 596885 - RNA, 19 nt, Artificial Sequence
  Description of Artificial Sequence: Synthetic oligonucleotide
  Antisense strand to SEQ ID NO: 596884
ugccuuccuauaaaucuuc

SEQ ID NO: 596886 - RNA, 19 nt, Artificial Sequence
  Description of Artificial Sequence: Synthetic oligonucleotide
  Sense strand starting at position 3782 of SEQ ID NO: 584888
auaucccagugaucuucua

SEQ ID NO: 596887 - RNA, 19 nt, Artificial Sequence
  Description of Artificial Sequence: Synthetic oligonucleotide
  Antisense strand to SEQ ID NO: 596886
uagaagaucacugggauau

SEQ ID NO: 596888 - RNA, 19 nt, Artificial Sequence
  Description of Artificial Sequence: Synthetic oligonucleotide
  Sense strand starting at position 3862 of SEQ ID NO: 584888
caggauuaauggcagguua

SEQ ID NO: 596889 - RNA, 19 nt, Artificial Sequence
  Description of Artificial Sequence: Synthetic oligonucleotide
  Antisense strand to SEQ ID NO: 596888
uaaccugccauuaauccug

SEQ ID NO: 596890 - RNA, 19 nt, Artificial Sequence
  Description of Artificial Sequence: Synthetic oligonucleotide
  Sense strand starting at position 3864 of SEQ ID NO: 584888
ggauuaauggcagguuaga

SEQ ID NO: 596891 - RNA, 19 nt, Artificial Sequence
  Description of Artificial Sequence: Synthetic oligonucleotide
  Antisense strand to SEQ ID NO: 596890
ucuaaccugccauuaaucc

SEQ ID NO: 596892 - RNA, 19 nt, Artificial Sequence
  Description of Artificial Sequence: Synthetic oligonucleotide
  Sense strand starting at position 3869 of SEQ ID NO: 584888
aauggcagguuagauauua

SEQ ID NO: 596893 - RNA, 19 nt, Artificial Sequence
  Description of Artificial Sequence: Synthetic oligonucleotide
  Antisense strand to SEQ ID NO: 596892
uaauaucuaaccugccauu

SEQ ID NO: 596894 - RNA, 19 nt, Artificial Sequence
  Description of Artificial Sequence: Synthetic oligonucleotide
  Sense strand starting at position 3874 of SEQ ID NO: 584888
cagguuagauauuacagaa

SEQ ID NO: 596895 - RNA, 19 nt, Artificial Sequence
  Description of Artificial Sequence: Synthetic oligonucleotide
  Antisense strand to SEQ ID NO: 596894
uucuguaauaucuaaccug

SEQ ID NO: 596896 - RNA, 19 nt, Artificial Sequence
  Description of Artificial Sequence: Synthetic oligonucleotide
  Sense strand starting at position 3901 of SEQ ID NO: 584888
aagugaacuugagggcaua

SEQ ID NO: 596897 - RNA, 19 nt, Artificial Sequence
  Description of Artificial Sequence: Synthetic oligonucleotide
  Antisense strand to SEQ ID NO: 596896
uaugcccucaaguucacuu

SEQ ID NO: 596898 - RNA, 19 nt, Artificial Sequence
  Description of Artificial Sequence: Synthetic oligonucleotide
  Sense strand starting at position 209 of SEQ ID NO: 584889
uuauuugccgcauauuacu

SEQ ID NO: 596899 - RNA, 19 nt, Artificial Sequence
  Description of Artificial Sequence: Synthetic oligonucleotide
  Antisense strand to SEQ ID NO: 596898
aguaauaugcggcaaauaa

SEQ ID NO: 596900 - RNA, 19 nt, Artificial Sequence
  Description of Artificial Sequence: Synthetic oligonucleotide
  Sense strand starting at position 313 of SEQ ID NO: 584889
uugguuuagaguuggaaau

SEQ ID NO: 596901 - RNA, 19 nt, Artificial Sequence
  Description of Artificial Sequence: Synthetic oligonucleotide
  Antisense strand to SEQ ID NO: 596900
auuuccaacucuaaaccaa

SEQ ID NO: 596902 - RNA, 19 nt, Artificial Sequence
  Description of Artificial Sequence: Synthetic oligonucleotide
  Sense strand starting at position 314 of SEQ ID NO: 584889
ugguuuagaguuggaaauc

SEQ ID NO: 596903 - RNA, 19 nt, Artificial Sequence
  Description of Artificial Sequence: Synthetic oligonucleotide
  Antisense strand to SEQ ID NO: 596902
gauuuccaacucuaaacca

SEQ ID NO: 596904 - RNA, 19 nt, Artificial Sequence
  Description of Artificial Sequence: Synthetic oligonucleotide
  Sense strand starting at position 389 of SEQ ID NO: 584889
gggaaucaguggucuacga

SEQ ID NO: 596905 - RNA, 19 nt, Artificial Sequence
  Description of Artificial Sequence: Synthetic oligonucleotide
  Antisense strand to SEQ ID NO: 596904
ucguagaccacugauuccc

SEQ ID NO: 596906 - RNA, 19 nt, Artificial Sequence
  Description of Artificial Sequence: Synthetic oligonucleotide
  Sense strand starting at position 391 of SEQ ID NO: 584889
gaaucaguggucuacgaag

SEQ ID NO: 596907 - RNA, 19 nt, Artificial Sequence
  Description of Artificial Sequence: Synthetic oligonucleotide
  Antisense strand to SEQ ID NO: 596906
cuucguagaccacugauuc

SEQ ID NO: 596908 - RNA, 19 nt, Artificial Sequence
  Description of Artificial Sequence: Synthetic oligonucleotide
  Sense strand starting at position 719 of SEQ ID NO: 584889
ugccaaccuccugaugaua

SEQ ID NO: 596909 - RNA, 19 nt, Artificial Sequence
  Description of Artificial Sequence: Synthetic oligonucleotide
  Antisense strand to SEQ ID NO: 596908
uaucaucaggagguuggca

SEQ ID NO: 596910 - RNA, 19 nt, Artificial Sequence
  Description of Artificial Sequence: Synthetic oligonucleotide
  Sense strand starting at position 742 of SEQ ID NO: 584889
ggauauuugcgagguuugu

SEQ ID NO: 596911 - RNA, 19 nt, Artificial Sequence
  Description of Artificial Sequence: Synthetic oligonucleotide
  Antisense strand to SEQ ID NO: 596910
acaaaccucgcaaauaucc

SEQ ID NO: 596912 - RNA, 19 nt, Artificial Sequence
  Description of Artificial Sequence: Synthetic oligonucleotide
  Sense strand starting at position 746 of SEQ ID NO: 584889
auuugcgagguuuguuauu

SEQ ID NO: 596913 - RNA, 19 nt, Artificial Sequence
  Description of Artificial Sequence: Synthetic oligonucleotide
  Antisense strand to SEQ ID NO: 596912
aauaacaaaccucgcaaau

SEQ ID NO: 596914 - RNA, 19 nt, Artificial Sequence
  Description of Artificial Sequence: Synthetic oligonucleotide
  Sense strand starting at position 795 of SEQ ID NO: 584889
gcuuaacuuguguuuguuu

SEQ ID NO: 596915 - RNA, 19 nt, Artificial Sequence
  Description of Artificial Sequence: Synthetic oligonucleotide
  Antisense strand to SEQ ID NO: 596914
aaacaaacacaaguuaagc

SEQ ID NO: 596916 - RNA, 19 nt, Artificial Sequence
  Description of Artificial Sequence: Synthetic oligonucleotide
  Sense strand starting at position 850 of SEQ ID NO: 584889
gagucuugcagucauagga

SEQ ID NO: 596917 - RNA, 19 nt, Artificial Sequence
  Description of Artificial Sequence: Synthetic oligonucleotide
  Antisense strand to SEQ ID NO: 596916
uccuaugacugcaagacuc

SEQ ID NO: 596918 - RNA, 19 nt, Artificial Sequence
  Description of Artificial Sequence: Synthetic oligonucleotide
  Sense strand starting at position 854 of SEQ ID NO: 584889
cuugcagucauaggagaga

SEQ ID NO: 596919 - RNA, 19 nt, Artificial Sequence
  Description of Artificial Sequence: Synthetic oligonucleotide
  Antisense strand to SEQ ID NO: 596918
ucucuccuaugacugcaag

SEQ ID NO: 596920 - RNA, 19 nt, Artificial Sequence
  Description of Artificial Sequence: Synthetic oligonucleotide
  Sense strand starting at position 1011 of SEQ ID NO: 584889
gaagaauauugagcucuga

SEQ ID NO: 596921 - RNA, 19 nt, Artificial Sequence
  Description of Artificial Sequence: Synthetic oligonucleotide
  Antisense strand to SEQ ID NO: 596920
ucagagcucaauauucuuc

SEQ ID NO: 596922 - RNA, 19 nt, Artificial Sequence
  Description of Artificial Sequence: Synthetic oligonucleotide
  Sense strand starting at position 1307 of SEQ ID NO: 584889
aggauaacuagauggugua

SEQ ID NO: 596923 - RNA, 19 nt, Artificial Sequence
  Description of Artificial Sequence: Synthetic oligonucleotide
  Antisense strand to SEQ ID NO: 596922
uacaccaucuaguuauccu

SEQ ID NO: 596924 - RNA, 19 nt, Artificial Sequence
  Description of Artificial Sequence: Synthetic oligonucleotide
  Sense strand starting at position 1454 of SEQ ID NO: 584889
gauuauauagagugaccau

SEQ ID NO: 596925 - RNA, 19 nt, Artificial Sequence
  Description of Artificial Sequence: Synthetic oligonucleotide
  Antisense strand to SEQ ID NO: 596924
auggucacucuauauaauc

SEQ ID NO: 596926 - RNA, 19 nt, Artificial Sequence
  Description of Artificial Sequence: Synthetic oligonucleotide
  Sense strand starting at position 1578 of SEQ ID NO: 584889
acuaucagccuagagcuua

SEQ ID NO: 596927 - RNA, 19 nt, Artificial Sequence
  Description of Artificial Sequence: Synthetic oligonucleotide
  Antisense strand to SEQ ID NO: 596926
uaagcucuaggcugauagu

SEQ ID NO: 596928 - RNA, 19 nt, Artificial Sequence
  Description of Artificial Sequence: Synthetic oligonucleotide
  Sense strand starting at position 1583 of SEQ ID NO: 584889
cagccuagagcuuaguuaa

SEQ ID NO: 596929 - RNA, 19 nt, Artificial Sequence
  Description of Artificial Sequence: Synthetic oligonucleotide
  Antisense strand to SEQ ID NO: 596928
uuaacuaagcucuaggcug

SEQ ID NO: 596930 - RNA, 19 nt, Artificial Sequence
  Description of Artificial Sequence: Synthetic oligonucleotide
  Sense strand starting at position 1767 of SEQ ID NO: 584889
ggaguuaguccauacccaa

SEQ ID NO: 596931 - RNA, 19 nt, Artificial Sequence
  Description of Artificial Sequence: Synthetic oligonucleotide
  Antisense strand to SEQ ID NO: 596930
uuggguauggacuaacucc

SEQ ID NO: 596932 - RNA, 19 nt, Artificial Sequence
  Description of Artificial Sequence: Synthetic oligonucleotide
  Sense strand starting at position 1832 of SEQ ID NO: 584889
ggauuucuuugucagagag

SEQ ID NO: 596933 - RNA, 19 nt, Artificial Sequence
  Description of Artificial Sequence: Synthetic oligonucleotide
  Antisense strand to SEQ ID NO: 596932
cucucugacaaagaaaucc

SEQ ID NO: 596934 - RNA, 19 nt, Artificial Sequence
  Description of Artificial Sequence: Synthetic oligonucleotide
  Sense strand starting at position 1881 of SEQ ID NO: 584889
acuguuucugagcaauaug

SEQ ID NO: 596935 - RNA, 19 nt, Artificial Sequence
  Description of Artificial Sequence: Synthetic oligonucleotide
  Antisense strand to SEQ ID NO: 596934
cauauugcucagaaacagu

SEQ ID NO: 596936 - RNA, 19 nt, Artificial Sequence
  Description of Artificial Sequence: Synthetic oligonucleotide
  Sense strand starting at position 1884 of SEQ ID NO: 584889
guuucugagcaauaugaac

SEQ ID NO: 596937 - RNA, 19 nt, Artificial Sequence
  Description of Artificial Sequence: Synthetic oligonucleotide
  Antisense strand to SEQ ID NO: 596936
guucauauugcucagaaac

SEQ ID NO: 596938 - RNA, 19 nt, Artificial Sequence
  Description of Artificial Sequence: Synthetic oligonucleotide
  Sense strand starting at position 1917 of SEQ ID NO: 584889
ggcccuuguaggcagagau

SEQ ID NO: 596939 - RNA, 19 nt, Artificial Sequence
  Description of Artificial Sequence: Synthetic oligonucleotide
  Antisense strand to SEQ ID NO: 596938
aucucugccuacaagggcc

SEQ ID NO: 596940 - RNA, 19 nt, Artificial Sequence
  Description of Artificial Sequence: Synthetic oligonucleotide
  Sense strand starting at position 1948 of SEQ ID NO: 584889
ugagaaauuguguggagca

SEQ ID NO: 596941 - RNA, 19 nt, Artificial Sequence
  Description of Artificial Sequence: Synthetic oligonucleotide
  Antisense strand to SEQ ID NO: 596940
ugcuccacacaauuucuca

SEQ ID NO: 596942 - RNA, 19 nt, Artificial Sequence
  Description of Artificial Sequence: Synthetic oligonucleotide
  Sense strand starting at position 1955 of SEQ ID NO: 584889
uuguguggagcagauugau

SEQ ID NO: 596943 - RNA, 19 nt, Artificial Sequence
  Description of Artificial Sequence: Synthetic oligonucleotide
  Antisense strand to SEQ ID NO: 596942
aucaaucugcuccacacaa

SEQ ID NO: 596944 - RNA, 19 nt, Artificial Sequence
  Description of Artificial Sequence: Synthetic oligonucleotide
  Sense strand starting at position 2013 of SEQ ID NO: 584889
ucuagaaucugugucauaa

SEQ ID NO: 596945 - RNA, 19 nt, Artificial Sequence
  Description of Artificial Sequence: Synthetic oligonucleotide
  Antisense strand to SEQ ID NO: 596944
uuaugacacagauucuaga

SEQ ID NO: 596946 - RNA, 19 nt, Artificial Sequence
  Description of Artificial Sequence: Synthetic oligonucleotide
  Sense strand starting at position 2093 of SEQ ID NO: 584889
uuaauaaugcuuuggagga

SEQ ID NO: 596947 - RNA, 19 nt, Artificial Sequence
  Description of Artificial Sequence: Synthetic oligonucleotide
  Antisense strand to SEQ ID NO: 596946
uccuccaaagcauuauuaa

SEQ ID NO: 596948 - RNA, 19 nt, Artificial Sequence
  Description of Artificial Sequence: Synthetic oligonucleotide
  Sense strand starting at position 2109 of SEQ ID NO: 584889
ggaccuugaacuuguauag

SEQ ID NO: 596949 - RNA, 19 nt, Artificial Sequence
  Description of Artificial Sequence: Synthetic oligonucleotide
  Antisense strand to SEQ ID NO: 596948
cuauacaaguucaaggucc

SEQ ID NO: 596950 - RNA, 19 nt, Artificial Sequence
  Description of Artificial Sequence: Synthetic oligonucleotide
  Sense strand starting at position 2149 of SEQ ID NO: 584889
cuuucugggcuuuagaauu

SEQ ID NO: 596951 - RNA, 19 nt, Artificial Sequence
  Description of Artificial Sequence: Synthetic oligonucleotide
  Antisense strand to SEQ ID NO: 596950
aauucuaaagcccagaaag

SEQ ID NO: 596952 - RNA, 19 nt, Artificial Sequence
  Description of Artificial Sequence: Synthetic oligonucleotide
  Sense strand starting at position 2653 of SEQ ID NO: 584889
guaaauauacaccguggaa

SEQ ID NO: 596953 - RNA, 19 nt, Artificial Sequence
  Description of Artificial Sequence: Synthetic oligonucleotide
  Antisense strand to SEQ ID NO: 596952
uuccacgguguauauuuac

SEQ ID NO: 596954 - RNA, 19 nt, Artificial Sequence
  Description of Artificial Sequence: Synthetic oligonucleotide
  Sense strand starting at position 3064 of SEQ ID NO: 584889
aguuguuggaguuagauag

SEQ ID NO: 596955 - RNA, 19 nt, Artificial Sequence
  Description of Artificial Sequence: Synthetic oligonucleotide
  Antisense strand to SEQ ID NO: 596954
cuaucuaacuccaacaacu

SEQ ID NO: 596956 - RNA, 19 nt, Artificial Sequence
  Description of Artificial Sequence: Synthetic oligonucleotide
  Sense strand starting at position 3068 of SEQ ID NO: 584889
guuggaguuagauagcaag

SEQ ID NO: 596957 - RNA, 19 nt, Artificial Sequence
  Description of Artificial Sequence: Synthetic oligonucleotide
  Antisense strand to SEQ ID NO: 596956
cuugcuaucuaacuccaac

SEQ ID NO: 596958 - RNA, 19 nt, Artificial Sequence
  Description of Artificial Sequence: Synthetic oligonucleotide
  Sense strand starting at position 3192 of SEQ ID NO: 584889
agugucuauugacuacaaa

SEQ ID NO: 596959 - RNA, 19 nt, Artificial Sequence
  Description of Artificial Sequence: Synthetic oligonucleotide
  Antisense strand to SEQ ID NO: 596958
uuuguagucaauagacacu

SEQ ID NO: 596960 - RNA, 19 nt, Artificial Sequence
  Description of Artificial Sequence: Synthetic oligonucleotide
  Sense strand starting at position 3193 of SEQ ID NO: 584889
gugucuauugacuacaaag

SEQ ID NO: 596961 - RNA, 19 nt, Artificial Sequence
  Description of Artificial Sequence: Synthetic oligonucleotide
  Antisense strand to SEQ ID NO: 596960
cuuuguagucaauagacac

SEQ ID NO: 596962 - RNA, 19 nt, Artificial Sequence
  Description of Artificial Sequence: Synthetic oligonucleotide
  Sense strand starting at position 3195 of SEQ ID NO: 584889
gucuauugacuacaaaguu

SEQ ID NO: 596963 - RNA, 19 nt, Artificial Sequence
  Description of Artificial Sequence: Synthetic oligonucleotide
  Antisense strand to SEQ ID NO: 596962
aacuuuguagucaauagac

SEQ ID NO: 596964 - RNA, 19 nt, Artificial Sequence
  Description of Artificial Sequence: Synthetic oligonucleotide
  Sense strand starting at position 3215 of SEQ ID NO: 584889
uauaguggguaccuuauaa

SEQ ID NO: 596965 - RNA, 19 nt, Artificial Sequence
  Description of Artificial Sequence: Synthetic oligonucleotide
  Antisense strand to SEQ ID NO: 596964
uuauaagguacccacuaua

SEQ ID NO: 596966 - RNA, 19 nt, Artificial Sequence
  Description of Artificial Sequence: Synthetic oligonucleotide
  Sense strand starting at position 3257 of SEQ ID NO: 584889
uaaacuguacgaugaaauu

SEQ ID NO: 596967 - RNA, 19 nt, Artificial Sequence
  Description of Artificial Sequence: Synthetic oligonucleotide
  Antisense strand to SEQ ID NO: 596966
aauuucaucguacaguuua

SEQ ID NO: 596968 - RNA, 19 nt, Artificial Sequence
  Description of Artificial Sequence: Synthetic oligonucleotide
  Sense strand starting at position 3266 of SEQ ID NO: 584889
cgaugaaauucuuugagau

SEQ ID NO: 596969 - RNA, 19 nt, Artificial Sequence
  Description of Artificial Sequence: Synthetic oligonucleotide
  Antisense strand to SEQ ID NO: 596968
aucucaaagaauuucaucg

SEQ ID NO: 596970 - RNA, 19 nt, Artificial Sequence
  Description of Artificial Sequence: Synthetic oligonucleotide
  Sense strand starting at position 3662 of SEQ ID NO: 584889
ccggauugaagacgaucaa

SEQ ID NO: 596971 - RNA, 19 nt, Artificial Sequence
  Description of Artificial Sequence: Synthetic oligonucleotide
  Antisense strand to SEQ ID NO: 596970
uugaucgucuucaauccgg

SEQ ID NO: 596972 - RNA, 19 nt, Artificial Sequence
  Description of Artificial Sequence: Synthetic oligonucleotide
  Sense strand starting at position 3775 of SEQ ID NO: 584889
gaaacaucauguguaagag

SEQ ID NO: 596973 - RNA, 19 nt, Artificial Sequence
  Description of Artificial Sequence: Synthetic oligonucleotide
  Antisense strand to SEQ ID NO: 596972
cucuuacacaugauguuuc

SEQ ID NO: 596974 - RNA, 19 nt, Artificial Sequence
  Description of Artificial Sequence: Synthetic oligonucleotide
  Sense strand starting at position 3804 of SEQ ID NO: 584889
aguccauuaccagacuucu

SEQ ID NO: 596975 - RNA, 19 nt, Artificial Sequence
  Description of Artificial Sequence: Synthetic oligonucleotide
  Antisense strand to SEQ ID NO: 596974
agaagucugguaauggacu

SEQ ID NO: 596976 - RNA, 19 nt, Artificial Sequence
  Description of Artificial Sequence: Synthetic oligonucleotide
  Sense strand starting at position 3898 of SEQ ID NO: 584889
ucucaaauugcugagacau

SEQ ID NO: 596977 - RNA, 19 nt, Artificial Sequence
  Description of Artificial Sequence: Synthetic oligonucleotide
  Antisense strand to SEQ ID NO: 596976
augucucagcaauuugaga

SEQ ID NO: 596978 - RNA, 19 nt, Artificial Sequence
  Description of Artificial Sequence: Synthetic oligonucleotide
  Sense strand starting at position 274 of SEQ ID NO: 584890
gagcaucauccaggguaga

SEQ ID NO: 596979 - RNA, 19 nt, Artificial Sequence
  Description of Artificial Sequence: Synthetic oligonucleotide
  Antisense strand to SEQ ID NO: 596978
ucuacccuggaugaugcuc

SEQ ID NO: 596980 - RNA, 19 nt, Artificial Sequence
  Description of Artificial Sequence: Synthetic oligonucleotide
  Sense strand starting at position 275 of SEQ ID NO: 584890
agcaucauccaggguagaa

SEQ ID NO: 596981 - RNA, 19 nt, Artificial Sequence
  Description of Artificial Sequence: Synthetic oligonucleotide
  Antisense strand to SEQ ID NO: 596980
uucuacccuggaugaugcu

SEQ ID NO: 596982 - RNA, 19 nt, Artificial Sequence
  Description of Artificial Sequence: Synthetic oligonucleotide
  Sense strand starting at position 294 of SEQ ID NO: 584890
cuagguaggagugggauaa

SEQ ID NO: 596983 - RNA, 19 nt, Artificial Sequence
  Description of Artificial Sequence: Synthetic oligonucleotide
  Antisense strand to SEQ ID NO: 596982
uuaucccacuccuaccuag

SEQ ID NO: 596984 - RNA, 19 nt, Artificial Sequence
  Description of Artificial Sequence: Synthetic oligonucleotide
  Sense strand starting at position 347 of SEQ ID NO: 584890
ugaggcauucaguggauaa

SEQ ID NO: 596985 - RNA, 19 nt, Artificial Sequence
  Description of Artificial Sequence: Synthetic oligonucleotide
  Antisense strand to SEQ ID NO: 596984
uuauccacugaaugccuca

SEQ ID NO: 596986 - RNA, 19 nt, Artificial Sequence
  Description of Artificial Sequence: Synthetic oligonucleotide
  Sense strand starting at position 380 of SEQ ID NO: 584890
guugguugugcaagugaug

SEQ ID NO: 596987 - RNA, 19 nt, Artificial Sequence
  Description of Artificial Sequence: Synthetic oligonucleotide
  Antisense strand to SEQ ID NO: 596986
caucacuugcacaaccaac

SEQ ID NO: 596988 - RNA, 19 nt, Artificial Sequence
  Description of Artificial Sequence: Synthetic oligonucleotide
  Sense strand starting at position 539 of SEQ ID NO: 584890
caacucugccucugaguga

SEQ ID NO: 596989 - RNA, 19 nt, Artificial Sequence
  Description of Artificial Sequence: Synthetic oligonucleotide
  Antisense strand to SEQ ID NO: 596988
ucacucagaggcagaguug

SEQ ID NO: 596990 - RNA, 19 nt, Artificial Sequence
  Description of Artificial Sequence: Synthetic oligonucleotide
  Sense strand starting at position 653 of SEQ ID NO: 584890
guagucuucugucccaauu

SEQ ID NO: 596991 - RNA, 19 nt, Artificial Sequence
  Description of Artificial Sequence: Synthetic oligonucleotide
  Antisense strand to SEQ ID NO: 596990
aauugggacagaagacuac

SEQ ID NO: 596992 - RNA, 19 nt, Artificial Sequence
  Description of Artificial Sequence: Synthetic oligonucleotide
  Sense strand starting at position 959 of SEQ ID NO: 584890
uggcauaacucucaagaaa

SEQ ID NO: 596993 - RNA, 19 nt, Artificial Sequence
  Description of Artificial Sequence: Synthetic oligonucleotide
  Antisense strand to SEQ ID NO: 596992
uuucuugagaguuaugcca

SEQ ID NO: 596994 - RNA, 19 nt, Artificial Sequence
  Description of Artificial Sequence: Synthetic oligonucleotide
  Sense strand starting at position 1140 of SEQ ID NO: 584890
ccuauaguuuccgcccaau

SEQ ID NO: 596995 - RNA, 19 nt, Artificial Sequence
  Description of Artificial Sequence: Synthetic oligonucleotide
  Antisense strand to SEQ ID NO: 596994
auugggcggaaacuauagg

SEQ ID NO: 596996 - RNA, 19 nt, Artificial Sequence
  Description of Artificial Sequence: Synthetic oligonucleotide
  Sense strand starting at position 1600 of SEQ ID NO: 584890
uggucauguccaggaagaa

SEQ ID NO: 596997 - RNA, 19 nt, Artificial Sequence
  Description of Artificial Sequence: Synthetic oligonucleotide
  Antisense strand to SEQ ID NO: 596996
uucuuccuggacaugacca

SEQ ID NO: 596998 - RNA, 19 nt, Artificial Sequence
  Description of Artificial Sequence: Synthetic oligonucleotide
  Sense strand starting at position 2079 of SEQ ID NO: 584890
cucuuagugucgucacaaa

SEQ ID NO: 596999 - RNA, 19 nt, Artificial Sequence
  Description of Artificial Sequence: Synthetic oligonucleotide
  Antisense strand to SEQ ID NO: 596998
uuugugacgacacuaagag

SEQ ID NO: 597000 - RNA, 19 nt, Artificial Sequence
  Description of Artificial Sequence: Synthetic oligonucleotide
  Sense strand starting at position 2192 of SEQ ID NO: 584890
ggcuucuggccagaccauu

SEQ ID NO: 597001 - RNA, 19 nt, Artificial Sequence
  Description of Artificial Sequence: Synthetic oligonucleotide
  Antisense strand to SEQ ID NO: 597000
aauggucuggccagaagcc

SEQ ID NO: 597002 - RNA, 19 nt, Artificial Sequence
  Description of Artificial Sequence: Synthetic oligonucleotide
  Sense strand starting at position 2261 of SEQ ID NO: 584890
gggagaaguugagggauuu

SEQ ID NO: 597003 - RNA, 19 nt, Artificial Sequence
  Description of Artificial Sequence: Synthetic oligonucleotide
  Antisense strand to SEQ ID NO: 597002
aaaucccucaacuucuccc

SEQ ID NO: 597004 - RNA, 19 nt, Artificial Sequence
  Description of Artificial Sequence: Synthetic oligonucleotide
  Sense strand starting at position 2317 of SEQ ID NO: 584890
acugaagucccgggagaga

SEQ ID NO: 597005 - RNA, 19 nt, Artificial Sequence
  Description of Artificial Sequence: Synthetic oligonucleotide
  Antisense strand to SEQ ID NO: 597004
ucucucccgggacuucagu

SEQ ID NO: 597006 - RNA, 19 nt, Artificial Sequence
  Description of Artificial Sequence: Synthetic oligonucleotide
  Sense strand starting at position 2397 of SEQ ID NO: 584890
gcuugaaggacguguuuga

SEQ ID NO: 597007 - RNA, 19 nt, Artificial Sequence
  Description of Artificial Sequence: Synthetic oligonucleotide
  Antisense strand to SEQ ID NO: 597006
ucaaacacguccuucaagc

SEQ ID NO: 597008 - RNA, 19 nt, Artificial Sequence
  Description of Artificial Sequence: Synthetic oligonucleotide
  Sense strand starting at position 2401 of SEQ ID NO: 584890
gaaggacguguuugaagag

SEQ ID NO: 597009 - RNA, 19 nt, Artificial Sequence
  Description of Artificial Sequence: Synthetic oligonucleotide
  Antisense strand to SEQ ID NO: 597008
cucuucaaacacguccuuc

SEQ ID NO: 597010 - RNA, 19 nt, Artificial Sequence
  Description of Artificial Sequence: Synthetic oligonucleotide
  Sense strand starting at position 2420 of SEQ ID NO: 584890
cugcuuucccagugggaug

SEQ ID NO: 597011 - RNA, 19 nt, Artificial Sequence
  Description of Artificial Sequence: Synthetic oligonucleotide
  Antisense strand to SEQ ID NO: 597010
caucccacugggaaagcag

SEQ ID NO: 597012 - RNA, 19 nt, Artificial Sequence
  Description of Artificial Sequence: Synthetic oligonucleotide
  Sense strand starting at position 2431 of SEQ ID NO: 584890
gugggaugcugccuuaaag

SEQ ID NO: 597013 - RNA, 19 nt, Artificial Sequence
  Description of Artificial Sequence: Synthetic oligonucleotide
  Antisense strand to SEQ ID NO: 597012
cuuuaaggcagcaucccac

SEQ ID NO: 597014 - RNA, 19 nt, Artificial Sequence
  Description of Artificial Sequence: Synthetic oligonucleotide
  Sense strand starting at position 2497 of SEQ ID NO: 584890
guuuguguuaugcaacggu

SEQ ID NO: 597015 - RNA, 19 nt, Artificial Sequence
  Description of Artificial Sequence: Synthetic oligonucleotide
  Antisense strand to SEQ ID NO: 597014
accguugcauaacacaaac

SEQ ID NO: 597016 - RNA, 19 nt, Artificial Sequence
  Description of Artificial Sequence: Synthetic oligonucleotide
  Sense strand starting at position 2501 of SEQ ID NO: 584890
guguuaugcaacgguagca

SEQ ID NO: 597017 - RNA, 19 nt, Artificial Sequence
  Description of Artificial Sequence: Synthetic oligonucleotide
  Antisense strand to SEQ ID NO: 597016
ugcuaccguugcauaacac

SEQ ID NO: 597018 - RNA, 19 nt, Artificial Sequence
  Description of Artificial Sequence: Synthetic oligonucleotide
  Sense strand starting at position 2610 of SEQ ID NO: 584890
augagaauuuagcaugccu

SEQ ID NO: 597019 - RNA, 19 nt, Artificial Sequence
  Description of Artificial Sequence: Synthetic oligonucleotide
  Antisense strand to SEQ ID NO: 597018
aggcaugcuaaauucucau

SEQ ID NO: 597020 - RNA, 19 nt, Artificial Sequence
  Description of Artificial Sequence: Synthetic oligonucleotide
  Sense strand starting at position 2623 of SEQ ID NO: 584890
augccuuguucuguguuua

SEQ ID NO: 597021 - RNA, 19 nt, Artificial Sequence
  Description of Artificial Sequence: Synthetic oligonucleotide
  Antisense strand to SEQ ID NO: 597020
uaaacacagaacaaggcau

SEQ ID NO: 597022 - RNA, 19 nt, Artificial Sequence
  Description of Artificial Sequence: Synthetic oligonucleotide
  Sense strand starting at position 2624 of SEQ ID NO: 584890
ugccuuguucuguguuuaa

SEQ ID NO: 597023 - RNA, 19 nt, Artificial Sequence
  Description of Artificial Sequence: Synthetic oligonucleotide
  Antisense strand to SEQ ID NO: 597022
uuaaacacagaacaaggca

SEQ ID NO: 597024 - RNA, 19 nt, Artificial Sequence
  Description of Artificial Sequence: Synthetic oligonucleotide
  Sense strand starting at position 2683 of SEQ ID NO: 584890
ccggucaaggucugucaaa

SEQ ID NO: 597025 - RNA, 19 nt, Artificial Sequence
  Description of Artificial Sequence: Synthetic oligonucleotide
  Antisense strand to SEQ ID NO: 597024
uuugacagaccuugaccgg

SEQ ID NO: 597026 - RNA, 19 nt, Artificial Sequence
  Description of Artificial Sequence: Synthetic oligonucleotide
  Sense strand starting at position 2736 of SEQ ID NO: 584890
acccucuucuguuaggaaa

SEQ ID NO: 597027 - RNA, 19 nt, Artificial Sequence
  Description of Artificial Sequence: Synthetic oligonucleotide
  Antisense strand to SEQ ID NO: 597026
uuuccuaacagaagagggu

SEQ ID NO: 597028 - RNA, 19 nt, Artificial Sequence
  Description of Artificial Sequence: Synthetic oligonucleotide
  Sense strand starting at position 2768 of SEQ ID NO: 584890
ucgcgaauugcccagcacu

SEQ ID NO: 597029 - RNA, 19 nt, Artificial Sequence
  Description of Artificial Sequence: Synthetic oligonucleotide
  Antisense strand to SEQ ID NO: 597028
agugcugggcaauucgcga

SEQ ID NO: 597030 - RNA, 19 nt, Artificial Sequence
  Description of Artificial Sequence: Synthetic oligonucleotide
  Sense strand starting at position 2819 of SEQ ID NO: 584890
augagugagaaauggucuu

SEQ ID NO: 597031 - RNA, 19 nt, Artificial Sequence
  Description of Artificial Sequence: Synthetic oligonucleotide
  Antisense strand to SEQ ID NO: 597030
aagaccauuucucacucau

SEQ ID NO: 597032 - RNA, 19 nt, Artificial Sequence
  Description of Artificial Sequence: Synthetic oligonucleotide
  Sense strand starting at position 2825 of SEQ ID NO: 584890
gagaaauggucuucugccu

SEQ ID NO: 597033 - RNA, 19 nt, Artificial Sequence
  Description of Artificial Sequence: Synthetic oligonucleotide
  Antisense strand to SEQ ID NO: 597032
aggcagaagaccauuucuc

SEQ ID NO: 597034 - RNA, 19 nt, Artificial Sequence
  Description of Artificial Sequence: Synthetic oligonucleotide
  Sense strand starting at position 2925 of SEQ ID NO: 584890
ccagguuucugguuccuua

SEQ ID NO: 597035 - RNA, 19 nt, Artificial Sequence
  Description of Artificial Sequence: Synthetic oligonucleotide
  Antisense strand to SEQ ID NO: 597034
uaaggaaccagaaaccugg

SEQ ID NO: 597036 - RNA, 19 nt, Artificial Sequence
  Description of Artificial Sequence: Synthetic oligonucleotide
  Sense strand starting at position 2928 of SEQ ID NO: 584890
gguuucugguuccuuauga

SEQ ID NO: 597037 - RNA, 19 nt, Artificial Sequence
  Description of Artificial Sequence: Synthetic oligonucleotide
  Antisense strand to SEQ ID NO: 597036
ucauaaggaaccagaaacc

SEQ ID NO: 597038 - RNA, 19 nt, Artificial Sequence
  Description of Artificial Sequence: Synthetic oligonucleotide
  Sense strand starting at position 2929 of SEQ ID NO: 584890
guuucugguuccuuaugaa

SEQ ID NO: 597039 - RNA, 19 nt, Artificial Sequence
  Description of Artificial Sequence: Synthetic oligonucleotide
  Antisense strand to SEQ ID NO: 597038
uucauaaggaaccagaaac

SEQ ID NO: 597040 - RNA, 19 nt, Artificial Sequence
  Description of Artificial Sequence: Synthetic oligonucleotide
  Sense strand starting at position 2937 of SEQ ID NO: 584890
uuccuuaugaaguguguuu

SEQ ID NO: 597041 - RNA, 19 nt, Artificial Sequence
  Description of Artificial Sequence: Synthetic oligonucleotide
  Antisense strand to SEQ ID NO: 597040
aaacacacuucauaaggaa

SEQ ID NO: 597042 - RNA, 19 nt, Artificial Sequence
  Description of Artificial Sequence: Synthetic oligonucleotide
  Sense strand starting at position 3111 of SEQ ID NO: 584890
cugagaggugaacauguuu

SEQ ID NO: 597043 - RNA, 19 nt, Artificial Sequence
  Description of Artificial Sequence: Synthetic oligonucleotide
  Antisense strand to SEQ ID NO: 597042
aaacauguucaccucucag

SEQ ID NO: 597044 - RNA, 19 nt, Artificial Sequence
  Description of Artificial Sequence: Synthetic oligonucleotide
  Sense strand starting at position 3405 of SEQ ID NO: 584890
gaacuaauuugauguuagg

SEQ ID NO: 597045 - RNA, 19 nt, Artificial Sequence
  Description of Artificial Sequence: Synthetic oligonucleotide
  Antisense strand to SEQ ID NO: 597044
ccuaacaucaaauuaguuc

SEQ ID NO: 597046 - RNA, 19 nt, Artificial Sequence
  Description of Artificial Sequence: Synthetic oligonucleotide
  Sense strand starting at position 3411 of SEQ ID NO: 584890
auuugauguuaggaccaua

SEQ ID NO: 597047 - RNA, 19 nt, Artificial Sequence
  Description of Artificial Sequence: Synthetic oligonucleotide
  Antisense strand to SEQ ID NO: 597046
uaugguccuaacaucaaau

SEQ ID NO: 597048 - RNA, 19 nt, Artificial Sequence
  Description of Artificial Sequence: Synthetic oligonucleotide
  Sense strand starting at position 3424 of SEQ ID NO: 584890
accauagacuucuagaaag

SEQ ID NO: 597049 - RNA, 19 nt, Artificial Sequence
  Description of Artificial Sequence: Synthetic oligonucleotide
  Antisense strand to SEQ ID NO: 597048
cuuucuagaagucuauggu

SEQ ID NO: 597050 - RNA, 19 nt, Artificial Sequence
  Description of Artificial Sequence: Synthetic oligonucleotide
  Sense strand starting at position 3453 of SEQ ID NO: 584890
ugcaguauccauggaugaa

SEQ ID NO: 597051 - RNA, 19 nt, Artificial Sequence
  Description of Artificial Sequence: Synthetic oligonucleotide
  Antisense strand to SEQ ID NO: 597050
uucauccauggauacugca

SEQ ID NO: 597052 - RNA, 19 nt, Artificial Sequence
  Description of Artificial Sequence: Synthetic oligonucleotide
  Sense strand starting at position 3520 of SEQ ID NO: 584890
acuccaucagaaugcugau

SEQ ID NO: 597053 - RNA, 19 nt, Artificial Sequence
  Description of Artificial Sequence: Synthetic oligonucleotide
  Antisense strand to SEQ ID NO: 597052
aucagcauucugauggagu

SEQ ID NO: 597054 - RNA, 19 nt, Artificial Sequence
  Description of Artificial Sequence: Synthetic oligonucleotide
  Sense strand starting at position 3561 of SEQ ID NO: 584890
cugucaaucccguacagua

SEQ ID NO: 597055 - RNA, 19 nt, Artificial Sequence
  Description of Artificial Sequence: Synthetic oligonucleotide
  Antisense strand to SEQ ID NO: 597054
uacuguacgggauugacag

SEQ ID NO: 597056 - RNA, 19 nt, Artificial Sequence
  Description of Artificial Sequence: Synthetic oligonucleotide
  Sense strand starting at position 3584 of SEQ ID NO: 584890
ggucuuagcccacaccuaa

SEQ ID NO: 597057 - RNA, 19 nt, Artificial Sequence
  Description of Artificial Sequence: Synthetic oligonucleotide
  Antisense strand to SEQ ID NO: 597056
uuaggugugggcuaagacc

SEQ ID NO: 597058 - RNA, 19 nt, Artificial Sequence
  Description of Artificial Sequence: Synthetic oligonucleotide
  Sense strand starting at position 2 of SEQ ID NO: 584891
uggaaauucuccuuggucu

SEQ ID NO: 597059 - RNA, 19 nt, Artificial Sequence
  Description of Artificial Sequence: Synthetic oligonucleotide
  Antisense strand to SEQ ID NO: 597058
agaccaaggagaauuucca

SEQ ID NO: 597060 - RNA, 19 nt, Artificial Sequence
  Description of Artificial Sequence: Synthetic oligonucleotide
  Sense strand starting at position 3 of SEQ ID NO: 584891
ggaaauucuccuuggucuc

SEQ ID NO: 597061 - RNA, 19 nt, Artificial Sequence
  Description of Artificial Sequence: Synthetic oligonucleotide
  Antisense strand to SEQ ID NO: 597060
gagaccaaggagaauuucc

SEQ ID NO: 597062 - RNA, 19 nt, Artificial Sequence
  Description of Artificial Sequence: Synthetic oligonucleotide
  Sense strand starting at position 16 of SEQ ID NO: 584891
ggucucauucuagaacauu

SEQ ID NO: 597063 - RNA, 19 nt, Artificial Sequence
  Description of Artificial Sequence: Synthetic oligonucleotide
  Antisense strand to SEQ ID NO: 597062
aauguucuagaaugagacc

SEQ ID NO: 597064 - RNA, 19 nt, Artificial Sequence
  Description of Artificial Sequence: Synthetic oligonucleotide
  Sense strand starting at position 99 of SEQ ID NO: 584891
uaagaaauguacuucugga

SEQ ID NO: 597065 - RNA, 19 nt, Artificial Sequence
  Description of Artificial Sequence: Synthetic oligonucleotide
  Antisense strand to SEQ ID NO: 597064
uccagaaguacauuucuua

SEQ ID NO: 597066 - RNA, 19 nt, Artificial Sequence
  Description of Artificial Sequence: Synthetic oligonucleotide
  Sense strand starting at position 341 of SEQ ID NO: 584891
uccugaacccacggauaaa

SEQ ID NO: 597067 - RNA, 19 nt, Artificial Sequence
  Description of Artificial Sequence: Synthetic oligonucleotide
  Antisense strand to SEQ ID NO: 597066
uuuauccguggguucagga

SEQ ID NO: 597068 - RNA, 19 nt, Artificial Sequence
  Description of Artificial Sequence: Synthetic oligonucleotide
  Sense strand starting at position 507 of SEQ ID NO: 584891
ucugucucagggugaaaug

SEQ ID NO: 597069 - RNA, 19 nt, Artificial Sequence
  Description of Artificial Sequence: Synthetic oligonucleotide
  Antisense strand to SEQ ID NO: 597068
cauuucacccugagacaga

SEQ ID NO: 597070 - RNA, 19 nt, Artificial Sequence
  Description of Artificial Sequence: Synthetic oligonucleotide
  Sense strand starting at position 517 of SEQ ID NO: 584891
ggugaaauguggaagcaga

SEQ ID NO: 597071 - RNA, 19 nt, Artificial Sequence
  Description of Artificial Sequence: Synthetic oligonucleotide
  Antisense strand to SEQ ID NO: 597070
ucugcuuccacauuucacc

SEQ ID NO: 597072 - RNA, 19 nt, Artificial Sequence
  Description of Artificial Sequence: Synthetic oligonucleotide
  Sense strand starting at position 623 of SEQ ID NO: 584891
uaaagugauuagucuggau

SEQ ID NO: 597073 - RNA, 19 nt, Artificial Sequence
  Description of Artificial Sequence: Synthetic oligonucleotide
  Antisense strand to SEQ ID NO: 597072
auccagacuaaucacuuua

SEQ ID NO: 597074 - RNA, 19 nt, Artificial Sequence
  Description of Artificial Sequence: Synthetic oligonucleotide
  Sense strand starting at position 627 of SEQ ID NO: 584891
gugauuagucuggaugguc

SEQ ID NO: 597075 - RNA, 19 nt, Artificial Sequence
  Description of Artificial Sequence: Synthetic oligonucleotide
  Antisense strand to SEQ ID NO: 597074
gaccauccagacuaaucac

SEQ ID NO: 597076 - RNA, 19 nt, Artificial Sequence
  Description of Artificial Sequence: Synthetic oligonucleotide
  Sense strand starting at position 641 of SEQ ID NO: 584891
uggucagggcucuaaucua

SEQ ID NO: 597077 - RNA, 19 nt, Artificial Sequence
  Description of Artificial Sequence: Synthetic oligonucleotide
  Antisense strand to SEQ ID NO: 597076
uagauuagagcccugacca

SEQ ID NO: 597078 - RNA, 19 nt, Artificial Sequence
  Description of Artificial Sequence: Synthetic oligonucleotide
  Sense strand starting at position 1140 of SEQ ID NO: 584891
ugagguucagguggucaga

SEQ ID NO: 597079 - RNA, 19 nt, Artificial Sequence
  Description of Artificial Sequence: Synthetic oligonucleotide
  Antisense strand to SEQ ID NO: 597078
ucugaccaccugaaccuca

SEQ ID NO: 597080 - RNA, 19 nt, Artificial Sequence
  Description of Artificial Sequence: Synthetic oligonucleotide
  Sense strand starting at position 1308 of SEQ ID NO: 584891
ugcccaaauuucgucugaa

SEQ ID NO: 597081 - RNA, 19 nt, Artificial Sequence
  Description of Artificial Sequence: Synthetic oligonucleotide
  Antisense strand to SEQ ID NO: 597080
uucagacgaaauuugggca

SEQ ID NO: 597082 - RNA, 19 nt, Artificial Sequence
  Description of Artificial Sequence: Synthetic oligonucleotide
  Sense strand starting at position 1309 of SEQ ID NO: 584891
gcccaaauuucgucugaau

SEQ ID NO: 597083 - RNA, 19 nt, Artificial Sequence
  Description of Artificial Sequence: Synthetic oligonucleotide
  Antisense strand to SEQ ID NO: 597082
auucagacgaaauuugggc

SEQ ID NO: 597084 - RNA, 19 nt, Artificial Sequence
  Description of Artificial Sequence: Synthetic oligonucleotide
  Sense strand starting at position 1331 of SEQ ID NO: 584891
ucgguaguccuguuucagu

SEQ ID NO: 597085 - RNA, 19 nt, Artificial Sequence
  Description of Artificial Sequence: Synthetic oligonucleotide
  Antisense strand to SEQ ID NO: 597084
acugaaacaggacuaccga

SEQ ID NO: 597086 - RNA, 19 nt, Artificial Sequence
  Description of Artificial Sequence: Synthetic oligonucleotide
  Sense strand starting at position 1513 of SEQ ID NO: 584891
ugagcuuuguggucauuua

SEQ ID NO: 597087 - RNA, 19 nt, Artificial Sequence
  Description of Artificial Sequence: Synthetic oligonucleotide
  Antisense strand to SEQ ID NO: 597086
uaaaugaccacaaagcuca

SEQ ID NO: 597088 - RNA, 19 nt, Artificial Sequence
  Description of Artificial Sequence: Synthetic oligonucleotide
  Sense strand starting at position 1556 of SEQ ID NO: 584891
cagggaaugcucugaagug

SEQ ID NO: 597089 - RNA, 19 nt, Artificial Sequence
  Description of Artificial Sequence: Synthetic oligonucleotide
  Antisense strand to SEQ ID NO: 597088
cacuucagagcauucccug

SEQ ID NO: 597090 - RNA, 19 nt, Artificial Sequence
  Description of Artificial Sequence: Synthetic oligonucleotide
  Sense strand starting at position 1992 of SEQ ID NO: 584891
ugggcugucgccguggaaa

SEQ ID NO: 597091 - RNA, 19 nt, Artificial Sequence
  Description of Artificial Sequence: Synthetic oligonucleotide
  Antisense strand to SEQ ID NO: 597090
uuuccacggcgacagccca

SEQ ID NO: 597092 - RNA, 19 nt, Artificial Sequence
  Description of Artificial Sequence: Synthetic oligonucleotide
  Sense strand starting at position 2105 of SEQ ID NO: 584891
cugugccuucuggaacaga

SEQ ID NO: 597093 - RNA, 19 nt, Artificial Sequence
  Description of Artificial Sequence: Synthetic oligonucleotide
  Antisense strand to SEQ ID NO: 597092
ucuguuccagaaggcacag

SEQ ID NO: 597094 - RNA, 19 nt, Artificial Sequence
  Description of Artificial Sequence: Synthetic oligonucleotide
  Sense strand starting at position 2120 of SEQ ID NO: 584891
cagagaguauuggugauug

SEQ ID NO: 597095 - RNA, 19 nt, Artificial Sequence
  Description of Artificial Sequence: Synthetic oligonucleotide
  Antisense strand to SEQ ID NO: 597094
caaucaccaauacucucug

SEQ ID NO: 597096 - RNA, 19 nt, Artificial Sequence
  Description of Artificial Sequence: Synthetic oligonucleotide
  Sense strand starting at position 2122 of SEQ ID NO: 584891
gagaguauuggugauugcu

SEQ ID NO: 597097 - RNA, 19 nt, Artificial Sequence
  Description of Artificial Sequence: Synthetic oligonucleotide
  Antisense strand to SEQ ID NO: 597096
agcaaucaccaauacucuc

SEQ ID NO: 597098 - RNA, 19 nt, Artificial Sequence
  Description of Artificial Sequence: Synthetic oligonucleotide
  Sense strand starting at position 2130 of SEQ ID NO: 584891
uggugauugcuugcuuguu

SEQ ID NO: 597099 - RNA, 19 nt, Artificial Sequence
  Description of Artificial Sequence: Synthetic oligonucleotide
  Antisense strand to SEQ ID NO: 597098
aacaagcaagcaaucacca

SEQ ID NO: 597100 - RNA, 19 nt, Artificial Sequence
  Description of Artificial Sequence: Synthetic oligonucleotide
  Sense strand starting at position 2328 of SEQ ID NO: 584891
cuuagauagcguuuacguu

SEQ ID NO: 597101 - RNA, 19 nt, Artificial Sequence
  Description of Artificial Sequence: Synthetic oligonucleotide
  Antisense strand to SEQ ID NO: 597100
aacguaaacgcuaucuaag

SEQ ID NO: 597102 - RNA, 19 nt, Artificial Sequence
  Description of Artificial Sequence: Synthetic oligonucleotide
  Sense strand starting at position 2335 of SEQ ID NO: 584891
agcguuuacguugucuuaa

SEQ ID NO: 597103 - RNA, 19 nt, Artificial Sequence
  Description of Artificial Sequence: Synthetic oligonucleotide
  Antisense strand to SEQ ID NO: 597102
uuaagacaacguaaacgcu

SEQ ID NO: 597104 - RNA, 19 nt, Artificial Sequence
  Description of Artificial Sequence: Synthetic oligonucleotide
  Sense strand starting at position 2391 of SEQ ID NO: 584891
gaaggaugcguauagguua

SEQ ID NO: 597105 - RNA, 19 nt, Artificial Sequence
  Description of Artificial Sequence: Synthetic oligonucleotide
  Antisense strand to SEQ ID NO: 597104
uaaccuauacgcauccuuc

SEQ ID NO: 597106 - RNA, 19 nt, Artificial Sequence
  Description of Artificial Sequence: Synthetic oligonucleotide
  Sense strand starting at position 2534 of SEQ ID NO: 584891
guacaucagcuuuaugaaa

SEQ ID NO: 597107 - RNA, 19 nt, Artificial Sequence
  Description of Artificial Sequence: Synthetic oligonucleotide
  Antisense strand to SEQ ID NO: 597106
uuucauaaagcugauguac

SEQ ID NO: 597108 - RNA, 19 nt, Artificial Sequence
  Description of Artificial Sequence: Synthetic oligonucleotide
  Sense strand starting at position 2558 of SEQ ID NO: 584891
gaaacacuuuccgugaucu

SEQ ID NO: 597109 - RNA, 19 nt, Artificial Sequence
  Description of Artificial Sequence: Synthetic oligonucleotide
  Antisense strand to SEQ ID NO: 597108
agaucacggaaaguguuuc

SEQ ID NO: 597110 - RNA, 19 nt, Artificial Sequence
  Description of Artificial Sequence: Synthetic oligonucleotide
  Sense strand starting at position 2560 of SEQ ID NO: 584891
aacacuuuccgugaucuga

SEQ ID NO: 597111 - RNA, 19 nt, Artificial Sequence
  Description of Artificial Sequence: Synthetic oligonucleotide
  Antisense strand to SEQ ID NO: 597110
ucagaucacggaaaguguu

SEQ ID NO: 597112 - RNA, 19 nt, Artificial Sequence
  Description of Artificial Sequence: Synthetic oligonucleotide
  Sense strand starting at position 2649 of SEQ ID NO: 584891
aggcaucugcuauagaaau

SEQ ID NO: 597113 - RNA, 19 nt, Artificial Sequence
  Description of Artificial Sequence: Synthetic oligonucleotide
  Antisense strand to SEQ ID NO: 597112
auuucuauagcagaugccu

SEQ ID NO: 597114 - RNA, 19 nt, Artificial Sequence
  Description of Artificial Sequence: Synthetic oligonucleotide
  Sense strand starting at position 2661 of SEQ ID NO: 584891
uagaaaugugcagguugga

SEQ ID NO: 597115 - RNA, 19 nt, Artificial Sequence
  Description of Artificial Sequence: Synthetic oligonucleotide
  Antisense strand to SEQ ID NO: 597114
uccaaccugcacauuucua

SEQ ID NO: 597116 - RNA, 19 nt, Artificial Sequence
  Description of Artificial Sequence: Synthetic oligonucleotide
  Sense strand starting at position 2825 of SEQ ID NO: 584891
guuagcagacaguggaauu

SEQ ID NO: 597117 - RNA, 19 nt, Artificial Sequence
  Description of Artificial Sequence: Synthetic oligonucleotide
  Antisense strand to SEQ ID NO: 597116
aauuccacugucugcuaac

SEQ ID NO: 597118 - RNA, 19 nt, Artificial Sequence
  Description of Artificial Sequence: Synthetic oligonucleotide
  Sense strand starting at position 2966 of SEQ ID NO: 584891
augucuugcagccagaaag

SEQ ID NO: 597119 - RNA, 19 nt, Artificial Sequence
  Description of Artificial Sequence: Synthetic oligonucleotide
  Antisense strand to SEQ ID NO: 597118
cuuucuggcugcaagacau

SEQ ID NO: 597120 - RNA, 19 nt, Artificial Sequence
  Description of Artificial Sequence: Synthetic oligonucleotide
  Sense strand starting at position 2999 of SEQ ID NO: 584891
gcgauucugcugguucuua

SEQ ID NO: 597121 - RNA, 19 nt, Artificial Sequence
  Description of Artificial Sequence: Synthetic oligonucleotide
  Antisense strand to SEQ ID NO: 597120
uaagaaccagcagaaucgc

SEQ ID NO: 597122 - RNA, 19 nt, Artificial Sequence
  Description of Artificial Sequence: Synthetic oligonucleotide
  Sense strand starting at position 3061 of SEQ ID NO: 584891
ugagaaagacggugaugua

SEQ ID NO: 597123 - RNA, 19 nt, Artificial Sequence
  Description of Artificial Sequence: Synthetic oligonucleotide
  Antisense strand to SEQ ID NO: 597122
uacaucaccgucuuucuca

SEQ ID NO: 597124 - RNA, 19 nt, Artificial Sequence
  Description of Artificial Sequence: Synthetic oligonucleotide
  Sense strand starting at position 3089 of SEQ ID NO: 584891
gguugugaggauggaauua

SEQ ID NO: 597125 - RNA, 19 nt, Artificial Sequence
  Description of Artificial Sequence: Synthetic oligonucleotide
  Antisense strand to SEQ ID NO: 597124
uaauuccauccucacaacc

SEQ ID NO: 597126 - RNA, 19 nt, Artificial Sequence
  Description of Artificial Sequence: Synthetic oligonucleotide
  Sense strand starting at position 3341 of SEQ ID NO: 584891
uccucugcugggcaaagau

SEQ ID NO: 597127 - RNA, 19 nt, Artificial Sequence
  Description of Artificial Sequence: Synthetic oligonucleotide
  Antisense strand to SEQ ID NO: 597126
aucuuugcccagcagagga

SEQ ID NO: 597128 - RNA, 19 nt, Artificial Sequence
  Description of Artificial Sequence: Synthetic oligonucleotide
  Sense strand starting at position 3432 of SEQ ID NO: 584891
ccaccuugucauggaacau

SEQ ID NO: 597129 - RNA, 19 nt, Artificial Sequence
  Description of Artificial Sequence: Synthetic oligonucleotide
  Antisense strand to SEQ ID NO: 597128
auguuccaugacaaggugg

SEQ ID NO: 597130 - RNA, 19 nt, Artificial Sequence
  Description of Artificial Sequence: Synthetic oligonucleotide
  Sense strand starting at position 3436 of SEQ ID NO: 584891
cuugucauggaacaucuua

SEQ ID NO: 597131 - RNA, 19 nt, Artificial Sequence
  Description of Artificial Sequence: Synthetic oligonucleotide
  Antisense strand to SEQ ID NO: 597130
uaagauguuccaugacaag

SEQ ID NO: 597132 - RNA, 19 nt, Artificial Sequence
  Description of Artificial Sequence: Synthetic oligonucleotide
  Sense strand starting at position 3571 of SEQ ID NO: 584891
aggucuuaggcuggacaua

SEQ ID NO: 597133 - RNA, 19 nt, Artificial Sequence
  Description of Artificial Sequence: Synthetic oligonucleotide
  Antisense strand to SEQ ID NO: 597132
uauguccagccuaagaccu

SEQ ID NO: 597134 - RNA, 19 nt, Artificial Sequence
  Description of Artificial Sequence: Synthetic oligonucleotide
  Sense strand starting at position 3807 of SEQ ID NO: 584891
augguaguuaggcaucuua

SEQ ID NO: 597135 - RNA, 19 nt, Artificial Sequence
  Description of Artificial Sequence: Synthetic oligonucleotide
  Antisense strand to SEQ ID NO: 597134
uaagaugccuaacuaccau

SEQ ID NO: 597136 - RNA, 19 nt, Artificial Sequence
  Description of Artificial Sequence: Synthetic oligonucleotide
  Sense strand starting at position 3818 of SEQ ID NO: 584891
gcaucuuaacuaugacaga

SEQ ID NO: 597137 - RNA, 19 nt, Artificial Sequence
  Description of Artificial Sequence: Synthetic oligonucleotide
  Antisense strand to SEQ ID NO: 597136
ucugucauaguuaagaugc

SEQ ID NO: 597138 - RNA, 19 nt, Artificial Sequence
  Description of Artificial Sequence: Synthetic oligonucleotide
  Sense strand starting at position 2038 of SEQ ID NO: 584892
acgcuagguccguaaguga

SEQ ID NO: 597139 - RNA, 19 nt, Artificial Sequence
  Description of Artificial Sequence: Synthetic oligonucleotide
  Antisense strand to SEQ ID NO: 597138
ucacuuacggaccuagcgu

SEQ ID NO: 597140 - RNA, 19 nt, Artificial Sequence
  Description of Artificial Sequence: Synthetic oligonucleotide
  Sense strand starting at position 2362 of SEQ ID NO: 584892
cgcugaggucucuaggaaa

SEQ ID NO: 597141 - RNA, 19 nt, Artificial Sequence
  Description of Artificial Sequence: Synthetic oligonucleotide
  Antisense strand to SEQ ID NO: 597140
uuuccuagagaccucagcg

SEQ ID NO: 597142 - RNA, 19 nt, Artificial Sequence
  Description of Artificial Sequence: Synthetic oligonucleotide
  Sense strand starting at position 2584 of SEQ ID NO: 584892
auguggaguucggaggaaa

SEQ ID NO: 597143 - RNA, 19 nt, Artificial Sequence
  Description of Artificial Sequence: Synthetic oligonucleotide
  Antisense strand to SEQ ID NO: 597142
uuuccuccgaacuccacau

SEQ ID NO: 597144 - RNA, 19 nt, Artificial Sequence
  Description of Artificial Sequence: Synthetic oligonucleotide
  Sense strand starting at position 2845 of SEQ ID NO: 584892
gcaaguuucugacuugauu

SEQ ID NO: 597145 - RNA, 19 nt, Artificial Sequence
  Description of Artificial Sequence: Synthetic oligonucleotide
  Antisense strand to SEQ ID NO: 597144
aaucaagucagaaacuugc

SEQ ID NO: 597146 - RNA, 19 nt, Artificial Sequence
  Description of Artificial Sequence: Synthetic oligonucleotide
  Sense strand starting at position 2974 of SEQ ID NO: 584892
agugguacuccucgaguag

SEQ ID NO: 597147 - RNA, 19 nt, Artificial Sequence
  Description of Artificial Sequence: Synthetic oligonucleotide
  Antisense strand to SEQ ID NO: 597146
cuacucgaggaguaccacu

SEQ ID NO: 597148 - RNA, 19 nt, Artificial Sequence
  Description of Artificial Sequence: Synthetic oligonucleotide
  Sense strand starting at position 2975 of SEQ ID NO: 584892
gugguacuccucgaguagu

SEQ ID NO: 597149 - RNA, 19 nt, Artificial Sequence
  Description of Artificial Sequence: Synthetic oligonucleotide
  Antisense strand to SEQ ID NO: 597148
acuacucgaggaguaccac

SEQ ID NO: 597150 - RNA, 19 nt, Artificial Sequence
  Description of Artificial Sequence: Synthetic oligonucleotide
  Sense strand starting at position 2978 of SEQ ID NO: 584892
guacuccucgaguaguaga

SEQ ID NO: 597151 - RNA, 19 nt, Artificial Sequence
  Description of Artificial Sequence: Synthetic oligonucleotide
  Antisense strand to SEQ ID NO: 597150
ucuacuacucgaggaguac

SEQ ID NO: 597152 - RNA, 19 nt, Artificial Sequence
  Description of Artificial Sequence: Synthetic oligonucleotide
  Sense strand starting at position 3051 of SEQ ID NO: 584892
guaccaguaaaggaguauu

SEQ ID NO: 597153 - RNA, 19 nt, Artificial Sequence
  Description of Artificial Sequence: Synthetic oligonucleotide
  Antisense strand to SEQ ID NO: 597152
aauacuccuuuacugguac

SEQ ID NO: 597154 - RNA, 19 nt, Artificial Sequence
  Description of Artificial Sequence: Synthetic oligonucleotide
  Sense strand starting at position 3080 of SEQ ID NO: 584892
cuuccaguuuaucugggau

SEQ ID NO: 597155 - RNA, 19 nt, Artificial Sequence
  Description of Artificial Sequence: Synthetic oligonucleotide
  Antisense strand to SEQ ID NO: 597154
aucccagauaaacuggaag

SEQ ID NO: 597156 - RNA, 19 nt, Artificial Sequence
  Description of Artificial Sequence: Synthetic oligonucleotide
  Sense strand starting at position 3083 of SEQ ID NO: 584892
ccaguuuaucugggauuac

SEQ ID NO: 597157 - RNA, 19 nt, Artificial Sequence
  Description of Artificial Sequence: Synthetic oligonucleotide
  Antisense strand to SEQ ID NO: 597156
guaaucccagauaaacugg

SEQ ID NO: 597158 - RNA, 19 nt, Artificial Sequence
  Description of Artificial Sequence: Synthetic oligonucleotide
  Sense strand starting at position 3093 of SEQ ID NO: 584892
ugggauuacuaucuugugu

SEQ ID NO: 597159 - RNA, 19 nt, Artificial Sequence
  Description of Artificial Sequence: Synthetic oligonucleotide
  Antisense strand to SEQ ID NO: 597158
acacaagauaguaauccca

SEQ ID NO: 597160 - RNA, 19 nt, Artificial Sequence
  Description of Artificial Sequence: Synthetic oligonucleotide
  Sense strand starting at position 3098 of SEQ ID NO: 584892
uuacuaucuuguguuuacu

SEQ ID NO: 597161 - RNA, 19 nt, Artificial Sequence
  Description of Artificial Sequence: Synthetic oligonucleotide
  Antisense strand to SEQ ID NO: 597160
aguaaacacaagauaguaa

SEQ ID NO: 597162 - RNA, 19 nt, Artificial Sequence
  Description of Artificial Sequence: Synthetic oligonucleotide
  Sense strand starting at position 3100 of SEQ ID NO: 584892
acuaucuuguguuuacuga

SEQ ID NO: 597163 - RNA, 19 nt, Artificial Sequence
  Description of Artificial Sequence: Synthetic oligonucleotide
  Antisense strand to SEQ ID NO: 597162
ucaguaaacacaagauagu

SEQ ID NO: 597164 - RNA, 19 nt, Artificial Sequence
  Description of Artificial Sequence: Synthetic oligonucleotide
  Sense strand starting at position 3107 of SEQ ID NO: 584892
uguguuuacugacuuaacu

SEQ ID NO: 597165 - RNA, 19 nt, Artificial Sequence
  Description of Artificial Sequence: Synthetic oligonucleotide
  Antisense strand to SEQ ID NO: 597164
aguuaagucaguaaacaca

SEQ ID NO: 597166 - RNA, 19 nt, Artificial Sequence
  Description of Artificial Sequence: Synthetic oligonucleotide
  Sense strand starting at position 3123 of SEQ ID NO: 584892
acuuuaagacuaugguauc

SEQ ID NO: 597167 - RNA, 19 nt, Artificial Sequence
  Description of Artificial Sequence: Synthetic oligonucleotide
  Antisense strand to SEQ ID NO: 597166
gauaccauagucuuaaagu

SEQ ID NO: 597168 - RNA, 19 nt, Artificial Sequence
  Description of Artificial Sequence: Synthetic oligonucleotide
  Sense strand starting at position 3126 of SEQ ID NO: 584892
uuaagacuaugguaucuuu

SEQ ID NO: 597169 - RNA, 19 nt, Artificial Sequence
  Description of Artificial Sequence: Synthetic oligonucleotide
  Antisense strand to SEQ ID NO: 597168
aaagauaccauagucuuaa

SEQ ID NO: 597170 - RNA, 19 nt, Artificial Sequence
  Description of Artificial Sequence: Synthetic oligonucleotide
  Sense strand starting at position 3134 of SEQ ID NO: 584892
augguaucuuuagcaauca

SEQ ID NO: 597171 - RNA, 19 nt, Artificial Sequence
  Description of Artificial Sequence: Synthetic oligonucleotide
  Antisense strand to SEQ ID NO: 597170
ugauugcuaaagauaccau

SEQ ID NO: 597172 - RNA, 19 nt, Artificial Sequence
  Description of Artificial Sequence: Synthetic oligonucleotide
  Sense strand starting at position 3182 of SEQ ID NO: 584892
ccuaguguuaggugcacua

SEQ ID NO: 597173 - RNA, 19 nt, Artificial Sequence
  Description of Artificial Sequence: Synthetic oligonucleotide
  Antisense strand to SEQ ID NO: 597172
uagugcaccuaacacuagg

SEQ ID NO: 597174 - RNA, 19 nt, Artificial Sequence
  Description of Artificial Sequence: Synthetic oligonucleotide
  Sense strand starting at position 3184 of SEQ ID NO: 584892
uaguguuaggugcacuaga

SEQ ID NO: 597175 - RNA, 19 nt, Artificial Sequence
  Description of Artificial Sequence: Synthetic oligonucleotide
  Antisense strand to SEQ ID NO: 597174
ucuagugcaccuaacacua

SEQ ID NO: 597176 - RNA, 19 nt, Artificial Sequence
  Description of Artificial Sequence: Synthetic oligonucleotide
  Sense strand starting at position 3238 of SEQ ID NO: 584892
ugacuuguucugugcaugu

SEQ ID NO: 597177 - RNA, 19 nt, Artificial Sequence
  Description of Artificial Sequence: Synthetic oligonucleotide
  Antisense strand to SEQ ID NO: 597176
acaugcacagaacaaguca

SEQ ID NO: 597178 - RNA, 19 nt, Artificial Sequence
  Description of Artificial Sequence: Synthetic oligonucleotide
  Sense strand starting at position 3240 of SEQ ID NO: 584892
acuuguucugugcauguau

SEQ ID NO: 597179 - RNA, 19 nt, Artificial Sequence
  Description of Artificial Sequence: Synthetic oligonucleotide
  Antisense strand to SEQ ID NO: 597178
auacaugcacagaacaagu

SEQ ID NO: 597180 - RNA, 19 nt, Artificial Sequence
  Description of Artificial Sequence: Synthetic oligonucleotide
  Sense strand starting at position 3243 of SEQ ID NO: 584892
uguucugugcauguaugua

SEQ ID NO: 597181 - RNA, 19 nt, Artificial Sequence
  Description of Artificial Sequence: Synthetic oligonucleotide
  Antisense strand to SEQ ID NO: 597180
uacauacaugcacagaaca

SEQ ID NO: 597182 - RNA, 19 nt, Artificial Sequence
  Description of Artificial Sequence: Synthetic oligonucleotide
  Sense strand starting at position 3253 of SEQ ID NO: 584892
auguauguacauggauauu

SEQ ID NO: 597183 - RNA, 19 nt, Artificial Sequence
  Description of Artificial Sequence: Synthetic oligonucleotide
  Antisense strand to SEQ ID NO: 597182
aauauccauguacauacau

SEQ ID NO: 597184 - RNA, 19 nt, Artificial Sequence
  Description of Artificial Sequence: Synthetic oligonucleotide
  Sense strand starting at position 3276 of SEQ ID NO: 584892
gggauauccugugacauug

SEQ ID NO: 597185 - RNA, 19 nt, Artificial Sequence
  Description of Artificial Sequence: Synthetic oligonucleotide
  Antisense strand to SEQ ID NO: 597184
caaugucacaggauauccc

SEQ ID NO: 597186 - RNA, 19 nt, Artificial Sequence
  Description of Artificial Sequence: Synthetic oligonucleotide
  Sense strand starting at position 3278 of SEQ ID NO: 584892
gauauccugugacauugau

SEQ ID NO: 597187 - RNA, 19 nt, Artificial Sequence
  Description of Artificial Sequence: Synthetic oligonucleotide
  Antisense strand to SEQ ID NO: 597186
aucaaugucacaggauauc

SEQ ID NO: 597188 - RNA, 19 nt, Artificial Sequence
  Description of Artificial Sequence: Synthetic oligonucleotide
  Sense strand starting at position 3353 of SEQ ID NO: 584892
uucugcauuguuuaaaugu

SEQ ID NO: 597189 - RNA, 19 nt, Artificial Sequence
  Description of Artificial Sequence: Synthetic oligonucleotide
  Antisense strand to SEQ ID NO: 597188
acauuuaaacaaugcagaa

SEQ ID NO: 597190 - RNA, 19 nt, Artificial Sequence
  Description of Artificial Sequence: Synthetic oligonucleotide
  Sense strand starting at position 3413 of SEQ ID NO: 584892
aauuuauauuaguggaggu

SEQ ID NO: 597191 - RNA, 19 nt, Artificial Sequence
  Description of Artificial Sequence: Synthetic oligonucleotide
  Antisense strand to SEQ ID NO: 597190
accuccacuaauauaaauu

SEQ ID NO: 597192 - RNA, 19 nt, Artificial Sequence
  Description of Artificial Sequence: Synthetic oligonucleotide
  Sense strand starting at position 3433 of SEQ ID NO: 584892
gguuaagugcuguagcaau

SEQ ID NO: 597193 - RNA, 19 nt, Artificial Sequence
  Description of Artificial Sequence: Synthetic oligonucleotide
  Antisense strand to SEQ ID NO: 597192
auugcuacagcacuuaacc

SEQ ID NO: 597194 - RNA, 19 nt, Artificial Sequence
  Description of Artificial Sequence: Synthetic oligonucleotide
  Sense strand starting at position 3492 of SEQ ID NO: 584892
uccuguguagcgguuucua

SEQ ID NO: 597195 - RNA, 19 nt, Artificial Sequence
  Description of Artificial Sequence: Synthetic oligonucleotide
  Antisense strand to SEQ ID NO: 597194
uagaaaccgcuacacagga

SEQ ID NO: 597196 - RNA, 19 nt, Artificial Sequence
  Description of Artificial Sequence: Synthetic oligonucleotide
  Sense strand starting at position 3494 of SEQ ID NO: 584892
cuguguagcgguuucuagu

SEQ ID NO: 597197 - RNA, 19 nt, Artificial Sequence
  Description of Artificial Sequence: Synthetic oligonucleotide
  Antisense strand to SEQ ID NO: 597196
acuagaaaccgcuacacag

SEQ ID NO: 597198 - RNA, 19 nt, Artificial Sequence
  Description of Artificial Sequence: Synthetic oligonucleotide
  Sense strand starting at position 3501 of SEQ ID NO: 584892
gcgguuucuagucagacga

SEQ ID NO: 597199 - RNA, 19 nt, Artificial Sequence
  Description of Artificial Sequence: Synthetic oligonucleotide
  Antisense strand to SEQ ID NO: 597198
ucgucugacuagaaaccgc

SEQ ID NO: 597200 - RNA, 19 nt, Artificial Sequence
  Description of Artificial Sequence: Synthetic oligonucleotide
  Sense strand starting at position 3514 of SEQ ID NO: 584892
agacgauuccuuugggcag

SEQ ID NO: 597201 - RNA, 19 nt, Artificial Sequence
  Description of Artificial Sequence: Synthetic oligonucleotide
  Antisense strand to SEQ ID NO: 597200
cugcccaaaggaaucgucu

SEQ ID NO: 597202 - RNA, 19 nt, Artificial Sequence
  Description of Artificial Sequence: Synthetic oligonucleotide
  Sense strand starting at position 3589 of SEQ ID NO: 584892
cucugaauucuccgcauuu

SEQ ID NO: 597203 - RNA, 19 nt, Artificial Sequence
  Description of Artificial Sequence: Synthetic oligonucleotide
  Antisense strand to SEQ ID NO: 597202
aaaugcggagaauucagag

SEQ ID NO: 597204 - RNA, 19 nt, Artificial Sequence
  Description of Artificial Sequence: Synthetic oligonucleotide
  Sense strand starting at position 3590 of SEQ ID NO: 584892
ucugaauucuccgcauuua

SEQ ID NO: 597205 - RNA, 19 nt, Artificial Sequence
  Description of Artificial Sequence: Synthetic oligonucleotide
  Antisense strand to SEQ ID NO: 597204
uaaaugcggagaauucaga

SEQ ID NO: 597206 - RNA, 19 nt, Artificial Sequence
  Description of Artificial Sequence: Synthetic oligonucleotide
  Sense strand starting at position 3703 of SEQ ID NO: 584892
uagggaguguaguuuaguu

SEQ ID NO: 597207 - RNA, 19 nt, Artificial Sequence
  Description of Artificial Sequence: Synthetic oligonucleotide
  Antisense strand to SEQ ID NO: 597206
aacuaaacuacacucccua

SEQ ID NO: 597208 - RNA, 19 nt, Artificial Sequence
  Description of Artificial Sequence: Synthetic oligonucleotide
  Sense strand starting at position 3707 of SEQ ID NO: 584892
gaguguaguuuaguucugu

SEQ ID NO: 597209 - RNA, 19 nt, Artificial Sequence
  Description of Artificial Sequence: Synthetic oligonucleotide
  Antisense strand to SEQ ID NO: 597208
acagaacuaaacuacacuc

SEQ ID NO: 597210 - RNA, 19 nt, Artificial Sequence
  Description of Artificial Sequence: Synthetic oligonucleotide
  Sense strand starting at position 3712 of SEQ ID NO: 584892
uaguuuaguucugugucua

SEQ ID NO: 597211 - RNA, 19 nt, Artificial Sequence
  Description of Artificial Sequence: Synthetic oligonucleotide
  Antisense strand to SEQ ID NO: 597210
uagacacagaacuaaacua

SEQ ID NO: 597212 - RNA, 19 nt, Artificial Sequence
  Description of Artificial Sequence: Synthetic oligonucleotide
  Sense strand starting at position 3713 of SEQ ID NO: 584892
aguuuaguucugugucuag

SEQ ID NO: 597213 - RNA, 19 nt, Artificial Sequence
  Description of Artificial Sequence: Synthetic oligonucleotide
  Antisense strand to SEQ ID NO: 597212
cuagacacagaacuaaacu

SEQ ID NO: 597214 - RNA, 19 nt, Artificial Sequence
  Description of Artificial Sequence: Synthetic oligonucleotide
  Sense strand starting at position 3716 of SEQ ID NO: 584892
uuaguucugugucuagaag

SEQ ID NO: 597215 - RNA, 19 nt, Artificial Sequence
  Description of Artificial Sequence: Synthetic oligonucleotide
  Antisense strand to SEQ ID NO: 597214
cuucuagacacagaacuaa

SEQ ID NO: 597216 - RNA, 19 nt, Artificial Sequence
  Description of Artificial Sequence: Synthetic oligonucleotide
  Sense strand starting at position 3740 of SEQ ID NO: 584892
ggaaguggcuuaguggaaa

SEQ ID NO: 597217 - RNA, 19 nt, Artificial Sequence
  Description of Artificial Sequence: Synthetic oligonucleotide
  Antisense strand to SEQ ID NO: 597216
uuuccacuaagccacuucc

SEQ ID NO: 597218 - RNA, 19 nt, Artificial Sequence
  Description of Artificial Sequence: Synthetic oligonucleotide
  Sense strand starting at position 32 of SEQ ID NO: 584893
cucgaaugcuaguuccacu

SEQ ID NO: 597219 - RNA, 19 nt, Artificial Sequence
  Description of Artificial Sequence: Synthetic oligonucleotide
  Antisense strand to SEQ ID NO: 597218
aguggaacuagcauucgag

SEQ ID NO: 597220 - RNA, 19 nt, Artificial Sequence
  Description of Artificial Sequence: Synthetic oligonucleotide
  Sense strand starting at position 39 of SEQ ID NO: 584893
gcuaguuccacucagaggu

SEQ ID NO: 597221 - RNA, 19 nt, Artificial Sequence
  Description of Artificial Sequence: Synthetic oligonucleotide
  Antisense strand to SEQ ID NO: 597220
accucugaguggaacuagc

SEQ ID NO: 597222 - RNA, 19 nt, Artificial Sequence
  Description of Artificial Sequence: Synthetic oligonucleotide
  Sense strand starting at position 114 of SEQ ID NO: 584893
ggcuaaauggcauaugguu

SEQ ID NO: 597223 - RNA, 19 nt, Artificial Sequence
  Description of Artificial Sequence: Synthetic oligonucleotide
  Antisense strand to SEQ ID NO: 597222
aaccauaugccauuuagcc

SEQ ID NO: 597224 - RNA, 19 nt, Artificial Sequence
  Description of Artificial Sequence: Synthetic oligonucleotide
  Sense strand starting at position 122 of SEQ ID NO: 584893
ggcauaugguuaguucugu

SEQ ID NO: 597225 - RNA, 19 nt, Artificial Sequence
  Description of Artificial Sequence: Synthetic oligonucleotide
  Antisense strand to SEQ ID NO: 597224
acagaacuaaccauaugcc

SEQ ID NO: 597226 - RNA, 19 nt, Artificial Sequence
  Description of Artificial Sequence: Synthetic oligonucleotide
  Sense strand starting at position 123 of SEQ ID NO: 584893
gcauaugguuaguucuguu

SEQ ID NO: 597227 - RNA, 19 nt, Artificial Sequence
  Description of Artificial Sequence: Synthetic oligonucleotide
  Antisense strand to SEQ ID NO: 597226
aacagaacuaaccauaugc

SEQ ID NO: 597228 - RNA, 19 nt, Artificial Sequence
  Description of Artificial Sequence: Synthetic oligonucleotide
  Sense strand starting at position 151 of SEQ ID NO: 584893
aucugauaucuuugugcca

SEQ ID NO: 597229 - RNA, 19 nt, Artificial Sequence
  Description of Artificial Sequence: Synthetic oligonucleotide
  Antisense strand to SEQ ID NO: 597228
uggcacaaagauaucagau

SEQ ID NO: 597230 - RNA, 19 nt, Artificial Sequence
  Description of Artificial Sequence: Synthetic oligonucleotide
  Sense strand starting at position 154 of SEQ ID NO: 584893
ugauaucuuugugccagga

SEQ ID NO: 597231 - RNA, 19 nt, Artificial Sequence
  Description of Artificial Sequence: Synthetic oligonucleotide
  Antisense strand to SEQ ID NO: 597230
uccuggcacaaagauauca

SEQ ID NO: 597232 - RNA, 19 nt, Artificial Sequence
  Description of Artificial Sequence: Synthetic oligonucleotide
  Sense strand starting at position 156 of SEQ ID NO: 584893
auaucuuugugccaggaag

SEQ ID NO: 597233 - RNA, 19 nt, Artificial Sequence
  Description of Artificial Sequence: Synthetic oligonucleotide
  Antisense strand to SEQ ID NO: 597232
cuuccuggcacaaagauau

SEQ ID NO: 597234 - RNA, 19 nt, Artificial Sequence
  Description of Artificial Sequence: Synthetic oligonucleotide
  Sense strand starting at position 158 of SEQ ID NO: 584893
aucuuugugccaggaagag

SEQ ID NO: 597235 - RNA, 19 nt, Artificial Sequence
  Description of Artificial Sequence: Synthetic oligonucleotide
  Antisense strand to SEQ ID NO: 597234
cucuuccuggcacaaagau

SEQ ID NO: 597236 - RNA, 19 nt, Artificial Sequence
  Description of Artificial Sequence: Synthetic oligonucleotide
  Sense strand starting at position 318 of SEQ ID NO: 584893
ugaagauaauauggugaga

SEQ ID NO: 597237 - RNA, 19 nt, Artificial Sequence
  Description of Artificial Sequence: Synthetic oligonucleotide
  Antisense strand to SEQ ID NO: 597236
ucucaccauauuaucuuca

SEQ ID NO: 597238 - RNA, 19 nt, Artificial Sequence
  Description of Artificial Sequence: Synthetic oligonucleotide
  Sense strand starting at position 724 of SEQ ID NO: 584893
gugacuuggugucacaaac

SEQ ID NO: 597239 - RNA, 19 nt, Artificial Sequence
  Description of Artificial Sequence: Synthetic oligonucleotide
  Antisense strand to SEQ ID NO: 597238
guuugugacaccaagucac

SEQ ID NO: 597240 - RNA, 19 nt, Artificial Sequence
  Description of Artificial Sequence: Synthetic oligonucleotide
  Sense strand starting at position 984 of SEQ ID NO: 584893
ggaagccuuuccgcuaaca

SEQ ID NO: 597241 - RNA, 19 nt, Artificial Sequence
  Description of Artificial Sequence: Synthetic oligonucleotide
  Antisense strand to SEQ ID NO: 597240
uguuagcggaaaggcuucc

SEQ ID NO: 597242 - RNA, 19 nt, Artificial Sequence
  Description of Artificial Sequence: Synthetic oligonucleotide
  Sense strand starting at position 986 of SEQ ID NO: 584893
aagccuuuccgcuaacagu

SEQ ID NO: 597243 - RNA, 19 nt, Artificial Sequence
  Description of Artificial Sequence: Synthetic oligonucleotide
  Antisense strand to SEQ ID NO: 597242
acuguuagcggaaaggcuu

SEQ ID NO: 597244 - RNA, 19 nt, Artificial Sequence
  Description of Artificial Sequence: Synthetic oligonucleotide
  Sense strand starting at position 1347 of SEQ ID NO: 584893
gggccuccugggugaagau

SEQ ID NO: 597245 - RNA, 19 nt, Artificial Sequence
  Description of Artificial Sequence: Synthetic oligonucleotide
  Antisense strand to SEQ ID NO: 597244
aucuucacccaggaggccc

SEQ ID NO: 597246 - RNA, 19 nt, Artificial Sequence
  Description of Artificial Sequence: Synthetic oligonucleotide
  Sense strand starting at position 1407 of SEQ ID NO: 584893
uggugugcuucuucccgaa

SEQ ID NO: 597247 - RNA, 19 nt, Artificial Sequence
  Description of Artificial Sequence: Synthetic oligonucleotide
  Antisense strand to SEQ ID NO: 597246
uucgggaagaagcacacca

SEQ ID NO: 597248 - RNA, 19 nt, Artificial Sequence
  Description of Artificial Sequence: Synthetic oligonucleotide
  Sense strand starting at position 1409 of SEQ ID NO: 584893
gugugcuucuucccgaaga

SEQ ID NO: 597249 - RNA, 19 nt, Artificial Sequence
  Description of Artificial Sequence: Synthetic oligonucleotide
  Antisense strand to SEQ ID NO: 597248
ucuucgggaagaagcacac

SEQ ID NO: 597250 - RNA, 19 nt, Artificial Sequence
  Description of Artificial Sequence: Synthetic oligonucleotide
  Sense strand starting at position 1410 of SEQ ID NO: 584893
ugugcuucuucccgaagag

SEQ ID NO: 597251 - RNA, 19 nt, Artificial Sequence
  Description of Artificial Sequence: Synthetic oligonucleotide
  Antisense strand to SEQ ID NO: 597250
cucuucgggaagaagcaca

SEQ ID NO: 597252 - RNA, 19 nt, Artificial Sequence
  Description of Artificial Sequence: Synthetic oligonucleotide
  Sense strand starting at position 1411 of SEQ ID NO: 584893
gugcuucuucccgaagagu

SEQ ID NO: 597253 - RNA, 19 nt, Artificial Sequence
  Description of Artificial Sequence: Synthetic oligonucleotide
  Antisense strand to SEQ ID NO: 597252
acucuucgggaagaagcac

SEQ ID NO: 597254 - RNA, 19 nt, Artificial Sequence
  Description of Artificial Sequence: Synthetic oligonucleotide
  Sense strand starting at position 1419 of SEQ ID NO: 584893
ucccgaagaguuugcugaa

SEQ ID NO: 597255 - RNA, 19 nt, Artificial Sequence
  Description of Artificial Sequence: Synthetic oligonucleotide
  Antisense strand to SEQ ID NO: 597254
uucagcaaacucuucggga

SEQ ID NO: 597256 - RNA, 19 nt, Artificial Sequence
  Description of Artificial Sequence: Synthetic oligonucleotide
  Sense strand starting at position 1420 of SEQ ID NO: 584893
cccgaagaguuugcugaag

SEQ ID NO: 597257 - RNA, 19 nt, Artificial Sequence
  Description of Artificial Sequence: Synthetic oligonucleotide
  Antisense strand to SEQ ID NO: 597256
cuucagcaaacucuucggg

SEQ ID NO: 597258 - RNA, 19 nt, Artificial Sequence
  Description of Artificial Sequence: Synthetic oligonucleotide
  Sense strand starting at position 1422 of SEQ ID NO: 584893
cgaagaguuugcugaaggu

SEQ ID NO: 597259 - RNA, 19 nt, Artificial Sequence
  Description of Artificial Sequence: Synthetic oligonucleotide
  Antisense strand to SEQ ID NO: 597258
accuucagcaaacucuucg

SEQ ID NO: 597260 - RNA, 19 nt, Artificial Sequence
  Description of Artificial Sequence: Synthetic oligonucleotide
  Sense strand starting at position 2044 of SEQ ID NO: 584893
ucaggaagugccuguaaga

SEQ ID NO: 597261 - RNA, 19 nt, Artificial Sequence
  Description of Artificial Sequence: Synthetic oligonucleotide
  Antisense strand to SEQ ID NO: 597260
ucuuacaggcacuuccuga

SEQ ID NO: 597262 - RNA, 19 nt, Artificial Sequence
  Description of Artificial Sequence: Synthetic oligonucleotide
  Sense strand starting at position 2168 of SEQ ID NO: 584893
ugacgaaaucuuggcauuc

SEQ ID NO: 597263 - RNA, 19 nt, Artificial Sequence
  Description of Artificial Sequence: Synthetic oligonucleotide
  Antisense strand to SEQ ID NO: 597262
gaaugccaagauuucguca

SEQ ID NO: 597264 - RNA, 19 nt, Artificial Sequence
  Description of Artificial Sequence: Synthetic oligonucleotide
  Sense strand starting at position 2169 of SEQ ID NO: 584893
gacgaaaucuuggcauucu

SEQ ID NO: 597265 - RNA, 19 nt, Artificial Sequence
  Description of Artificial Sequence: Synthetic oligonucleotide
  Antisense strand to SEQ ID NO: 597264
agaaugccaagauuucguc

SEQ ID NO: 597266 - RNA, 19 nt, Artificial Sequence
  Description of Artificial Sequence: Synthetic oligonucleotide
  Sense strand starting at position 2170 of SEQ ID NO: 584893
acgaaaucuuggcauucug

SEQ ID NO: 597267 - RNA, 19 nt, Artificial Sequence
  Description of Artificial Sequence: Synthetic oligonucleotide
  Antisense strand to SEQ ID NO: 597266
cagaaugccaagauuucgu

SEQ ID NO: 597268 - RNA, 19 nt, Artificial Sequence
  Description of Artificial Sequence: Synthetic oligonucleotide
  Sense strand starting at position 2178 of SEQ ID NO: 584893
uuggcauucugugucugua

SEQ ID NO: 597269 - RNA, 19 nt, Artificial Sequence
  Description of Artificial Sequence: Synthetic oligonucleotide
  Antisense strand to SEQ ID NO: 597268
uacagacacagaaugccaa

SEQ ID NO: 597270 - RNA, 19 nt, Artificial Sequence
  Description of Artificial Sequence: Synthetic oligonucleotide
  Sense strand starting at position 2181 of SEQ ID NO: 584893
gcauucugugucuguacau

SEQ ID NO: 597271 - RNA, 19 nt, Artificial Sequence
  Description of Artificial Sequence: Synthetic oligonucleotide
  Antisense strand to SEQ ID NO: 597270
auguacagacacagaaugc

SEQ ID NO: 597272 - RNA, 19 nt, Artificial Sequence
  Description of Artificial Sequence: Synthetic oligonucleotide
  Sense strand starting at position 2543 of SEQ ID NO: 584893
cugugaaguuaagugaaua

SEQ ID NO: 597273 - RNA, 19 nt, Artificial Sequence
  Description of Artificial Sequence: Synthetic oligonucleotide
  Antisense strand to SEQ ID NO: 597272
uauucacuuaacuucacag

SEQ ID NO: 597274 - RNA, 19 nt, Artificial Sequence
  Description of Artificial Sequence: Synthetic oligonucleotide
  Sense strand starting at position 2544 of SEQ ID NO: 584893
ugugaaguuaagugaauau

SEQ ID NO: 597275 - RNA, 19 nt, Artificial Sequence
  Description of Artificial Sequence: Synthetic oligonucleotide
  Antisense strand to SEQ ID NO: 597274
auauucacuuaacuucaca

SEQ ID NO: 597276 - RNA, 19 nt, Artificial Sequence
  Description of Artificial Sequence: Synthetic oligonucleotide
  Sense strand starting at position 2622 of SEQ ID NO: 584893
gacaaacagugguacuuua

SEQ ID NO: 597277 - RNA, 19 nt, Artificial Sequence
  Description of Artificial Sequence: Synthetic oligonucleotide
  Antisense strand to SEQ ID NO: 597276
uaaaguaccacuguuuguc

SEQ ID NO: 597278 - RNA, 19 nt, Artificial Sequence
  Description of Artificial Sequence: Synthetic oligonucleotide
  Sense strand starting at position 2649 of SEQ ID NO: 584893
aggguaacauccuagccaa

SEQ ID NO: 597279 - RNA, 19 nt, Artificial Sequence
  Description of Artificial Sequence: Synthetic oligonucleotide
  Antisense strand to SEQ ID NO: 597278
uuggcuaggauguuacccu

SEQ ID NO: 597280 - RNA, 19 nt, Artificial Sequence
  Description of Artificial Sequence: Synthetic oligonucleotide
  Sense strand starting at position 2691 of SEQ ID NO: 584893
gaaauuuccuccgaugagg

SEQ ID NO: 597281 - RNA, 19 nt, Artificial Sequence
  Description of Artificial Sequence: Synthetic oligonucleotide
  Antisense strand to SEQ ID NO: 597280
ccucaucggaggaaauuuc

SEQ ID NO: 597282 - RNA, 19 nt, Artificial Sequence
  Description of Artificial Sequence: Synthetic oligonucleotide
  Sense strand starting at position 2810 of SEQ ID NO: 584893
ugccauuucugcugagcuu

SEQ ID NO: 597283 - RNA, 19 nt, Artificial Sequence
  Description of Artificial Sequence: Synthetic oligonucleotide
  Antisense strand to SEQ ID NO: 597282
aagcucagcagaaauggca

SEQ ID NO: 597284 - RNA, 19 nt, Artificial Sequence
  Description of Artificial Sequence: Synthetic oligonucleotide
  Sense strand starting at position 2939 of SEQ ID NO: 584893
uuacaagaauuguacaaug

SEQ ID NO: 597285 - RNA, 19 nt, Artificial Sequence
  Description of Artificial Sequence: Synthetic oligonucleotide
  Antisense strand to SEQ ID NO: 597284
cauuguacaauucuuguaa

SEQ ID NO: 597286 - RNA, 19 nt, Artificial Sequence
  Description of Artificial Sequence: Synthetic oligonucleotide
  Sense strand starting at position 2967 of SEQ ID NO: 584893
guacccuucucccuggauu

SEQ ID NO: 597287 - RNA, 19 nt, Artificial Sequence
  Description of Artificial Sequence: Synthetic oligonucleotide
  Antisense strand to SEQ ID NO: 597286
aauccagggagaaggguac

SEQ ID NO: 597288 - RNA, 19 nt, Artificial Sequence
  Description of Artificial Sequence: Synthetic oligonucleotide
  Sense strand starting at position 3125 of SEQ ID NO: 584893
agcaucgaugucuaagagu

SEQ ID NO: 597289 - RNA, 19 nt, Artificial Sequence
  Description of Artificial Sequence: Synthetic oligonucleotide
  Antisense strand to SEQ ID NO: 597288
acucuuagacaucgaugcu

SEQ ID NO: 597290 - RNA, 19 nt, Artificial Sequence
  Description of Artificial Sequence: Synthetic oligonucleotide
  Sense strand starting at position 3133 of SEQ ID NO: 584893
ugucuaagaguaggaacau

SEQ ID NO: 597291 - RNA, 19 nt, Artificial Sequence
  Description of Artificial Sequence: Synthetic oligonucleotide
  Antisense strand to SEQ ID NO: 597290
auguuccuacucuuagaca

SEQ ID NO: 597292 - RNA, 19 nt, Artificial Sequence
  Description of Artificial Sequence: Synthetic oligonucleotide
  Sense strand starting at position 3134 of SEQ ID NO: 584893
gucuaagaguaggaacauu

SEQ ID NO: 597293 - RNA, 19 nt, Artificial Sequence
  Description of Artificial Sequence: Synthetic oligonucleotide
  Antisense strand to SEQ ID NO: 597292
aauguuccuacucuuagac

SEQ ID NO: 597294 - RNA, 19 nt, Artificial Sequence
  Description of Artificial Sequence: Synthetic oligonucleotide
  Sense strand starting at position 3142 of SEQ ID NO: 584893
guaggaacauucuccuaca

SEQ ID NO: 597295 - RNA, 19 nt, Artificial Sequence
  Description of Artificial Sequence: Synthetic oligonucleotide
  Antisense strand to SEQ ID NO: 597294
uguaggagaauguuccuac

SEQ ID NO: 597296 - RNA, 19 nt, Artificial Sequence
  Description of Artificial Sequence: Synthetic oligonucleotide
  Sense strand starting at position 669 of SEQ ID NO: 584894
cucuuaucgcaagaaucau

SEQ ID NO: 597297 - RNA, 19 nt, Artificial Sequence
  Description of Artificial Sequence: Synthetic oligonucleotide
  Antisense strand to SEQ ID NO: 597296
augauucuugcgauaagag

SEQ ID NO: 597298 - RNA, 19 nt, Artificial Sequence
  Description of Artificial Sequence: Synthetic oligonucleotide
  Sense strand starting at position 687 of SEQ ID NO: 584894
uguaauacauacuugauga

SEQ ID NO: 597299 - RNA, 19 nt, Artificial Sequence
  Description of Artificial Sequence: Synthetic oligonucleotide
  Antisense strand to SEQ ID NO: 597298
ucaucaaguauguauuaca

SEQ ID NO: 597300 - RNA, 19 nt, Artificial Sequence
  Description of Artificial Sequence: Synthetic oligonucleotide
  Sense strand starting at position 723 of SEQ ID NO: 584894
uuuauuguacuguggauua

SEQ ID NO: 597301 - RNA, 19 nt, Artificial Sequence
  Description of Artificial Sequence: Synthetic oligonucleotide
  Antisense strand to SEQ ID NO: 597300
uaauccacaguacaauaaa

SEQ ID NO: 597302 - RNA, 19 nt, Artificial Sequence
  Description of Artificial Sequence: Synthetic oligonucleotide
  Sense strand starting at position 725 of SEQ ID NO: 584894
uauuguacuguggauuaaa

SEQ ID NO: 597303 - RNA, 19 nt, Artificial Sequence
  Description of Artificial Sequence: Synthetic oligonucleotide
  Antisense strand to SEQ ID NO: 597302
uuuaauccacaguacaaua

SEQ ID NO: 597304 - RNA, 19 nt, Artificial Sequence
  Description of Artificial Sequence: Synthetic oligonucleotide
  Sense strand starting at position 751 of SEQ ID NO: 584894
gccuguacaucuccaugau

SEQ ID NO: 597305 - RNA, 19 nt, Artificial Sequence
  Description of Artificial Sequence: Synthetic oligonucleotide
  Antisense strand to SEQ ID NO: 597304
aucauggagauguacaggc

SEQ ID NO: 597306 - RNA, 19 nt, Artificial Sequence
  Description of Artificial Sequence: Synthetic oligonucleotide
  Sense strand starting at position 752 of SEQ ID NO: 584894
ccuguacaucuccaugauu

SEQ ID NO: 597307 - RNA, 19 nt, Artificial Sequence
  Description of Artificial Sequence: Synthetic oligonucleotide
  Antisense strand to SEQ ID NO: 597306
aaucauggagauguacagg

SEQ ID NO: 597308 - RNA, 19 nt, Artificial Sequence
  Description of Artificial Sequence: Synthetic oligonucleotide
  Sense strand starting at position 918 of SEQ ID NO: 584894
gguuaugaggccuauauga

SEQ ID NO: 597309 - RNA, 19 nt, Artificial Sequence
  Description of Artificial Sequence: Synthetic oligonucleotide
  Antisense strand to SEQ ID NO: 597308
ucauauaggccucauaacc

SEQ ID NO: 597310 - RNA, 19 nt, Artificial Sequence
  Description of Artificial Sequence: Synthetic oligonucleotide
  Sense strand starting at position 1064 of SEQ ID NO: 584894
uggguuuaccgacguugaa

SEQ ID NO: 597311 - RNA, 19 nt, Artificial Sequence
  Description of Artificial Sequence: Synthetic oligonucleotide
  Antisense strand to SEQ ID NO: 597310
uucaacgucgguaaaccca

SEQ ID NO: 597312 - RNA, 19 nt, Artificial Sequence
  Description of Artificial Sequence: Synthetic oligonucleotide
  Sense strand starting at position 2106 of SEQ ID NO: 584894
agcugaggccuuugagcaa

SEQ ID NO: 597313 - RNA, 19 nt, Artificial Sequence
  Description of Artificial Sequence: Synthetic oligonucleotide
  Antisense strand to SEQ ID NO: 597312
uugcucaaaggccucagcu

SEQ ID NO: 597314 - RNA, 19 nt, Artificial Sequence
  Description of Artificial Sequence: Synthetic oligonucleotide
  Sense strand starting at position 2614 of SEQ ID NO: 584894
agaggaaauuaagauuaca

SEQ ID NO: 597315 - RNA, 19 nt, Artificial Sequence
  Description of Artificial Sequence: Synthetic oligonucleotide
  Antisense strand to SEQ ID NO: 597314
uguaaucuuaauuuccucu

SEQ ID NO: 597316 - RNA, 19 nt, Artificial Sequence
  Description of Artificial Sequence: Synthetic oligonucleotide
  Sense strand starting at position 2671 of SEQ ID NO: 584894
acaugauggguaugaagcu

SEQ ID NO: 597317 - RNA, 19 nt, Artificial Sequence
  Description of Artificial Sequence: Synthetic oligonucleotide
  Antisense strand to SEQ ID NO: 597316
agcuucauacccaucaugu

SEQ ID NO: 597318 - RNA, 19 nt, Artificial Sequence
  Description of Artificial Sequence: Synthetic oligonucleotide
  Sense strand starting at position 2694 of SEQ ID NO: 584894
ccauuagugcuauguccaa

SEQ ID NO: 597319 - RNA, 19 nt, Artificial Sequence
  Description of Artificial Sequence: Synthetic oligonucleotide
  Antisense strand to SEQ ID NO: 597318
uuggacauagcacuaaugg

SEQ ID NO: 597320 - RNA, 19 nt, Artificial Sequence
  Description of Artificial Sequence: Synthetic oligonucleotide
  Sense strand starting at position 2728 of SEQ ID NO: 584894
gagaauccguauuccaaag

SEQ ID NO: 597321 - RNA, 19 nt, Artificial Sequence
  Description of Artificial Sequence: Synthetic oligonucleotide
  Antisense strand to SEQ ID NO: 597320
cuuuggaauacggauucuc

SEQ ID NO: 597322 - RNA, 19 nt, Artificial Sequence
  Description of Artificial Sequence: Synthetic oligonucleotide
  Sense strand starting at position 2734 of SEQ ID NO: 584894
ccguauuccaaagggaagu

SEQ ID NO: 597323 - RNA, 19 nt, Artificial Sequence
  Description of Artificial Sequence: Synthetic oligonucleotide
  Antisense strand to SEQ ID NO: 597322
acuucccuuuggaauacgg

SEQ ID NO: 597324 - RNA, 19 nt, Artificial Sequence
  Description of Artificial Sequence: Synthetic oligonucleotide
  Sense strand starting at position 2735 of SEQ ID NO: 584894
cguauuccaaagggaagua

SEQ ID NO: 597325 - RNA, 19 nt, Artificial Sequence
  Description of Artificial Sequence: Synthetic oligonucleotide
  Antisense strand to SEQ ID NO: 597324
uacuucccuuuggaauacg

SEQ ID NO: 597326 - RNA, 19 nt, Artificial Sequence
  Description of Artificial Sequence: Synthetic oligonucleotide
  Sense strand starting at position 2851 of SEQ ID NO: 584894
guaggaagugacugagaau

SEQ ID NO: 597327 - RNA, 19 nt, Artificial Sequence
  Description of Artificial Sequence: Synthetic oligonucleotide
  Antisense strand to SEQ ID NO: 597326
auucucagucacuuccuac

SEQ ID NO: 597328 - RNA, 19 nt, Artificial Sequence
  Description of Artificial Sequence: Synthetic oligonucleotide
  Sense strand starting at position 2854 of SEQ ID NO: 584894
ggaagugacugagaaugau

SEQ ID NO: 597329 - RNA, 19 nt, Artificial Sequence
  Description of Artificial Sequence: Synthetic oligonucleotide
  Antisense strand to SEQ ID NO: 597328
aucauucucagucacuucc

SEQ ID NO: 597330 - RNA, 19 nt, Artificial Sequence
  Description of Artificial Sequence: Synthetic oligonucleotide
  Sense strand starting at position 2857 of SEQ ID NO: 584894
agugacugagaaugauguu

SEQ ID NO: 597331 - RNA, 19 nt, Artificial Sequence
  Description of Artificial Sequence: Synthetic oligonucleotide
  Antisense strand to SEQ ID NO: 597330
aacaucauucucagucacu

SEQ ID NO: 597332 - RNA, 19 nt, Artificial Sequence
  Description of Artificial Sequence: Synthetic oligonucleotide
  Sense strand starting at position 2863 of SEQ ID NO: 584894
ugagaaugauguuaggaag

SEQ ID NO: 597333 - RNA, 19 nt, Artificial Sequence
  Description of Artificial Sequence: Synthetic oligonucleotide
  Antisense strand to SEQ ID NO: 597332
cuuccuaacaucauucuca

SEQ ID NO: 597334 - RNA, 19 nt, Artificial Sequence
  Description of Artificial Sequence: Synthetic oligonucleotide
  Sense strand starting at position 2866 of SEQ ID NO: 584894
gaaugauguuaggaaggga

SEQ ID NO: 597335 - RNA, 19 nt, Artificial Sequence
  Description of Artificial Sequence: Synthetic oligonucleotide
  Antisense strand to SEQ ID NO: 597334
ucccuuccuaacaucauuc

SEQ ID NO: 597336 - RNA, 19 nt, Artificial Sequence
  Description of Artificial Sequence: Synthetic oligonucleotide
  Sense strand starting at position 2916 of SEQ ID NO: 584894
ggguuuagaccucaccuau

SEQ ID NO: 597337 - RNA, 19 nt, Artificial Sequence
  Description of Artificial Sequence: Synthetic oligonucleotide
  Antisense strand to SEQ ID NO: 597336
auaggugaggucuaaaccc

SEQ ID NO: 597338 - RNA, 19 nt, Artificial Sequence
  Description of Artificial Sequence: Synthetic oligonucleotide
  Sense strand starting at position 2965 of SEQ ID NO: 584894
cuugguugccuguggaaau

SEQ ID NO: 597339 - RNA, 19 nt, Artificial Sequence
  Description of Artificial Sequence: Synthetic oligonucleotide
  Antisense strand to SEQ ID NO: 597338
auuuccacaggcaaccaag

SEQ ID NO: 597340 - RNA, 19 nt, Artificial Sequence
  Description of Artificial Sequence: Synthetic oligonucleotide
  Sense strand starting at position 2980 of SEQ ID NO: 584894
aaauaucaggcaugugaau

SEQ ID NO: 597341 - RNA, 19 nt, Artificial Sequence
  Description of Artificial Sequence: Synthetic oligonucleotide
  Antisense strand to SEQ ID NO: 597340
auucacaugccugauauuu

SEQ ID NO: 597342 - RNA, 19 nt, Artificial Sequence
  Description of Artificial Sequence: Synthetic oligonucleotide
  Sense strand starting at position 3007 of SEQ ID NO: 584894
aggaguagacagugaaugu

SEQ ID NO: 597343 - RNA, 19 nt, Artificial Sequence
  Description of Artificial Sequence: Synthetic oligonucleotide
  Antisense strand to SEQ ID NO: 597342
acauucacugucuacuccu

SEQ ID NO: 597344 - RNA, 19 nt, Artificial Sequence
  Description of Artificial Sequence: Synthetic oligonucleotide
  Sense strand starting at position 3016 of SEQ ID NO: 584894
cagugaauguggccuacuu

SEQ ID NO: 597345 - RNA, 19 nt, Artificial Sequence
  Description of Artificial Sequence: Synthetic oligonucleotide
  Antisense strand to SEQ ID NO: 597344
aaguaggccacauucacug

SEQ ID NO: 597346 - RNA, 19 nt, Artificial Sequence
  Description of Artificial Sequence: Synthetic oligonucleotide
  Sense strand starting at position 3018 of SEQ ID NO: 584894
gugaauguggccuacuuga

SEQ ID NO: 597347 - RNA, 19 nt, Artificial Sequence
  Description of Artificial Sequence: Synthetic oligonucleotide
  Antisense strand to SEQ ID NO: 597346
ucaaguaggccacauucac

SEQ ID NO: 597348 - RNA, 19 nt, Artificial Sequence
  Description of Artificial Sequence: Synthetic oligonucleotide
  Sense strand starting at position 3028 of SEQ ID NO: 584894
ccuacuugauuugagggua

SEQ ID NO: 597349 - RNA, 19 nt, Artificial Sequence
  Description of Artificial Sequence: Synthetic oligonucleotide
  Antisense strand to SEQ ID NO: 597348
uacccucaaaucaaguagg

SEQ ID NO: 597350 - RNA, 19 nt, Artificial Sequence
  Description of Artificial Sequence: Synthetic oligonucleotide
  Sense strand starting at position 3053 of SEQ ID NO: 584894
agugaauacuuaccuguau

SEQ ID NO: 597351 - RNA, 19 nt, Artificial Sequence
  Description of Artificial Sequence: Synthetic oligonucleotide
  Antisense strand to SEQ ID NO: 597350
auacagguaaguauucacu

SEQ ID NO: 597352 - RNA, 19 nt, Artificial Sequence
  Description of Artificial Sequence: Synthetic oligonucleotide
  Sense strand starting at position 3054 of SEQ ID NO: 584894
gugaauacuuaccuguauu

SEQ ID NO: 597353 - RNA, 19 nt, Artificial Sequence
  Description of Artificial Sequence: Synthetic oligonucleotide
  Antisense strand to SEQ ID NO: 597352
aauacagguaaguauucac

SEQ ID NO: 597354 - RNA, 19 nt, Artificial Sequence
  Description of Artificial Sequence: Synthetic oligonucleotide
  Sense strand starting at position 3186 of SEQ ID NO: 584894
augaaagauggguggguau

SEQ ID NO: 597355 - RNA, 19 nt, Artificial Sequence
  Description of Artificial Sequence: Synthetic oligonucleotide
  Antisense strand to SEQ ID NO: 597354
auacccacccaucuuucau

SEQ ID NO: 597356 - RNA, 19 nt, Artificial Sequence
  Description of Artificial Sequence: Synthetic oligonucleotide
  Sense strand starting at position 3257 of SEQ ID NO: 584894
ggguaauuaucauuccuaa

SEQ ID NO: 597357 - RNA, 19 nt, Artificial Sequence
  Description of Artificial Sequence: Synthetic oligonucleotide
  Antisense strand to SEQ ID NO: 597356
uuaggaaugauaauuaccc

SEQ ID NO: 597358 - RNA, 19 nt, Artificial Sequence
  Description of Artificial Sequence: Synthetic oligonucleotide
  Sense strand starting at position 3366 of SEQ ID NO: 584894
uauucuuucuaguugaggu

SEQ ID NO: 597359 - RNA, 19 nt, Artificial Sequence
  Description of Artificial Sequence: Synthetic oligonucleotide
  Antisense strand to SEQ ID NO: 597358
accucaacuagaaagaaua

SEQ ID NO: 597360 - RNA, 19 nt, Artificial Sequence
  Description of Artificial Sequence: Synthetic oligonucleotide
  Sense strand starting at position 3368 of SEQ ID NO: 584894
uucuuucuaguugagguaa

SEQ ID NO: 597361 - RNA, 19 nt, Artificial Sequence
  Description of Artificial Sequence: Synthetic oligonucleotide
  Antisense strand to SEQ ID NO: 597360
uuaccucaacuagaaagaa

SEQ ID NO: 597362 - RNA, 19 nt, Artificial Sequence
  Description of Artificial Sequence: Synthetic oligonucleotide
  Sense strand starting at position 3388 of SEQ ID NO: 584894
guguuaaaucuauggcuag

SEQ ID NO: 597363 - RNA, 19 nt, Artificial Sequence
  Description of Artificial Sequence: Synthetic oligonucleotide
  Antisense strand to SEQ ID NO: 597362
cuagccauagauuuaacac

SEQ ID NO: 597364 - RNA, 19 nt, Artificial Sequence
  Description of Artificial Sequence: Synthetic oligonucleotide
  Sense strand starting at position 3495 of SEQ ID NO: 584894
ggguuaccuuaacuauaag

SEQ ID NO: 597365 - RNA, 19 nt, Artificial Sequence
  Description of Artificial Sequence: Synthetic oligonucleotide
  Antisense strand to SEQ ID NO: 597364
cuuauaguuaagguaaccc

SEQ ID NO: 597366 - RNA, 19 nt, Artificial Sequence
  Description of Artificial Sequence: Synthetic oligonucleotide
  Sense strand starting at position 3895 of SEQ ID NO: 584894
cuguaaauagggugacaga

SEQ ID NO: 597367 - RNA, 19 nt, Artificial Sequence
  Description of Artificial Sequence: Synthetic oligonucleotide
  Antisense strand to SEQ ID NO: 597366
ucugucacccuauuuacag

SEQ ID NO: 597368 - RNA, 19 nt, Artificial Sequence
  Description of Artificial Sequence: Synthetic oligonucleotide
  Sense strand starting at position 3920 of SEQ ID NO: 584894
ugcacucucaauggaggua

SEQ ID NO: 597369 - RNA, 19 nt, Artificial Sequence
  Description of Artificial Sequence: Synthetic oligonucleotide
  Antisense strand to SEQ ID NO: 597368
uaccuccauugagagugca

SEQ ID NO: 597370 - RNA, 19 nt, Artificial Sequence
  Description of Artificial Sequence: Synthetic oligonucleotide
  Sense strand starting at position 3953 of SEQ ID NO: 584894
gagagauccagcgguuuag

SEQ ID NO: 597371 - RNA, 19 nt, Artificial Sequence
  Description of Artificial Sequence: Synthetic oligonucleotide
  Antisense strand to SEQ ID NO: 597370
cuaaaccgcuggaucucuc

SEQ ID NO: 597372 - RNA, 19 nt, Artificial Sequence
  Description of Artificial Sequence: Synthetic oligonucleotide
  Sense strand starting at position 3962 of SEQ ID NO: 584894
agcgguuuaguggagcaga

SEQ ID NO: 597373 - RNA, 19 nt, Artificial Sequence
  Description of Artificial Sequence: Synthetic oligonucleotide
  Antisense strand to SEQ ID NO: 597372
ucugcuccacuaaaccgcu

SEQ ID NO: 597374 - RNA, 19 nt, Artificial Sequence
  Description of Artificial Sequence: Synthetic oligonucleotide
  Sense strand starting at position 3979 of SEQ ID NO: 584894
gacgucagguaaucagagu

SEQ ID NO: 597375 - RNA, 19 nt, Artificial Sequence
  Description of Artificial Sequence: Synthetic oligonucleotide
  Antisense strand to SEQ ID NO: 597374
acucugauuaccugacguc

SEQ ID NO: 597376 - RNA, 19 nt, Artificial Sequence
  Description of Artificial Sequence: Synthetic oligonucleotide
  Sense strand starting at position 140 of SEQ ID NO: 584895
auugcuaucuaccuuuagu

SEQ ID NO: 597377 - RNA, 19 nt, Artificial Sequence
  Description of Artificial Sequence: Synthetic oligonucleotide
  Antisense strand to SEQ ID NO: 597376
acuaaagguagauagcaau

SEQ ID NO: 597378 - RNA, 19 nt, Artificial Sequence
  Description of Artificial Sequence: Synthetic oligonucleotide
  Sense strand starting at position 213 of SEQ ID NO: 584895
gcauguuuacaggacuaaa

SEQ ID NO: 597379 - RNA, 19 nt, Artificial Sequence
  Description of Artificial Sequence: Synthetic oligonucleotide
  Antisense strand to SEQ ID NO: 597378
uuuaguccuguaaacaugc

SEQ ID NO: 597380 - RNA, 19 nt, Artificial Sequence
  Description of Artificial Sequence: Synthetic oligonucleotide
  Sense strand starting at position 224 of SEQ ID NO: 584895
ggacuaaauuagcuauugu

SEQ ID NO: 597381 - RNA, 19 nt, Artificial Sequence
  Description of Artificial Sequence: Synthetic oligonucleotide
  Antisense strand to SEQ ID NO: 597380
acaauagcuaauuuagucc

SEQ ID NO: 597382 - RNA, 19 nt, Artificial Sequence
  Description of Artificial Sequence: Synthetic oligonucleotide
  Sense strand starting at position 247 of SEQ ID NO: 584895
aguaaagccuuuguaaaug

SEQ ID NO: 597383 - RNA, 19 nt, Artificial Sequence
  Description of Artificial Sequence: Synthetic oligonucleotide
  Antisense strand to SEQ ID NO: 597382
cauuuacaaaggcuuuacu

SEQ ID NO: 597384 - RNA, 19 nt, Artificial Sequence
  Description of Artificial Sequence: Synthetic oligonucleotide
  Sense strand starting at position 275 of SEQ ID NO: 584895
guugaaaucuuagucuucu

SEQ ID NO: 597385 - RNA, 19 nt, Artificial Sequence
  Description of Artificial Sequence: Synthetic oligonucleotide
  Antisense strand to SEQ ID NO: 597384
agaagacuaagauuucaac

SEQ ID NO: 597386 - RNA, 19 nt, Artificial Sequence
  Description of Artificial Sequence: Synthetic oligonucleotide
  Sense strand starting at position 276 of SEQ ID NO: 584895
uugaaaucuuagucuucug

SEQ ID NO: 597387 - RNA, 19 nt, Artificial Sequence
  Description of Artificial Sequence: Synthetic oligonucleotide
  Antisense strand to SEQ ID NO: 597386
cagaagacuaagauuucaa

SEQ ID NO: 597388 - RNA, 19 nt, Artificial Sequence
  Description of Artificial Sequence: Synthetic oligonucleotide
  Sense strand starting at position 2015 of SEQ ID NO: 584895
uauguuugcuuuccaagga

SEQ ID NO: 597389 - RNA, 19 nt, Artificial Sequence
  Description of Artificial Sequence: Synthetic oligonucleotide
  Antisense strand to SEQ ID NO: 597388
uccuuggaaagcaaacaua

SEQ ID NO: 597390 - RNA, 19 nt, Artificial Sequence
  Description of Artificial Sequence: Synthetic oligonucleotide
  Sense strand starting at position 2031 of SEQ ID NO: 584895
ggacgcuccuugaggugaa

SEQ ID NO: 597391 - RNA, 19 nt, Artificial Sequence
  Description of Artificial Sequence: Synthetic oligonucleotide
  Antisense strand to SEQ ID NO: 597390
uucaccucaaggagcgucc

SEQ ID NO: 597392 - RNA, 19 nt, Artificial Sequence
  Description of Artificial Sequence: Synthetic oligonucleotide
  Sense strand starting at position 2055 of SEQ ID NO: 584895
aaagaaguuugugugcauu

SEQ ID NO: 597393 - RNA, 19 nt, Artificial Sequence
  Description of Artificial Sequence: Synthetic oligonucleotide
  Antisense strand to SEQ ID NO: 597392
aaugcacacaaacuucuuu

SEQ ID NO: 597394 - RNA, 19 nt, Artificial Sequence
  Description of Artificial Sequence: Synthetic oligonucleotide
  Sense strand starting at position 2152 of SEQ ID NO: 584895
uguagaucaaauggucaga

SEQ ID NO: 597395 - RNA, 19 nt, Artificial Sequence
  Description of Artificial Sequence: Synthetic oligonucleotide
  Antisense strand to SEQ ID NO: 597394
ucugaccauuugaucuaca

SEQ ID NO: 597396 - RNA, 19 nt, Artificial Sequence
  Description of Artificial Sequence: Synthetic oligonucleotide
  Sense strand starting at position 2154 of SEQ ID NO: 584895
uagaucaaauggucagacu

SEQ ID NO: 597397 - RNA, 19 nt, Artificial Sequence
  Description of Artificial Sequence: Synthetic oligonucleotide
  Antisense strand to SEQ ID NO: 597396
agucugaccauuugaucua

SEQ ID NO: 597398 - RNA, 19 nt, Artificial Sequence
  Description of Artificial Sequence: Synthetic oligonucleotide
  Sense strand starting at position 2157 of SEQ ID NO: 584895
aucaaauggucagacugaa

SEQ ID NO: 597399 - RNA, 19 nt, Artificial Sequence
  Description of Artificial Sequence: Synthetic oligonucleotide
  Antisense strand to SEQ ID NO: 597398
uucagucugaccauuugau

SEQ ID NO: 597400 - RNA, 19 nt, Artificial Sequence
  Description of Artificial Sequence: Synthetic oligonucleotide
  Sense strand starting at position 2177 of SEQ ID NO: 584895
agcugaagccuuggagaaa

SEQ ID NO: 597401 - RNA, 19 nt, Artificial Sequence
  Description of Artificial Sequence: Synthetic oligonucleotide
  Antisense strand to SEQ ID NO: 597400
uuucuccaaggcuucagcu

SEQ ID NO: 597402 - RNA, 19 nt, Artificial Sequence
  Description of Artificial Sequence: Synthetic oligonucleotide
  Sense strand starting at position 2211 of SEQ ID NO: 584895
uuguccuucuuccuuuaga

SEQ ID NO: 597403 - RNA, 19 nt, Artificial Sequence
  Description of Artificial Sequence: Synthetic oligonucleotide
  Antisense strand to SEQ ID NO: 597402
ucuaaaggaagaaggacaa

SEQ ID NO: 597404 - RNA, 19 nt, Artificial Sequence
  Description of Artificial Sequence: Synthetic oligonucleotide
  Sense strand starting at position 2219 of SEQ ID NO: 584895
cuuccuuuagaaugccaga

SEQ ID NO: 597405 - RNA, 19 nt, Artificial Sequence
  Description of Artificial Sequence: Synthetic oligonucleotide
  Antisense strand to SEQ ID NO: 597404
ucuggcauucuaaaggaag

SEQ ID NO: 597406 - RNA, 19 nt, Artificial Sequence
  Description of Artificial Sequence: Synthetic oligonucleotide
  Sense strand starting at position 2241 of SEQ ID NO: 584895
uguagcucuggaggacaau

SEQ ID NO: 597407 - RNA, 19 nt, Artificial Sequence
  Description of Artificial Sequence: Synthetic oligonucleotide
  Antisense strand to SEQ ID NO: 597406
auuguccuccagagcuaca

SEQ ID NO: 597408 - RNA, 19 nt, Artificial Sequence
  Description of Artificial Sequence: Synthetic oligonucleotide
  Sense strand starting at position 2379 of SEQ ID NO: 584895
cgcucuguagcucaggaua

SEQ ID NO: 597409 - RNA, 19 nt, Artificial Sequence
  Description of Artificial Sequence: Synthetic oligonucleotide
  Antisense strand to SEQ ID NO: 597408
uauccugagcuacagagcg

SEQ ID NO: 597410 - RNA, 19 nt, Artificial Sequence
  Description of Artificial Sequence: Synthetic oligonucleotide
  Sense strand starting at position 2705 of SEQ ID NO: 584895
guguaaucaacgcuugucu

SEQ ID NO: 597411 - RNA, 19 nt, Artificial Sequence
  Description of Artificial Sequence: Synthetic oligonucleotide
  Antisense strand to SEQ ID NO: 597410
agacaagcguugauuacac

SEQ ID NO: 597412 - RNA, 19 nt, Artificial Sequence
  Description of Artificial Sequence: Synthetic oligonucleotide
  Sense strand starting at position 2729 of SEQ ID NO: 584895
agguguagucuuugauuua

SEQ ID NO: 597413 - RNA, 19 nt, Artificial Sequence
  Description of Artificial Sequence: Synthetic oligonucleotide
  Antisense strand to SEQ ID NO: 597412
uaaaucaaagacuacaccu

SEQ ID NO: 597414 - RNA, 19 nt, Artificial Sequence
  Description of Artificial Sequence: Synthetic oligonucleotide
  Sense strand starting at position 2730 of SEQ ID NO: 584895
gguguagucuuugauuuaa

SEQ ID NO: 597415 - RNA, 19 nt, Artificial Sequence
  Description of Artificial Sequence: Synthetic oligonucleotide
  Antisense strand to SEQ ID NO: 597414
uuaaaucaaagacuacacc

SEQ ID NO: 597416 - RNA, 19 nt, Artificial Sequence
  Description of Artificial Sequence: Synthetic oligonucleotide
  Sense strand starting at position 2813 of SEQ ID NO: 584895
uguguuugugucguuuaua

SEQ ID NO: 597417 - RNA, 19 nt, Artificial Sequence
  Description of Artificial Sequence: Synthetic oligonucleotide
  Antisense strand to SEQ ID NO: 597416
uauaaacgacacaaacaca

SEQ ID NO: 597418 - RNA, 19 nt, Artificial Sequence
  Description of Artificial Sequence: Synthetic oligonucleotide
  Sense strand starting at position 2938 of SEQ ID NO: 584895
cuacucuuugccuaagguu

SEQ ID NO: 597419 - RNA, 19 nt, Artificial Sequence
  Description of Artificial Sequence: Synthetic oligonucleotide
  Antisense strand to SEQ ID NO: 597418
aaccuuaggcaaagaguag

SEQ ID NO: 597420 - RNA, 19 nt, Artificial Sequence
  Description of Artificial Sequence: Synthetic oligonucleotide
  Sense strand starting at position 3192 of SEQ ID NO: 584895
gugguacacacauguaagu

SEQ ID NO: 597421 - RNA, 19 nt, Artificial Sequence
  Description of Artificial Sequence: Synthetic oligonucleotide
  Antisense strand to SEQ ID NO: 597420
acuuacauguguguaccac

SEQ ID NO: 597422 - RNA, 19 nt, Artificial Sequence
  Description of Artificial Sequence: Synthetic oligonucleotide
  Sense strand starting at position 3308 of SEQ ID NO: 584895
guguuagagcaagaaucug

SEQ ID NO: 597423 - RNA, 19 nt, Artificial Sequence
  Description of Artificial Sequence: Synthetic oligonucleotide
  Antisense strand to SEQ ID NO: 597422
cagauucuugcucuaacac

SEQ ID NO: 597424 - RNA, 19 nt, Artificial Sequence
  Description of Artificial Sequence: Synthetic oligonucleotide
  Sense strand starting at position 3444 of SEQ ID NO: 584895
guaguauagugagauauuu

SEQ ID NO: 597425 - RNA, 19 nt, Artificial Sequence
  Description of Artificial Sequence: Synthetic oligonucleotide
  Antisense strand to SEQ ID NO: 597424
aaauaucucacuauacuac

SEQ ID NO: 597426 - RNA, 19 nt, Artificial Sequence
  Description of Artificial Sequence: Synthetic oligonucleotide
  Sense strand starting at position 3502 of SEQ ID NO: 584895
gaaauaaagugauagagga

SEQ ID NO: 597427 - RNA, 19 nt, Artificial Sequence
  Description of Artificial Sequence: Synthetic oligonucleotide
  Antisense strand to SEQ ID NO: 597426
uccucuaucacuuuauuuc

SEQ ID NO: 597428 - RNA, 19 nt, Artificial Sequence
  Description of Artificial Sequence: Synthetic oligonucleotide
  Sense strand starting at position 3536 of SEQ ID NO: 584895
gggucagaccugggugauu

SEQ ID NO: 597429 - RNA, 19 nt, Artificial Sequence
  Description of Artificial Sequence: Synthetic oligonucleotide
  Antisense strand to SEQ ID NO: 597428
aaucacccaggucugaccc

SEQ ID NO: 597430 - RNA, 19 nt, Artificial Sequence
  Description of Artificial Sequence: Synthetic oligonucleotide
  Sense strand starting at position 3550 of SEQ ID NO: 584895
ugauuagaagccugaccuu

SEQ ID NO: 597431 - RNA, 19 nt, Artificial Sequence
  Description of Artificial Sequence: Synthetic oligonucleotide
  Antisense strand to SEQ ID NO: 597430
aaggucaggcuucuaauca

SEQ ID NO: 597432 - RNA, 19 nt, Artificial Sequence
  Description of Artificial Sequence: Synthetic oligonucleotide
  Sense strand starting at position 3729 of SEQ ID NO: 584895
gcugguuucuccucaauca

SEQ ID NO: 597433 - RNA, 19 nt, Artificial Sequence
  Description of Artificial Sequence: Synthetic oligonucleotide
  Antisense strand to SEQ ID NO: 597432
ugauugaggagaaaccagc

SEQ ID NO: 597434 - RNA, 19 nt, Artificial Sequence
  Description of Artificial Sequence: Synthetic oligonucleotide
  Sense strand starting at position 3764 of SEQ ID NO: 584895
uugagugucuuagccaaga

SEQ ID NO: 597435 - RNA, 19 nt, Artificial Sequence
  Description of Artificial Sequence: Synthetic oligonucleotide
  Antisense strand to SEQ ID NO: 597434
ucuuggcuaagacacucaa

SEQ ID NO: 597436 - RNA, 19 nt, Artificial Sequence
  Description of Artificial Sequence: Synthetic oligonucleotide
  Sense strand starting at position 3769 of SEQ ID NO: 584895
ugucuuagccaagaauugu

SEQ ID NO: 597437 - RNA, 19 nt, Artificial Sequence
  Description of Artificial Sequence: Synthetic oligonucleotide
  Antisense strand to SEQ ID NO: 597436
acaauucuuggcuaagaca

SEQ ID NO: 597438 - RNA, 19 nt, Artificial Sequence
  Description of Artificial Sequence: Synthetic oligonucleotide
  Sense strand starting at position 3775 of SEQ ID NO: 584895
agccaagaauuguucuaag

SEQ ID NO: 597439 - RNA, 19 nt, Artificial Sequence
  Description of Artificial Sequence: Synthetic oligonucleotide
  Antisense strand to SEQ ID NO: 597438
cuuagaacaauucuuggcu

SEQ ID NO: 597440 - RNA, 19 nt, Artificial Sequence
  Description of Artificial Sequence: Synthetic oligonucleotide
  Sense strand starting at position 3825 of SEQ ID NO: 584895
acaauaaacugugaaagua

SEQ ID NO: 597441 - RNA, 19 nt, Artificial Sequence
  Description of Artificial Sequence: Synthetic oligonucleotide
  Antisense strand to SEQ ID NO: 597440
uacuuucacaguuuauugu

SEQ ID NO: 597442 - RNA, 19 nt, Artificial Sequence
  Description of Artificial Sequence: Synthetic oligonucleotide
  Sense strand starting at position 3843 of SEQ ID NO: 584895
aguaguauuucuuuggucu

SEQ ID NO: 597443 - RNA, 19 nt, Artificial Sequence
  Description of Artificial Sequence: Synthetic oligonucleotide
  Antisense strand to SEQ ID NO: 597442
agaccaaagaaauacuacu

SEQ ID NO: 597444 - RNA, 19 nt, Artificial Sequence
  Description of Artificial Sequence: Synthetic oligonucleotide
  Sense strand starting at position 3844 of SEQ ID NO: 584895
guaguauuucuuuggucuc

SEQ ID NO: 597445 - RNA, 19 nt, Artificial Sequence
  Description of Artificial Sequence: Synthetic oligonucleotide
  Antisense strand to SEQ ID NO: 597444
gagaccaaagaaauacuac

SEQ ID NO: 597446 - RNA, 19 nt, Artificial Sequence
  Description of Artificial Sequence: Synthetic oligonucleotide
  Sense strand starting at position 3854 of SEQ ID NO: 584895
uuuggucuccuugaaaucu

SEQ ID NO: 597447 - RNA, 19 nt, Artificial Sequence
  Description of Artificial Sequence: Synthetic oligonucleotide
  Antisense strand to SEQ ID NO: 597446
agauuucaaggagaccaaa

SEQ ID NO: 597448 - RNA, 19 nt, Artificial Sequence
  Description of Artificial Sequence: Synthetic oligonucleotide
  Sense strand starting at position 3862 of SEQ ID NO: 584895
ccuugaaaucuuugaagca

SEQ ID NO: 597449 - RNA, 19 nt, Artificial Sequence
  Description of Artificial Sequence: Synthetic oligonucleotide
  Antisense strand to SEQ ID NO: 597448
ugcuucaaagauuucaagg

SEQ ID NO: 597450 - RNA, 19 nt, Artificial Sequence
  Description of Artificial Sequence: Synthetic oligonucleotide
  Sense strand starting at position 3878 of SEQ ID NO: 584895
gcacaaagagguuaagugu

SEQ ID NO: 597451 - RNA, 19 nt, Artificial Sequence
  Description of Artificial Sequence: Synthetic oligonucleotide
  Antisense strand to SEQ ID NO: 597450
acacuuaaccucuuugugc

SEQ ID NO: 597452 - RNA, 19 nt, Artificial Sequence
  Description of Artificial Sequence: Synthetic oligonucleotide
  Sense strand starting at position 3886 of SEQ ID NO: 584895
agguuaagugugugcccaa

SEQ ID NO: 597453 - RNA, 19 nt, Artificial Sequence
  Description of Artificial Sequence: Synthetic oligonucleotide
  Antisense strand to SEQ ID NO: 597452
uugggcacacacuuaaccu

SEQ ID NO: 597454 - RNA, 19 nt, Artificial Sequence
  Description of Artificial Sequence: Synthetic oligonucleotide
  Sense strand starting at position 3893 of SEQ ID NO: 584895
gugugugcccaaggucaaa

SEQ ID NO: 597455 - RNA, 19 nt, Artificial Sequence
  Description of Artificial Sequence: Synthetic oligonucleotide
  Antisense strand to SEQ ID NO: 597454
uuugaccuugggcacacac

SEQ ID NO: 597456 - RNA, 19 nt, Artificial Sequence
  Description of Artificial Sequence: Synthetic oligonucleotide
  Sense strand starting at position 26 of SEQ ID NO: 584896
gagacugugucaucacuug

SEQ ID NO: 597457 - RNA, 19 nt, Artificial Sequence
  Description of Artificial Sequence: Synthetic oligonucleotide
  Antisense strand to SEQ ID NO: 597456
caagugaugacacagucuc

SEQ ID NO: 597458 - RNA, 19 nt, Artificial Sequence
  Description of Artificial Sequence: Synthetic oligonucleotide
  Sense strand starting at position 31 of SEQ ID NO: 584896
ugugucaucacuugggaau

SEQ ID NO: 597459 - RNA, 19 nt, Artificial Sequence
  Description of Artificial Sequence: Synthetic oligonucleotide
  Antisense strand to SEQ ID NO: 597458
auucccaagugaugacaca

SEQ ID NO: 597460 - RNA, 19 nt, Artificial Sequence
  Description of Artificial Sequence: Synthetic oligonucleotide
  Sense strand starting at position 32 of SEQ ID NO: 584896
gugucaucacuugggaaug

SEQ ID NO: 597461 - RNA, 19 nt, Artificial Sequence
  Description of Artificial Sequence: Synthetic oligonucleotide
  Antisense strand to SEQ ID NO: 597460
cauucccaagugaugacac

SEQ ID NO: 597462 - RNA, 19 nt, Artificial Sequence
  Description of Artificial Sequence: Synthetic oligonucleotide
  Sense strand starting at position 74 of SEQ ID NO: 584896
ugggauuguuggcuucaag

SEQ ID NO: 597463 - RNA, 19 nt, Artificial Sequence
  Description of Artificial Sequence: Synthetic oligonucleotide
  Antisense strand to SEQ ID NO: 597462
cuugaagccaacaauccca

SEQ ID NO: 597464 - RNA, 19 nt, Artificial Sequence
  Description of Artificial Sequence: Synthetic oligonucleotide
  Sense strand starting at position 184 of SEQ ID NO: 584896
gggacacaaugugcuaaau

SEQ ID NO: 597465 - RNA, 19 nt, Artificial Sequence
  Description of Artificial Sequence: Synthetic oligonucleotide
  Antisense strand to SEQ ID NO: 597464
auuuagcacauuguguccc

SEQ ID NO: 597466 - RNA, 19 nt, Artificial Sequence
  Description of Artificial Sequence: Synthetic oligonucleotide
  Sense strand starting at position 238 of SEQ ID NO: 584896
uuccaagaagcuugacuuu

SEQ ID NO: 597467 - RNA, 19 nt, Artificial Sequence
  Description of Artificial Sequence: Synthetic oligonucleotide
  Antisense strand to SEQ ID NO: 597466
aaagucaagcuucuuggaa

SEQ ID NO: 597468 - RNA, 19 nt, Artificial Sequence
  Description of Artificial Sequence: Synthetic oligonucleotide
  Sense strand starting at position 271 of SEQ ID NO: 584896
acaagugaagcguagacau

SEQ ID NO: 597469 - RNA, 19 nt, Artificial Sequence
  Description of Artificial Sequence: Synthetic oligonucleotide
  Antisense strand to SEQ ID NO: 597468
augucuacgcuucacuugu

SEQ ID NO: 597470 - RNA, 19 nt, Artificial Sequence
  Description of Artificial Sequence: Synthetic oligonucleotide
  Sense strand starting at position 314 of SEQ ID NO: 584896
gugaguugcaaggaauccu

SEQ ID NO: 597471 - RNA, 19 nt, Artificial Sequence
  Description of Artificial Sequence: Synthetic oligonucleotide
  Antisense strand to SEQ ID NO: 597470
aggauuccuugcaacucac

SEQ ID NO: 597472 - RNA, 19 nt, Artificial Sequence
  Description of Artificial Sequence: Synthetic oligonucleotide
  Sense strand starting at position 502 of SEQ ID NO: 584896
gggcacugauccuuuguga

SEQ ID NO: 597473 - RNA, 19 nt, Artificial Sequence
  Description of Artificial Sequence: Synthetic oligonucleotide
  Antisense strand to SEQ ID NO: 597472
ucacaaaggaucagugccc

SEQ ID NO: 597474 - RNA, 19 nt, Artificial Sequence
  Description of Artificial Sequence: Synthetic oligonucleotide
  Sense strand starting at position 629 of SEQ ID NO: 584896
agcuuaugcccagaaacaa

SEQ ID NO: 597475 - RNA, 19 nt, Artificial Sequence
  Description of Artificial Sequence: Synthetic oligonucleotide
  Antisense strand to SEQ ID NO: 597474
uuguuucugggcauaagcu

SEQ ID NO: 597476 - RNA, 19 nt, Artificial Sequence
  Description of Artificial Sequence: Synthetic oligonucleotide
  Sense strand starting at position 921 of SEQ ID NO: 584896
gguuauugauaccugggua

SEQ ID NO: 597477 - RNA, 19 nt, Artificial Sequence
  Description of Artificial Sequence: Synthetic oligonucleotide
  Antisense strand to SEQ ID NO: 597476
uacccagguaucaauaacc

SEQ ID NO: 597478 - RNA, 19 nt, Artificial Sequence
  Description of Artificial Sequence: Synthetic oligonucleotide
  Sense strand starting at position 922 of SEQ ID NO: 584896
guuauugauaccuggguau

SEQ ID NO: 597479 - RNA, 19 nt, Artificial Sequence
  Description of Artificial Sequence: Synthetic oligonucleotide
  Antisense strand to SEQ ID NO: 597478
auacccagguaucaauaac

SEQ ID NO: 597480 - RNA, 19 nt, Artificial Sequence
  Description of Artificial Sequence: Synthetic oligonucleotide
  Sense strand starting at position 924 of SEQ ID NO: 584896
uauugauaccuggguauag

SEQ ID NO: 597481 - RNA, 19 nt, Artificial Sequence
  Description of Artificial Sequence: Synthetic oligonucleotide
  Antisense strand to SEQ ID NO: 597480
cuauacccagguaucaaua

SEQ ID NO: 597482 - RNA, 19 nt, Artificial Sequence
  Description of Artificial Sequence: Synthetic oligonucleotide
  Sense strand starting at position 925 of SEQ ID NO: 584896
auugauaccuggguauaga

SEQ ID NO: 597483 - RNA, 19 nt, Artificial Sequence
  Description of Artificial Sequence: Synthetic oligonucleotide
  Antisense strand to SEQ ID NO: 597482
ucuauacccagguaucaau

SEQ ID NO: 597484 - RNA, 19 nt, Artificial Sequence
  Description of Artificial Sequence: Synthetic oligonucleotide
  Sense strand starting at position 1190 of SEQ ID NO: 584896
ggcagaacccuguggauga

SEQ ID NO: 597485 - RNA, 19 nt, Artificial Sequence
  Description of Artificial Sequence: Synthetic oligonucleotide
  Antisense strand to SEQ ID NO: 597484
ucauccacaggguucugcc

SEQ ID NO: 597486 - RNA, 19 nt, Artificial Sequence
  Description of Artificial Sequence: Synthetic oligonucleotide
  Sense strand starting at position 1299 of SEQ ID NO: 584896
ggagugaagccuuggguga

SEQ ID NO: 597487 - RNA, 19 nt, Artificial Sequence
  Description of Artificial Sequence: Synthetic oligonucleotide
  Antisense strand to SEQ ID NO: 597486
ucacccaaggcuucacucc

SEQ ID NO: 597488 - RNA, 19 nt, Artificial Sequence
  Description of Artificial Sequence: Synthetic oligonucleotide
  Sense strand starting at position 1325 of SEQ ID NO: 584896
guggcaucgggagaagacu

SEQ ID NO: 597489 - RNA, 19 nt, Artificial Sequence
  Description of Artificial Sequence: Synthetic oligonucleotide
  Antisense strand to SEQ ID NO: 597488
agucuucucccgaugccac

SEQ ID NO: 597490 - RNA, 19 nt, Artificial Sequence
  Description of Artificial Sequence: Synthetic oligonucleotide
  Sense strand starting at position 1924 of SEQ ID NO: 584896
gccuccauaccugggagau

SEQ ID NO: 597491 - RNA, 19 nt, Artificial Sequence
  Description of Artificial Sequence: Synthetic oligonucleotide
  Antisense strand to SEQ ID NO: 597490
aucucccagguauggaggc

SEQ ID NO: 597492 - RNA, 19 nt, Artificial Sequence
  Description of Artificial Sequence: Synthetic oligonucleotide
  Sense strand starting at position 1925 of SEQ ID NO: 584896
ccuccauaccugggagaug

SEQ ID NO: 597493 - RNA, 19 nt, Artificial Sequence
  Description of Artificial Sequence: Synthetic oligonucleotide
  Antisense strand to SEQ ID NO: 597492
caucucccagguauggagg

SEQ ID NO: 597494 - RNA, 19 nt, Artificial Sequence
  Description of Artificial Sequence: Synthetic oligonucleotide
  Sense strand starting at position 2090 of SEQ ID NO: 584896
agugguugugaagacaaua

SEQ ID NO: 597495 - RNA, 19 nt, Artificial Sequence
  Description of Artificial Sequence: Synthetic oligonucleotide
  Antisense strand to SEQ ID NO: 597494
uauugucuucacaaccacu

SEQ ID NO: 597496 - RNA, 19 nt, Artificial Sequence
  Description of Artificial Sequence: Synthetic oligonucleotide
  Sense strand starting at position 2151 of SEQ ID NO: 584896
acaggugucacuugaauga

SEQ ID NO: 597497 - RNA, 19 nt, Artificial Sequence
  Description of Artificial Sequence: Synthetic oligonucleotide
  Antisense strand to SEQ ID NO: 597496
ucauucaagugacaccugu

SEQ ID NO: 597498 - RNA, 19 nt, Artificial Sequence
  Description of Artificial Sequence: Synthetic oligonucleotide
  Sense strand starting at position 2155 of SEQ ID NO: 584896
gugucacuugaaugaaugu

SEQ ID NO: 597499 - RNA, 19 nt, Artificial Sequence
  Description of Artificial Sequence: Synthetic oligonucleotide
  Antisense strand to SEQ ID NO: 597498
acauucauucaagugacac

SEQ ID NO: 597500 - RNA, 19 nt, Artificial Sequence
  Description of Artificial Sequence: Synthetic oligonucleotide
  Sense strand starting at position 2319 of SEQ ID NO: 584896
gggucccacucucuuaauu

SEQ ID NO: 597501 - RNA, 19 nt, Artificial Sequence
  Description of Artificial Sequence: Synthetic oligonucleotide
  Antisense strand to SEQ ID NO: 597500
aauuaagagagugggaccc

SEQ ID NO: 597502 - RNA, 19 nt, Artificial Sequence
  Description of Artificial Sequence: Synthetic oligonucleotide
  Sense strand starting at position 2506 of SEQ ID NO: 584896
uggaucuagcuagggaaau

SEQ ID NO: 597503 - RNA, 19 nt, Artificial Sequence
  Description of Artificial Sequence: Synthetic oligonucleotide
  Antisense strand to SEQ ID NO: 597502
auuucccuagcuagaucca

SEQ ID NO: 597504 - RNA, 19 nt, Artificial Sequence
  Description of Artificial Sequence: Synthetic oligonucleotide
  Sense strand starting at position 2653 of SEQ ID NO: 584896
acaggucucaguggauuaa

SEQ ID NO: 597505 - RNA, 19 nt, Artificial Sequence
  Description of Artificial Sequence: Synthetic oligonucleotide
  Antisense strand to SEQ ID NO: 597504
uuaauccacugagaccugu

SEQ ID NO: 597506 - RNA, 19 nt, Artificial Sequence
  Description of Artificial Sequence: Synthetic oligonucleotide
  Sense strand starting at position 2903 of SEQ ID NO: 584896
ccaugauaaucucugugaa

SEQ ID NO: 597507 - RNA, 19 nt, Artificial Sequence
  Description of Artificial Sequence: Synthetic oligonucleotide
  Antisense strand to SEQ ID NO: 597506
uucacagagauuaucaugg

SEQ ID NO: 597508 - RNA, 19 nt, Artificial Sequence
  Description of Artificial Sequence: Synthetic oligonucleotide
  Sense strand starting at position 2904 of SEQ ID NO: 584896
caugauaaucucugugaag

SEQ ID NO: 597509 - RNA, 19 nt, Artificial Sequence
  Description of Artificial Sequence: Synthetic oligonucleotide
  Antisense strand to SEQ ID NO: 597508
cuucacagagauuaucaug

SEQ ID NO: 597510 - RNA, 19 nt, Artificial Sequence
  Description of Artificial Sequence: Synthetic oligonucleotide
  Sense strand starting at position 2905 of SEQ ID NO: 584896
augauaaucucugugaagu

SEQ ID NO: 597511 - RNA, 19 nt, Artificial Sequence
  Description of Artificial Sequence: Synthetic oligonucleotide
  Antisense strand to SEQ ID NO: 597510
acuucacagagauuaucau

SEQ ID NO: 597512 - RNA, 19 nt, Artificial Sequence
  Description of Artificial Sequence: Synthetic oligonucleotide
  Sense strand starting at position 2906 of SEQ ID NO: 584896
ugauaaucucugugaaguc

SEQ ID NO: 597513 - RNA, 19 nt, Artificial Sequence
  Description of Artificial Sequence: Synthetic oligonucleotide
  Antisense strand to SEQ ID NO: 597512
gacuucacagagauuauca

SEQ ID NO: 597514 - RNA, 19 nt, Artificial Sequence
  Description of Artificial Sequence: Synthetic oligonucleotide
  Sense strand starting at position 2986 of SEQ ID NO: 584896
uccuacguuccagggauua

SEQ ID NO: 597515 - RNA, 19 nt, Artificial Sequence
  Description of Artificial Sequence: Synthetic oligonucleotide
  Antisense strand to SEQ ID NO: 597514
uaaucccuggaacguagga

SEQ ID NO: 597516 - RNA, 19 nt, Artificial Sequence
  Description of Artificial Sequence: Synthetic oligonucleotide
  Sense strand starting at position 3065 of SEQ ID NO: 584896
ucagaugugccauagagua

SEQ ID NO: 597517 - RNA, 19 nt, Artificial Sequence
  Description of Artificial Sequence: Synthetic oligonucleotide
  Antisense strand to SEQ ID NO: 597516
uacucuauggcacaucuga

SEQ ID NO: 597518 - RNA, 19 nt, Artificial Sequence
  Description of Artificial Sequence: Synthetic oligonucleotide
  Sense strand starting at position 3067 of SEQ ID NO: 584896
agaugugccauagaguaua

SEQ ID NO: 597519 - RNA, 19 nt, Artificial Sequence
  Description of Artificial Sequence: Synthetic oligonucleotide
  Antisense strand to SEQ ID NO: 597518
uauacucuauggcacaucu

SEQ ID NO: 597520 - RNA, 19 nt, Artificial Sequence
  Description of Artificial Sequence: Synthetic oligonucleotide
  Sense strand starting at position 3070 of SEQ ID NO: 584896
ugugccauagaguauaaga

SEQ ID NO: 597521 - RNA, 19 nt, Artificial Sequence
  Description of Artificial Sequence: Synthetic oligonucleotide
  Antisense strand to SEQ ID NO: 597520
ucuuauacucuauggcaca

SEQ ID NO: 597522 - RNA, 19 nt, Artificial Sequence
  Description of Artificial Sequence: Synthetic oligonucleotide
  Sense strand starting at position 3160 of SEQ ID NO: 584896
aggacuugauccuuguuga

SEQ ID NO: 597523 - RNA, 19 nt, Artificial Sequence
  Description of Artificial Sequence: Synthetic oligonucleotide
  Antisense strand to SEQ ID NO: 597522
ucaacaaggaucaaguccu

SEQ ID NO: 597524 - RNA, 19 nt, Artificial Sequence
  Description of Artificial Sequence: Synthetic oligonucleotide
  Sense strand starting at position 3161 of SEQ ID NO: 584896
ggacuugauccuuguugaa

SEQ ID NO: 597525 - RNA, 19 nt, Artificial Sequence
  Description of Artificial Sequence: Synthetic oligonucleotide
  Antisense strand to SEQ ID NO: 597524
uucaacaaggaucaagucc

SEQ ID NO: 597526 - RNA, 19 nt, Artificial Sequence
  Description of Artificial Sequence: Synthetic oligonucleotide
  Sense strand starting at position 3177 of SEQ ID NO: 584896
gaagcugggcgaugagaau

SEQ ID NO: 597527 - RNA, 19 nt, Artificial Sequence
  Description of Artificial Sequence: Synthetic oligonucleotide
  Antisense strand to SEQ ID NO: 597526
auucucaucgcccagcuuc

SEQ ID NO: 597528 - RNA, 19 nt, Artificial Sequence
  Description of Artificial Sequence: Synthetic oligonucleotide
  Sense strand starting at position 3380 of SEQ ID NO: 584896
uggcuuaaccacuggagga

SEQ ID NO: 597529 - RNA, 19 nt, Artificial Sequence
  Description of Artificial Sequence: Synthetic oligonucleotide
  Antisense strand to SEQ ID NO: 597528
uccuccagugguuaagcca

SEQ ID NO: 597530 - RNA, 19 nt, Artificial Sequence
  Description of Artificial Sequence: Synthetic oligonucleotide
  Sense strand starting at position 3451 of SEQ ID NO: 584896
ggaugacaugcaugaguuu

SEQ ID NO: 597531 - RNA, 19 nt, Artificial Sequence
  Description of Artificial Sequence: Synthetic oligonucleotide
  Antisense strand to SEQ ID NO: 597530
aaacucaugcaugucaucc

SEQ ID NO: 597532 - RNA, 19 nt, Artificial Sequence
  Description of Artificial Sequence: Synthetic oligonucleotide
  Sense strand starting at position 3633 of SEQ ID NO: 584896
cuuucuggucaauguaaua

SEQ ID NO: 597533 - RNA, 19 nt, Artificial Sequence
  Description of Artificial Sequence: Synthetic oligonucleotide
  Antisense strand to SEQ ID NO: 597532
uauuacauugaccagaaag

SEQ ID NO: 597534 - RNA, 19 nt, Artificial Sequence
  Description of Artificial Sequence: Synthetic oligonucleotide
  Sense strand starting at position 3661 of SEQ ID NO: 584896
ugauuccagacuuggaguu

SEQ ID NO: 597535 - RNA, 19 nt, Artificial Sequence
  Description of Artificial Sequence: Synthetic oligonucleotide
  Antisense strand to SEQ ID NO: 597534
aacuccaagucuggaauca

SEQ ID NO: 597536 - RNA, 19 nt, Artificial Sequence
  Description of Artificial Sequence: Synthetic oligonucleotide
  Sense strand starting at position 114 of SEQ ID NO: 584897
uauuaaauccagugggucu

SEQ ID NO: 597537 - RNA, 19 nt, Artificial Sequence
  Description of Artificial Sequence: Synthetic oligonucleotide
  Antisense strand to SEQ ID NO: 597536
agacccacuggauuuaaua

SEQ ID NO: 597538 - RNA, 19 nt, Artificial Sequence
  Description of Artificial Sequence: Synthetic oligonucleotide
  Sense strand starting at position 193 of SEQ ID NO: 584897
ugagaacuaucguccuaug

SEQ ID NO: 597539 - RNA, 19 nt, Artificial Sequence
  Description of Artificial Sequence: Synthetic oligonucleotide
  Antisense strand to SEQ ID NO: 597538
cauaggacgauaguucuca

SEQ ID NO: 597540 - RNA, 19 nt, Artificial Sequence
  Description of Artificial Sequence: Synthetic oligonucleotide
  Sense strand starting at position 198 of SEQ ID NO: 584897
acuaucguccuaugaaaua

SEQ ID NO: 597541 - RNA, 19 nt, Artificial Sequence
  Description of Artificial Sequence: Synthetic oligonucleotide
  Antisense strand to SEQ ID NO: 597540
uauuucauaggacgauagu

SEQ ID NO: 597542 - RNA, 19 nt, Artificial Sequence
  Description of Artificial Sequence: Synthetic oligonucleotide
  Sense strand starting at position 359 of SEQ ID NO: 584897
ccacuuaagguuuggguua

SEQ ID NO: 597543 - RNA, 19 nt, Artificial Sequence
  Description of Artificial Sequence: Synthetic oligonucleotide
  Antisense strand to SEQ ID NO: 597542
uaacccaaaccuuaagugg

SEQ ID NO: 597544 - RNA, 19 nt, Artificial Sequence
  Description of Artificial Sequence: Synthetic oligonucleotide
  Sense strand starting at position 364 of SEQ ID NO: 584897
uaagguuuggguuagauau

SEQ ID NO: 597545 - RNA, 19 nt, Artificial Sequence
  Description of Artificial Sequence: Synthetic oligonucleotide
  Antisense strand to SEQ ID NO: 597544
auaucuaacccaaaccuua

SEQ ID NO: 597546 - RNA, 19 nt, Artificial Sequence
  Description of Artificial Sequence: Synthetic oligonucleotide
  Sense strand starting at position 371 of SEQ ID NO: 584897
uggguuagauauuccauaa

SEQ ID NO: 597547 - RNA, 19 nt, Artificial Sequence
  Description of Artificial Sequence: Synthetic oligonucleotide
  Antisense strand to SEQ ID NO: 597546
uuauggaauaucuaaccca

SEQ ID NO: 597548 - RNA, 19 nt, Artificial Sequence
  Description of Artificial Sequence: Synthetic oligonucleotide
  Sense strand starting at position 432 of SEQ ID NO: 584897
uacacuguccuggguauga

SEQ ID NO: 597549 - RNA, 19 nt, Artificial Sequence
  Description of Artificial Sequence: Synthetic oligonucleotide
  Antisense strand to SEQ ID NO: 597548
ucauacccaggacagugua

SEQ ID NO: 597550 - RNA, 19 nt, Artificial Sequence
  Description of Artificial Sequence: Synthetic oligonucleotide
  Sense strand starting at position 434 of SEQ ID NO: 584897
cacuguccuggguaugaaa

SEQ ID NO: 597551 - RNA, 19 nt, Artificial Sequence
  Description of Artificial Sequence: Synthetic oligonucleotide
  Antisense strand to SEQ ID NO: 597550
uuucauacccaggacagug

SEQ ID NO: 597552 - RNA, 19 nt, Artificial Sequence
  Description of Artificial Sequence: Synthetic oligonucleotide
  Sense strand starting at position 684 of SEQ ID NO: 584897
uugugagaguucuuaggaa

SEQ ID NO: 597553 - RNA, 19 nt, Artificial Sequence
  Description of Artificial Sequence: Synthetic oligonucleotide
  Antisense strand to SEQ ID NO: 597552
uuccuaagaacucucacaa

SEQ ID NO: 597554 - RNA, 19 nt, Artificial Sequence
  Description of Artificial Sequence: Synthetic oligonucleotide
  Sense strand starting at position 811 of SEQ ID NO: 584897
aguaaacguccucauguua

SEQ ID NO: 597555 - RNA, 19 nt, Artificial Sequence
  Description of Artificial Sequence: Synthetic oligonucleotide
  Antisense strand to SEQ ID NO: 597554
uaacaugaggacguuuacu

SEQ ID NO: 597556 - RNA, 19 nt, Artificial Sequence
  Description of Artificial Sequence: Synthetic oligonucleotide
  Sense strand starting at position 819 of SEQ ID NO: 584897
uccucauguuaucuauaug

SEQ ID NO: 597557 - RNA, 19 nt, Artificial Sequence
  Description of Artificial Sequence: Synthetic oligonucleotide
  Antisense strand to SEQ ID NO: 597556
cauauagauaacaugagga

SEQ ID NO: 597558 - RNA, 19 nt, Artificial Sequence
  Description of Artificial Sequence: Synthetic oligonucleotide
  Sense strand starting at position 1211 of SEQ ID NO: 584897
auccaauuaggguguuauu

SEQ ID NO: 597559 - RNA, 19 nt, Artificial Sequence
  Description of Artificial Sequence: Synthetic oligonucleotide
  Antisense strand to SEQ ID NO: 597558
aauaacacccuaauuggau

SEQ ID NO: 597560 - RNA, 19 nt, Artificial Sequence
  Description of Artificial Sequence: Synthetic oligonucleotide
  Sense strand starting at position 1220 of SEQ ID NO: 584897
ggguguuauuuagagauaa

SEQ ID NO: 597561 - RNA, 19 nt, Artificial Sequence
  Description of Artificial Sequence: Synthetic oligonucleotide
  Antisense strand to SEQ ID NO: 597560
uuaucucuaaauaacaccc

SEQ ID NO: 597562 - RNA, 19 nt, Artificial Sequence
  Description of Artificial Sequence: Synthetic oligonucleotide
  Sense strand starting at position 1258 of SEQ ID NO: 584897
acugaaaggugcucaagua

SEQ ID NO: 597563 - RNA, 19 nt, Artificial Sequence
  Description of Artificial Sequence: Synthetic oligonucleotide
  Antisense strand to SEQ ID NO: 597562
uacuugagcaccuuucagu

SEQ ID NO: 597564 - RNA, 19 nt, Artificial Sequence
  Description of Artificial Sequence: Synthetic oligonucleotide
  Sense strand starting at position 1259 of SEQ ID NO: 584897
cugaaaggugcucaaguau

SEQ ID NO: 597565 - RNA, 19 nt, Artificial Sequence
  Description of Artificial Sequence: Synthetic oligonucleotide
  Antisense strand to SEQ ID NO: 597564
auacuugagcaccuuucag

SEQ ID NO: 597566 - RNA, 19 nt, Artificial Sequence
  Description of Artificial Sequence: Synthetic oligonucleotide
  Sense strand starting at position 1363 of SEQ ID NO: 584897
ccuguaagauagguauuag

SEQ ID NO: 597567 - RNA, 19 nt, Artificial Sequence
  Description of Artificial Sequence: Synthetic oligonucleotide
  Antisense strand to SEQ ID NO: 597566
cuaauaccuaucuuacagg

SEQ ID NO: 597568 - RNA, 19 nt, Artificial Sequence
  Description of Artificial Sequence: Synthetic oligonucleotide
  Sense strand starting at position 1364 of SEQ ID NO: 584897
cuguaagauagguauuagu

SEQ ID NO: 597569 - RNA, 19 nt, Artificial Sequence
  Description of Artificial Sequence: Synthetic oligonucleotide
  Antisense strand to SEQ ID NO: 597568
acuaauaccuaucuuacag

SEQ ID NO: 597570 - RNA, 19 nt, Artificial Sequence
  Description of Artificial Sequence: Synthetic oligonucleotide
  Sense strand starting at position 1590 of SEQ ID NO: 584897
acgauaaagucacuuaccu

SEQ ID NO: 597571 - RNA, 19 nt, Artificial Sequence
  Description of Artificial Sequence: Synthetic oligonucleotide
  Antisense strand to SEQ ID NO: 597570
agguaagugacuuuaucgu

SEQ ID NO: 597572 - RNA, 19 nt, Artificial Sequence
  Description of Artificial Sequence: Synthetic oligonucleotide
  Sense strand starting at position 2050 of SEQ ID NO: 584897
acuguugcuagguaagaca

SEQ ID NO: 597573 - RNA, 19 nt, Artificial Sequence
  Description of Artificial Sequence: Synthetic oligonucleotide
  Antisense strand to SEQ ID NO: 597572
ugucuuaccuagcaacagu

SEQ ID NO: 597574 - RNA, 19 nt, Artificial Sequence
  Description of Artificial Sequence: Synthetic oligonucleotide
  Sense strand starting at position 2064 of SEQ ID NO: 584897
agacaagcuuugcucauaa

SEQ ID NO: 597575 - RNA, 19 nt, Artificial Sequence
  Description of Artificial Sequence: Synthetic oligonucleotide
  Antisense strand to SEQ ID NO: 597574
uuaugagcaaagcuugucu

SEQ ID NO: 597576 - RNA, 19 nt, Artificial Sequence
  Description of Artificial Sequence: Synthetic oligonucleotide
  Sense strand starting at position 2280 of SEQ ID NO: 584897
aguugcaucagguaagaau

SEQ ID NO: 597577 - RNA, 19 nt, Artificial Sequence
  Description of Artificial Sequence: Synthetic oligonucleotide
  Antisense strand to SEQ ID NO: 597576
auucuuaccugaugcaacu

SEQ ID NO: 597578 - RNA, 19 nt, Artificial Sequence
  Description of Artificial Sequence: Synthetic oligonucleotide
  Sense strand starting at position 2289 of SEQ ID NO: 584897
agguaagaaucuucuuggu

SEQ ID NO: 597579 - RNA, 19 nt, Artificial Sequence
  Description of Artificial Sequence: Synthetic oligonucleotide
  Antisense strand to SEQ ID NO: 597578
accaagaagauucuuaccu

SEQ ID NO: 597580 - RNA, 19 nt, Artificial Sequence
  Description of Artificial Sequence: Synthetic oligonucleotide
  Sense strand starting at position 2318 of SEQ ID NO: 584897
cacugaagauuccugaggu

SEQ ID NO: 597581 - RNA, 19 nt, Artificial Sequence
  Description of Artificial Sequence: Synthetic oligonucleotide
  Antisense strand to SEQ ID NO: 597580
accucaggaaucuucagug

SEQ ID NO: 597582 - RNA, 19 nt, Artificial Sequence
  Description of Artificial Sequence: Synthetic oligonucleotide
  Sense strand starting at position 2324 of SEQ ID NO: 584897
agauuccugaggugguaua

SEQ ID NO: 597583 - RNA, 19 nt, Artificial Sequence
  Description of Artificial Sequence: Synthetic oligonucleotide
  Antisense strand to SEQ ID NO: 597582
uauaccaccucaggaaucu

SEQ ID NO: 597584 - RNA, 19 nt, Artificial Sequence
  Description of Artificial Sequence: Synthetic oligonucleotide
  Sense strand starting at position 2334 of SEQ ID NO: 584897
ggugguauaggguaugaca

SEQ ID NO: 597585 - RNA, 19 nt, Artificial Sequence
  Description of Artificial Sequence: Synthetic oligonucleotide
  Antisense strand to SEQ ID NO: 597584
ugucauacccuauaccacc

SEQ ID NO: 597586 - RNA, 19 nt, Artificial Sequence
  Description of Artificial Sequence: Synthetic oligonucleotide
  Sense strand starting at position 2827 of SEQ ID NO: 584897
ucuucugccgugcuuuaaa

SEQ ID NO: 597587 - RNA, 19 nt, Artificial Sequence
  Description of Artificial Sequence: Synthetic oligonucleotide
  Antisense strand to SEQ ID NO: 597586
uuuaaagcacggcagaaga

SEQ ID NO: 597588 - RNA, 19 nt, Artificial Sequence
  Description of Artificial Sequence: Synthetic oligonucleotide
  Sense strand starting at position 2839 of SEQ ID NO: 584897
cuuuaaagaccuuggugau

SEQ ID NO: 597589 - RNA, 19 nt, Artificial Sequence
  Description of Artificial Sequence: Synthetic oligonucleotide
  Antisense strand to SEQ ID NO: 597588
aucaccaaggucuuuaaag

SEQ ID NO: 597590 - RNA, 19 nt, Artificial Sequence
  Description of Artificial Sequence: Synthetic oligonucleotide
  Sense strand starting at position 2840 of SEQ ID NO: 584897
uuuaaagaccuuggugauu

SEQ ID NO: 597591 - RNA, 19 nt, Artificial Sequence
  Description of Artificial Sequence: Synthetic oligonucleotide
  Antisense strand to SEQ ID NO: 597590
aaucaccaaggucuuuaaa

SEQ ID NO: 597592 - RNA, 19 nt, Artificial Sequence
  Description of Artificial Sequence: Synthetic oligonucleotide
  Sense strand starting at position 3125 of SEQ ID NO: 584897
gggaaauaucaugguaucu

SEQ ID NO: 597593 - RNA, 19 nt, Artificial Sequence
  Description of Artificial Sequence: Synthetic oligonucleotide
  Antisense strand to SEQ ID NO: 597592
agauaccaugauauuuccc

SEQ ID NO: 597594 - RNA, 19 nt, Artificial Sequence
  Description of Artificial Sequence: Synthetic oligonucleotide
  Sense strand starting at position 3130 of SEQ ID NO: 584897
auaucaugguaucuugaag

SEQ ID NO: 597595 - RNA, 19 nt, Artificial Sequence
  Description of Artificial Sequence: Synthetic oligonucleotide
  Antisense strand to SEQ ID NO: 597594
cuucaagauaccaugauau

SEQ ID NO: 597596 - RNA, 19 nt, Artificial Sequence
  Description of Artificial Sequence: Synthetic oligonucleotide
  Sense strand starting at position 3313 of SEQ ID NO: 584897
auugccugacaaugucaua

SEQ ID NO: 597597 - RNA, 19 nt, Artificial Sequence
  Description of Artificial Sequence: Synthetic oligonucleotide
  Antisense strand to SEQ ID NO: 597596
uaugacauugucaggcaau

SEQ ID NO: 597598 - RNA, 19 nt, Artificial Sequence
  Description of Artificial Sequence: Synthetic oligonucleotide
  Sense strand starting at position 3422 of SEQ ID NO: 584897
cuaaguguaccacaaguua

SEQ ID NO: 597599 - RNA, 19 nt, Artificial Sequence
  Description of Artificial Sequence: Synthetic oligonucleotide
  Antisense strand to SEQ ID NO: 597598
uaacuugugguacacuuag

SEQ ID NO: 597600 - RNA, 19 nt, Artificial Sequence
  Description of Artificial Sequence: Synthetic oligonucleotide
  Sense strand starting at position 3458 of SEQ ID NO: 584897
acacauacggccugauaac

SEQ ID NO: 597601 - RNA, 19 nt, Artificial Sequence
  Description of Artificial Sequence: Synthetic oligonucleotide
  Antisense strand to SEQ ID NO: 597600
guuaucaggccguaugugu

SEQ ID NO: 597602 - RNA, 19 nt, Artificial Sequence
  Description of Artificial Sequence: Synthetic oligonucleotide
  Sense strand starting at position 3468 of SEQ ID NO: 584897
ccugauaacuggcugaaga

SEQ ID NO: 597603 - RNA, 19 nt, Artificial Sequence
  Description of Artificial Sequence: Synthetic oligonucleotide
  Antisense strand to SEQ ID NO: 597602
ucuucagccaguuaucagg

SEQ ID NO: 597604 - RNA, 19 nt, Artificial Sequence
  Description of Artificial Sequence: Synthetic oligonucleotide
  Sense strand starting at position 3469 of SEQ ID NO: 584897
cugauaacuggcugaagac

SEQ ID NO: 597605 - RNA, 19 nt, Artificial Sequence
  Description of Artificial Sequence: Synthetic oligonucleotide
  Antisense strand to SEQ ID NO: 597604
gucuucagccaguuaucag

SEQ ID NO: 597606 - RNA, 19 nt, Artificial Sequence
  Description of Artificial Sequence: Synthetic oligonucleotide
  Sense strand starting at position 3497 of SEQ ID NO: 584897
cuaucaaauugugccagau

SEQ ID NO: 597607 - RNA, 19 nt, Artificial Sequence
  Description of Artificial Sequence: Synthetic oligonucleotide
  Antisense strand to SEQ ID NO: 597606
aucuggcacaauuugauag

SEQ ID NO: 597608 - RNA, 19 nt, Artificial Sequence
  Description of Artificial Sequence: Synthetic oligonucleotide
  Sense strand starting at position 3607 of SEQ ID NO: 584897
acaguuaauuaucuggauu

SEQ ID NO: 597609 - RNA, 19 nt, Artificial Sequence
  Description of Artificial Sequence: Synthetic oligonucleotide
  Antisense strand to SEQ ID NO: 597608
aauccagauaauuaacugu

SEQ ID NO: 597610 - RNA, 19 nt, Artificial Sequence
  Description of Artificial Sequence: Synthetic oligonucleotide
  Sense strand starting at position 3670 of SEQ ID NO: 584897
agaaauucuugcccagaug

SEQ ID NO: 597611 - RNA, 19 nt, Artificial Sequence
  Description of Artificial Sequence: Synthetic oligonucleotide
  Antisense strand to SEQ ID NO: 597610
caucugggcaagaauuucu

SEQ ID NO: 597612 - RNA, 19 nt, Artificial Sequence
  Description of Artificial Sequence: Synthetic oligonucleotide
  Sense strand starting at position 3708 of SEQ ID NO: 584897
uugauuugccugggacugu

SEQ ID NO: 597613 - RNA, 19 nt, Artificial Sequence
  Description of Artificial Sequence: Synthetic oligonucleotide
  Antisense strand to SEQ ID NO: 597612
acagucccaggcaaaucaa

SEQ ID NO: 597614 - RNA, 19 nt, Artificial Sequence
  Description of Artificial Sequence: Synthetic oligonucleotide
  Sense strand starting at position 3829 of SEQ ID NO: 584897
caguguuugccuuaggaaa

SEQ ID NO: 597615 - RNA, 19 nt, Artificial Sequence
  Description of Artificial Sequence: Synthetic oligonucleotide
  Antisense strand to SEQ ID NO: 597614
uuuccuaaggcaaacacug

SEQ ID NO: 597616 - RNA, 19 nt, Artificial Sequence
  Description of Artificial Sequence: Synthetic oligonucleotide
  Sense strand starting at position 127 of SEQ ID NO: 584898
gaggcauucuggcuaaaua

SEQ ID NO: 597617 - RNA, 19 nt, Artificial Sequence
  Description of Artificial Sequence: Synthetic oligonucleotide
  Antisense strand to SEQ ID NO: 597616
uauuuagccagaaugccuc

SEQ ID NO: 597618 - RNA, 19 nt, Artificial Sequence
  Description of Artificial Sequence: Synthetic oligonucleotide
  Sense strand starting at position 128 of SEQ ID NO: 584898
aggcauucuggcuaaauaa

SEQ ID NO: 597619 - RNA, 19 nt, Artificial Sequence
  Description of Artificial Sequence: Synthetic oligonucleotide
  Antisense strand to SEQ ID NO: 597618
uuauuuagccagaaugccu

SEQ ID NO: 597620 - RNA, 19 nt, Artificial Sequence
  Description of Artificial Sequence: Synthetic oligonucleotide
  Sense strand starting at position 1030 of SEQ ID NO: 584898
gaaguuggcauguagagua

SEQ ID NO: 597621 - RNA, 19 nt, Artificial Sequence
  Description of Artificial Sequence: Synthetic oligonucleotide
  Antisense strand to SEQ ID NO: 597620
uacucuacaugccaacuuc

SEQ ID NO: 597622 - RNA, 19 nt, Artificial Sequence
  Description of Artificial Sequence: Synthetic oligonucleotide
  Sense strand starting at position 1035 of SEQ ID NO: 584898
uggcauguagaguauaaca

SEQ ID NO: 597623 - RNA, 19 nt, Artificial Sequence
  Description of Artificial Sequence: Synthetic oligonucleotide
  Antisense strand to SEQ ID NO: 597622
uguuauacucuacaugcca

SEQ ID NO: 597624 - RNA, 19 nt, Artificial Sequence
  Description of Artificial Sequence: Synthetic oligonucleotide
  Sense strand starting at position 1037 of SEQ ID NO: 584898
gcauguagaguauaacaaa

SEQ ID NO: 597625 - RNA, 19 nt, Artificial Sequence
  Description of Artificial Sequence: Synthetic oligonucleotide
  Antisense strand to SEQ ID NO: 597624
uuuguuauacucuacaugc

SEQ ID NO: 597626 - RNA, 19 nt, Artificial Sequence
  Description of Artificial Sequence: Synthetic oligonucleotide
  Sense strand starting at position 1094 of SEQ ID NO: 584898
uuagcuuuccaauggauga

SEQ ID NO: 597627 - RNA, 19 nt, Artificial Sequence
  Description of Artificial Sequence: Synthetic oligonucleotide
  Antisense strand to SEQ ID NO: 597626
ucauccauuggaaagcuaa

SEQ ID NO: 597628 - RNA, 19 nt, Artificial Sequence
  Description of Artificial Sequence: Synthetic oligonucleotide
  Sense strand starting at position 1096 of SEQ ID NO: 584898
agcuuuccaauggaugagu

SEQ ID NO: 597629 - RNA, 19 nt, Artificial Sequence
  Description of Artificial Sequence: Synthetic oligonucleotide
  Antisense strand to SEQ ID NO: 597628
acucauccauuggaaagcu

SEQ ID NO: 597630 - RNA, 19 nt, Artificial Sequence
  Description of Artificial Sequence: Synthetic oligonucleotide
  Sense strand starting at position 1145 of SEQ ID NO: 584898
ccagauugccuggauucca

SEQ ID NO: 597631 - RNA, 19 nt, Artificial Sequence
  Description of Artificial Sequence: Synthetic oligonucleotide
  Antisense strand to SEQ ID NO: 597630
uggaauccaggcaaucugg

SEQ ID NO: 597632 - RNA, 19 nt, Artificial Sequence
  Description of Artificial Sequence: Synthetic oligonucleotide
  Sense strand starting at position 1210 of SEQ ID NO: 584898
cacuucuuuccagaggugu

SEQ ID NO: 597633 - RNA, 19 nt, Artificial Sequence
  Description of Artificial Sequence: Synthetic oligonucleotide
  Antisense strand to SEQ ID NO: 597632
acaccucuggaaagaagug

SEQ ID NO: 597634 - RNA, 19 nt, Artificial Sequence
  Description of Artificial Sequence: Synthetic oligonucleotide
  Sense strand starting at position 1231 of SEQ ID NO: 584898
ggacuaaauuaguccuguu

SEQ ID NO: 597635 - RNA, 19 nt, Artificial Sequence
  Description of Artificial Sequence: Synthetic oligonucleotide
  Antisense strand to SEQ ID NO: 597634
aacaggacuaauuuagucc

SEQ ID NO: 597636 - RNA, 19 nt, Artificial Sequence
  Description of Artificial Sequence: Synthetic oligonucleotide
  Sense strand starting at position 1739 of SEQ ID NO: 584898
agccuaaaggaucgagacu

SEQ ID NO: 597637 - RNA, 19 nt, Artificial Sequence
  Description of Artificial Sequence: Synthetic oligonucleotide
  Antisense strand to SEQ ID NO: 597636
agucucgauccuuuaggcu

SEQ ID NO: 597638 - RNA, 19 nt, Artificial Sequence
  Description of Artificial Sequence: Synthetic oligonucleotide
  Sense strand starting at position 2133 of SEQ ID NO: 584898
ugguuaagacugugaaaca

SEQ ID NO: 597639 - RNA, 19 nt, Artificial Sequence
  Description of Artificial Sequence: Synthetic oligonucleotide
  Antisense strand to SEQ ID NO: 597638
uguuucacagucuuaacca

SEQ ID NO: 597640 - RNA, 19 nt, Artificial Sequence
  Description of Artificial Sequence: Synthetic oligonucleotide
  Sense strand starting at position 2154 of SEQ ID NO: 584898
aguucucguaaauaaggau

SEQ ID NO: 597641 - RNA, 19 nt, Artificial Sequence
  Description of Artificial Sequence: Synthetic oligonucleotide
  Antisense strand to SEQ ID NO: 597640
auccuuauuuacgagaacu

SEQ ID NO: 597642 - RNA, 19 nt, Artificial Sequence
  Description of Artificial Sequence: Synthetic oligonucleotide
  Sense strand starting at position 2609 of SEQ ID NO: 584898
agaauaugcuuugcuuaag

SEQ ID NO: 597643 - RNA, 19 nt, Artificial Sequence
  Description of Artificial Sequence: Synthetic oligonucleotide
  Antisense strand to SEQ ID NO: 597642
cuuaagcaaagcauauucu

SEQ ID NO: 597644 - RNA, 19 nt, Artificial Sequence
  Description of Artificial Sequence: Synthetic oligonucleotide
  Sense strand starting at position 2781 of SEQ ID NO: 584898
auagcacagccuuagaaau

SEQ ID NO: 597645 - RNA, 19 nt, Artificial Sequence
  Description of Artificial Sequence: Synthetic oligonucleotide
  Antisense strand to SEQ ID NO: 597644
auuucuaaggcugugcuau

SEQ ID NO: 597646 - RNA, 19 nt, Artificial Sequence
  Description of Artificial Sequence: Synthetic oligonucleotide
  Sense strand starting at position 3111 of SEQ ID NO: 584898
gggagaugagacuggcuau

SEQ ID NO: 597647 - RNA, 19 nt, Artificial Sequence
  Description of Artificial Sequence: Synthetic oligonucleotide
  Antisense strand to SEQ ID NO: 597646
auagccagucucaucuccc

SEQ ID NO: 597648 - RNA, 19 nt, Artificial Sequence
  Description of Artificial Sequence: Synthetic oligonucleotide
  Sense strand starting at position 3112 of SEQ ID NO: 584898
ggagaugagacuggcuauu

SEQ ID NO: 597649 - RNA, 19 nt, Artificial Sequence
  Description of Artificial Sequence: Synthetic oligonucleotide
  Antisense strand to SEQ ID NO: 597648
aauagccagucucaucucc

SEQ ID NO: 597650 - RNA, 19 nt, Artificial Sequence
  Description of Artificial Sequence: Synthetic oligonucleotide
  Sense strand starting at position 3169 of SEQ ID NO: 584898
guaaguauacaagguaaag

SEQ ID NO: 597651 - RNA, 19 nt, Artificial Sequence
  Description of Artificial Sequence: Synthetic oligonucleotide
  Antisense strand to SEQ ID NO: 597650
cuuuaccuuguauacuuac

SEQ ID NO: 597652 - RNA, 19 nt, Artificial Sequence
  Description of Artificial Sequence: Synthetic oligonucleotide
  Sense strand starting at position 3241 of SEQ ID NO: 584898
uggcuuauggcugauuugu

SEQ ID NO: 597653 - RNA, 19 nt, Artificial Sequence
  Description of Artificial Sequence: Synthetic oligonucleotide
  Antisense strand to SEQ ID NO: 597652
acaaaucagccauaagcca

SEQ ID NO: 597654 - RNA, 19 nt, Artificial Sequence
  Description of Artificial Sequence: Synthetic oligonucleotide
  Sense strand starting at position 3290 of SEQ ID NO: 584898
ugucuuccaugagcauaua

SEQ ID NO: 597655 - RNA, 19 nt, Artificial Sequence
  Description of Artificial Sequence: Synthetic oligonucleotide
  Antisense strand to SEQ ID NO: 597654
uauaugcucauggaagaca

SEQ ID NO: 597656 - RNA, 19 nt, Artificial Sequence
  Description of Artificial Sequence: Synthetic oligonucleotide
  Sense strand starting at position 3291 of SEQ ID NO: 584898
gucuuccaugagcauauau

SEQ ID NO: 597657 - RNA, 19 nt, Artificial Sequence
  Description of Artificial Sequence: Synthetic oligonucleotide
  Antisense strand to SEQ ID NO: 597656
auauaugcucauggaagac

SEQ ID NO: 597658 - RNA, 19 nt, Artificial Sequence
  Description of Artificial Sequence: Synthetic oligonucleotide
  Sense strand starting at position 3355 of SEQ ID NO: 584898
ccaucauauuaaguauagu

SEQ ID NO: 597659 - RNA, 19 nt, Artificial Sequence
  Description of Artificial Sequence: Synthetic oligonucleotide
  Antisense strand to SEQ ID NO: 597658
acuauacuuaauaugaugg

SEQ ID NO: 597660 - RNA, 19 nt, Artificial Sequence
  Description of Artificial Sequence: Synthetic oligonucleotide
  Sense strand starting at position 3384 of SEQ ID NO: 584898
ugggcaaauccuggcacaa

SEQ ID NO: 597661 - RNA, 19 nt, Artificial Sequence
  Description of Artificial Sequence: Synthetic oligonucleotide
  Antisense strand to SEQ ID NO: 597660
uugugccaggauuugccca

SEQ ID NO: 597662 - RNA, 19 nt, Artificial Sequence
  Description of Artificial Sequence: Synthetic oligonucleotide
  Sense strand starting at position 3409 of SEQ ID NO: 584898
ccugaaguauguuugauac

SEQ ID NO: 597663 - RNA, 19 nt, Artificial Sequence
  Description of Artificial Sequence: Synthetic oligonucleotide
  Antisense strand to SEQ ID NO: 597662
guaucaaacauacuucagg

SEQ ID NO: 597664 - RNA, 19 nt, Artificial Sequence
  Description of Artificial Sequence: Synthetic oligonucleotide
  Sense strand starting at position 3429 of SEQ ID NO: 584898
guuaauuccuacuuaaugu

SEQ ID NO: 597665 - RNA, 19 nt, Artificial Sequence
  Description of Artificial Sequence: Synthetic oligonucleotide
  Antisense strand to SEQ ID NO: 597664
acauuaaguaggaauuaac

SEQ ID NO: 597666 - RNA, 19 nt, Artificial Sequence
  Description of Artificial Sequence: Synthetic oligonucleotide
  Sense strand starting at position 3483 of SEQ ID NO: 584898
cuguguugggaaugacagu

SEQ ID NO: 597667 - RNA, 19 nt, Artificial Sequence
  Description of Artificial Sequence: Synthetic oligonucleotide
  Antisense strand to SEQ ID NO: 597666
acugucauucccaacacag

SEQ ID NO: 597668 - RNA, 19 nt, Artificial Sequence
  Description of Artificial Sequence: Synthetic oligonucleotide
  Sense strand starting at position 3492 of SEQ ID NO: 584898
gaaugacaguguucucuuu

SEQ ID NO: 597669 - RNA, 19 nt, Artificial Sequence
  Description of Artificial Sequence: Synthetic oligonucleotide
  Antisense strand to SEQ ID NO: 597668
aaagagaacacugucauuc

SEQ ID NO: 597670 - RNA, 19 nt, Artificial Sequence
  Description of Artificial Sequence: Synthetic oligonucleotide
  Sense strand starting at position 3544 of SEQ ID NO: 584898
gagaguggccugugacaug

SEQ ID NO: 597671 - RNA, 19 nt, Artificial Sequence
  Description of Artificial Sequence: Synthetic oligonucleotide
  Antisense strand to SEQ ID NO: 597670
caugucacaggccacucuc

SEQ ID NO: 597672 - RNA, 19 nt, Artificial Sequence
  Description of Artificial Sequence: Synthetic oligonucleotide
  Sense strand starting at position 3554 of SEQ ID NO: 584898
ugugacauggucuagccaa

SEQ ID NO: 597673 - RNA, 19 nt, Artificial Sequence
  Description of Artificial Sequence: Synthetic oligonucleotide
  Antisense strand to SEQ ID NO: 597672
uuggcuagaccaugucaca

SEQ ID NO: 597674 - RNA, 19 nt, Artificial Sequence
  Description of Artificial Sequence: Synthetic oligonucleotide
  Sense strand starting at position 3568 of SEQ ID NO: 584898
gccaaugagauguaagugu

SEQ ID NO: 597675 - RNA, 19 nt, Artificial Sequence
  Description of Artificial Sequence: Synthetic oligonucleotide
  Antisense strand to SEQ ID NO: 597674
acacuuacaucucauuggc

SEQ ID NO: 597676 - RNA, 19 nt, Artificial Sequence
  Description of Artificial Sequence: Synthetic oligonucleotide
  Sense strand starting at position 3572 of SEQ ID NO: 584898
augagauguaaguguaauc

SEQ ID NO: 597677 - RNA, 19 nt, Artificial Sequence
  Description of Artificial Sequence: Synthetic oligonucleotide
  Antisense strand to SEQ ID NO: 597676
gauuacacuuacaucucau

SEQ ID NO: 597678 - RNA, 19 nt, Artificial Sequence
  Description of Artificial Sequence: Synthetic oligonucleotide
  Sense strand starting at position 3581 of SEQ ID NO: 584898
aaguguaaucacuggauga

SEQ ID NO: 597679 - RNA, 19 nt, Artificial Sequence
  Description of Artificial Sequence: Synthetic oligonucleotide
  Antisense strand to SEQ ID NO: 597678
ucauccagugauuacacuu

SEQ ID NO: 597680 - RNA, 19 nt, Artificial Sequence
  Description of Artificial Sequence: Synthetic oligonucleotide
  Sense strand starting at position 3582 of SEQ ID NO: 584898
aguguaaucacuggaugag

SEQ ID NO: 597681 - RNA, 19 nt, Artificial Sequence
  Description of Artificial Sequence: Synthetic oligonucleotide
  Antisense strand to SEQ ID NO: 597680
cucauccagugauuacacu

SEQ ID NO: 597682 - RNA, 19 nt, Artificial Sequence
  Description of Artificial Sequence: Synthetic oligonucleotide
  Sense strand starting at position 3597 of SEQ ID NO: 584898
ugaggugucagggaaagca

SEQ ID NO: 597683 - RNA, 19 nt, Artificial Sequence
  Description of Artificial Sequence: Synthetic oligonucleotide
  Antisense strand to SEQ ID NO: 597682
ugcuuucccugacaccuca

SEQ ID NO: 597684 - RNA, 19 nt, Artificial Sequence
  Description of Artificial Sequence: Synthetic oligonucleotide
  Sense strand starting at position 3661 of SEQ ID NO: 584898
ugagaauaugcuggcugaa

SEQ ID NO: 597685 - RNA, 19 nt, Artificial Sequence
  Description of Artificial Sequence: Synthetic oligonucleotide
  Antisense strand to SEQ ID NO: 597684
uucagccagcauauucuca

SEQ ID NO: 597686 - RNA, 19 nt, Artificial Sequence
  Description of Artificial Sequence: Synthetic oligonucleotide
  Sense strand starting at position 3752 of SEQ ID NO: 584898
gaaccugaguuccugguaa

SEQ ID NO: 597687 - RNA, 19 nt, Artificial Sequence
  Description of Artificial Sequence: Synthetic oligonucleotide
  Antisense strand to SEQ ID NO: 597686
uuaccaggaacucagguuc

SEQ ID NO: 597688 - RNA, 19 nt, Artificial Sequence
  Description of Artificial Sequence: Synthetic oligonucleotide
  Sense strand starting at position 3800 of SEQ ID NO: 584898
acuggcuaucuccagacuu

SEQ ID NO: 597689 - RNA, 19 nt, Artificial Sequence
  Description of Artificial Sequence: Synthetic oligonucleotide
  Antisense strand to SEQ ID NO: 597688
aagucuggagauagccagu

SEQ ID NO: 597690 - RNA, 19 nt, Artificial Sequence
  Description of Artificial Sequence: Synthetic oligonucleotide
  Sense strand starting at position 3811 of SEQ ID NO: 584898
ccagacuuugcaugagaga

SEQ ID NO: 597691 - RNA, 19 nt, Artificial Sequence
  Description of Artificial Sequence: Synthetic oligonucleotide
  Antisense strand to SEQ ID NO: 597690
ucucucaugcaaagucugg

SEQ ID NO: 597692 - RNA, 19 nt, Artificial Sequence
  Description of Artificial Sequence: Synthetic oligonucleotide
  Sense strand starting at position 3905 of SEQ ID NO: 584898
cuacaauggguaugacuuu

SEQ ID NO: 597693 - RNA, 19 nt, Artificial Sequence
  Description of Artificial Sequence: Synthetic oligonucleotide
  Antisense strand to SEQ ID NO: 597692
aaagucauacccauuguag

SEQ ID NO: 597694 - RNA, 19 nt, Artificial Sequence
  Description of Artificial Sequence: Synthetic oligonucleotide
  Sense strand starting at position 3911 of SEQ ID NO: 584898
uggguaugacuuuggaagu

SEQ ID NO: 597695 - RNA, 19 nt, Artificial Sequence
  Description of Artificial Sequence: Synthetic oligonucleotide
  Antisense strand to SEQ ID NO: 597694
acuuccaaagucauaccca

SEQ ID NO: 597696 - RNA, 19 nt, Artificial Sequence
  Description of Artificial Sequence: Synthetic oligonucleotide
  Sense strand starting at position 67 of SEQ ID NO: 584899
gcuggucuuguuuaaauaa

SEQ ID NO: 597697 - RNA, 19 nt, Artificial Sequence
  Description of Artificial Sequence: Synthetic oligonucleotide
  Antisense strand to SEQ ID NO: 597696
uuauuuaaacaagaccagc

SEQ ID NO: 597698 - RNA, 19 nt, Artificial Sequence
  Description of Artificial Sequence: Synthetic oligonucleotide
  Sense strand starting at position 618 of SEQ ID NO: 584899
ucugguauuucucucaugu

SEQ ID NO: 597699 - RNA, 19 nt, Artificial Sequence
  Description of Artificial Sequence: Synthetic oligonucleotide
  Antisense strand to SEQ ID NO: 597698
acaugagagaaauaccaga

SEQ ID NO: 597700 - RNA, 19 nt, Artificial Sequence
  Description of Artificial Sequence: Synthetic oligonucleotide
  Sense strand starting at position 627 of SEQ ID NO: 584899
ucucucauguggccacaua

SEQ ID NO: 597701 - RNA, 19 nt, Artificial Sequence
  Description of Artificial Sequence: Synthetic oligonucleotide
  Antisense strand to SEQ ID NO: 597700
uauguggccacaugagaga

SEQ ID NO: 597702 - RNA, 19 nt, Artificial Sequence
  Description of Artificial Sequence: Synthetic oligonucleotide
  Sense strand starting at position 628 of SEQ ID NO: 584899
cucucauguggccacauaa

SEQ ID NO: 597703 - RNA, 19 nt, Artificial Sequence
  Description of Artificial Sequence: Synthetic oligonucleotide
  Antisense strand to SEQ ID NO: 597702
uuauguggccacaugagag

SEQ ID NO: 597704 - RNA, 19 nt, Artificial Sequence
  Description of Artificial Sequence: Synthetic oligonucleotide
  Sense strand starting at position 638 of SEQ ID NO: 584899
gccacauaaccuugaaugu

SEQ ID NO: 597705 - RNA, 19 nt, Artificial Sequence
  Description of Artificial Sequence: Synthetic oligonucleotide
  Antisense strand to SEQ ID NO: 597704
acauucaagguuauguggc

SEQ ID NO: 597706 - RNA, 19 nt, Artificial Sequence
  Description of Artificial Sequence: Synthetic oligonucleotide
  Sense strand starting at position 673 of SEQ ID NO: 584899
ucaucuguacaguggugaa

SEQ ID NO: 597707 - RNA, 19 nt, Artificial Sequence
  Description of Artificial Sequence: Synthetic oligonucleotide
  Antisense strand to SEQ ID NO: 597706
uucaccacuguacagauga

SEQ ID NO: 597708 - RNA, 19 nt, Artificial Sequence
  Description of Artificial Sequence: Synthetic oligonucleotide
  Sense strand starting at position 714 of SEQ ID NO: 584899
uguugugagcauuaccuaa

SEQ ID NO: 597709 - RNA, 19 nt, Artificial Sequence
  Description of Artificial Sequence: Synthetic oligonucleotide
  Antisense strand to SEQ ID NO: 597708
uuagguaaugcucacaaca

SEQ ID NO: 597710 - RNA, 19 nt, Artificial Sequence
  Description of Artificial Sequence: Synthetic oligonucleotide
  Sense strand starting at position 755 of SEQ ID NO: 584899
cauguuuguugagcuagga

SEQ ID NO: 597711 - RNA, 19 nt, Artificial Sequence
  Description of Artificial Sequence: Synthetic oligonucleotide
  Antisense strand to SEQ ID NO: 597710
uccuagcucaacaaacaug

SEQ ID NO: 597712 - RNA, 19 nt, Artificial Sequence
  Description of Artificial Sequence: Synthetic oligonucleotide
  Sense strand starting at position 849 of SEQ ID NO: 584899
ccugguuugugucccagga

SEQ ID NO: 597713 - RNA, 19 nt, Artificial Sequence
  Description of Artificial Sequence: Synthetic oligonucleotide
  Antisense strand to SEQ ID NO: 597712
uccugggacacaaaccagg

SEQ ID NO: 597714 - RNA, 19 nt, Artificial Sequence
  Description of Artificial Sequence: Synthetic oligonucleotide
  Sense strand starting at position 1016 of SEQ ID NO: 584899
agcacaccgcgcuuauaau

SEQ ID NO: 597715 - RNA, 19 nt, Artificial Sequence
  Description of Artificial Sequence: Synthetic oligonucleotide
  Antisense strand to SEQ ID NO: 597714
auuauaagcgcggugugcu

SEQ ID NO: 597716 - RNA, 19 nt, Artificial Sequence
  Description of Artificial Sequence: Synthetic oligonucleotide
  Sense strand starting at position 1792 of SEQ ID NO: 584899
agcugaauuucugaauagu

SEQ ID NO: 597717 - RNA, 19 nt, Artificial Sequence
  Description of Artificial Sequence: Synthetic oligonucleotide
  Antisense strand to SEQ ID NO: 597716
acuauucagaaauucagcu

SEQ ID NO: 597718 - RNA, 19 nt, Artificial Sequence
  Description of Artificial Sequence: Synthetic oligonucleotide
  Sense strand starting at position 1907 of SEQ ID NO: 584899
gggauuacuguugagcaga

SEQ ID NO: 597719 - RNA, 19 nt, Artificial Sequence
  Description of Artificial Sequence: Synthetic oligonucleotide
  Antisense strand to SEQ ID NO: 597718
ucugcucaacaguaauccc

SEQ ID NO: 597720 - RNA, 19 nt, Artificial Sequence
  Description of Artificial Sequence: Synthetic oligonucleotide
  Sense strand starting at position 1909 of SEQ ID NO: 584899
gauuacuguugagcagaaa

SEQ ID NO: 597721 - RNA, 19 nt, Artificial Sequence
  Description of Artificial Sequence: Synthetic oligonucleotide
  Antisense strand to SEQ ID NO: 597720
uuucugcucaacaguaauc

SEQ ID NO: 597722 - RNA, 19 nt, Artificial Sequence
  Description of Artificial Sequence: Synthetic oligonucleotide
  Sense strand starting at position 1910 of SEQ ID NO: 584899
auuacuguugagcagaaau

SEQ ID NO: 597723 - RNA, 19 nt, Artificial Sequence
  Description of Artificial Sequence: Synthetic oligonucleotide
  Antisense strand to SEQ ID NO: 597722
auuucugcucaacaguaau

SEQ ID NO: 597724 - RNA, 19 nt, Artificial Sequence
  Description of Artificial Sequence: Synthetic oligonucleotide
  Sense strand starting at position 1920 of SEQ ID NO: 584899
agcagaaaugcuugugaaa

SEQ ID NO: 597725 - RNA, 19 nt, Artificial Sequence
  Description of Artificial Sequence: Synthetic oligonucleotide
  Antisense strand to SEQ ID NO: 597724
uuucacaagcauuucugcu

SEQ ID NO: 597726 - RNA, 19 nt, Artificial Sequence
  Description of Artificial Sequence: Synthetic oligonucleotide
  Sense strand starting at position 1964 of SEQ ID NO: 584899
cuucuuuggcauuaaguaa

SEQ ID NO: 597727 - RNA, 19 nt, Artificial Sequence
  Description of Artificial Sequence: Synthetic oligonucleotide
  Antisense strand to SEQ ID NO: 597726
uuacuuaaugccaaagaag

SEQ ID NO: 597728 - RNA, 19 nt, Artificial Sequence
  Description of Artificial Sequence: Synthetic oligonucleotide
  Sense strand starting at position 2061 of SEQ ID NO: 584899
gguucucugugagccagaa

SEQ ID NO: 597729 - RNA, 19 nt, Artificial Sequence
  Description of Artificial Sequence: Synthetic oligonucleotide
  Antisense strand to SEQ ID NO: 597728
uucuggcucacagagaacc

SEQ ID NO: 597730 - RNA, 19 nt, Artificial Sequence
  Description of Artificial Sequence: Synthetic oligonucleotide
  Sense strand starting at position 2074 of SEQ ID NO: 584899
ccagaaaccuggcuucugu

SEQ ID NO: 597731 - RNA, 19 nt, Artificial Sequence
  Description of Artificial Sequence: Synthetic oligonucleotide
  Antisense strand to SEQ ID NO: 597730
acagaagccagguuucugg

SEQ ID NO: 597732 - RNA, 19 nt, Artificial Sequence
  Description of Artificial Sequence: Synthetic oligonucleotide
  Sense strand starting at position 2152 of SEQ ID NO: 584899
agggcauugcaguaaagcu

SEQ ID NO: 597733 - RNA, 19 nt, Artificial Sequence
  Description of Artificial Sequence: Synthetic oligonucleotide
  Antisense strand to SEQ ID NO: 597732
agcuuuacugcaaugcccu

SEQ ID NO: 597734 - RNA, 19 nt, Artificial Sequence
  Description of Artificial Sequence: Synthetic oligonucleotide
  Sense strand starting at position 2214 of SEQ ID NO: 584899
guuguagcauacuuggaaa

SEQ ID NO: 597735 - RNA, 19 nt, Artificial Sequence
  Description of Artificial Sequence: Synthetic oligonucleotide
  Antisense strand to SEQ ID NO: 597734
uuuccaaguaugcuacaac

SEQ ID NO: 597736 - RNA, 19 nt, Artificial Sequence
  Description of Artificial Sequence: Synthetic oligonucleotide
  Sense strand starting at position 2216 of SEQ ID NO: 584899
uguagcauacuuggaaauu

SEQ ID NO: 597737 - RNA, 19 nt, Artificial Sequence
  Description of Artificial Sequence: Synthetic oligonucleotide
  Antisense strand to SEQ ID NO: 597736
aauuuccaaguaugcuaca

SEQ ID NO: 597738 - RNA, 19 nt, Artificial Sequence
  Description of Artificial Sequence: Synthetic oligonucleotide
  Sense strand starting at position 2237 of SEQ ID NO: 584899
gguggaguauugucaucca

SEQ ID NO: 597739 - RNA, 19 nt, Artificial Sequence
  Description of Artificial Sequence: Synthetic oligonucleotide
  Antisense strand to SEQ ID NO: 597738
uggaugacaauacuccacc

SEQ ID NO: 597740 - RNA, 19 nt, Artificial Sequence
  Description of Artificial Sequence: Synthetic oligonucleotide
  Sense strand starting at position 2656 of SEQ ID NO: 584899
cagaaagagucuuaagaug

SEQ ID NO: 597741 - RNA, 19 nt, Artificial Sequence
  Description of Artificial Sequence: Synthetic oligonucleotide
  Antisense strand to SEQ ID NO: 597740
caucuuaagacucuuucug

SEQ ID NO: 597742 - RNA, 19 nt, Artificial Sequence
  Description of Artificial Sequence: Synthetic oligonucleotide
  Sense strand starting at position 2706 of SEQ ID NO: 584899
gaaagcuaccgucaguaaa

SEQ ID NO: 597743 - RNA, 19 nt, Artificial Sequence
  Description of Artificial Sequence: Synthetic oligonucleotide
  Antisense strand to SEQ ID NO: 597742
uuuacugacgguagcuuuc

SEQ ID NO: 597744 - RNA, 19 nt, Artificial Sequence
  Description of Artificial Sequence: Synthetic oligonucleotide
  Sense strand starting at position 2709 of SEQ ID NO: 584899
agcuaccgucaguaaagua

SEQ ID NO: 597745 - RNA, 19 nt, Artificial Sequence
  Description of Artificial Sequence: Synthetic oligonucleotide
  Antisense strand to SEQ ID NO: 597744
uacuuuacugacgguagcu

SEQ ID NO: 597746 - RNA, 19 nt, Artificial Sequence
  Description of Artificial Sequence: Synthetic oligonucleotide
  Sense strand starting at position 2769 of SEQ ID NO: 584899
gaggaagugcucugacagg

SEQ ID NO: 597747 - RNA, 19 nt, Artificial Sequence
  Description of Artificial Sequence: Synthetic oligonucleotide
  Antisense strand to SEQ ID NO: 597746
ccugucagagcacuuccuc

SEQ ID NO: 597748 - RNA, 19 nt, Artificial Sequence
  Description of Artificial Sequence: Synthetic oligonucleotide
  Sense strand starting at position 2774 of SEQ ID NO: 584899
agugcucugacaggucaaa

SEQ ID NO: 597749 - RNA, 19 nt, Artificial Sequence
  Description of Artificial Sequence: Synthetic oligonucleotide
  Antisense strand to SEQ ID NO: 597748
uuugaccugucagagcacu

SEQ ID NO: 597750 - RNA, 19 nt, Artificial Sequence
  Description of Artificial Sequence: Synthetic oligonucleotide
  Sense strand starting at position 2866 of SEQ ID NO: 584899
agcguaagugccuaauaaa

SEQ ID NO: 597751 - RNA, 19 nt, Artificial Sequence
  Description of Artificial Sequence: Synthetic oligonucleotide
  Antisense strand to SEQ ID NO: 597750
uuuauuaggcacuuacgcu

SEQ ID NO: 597752 - RNA, 19 nt, Artificial Sequence
  Description of Artificial Sequence: Synthetic oligonucleotide
  Sense strand starting at position 2883 of SEQ ID NO: 584899
aaugaaugugugggucuga

SEQ ID NO: 597753 - RNA, 19 nt, Artificial Sequence
  Description of Artificial Sequence: Synthetic oligonucleotide
  Antisense strand to SEQ ID NO: 597752
ucagacccacacauucauu

SEQ ID NO: 597754 - RNA, 19 nt, Artificial Sequence
  Description of Artificial Sequence: Synthetic oligonucleotide
  Sense strand starting at position 2884 of SEQ ID NO: 584899
augaaugugugggucugaa

SEQ ID NO: 597755 - RNA, 19 nt, Artificial Sequence
  Description of Artificial Sequence: Synthetic oligonucleotide
  Antisense strand to SEQ ID NO: 597754
uucagacccacacauucau

SEQ ID NO: 597756 - RNA, 19 nt, Artificial Sequence
  Description of Artificial Sequence: Synthetic oligonucleotide
  Sense strand starting at position 2896 of SEQ ID NO: 584899
gucugaagaaagugauauu

SEQ ID NO: 597757 - RNA, 19 nt, Artificial Sequence
  Description of Artificial Sequence: Synthetic oligonucleotide
  Antisense strand to SEQ ID NO: 597756
aauaucacuuucuucagac

SEQ ID NO: 597758 - RNA, 19 nt, Artificial Sequence
  Description of Artificial Sequence: Synthetic oligonucleotide
  Sense strand starting at position 3309 of SEQ ID NO: 584899
cauccaucuccgggacuuu

SEQ ID NO: 597759 - RNA, 19 nt, Artificial Sequence
  Description of Artificial Sequence: Synthetic oligonucleotide
  Antisense strand to SEQ ID NO: 597758
aaagucccggagauggaug

SEQ ID NO: 597760 - RNA, 19 nt, Artificial Sequence
  Description of Artificial Sequence: Synthetic oligonucleotide
  Sense strand starting at position 3513 of SEQ ID NO: 584899
ggguuucccucccuguuaa

SEQ ID NO: 597761 - RNA, 19 nt, Artificial Sequence
  Description of Artificial Sequence: Synthetic oligonucleotide
  Antisense strand to SEQ ID NO: 597760
uuaacagggagggaaaccc

SEQ ID NO: 597762 - RNA, 19 nt, Artificial Sequence
  Description of Artificial Sequence: Synthetic oligonucleotide
  Sense strand starting at position 3531 of SEQ ID NO: 584899
aggugagucgcguuccauc

SEQ ID NO: 597763 - RNA, 19 nt, Artificial Sequence
  Description of Artificial Sequence: Synthetic oligonucleotide
  Antisense strand to SEQ ID NO: 597762
gauggaacgcgacucaccu

SEQ ID NO: 597764 - RNA, 19 nt, Artificial Sequence
  Description of Artificial Sequence: Synthetic oligonucleotide
  Sense strand starting at position 3533 of SEQ ID NO: 584899
gugagucgcguuccaucau

SEQ ID NO: 597765 - RNA, 19 nt, Artificial Sequence
  Description of Artificial Sequence: Synthetic oligonucleotide
  Antisense strand to SEQ ID NO: 597764
augauggaacgcgacucac

SEQ ID NO: 597766 - RNA, 19 nt, Artificial Sequence
  Description of Artificial Sequence: Synthetic oligonucleotide
  Sense strand starting at position 3626 of SEQ ID NO: 584899
gccuaaugugaauaacacu

SEQ ID NO: 597767 - RNA, 19 nt, Artificial Sequence
  Description of Artificial Sequence: Synthetic oligonucleotide
  Antisense strand to SEQ ID NO: 597766
aguguuauucacauuaggc

SEQ ID NO: 597768 - RNA, 19 nt, Artificial Sequence
  Description of Artificial Sequence: Synthetic oligonucleotide
  Sense strand starting at position 3662 of SEQ ID NO: 584899
acacguaacuccuugagac

SEQ ID NO: 597769 - RNA, 19 nt, Artificial Sequence
  Description of Artificial Sequence: Synthetic oligonucleotide
  Antisense strand to SEQ ID NO: 597768
gucucaaggaguuacgugu

SEQ ID NO: 597770 - RNA, 19 nt, Artificial Sequence
  Description of Artificial Sequence: Synthetic oligonucleotide
  Sense strand starting at position 3686 of SEQ ID NO: 584899
uuucgauuccuuuggauau

SEQ ID NO: 597771 - RNA, 19 nt, Artificial Sequence
  Description of Artificial Sequence: Synthetic oligonucleotide
  Antisense strand to SEQ ID NO: 597770
auauccaaaggaaucgaaa

SEQ ID NO: 597772 - RNA, 19 nt, Artificial Sequence
  Description of Artificial Sequence: Synthetic oligonucleotide
  Sense strand starting at position 3871 of SEQ ID NO: 584899
agaggccauccugaugagu

SEQ ID NO: 597773 - RNA, 19 nt, Artificial Sequence
  Description of Artificial Sequence: Synthetic oligonucleotide
  Antisense strand to SEQ ID NO: 597772
acucaucaggauggccucu

SEQ ID NO: 597774 - RNA, 19 nt, Artificial Sequence
  Description of Artificial Sequence: Synthetic oligonucleotide
  Sense strand starting at position 3882 of SEQ ID NO: 584899
ugaugaguacgagguggua

SEQ ID NO: 597775 - RNA, 19 nt, Artificial Sequence
  Description of Artificial Sequence: Synthetic oligonucleotide
  Antisense strand to SEQ ID NO: 597774
uaccaccucguacucauca

SEQ ID NO: 597776 - RNA, 19 nt, Artificial Sequence
  Description of Artificial Sequence: Synthetic oligonucleotide
  Sense strand starting at position 176 of SEQ ID NO: 584900
agacguuguaaaugaauaa

SEQ ID NO: 597777 - RNA, 19 nt, Artificial Sequence
  Description of Artificial Sequence: Synthetic oligonucleotide
  Antisense strand to SEQ ID NO: 597776
uuauucauuuacaacgucu

SEQ ID NO: 597778 - RNA, 19 nt, Artificial Sequence
  Description of Artificial Sequence: Synthetic oligonucleotide
  Sense strand starting at position 194 of SEQ ID NO: 584900
auuacaauguaacugagua

SEQ ID NO: 597779 - RNA, 19 nt, Artificial Sequence
  Description of Artificial Sequence: Synthetic oligonucleotide
  Antisense strand to SEQ ID NO: 597778
uacucaguuacauuguaau

SEQ ID NO: 597780 - RNA, 19 nt, Artificial Sequence
  Description of Artificial Sequence: Synthetic oligonucleotide
  Sense strand starting at position 337 of SEQ ID NO: 584900
aaugacuugugaguuagaa

SEQ ID NO: 597781 - RNA, 19 nt, Artificial Sequence
  Description of Artificial Sequence: Synthetic oligonucleotide
  Antisense strand to SEQ ID NO: 597780
uucuaacucacaagucauu

SEQ ID NO: 597782 - RNA, 19 nt, Artificial Sequence
  Description of Artificial Sequence: Synthetic oligonucleotide
  Sense strand starting at position 339 of SEQ ID NO: 584900
ugacuugugaguuagaagu

SEQ ID NO: 597783 - RNA, 19 nt, Artificial Sequence
  Description of Artificial Sequence: Synthetic oligonucleotide
  Antisense strand to SEQ ID NO: 597782
acuucuaacucacaaguca

SEQ ID NO: 597784 - RNA, 19 nt, Artificial Sequence
  Description of Artificial Sequence: Synthetic oligonucleotide
  Sense strand starting at position 345 of SEQ ID NO: 584900
gugaguuagaaguguaaug

SEQ ID NO: 597785 - RNA, 19 nt, Artificial Sequence
  Description of Artificial Sequence: Synthetic oligonucleotide
  Antisense strand to SEQ ID NO: 597784
cauuacacuucuaacucac

SEQ ID NO: 597786 - RNA, 19 nt, Artificial Sequence
  Description of Artificial Sequence: Synthetic oligonucleotide
  Sense strand starting at position 347 of SEQ ID NO: 584900
gaguuagaaguguaaugac

SEQ ID NO: 597787 - RNA, 19 nt, Artificial Sequence
  Description of Artificial Sequence: Synthetic oligonucleotide
  Antisense strand to SEQ ID NO: 597786
gucauuacacuucuaacuc

SEQ ID NO: 597788 - RNA, 19 nt, Artificial Sequence
  Description of Artificial Sequence: Synthetic oligonucleotide
  Sense strand starting at position 433 of SEQ ID NO: 584900
ugauguaugcccuggagga

SEQ ID NO: 597789 - RNA, 19 nt, Artificial Sequence
  Description of Artificial Sequence: Synthetic oligonucleotide
  Antisense strand to SEQ ID NO: 597788
uccuccagggcauacauca

SEQ ID NO: 597790 - RNA, 19 nt, Artificial Sequence
  Description of Artificial Sequence: Synthetic oligonucleotide
  Sense strand starting at position 434 of SEQ ID NO: 584900
gauguaugcccuggaggag

SEQ ID NO: 597791 - RNA, 19 nt, Artificial Sequence
  Description of Artificial Sequence: Synthetic oligonucleotide
  Antisense strand to SEQ ID NO: 597790
cuccuccagggcauacauc

SEQ ID NO: 597792 - RNA, 19 nt, Artificial Sequence
  Description of Artificial Sequence: Synthetic oligonucleotide
  Sense strand starting at position 435 of SEQ ID NO: 584900
auguaugcccuggaggaga

SEQ ID NO: 597793 - RNA, 19 nt, Artificial Sequence
  Description of Artificial Sequence: Synthetic oligonucleotide
  Antisense strand to SEQ ID NO: 597792
ucuccuccagggcauacau

SEQ ID NO: 597794 - RNA, 19 nt, Artificial Sequence
  Description of Artificial Sequence: Synthetic oligonucleotide
  Sense strand starting at position 529 of SEQ ID NO: 584900
aagggauggcugcagaauu

SEQ ID NO: 597795 - RNA, 19 nt, Artificial Sequence
  Description of Artificial Sequence: Synthetic oligonucleotide
  Antisense strand to SEQ ID NO: 597794
aauucugcagccaucccuu

SEQ ID NO: 597796 - RNA, 19 nt, Artificial Sequence
  Description of Artificial Sequence: Synthetic oligonucleotide
  Sense strand starting at position 543 of SEQ ID NO: 584900
gaauuaggguuuccuccuu

SEQ ID NO: 597797 - RNA, 19 nt, Artificial Sequence
  Description of Artificial Sequence: Synthetic oligonucleotide
  Antisense strand to SEQ ID NO: 597796
aaggaggaaacccuaauuc

SEQ ID NO: 597798 - RNA, 19 nt, Artificial Sequence
  Description of Artificial Sequence: Synthetic oligonucleotide
  Sense strand starting at position 667 of SEQ ID NO: 584900
aggaaugaggccugcacaa

SEQ ID NO: 597799 - RNA, 19 nt, Artificial Sequence
  Description of Artificial Sequence: Synthetic oligonucleotide
  Antisense strand to SEQ ID NO: 597798
uugugcaggccucauuccu

SEQ ID NO: 597800 - RNA, 19 nt, Artificial Sequence
  Description of Artificial Sequence: Synthetic oligonucleotide
  Sense strand starting at position 669 of SEQ ID NO: 584900
gaaugaggccugcacaaau

SEQ ID NO: 597801 - RNA, 19 nt, Artificial Sequence
  Description of Artificial Sequence: Synthetic oligonucleotide
  Antisense strand to SEQ ID NO: 597800
auuugugcaggccucauuc

SEQ ID NO: 597802 - RNA, 19 nt, Artificial Sequence
  Description of Artificial Sequence: Synthetic oligonucleotide
  Sense strand starting at position 802 of SEQ ID NO: 584900
ccacauggaguuugauauu

SEQ ID NO: 597803 - RNA, 19 nt, Artificial Sequence
  Description of Artificial Sequence: Synthetic oligonucleotide
  Antisense strand to SEQ ID NO: 597802
aauaucaaacuccaugugg

SEQ ID NO: 597804 - RNA, 19 nt, Artificial Sequence
  Description of Artificial Sequence: Synthetic oligonucleotide
  Sense strand starting at position 808 of SEQ ID NO: 584900
ggaguuugauauucuacug

SEQ ID NO: 597805 - RNA, 19 nt, Artificial Sequence
  Description of Artificial Sequence: Synthetic oligonucleotide
  Antisense strand to SEQ ID NO: 597804
caguagaauaucaaacucc

SEQ ID NO: 597806 - RNA, 19 nt, Artificial Sequence
  Description of Artificial Sequence: Synthetic oligonucleotide
  Sense strand starting at position 903 of SEQ ID NO: 584900
ggugucaugaaauagagua

SEQ ID NO: 597807 - RNA, 19 nt, Artificial Sequence
  Description of Artificial Sequence: Synthetic oligonucleotide
  Antisense strand to SEQ ID NO: 597806
uacucuauuucaugacacc

SEQ ID NO: 597808 - RNA, 19 nt, Artificial Sequence
  Description of Artificial Sequence: Synthetic oligonucleotide
  Sense strand starting at position 938 of SEQ ID NO: 584900
ggaagagcuucuuuaaagg

SEQ ID NO: 597809 - RNA, 19 nt, Artificial Sequence
  Description of Artificial Sequence: Synthetic oligonucleotide
  Antisense strand to SEQ ID NO: 597808
ccuuuaaagaagcucuucc

SEQ ID NO: 597810 - RNA, 19 nt, Artificial Sequence
  Description of Artificial Sequence: Synthetic oligonucleotide
  Sense strand starting at position 1046 of SEQ ID NO: 584900
caacaugugguauauaagu

SEQ ID NO: 597811 - RNA, 19 nt, Artificial Sequence
  Description of Artificial Sequence: Synthetic oligonucleotide
  Antisense strand to SEQ ID NO: 597810
acuuauauaccacauguug

SEQ ID NO: 597812 - RNA, 19 nt, Artificial Sequence
  Description of Artificial Sequence: Synthetic oligonucleotide
  Sense strand starting at position 1052 of SEQ ID NO: 584900
gugguauauaagugcauuu

SEQ ID NO: 597813 - RNA, 19 nt, Artificial Sequence
  Description of Artificial Sequence: Synthetic oligonucleotide
  Antisense strand to SEQ ID NO: 597812
aaaugcacuuauauaccac

SEQ ID NO: 597814 - RNA, 19 nt, Artificial Sequence
  Description of Artificial Sequence: Synthetic oligonucleotide
  Sense strand starting at position 1091 of SEQ ID NO: 584900
ggacauggccgugaucuca

SEQ ID NO: 597815 - RNA, 19 nt, Artificial Sequence
  Description of Artificial Sequence: Synthetic oligonucleotide
  Antisense strand to SEQ ID NO: 597814
ugagaucacggccaugucc

SEQ ID NO: 597816 - RNA, 19 nt, Artificial Sequence
  Description of Artificial Sequence: Synthetic oligonucleotide
  Sense strand starting at position 1194 of SEQ ID NO: 584900
gggugaugauagcuaugca

SEQ ID NO: 597817 - RNA, 19 nt, Artificial Sequence
  Description of Artificial Sequence: Synthetic oligonucleotide
  Antisense strand to SEQ ID NO: 597816
ugcauagcuaucaucaccc

SEQ ID NO: 597818 - RNA, 19 nt, Artificial Sequence
  Description of Artificial Sequence: Synthetic oligonucleotide
  Sense strand starting at position 1197 of SEQ ID NO: 584900
ugaugauagcuaugcagau

SEQ ID NO: 597819 - RNA, 19 nt, Artificial Sequence
  Description of Artificial Sequence: Synthetic oligonucleotide
  Antisense strand to SEQ ID NO: 597818
aucugcauagcuaucauca

SEQ ID NO: 597820 - RNA, 19 nt, Artificial Sequence
  Description of Artificial Sequence: Synthetic oligonucleotide
  Sense strand starting at position 1198 of SEQ ID NO: 584900
gaugauagcuaugcagaua

SEQ ID NO: 597821 - RNA, 19 nt, Artificial Sequence
  Description of Artificial Sequence: Synthetic oligonucleotide
  Antisense strand to SEQ ID NO: 597820
uaucugcauagcuaucauc

SEQ ID NO: 597822 - RNA, 19 nt, Artificial Sequence
  Description of Artificial Sequence: Synthetic oligonucleotide
  Sense strand starting at position 1201 of SEQ ID NO: 584900
gauagcuaugcagauauau

SEQ ID NO: 597823 - RNA, 19 nt, Artificial Sequence
  Description of Artificial Sequence: Synthetic oligonucleotide
  Antisense strand to SEQ ID NO: 597822
auauaucugcauagcuauc

SEQ ID NO: 597824 - RNA, 19 nt, Artificial Sequence
  Description of Artificial Sequence: Synthetic oligonucleotide
  Sense strand starting at position 1307 of SEQ ID NO: 584900
ugggcugugugauuuacau

SEQ ID NO: 597825 - RNA, 19 nt, Artificial Sequence
  Description of Artificial Sequence: Synthetic oligonucleotide
  Antisense strand to SEQ ID NO: 597824
auguaaaucacacagccca

SEQ ID NO: 597826 - RNA, 19 nt, Artificial Sequence
  Description of Artificial Sequence: Synthetic oligonucleotide
  Sense strand starting at position 1309 of SEQ ID NO: 584900
ggcugugugauuuacaugu

SEQ ID NO: 597827 - RNA, 19 nt, Artificial Sequence
  Description of Artificial Sequence: Synthetic oligonucleotide
  Antisense strand to SEQ ID NO: 597826
acauguaaaucacacagcc

SEQ ID NO: 597828 - RNA, 19 nt, Artificial Sequence
  Description of Artificial Sequence: Synthetic oligonucleotide
  Sense strand starting at position 1453 of SEQ ID NO: 584900
auuguacaagcauagauau

SEQ ID NO: 597829 - RNA, 19 nt, Artificial Sequence
  Description of Artificial Sequence: Synthetic oligonucleotide
  Antisense strand to SEQ ID NO: 597828
auaucuaugcuuguacaau

SEQ ID NO: 597830 - RNA, 19 nt, Artificial Sequence
  Description of Artificial Sequence: Synthetic oligonucleotide
  Sense strand starting at position 1502 of SEQ ID NO: 584900
uagcuuagucuggaggacu

SEQ ID NO: 597831 - RNA, 19 nt, Artificial Sequence
  Description of Artificial Sequence: Synthetic oligonucleotide
  Antisense strand to SEQ ID NO: 597830
aguccuccagacuaagcua

SEQ ID NO: 597832 - RNA, 19 nt, Artificial Sequence
  Description of Artificial Sequence: Synthetic oligonucleotide
  Sense strand starting at position 2799 of SEQ ID NO: 584900
auuguaaacgauuagcaga

SEQ ID NO: 597833 - RNA, 19 nt, Artificial Sequence
  Description of Artificial Sequence: Synthetic oligonucleotide
  Antisense strand to SEQ ID NO: 597832
ucugcuaaucguuuacaau

SEQ ID NO: 597834 - RNA, 19 nt, Artificial Sequence
  Description of Artificial Sequence: Synthetic oligonucleotide
  Sense strand starting at position 2801 of SEQ ID NO: 584900
uguaaacgauuagcagaua

SEQ ID NO: 597835 - RNA, 19 nt, Artificial Sequence
  Description of Artificial Sequence: Synthetic oligonucleotide
  Antisense strand to SEQ ID NO: 597834
uaucugcuaaucguuuaca

SEQ ID NO: 597836 - RNA, 19 nt, Artificial Sequence
  Description of Artificial Sequence: Synthetic oligonucleotide
  Sense strand starting at position 2812 of SEQ ID NO: 584900
agcagauagaccgauuacu

SEQ ID NO: 597837 - RNA, 19 nt, Artificial Sequence
  Description of Artificial Sequence: Synthetic oligonucleotide
  Antisense strand to SEQ ID NO: 597836
aguaaucggucuaucugcu

SEQ ID NO: 597838 - RNA, 19 nt, Artificial Sequence
  Description of Artificial Sequence: Synthetic oligonucleotide
  Sense strand starting at position 2834 of SEQ ID NO: 584900
guggcuuuaauuugugauu

SEQ ID NO: 597839 - RNA, 19 nt, Artificial Sequence
  Description of Artificial Sequence: Synthetic oligonucleotide
  Antisense strand to SEQ ID NO: 597838
aaucacaaauuaaagccac

SEQ ID NO: 597840 - RNA, 19 nt, Artificial Sequence
  Description of Artificial Sequence: Synthetic oligonucleotide
  Sense strand starting at position 3180 of SEQ ID NO: 584900
accuuaauccagugacugu

SEQ ID NO: 597841 - RNA, 19 nt, Artificial Sequence
  Description of Artificial Sequence: Synthetic oligonucleotide
  Antisense strand to SEQ ID NO: 597840
acagucacuggauuaaggu

SEQ ID NO: 597842 - RNA, 19 nt, Artificial Sequence
  Description of Artificial Sequence: Synthetic oligonucleotide
  Sense strand starting at position 3448 of SEQ ID NO: 584900
ucaccauaguuuguuccaa

SEQ ID NO: 597843 - RNA, 19 nt, Artificial Sequence
  Description of Artificial Sequence: Synthetic oligonucleotide
  Antisense strand to SEQ ID NO: 597842
uuggaacaaacuaugguga

SEQ ID NO: 597844 - RNA, 19 nt, Artificial Sequence
  Description of Artificial Sequence: Synthetic oligonucleotide
  Sense strand starting at position 3450 of SEQ ID NO: 584900
accauaguuuguuccaaug

SEQ ID NO: 597845 - RNA, 19 nt, Artificial Sequence
  Description of Artificial Sequence: Synthetic oligonucleotide
  Antisense strand to SEQ ID NO: 597844
cauuggaacaaacuauggu

SEQ ID NO: 597846 - RNA, 19 nt, Artificial Sequence
  Description of Artificial Sequence: Synthetic oligonucleotide
  Sense strand starting at position 3486 of SEQ ID NO: 584900
gcugauauuugcuuucuca

SEQ ID NO: 597847 - RNA, 19 nt, Artificial Sequence
  Description of Artificial Sequence: Synthetic oligonucleotide
  Antisense strand to SEQ ID NO: 597846
ugagaaagcaaauaucagc

SEQ ID NO: 597848 - RNA, 19 nt, Artificial Sequence
  Description of Artificial Sequence: Synthetic oligonucleotide
  Sense strand starting at position 3522 of SEQ ID NO: 584900
cuaaucuucuguucugaga

SEQ ID NO: 597849 - RNA, 19 nt, Artificial Sequence
  Description of Artificial Sequence: Synthetic oligonucleotide
  Antisense strand to SEQ ID NO: 597848
ucucagaacagaagauuag

SEQ ID NO: 597850 - RNA, 19 nt, Artificial Sequence
  Description of Artificial Sequence: Synthetic oligonucleotide
  Sense strand starting at position 3668 of SEQ ID NO: 584900
ccuccuuuagaugggaaau

SEQ ID NO: 597851 - RNA, 19 nt, Artificial Sequence
  Description of Artificial Sequence: Synthetic oligonucleotide
  Antisense strand to SEQ ID NO: 597850
auuucccaucuaaaggagg

SEQ ID NO: 597852 - RNA, 19 nt, Artificial Sequence
  Description of Artificial Sequence: Synthetic oligonucleotide
  Sense strand starting at position 3802 of SEQ ID NO: 584900
agaaaugagaacugugcua

SEQ ID NO: 597853 - RNA, 19 nt, Artificial Sequence
  Description of Artificial Sequence: Synthetic oligonucleotide
  Antisense strand to SEQ ID NO: 597852
uagcacaguucucauuucu

SEQ ID NO: 597854 - RNA, 19 nt, Artificial Sequence
  Description of Artificial Sequence: Synthetic oligonucleotide
  Sense strand starting at position 3833 of SEQ ID NO: 584900
ugucaaacaucucucagga

SEQ ID NO: 597855 - RNA, 19 nt, Artificial Sequence
  Description of Artificial Sequence: Synthetic oligonucleotide
  Antisense strand to SEQ ID NO: 597854
uccugagagauguuugaca

SEQ ID NO: 597856 - RNA, 19 nt, Artificial Sequence
  Description of Artificial Sequence: Synthetic oligonucleotide
  Sense strand starting at position 136 of SEQ ID NO: 584901
uagaguuuauagucuagua

SEQ ID NO: 597857 - RNA, 19 nt, Artificial Sequence
  Description of Artificial Sequence: Synthetic oligonucleotide
  Antisense strand to SEQ ID NO: 597856
uacuagacuauaaacucua

SEQ ID NO: 597858 - RNA, 19 nt, Artificial Sequence
  Description of Artificial Sequence: Synthetic oligonucleotide
  Sense strand starting at position 197 of SEQ ID NO: 584901
augauagcuggugguuaau

SEQ ID NO: 597859 - RNA, 19 nt, Artificial Sequence
  Description of Artificial Sequence: Synthetic oligonucleotide
  Antisense strand to SEQ ID NO: 597858
auuaaccaccagcuaucau

SEQ ID NO: 597860 - RNA, 19 nt, Artificial Sequence
  Description of Artificial Sequence: Synthetic oligonucleotide
  Sense strand starting at position 327 of SEQ ID NO: 584901
cucgcuuguguccaagagu

SEQ ID NO: 597861 - RNA, 19 nt, Artificial Sequence
  Description of Artificial Sequence: Synthetic oligonucleotide
  Antisense strand to SEQ ID NO: 597860
acucuuggacacaagcgag

SEQ ID NO: 597862 - RNA, 19 nt, Artificial Sequence
  Description of Artificial Sequence: Synthetic oligonucleotide
  Sense strand starting at position 335 of SEQ ID NO: 584901
uguccaagaguuugagauc

SEQ ID NO: 597863 - RNA, 19 nt, Artificial Sequence
  Description of Artificial Sequence: Synthetic oligonucleotide
  Antisense strand to SEQ ID NO: 597862
gaucucaaacucuuggaca

SEQ ID NO: 597864 - RNA, 19 nt, Artificial Sequence
  Description of Artificial Sequence: Synthetic oligonucleotide
  Sense strand starting at position 1190 of SEQ ID NO: 584901
acgggugcauucgaaugaa

SEQ ID NO: 597865 - RNA, 19 nt, Artificial Sequence
  Description of Artificial Sequence: Synthetic oligonucleotide
  Antisense strand to SEQ ID NO: 597864
uucauucgaaugcacccgu

SEQ ID NO: 597866 - RNA, 19 nt, Artificial Sequence
  Description of Artificial Sequence: Synthetic oligonucleotide
  Sense strand starting at position 1193 of SEQ ID NO: 584901
ggugcauucgaaugaauca

SEQ ID NO: 597867 - RNA, 19 nt, Artificial Sequence
  Description of Artificial Sequence: Synthetic oligonucleotide
  Antisense strand to SEQ ID NO: 597866
ugauucauucgaaugcacc

SEQ ID NO: 597868 - RNA, 19 nt, Artificial Sequence
  Description of Artificial Sequence: Synthetic oligonucleotide
  Sense strand starting at position 1242 of SEQ ID NO: 584901
aagugaccugauggaaguu

SEQ ID NO: 597869 - RNA, 19 nt, Artificial Sequence
  Description of Artificial Sequence: Synthetic oligonucleotide
  Antisense strand to SEQ ID NO: 597868
aacuuccaucaggucacuu

SEQ ID NO: 597870 - RNA, 19 nt, Artificial Sequence
  Description of Artificial Sequence: Synthetic oligonucleotide
  Sense strand starting at position 1301 of SEQ ID NO: 584901
gagagaugaucacggcaga

SEQ ID NO: 597871 - RNA, 19 nt, Artificial Sequence
  Description of Artificial Sequence: Synthetic oligonucleotide
  Antisense strand to SEQ ID NO: 597870
ucugccgugaucaucucuc

SEQ ID NO: 597872 - RNA, 19 nt, Artificial Sequence
  Description of Artificial Sequence: Synthetic oligonucleotide
  Sense strand starting at position 1302 of SEQ ID NO: 584901
agagaugaucacggcagaa

SEQ ID NO: 597873 - RNA, 19 nt, Artificial Sequence
  Description of Artificial Sequence: Synthetic oligonucleotide
  Antisense strand to SEQ ID NO: 597872
uucugccgugaucaucucu

SEQ ID NO: 597874 - RNA, 19 nt, Artificial Sequence
  Description of Artificial Sequence: Synthetic oligonucleotide
  Sense strand starting at position 1356 of SEQ ID NO: 584901
gguauacaaucugaacuaa

SEQ ID NO: 597875 - RNA, 19 nt, Artificial Sequence
  Description of Artificial Sequence: Synthetic oligonucleotide
  Antisense strand to SEQ ID NO: 597874
uuaguucagauuguauacc

SEQ ID NO: 597876 - RNA, 19 nt, Artificial Sequence
  Description of Artificial Sequence: Synthetic oligonucleotide
  Sense strand starting at position 2432 of SEQ ID NO: 584901
gguucaagcgauugucguu

SEQ ID NO: 597877 - RNA, 19 nt, Artificial Sequence
  Description of Artificial Sequence: Synthetic oligonucleotide
  Antisense strand to SEQ ID NO: 597876
aacgacaaucgcuugaacc

SEQ ID NO: 597878 - RNA, 19 nt, Artificial Sequence
  Description of Artificial Sequence: Synthetic oligonucleotide
  Sense strand starting at position 2437 of SEQ ID NO: 584901
aagcgauugucguuccuca

SEQ ID NO: 597879 - RNA, 19 nt, Artificial Sequence
  Description of Artificial Sequence: Synthetic oligonucleotide
  Antisense strand to SEQ ID NO: 597878
ugaggaacgacaaucgcuu

SEQ ID NO: 597880 - RNA, 19 nt, Artificial Sequence
  Description of Artificial Sequence: Synthetic oligonucleotide
  Sense strand starting at position 2439 of SEQ ID NO: 584901
gcgauugucguuccucagu

SEQ ID NO: 597881 - RNA, 19 nt, Artificial Sequence
  Description of Artificial Sequence: Synthetic oligonucleotide
  Antisense strand to SEQ ID NO: 597880
acugaggaacgacaaucgc

SEQ ID NO: 597882 - RNA, 19 nt, Artificial Sequence
  Description of Artificial Sequence: Synthetic oligonucleotide
  Sense strand starting at position 2496 of SEQ ID NO: 584901
accggcuaaucaucuuaau

SEQ ID NO: 597883 - RNA, 19 nt, Artificial Sequence
  Description of Artificial Sequence: Synthetic oligonucleotide
  Antisense strand to SEQ ID NO: 597882
auuaagaugauuagccggu

SEQ ID NO: 597884 - RNA, 19 nt, Artificial Sequence
  Description of Artificial Sequence: Synthetic oligonucleotide
  Sense strand starting at position 2524 of SEQ ID NO: 584901
agugauccuuucucuggga

SEQ ID NO: 597885 - RNA, 19 nt, Artificial Sequence
  Description of Artificial Sequence: Synthetic oligonucleotide
  Antisense strand to SEQ ID NO: 597884
ucccagagaaaggaucacu

SEQ ID NO: 597886 - RNA, 19 nt, Artificial Sequence
  Description of Artificial Sequence: Synthetic oligonucleotide
  Sense strand starting at position 2527 of SEQ ID NO: 584901
gauccuuucucugggacca

SEQ ID NO: 597887 - RNA, 19 nt, Artificial Sequence
  Description of Artificial Sequence: Synthetic oligonucleotide
  Antisense strand to SEQ ID NO: 597886
uggucccagagaaaggauc

SEQ ID NO: 597888 - RNA, 19 nt, Artificial Sequence
  Description of Artificial Sequence: Synthetic oligonucleotide
  Sense strand starting at position 2866 of SEQ ID NO: 584901
aagagauauaggcguuguu

SEQ ID NO: 597889 - RNA, 19 nt, Artificial Sequence
  Description of Artificial Sequence: Synthetic oligonucleotide
  Antisense strand to SEQ ID NO: 597888
aacaacgccuauaucucuu

SEQ ID NO: 597890 - RNA, 19 nt, Artificial Sequence
  Description of Artificial Sequence: Synthetic oligonucleotide
  Sense strand starting at position 2947 of SEQ ID NO: 584901
gcaauuuacacgugagcca

SEQ ID NO: 597891 - RNA, 19 nt, Artificial Sequence
  Description of Artificial Sequence: Synthetic oligonucleotide
  Antisense strand to SEQ ID NO: 597890
uggcucacguguaaauugc

SEQ ID NO: 597892 - RNA, 19 nt, Artificial Sequence
  Description of Artificial Sequence: Synthetic oligonucleotide
  Sense strand starting at position 3043 of SEQ ID NO: 584901
uuaggucugucuguggaga

SEQ ID NO: 597893 - RNA, 19 nt, Artificial Sequence
  Description of Artificial Sequence: Synthetic oligonucleotide
  Antisense strand to SEQ ID NO: 597892
ucuccacagacagaccuaa

SEQ ID NO: 597894 - RNA, 19 nt, Artificial Sequence
  Description of Artificial Sequence: Synthetic oligonucleotide
  Sense strand starting at position 3044 of SEQ ID NO: 584901
uaggucugucuguggagaa

SEQ ID NO: 597895 - RNA, 19 nt, Artificial Sequence
  Description of Artificial Sequence: Synthetic oligonucleotide
  Antisense strand to SEQ ID NO: 597894
uucuccacagacagaccua

SEQ ID NO: 597896 - RNA, 19 nt, Artificial Sequence
  Description of Artificial Sequence: Synthetic oligonucleotide
  Sense strand starting at position 3045 of SEQ ID NO: 584901
aggucugucuguggagaac

SEQ ID NO: 597897 - RNA, 19 nt, Artificial Sequence
  Description of Artificial Sequence: Synthetic oligonucleotide
  Antisense strand to SEQ ID NO: 597896
guucuccacagacagaccu

SEQ ID NO: 597898 - RNA, 19 nt, Artificial Sequence
  Description of Artificial Sequence: Synthetic oligonucleotide
  Sense strand starting at position 3054 of SEQ ID NO: 584901
uguggagaacucugacuca

SEQ ID NO: 597899 - RNA, 19 nt, Artificial Sequence
  Description of Artificial Sequence: Synthetic oligonucleotide
  Antisense strand to SEQ ID NO: 597898
ugagucagaguucuccaca

SEQ ID NO: 597900 - RNA, 19 nt, Artificial Sequence
  Description of Artificial Sequence: Synthetic oligonucleotide
  Sense strand starting at position 3117 of SEQ ID NO: 584901
uagucaaagucacagauga

SEQ ID NO: 597901 - RNA, 19 nt, Artificial Sequence
  Description of Artificial Sequence: Synthetic oligonucleotide
  Antisense strand to SEQ ID NO: 597900
ucaucugugacuuugacua

SEQ ID NO: 597902 - RNA, 19 nt, Artificial Sequence
  Description of Artificial Sequence: Synthetic oligonucleotide
  Sense strand starting at position 3128 of SEQ ID NO: 584901
acagaugaccucugcaaug

SEQ ID NO: 597903 - RNA, 19 nt, Artificial Sequence
  Description of Artificial Sequence: Synthetic oligonucleotide
  Antisense strand to SEQ ID NO: 597902
cauugcagaggucaucugu

SEQ ID NO: 597904 - RNA, 19 nt, Artificial Sequence
  Description of Artificial Sequence: Synthetic oligonucleotide
  Sense strand starting at position 3130 of SEQ ID NO: 584901
agaugaccucugcaaugua

SEQ ID NO: 597905 - RNA, 19 nt, Artificial Sequence
  Description of Artificial Sequence: Synthetic oligonucleotide
  Antisense strand to SEQ ID NO: 597904
uacauugcagaggucaucu

SEQ ID NO: 597906 - RNA, 19 nt, Artificial Sequence
  Description of Artificial Sequence: Synthetic oligonucleotide
  Sense strand starting at position 3133 of SEQ ID NO: 584901
ugaccucugcaauguaaau

SEQ ID NO: 597907 - RNA, 19 nt, Artificial Sequence
  Description of Artificial Sequence: Synthetic oligonucleotide
  Antisense strand to SEQ ID NO: 597906
auuuacauugcagagguca

SEQ ID NO: 597908 - RNA, 19 nt, Artificial Sequence
  Description of Artificial Sequence: Synthetic oligonucleotide
  Sense strand starting at position 3178 of SEQ ID NO: 584901
uuacuugaguuauaggaua

SEQ ID NO: 597909 - RNA, 19 nt, Artificial Sequence
  Description of Artificial Sequence: Synthetic oligonucleotide
  Antisense strand to SEQ ID NO: 597908
uauccuauaacucaaguaa

SEQ ID NO: 597910 - RNA, 19 nt, Artificial Sequence
  Description of Artificial Sequence: Synthetic oligonucleotide
  Sense strand starting at position 3653 of SEQ ID NO: 584901
ccagucgaucuccaacaau

SEQ ID NO: 597911 - RNA, 19 nt, Artificial Sequence
  Description of Artificial Sequence: Synthetic oligonucleotide
  Antisense strand to SEQ ID NO: 597910
auuguuggagaucgacugg

SEQ ID NO: 597912 - RNA, 19 nt, Artificial Sequence
  Description of Artificial Sequence: Synthetic oligonucleotide
  Sense strand starting at position 3664 of SEQ ID NO: 584901
ccaacaauuucguggcuuu

SEQ ID NO: 597913 - RNA, 19 nt, Artificial Sequence
  Description of Artificial Sequence: Synthetic oligonucleotide
  Antisense strand to SEQ ID NO: 597912
aaagccacgaaauuguugg

SEQ ID NO: 597914 - RNA, 19 nt, Artificial Sequence
  Description of Artificial Sequence: Synthetic oligonucleotide
  Sense strand starting at position 3665 of SEQ ID NO: 584901
caacaauuucguggcuuua

SEQ ID NO: 597915 - RNA, 19 nt, Artificial Sequence
  Description of Artificial Sequence: Synthetic oligonucleotide
  Antisense strand to SEQ ID NO: 597914
uaaagccacgaaauuguug

SEQ ID NO: 597916 - RNA, 19 nt, Artificial Sequence
  Description of Artificial Sequence: Synthetic oligonucleotide
  Sense strand starting at position 3727 of SEQ ID NO: 584901
ccgagaucauucucuugca

SEQ ID NO: 597917 - RNA, 19 nt, Artificial Sequence
  Description of Artificial Sequence: Synthetic oligonucleotide
  Antisense strand to SEQ ID NO: 597916
ugcaagagaaugaucucgg

SEQ ID NO: 597918 - RNA, 19 nt, Artificial Sequence
  Description of Artificial Sequence: Synthetic oligonucleotide
  Sense strand starting at position 3728 of SEQ ID NO: 584901
cgagaucauucucuugcau

SEQ ID NO: 597919 - RNA, 19 nt, Artificial Sequence
  Description of Artificial Sequence: Synthetic oligonucleotide
  Antisense strand to SEQ ID NO: 597918
augcaagagaaugaucucg

SEQ ID NO: 597920 - RNA, 19 nt, Artificial Sequence
  Description of Artificial Sequence: Synthetic oligonucleotide
  Sense strand starting at position 3780 of SEQ ID NO: 584901
uuggaaaucuaacggaaau

SEQ ID NO: 597921 - RNA, 19 nt, Artificial Sequence
  Description of Artificial Sequence: Synthetic oligonucleotide
  Antisense strand to SEQ ID NO: 597920
auuuccguuagauuuccaa

SEQ ID NO: 597922 - RNA, 19 nt, Artificial Sequence
  Description of Artificial Sequence: Synthetic oligonucleotide
  Sense strand starting at position 3889 of SEQ ID NO: 584901
uccuguuacuuaggucaga

SEQ ID NO: 597923 - RNA, 19 nt, Artificial Sequence
  Description of Artificial Sequence: Synthetic oligonucleotide
  Antisense strand to SEQ ID NO: 597922
ucugaccuaaguaacagga

SEQ ID NO: 597924 - RNA, 19 nt, Artificial Sequence
  Description of Artificial Sequence: Synthetic oligonucleotide
  Sense strand starting at position 3890 of SEQ ID NO: 584901
ccuguuacuuaggucagau

SEQ ID NO: 597925 - RNA, 19 nt, Artificial Sequence
  Description of Artificial Sequence: Synthetic oligonucleotide
  Antisense strand to SEQ ID NO: 597924
aucugaccuaaguaacagg

SEQ ID NO: 597926 - RNA, 19 nt, Artificial Sequence
  Description of Artificial Sequence: Synthetic oligonucleotide
  Sense strand starting at position 3892 of SEQ ID NO: 584901
uguuacuuaggucagauau

SEQ ID NO: 597927 - RNA, 19 nt, Artificial Sequence
  Description of Artificial Sequence: Synthetic oligonucleotide
  Antisense strand to SEQ ID NO: 597926
auaucugaccuaaguaaca

SEQ ID NO: 597928 - RNA, 19 nt, Artificial Sequence
  Description of Artificial Sequence: Synthetic oligonucleotide
  Sense strand starting at position 3894 of SEQ ID NO: 584901
uuacuuaggucagauaucu

SEQ ID NO: 597929 - RNA, 19 nt, Artificial Sequence
  Description of Artificial Sequence: Synthetic oligonucleotide
  Antisense strand to SEQ ID NO: 597928
agauaucugaccuaaguaa

SEQ ID NO: 597930 - RNA, 19 nt, Artificial Sequence
  Description of Artificial Sequence: Synthetic oligonucleotide
  Sense strand starting at position 3903 of SEQ ID NO: 584901
ucagauaucuuagagauac

SEQ ID NO: 597931 - RNA, 19 nt, Artificial Sequence
  Description of Artificial Sequence: Synthetic oligonucleotide
  Antisense strand to SEQ ID NO: 597930
guaucucuaagauaucuga

SEQ ID NO: 597932 - RNA, 19 nt, Artificial Sequence
  Description of Artificial Sequence: Synthetic oligonucleotide
  Sense strand starting at position 3938 of SEQ ID NO: 584901
ucugucucaccugggauua

SEQ ID NO: 597933 - RNA, 19 nt, Artificial Sequence
  Description of Artificial Sequence: Synthetic oligonucleotide
  Antisense strand to SEQ ID NO: 597932
uaaucccaggugagacaga

SEQ ID NO: 597934 - RNA, 19 nt, Artificial Sequence
  Description of Artificial Sequence: Synthetic oligonucleotide
  Sense strand starting at position 3940 of SEQ ID NO: 584901
ugucucaccugggauuaga

SEQ ID NO: 597935 - RNA, 19 nt, Artificial Sequence
  Description of Artificial Sequence: Synthetic oligonucleotide
  Antisense strand to SEQ ID NO: 597934
ucuaaucccaggugagaca

SEQ ID NO: 597936 - RNA, 19 nt, Artificial Sequence
  Description of Artificial Sequence: Synthetic oligonucleotide
  Sense strand starting at position 133 of SEQ ID NO: 584902
agggucuaaugugcuugaa

SEQ ID NO: 597937 - RNA, 19 nt, Artificial Sequence
  Description of Artificial Sequence: Synthetic oligonucleotide
  Antisense strand to SEQ ID NO: 597936
uucaagcacauuagacccu

SEQ ID NO: 597938 - RNA, 19 nt, Artificial Sequence
  Description of Artificial Sequence: Synthetic oligonucleotide
  Sense strand starting at position 135 of SEQ ID NO: 584902
ggucuaaugugcuugaaca

SEQ ID NO: 597939 - RNA, 19 nt, Artificial Sequence
  Description of Artificial Sequence: Synthetic oligonucleotide
  Antisense strand to SEQ ID NO: 597938
uguucaagcacauuagacc

SEQ ID NO: 597940 - RNA, 19 nt, Artificial Sequence
  Description of Artificial Sequence: Synthetic oligonucleotide
  Sense strand starting at position 136 of SEQ ID NO: 584902
gucuaaugugcuugaacaa

SEQ ID NO: 597941 - RNA, 19 nt, Artificial Sequence
  Description of Artificial Sequence: Synthetic oligonucleotide
  Antisense strand to SEQ ID NO: 597940
uuguucaagcacauuagac

SEQ ID NO: 597942 - RNA, 19 nt, Artificial Sequence
  Description of Artificial Sequence: Synthetic oligonucleotide
  Sense strand starting at position 137 of SEQ ID NO: 584902
ucuaaugugcuugaacaac

SEQ ID NO: 597943 - RNA, 19 nt, Artificial Sequence
  Description of Artificial Sequence: Synthetic oligonucleotide
  Antisense strand to SEQ ID NO: 597942
guuguucaagcacauuaga

SEQ ID NO: 597944 - RNA, 19 nt, Artificial Sequence
  Description of Artificial Sequence: Synthetic oligonucleotide
  Sense strand starting at position 521 of SEQ ID NO: 584902
uggagaaauucugugcagu

SEQ ID NO: 597945 - RNA, 19 nt, Artificial Sequence
  Description of Artificial Sequence: Synthetic oligonucleotide
  Antisense strand to SEQ ID NO: 597944
acugcacagaauuucucca

SEQ ID NO: 597946 - RNA, 19 nt, Artificial Sequence
  Description of Artificial Sequence: Synthetic oligonucleotide
  Sense strand starting at position 522 of SEQ ID NO: 584902
ggagaaauucugugcaguu

SEQ ID NO: 597947 - RNA, 19 nt, Artificial Sequence
  Description of Artificial Sequence: Synthetic oligonucleotide
  Antisense strand to SEQ ID NO: 597946
aacugcacagaauuucucc

SEQ ID NO: 597948 - RNA, 19 nt, Artificial Sequence
  Description of Artificial Sequence: Synthetic oligonucleotide
  Sense strand starting at position 523 of SEQ ID NO: 584902
gagaaauucugugcaguuu

SEQ ID NO: 597949 - RNA, 19 nt, Artificial Sequence
  Description of Artificial Sequence: Synthetic oligonucleotide
  Antisense strand to SEQ ID NO: 597948
aaacugcacagaauuucuc

SEQ ID NO: 597950 - RNA, 19 nt, Artificial Sequence
  Description of Artificial Sequence: Synthetic oligonucleotide
  Sense strand starting at position 649 of SEQ ID NO: 584902
cucaaaugauagcuauaga

SEQ ID NO: 597951 - RNA, 19 nt, Artificial Sequence
  Description of Artificial Sequence: Synthetic oligonucleotide
  Antisense strand to SEQ ID NO: 597950
ucuauagcuaucauuugag

SEQ ID NO: 597952 - RNA, 19 nt, Artificial Sequence
  Description of Artificial Sequence: Synthetic oligonucleotide
  Sense strand starting at position 749 of SEQ ID NO: 584902
gcauaauaacuacguugau

SEQ ID NO: 597953 - RNA, 19 nt, Artificial Sequence
  Description of Artificial Sequence: Synthetic oligonucleotide
  Antisense strand to SEQ ID NO: 597952
aucaacguaguuauuaugc

SEQ ID NO: 597954 - RNA, 19 nt, Artificial Sequence
  Description of Artificial Sequence: Synthetic oligonucleotide
  Sense strand starting at position 755 of SEQ ID NO: 584902
uaacuacguugaucagaau

SEQ ID NO: 597955 - RNA, 19 nt, Artificial Sequence
  Description of Artificial Sequence: Synthetic oligonucleotide
  Antisense strand to SEQ ID NO: 597954
auucugaucaacguaguua

SEQ ID NO: 597956 - RNA, 19 nt, Artificial Sequence
  Description of Artificial Sequence: Synthetic oligonucleotide
  Sense strand starting at position 756 of SEQ ID NO: 584902
aacuacguugaucagaauu

SEQ ID NO: 597957 - RNA, 19 nt, Artificial Sequence
  Description of Artificial Sequence: Synthetic oligonucleotide
  Antisense strand to SEQ ID NO: 597956
aauucugaucaacguaguu

SEQ ID NO: 597958 - RNA, 19 nt, Artificial Sequence
  Description of Artificial Sequence: Synthetic oligonucleotide
  Sense strand starting at position 758 of SEQ ID NO: 584902
cuacguugaucagaauuua

SEQ ID NO: 597959 - RNA, 19 nt, Artificial Sequence
  Description of Artificial Sequence: Synthetic oligonucleotide
  Antisense strand to SEQ ID NO: 597958
uaaauucugaucaacguag

SEQ ID NO: 597960 - RNA, 19 nt, Artificial Sequence
  Description of Artificial Sequence: Synthetic oligonucleotide
  Sense strand starting at position 1026 of SEQ ID NO: 584902
auacuugcaugaccugaaa

SEQ ID NO: 597961 - RNA, 19 nt, Artificial Sequence
  Description of Artificial Sequence: Synthetic oligonucleotide
  Antisense strand to SEQ ID NO: 597960
uuucaggucaugcaaguau

SEQ ID NO: 597962 - RNA, 19 nt, Artificial Sequence
  Description of Artificial Sequence: Synthetic oligonucleotide
  Sense strand starting at position 1079 of SEQ ID NO: 584902
cuuuguuggccucaaccua

SEQ ID NO: 597963 - RNA, 19 nt, Artificial Sequence
  Description of Artificial Sequence: Synthetic oligonucleotide
  Antisense strand to SEQ ID NO: 597962
uagguugaggccaacaaag

SEQ ID NO: 597964 - RNA, 19 nt, Artificial Sequence
  Description of Artificial Sequence: Synthetic oligonucleotide
  Sense strand starting at position 1193 of SEQ ID NO: 584902
uaugcaaauggauguuauu

SEQ ID NO: 597965 - RNA, 19 nt, Artificial Sequence
  Description of Artificial Sequence: Synthetic oligonucleotide
  Antisense strand to SEQ ID NO: 597964
aauaacauccauuugcaua

SEQ ID NO: 597966 - RNA, 19 nt, Artificial Sequence
  Description of Artificial Sequence: Synthetic oligonucleotide
  Sense strand starting at position 1246 of SEQ ID NO: 584902
uagcgugacgacuauaaag

SEQ ID NO: 597967 - RNA, 19 nt, Artificial Sequence
  Description of Artificial Sequence: Synthetic oligonucleotide
  Antisense strand to SEQ ID NO: 597966
cuuuauagucgucacgcua

SEQ ID NO: 597968 - RNA, 19 nt, Artificial Sequence
  Description of Artificial Sequence: Synthetic oligonucleotide
  Sense strand starting at position 1271 of SEQ ID NO: 584902
acuagacaguucuuacugu

SEQ ID NO: 597969 - RNA, 19 nt, Artificial Sequence
  Description of Artificial Sequence: Synthetic oligonucleotide
  Antisense strand to SEQ ID NO: 597968
acaguaagaacugucuagu

SEQ ID NO: 597970 - RNA, 19 nt, Artificial Sequence
  Description of Artificial Sequence: Synthetic oligonucleotide
  Sense strand starting at position 1277 of SEQ ID NO: 584902
caguucuuacugugagauu

SEQ ID NO: 597971 - RNA, 19 nt, Artificial Sequence
  Description of Artificial Sequence: Synthetic oligonucleotide
  Antisense strand to SEQ ID NO: 597970
aaucucacaguaagaacug

SEQ ID NO: 597972 - RNA, 19 nt, Artificial Sequence
  Description of Artificial Sequence: Synthetic oligonucleotide
  Sense strand starting at position 1286 of SEQ ID NO: 584902
cugugagauuacgauuuga

SEQ ID NO: 597973 - RNA, 19 nt, Artificial Sequence
  Description of Artificial Sequence: Synthetic oligonucleotide
  Antisense strand to SEQ ID NO: 597972
ucaaaucguaaucucacag

SEQ ID NO: 597974 - RNA, 19 nt, Artificial Sequence
  Description of Artificial Sequence: Synthetic oligonucleotide
  Sense strand starting at position 1291 of SEQ ID NO: 584902
agauuacgauuugaucaac

SEQ ID NO: 597975 - RNA, 19 nt, Artificial Sequence
  Description of Artificial Sequence: Synthetic oligonucleotide
  Antisense strand to SEQ ID NO: 597974
guugaucaaaucguaaucu

SEQ ID NO: 597976 - RNA, 19 nt, Artificial Sequence
  Description of Artificial Sequence: Synthetic oligonucleotide
  Sense strand starting at position 1317 of SEQ ID NO: 584902
agaaacccguuucuuaaua

SEQ ID NO: 597977 - RNA, 19 nt, Artificial Sequence
  Description of Artificial Sequence: Synthetic oligonucleotide
  Antisense strand to SEQ ID NO: 597976
uauuaagaaacggguuucu

SEQ ID NO: 597978 - RNA, 19 nt, Artificial Sequence
  Description of Artificial Sequence: Synthetic oligonucleotide
  Sense strand starting at position 1347 of SEQ ID NO: 584902
cccaacucuuacgcagaau

SEQ ID NO: 597979 - RNA, 19 nt, Artificial Sequence
  Description of Artificial Sequence: Synthetic oligonucleotide
  Antisense strand to SEQ ID NO: 597978
auucugcguaagaguuggg

SEQ ID NO: 597980 - RNA, 19 nt, Artificial Sequence
  Description of Artificial Sequence: Synthetic oligonucleotide
  Sense strand starting at position 2058 of SEQ ID NO: 584902
cgaguuucucccgcuaagu

SEQ ID NO: 597981 - RNA, 19 nt, Artificial Sequence
  Description of Artificial Sequence: Synthetic oligonucleotide
  Antisense strand to SEQ ID NO: 597980
acuuagcgggagaaacucg

SEQ ID NO: 597982 - RNA, 19 nt, Artificial Sequence
  Description of Artificial Sequence: Synthetic oligonucleotide
  Sense strand starting at position 2235 of SEQ ID NO: 584902
ggcggagagguuaguguau

SEQ ID NO: 597983 - RNA, 19 nt, Artificial Sequence
  Description of Artificial Sequence: Synthetic oligonucleotide
  Antisense strand to SEQ ID NO: 597982
auacacuaaccucuccgcc

SEQ ID NO: 597984 - RNA, 19 nt, Artificial Sequence
  Description of Artificial Sequence: Synthetic oligonucleotide
  Sense strand starting at position 2374 of SEQ ID NO: 584902
gugaucuuuggucagcuua

SEQ ID NO: 597985 - RNA, 19 nt, Artificial Sequence
  Description of Artificial Sequence: Synthetic oligonucleotide
  Antisense strand to SEQ ID NO: 597984
uaagcugaccaaagaucac

SEQ ID NO: 597986 - RNA, 19 nt, Artificial Sequence
  Description of Artificial Sequence: Synthetic oligonucleotide
  Sense strand starting at position 2385 of SEQ ID NO: 584902
ucagcuuagcugggaguaa

SEQ ID NO: 597987 - RNA, 19 nt, Artificial Sequence
  Description of Artificial Sequence: Synthetic oligonucleotide
  Antisense strand to SEQ ID NO: 597986
uuacucccagcuaagcuga

SEQ ID NO: 597988 - RNA, 19 nt, Artificial Sequence
  Description of Artificial Sequence: Synthetic oligonucleotide
  Sense strand starting at position 2483 of SEQ ID NO: 584902
ugaggaauugaacggcaua

SEQ ID NO: 597989 - RNA, 19 nt, Artificial Sequence
  Description of Artificial Sequence: Synthetic oligonucleotide
  Antisense strand to SEQ ID NO: 597988
uaugccguucaauuccuca

SEQ ID NO: 597990 - RNA, 19 nt, Artificial Sequence
  Description of Artificial Sequence: Synthetic oligonucleotide
  Sense strand starting at position 2515 of SEQ ID NO: 584902
gcgccacuuagcucucgaa

SEQ ID NO: 597991 - RNA, 19 nt, Artificial Sequence
  Description of Artificial Sequence: Synthetic oligonucleotide
  Antisense strand to SEQ ID NO: 597990
uucgagagcuaaguggcgc

SEQ ID NO: 597992 - RNA, 19 nt, Artificial Sequence
  Description of Artificial Sequence: Synthetic oligonucleotide
  Sense strand starting at position 2558 of SEQ ID NO: 584902
ucuuaauugguguaauugu

SEQ ID NO: 597993 - RNA, 19 nt, Artificial Sequence
  Description of Artificial Sequence: Synthetic oligonucleotide
  Antisense strand to SEQ ID NO: 597992
acaauuacaccaauuaaga

SEQ ID NO: 597994 - RNA, 19 nt, Artificial Sequence
  Description of Artificial Sequence: Synthetic oligonucleotide
  Sense strand starting at position 2565 of SEQ ID NO: 584902
ugguguaauuguucucuaa

SEQ ID NO: 597995 - RNA, 19 nt, Artificial Sequence
  Description of Artificial Sequence: Synthetic oligonucleotide
  Antisense strand to SEQ ID NO: 597994
uuagagaacaauuacacca

SEQ ID NO: 597996 - RNA, 19 nt, Artificial Sequence
  Description of Artificial Sequence: Synthetic oligonucleotide
  Sense strand starting at position 2586 of SEQ ID NO: 584902
guugaaaugugcccgggaa

SEQ ID NO: 597997 - RNA, 19 nt, Artificial Sequence
  Description of Artificial Sequence: Synthetic oligonucleotide
  Antisense strand to SEQ ID NO: 597996
uucccgggcacauuucaac

SEQ ID NO: 597998 - RNA, 19 nt, Artificial Sequence
  Description of Artificial Sequence: Synthetic oligonucleotide
  Sense strand starting at position 2587 of SEQ ID NO: 584902
uugaaaugugcccgggaac

SEQ ID NO: 597999 - RNA, 19 nt, Artificial Sequence
  Description of Artificial Sequence: Synthetic oligonucleotide
  Antisense strand to SEQ ID NO: 597998
guucccgggcacauuucaa

SEQ ID NO: 598000 - RNA, 19 nt, Artificial Sequence
  Description of Artificial Sequence: Synthetic oligonucleotide
  Sense strand starting at position 2588 of SEQ ID NO: 584902
ugaaaugugcccgggaacu

SEQ ID NO: 598001 - RNA, 19 nt, Artificial Sequence
  Description of Artificial Sequence: Synthetic oligonucleotide
  Antisense strand to SEQ ID NO: 598000
aguucccgggcacauuuca

SEQ ID NO: 598002 - RNA, 19 nt, Artificial Sequence
  Description of Artificial Sequence: Synthetic oligonucleotide
  Sense strand starting at position 2607 of SEQ ID NO: 584902
gaguaacugccuuguauuu

SEQ ID NO: 598003 - RNA, 19 nt, Artificial Sequence
  Description of Artificial Sequence: Synthetic oligonucleotide
  Antisense strand to SEQ ID NO: 598002
aaauacaaggcaguuacuc

SEQ ID NO: 598004 - RNA, 19 nt, Artificial Sequence
  Description of Artificial Sequence: Synthetic oligonucleotide
  Sense strand starting at position 2663 of SEQ ID NO: 584902
ggcgcuauugucaggagau

SEQ ID NO: 598005 - RNA, 19 nt, Artificial Sequence
  Description of Artificial Sequence: Synthetic oligonucleotide
  Antisense strand to SEQ ID NO: 598004
aucuccugacaauagcgcc

SEQ ID NO: 598006 - RNA, 19 nt, Artificial Sequence
  Description of Artificial Sequence: Synthetic oligonucleotide
  Sense strand starting at position 2665 of SEQ ID NO: 584902
cgcuauugucaggagauau

SEQ ID NO: 598007 - RNA, 19 nt, Artificial Sequence
  Description of Artificial Sequence: Synthetic oligonucleotide
  Antisense strand to SEQ ID NO: 598006
auaucuccugacaauagcg

SEQ ID NO: 598008 - RNA, 19 nt, Artificial Sequence
  Description of Artificial Sequence: Synthetic oligonucleotide
  Sense strand starting at position 2775 of SEQ ID NO: 584902
uagcuuugugucucacgua

SEQ ID NO: 598009 - RNA, 19 nt, Artificial Sequence
  Description of Artificial Sequence: Synthetic oligonucleotide
  Antisense strand to SEQ ID NO: 598008
uacgugagacacaaagcua

SEQ ID NO: 598010 - RNA, 19 nt, Artificial Sequence
  Description of Artificial Sequence: Synthetic oligonucleotide
  Sense strand starting at position 2883 of SEQ ID NO: 584902
cuguauugucagcaacuag

SEQ ID NO: 598011 - RNA, 19 nt, Artificial Sequence
  Description of Artificial Sequence: Synthetic oligonucleotide
  Antisense strand to SEQ ID NO: 598010
cuaguugcugacaauacag

SEQ ID NO: 598012 - RNA, 19 nt, Artificial Sequence
  Description of Artificial Sequence: Synthetic oligonucleotide
  Sense strand starting at position 2961 of SEQ ID NO: 584902
aaauuaaaggugugcaagu

SEQ ID NO: 598013 - RNA, 19 nt, Artificial Sequence
  Description of Artificial Sequence: Synthetic oligonucleotide
  Antisense strand to SEQ ID NO: 598012
acuugcacaccuuuaauuu

SEQ ID NO: 598014 - RNA, 19 nt, Artificial Sequence
  Description of Artificial Sequence: Synthetic oligonucleotide
  Sense strand starting at position 2968 of SEQ ID NO: 584902
aggugugcaagugauguua

SEQ ID NO: 598015 - RNA, 19 nt, Artificial Sequence
  Description of Artificial Sequence: Synthetic oligonucleotide
  Antisense strand to SEQ ID NO: 598014
uaacaucacuugcacaccu

SEQ ID NO: 598016 - RNA, 19 nt, Artificial Sequence
  Description of Artificial Sequence: Synthetic oligonucleotide
  Sense strand starting at position 15 of SEQ ID NO: 584903
caggaauccuaagugagca

SEQ ID NO: 598017 - RNA, 19 nt, Artificial Sequence
  Description of Artificial Sequence: Synthetic oligonucleotide
  Antisense strand to SEQ ID NO: 598016
ugcucacuuaggauuccug

SEQ ID NO: 598018 - RNA, 19 nt, Artificial Sequence
  Description of Artificial Sequence: Synthetic oligonucleotide
  Sense strand starting at position 135 of SEQ ID NO: 584903
ccaagugaucugcacauca

SEQ ID NO: 598019 - RNA, 19 nt, Artificial Sequence
  Description of Artificial Sequence: Synthetic oligonucleotide
  Antisense strand to SEQ ID NO: 598018
ugaugugcagaucacuugg

SEQ ID NO: 598020 - RNA, 19 nt, Artificial Sequence
  Description of Artificial Sequence: Synthetic oligonucleotide
  Sense strand starting at position 151 of SEQ ID NO: 584903
ucacaagacugcuucugau

SEQ ID NO: 598021 - RNA, 19 nt, Artificial Sequence
  Description of Artificial Sequence: Synthetic oligonucleotide
  Antisense strand to SEQ ID NO: 598020
aucagaagcagucuuguga

SEQ ID NO: 598022 - RNA, 19 nt, Artificial Sequence
  Description of Artificial Sequence: Synthetic oligonucleotide
  Sense strand starting at position 165 of SEQ ID NO: 584903
cugauaagaugugacauuu

SEQ ID NO: 598023 - RNA, 19 nt, Artificial Sequence
  Description of Artificial Sequence: Synthetic oligonucleotide
  Antisense strand to SEQ ID NO: 598022
aaaugucacaucuuaucag

SEQ ID NO: 598024 - RNA, 19 nt, Artificial Sequence
  Description of Artificial Sequence: Synthetic oligonucleotide
  Sense strand starting at position 375 of SEQ ID NO: 584903
ggugccuuucauggagaua

SEQ ID NO: 598025 - RNA, 19 nt, Artificial Sequence
  Description of Artificial Sequence: Synthetic oligonucleotide
  Antisense strand to SEQ ID NO: 598024
uaucuccaugaaaggcacc

SEQ ID NO: 598026 - RNA, 19 nt, Artificial Sequence
  Description of Artificial Sequence: Synthetic oligonucleotide
  Sense strand starting at position 625 of SEQ ID NO: 584903
auaauuaugugaccaagcu

SEQ ID NO: 598027 - RNA, 19 nt, Artificial Sequence
  Description of Artificial Sequence: Synthetic oligonucleotide
  Antisense strand to SEQ ID NO: 598026
agcuuggucacauaauuau

SEQ ID NO: 598028 - RNA, 19 nt, Artificial Sequence
  Description of Artificial Sequence: Synthetic oligonucleotide
  Sense strand starting at position 819 of SEQ ID NO: 584903
caucuuugccaggagcagu

SEQ ID NO: 598029 - RNA, 19 nt, Artificial Sequence
  Description of Artificial Sequence: Synthetic oligonucleotide
  Antisense strand to SEQ ID NO: 598028
acugcuccuggcaaagaug

SEQ ID NO: 598030 - RNA, 19 nt, Artificial Sequence
  Description of Artificial Sequence: Synthetic oligonucleotide
  Sense strand starting at position 972 of SEQ ID NO: 584903
accaaauggccucauguaa

SEQ ID NO: 598031 - RNA, 19 nt, Artificial Sequence
  Description of Artificial Sequence: Synthetic oligonucleotide
  Antisense strand to SEQ ID NO: 598030
uuacaugaggccauuuggu

SEQ ID NO: 598032 - RNA, 19 nt, Artificial Sequence
  Description of Artificial Sequence: Synthetic oligonucleotide
  Sense strand starting at position 1009 of SEQ ID NO: 584903
gcacuuacacauggacuua

SEQ ID NO: 598033 - RNA, 19 nt, Artificial Sequence
  Description of Artificial Sequence: Synthetic oligonucleotide
  Antisense strand to SEQ ID NO: 598032
uaaguccauguguaagugc

SEQ ID NO: 598034 - RNA, 19 nt, Artificial Sequence
  Description of Artificial Sequence: Synthetic oligonucleotide
  Sense strand starting at position 1209 of SEQ ID NO: 584903
ucaggacuguggguuauaa

SEQ ID NO: 598035 - RNA, 19 nt, Artificial Sequence
  Description of Artificial Sequence: Synthetic oligonucleotide
  Antisense strand to SEQ ID NO: 598034
uuauaacccacaguccuga

SEQ ID NO: 598036 - RNA, 19 nt, Artificial Sequence
  Description of Artificial Sequence: Synthetic oligonucleotide
  Sense strand starting at position 1211 of SEQ ID NO: 584903
aggacuguggguuauaauc

SEQ ID NO: 598037 - RNA, 19 nt, Artificial Sequence
  Description of Artificial Sequence: Synthetic oligonucleotide
  Antisense strand to SEQ ID NO: 598036
gauuauaacccacaguccu

SEQ ID NO: 598038 - RNA, 19 nt, Artificial Sequence
  Description of Artificial Sequence: Synthetic oligonucleotide
  Sense strand starting at position 1262 of SEQ ID NO: 584903
agcaguagaccaugaguua

SEQ ID NO: 598039 - RNA, 19 nt, Artificial Sequence
  Description of Artificial Sequence: Synthetic oligonucleotide
  Antisense strand to SEQ ID NO: 598038
uaacucauggucuacugcu

SEQ ID NO: 598040 - RNA, 19 nt, Artificial Sequence
  Description of Artificial Sequence: Synthetic oligonucleotide
  Sense strand starting at position 1263 of SEQ ID NO: 584903
gcaguagaccaugaguuau

SEQ ID NO: 598041 - RNA, 19 nt, Artificial Sequence
  Description of Artificial Sequence: Synthetic oligonucleotide
  Antisense strand to SEQ ID NO: 598040
auaacucauggucuacugc

SEQ ID NO: 598042 - RNA, 19 nt, Artificial Sequence
  Description of Artificial Sequence: Synthetic oligonucleotide
  Sense strand starting at position 1584 of SEQ ID NO: 584903
cccagagcccuuugagaaa

SEQ ID NO: 598043 - RNA, 19 nt, Artificial Sequence
  Description of Artificial Sequence: Synthetic oligonucleotide
  Antisense strand to SEQ ID NO: 598042
uuucucaaagggcucuggg

SEQ ID NO: 598044 - RNA, 19 nt, Artificial Sequence
  Description of Artificial Sequence: Synthetic oligonucleotide
  Sense strand starting at position 1612 of SEQ ID NO: 584903
gagauaaugucauugaacc

SEQ ID NO: 598045 - RNA, 19 nt, Artificial Sequence
  Description of Artificial Sequence: Synthetic oligonucleotide
  Antisense strand to SEQ ID NO: 598044
gguucaaugacauuaucuc

SEQ ID NO: 598046 - RNA, 19 nt, Artificial Sequence
  Description of Artificial Sequence: Synthetic oligonucleotide
  Sense strand starting at position 1613 of SEQ ID NO: 584903
agauaaugucauugaaccu

SEQ ID NO: 598047 - RNA, 19 nt, Artificial Sequence
  Description of Artificial Sequence: Synthetic oligonucleotide
  Antisense strand to SEQ ID NO: 598046
agguucaaugacauuaucu

SEQ ID NO: 598048 - RNA, 19 nt, Artificial Sequence
  Description of Artificial Sequence: Synthetic oligonucleotide
  Sense strand starting at position 1726 of SEQ ID NO: 584903
cuggacucuugguuugaca

SEQ ID NO: 598049 - RNA, 19 nt, Artificial Sequence
  Description of Artificial Sequence: Synthetic oligonucleotide
  Antisense strand to SEQ ID NO: 598048
ugucaaaccaagaguccag

SEQ ID NO: 598050 - RNA, 19 nt, Artificial Sequence
  Description of Artificial Sequence: Synthetic oligonucleotide
  Sense strand starting at position 1737 of SEQ ID NO: 584903
guuugacacccaggacuaa

SEQ ID NO: 598051 - RNA, 19 nt, Artificial Sequence
  Description of Artificial Sequence: Synthetic oligonucleotide
  Antisense strand to SEQ ID NO: 598050
uuaguccugggugucaaac

SEQ ID NO: 598052 - RNA, 19 nt, Artificial Sequence
  Description of Artificial Sequence: Synthetic oligonucleotide
  Sense strand starting at position 1880 of SEQ ID NO: 584903
acaagaggucucuguguua

SEQ ID NO: 598053 - RNA, 19 nt, Artificial Sequence
  Description of Artificial Sequence: Synthetic oligonucleotide
  Antisense strand to SEQ ID NO: 598052
uaacacagagaccucuugu

SEQ ID NO: 598054 - RNA, 19 nt, Artificial Sequence
  Description of Artificial Sequence: Synthetic oligonucleotide
  Sense strand starting at position 1947 of SEQ ID NO: 584903
ccagcucucccagggagaa

SEQ ID NO: 598055 - RNA, 19 nt, Artificial Sequence
  Description of Artificial Sequence: Synthetic oligonucleotide
  Antisense strand to SEQ ID NO: 598054
uucucccugggagagcugg

SEQ ID NO: 598056 - RNA, 19 nt, Artificial Sequence
  Description of Artificial Sequence: Synthetic oligonucleotide
  Sense strand starting at position 2011 of SEQ ID NO: 584903
augcuuuggccguccauau

SEQ ID NO: 598057 - RNA, 19 nt, Artificial Sequence
  Description of Artificial Sequence: Synthetic oligonucleotide
  Antisense strand to SEQ ID NO: 598056
auauggacggccaaagcau

SEQ ID NO: 598058 - RNA, 19 nt, Artificial Sequence
  Description of Artificial Sequence: Synthetic oligonucleotide
  Sense strand starting at position 2012 of SEQ ID NO: 584903
ugcuuuggccguccauaua

SEQ ID NO: 598059 - RNA, 19 nt, Artificial Sequence
  Description of Artificial Sequence: Synthetic oligonucleotide
  Antisense strand to SEQ ID NO: 598058
uauauggacggccaaagca

SEQ ID NO: 598060 - RNA, 19 nt, Artificial Sequence
  Description of Artificial Sequence: Synthetic oligonucleotide
  Sense strand starting at position 2143 of SEQ ID NO: 584903
ugauaagaggcuuagcuca

SEQ ID NO: 598061 - RNA, 19 nt, Artificial Sequence
  Description of Artificial Sequence: Synthetic oligonucleotide
  Antisense strand to SEQ ID NO: 598060
ugagcuaagccucuuauca

SEQ ID NO: 598062 - RNA, 19 nt, Artificial Sequence
  Description of Artificial Sequence: Synthetic oligonucleotide
  Sense strand starting at position 2355 of SEQ ID NO: 584903
cucaguuaucuuugaagau

SEQ ID NO: 598063 - RNA, 19 nt, Artificial Sequence
  Description of Artificial Sequence: Synthetic oligonucleotide
  Antisense strand to SEQ ID NO: 598062
aucuucaaagauaacugag

SEQ ID NO: 598064 - RNA, 19 nt, Artificial Sequence
  Description of Artificial Sequence: Synthetic oligonucleotide
  Sense strand starting at position 2359 of SEQ ID NO: 584903
guuaucuuugaagauuagu

SEQ ID NO: 598065 - RNA, 19 nt, Artificial Sequence
  Description of Artificial Sequence: Synthetic oligonucleotide
  Antisense strand to SEQ ID NO: 598064
acuaaucuucaaagauaac

SEQ ID NO: 598066 - RNA, 19 nt, Artificial Sequence
  Description of Artificial Sequence: Synthetic oligonucleotide
  Sense strand starting at position 2400 of SEQ ID NO: 584903
aaaggucagcgaugggaua

SEQ ID NO: 598067 - RNA, 19 nt, Artificial Sequence
  Description of Artificial Sequence: Synthetic oligonucleotide
  Antisense strand to SEQ ID NO: 598066
uaucccaucgcugaccuuu

SEQ ID NO: 598068 - RNA, 19 nt, Artificial Sequence
  Description of Artificial Sequence: Synthetic oligonucleotide
  Sense strand starting at position 2497 of SEQ ID NO: 584903
aaggguugccauggaucuu

SEQ ID NO: 598069 - RNA, 19 nt, Artificial Sequence
  Description of Artificial Sequence: Synthetic oligonucleotide
  Antisense strand to SEQ ID NO: 598068
aagauccauggcaacccuu

SEQ ID NO: 598070 - RNA, 19 nt, Artificial Sequence
  Description of Artificial Sequence: Synthetic oligonucleotide
  Sense strand starting at position 2516 of SEQ ID NO: 584903
gagagaacauucuaagaag

SEQ ID NO: 598071 - RNA, 19 nt, Artificial Sequence
  Description of Artificial Sequence: Synthetic oligonucleotide
  Antisense strand to SEQ ID NO: 598070
cuucuuagaauguucucuc

SEQ ID NO: 598072 - RNA, 19 nt, Artificial Sequence
  Description of Artificial Sequence: Synthetic oligonucleotide
  Sense strand starting at position 3092 of SEQ ID NO: 584903
acaugaugucacugagcuu

SEQ ID NO: 598073 - RNA, 19 nt, Artificial Sequence
  Description of Artificial Sequence: Synthetic oligonucleotide
  Antisense strand to SEQ ID NO: 598072
aagcucagugacaucaugu

SEQ ID NO: 598074 - RNA, 19 nt, Artificial Sequence
  Description of Artificial Sequence: Synthetic oligonucleotide
  Sense strand starting at position 3132 of SEQ ID NO: 584903
agucaucucagaggguagu

SEQ ID NO: 598075 - RNA, 19 nt, Artificial Sequence
  Description of Artificial Sequence: Synthetic oligonucleotide
  Antisense strand to SEQ ID NO: 598074
acuacccucugagaugacu

SEQ ID NO: 598076 - RNA, 19 nt, Artificial Sequence
  Description of Artificial Sequence: Synthetic oligonucleotide
  Sense strand starting at position 3142 of SEQ ID NO: 584903
gaggguaguugggccaaau

SEQ ID NO: 598077 - RNA, 19 nt, Artificial Sequence
  Description of Artificial Sequence: Synthetic oligonucleotide
  Antisense strand to SEQ ID NO: 598076
auuuggcccaacuacccuc

SEQ ID NO: 598078 - RNA, 19 nt, Artificial Sequence
  Description of Artificial Sequence: Synthetic oligonucleotide
  Sense strand starting at position 3159 of SEQ ID NO: 584903
augcgauaaugcuuacaaa

SEQ ID NO: 598079 - RNA, 19 nt, Artificial Sequence
  Description of Artificial Sequence: Synthetic oligonucleotide
  Antisense strand to SEQ ID NO: 598078
uuuguaagcauuaucgcau

SEQ ID NO: 598080 - RNA, 19 nt, Artificial Sequence
  Description of Artificial Sequence: Synthetic oligonucleotide
  Sense strand starting at position 3160 of SEQ ID NO: 584903
ugcgauaaugcuuacaaag

SEQ ID NO: 598081 - RNA, 19 nt, Artificial Sequence
  Description of Artificial Sequence: Synthetic oligonucleotide
  Antisense strand to SEQ ID NO: 598080
cuuuguaagcauuaucgca

SEQ ID NO: 598082 - RNA, 19 nt, Artificial Sequence
  Description of Artificial Sequence: Synthetic oligonucleotide
  Sense strand starting at position 3653 of SEQ ID NO: 584903
aaauguauggagugccaga

SEQ ID NO: 598083 - RNA, 19 nt, Artificial Sequence
  Description of Artificial Sequence: Synthetic oligonucleotide
  Antisense strand to SEQ ID NO: 598082
ucuggcacuccauacauuu

SEQ ID NO: 598084 - RNA, 19 nt, Artificial Sequence
  Description of Artificial Sequence: Synthetic oligonucleotide
  Sense strand starting at position 3660 of SEQ ID NO: 584903
uggagugccagacaucuuu

SEQ ID NO: 598085 - RNA, 19 nt, Artificial Sequence
  Description of Artificial Sequence: Synthetic oligonucleotide
  Antisense strand to SEQ ID NO: 598084
aaagaugucuggcacucca

SEQ ID NO: 598086 - RNA, 19 nt, Artificial Sequence
  Description of Artificial Sequence: Synthetic oligonucleotide
  Sense strand starting at position 3706 of SEQ ID NO: 584903
cuuguaagggcucaauaaa

SEQ ID NO: 598087 - RNA, 19 nt, Artificial Sequence
  Description of Artificial Sequence: Synthetic oligonucleotide
  Antisense strand to SEQ ID NO: 598086
uuuauugagcccuuacaag

SEQ ID NO: 598088 - RNA, 19 nt, Artificial Sequence
  Description of Artificial Sequence: Synthetic oligonucleotide
  Sense strand starting at position 3769 of SEQ ID NO: 584903
ucauucugucaacagguuu

SEQ ID NO: 598089 - RNA, 19 nt, Artificial Sequence
  Description of Artificial Sequence: Synthetic oligonucleotide
  Antisense strand to SEQ ID NO: 598088
aaaccuguugacagaauga

SEQ ID NO: 598090 - RNA, 19 nt, Artificial Sequence
  Description of Artificial Sequence: Synthetic oligonucleotide
  Sense strand starting at position 3786 of SEQ ID NO: 584903
uuuggauccagcuauguga

SEQ ID NO: 598091 - RNA, 19 nt, Artificial Sequence
  Description of Artificial Sequence: Synthetic oligonucleotide
  Antisense strand to SEQ ID NO: 598090
ucacauagcuggauccaaa

SEQ ID NO: 598092 - RNA, 19 nt, Artificial Sequence
  Description of Artificial Sequence: Synthetic oligonucleotide
  Sense strand starting at position 3835 of SEQ ID NO: 584903
uuauuaguccaagaaguca

SEQ ID NO: 598093 - RNA, 19 nt, Artificial Sequence
  Description of Artificial Sequence: Synthetic oligonucleotide
  Antisense strand to SEQ ID NO: 598092
ugacuucuuggacuaauaa

SEQ ID NO: 598094 - RNA, 19 nt, Artificial Sequence
  Description of Artificial Sequence: Synthetic oligonucleotide
  Sense strand starting at position 3961 of SEQ ID NO: 584903
uucuuauuccaaggugaau

SEQ ID NO: 598095 - RNA, 19 nt, Artificial Sequence
  Description of Artificial Sequence: Synthetic oligonucleotide
  Antisense strand to SEQ ID NO: 598094
auucaccuuggaauaagaa

SEQ ID NO: 598096 - RNA, 19 nt, Artificial Sequence
  Description of Artificial Sequence: Synthetic oligonucleotide
  Sense strand starting at position 466 of SEQ ID NO: 584904
guguuuaccugcuuuccua

SEQ ID NO: 598097 - RNA, 19 nt, Artificial Sequence
  Description of Artificial Sequence: Synthetic oligonucleotide
  Antisense strand to SEQ ID NO: 598096
uaggaaagcagguaaacac

SEQ ID NO: 598098 - RNA, 19 nt, Artificial Sequence
  Description of Artificial Sequence: Synthetic oligonucleotide
  Sense strand starting at position 538 of SEQ ID NO: 584904
gguuaccagaucuggcaaa

SEQ ID NO: 598099 - RNA, 19 nt, Artificial Sequence
  Description of Artificial Sequence: Synthetic oligonucleotide
  Antisense strand to SEQ ID NO: 598098
uuugccagaucugguaacc

SEQ ID NO: 598100 - RNA, 19 nt, Artificial Sequence
  Description of Artificial Sequence: Synthetic oligonucleotide
  Sense strand starting at position 589 of SEQ ID NO: 584904
cuuuaaauaguguaagucu

SEQ ID NO: 598101 - RNA, 19 nt, Artificial Sequence
  Description of Artificial Sequence: Synthetic oligonucleotide
  Antisense strand to SEQ ID NO: 598100
agacuuacacuauuuaaag

SEQ ID NO: 598102 - RNA, 19 nt, Artificial Sequence
  Description of Artificial Sequence: Synthetic oligonucleotide
  Sense strand starting at position 624 of SEQ ID NO: 584904
gggacagacuuaugcuaaa

SEQ ID NO: 598103 - RNA, 19 nt, Artificial Sequence
  Description of Artificial Sequence: Synthetic oligonucleotide
  Antisense strand to SEQ ID NO: 598102
uuuagcauaagucuguccc

SEQ ID NO: 598104 - RNA, 19 nt, Artificial Sequence
  Description of Artificial Sequence: Synthetic oligonucleotide
  Sense strand starting at position 648 of SEQ ID NO: 584904
auucguuguuuaucugaua

SEQ ID NO: 598105 - RNA, 19 nt, Artificial Sequence
  Description of Artificial Sequence: Synthetic oligonucleotide
  Antisense strand to SEQ ID NO: 598104
uaucagauaaacaacgaau

SEQ ID NO: 598106 - RNA, 19 nt, Artificial Sequence
  Description of Artificial Sequence: Synthetic oligonucleotide
  Sense strand starting at position 649 of SEQ ID NO: 584904
uucguuguuuaucugauau

SEQ ID NO: 598107 - RNA, 19 nt, Artificial Sequence
  Description of Artificial Sequence: Synthetic oligonucleotide
  Antisense strand to SEQ ID NO: 598106
auaucagauaaacaacgaa

SEQ ID NO: 598108 - RNA, 19 nt, Artificial Sequence
  Description of Artificial Sequence: Synthetic oligonucleotide
  Sense strand starting at position 726 of SEQ ID NO: 584904
ucuaauccaugucuggaaa

SEQ ID NO: 598109 - RNA, 19 nt, Artificial Sequence
  Description of Artificial Sequence: Synthetic oligonucleotide
  Antisense strand to SEQ ID NO: 598108
uuuccagacauggauuaga

SEQ ID NO: 598110 - RNA, 19 nt, Artificial Sequence
  Description of Artificial Sequence: Synthetic oligonucleotide
  Sense strand starting at position 747 of SEQ ID NO: 584904
gauugaugguucccgaaag

SEQ ID NO: 598111 - RNA, 19 nt, Artificial Sequence
  Description of Artificial Sequence: Synthetic oligonucleotide
  Antisense strand to SEQ ID NO: 598110
cuuucgggaaccaucaauc

SEQ ID NO: 598112 - RNA, 19 nt, Artificial Sequence
  Description of Artificial Sequence: Synthetic oligonucleotide
  Sense strand starting at position 759 of SEQ ID NO: 584904
ccgaaaguccaguggguau

SEQ ID NO: 598113 - RNA, 19 nt, Artificial Sequence
  Description of Artificial Sequence: Synthetic oligonucleotide
  Antisense strand to SEQ ID NO: 598112
auacccacuggacuuucgg

SEQ ID NO: 598114 - RNA, 19 nt, Artificial Sequence
  Description of Artificial Sequence: Synthetic oligonucleotide
  Sense strand starting at position 775 of SEQ ID NO: 584904
uaugccucauuugagagau

SEQ ID NO: 598115 - RNA, 19 nt, Artificial Sequence
  Description of Artificial Sequence: Synthetic oligonucleotide
  Antisense strand to SEQ ID NO: 598114
aucucucaaaugaggcaua

SEQ ID NO: 598116 - RNA, 19 nt, Artificial Sequence
  Description of Artificial Sequence: Synthetic oligonucleotide
  Sense strand starting at position 874 of SEQ ID NO: 584904
cagcucugagagcacuaua

SEQ ID NO: 598117 - RNA, 19 nt, Artificial Sequence
  Description of Artificial Sequence: Synthetic oligonucleotide
  Antisense strand to SEQ ID NO: 598116
uauagugcucucagagcug

SEQ ID NO: 598118 - RNA, 19 nt, Artificial Sequence
  Description of Artificial Sequence: Synthetic oligonucleotide
  Sense strand starting at position 877 of SEQ ID NO: 584904
cucugagagcacuauaugu

SEQ ID NO: 598119 - RNA, 19 nt, Artificial Sequence
  Description of Artificial Sequence: Synthetic oligonucleotide
  Antisense strand to SEQ ID NO: 598118
acauauagugcucucagag

SEQ ID NO: 598120 - RNA, 19 nt, Artificial Sequence
  Description of Artificial Sequence: Synthetic oligonucleotide
  Sense strand starting at position 879 of SEQ ID NO: 584904
cugagagcacuauaugugu

SEQ ID NO: 598121 - RNA, 19 nt, Artificial Sequence
  Description of Artificial Sequence: Synthetic oligonucleotide
  Antisense strand to SEQ ID NO: 598120
acacauauagugcucucag

SEQ ID NO: 598122 - RNA, 19 nt, Artificial Sequence
  Description of Artificial Sequence: Synthetic oligonucleotide
  Sense strand starting at position 969 of SEQ ID NO: 584904
gugucugugaccugugaca

SEQ ID NO: 598123 - RNA, 19 nt, Artificial Sequence
  Description of Artificial Sequence: Synthetic oligonucleotide
  Antisense strand to SEQ ID NO: 598122
ugucacaggucacagacac

SEQ ID NO: 598124 - RNA, 19 nt, Artificial Sequence
  Description of Artificial Sequence: Synthetic oligonucleotide
  Sense strand starting at position 971 of SEQ ID NO: 584904
gucugugaccugugacacu

SEQ ID NO: 598125 - RNA, 19 nt, Artificial Sequence
  Description of Artificial Sequence: Synthetic oligonucleotide
  Antisense strand to SEQ ID NO: 598124
agugucacaggucacagac

SEQ ID NO: 598126 - RNA, 19 nt, Artificial Sequence
  Description of Artificial Sequence: Synthetic oligonucleotide
  Sense strand starting at position 1087 of SEQ ID NO: 584904
ggaggcuccuccuccauua

SEQ ID NO: 598127 - RNA, 19 nt, Artificial Sequence
  Description of Artificial Sequence: Synthetic oligonucleotide
  Antisense strand to SEQ ID NO: 598126
uaauggaggaggagccucc

SEQ ID NO: 598128 - RNA, 19 nt, Artificial Sequence
  Description of Artificial Sequence: Synthetic oligonucleotide
  Sense strand starting at position 1159 of SEQ ID NO: 584904
auggaugggaccuguuuau

SEQ ID NO: 598129 - RNA, 19 nt, Artificial Sequence
  Description of Artificial Sequence: Synthetic oligonucleotide
  Antisense strand to SEQ ID NO: 598128
auaaacaggucccauccau

SEQ ID NO: 598130 - RNA, 19 nt, Artificial Sequence
  Description of Artificial Sequence: Synthetic oligonucleotide
  Sense strand starting at position 1166 of SEQ ID NO: 584904
ggaccuguuuauugggacu

SEQ ID NO: 598131 - RNA, 19 nt, Artificial Sequence
  Description of Artificial Sequence: Synthetic oligonucleotide
  Antisense strand to SEQ ID NO: 598130
agucccaauaaacaggucc

SEQ ID NO: 598132 - RNA, 19 nt, Artificial Sequence
  Description of Artificial Sequence: Synthetic oligonucleotide
  Sense strand starting at position 1205 of SEQ ID NO: 584904
guugaugcacuugagaaua

SEQ ID NO: 598133 - RNA, 19 nt, Artificial Sequence
  Description of Artificial Sequence: Synthetic oligonucleotide
  Antisense strand to SEQ ID NO: 598132
uauucucaagugcaucaac

SEQ ID NO: 598134 - RNA, 19 nt, Artificial Sequence
  Description of Artificial Sequence: Synthetic oligonucleotide
  Sense strand starting at position 1333 of SEQ ID NO: 584904
cccacuguuucuuccagga

SEQ ID NO: 598135 - RNA, 19 nt, Artificial Sequence
  Description of Artificial Sequence: Synthetic oligonucleotide
  Antisense strand to SEQ ID NO: 598134
uccuggaagaaacaguggg

SEQ ID NO: 598136 - RNA, 19 nt, Artificial Sequence
  Description of Artificial Sequence: Synthetic oligonucleotide
  Sense strand starting at position 1828 of SEQ ID NO: 584904
gcgcuuucccacggucaca

SEQ ID NO: 598137 - RNA, 19 nt, Artificial Sequence
  Description of Artificial Sequence: Synthetic oligonucleotide
  Antisense strand to SEQ ID NO: 598136
ugugaccgugggaaagcgc

SEQ ID NO: 598138 - RNA, 19 nt, Artificial Sequence
  Description of Artificial Sequence: Synthetic oligonucleotide
  Sense strand starting at position 1894 of SEQ ID NO: 584904
gucucacccuccgcagaau

SEQ ID NO: 598139 - RNA, 19 nt, Artificial Sequence
  Description of Artificial Sequence: Synthetic oligonucleotide
  Antisense strand to SEQ ID NO: 598138
auucugcggagggugagac

SEQ ID NO: 598140 - RNA, 19 nt, Artificial Sequence
  Description of Artificial Sequence: Synthetic oligonucleotide
  Sense strand starting at position 2001 of SEQ ID NO: 584904
cagucaucagguuggcaau

SEQ ID NO: 598141 - RNA, 19 nt, Artificial Sequence
  Description of Artificial Sequence: Synthetic oligonucleotide
  Antisense strand to SEQ ID NO: 598140
auugccaaccugaugacug

SEQ ID NO: 598142 - RNA, 19 nt, Artificial Sequence
  Description of Artificial Sequence: Synthetic oligonucleotide
  Sense strand starting at position 2002 of SEQ ID NO: 584904
agucaucagguuggcaauu

SEQ ID NO: 598143 - RNA, 19 nt, Artificial Sequence
  Description of Artificial Sequence: Synthetic oligonucleotide
  Antisense strand to SEQ ID NO: 598142
aauugccaaccugaugacu

SEQ ID NO: 598144 - RNA, 19 nt, Artificial Sequence
  Description of Artificial Sequence: Synthetic oligonucleotide
  Sense strand starting at position 2003 of SEQ ID NO: 584904
gucaucagguuggcaauua

SEQ ID NO: 598145 - RNA, 19 nt, Artificial Sequence
  Description of Artificial Sequence: Synthetic oligonucleotide
  Antisense strand to SEQ ID NO: 598144
uaauugccaaccugaugac

SEQ ID NO: 598146 - RNA, 19 nt, Artificial Sequence
  Description of Artificial Sequence: Synthetic oligonucleotide
  Sense strand starting at position 2157 of SEQ ID NO: 584904
ccuacugagugcuagggua

SEQ ID NO: 598147 - RNA, 19 nt, Artificial Sequence
  Description of Artificial Sequence: Synthetic oligonucleotide
  Antisense strand to SEQ ID NO: 598146
uacccuagcacucaguagg

SEQ ID NO: 598148 - RNA, 19 nt, Artificial Sequence
  Description of Artificial Sequence: Synthetic oligonucleotide
  Sense strand starting at position 2159 of SEQ ID NO: 584904
uacugagugcuaggguaau

SEQ ID NO: 598149 - RNA, 19 nt, Artificial Sequence
  Description of Artificial Sequence: Synthetic oligonucleotide
  Antisense strand to SEQ ID NO: 598148
auuacccuagcacucagua

SEQ ID NO: 598150 - RNA, 19 nt, Artificial Sequence
  Description of Artificial Sequence: Synthetic oligonucleotide
  Sense strand starting at position 2324 of SEQ ID NO: 584904
gggcuuaagacucaggugu

SEQ ID NO: 598151 - RNA, 19 nt, Artificial Sequence
  Description of Artificial Sequence: Synthetic oligonucleotide
  Antisense strand to SEQ ID NO: 598150
acaccugagucuuaagccc

SEQ ID NO: 598152 - RNA, 19 nt, Artificial Sequence
  Description of Artificial Sequence: Synthetic oligonucleotide
  Sense strand starting at position 2404 of SEQ ID NO: 584904
ugaagaugguggcaguuau

SEQ ID NO: 598153 - RNA, 19 nt, Artificial Sequence
  Description of Artificial Sequence: Synthetic oligonucleotide
  Antisense strand to SEQ ID NO: 598152
auaacugccaccaucuuca

SEQ ID NO: 598154 - RNA, 19 nt, Artificial Sequence
  Description of Artificial Sequence: Synthetic oligonucleotide
  Sense strand starting at position 2504 of SEQ ID NO: 584904
ggcucauuugccugugucu

SEQ ID NO: 598155 - RNA, 19 nt, Artificial Sequence
  Description of Artificial Sequence: Synthetic oligonucleotide
  Antisense strand to SEQ ID NO: 598154
agacacaggcaaaugagcc

SEQ ID NO: 598156 - RNA, 19 nt, Artificial Sequence
  Description of Artificial Sequence: Synthetic oligonucleotide
  Sense strand starting at position 2533 of SEQ ID NO: 584904
acgguuacaaucuaggcaa

SEQ ID NO: 598157 - RNA, 19 nt, Artificial Sequence
  Description of Artificial Sequence: Synthetic oligonucleotide
  Antisense strand to SEQ ID NO: 598156
uugccuagauuguaaccgu

SEQ ID NO: 598158 - RNA, 19 nt, Artificial Sequence
  Description of Artificial Sequence: Synthetic oligonucleotide
  Sense strand starting at position 2536 of SEQ ID NO: 584904
guuacaaucuaggcaaugu

SEQ ID NO: 598159 - RNA, 19 nt, Artificial Sequence
  Description of Artificial Sequence: Synthetic oligonucleotide
  Antisense strand to SEQ ID NO: 598158
acauugccuagauuguaac

SEQ ID NO: 598160 - RNA, 19 nt, Artificial Sequence
  Description of Artificial Sequence: Synthetic oligonucleotide
  Sense strand starting at position 2819 of SEQ ID NO: 584904
ggaggaagucugcacuuca

SEQ ID NO: 598161 - RNA, 19 nt, Artificial Sequence
  Description of Artificial Sequence: Synthetic oligonucleotide
  Antisense strand to SEQ ID NO: 598160
ugaagugcagacuuccucc

SEQ ID NO: 598162 - RNA, 19 nt, Artificial Sequence
  Description of Artificial Sequence: Synthetic oligonucleotide
  Sense strand starting at position 2830 of SEQ ID NO: 584904
gcacuucagggauaugugu

SEQ ID NO: 598163 - RNA, 19 nt, Artificial Sequence
  Description of Artificial Sequence: Synthetic oligonucleotide
  Antisense strand to SEQ ID NO: 598162
acacauaucccugaagugc

SEQ ID NO: 598164 - RNA, 19 nt, Artificial Sequence
  Description of Artificial Sequence: Synthetic oligonucleotide
  Sense strand starting at position 2962 of SEQ ID NO: 584904
ugugaucuuaggcagauca

SEQ ID NO: 598165 - RNA, 19 nt, Artificial Sequence
  Description of Artificial Sequence: Synthetic oligonucleotide
  Antisense strand to SEQ ID NO: 598164
ugaucugccuaagaucaca

SEQ ID NO: 598166 - RNA, 19 nt, Artificial Sequence
  Description of Artificial Sequence: Synthetic oligonucleotide
  Sense strand starting at position 2964 of SEQ ID NO: 584904
ugaucuuaggcagaucacu

SEQ ID NO: 598167 - RNA, 19 nt, Artificial Sequence
  Description of Artificial Sequence: Synthetic oligonucleotide
  Antisense strand to SEQ ID NO: 598166
agugaucugccuaagauca

SEQ ID NO: 598168 - RNA, 19 nt, Artificial Sequence
  Description of Artificial Sequence: Synthetic oligonucleotide
  Sense strand starting at position 3040 of SEQ ID NO: 584904
uuuaaacuugguugucaaa

SEQ ID NO: 598169 - RNA, 19 nt, Artificial Sequence
  Description of Artificial Sequence: Synthetic oligonucleotide
  Antisense strand to SEQ ID NO: 598168
uuugacaaccaaguuuaaa

SEQ ID NO: 598170 - RNA, 19 nt, Artificial Sequence
  Description of Artificial Sequence: Synthetic oligonucleotide
  Sense strand starting at position 3243 of SEQ ID NO: 584904
uuuacaacuucuguagaga

SEQ ID NO: 598171 - RNA, 19 nt, Artificial Sequence
  Description of Artificial Sequence: Synthetic oligonucleotide
  Antisense strand to SEQ ID NO: 598170
ucucuacagaaguuguaaa

SEQ ID NO: 598172 - RNA, 19 nt, Artificial Sequence
  Description of Artificial Sequence: Synthetic oligonucleotide
  Sense strand starting at position 3260 of SEQ ID NO: 584904
gauggaguguugcuggguu

SEQ ID NO: 598173 - RNA, 19 nt, Artificial Sequence
  Description of Artificial Sequence: Synthetic oligonucleotide
  Antisense strand to SEQ ID NO: 598172
aacccagcaacacuccauc

SEQ ID NO: 598174 - RNA, 19 nt, Artificial Sequence
  Description of Artificial Sequence: Synthetic oligonucleotide
  Sense strand starting at position 3840 of SEQ ID NO: 584904
gcguuuacaauccgagcua

SEQ ID NO: 598175 - RNA, 19 nt, Artificial Sequence
  Description of Artificial Sequence: Synthetic oligonucleotide
  Antisense strand to SEQ ID NO: 598174
uagcucggauuguaaacgc

SEQ ID NO: 598176 - RNA, 19 nt, Artificial Sequence
  Description of Artificial Sequence: Synthetic oligonucleotide
  Sense strand starting at position 1076 of SEQ ID NO: 584905
gcgcacuuauauguaugua

SEQ ID NO: 598177 - RNA, 19 nt, Artificial Sequence
  Description of Artificial Sequence: Synthetic oligonucleotide
  Antisense strand to SEQ ID NO: 598176
uacauacauauaagugcgc

SEQ ID NO: 598178 - RNA, 19 nt, Artificial Sequence
  Description of Artificial Sequence: Synthetic oligonucleotide
  Sense strand starting at position 1084 of SEQ ID NO: 584905
auauguauguaccaugaca

SEQ ID NO: 598179 - RNA, 19 nt, Artificial Sequence
  Description of Artificial Sequence: Synthetic oligonucleotide
  Antisense strand to SEQ ID NO: 598178
ugucaugguacauacauau

SEQ ID NO: 598180 - RNA, 19 nt, Artificial Sequence
  Description of Artificial Sequence: Synthetic oligonucleotide
  Sense strand starting at position 1086 of SEQ ID NO: 584905
auguauguaccaugacaua

SEQ ID NO: 598181 - RNA, 19 nt, Artificial Sequence
  Description of Artificial Sequence: Synthetic oligonucleotide
  Antisense strand to SEQ ID NO: 598180
uaugucaugguacauacau

SEQ ID NO: 598182 - RNA, 19 nt, Artificial Sequence
  Description of Artificial Sequence: Synthetic oligonucleotide
  Sense strand starting at position 1102 of SEQ ID NO: 584905
auaacuaauucguugaaca

SEQ ID NO: 598183 - RNA, 19 nt, Artificial Sequence
  Description of Artificial Sequence: Synthetic oligonucleotide
  Antisense strand to SEQ ID NO: 598182
uguucaacgaauuaguuau

SEQ ID NO: 598184 - RNA, 19 nt, Artificial Sequence
  Description of Artificial Sequence: Synthetic oligonucleotide
  Sense strand starting at position 1112 of SEQ ID NO: 584905
cguugaacaaguugugaga

SEQ ID NO: 598185 - RNA, 19 nt, Artificial Sequence
  Description of Artificial Sequence: Synthetic oligonucleotide
  Antisense strand to SEQ ID NO: 598184
ucucacaacuuguucaacg

SEQ ID NO: 598186 - RNA, 19 nt, Artificial Sequence
  Description of Artificial Sequence: Synthetic oligonucleotide
  Sense strand starting at position 1114 of SEQ ID NO: 584905
uugaacaaguugugagaca

SEQ ID NO: 598187 - RNA, 19 nt, Artificial Sequence
  Description of Artificial Sequence: Synthetic oligonucleotide
  Antisense strand to SEQ ID NO: 598186
ugucucacaacuuguucaa

SEQ ID NO: 598188 - RNA, 19 nt, Artificial Sequence
  Description of Artificial Sequence: Synthetic oligonucleotide
  Sense strand starting at position 1115 of SEQ ID NO: 584905
ugaacaaguugugagacaa

SEQ ID NO: 598189 - RNA, 19 nt, Artificial Sequence
  Description of Artificial Sequence: Synthetic oligonucleotide
  Antisense strand to SEQ ID NO: 598188
uugucucacaacuuguuca

SEQ ID NO: 598190 - RNA, 19 nt, Artificial Sequence
  Description of Artificial Sequence: Synthetic oligonucleotide
  Sense strand starting at position 1125 of SEQ ID NO: 584905
gugagacaauccuuucuga

SEQ ID NO: 598191 - RNA, 19 nt, Artificial Sequence
  Description of Artificial Sequence: Synthetic oligonucleotide
  Antisense strand to SEQ ID NO: 598190
ucagaaaggauugucucac

SEQ ID NO: 598192 - RNA, 19 nt, Artificial Sequence
  Description of Artificial Sequence: Synthetic oligonucleotide
  Sense strand starting at position 1158 of SEQ ID NO: 584905
guuacaucgucuguggguu

SEQ ID NO: 598193 - RNA, 19 nt, Artificial Sequence
  Description of Artificial Sequence: Synthetic oligonucleotide
  Antisense strand to SEQ ID NO: 598192
aacccacagacgauguaac

SEQ ID NO: 598194 - RNA, 19 nt, Artificial Sequence
  Description of Artificial Sequence: Synthetic oligonucleotide
  Sense strand starting at position 1159 of SEQ ID NO: 584905
uuacaucgucuguggguua

SEQ ID NO: 598195 - RNA, 19 nt, Artificial Sequence
  Description of Artificial Sequence: Synthetic oligonucleotide
  Antisense strand to SEQ ID NO: 598194
uaacccacagacgauguaa

SEQ ID NO: 598196 - RNA, 19 nt, Artificial Sequence
  Description of Artificial Sequence: Synthetic oligonucleotide
  Sense strand starting at position 1170 of SEQ ID NO: 584905
guggguuagggucauguca

SEQ ID NO: 598197 - RNA, 19 nt, Artificial Sequence
  Description of Artificial Sequence: Synthetic oligonucleotide
  Antisense strand to SEQ ID NO: 598196
ugacaugacccuaacccac

SEQ ID NO: 598198 - RNA, 19 nt, Artificial Sequence
  Description of Artificial Sequence: Synthetic oligonucleotide
  Sense strand starting at position 1177 of SEQ ID NO: 584905
agggucaugucagcacgua

SEQ ID NO: 598199 - RNA, 19 nt, Artificial Sequence
  Description of Artificial Sequence: Synthetic oligonucleotide
  Antisense strand to SEQ ID NO: 598198
uacgugcugacaugacccu

SEQ ID NO: 598200 - RNA, 19 nt, Artificial Sequence
  Description of Artificial Sequence: Synthetic oligonucleotide
  Sense strand starting at position 1231 of SEQ ID NO: 584905
ucuaguguugaguauguag

SEQ ID NO: 598201 - RNA, 19 nt, Artificial Sequence
  Description of Artificial Sequence: Synthetic oligonucleotide
  Antisense strand to SEQ ID NO: 598200
cuacauacucaacacuaga

SEQ ID NO: 598202 - RNA, 19 nt, Artificial Sequence
  Description of Artificial Sequence: Synthetic oligonucleotide
  Sense strand starting at position 1349 of SEQ ID NO: 584905
agcugauuccaagagccaa

SEQ ID NO: 598203 - RNA, 19 nt, Artificial Sequence
  Description of Artificial Sequence: Synthetic oligonucleotide
  Antisense strand to SEQ ID NO: 598202
uuggcucuuggaaucagcu

SEQ ID NO: 598204 - RNA, 19 nt, Artificial Sequence
  Description of Artificial Sequence: Synthetic oligonucleotide
  Sense strand starting at position 1405 of SEQ ID NO: 584905
ugggcuuuccuuuaaugua

SEQ ID NO: 598205 - RNA, 19 nt, Artificial Sequence
  Description of Artificial Sequence: Synthetic oligonucleotide
  Antisense strand to SEQ ID NO: 598204
uacauuaaaggaaagccca

SEQ ID NO: 598206 - RNA, 19 nt, Artificial Sequence
  Description of Artificial Sequence: Synthetic oligonucleotide
  Sense strand starting at position 1502 of SEQ ID NO: 584905
acuguaacaugguccacaa

SEQ ID NO: 598207 - RNA, 19 nt, Artificial Sequence
  Description of Artificial Sequence: Synthetic oligonucleotide
  Antisense strand to SEQ ID NO: 598206
uuguggaccauguuacagu

SEQ ID NO: 598208 - RNA, 19 nt, Artificial Sequence
  Description of Artificial Sequence: Synthetic oligonucleotide
  Sense strand starting at position 1504 of SEQ ID NO: 584905
uguaacaugguccacaaau

SEQ ID NO: 598209 - RNA, 19 nt, Artificial Sequence
  Description of Artificial Sequence: Synthetic oligonucleotide
  Antisense strand to SEQ ID NO: 598208
auuuguggaccauguuaca

SEQ ID NO: 598210 - RNA, 19 nt, Artificial Sequence
  Description of Artificial Sequence: Synthetic oligonucleotide
  Sense strand starting at position 1553 of SEQ ID NO: 584905
gagcaagucuaguugagac

SEQ ID NO: 598211 - RNA, 19 nt, Artificial Sequence
  Description of Artificial Sequence: Synthetic oligonucleotide
  Antisense strand to SEQ ID NO: 598210
gucucaacuagacuugcuc

SEQ ID NO: 598212 - RNA, 19 nt, Artificial Sequence
  Description of Artificial Sequence: Synthetic oligonucleotide
  Sense strand starting at position 1993 of SEQ ID NO: 584905
cggcguguaaugcagagaa

SEQ ID NO: 598213 - RNA, 19 nt, Artificial Sequence
  Description of Artificial Sequence: Synthetic oligonucleotide
  Antisense strand to SEQ ID NO: 598212
uucucugcauuacacgccg

SEQ ID NO: 598214 - RNA, 19 nt, Artificial Sequence
  Description of Artificial Sequence: Synthetic oligonucleotide
  Sense strand starting at position 1997 of SEQ ID NO: 584905
guguaaugcagagaagcga

SEQ ID NO: 598215 - RNA, 19 nt, Artificial Sequence
  Description of Artificial Sequence: Synthetic oligonucleotide
  Antisense strand to SEQ ID NO: 598214
ucgcuucucugcauuacac

SEQ ID NO: 598216 - RNA, 19 nt, Artificial Sequence
  Description of Artificial Sequence: Synthetic oligonucleotide
  Sense strand starting at position 2148 of SEQ ID NO: 584905
uuuagaagcguccacgauu

SEQ ID NO: 598217 - RNA, 19 nt, Artificial Sequence
  Description of Artificial Sequence: Synthetic oligonucleotide
  Antisense strand to SEQ ID NO: 598216
aaucguggacgcuucuaaa

SEQ ID NO: 598218 - RNA, 19 nt, Artificial Sequence
  Description of Artificial Sequence: Synthetic oligonucleotide
  Sense strand starting at position 2411 of SEQ ID NO: 584905
aaagcauaacuguagaguu

SEQ ID NO: 598219 - RNA, 19 nt, Artificial Sequence
  Description of Artificial Sequence: Synthetic oligonucleotide
  Antisense strand to SEQ ID NO: 598218
aacucuacaguuaugcuuu

SEQ ID NO: 598220 - RNA, 19 nt, Artificial Sequence
  Description of Artificial Sequence: Synthetic oligonucleotide
  Sense strand starting at position 2470 of SEQ ID NO: 584905
gcuacucucuuaguuguua

SEQ ID NO: 598221 - RNA, 19 nt, Artificial Sequence
  Description of Artificial Sequence: Synthetic oligonucleotide
  Antisense strand to SEQ ID NO: 598220
uaacaacuaagagaguagc

SEQ ID NO: 598222 - RNA, 19 nt, Artificial Sequence
  Description of Artificial Sequence: Synthetic oligonucleotide
  Sense strand starting at position 2471 of SEQ ID NO: 584905
cuacucucuuaguuguuau

SEQ ID NO: 598223 - RNA, 19 nt, Artificial Sequence
  Description of Artificial Sequence: Synthetic oligonucleotide
  Antisense strand to SEQ ID NO: 598222
auaacaacuaagagaguag

SEQ ID NO: 598224 - RNA, 19 nt, Artificial Sequence
  Description of Artificial Sequence: Synthetic oligonucleotide
  Sense strand starting at position 2474 of SEQ ID NO: 584905
cucucuuaguuguuauuau

SEQ ID NO: 598225 - RNA, 19 nt, Artificial Sequence
  Description of Artificial Sequence: Synthetic oligonucleotide
  Antisense strand to SEQ ID NO: 598224
auaauaacaacuaagagag

SEQ ID NO: 598226 - RNA, 19 nt, Artificial Sequence
  Description of Artificial Sequence: Synthetic oligonucleotide
  Sense strand starting at position 2829 of SEQ ID NO: 584905
aauucuugguggucccaga

SEQ ID NO: 598227 - RNA, 19 nt, Artificial Sequence
  Description of Artificial Sequence: Synthetic oligonucleotide
  Antisense strand to SEQ ID NO: 598226
ucugggaccaccaagaauu

SEQ ID NO: 598228 - RNA, 19 nt, Artificial Sequence
  Description of Artificial Sequence: Synthetic oligonucleotide
  Sense strand starting at position 2865 of SEQ ID NO: 584905
gcaggucagaugugcuaca

SEQ ID NO: 598229 - RNA, 19 nt, Artificial Sequence
  Description of Artificial Sequence: Synthetic oligonucleotide
  Antisense strand to SEQ ID NO: 598228
uguagcacaucugaccugc

SEQ ID NO: 598230 - RNA, 19 nt, Artificial Sequence
  Description of Artificial Sequence: Synthetic oligonucleotide
  Sense strand starting at position 2886 of SEQ ID NO: 584905
ugcucugacugcucggaaa

SEQ ID NO: 598231 - RNA, 19 nt, Artificial Sequence
  Description of Artificial Sequence: Synthetic oligonucleotide
  Antisense strand to SEQ ID NO: 598230
uuuccgagcagucagagca

SEQ ID NO: 598232 - RNA, 19 nt, Artificial Sequence
  Description of Artificial Sequence: Synthetic oligonucleotide
  Sense strand starting at position 2888 of SEQ ID NO: 584905
cucugacugcucggaaagu

SEQ ID NO: 598233 - RNA, 19 nt, Artificial Sequence
  Description of Artificial Sequence: Synthetic oligonucleotide
  Antisense strand to SEQ ID NO: 598232
acuuuccgagcagucagag

SEQ ID NO: 598234 - RNA, 19 nt, Artificial Sequence
  Description of Artificial Sequence: Synthetic oligonucleotide
  Sense strand starting at position 3237 of SEQ ID NO: 584905
gcuagacugaucuggugaa

SEQ ID NO: 598235 - RNA, 19 nt, Artificial Sequence
  Description of Artificial Sequence: Synthetic oligonucleotide
  Antisense strand to SEQ ID NO: 598234
uucaccagaucagucuagc

SEQ ID NO: 598236 - RNA, 19 nt, Artificial Sequence
  Description of Artificial Sequence: Synthetic oligonucleotide
  Sense strand starting at position 3249 of SEQ ID NO: 584905
uggugaacaucaccuuaau

SEQ ID NO: 598237 - RNA, 19 nt, Artificial Sequence
  Description of Artificial Sequence: Synthetic oligonucleotide
  Antisense strand to SEQ ID NO: 598236
auuaaggugauguucacca

SEQ ID NO: 598238 - RNA, 19 nt, Artificial Sequence
  Description of Artificial Sequence: Synthetic oligonucleotide
  Sense strand starting at position 3611 of SEQ ID NO: 584905
ggccuugugugccuucuga

SEQ ID NO: 598239 - RNA, 19 nt, Artificial Sequence
  Description of Artificial Sequence: Synthetic oligonucleotide
  Antisense strand to SEQ ID NO: 598238
ucagaaggcacacaaggcc

SEQ ID NO: 598240 - RNA, 19 nt, Artificial Sequence
  Description of Artificial Sequence: Synthetic oligonucleotide
  Sense strand starting at position 3660 of SEQ ID NO: 584905
ggaguacauuucuguagua

SEQ ID NO: 598241 - RNA, 19 nt, Artificial Sequence
  Description of Artificial Sequence: Synthetic oligonucleotide
  Antisense strand to SEQ ID NO: 598240
uacuacagaaauguacucc

SEQ ID NO: 598242 - RNA, 19 nt, Artificial Sequence
  Description of Artificial Sequence: Synthetic oligonucleotide
  Sense strand starting at position 3712 of SEQ ID NO: 584905
accaccuagucuugaggaa

SEQ ID NO: 598243 - RNA, 19 nt, Artificial Sequence
  Description of Artificial Sequence: Synthetic oligonucleotide
  Antisense strand to SEQ ID NO: 598242
uuccucaagacuagguggu

SEQ ID NO: 598244 - RNA, 19 nt, Artificial Sequence
  Description of Artificial Sequence: Synthetic oligonucleotide
  Sense strand starting at position 3760 of SEQ ID NO: 584905
aaaugauuggucuggacac

SEQ ID NO: 598245 - RNA, 19 nt, Artificial Sequence
  Description of Artificial Sequence: Synthetic oligonucleotide
  Antisense strand to SEQ ID NO: 598244
guguccagaccaaucauuu

SEQ ID NO: 598246 - RNA, 19 nt, Artificial Sequence
  Description of Artificial Sequence: Synthetic oligonucleotide
  Sense strand starting at position 3761 of SEQ ID NO: 584905
aaugauuggucuggacacu

SEQ ID NO: 598247 - RNA, 19 nt, Artificial Sequence
  Description of Artificial Sequence: Synthetic oligonucleotide
  Antisense strand to SEQ ID NO: 598246
aguguccagaccaaucauu

SEQ ID NO: 598248 - RNA, 19 nt, Artificial Sequence
  Description of Artificial Sequence: Synthetic oligonucleotide
  Sense strand starting at position 3781 of SEQ ID NO: 584905
uacagaugucguuguuaua

SEQ ID NO: 598249 - RNA, 19 nt, Artificial Sequence
  Description of Artificial Sequence: Synthetic oligonucleotide
  Antisense strand to SEQ ID NO: 598248
uauaacaacgacaucugua

SEQ ID NO: 598250 - RNA, 19 nt, Artificial Sequence
  Description of Artificial Sequence: Synthetic oligonucleotide
  Sense strand starting at position 54 of SEQ ID NO: 584906
ggaagagucuagguaauca

SEQ ID NO: 598251 - RNA, 19 nt, Artificial Sequence
  Description of Artificial Sequence: Synthetic oligonucleotide
  Antisense strand to SEQ ID NO: 598250
ugauuaccuagacucuucc

SEQ ID NO: 598252 - RNA, 19 nt, Artificial Sequence
  Description of Artificial Sequence: Synthetic oligonucleotide
  Sense strand starting at position 58 of SEQ ID NO: 584906
gagucuagguaaucaucuu

SEQ ID NO: 598253 - RNA, 19 nt, Artificial Sequence
  Description of Artificial Sequence: Synthetic oligonucleotide
  Antisense strand to SEQ ID NO: 598252
aagaugauuaccuagacuc

SEQ ID NO: 598254 - RNA, 19 nt, Artificial Sequence
  Description of Artificial Sequence: Synthetic oligonucleotide
  Sense strand starting at position 64 of SEQ ID NO: 584906
agguaaucaucuuuguuuc

SEQ ID NO: 598255 - RNA, 19 nt, Artificial Sequence
  Description of Artificial Sequence: Synthetic oligonucleotide
  Antisense strand to SEQ ID NO: 598254
gaaacaaagaugauuaccu

SEQ ID NO: 598256 - RNA, 19 nt, Artificial Sequence
  Description of Artificial Sequence: Synthetic oligonucleotide
  Sense strand starting at position 174 of SEQ ID NO: 584906
gcgucagugaggucagcuu

SEQ ID NO: 598257 - RNA, 19 nt, Artificial Sequence
  Description of Artificial Sequence: Synthetic oligonucleotide
  Antisense strand to SEQ ID NO: 598256
aagcugaccucacugacgc

SEQ ID NO: 598258 - RNA, 19 nt, Artificial Sequence
  Description of Artificial Sequence: Synthetic oligonucleotide
  Sense strand starting at position 372 of SEQ ID NO: 584906
gaaguuugauuauugcagu

SEQ ID NO: 598259 - RNA, 19 nt, Artificial Sequence
  Description of Artificial Sequence: Synthetic oligonucleotide
  Antisense strand to SEQ ID NO: 598258
acugcaauaaucaaacuuc

SEQ ID NO: 598260 - RNA, 19 nt, Artificial Sequence
  Description of Artificial Sequence: Synthetic oligonucleotide
  Sense strand starting at position 385 of SEQ ID NO: 584906
ugcaguuaacuguaugaaa

SEQ ID NO: 598261 - RNA, 19 nt, Artificial Sequence
  Description of Artificial Sequence: Synthetic oligonucleotide
  Antisense strand to SEQ ID NO: 598260
uuucauacaguuaacugca

SEQ ID NO: 598262 - RNA, 19 nt, Artificial Sequence
  Description of Artificial Sequence: Synthetic oligonucleotide
  Sense strand starting at position 614 of SEQ ID NO: 584906
agagcacuguggucuuuaa

SEQ ID NO: 598263 - RNA, 19 nt, Artificial Sequence
  Description of Artificial Sequence: Synthetic oligonucleotide
  Antisense strand to SEQ ID NO: 598262
uuaaagaccacagugcucu

SEQ ID NO: 598264 - RNA, 19 nt, Artificial Sequence
  Description of Artificial Sequence: Synthetic oligonucleotide
  Sense strand starting at position 649 of SEQ ID NO: 584906
caaguuauugcaugucaug

SEQ ID NO: 598265 - RNA, 19 nt, Artificial Sequence
  Description of Artificial Sequence: Synthetic oligonucleotide
  Antisense strand to SEQ ID NO: 598264
caugacaugcaauaacuug

SEQ ID NO: 598266 - RNA, 19 nt, Artificial Sequence
  Description of Artificial Sequence: Synthetic oligonucleotide
  Sense strand starting at position 802 of SEQ ID NO: 584906
gcugacaggguuuaaguaa

SEQ ID NO: 598267 - RNA, 19 nt, Artificial Sequence
  Description of Artificial Sequence: Synthetic oligonucleotide
  Antisense strand to SEQ ID NO: 598266
uuacuuaaacccugucagc

SEQ ID NO: 598268 - RNA, 19 nt, Artificial Sequence
  Description of Artificial Sequence: Synthetic oligonucleotide
  Sense strand starting at position 874 of SEQ ID NO: 584906
cucaucuugcaacaaguga

SEQ ID NO: 598269 - RNA, 19 nt, Artificial Sequence
  Description of Artificial Sequence: Synthetic oligonucleotide
  Antisense strand to SEQ ID NO: 598268
ucacuuguugcaagaugag

SEQ ID NO: 598270 - RNA, 19 nt, Artificial Sequence
  Description of Artificial Sequence: Synthetic oligonucleotide
  Sense strand starting at position 906 of SEQ ID NO: 584906
uguacucagcugcaaaguu

SEQ ID NO: 598271 - RNA, 19 nt, Artificial Sequence
  Description of Artificial Sequence: Synthetic oligonucleotide
  Antisense strand to SEQ ID NO: 598270
aacuuugcagcugaguaca

SEQ ID NO: 598272 - RNA, 19 nt, Artificial Sequence
  Description of Artificial Sequence: Synthetic oligonucleotide
  Sense strand starting at position 979 of SEQ ID NO: 584906
uguaucuauuagcuaguaa

SEQ ID NO: 598273 - RNA, 19 nt, Artificial Sequence
  Description of Artificial Sequence: Synthetic oligonucleotide
  Antisense strand to SEQ ID NO: 598272
uuacuagcuaauagauaca

SEQ ID NO: 598274 - RNA, 19 nt, Artificial Sequence
  Description of Artificial Sequence: Synthetic oligonucleotide
  Sense strand starting at position 991 of SEQ ID NO: 584906
cuaguaacacuuuggaaug

SEQ ID NO: 598275 - RNA, 19 nt, Artificial Sequence
  Description of Artificial Sequence: Synthetic oligonucleotide
  Antisense strand to SEQ ID NO: 598274
cauuccaaaguguuacuag

SEQ ID NO: 598276 - RNA, 19 nt, Artificial Sequence
  Description of Artificial Sequence: Synthetic oligonucleotide
  Sense strand starting at position 1036 of SEQ ID NO: 584906
uguagaggauacuuuggau

SEQ ID NO: 598277 - RNA, 19 nt, Artificial Sequence
  Description of Artificial Sequence: Synthetic oligonucleotide
  Antisense strand to SEQ ID NO: 598276
auccaaaguauccucuaca

SEQ ID NO: 598278 - RNA, 19 nt, Artificial Sequence
  Description of Artificial Sequence: Synthetic oligonucleotide
  Sense strand starting at position 1208 of SEQ ID NO: 584906
gugaguauuucuuucuuuc

SEQ ID NO: 598279 - RNA, 19 nt, Artificial Sequence
  Description of Artificial Sequence: Synthetic oligonucleotide
  Antisense strand to SEQ ID NO: 598278
gaaagaaagaaauacucac

SEQ ID NO: 598280 - RNA, 19 nt, Artificial Sequence
  Description of Artificial Sequence: Synthetic oligonucleotide
  Sense strand starting at position 1425 of SEQ ID NO: 584906
uugaucagcuggucuugaa

SEQ ID NO: 598281 - RNA, 19 nt, Artificial Sequence
  Description of Artificial Sequence: Synthetic oligonucleotide
  Antisense strand to SEQ ID NO: 598280
uucaagaccagcugaucaa

SEQ ID NO: 598282 - RNA, 19 nt, Artificial Sequence
  Description of Artificial Sequence: Synthetic oligonucleotide
  Sense strand starting at position 1523 of SEQ ID NO: 584906
gagugaguauuucaaggug

SEQ ID NO: 598283 - RNA, 19 nt, Artificial Sequence
  Description of Artificial Sequence: Synthetic oligonucleotide
  Antisense strand to SEQ ID NO: 598282
caccuugaaauacucacuc

SEQ ID NO: 598284 - RNA, 19 nt, Artificial Sequence
  Description of Artificial Sequence: Synthetic oligonucleotide
  Sense strand starting at position 1552 of SEQ ID NO: 584906
gguuguguucgcuuagcaa

SEQ ID NO: 598285 - RNA, 19 nt, Artificial Sequence
  Description of Artificial Sequence: Synthetic oligonucleotide
  Antisense strand to SEQ ID NO: 598284
uugcuaagcgaacacaacc

SEQ ID NO: 598286 - RNA, 19 nt, Artificial Sequence
  Description of Artificial Sequence: Synthetic oligonucleotide
  Sense strand starting at position 1628 of SEQ ID NO: 584906
acuaaacuacaguguuaua

SEQ ID NO: 598287 - RNA, 19 nt, Artificial Sequence
  Description of Artificial Sequence: Synthetic oligonucleotide
  Antisense strand to SEQ ID NO: 598286
uauaacacuguaguuuagu

SEQ ID NO: 598288 - RNA, 19 nt, Artificial Sequence
  Description of Artificial Sequence: Synthetic oligonucleotide
  Sense strand starting at position 1685 of SEQ ID NO: 584906
uuagaucaguaccugugaa

SEQ ID NO: 598289 - RNA, 19 nt, Artificial Sequence
  Description of Artificial Sequence: Synthetic oligonucleotide
  Antisense strand to SEQ ID NO: 598288
uucacagguacugaucuaa

SEQ ID NO: 598290 - RNA, 19 nt, Artificial Sequence
  Description of Artificial Sequence: Synthetic oligonucleotide
  Sense strand starting at position 1739 of SEQ ID NO: 584906
ucuucucaauggguagaga

SEQ ID NO: 598291 - RNA, 19 nt, Artificial Sequence
  Description of Artificial Sequence: Synthetic oligonucleotide
  Antisense strand to SEQ ID NO: 598290
ucucuacccauugagaaga

SEQ ID NO: 598292 - RNA, 19 nt, Artificial Sequence
  Description of Artificial Sequence: Synthetic oligonucleotide
  Sense strand starting at position 1949 of SEQ ID NO: 584906
ggcuguuagccauugugua

SEQ ID NO: 598293 - RNA, 19 nt, Artificial Sequence
  Description of Artificial Sequence: Synthetic oligonucleotide
  Antisense strand to SEQ ID NO: 598292
uacacaauggcuaacagcc

SEQ ID NO: 598294 - RNA, 19 nt, Artificial Sequence
  Description of Artificial Sequence: Synthetic oligonucleotide
  Sense strand starting at position 2203 of SEQ ID NO: 584906
gcaugaaucucacuacugu

SEQ ID NO: 598295 - RNA, 19 nt, Artificial Sequence
  Description of Artificial Sequence: Synthetic oligonucleotide
  Antisense strand to SEQ ID NO: 598294
acaguagugagauucaugc

SEQ ID NO: 598296 - RNA, 19 nt, Artificial Sequence
  Description of Artificial Sequence: Synthetic oligonucleotide
  Sense strand starting at position 2241 of SEQ ID NO: 584906
caggguauauuuggaacuu

SEQ ID NO: 598297 - RNA, 19 nt, Artificial Sequence
  Description of Artificial Sequence: Synthetic oligonucleotide
  Antisense strand to SEQ ID NO: 598296
aaguuccaaauauacccug

SEQ ID NO: 598298 - RNA, 19 nt, Artificial Sequence
  Description of Artificial Sequence: Synthetic oligonucleotide
  Sense strand starting at position 2270 of SEQ ID NO: 584906
gucugauuauucccacaug

SEQ ID NO: 598299 - RNA, 19 nt, Artificial Sequence
  Description of Artificial Sequence: Synthetic oligonucleotide
  Antisense strand to SEQ ID NO: 598298
caugugggaauaaucagac

SEQ ID NO: 598300 - RNA, 19 nt, Artificial Sequence
  Description of Artificial Sequence: Synthetic oligonucleotide
  Sense strand starting at position 2273 of SEQ ID NO: 584906
ugauuauucccacauguac

SEQ ID NO: 598301 - RNA, 19 nt, Artificial Sequence
  Description of Artificial Sequence: Synthetic oligonucleotide
  Antisense strand to SEQ ID NO: 598300
guacaugugggaauaauca

SEQ ID NO: 598302 - RNA, 19 nt, Artificial Sequence
  Description of Artificial Sequence: Synthetic oligonucleotide
  Sense strand starting at position 2316 of SEQ ID NO: 584906
auaguauuguuaccucuuu

SEQ ID NO: 598303 - RNA, 19 nt, Artificial Sequence
  Description of Artificial Sequence: Synthetic oligonucleotide
  Antisense strand to SEQ ID NO: 598302
aaagagguaacaauacuau

SEQ ID NO: 598304 - RNA, 19 nt, Artificial Sequence
  Description of Artificial Sequence: Synthetic oligonucleotide
  Sense strand starting at position 2337 of SEQ ID NO: 584906
cuuguuugcuacccaaaga

SEQ ID NO: 598305 - RNA, 19 nt, Artificial Sequence
  Description of Artificial Sequence: Synthetic oligonucleotide
  Antisense strand to SEQ ID NO: 598304
ucuuuggguagcaaacaag

SEQ ID NO: 598306 - RNA, 19 nt, Artificial Sequence
  Description of Artificial Sequence: Synthetic oligonucleotide
  Sense strand starting at position 2716 of SEQ ID NO: 584906
ccugcucuccuuuacagua

SEQ ID NO: 598307 - RNA, 19 nt, Artificial Sequence
  Description of Artificial Sequence: Synthetic oligonucleotide
  Antisense strand to SEQ ID NO: 598306
uacuguaaaggagagcagg

SEQ ID NO: 598308 - RNA, 19 nt, Artificial Sequence
  Description of Artificial Sequence: Synthetic oligonucleotide
  Sense strand starting at position 2731 of SEQ ID NO: 584906
aguacagcucuuuaaagag

SEQ ID NO: 598309 - RNA, 19 nt, Artificial Sequence
  Description of Artificial Sequence: Synthetic oligonucleotide
  Antisense strand to SEQ ID NO: 598308
cucuuuaaagagcuguacu

SEQ ID NO: 598310 - RNA, 19 nt, Artificial Sequence
  Description of Artificial Sequence: Synthetic oligonucleotide
  Sense strand starting at position 2781 of SEQ ID NO: 584906
uucuuucuuggaugaauuc

SEQ ID NO: 598311 - RNA, 19 nt, Artificial Sequence
  Description of Artificial Sequence: Synthetic oligonucleotide
  Antisense strand to SEQ ID NO: 598310
gaauucauccaagaaagaa

SEQ ID NO: 598312 - RNA, 19 nt, Artificial Sequence
  Description of Artificial Sequence: Synthetic oligonucleotide
  Sense strand starting at position 2838 of SEQ ID NO: 584906
cugucagggucauugaauu

SEQ ID NO: 598313 - RNA, 19 nt, Artificial Sequence
  Description of Artificial Sequence: Synthetic oligonucleotide
  Antisense strand to SEQ ID NO: 598312
aauucaaugacccugacag

SEQ ID NO: 598314 - RNA, 19 nt, Artificial Sequence
  Description of Artificial Sequence: Synthetic oligonucleotide
  Sense strand starting at position 2844 of SEQ ID NO: 584906
gggucauugaauugucagu

SEQ ID NO: 598315 - RNA, 19 nt, Artificial Sequence
  Description of Artificial Sequence: Synthetic oligonucleotide
  Antisense strand to SEQ ID NO: 598314
acugacaauucaaugaccc

SEQ ID NO: 598316 - RNA, 19 nt, Artificial Sequence
  Description of Artificial Sequence: Synthetic oligonucleotide
  Sense strand starting at position 2846 of SEQ ID NO: 584906
gucauugaauugucagucu

SEQ ID NO: 598317 - RNA, 19 nt, Artificial Sequence
  Description of Artificial Sequence: Synthetic oligonucleotide
  Antisense strand to SEQ ID NO: 598316
agacugacaauucaaugac

SEQ ID NO: 598318 - RNA, 19 nt, Artificial Sequence
  Description of Artificial Sequence: Synthetic oligonucleotide
  Sense strand starting at position 2849 of SEQ ID NO: 584906
auugaauugucagucuuug

SEQ ID NO: 598319 - RNA, 19 nt, Artificial Sequence
  Description of Artificial Sequence: Synthetic oligonucleotide
  Antisense strand to SEQ ID NO: 598318
caaagacugacaauucaau

SEQ ID NO: 598320 - RNA, 19 nt, Artificial Sequence
  Description of Artificial Sequence: Synthetic oligonucleotide
  Sense strand starting at position 2854 of SEQ ID NO: 584906
auugucagucuuugacauu

SEQ ID NO: 598321 - RNA, 19 nt, Artificial Sequence
  Description of Artificial Sequence: Synthetic oligonucleotide
  Antisense strand to SEQ ID NO: 598320
aaugucaaagacugacaau

SEQ ID NO: 598322 - RNA, 19 nt, Artificial Sequence
  Description of Artificial Sequence: Synthetic oligonucleotide
  Sense strand starting at position 3391 of SEQ ID NO: 584906
aguuuauggcuuuaacuau

SEQ ID NO: 598323 - RNA, 19 nt, Artificial Sequence
  Description of Artificial Sequence: Synthetic oligonucleotide
  Antisense strand to SEQ ID NO: 598322
auaguuaaagccauaaacu

SEQ ID NO: 598324 - RNA, 19 nt, Artificial Sequence
  Description of Artificial Sequence: Synthetic oligonucleotide
  Sense strand starting at position 3891 of SEQ ID NO: 584906
aggucuuccucccuagacu

SEQ ID NO: 598325 - RNA, 19 nt, Artificial Sequence
  Description of Artificial Sequence: Synthetic oligonucleotide
  Antisense strand to SEQ ID NO: 598324
agucuagggaggaagaccu

SEQ ID NO: 598326 - RNA, 19 nt, Artificial Sequence
  Description of Artificial Sequence: Synthetic oligonucleotide
  Sense strand starting at position 3923 of SEQ ID NO: 584906
uuucuauaucuuggaagau

SEQ ID NO: 598327 - RNA, 19 nt, Artificial Sequence
  Description of Artificial Sequence: Synthetic oligonucleotide
  Antisense strand to SEQ ID NO: 598326
aucuuccaagauauagaaa

SEQ ID NO: 598328 - RNA, 19 nt, Artificial Sequence
  Description of Artificial Sequence: Synthetic oligonucleotide
  Sense strand starting at position 3942 of SEQ ID NO: 584906
gguauuacauccuucuagu

SEQ ID NO: 598329 - RNA, 19 nt, Artificial Sequence
  Description of Artificial Sequence: Synthetic oligonucleotide
  Antisense strand to SEQ ID NO: 598328
acuagaaggauguaauacc

SEQ ID NO: 598330 - RNA, 19 nt, Artificial Sequence
  Description of Artificial Sequence: Synthetic oligonucleotide
  Sense strand starting at position 625 of SEQ ID NO: 584907
acgugucugcucccagcaa

SEQ ID NO: 598331 - RNA, 19 nt, Artificial Sequence
  Description of Artificial Sequence: Synthetic oligonucleotide
  Antisense strand to SEQ ID NO: 598330
uugcugggagcagacacgu

SEQ ID NO: 598332 - RNA, 19 nt, Artificial Sequence
  Description of Artificial Sequence: Synthetic oligonucleotide
  Sense strand starting at position 703 of SEQ ID NO: 584907
uggaauuagucucaccaaa

SEQ ID NO: 598333 - RNA, 19 nt, Artificial Sequence
  Description of Artificial Sequence: Synthetic oligonucleotide
  Antisense strand to SEQ ID NO: 598332
uuuggugagacuaauucca

SEQ ID NO: 598334 - RNA, 19 nt, Artificial Sequence
  Description of Artificial Sequence: Synthetic oligonucleotide
  Sense strand starting at position 755 of SEQ ID NO: 584907
gcgccuguaagggacauau

SEQ ID NO: 598335 - RNA, 19 nt, Artificial Sequence
  Description of Artificial Sequence: Synthetic oligonucleotide
  Antisense strand to SEQ ID NO: 598334
auaugucccuuacaggcgc

SEQ ID NO: 598336 - RNA, 19 nt, Artificial Sequence
  Description of Artificial Sequence: Synthetic oligonucleotide
  Sense strand starting at position 768 of SEQ ID NO: 584907
acauaugagucuuugagaa

SEQ ID NO: 598337 - RNA, 19 nt, Artificial Sequence
  Description of Artificial Sequence: Synthetic oligonucleotide
  Antisense strand to SEQ ID NO: 598336
uucucaaagacucauaugu

SEQ ID NO: 598338 - RNA, 19 nt, Artificial Sequence
  Description of Artificial Sequence: Synthetic oligonucleotide
  Sense strand starting at position 770 of SEQ ID NO: 584907
auaugagucuuugagaacc

SEQ ID NO: 598339 - RNA, 19 nt, Artificial Sequence
  Description of Artificial Sequence: Synthetic oligonucleotide
  Antisense strand to SEQ ID NO: 598338
gguucucaaagacucauau

SEQ ID NO: 598340 - RNA, 19 nt, Artificial Sequence
  Description of Artificial Sequence: Synthetic oligonucleotide
  Sense strand starting at position 787 of SEQ ID NO: 584907
ccaccagucuugucucacu

SEQ ID NO: 598341 - RNA, 19 nt, Artificial Sequence
  Description of Artificial Sequence: Synthetic oligonucleotide
  Antisense strand to SEQ ID NO: 598340
agugagacaagacuggugg

SEQ ID NO: 598342 - RNA, 19 nt, Artificial Sequence
  Description of Artificial Sequence: Synthetic oligonucleotide
  Sense strand starting at position 862 of SEQ ID NO: 584907
ggaaacaacuuagacucua

SEQ ID NO: 598343 - RNA, 19 nt, Artificial Sequence
  Description of Artificial Sequence: Synthetic oligonucleotide
  Antisense strand to SEQ ID NO: 598342
uagagucuaaguuguuucc

SEQ ID NO: 598344 - RNA, 19 nt, Artificial Sequence
  Description of Artificial Sequence: Synthetic oligonucleotide
  Sense strand starting at position 1308 of SEQ ID NO: 584907
ccggguaugugucggaguu

SEQ ID NO: 598345 - RNA, 19 nt, Artificial Sequence
  Description of Artificial Sequence: Synthetic oligonucleotide
  Antisense strand to SEQ ID NO: 598344
aacuccgacacauacccgg

SEQ ID NO: 598346 - RNA, 19 nt, Artificial Sequence
  Description of Artificial Sequence: Synthetic oligonucleotide
  Sense strand starting at position 1309 of SEQ ID NO: 584907
cggguaugugucggaguua

SEQ ID NO: 598347 - RNA, 19 nt, Artificial Sequence
  Description of Artificial Sequence: Synthetic oligonucleotide
  Antisense strand to SEQ ID NO: 598346
uaacuccgacacauacccg

SEQ ID NO: 598348 - RNA, 19 nt, Artificial Sequence
  Description of Artificial Sequence: Synthetic oligonucleotide
  Sense strand starting at position 1310 of SEQ ID NO: 584907
ggguaugugucggaguuaa

SEQ ID NO: 598349 - RNA, 19 nt, Artificial Sequence
  Description of Artificial Sequence: Synthetic oligonucleotide
  Antisense strand to SEQ ID NO: 598348
uuaacuccgacacauaccc

SEQ ID NO: 598350 - RNA, 19 nt, Artificial Sequence
  Description of Artificial Sequence: Synthetic oligonucleotide
  Sense strand starting at position 1875 of SEQ ID NO: 584907
ucacaacucucccagggau

SEQ ID NO: 598351 - RNA, 19 nt, Artificial Sequence
  Description of Artificial Sequence: Synthetic oligonucleotide
  Antisense strand to SEQ ID NO: 598350
aucccugggagaguuguga

SEQ ID NO: 598352 - RNA, 19 nt, Artificial Sequence
  Description of Artificial Sequence: Synthetic oligonucleotide
  Sense strand starting at position 2101 of SEQ ID NO: 584907
cccagaucccuuugggaau

SEQ ID NO: 598353 - RNA, 19 nt, Artificial Sequence
  Description of Artificial Sequence: Synthetic oligonucleotide
  Antisense strand to SEQ ID NO: 598352
auucccaaagggaucuggg

SEQ ID NO: 598354 - RNA, 19 nt, Artificial Sequence
  Description of Artificial Sequence: Synthetic oligonucleotide
  Sense strand starting at position 2113 of SEQ ID NO: 584907
ugggaauccucgcaggcaa

SEQ ID NO: 598355 - RNA, 19 nt, Artificial Sequence
  Description of Artificial Sequence: Synthetic oligonucleotide
  Antisense strand to SEQ ID NO: 598354
uugccugcgaggauuccca

SEQ ID NO: 598356 - RNA, 19 nt, Artificial Sequence
  Description of Artificial Sequence: Synthetic oligonucleotide
  Sense strand starting at position 2125 of SEQ ID NO: 584907
caggcaaacucggagucuu

SEQ ID NO: 598357 - RNA, 19 nt, Artificial Sequence
  Description of Artificial Sequence: Synthetic oligonucleotide
  Antisense strand to SEQ ID NO: 598356
aagacuccgaguuugccug

SEQ ID NO: 598358 - RNA, 19 nt, Artificial Sequence
  Description of Artificial Sequence: Synthetic oligonucleotide
  Sense strand starting at position 2161 of SEQ ID NO: 584907
aaaugugugcucgggccau

SEQ ID NO: 598359 - RNA, 19 nt, Artificial Sequence
  Description of Artificial Sequence: Synthetic oligonucleotide
  Antisense strand to SEQ ID NO: 598358
auggcccgagcacacauuu

SEQ ID NO: 598360 - RNA, 19 nt, Artificial Sequence
  Description of Artificial Sequence: Synthetic oligonucleotide
  Sense strand starting at position 2414 of SEQ ID NO: 584907
guaaacugcuuagaauaca

SEQ ID NO: 598361 - RNA, 19 nt, Artificial Sequence
  Description of Artificial Sequence: Synthetic oligonucleotide
  Antisense strand to SEQ ID NO: 598360
uguauucuaagcaguuuac

SEQ ID NO: 598362 - RNA, 19 nt, Artificial Sequence
  Description of Artificial Sequence: Synthetic oligonucleotide
  Sense strand starting at position 2432 of SEQ ID NO: 584907
auaggaucacuauguaagu

SEQ ID NO: 598363 - RNA, 19 nt, Artificial Sequence
  Description of Artificial Sequence: Synthetic oligonucleotide
  Antisense strand to SEQ ID NO: 598362
acuuacauagugauccuau

SEQ ID NO: 598364 - RNA, 19 nt, Artificial Sequence
  Description of Artificial Sequence: Synthetic oligonucleotide
  Sense strand starting at position 2441 of SEQ ID NO: 584907
cuauguaagugcuugccau

SEQ ID NO: 598365 - RNA, 19 nt, Artificial Sequence
  Description of Artificial Sequence: Synthetic oligonucleotide
  Antisense strand to SEQ ID NO: 598364
auggcaagcacuuacauag

SEQ ID NO: 598366 - RNA, 19 nt, Artificial Sequence
  Description of Artificial Sequence: Synthetic oligonucleotide
  Sense strand starting at position 2442 of SEQ ID NO: 584907
uauguaagugcuugccauu

SEQ ID NO: 598367 - RNA, 19 nt, Artificial Sequence
  Description of Artificial Sequence: Synthetic oligonucleotide
  Antisense strand to SEQ ID NO: 598366
aauggcaagcacuuacaua

SEQ ID NO: 598368 - RNA, 19 nt, Artificial Sequence
  Description of Artificial Sequence: Synthetic oligonucleotide
  Sense strand starting at position 2445 of SEQ ID NO: 584907
guaagugcuugccauuauu

SEQ ID NO: 598369 - RNA, 19 nt, Artificial Sequence
  Description of Artificial Sequence: Synthetic oligonucleotide
  Antisense strand to SEQ ID NO: 598368
aauaauggcaagcacuuac

SEQ ID NO: 598370 - RNA, 19 nt, Artificial Sequence
  Description of Artificial Sequence: Synthetic oligonucleotide
  Sense strand starting at position 2448 of SEQ ID NO: 584907
agugcuugccauuauuauu

SEQ ID NO: 598371 - RNA, 19 nt, Artificial Sequence
  Description of Artificial Sequence: Synthetic oligonucleotide
  Antisense strand to SEQ ID NO: 598370
aauaauaauggcaagcacu

SEQ ID NO: 598372 - RNA, 19 nt, Artificial Sequence
  Description of Artificial Sequence: Synthetic oligonucleotide
  Sense strand starting at position 2967 of SEQ ID NO: 584907
gugacauccugagaaccuu

SEQ ID NO: 598373 - RNA, 19 nt, Artificial Sequence
  Description of Artificial Sequence: Synthetic oligonucleotide
  Antisense strand to SEQ ID NO: 598372
aagguucucaggaugucac

SEQ ID NO: 598374 - RNA, 19 nt, Artificial Sequence
  Description of Artificial Sequence: Synthetic oligonucleotide
  Sense strand starting at position 3024 of SEQ ID NO: 584907
guggcucuccuggaugagu

SEQ ID NO: 598375 - RNA, 19 nt, Artificial Sequence
  Description of Artificial Sequence: Synthetic oligonucleotide
  Antisense strand to SEQ ID NO: 598374
acucauccaggagagccac

SEQ ID NO: 598376 - RNA, 19 nt, Artificial Sequence
  Description of Artificial Sequence: Synthetic oligonucleotide
  Sense strand starting at position 3089 of SEQ ID NO: 584907
gugagucacuuauugcuga

SEQ ID NO: 598377 - RNA, 19 nt, Artificial Sequence
  Description of Artificial Sequence: Synthetic oligonucleotide
  Antisense strand to SEQ ID NO: 598376
ucagcaauaagugacucac

SEQ ID NO: 598378 - RNA, 19 nt, Artificial Sequence
  Description of Artificial Sequence: Synthetic oligonucleotide
  Sense strand starting at position 3141 of SEQ ID NO: 584907
ggagauuaauuugacccau

SEQ ID NO: 598379 - RNA, 19 nt, Artificial Sequence
  Description of Artificial Sequence: Synthetic oligonucleotide
  Antisense strand to SEQ ID NO: 598378
augggucaaauuaaucucc

SEQ ID NO: 598380 - RNA, 19 nt, Artificial Sequence
  Description of Artificial Sequence: Synthetic oligonucleotide
  Sense strand starting at position 3226 of SEQ ID NO: 584907
gcaauuaauuugggccaca

SEQ ID NO: 598381 - RNA, 19 nt, Artificial Sequence
  Description of Artificial Sequence: Synthetic oligonucleotide
  Antisense strand to SEQ ID NO: 598380
uguggcccaaauuaauugc

SEQ ID NO: 598382 - RNA, 19 nt, Artificial Sequence
  Description of Artificial Sequence: Synthetic oligonucleotide
  Sense strand starting at position 3367 of SEQ ID NO: 584907
agggcaucuuggccugaaa

SEQ ID NO: 598383 - RNA, 19 nt, Artificial Sequence
  Description of Artificial Sequence: Synthetic oligonucleotide
  Antisense strand to SEQ ID NO: 598382
uuucaggccaagaugcccu

SEQ ID NO: 598384 - RNA, 19 nt, Artificial Sequence
  Description of Artificial Sequence: Synthetic oligonucleotide
  Sense strand starting at position 3370 of SEQ ID NO: 584907
gcaucuuggccugaaacca

SEQ ID NO: 598385 - RNA, 19 nt, Artificial Sequence
  Description of Artificial Sequence: Synthetic oligonucleotide
  Antisense strand to SEQ ID NO: 598384
ugguuucaggccaagaugc

SEQ ID NO: 598386 - RNA, 19 nt, Artificial Sequence
  Description of Artificial Sequence: Synthetic oligonucleotide
  Sense strand starting at position 3552 of SEQ ID NO: 584907
ggaggagccuuuggguuua

SEQ ID NO: 598387 - RNA, 19 nt, Artificial Sequence
  Description of Artificial Sequence: Synthetic oligonucleotide
  Antisense strand to SEQ ID NO: 598386
uaaacccaaaggcuccucc

SEQ ID NO: 598388 - RNA, 19 nt, Artificial Sequence
  Description of Artificial Sequence: Synthetic oligonucleotide
  Sense strand starting at position 3554 of SEQ ID NO: 584907
aggagccuuuggguuuaua

SEQ ID NO: 598389 - RNA, 19 nt, Artificial Sequence
  Description of Artificial Sequence: Synthetic oligonucleotide
  Antisense strand to SEQ ID NO: 598388
uauaaacccaaaggcuccu

SEQ ID NO: 598390 - RNA, 19 nt, Artificial Sequence
  Description of Artificial Sequence: Synthetic oligonucleotide
  Sense strand starting at position 3557 of SEQ ID NO: 584907
agccuuuggguuuauaaau

SEQ ID NO: 598391 - RNA, 19 nt, Artificial Sequence
  Description of Artificial Sequence: Synthetic oligonucleotide
  Antisense strand to SEQ ID NO: 598390
auuuauaaacccaaaggcu

SEQ ID NO: 598392 - RNA, 19 nt, Artificial Sequence
  Description of Artificial Sequence: Synthetic oligonucleotide
  Sense strand starting at position 83 of SEQ ID NO: 584908
uggugaauccaagagcagu

SEQ ID NO: 598393 - RNA, 19 nt, Artificial Sequence
  Description of Artificial Sequence: Synthetic oligonucleotide
  Antisense strand to SEQ ID NO: 598392
acugcucuuggauucacca

SEQ ID NO: 598394 - RNA, 19 nt, Artificial Sequence
  Description of Artificial Sequence: Synthetic oligonucleotide
  Sense strand starting at position 200 of SEQ ID NO: 584908
cccugaggucccuaugcuu

SEQ ID NO: 598395 - RNA, 19 nt, Artificial Sequence
  Description of Artificial Sequence: Synthetic oligonucleotide
  Antisense strand to SEQ ID NO: 598394
aagcauagggaccucaggg

SEQ ID NO: 598396 - RNA, 19 nt, Artificial Sequence
  Description of Artificial Sequence: Synthetic oligonucleotide
  Sense strand starting at position 206 of SEQ ID NO: 584908
ggucccuaugcuuacaauu

SEQ ID NO: 598397 - RNA, 19 nt, Artificial Sequence
  Description of Artificial Sequence: Synthetic oligonucleotide
  Antisense strand to SEQ ID NO: 598396
aauuguaagcauagggacc

SEQ ID NO: 598398 - RNA, 19 nt, Artificial Sequence
  Description of Artificial Sequence: Synthetic oligonucleotide
  Sense strand starting at position 225 of SEQ ID NO: 584908
ugggucaugccucacacuu

SEQ ID NO: 598399 - RNA, 19 nt, Artificial Sequence
  Description of Artificial Sequence: Synthetic oligonucleotide
  Antisense strand to SEQ ID NO: 598398
aagugugaggcaugaccca

SEQ ID NO: 598400 - RNA, 19 nt, Artificial Sequence
  Description of Artificial Sequence: Synthetic oligonucleotide
  Sense strand starting at position 866 of SEQ ID NO: 584908
cagacucuugagugcuaga

SEQ ID NO: 598401 - RNA, 19 nt, Artificial Sequence
  Description of Artificial Sequence: Synthetic oligonucleotide
  Antisense strand to SEQ ID NO: 598400
ucuagcacucaagagucug

SEQ ID NO: 598402 - RNA, 19 nt, Artificial Sequence
  Description of Artificial Sequence: Synthetic oligonucleotide
  Sense strand starting at position 871 of SEQ ID NO: 584908
ucuugagugcuagagauag

SEQ ID NO: 598403 - RNA, 19 nt, Artificial Sequence
  Description of Artificial Sequence: Synthetic oligonucleotide
  Antisense strand to SEQ ID NO: 598402
cuaucucuagcacucaaga

SEQ ID NO: 598404 - RNA, 19 nt, Artificial Sequence
  Description of Artificial Sequence: Synthetic oligonucleotide
  Sense strand starting at position 1056 of SEQ ID NO: 584908
uccugaauucuccgaggag

SEQ ID NO: 598405 - RNA, 19 nt, Artificial Sequence
  Description of Artificial Sequence: Synthetic oligonucleotide
  Antisense strand to SEQ ID NO: 598404
cuccucggagaauucagga

SEQ ID NO: 598406 - RNA, 19 nt, Artificial Sequence
  Description of Artificial Sequence: Synthetic oligonucleotide
  Sense strand starting at position 1059 of SEQ ID NO: 584908
ugaauucuccgaggagcug

SEQ ID NO: 598407 - RNA, 19 nt, Artificial Sequence
  Description of Artificial Sequence: Synthetic oligonucleotide
  Antisense strand to SEQ ID NO: 598406
cagcuccucggagaauuca

SEQ ID NO: 598408 - RNA, 19 nt, Artificial Sequence
  Description of Artificial Sequence: Synthetic oligonucleotide
  Sense strand starting at position 1257 of SEQ ID NO: 584908
gagucuuucuggcucagaa

SEQ ID NO: 598409 - RNA, 19 nt, Artificial Sequence
  Description of Artificial Sequence: Synthetic oligonucleotide
  Antisense strand to SEQ ID NO: 598408
uucugagccagaaagacuc

SEQ ID NO: 598410 - RNA, 19 nt, Artificial Sequence
  Description of Artificial Sequence: Synthetic oligonucleotide
  Sense strand starting at position 1259 of SEQ ID NO: 584908
gucuuucuggcucagaaca

SEQ ID NO: 598411 - RNA, 19 nt, Artificial Sequence
  Description of Artificial Sequence: Synthetic oligonucleotide
  Antisense strand to SEQ ID NO: 598410
uguucugagccagaaagac

SEQ ID NO: 598412 - RNA, 19 nt, Artificial Sequence
  Description of Artificial Sequence: Synthetic oligonucleotide
  Sense strand starting at position 1276 of SEQ ID NO: 584908
cagguauuugccuggugau

SEQ ID NO: 598413 - RNA, 19 nt, Artificial Sequence
  Description of Artificial Sequence: Synthetic oligonucleotide
  Antisense strand to SEQ ID NO: 598412
aucaccaggcaaauaccug

SEQ ID NO: 598414 - RNA, 19 nt, Artificial Sequence
  Description of Artificial Sequence: Synthetic oligonucleotide
  Sense strand starting at position 1277 of SEQ ID NO: 584908
agguauuugccuggugaug

SEQ ID NO: 598415 - RNA, 19 nt, Artificial Sequence
  Description of Artificial Sequence: Synthetic oligonucleotide
  Antisense strand to SEQ ID NO: 598414
caucaccaggcaaauaccu

SEQ ID NO: 598416 - RNA, 19 nt, Artificial Sequence
  Description of Artificial Sequence: Synthetic oligonucleotide
  Sense strand starting at position 1687 of SEQ ID NO: 584908
uaggaauucucuuuguuag

SEQ ID NO: 598417 - RNA, 19 nt, Artificial Sequence
  Description of Artificial Sequence: Synthetic oligonucleotide
  Antisense strand to SEQ ID NO: 598416
cuaacaaagagaauuccua

SEQ ID NO: 598418 - RNA, 19 nt, Artificial Sequence
  Description of Artificial Sequence: Synthetic oligonucleotide
  Sense strand starting at position 1688 of SEQ ID NO: 584908
aggaauucucuuuguuagg

SEQ ID NO: 598419 - RNA, 19 nt, Artificial Sequence
  Description of Artificial Sequence: Synthetic oligonucleotide
  Antisense strand to SEQ ID NO: 598418
ccuaacaaagagaauuccu

SEQ ID NO: 598420 - RNA, 19 nt, Artificial Sequence
  Description of Artificial Sequence: Synthetic oligonucleotide
  Sense strand starting at position 1689 of SEQ ID NO: 584908
ggaauucucuuuguuagga

SEQ ID NO: 598421 - RNA, 19 nt, Artificial Sequence
  Description of Artificial Sequence: Synthetic oligonucleotide
  Antisense strand to SEQ ID NO: 598420
uccuaacaaagagaauucc

SEQ ID NO: 598422 - RNA, 19 nt, Artificial Sequence
  Description of Artificial Sequence: Synthetic oligonucleotide
  Sense strand starting at position 1690 of SEQ ID NO: 584908
gaauucucuuuguuaggag

SEQ ID NO: 598423 - RNA, 19 nt, Artificial Sequence
  Description of Artificial Sequence: Synthetic oligonucleotide
  Antisense strand to SEQ ID NO: 598422
cuccuaacaaagagaauuc

SEQ ID NO: 598424 - RNA, 19 nt, Artificial Sequence
  Description of Artificial Sequence: Synthetic oligonucleotide
  Sense strand starting at position 1712 of SEQ ID NO: 584908
gaaugaaaguguccagcaa

SEQ ID NO: 598425 - RNA, 19 nt, Artificial Sequence
  Description of Artificial Sequence: Synthetic oligonucleotide
  Antisense strand to SEQ ID NO: 598424
uugcuggacacuuucauuc

SEQ ID NO: 598426 - RNA, 19 nt, Artificial Sequence
  Description of Artificial Sequence: Synthetic oligonucleotide
  Sense strand starting at position 1713 of SEQ ID NO: 584908
aaugaaaguguccagcaaa

SEQ ID NO: 598427 - RNA, 19 nt, Artificial Sequence
  Description of Artificial Sequence: Synthetic oligonucleotide
  Antisense strand to SEQ ID NO: 598426
uuugcuggacacuuucauu

SEQ ID NO: 598428 - RNA, 19 nt, Artificial Sequence
  Description of Artificial Sequence: Synthetic oligonucleotide
  Sense strand starting at position 1716 of SEQ ID NO: 584908
gaaaguguccagcaaacuc

SEQ ID NO: 598429 - RNA, 19 nt, Artificial Sequence
  Description of Artificial Sequence: Synthetic oligonucleotide
  Antisense strand to SEQ ID NO: 598428
gaguuugcuggacacuuuc

SEQ ID NO: 598430 - RNA, 19 nt, Artificial Sequence
  Description of Artificial Sequence: Synthetic oligonucleotide
  Sense strand starting at position 1766 of SEQ ID NO: 584908
ggcuaugauuucuacaaag

SEQ ID NO: 598431 - RNA, 19 nt, Artificial Sequence
  Description of Artificial Sequence: Synthetic oligonucleotide
  Antisense strand to SEQ ID NO: 598430
cuuuguagaaaucauagcc

SEQ ID NO: 598432 - RNA, 19 nt, Artificial Sequence
  Description of Artificial Sequence: Synthetic oligonucleotide
  Sense strand starting at position 1837 of SEQ ID NO: 584908
gaacuaagauguccucaga

SEQ ID NO: 598433 - RNA, 19 nt, Artificial Sequence
  Description of Artificial Sequence: Synthetic oligonucleotide
  Antisense strand to SEQ ID NO: 598432
ucugaggacaucuuaguuc

SEQ ID NO: 598434 - RNA, 19 nt, Artificial Sequence
  Description of Artificial Sequence: Synthetic oligonucleotide
  Sense strand starting at position 2296 of SEQ ID NO: 584908
agucuugcgacuugaacag

SEQ ID NO: 598435 - RNA, 19 nt, Artificial Sequence
  Description of Artificial Sequence: Synthetic oligonucleotide
  Antisense strand to SEQ ID NO: 598434
cuguucaagucgcaagacu

SEQ ID NO: 598436 - RNA, 19 nt, Artificial Sequence
  Description of Artificial Sequence: Synthetic oligonucleotide
  Sense strand starting at position 2520 of SEQ ID NO: 584908
aguguacaagcuugauaau

SEQ ID NO: 598437 - RNA, 19 nt, Artificial Sequence
  Description of Artificial Sequence: Synthetic oligonucleotide
  Antisense strand to SEQ ID NO: 598436
auuaucaagcuuguacacu

SEQ ID NO: 598438 - RNA, 19 nt, Artificial Sequence
  Description of Artificial Sequence: Synthetic oligonucleotide
  Sense strand starting at position 2521 of SEQ ID NO: 584908
guguacaagcuugauaauc

SEQ ID NO: 598439 - RNA, 19 nt, Artificial Sequence
  Description of Artificial Sequence: Synthetic oligonucleotide
  Antisense strand to SEQ ID NO: 598438
gauuaucaagcuuguacac

SEQ ID NO: 598440 - RNA, 19 nt, Artificial Sequence
  Description of Artificial Sequence: Synthetic oligonucleotide
  Sense strand starting at position 2975 of SEQ ID NO: 584908
cugugaacucuuugagggu

SEQ ID NO: 598441 - RNA, 19 nt, Artificial Sequence
  Description of Artificial Sequence: Synthetic oligonucleotide
  Antisense strand to SEQ ID NO: 598440
acccucaaagaguucacag

SEQ ID NO: 598442 - RNA, 19 nt, Artificial Sequence
  Description of Artificial Sequence: Synthetic oligonucleotide
  Sense strand starting at position 2982 of SEQ ID NO: 584908
cucuuugaggguugggaau

SEQ ID NO: 598443 - RNA, 19 nt, Artificial Sequence
  Description of Artificial Sequence: Synthetic oligonucleotide
  Antisense strand to SEQ ID NO: 598442
auucccaacccucaaagag

SEQ ID NO: 598444 - RNA, 19 nt, Artificial Sequence
  Description of Artificial Sequence: Synthetic oligonucleotide
  Sense strand starting at position 2988 of SEQ ID NO: 584908
gaggguugggaaugucuuu

SEQ ID NO: 598445 - RNA, 19 nt, Artificial Sequence
  Description of Artificial Sequence: Synthetic oligonucleotide
  Antisense strand to SEQ ID NO: 598444
aaagacauucccaacccuc

SEQ ID NO: 598446 - RNA, 19 nt, Artificial Sequence
  Description of Artificial Sequence: Synthetic oligonucleotide
  Sense strand starting at position 2993 of SEQ ID NO: 584908
uugggaaugucuuuaccug

SEQ ID NO: 598447 - RNA, 19 nt, Artificial Sequence
  Description of Artificial Sequence: Synthetic oligonucleotide
  Antisense strand to SEQ ID NO: 598446
cagguaaagacauucccaa

SEQ ID NO: 598448 - RNA, 19 nt, Artificial Sequence
  Description of Artificial Sequence: Synthetic oligonucleotide
  Sense strand starting at position 2994 of SEQ ID NO: 584908
ugggaaugucuuuaccugu

SEQ ID NO: 598449 - RNA, 19 nt, Artificial Sequence
  Description of Artificial Sequence: Synthetic oligonucleotide
  Antisense strand to SEQ ID NO: 598448
acagguaaagacauuccca

SEQ ID NO: 598450 - RNA, 19 nt, Artificial Sequence
  Description of Artificial Sequence: Synthetic oligonucleotide
  Sense strand starting at position 3000 of SEQ ID NO: 584908
ugucuuuaccuguauucuu

SEQ ID NO: 598451 - RNA, 19 nt, Artificial Sequence
  Description of Artificial Sequence: Synthetic oligonucleotide
  Antisense strand to SEQ ID NO: 598450
aagaauacagguaaagaca

SEQ ID NO: 598452 - RNA, 19 nt, Artificial Sequence
  Description of Artificial Sequence: Synthetic oligonucleotide
  Sense strand starting at position 3011 of SEQ ID NO: 584908
guauucuuggcacauagua

SEQ ID NO: 598453 - RNA, 19 nt, Artificial Sequence
  Description of Artificial Sequence: Synthetic oligonucleotide
  Antisense strand to SEQ ID NO: 598452
uacuaugugccaagaauac

SEQ ID NO: 598454 - RNA, 19 nt, Artificial Sequence
  Description of Artificial Sequence: Synthetic oligonucleotide
  Sense strand starting at position 3031 of SEQ ID NO: 584908
auggacuuauguuugugaa

SEQ ID NO: 598455 - RNA, 19 nt, Artificial Sequence
  Description of Artificial Sequence: Synthetic oligonucleotide
  Antisense strand to SEQ ID NO: 598454
uucacaaacauaaguccau

SEQ ID NO: 598456 - RNA, 19 nt, Artificial Sequence
  Description of Artificial Sequence: Synthetic oligonucleotide
  Sense strand starting at position 3032 of SEQ ID NO: 584908
uggacuuauguuugugaaa

SEQ ID NO: 598457 - RNA, 19 nt, Artificial Sequence
  Description of Artificial Sequence: Synthetic oligonucleotide
  Antisense strand to SEQ ID NO: 598456
uuucacaaacauaagucca

SEQ ID NO: 598458 - RNA, 19 nt, Artificial Sequence
  Description of Artificial Sequence: Synthetic oligonucleotide
  Sense strand starting at position 3033 of SEQ ID NO: 584908
ggacuuauguuugugaaau

SEQ ID NO: 598459 - RNA, 19 nt, Artificial Sequence
  Description of Artificial Sequence: Synthetic oligonucleotide
  Antisense strand to SEQ ID NO: 598458
auuucacaaacauaagucc

SEQ ID NO: 598460 - RNA, 19 nt, Artificial Sequence
  Description of Artificial Sequence: Synthetic oligonucleotide
  Sense strand starting at position 3043 of SEQ ID NO: 584908
uugugaaaucagugaauug

SEQ ID NO: 598461 - RNA, 19 nt, Artificial Sequence
  Description of Artificial Sequence: Synthetic oligonucleotide
  Antisense strand to SEQ ID NO: 598460
caauucacugauuucacaa

SEQ ID NO: 598462 - RNA, 19 nt, Artificial Sequence
  Description of Artificial Sequence: Synthetic oligonucleotide
  Sense strand starting at position 3054 of SEQ ID NO: 584908
gugaauuggcuguagucag

SEQ ID NO: 598463 - RNA, 19 nt, Artificial Sequence
  Description of Artificial Sequence: Synthetic oligonucleotide
  Antisense strand to SEQ ID NO: 598462
cugacuacagccaauucac

SEQ ID NO: 598464 - RNA, 19 nt, Artificial Sequence
  Description of Artificial Sequence: Synthetic oligonucleotide
  Sense strand starting at position 3088 of SEQ ID NO: 584908
ggaagugagacuugcacga

SEQ ID NO: 598465 - RNA, 19 nt, Artificial Sequence
  Description of Artificial Sequence: Synthetic oligonucleotide
  Antisense strand to SEQ ID NO: 598464
ucgugcaagucucacuucc

SEQ ID NO: 598466 - RNA, 19 nt, Artificial Sequence
  Description of Artificial Sequence: Synthetic oligonucleotide
  Sense strand starting at position 3163 of SEQ ID NO: 584908
gggucugggaccugaaagu

SEQ ID NO: 598467 - RNA, 19 nt, Artificial Sequence
  Description of Artificial Sequence: Synthetic oligonucleotide
  Antisense strand to SEQ ID NO: 598466
acuuucaggucccagaccc

SEQ ID NO: 598468 - RNA, 19 nt, Artificial Sequence
  Description of Artificial Sequence: Synthetic oligonucleotide
  Sense strand starting at position 3493 of SEQ ID NO: 584908
gucagaacucgagguucau

SEQ ID NO: 598469 - RNA, 19 nt, Artificial Sequence
  Description of Artificial Sequence: Synthetic oligonucleotide
  Antisense strand to SEQ ID NO: 598468
augaaccucgaguucugac

SEQ ID NO: 598470 - RNA, 19 nt, Artificial Sequence
  Description of Artificial Sequence: Synthetic oligonucleotide
  Sense strand starting at position 3508 of SEQ ID NO: 584908
ucauguaaguccuuagauc

SEQ ID NO: 598471 - RNA, 19 nt, Artificial Sequence
  Description of Artificial Sequence: Synthetic oligonucleotide
  Antisense strand to SEQ ID NO: 598470
gaucuaaggacuuacauga

SEQ ID NO: 598472 - RNA, 19 nt, Artificial Sequence
  Description of Artificial Sequence: Synthetic oligonucleotide
  Sense strand starting at position 205 of SEQ ID NO: 584909
caacaugagugagacucau

SEQ ID NO: 598473 - RNA, 19 nt, Artificial Sequence
  Description of Artificial Sequence: Synthetic oligonucleotide
  Antisense strand to SEQ ID NO: 598472
augagucucacucauguug

SEQ ID NO: 598474 - RNA, 19 nt, Artificial Sequence
  Description of Artificial Sequence: Synthetic oligonucleotide
  Sense strand starting at position 251 of SEQ ID NO: 584909
auagaauagucacaaggaa

SEQ ID NO: 598475 - RNA, 19 nt, Artificial Sequence
  Description of Artificial Sequence: Synthetic oligonucleotide
  Antisense strand to SEQ ID NO: 598474
uuccuugugacuauucuau

SEQ ID NO: 598476 - RNA, 19 nt, Artificial Sequence
  Description of Artificial Sequence: Synthetic oligonucleotide
  Sense strand starting at position 585 of SEQ ID NO: 584909
guggauguugcagggagau

SEQ ID NO: 598477 - RNA, 19 nt, Artificial Sequence
  Description of Artificial Sequence: Synthetic oligonucleotide
  Antisense strand to SEQ ID NO: 598476
aucucccugcaacauccac

SEQ ID NO: 598478 - RNA, 19 nt, Artificial Sequence
  Description of Artificial Sequence: Synthetic oligonucleotide
  Sense strand starting at position 663 of SEQ ID NO: 584909
accugugguacauggauua

SEQ ID NO: 598479 - RNA, 19 nt, Artificial Sequence
  Description of Artificial Sequence: Synthetic oligonucleotide
  Antisense strand to SEQ ID NO: 598478
uaauccauguaccacaggu

SEQ ID NO: 598480 - RNA, 19 nt, Artificial Sequence
  Description of Artificial Sequence: Synthetic oligonucleotide
  Sense strand starting at position 964 of SEQ ID NO: 584909
gugggagaaucgguuaaac

SEQ ID NO: 598481 - RNA, 19 nt, Artificial Sequence
  Description of Artificial Sequence: Synthetic oligonucleotide
  Antisense strand to SEQ ID NO: 598480
guuuaaccgauucucccac

SEQ ID NO: 598482 - RNA, 19 nt, Artificial Sequence
  Description of Artificial Sequence: Synthetic oligonucleotide
  Sense strand starting at position 975 of SEQ ID NO: 584909
gguuaaacccgggaguuga

SEQ ID NO: 598483 - RNA, 19 nt, Artificial Sequence
  Description of Artificial Sequence: Synthetic oligonucleotide
  Antisense strand to SEQ ID NO: 598482
ucaacucccggguuuaacc

SEQ ID NO: 598484 - RNA, 19 nt, Artificial Sequence
  Description of Artificial Sequence: Synthetic oligonucleotide
  Sense strand starting at position 1382 of SEQ ID NO: 584909
gcauaaugcccaugaacga

SEQ ID NO: 598485 - RNA, 19 nt, Artificial Sequence
  Description of Artificial Sequence: Synthetic oligonucleotide
  Antisense strand to SEQ ID NO: 598484
ucguucaugggcauuaugc

SEQ ID NO: 598486 - RNA, 19 nt, Artificial Sequence
  Description of Artificial Sequence: Synthetic oligonucleotide
  Sense strand starting at position 1397 of SEQ ID NO: 584909
acgaaagcuugcuugggaa

SEQ ID NO: 598487 - RNA, 19 nt, Artificial Sequence
  Description of Artificial Sequence: Synthetic oligonucleotide
  Antisense strand to SEQ ID NO: 598486
uucccaagcaagcuuucgu

SEQ ID NO: 598488 - RNA, 19 nt, Artificial Sequence
  Description of Artificial Sequence: Synthetic oligonucleotide
  Sense strand starting at position 1399 of SEQ ID NO: 584909
gaaagcuugcuugggaaca

SEQ ID NO: 598489 - RNA, 19 nt, Artificial Sequence
  Description of Artificial Sequence: Synthetic oligonucleotide
  Antisense strand to SEQ ID NO: 598488
uguucccaagcaagcuuuc

SEQ ID NO: 598490 - RNA, 19 nt, Artificial Sequence
  Description of Artificial Sequence: Synthetic oligonucleotide
  Sense strand starting at position 1413 of SEQ ID NO: 584909
gaacaaagcuuuccgaaga

SEQ ID NO: 598491 - RNA, 19 nt, Artificial Sequence
  Description of Artificial Sequence: Synthetic oligonucleotide
  Antisense strand to SEQ ID NO: 598490
ucuucggaaagcuuuguuc

SEQ ID NO: 598492 - RNA, 19 nt, Artificial Sequence
  Description of Artificial Sequence: Synthetic oligonucleotide
  Sense strand starting at position 1418 of SEQ ID NO: 584909
aagcuuuccgaagaggcau

SEQ ID NO: 598493 - RNA, 19 nt, Artificial Sequence
  Description of Artificial Sequence: Synthetic oligonucleotide
  Antisense strand to SEQ ID NO: 598492
augccucuucggaaagcuu

SEQ ID NO: 598494 - RNA, 19 nt, Artificial Sequence
  Description of Artificial Sequence: Synthetic oligonucleotide
  Sense strand starting at position 1535 of SEQ ID NO: 584909
uuaggaaucuuggccauga

SEQ ID NO: 598495 - RNA, 19 nt, Artificial Sequence
  Description of Artificial Sequence: Synthetic oligonucleotide
  Antisense strand to SEQ ID NO: 598494
ucauggccaagauuccuaa

SEQ ID NO: 598496 - RNA, 19 nt, Artificial Sequence
  Description of Artificial Sequence: Synthetic oligonucleotide
  Sense strand starting at position 1536 of SEQ ID NO: 584909
uaggaaucuuggccaugaa

SEQ ID NO: 598497 - RNA, 19 nt, Artificial Sequence
  Description of Artificial Sequence: Synthetic oligonucleotide
  Antisense strand to SEQ ID NO: 598496
uucauggccaagauuccua

SEQ ID NO: 598498 - RNA, 19 nt, Artificial Sequence
  Description of Artificial Sequence: Synthetic oligonucleotide
  Sense strand starting at position 1548 of SEQ ID NO: 584909
ccaugaacucguugagccu

SEQ ID NO: 598499 - RNA, 19 nt, Artificial Sequence
  Description of Artificial Sequence: Synthetic oligonucleotide
  Antisense strand to SEQ ID NO: 598498
aggcucaacgaguucaugg

SEQ ID NO: 598500 - RNA, 19 nt, Artificial Sequence
  Description of Artificial Sequence: Synthetic oligonucleotide
  Sense strand starting at position 1554 of SEQ ID NO: 584909
acucguugagccugagaaa

SEQ ID NO: 598501 - RNA, 19 nt, Artificial Sequence
  Description of Artificial Sequence: Synthetic oligonucleotide
  Antisense strand to SEQ ID NO: 598500
uuucucaggcucaacgagu

SEQ ID NO: 598502 - RNA, 19 nt, Artificial Sequence
  Description of Artificial Sequence: Synthetic oligonucleotide
  Sense strand starting at position 1555 of SEQ ID NO: 584909
cucguugagccugagaaau

SEQ ID NO: 598503 - RNA, 19 nt, Artificial Sequence
  Description of Artificial Sequence: Synthetic oligonucleotide
  Antisense strand to SEQ ID NO: 598502
auuucucaggcucaacgag

SEQ ID NO: 598504 - RNA, 19 nt, Artificial Sequence
  Description of Artificial Sequence: Synthetic oligonucleotide
  Sense strand starting at position 1565 of SEQ ID NO: 584909
cugagaaaugcuggaccga

SEQ ID NO: 598505 - RNA, 19 nt, Artificial Sequence
  Description of Artificial Sequence: Synthetic oligonucleotide
  Antisense strand to SEQ ID NO: 598504
ucgguccagcauuucucag

SEQ ID NO: 598506 - RNA, 19 nt, Artificial Sequence
  Description of Artificial Sequence: Synthetic oligonucleotide
  Sense strand starting at position 2047 of SEQ ID NO: 584909
gggccugacggguauaguu

SEQ ID NO: 598507 - RNA, 19 nt, Artificial Sequence
  Description of Artificial Sequence: Synthetic oligonucleotide
  Antisense strand to SEQ ID NO: 598506
aacuauacccgucaggccc

SEQ ID NO: 598508 - RNA, 19 nt, Artificial Sequence
  Description of Artificial Sequence: Synthetic oligonucleotide
  Sense strand starting at position 2070 of SEQ ID NO: 584909
ucuuaucugccuggcuaga

SEQ ID NO: 598509 - RNA, 19 nt, Artificial Sequence
  Description of Artificial Sequence: Synthetic oligonucleotide
  Antisense strand to SEQ ID NO: 598508
ucuagccaggcagauaaga

SEQ ID NO: 598510 - RNA, 19 nt, Artificial Sequence
  Description of Artificial Sequence: Synthetic oligonucleotide
  Sense strand starting at position 2103 of SEQ ID NO: 584909
cccauuguuuguccacaca

SEQ ID NO: 598511 - RNA, 19 nt, Artificial Sequence
  Description of Artificial Sequence: Synthetic oligonucleotide
  Antisense strand to SEQ ID NO: 598510
uguguggacaaacaauggg

SEQ ID NO: 598512 - RNA, 19 nt, Artificial Sequence
  Description of Artificial Sequence: Synthetic oligonucleotide
  Sense strand starting at position 2106 of SEQ ID NO: 584909
auuguuuguccacacagaa

SEQ ID NO: 598513 - RNA, 19 nt, Artificial Sequence
  Description of Artificial Sequence: Synthetic oligonucleotide
  Antisense strand to SEQ ID NO: 598512
uucuguguggacaaacaau

SEQ ID NO: 598514 - RNA, 19 nt, Artificial Sequence
  Description of Artificial Sequence: Synthetic oligonucleotide
  Sense strand starting at position 2164 of SEQ ID NO: 584909
acacuccucugggcaaaua

SEQ ID NO: 598515 - RNA, 19 nt, Artificial Sequence
  Description of Artificial Sequence: Synthetic oligonucleotide
  Antisense strand to SEQ ID NO: 598514
uauuugcccagaggagugu

SEQ ID NO: 598516 - RNA, 19 nt, Artificial Sequence
  Description of Artificial Sequence: Synthetic oligonucleotide
  Sense strand starting at position 2173 of SEQ ID NO: 584909
ugggcaaauauucggagau

SEQ ID NO: 598517 - RNA, 19 nt, Artificial Sequence
  Description of Artificial Sequence: Synthetic oligonucleotide
  Antisense strand to SEQ ID NO: 598516
aucuccgaauauuugccca

SEQ ID NO: 598518 - RNA, 19 nt, Artificial Sequence
  Description of Artificial Sequence: Synthetic oligonucleotide
  Sense strand starting at position 2177 of SEQ ID NO: 584909
caaauauucggagaugcuu

SEQ ID NO: 598519 - RNA, 19 nt, Artificial Sequence
  Description of Artificial Sequence: Synthetic oligonucleotide
  Antisense strand to SEQ ID NO: 598518
aagcaucuccgaauauuug

SEQ ID NO: 598520 - RNA, 19 nt, Artificial Sequence
  Description of Artificial Sequence: Synthetic oligonucleotide
  Sense strand starting at position 2185 of SEQ ID NO: 584909
cggagaugcuuucugaauu

SEQ ID NO: 598521 - RNA, 19 nt, Artificial Sequence
  Description of Artificial Sequence: Synthetic oligonucleotide
  Antisense strand to SEQ ID NO: 598520
aauucagaaagcaucuccg

SEQ ID NO: 598522 - RNA, 19 nt, Artificial Sequence
  Description of Artificial Sequence: Synthetic oligonucleotide
  Sense strand starting at position 2186 of SEQ ID NO: 584909
ggagaugcuuucugaauuu

SEQ ID NO: 598523 - RNA, 19 nt, Artificial Sequence
  Description of Artificial Sequence: Synthetic oligonucleotide
  Antisense strand to SEQ ID NO: 598522
aaauucagaaagcaucucc

SEQ ID NO: 598524 - RNA, 19 nt, Artificial Sequence
  Description of Artificial Sequence: Synthetic oligonucleotide
  Sense strand starting at position 2317 of SEQ ID NO: 584909
cguuaaugacccugggacu

SEQ ID NO: 598525 - RNA, 19 nt, Artificial Sequence
  Description of Artificial Sequence: Synthetic oligonucleotide
  Antisense strand to SEQ ID NO: 598524
agucccagggucauuaacg

SEQ ID NO: 598526 - RNA, 19 nt, Artificial Sequence
  Description of Artificial Sequence: Synthetic oligonucleotide
  Sense strand starting at position 2369 of SEQ ID NO: 584909
ccaguuuagcguccagcua

SEQ ID NO: 598527 - RNA, 19 nt, Artificial Sequence
  Description of Artificial Sequence: Synthetic oligonucleotide
  Antisense strand to SEQ ID NO: 598526
uagcuggacgcuaaacugg

SEQ ID NO: 598528 - RNA, 19 nt, Artificial Sequence
  Description of Artificial Sequence: Synthetic oligonucleotide
  Sense strand starting at position 2511 of SEQ ID NO: 584909
aggcaggucggacguaaua

SEQ ID NO: 598529 - RNA, 19 nt, Artificial Sequence
  Description of Artificial Sequence: Synthetic oligonucleotide
  Antisense strand to SEQ ID NO: 598528
uauuacguccgaccugccu

SEQ ID NO: 598530 - RNA, 19 nt, Artificial Sequence
  Description of Artificial Sequence: Synthetic oligonucleotide
  Sense strand starting at position 2999 of SEQ ID NO: 584909
uuuauaaacgcguaugaug

SEQ ID NO: 598531 - RNA, 19 nt, Artificial Sequence
  Description of Artificial Sequence: Synthetic oligonucleotide
  Antisense strand to SEQ ID NO: 598530
caucauacgcguuuauaaa

SEQ ID NO: 598532 - RNA, 19 nt, Artificial Sequence
  Description of Artificial Sequence: Synthetic oligonucleotide
  Sense strand starting at position 3010 of SEQ ID NO: 584909
guaugauguuuggugaugu

SEQ ID NO: 598533 - RNA, 19 nt, Artificial Sequence
  Description of Artificial Sequence: Synthetic oligonucleotide
  Antisense strand to SEQ ID NO: 598532
acaucaccaaacaucauac

SEQ ID NO: 598534 - RNA, 19 nt, Artificial Sequence
  Description of Artificial Sequence: Synthetic oligonucleotide
  Sense strand starting at position 3166 of SEQ ID NO: 584909
cgaaguagcaaggauuaca

SEQ ID NO: 598535 - RNA, 19 nt, Artificial Sequence
  Description of Artificial Sequence: Synthetic oligonucleotide
  Antisense strand to SEQ ID NO: 598534
uguaauccuugcuacuucg

SEQ ID NO: 598536 - RNA, 19 nt, Artificial Sequence
  Description of Artificial Sequence: Synthetic oligonucleotide
  Sense strand starting at position 3593 of SEQ ID NO: 584909
acuggugaaccucagugau

SEQ ID NO: 598537 - RNA, 19 nt, Artificial Sequence
  Description of Artificial Sequence: Synthetic oligonucleotide
  Antisense strand to SEQ ID NO: 598536
aucacugagguucaccagu

SEQ ID NO: 598538 - RNA, 19 nt, Artificial Sequence
  Description of Artificial Sequence: Synthetic oligonucleotide
  Sense strand starting at position 3596 of SEQ ID NO: 584909
ggugaaccucagugauccu

SEQ ID NO: 598539 - RNA, 19 nt, Artificial Sequence
  Description of Artificial Sequence: Synthetic oligonucleotide
  Antisense strand to SEQ ID NO: 598538
aggaucacugagguucacc

SEQ ID NO: 598540 - RNA, 19 nt, Artificial Sequence
  Description of Artificial Sequence: Synthetic oligonucleotide
  Sense strand starting at position 3688 of SEQ ID NO: 584909
ccacauuggcugcaaauua

SEQ ID NO: 598541 - RNA, 19 nt, Artificial Sequence
  Description of Artificial Sequence: Synthetic oligonucleotide
  Antisense strand to SEQ ID NO: 598540
uaauuugcagccaaugugg

SEQ ID NO: 598542 - RNA, 19 nt, Artificial Sequence
  Description of Artificial Sequence: Synthetic oligonucleotide
  Sense strand starting at position 3721 of SEQ ID NO: 584909
gcuuuaaaugucuacacug

SEQ ID NO: 598543 - RNA, 19 nt, Artificial Sequence
  Description of Artificial Sequence: Synthetic oligonucleotide
  Antisense strand to SEQ ID NO: 598542
caguguagacauuuaaagc

SEQ ID NO: 598544 - RNA, 19 nt, Artificial Sequence
  Description of Artificial Sequence: Synthetic oligonucleotide
  Sense strand starting at position 3753 of SEQ ID NO: 584909
ucugaauuggccugagaga

SEQ ID NO: 598545 - RNA, 19 nt, Artificial Sequence
  Description of Artificial Sequence: Synthetic oligonucleotide
  Antisense strand to SEQ ID NO: 598544
ucucucaggccaauucaga

SEQ ID NO: 598546 - RNA, 19 nt, Artificial Sequence
  Description of Artificial Sequence: Synthetic oligonucleotide
  Sense strand starting at position 3771 of SEQ ID NO: 584909
aggccuggcaucuguauuu

SEQ ID NO: 598547 - RNA, 19 nt, Artificial Sequence
  Description of Artificial Sequence: Synthetic oligonucleotide
  Antisense strand to SEQ ID NO: 598546
aaauacagaugccaggccu

SEQ ID NO: 598548 - RNA, 19 nt, Artificial Sequence
  Description of Artificial Sequence: Synthetic oligonucleotide
  Sense strand starting at position 3852 of SEQ ID NO: 584909
aguauuuguucccucuacu

SEQ ID NO: 598549 - RNA, 19 nt, Artificial Sequence
  Description of Artificial Sequence: Synthetic oligonucleotide
  Antisense strand to SEQ ID NO: 598548
aguagagggaacaaauacu

SEQ ID NO: 598550 - RNA, 19 nt, Artificial Sequence
  Description of Artificial Sequence: Synthetic oligonucleotide
  Sense strand starting at position 3976 of SEQ ID NO: 584909
ugccaugaaccgugaucau

SEQ ID NO: 598551 - RNA, 19 nt, Artificial Sequence
  Description of Artificial Sequence: Synthetic oligonucleotide
  Antisense strand to SEQ ID NO: 598550
augaucacgguucauggca

SEQ ID NO: 598552 - RNA, 19 nt, Artificial Sequence
  Description of Artificial Sequence: Synthetic oligonucleotide
  Sense strand starting at position 59 of SEQ ID NO: 584910
ucuugaucucgucaaagug

SEQ ID NO: 598553 - RNA, 19 nt, Artificial Sequence
  Description of Artificial Sequence: Synthetic oligonucleotide
  Antisense strand to SEQ ID NO: 598552
cacuuugacgagaucaaga

SEQ ID NO: 598554 - RNA, 19 nt, Artificial Sequence
  Description of Artificial Sequence: Synthetic oligonucleotide
  Sense strand starting at position 139 of SEQ ID NO: 584910
gaguccugaccucaagcaa

SEQ ID NO: 598555 - RNA, 19 nt, Artificial Sequence
  Description of Artificial Sequence: Synthetic oligonucleotide
  Antisense strand to SEQ ID NO: 598554
uugcuugaggucaggacuc

SEQ ID NO: 598556 - RNA, 19 nt, Artificial Sequence
  Description of Artificial Sequence: Synthetic oligonucleotide
  Sense strand starting at position 253 of SEQ ID NO: 584910
uuuccacuagacugagaau

SEQ ID NO: 598557 - RNA, 19 nt, Artificial Sequence
  Description of Artificial Sequence: Synthetic oligonucleotide
  Antisense strand to SEQ ID NO: 598556
auucucagucuaguggaaa

SEQ ID NO: 598558 - RNA, 19 nt, Artificial Sequence
  Description of Artificial Sequence: Synthetic oligonucleotide
  Sense strand starting at position 265 of SEQ ID NO: 584910
ugagaauuaguuugucaac

SEQ ID NO: 598559 - RNA, 19 nt, Artificial Sequence
  Description of Artificial Sequence: Synthetic oligonucleotide
  Antisense strand to SEQ ID NO: 598558
guugacaaacuaauucuca

SEQ ID NO: 598560 - RNA, 19 nt, Artificial Sequence
  Description of Artificial Sequence: Synthetic oligonucleotide
  Sense strand starting at position 266 of SEQ ID NO: 584910
gagaauuaguuugucaaca

SEQ ID NO: 598561 - RNA, 19 nt, Artificial Sequence
  Description of Artificial Sequence: Synthetic oligonucleotide
  Antisense strand to SEQ ID NO: 598560
uguugacaaacuaauucuc

SEQ ID NO: 598562 - RNA, 19 nt, Artificial Sequence
  Description of Artificial Sequence: Synthetic oligonucleotide
  Sense strand starting at position 267 of SEQ ID NO: 584910
agaauuaguuugucaacag

SEQ ID NO: 598563 - RNA, 19 nt, Artificial Sequence
  Description of Artificial Sequence: Synthetic oligonucleotide
  Antisense strand to SEQ ID NO: 598562
cuguugacaaacuaauucu

SEQ ID NO: 598564 - RNA, 19 nt, Artificial Sequence
  Description of Artificial Sequence: Synthetic oligonucleotide
  Sense strand starting at position 333 of SEQ ID NO: 584910
gcagaugacguagaaagua

SEQ ID NO: 598565 - RNA, 19 nt, Artificial Sequence
  Description of Artificial Sequence: Synthetic oligonucleotide
  Antisense strand to SEQ ID NO: 598564
uacuuucuacgucaucugc

SEQ ID NO: 598566 - RNA, 19 nt, Artificial Sequence
  Description of Artificial Sequence: Synthetic oligonucleotide
  Sense strand starting at position 1017 of SEQ ID NO: 584910
uacuacgguguuuaugaga

SEQ ID NO: 598567 - RNA, 19 nt, Artificial Sequence
  Description of Artificial Sequence: Synthetic oligonucleotide
  Antisense strand to SEQ ID NO: 598566
ucucauaaacaccguagua

SEQ ID NO: 598568 - RNA, 19 nt, Artificial Sequence
  Description of Artificial Sequence: Synthetic oligonucleotide
  Sense strand starting at position 1071 of SEQ ID NO: 584910
guaggaaagcuguaauguc

SEQ ID NO: 598569 - RNA, 19 nt, Artificial Sequence
  Description of Artificial Sequence: Synthetic oligonucleotide
  Antisense strand to SEQ ID NO: 598568
gacauuacagcuuuccuac

SEQ ID NO: 598570 - RNA, 19 nt, Artificial Sequence
  Description of Artificial Sequence: Synthetic oligonucleotide
  Sense strand starting at position 1078 of SEQ ID NO: 584910
agcuguaaugucuaagaca

SEQ ID NO: 598571 - RNA, 19 nt, Artificial Sequence
  Description of Artificial Sequence: Synthetic oligonucleotide
  Antisense strand to SEQ ID NO: 598570
ugucuuagacauuacagcu

SEQ ID NO: 598572 - RNA, 19 nt, Artificial Sequence
  Description of Artificial Sequence: Synthetic oligonucleotide
  Sense strand starting at position 2023 of SEQ ID NO: 584910
uccugaugucacggaaaug

SEQ ID NO: 598573 - RNA, 19 nt, Artificial Sequence
  Description of Artificial Sequence: Synthetic oligonucleotide
  Antisense strand to SEQ ID NO: 598572
cauuuccgugacaucagga

SEQ ID NO: 598574 - RNA, 19 nt, Artificial Sequence
  Description of Artificial Sequence: Synthetic oligonucleotide
  Sense strand starting at position 2091 of SEQ ID NO: 584910
uggcaccuuccugagauau

SEQ ID NO: 598575 - RNA, 19 nt, Artificial Sequence
  Description of Artificial Sequence: Synthetic oligonucleotide
  Antisense strand to SEQ ID NO: 598574
auaucucaggaaggugcca

SEQ ID NO: 598576 - RNA, 19 nt, Artificial Sequence
  Description of Artificial Sequence: Synthetic oligonucleotide
  Sense strand starting at position 2142 of SEQ ID NO: 584910
gugagaaccuccucaugug

SEQ ID NO: 598577 - RNA, 19 nt, Artificial Sequence
  Description of Artificial Sequence: Synthetic oligonucleotide
  Antisense strand to SEQ ID NO: 598576
cacaugaggagguucucac

SEQ ID NO: 598578 - RNA, 19 nt, Artificial Sequence
  Description of Artificial Sequence: Synthetic oligonucleotide
  Sense strand starting at position 2208 of SEQ ID NO: 584910
gcuuaaaguguuuccacgu

SEQ ID NO: 598579 - RNA, 19 nt, Artificial Sequence
  Description of Artificial Sequence: Synthetic oligonucleotide
  Antisense strand to SEQ ID NO: 598578
acguggaaacacuuuaagc

SEQ ID NO: 598580 - RNA, 19 nt, Artificial Sequence
  Description of Artificial Sequence: Synthetic oligonucleotide
  Sense strand starting at position 2250 of SEQ ID NO: 584910
uggagccugacguauaauu

SEQ ID NO: 598581 - RNA, 19 nt, Artificial Sequence
  Description of Artificial Sequence: Synthetic oligonucleotide
  Antisense strand to SEQ ID NO: 598580
aauuauacgucaggcucca

SEQ ID NO: 598582 - RNA, 19 nt, Artificial Sequence
  Description of Artificial Sequence: Synthetic oligonucleotide
  Sense strand starting at position 2260 of SEQ ID NO: 584910
cguauaauucgagcgccga

SEQ ID NO: 598583 - RNA, 19 nt, Artificial Sequence
  Description of Artificial Sequence: Synthetic oligonucleotide
  Antisense strand to SEQ ID NO: 598582
ucggcgcucgaauuauacg

SEQ ID NO: 598584 - RNA, 19 nt, Artificial Sequence
  Description of Artificial Sequence: Synthetic oligonucleotide
  Sense strand starting at position 2562 of SEQ ID NO: 584910
acuggaugauuugaugaau

SEQ ID NO: 598585 - RNA, 19 nt, Artificial Sequence
  Description of Artificial Sequence: Synthetic oligonucleotide
  Antisense strand to SEQ ID NO: 598584
auucaucaaaucauccagu

SEQ ID NO: 598586 - RNA, 19 nt, Artificial Sequence
  Description of Artificial Sequence: Synthetic oligonucleotide
  Sense strand starting at position 2717 of SEQ ID NO: 584910
ggacaaaugagucguagau

SEQ ID NO: 598587 - RNA, 19 nt, Artificial Sequence
  Description of Artificial Sequence: Synthetic oligonucleotide
  Antisense strand to SEQ ID NO: 598586
aucuacgacucauuugucc

SEQ ID NO: 598588 - RNA, 19 nt, Artificial Sequence
  Description of Artificial Sequence: Synthetic oligonucleotide
  Sense strand starting at position 2721 of SEQ ID NO: 584910
aaaugagucguagauugug

SEQ ID NO: 598589 - RNA, 19 nt, Artificial Sequence
  Description of Artificial Sequence: Synthetic oligonucleotide
  Antisense strand to SEQ ID NO: 598588
cacaaucuacgacucauuu

SEQ ID NO: 598590 - RNA, 19 nt, Artificial Sequence
  Description of Artificial Sequence: Synthetic oligonucleotide
  Sense strand starting at position 2866 of SEQ ID NO: 584910
uagguaaagcgauaccaau

SEQ ID NO: 598591 - RNA, 19 nt, Artificial Sequence
  Description of Artificial Sequence: Synthetic oligonucleotide
  Antisense strand to SEQ ID NO: 598590
auugguaucgcuuuaccua

SEQ ID NO: 598592 - RNA, 19 nt, Artificial Sequence
  Description of Artificial Sequence: Synthetic oligonucleotide
  Sense strand starting at position 2944 of SEQ ID NO: 584910
uauggaucuugccuuagag

SEQ ID NO: 598593 - RNA, 19 nt, Artificial Sequence
  Description of Artificial Sequence: Synthetic oligonucleotide
  Antisense strand to SEQ ID NO: 598592
cucuaaggcaagauccaua

SEQ ID NO: 598594 - RNA, 19 nt, Artificial Sequence
  Description of Artificial Sequence: Synthetic oligonucleotide
  Sense strand starting at position 2959 of SEQ ID NO: 584910
agagacguugccuacauaa

SEQ ID NO: 598595 - RNA, 19 nt, Artificial Sequence
  Description of Artificial Sequence: Synthetic oligonucleotide
  Antisense strand to SEQ ID NO: 598594
uuauguaggcaacgucucu

SEQ ID NO: 598596 - RNA, 19 nt, Artificial Sequence
  Description of Artificial Sequence: Synthetic oligonucleotide
  Sense strand starting at position 3028 of SEQ ID NO: 584910
augauauuacuagaugugu

SEQ ID NO: 598597 - RNA, 19 nt, Artificial Sequence
  Description of Artificial Sequence: Synthetic oligonucleotide
  Antisense strand to SEQ ID NO: 598596
acacaucuaguaauaucau

SEQ ID NO: 598598 - RNA, 19 nt, Artificial Sequence
  Description of Artificial Sequence: Synthetic oligonucleotide
  Sense strand starting at position 3033 of SEQ ID NO: 584910
auuacuagaugugugaaua

SEQ ID NO: 598599 - RNA, 19 nt, Artificial Sequence
  Description of Artificial Sequence: Synthetic oligonucleotide
  Antisense strand to SEQ ID NO: 598598
uauucacacaucuaguaau

SEQ ID NO: 598600 - RNA, 19 nt, Artificial Sequence
  Description of Artificial Sequence: Synthetic oligonucleotide
  Sense strand starting at position 3034 of SEQ ID NO: 584910
uuacuagaugugugaauag

SEQ ID NO: 598601 - RNA, 19 nt, Artificial Sequence
  Description of Artificial Sequence: Synthetic oligonucleotide
  Antisense strand to SEQ ID NO: 598600
cuauucacacaucuaguaa

SEQ ID NO: 598602 - RNA, 19 nt, Artificial Sequence
  Description of Artificial Sequence: Synthetic oligonucleotide
  Sense strand starting at position 3074 of SEQ ID NO: 584910
ucaguagucaaauagguag

SEQ ID NO: 598603 - RNA, 19 nt, Artificial Sequence
  Description of Artificial Sequence: Synthetic oligonucleotide
  Antisense strand to SEQ ID NO: 598602
cuaccuauuugacuacuga

SEQ ID NO: 598604 - RNA, 19 nt, Artificial Sequence
  Description of Artificial Sequence: Synthetic oligonucleotide
  Sense strand starting at position 3076 of SEQ ID NO: 584910
aguagucaaauagguagau

SEQ ID NO: 598605 - RNA, 19 nt, Artificial Sequence
  Description of Artificial Sequence: Synthetic oligonucleotide
  Antisense strand to SEQ ID NO: 598604
aucuaccuauuugacuacu

SEQ ID NO: 598606 - RNA, 19 nt, Artificial Sequence
  Description of Artificial Sequence: Synthetic oligonucleotide
  Sense strand starting at position 3077 of SEQ ID NO: 584910
guagucaaauagguagaua

SEQ ID NO: 598607 - RNA, 19 nt, Artificial Sequence
  Description of Artificial Sequence: Synthetic oligonucleotide
  Antisense strand to SEQ ID NO: 598606
uaucuaccuauuugacuac

SEQ ID NO: 598608 - RNA, 19 nt, Artificial Sequence
  Description of Artificial Sequence: Synthetic oligonucleotide
  Sense strand starting at position 3216 of SEQ ID NO: 584910
ggucuuuaauuauccagaa

SEQ ID NO: 598609 - RNA, 19 nt, Artificial Sequence
  Description of Artificial Sequence: Synthetic oligonucleotide
  Antisense strand to SEQ ID NO: 598608
uucuggauaauuaaagacc

SEQ ID NO: 598610 - RNA, 19 nt, Artificial Sequence
  Description of Artificial Sequence: Synthetic oligonucleotide
  Sense strand starting at position 3255 of SEQ ID NO: 584910
ggccuauugcuuucguuua

SEQ ID NO: 598611 - RNA, 19 nt, Artificial Sequence
  Description of Artificial Sequence: Synthetic oligonucleotide
  Antisense strand to SEQ ID NO: 598610
uaaacgaaagcaauaggcc

SEQ ID NO: 598612 - RNA, 19 nt, Artificial Sequence
  Description of Artificial Sequence: Synthetic oligonucleotide
  Sense strand starting at position 3429 of SEQ ID NO: 584910
ggaggaugcaguuauucuc

SEQ ID NO: 598613 - RNA, 19 nt, Artificial Sequence
  Description of Artificial Sequence: Synthetic oligonucleotide
  Antisense strand to SEQ ID NO: 598612
gagaauaacugcauccucc

SEQ ID NO: 598614 - RNA, 19 nt, Artificial Sequence
  Description of Artificial Sequence: Synthetic oligonucleotide
  Sense strand starting at position 3472 of SEQ ID NO: 584910
guugguccuagauagguua

SEQ ID NO: 598615 - RNA, 19 nt, Artificial Sequence
  Description of Artificial Sequence: Synthetic oligonucleotide
  Antisense strand to SEQ ID NO: 598614
uaaccuaucuaggaccaac

SEQ ID NO: 598616 - RNA, 19 nt, Artificial Sequence
  Description of Artificial Sequence: Synthetic oligonucleotide
  Sense strand starting at position 3556 of SEQ ID NO: 584910
gagggucucugacauuuga

SEQ ID NO: 598617 - RNA, 19 nt, Artificial Sequence
  Description of Artificial Sequence: Synthetic oligonucleotide
  Antisense strand to SEQ ID NO: 598616
ucaaaugucagagacccuc

SEQ ID NO: 598618 - RNA, 19 nt, Artificial Sequence
  Description of Artificial Sequence: Synthetic oligonucleotide
  Sense strand starting at position 3714 of SEQ ID NO: 584910
cuuggucuuaaaugaugga

SEQ ID NO: 598619 - RNA, 19 nt, Artificial Sequence
  Description of Artificial Sequence: Synthetic oligonucleotide
  Antisense strand to SEQ ID NO: 598618
uccaucauuuaagaccaag

SEQ ID NO: 598620 - RNA, 19 nt, Artificial Sequence
  Description of Artificial Sequence: Synthetic oligonucleotide
  Sense strand starting at position 3731 of SEQ ID NO: 584910
gaaggaguaucuucuguaa

SEQ ID NO: 598621 - RNA, 19 nt, Artificial Sequence
  Description of Artificial Sequence: Synthetic oligonucleotide
  Antisense strand to SEQ ID NO: 598620
uuacagaagauacuccuuc

SEQ ID NO: 598622 - RNA, 19 nt, Artificial Sequence
  Description of Artificial Sequence: Synthetic oligonucleotide
  Sense strand starting at position 3734 of SEQ ID NO: 584910
ggaguaucuucuguaacua

SEQ ID NO: 598623 - RNA, 19 nt, Artificial Sequence
  Description of Artificial Sequence: Synthetic oligonucleotide
  Antisense strand to SEQ ID NO: 598622
uaguuacagaagauacucc

SEQ ID NO: 598624 - RNA, 19 nt, Artificial Sequence
  Description of Artificial Sequence: Synthetic oligonucleotide
  Sense strand starting at position 3847 of SEQ ID NO: 584910
caguuuaaggagugaguga

SEQ ID NO: 598625 - RNA, 19 nt, Artificial Sequence
  Description of Artificial Sequence: Synthetic oligonucleotide
  Antisense strand to SEQ ID NO: 598624
ucacucacuccuuaaacug

SEQ ID NO: 598626 - RNA, 19 nt, Artificial Sequence
  Description of Artificial Sequence: Synthetic oligonucleotide
  Sense strand starting at position 3950 of SEQ ID NO: 584910
agcacagaguuccugagau

SEQ ID NO: 598627 - RNA, 19 nt, Artificial Sequence
  Description of Artificial Sequence: Synthetic oligonucleotide
  Antisense strand to SEQ ID NO: 598626
aucucaggaacucugugcu

SEQ ID NO: 598628 - RNA, 19 nt, Artificial Sequence
  Description of Artificial Sequence: Synthetic oligonucleotide
  Sense strand starting at position 3966 of SEQ ID NO: 584910
gauuucguuauuggugauu

SEQ ID NO: 598629 - RNA, 19 nt, Artificial Sequence
  Description of Artificial Sequence: Synthetic oligonucleotide
  Antisense strand to SEQ ID NO: 598628
aaucaccaauaacgaaauc

SEQ ID NO: 598630 - RNA, 19 nt, Artificial Sequence
  Description of Artificial Sequence: Synthetic oligonucleotide
  Sense strand starting at position 3978 of SEQ ID NO: 584910
ggugauucucuagagcuua

SEQ ID NO: 598631 - RNA, 19 nt, Artificial Sequence
  Description of Artificial Sequence: Synthetic oligonucleotide
  Antisense strand to SEQ ID NO: 598630
uaagcucuagagaaucacc

SEQ ID NO: 598632 - RNA, 19 nt, Artificial Sequence
  Description of Artificial Sequence: Synthetic oligonucleotide
  Sense strand starting at position 293 of SEQ ID NO: 584911
auccuaguguuucuggaau

SEQ ID NO: 598633 - RNA, 19 nt, Artificial Sequence
  Description of Artificial Sequence: Synthetic oligonucleotide
  Antisense strand to SEQ ID NO: 598632
auuccagaaacacuaggau

SEQ ID NO: 598634 - RNA, 19 nt, Artificial Sequence
  Description of Artificial Sequence: Synthetic oligonucleotide
  Sense strand starting at position 313 of SEQ ID NO: 584911
acccaaauguccuuugaga

SEQ ID NO: 598635 - RNA, 19 nt, Artificial Sequence
  Description of Artificial Sequence: Synthetic oligonucleotide
  Antisense strand to SEQ ID NO: 598634
ucucaaaggacauuugggu

SEQ ID NO: 598636 - RNA, 19 nt, Artificial Sequence
  Description of Artificial Sequence: Synthetic oligonucleotide
  Sense strand starting at position 315 of SEQ ID NO: 584911
ccaaauguccuuugagaag

SEQ ID NO: 598637 - RNA, 19 nt, Artificial Sequence
  Description of Artificial Sequence: Synthetic oligonucleotide
  Antisense strand to SEQ ID NO: 598636
cuucucaaaggacauuugg

SEQ ID NO: 598638 - RNA, 19 nt, Artificial Sequence
  Description of Artificial Sequence: Synthetic oligonucleotide
  Sense strand starting at position 413 of SEQ ID NO: 584911
aacacagcguuaucugaaa

SEQ ID NO: 598639 - RNA, 19 nt, Artificial Sequence
  Description of Artificial Sequence: Synthetic oligonucleotide
  Antisense strand to SEQ ID NO: 598638
uuucagauaacgcuguguu

SEQ ID NO: 598640 - RNA, 19 nt, Artificial Sequence
  Description of Artificial Sequence: Synthetic oligonucleotide
  Sense strand starting at position 507 of SEQ ID NO: 584911
agagaccuccuuggcaaua

SEQ ID NO: 598641 - RNA, 19 nt, Artificial Sequence
  Description of Artificial Sequence: Synthetic oligonucleotide
  Antisense strand to SEQ ID NO: 598640
uauugccaaggaggucucu

SEQ ID NO: 598642 - RNA, 19 nt, Artificial Sequence
  Description of Artificial Sequence: Synthetic oligonucleotide
  Sense strand starting at position 713 of SEQ ID NO: 584911
cguuauuaccuugagguuu

SEQ ID NO: 598643 - RNA, 19 nt, Artificial Sequence
  Description of Artificial Sequence: Synthetic oligonucleotide
  Antisense strand to SEQ ID NO: 598642
aaaccucaagguaauaacg

SEQ ID NO: 598644 - RNA, 19 nt, Artificial Sequence
  Description of Artificial Sequence: Synthetic oligonucleotide
  Sense strand starting at position 719 of SEQ ID NO: 584911
uaccuugagguuuggauaa

SEQ ID NO: 598645 - RNA, 19 nt, Artificial Sequence
  Description of Artificial Sequence: Synthetic oligonucleotide
  Antisense strand to SEQ ID NO: 598644
uuauccaaaccucaaggua

SEQ ID NO: 598646 - RNA, 19 nt, Artificial Sequence
  Description of Artificial Sequence: Synthetic oligonucleotide
  Sense strand starting at position 896 of SEQ ID NO: 584911
acauaacuucuccaggugu

SEQ ID NO: 598647 - RNA, 19 nt, Artificial Sequence
  Description of Artificial Sequence: Synthetic oligonucleotide
  Antisense strand to SEQ ID NO: 598646
acaccuggagaaguuaugu

SEQ ID NO: 598648 - RNA, 19 nt, Artificial Sequence
  Description of Artificial Sequence: Synthetic oligonucleotide
  Sense strand starting at position 898 of SEQ ID NO: 584911
auaacuucuccagguguca

SEQ ID NO: 598649 - RNA, 19 nt, Artificial Sequence
  Description of Artificial Sequence: Synthetic oligonucleotide
  Antisense strand to SEQ ID NO: 598648
ugacaccuggagaaguuau

SEQ ID NO: 598650 - RNA, 19 nt, Artificial Sequence
  Description of Artificial Sequence: Synthetic oligonucleotide
  Sense strand starting at position 1499 of SEQ ID NO: 584911
cgcggauuccuguaaauaa

SEQ ID NO: 598651 - RNA, 19 nt, Artificial Sequence
  Description of Artificial Sequence: Synthetic oligonucleotide
  Antisense strand to SEQ ID NO: 598650
uuauuuacaggaauccgcg

SEQ ID NO: 598652 - RNA, 19 nt, Artificial Sequence
  Description of Artificial Sequence: Synthetic oligonucleotide
  Sense strand starting at position 1692 of SEQ ID NO: 584911
cugaaagggccuuagcgau

SEQ ID NO: 598653 - RNA, 19 nt, Artificial Sequence
  Description of Artificial Sequence: Synthetic oligonucleotide
  Antisense strand to SEQ ID NO: 598652
aucgcuaaggcccuuucag

SEQ ID NO: 598654 - RNA, 19 nt, Artificial Sequence
  Description of Artificial Sequence: Synthetic oligonucleotide
  Sense strand starting at position 2114 of SEQ ID NO: 584911
gggcucuuuggccaagaga

SEQ ID NO: 598655 - RNA, 19 nt, Artificial Sequence
  Description of Artificial Sequence: Synthetic oligonucleotide
  Antisense strand to SEQ ID NO: 598654
ucucuuggccaaagagccc

SEQ ID NO: 598656 - RNA, 19 nt, Artificial Sequence
  Description of Artificial Sequence: Synthetic oligonucleotide
  Sense strand starting at position 2230 of SEQ ID NO: 584911
cgaaauggcccguggaaga

SEQ ID NO: 598657 - RNA, 19 nt, Artificial Sequence
  Description of Artificial Sequence: Synthetic oligonucleotide
  Antisense strand to SEQ ID NO: 598656
ucuuccacgggccauuucg

SEQ ID NO: 598658 - RNA, 19 nt, Artificial Sequence
  Description of Artificial Sequence: Synthetic oligonucleotide
  Sense strand starting at position 2368 of SEQ ID NO: 584911
guccauucugaccgacuaa

SEQ ID NO: 598659 - RNA, 19 nt, Artificial Sequence
  Description of Artificial Sequence: Synthetic oligonucleotide
  Antisense strand to SEQ ID NO: 598658
uuagucggucagaauggac

SEQ ID NO: 598660 - RNA, 19 nt, Artificial Sequence
  Description of Artificial Sequence: Synthetic oligonucleotide
  Sense strand starting at position 2380 of SEQ ID NO: 584911
cgacuaaccagaugauaug

SEQ ID NO: 598661 - RNA, 19 nt, Artificial Sequence
  Description of Artificial Sequence: Synthetic oligonucleotide
  Antisense strand to SEQ ID NO: 598660
cauaucaucugguuagucg

SEQ ID NO: 598662 - RNA, 19 nt, Artificial Sequence
  Description of Artificial Sequence: Synthetic oligonucleotide
  Sense strand starting at position 2383 of SEQ ID NO: 584911
cuaaccagaugauaugaaa

SEQ ID NO: 598663 - RNA, 19 nt, Artificial Sequence
  Description of Artificial Sequence: Synthetic oligonucleotide
  Antisense strand to SEQ ID NO: 598662
uuucauaucaucugguuag

SEQ ID NO: 598664 - RNA, 19 nt, Artificial Sequence
  Description of Artificial Sequence: Synthetic oligonucleotide
  Sense strand starting at position 2392 of SEQ ID NO: 584911
ugauaugaaaggcgacauu

SEQ ID NO: 598665 - RNA, 19 nt, Artificial Sequence
  Description of Artificial Sequence: Synthetic oligonucleotide
  Antisense strand to SEQ ID NO: 598664
aaugucgccuuucauauca

SEQ ID NO: 598666 - RNA, 19 nt, Artificial Sequence
  Description of Artificial Sequence: Synthetic oligonucleotide
  Sense strand starting at position 2543 of SEQ ID NO: 584911
gugcaacucguggaaauau

SEQ ID NO: 598667 - RNA, 19 nt, Artificial Sequence
  Description of Artificial Sequence: Synthetic oligonucleotide
  Antisense strand to SEQ ID NO: 598666
auauuuccacgaguugcac

SEQ ID NO: 598668 - RNA, 19 nt, Artificial Sequence
  Description of Artificial Sequence: Synthetic oligonucleotide
  Sense strand starting at position 2553 of SEQ ID NO: 584911
uggaaauauuuacagaauc

SEQ ID NO: 598669 - RNA, 19 nt, Artificial Sequence
  Description of Artificial Sequence: Synthetic oligonucleotide
  Antisense strand to SEQ ID NO: 598668
gauucuguaaauauuucca

SEQ ID NO: 598670 - RNA, 19 nt, Artificial Sequence
  Description of Artificial Sequence: Synthetic oligonucleotide
  Sense strand starting at position 2620 of SEQ ID NO: 584911
aaaguuucuggcuagcuau

SEQ ID NO: 598671 - RNA, 19 nt, Artificial Sequence
  Description of Artificial Sequence: Synthetic oligonucleotide
  Antisense strand to SEQ ID NO: 598670
auagcuagccagaaacuuu

SEQ ID NO: 598672 - RNA, 19 nt, Artificial Sequence
  Description of Artificial Sequence: Synthetic oligonucleotide
  Sense strand starting at position 2632 of SEQ ID NO: 584911
uagcuauugcgccuuggua

SEQ ID NO: 598673 - RNA, 19 nt, Artificial Sequence
  Description of Artificial Sequence: Synthetic oligonucleotide
  Antisense strand to SEQ ID NO: 598672
uaccaaggcgcaauagcua

SEQ ID NO: 598674 - RNA, 19 nt, Artificial Sequence
  Description of Artificial Sequence: Synthetic oligonucleotide
  Sense strand starting at position 2650 of SEQ ID NO: 584911
agugucugaccaugugaca

SEQ ID NO: 598675 - RNA, 19 nt, Artificial Sequence
  Description of Artificial Sequence: Synthetic oligonucleotide
  Antisense strand to SEQ ID NO: 598674
ugucacauggucagacacu

SEQ ID NO: 598676 - RNA, 19 nt, Artificial Sequence
  Description of Artificial Sequence: Synthetic oligonucleotide
  Sense strand starting at position 2662 of SEQ ID NO: 584911
ugugacaucaagugguuau

SEQ ID NO: 598677 - RNA, 19 nt, Artificial Sequence
  Description of Artificial Sequence: Synthetic oligonucleotide
  Antisense strand to SEQ ID NO: 598676
auaaccacuugaugucaca

SEQ ID NO: 598678 - RNA, 19 nt, Artificial Sequence
  Description of Artificial Sequence: Synthetic oligonucleotide
  Sense strand starting at position 2663 of SEQ ID NO: 584911
gugacaucaagugguuaua

SEQ ID NO: 598679 - RNA, 19 nt, Artificial Sequence
  Description of Artificial Sequence: Synthetic oligonucleotide
  Antisense strand to SEQ ID NO: 598678
uauaaccacuugaugucac

SEQ ID NO: 598680 - RNA, 19 nt, Artificial Sequence
  Description of Artificial Sequence: Synthetic oligonucleotide
  Sense strand starting at position 2666 of SEQ ID NO: 584911
acaucaagugguuauacga

SEQ ID NO: 598681 - RNA, 19 nt, Artificial Sequence
  Description of Artificial Sequence: Synthetic oligonucleotide
  Antisense strand to SEQ ID NO: 598680
ucguauaaccacuugaugu

SEQ ID NO: 598682 - RNA, 19 nt, Artificial Sequence
  Description of Artificial Sequence: Synthetic oligonucleotide
  Sense strand starting at position 2675 of SEQ ID NO: 584911
gguuauacgaucgaagcuu

SEQ ID NO: 598683 - RNA, 19 nt, Artificial Sequence
  Description of Artificial Sequence: Synthetic oligonucleotide
  Antisense strand to SEQ ID NO: 598682
aagcuucgaucguauaacc

SEQ ID NO: 598684 - RNA, 19 nt, Artificial Sequence
  Description of Artificial Sequence: Synthetic oligonucleotide
  Sense strand starting at position 2686 of SEQ ID NO: 584911
cgaagcuucuuaucaugaa

SEQ ID NO: 598685 - RNA, 19 nt, Artificial Sequence
  Description of Artificial Sequence: Synthetic oligonucleotide
  Antisense strand to SEQ ID NO: 598684
uucaugauaagaagcuucg

SEQ ID NO: 598686 - RNA, 19 nt, Artificial Sequence
  Description of Artificial Sequence: Synthetic oligonucleotide
  Sense strand starting at position 2690 of SEQ ID NO: 584911
gcuucuuaucaugaacuga

SEQ ID NO: 598687 - RNA, 19 nt, Artificial Sequence
  Description of Artificial Sequence: Synthetic oligonucleotide
  Antisense strand to SEQ ID NO: 598686
ucaguucaugauaagaagc

SEQ ID NO: 598688 - RNA, 19 nt, Artificial Sequence
  Description of Artificial Sequence: Synthetic oligonucleotide
  Sense strand starting at position 2703 of SEQ ID NO: 584911
aacugagaauuaucugguu

SEQ ID NO: 598689 - RNA, 19 nt, Artificial Sequence
  Description of Artificial Sequence: Synthetic oligonucleotide
  Antisense strand to SEQ ID NO: 598688
aaccagauaauucucaguu

SEQ ID NO: 598690 - RNA, 19 nt, Artificial Sequence
  Description of Artificial Sequence: Synthetic oligonucleotide
  Sense strand starting at position 2708 of SEQ ID NO: 584911
agaauuaucugguucuccu

SEQ ID NO: 598691 - RNA, 19 nt, Artificial Sequence
  Description of Artificial Sequence: Synthetic oligonucleotide
  Antisense strand to SEQ ID NO: 598690
aggagaaccagauaauucu

SEQ ID NO: 598692 - RNA, 19 nt, Artificial Sequence
  Description of Artificial Sequence: Synthetic oligonucleotide
  Sense strand starting at position 2711 of SEQ ID NO: 584911
auuaucugguucuccuaga

SEQ ID NO: 598693 - RNA, 19 nt, Artificial Sequence
  Description of Artificial Sequence: Synthetic oligonucleotide
  Antisense strand to SEQ ID NO: 598692
ucuaggagaaccagauaau

SEQ ID NO: 598694 - RNA, 19 nt, Artificial Sequence
  Description of Artificial Sequence: Synthetic oligonucleotide
  Sense strand starting at position 3145 of SEQ ID NO: 584911
agcuuauaucuacaguuua

SEQ ID NO: 598695 - RNA, 19 nt, Artificial Sequence
  Description of Artificial Sequence: Synthetic oligonucleotide
  Antisense strand to SEQ ID NO: 598694
uaaacuguagauauaagcu

SEQ ID NO: 598696 - RNA, 19 nt, Artificial Sequence
  Description of Artificial Sequence: Synthetic oligonucleotide
  Sense strand starting at position 3218 of SEQ ID NO: 584911
ggcuuugcucaauaaacug

SEQ ID NO: 598697 - RNA, 19 nt, Artificial Sequence
  Description of Artificial Sequence: Synthetic oligonucleotide
  Antisense strand to SEQ ID NO: 598696
caguuuauugagcaaagcc

SEQ ID NO: 598698 - RNA, 19 nt, Artificial Sequence
  Description of Artificial Sequence: Synthetic oligonucleotide
  Sense strand starting at position 3599 of SEQ ID NO: 584911
cagugacugguuugucaag

SEQ ID NO: 598699 - RNA, 19 nt, Artificial Sequence
  Description of Artificial Sequence: Synthetic oligonucleotide
  Antisense strand to SEQ ID NO: 598698
cuugacaaaccagucacug

SEQ ID NO: 598700 - RNA, 19 nt, Artificial Sequence
  Description of Artificial Sequence: Synthetic oligonucleotide
  Sense strand starting at position 3646 of SEQ ID NO: 584911
uggacugggucuuuggaau

SEQ ID NO: 598701 - RNA, 19 nt, Artificial Sequence
  Description of Artificial Sequence: Synthetic oligonucleotide
  Antisense strand to SEQ ID NO: 598700
auuccaaagacccagucca

SEQ ID NO: 598702 - RNA, 19 nt, Artificial Sequence
  Description of Artificial Sequence: Synthetic oligonucleotide
  Sense strand starting at position 3670 of SEQ ID NO: 584911
cucucaaaguggucccaaa

SEQ ID NO: 598703 - RNA, 19 nt, Artificial Sequence
  Description of Artificial Sequence: Synthetic oligonucleotide
  Antisense strand to SEQ ID NO: 598702
uuugggaccacuuugagag

SEQ ID NO: 598704 - RNA, 19 nt, Artificial Sequence
  Description of Artificial Sequence: Synthetic oligonucleotide
  Sense strand starting at position 3697 of SEQ ID NO: 584911
acauuuggguccuauugaa

SEQ ID NO: 598705 - RNA, 19 nt, Artificial Sequence
  Description of Artificial Sequence: Synthetic oligonucleotide
  Antisense strand to SEQ ID NO: 598704
uucaauaggacccaaaugu

SEQ ID NO: 598706 - RNA, 19 nt, Artificial Sequence
  Description of Artificial Sequence: Synthetic oligonucleotide
  Sense strand starting at position 3704 of SEQ ID NO: 584911
gguccuauugaacguuaaa

SEQ ID NO: 598707 - RNA, 19 nt, Artificial Sequence
  Description of Artificial Sequence: Synthetic oligonucleotide
  Antisense strand to SEQ ID NO: 598706
uuuaacguucaauaggacc

SEQ ID NO: 598708 - RNA, 19 nt, Artificial Sequence
  Description of Artificial Sequence: Synthetic oligonucleotide
  Sense strand starting at position 3862 of SEQ ID NO: 584911
guggaucaguaaccuagaa

SEQ ID NO: 598709 - RNA, 19 nt, Artificial Sequence
  Description of Artificial Sequence: Synthetic oligonucleotide
  Antisense strand to SEQ ID NO: 598708
uucuagguuacugauccac

SEQ ID NO: 598710 - RNA, 19 nt, Artificial Sequence
  Description of Artificial Sequence: Synthetic oligonucleotide
  Sense strand starting at position 3949 of SEQ ID NO: 584911
cguauaaaugcacaacuaa

SEQ ID NO: 598711 - RNA, 19 nt, Artificial Sequence
  Description of Artificial Sequence: Synthetic oligonucleotide
  Antisense strand to SEQ ID NO: 598710
uuaguugugcauuuauacg

SEQ ID NO: 598712 - RNA, 19 nt, Artificial Sequence
  Description of Artificial Sequence: Synthetic oligonucleotide
  Sense strand starting at position 81 of SEQ ID NO: 584912
uuccuuauucuggagauuc

SEQ ID NO: 598713 - RNA, 19 nt, Artificial Sequence
  Description of Artificial Sequence: Synthetic oligonucleotide
  Antisense strand to SEQ ID NO: 598712
gaaucuccagaauaaggaa

SEQ ID NO: 598714 - RNA, 19 nt, Artificial Sequence
  Description of Artificial Sequence: Synthetic oligonucleotide
  Sense strand starting at position 83 of SEQ ID NO: 584912
ccuuauucuggagauucuu

SEQ ID NO: 598715 - RNA, 19 nt, Artificial Sequence
  Description of Artificial Sequence: Synthetic oligonucleotide
  Antisense strand to SEQ ID NO: 598714
aagaaucuccagaauaagg

SEQ ID NO: 598716 - RNA, 19 nt, Artificial Sequence
  Description of Artificial Sequence: Synthetic oligonucleotide
  Sense strand starting at position 89 of SEQ ID NO: 584912
ucuggagauucuuugucau

SEQ ID NO: 598717 - RNA, 19 nt, Artificial Sequence
  Description of Artificial Sequence: Synthetic oligonucleotide
  Antisense strand to SEQ ID NO: 598716
augacaaagaaucuccaga

SEQ ID NO: 598718 - RNA, 19 nt, Artificial Sequence
  Description of Artificial Sequence: Synthetic oligonucleotide
  Sense strand starting at position 91 of SEQ ID NO: 584912
uggagauucuuugucauca

SEQ ID NO: 598719 - RNA, 19 nt, Artificial Sequence
  Description of Artificial Sequence: Synthetic oligonucleotide
  Antisense strand to SEQ ID NO: 598718
ugaugacaaagaaucucca

SEQ ID NO: 598720 - RNA, 19 nt, Artificial Sequence
  Description of Artificial Sequence: Synthetic oligonucleotide
  Sense strand starting at position 92 of SEQ ID NO: 584912
ggagauucuuugucaucag

SEQ ID NO: 598721 - RNA, 19 nt, Artificial Sequence
  Description of Artificial Sequence: Synthetic oligonucleotide
  Antisense strand to SEQ ID NO: 598720
cugaugacaaagaaucucc

SEQ ID NO: 598722 - RNA, 19 nt, Artificial Sequence
  Description of Artificial Sequence: Synthetic oligonucleotide
  Sense strand starting at position 264 of SEQ ID NO: 584912
uaagguacacggugaaaua

SEQ ID NO: 598723 - RNA, 19 nt, Artificial Sequence
  Description of Artificial Sequence: Synthetic oligonucleotide
  Antisense strand to SEQ ID NO: 598722
uauuucaccguguaccuua

SEQ ID NO: 598724 - RNA, 19 nt, Artificial Sequence
  Description of Artificial Sequence: Synthetic oligonucleotide
  Sense strand starting at position 533 of SEQ ID NO: 584912
ugaaacuggcuguaacuau

SEQ ID NO: 598725 - RNA, 19 nt, Artificial Sequence
  Description of Artificial Sequence: Synthetic oligonucleotide
  Antisense strand to SEQ ID NO: 598724
auaguuacagccaguuuca

SEQ ID NO: 598726 - RNA, 19 nt, Artificial Sequence
  Description of Artificial Sequence: Synthetic oligonucleotide
  Sense strand starting at position 921 of SEQ ID NO: 584912
acauuauaagguugugaug

SEQ ID NO: 598727 - RNA, 19 nt, Artificial Sequence
  Description of Artificial Sequence: Synthetic oligonucleotide
  Antisense strand to SEQ ID NO: 598726
caucacaaccuuauaaugu

SEQ ID NO: 598728 - RNA, 19 nt, Artificial Sequence
  Description of Artificial Sequence: Synthetic oligonucleotide
  Sense strand starting at position 1183 of SEQ ID NO: 584912
guaacuucugucuauacac

SEQ ID NO: 598729 - RNA, 19 nt, Artificial Sequence
  Description of Artificial Sequence: Synthetic oligonucleotide
  Antisense strand to SEQ ID NO: 598728
guguauagacagaaguuac

SEQ ID NO: 598730 - RNA, 19 nt, Artificial Sequence
  Description of Artificial Sequence: Synthetic oligonucleotide
  Sense strand starting at position 1192 of SEQ ID NO: 584912
gucuauacacuguaaggua

SEQ ID NO: 598731 - RNA, 19 nt, Artificial Sequence
  Description of Artificial Sequence: Synthetic oligonucleotide
  Antisense strand to SEQ ID NO: 598730
uaccuuacaguguauagac

SEQ ID NO: 598732 - RNA, 19 nt, Artificial Sequence
  Description of Artificial Sequence: Synthetic oligonucleotide
  Sense strand starting at position 1322 of SEQ ID NO: 584912
uggacaucacuuuguauau

SEQ ID NO: 598733 - RNA, 19 nt, Artificial Sequence
  Description of Artificial Sequence: Synthetic oligonucleotide
  Antisense strand to SEQ ID NO: 598732
auauacaaagugaugucca

SEQ ID NO: 598734 - RNA, 19 nt, Artificial Sequence
  Description of Artificial Sequence: Synthetic oligonucleotide
  Sense strand starting at position 1323 of SEQ ID NO: 584912
ggacaucacuuuguauauc

SEQ ID NO: 598735 - RNA, 19 nt, Artificial Sequence
  Description of Artificial Sequence: Synthetic oligonucleotide
  Antisense strand to SEQ ID NO: 598734
gauauacaaagugaugucc

SEQ ID NO: 598736 - RNA, 19 nt, Artificial Sequence
  Description of Artificial Sequence: Synthetic oligonucleotide
  Sense strand starting at position 1411 of SEQ ID NO: 584912
uugugaaaugcucaauaga

SEQ ID NO: 598737 - RNA, 19 nt, Artificial Sequence
  Description of Artificial Sequence: Synthetic oligonucleotide
  Antisense strand to SEQ ID NO: 598736
ucuauugagcauuucacaa

SEQ ID NO: 598738 - RNA, 19 nt, Artificial Sequence
  Description of Artificial Sequence: Synthetic oligonucleotide
  Sense strand starting at position 1419 of SEQ ID NO: 584912
ugcucaauagaugagaugu

SEQ ID NO: 598739 - RNA, 19 nt, Artificial Sequence
  Description of Artificial Sequence: Synthetic oligonucleotide
  Antisense strand to SEQ ID NO: 598738
acaucucaucuauugagca

SEQ ID NO: 598740 - RNA, 19 nt, Artificial Sequence
  Description of Artificial Sequence: Synthetic oligonucleotide
  Sense strand starting at position 1451 of SEQ ID NO: 584912
aguugauaacuaugucuua

SEQ ID NO: 598741 - RNA, 19 nt, Artificial Sequence
  Description of Artificial Sequence: Synthetic oligonucleotide
  Antisense strand to SEQ ID NO: 598740
uaagacauaguuaucaacu

SEQ ID NO: 598742 - RNA, 19 nt, Artificial Sequence
  Description of Artificial Sequence: Synthetic oligonucleotide
  Sense strand starting at position 1463 of SEQ ID NO: 584912
ugucuuaugccucauugaa

SEQ ID NO: 598743 - RNA, 19 nt, Artificial Sequence
  Description of Artificial Sequence: Synthetic oligonucleotide
  Antisense strand to SEQ ID NO: 598742
uucaaugaggcauaagaca

SEQ ID NO: 598744 - RNA, 19 nt, Artificial Sequence
  Description of Artificial Sequence: Synthetic oligonucleotide
  Sense strand starting at position 1642 of SEQ ID NO: 584912
uaggucuaucgguagauca

SEQ ID NO: 598745 - RNA, 19 nt, Artificial Sequence
  Description of Artificial Sequence: Synthetic oligonucleotide
  Antisense strand to SEQ ID NO: 598744
ugaucuaccgauagaccua

SEQ ID NO: 598746 - RNA, 19 nt, Artificial Sequence
  Description of Artificial Sequence: Synthetic oligonucleotide
  Sense strand starting at position 1644 of SEQ ID NO: 584912
ggucuaucgguagaucauu

SEQ ID NO: 598747 - RNA, 19 nt, Artificial Sequence
  Description of Artificial Sequence: Synthetic oligonucleotide
  Antisense strand to SEQ ID NO: 598746
aaugaucuaccgauagacc

SEQ ID NO: 598748 - RNA, 19 nt, Artificial Sequence
  Description of Artificial Sequence: Synthetic oligonucleotide
  Sense strand starting at position 1649 of SEQ ID NO: 584912
aucgguagaucauuacaau

SEQ ID NO: 598749 - RNA, 19 nt, Artificial Sequence
  Description of Artificial Sequence: Synthetic oligonucleotide
  Antisense strand to SEQ ID NO: 598748
auuguaaugaucuaccgau

SEQ ID NO: 598750 - RNA, 19 nt, Artificial Sequence
  Description of Artificial Sequence: Synthetic oligonucleotide
  Sense strand starting at position 1650 of SEQ ID NO: 584912
ucgguagaucauuacaaug

SEQ ID NO: 598751 - RNA, 19 nt, Artificial Sequence
  Description of Artificial Sequence: Synthetic oligonucleotide
  Antisense strand to SEQ ID NO: 598750
cauuguaaugaucuaccga

SEQ ID NO: 598752 - RNA, 19 nt, Artificial Sequence
  Description of Artificial Sequence: Synthetic oligonucleotide
  Sense strand starting at position 2118 of SEQ ID NO: 584912
uguagaagaaauugaugua

SEQ ID NO: 598753 - RNA, 19 nt, Artificial Sequence
  Description of Artificial Sequence: Synthetic oligonucleotide
  Antisense strand to SEQ ID NO: 598752
uacaucaauuucuucuaca

SEQ ID NO: 598754 - RNA, 19 nt, Artificial Sequence
  Description of Artificial Sequence: Synthetic oligonucleotide
  Sense strand starting at position 2128 of SEQ ID NO: 584912
auugauguauuagcuaaca

SEQ ID NO: 598755 - RNA, 19 nt, Artificial Sequence
  Description of Artificial Sequence: Synthetic oligonucleotide
  Antisense strand to SEQ ID NO: 598754
uguuagcuaauacaucaau

SEQ ID NO: 598756 - RNA, 19 nt, Artificial Sequence
  Description of Artificial Sequence: Synthetic oligonucleotide
  Sense strand starting at position 2140 of SEQ ID NO: 584912
gcuaacauuuaggacaauu

SEQ ID NO: 598757 - RNA, 19 nt, Artificial Sequence
  Description of Artificial Sequence: Synthetic oligonucleotide
  Antisense strand to SEQ ID NO: 598756
aauuguccuaaauguuagc

SEQ ID NO: 598758 - RNA, 19 nt, Artificial Sequence
  Description of Artificial Sequence: Synthetic oligonucleotide
  Sense strand starting at position 2181 of SEQ ID NO: 584912
ucagaauacugugucagaa

SEQ ID NO: 598759 - RNA, 19 nt, Artificial Sequence
  Description of Artificial Sequence: Synthetic oligonucleotide
  Antisense strand to SEQ ID NO: 598758
uucugacacaguauucuga

SEQ ID NO: 598760 - RNA, 19 nt, Artificial Sequence
  Description of Artificial Sequence: Synthetic oligonucleotide
  Sense strand starting at position 2364 of SEQ ID NO: 584912
uauuaaauagcuggagaug

SEQ ID NO: 598761 - RNA, 19 nt, Artificial Sequence
  Description of Artificial Sequence: Synthetic oligonucleotide
  Antisense strand to SEQ ID NO: 598760
caucuccagcuauuuaaua

SEQ ID NO: 598762 - RNA, 19 nt, Artificial Sequence
  Description of Artificial Sequence: Synthetic oligonucleotide
  Sense strand starting at position 2381 of SEQ ID NO: 584912
uggaaauacuaggauuuau

SEQ ID NO: 598763 - RNA, 19 nt, Artificial Sequence
  Description of Artificial Sequence: Synthetic oligonucleotide
  Antisense strand to SEQ ID NO: 598762
auaaauccuaguauuucca

SEQ ID NO: 598764 - RNA, 19 nt, Artificial Sequence
  Description of Artificial Sequence: Synthetic oligonucleotide
  Sense strand starting at position 2598 of SEQ ID NO: 584912
ggaauauggucucccagaa

SEQ ID NO: 598765 - RNA, 19 nt, Artificial Sequence
  Description of Artificial Sequence: Synthetic oligonucleotide
  Antisense strand to SEQ ID NO: 598764
uucugggagaccauauucc

SEQ ID NO: 598766 - RNA, 19 nt, Artificial Sequence
  Description of Artificial Sequence: Synthetic oligonucleotide
  Sense strand starting at position 2650 of SEQ ID NO: 584912
caaccaugugacuaagugu

SEQ ID NO: 598767 - RNA, 19 nt, Artificial Sequence
  Description of Artificial Sequence: Synthetic oligonucleotide
  Antisense strand to SEQ ID NO: 598766
acacuuagucacaugguug

SEQ ID NO: 598768 - RNA, 19 nt, Artificial Sequence
  Description of Artificial Sequence: Synthetic oligonucleotide
  Sense strand starting at position 2765 of SEQ ID NO: 584912
uguggcuuggauuauugau

SEQ ID NO: 598769 - RNA, 19 nt, Artificial Sequence
  Description of Artificial Sequence: Synthetic oligonucleotide
  Antisense strand to SEQ ID NO: 598768
aucaauaauccaagccaca

SEQ ID NO: 598770 - RNA, 19 nt, Artificial Sequence
  Description of Artificial Sequence: Synthetic oligonucleotide
  Sense strand starting at position 2773 of SEQ ID NO: 584912
ggauuauugaugugaugau

SEQ ID NO: 598771 - RNA, 19 nt, Artificial Sequence
  Description of Artificial Sequence: Synthetic oligonucleotide
  Antisense strand to SEQ ID NO: 598770
aucaucacaucaauaaucc

SEQ ID NO: 598772 - RNA, 19 nt, Artificial Sequence
  Description of Artificial Sequence: Synthetic oligonucleotide
  Sense strand starting at position 2780 of SEQ ID NO: 584912
ugaugugaugauugaaauu

SEQ ID NO: 598773 - RNA, 19 nt, Artificial Sequence
  Description of Artificial Sequence: Synthetic oligonucleotide
  Antisense strand to SEQ ID NO: 598772
aauuucaaucaucacauca

SEQ ID NO: 598774 - RNA, 19 nt, Artificial Sequence
  Description of Artificial Sequence: Synthetic oligonucleotide
  Sense strand starting at position 2888 of SEQ ID NO: 584912
augagauguccuugaauuc

SEQ ID NO: 598775 - RNA, 19 nt, Artificial Sequence
  Description of Artificial Sequence: Synthetic oligonucleotide
  Antisense strand to SEQ ID NO: 598774
gaauucaaggacaucucau

SEQ ID NO: 598776 - RNA, 19 nt, Artificial Sequence
  Description of Artificial Sequence: Synthetic oligonucleotide
  Sense strand starting at position 3089 of SEQ ID NO: 584912
ccuggcaugguccacauua

SEQ ID NO: 598777 - RNA, 19 nt, Artificial Sequence
  Description of Artificial Sequence: Synthetic oligonucleotide
  Antisense strand to SEQ ID NO: 598776
uaauguggaccaugccagg

SEQ ID NO: 598778 - RNA, 19 nt, Artificial Sequence
  Description of Artificial Sequence: Synthetic oligonucleotide
  Sense strand starting at position 3091 of SEQ ID NO: 584912
uggcaugguccacauuaaa

SEQ ID NO: 598779 - RNA, 19 nt, Artificial Sequence
  Description of Artificial Sequence: Synthetic oligonucleotide
  Antisense strand to SEQ ID NO: 598778
uuuaauguggaccaugcca

SEQ ID NO: 598780 - RNA, 19 nt, Artificial Sequence
  Description of Artificial Sequence: Synthetic oligonucleotide
  Sense strand starting at position 3338 of SEQ ID NO: 584912
gauuguucucaauggagaa

SEQ ID NO: 598781 - RNA, 19 nt, Artificial Sequence
  Description of Artificial Sequence: Synthetic oligonucleotide
  Antisense strand to SEQ ID NO: 598780
uucuccauugagaacaauc

SEQ ID NO: 598782 - RNA, 19 nt, Artificial Sequence
  Description of Artificial Sequence: Synthetic oligonucleotide
  Sense strand starting at position 3486 of SEQ ID NO: 584912
ugagaaugaagaugugcua

SEQ ID NO: 598783 - RNA, 19 nt, Artificial Sequence
  Description of Artificial Sequence: Synthetic oligonucleotide
  Antisense strand to SEQ ID NO: 598782
uagcacaucuucauucuca

SEQ ID NO: 598784 - RNA, 19 nt, Artificial Sequence
  Description of Artificial Sequence: Synthetic oligonucleotide
  Sense strand starting at position 3489 of SEQ ID NO: 584912
gaaugaagaugugcuagua

SEQ ID NO: 598785 - RNA, 19 nt, Artificial Sequence
  Description of Artificial Sequence: Synthetic oligonucleotide
  Antisense strand to SEQ ID NO: 598784
uacuagcacaucuucauuc

SEQ ID NO: 598786 - RNA, 19 nt, Artificial Sequence
  Description of Artificial Sequence: Synthetic oligonucleotide
  Sense strand starting at position 3504 of SEQ ID NO: 584912
aguacuuucccuuauagau

SEQ ID NO: 598787 - RNA, 19 nt, Artificial Sequence
  Description of Artificial Sequence: Synthetic oligonucleotide
  Antisense strand to SEQ ID NO: 598786
aucuauaagggaaaguacu

SEQ ID NO: 598788 - RNA, 19 nt, Artificial Sequence
  Description of Artificial Sequence: Synthetic oligonucleotide
  Sense strand starting at position 3724 of SEQ ID NO: 584912
auaauuaugguagaucugu

SEQ ID NO: 598789 - RNA, 19 nt, Artificial Sequence
  Description of Artificial Sequence: Synthetic oligonucleotide
  Antisense strand to SEQ ID NO: 598788
acagaucuaccauaauuau

SEQ ID NO: 598790 - RNA, 19 nt, Artificial Sequence
  Description of Artificial Sequence: Synthetic oligonucleotide
  Sense strand starting at position 3729 of SEQ ID NO: 584912
uaugguagaucuguuugga

SEQ ID NO: 598791 - RNA, 19 nt, Artificial Sequence
  Description of Artificial Sequence: Synthetic oligonucleotide
  Antisense strand to SEQ ID NO: 598790
uccaaacagaucuaccaua

SEQ ID NO: 598792 - RNA, 19 nt, Artificial Sequence
  Description of Artificial Sequence: Synthetic oligonucleotide
  Sense strand starting at position 28 of SEQ ID NO: 584913
guugguguuaaagaauuaa

SEQ ID NO: 598793 - RNA, 19 nt, Artificial Sequence
  Description of Artificial Sequence: Synthetic oligonucleotide
  Antisense strand to SEQ ID NO: 598792
uuaauucuuuaacaccaac

SEQ ID NO: 598794 - RNA, 19 nt, Artificial Sequence
  Description of Artificial Sequence: Synthetic oligonucleotide
  Sense strand starting at position 38 of SEQ ID NO: 584913
aagaauuaagauggugcaa

SEQ ID NO: 598795 - RNA, 19 nt, Artificial Sequence
  Description of Artificial Sequence: Synthetic oligonucleotide
  Antisense strand to SEQ ID NO: 598794
uugcaccaucuuaauucuu

SEQ ID NO: 598796 - RNA, 19 nt, Artificial Sequence
  Description of Artificial Sequence: Synthetic oligonucleotide
  Sense strand starting at position 202 of SEQ ID NO: 584913
agauguaaguccuugauac

SEQ ID NO: 598797 - RNA, 19 nt, Artificial Sequence
  Description of Artificial Sequence: Synthetic oligonucleotide
  Antisense strand to SEQ ID NO: 598796
guaucaaggacuuacaucu

SEQ ID NO: 598798 - RNA, 19 nt, Artificial Sequence
  Description of Artificial Sequence: Synthetic oligonucleotide
  Sense strand starting at position 204 of SEQ ID NO: 584913
auguaaguccuugauacca

SEQ ID NO: 598799 - RNA, 19 nt, Artificial Sequence
  Description of Artificial Sequence: Synthetic oligonucleotide
  Antisense strand to SEQ ID NO: 598798
ugguaucaaggacuuacau

SEQ ID NO: 598800 - RNA, 19 nt, Artificial Sequence
  Description of Artificial Sequence: Synthetic oligonucleotide
  Sense strand starting at position 619 of SEQ ID NO: 584913
auaagccuugcugauaauu

SEQ ID NO: 598801 - RNA, 19 nt, Artificial Sequence
  Description of Artificial Sequence: Synthetic oligonucleotide
  Antisense strand to SEQ ID NO: 598800
aauuaucagcaaggcuuau

SEQ ID NO: 598802 - RNA, 19 nt, Artificial Sequence
  Description of Artificial Sequence: Synthetic oligonucleotide
  Sense strand starting at position 715 of SEQ ID NO: 584913
gcuauuuaacugcggaacu

SEQ ID NO: 598803 - RNA, 19 nt, Artificial Sequence
  Description of Artificial Sequence: Synthetic oligonucleotide
  Antisense strand to SEQ ID NO: 598802
aguuccgcaguuaaauagc

SEQ ID NO: 598804 - RNA, 19 nt, Artificial Sequence
  Description of Artificial Sequence: Synthetic oligonucleotide
  Sense strand starting at position 767 of SEQ ID NO: 584913
ugaaacuuccucuagguca

SEQ ID NO: 598805 - RNA, 19 nt, Artificial Sequence
  Description of Artificial Sequence: Synthetic oligonucleotide
  Antisense strand to SEQ ID NO: 598804
ugaccuagaggaaguuuca

SEQ ID NO: 598806 - RNA, 19 nt, Artificial Sequence
  Description of Artificial Sequence: Synthetic oligonucleotide
  Sense strand starting at position 942 of SEQ ID NO: 584913
cauuacgcaguuuaagaaa

SEQ ID NO: 598807 - RNA, 19 nt, Artificial Sequence
  Description of Artificial Sequence: Synthetic oligonucleotide
  Antisense strand to SEQ ID NO: 598806
uuucuuaaacugcguaaug

SEQ ID NO: 598808 - RNA, 19 nt, Artificial Sequence
  Description of Artificial Sequence: Synthetic oligonucleotide
  Sense strand starting at position 963 of SEQ ID NO: 584913
ggauaaacuuuagcauaua

SEQ ID NO: 598809 - RNA, 19 nt, Artificial Sequence
  Description of Artificial Sequence: Synthetic oligonucleotide
  Antisense strand to SEQ ID NO: 598808
uauaugcuaaaguuuaucc

SEQ ID NO: 598810 - RNA, 19 nt, Artificial Sequence
  Description of Artificial Sequence: Synthetic oligonucleotide
  Sense strand starting at position 1110 of SEQ ID NO: 584913
gucaacucaguguauacua

SEQ ID NO: 598811 - RNA, 19 nt, Artificial Sequence
  Description of Artificial Sequence: Synthetic oligonucleotide
  Antisense strand to SEQ ID NO: 598810
uaguauacacugaguugac

SEQ ID NO: 598812 - RNA, 19 nt, Artificial Sequence
  Description of Artificial Sequence: Synthetic oligonucleotide
  Sense strand starting at position 1408 of SEQ ID NO: 584913
uggucagcuagagauucuu

SEQ ID NO: 598813 - RNA, 19 nt, Artificial Sequence
  Description of Artificial Sequence: Synthetic oligonucleotide
  Antisense strand to SEQ ID NO: 598812
aagaaucucuagcugacca

SEQ ID NO: 598814 - RNA, 19 nt, Artificial Sequence
  Description of Artificial Sequence: Synthetic oligonucleotide
  Sense strand starting at position 1495 of SEQ ID NO: 584913
uugaaauacaggugguacu

SEQ ID NO: 598815 - RNA, 19 nt, Artificial Sequence
  Description of Artificial Sequence: Synthetic oligonucleotide
  Antisense strand to SEQ ID NO: 598814
aguaccaccuguauuucaa

SEQ ID NO: 598816 - RNA, 19 nt, Artificial Sequence
  Description of Artificial Sequence: Synthetic oligonucleotide
  Sense strand starting at position 1496 of SEQ ID NO: 584913
ugaaauacaggugguacua

SEQ ID NO: 598817 - RNA, 19 nt, Artificial Sequence
  Description of Artificial Sequence: Synthetic oligonucleotide
  Antisense strand to SEQ ID NO: 598816
uaguaccaccuguauuuca

SEQ ID NO: 598818 - RNA, 19 nt, Artificial Sequence
  Description of Artificial Sequence: Synthetic oligonucleotide
  Sense strand starting at position 1522 of SEQ ID NO: 584913
uggaaauugucacuaaacu

SEQ ID NO: 598819 - RNA, 19 nt, Artificial Sequence
  Description of Artificial Sequence: Synthetic oligonucleotide
  Antisense strand to SEQ ID NO: 598818
aguuuagugacaauuucca

SEQ ID NO: 598820 - RNA, 19 nt, Artificial Sequence
  Description of Artificial Sequence: Synthetic oligonucleotide
  Sense strand starting at position 1594 of SEQ ID NO: 584913
cugcuaauaugauugauua

SEQ ID NO: 598821 - RNA, 19 nt, Artificial Sequence
  Description of Artificial Sequence: Synthetic oligonucleotide
  Antisense strand to SEQ ID NO: 598820
uaaucaaucauauuagcag

SEQ ID NO: 598822 - RNA, 19 nt, Artificial Sequence
  Description of Artificial Sequence: Synthetic oligonucleotide
  Sense strand starting at position 1595 of SEQ ID NO: 584913
ugcuaauaugauugauuag

SEQ ID NO: 598823 - RNA, 19 nt, Artificial Sequence
  Description of Artificial Sequence: Synthetic oligonucleotide
  Antisense strand to SEQ ID NO: 598822
cuaaucaaucauauuagca

SEQ ID NO: 598824 - RNA, 19 nt, Artificial Sequence
  Description of Artificial Sequence: Synthetic oligonucleotide
  Sense strand starting at position 1598 of SEQ ID NO: 584913
uaauaugauugauuagcga

SEQ ID NO: 598825 - RNA, 19 nt, Artificial Sequence
  Description of Artificial Sequence: Synthetic oligonucleotide
  Antisense strand to SEQ ID NO: 598824
ucgcuaaucaaucauauua

SEQ ID NO: 598826 - RNA, 19 nt, Artificial Sequence
  Description of Artificial Sequence: Synthetic oligonucleotide
  Sense strand starting at position 1655 of SEQ ID NO: 584913
auauuagcagacugucaua

SEQ ID NO: 598827 - RNA, 19 nt, Artificial Sequence
  Description of Artificial Sequence: Synthetic oligonucleotide
  Antisense strand to SEQ ID NO: 598826
uaugacagucugcuaauau

SEQ ID NO: 598828 - RNA, 19 nt, Artificial Sequence
  Description of Artificial Sequence: Synthetic oligonucleotide
  Sense strand starting at position 1668 of SEQ ID NO: 584913
gucauauuacagggucaag

SEQ ID NO: 598829 - RNA, 19 nt, Artificial Sequence
  Description of Artificial Sequence: Synthetic oligonucleotide
  Antisense strand to SEQ ID NO: 598828
cuugacccuguaauaugac

SEQ ID NO: 598830 - RNA, 19 nt, Artificial Sequence
  Description of Artificial Sequence: Synthetic oligonucleotide
  Sense strand starting at position 1695 of SEQ ID NO: 584913
gcugcuguccagucauguu

SEQ ID NO: 598831 - RNA, 19 nt, Artificial Sequence
  Description of Artificial Sequence: Synthetic oligonucleotide
  Antisense strand to SEQ ID NO: 598830
aacaugacuggacagcagc

SEQ ID NO: 598832 - RNA, 19 nt, Artificial Sequence
  Description of Artificial Sequence: Synthetic oligonucleotide
  Sense strand starting at position 1822 of SEQ ID NO: 584913
aaaggcuuugcggagaaau

SEQ ID NO: 598833 - RNA, 19 nt, Artificial Sequence
  Description of Artificial Sequence: Synthetic oligonucleotide
  Antisense strand to SEQ ID NO: 598832
auuucuccgcaaagccuuu

SEQ ID NO: 598834 - RNA, 19 nt, Artificial Sequence
  Description of Artificial Sequence: Synthetic oligonucleotide
  Sense strand starting at position 1824 of SEQ ID NO: 584913
aggcuuugcggagaaauga

SEQ ID NO: 598835 - RNA, 19 nt, Artificial Sequence
  Description of Artificial Sequence: Synthetic oligonucleotide
  Antisense strand to SEQ ID NO: 598834
ucauuucuccgcaaagccu

SEQ ID NO: 598836 - RNA, 19 nt, Artificial Sequence
  Description of Artificial Sequence: Synthetic oligonucleotide
  Sense strand starting at position 2037 of SEQ ID NO: 584913
aggguaggugaaugaaacu

SEQ ID NO: 598837 - RNA, 19 nt, Artificial Sequence
  Description of Artificial Sequence: Synthetic oligonucleotide
  Antisense strand to SEQ ID NO: 598836
aguuucauucaccuacccu

SEQ ID NO: 598838 - RNA, 19 nt, Artificial Sequence
  Description of Artificial Sequence: Synthetic oligonucleotide
  Sense strand starting at position 2138 of SEQ ID NO: 584913
uguauugucagugcuuguu

SEQ ID NO: 598839 - RNA, 19 nt, Artificial Sequence
  Description of Artificial Sequence: Synthetic oligonucleotide
  Antisense strand to SEQ ID NO: 598838
aacaagcacugacaauaca

SEQ ID NO: 598840 - RNA, 19 nt, Artificial Sequence
  Description of Artificial Sequence: Synthetic oligonucleotide
  Sense strand starting at position 2151 of SEQ ID NO: 584913
cuuguuauugauuacacuu

SEQ ID NO: 598841 - RNA, 19 nt, Artificial Sequence
  Description of Artificial Sequence: Synthetic oligonucleotide
  Antisense strand to SEQ ID NO: 598840
aaguguaaucaauaacaag

SEQ ID NO: 598842 - RNA, 19 nt, Artificial Sequence
  Description of Artificial Sequence: Synthetic oligonucleotide
  Sense strand starting at position 2164 of SEQ ID NO: 584913
acacuugguggugagcaua

SEQ ID NO: 598843 - RNA, 19 nt, Artificial Sequence
  Description of Artificial Sequence: Synthetic oligonucleotide
  Antisense strand to SEQ ID NO: 598842
uaugcucaccaccaagugu

SEQ ID NO: 598844 - RNA, 19 nt, Artificial Sequence
  Description of Artificial Sequence: Synthetic oligonucleotide
  Sense strand starting at position 2225 of SEQ ID NO: 584913
aggguuucccugcaaucaa

SEQ ID NO: 598845 - RNA, 19 nt, Artificial Sequence
  Description of Artificial Sequence: Synthetic oligonucleotide
  Antisense strand to SEQ ID NO: 598844
uugauugcagggaaacccu

SEQ ID NO: 598846 - RNA, 19 nt, Artificial Sequence
  Description of Artificial Sequence: Synthetic oligonucleotide
  Sense strand starting at position 2371 of SEQ ID NO: 584913
gagaaucaugacggcagaa

SEQ ID NO: 598847 - RNA, 19 nt, Artificial Sequence
  Description of Artificial Sequence: Synthetic oligonucleotide
  Antisense strand to SEQ ID NO: 598846
uucugccgucaugauucuc

SEQ ID NO: 598848 - RNA, 19 nt, Artificial Sequence
  Description of Artificial Sequence: Synthetic oligonucleotide
  Sense strand starting at position 2430 of SEQ ID NO: 584913
ugugguuagaccugauuaa

SEQ ID NO: 598849 - RNA, 19 nt, Artificial Sequence
  Description of Artificial Sequence: Synthetic oligonucleotide
  Antisense strand to SEQ ID NO: 598848
uuaaucaggucuaaccaca

SEQ ID NO: 598850 - RNA, 19 nt, Artificial Sequence
  Description of Artificial Sequence: Synthetic oligonucleotide
  Sense strand starting at position 2431 of SEQ ID NO: 584913
gugguuagaccugauuaau

SEQ ID NO: 598851 - RNA, 19 nt, Artificial Sequence
  Description of Artificial Sequence: Synthetic oligonucleotide
  Antisense strand to SEQ ID NO: 598850
auuaaucaggucuaaccac

SEQ ID NO: 598852 - RNA, 19 nt, Artificial Sequence
  Description of Artificial Sequence: Synthetic oligonucleotide
  Sense strand starting at position 2499 of SEQ ID NO: 584913
gggagacuucccuguggau

SEQ ID NO: 598853 - RNA, 19 nt, Artificial Sequence
  Description of Artificial Sequence: Synthetic oligonucleotide
  Antisense strand to SEQ ID NO: 598852
auccacagggaagucuccc

SEQ ID NO: 598854 - RNA, 19 nt, Artificial Sequence
  Description of Artificial Sequence: Synthetic oligonucleotide
  Sense strand starting at position 2501 of SEQ ID NO: 584913
gagacuucccuguggaucu

SEQ ID NO: 598855 - RNA, 19 nt, Artificial Sequence
  Description of Artificial Sequence: Synthetic oligonucleotide
  Antisense strand to SEQ ID NO: 598854
agauccacagggaagucuc

SEQ ID NO: 598856 - RNA, 19 nt, Artificial Sequence
  Description of Artificial Sequence: Synthetic oligonucleotide
  Sense strand starting at position 2541 of SEQ ID NO: 584913
gagugcgauuuaucuucuu

SEQ ID NO: 598857 - RNA, 19 nt, Artificial Sequence
  Description of Artificial Sequence: Synthetic oligonucleotide
  Antisense strand to SEQ ID NO: 598856
aagaagauaaaucgcacuc

SEQ ID NO: 598858 - RNA, 19 nt, Artificial Sequence
  Description of Artificial Sequence: Synthetic oligonucleotide
  Sense strand starting at position 2544 of SEQ ID NO: 584913
ugcgauuuaucuucuugug

SEQ ID NO: 598859 - RNA, 19 nt, Artificial Sequence
  Description of Artificial Sequence: Synthetic oligonucleotide
  Antisense strand to SEQ ID NO: 598858
cacaagaagauaaaucgca

SEQ ID NO: 598860 - RNA, 19 nt, Artificial Sequence
  Description of Artificial Sequence: Synthetic oligonucleotide
  Sense strand starting at position 2861 of SEQ ID NO: 584913
aauuaaguucccggauuag

SEQ ID NO: 598861 - RNA, 19 nt, Artificial Sequence
  Description of Artificial Sequence: Synthetic oligonucleotide
  Antisense strand to SEQ ID NO: 598860
cuaauccgggaacuuaauu

SEQ ID NO: 598862 - RNA, 19 nt, Artificial Sequence
  Description of Artificial Sequence: Synthetic oligonucleotide
  Sense strand starting at position 3647 of SEQ ID NO: 584913
ggcagagucgcguuugaga

SEQ ID NO: 598863 - RNA, 19 nt, Artificial Sequence
  Description of Artificial Sequence: Synthetic oligonucleotide
  Antisense strand to SEQ ID NO: 598862
ucucaaacgcgacucugcc

SEQ ID NO: 598864 - RNA, 19 nt, Artificial Sequence
  Description of Artificial Sequence: Synthetic oligonucleotide
  Sense strand starting at position 3771 of SEQ ID NO: 584913
cccaccauuugcgcagaau

SEQ ID NO: 598865 - RNA, 19 nt, Artificial Sequence
  Description of Artificial Sequence: Synthetic oligonucleotide
  Antisense strand to SEQ ID NO: 598864
auucugcgcaaaugguggg

SEQ ID NO: 598866 - RNA, 19 nt, Artificial Sequence
  Description of Artificial Sequence: Synthetic oligonucleotide
  Sense strand starting at position 3864 of SEQ ID NO: 584913
ggaauagggacaggucuuu

SEQ ID NO: 598867 - RNA, 19 nt, Artificial Sequence
  Description of Artificial Sequence: Synthetic oligonucleotide
  Antisense strand to SEQ ID NO: 598866
aaagaccugucccuauucc

SEQ ID NO: 598868 - RNA, 19 nt, Artificial Sequence
  Description of Artificial Sequence: Synthetic oligonucleotide
  Sense strand starting at position 3940 of SEQ ID NO: 584913
gaguuugagaguugagacu

SEQ ID NO: 598869 - RNA, 19 nt, Artificial Sequence
  Description of Artificial Sequence: Synthetic oligonucleotide
  Antisense strand to SEQ ID NO: 598868
agucucaacucucaaacuc

SEQ ID NO: 598870 - RNA, 19 nt, Artificial Sequence
  Description of Artificial Sequence: Synthetic oligonucleotide
  Sense strand starting at position 3968 of SEQ ID NO: 584913
uccaguauggaguauccaa

SEQ ID NO: 598871 - RNA, 19 nt, Artificial Sequence
  Description of Artificial Sequence: Synthetic oligonucleotide
  Antisense strand to SEQ ID NO: 598870
uuggauacuccauacugga

SEQ ID NO: 598872 - RNA, 19 nt, Artificial Sequence
  Description of Artificial Sequence: Synthetic oligonucleotide
  Sense strand starting at position 122 of SEQ ID NO: 584914
agauauuuguucuaagaac

SEQ ID NO: 598873 - RNA, 19 nt, Artificial Sequence
  Description of Artificial Sequence: Synthetic oligonucleotide
  Antisense strand to SEQ ID NO: 598872
guucuuagaacaaauaucu

SEQ ID NO: 598874 - RNA, 19 nt, Artificial Sequence
  Description of Artificial Sequence: Synthetic oligonucleotide
  Sense strand starting at position 158 of SEQ ID NO: 584914
uaccuuuggugacucugaa

SEQ ID NO: 598875 - RNA, 19 nt, Artificial Sequence
  Description of Artificial Sequence: Synthetic oligonucleotide
  Antisense strand to SEQ ID NO: 598874
uucagagucaccaaaggua

SEQ ID NO: 598876 - RNA, 19 nt, Artificial Sequence
  Description of Artificial Sequence: Synthetic oligonucleotide
  Sense strand starting at position 413 of SEQ ID NO: 584914
uggacaauauuguuguuaa

SEQ ID NO: 598877 - RNA, 19 nt, Artificial Sequence
  Description of Artificial Sequence: Synthetic oligonucleotide
  Antisense strand to SEQ ID NO: 598876
uuaacaacaauauugucca

SEQ ID NO: 598878 - RNA, 19 nt, Artificial Sequence
  Description of Artificial Sequence: Synthetic oligonucleotide
  Sense strand starting at position 416 of SEQ ID NO: 584914
acaauauuguuguuaacca

SEQ ID NO: 598879 - RNA, 19 nt, Artificial Sequence
  Description of Artificial Sequence: Synthetic oligonucleotide
  Antisense strand to SEQ ID NO: 598878
ugguuaacaacaauauugu

SEQ ID NO: 598880 - RNA, 19 nt, Artificial Sequence
  Description of Artificial Sequence: Synthetic oligonucleotide
  Sense strand starting at position 420 of SEQ ID NO: 584914
uauuguuguuaaccaggga

SEQ ID NO: 598881 - RNA, 19 nt, Artificial Sequence
  Description of Artificial Sequence: Synthetic oligonucleotide
  Antisense strand to SEQ ID NO: 598880
ucccugguuaacaacaaua

SEQ ID NO: 598882 - RNA, 19 nt, Artificial Sequence
  Description of Artificial Sequence: Synthetic oligonucleotide
  Sense strand starting at position 421 of SEQ ID NO: 584914
auuguuguuaaccagggau

SEQ ID NO: 598883 - RNA, 19 nt, Artificial Sequence
  Description of Artificial Sequence: Synthetic oligonucleotide
  Antisense strand to SEQ ID NO: 598882
aucccugguuaacaacaau

SEQ ID NO: 598884 - RNA, 19 nt, Artificial Sequence
  Description of Artificial Sequence: Synthetic oligonucleotide
  Sense strand starting at position 425 of SEQ ID NO: 584914
uuguuaaccagggauguag

SEQ ID NO: 598885 - RNA, 19 nt, Artificial Sequence
  Description of Artificial Sequence: Synthetic oligonucleotide
  Antisense strand to SEQ ID NO: 598884
cuacaucccugguuaacaa

SEQ ID NO: 598886 - RNA, 19 nt, Artificial Sequence
  Description of Artificial Sequence: Synthetic oligonucleotide
  Sense strand starting at position 1186 of SEQ ID NO: 584914
uggcaacccuaucuuugau

SEQ ID NO: 598887 - RNA, 19 nt, Artificial Sequence
  Description of Artificial Sequence: Synthetic oligonucleotide
  Antisense strand to SEQ ID NO: 598886
aucaaagauaggguugcca

SEQ ID NO: 598888 - RNA, 19 nt, Artificial Sequence
  Description of Artificial Sequence: Synthetic oligonucleotide
  Sense strand starting at position 1234 of SEQ ID NO: 584914
gcauucgaaaucuagcuga

SEQ ID NO: 598889 - RNA, 19 nt, Artificial Sequence
  Description of Artificial Sequence: Synthetic oligonucleotide
  Antisense strand to SEQ ID NO: 598888
ucagcuagauuucgaaugc

SEQ ID NO: 598890 - RNA, 19 nt, Artificial Sequence
  Description of Artificial Sequence: Synthetic oligonucleotide
  Sense strand starting at position 1485 of SEQ ID NO: 584914
acaagaaaguggccuuacu

SEQ ID NO: 598891 - RNA, 19 nt, Artificial Sequence
  Description of Artificial Sequence: Synthetic oligonucleotide
  Antisense strand to SEQ ID NO: 598890
aguaaggccacuuucuugu

SEQ ID NO: 598892 - RNA, 19 nt, Artificial Sequence
  Description of Artificial Sequence: Synthetic oligonucleotide
  Sense strand starting at position 1605 of SEQ ID NO: 584914
ggcuguacucaccacuaaa

SEQ ID NO: 598893 - RNA, 19 nt, Artificial Sequence
  Description of Artificial Sequence: Synthetic oligonucleotide
  Antisense strand to SEQ ID NO: 598892
uuuaguggugaguacagcc

SEQ ID NO: 598894 - RNA, 19 nt, Artificial Sequence
  Description of Artificial Sequence: Synthetic oligonucleotide
  Sense strand starting at position 1678 of SEQ ID NO: 584914
uuugucaaagaguacucau

SEQ ID NO: 598895 - RNA, 19 nt, Artificial Sequence
  Description of Artificial Sequence: Synthetic oligonucleotide
  Antisense strand to SEQ ID NO: 598894
augaguacucuuugacaaa

SEQ ID NO: 598896 - RNA, 19 nt, Artificial Sequence
  Description of Artificial Sequence: Synthetic oligonucleotide
  Sense strand starting at position 1681 of SEQ ID NO: 584914
gucaaagaguacucaugua

SEQ ID NO: 598897 - RNA, 19 nt, Artificial Sequence
  Description of Artificial Sequence: Synthetic oligonucleotide
  Antisense strand to SEQ ID NO: 598896
uacaugaguacucuuugac

SEQ ID NO: 598898 - RNA, 19 nt, Artificial Sequence
  Description of Artificial Sequence: Synthetic oligonucleotide
  Sense strand starting at position 1693 of SEQ ID NO: 584914
ucauguagacagcaaguuu

SEQ ID NO: 598899 - RNA, 19 nt, Artificial Sequence
  Description of Artificial Sequence: Synthetic oligonucleotide
  Antisense strand to SEQ ID NO: 598898
aaacuugcugucuacauga

SEQ ID NO: 598900 - RNA, 19 nt, Artificial Sequence
  Description of Artificial Sequence: Synthetic oligonucleotide
  Sense strand starting at position 1717 of SEQ ID NO: 584914
gguggagaugcuuaucugu

SEQ ID NO: 598901 - RNA, 19 nt, Artificial Sequence
  Description of Artificial Sequence: Synthetic oligonucleotide
  Antisense strand to SEQ ID NO: 598900
acagauaagcaucuccacc

SEQ ID NO: 598902 - RNA, 19 nt, Artificial Sequence
  Description of Artificial Sequence: Synthetic oligonucleotide
  Sense strand starting at position 1871 of SEQ ID NO: 584914
aggagaugauggcugaagu

SEQ ID NO: 598903 - RNA, 19 nt, Artificial Sequence
  Description of Artificial Sequence: Synthetic oligonucleotide
  Antisense strand to SEQ ID NO: 598902
acuucagccaucaucuccu

SEQ ID NO: 598904 - RNA, 19 nt, Artificial Sequence
  Description of Artificial Sequence: Synthetic oligonucleotide
  Sense strand starting at position 1899 of SEQ ID NO: 584914
caucaacgacuguggaauu

SEQ ID NO: 598905 - RNA, 19 nt, Artificial Sequence
  Description of Artificial Sequence: Synthetic oligonucleotide
  Antisense strand to SEQ ID NO: 598904
aauuccacagucguugaug

SEQ ID NO: 598906 - RNA, 19 nt, Artificial Sequence
  Description of Artificial Sequence: Synthetic oligonucleotide
  Sense strand starting at position 1999 of SEQ ID NO: 584914
accugagauugcuuuacaa

SEQ ID NO: 598907 - RNA, 19 nt, Artificial Sequence
  Description of Artificial Sequence: Synthetic oligonucleotide
  Antisense strand to SEQ ID NO: 598906
uuguaaagcaaucucaggu

SEQ ID NO: 598908 - RNA, 19 nt, Artificial Sequence
  Description of Artificial Sequence: Synthetic oligonucleotide
  Sense strand starting at position 2044 of SEQ ID NO: 584914
caggauagugucuacagca

SEQ ID NO: 598909 - RNA, 19 nt, Artificial Sequence
  Description of Artificial Sequence: Synthetic oligonucleotide
  Antisense strand to SEQ ID NO: 598908
ugcuguagacacuauccug

SEQ ID NO: 598910 - RNA, 19 nt, Artificial Sequence
  Description of Artificial Sequence: Synthetic oligonucleotide
  Sense strand starting at position 2115 of SEQ ID NO: 584914
ccaucugaguuccuuaaag

SEQ ID NO: 598911 - RNA, 19 nt, Artificial Sequence
  Description of Artificial Sequence: Synthetic oligonucleotide
  Antisense strand to SEQ ID NO: 598910
cuuuaaggaacucagaugg

SEQ ID NO: 598912 - RNA, 19 nt, Artificial Sequence
  Description of Artificial Sequence: Synthetic oligonucleotide
  Sense strand starting at position 2217 of SEQ ID NO: 584914
uuggcuuuaguggagucaa

SEQ ID NO: 598913 - RNA, 19 nt, Artificial Sequence
  Description of Artificial Sequence: Synthetic oligonucleotide
  Antisense strand to SEQ ID NO: 598912
uugacuccacuaaagccaa

SEQ ID NO: 598914 - RNA, 19 nt, Artificial Sequence
  Description of Artificial Sequence: Synthetic oligonucleotide
  Sense strand starting at position 2285 of SEQ ID NO: 584914
caccaauggcaguauuaag

SEQ ID NO: 598915 - RNA, 19 nt, Artificial Sequence
  Description of Artificial Sequence: Synthetic oligonucleotide
  Antisense strand to SEQ ID NO: 598914
cuuaauacugccauuggug

SEQ ID NO: 598916 - RNA, 19 nt, Artificial Sequence
  Description of Artificial Sequence: Synthetic oligonucleotide
  Sense strand starting at position 2541 of SEQ ID NO: 584914
uugagacauuagguacuca

SEQ ID NO: 598917 - RNA, 19 nt, Artificial Sequence
  Description of Artificial Sequence: Synthetic oligonucleotide
  Antisense strand to SEQ ID NO: 598916
ugaguaccuaaugucucaa

SEQ ID NO: 598918 - RNA, 19 nt, Artificial Sequence
  Description of Artificial Sequence: Synthetic oligonucleotide
  Sense strand starting at position 2651 of SEQ ID NO: 584914
acuguaacccuguaauguu

SEQ ID NO: 598919 - RNA, 19 nt, Artificial Sequence
  Description of Artificial Sequence: Synthetic oligonucleotide
  Antisense strand to SEQ ID NO: 598918
aacauuacaggguuacagu

SEQ ID NO: 598920 - RNA, 19 nt, Artificial Sequence
  Description of Artificial Sequence: Synthetic oligonucleotide
  Sense strand starting at position 2708 of SEQ ID NO: 584914
agcuuaaagaagugaagua

SEQ ID NO: 598921 - RNA, 19 nt, Artificial Sequence
  Description of Artificial Sequence: Synthetic oligonucleotide
  Antisense strand to SEQ ID NO: 598920
uacuucacuucuuuaagcu

SEQ ID NO: 598922 - RNA, 19 nt, Artificial Sequence
  Description of Artificial Sequence: Synthetic oligonucleotide
  Sense strand starting at position 2802 of SEQ ID NO: 584914
cugguacuugaguauauga

SEQ ID NO: 598923 - RNA, 19 nt, Artificial Sequence
  Description of Artificial Sequence: Synthetic oligonucleotide
  Antisense strand to SEQ ID NO: 598922
ucauauacucaaguaccag

SEQ ID NO: 598924 - RNA, 19 nt, Artificial Sequence
  Description of Artificial Sequence: Synthetic oligonucleotide
  Sense strand starting at position 2855 of SEQ ID NO: 584914
auaggaaauguuugcuaga

SEQ ID NO: 598925 - RNA, 19 nt, Artificial Sequence
  Description of Artificial Sequence: Synthetic oligonucleotide
  Antisense strand to SEQ ID NO: 598924
ucuagcaaacauuuccuau

SEQ ID NO: 598926 - RNA, 19 nt, Artificial Sequence
  Description of Artificial Sequence: Synthetic oligonucleotide
  Sense strand starting at position 2856 of SEQ ID NO: 584914
uaggaaauguuugcuagaa

SEQ ID NO: 598927 - RNA, 19 nt, Artificial Sequence
  Description of Artificial Sequence: Synthetic oligonucleotide
  Antisense strand to SEQ ID NO: 598926
uucuagcaaacauuuccua

SEQ ID NO: 598928 - RNA, 19 nt, Artificial Sequence
  Description of Artificial Sequence: Synthetic oligonucleotide
  Sense strand starting at position 2857 of SEQ ID NO: 584914
aggaaauguuugcuagaaa

SEQ ID NO: 598929 - RNA, 19 nt, Artificial Sequence
  Description of Artificial Sequence: Synthetic oligonucleotide
  Antisense strand to SEQ ID NO: 598928
uuucuagcaaacauuuccu

SEQ ID NO: 598930 - RNA, 19 nt, Artificial Sequence
  Description of Artificial Sequence: Synthetic oligonucleotide
  Sense strand starting at position 3176 of SEQ ID NO: 584914
acauguaucgcagaaccua

SEQ ID NO: 598931 - RNA, 19 nt, Artificial Sequence
  Description of Artificial Sequence: Synthetic oligonucleotide
  Antisense strand to SEQ ID NO: 598930
uagguucugcgauacaugu

SEQ ID NO: 598932 - RNA, 19 nt, Artificial Sequence
  Description of Artificial Sequence: Synthetic oligonucleotide
  Sense strand starting at position 3233 of SEQ ID NO: 584914
gaaauaacguucuuuagau

SEQ ID NO: 598933 - RNA, 19 nt, Artificial Sequence
  Description of Artificial Sequence: Synthetic oligonucleotide
  Antisense strand to SEQ ID NO: 598932
aucuaaagaacguuauuuc

SEQ ID NO: 598934 - RNA, 19 nt, Artificial Sequence
  Description of Artificial Sequence: Synthetic oligonucleotide
  Sense strand starting at position 3325 of SEQ ID NO: 584914
uggguauucugaucuagua

SEQ ID NO: 598935 - RNA, 19 nt, Artificial Sequence
  Description of Artificial Sequence: Synthetic oligonucleotide
  Antisense strand to SEQ ID NO: 598934
uacuagaucagaauaccca

SEQ ID NO: 598936 - RNA, 19 nt, Artificial Sequence
  Description of Artificial Sequence: Synthetic oligonucleotide
  Sense strand starting at position 3327 of SEQ ID NO: 584914
gguauucugaucuaguagu

SEQ ID NO: 598937 - RNA, 19 nt, Artificial Sequence
  Description of Artificial Sequence: Synthetic oligonucleotide
  Antisense strand to SEQ ID NO: 598936
acuacuagaucagaauacc

SEQ ID NO: 598938 - RNA, 19 nt, Artificial Sequence
  Description of Artificial Sequence: Synthetic oligonucleotide
  Sense strand starting at position 3500 of SEQ ID NO: 584914
guauaagauuauguuagga

SEQ ID NO: 598939 - RNA, 19 nt, Artificial Sequence
  Description of Artificial Sequence: Synthetic oligonucleotide
  Antisense strand to SEQ ID NO: 598938
uccuaacauaaucuuauac

SEQ ID NO: 598940 - RNA, 19 nt, Artificial Sequence
  Description of Artificial Sequence: Synthetic oligonucleotide
  Sense strand starting at position 3537 of SEQ ID NO: 584914
auugaaugaacugguguau

SEQ ID NO: 598941 - RNA, 19 nt, Artificial Sequence
  Description of Artificial Sequence: Synthetic oligonucleotide
  Antisense strand to SEQ ID NO: 598940
auacaccaguucauucaau

SEQ ID NO: 598942 - RNA, 19 nt, Artificial Sequence
  Description of Artificial Sequence: Synthetic oligonucleotide
  Sense strand starting at position 3557 of SEQ ID NO: 584914
ucuagagagcaauauguca

SEQ ID NO: 598943 - RNA, 19 nt, Artificial Sequence
  Description of Artificial Sequence: Synthetic oligonucleotide
  Antisense strand to SEQ ID NO: 598942
ugacauauugcucucuaga

SEQ ID NO: 598944 - RNA, 19 nt, Artificial Sequence
  Description of Artificial Sequence: Synthetic oligonucleotide
  Sense strand starting at position 3574 of SEQ ID NO: 584914
cagaauucugaugguguuu

SEQ ID NO: 598945 - RNA, 19 nt, Artificial Sequence
  Description of Artificial Sequence: Synthetic oligonucleotide
  Antisense strand to SEQ ID NO: 598944
aaacaccaucagaauucug

SEQ ID NO: 598946 - RNA, 19 nt, Artificial Sequence
  Description of Artificial Sequence: Synthetic oligonucleotide
  Sense strand starting at position 3914 of SEQ ID NO: 584914
uuaacuuuagugugauaca

SEQ ID NO: 598947 - RNA, 19 nt, Artificial Sequence
  Description of Artificial Sequence: Synthetic oligonucleotide
  Antisense strand to SEQ ID NO: 598946
uguaucacacuaaaguuaa

SEQ ID NO: 598948 - RNA, 19 nt, Artificial Sequence
  Description of Artificial Sequence: Synthetic oligonucleotide
  Sense strand starting at position 3935 of SEQ ID NO: 584914
uucugaauccugugaauaa

SEQ ID NO: 598949 - RNA, 19 nt, Artificial Sequence
  Description of Artificial Sequence: Synthetic oligonucleotide
  Antisense strand to SEQ ID NO: 598948
uuauucacaggauucagaa

SEQ ID NO: 598950 - RNA, 19 nt, Artificial Sequence
  Description of Artificial Sequence: Synthetic oligonucleotide
  Sense strand starting at position 3951 of SEQ ID NO: 584914
uaaagagucuggguaaacu

SEQ ID NO: 598951 - RNA, 19 nt, Artificial Sequence
  Description of Artificial Sequence: Synthetic oligonucleotide
  Antisense strand to SEQ ID NO: 598950
aguuuacccagacucuuua

SEQ ID NO: 598952 - RNA, 19 nt, Artificial Sequence
  Description of Artificial Sequence: Synthetic oligonucleotide
  Sense strand starting at position 76 of SEQ ID NO: 584915
ccguaauagcaccacugua

SEQ ID NO: 598953 - RNA, 19 nt, Artificial Sequence
  Description of Artificial Sequence: Synthetic oligonucleotide
  Antisense strand to SEQ ID NO: 598952
uacaguggugcuauuacgg

SEQ ID NO: 598954 - RNA, 19 nt, Artificial Sequence
  Description of Artificial Sequence: Synthetic oligonucleotide
  Sense strand starting at position 301 of SEQ ID NO: 584915
cagugcuuuguccaauaag

SEQ ID NO: 598955 - RNA, 19 nt, Artificial Sequence
  Description of Artificial Sequence: Synthetic oligonucleotide
  Antisense strand to SEQ ID NO: 598954
cuuauuggacaaagcacug

SEQ ID NO: 598956 - RNA, 19 nt, Artificial Sequence
  Description of Artificial Sequence: Synthetic oligonucleotide
  Sense strand starting at position 304 of SEQ ID NO: 584915
ugcuuuguccaauaaguga

SEQ ID NO: 598957 - RNA, 19 nt, Artificial Sequence
  Description of Artificial Sequence: Synthetic oligonucleotide
  Antisense strand to SEQ ID NO: 598956
ucacuuauuggacaaagca

SEQ ID NO: 598958 - RNA, 19 nt, Artificial Sequence
  Description of Artificial Sequence: Synthetic oligonucleotide
  Sense strand starting at position 406 of SEQ ID NO: 584915
ccuaaauaguguuucuuga

SEQ ID NO: 598959 - RNA, 19 nt, Artificial Sequence
  Description of Artificial Sequence: Synthetic oligonucleotide
  Antisense strand to SEQ ID NO: 598958
ucaagaaacacuauuuagg

SEQ ID NO: 598960 - RNA, 19 nt, Artificial Sequence
  Description of Artificial Sequence: Synthetic oligonucleotide
  Sense strand starting at position 768 of SEQ ID NO: 584915
caaugugaugaggguuuaa

SEQ ID NO: 598961 - RNA, 19 nt, Artificial Sequence
  Description of Artificial Sequence: Synthetic oligonucleotide
  Antisense strand to SEQ ID NO: 598960
uuaaacccucaucacauug

SEQ ID NO: 598962 - RNA, 19 nt, Artificial Sequence
  Description of Artificial Sequence: Synthetic oligonucleotide
  Sense strand starting at position 786 of SEQ ID NO: 584915
agguuagcagguuaggaau

SEQ ID NO: 598963 - RNA, 19 nt, Artificial Sequence
  Description of Artificial Sequence: Synthetic oligonucleotide
  Antisense strand to SEQ ID NO: 598962
auuccuaaccugcuaaccu

SEQ ID NO: 598964 - RNA, 19 nt, Artificial Sequence
  Description of Artificial Sequence: Synthetic oligonucleotide
  Sense strand starting at position 794 of SEQ ID NO: 584915
agguuaggaaucuagcauu

SEQ ID NO: 598965 - RNA, 19 nt, Artificial Sequence
  Description of Artificial Sequence: Synthetic oligonucleotide
  Antisense strand to SEQ ID NO: 598964
aaugcuagauuccuaaccu

SEQ ID NO: 598966 - RNA, 19 nt, Artificial Sequence
  Description of Artificial Sequence: Synthetic oligonucleotide
  Sense strand starting at position 1008 of SEQ ID NO: 584915
gcauguuauucccuagagg

SEQ ID NO: 598967 - RNA, 19 nt, Artificial Sequence
  Description of Artificial Sequence: Synthetic oligonucleotide
  Antisense strand to SEQ ID NO: 598966
ccucuagggaauaacaugc

SEQ ID NO: 598968 - RNA, 19 nt, Artificial Sequence
  Description of Artificial Sequence: Synthetic oligonucleotide
  Sense strand starting at position 1053 of SEQ ID NO: 584915
gaacgaauuuauuaaggga

SEQ ID NO: 598969 - RNA, 19 nt, Artificial Sequence
  Description of Artificial Sequence: Synthetic oligonucleotide
  Antisense strand to SEQ ID NO: 598968
ucccuuaauaaauucguuc

SEQ ID NO: 598970 - RNA, 19 nt, Artificial Sequence
  Description of Artificial Sequence: Synthetic oligonucleotide
  Sense strand starting at position 1056 of SEQ ID NO: 584915
cgaauuuauuaagggagag

SEQ ID NO: 598971 - RNA, 19 nt, Artificial Sequence
  Description of Artificial Sequence: Synthetic oligonucleotide
  Antisense strand to SEQ ID NO: 598970
cucucccuuaauaaauucg

SEQ ID NO: 598972 - RNA, 19 nt, Artificial Sequence
  Description of Artificial Sequence: Synthetic oligonucleotide
  Sense strand starting at position 1145 of SEQ ID NO: 584915
ggaaguagucucuauuaua

SEQ ID NO: 598973 - RNA, 19 nt, Artificial Sequence
  Description of Artificial Sequence: Synthetic oligonucleotide
  Antisense strand to SEQ ID NO: 598972
uauaauagagacuacuucc

SEQ ID NO: 598974 - RNA, 19 nt, Artificial Sequence
  Description of Artificial Sequence: Synthetic oligonucleotide
  Sense strand starting at position 1216 of SEQ ID NO: 584915
cuaugagggcucugagacu

SEQ ID NO: 598975 - RNA, 19 nt, Artificial Sequence
  Description of Artificial Sequence: Synthetic oligonucleotide
  Antisense strand to SEQ ID NO: 598974
agucucagagcccucauag

SEQ ID NO: 598976 - RNA, 19 nt, Artificial Sequence
  Description of Artificial Sequence: Synthetic oligonucleotide
  Sense strand starting at position 1377 of SEQ ID NO: 584915
augccagguuuaucacaua

SEQ ID NO: 598977 - RNA, 19 nt, Artificial Sequence
  Description of Artificial Sequence: Synthetic oligonucleotide
  Antisense strand to SEQ ID NO: 598976
uaugugauaaaccuggcau

SEQ ID NO: 598978 - RNA, 19 nt, Artificial Sequence
  Description of Artificial Sequence: Synthetic oligonucleotide
  Sense strand starting at position 1430 of SEQ ID NO: 584915
cccuaacgauuauuagaaa

SEQ ID NO: 598979 - RNA, 19 nt, Artificial Sequence
  Description of Artificial Sequence: Synthetic oligonucleotide
  Antisense strand to SEQ ID NO: 598978
uuucuaauaaucguuaggg

SEQ ID NO: 598980 - RNA, 19 nt, Artificial Sequence
  Description of Artificial Sequence: Synthetic oligonucleotide
  Sense strand starting at position 1507 of SEQ ID NO: 584915
agggcagaaaucuggacuu

SEQ ID NO: 598981 - RNA, 19 nt, Artificial Sequence
  Description of Artificial Sequence: Synthetic oligonucleotide
  Antisense strand to SEQ ID NO: 598980
aaguccagauuucugcccu

SEQ ID NO: 598982 - RNA, 19 nt, Artificial Sequence
  Description of Artificial Sequence: Synthetic oligonucleotide
  Sense strand starting at position 1527 of SEQ ID NO: 584915
auuagcaacgcucaaguua

SEQ ID NO: 598983 - RNA, 19 nt, Artificial Sequence
  Description of Artificial Sequence: Synthetic oligonucleotide
  Antisense strand to SEQ ID NO: 598982
uaacuugagcguugcuaau

SEQ ID NO: 598984 - RNA, 19 nt, Artificial Sequence
  Description of Artificial Sequence: Synthetic oligonucleotide
  Sense strand starting at position 2036 of SEQ ID NO: 584915
gcgggaccucucgcgauau

SEQ ID NO: 598985 - RNA, 19 nt, Artificial Sequence
  Description of Artificial Sequence: Synthetic oligonucleotide
  Antisense strand to SEQ ID NO: 598984
auaucgcgagaggucccgc

SEQ ID NO: 598986 - RNA, 19 nt, Artificial Sequence
  Description of Artificial Sequence: Synthetic oligonucleotide
  Sense strand starting at position 2038 of SEQ ID NO: 584915
gggaccucucgcgauaucu

SEQ ID NO: 598987 - RNA, 19 nt, Artificial Sequence
  Description of Artificial Sequence: Synthetic oligonucleotide
  Antisense strand to SEQ ID NO: 598986
agauaucgcgagagguccc

SEQ ID NO: 598988 - RNA, 19 nt, Artificial Sequence
  Description of Artificial Sequence: Synthetic oligonucleotide
  Sense strand starting at position 2046 of SEQ ID NO: 584915
ucgcgauaucuggagagug

SEQ ID NO: 598989 - RNA, 19 nt, Artificial Sequence
  Description of Artificial Sequence: Synthetic oligonucleotide
  Antisense strand to SEQ ID NO: 598988
cacucuccagauaucgcga

SEQ ID NO: 598990 - RNA, 19 nt, Artificial Sequence
  Description of Artificial Sequence: Synthetic oligonucleotide
  Sense strand starting at position 2048 of SEQ ID NO: 584915
gcgauaucuggagagugua

SEQ ID NO: 598991 - RNA, 19 nt, Artificial Sequence
  Description of Artificial Sequence: Synthetic oligonucleotide
  Antisense strand to SEQ ID NO: 598990
uacacucuccagauaucgc

SEQ ID NO: 598992 - RNA, 19 nt, Artificial Sequence
  Description of Artificial Sequence: Synthetic oligonucleotide
  Sense strand starting at position 2117 of SEQ ID NO: 584915
aguccuaaauccuugucuu

SEQ ID NO: 598993 - RNA, 19 nt, Artificial Sequence
  Description of Artificial Sequence: Synthetic oligonucleotide
  Antisense strand to SEQ ID NO: 598992
aagacaaggauuuaggacu

SEQ ID NO: 598994 - RNA, 19 nt, Artificial Sequence
  Description of Artificial Sequence: Synthetic oligonucleotide
  Sense strand starting at position 2235 of SEQ ID NO: 584915
ggcauuaagggaugggagu

SEQ ID NO: 598995 - RNA, 19 nt, Artificial Sequence
  Description of Artificial Sequence: Synthetic oligonucleotide
  Antisense strand to SEQ ID NO: 598994
acucccaucccuuaaugcc

SEQ ID NO: 598996 - RNA, 19 nt, Artificial Sequence
  Description of Artificial Sequence: Synthetic oligonucleotide
  Sense strand starting at position 2357 of SEQ ID NO: 584915
gagagcuuacucuguugau

SEQ ID NO: 598997 - RNA, 19 nt, Artificial Sequence
  Description of Artificial Sequence: Synthetic oligonucleotide
  Antisense strand to SEQ ID NO: 598996
aucaacagaguaagcucuc

SEQ ID NO: 598998 - RNA, 19 nt, Artificial Sequence
  Description of Artificial Sequence: Synthetic oligonucleotide
  Sense strand starting at position 2358 of SEQ ID NO: 584915
agagcuuacucuguugaua

SEQ ID NO: 598999 - RNA, 19 nt, Artificial Sequence
  Description of Artificial Sequence: Synthetic oligonucleotide
  Antisense strand to SEQ ID NO: 598998
uaucaacagaguaagcucu

SEQ ID NO: 599000 - RNA, 19 nt, Artificial Sequence
  Description of Artificial Sequence: Synthetic oligonucleotide
  Sense strand starting at position 2390 of SEQ ID NO: 584915
agccgaauuaaguauaaag

SEQ ID NO: 599001 - RNA, 19 nt, Artificial Sequence
  Description of Artificial Sequence: Synthetic oligonucleotide
  Antisense strand to SEQ ID NO: 599000
cuuuauacuuaauucggcu

SEQ ID NO: 599002 - RNA, 19 nt, Artificial Sequence
  Description of Artificial Sequence: Synthetic oligonucleotide
  Sense strand starting at position 2577 of SEQ ID NO: 584915
cucgguguuugccugauuu

SEQ ID NO: 599003 - RNA, 19 nt, Artificial Sequence
  Description of Artificial Sequence: Synthetic oligonucleotide
  Antisense strand to SEQ ID NO: 599002
aaaucaggcaaacaccgag

SEQ ID NO: 599004 - RNA, 19 nt, Artificial Sequence
  Description of Artificial Sequence: Synthetic oligonucleotide
  Sense strand starting at position 2579 of SEQ ID NO: 584915
cgguguuugccugauuuga

SEQ ID NO: 599005 - RNA, 19 nt, Artificial Sequence
  Description of Artificial Sequence: Synthetic oligonucleotide
  Antisense strand to SEQ ID NO: 599004
ucaaaucaggcaaacaccg

SEQ ID NO: 599006 - RNA, 19 nt, Artificial Sequence
  Description of Artificial Sequence: Synthetic oligonucleotide
  Sense strand starting at position 2581 of SEQ ID NO: 584915
guguuugccugauuugaac

SEQ ID NO: 599007 - RNA, 19 nt, Artificial Sequence
  Description of Artificial Sequence: Synthetic oligonucleotide
  Antisense strand to SEQ ID NO: 599006
guucaaaucaggcaaacac

SEQ ID NO: 599008 - RNA, 19 nt, Artificial Sequence
  Description of Artificial Sequence: Synthetic oligonucleotide
  Sense strand starting at position 2587 of SEQ ID NO: 584915
gccugauuugaacgcagau

SEQ ID NO: 599009 - RNA, 19 nt, Artificial Sequence
  Description of Artificial Sequence: Synthetic oligonucleotide
  Antisense strand to SEQ ID NO: 599008
aucugcguucaaaucaggc

SEQ ID NO: 599010 - RNA, 19 nt, Artificial Sequence
  Description of Artificial Sequence: Synthetic oligonucleotide
  Sense strand starting at position 2780 of SEQ ID NO: 584915
ccauauuuaguuugccuua

SEQ ID NO: 599011 - RNA, 19 nt, Artificial Sequence
  Description of Artificial Sequence: Synthetic oligonucleotide
  Antisense strand to SEQ ID NO: 599010
uaaggcaaacuaaauaugg

SEQ ID NO: 599012 - RNA, 19 nt, Artificial Sequence
  Description of Artificial Sequence: Synthetic oligonucleotide
  Sense strand starting at position 2846 of SEQ ID NO: 584915
aaaccuuggucauugaugu

SEQ ID NO: 599013 - RNA, 19 nt, Artificial Sequence
  Description of Artificial Sequence: Synthetic oligonucleotide
  Antisense strand to SEQ ID NO: 599012
acaucaaugaccaagguuu

SEQ ID NO: 599014 - RNA, 19 nt, Artificial Sequence
  Description of Artificial Sequence: Synthetic oligonucleotide
  Sense strand starting at position 2847 of SEQ ID NO: 584915
aaccuuggucauugauguu

SEQ ID NO: 599015 - RNA, 19 nt, Artificial Sequence
  Description of Artificial Sequence: Synthetic oligonucleotide
  Antisense strand to SEQ ID NO: 599014
aacaucaaugaccaagguu

SEQ ID NO: 599016 - RNA, 19 nt, Artificial Sequence
  Description of Artificial Sequence: Synthetic oligonucleotide
  Sense strand starting at position 3033 of SEQ ID NO: 584915
uuuaaagccuugguuugau

SEQ ID NO: 599017 - RNA, 19 nt, Artificial Sequence
  Description of Artificial Sequence: Synthetic oligonucleotide
  Antisense strand to SEQ ID NO: 599016
aucaaaccaaggcuuuaaa

SEQ ID NO: 599018 - RNA, 19 nt, Artificial Sequence
  Description of Artificial Sequence: Synthetic oligonucleotide
  Sense strand starting at position 3420 of SEQ ID NO: 584915
aucauuaucgggcggauaa

SEQ ID NO: 599019 - RNA, 19 nt, Artificial Sequence
  Description of Artificial Sequence: Synthetic oligonucleotide
  Antisense strand to SEQ ID NO: 599018
uuauccgcccgauaaugau

SEQ ID NO: 599020 - RNA, 19 nt, Artificial Sequence
  Description of Artificial Sequence: Synthetic oligonucleotide
  Sense strand starting at position 3421 of SEQ ID NO: 584915
ucauuaucgggcggauaau

SEQ ID NO: 599021 - RNA, 19 nt, Artificial Sequence
  Description of Artificial Sequence: Synthetic oligonucleotide
  Antisense strand to SEQ ID NO: 599020
auuauccgcccgauaauga

SEQ ID NO: 599022 - RNA, 19 nt, Artificial Sequence
  Description of Artificial Sequence: Synthetic oligonucleotide
  Sense strand starting at position 3422 of SEQ ID NO: 584915
cauuaucgggcggauaaua

SEQ ID NO: 599023 - RNA, 19 nt, Artificial Sequence
  Description of Artificial Sequence: Synthetic oligonucleotide
  Antisense strand to SEQ ID NO: 599022
uauuauccgcccgauaaug

SEQ ID NO: 599024 - RNA, 19 nt, Artificial Sequence
  Description of Artificial Sequence: Synthetic oligonucleotide
  Sense strand starting at position 3522 of SEQ ID NO: 584915
gaugaagagucuccuugcu

SEQ ID NO: 599025 - RNA, 19 nt, Artificial Sequence
  Description of Artificial Sequence: Synthetic oligonucleotide
  Antisense strand to SEQ ID NO: 599024
agcaaggagacucuucauc

SEQ ID NO: 599026 - RNA, 19 nt, Artificial Sequence
  Description of Artificial Sequence: Synthetic oligonucleotide
  Sense strand starting at position 3524 of SEQ ID NO: 584915
ugaagagucuccuugcuug

SEQ ID NO: 599027 - RNA, 19 nt, Artificial Sequence
  Description of Artificial Sequence: Synthetic oligonucleotide
  Antisense strand to SEQ ID NO: 599026
caagcaaggagacucuuca

SEQ ID NO: 599028 - RNA, 19 nt, Artificial Sequence
  Description of Artificial Sequence: Synthetic oligonucleotide
  Sense strand starting at position 3881 of SEQ ID NO: 584915
cggccagaauuguuuauaa

SEQ ID NO: 599029 - RNA, 19 nt, Artificial Sequence
  Description of Artificial Sequence: Synthetic oligonucleotide
  Antisense strand to SEQ ID NO: 599028
uuauaaacaauucuggccg

SEQ ID NO: 599030 - RNA, 19 nt, Artificial Sequence
  Description of Artificial Sequence: Synthetic oligonucleotide
  Sense strand starting at position 3883 of SEQ ID NO: 584915
gccagaauuguuuauaauu

SEQ ID NO: 599031 - RNA, 19 nt, Artificial Sequence
  Description of Artificial Sequence: Synthetic oligonucleotide
  Antisense strand to SEQ ID NO: 599030
aauuauaaacaauucuggc

SEQ ID NO: 599032 - RNA, 19 nt, Artificial Sequence
  Description of Artificial Sequence: Synthetic oligonucleotide
  Sense strand starting at position 302 of SEQ ID NO: 584916
cagaguaagaagugaaagu

SEQ ID NO: 599033 - RNA, 19 nt, Artificial Sequence
  Description of Artificial Sequence: Synthetic oligonucleotide
  Antisense strand to SEQ ID NO: 599032
acuuucacuucuuacucug

SEQ ID NO: 599034 - RNA, 19 nt, Artificial Sequence
  Description of Artificial Sequence: Synthetic oligonucleotide
  Sense strand starting at position 353 of SEQ ID NO: 584916
guuggaugauuguccagac

SEQ ID NO: 599035 - RNA, 19 nt, Artificial Sequence
  Description of Artificial Sequence: Synthetic oligonucleotide
  Antisense strand to SEQ ID NO: 599034
gucuggacaaucauccaac

SEQ ID NO: 599036 - RNA, 19 nt, Artificial Sequence
  Description of Artificial Sequence: Synthetic oligonucleotide
  Sense strand starting at position 354 of SEQ ID NO: 584916
uuggaugauuguccagacu

SEQ ID NO: 599037 - RNA, 19 nt, Artificial Sequence
  Description of Artificial Sequence: Synthetic oligonucleotide
  Antisense strand to SEQ ID NO: 599036
agucuggacaaucauccaa

SEQ ID NO: 599038 - RNA, 19 nt, Artificial Sequence
  Description of Artificial Sequence: Synthetic oligonucleotide
  Sense strand starting at position 430 of SEQ ID NO: 584916
augaucauacuguauguau

SEQ ID NO: 599039 - RNA, 19 nt, Artificial Sequence
  Description of Artificial Sequence: Synthetic oligonucleotide
  Antisense strand to SEQ ID NO: 599038
auacauacaguaugaucau

SEQ ID NO: 599040 - RNA, 19 nt, Artificial Sequence
  Description of Artificial Sequence: Synthetic oligonucleotide
  Sense strand starting at position 496 of SEQ ID NO: 584916
gcccauaguauggauaguu

SEQ ID NO: 599041 - RNA, 19 nt, Artificial Sequence
  Description of Artificial Sequence: Synthetic oligonucleotide
  Antisense strand to SEQ ID NO: 599040
aacuauccauacuaugggc

SEQ ID NO: 599042 - RNA, 19 nt, Artificial Sequence
  Description of Artificial Sequence: Synthetic oligonucleotide
  Sense strand starting at position 501 of SEQ ID NO: 584916
uaguauggauaguugauau

SEQ ID NO: 599043 - RNA, 19 nt, Artificial Sequence
  Description of Artificial Sequence: Synthetic oligonucleotide
  Antisense strand to SEQ ID NO: 599042
auaucaacuauccauacua

SEQ ID NO: 599044 - RNA, 19 nt, Artificial Sequence
  Description of Artificial Sequence: Synthetic oligonucleotide
  Sense strand starting at position 586 of SEQ ID NO: 584916
agaugaacauccuugcaca

SEQ ID NO: 599045 - RNA, 19 nt, Artificial Sequence
  Description of Artificial Sequence: Synthetic oligonucleotide
  Antisense strand to SEQ ID NO: 599044
ugugcaaggauguucaucu

SEQ ID NO: 599046 - RNA, 19 nt, Artificial Sequence
  Description of Artificial Sequence: Synthetic oligonucleotide
  Sense strand starting at position 814 of SEQ ID NO: 584916
ggagcagugugaaagauga

SEQ ID NO: 599047 - RNA, 19 nt, Artificial Sequence
  Description of Artificial Sequence: Synthetic oligonucleotide
  Antisense strand to SEQ ID NO: 599046
ucaucuuucacacugcucc

SEQ ID NO: 599048 - RNA, 19 nt, Artificial Sequence
  Description of Artificial Sequence: Synthetic oligonucleotide
  Sense strand starting at position 825 of SEQ ID NO: 584916
aaagaugaauuggaugaau

SEQ ID NO: 599049 - RNA, 19 nt, Artificial Sequence
  Description of Artificial Sequence: Synthetic oligonucleotide
  Antisense strand to SEQ ID NO: 599048
auucauccaauucaucuuu

SEQ ID NO: 599050 - RNA, 19 nt, Artificial Sequence
  Description of Artificial Sequence: Synthetic oligonucleotide
  Sense strand starting at position 888 of SEQ ID NO: 584916
auacuuauagaguguuuac

SEQ ID NO: 599051 - RNA, 19 nt, Artificial Sequence
  Description of Artificial Sequence: Synthetic oligonucleotide
  Antisense strand to SEQ ID NO: 599050
guaaacacucuauaaguau

SEQ ID NO: 599052 - RNA, 19 nt, Artificial Sequence
  Description of Artificial Sequence: Synthetic oligonucleotide
  Sense strand starting at position 891 of SEQ ID NO: 584916
cuuauagaguguuuacacu

SEQ ID NO: 599053 - RNA, 19 nt, Artificial Sequence
  Description of Artificial Sequence: Synthetic oligonucleotide
  Antisense strand to SEQ ID NO: 599052
aguguaaacacucuauaag

SEQ ID NO: 599054 - RNA, 19 nt, Artificial Sequence
  Description of Artificial Sequence: Synthetic oligonucleotide
  Sense strand starting at position 1272 of SEQ ID NO: 584916
gagcuuaaagucuagguau

SEQ ID NO: 599055 - RNA, 19 nt, Artificial Sequence
  Description of Artificial Sequence: Synthetic oligonucleotide
  Antisense strand to SEQ ID NO: 599054
auaccuagacuuuaagcuc

SEQ ID NO: 599056 - RNA, 19 nt, Artificial Sequence
  Description of Artificial Sequence: Synthetic oligonucleotide
  Sense strand starting at position 1285 of SEQ ID NO: 584916
agguaugugcuggaguaga

SEQ ID NO: 599057 - RNA, 19 nt, Artificial Sequence
  Description of Artificial Sequence: Synthetic oligonucleotide
  Antisense strand to SEQ ID NO: 599056
ucuacuccagcacauaccu

SEQ ID NO: 599058 - RNA, 19 nt, Artificial Sequence
  Description of Artificial Sequence: Synthetic oligonucleotide
  Sense strand starting at position 1815 of SEQ ID NO: 584916
aaagauaauggguguuuau

SEQ ID NO: 599059 - RNA, 19 nt, Artificial Sequence
  Description of Artificial Sequence: Synthetic oligonucleotide
  Antisense strand to SEQ ID NO: 599058
auaaacacccauuaucuuu

SEQ ID NO: 599060 - RNA, 19 nt, Artificial Sequence
  Description of Artificial Sequence: Synthetic oligonucleotide
  Sense strand starting at position 1855 of SEQ ID NO: 584916
uccuuugcugagcaugaaa

SEQ ID NO: 599061 - RNA, 19 nt, Artificial Sequence
  Description of Artificial Sequence: Synthetic oligonucleotide
  Antisense strand to SEQ ID NO: 599060
uuucaugcucagcaaagga

SEQ ID NO: 599062 - RNA, 19 nt, Artificial Sequence
  Description of Artificial Sequence: Synthetic oligonucleotide
  Sense strand starting at position 1867 of SEQ ID NO: 584916
caugaaauccagugguuau

SEQ ID NO: 599063 - RNA, 19 nt, Artificial Sequence
  Description of Artificial Sequence: Synthetic oligonucleotide
  Antisense strand to SEQ ID NO: 599062
auaaccacuggauuucaug

SEQ ID NO: 599064 - RNA, 19 nt, Artificial Sequence
  Description of Artificial Sequence: Synthetic oligonucleotide
  Sense strand starting at position 2017 of SEQ ID NO: 584916
ggagcuguacuggaagcau

SEQ ID NO: 599065 - RNA, 19 nt, Artificial Sequence
  Description of Artificial Sequence: Synthetic oligonucleotide
  Antisense strand to SEQ ID NO: 599064
augcuuccaguacagcucc

SEQ ID NO: 599066 - RNA, 19 nt, Artificial Sequence
  Description of Artificial Sequence: Synthetic oligonucleotide
  Sense strand starting at position 2165 of SEQ ID NO: 584916
ccaacauuaguuuauguuu

SEQ ID NO: 599067 - RNA, 19 nt, Artificial Sequence
  Description of Artificial Sequence: Synthetic oligonucleotide
  Antisense strand to SEQ ID NO: 599066
aaacauaaacuaauguugg

SEQ ID NO: 599068 - RNA, 19 nt, Artificial Sequence
  Description of Artificial Sequence: Synthetic oligonucleotide
  Sense strand starting at position 2213 of SEQ ID NO: 584916
uucuaaagccagcauuagu

SEQ ID NO: 599069 - RNA, 19 nt, Artificial Sequence
  Description of Artificial Sequence: Synthetic oligonucleotide
  Antisense strand to SEQ ID NO: 599068
acuaaugcuggcuuuagaa

SEQ ID NO: 599070 - RNA, 19 nt, Artificial Sequence
  Description of Artificial Sequence: Synthetic oligonucleotide
  Sense strand starting at position 2245 of SEQ ID NO: 584916
gucguaaauaggugauaag

SEQ ID NO: 599071 - RNA, 19 nt, Artificial Sequence
  Description of Artificial Sequence: Synthetic oligonucleotide
  Antisense strand to SEQ ID NO: 599070
cuuaucaccuauuuacgac

SEQ ID NO: 599072 - RNA, 19 nt, Artificial Sequence
  Description of Artificial Sequence: Synthetic oligonucleotide
  Sense strand starting at position 2337 of SEQ ID NO: 584916
aacacacauguguggaauu

SEQ ID NO: 599073 - RNA, 19 nt, Artificial Sequence
  Description of Artificial Sequence: Synthetic oligonucleotide
  Antisense strand to SEQ ID NO: 599072
aauuccacacauguguguu

SEQ ID NO: 599074 - RNA, 19 nt, Artificial Sequence
  Description of Artificial Sequence: Synthetic oligonucleotide
  Sense strand starting at position 2408 of SEQ ID NO: 584916
auguacugcucacuaagaa

SEQ ID NO: 599075 - RNA, 19 nt, Artificial Sequence
  Description of Artificial Sequence: Synthetic oligonucleotide
  Antisense strand to SEQ ID NO: 599074
uucuuagugagcaguacau

SEQ ID NO: 599076 - RNA, 19 nt, Artificial Sequence
  Description of Artificial Sequence: Synthetic oligonucleotide
  Sense strand starting at position 2409 of SEQ ID NO: 584916
uguacugcucacuaagaac

SEQ ID NO: 599077 - RNA, 19 nt, Artificial Sequence
  Description of Artificial Sequence: Synthetic oligonucleotide
  Antisense strand to SEQ ID NO: 599076
guucuuagugagcaguaca

SEQ ID NO: 599078 - RNA, 19 nt, Artificial Sequence
  Description of Artificial Sequence: Synthetic oligonucleotide
  Sense strand starting at position 2445 of SEQ ID NO: 584916
auuauagugaugcaaguag

SEQ ID NO: 599079 - RNA, 19 nt, Artificial Sequence
  Description of Artificial Sequence: Synthetic oligonucleotide
  Antisense strand to SEQ ID NO: 599078
cuacuugcaucacuauaau

SEQ ID NO: 599080 - RNA, 19 nt, Artificial Sequence
  Description of Artificial Sequence: Synthetic oligonucleotide
  Sense strand starting at position 2679 of SEQ ID NO: 584916
gggaacuccucucugacau

SEQ ID NO: 599081 - RNA, 19 nt, Artificial Sequence
  Description of Artificial Sequence: Synthetic oligonucleotide
  Antisense strand to SEQ ID NO: 599080
augucagagaggaguuccc

SEQ ID NO: 599082 - RNA, 19 nt, Artificial Sequence
  Description of Artificial Sequence: Synthetic oligonucleotide
  Sense strand starting at position 2680 of SEQ ID NO: 584916
ggaacuccucucugacauu

SEQ ID NO: 599083 - RNA, 19 nt, Artificial Sequence
  Description of Artificial Sequence: Synthetic oligonucleotide
  Antisense strand to SEQ ID NO: 599082
aaugucagagaggaguucc

SEQ ID NO: 599084 - RNA, 19 nt, Artificial Sequence
  Description of Artificial Sequence: Synthetic oligonucleotide
  Sense strand starting at position 2830 of SEQ ID NO: 584916
ccuuauagggcaugguaga

SEQ ID NO: 599085 - RNA, 19 nt, Artificial Sequence
  Description of Artificial Sequence: Synthetic oligonucleotide
  Antisense strand to SEQ ID NO: 599084
ucuaccaugcccuauaagg

SEQ ID NO: 599086 - RNA, 19 nt, Artificial Sequence
  Description of Artificial Sequence: Synthetic oligonucleotide
  Sense strand starting at position 2868 of SEQ ID NO: 584916
uaagaugugaugugaguca

SEQ ID NO: 599087 - RNA, 19 nt, Artificial Sequence
  Description of Artificial Sequence: Synthetic oligonucleotide
  Antisense strand to SEQ ID NO: 599086
ugacucacaucacaucuua

SEQ ID NO: 599088 - RNA, 19 nt, Artificial Sequence
  Description of Artificial Sequence: Synthetic oligonucleotide
  Sense strand starting at position 2873 of SEQ ID NO: 584916
ugugaugugagucauugga

SEQ ID NO: 599089 - RNA, 19 nt, Artificial Sequence
  Description of Artificial Sequence: Synthetic oligonucleotide
  Antisense strand to SEQ ID NO: 599088
uccaaugacucacaucaca

SEQ ID NO: 599090 - RNA, 19 nt, Artificial Sequence
  Description of Artificial Sequence: Synthetic oligonucleotide
  Sense strand starting at position 2875 of SEQ ID NO: 584916
ugaugugagucauuggaga

SEQ ID NO: 599091 - RNA, 19 nt, Artificial Sequence
  Description of Artificial Sequence: Synthetic oligonucleotide
  Antisense strand to SEQ ID NO: 599090
ucuccaaugacucacauca

SEQ ID NO: 599092 - RNA, 19 nt, Artificial Sequence
  Description of Artificial Sequence: Synthetic oligonucleotide
  Sense strand starting at position 2877 of SEQ ID NO: 584916
augugagucauuggagagu

SEQ ID NO: 599093 - RNA, 19 nt, Artificial Sequence
  Description of Artificial Sequence: Synthetic oligonucleotide
  Antisense strand to SEQ ID NO: 599092
acucuccaaugacucacau

SEQ ID NO: 599094 - RNA, 19 nt, Artificial Sequence
  Description of Artificial Sequence: Synthetic oligonucleotide
  Sense strand starting at position 3261 of SEQ ID NO: 584916
cuagcugcuguuuagagaa

SEQ ID NO: 599095 - RNA, 19 nt, Artificial Sequence
  Description of Artificial Sequence: Synthetic oligonucleotide
  Antisense strand to SEQ ID NO: 599094
uucucuaaacagcagcuag

SEQ ID NO: 599096 - RNA, 19 nt, Artificial Sequence
  Description of Artificial Sequence: Synthetic oligonucleotide
  Sense strand starting at position 3455 of SEQ ID NO: 584916
gacuaugcucaugaguaag

SEQ ID NO: 599097 - RNA, 19 nt, Artificial Sequence
  Description of Artificial Sequence: Synthetic oligonucleotide
  Antisense strand to SEQ ID NO: 599096
cuuacucaugagcauaguc

SEQ ID NO: 599098 - RNA, 19 nt, Artificial Sequence
  Description of Artificial Sequence: Synthetic oligonucleotide
  Sense strand starting at position 3465 of SEQ ID NO: 584916
augaguaaguaguuggaua

SEQ ID NO: 599099 - RNA, 19 nt, Artificial Sequence
  Description of Artificial Sequence: Synthetic oligonucleotide
  Antisense strand to SEQ ID NO: 599098
uauccaacuacuuacucau

SEQ ID NO: 599100 - RNA, 19 nt, Artificial Sequence
  Description of Artificial Sequence: Synthetic oligonucleotide
  Sense strand starting at position 3466 of SEQ ID NO: 584916
ugaguaaguaguuggauag

SEQ ID NO: 599101 - RNA, 19 nt, Artificial Sequence
  Description of Artificial Sequence: Synthetic oligonucleotide
  Antisense strand to SEQ ID NO: 599100
cuauccaacuacuuacuca

SEQ ID NO: 599102 - RNA, 19 nt, Artificial Sequence
  Description of Artificial Sequence: Synthetic oligonucleotide
  Sense strand starting at position 3472 of SEQ ID NO: 584916
aguaguuggauaggaauau

SEQ ID NO: 599103 - RNA, 19 nt, Artificial Sequence
  Description of Artificial Sequence: Synthetic oligonucleotide
  Antisense strand to SEQ ID NO: 599102
auauuccuauccaacuacu

SEQ ID NO: 599104 - RNA, 19 nt, Artificial Sequence
  Description of Artificial Sequence: Synthetic oligonucleotide
  Sense strand starting at position 3508 of SEQ ID NO: 584916
cugguauggagguauuaau

SEQ ID NO: 599105 - RNA, 19 nt, Artificial Sequence
  Description of Artificial Sequence: Synthetic oligonucleotide
  Antisense strand to SEQ ID NO: 599104
auuaauaccuccauaccag

SEQ ID NO: 599106 - RNA, 19 nt, Artificial Sequence
  Description of Artificial Sequence: Synthetic oligonucleotide
  Sense strand starting at position 3555 of SEQ ID NO: 584916
uuauuagugaacuggugga

SEQ ID NO: 599107 - RNA, 19 nt, Artificial Sequence
  Description of Artificial Sequence: Synthetic oligonucleotide
  Antisense strand to SEQ ID NO: 599106
uccaccaguucacuaauaa

SEQ ID NO: 599108 - RNA, 19 nt, Artificial Sequence
  Description of Artificial Sequence: Synthetic oligonucleotide
  Sense strand starting at position 3724 of SEQ ID NO: 584916
uaucaucuauggucagaag

SEQ ID NO: 599109 - RNA, 19 nt, Artificial Sequence
  Description of Artificial Sequence: Synthetic oligonucleotide
  Antisense strand to SEQ ID NO: 599108
cuucugaccauagaugaua

SEQ ID NO: 599110 - RNA, 19 nt, Artificial Sequence
  Description of Artificial Sequence: Synthetic oligonucleotide
  Sense strand starting at position 3932 of SEQ ID NO: 584916
ucaugucugguuuaaggga

SEQ ID NO: 599111 - RNA, 19 nt, Artificial Sequence
  Description of Artificial Sequence: Synthetic oligonucleotide
  Antisense strand to SEQ ID NO: 599110
ucccuuaaaccagacauga

SEQ ID NO: 599112 - RNA, 19 nt, Artificial Sequence
  Description of Artificial Sequence: Synthetic oligonucleotide
  Sense strand starting at position 52 of SEQ ID NO: 584917
guggauuccuaaccucaga

SEQ ID NO: 599113 - RNA, 19 nt, Artificial Sequence
  Description of Artificial Sequence: Synthetic oligonucleotide
  Antisense strand to SEQ ID NO: 599112
ucugagguuaggaauccac

SEQ ID NO: 599114 - RNA, 19 nt, Artificial Sequence
  Description of Artificial Sequence: Synthetic oligonucleotide
  Sense strand starting at position 92 of SEQ ID NO: 584917
agugcauccuccgacaugu

SEQ ID NO: 599115 - RNA, 19 nt, Artificial Sequence
  Description of Artificial Sequence: Synthetic oligonucleotide
  Antisense strand to SEQ ID NO: 599114
acaugucggaggaugcacu

SEQ ID NO: 599116 - RNA, 19 nt, Artificial Sequence
  Description of Artificial Sequence: Synthetic oligonucleotide
  Sense strand starting at position 192 of SEQ ID NO: 584917
acugcucuuguaggugaua

SEQ ID NO: 599117 - RNA, 19 nt, Artificial Sequence
  Description of Artificial Sequence: Synthetic oligonucleotide
  Antisense strand to SEQ ID NO: 599116
uaucaccuacaagagcagu

SEQ ID NO: 599118 - RNA, 19 nt, Artificial Sequence
  Description of Artificial Sequence: Synthetic oligonucleotide
  Sense strand starting at position 193 of SEQ ID NO: 584917
cugcucuuguaggugauaa

SEQ ID NO: 599119 - RNA, 19 nt, Artificial Sequence
  Description of Artificial Sequence: Synthetic oligonucleotide
  Antisense strand to SEQ ID NO: 599118
uuaucaccuacaagagcag

SEQ ID NO: 599120 - RNA, 19 nt, Artificial Sequence
  Description of Artificial Sequence: Synthetic oligonucleotide
  Sense strand starting at position 194 of SEQ ID NO: 584917
ugcucuuguaggugauaag

SEQ ID NO: 599121 - RNA, 19 nt, Artificial Sequence
  Description of Artificial Sequence: Synthetic oligonucleotide
  Antisense strand to SEQ ID NO: 599120
cuuaucaccuacaagagca

SEQ ID NO: 599122 - RNA, 19 nt, Artificial Sequence
  Description of Artificial Sequence: Synthetic oligonucleotide
  Sense strand starting at position 205 of SEQ ID NO: 584917
gugauaagguccuguguca

SEQ ID NO: 599123 - RNA, 19 nt, Artificial Sequence
  Description of Artificial Sequence: Synthetic oligonucleotide
  Antisense strand to SEQ ID NO: 599122
ugacacaggaccuuaucac

SEQ ID NO: 599124 - RNA, 19 nt, Artificial Sequence
  Description of Artificial Sequence: Synthetic oligonucleotide
  Sense strand starting at position 217 of SEQ ID NO: 584917
ugugucauuguucccgcaa

SEQ ID NO: 599125 - RNA, 19 nt, Artificial Sequence
  Description of Artificial Sequence: Synthetic oligonucleotide
  Antisense strand to SEQ ID NO: 599124
uugcgggaacaaugacaca

SEQ ID NO: 599126 - RNA, 19 nt, Artificial Sequence
  Description of Artificial Sequence: Synthetic oligonucleotide
  Sense strand starting at position 218 of SEQ ID NO: 584917
gugucauuguucccgcaau

SEQ ID NO: 599127 - RNA, 19 nt, Artificial Sequence
  Description of Artificial Sequence: Synthetic oligonucleotide
  Antisense strand to SEQ ID NO: 599126
auugcgggaacaaugacac

SEQ ID NO: 599128 - RNA, 19 nt, Artificial Sequence
  Description of Artificial Sequence: Synthetic oligonucleotide
  Sense strand starting at position 219 of SEQ ID NO: 584917
ugucauuguucccgcaauc

SEQ ID NO: 599129 - RNA, 19 nt, Artificial Sequence
  Description of Artificial Sequence: Synthetic oligonucleotide
  Antisense strand to SEQ ID NO: 599128
gauugcgggaacaaugaca

SEQ ID NO: 599130 - RNA, 19 nt, Artificial Sequence
  Description of Artificial Sequence: Synthetic oligonucleotide
  Sense strand starting at position 228 of SEQ ID NO: 584917
ucccgcaaucuaugucuuu

SEQ ID NO: 599131 - RNA, 19 nt, Artificial Sequence
  Description of Artificial Sequence: Synthetic oligonucleotide
  Antisense strand to SEQ ID NO: 599130
aaagacauagauugcggga

SEQ ID NO: 599132 - RNA, 19 nt, Artificial Sequence
  Description of Artificial Sequence: Synthetic oligonucleotide
  Sense strand starting at position 264 of SEQ ID NO: 584917
cuggcagacugacuuauua

SEQ ID NO: 599133 - RNA, 19 nt, Artificial Sequence
  Description of Artificial Sequence: Synthetic oligonucleotide
  Antisense strand to SEQ ID NO: 599132
uaauaagucagucugccag

SEQ ID NO: 599134 - RNA, 19 nt, Artificial Sequence
  Description of Artificial Sequence: Synthetic oligonucleotide
  Sense strand starting at position 1621 of SEQ ID NO: 584917
ccuugagaauguucuuugu

SEQ ID NO: 599135 - RNA, 19 nt, Artificial Sequence
  Description of Artificial Sequence: Synthetic oligonucleotide
  Antisense strand to SEQ ID NO: 599134
acaaagaacauucucaagg

SEQ ID NO: 599136 - RNA, 19 nt, Artificial Sequence
  Description of Artificial Sequence: Synthetic oligonucleotide
  Sense strand starting at position 1625 of SEQ ID NO: 584917
gagaauguucuuugugaga

SEQ ID NO: 599137 - RNA, 19 nt, Artificial Sequence
  Description of Artificial Sequence: Synthetic oligonucleotide
  Antisense strand to SEQ ID NO: 599136
ucucacaaagaacauucuc

SEQ ID NO: 599138 - RNA, 19 nt, Artificial Sequence
  Description of Artificial Sequence: Synthetic oligonucleotide
  Sense strand starting at position 1627 of SEQ ID NO: 584917
gaauguucuuugugagauc

SEQ ID NO: 599139 - RNA, 19 nt, Artificial Sequence
  Description of Artificial Sequence: Synthetic oligonucleotide
  Antisense strand to SEQ ID NO: 599138
gaucucacaaagaacauuc

SEQ ID NO: 599140 - RNA, 19 nt, Artificial Sequence
  Description of Artificial Sequence: Synthetic oligonucleotide
  Sense strand starting at position 1819 of SEQ ID NO: 584917
acacgaaugcgugagacau

SEQ ID NO: 599141 - RNA, 19 nt, Artificial Sequence
  Description of Artificial Sequence: Synthetic oligonucleotide
  Antisense strand to SEQ ID NO: 599140
augucucacgcauucgugu

SEQ ID NO: 599142 - RNA, 19 nt, Artificial Sequence
  Description of Artificial Sequence: Synthetic oligonucleotide
  Sense strand starting at position 1821 of SEQ ID NO: 584917
acgaaugcgugagacauuu

SEQ ID NO: 599143 - RNA, 19 nt, Artificial Sequence
  Description of Artificial Sequence: Synthetic oligonucleotide
  Antisense strand to SEQ ID NO: 599142
aaaugucucacgcauucgu

SEQ ID NO: 599144 - RNA, 19 nt, Artificial Sequence
  Description of Artificial Sequence: Synthetic oligonucleotide
  Sense strand starting at position 1843 of SEQ ID NO: 584917
gccaaagaccugggucaga

SEQ ID NO: 599145 - RNA, 19 nt, Artificial Sequence
  Description of Artificial Sequence: Synthetic oligonucleotide
  Antisense strand to SEQ ID NO: 599144
ucugacccaggucuuuggc

SEQ ID NO: 599146 - RNA, 19 nt, Artificial Sequence
  Description of Artificial Sequence: Synthetic oligonucleotide
  Sense strand starting at position 2843 of SEQ ID NO: 584917
cgauaaugguucuaaaugg

SEQ ID NO: 599147 - RNA, 19 nt, Artificial Sequence
  Description of Artificial Sequence: Synthetic oligonucleotide
  Antisense strand to SEQ ID NO: 599146
ccauuuagaaccauuaucg

SEQ ID NO: 599148 - RNA, 19 nt, Artificial Sequence
  Description of Artificial Sequence: Synthetic oligonucleotide
  Sense strand starting at position 2972 of SEQ ID NO: 584917
ucuagugucuguuuccagu

SEQ ID NO: 599149 - RNA, 19 nt, Artificial Sequence
  Description of Artificial Sequence: Synthetic oligonucleotide
  Antisense strand to SEQ ID NO: 599148
acuggaaacagacacuaga

SEQ ID NO: 599150 - RNA, 19 nt, Artificial Sequence
  Description of Artificial Sequence: Synthetic oligonucleotide
  Sense strand starting at position 2976 of SEQ ID NO: 584917
gugucuguuuccagugcga

SEQ ID NO: 599151 - RNA, 19 nt, Artificial Sequence
  Description of Artificial Sequence: Synthetic oligonucleotide
  Antisense strand to SEQ ID NO: 599150
ucgcacuggaaacagacac

SEQ ID NO: 599152 - RNA, 19 nt, Artificial Sequence
  Description of Artificial Sequence: Synthetic oligonucleotide
  Sense strand starting at position 2978 of SEQ ID NO: 584917
gucuguuuccagugcgacu

SEQ ID NO: 599153 - RNA, 19 nt, Artificial Sequence
  Description of Artificial Sequence: Synthetic oligonucleotide
  Antisense strand to SEQ ID NO: 599152
agucgcacuggaaacagac

SEQ ID NO: 599154 - RNA, 19 nt, Artificial Sequence
  Description of Artificial Sequence: Synthetic oligonucleotide
  Sense strand starting at position 2987 of SEQ ID NO: 584917
cagugcgacuagucccaaa

SEQ ID NO: 599155 - RNA, 19 nt, Artificial Sequence
  Description of Artificial Sequence: Synthetic oligonucleotide
  Antisense strand to SEQ ID NO: 599154
uuugggacuagucgcacug

SEQ ID NO: 599156 - RNA, 19 nt, Artificial Sequence
  Description of Artificial Sequence: Synthetic oligonucleotide
  Sense strand starting at position 3023 of SEQ ID NO: 584917
ccgccuaucccuuaagucu

SEQ ID NO: 599157 - RNA, 19 nt, Artificial Sequence
  Description of Artificial Sequence: Synthetic oligonucleotide
  Antisense strand to SEQ ID NO: 599156
agacuuaagggauaggcgg

SEQ ID NO: 599158 - RNA, 19 nt, Artificial Sequence
  Description of Artificial Sequence: Synthetic oligonucleotide
  Sense strand starting at position 3053 of SEQ ID NO: 584917
aucacugagucuugugaau

SEQ ID NO: 599159 - RNA, 19 nt, Artificial Sequence
  Description of Artificial Sequence: Synthetic oligonucleotide
  Antisense strand to SEQ ID NO: 599158
auucacaagacucagugau

SEQ ID NO: 599160 - RNA, 19 nt, Artificial Sequence
  Description of Artificial Sequence: Synthetic oligonucleotide
  Sense strand starting at position 3234 of SEQ ID NO: 584917
cgguuucguucugugacca

SEQ ID NO: 599161 - RNA, 19 nt, Artificial Sequence
  Description of Artificial Sequence: Synthetic oligonucleotide
  Antisense strand to SEQ ID NO: 599160
uggucacagaacgaaaccg

SEQ ID NO: 599162 - RNA, 19 nt, Artificial Sequence
  Description of Artificial Sequence: Synthetic oligonucleotide
  Sense strand starting at position 3417 of SEQ ID NO: 584917
cuaacucuguccuacaagu

SEQ ID NO: 599163 - RNA, 19 nt, Artificial Sequence
  Description of Artificial Sequence: Synthetic oligonucleotide
  Antisense strand to SEQ ID NO: 599162
acuuguaggacagaguuag

SEQ ID NO: 599164 - RNA, 19 nt, Artificial Sequence
  Description of Artificial Sequence: Synthetic oligonucleotide
  Sense strand starting at position 3430 of SEQ ID NO: 584917
acaaguuaaccuggaguga

SEQ ID NO: 599165 - RNA, 19 nt, Artificial Sequence
  Description of Artificial Sequence: Synthetic oligonucleotide
  Antisense strand to SEQ ID NO: 599164
ucacuccagguuaacuugu

SEQ ID NO: 599166 - RNA, 19 nt, Artificial Sequence
  Description of Artificial Sequence: Synthetic oligonucleotide
  Sense strand starting at position 3443 of SEQ ID NO: 584917
gagugacugaagugucauc

SEQ ID NO: 599167 - RNA, 19 nt, Artificial Sequence
  Description of Artificial Sequence: Synthetic oligonucleotide
  Antisense strand to SEQ ID NO: 599166
gaugacacuucagucacuc

SEQ ID NO: 599168 - RNA, 19 nt, Artificial Sequence
  Description of Artificial Sequence: Synthetic oligonucleotide
  Sense strand starting at position 3448 of SEQ ID NO: 584917
acugaagugucauccuaau

SEQ ID NO: 599169 - RNA, 19 nt, Artificial Sequence
  Description of Artificial Sequence: Synthetic oligonucleotide
  Antisense strand to SEQ ID NO: 599168
auuaggaugacacuucagu

SEQ ID NO: 599170 - RNA, 19 nt, Artificial Sequence
  Description of Artificial Sequence: Synthetic oligonucleotide
  Sense strand starting at position 3505 of SEQ ID NO: 584917
agcccagucucgugcugau

SEQ ID NO: 599171 - RNA, 19 nt, Artificial Sequence
  Description of Artificial Sequence: Synthetic oligonucleotide
  Antisense strand to SEQ ID NO: 599170
aucagcacgagacugggcu

SEQ ID NO: 599172 - RNA, 19 nt, Artificial Sequence
  Description of Artificial Sequence: Synthetic oligonucleotide
  Sense strand starting at position 3508 of SEQ ID NO: 584917
ccagucucgugcugauaac

SEQ ID NO: 599173 - RNA, 19 nt, Artificial Sequence
  Description of Artificial Sequence: Synthetic oligonucleotide
  Antisense strand to SEQ ID NO: 599172
guuaucagcacgagacugg

SEQ ID NO: 599174 - RNA, 19 nt, Artificial Sequence
  Description of Artificial Sequence: Synthetic oligonucleotide
  Sense strand starting at position 3614 of SEQ ID NO: 584917
gguacagcugggcaagauu

SEQ ID NO: 599175 - RNA, 19 nt, Artificial Sequence
  Description of Artificial Sequence: Synthetic oligonucleotide
  Antisense strand to SEQ ID NO: 599174
aaucuugcccagcuguacc

SEQ ID NO: 599176 - RNA, 19 nt, Artificial Sequence
  Description of Artificial Sequence: Synthetic oligonucleotide
  Sense strand starting at position 3682 of SEQ ID NO: 584917
ugguaauuaugacgaacuu

SEQ ID NO: 599177 - RNA, 19 nt, Artificial Sequence
  Description of Artificial Sequence: Synthetic oligonucleotide
  Antisense strand to SEQ ID NO: 599176
aaguucgucauaauuacca

SEQ ID NO: 599178 - RNA, 19 nt, Artificial Sequence
  Description of Artificial Sequence: Synthetic oligonucleotide
  Sense strand starting at position 3980 of SEQ ID NO: 584917
cuacuugacuccucuggaa

SEQ ID NO: 599179 - RNA, 19 nt, Artificial Sequence
  Description of Artificial Sequence: Synthetic oligonucleotide
  Antisense strand to SEQ ID NO: 599178
uuccagaggagucaaguag

SEQ ID NO: 599180 - RNA, 19 nt, Artificial Sequence
  Description of Artificial Sequence: Synthetic oligonucleotide
  Sense strand starting at position 3982 of SEQ ID NO: 584917
acuugacuccucuggaaga

SEQ ID NO: 599181 - RNA, 19 nt, Artificial Sequence
  Description of Artificial Sequence: Synthetic oligonucleotide
  Antisense strand to SEQ ID NO: 599180
ucuuccagaggagucaagu

SEQ ID NO: 599182 - RNA, 19 nt, Artificial Sequence
  Description of Artificial Sequence: Synthetic oligonucleotide
  Sense strand starting at position 18 of SEQ ID NO: 584918
auagguauauauccuacua

SEQ ID NO: 599183 - RNA, 19 nt, Artificial Sequence
  Description of Artificial Sequence: Synthetic oligonucleotide
  Antisense strand to SEQ ID NO: 599182
uaguaggauauauaccuau

SEQ ID NO: 599184 - RNA, 19 nt, Artificial Sequence
  Description of Artificial Sequence: Synthetic oligonucleotide
  Sense strand starting at position 133 of SEQ ID NO: 584918
aggauaaguuaacuuaagu

SEQ ID NO: 599185 - RNA, 19 nt, Artificial Sequence
  Description of Artificial Sequence: Synthetic oligonucleotide
  Antisense strand to SEQ ID NO: 599184
acuuaaguuaacuuauccu

SEQ ID NO: 599186 - RNA, 19 nt, Artificial Sequence
  Description of Artificial Sequence: Synthetic oligonucleotide
  Sense strand starting at position 196 of SEQ ID NO: 584918
acuacugauacgugugaua

SEQ ID NO: 599187 - RNA, 19 nt, Artificial Sequence
  Description of Artificial Sequence: Synthetic oligonucleotide
  Antisense strand to SEQ ID NO: 599186
uaucacacguaucaguagu

SEQ ID NO: 599188 - RNA, 19 nt, Artificial Sequence
  Description of Artificial Sequence: Synthetic oligonucleotide
  Sense strand starting at position 198 of SEQ ID NO: 584918
uacugauacgugugauaac

SEQ ID NO: 599189 - RNA, 19 nt, Artificial Sequence
  Description of Artificial Sequence: Synthetic oligonucleotide
  Antisense strand to SEQ ID NO: 599188
guuaucacacguaucagua

SEQ ID NO: 599190 - RNA, 19 nt, Artificial Sequence
  Description of Artificial Sequence: Synthetic oligonucleotide
  Sense strand starting at position 207 of SEQ ID NO: 584918
gugugauaacauggaggaa

SEQ ID NO: 599191 - RNA, 19 nt, Artificial Sequence
  Description of Artificial Sequence: Synthetic oligonucleotide
  Antisense strand to SEQ ID NO: 599190
uuccuccauguuaucacac

SEQ ID NO: 599192 - RNA, 19 nt, Artificial Sequence
  Description of Artificial Sequence: Synthetic oligonucleotide
  Sense strand starting at position 263 of SEQ ID NO: 584918
ugcaaagguguccaaucuu

SEQ ID NO: 599193 - RNA, 19 nt, Artificial Sequence
  Description of Artificial Sequence: Synthetic oligonucleotide
  Antisense strand to SEQ ID NO: 599192
aagauuggacaccuuugca

SEQ ID NO: 599194 - RNA, 19 nt, Artificial Sequence
  Description of Artificial Sequence: Synthetic oligonucleotide
  Sense strand starting at position 765 of SEQ ID NO: 584918
guuggacaaguuuggaaua

SEQ ID NO: 599195 - RNA, 19 nt, Artificial Sequence
  Description of Artificial Sequence: Synthetic oligonucleotide
  Antisense strand to SEQ ID NO: 599194
uauuccaaacuuguccaac

SEQ ID NO: 599196 - RNA, 19 nt, Artificial Sequence
  Description of Artificial Sequence: Synthetic oligonucleotide
  Sense strand starting at position 785 of SEQ ID NO: 584918
agcauaaugcuugauugca

SEQ ID NO: 599197 - RNA, 19 nt, Artificial Sequence
  Description of Artificial Sequence: Synthetic oligonucleotide
  Antisense strand to SEQ ID NO: 599196
ugcaaucaagcauuaugcu

SEQ ID NO: 599198 - RNA, 19 nt, Artificial Sequence
  Description of Artificial Sequence: Synthetic oligonucleotide
  Sense strand starting at position 799 of SEQ ID NO: 584918
uugcaauuacaugaaguuu

SEQ ID NO: 599199 - RNA, 19 nt, Artificial Sequence
  Description of Artificial Sequence: Synthetic oligonucleotide
  Antisense strand to SEQ ID NO: 599198
aaacuucauguaauugcaa

SEQ ID NO: 599200 - RNA, 19 nt, Artificial Sequence
  Description of Artificial Sequence: Synthetic oligonucleotide
  Sense strand starting at position 948 of SEQ ID NO: 584918
gggcuaaugacauguguau

SEQ ID NO: 599201 - RNA, 19 nt, Artificial Sequence
  Description of Artificial Sequence: Synthetic oligonucleotide
  Antisense strand to SEQ ID NO: 599200
auacacaugucauuagccc

SEQ ID NO: 599202 - RNA, 19 nt, Artificial Sequence
  Description of Artificial Sequence: Synthetic oligonucleotide
  Sense strand starting at position 994 of SEQ ID NO: 584918
cucuuaauuucugugcgau

SEQ ID NO: 599203 - RNA, 19 nt, Artificial Sequence
  Description of Artificial Sequence: Synthetic oligonucleotide
  Antisense strand to SEQ ID NO: 599202
aucgcacagaaauuaagag

SEQ ID NO: 599204 - RNA, 19 nt, Artificial Sequence
  Description of Artificial Sequence: Synthetic oligonucleotide
  Sense strand starting at position 995 of SEQ ID NO: 584918
ucuuaauuucugugcgauu

SEQ ID NO: 599205 - RNA, 19 nt, Artificial Sequence
  Description of Artificial Sequence: Synthetic oligonucleotide
  Antisense strand to SEQ ID NO: 599204
aaucgcacagaaauuaaga

SEQ ID NO: 599206 - RNA, 19 nt, Artificial Sequence
  Description of Artificial Sequence: Synthetic oligonucleotide
  Sense strand starting at position 998 of SEQ ID NO: 584918
uaauuucugugcgauuuau

SEQ ID NO: 599207 - RNA, 19 nt, Artificial Sequence
  Description of Artificial Sequence: Synthetic oligonucleotide
  Antisense strand to SEQ ID NO: 599206
auaaaucgcacagaaauua

SEQ ID NO: 599208 - RNA, 19 nt, Artificial Sequence
  Description of Artificial Sequence: Synthetic oligonucleotide
  Sense strand starting at position 1008 of SEQ ID NO: 584918
gcgauuuauuguguguaaa

SEQ ID NO: 599209 - RNA, 19 nt, Artificial Sequence
  Description of Artificial Sequence: Synthetic oligonucleotide
  Antisense strand to SEQ ID NO: 599208
uuuacacacaauaaaucgc

SEQ ID NO: 599210 - RNA, 19 nt, Artificial Sequence
  Description of Artificial Sequence: Synthetic oligonucleotide
  Sense strand starting at position 1009 of SEQ ID NO: 584918
cgauuuauuguguguaaau

SEQ ID NO: 599211 - RNA, 19 nt, Artificial Sequence
  Description of Artificial Sequence: Synthetic oligonucleotide
  Antisense strand to SEQ ID NO: 599210
auuuacacacaauaaaucg

SEQ ID NO: 599212 - RNA, 19 nt, Artificial Sequence
  Description of Artificial Sequence: Synthetic oligonucleotide
  Sense strand starting at position 1513 of SEQ ID NO: 584918
aggucacuuccucggagaa

SEQ ID NO: 599213 - RNA, 19 nt, Artificial Sequence
  Description of Artificial Sequence: Synthetic oligonucleotide
  Antisense strand to SEQ ID NO: 599212
uucuccgaggaagugaccu

SEQ ID NO: 599214 - RNA, 19 nt, Artificial Sequence
  Description of Artificial Sequence: Synthetic oligonucleotide
  Sense strand starting at position 1514 of SEQ ID NO: 584918
ggucacuuccucggagaaa

SEQ ID NO: 599215 - RNA, 19 nt, Artificial Sequence
  Description of Artificial Sequence: Synthetic oligonucleotide
  Antisense strand to SEQ ID NO: 599214
uuucuccgaggaagugacc

SEQ ID NO: 599216 - RNA, 19 nt, Artificial Sequence
  Description of Artificial Sequence: Synthetic oligonucleotide
  Sense strand starting at position 1532 of SEQ ID NO: 584918
aggugacuccuagaaaugc

SEQ ID NO: 599217 - RNA, 19 nt, Artificial Sequence
  Description of Artificial Sequence: Synthetic oligonucleotide
  Antisense strand to SEQ ID NO: 599216
gcauuucuaggagucaccu

SEQ ID NO: 599218 - RNA, 19 nt, Artificial Sequence
  Description of Artificial Sequence: Synthetic oligonucleotide
  Sense strand starting at position 1565 of SEQ ID NO: 584918
ugaucuccuccugggaaga

SEQ ID NO: 599219 - RNA, 19 nt, Artificial Sequence
  Description of Artificial Sequence: Synthetic oligonucleotide
  Antisense strand to SEQ ID NO: 599218
ucuucccaggaggagauca

SEQ ID NO: 599220 - RNA, 19 nt, Artificial Sequence
  Description of Artificial Sequence: Synthetic oligonucleotide
  Sense strand starting at position 1578 of SEQ ID NO: 584918
ggaagaacgucugucuuau

SEQ ID NO: 599221 - RNA, 19 nt, Artificial Sequence
  Description of Artificial Sequence: Synthetic oligonucleotide
  Antisense strand to SEQ ID NO: 599220
auaagacagacguucuucc

SEQ ID NO: 599222 - RNA, 19 nt, Artificial Sequence
  Description of Artificial Sequence: Synthetic oligonucleotide
  Sense strand starting at position 1715 of SEQ ID NO: 584918
gcagaugcgcguuccugua

SEQ ID NO: 599223 - RNA, 19 nt, Artificial Sequence
  Description of Artificial Sequence: Synthetic oligonucleotide
  Antisense strand to SEQ ID NO: 599222
uacaggaacgcgcaucugc

SEQ ID NO: 599224 - RNA, 19 nt, Artificial Sequence
  Description of Artificial Sequence: Synthetic oligonucleotide
  Sense strand starting at position 1802 of SEQ ID NO: 584918
cugcgcuuccuuccgaaga

SEQ ID NO: 599225 - RNA, 19 nt, Artificial Sequence
  Description of Artificial Sequence: Synthetic oligonucleotide
  Antisense strand to SEQ ID NO: 599224
ucuucggaaggaagcgcag

SEQ ID NO: 599226 - RNA, 19 nt, Artificial Sequence
  Description of Artificial Sequence: Synthetic oligonucleotide
  Sense strand starting at position 1836 of SEQ ID NO: 584918
gagugaagcgaugaguuau

SEQ ID NO: 599227 - RNA, 19 nt, Artificial Sequence
  Description of Artificial Sequence: Synthetic oligonucleotide
  Antisense strand to SEQ ID NO: 599226
auaacucaucgcuucacuc

SEQ ID NO: 599228 - RNA, 19 nt, Artificial Sequence
  Description of Artificial Sequence: Synthetic oligonucleotide
  Sense strand starting at position 1847 of SEQ ID NO: 584918
ugaguuaugccucacugga

SEQ ID NO: 599229 - RNA, 19 nt, Artificial Sequence
  Description of Artificial Sequence: Synthetic oligonucleotide
  Antisense strand to SEQ ID NO: 599228
uccagugaggcauaacuca

SEQ ID NO: 599230 - RNA, 19 nt, Artificial Sequence
  Description of Artificial Sequence: Synthetic oligonucleotide
  Sense strand starting at position 1849 of SEQ ID NO: 584918
aguuaugccucacuggaaa

SEQ ID NO: 599231 - RNA, 19 nt, Artificial Sequence
  Description of Artificial Sequence: Synthetic oligonucleotide
  Antisense strand to SEQ ID NO: 599230
uuuccagugaggcauaacu

SEQ ID NO: 599232 - RNA, 19 nt, Artificial Sequence
  Description of Artificial Sequence: Synthetic oligonucleotide
  Sense strand starting at position 2376 of SEQ ID NO: 584918
cggcguaaaccuuaccaga

SEQ ID NO: 599233 - RNA, 19 nt, Artificial Sequence
  Description of Artificial Sequence: Synthetic oligonucleotide
  Antisense strand to SEQ ID NO: 599232
ucugguaagguuuacgccg

SEQ ID NO: 599234 - RNA, 19 nt, Artificial Sequence
  Description of Artificial Sequence: Synthetic oligonucleotide
  Sense strand starting at position 2414 of SEQ ID NO: 584918
agugucauucgcgucuuga

SEQ ID NO: 599235 - RNA, 19 nt, Artificial Sequence
  Description of Artificial Sequence: Synthetic oligonucleotide
  Antisense strand to SEQ ID NO: 599234
ucaagacgcgaaugacacu

SEQ ID NO: 599236 - RNA, 19 nt, Artificial Sequence
  Description of Artificial Sequence: Synthetic oligonucleotide
  Sense strand starting at position 2415 of SEQ ID NO: 584918
gugucauucgcgucuugaa

SEQ ID NO: 599237 - RNA, 19 nt, Artificial Sequence
  Description of Artificial Sequence: Synthetic oligonucleotide
  Antisense strand to SEQ ID NO: 599236
uucaagacgcgaaugacac

SEQ ID NO: 599238 - RNA, 19 nt, Artificial Sequence
  Description of Artificial Sequence: Synthetic oligonucleotide
  Sense strand starting at position 2416 of SEQ ID NO: 584918
ugucauucgcgucuugaag

SEQ ID NO: 599239 - RNA, 19 nt, Artificial Sequence
  Description of Artificial Sequence: Synthetic oligonucleotide
  Antisense strand to SEQ ID NO: 599238
cuucaagacgcgaaugaca

SEQ ID NO: 599240 - RNA, 19 nt, Artificial Sequence
  Description of Artificial Sequence: Synthetic oligonucleotide
  Sense strand starting at position 2451 of SEQ ID NO: 584918
uuugcaagcgcgucuaaug

SEQ ID NO: 599241 - RNA, 19 nt, Artificial Sequence
  Description of Artificial Sequence: Synthetic oligonucleotide
  Antisense strand to SEQ ID NO: 599240
cauuagacgcgcuugcaaa

SEQ ID NO: 599242 - RNA, 19 nt, Artificial Sequence
  Description of Artificial Sequence: Synthetic oligonucleotide
  Sense strand starting at position 2608 of SEQ ID NO: 584918
cuuagaaucgcuggaggau

SEQ ID NO: 599243 - RNA, 19 nt, Artificial Sequence
  Description of Artificial Sequence: Synthetic oligonucleotide
  Antisense strand to SEQ ID NO: 599242
auccuccagcgauucuaag

SEQ ID NO: 599244 - RNA, 19 nt, Artificial Sequence
  Description of Artificial Sequence: Synthetic oligonucleotide
  Sense strand starting at position 2723 of SEQ ID NO: 584918
gucucaagguuauuaaauu

SEQ ID NO: 599245 - RNA, 19 nt, Artificial Sequence
  Description of Artificial Sequence: Synthetic oligonucleotide
  Antisense strand to SEQ ID NO: 599244
aauuuaauaaccuugagac

SEQ ID NO: 599246 - RNA, 19 nt, Artificial Sequence
  Description of Artificial Sequence: Synthetic oligonucleotide
  Sense strand starting at position 2771 of SEQ ID NO: 584918
uggugaaagugaccaaaua

SEQ ID NO: 599247 - RNA, 19 nt, Artificial Sequence
  Description of Artificial Sequence: Synthetic oligonucleotide
  Antisense strand to SEQ ID NO: 599246
uauuuggucacuuucacca

SEQ ID NO: 599248 - RNA, 19 nt, Artificial Sequence
  Description of Artificial Sequence: Synthetic oligonucleotide
  Sense strand starting at position 2787 of SEQ ID NO: 584918
auagguacgaagugugauu

SEQ ID NO: 599249 - RNA, 19 nt, Artificial Sequence
  Description of Artificial Sequence: Synthetic oligonucleotide
  Antisense strand to SEQ ID NO: 599248
aaucacacuucguaccuau

SEQ ID NO: 599250 - RNA, 19 nt, Artificial Sequence
  Description of Artificial Sequence: Synthetic oligonucleotide
  Sense strand starting at position 2873 of SEQ ID NO: 584918
augggaacuuagcuugaaa

SEQ ID NO: 599251 - RNA, 19 nt, Artificial Sequence
  Description of Artificial Sequence: Synthetic oligonucleotide
  Antisense strand to SEQ ID NO: 599250
uuucaagcuaaguucccau

SEQ ID NO: 599252 - RNA, 19 nt, Artificial Sequence
  Description of Artificial Sequence: Synthetic oligonucleotide
  Sense strand starting at position 2935 of SEQ ID NO: 584918
uaucaucucugguuggaaa

SEQ ID NO: 599253 - RNA, 19 nt, Artificial Sequence
  Description of Artificial Sequence: Synthetic oligonucleotide
  Antisense strand to SEQ ID NO: 599252
uuuccaaccagagaugaua

SEQ ID NO: 599254 - RNA, 19 nt, Artificial Sequence
  Description of Artificial Sequence: Synthetic oligonucleotide
  Sense strand starting at position 3048 of SEQ ID NO: 584918
ggacaucaauaagaauuaa

SEQ ID NO: 599255 - RNA, 19 nt, Artificial Sequence
  Description of Artificial Sequence: Synthetic oligonucleotide
  Antisense strand to SEQ ID NO: 599254
uuaauucuuauugaugucc

SEQ ID NO: 599256 - RNA, 19 nt, Artificial Sequence
  Description of Artificial Sequence: Synthetic oligonucleotide
  Sense strand starting at position 3482 of SEQ ID NO: 584918
auaacauugugucuggacu

SEQ ID NO: 599257 - RNA, 19 nt, Artificial Sequence
  Description of Artificial Sequence: Synthetic oligonucleotide
  Antisense strand to SEQ ID NO: 599256
aguccagacacaauguuau

SEQ ID NO: 599258 - RNA, 19 nt, Artificial Sequence
  Description of Artificial Sequence: Synthetic oligonucleotide
  Sense strand starting at position 3483 of SEQ ID NO: 584918
uaacauugugucuggacuu

SEQ ID NO: 599259 - RNA, 19 nt, Artificial Sequence
  Description of Artificial Sequence: Synthetic oligonucleotide
  Antisense strand to SEQ ID NO: 599258
aaguccagacacaauguua

SEQ ID NO: 599260 - RNA, 19 nt, Artificial Sequence
  Description of Artificial Sequence: Synthetic oligonucleotide
  Sense strand starting at position 3517 of SEQ ID NO: 584918
guucguggucucagugacu

SEQ ID NO: 599261 - RNA, 19 nt, Artificial Sequence
  Description of Artificial Sequence: Synthetic oligonucleotide
  Antisense strand to SEQ ID NO: 599260
agucacugagaccacgaac

SEQ ID NO: 599262 - RNA, 19 nt, Artificial Sequence
  Description of Artificial Sequence: Synthetic oligonucleotide
  Sense strand starting at position 553 of SEQ ID NO: 584919
aggcucauuucccugcaga

SEQ ID NO: 599263 - RNA, 19 nt, Artificial Sequence
  Description of Artificial Sequence: Synthetic oligonucleotide
  Antisense strand to SEQ ID NO: 599262
ucugcagggaaaugagccu

SEQ ID NO: 599264 - RNA, 19 nt, Artificial Sequence
  Description of Artificial Sequence: Synthetic oligonucleotide
  Sense strand starting at position 554 of SEQ ID NO: 584919
ggcucauuucccugcagac

SEQ ID NO: 599265 - RNA, 19 nt, Artificial Sequence
  Description of Artificial Sequence: Synthetic oligonucleotide
  Antisense strand to SEQ ID NO: 599264
gucugcagggaaaugagcc

SEQ ID NO: 599266 - RNA, 19 nt, Artificial Sequence
  Description of Artificial Sequence: Synthetic oligonucleotide
  Sense strand starting at position 572 of SEQ ID NO: 584919
cagauaauguuccuuacga

SEQ ID NO: 599267 - RNA, 19 nt, Artificial Sequence
  Description of Artificial Sequence: Synthetic oligonucleotide
  Antisense strand to SEQ ID NO: 599266
ucguaaggaacauuaucug

SEQ ID NO: 599268 - RNA, 19 nt, Artificial Sequence
  Description of Artificial Sequence: Synthetic oligonucleotide
  Sense strand starting at position 574 of SEQ ID NO: 584919
gauaauguuccuuacgaau

SEQ ID NO: 599269 - RNA, 19 nt, Artificial Sequence
  Description of Artificial Sequence: Synthetic oligonucleotide
  Antisense strand to SEQ ID NO: 599268
auucguaaggaacauuauc

SEQ ID NO: 599270 - RNA, 19 nt, Artificial Sequence
  Description of Artificial Sequence: Synthetic oligonucleotide
  Sense strand starting at position 716 of SEQ ID NO: 584919
cuuggugauuucguuuacu

SEQ ID NO: 599271 - RNA, 19 nt, Artificial Sequence
  Description of Artificial Sequence: Synthetic oligonucleotide
  Antisense strand to SEQ ID NO: 599270
aguaaacgaaaucaccaag

SEQ ID NO: 599272 - RNA, 19 nt, Artificial Sequence
  Description of Artificial Sequence: Synthetic oligonucleotide
  Sense strand starting at position 719 of SEQ ID NO: 584919
ggugauuucguuuacuguu

SEQ ID NO: 599273 - RNA, 19 nt, Artificial Sequence
  Description of Artificial Sequence: Synthetic oligonucleotide
  Antisense strand to SEQ ID NO: 599272
aacaguaaacgaaaucacc

SEQ ID NO: 599274 - RNA, 19 nt, Artificial Sequence
  Description of Artificial Sequence: Synthetic oligonucleotide
  Sense strand starting at position 775 of SEQ ID NO: 584919
guguuuacagaucauaaau

SEQ ID NO: 599275 - RNA, 19 nt, Artificial Sequence
  Description of Artificial Sequence: Synthetic oligonucleotide
  Antisense strand to SEQ ID NO: 599274
auuuaugaucuguaaacac

SEQ ID NO: 599276 - RNA, 19 nt, Artificial Sequence
  Description of Artificial Sequence: Synthetic oligonucleotide
  Sense strand starting at position 784 of SEQ ID NO: 584919
gaucauaaaugucuugaga

SEQ ID NO: 599277 - RNA, 19 nt, Artificial Sequence
  Description of Artificial Sequence: Synthetic oligonucleotide
  Antisense strand to SEQ ID NO: 599276
ucucaagacauuuaugauc

SEQ ID NO: 599278 - RNA, 19 nt, Artificial Sequence
  Description of Artificial Sequence: Synthetic oligonucleotide
  Sense strand starting at position 1050 of SEQ ID NO: 584919
cagucaggaucagugaaag

SEQ ID NO: 599279 - RNA, 19 nt, Artificial Sequence
  Description of Artificial Sequence: Synthetic oligonucleotide
  Antisense strand to SEQ ID NO: 599278
cuuucacugauccugacug

SEQ ID NO: 599280 - RNA, 19 nt, Artificial Sequence
  Description of Artificial Sequence: Synthetic oligonucleotide
  Sense strand starting at position 1060 of SEQ ID NO: 584919
cagugaaaggcccaacuuu

SEQ ID NO: 599281 - RNA, 19 nt, Artificial Sequence
  Description of Artificial Sequence: Synthetic oligonucleotide
  Antisense strand to SEQ ID NO: 599280
aaaguugggccuuucacug

SEQ ID NO: 599282 - RNA, 19 nt, Artificial Sequence
  Description of Artificial Sequence: Synthetic oligonucleotide
  Sense strand starting at position 1115 of SEQ ID NO: 584919
cuggauuguggugagaucu

SEQ ID NO: 599283 - RNA, 19 nt, Artificial Sequence
  Description of Artificial Sequence: Synthetic oligonucleotide
  Antisense strand to SEQ ID NO: 599282
agaucucaccacaauccag

SEQ ID NO: 599284 - RNA, 19 nt, Artificial Sequence
  Description of Artificial Sequence: Synthetic oligonucleotide
  Sense strand starting at position 1568 of SEQ ID NO: 584919
gcucacuuccaggauccau

SEQ ID NO: 599285 - RNA, 19 nt, Artificial Sequence
  Description of Artificial Sequence: Synthetic oligonucleotide
  Antisense strand to SEQ ID NO: 599284
auggauccuggaagugagc

SEQ ID NO: 599286 - RNA, 19 nt, Artificial Sequence
  Description of Artificial Sequence: Synthetic oligonucleotide
  Sense strand starting at position 1807 of SEQ ID NO: 584919
ggugucuucccagagagug

SEQ ID NO: 599287 - RNA, 19 nt, Artificial Sequence
  Description of Artificial Sequence: Synthetic oligonucleotide
  Antisense strand to SEQ ID NO: 599286
cacucucugggaagacacc

SEQ ID NO: 599288 - RNA, 19 nt, Artificial Sequence
  Description of Artificial Sequence: Synthetic oligonucleotide
  Sense strand starting at position 2056 of SEQ ID NO: 584919
gcgggacuuccgcucaagu

SEQ ID NO: 599289 - RNA, 19 nt, Artificial Sequence
  Description of Artificial Sequence: Synthetic oligonucleotide
  Antisense strand to SEQ ID NO: 599288
acuugagcggaagucccgc

SEQ ID NO: 599290 - RNA, 19 nt, Artificial Sequence
  Description of Artificial Sequence: Synthetic oligonucleotide
  Sense strand starting at position 2442 of SEQ ID NO: 584919
gcgguuuagagggagacua

SEQ ID NO: 599291 - RNA, 19 nt, Artificial Sequence
  Description of Artificial Sequence: Synthetic oligonucleotide
  Antisense strand to SEQ ID NO: 599290
uagucucccucuaaaccgc

SEQ ID NO: 599292 - RNA, 19 nt, Artificial Sequence
  Description of Artificial Sequence: Synthetic oligonucleotide
  Sense strand starting at position 2453 of SEQ ID NO: 584919
ggagacuagugguucauca

SEQ ID NO: 599293 - RNA, 19 nt, Artificial Sequence
  Description of Artificial Sequence: Synthetic oligonucleotide
  Antisense strand to SEQ ID NO: 599292
ugaugaaccacuagucucc

SEQ ID NO: 599294 - RNA, 19 nt, Artificial Sequence
  Description of Artificial Sequence: Synthetic oligonucleotide
  Sense strand starting at position 2578 of SEQ ID NO: 584919
gcgguucucaggucgguua

SEQ ID NO: 599295 - RNA, 19 nt, Artificial Sequence
  Description of Artificial Sequence: Synthetic oligonucleotide
  Antisense strand to SEQ ID NO: 599294
uaaccgaccugagaaccgc

SEQ ID NO: 599296 - RNA, 19 nt, Artificial Sequence
  Description of Artificial Sequence: Synthetic oligonucleotide
  Sense strand starting at position 2811 of SEQ ID NO: 584919
ugauguagacuaugcaaau

SEQ ID NO: 599297 - RNA, 19 nt, Artificial Sequence
  Description of Artificial Sequence: Synthetic oligonucleotide
  Antisense strand to SEQ ID NO: 599296
auuugcauagucuacauca

SEQ ID NO: 599298 - RNA, 19 nt, Artificial Sequence
  Description of Artificial Sequence: Synthetic oligonucleotide
  Sense strand starting at position 2812 of SEQ ID NO: 584919
gauguagacuaugcaaauc

SEQ ID NO: 599299 - RNA, 19 nt, Artificial Sequence
  Description of Artificial Sequence: Synthetic oligonucleotide
  Antisense strand to SEQ ID NO: 599298
gauuugcauagucuacauc

SEQ ID NO: 599300 - RNA, 19 nt, Artificial Sequence
  Description of Artificial Sequence: Synthetic oligonucleotide
  Sense strand starting at position 2894 of SEQ ID NO: 584919
ggagcuaauccuggcaaga

SEQ ID NO: 599301 - RNA, 19 nt, Artificial Sequence
  Description of Artificial Sequence: Synthetic oligonucleotide
  Antisense strand to SEQ ID NO: 599300
ucuugccaggauuagcucc

SEQ ID NO: 599302 - RNA, 19 nt, Artificial Sequence
  Description of Artificial Sequence: Synthetic oligonucleotide
  Sense strand starting at position 2991 of SEQ ID NO: 584919
gguaguugagaagauuggu

SEQ ID NO: 599303 - RNA, 19 nt, Artificial Sequence
  Description of Artificial Sequence: Synthetic oligonucleotide
  Antisense strand to SEQ ID NO: 599302
accaaucuucucaacuacc

SEQ ID NO: 599304 - RNA, 19 nt, Artificial Sequence
  Description of Artificial Sequence: Synthetic oligonucleotide
  Sense strand starting at position 2999 of SEQ ID NO: 584919
agaagauugguagggugau

SEQ ID NO: 599305 - RNA, 19 nt, Artificial Sequence
  Description of Artificial Sequence: Synthetic oligonucleotide
  Antisense strand to SEQ ID NO: 599304
aucacccuaccaaucuucu

SEQ ID NO: 599306 - RNA, 19 nt, Artificial Sequence
  Description of Artificial Sequence: Synthetic oligonucleotide
  Sense strand starting at position 3053 of SEQ ID NO: 584919
uuuacaagugauggugaaa

SEQ ID NO: 599307 - RNA, 19 nt, Artificial Sequence
  Description of Artificial Sequence: Synthetic oligonucleotide
  Antisense strand to SEQ ID NO: 599306
uuucaccaucacuuguaaa

SEQ ID NO: 599308 - RNA, 19 nt, Artificial Sequence
  Description of Artificial Sequence: Synthetic oligonucleotide
  Sense strand starting at position 3078 of SEQ ID NO: 584919
gauauuaaugugggucuua

SEQ ID NO: 599309 - RNA, 19 nt, Artificial Sequence
  Description of Artificial Sequence: Synthetic oligonucleotide
  Antisense strand to SEQ ID NO: 599308
uaagacccacauuaauauc

SEQ ID NO: 599310 - RNA, 19 nt, Artificial Sequence
  Description of Artificial Sequence: Synthetic oligonucleotide
  Sense strand starting at position 3118 of SEQ ID NO: 584919
uuagcagaagaaugacauu

SEQ ID NO: 599311 - RNA, 19 nt, Artificial Sequence
  Description of Artificial Sequence: Synthetic oligonucleotide
  Antisense strand to SEQ ID NO: 599310
aaugucauucuucugcuaa

SEQ ID NO: 599312 - RNA, 19 nt, Artificial Sequence
  Description of Artificial Sequence: Synthetic oligonucleotide
  Sense strand starting at position 3133 of SEQ ID NO: 584919
cauuauuugcuuggugauu

SEQ ID NO: 599313 - RNA, 19 nt, Artificial Sequence
  Description of Artificial Sequence: Synthetic oligonucleotide
  Antisense strand to SEQ ID NO: 599312
aaucaccaagcaaauaaug

SEQ ID NO: 599314 - RNA, 19 nt, Artificial Sequence
  Description of Artificial Sequence: Synthetic oligonucleotide
  Sense strand starting at position 3161 of SEQ ID NO: 584919
cauucuuucuagguagaug

SEQ ID NO: 599315 - RNA, 19 nt, Artificial Sequence
  Description of Artificial Sequence: Synthetic oligonucleotide
  Antisense strand to SEQ ID NO: 599314
caucuaccuagaaagaaug

SEQ ID NO: 599316 - RNA, 19 nt, Artificial Sequence
  Description of Artificial Sequence: Synthetic oligonucleotide
  Sense strand starting at position 3172 of SEQ ID NO: 584919
gguagaugauguucaugga

SEQ ID NO: 599317 - RNA, 19 nt, Artificial Sequence
  Description of Artificial Sequence: Synthetic oligonucleotide
  Antisense strand to SEQ ID NO: 599316
uccaugaacaucaucuacc

SEQ ID NO: 599318 - RNA, 19 nt, Artificial Sequence
  Description of Artificial Sequence: Synthetic oligonucleotide
  Sense strand starting at position 3275 of SEQ ID NO: 584919
aagauaugucuuggaggua

SEQ ID NO: 599319 - RNA, 19 nt, Artificial Sequence
  Description of Artificial Sequence: Synthetic oligonucleotide
  Antisense strand to SEQ ID NO: 599318
uaccuccaagacauaucuu

SEQ ID NO: 599320 - RNA, 19 nt, Artificial Sequence
  Description of Artificial Sequence: Synthetic oligonucleotide
  Sense strand starting at position 3278 of SEQ ID NO: 584919
auaugucuuggagguagaa

SEQ ID NO: 599321 - RNA, 19 nt, Artificial Sequence
  Description of Artificial Sequence: Synthetic oligonucleotide
  Antisense strand to SEQ ID NO: 599320
uucuaccuccaagacauau

SEQ ID NO: 599322 - RNA, 19 nt, Artificial Sequence
  Description of Artificial Sequence: Synthetic oligonucleotide
  Sense strand starting at position 3280 of SEQ ID NO: 584919
augucuuggagguagaagu

SEQ ID NO: 599323 - RNA, 19 nt, Artificial Sequence
  Description of Artificial Sequence: Synthetic oligonucleotide
  Antisense strand to SEQ ID NO: 599322
acuucuaccuccaagacau

SEQ ID NO: 599324 - RNA, 19 nt, Artificial Sequence
  Description of Artificial Sequence: Synthetic oligonucleotide
  Sense strand starting at position 3423 of SEQ ID NO: 584919
uuauguuuacaguaaggau

SEQ ID NO: 599325 - RNA, 19 nt, Artificial Sequence
  Description of Artificial Sequence: Synthetic oligonucleotide
  Antisense strand to SEQ ID NO: 599324
auccuuacuguaaacauaa

SEQ ID NO: 599326 - RNA, 19 nt, Artificial Sequence
  Description of Artificial Sequence: Synthetic oligonucleotide
  Sense strand starting at position 3511 of SEQ ID NO: 584919
gugagucagaucuagucuu

SEQ ID NO: 599327 - RNA, 19 nt, Artificial Sequence
  Description of Artificial Sequence: Synthetic oligonucleotide
  Antisense strand to SEQ ID NO: 599326
aagacuagaucugacucac

SEQ ID NO: 599328 - RNA, 19 nt, Artificial Sequence
  Description of Artificial Sequence: Synthetic oligonucleotide
  Sense strand starting at position 3536 of SEQ ID NO: 584919
uagggaggcauugguaaau

SEQ ID NO: 599329 - RNA, 19 nt, Artificial Sequence
  Description of Artificial Sequence: Synthetic oligonucleotide
  Antisense strand to SEQ ID NO: 599328
auuuaccaaugccucccua

SEQ ID NO: 599330 - RNA, 19 nt, Artificial Sequence
  Description of Artificial Sequence: Synthetic oligonucleotide
  Sense strand starting at position 3627 of SEQ ID NO: 584919
auucgaauuggguaaguag

SEQ ID NO: 599331 - RNA, 19 nt, Artificial Sequence
  Description of Artificial Sequence: Synthetic oligonucleotide
  Antisense strand to SEQ ID NO: 599330
cuacuuacccaauucgaau

SEQ ID NO: 599332 - RNA, 19 nt, Artificial Sequence
  Description of Artificial Sequence: Synthetic oligonucleotide
  Sense strand starting at position 3673 of SEQ ID NO: 584919
ggaagacuuccuugagcaa

SEQ ID NO: 599333 - RNA, 19 nt, Artificial Sequence
  Description of Artificial Sequence: Synthetic oligonucleotide
  Antisense strand to SEQ ID NO: 599332
uugcucaaggaagucuucc

SEQ ID NO: 599334 - RNA, 19 nt, Artificial Sequence
  Description of Artificial Sequence: Synthetic oligonucleotide
  Sense strand starting at position 3690 of SEQ ID NO: 584919
aagugauagugagcugaua

SEQ ID NO: 599335 - RNA, 19 nt, Artificial Sequence
  Description of Artificial Sequence: Synthetic oligonucleotide
  Antisense strand to SEQ ID NO: 599334
uaucagcucacuaucacuu

SEQ ID NO: 599336 - RNA, 19 nt, Artificial Sequence
  Description of Artificial Sequence: Synthetic oligonucleotide
  Sense strand starting at position 3699 of SEQ ID NO: 584919
ugagcugauacuugaugga

SEQ ID NO: 599337 - RNA, 19 nt, Artificial Sequence
  Description of Artificial Sequence: Synthetic oligonucleotide
  Antisense strand to SEQ ID NO: 599336
uccaucaaguaucagcuca

SEQ ID NO: 599338 - RNA, 19 nt, Artificial Sequence
  Description of Artificial Sequence: Synthetic oligonucleotide
  Sense strand starting at position 3761 of SEQ ID NO: 584919
uaugguuacggagaagugu

SEQ ID NO: 599339 - RNA, 19 nt, Artificial Sequence
  Description of Artificial Sequence: Synthetic oligonucleotide
  Antisense strand to SEQ ID NO: 599338
acacuucuccguaaccaua

SEQ ID NO: 599340 - RNA, 19 nt, Artificial Sequence
  Description of Artificial Sequence: Synthetic oligonucleotide
  Sense strand starting at position 3826 of SEQ ID NO: 584919
auagcuaguggguaguuaa

SEQ ID NO: 599341 - RNA, 19 nt, Artificial Sequence
  Description of Artificial Sequence: Synthetic oligonucleotide
  Antisense strand to SEQ ID NO: 599340
uuaacuacccacuagcuau

SEQ ID NO: 599342 - RNA, 19 nt, Artificial Sequence
  Description of Artificial Sequence: Synthetic oligonucleotide
  Sense strand starting at position 169 of SEQ ID NO: 584920
auaccauuccuuuagguau

SEQ ID NO: 599343 - RNA, 19 nt, Artificial Sequence
  Description of Artificial Sequence: Synthetic oligonucleotide
  Antisense strand to SEQ ID NO: 599342
auaccuaaaggaaugguau

SEQ ID NO: 599344 - RNA, 19 nt, Artificial Sequence
  Description of Artificial Sequence: Synthetic oligonucleotide
  Sense strand starting at position 218 of SEQ ID NO: 584920
ggaacugaguaguugcuaa

SEQ ID NO: 599345 - RNA, 19 nt, Artificial Sequence
  Description of Artificial Sequence: Synthetic oligonucleotide
  Antisense strand to SEQ ID NO: 599344
uuagcaacuacucaguucc

SEQ ID NO: 599346 - RNA, 19 nt, Artificial Sequence
  Description of Artificial Sequence: Synthetic oligonucleotide
  Sense strand starting at position 453 of SEQ ID NO: 584920
augacacuuugauuguaau

SEQ ID NO: 599347 - RNA, 19 nt, Artificial Sequence
  Description of Artificial Sequence: Synthetic oligonucleotide
  Antisense strand to SEQ ID NO: 599346
auuacaaucaaagugucau

SEQ ID NO: 599348 - RNA, 19 nt, Artificial Sequence
  Description of Artificial Sequence: Synthetic oligonucleotide
  Sense strand starting at position 454 of SEQ ID NO: 584920
ugacacuuugauuguaaug

SEQ ID NO: 599349 - RNA, 19 nt, Artificial Sequence
  Description of Artificial Sequence: Synthetic oligonucleotide
  Antisense strand to SEQ ID NO: 599348
cauuacaaucaaaguguca

SEQ ID NO: 599350 - RNA, 19 nt, Artificial Sequence
  Description of Artificial Sequence: Synthetic oligonucleotide
  Sense strand starting at position 764 of SEQ ID NO: 584920
gggcuuagauaguuuacca

SEQ ID NO: 599351 - RNA, 19 nt, Artificial Sequence
  Description of Artificial Sequence: Synthetic oligonucleotide
  Antisense strand to SEQ ID NO: 599350
ugguaaacuaucuaagccc

SEQ ID NO: 599352 - RNA, 19 nt, Artificial Sequence
  Description of Artificial Sequence: Synthetic oligonucleotide
  Sense strand starting at position 845 of SEQ ID NO: 584920
aguaaacuacagugcucaa

SEQ ID NO: 599353 - RNA, 19 nt, Artificial Sequence
  Description of Artificial Sequence: Synthetic oligonucleotide
  Antisense strand to SEQ ID NO: 599352
uugagcacuguaguuuacu

SEQ ID NO: 599354 - RNA, 19 nt, Artificial Sequence
  Description of Artificial Sequence: Synthetic oligonucleotide
  Sense strand starting at position 1197 of SEQ ID NO: 584920
gucucaguugccucugcau

SEQ ID NO: 599355 - RNA, 19 nt, Artificial Sequence
  Description of Artificial Sequence: Synthetic oligonucleotide
  Antisense strand to SEQ ID NO: 599354
augcagaggcaacugagac

SEQ ID NO: 599356 - RNA, 19 nt, Artificial Sequence
  Description of Artificial Sequence: Synthetic oligonucleotide
  Sense strand starting at position 1227 of SEQ ID NO: 584920
gacucaucgccucaaguca

SEQ ID NO: 599357 - RNA, 19 nt, Artificial Sequence
  Description of Artificial Sequence: Synthetic oligonucleotide
  Antisense strand to SEQ ID NO: 599356
ugacuugaggcgaugaguc

SEQ ID NO: 599358 - RNA, 19 nt, Artificial Sequence
  Description of Artificial Sequence: Synthetic oligonucleotide
  Sense strand starting at position 2151 of SEQ ID NO: 584920
ugcaaagaagucuggaaag

SEQ ID NO: 599359 - RNA, 19 nt, Artificial Sequence
  Description of Artificial Sequence: Synthetic oligonucleotide
  Antisense strand to SEQ ID NO: 599358
cuuuccagacuucuuugca

SEQ ID NO: 599360 - RNA, 19 nt, Artificial Sequence
  Description of Artificial Sequence: Synthetic oligonucleotide
  Sense strand starting at position 2215 of SEQ ID NO: 584920
cgaagaucugugcagagaa

SEQ ID NO: 599361 - RNA, 19 nt, Artificial Sequence
  Description of Artificial Sequence: Synthetic oligonucleotide
  Antisense strand to SEQ ID NO: 599360
uucucugcacagaucuucg

SEQ ID NO: 599362 - RNA, 19 nt, Artificial Sequence
  Description of Artificial Sequence: Synthetic oligonucleotide
  Sense strand starting at position 2331 of SEQ ID NO: 584920
augcuuuagcgagacauca

SEQ ID NO: 599363 - RNA, 19 nt, Artificial Sequence
  Description of Artificial Sequence: Synthetic oligonucleotide
  Antisense strand to SEQ ID NO: 599362
ugaugucucgcuaaagcau

SEQ ID NO: 599364 - RNA, 19 nt, Artificial Sequence
  Description of Artificial Sequence: Synthetic oligonucleotide
  Sense strand starting at position 2333 of SEQ ID NO: 584920
gcuuuagcgagacaucaag

SEQ ID NO: 599365 - RNA, 19 nt, Artificial Sequence
  Description of Artificial Sequence: Synthetic oligonucleotide
  Antisense strand to SEQ ID NO: 599364
cuugaugucucgcuaaagc

SEQ ID NO: 599366 - RNA, 19 nt, Artificial Sequence
  Description of Artificial Sequence: Synthetic oligonucleotide
  Sense strand starting at position 2454 of SEQ ID NO: 584920
ccacuuggcuucuuaagau

SEQ ID NO: 599367 - RNA, 19 nt, Artificial Sequence
  Description of Artificial Sequence: Synthetic oligonucleotide
  Antisense strand to SEQ ID NO: 599366
aucuuaagaagccaagugg

SEQ ID NO: 599368 - RNA, 19 nt, Artificial Sequence
  Description of Artificial Sequence: Synthetic oligonucleotide
  Sense strand starting at position 2464 of SEQ ID NO: 584920
ucuuaagaugugcagcaua

SEQ ID NO: 599369 - RNA, 19 nt, Artificial Sequence
  Description of Artificial Sequence: Synthetic oligonucleotide
  Antisense strand to SEQ ID NO: 599368
uaugcugcacaucuuaaga

SEQ ID NO: 599370 - RNA, 19 nt, Artificial Sequence
  Description of Artificial Sequence: Synthetic oligonucleotide
  Sense strand starting at position 2536 of SEQ ID NO: 584920
uucucuuaacgucauuaga

SEQ ID NO: 599371 - RNA, 19 nt, Artificial Sequence
  Description of Artificial Sequence: Synthetic oligonucleotide
  Antisense strand to SEQ ID NO: 599370
ucuaaugacguuaagagaa

SEQ ID NO: 599372 - RNA, 19 nt, Artificial Sequence
  Description of Artificial Sequence: Synthetic oligonucleotide
  Sense strand starting at position 2538 of SEQ ID NO: 584920
cucuuaacgucauuagaag

SEQ ID NO: 599373 - RNA, 19 nt, Artificial Sequence
  Description of Artificial Sequence: Synthetic oligonucleotide
  Antisense strand to SEQ ID NO: 599372
cuucuaaugacguuaagag

SEQ ID NO: 599374 - RNA, 19 nt, Artificial Sequence
  Description of Artificial Sequence: Synthetic oligonucleotide
  Sense strand starting at position 2609 of SEQ ID NO: 584920
acuugaagcucuuuauuga

SEQ ID NO: 599375 - RNA, 19 nt, Artificial Sequence
  Description of Artificial Sequence: Synthetic oligonucleotide
  Antisense strand to SEQ ID NO: 599374
ucaauaaagagcuucaagu

SEQ ID NO: 599376 - RNA, 19 nt, Artificial Sequence
  Description of Artificial Sequence: Synthetic oligonucleotide
  Sense strand starting at position 2610 of SEQ ID NO: 584920
cuugaagcucuuuauugaa

SEQ ID NO: 599377 - RNA, 19 nt, Artificial Sequence
  Description of Artificial Sequence: Synthetic oligonucleotide
  Antisense strand to SEQ ID NO: 599376
uucaauaaagagcuucaag

SEQ ID NO: 599378 - RNA, 19 nt, Artificial Sequence
  Description of Artificial Sequence: Synthetic oligonucleotide
  Sense strand starting at position 2775 of SEQ ID NO: 584920
guugguucuguacauuaua

SEQ ID NO: 599379 - RNA, 19 nt, Artificial Sequence
  Description of Artificial Sequence: Synthetic oligonucleotide
  Antisense strand to SEQ ID NO: 599378
uauaauguacagaaccaac

SEQ ID NO: 599380 - RNA, 19 nt, Artificial Sequence
  Description of Artificial Sequence: Synthetic oligonucleotide
  Sense strand starting at position 2808 of SEQ ID NO: 584920
cccauaggucagcacuuau

SEQ ID NO: 599381 - RNA, 19 nt, Artificial Sequence
  Description of Artificial Sequence: Synthetic oligonucleotide
  Antisense strand to SEQ ID NO: 599380
auaagugcugaccuauggg

SEQ ID NO: 599382 - RNA, 19 nt, Artificial Sequence
  Description of Artificial Sequence: Synthetic oligonucleotide
  Sense strand starting at position 3053 of SEQ ID NO: 584920
ggaugaaguauguaugcau

SEQ ID NO: 599383 - RNA, 19 nt, Artificial Sequence
  Description of Artificial Sequence: Synthetic oligonucleotide
  Antisense strand to SEQ ID NO: 599382
augcauacauacuucaucc

SEQ ID NO: 599384 - RNA, 19 nt, Artificial Sequence
  Description of Artificial Sequence: Synthetic oligonucleotide
  Sense strand starting at position 3119 of SEQ ID NO: 584920
gaaucaaugugugcaggau

SEQ ID NO: 599385 - RNA, 19 nt, Artificial Sequence
  Description of Artificial Sequence: Synthetic oligonucleotide
  Antisense strand to SEQ ID NO: 599384
auccugcacacauugauuc

SEQ ID NO: 599386 - RNA, 19 nt, Artificial Sequence
  Description of Artificial Sequence: Synthetic oligonucleotide
  Sense strand starting at position 3123 of SEQ ID NO: 584920
caaugugugcaggaucaca

SEQ ID NO: 599387 - RNA, 19 nt, Artificial Sequence
  Description of Artificial Sequence: Synthetic oligonucleotide
  Antisense strand to SEQ ID NO: 599386
ugugauccugcacacauug

SEQ ID NO: 599388 - RNA, 19 nt, Artificial Sequence
  Description of Artificial Sequence: Synthetic oligonucleotide
  Sense strand starting at position 3131 of SEQ ID NO: 584920
gcaggaucacagggaaguu

SEQ ID NO: 599389 - RNA, 19 nt, Artificial Sequence
  Description of Artificial Sequence: Synthetic oligonucleotide
  Antisense strand to SEQ ID NO: 599388
aacuucccugugauccugc

SEQ ID NO: 599390 - RNA, 19 nt, Artificial Sequence
  Description of Artificial Sequence: Synthetic oligonucleotide
  Sense strand starting at position 3254 of SEQ ID NO: 584920
ggagucuaagaguggauga

SEQ ID NO: 599391 - RNA, 19 nt, Artificial Sequence
  Description of Artificial Sequence: Synthetic oligonucleotide
  Antisense strand to SEQ ID NO: 599390
ucauccacucuuagacucc

SEQ ID NO: 599392 - RNA, 19 nt, Artificial Sequence
  Description of Artificial Sequence: Synthetic oligonucleotide
  Sense strand starting at position 3284 of SEQ ID NO: 584920
ugucuuuagguugauaaua

SEQ ID NO: 599393 - RNA, 19 nt, Artificial Sequence
  Description of Artificial Sequence: Synthetic oligonucleotide
  Antisense strand to SEQ ID NO: 599392
uauuaucaaccuaaagaca

SEQ ID NO: 599394 - RNA, 19 nt, Artificial Sequence
  Description of Artificial Sequence: Synthetic oligonucleotide
  Sense strand starting at position 3333 of SEQ ID NO: 584920
accacaguucuaggaaugu

SEQ ID NO: 599395 - RNA, 19 nt, Artificial Sequence
  Description of Artificial Sequence: Synthetic oligonucleotide
  Antisense strand to SEQ ID NO: 599394
acauuccuagaacuguggu

SEQ ID NO: 599396 - RNA, 19 nt, Artificial Sequence
  Description of Artificial Sequence: Synthetic oligonucleotide
  Sense strand starting at position 3377 of SEQ ID NO: 584920
ugaacaaauuuccauggau

SEQ ID NO: 599397 - RNA, 19 nt, Artificial Sequence
  Description of Artificial Sequence: Synthetic oligonucleotide
  Antisense strand to SEQ ID NO: 599396
auccauggaaauuuguuca

SEQ ID NO: 599398 - RNA, 19 nt, Artificial Sequence
  Description of Artificial Sequence: Synthetic oligonucleotide
  Sense strand starting at position 3406 of SEQ ID NO: 584920
aaggaagguugcuucuaga

SEQ ID NO: 599399 - RNA, 19 nt, Artificial Sequence
  Description of Artificial Sequence: Synthetic oligonucleotide
  Antisense strand to SEQ ID NO: 599398
ucuagaagcaaccuuccuu

SEQ ID NO: 599400 - RNA, 19 nt, Artificial Sequence
  Description of Artificial Sequence: Synthetic oligonucleotide
  Sense strand starting at position 3444 of SEQ ID NO: 584920
uucugauggacaugaaagu

SEQ ID NO: 599401 - RNA, 19 nt, Artificial Sequence
  Description of Artificial Sequence: Synthetic oligonucleotide
  Antisense strand to SEQ ID NO: 599400
acuuucauguccaucagaa

SEQ ID NO: 599402 - RNA, 19 nt, Artificial Sequence
  Description of Artificial Sequence: Synthetic oligonucleotide
  Sense strand starting at position 3465 of SEQ ID NO: 584920
agucuucaugcggaaauga

SEQ ID NO: 599403 - RNA, 19 nt, Artificial Sequence
  Description of Artificial Sequence: Synthetic oligonucleotide
  Antisense strand to SEQ ID NO: 599402
ucauuuccgcaugaagacu

SEQ ID NO: 599404 - RNA, 19 nt, Artificial Sequence
  Description of Artificial Sequence: Synthetic oligonucleotide
  Sense strand starting at position 3484 of SEQ ID NO: 584920
gacauuaagaguggauugu

SEQ ID NO: 599405 - RNA, 19 nt, Artificial Sequence
  Description of Artificial Sequence: Synthetic oligonucleotide
  Antisense strand to SEQ ID NO: 599404
acaauccacucuuaauguc

SEQ ID NO: 599406 - RNA, 19 nt, Artificial Sequence
  Description of Artificial Sequence: Synthetic oligonucleotide
  Sense strand starting at position 3569 of SEQ ID NO: 584920
gaaggacagucugugaguu

SEQ ID NO: 599407 - RNA, 19 nt, Artificial Sequence
  Description of Artificial Sequence: Synthetic oligonucleotide
  Antisense strand to SEQ ID NO: 599406
aacucacagacuguccuuc

SEQ ID NO: 599408 - RNA, 19 nt, Artificial Sequence
  Description of Artificial Sequence: Synthetic oligonucleotide
  Sense strand starting at position 3570 of SEQ ID NO: 584920
aaggacagucugugaguuu

SEQ ID NO: 599409 - RNA, 19 nt, Artificial Sequence
  Description of Artificial Sequence: Synthetic oligonucleotide
  Antisense strand to SEQ ID NO: 599408
aaacucacagacuguccuu

SEQ ID NO: 599410 - RNA, 19 nt, Artificial Sequence
  Description of Artificial Sequence: Synthetic oligonucleotide
  Sense strand starting at position 3582 of SEQ ID NO: 584920
ugaguuuagcuggauugga

SEQ ID NO: 599411 - RNA, 19 nt, Artificial Sequence
  Description of Artificial Sequence: Synthetic oligonucleotide
  Antisense strand to SEQ ID NO: 599410
uccaauccagcuaaacuca

SEQ ID NO: 599412 - RNA, 19 nt, Artificial Sequence
  Description of Artificial Sequence: Synthetic oligonucleotide
  Sense strand starting at position 3727 of SEQ ID NO: 584920
ucaugauagcaaugguuag

SEQ ID NO: 599413 - RNA, 19 nt, Artificial Sequence
  Description of Artificial Sequence: Synthetic oligonucleotide
  Antisense strand to SEQ ID NO: 599412
cuaaccauugcuaucauga

SEQ ID NO: 599414 - RNA, 19 nt, Artificial Sequence
  Description of Artificial Sequence: Synthetic oligonucleotide
  Sense strand starting at position 3799 of SEQ ID NO: 584920
agaaauaacuagcuagucu

SEQ ID NO: 599415 - RNA, 19 nt, Artificial Sequence
  Description of Artificial Sequence: Synthetic oligonucleotide
  Antisense strand to SEQ ID NO: 599414
agacuagcuaguuauuucu

SEQ ID NO: 599416 - RNA, 19 nt, Artificial Sequence
  Description of Artificial Sequence: Synthetic oligonucleotide
  Sense strand starting at position 3883 of SEQ ID NO: 584920
aucugucugcuauaugaug

SEQ ID NO: 599417 - RNA, 19 nt, Artificial Sequence
  Description of Artificial Sequence: Synthetic oligonucleotide
  Antisense strand to SEQ ID NO: 599416
caucauauagcagacagau

SEQ ID NO: 599418 - RNA, 19 nt, Artificial Sequence
  Description of Artificial Sequence: Synthetic oligonucleotide
  Sense strand starting at position 3949 of SEQ ID NO: 584920
cuuugauacuuauugucca

SEQ ID NO: 599419 - RNA, 19 nt, Artificial Sequence
  Description of Artificial Sequence: Synthetic oligonucleotide
  Antisense strand to SEQ ID NO: 599418
uggacaauaaguaucaaag

SEQ ID NO: 599420 - RNA, 19 nt, Artificial Sequence
  Description of Artificial Sequence: Synthetic oligonucleotide
  Sense strand starting at position 3952 of SEQ ID NO: 584920
ugauacuuauuguccauau

SEQ ID NO: 599421 - RNA, 19 nt, Artificial Sequence
  Description of Artificial Sequence: Synthetic oligonucleotide
  Antisense strand to SEQ ID NO: 599420
auauggacaauaaguauca

SEQ ID NO: 599422 - RNA, 19 nt, Artificial Sequence
  Description of Artificial Sequence: Synthetic oligonucleotide
  Sense strand starting at position 37 of SEQ ID NO: 584921
aacugaaacugcguggaaa

SEQ ID NO: 599423 - RNA, 19 nt, Artificial Sequence
  Description of Artificial Sequence: Synthetic oligonucleotide
  Antisense strand to SEQ ID NO: 599422
uuuccacgcaguuucaguu

SEQ ID NO: 599424 - RNA, 19 nt, Artificial Sequence
  Description of Artificial Sequence: Synthetic oligonucleotide
  Sense strand starting at position 525 of SEQ ID NO: 584921
auaucuguuguauacgaca

SEQ ID NO: 599425 - RNA, 19 nt, Artificial Sequence
  Description of Artificial Sequence: Synthetic oligonucleotide
  Antisense strand to SEQ ID NO: 599424
ugucguauacaacagauau

SEQ ID NO: 599426 - RNA, 19 nt, Artificial Sequence
  Description of Artificial Sequence: Synthetic oligonucleotide
  Sense strand starting at position 747 of SEQ ID NO: 584921
acuugcuggguucaagaga

SEQ ID NO: 599427 - RNA, 19 nt, Artificial Sequence
  Description of Artificial Sequence: Synthetic oligonucleotide
  Antisense strand to SEQ ID NO: 599426
ucucuugaacccagcaagu

SEQ ID NO: 599428 - RNA, 19 nt, Artificial Sequence
  Description of Artificial Sequence: Synthetic oligonucleotide
  Sense strand starting at position 955 of SEQ ID NO: 584921
uggccucucucagugauuu

SEQ ID NO: 599429 - RNA, 19 nt, Artificial Sequence
  Description of Artificial Sequence: Synthetic oligonucleotide
  Antisense strand to SEQ ID NO: 599428
aaaucacugagagaggcca

SEQ ID NO: 599430 - RNA, 19 nt, Artificial Sequence
  Description of Artificial Sequence: Synthetic oligonucleotide
  Sense strand starting at position 1052 of SEQ ID NO: 584921
uguugugucagggaacuuu

SEQ ID NO: 599431 - RNA, 19 nt, Artificial Sequence
  Description of Artificial Sequence: Synthetic oligonucleotide
  Antisense strand to SEQ ID NO: 599430
aaaguucccugacacaaca

SEQ ID NO: 599432 - RNA, 19 nt, Artificial Sequence
  Description of Artificial Sequence: Synthetic oligonucleotide
  Sense strand starting at position 1533 of SEQ ID NO: 584921
aggagagguucucucuguu

SEQ ID NO: 599433 - RNA, 19 nt, Artificial Sequence
  Description of Artificial Sequence: Synthetic oligonucleotide
  Antisense strand to SEQ ID NO: 599432
aacagagagaaccucuccu

SEQ ID NO: 599434 - RNA, 19 nt, Artificial Sequence
  Description of Artificial Sequence: Synthetic oligonucleotide
  Sense strand starting at position 1542 of SEQ ID NO: 584921
ucucucuguucccuaaagu

SEQ ID NO: 599435 - RNA, 19 nt, Artificial Sequence
  Description of Artificial Sequence: Synthetic oligonucleotide
  Antisense strand to SEQ ID NO: 599434
acuuuagggaacagagaga

SEQ ID NO: 599436 - RNA, 19 nt, Artificial Sequence
  Description of Artificial Sequence: Synthetic oligonucleotide
  Sense strand starting at position 1543 of SEQ ID NO: 584921
cucucuguucccuaaaguu

SEQ ID NO: 599437 - RNA, 19 nt, Artificial Sequence
  Description of Artificial Sequence: Synthetic oligonucleotide
  Antisense strand to SEQ ID NO: 599436
aacuuuagggaacagagag

SEQ ID NO: 599438 - RNA, 19 nt, Artificial Sequence
  Description of Artificial Sequence: Synthetic oligonucleotide
  Sense strand starting at position 2032 of SEQ ID NO: 584921
agaacucucucauugcagu

SEQ ID NO: 599439 - RNA, 19 nt, Artificial Sequence
  Description of Artificial Sequence: Synthetic oligonucleotide
  Antisense strand to SEQ ID NO: 599438
acugcaaugagagaguucu

SEQ ID NO: 599440 - RNA, 19 nt, Artificial Sequence
  Description of Artificial Sequence: Synthetic oligonucleotide
  Sense strand starting at position 2038 of SEQ ID NO: 584921
cucucauugcagugggauu

SEQ ID NO: 599441 - RNA, 19 nt, Artificial Sequence
  Description of Artificial Sequence: Synthetic oligonucleotide
  Antisense strand to SEQ ID NO: 599440
aaucccacugcaaugagag

SEQ ID NO: 599442 - RNA, 19 nt, Artificial Sequence
  Description of Artificial Sequence: Synthetic oligonucleotide
  Sense strand starting at position 2049 of SEQ ID NO: 584921
gugggauuccuaggucagc

SEQ ID NO: 599443 - RNA, 19 nt, Artificial Sequence
  Description of Artificial Sequence: Synthetic oligonucleotide
  Antisense strand to SEQ ID NO: 599442
gcugaccuaggaaucccac

SEQ ID NO: 599444 - RNA, 19 nt, Artificial Sequence
  Description of Artificial Sequence: Synthetic oligonucleotide
  Sense strand starting at position 2050 of SEQ ID NO: 584921
ugggauuccuaggucagca

SEQ ID NO: 599445 - RNA, 19 nt, Artificial Sequence
  Description of Artificial Sequence: Synthetic oligonucleotide
  Antisense strand to SEQ ID NO: 599444
ugcugaccuaggaauccca

SEQ ID NO: 599446 - RNA, 19 nt, Artificial Sequence
  Description of Artificial Sequence: Synthetic oligonucleotide
  Sense strand starting at position 2138 of SEQ ID NO: 584921
ccgcuuuagggacagauga

SEQ ID NO: 599447 - RNA, 19 nt, Artificial Sequence
  Description of Artificial Sequence: Synthetic oligonucleotide
  Antisense strand to SEQ ID NO: 599446
ucaucugucccuaaagcgg

SEQ ID NO: 599448 - RNA, 19 nt, Artificial Sequence
  Description of Artificial Sequence: Synthetic oligonucleotide
  Sense strand starting at position 2473 of SEQ ID NO: 584921
cgaauuacaucugcaacca

SEQ ID NO: 599449 - RNA, 19 nt, Artificial Sequence
  Description of Artificial Sequence: Synthetic oligonucleotide
  Antisense strand to SEQ ID NO: 599448
ugguugcagauguaauucg

SEQ ID NO: 599450 - RNA, 19 nt, Artificial Sequence
  Description of Artificial Sequence: Synthetic oligonucleotide
  Sense strand starting at position 2654 of SEQ ID NO: 584921
gugggaaugcuuugagcua

SEQ ID NO: 599451 - RNA, 19 nt, Artificial Sequence
  Description of Artificial Sequence: Synthetic oligonucleotide
  Antisense strand to SEQ ID NO: 599450
uagcucaaagcauucccac

SEQ ID NO: 599452 - RNA, 19 nt, Artificial Sequence
  Description of Artificial Sequence: Synthetic oligonucleotide
  Sense strand starting at position 2692 of SEQ ID NO: 584921
cagucuucucuggagugua

SEQ ID NO: 599453 - RNA, 19 nt, Artificial Sequence
  Description of Artificial Sequence: Synthetic oligonucleotide
  Antisense strand to SEQ ID NO: 599452
uacacuccagagaagacug

SEQ ID NO: 599454 - RNA, 19 nt, Artificial Sequence
  Description of Artificial Sequence: Synthetic oligonucleotide
  Sense strand starting at position 2695 of SEQ ID NO: 584921
ucuucucuggaguguauga

SEQ ID NO: 599455 - RNA, 19 nt, Artificial Sequence
  Description of Artificial Sequence: Synthetic oligonucleotide
  Antisense strand to SEQ ID NO: 599454
ucauacacuccagagaaga

SEQ ID NO: 599456 - RNA, 19 nt, Artificial Sequence
  Description of Artificial Sequence: Synthetic oligonucleotide
  Sense strand starting at position 2705 of SEQ ID NO: 584921
aguguaugauggcugagga

SEQ ID NO: 599457 - RNA, 19 nt, Artificial Sequence
  Description of Artificial Sequence: Synthetic oligonucleotide
  Antisense strand to SEQ ID NO: 599456
uccucagccaucauacacu

SEQ ID NO: 599458 - RNA, 19 nt, Artificial Sequence
  Description of Artificial Sequence: Synthetic oligonucleotide
  Sense strand starting at position 2767 of SEQ ID NO: 584921
gugcuaaucaggcacagaa

SEQ ID NO: 599459 - RNA, 19 nt, Artificial Sequence
  Description of Artificial Sequence: Synthetic oligonucleotide
  Antisense strand to SEQ ID NO: 599458
uucugugccugauuagcac

SEQ ID NO: 599460 - RNA, 19 nt, Artificial Sequence
  Description of Artificial Sequence: Synthetic oligonucleotide
  Sense strand starting at position 2809 of SEQ ID NO: 584921
aucagagaaccuuguucca

SEQ ID NO: 599461 - RNA, 19 nt, Artificial Sequence
  Description of Artificial Sequence: Synthetic oligonucleotide
  Antisense strand to SEQ ID NO: 599460
uggaacaagguucucugau

SEQ ID NO: 599462 - RNA, 19 nt, Artificial Sequence
  Description of Artificial Sequence: Synthetic oligonucleotide
  Sense strand starting at position 2811 of SEQ ID NO: 584921
cagagaaccuuguuccaag

SEQ ID NO: 599463 - RNA, 19 nt, Artificial Sequence
  Description of Artificial Sequence: Synthetic oligonucleotide
  Antisense strand to SEQ ID NO: 599462
cuuggaacaagguucucug

SEQ ID NO: 599464 - RNA, 19 nt, Artificial Sequence
  Description of Artificial Sequence: Synthetic oligonucleotide
  Sense strand starting at position 2821 of SEQ ID NO: 584921
uguuccaagcucugaaaca

SEQ ID NO: 599465 - RNA, 19 nt, Artificial Sequence
  Description of Artificial Sequence: Synthetic oligonucleotide
  Antisense strand to SEQ ID NO: 599464
uguuucagagcuuggaaca

SEQ ID NO: 599466 - RNA, 19 nt, Artificial Sequence
  Description of Artificial Sequence: Synthetic oligonucleotide
  Sense strand starting at position 2889 of SEQ ID NO: 584921
ucuccucaucuacgagaau

SEQ ID NO: 599467 - RNA, 19 nt, Artificial Sequence
  Description of Artificial Sequence: Synthetic oligonucleotide
  Antisense strand to SEQ ID NO: 599466
auucucguagaugaggaga

SEQ ID NO: 599468 - RNA, 19 nt, Artificial Sequence
  Description of Artificial Sequence: Synthetic oligonucleotide
  Sense strand starting at position 2901 of SEQ ID NO: 584921
cgagaauauuaauuauggu

SEQ ID NO: 599469 - RNA, 19 nt, Artificial Sequence
  Description of Artificial Sequence: Synthetic oligonucleotide
  Antisense strand to SEQ ID NO: 599468
accauaauuaauauucucg

SEQ ID NO: 599470 - RNA, 19 nt, Artificial Sequence
  Description of Artificial Sequence: Synthetic oligonucleotide
  Sense strand starting at position 2984 of SEQ ID NO: 584921
aggccaugacauugcuauu

SEQ ID NO: 599471 - RNA, 19 nt, Artificial Sequence
  Description of Artificial Sequence: Synthetic oligonucleotide
  Antisense strand to SEQ ID NO: 599470
aauagcaaugucauggccu

SEQ ID NO: 599472 - RNA, 19 nt, Artificial Sequence
  Description of Artificial Sequence: Synthetic oligonucleotide
  Sense strand starting at position 3022 of SEQ ID NO: 584921
aagugaggucuagagguau

SEQ ID NO: 599473 - RNA, 19 nt, Artificial Sequence
  Description of Artificial Sequence: Synthetic oligonucleotide
  Antisense strand to SEQ ID NO: 599472
auaccucuagaccucacuu

SEQ ID NO: 599474 - RNA, 19 nt, Artificial Sequence
  Description of Artificial Sequence: Synthetic oligonucleotide
  Sense strand starting at position 3028 of SEQ ID NO: 584921
ggucuagagguaugaugca

SEQ ID NO: 599475 - RNA, 19 nt, Artificial Sequence
  Description of Artificial Sequence: Synthetic oligonucleotide
  Antisense strand to SEQ ID NO: 599474
ugcaucauaccucuagacc

SEQ ID NO: 599476 - RNA, 19 nt, Artificial Sequence
  Description of Artificial Sequence: Synthetic oligonucleotide
  Sense strand starting at position 3074 of SEQ ID NO: 584921
gcggucgagccaggauuua

SEQ ID NO: 599477 - RNA, 19 nt, Artificial Sequence
  Description of Artificial Sequence: Synthetic oligonucleotide
  Antisense strand to SEQ ID NO: 599476
uaaauccuggcucgaccgc

SEQ ID NO: 599478 - RNA, 19 nt, Artificial Sequence
  Description of Artificial Sequence: Synthetic oligonucleotide
  Sense strand starting at position 3522 of SEQ ID NO: 584921
ccucuuggaugccucuaau

SEQ ID NO: 599479 - RNA, 19 nt, Artificial Sequence
  Description of Artificial Sequence: Synthetic oligonucleotide
  Antisense strand to SEQ ID NO: 599478
auuagaggcauccaagagg

SEQ ID NO: 599480 - RNA, 19 nt, Artificial Sequence
  Description of Artificial Sequence: Synthetic oligonucleotide
  Sense strand starting at position 3525 of SEQ ID NO: 584921
cuuggaugccucuaaugug

SEQ ID NO: 599481 - RNA, 19 nt, Artificial Sequence
  Description of Artificial Sequence: Synthetic oligonucleotide
  Antisense strand to SEQ ID NO: 599480
cacauuagaggcauccaag

SEQ ID NO: 599482 - RNA, 19 nt, Artificial Sequence
  Description of Artificial Sequence: Synthetic oligonucleotide
  Sense strand starting at position 3539 of SEQ ID NO: 584921
augugaucugccuggacau

SEQ ID NO: 599483 - RNA, 19 nt, Artificial Sequence
  Description of Artificial Sequence: Synthetic oligonucleotide
  Antisense strand to SEQ ID NO: 599482
auguccaggcagaucacau

SEQ ID NO: 599484 - RNA, 19 nt, Artificial Sequence
  Description of Artificial Sequence: Synthetic oligonucleotide
  Sense strand starting at position 3540 of SEQ ID NO: 584921
ugugaucugccuggacaug

SEQ ID NO: 599485 - RNA, 19 nt, Artificial Sequence
  Description of Artificial Sequence: Synthetic oligonucleotide
  Antisense strand to SEQ ID NO: 599484
cauguccaggcagaucaca

SEQ ID NO: 599486 - RNA, 19 nt, Artificial Sequence
  Description of Artificial Sequence: Synthetic oligonucleotide
  Sense strand starting at position 3541 of SEQ ID NO: 584921
gugaucugccuggacauga

SEQ ID NO: 599487 - RNA, 19 nt, Artificial Sequence
  Description of Artificial Sequence: Synthetic oligonucleotide
  Antisense strand to SEQ ID NO: 599486
ucauguccaggcagaucac

SEQ ID NO: 599488 - RNA, 19 nt, Artificial Sequence
  Description of Artificial Sequence: Synthetic oligonucleotide
  Sense strand starting at position 3554 of SEQ ID NO: 584921
acaugaacucugugacgag

SEQ ID NO: 599489 - RNA, 19 nt, Artificial Sequence
  Description of Artificial Sequence: Synthetic oligonucleotide
  Antisense strand to SEQ ID NO: 599488
cucgucacagaguucaugu

SEQ ID NO: 599490 - RNA, 19 nt, Artificial Sequence
  Description of Artificial Sequence: Synthetic oligonucleotide
  Sense strand starting at position 3601 of SEQ ID NO: 584921
ggguguuccucucuauuac

SEQ ID NO: 599491 - RNA, 19 nt, Artificial Sequence
  Description of Artificial Sequence: Synthetic oligonucleotide
  Antisense strand to SEQ ID NO: 599490
guaauagagaggaacaccc

SEQ ID NO: 599492 - RNA, 19 nt, Artificial Sequence
  Description of Artificial Sequence: Synthetic oligonucleotide
  Sense strand starting at position 3602 of SEQ ID NO: 584921
gguguuccucucuauuaca

SEQ ID NO: 599493 - RNA, 19 nt, Artificial Sequence
  Description of Artificial Sequence: Synthetic oligonucleotide
  Antisense strand to SEQ ID NO: 599492
uguaauagagaggaacacc

SEQ ID NO: 599494 - RNA, 19 nt, Artificial Sequence
  Description of Artificial Sequence: Synthetic oligonucleotide
  Sense strand starting at position 3637 of SEQ ID NO: 584921
gagggcuguccucaggacu

SEQ ID NO: 599495 - RNA, 19 nt, Artificial Sequence
  Description of Artificial Sequence: Synthetic oligonucleotide
  Antisense strand to SEQ ID NO: 599494
aguccugaggacagcccuc

SEQ ID NO: 599496 - RNA, 19 nt, Artificial Sequence
  Description of Artificial Sequence: Synthetic oligonucleotide
  Sense strand starting at position 3673 of SEQ ID NO: 584921
uugggcauuaucuggaguu

SEQ ID NO: 599497 - RNA, 19 nt, Artificial Sequence
  Description of Artificial Sequence: Synthetic oligonucleotide
  Antisense strand to SEQ ID NO: 599496
aacuccagauaaugcccaa

SEQ ID NO: 599498 - RNA, 19 nt, Artificial Sequence
  Description of Artificial Sequence: Synthetic oligonucleotide
  Sense strand starting at position 3675 of SEQ ID NO: 584921
gggcauuaucuggaguuuc

SEQ ID NO: 599499 - RNA, 19 nt, Artificial Sequence
  Description of Artificial Sequence: Synthetic oligonucleotide
  Antisense strand to SEQ ID NO: 599498
gaaacuccagauaaugccc

SEQ ID NO: 599500 - RNA, 19 nt, Artificial Sequence
  Description of Artificial Sequence: Synthetic oligonucleotide
  Sense strand starting at position 3706 of SEQ ID NO: 584921
gcuggaaccuggcuuugaa

SEQ ID NO: 599501 - RNA, 19 nt, Artificial Sequence
  Description of Artificial Sequence: Synthetic oligonucleotide
  Antisense strand to SEQ ID NO: 599500
uucaaagccagguuccagc

SEQ ID NO: 599502 - RNA, 19 nt, Artificial Sequence
  Description of Artificial Sequence: Synthetic oligonucleotide
  Sense strand starting at position 307 of SEQ ID NO: 584922
ggauucagaugugaaagca

SEQ ID NO: 599503 - RNA, 19 nt, Artificial Sequence
  Description of Artificial Sequence: Synthetic oligonucleotide
  Antisense strand to SEQ ID NO: 599502
ugcuuucacaucugaaucc

SEQ ID NO: 599504 - RNA, 19 nt, Artificial Sequence
  Description of Artificial Sequence: Synthetic oligonucleotide
  Sense strand starting at position 364 of SEQ ID NO: 584922
ggcagucugaaggaaguuu

SEQ ID NO: 599505 - RNA, 19 nt, Artificial Sequence
  Description of Artificial Sequence: Synthetic oligonucleotide
  Antisense strand to SEQ ID NO: 599504
aaacuuccuucagacugcc

SEQ ID NO: 599506 - RNA, 19 nt, Artificial Sequence
  Description of Artificial Sequence: Synthetic oligonucleotide
  Sense strand starting at position 461 of SEQ ID NO: 584922
gucugaucacuugagccua

SEQ ID NO: 599507 - RNA, 19 nt, Artificial Sequence
  Description of Artificial Sequence: Synthetic oligonucleotide
  Antisense strand to SEQ ID NO: 599506
uaggcucaagugaucagac

SEQ ID NO: 599508 - RNA, 19 nt, Artificial Sequence
  Description of Artificial Sequence: Synthetic oligonucleotide
  Sense strand starting at position 613 of SEQ ID NO: 584922
ggaggucaaaccuguagua

SEQ ID NO: 599509 - RNA, 19 nt, Artificial Sequence
  Description of Artificial Sequence: Synthetic oligonucleotide
  Antisense strand to SEQ ID NO: 599508
uacuacagguuugaccucc

SEQ ID NO: 599510 - RNA, 19 nt, Artificial Sequence
  Description of Artificial Sequence: Synthetic oligonucleotide
  Sense strand starting at position 615 of SEQ ID NO: 584922
aggucaaaccuguaguaag

SEQ ID NO: 599511 - RNA, 19 nt, Artificial Sequence
  Description of Artificial Sequence: Synthetic oligonucleotide
  Antisense strand to SEQ ID NO: 599510
cuuacuacagguuugaccu

SEQ ID NO: 599512 - RNA, 19 nt, Artificial Sequence
  Description of Artificial Sequence: Synthetic oligonucleotide
  Sense strand starting at position 623 of SEQ ID NO: 584922
ccuguaguaagccgagauc

SEQ ID NO: 599513 - RNA, 19 nt, Artificial Sequence
  Description of Artificial Sequence: Synthetic oligonucleotide
  Antisense strand to SEQ ID NO: 599512
gaucucggcuuacuacagg

SEQ ID NO: 599514 - RNA, 19 nt, Artificial Sequence
  Description of Artificial Sequence: Synthetic oligonucleotide
  Sense strand starting at position 713 of SEQ ID NO: 584922
aacugagaauguguccuua

SEQ ID NO: 599515 - RNA, 19 nt, Artificial Sequence
  Description of Artificial Sequence: Synthetic oligonucleotide
  Antisense strand to SEQ ID NO: 599514
uaaggacacauucucaguu

SEQ ID NO: 599516 - RNA, 19 nt, Artificial Sequence
  Description of Artificial Sequence: Synthetic oligonucleotide
  Sense strand starting at position 715 of SEQ ID NO: 584922
cugagaauguguccuuaau

SEQ ID NO: 599517 - RNA, 19 nt, Artificial Sequence
  Description of Artificial Sequence: Synthetic oligonucleotide
  Antisense strand to SEQ ID NO: 599516
auuaaggacacauucucag

SEQ ID NO: 599518 - RNA, 19 nt, Artificial Sequence
  Description of Artificial Sequence: Synthetic oligonucleotide
  Sense strand starting at position 717 of SEQ ID NO: 584922
gagaauguguccuuaaugu

SEQ ID NO: 599519 - RNA, 19 nt, Artificial Sequence
  Description of Artificial Sequence: Synthetic oligonucleotide
  Antisense strand to SEQ ID NO: 599518
acauuaaggacacauucuc

SEQ ID NO: 599520 - RNA, 19 nt, Artificial Sequence
  Description of Artificial Sequence: Synthetic oligonucleotide
  Sense strand starting at position 979 of SEQ ID NO: 584922
agaguucuaugagguccau

SEQ ID NO: 599521 - RNA, 19 nt, Artificial Sequence
  Description of Artificial Sequence: Synthetic oligonucleotide
  Antisense strand to SEQ ID NO: 599520
auggaccucauagaacucu

SEQ ID NO: 599522 - RNA, 19 nt, Artificial Sequence
  Description of Artificial Sequence: Synthetic oligonucleotide
  Sense strand starting at position 985 of SEQ ID NO: 584922
cuaugagguccauauuauu

SEQ ID NO: 599523 - RNA, 19 nt, Artificial Sequence
  Description of Artificial Sequence: Synthetic oligonucleotide
  Antisense strand to SEQ ID NO: 599522
aauaauauggaccucauag

SEQ ID NO: 599524 - RNA, 19 nt, Artificial Sequence
  Description of Artificial Sequence: Synthetic oligonucleotide
  Sense strand starting at position 1073 of SEQ ID NO: 584922
aguggcagagcugaaauua

SEQ ID NO: 599525 - RNA, 19 nt, Artificial Sequence
  Description of Artificial Sequence: Synthetic oligonucleotide
  Antisense strand to SEQ ID NO: 599524
uaauuucagcucugccacu

SEQ ID NO: 599526 - RNA, 19 nt, Artificial Sequence
  Description of Artificial Sequence: Synthetic oligonucleotide
  Sense strand starting at position 1097 of SEQ ID NO: 584922
caggucugucuguaaagca

SEQ ID NO: 599527 - RNA, 19 nt, Artificial Sequence
  Description of Artificial Sequence: Synthetic oligonucleotide
  Antisense strand to SEQ ID NO: 599526
ugcuuuacagacagaccug

SEQ ID NO: 599528 - RNA, 19 nt, Artificial Sequence
  Description of Artificial Sequence: Synthetic oligonucleotide
  Sense strand starting at position 1236 of SEQ ID NO: 584922
augggagaaucccugccau

SEQ ID NO: 599529 - RNA, 19 nt, Artificial Sequence
  Description of Artificial Sequence: Synthetic oligonucleotide
  Antisense strand to SEQ ID NO: 599528
auggcagggauucucccau

SEQ ID NO: 599530 - RNA, 19 nt, Artificial Sequence
  Description of Artificial Sequence: Synthetic oligonucleotide
  Sense strand starting at position 1412 of SEQ ID NO: 584922
augcucagcuccuacgaau

SEQ ID NO: 599531 - RNA, 19 nt, Artificial Sequence
  Description of Artificial Sequence: Synthetic oligonucleotide
  Antisense strand to SEQ ID NO: 599530
auucguaggagcugagcau

SEQ ID NO: 599532 - RNA, 19 nt, Artificial Sequence
  Description of Artificial Sequence: Synthetic oligonucleotide
  Sense strand starting at position 1462 of SEQ ID NO: 584922
ugugcuaggaaugaaucua

SEQ ID NO: 599533 - RNA, 19 nt, Artificial Sequence
  Description of Artificial Sequence: Synthetic oligonucleotide
  Antisense strand to SEQ ID NO: 599532
uagauucauuccuagcaca

SEQ ID NO: 599534 - RNA, 19 nt, Artificial Sequence
  Description of Artificial Sequence: Synthetic oligonucleotide
  Sense strand starting at position 1470 of SEQ ID NO: 584922
gaaugaaucuaggcgcugu

SEQ ID NO: 599535 - RNA, 19 nt, Artificial Sequence
  Description of Artificial Sequence: Synthetic oligonucleotide
  Antisense strand to SEQ ID NO: 599534
acagcgccuagauucauuc

SEQ ID NO: 599536 - RNA, 19 nt, Artificial Sequence
  Description of Artificial Sequence: Synthetic oligonucleotide
  Sense strand starting at position 1474 of SEQ ID NO: 584922
gaaucuaggcgcuguagaa

SEQ ID NO: 599537 - RNA, 19 nt, Artificial Sequence
  Description of Artificial Sequence: Synthetic oligonucleotide
  Antisense strand to SEQ ID NO: 599536
uucuacagcgccuagauuc

SEQ ID NO: 599538 - RNA, 19 nt, Artificial Sequence
  Description of Artificial Sequence: Synthetic oligonucleotide
  Sense strand starting at position 1506 of SEQ ID NO: 584922
uuaggcauguugguuugau

SEQ ID NO: 599539 - RNA, 19 nt, Artificial Sequence
  Description of Artificial Sequence: Synthetic oligonucleotide
  Antisense strand to SEQ ID NO: 599538
aucaaaccaacaugccuaa

SEQ ID NO: 599540 - RNA, 19 nt, Artificial Sequence
  Description of Artificial Sequence: Synthetic oligonucleotide
  Sense strand starting at position 1515 of SEQ ID NO: 584922
uugguuugaugccuaaaua

SEQ ID NO: 599541 - RNA, 19 nt, Artificial Sequence
  Description of Artificial Sequence: Synthetic oligonucleotide
  Antisense strand to SEQ ID NO: 599540
uauuuaggcaucaaaccaa

SEQ ID NO: 599542 - RNA, 19 nt, Artificial Sequence
  Description of Artificial Sequence: Synthetic oligonucleotide
  Sense strand starting at position 1516 of SEQ ID NO: 584922
ugguuugaugccuaaauaa

SEQ ID NO: 599543 - RNA, 19 nt, Artificial Sequence
  Description of Artificial Sequence: Synthetic oligonucleotide
  Antisense strand to SEQ ID NO: 599542
uuauuuaggcaucaaacca

SEQ ID NO: 599544 - RNA, 19 nt, Artificial Sequence
  Description of Artificial Sequence: Synthetic oligonucleotide
  Sense strand starting at position 1596 of SEQ ID NO: 584922
agaacuccauccgaaagau

SEQ ID NO: 599545 - RNA, 19 nt, Artificial Sequence
  Description of Artificial Sequence: Synthetic oligonucleotide
  Antisense strand to SEQ ID NO: 599544
aucuuucggauggaguucu

SEQ ID NO: 599546 - RNA, 19 nt, Artificial Sequence
  Description of Artificial Sequence: Synthetic oligonucleotide
  Sense strand starting at position 2082 of SEQ ID NO: 584922
ccaaucauaucagacgcaa

SEQ ID NO: 599547 - RNA, 19 nt, Artificial Sequence
  Description of Artificial Sequence: Synthetic oligonucleotide
  Antisense strand to SEQ ID NO: 599546
uugcgucugauaugauugg

SEQ ID NO: 599548 - RNA, 19 nt, Artificial Sequence
  Description of Artificial Sequence: Synthetic oligonucleotide
  Sense strand starting at position 2162 of SEQ ID NO: 584922
ggcgccaaacuccaguaau

SEQ ID NO: 599549 - RNA, 19 nt, Artificial Sequence
  Description of Artificial Sequence: Synthetic oligonucleotide
  Antisense strand to SEQ ID NO: 599548
auuacuggaguuuggcgcc

SEQ ID NO: 599550 - RNA, 19 nt, Artificial Sequence
  Description of Artificial Sequence: Synthetic oligonucleotide
  Sense strand starting at position 2174 of SEQ ID NO: 584922
caguaaucuuccuagggcu

SEQ ID NO: 599551 - RNA, 19 nt, Artificial Sequence
  Description of Artificial Sequence: Synthetic oligonucleotide
  Antisense strand to SEQ ID NO: 599550
agcccuaggaagauuacug

SEQ ID NO: 599552 - RNA, 19 nt, Artificial Sequence
  Description of Artificial Sequence: Synthetic oligonucleotide
  Sense strand starting at position 2320 of SEQ ID NO: 584922
ccuugagaggucugucauu

SEQ ID NO: 599553 - RNA, 19 nt, Artificial Sequence
  Description of Artificial Sequence: Synthetic oligonucleotide
  Antisense strand to SEQ ID NO: 599552
aaugacagaccucucaagg

SEQ ID NO: 599554 - RNA, 19 nt, Artificial Sequence
  Description of Artificial Sequence: Synthetic oligonucleotide
  Sense strand starting at position 2394 of SEQ ID NO: 584922
gggcucgauuacgaugaau

SEQ ID NO: 599555 - RNA, 19 nt, Artificial Sequence
  Description of Artificial Sequence: Synthetic oligonucleotide
  Antisense strand to SEQ ID NO: 599554
auucaucguaaucgagccc

SEQ ID NO: 599556 - RNA, 19 nt, Artificial Sequence
  Description of Artificial Sequence: Synthetic oligonucleotide
  Sense strand starting at position 2396 of SEQ ID NO: 584922
gcucgauuacgaugaauaa

SEQ ID NO: 599557 - RNA, 19 nt, Artificial Sequence
  Description of Artificial Sequence: Synthetic oligonucleotide
  Antisense strand to SEQ ID NO: 599556
uuauucaucguaaucgagc

SEQ ID NO: 599558 - RNA, 19 nt, Artificial Sequence
  Description of Artificial Sequence: Synthetic oligonucleotide
  Sense strand starting at position 2432 of SEQ ID NO: 584922
agacgcguuccuggaugau

SEQ ID NO: 599559 - RNA, 19 nt, Artificial Sequence
  Description of Artificial Sequence: Synthetic oligonucleotide
  Antisense strand to SEQ ID NO: 599558
aucauccaggaacgcgucu

SEQ ID NO: 599560 - RNA, 19 nt, Artificial Sequence
  Description of Artificial Sequence: Synthetic oligonucleotide
  Sense strand starting at position 2434 of SEQ ID NO: 584922
acgcguuccuggaugauag

SEQ ID NO: 599561 - RNA, 19 nt, Artificial Sequence
  Description of Artificial Sequence: Synthetic oligonucleotide
  Antisense strand to SEQ ID NO: 599560
cuaucauccaggaacgcgu

SEQ ID NO: 599562 - RNA, 19 nt, Artificial Sequence
  Description of Artificial Sequence: Synthetic oligonucleotide
  Sense strand starting at position 2550 of SEQ ID NO: 584922
ccugacuugccuuauagaa

SEQ ID NO: 599563 - RNA, 19 nt, Artificial Sequence
  Description of Artificial Sequence: Synthetic oligonucleotide
  Antisense strand to SEQ ID NO: 599562
uucuauaaggcaagucagg

SEQ ID NO: 599564 - RNA, 19 nt, Artificial Sequence
  Description of Artificial Sequence: Synthetic oligonucleotide
  Sense strand starting at position 2606 of SEQ ID NO: 584922
ggagcucagccugagcauu

SEQ ID NO: 599565 - RNA, 19 nt, Artificial Sequence
  Description of Artificial Sequence: Synthetic oligonucleotide
  Antisense strand to SEQ ID NO: 599564
aaugcucaggcugagcucc

SEQ ID NO: 599566 - RNA, 19 nt, Artificial Sequence
  Description of Artificial Sequence: Synthetic oligonucleotide
  Sense strand starting at position 2618 of SEQ ID NO: 584922
gagcauugauaggugcgaa

SEQ ID NO: 599567 - RNA, 19 nt, Artificial Sequence
  Description of Artificial Sequence: Synthetic oligonucleotide
  Antisense strand to SEQ ID NO: 599566
uucgcaccuaucaaugcuc

SEQ ID NO: 599568 - RNA, 19 nt, Artificial Sequence
  Description of Artificial Sequence: Synthetic oligonucleotide
  Sense strand starting at position 2619 of SEQ ID NO: 584922
agcauugauaggugcgaaa

SEQ ID NO: 599569 - RNA, 19 nt, Artificial Sequence
  Description of Artificial Sequence: Synthetic oligonucleotide
  Antisense strand to SEQ ID NO: 599568
uuucgcaccuaucaaugcu

SEQ ID NO: 599570 - RNA, 19 nt, Artificial Sequence
  Description of Artificial Sequence: Synthetic oligonucleotide
  Sense strand starting at position 2657 of SEQ ID NO: 584922
cuacuuauagucugccuau

SEQ ID NO: 599571 - RNA, 19 nt, Artificial Sequence
  Description of Artificial Sequence: Synthetic oligonucleotide
  Antisense strand to SEQ ID NO: 599570
auaggcagacuauaaguag

SEQ ID NO: 599572 - RNA, 19 nt, Artificial Sequence
  Description of Artificial Sequence: Synthetic oligonucleotide
  Sense strand starting at position 2660 of SEQ ID NO: 584922
cuuauagucugccuauauu

SEQ ID NO: 599573 - RNA, 19 nt, Artificial Sequence
  Description of Artificial Sequence: Synthetic oligonucleotide
  Antisense strand to SEQ ID NO: 599572
aauauaggcagacuauaag

SEQ ID NO: 599574 - RNA, 19 nt, Artificial Sequence
  Description of Artificial Sequence: Synthetic oligonucleotide
  Sense strand starting at position 2696 of SEQ ID NO: 584922
ucguuuguccacuuagcuu

SEQ ID NO: 599575 - RNA, 19 nt, Artificial Sequence
  Description of Artificial Sequence: Synthetic oligonucleotide
  Antisense strand to SEQ ID NO: 599574
aagcuaaguggacaaacga

SEQ ID NO: 599576 - RNA, 19 nt, Artificial Sequence
  Description of Artificial Sequence: Synthetic oligonucleotide
  Sense strand starting at position 2803 of SEQ ID NO: 584922
ccuccaaggcucgagagau

SEQ ID NO: 599577 - RNA, 19 nt, Artificial Sequence
  Description of Artificial Sequence: Synthetic oligonucleotide
  Antisense strand to SEQ ID NO: 599576
aucucucgagccuuggagg

SEQ ID NO: 599578 - RNA, 19 nt, Artificial Sequence
  Description of Artificial Sequence: Synthetic oligonucleotide
  Sense strand starting at position 2947 of SEQ ID NO: 584922
gcgcgaucucgacccacua

SEQ ID NO: 599579 - RNA, 19 nt, Artificial Sequence
  Description of Artificial Sequence: Synthetic oligonucleotide
  Antisense strand to SEQ ID NO: 599578
uagugggucgagaucgcgc

SEQ ID NO: 599580 - RNA, 19 nt, Artificial Sequence
  Description of Artificial Sequence: Synthetic oligonucleotide
  Sense strand starting at position 3253 of SEQ ID NO: 584922
acgaacuucugggcucaaa

SEQ ID NO: 599581 - RNA, 19 nt, Artificial Sequence
  Description of Artificial Sequence: Synthetic oligonucleotide
  Antisense strand to SEQ ID NO: 599580
uuugagcccagaaguucgu

SEQ ID NO: 599582 - RNA, 19 nt, Artificial Sequence
  Description of Artificial Sequence: Synthetic oligonucleotide
  Sense strand starting at position 26 of SEQ ID NO: 584923
ccuuguuuacaguaggaca

SEQ ID NO: 599583 - RNA, 19 nt, Artificial Sequence
  Description of Artificial Sequence: Synthetic oligonucleotide
  Antisense strand to SEQ ID NO: 599582
uguccuacuguaaacaagg

SEQ ID NO: 599584 - RNA, 19 nt, Artificial Sequence
  Description of Artificial Sequence: Synthetic oligonucleotide
  Sense strand starting at position 207 of SEQ ID NO: 584923
uguggaaucugugaauaau

SEQ ID NO: 599585 - RNA, 19 nt, Artificial Sequence
  Description of Artificial Sequence: Synthetic oligonucleotide
  Antisense strand to SEQ ID NO: 599584
auuauucacagauuccaca

SEQ ID NO: 599586 - RNA, 19 nt, Artificial Sequence
  Description of Artificial Sequence: Synthetic oligonucleotide
  Sense strand starting at position 329 of SEQ ID NO: 584923
cuugcucuagccuguuaga

SEQ ID NO: 599587 - RNA, 19 nt, Artificial Sequence
  Description of Artificial Sequence: Synthetic oligonucleotide
  Antisense strand to SEQ ID NO: 599586
ucuaacaggcuagagcaag

SEQ ID NO: 599588 - RNA, 19 nt, Artificial Sequence
  Description of Artificial Sequence: Synthetic oligonucleotide
  Sense strand starting at position 367 of SEQ ID NO: 584923
ucuugaagccacugaguuu

SEQ ID NO: 599589 - RNA, 19 nt, Artificial Sequence
  Description of Artificial Sequence: Synthetic oligonucleotide
  Antisense strand to SEQ ID NO: 599588
aaacucaguggcuucaaga

SEQ ID NO: 599590 - RNA, 19 nt, Artificial Sequence
  Description of Artificial Sequence: Synthetic oligonucleotide
  Sense strand starting at position 386 of SEQ ID NO: 584923
uggaguuucucuguuacug

SEQ ID NO: 599591 - RNA, 19 nt, Artificial Sequence
  Description of Artificial Sequence: Synthetic oligonucleotide
  Antisense strand to SEQ ID NO: 599590
caguaacagagaaacucca

SEQ ID NO: 599592 - RNA, 19 nt, Artificial Sequence
  Description of Artificial Sequence: Synthetic oligonucleotide
  Sense strand starting at position 429 of SEQ ID NO: 584923
uuacaaagucuauguucuu

SEQ ID NO: 599593 - RNA, 19 nt, Artificial Sequence
  Description of Artificial Sequence: Synthetic oligonucleotide
  Antisense strand to SEQ ID NO: 599592
aagaacauagacuuuguaa

SEQ ID NO: 599594 - RNA, 19 nt, Artificial Sequence
  Description of Artificial Sequence: Synthetic oligonucleotide
  Sense strand starting at position 518 of SEQ ID NO: 584923
uaccaagugggccaauauu

SEQ ID NO: 599595 - RNA, 19 nt, Artificial Sequence
  Description of Artificial Sequence: Synthetic oligonucleotide
  Antisense strand to SEQ ID NO: 599594
aauauuggcccacuuggua

SEQ ID NO: 599596 - RNA, 19 nt, Artificial Sequence
  Description of Artificial Sequence: Synthetic oligonucleotide
  Sense strand starting at position 528 of SEQ ID NO: 584923
gccaauauuucucaaggga

SEQ ID NO: 599597 - RNA, 19 nt, Artificial Sequence
  Description of Artificial Sequence: Synthetic oligonucleotide
  Antisense strand to SEQ ID NO: 599596
ucccuugagaaauauuggc

SEQ ID NO: 599598 - RNA, 19 nt, Artificial Sequence
  Description of Artificial Sequence: Synthetic oligonucleotide
  Sense strand starting at position 913 of SEQ ID NO: 584923
gcagauuccuuguuaagaa

SEQ ID NO: 599599 - RNA, 19 nt, Artificial Sequence
  Description of Artificial Sequence: Synthetic oligonucleotide
  Antisense strand to SEQ ID NO: 599598
uucuuaacaaggaaucugc

SEQ ID NO: 599600 - RNA, 19 nt, Artificial Sequence
  Description of Artificial Sequence: Synthetic oligonucleotide
  Sense strand starting at position 920 of SEQ ID NO: 584923
ccuuguuaagaaugcacau

SEQ ID NO: 599601 - RNA, 19 nt, Artificial Sequence
  Description of Artificial Sequence: Synthetic oligonucleotide
  Antisense strand to SEQ ID NO: 599600
augugcauucuuaacaagg

SEQ ID NO: 599602 - RNA, 19 nt, Artificial Sequence
  Description of Artificial Sequence: Synthetic oligonucleotide
  Sense strand starting at position 965 of SEQ ID NO: 584923
gugggaagaguucaacucu

SEQ ID NO: 599603 - RNA, 19 nt, Artificial Sequence
  Description of Artificial Sequence: Synthetic oligonucleotide
  Antisense strand to SEQ ID NO: 599602
agaguugaacucuucccac

SEQ ID NO: 599604 - RNA, 19 nt, Artificial Sequence
  Description of Artificial Sequence: Synthetic oligonucleotide
  Sense strand starting at position 1003 of SEQ ID NO: 584923
ugacucuaugcaugcuaaa

SEQ ID NO: 599605 - RNA, 19 nt, Artificial Sequence
  Description of Artificial Sequence: Synthetic oligonucleotide
  Antisense strand to SEQ ID NO: 599604
uuuagcaugcauagaguca

SEQ ID NO: 599606 - RNA, 19 nt, Artificial Sequence
  Description of Artificial Sequence: Synthetic oligonucleotide
  Sense strand starting at position 1240 of SEQ ID NO: 584923
caggcuugcagugaggauu

SEQ ID NO: 599607 - RNA, 19 nt, Artificial Sequence
  Description of Artificial Sequence: Synthetic oligonucleotide
  Antisense strand to SEQ ID NO: 599606
aauccucacugcaagccug

SEQ ID NO: 599608 - RNA, 19 nt, Artificial Sequence
  Description of Artificial Sequence: Synthetic oligonucleotide
  Sense strand starting at position 1257 of SEQ ID NO: 584923
uuaacaaugcaaugaaagu

SEQ ID NO: 599609 - RNA, 19 nt, Artificial Sequence
  Description of Artificial Sequence: Synthetic oligonucleotide
  Antisense strand to SEQ ID NO: 599608
acuuucauugcauuguuaa

SEQ ID NO: 599610 - RNA, 19 nt, Artificial Sequence
  Description of Artificial Sequence: Synthetic oligonucleotide
  Sense strand starting at position 1283 of SEQ ID NO: 584923
agcgguugcucaguaugua

SEQ ID NO: 599611 - RNA, 19 nt, Artificial Sequence
  Description of Artificial Sequence: Synthetic oligonucleotide
  Antisense strand to SEQ ID NO: 599610
uacauacugagcaaccgcu

SEQ ID NO: 599612 - RNA, 19 nt, Artificial Sequence
  Description of Artificial Sequence: Synthetic oligonucleotide
  Sense strand starting at position 1284 of SEQ ID NO: 584923
gcgguugcucaguauguau

SEQ ID NO: 599613 - RNA, 19 nt, Artificial Sequence
  Description of Artificial Sequence: Synthetic oligonucleotide
  Antisense strand to SEQ ID NO: 599612
auacauacugagcaaccgc

SEQ ID NO: 599614 - RNA, 19 nt, Artificial Sequence
  Description of Artificial Sequence: Synthetic oligonucleotide
  Sense strand starting at position 1511 of SEQ ID NO: 584923
gggaguucuccuuagauuc

SEQ ID NO: 599615 - RNA, 19 nt, Artificial Sequence
  Description of Artificial Sequence: Synthetic oligonucleotide
  Antisense strand to SEQ ID NO: 599614
gaaucuaaggagaacuccc

SEQ ID NO: 599616 - RNA, 19 nt, Artificial Sequence
  Description of Artificial Sequence: Synthetic oligonucleotide
  Sense strand starting at position 1600 of SEQ ID NO: 584923
ugaguucccucacuucuau

SEQ ID NO: 599617 - RNA, 19 nt, Artificial Sequence
  Description of Artificial Sequence: Synthetic oligonucleotide
  Antisense strand to SEQ ID NO: 599616
auagaagugagggaacuca

SEQ ID NO: 599618 - RNA, 19 nt, Artificial Sequence
  Description of Artificial Sequence: Synthetic oligonucleotide
  Sense strand starting at position 1654 of SEQ ID NO: 584923
gucucuuccucucuggaga

SEQ ID NO: 599619 - RNA, 19 nt, Artificial Sequence
  Description of Artificial Sequence: Synthetic oligonucleotide
  Antisense strand to SEQ ID NO: 599618
ucuccagagaggaagagac

SEQ ID NO: 599620 - RNA, 19 nt, Artificial Sequence
  Description of Artificial Sequence: Synthetic oligonucleotide
  Sense strand starting at position 1655 of SEQ ID NO: 584923
ucucuuccucucuggagau

SEQ ID NO: 599621 - RNA, 19 nt, Artificial Sequence
  Description of Artificial Sequence: Synthetic oligonucleotide
  Antisense strand to SEQ ID NO: 599620
aucuccagagaggaagaga

SEQ ID NO: 599622 - RNA, 19 nt, Artificial Sequence
  Description of Artificial Sequence: Synthetic oligonucleotide
  Sense strand starting at position 1936 of SEQ ID NO: 584923
ucauguuacuugccgggau

SEQ ID NO: 599623 - RNA, 19 nt, Artificial Sequence
  Description of Artificial Sequence: Synthetic oligonucleotide
  Antisense strand to SEQ ID NO: 599622
aucccggcaaguaacauga

SEQ ID NO: 599624 - RNA, 19 nt, Artificial Sequence
  Description of Artificial Sequence: Synthetic oligonucleotide
  Sense strand starting at position 2409 of SEQ ID NO: 584923
auuguuauuucuccuuugu

SEQ ID NO: 599625 - RNA, 19 nt, Artificial Sequence
  Description of Artificial Sequence: Synthetic oligonucleotide
  Antisense strand to SEQ ID NO: 599624
acaaaggagaaauaacaau

SEQ ID NO: 599626 - RNA, 19 nt, Artificial Sequence
  Description of Artificial Sequence: Synthetic oligonucleotide
  Sense strand starting at position 2547 of SEQ ID NO: 584923
cucuuugcuucuguuuauu

SEQ ID NO: 599627 - RNA, 19 nt, Artificial Sequence
  Description of Artificial Sequence: Synthetic oligonucleotide
  Antisense strand to SEQ ID NO: 599626
aauaaacagaagcaaagag

SEQ ID NO: 599628 - RNA, 19 nt, Artificial Sequence
  Description of Artificial Sequence: Synthetic oligonucleotide
  Sense strand starting at position 2606 of SEQ ID NO: 584923
guaaucguacuauacugua

SEQ ID NO: 599629 - RNA, 19 nt, Artificial Sequence
  Description of Artificial Sequence: Synthetic oligonucleotide
  Antisense strand to SEQ ID NO: 599628
uacaguauaguacgauuac

SEQ ID NO: 599630 - RNA, 19 nt, Artificial Sequence
  Description of Artificial Sequence: Synthetic oligonucleotide
  Sense strand starting at position 2751 of SEQ ID NO: 584923
uguaaugcacucuguuauu

SEQ ID NO: 599631 - RNA, 19 nt, Artificial Sequence
  Description of Artificial Sequence: Synthetic oligonucleotide
  Antisense strand to SEQ ID NO: 599630
aauaacagagugcauuaca

SEQ ID NO: 599632 - RNA, 19 nt, Artificial Sequence
  Description of Artificial Sequence: Synthetic oligonucleotide
  Sense strand starting at position 2769 of SEQ ID NO: 584923
uuuguauucuugccuauuu

SEQ ID NO: 599633 - RNA, 19 nt, Artificial Sequence
  Description of Artificial Sequence: Synthetic oligonucleotide
  Antisense strand to SEQ ID NO: 599632
aaauaggcaagaauacaaa

SEQ ID NO: 599634 - RNA, 19 nt, Artificial Sequence
  Description of Artificial Sequence: Synthetic oligonucleotide
  Sense strand starting at position 2770 of SEQ ID NO: 584923
uuguauucuugccuauuua

SEQ ID NO: 599635 - RNA, 19 nt, Artificial Sequence
  Description of Artificial Sequence: Synthetic oligonucleotide
  Antisense strand to SEQ ID NO: 599634
uaaauaggcaagaauacaa

SEQ ID NO: 599636 - RNA, 19 nt, Artificial Sequence
  Description of Artificial Sequence: Synthetic oligonucleotide
  Sense strand starting at position 2842 of SEQ ID NO: 584923
ggaguugguuccuucaggu

SEQ ID NO: 599637 - RNA, 19 nt, Artificial Sequence
  Description of Artificial Sequence: Synthetic oligonucleotide
  Antisense strand to SEQ ID NO: 599636
accugaaggaaccaacucc

SEQ ID NO: 599638 - RNA, 19 nt, Artificial Sequence
  Description of Artificial Sequence: Synthetic oligonucleotide
  Sense strand starting at position 2876 of SEQ ID NO: 584923
cugacuucacggugagugu

SEQ ID NO: 599639 - RNA, 19 nt, Artificial Sequence
  Description of Artificial Sequence: Synthetic oligonucleotide
  Antisense strand to SEQ ID NO: 599638
acacucaccgugaagucag

SEQ ID NO: 599640 - RNA, 19 nt, Artificial Sequence
  Description of Artificial Sequence: Synthetic oligonucleotide
  Sense strand starting at position 2877 of SEQ ID NO: 584923
ugacuucacggugaguguu

SEQ ID NO: 599641 - RNA, 19 nt, Artificial Sequence
  Description of Artificial Sequence: Synthetic oligonucleotide
  Antisense strand to SEQ ID NO: 599640
aacacucaccgugaaguca

SEQ ID NO: 599642 - RNA, 19 nt, Artificial Sequence
  Description of Artificial Sequence: Synthetic oligonucleotide
  Sense strand starting at position 3258 of SEQ ID NO: 584923
ugcuuauuggugcauuaua

SEQ ID NO: 599643 - RNA, 19 nt, Artificial Sequence
  Description of Artificial Sequence: Synthetic oligonucleotide
  Antisense strand to SEQ ID NO: 599642
uauaaugcaccaauaagca

SEQ ID NO: 599644 - RNA, 19 nt, Artificial Sequence
  Description of Artificial Sequence: Synthetic oligonucleotide
  Sense strand starting at position 3266 of SEQ ID NO: 584923
ggugcauuauaauccuuua

SEQ ID NO: 599645 - RNA, 19 nt, Artificial Sequence
  Description of Artificial Sequence: Synthetic oligonucleotide
  Antisense strand to SEQ ID NO: 599644
uaaaggauuauaaugcacc

SEQ ID NO: 599646 - RNA, 19 nt, Artificial Sequence
  Description of Artificial Sequence: Synthetic oligonucleotide
  Sense strand starting at position 3373 of SEQ ID NO: 584923
gugcguuuacaauugucua

SEQ ID NO: 599647 - RNA, 19 nt, Artificial Sequence
  Description of Artificial Sequence: Synthetic oligonucleotide
  Antisense strand to SEQ ID NO: 599646
uagacaauuguaaacgcac

SEQ ID NO: 599648 - RNA, 19 nt, Artificial Sequence
  Description of Artificial Sequence: Synthetic oligonucleotide
  Sense strand starting at position 3377 of SEQ ID NO: 584923
guuuacaauugucuagcua

SEQ ID NO: 599649 - RNA, 19 nt, Artificial Sequence
  Description of Artificial Sequence: Synthetic oligonucleotide
  Antisense strand to SEQ ID NO: 599648
uagcuagacaauuguaaac

SEQ ID NO: 599650 - RNA, 19 nt, Artificial Sequence
  Description of Artificial Sequence: Synthetic oligonucleotide
  Sense strand starting at position 3381 of SEQ ID NO: 584923
acaauugucuagcuagaca

SEQ ID NO: 599651 - RNA, 19 nt, Artificial Sequence
  Description of Artificial Sequence: Synthetic oligonucleotide
  Antisense strand to SEQ ID NO: 599650
ugucuagcuagacaauugu

SEQ ID NO: 599652 - RNA, 19 nt, Artificial Sequence
  Description of Artificial Sequence: Synthetic oligonucleotide
  Sense strand starting at position 3870 of SEQ ID NO: 584923
gcauucuugcauuggacau

SEQ ID NO: 599653 - RNA, 19 nt, Artificial Sequence
  Description of Artificial Sequence: Synthetic oligonucleotide
  Antisense strand to SEQ ID NO: 599652
auguccaaugcaagaaugc

SEQ ID NO: 599654 - RNA, 19 nt, Artificial Sequence
  Description of Artificial Sequence: Synthetic oligonucleotide
  Sense strand starting at position 3874 of SEQ ID NO: 584923
ucuugcauuggacaucauu

SEQ ID NO: 599655 - RNA, 19 nt, Artificial Sequence
  Description of Artificial Sequence: Synthetic oligonucleotide
  Antisense strand to SEQ ID NO: 599654
aaugauguccaaugcaaga

SEQ ID NO: 599656 - RNA, 19 nt, Artificial Sequence
  Description of Artificial Sequence: Synthetic oligonucleotide
  Sense strand starting at position 3953 of SEQ ID NO: 584923
ucuggauucuuucuuuaag

SEQ ID NO: 599657 - RNA, 19 nt, Artificial Sequence
  Description of Artificial Sequence: Synthetic oligonucleotide
  Antisense strand to SEQ ID NO: 599656
cuuaaagaaagaauccaga

SEQ ID NO: 599658 - RNA, 19 nt, Artificial Sequence
  Description of Artificial Sequence: Synthetic oligonucleotide
  Sense strand starting at position 3954 of SEQ ID NO: 584923
cuggauucuuucuuuaaga

SEQ ID NO: 599659 - RNA, 19 nt, Artificial Sequence
  Description of Artificial Sequence: Synthetic oligonucleotide
  Antisense strand to SEQ ID NO: 599658
ucuuaaagaaagaauccag

SEQ ID NO: 599660 - RNA, 19 nt, Artificial Sequence
  Description of Artificial Sequence: Synthetic oligonucleotide
  Sense strand starting at position 3955 of SEQ ID NO: 584923
uggauucuuucuuuaagau

SEQ ID NO: 599661 - RNA, 19 nt, Artificial Sequence
  Description of Artificial Sequence: Synthetic oligonucleotide
  Antisense strand to SEQ ID NO: 599660
aucuuaaagaaagaaucca

SEQ ID NO: 599662 - RNA, 19 nt, Artificial Sequence
  Description of Artificial Sequence: Synthetic oligonucleotide
  Sense strand starting at position 41 of SEQ ID NO: 584924
gugugugauccugagaugg

SEQ ID NO: 599663 - RNA, 19 nt, Artificial Sequence
  Description of Artificial Sequence: Synthetic oligonucleotide
  Antisense strand to SEQ ID NO: 599662
ccaucucaggaucacacac

SEQ ID NO: 599664 - RNA, 19 nt, Artificial Sequence
  Description of Artificial Sequence: Synthetic oligonucleotide
  Sense strand starting at position 592 of SEQ ID NO: 584924
aagaaucaugauggcugua

SEQ ID NO: 599665 - RNA, 19 nt, Artificial Sequence
  Description of Artificial Sequence: Synthetic oligonucleotide
  Antisense strand to SEQ ID NO: 599664
uacagccaucaugauucuu

SEQ ID NO: 599666 - RNA, 19 nt, Artificial Sequence
  Description of Artificial Sequence: Synthetic oligonucleotide
  Sense strand starting at position 594 of SEQ ID NO: 584924
gaaucaugauggcuguaau

SEQ ID NO: 599667 - RNA, 19 nt, Artificial Sequence
  Description of Artificial Sequence: Synthetic oligonucleotide
  Antisense strand to SEQ ID NO: 599666
auuacagccaucaugauuc

SEQ ID NO: 599668 - RNA, 19 nt, Artificial Sequence
  Description of Artificial Sequence: Synthetic oligonucleotide
  Sense strand starting at position 595 of SEQ ID NO: 584924
aaucaugauggcuguaauu

SEQ ID NO: 599669 - RNA, 19 nt, Artificial Sequence
  Description of Artificial Sequence: Synthetic oligonucleotide
  Antisense strand to SEQ ID NO: 599668
aauuacagccaucaugauu

SEQ ID NO: 599670 - RNA, 19 nt, Artificial Sequence
  Description of Artificial Sequence: Synthetic oligonucleotide
  Sense strand starting at position 617 of SEQ ID NO: 584924
ucucaaugggcucaccaaa

SEQ ID NO: 599671 - RNA, 19 nt, Artificial Sequence
  Description of Artificial Sequence: Synthetic oligonucleotide
  Antisense strand to SEQ ID NO: 599670
uuuggugagcccauugaga

SEQ ID NO: 599672 - RNA, 19 nt, Artificial Sequence
  Description of Artificial Sequence: Synthetic oligonucleotide
  Sense strand starting at position 670 of SEQ ID NO: 584924
acuuauguaugguuaagac

SEQ ID NO: 599673 - RNA, 19 nt, Artificial Sequence
  Description of Artificial Sequence: Synthetic oligonucleotide
  Antisense strand to SEQ ID NO: 599672
gucuuaaccauacauaagu

SEQ ID NO: 599674 - RNA, 19 nt, Artificial Sequence
  Description of Artificial Sequence: Synthetic oligonucleotide
  Sense strand starting at position 757 of SEQ ID NO: 584924
acuggccucugaguuagaa

SEQ ID NO: 599675 - RNA, 19 nt, Artificial Sequence
  Description of Artificial Sequence: Synthetic oligonucleotide
  Antisense strand to SEQ ID NO: 599674
uucuaacucagaggccagu

SEQ ID NO: 599676 - RNA, 19 nt, Artificial Sequence
  Description of Artificial Sequence: Synthetic oligonucleotide
  Sense strand starting at position 759 of SEQ ID NO: 584924
uggccucugaguuagaaag

SEQ ID NO: 599677 - RNA, 19 nt, Artificial Sequence
  Description of Artificial Sequence: Synthetic oligonucleotide
  Antisense strand to SEQ ID NO: 599676
cuuucuaacucagaggcca

SEQ ID NO: 599678 - RNA, 19 nt, Artificial Sequence
  Description of Artificial Sequence: Synthetic oligonucleotide
  Sense strand starting at position 876 of SEQ ID NO: 584924
aucaaagcugcugaauauu

SEQ ID NO: 599679 - RNA, 19 nt, Artificial Sequence
  Description of Artificial Sequence: Synthetic oligonucleotide
  Antisense strand to SEQ ID NO: 599678
aauauucagcagcuuugau

SEQ ID NO: 599680 - RNA, 19 nt, Artificial Sequence
  Description of Artificial Sequence: Synthetic oligonucleotide
  Sense strand starting at position 955 of SEQ ID NO: 584924
cagggauaucuauggucag

SEQ ID NO: 599681 - RNA, 19 nt, Artificial Sequence
  Description of Artificial Sequence: Synthetic oligonucleotide
  Antisense strand to SEQ ID NO: 599680
cugaccauagauaucccug

SEQ ID NO: 599682 - RNA, 19 nt, Artificial Sequence
  Description of Artificial Sequence: Synthetic oligonucleotide
  Sense strand starting at position 958 of SEQ ID NO: 584924
ggauaucuauggucaguac

SEQ ID NO: 599683 - RNA, 19 nt, Artificial Sequence
  Description of Artificial Sequence: Synthetic oligonucleotide
  Antisense strand to SEQ ID NO: 599682
guacugaccauagauaucc

SEQ ID NO: 599684 - RNA, 19 nt, Artificial Sequence
  Description of Artificial Sequence: Synthetic oligonucleotide
  Sense strand starting at position 959 of SEQ ID NO: 584924
gauaucuauggucaguaca

SEQ ID NO: 599685 - RNA, 19 nt, Artificial Sequence
  Description of Artificial Sequence: Synthetic oligonucleotide
  Antisense strand to SEQ ID NO: 599684
uguacugaccauagauauc

SEQ ID NO: 599686 - RNA, 19 nt, Artificial Sequence
  Description of Artificial Sequence: Synthetic oligonucleotide
  Sense strand starting at position 1031 of SEQ ID NO: 584924
uuuacuaauugggugaguu

SEQ ID NO: 599687 - RNA, 19 nt, Artificial Sequence
  Description of Artificial Sequence: Synthetic oligonucleotide
  Antisense strand to SEQ ID NO: 599686
aacucacccaauuaguaaa

SEQ ID NO: 599688 - RNA, 19 nt, Artificial Sequence
  Description of Artificial Sequence: Synthetic oligonucleotide
  Sense strand starting at position 1032 of SEQ ID NO: 584924
uuacuaauugggugaguua

SEQ ID NO: 599689 - RNA, 19 nt, Artificial Sequence
  Description of Artificial Sequence: Synthetic oligonucleotide
  Antisense strand to SEQ ID NO: 599688
uaacucacccaauuaguaa

SEQ ID NO: 599690 - RNA, 19 nt, Artificial Sequence
  Description of Artificial Sequence: Synthetic oligonucleotide
  Sense strand starting at position 1035 of SEQ ID NO: 584924
cuaauugggugaguuacuu

SEQ ID NO: 599691 - RNA, 19 nt, Artificial Sequence
  Description of Artificial Sequence: Synthetic oligonucleotide
  Antisense strand to SEQ ID NO: 599690
aaguaacucacccaauuag

SEQ ID NO: 599692 - RNA, 19 nt, Artificial Sequence
  Description of Artificial Sequence: Synthetic oligonucleotide
  Sense strand starting at position 1063 of SEQ ID NO: 584924
aguugagcugaacacaauu

SEQ ID NO: 599693 - RNA, 19 nt, Artificial Sequence
  Description of Artificial Sequence: Synthetic oligonucleotide
  Antisense strand to SEQ ID NO: 599692
aauuguguucagcucaacu

SEQ ID NO: 599694 - RNA, 19 nt, Artificial Sequence
  Description of Artificial Sequence: Synthetic oligonucleotide
  Sense strand starting at position 1181 of SEQ ID NO: 584924
cuucuugugcgcccaagua

SEQ ID NO: 599695 - RNA, 19 nt, Artificial Sequence
  Description of Artificial Sequence: Synthetic oligonucleotide
  Antisense strand to SEQ ID NO: 599694
uacuugggcgcacaagaag

SEQ ID NO: 599696 - RNA, 19 nt, Artificial Sequence
  Description of Artificial Sequence: Synthetic oligonucleotide
  Sense strand starting at position 1352 of SEQ ID NO: 584924
uaaguaacuccugggagua

SEQ ID NO: 599697 - RNA, 19 nt, Artificial Sequence
  Description of Artificial Sequence: Synthetic oligonucleotide
  Antisense strand to SEQ ID NO: 599696
uacucccaggaguuacuua

SEQ ID NO: 599698 - RNA, 19 nt, Artificial Sequence
  Description of Artificial Sequence: Synthetic oligonucleotide
  Sense strand starting at position 1353 of SEQ ID NO: 584924
aaguaacuccugggaguaa

SEQ ID NO: 599699 - RNA, 19 nt, Artificial Sequence
  Description of Artificial Sequence: Synthetic oligonucleotide
  Antisense strand to SEQ ID NO: 599698
uuacucccaggaguuacuu

SEQ ID NO: 599700 - RNA, 19 nt, Artificial Sequence
  Description of Artificial Sequence: Synthetic oligonucleotide
  Sense strand starting at position 1367 of SEQ ID NO: 584924
aguaaaugaguagaugcau

SEQ ID NO: 599701 - RNA, 19 nt, Artificial Sequence
  Description of Artificial Sequence: Synthetic oligonucleotide
  Antisense strand to SEQ ID NO: 599700
augcaucuacucauuuacu

SEQ ID NO: 599702 - RNA, 19 nt, Artificial Sequence
  Description of Artificial Sequence: Synthetic oligonucleotide
  Sense strand starting at position 1484 of SEQ ID NO: 584924
uccagaaauugcuccgaag

SEQ ID NO: 599703 - RNA, 19 nt, Artificial Sequence
  Description of Artificial Sequence: Synthetic oligonucleotide
  Antisense strand to SEQ ID NO: 599702
cuucggagcaauuucugga

SEQ ID NO: 599704 - RNA, 19 nt, Artificial Sequence
  Description of Artificial Sequence: Synthetic oligonucleotide
  Sense strand starting at position 1600 of SEQ ID NO: 584924
accgguuuaaauggucaga

SEQ ID NO: 599705 - RNA, 19 nt, Artificial Sequence
  Description of Artificial Sequence: Synthetic oligonucleotide
  Antisense strand to SEQ ID NO: 599704
ucugaccauuuaaaccggu

SEQ ID NO: 599706 - RNA, 19 nt, Artificial Sequence
  Description of Artificial Sequence: Synthetic oligonucleotide
  Sense strand starting at position 1602 of SEQ ID NO: 584924
cgguuuaaauggucagaga

SEQ ID NO: 599707 - RNA, 19 nt, Artificial Sequence
  Description of Artificial Sequence: Synthetic oligonucleotide
  Antisense strand to SEQ ID NO: 599706
ucucugaccauuuaaaccg

SEQ ID NO: 599708 - RNA, 19 nt, Artificial Sequence
  Description of Artificial Sequence: Synthetic oligonucleotide
  Sense strand starting at position 2223 of SEQ ID NO: 584924
aggccucauccuuauguca

SEQ ID NO: 599709 - RNA, 19 nt, Artificial Sequence
  Description of Artificial Sequence: Synthetic oligonucleotide
  Antisense strand to SEQ ID NO: 599708
ugacauaaggaugaggccu

SEQ ID NO: 599710 - RNA, 19 nt, Artificial Sequence
  Description of Artificial Sequence: Synthetic oligonucleotide
  Sense strand starting at position 2234 of SEQ ID NO: 584924
uuaugucagcgauaaauac

SEQ ID NO: 599711 - RNA, 19 nt, Artificial Sequence
  Description of Artificial Sequence: Synthetic oligonucleotide
  Antisense strand to SEQ ID NO: 599710
guauuuaucgcugacauaa

SEQ ID NO: 599712 - RNA, 19 nt, Artificial Sequence
  Description of Artificial Sequence: Synthetic oligonucleotide
  Sense strand starting at position 2282 of SEQ ID NO: 584924
gcgagugaggcauaggaaa

SEQ ID NO: 599713 - RNA, 19 nt, Artificial Sequence
  Description of Artificial Sequence: Synthetic oligonucleotide
  Antisense strand to SEQ ID NO: 599712
uuuccuaugccucacucgc

SEQ ID NO: 599714 - RNA, 19 nt, Artificial Sequence
  Description of Artificial Sequence: Synthetic oligonucleotide
  Sense strand starting at position 2284 of SEQ ID NO: 584924
gagugaggcauaggaaacu

SEQ ID NO: 599715 - RNA, 19 nt, Artificial Sequence
  Description of Artificial Sequence: Synthetic oligonucleotide
  Antisense strand to SEQ ID NO: 599714
aguuuccuaugccucacuc

SEQ ID NO: 599716 - RNA, 19 nt, Artificial Sequence
  Description of Artificial Sequence: Synthetic oligonucleotide
  Sense strand starting at position 2341 of SEQ ID NO: 584924
ugugcaaaugugucugcga

SEQ ID NO: 599717 - RNA, 19 nt, Artificial Sequence
  Description of Artificial Sequence: Synthetic oligonucleotide
  Antisense strand to SEQ ID NO: 599716
ucgcagacacauuugcaca

SEQ ID NO: 599718 - RNA, 19 nt, Artificial Sequence
  Description of Artificial Sequence: Synthetic oligonucleotide
  Sense strand starting at position 2497 of SEQ ID NO: 584924
ccuggugugcguucuuuca

SEQ ID NO: 599719 - RNA, 19 nt, Artificial Sequence
  Description of Artificial Sequence: Synthetic oligonucleotide
  Antisense strand to SEQ ID NO: 599718
ugaaagaacgcacaccagg

SEQ ID NO: 599720 - RNA, 19 nt, Artificial Sequence
  Description of Artificial Sequence: Synthetic oligonucleotide
  Sense strand starting at position 2581 of SEQ ID NO: 584924
acagcugcucauuaugaaa

SEQ ID NO: 599721 - RNA, 19 nt, Artificial Sequence
  Description of Artificial Sequence: Synthetic oligonucleotide
  Antisense strand to SEQ ID NO: 599720
uuucauaaugagcagcugu

SEQ ID NO: 599722 - RNA, 19 nt, Artificial Sequence
  Description of Artificial Sequence: Synthetic oligonucleotide
  Sense strand starting at position 2667 of SEQ ID NO: 584924
agauuaugaaguggauguu

SEQ ID NO: 599723 - RNA, 19 nt, Artificial Sequence
  Description of Artificial Sequence: Synthetic oligonucleotide
  Antisense strand to SEQ ID NO: 599722
aacauccacuucauaaucu

SEQ ID NO: 599724 - RNA, 19 nt, Artificial Sequence
  Description of Artificial Sequence: Synthetic oligonucleotide
  Sense strand starting at position 2670 of SEQ ID NO: 584924
uuaugaaguggauguuaga

SEQ ID NO: 599725 - RNA, 19 nt, Artificial Sequence
  Description of Artificial Sequence: Synthetic oligonucleotide
  Antisense strand to SEQ ID NO: 599724
ucuaacauccacuucauaa

SEQ ID NO: 599726 - RNA, 19 nt, Artificial Sequence
  Description of Artificial Sequence: Synthetic oligonucleotide
  Sense strand starting at position 2710 of SEQ ID NO: 584924
gcaacagucacagggaaau

SEQ ID NO: 599727 - RNA, 19 nt, Artificial Sequence
  Description of Artificial Sequence: Synthetic oligonucleotide
  Antisense strand to SEQ ID NO: 599726
auuucccugugacuguugc

SEQ ID NO: 599728 - RNA, 19 nt, Artificial Sequence
  Description of Artificial Sequence: Synthetic oligonucleotide
  Sense strand starting at position 2742 of SEQ ID NO: 584924
caagauguacaggguaagu

SEQ ID NO: 599729 - RNA, 19 nt, Artificial Sequence
  Description of Artificial Sequence: Synthetic oligonucleotide
  Antisense strand to SEQ ID NO: 599728
acuuacccuguacaucuug

SEQ ID NO: 599730 - RNA, 19 nt, Artificial Sequence
  Description of Artificial Sequence: Synthetic oligonucleotide
  Sense strand starting at position 2806 of SEQ ID NO: 584924
gaagaugaguaacuuguuu

SEQ ID NO: 599731 - RNA, 19 nt, Artificial Sequence
  Description of Artificial Sequence: Synthetic oligonucleotide
  Antisense strand to SEQ ID NO: 599730
aaacaaguuacucaucuuc

SEQ ID NO: 599732 - RNA, 19 nt, Artificial Sequence
  Description of Artificial Sequence: Synthetic oligonucleotide
  Sense strand starting at position 2812 of SEQ ID NO: 584924
gaguaacuuguuuaagguc

SEQ ID NO: 599733 - RNA, 19 nt, Artificial Sequence
  Description of Artificial Sequence: Synthetic oligonucleotide
  Antisense strand to SEQ ID NO: 599732
gaccuuaaacaaguuacuc

SEQ ID NO: 599734 - RNA, 19 nt, Artificial Sequence
  Description of Artificial Sequence: Synthetic oligonucleotide
  Sense strand starting at position 3043 of SEQ ID NO: 584924
agcggacaccuguaauaca

SEQ ID NO: 599735 - RNA, 19 nt, Artificial Sequence
  Description of Artificial Sequence: Synthetic oligonucleotide
  Antisense strand to SEQ ID NO: 599734
uguauuacagguguccgcu

SEQ ID NO: 599736 - RNA, 19 nt, Artificial Sequence
  Description of Artificial Sequence: Synthetic oligonucleotide
  Sense strand starting at position 3223 of SEQ ID NO: 584924
ugcuguuugagacacauga

SEQ ID NO: 599737 - RNA, 19 nt, Artificial Sequence
  Description of Artificial Sequence: Synthetic oligonucleotide
  Antisense strand to SEQ ID NO: 599736
ucaugugucucaaacagca

SEQ ID NO: 599738 - RNA, 19 nt, Artificial Sequence
  Description of Artificial Sequence: Synthetic oligonucleotide
  Sense strand starting at position 3850 of SEQ ID NO: 584924
cuuggauuccaucagucau

SEQ ID NO: 599739 - RNA, 19 nt, Artificial Sequence
  Description of Artificial Sequence: Synthetic oligonucleotide
  Antisense strand to SEQ ID NO: 599738
augacugauggaauccaag

SEQ ID NO: 599740 - RNA, 19 nt, Artificial Sequence
  Description of Artificial Sequence: Synthetic oligonucleotide
  Sense strand starting at position 3880 of SEQ ID NO: 584924
ucauauugacccugaggau

SEQ ID NO: 599741 - RNA, 19 nt, Artificial Sequence
  Description of Artificial Sequence: Synthetic oligonucleotide
  Antisense strand to SEQ ID NO: 599740
auccucagggucaauauga

SEQ ID NO: 599742 - RNA, 19 nt, Artificial Sequence
  Description of Artificial Sequence: Synthetic oligonucleotide
  Sense strand starting at position 17 of SEQ ID NO: 584925
gauucuagcuuggugauaa

SEQ ID NO: 599743 - RNA, 19 nt, Artificial Sequence
  Description of Artificial Sequence: Synthetic oligonucleotide
  Antisense strand to SEQ ID NO: 599742
uuaucaccaagcuagaauc

SEQ ID NO: 599744 - RNA, 19 nt, Artificial Sequence
  Description of Artificial Sequence: Synthetic oligonucleotide
  Sense strand starting at position 194 of SEQ ID NO: 584925
cguguaaggccuccuaguu

SEQ ID NO: 599745 - RNA, 19 nt, Artificial Sequence
  Description of Artificial Sequence: Synthetic oligonucleotide
  Antisense strand to SEQ ID NO: 599744
aacuaggaggccuuacacg

SEQ ID NO: 599746 - RNA, 19 nt, Artificial Sequence
  Description of Artificial Sequence: Synthetic oligonucleotide
  Sense strand starting at position 600 of SEQ ID NO: 584925
uuuauuugugcauaguguu

SEQ ID NO: 599747 - RNA, 19 nt, Artificial Sequence
  Description of Artificial Sequence: Synthetic oligonucleotide
  Antisense strand to SEQ ID NO: 599746
aacacuaugcacaaauaaa

SEQ ID NO: 599748 - RNA, 19 nt, Artificial Sequence
  Description of Artificial Sequence: Synthetic oligonucleotide
  Sense strand starting at position 678 of SEQ ID NO: 584925
accucaucagguuguaaau

SEQ ID NO: 599749 - RNA, 19 nt, Artificial Sequence
  Description of Artificial Sequence: Synthetic oligonucleotide
  Antisense strand to SEQ ID NO: 599748
auuuacaaccugaugaggu

SEQ ID NO: 599750 - RNA, 19 nt, Artificial Sequence
  Description of Artificial Sequence: Synthetic oligonucleotide
  Sense strand starting at position 726 of SEQ ID NO: 584925
gcaugcuguguuuaauuua

SEQ ID NO: 599751 - RNA, 19 nt, Artificial Sequence
  Description of Artificial Sequence: Synthetic oligonucleotide
  Antisense strand to SEQ ID NO: 599750
uaaauuaaacacagcaugc

SEQ ID NO: 599752 - RNA, 19 nt, Artificial Sequence
  Description of Artificial Sequence: Synthetic oligonucleotide
  Sense strand starting at position 978 of SEQ ID NO: 584925
gauaccacugggugucaau

SEQ ID NO: 599753 - RNA, 19 nt, Artificial Sequence
  Description of Artificial Sequence: Synthetic oligonucleotide
  Antisense strand to SEQ ID NO: 599752
auugacacccagugguauc

SEQ ID NO: 599754 - RNA, 19 nt, Artificial Sequence
  Description of Artificial Sequence: Synthetic oligonucleotide
  Sense strand starting at position 1120 of SEQ ID NO: 584925
gacgauuaguucucugaag

SEQ ID NO: 599755 - RNA, 19 nt, Artificial Sequence
  Description of Artificial Sequence: Synthetic oligonucleotide
  Antisense strand to SEQ ID NO: 599754
cuucagagaacuaaucguc

SEQ ID NO: 599756 - RNA, 19 nt, Artificial Sequence
  Description of Artificial Sequence: Synthetic oligonucleotide
  Sense strand starting at position 1121 of SEQ ID NO: 584925
acgauuaguucucugaaga

SEQ ID NO: 599757 - RNA, 19 nt, Artificial Sequence
  Description of Artificial Sequence: Synthetic oligonucleotide
  Antisense strand to SEQ ID NO: 599756
ucuucagagaacuaaucgu

SEQ ID NO: 599758 - RNA, 19 nt, Artificial Sequence
  Description of Artificial Sequence: Synthetic oligonucleotide
  Sense strand starting at position 1122 of SEQ ID NO: 584925
cgauuaguucucugaagag

SEQ ID NO: 599759 - RNA, 19 nt, Artificial Sequence
  Description of Artificial Sequence: Synthetic oligonucleotide
  Antisense strand to SEQ ID NO: 599758
cucuucagagaacuaaucg

SEQ ID NO: 599760 - RNA, 19 nt, Artificial Sequence
  Description of Artificial Sequence: Synthetic oligonucleotide
  Sense strand starting at position 1126 of SEQ ID NO: 584925
uaguucucugaagaggcaa

SEQ ID NO: 599761 - RNA, 19 nt, Artificial Sequence
  Description of Artificial Sequence: Synthetic oligonucleotide
  Antisense strand to SEQ ID NO: 599760
uugccucuucagagaacua

SEQ ID NO: 599762 - RNA, 19 nt, Artificial Sequence
  Description of Artificial Sequence: Synthetic oligonucleotide
  Sense strand starting at position 1156 of SEQ ID NO: 584925
aauguaugauacgcauaaa

SEQ ID NO: 599763 - RNA, 19 nt, Artificial Sequence
  Description of Artificial Sequence: Synthetic oligonucleotide
  Antisense strand to SEQ ID NO: 599762
uuuaugcguaucauacauu

SEQ ID NO: 599764 - RNA, 19 nt, Artificial Sequence
  Description of Artificial Sequence: Synthetic oligonucleotide
  Sense strand starting at position 1159 of SEQ ID NO: 584925
guaugauacgcauaaacac

SEQ ID NO: 599765 - RNA, 19 nt, Artificial Sequence
  Description of Artificial Sequence: Synthetic oligonucleotide
  Antisense strand to SEQ ID NO: 599764
guguuuaugcguaucauac

SEQ ID NO: 599766 - RNA, 19 nt, Artificial Sequence
  Description of Artificial Sequence: Synthetic oligonucleotide
  Sense strand starting at position 2228 of SEQ ID NO: 584925
aauugagagucuguuacca

SEQ ID NO: 599767 - RNA, 19 nt, Artificial Sequence
  Description of Artificial Sequence: Synthetic oligonucleotide
  Antisense strand to SEQ ID NO: 599766
ugguaacagacucucaauu

SEQ ID NO: 599768 - RNA, 19 nt, Artificial Sequence
  Description of Artificial Sequence: Synthetic oligonucleotide
  Sense strand starting at position 2232 of SEQ ID NO: 584925
gagagucuguuaccacuau

SEQ ID NO: 599769 - RNA, 19 nt, Artificial Sequence
  Description of Artificial Sequence: Synthetic oligonucleotide
  Antisense strand to SEQ ID NO: 599768
auagugguaacagacucuc

SEQ ID NO: 599770 - RNA, 19 nt, Artificial Sequence
  Description of Artificial Sequence: Synthetic oligonucleotide
  Sense strand starting at position 2236 of SEQ ID NO: 584925
gucuguuaccacuauuaau

SEQ ID NO: 599771 - RNA, 19 nt, Artificial Sequence
  Description of Artificial Sequence: Synthetic oligonucleotide
  Antisense strand to SEQ ID NO: 599770
auuaauagugguaacagac

SEQ ID NO: 599772 - RNA, 19 nt, Artificial Sequence
  Description of Artificial Sequence: Synthetic oligonucleotide
  Sense strand starting at position 2276 of SEQ ID NO: 584925
cacauaacgguguaucuaa

SEQ ID NO: 599773 - RNA, 19 nt, Artificial Sequence
  Description of Artificial Sequence: Synthetic oligonucleotide
  Antisense strand to SEQ ID NO: 599772
uuagauacaccguuaugug

SEQ ID NO: 599774 - RNA, 19 nt, Artificial Sequence
  Description of Artificial Sequence: Synthetic oligonucleotide
  Sense strand starting at position 2379 of SEQ ID NO: 584925
ggugucucucugucgucaa

SEQ ID NO: 599775 - RNA, 19 nt, Artificial Sequence
  Description of Artificial Sequence: Synthetic oligonucleotide
  Antisense strand to SEQ ID NO: 599774
uugacgacagagagacacc

SEQ ID NO: 599776 - RNA, 19 nt, Artificial Sequence
  Description of Artificial Sequence: Synthetic oligonucleotide
  Sense strand starting at position 2419 of SEQ ID NO: 584925
acuuaaagccucuggagaa

SEQ ID NO: 599777 - RNA, 19 nt, Artificial Sequence
  Description of Artificial Sequence: Synthetic oligonucleotide
  Antisense strand to SEQ ID NO: 599776
uucuccagaggcuuuaagu

SEQ ID NO: 599778 - RNA, 19 nt, Artificial Sequence
  Description of Artificial Sequence: Synthetic oligonucleotide
  Sense strand starting at position 2438 of SEQ ID NO: 584925
ggaauugcaggcugagaga

SEQ ID NO: 599779 - RNA, 19 nt, Artificial Sequence
  Description of Artificial Sequence: Synthetic oligonucleotide
  Antisense strand to SEQ ID NO: 599778
ucucucagccugcaauucc

SEQ ID NO: 599780 - RNA, 19 nt, Artificial Sequence
  Description of Artificial Sequence: Synthetic oligonucleotide
  Sense strand starting at position 2838 of SEQ ID NO: 584925
uaaagaagguguucccuau

SEQ ID NO: 599781 - RNA, 19 nt, Artificial Sequence
  Description of Artificial Sequence: Synthetic oligonucleotide
  Antisense strand to SEQ ID NO: 599780
auagggaacaccuucuuua

SEQ ID NO: 599782 - RNA, 19 nt, Artificial Sequence
  Description of Artificial Sequence: Synthetic oligonucleotide
  Sense strand starting at position 2842 of SEQ ID NO: 584925
gaagguguucccuauucuc

SEQ ID NO: 599783 - RNA, 19 nt, Artificial Sequence
  Description of Artificial Sequence: Synthetic oligonucleotide
  Antisense strand to SEQ ID NO: 599782
gagaauagggaacaccuuc

SEQ ID NO: 599784 - RNA, 19 nt, Artificial Sequence
  Description of Artificial Sequence: Synthetic oligonucleotide
  Sense strand starting at position 2898 of SEQ ID NO: 584925
gaucaugaauuugauaugu

SEQ ID NO: 599785 - RNA, 19 nt, Artificial Sequence
  Description of Artificial Sequence: Synthetic oligonucleotide
  Antisense strand to SEQ ID NO: 599784
acauaucaaauucaugauc

SEQ ID NO: 599786 - RNA, 19 nt, Artificial Sequence
  Description of Artificial Sequence: Synthetic oligonucleotide
  Sense strand starting at position 3084 of SEQ ID NO: 584925
ugauaaauauagcuagacu

SEQ ID NO: 599787 - RNA, 19 nt, Artificial Sequence
  Description of Artificial Sequence: Synthetic oligonucleotide
  Antisense strand to SEQ ID NO: 599786
agucuagcuauauuuauca

SEQ ID NO: 599788 - RNA, 19 nt, Artificial Sequence
  Description of Artificial Sequence: Synthetic oligonucleotide
  Sense strand starting at position 3121 of SEQ ID NO: 584925
acaaauuauuugggaauuc

SEQ ID NO: 599789 - RNA, 19 nt, Artificial Sequence
  Description of Artificial Sequence: Synthetic oligonucleotide
  Antisense strand to SEQ ID NO: 599788
gaauucccaaauaauuugu

SEQ ID NO: 599790 - RNA, 19 nt, Artificial Sequence
  Description of Artificial Sequence: Synthetic oligonucleotide
  Sense strand starting at position 3139 of SEQ ID NO: 584925
cccauagugauggauguuu

SEQ ID NO: 599791 - RNA, 19 nt, Artificial Sequence
  Description of Artificial Sequence: Synthetic oligonucleotide
  Antisense strand to SEQ ID NO: 599790
aaacauccaucacuauggg

SEQ ID NO: 599792 - RNA, 19 nt, Artificial Sequence
  Description of Artificial Sequence: Synthetic oligonucleotide
  Sense strand starting at position 3243 of SEQ ID NO: 584925
cgaauugucuuauuuguau

SEQ ID NO: 599793 - RNA, 19 nt, Artificial Sequence
  Description of Artificial Sequence: Synthetic oligonucleotide
  Antisense strand to SEQ ID NO: 599792
auacaaauaagacaauucg

SEQ ID NO: 599794 - RNA, 19 nt, Artificial Sequence
  Description of Artificial Sequence: Synthetic oligonucleotide
  Sense strand starting at position 3351 of SEQ ID NO: 584925
guggcaucccaugaauuaa

SEQ ID NO: 599795 - RNA, 19 nt, Artificial Sequence
  Description of Artificial Sequence: Synthetic oligonucleotide
  Antisense strand to SEQ ID NO: 599794
uuaauucaugggaugccac

SEQ ID NO: 599796 - RNA, 19 nt, Artificial Sequence
  Description of Artificial Sequence: Synthetic oligonucleotide
  Sense strand starting at position 3374 of SEQ ID NO: 584925
aagaucugacuacguuaga

SEQ ID NO: 599797 - RNA, 19 nt, Artificial Sequence
  Description of Artificial Sequence: Synthetic oligonucleotide
  Antisense strand to SEQ ID NO: 599796
ucuaacguagucagaucuu

SEQ ID NO: 599798 - RNA, 19 nt, Artificial Sequence
  Description of Artificial Sequence: Synthetic oligonucleotide
  Sense strand starting at position 3375 of SEQ ID NO: 584925
agaucugacuacguuagau

SEQ ID NO: 599799 - RNA, 19 nt, Artificial Sequence
  Description of Artificial Sequence: Synthetic oligonucleotide
  Antisense strand to SEQ ID NO: 599798
aucuaacguagucagaucu

SEQ ID NO: 599800 - RNA, 19 nt, Artificial Sequence
  Description of Artificial Sequence: Synthetic oligonucleotide
  Sense strand starting at position 3377 of SEQ ID NO: 584925
aucugacuacguuagaugu

SEQ ID NO: 599801 - RNA, 19 nt, Artificial Sequence
  Description of Artificial Sequence: Synthetic oligonucleotide
  Antisense strand to SEQ ID NO: 599800
acaucuaacguagucagau

SEQ ID NO: 599802 - RNA, 19 nt, Artificial Sequence
  Description of Artificial Sequence: Synthetic oligonucleotide
  Sense strand starting at position 3394 of SEQ ID NO: 584925
gugcauuguagccuggcaa

SEQ ID NO: 599803 - RNA, 19 nt, Artificial Sequence
  Description of Artificial Sequence: Synthetic oligonucleotide
  Antisense strand to SEQ ID NO: 599802
uugccaggcuacaaugcac

SEQ ID NO: 599804 - RNA, 19 nt, Artificial Sequence
  Description of Artificial Sequence: Synthetic oligonucleotide
  Sense strand starting at position 3502 of SEQ ID NO: 584925
uguagcauuuguguuuaca

SEQ ID NO: 599805 - RNA, 19 nt, Artificial Sequence
  Description of Artificial Sequence: Synthetic oligonucleotide
  Antisense strand to SEQ ID NO: 599804
uguaaacacaaaugcuaca

SEQ ID NO: 599806 - RNA, 19 nt, Artificial Sequence
  Description of Artificial Sequence: Synthetic oligonucleotide
  Sense strand starting at position 3556 of SEQ ID NO: 584925
cuucuaaauggacauguuu

SEQ ID NO: 599807 - RNA, 19 nt, Artificial Sequence
  Description of Artificial Sequence: Synthetic oligonucleotide
  Antisense strand to SEQ ID NO: 599806
aaacauguccauuuagaag

SEQ ID NO: 599808 - RNA, 19 nt, Artificial Sequence
  Description of Artificial Sequence: Synthetic oligonucleotide
  Sense strand starting at position 3677 of SEQ ID NO: 584925
guacaagagcuuuauaguc

SEQ ID NO: 599809 - RNA, 19 nt, Artificial Sequence
  Description of Artificial Sequence: Synthetic oligonucleotide
  Antisense strand to SEQ ID NO: 599808
gacuauaaagcucuuguac

SEQ ID NO: 599810 - RNA, 19 nt, Artificial Sequence
  Description of Artificial Sequence: Synthetic oligonucleotide
  Sense strand starting at position 3682 of SEQ ID NO: 584925
agagcuuuauagucagaga

SEQ ID NO: 599811 - RNA, 19 nt, Artificial Sequence
  Description of Artificial Sequence: Synthetic oligonucleotide
  Antisense strand to SEQ ID NO: 599810
ucucugacuauaaagcucu

SEQ ID NO: 599812 - RNA, 19 nt, Artificial Sequence
  Description of Artificial Sequence: Synthetic oligonucleotide
  Sense strand starting at position 3697 of SEQ ID NO: 584925
gagaucuuauauucccgau

SEQ ID NO: 599813 - RNA, 19 nt, Artificial Sequence
  Description of Artificial Sequence: Synthetic oligonucleotide
  Antisense strand to SEQ ID NO: 599812
aucgggaauauaagaucuc

SEQ ID NO: 599814 - RNA, 19 nt, Artificial Sequence
  Description of Artificial Sequence: Synthetic oligonucleotide
  Sense strand starting at position 3716 of SEQ ID NO: 584925
auaagagacugacaauaaa

SEQ ID NO: 599815 - RNA, 19 nt, Artificial Sequence
  Description of Artificial Sequence: Synthetic oligonucleotide
  Antisense strand to SEQ ID NO: 599814
uuuauugucagucucuuau

SEQ ID NO: 599816 - RNA, 19 nt, Artificial Sequence
  Description of Artificial Sequence: Synthetic oligonucleotide
  Sense strand starting at position 3803 of SEQ ID NO: 584925
guaguuuguacugaaggag

SEQ ID NO: 599817 - RNA, 19 nt, Artificial Sequence
  Description of Artificial Sequence: Synthetic oligonucleotide
  Antisense strand to SEQ ID NO: 599816
cuccuucaguacaaacuac

SEQ ID NO: 599818 - RNA, 19 nt, Artificial Sequence
  Description of Artificial Sequence: Synthetic oligonucleotide
  Sense strand starting at position 3850 of SEQ ID NO: 584925
gcagcuuugagguagagau

SEQ ID NO: 599819 - RNA, 19 nt, Artificial Sequence
  Description of Artificial Sequence: Synthetic oligonucleotide
  Antisense strand to SEQ ID NO: 599818
aucucuaccucaaagcugc

SEQ ID NO: 599820 - RNA, 19 nt, Artificial Sequence
  Description of Artificial Sequence: Synthetic oligonucleotide
  Sense strand starting at position 3977 of SEQ ID NO: 584925
agacaaauagcuugaaccu

SEQ ID NO: 599821 - RNA, 19 nt, Artificial Sequence
  Description of Artificial Sequence: Synthetic oligonucleotide
  Antisense strand to SEQ ID NO: 599820
agguucaagcuauuugucu

SEQ ID NO: 599822 - RNA, 19 nt, Artificial Sequence
  Description of Artificial Sequence: Synthetic oligonucleotide
  Sense strand starting at position 315 of SEQ ID NO: 584926
cgaucuguaggcuagggaa

SEQ ID NO: 599823 - RNA, 19 nt, Artificial Sequence
  Description of Artificial Sequence: Synthetic oligonucleotide
  Antisense strand to SEQ ID NO: 599822
uucccuagccuacagaucg

SEQ ID NO: 599824 - RNA, 19 nt, Artificial Sequence
  Description of Artificial Sequence: Synthetic oligonucleotide
  Sense strand starting at position 317 of SEQ ID NO: 584926
aucuguaggcuagggaaau

SEQ ID NO: 599825 - RNA, 19 nt, Artificial Sequence
  Description of Artificial Sequence: Synthetic oligonucleotide
  Antisense strand to SEQ ID NO: 599824
auuucccuagccuacagau

SEQ ID NO: 599826 - RNA, 19 nt, Artificial Sequence
  Description of Artificial Sequence: Synthetic oligonucleotide
  Sense strand starting at position 345 of SEQ ID NO: 584926
ugccaaauguccucuagcu

SEQ ID NO: 599827 - RNA, 19 nt, Artificial Sequence
  Description of Artificial Sequence: Synthetic oligonucleotide
  Antisense strand to SEQ ID NO: 599826
agcuagaggacauuuggca

SEQ ID NO: 599828 - RNA, 19 nt, Artificial Sequence
  Description of Artificial Sequence: Synthetic oligonucleotide
  Sense strand starting at position 383 of SEQ ID NO: 584926
gagucucugucuccugaca

SEQ ID NO: 599829 - RNA, 19 nt, Artificial Sequence
  Description of Artificial Sequence: Synthetic oligonucleotide
  Antisense strand to SEQ ID NO: 599828
ugucaggagacagagacuc

SEQ ID NO: 599830 - RNA, 19 nt, Artificial Sequence
  Description of Artificial Sequence: Synthetic oligonucleotide
  Sense strand starting at position 468 of SEQ ID NO: 584926
gcagaaugauaucccagua

SEQ ID NO: 599831 - RNA, 19 nt, Artificial Sequence
  Description of Artificial Sequence: Synthetic oligonucleotide
  Antisense strand to SEQ ID NO: 599830
uacugggauaucauucugc

SEQ ID NO: 599832 - RNA, 19 nt, Artificial Sequence
  Description of Artificial Sequence: Synthetic oligonucleotide
  Sense strand starting at position 558 of SEQ ID NO: 584926
cagcauguccucuguaaag

SEQ ID NO: 599833 - RNA, 19 nt, Artificial Sequence
  Description of Artificial Sequence: Synthetic oligonucleotide
  Antisense strand to SEQ ID NO: 599832
cuuuacagaggacaugcug

SEQ ID NO: 599834 - RNA, 19 nt, Artificial Sequence
  Description of Artificial Sequence: Synthetic oligonucleotide
  Sense strand starting at position 570 of SEQ ID NO: 584926
uguaaaggcuuucuuccau

SEQ ID NO: 599835 - RNA, 19 nt, Artificial Sequence
  Description of Artificial Sequence: Synthetic oligonucleotide
  Antisense strand to SEQ ID NO: 599834
auggaagaaagccuuuaca

SEQ ID NO: 599836 - RNA, 19 nt, Artificial Sequence
  Description of Artificial Sequence: Synthetic oligonucleotide
  Sense strand starting at position 577 of SEQ ID NO: 584926
gcuuucuuccaucagaaug

SEQ ID NO: 599837 - RNA, 19 nt, Artificial Sequence
  Description of Artificial Sequence: Synthetic oligonucleotide
  Antisense strand to SEQ ID NO: 599836
cauucugauggaagaaagc

SEQ ID NO: 599838 - RNA, 19 nt, Artificial Sequence
  Description of Artificial Sequence: Synthetic oligonucleotide
  Sense strand starting at position 669 of SEQ ID NO: 584926
ccaucagcugguggucaau

SEQ ID NO: 599839 - RNA, 19 nt, Artificial Sequence
  Description of Artificial Sequence: Synthetic oligonucleotide
  Antisense strand to SEQ ID NO: 599838
auugaccaccagcugaugg

SEQ ID NO: 599840 - RNA, 19 nt, Artificial Sequence
  Description of Artificial Sequence: Synthetic oligonucleotide
  Sense strand starting at position 813 of SEQ ID NO: 584926
ggaacuaauugcuuacaua

SEQ ID NO: 599841 - RNA, 19 nt, Artificial Sequence
  Description of Artificial Sequence: Synthetic oligonucleotide
  Antisense strand to SEQ ID NO: 599840
uauguaagcaauuaguucc

SEQ ID NO: 599842 - RNA, 19 nt, Artificial Sequence
  Description of Artificial Sequence: Synthetic oligonucleotide
  Sense strand starting at position 837 of SEQ ID NO: 584926
gaguacguucuggaaacua

SEQ ID NO: 599843 - RNA, 19 nt, Artificial Sequence
  Description of Artificial Sequence: Synthetic oligonucleotide
  Antisense strand to SEQ ID NO: 599842
uaguuuccagaacguacuc

SEQ ID NO: 599844 - RNA, 19 nt, Artificial Sequence
  Description of Artificial Sequence: Synthetic oligonucleotide
  Sense strand starting at position 848 of SEQ ID NO: 584926
ggaaacuagggccgaaaua

SEQ ID NO: 599845 - RNA, 19 nt, Artificial Sequence
  Description of Artificial Sequence: Synthetic oligonucleotide
  Antisense strand to SEQ ID NO: 599844
uauuucggcccuaguuucc

SEQ ID NO: 599846 - RNA, 19 nt, Artificial Sequence
  Description of Artificial Sequence: Synthetic oligonucleotide
  Sense strand starting at position 861 of SEQ ID NO: 584926
gaaauaggguaaggaguuu

SEQ ID NO: 599847 - RNA, 19 nt, Artificial Sequence
  Description of Artificial Sequence: Synthetic oligonucleotide
  Antisense strand to SEQ ID NO: 599846
aaacuccuuacccuauuuc

SEQ ID NO: 599848 - RNA, 19 nt, Artificial Sequence
  Description of Artificial Sequence: Synthetic oligonucleotide
  Sense strand starting at position 867 of SEQ ID NO: 584926
ggguaaggaguuuauucca

SEQ ID NO: 599849 - RNA, 19 nt, Artificial Sequence
  Description of Artificial Sequence: Synthetic oligonucleotide
  Antisense strand to SEQ ID NO: 599848
uggaauaaacuccuuaccc

SEQ ID NO: 599850 - RNA, 19 nt, Artificial Sequence
  Description of Artificial Sequence: Synthetic oligonucleotide
  Sense strand starting at position 872 of SEQ ID NO: 584926
aggaguuuauuccagugag

SEQ ID NO: 599851 - RNA, 19 nt, Artificial Sequence
  Description of Artificial Sequence: Synthetic oligonucleotide
  Antisense strand to SEQ ID NO: 599850
cucacuggaauaaacuccu

SEQ ID NO: 599852 - RNA, 19 nt, Artificial Sequence
  Description of Artificial Sequence: Synthetic oligonucleotide
  Sense strand starting at position 875 of SEQ ID NO: 584926
aguuuauuccagugaggaa

SEQ ID NO: 599853 - RNA, 19 nt, Artificial Sequence
  Description of Artificial Sequence: Synthetic oligonucleotide
  Antisense strand to SEQ ID NO: 599852
uuccucacuggaauaaacu

SEQ ID NO: 599854 - RNA, 19 nt, Artificial Sequence
  Description of Artificial Sequence: Synthetic oligonucleotide
  Sense strand starting at position 876 of SEQ ID NO: 584926
guuuauuccagugaggaag

SEQ ID NO: 599855 - RNA, 19 nt, Artificial Sequence
  Description of Artificial Sequence: Synthetic oligonucleotide
  Antisense strand to SEQ ID NO: 599854
cuuccucacuggaauaaac

SEQ ID NO: 599856 - RNA, 19 nt, Artificial Sequence
  Description of Artificial Sequence: Synthetic oligonucleotide
  Sense strand starting at position 888 of SEQ ID NO: 584926
gaggaagggucacuagcaa

SEQ ID NO: 599857 - RNA, 19 nt, Artificial Sequence
  Description of Artificial Sequence: Synthetic oligonucleotide
  Antisense strand to SEQ ID NO: 599856
uugcuagugacccuuccuc

SEQ ID NO: 599858 - RNA, 19 nt, Artificial Sequence
  Description of Artificial Sequence: Synthetic oligonucleotide
  Sense strand starting at position 1002 of SEQ ID NO: 584926
ugaggucucugggugucua

SEQ ID NO: 599859 - RNA, 19 nt, Artificial Sequence
  Description of Artificial Sequence: Synthetic oligonucleotide
  Antisense strand to SEQ ID NO: 599858
uagacacccagagaccuca

SEQ ID NO: 599860 - RNA, 19 nt, Artificial Sequence
  Description of Artificial Sequence: Synthetic oligonucleotide
  Sense strand starting at position 1087 of SEQ ID NO: 584926
gagccauucuuggcagagu

SEQ ID NO: 599861 - RNA, 19 nt, Artificial Sequence
  Description of Artificial Sequence: Synthetic oligonucleotide
  Antisense strand to SEQ ID NO: 599860
acucugccaagaauggcuc

SEQ ID NO: 599862 - RNA, 19 nt, Artificial Sequence
  Description of Artificial Sequence: Synthetic oligonucleotide
  Sense strand starting at position 1090 of SEQ ID NO: 584926
ccauucuuggcagaguuga

SEQ ID NO: 599863 - RNA, 19 nt, Artificial Sequence
  Description of Artificial Sequence: Synthetic oligonucleotide
  Antisense strand to SEQ ID NO: 599862
ucaacucugccaagaaugg

SEQ ID NO: 599864 - RNA, 19 nt, Artificial Sequence
  Description of Artificial Sequence: Synthetic oligonucleotide
  Sense strand starting at position 1392 of SEQ ID NO: 584926
gaauuauagccagguccac

SEQ ID NO: 599865 - RNA, 19 nt, Artificial Sequence
  Description of Artificial Sequence: Synthetic oligonucleotide
  Antisense strand to SEQ ID NO: 599864
guggaccuggcuauaauuc

SEQ ID NO: 599866 - RNA, 19 nt, Artificial Sequence
  Description of Artificial Sequence: Synthetic oligonucleotide
  Sense strand starting at position 1500 of SEQ ID NO: 584926
gcaacuaucaaguggagag

SEQ ID NO: 599867 - RNA, 19 nt, Artificial Sequence
  Description of Artificial Sequence: Synthetic oligonucleotide
  Antisense strand to SEQ ID NO: 599866
cucuccacuugauaguugc

SEQ ID NO: 599868 - RNA, 19 nt, Artificial Sequence
  Description of Artificial Sequence: Synthetic oligonucleotide
  Sense strand starting at position 1514 of SEQ ID NO: 584926
gagagaauuuacugaaaga

SEQ ID NO: 599869 - RNA, 19 nt, Artificial Sequence
  Description of Artificial Sequence: Synthetic oligonucleotide
  Antisense strand to SEQ ID NO: 599868
ucuuucaguaaauucucuc

SEQ ID NO: 599870 - RNA, 19 nt, Artificial Sequence
  Description of Artificial Sequence: Synthetic oligonucleotide
  Sense strand starting at position 1674 of SEQ ID NO: 584926
gcgccaucuccagaguucu

SEQ ID NO: 599871 - RNA, 19 nt, Artificial Sequence
  Description of Artificial Sequence: Synthetic oligonucleotide
  Antisense strand to SEQ ID NO: 599870
agaacucuggagauggcgc

SEQ ID NO: 599872 - RNA, 19 nt, Artificial Sequence
  Description of Artificial Sequence: Synthetic oligonucleotide
  Sense strand starting at position 1684 of SEQ ID NO: 584926
cagaguucucuccauggcu

SEQ ID NO: 599873 - RNA, 19 nt, Artificial Sequence
  Description of Artificial Sequence: Synthetic oligonucleotide
  Antisense strand to SEQ ID NO: 599872
agccauggagagaacucug

SEQ ID NO: 599874 - RNA, 19 nt, Artificial Sequence
  Description of Artificial Sequence: Synthetic oligonucleotide
  Sense strand starting at position 1686 of SEQ ID NO: 584926
gaguucucuccauggcuca

SEQ ID NO: 599875 - RNA, 19 nt, Artificial Sequence
  Description of Artificial Sequence: Synthetic oligonucleotide
  Antisense strand to SEQ ID NO: 599874
ugagccauggagagaacuc

SEQ ID NO: 599876 - RNA, 19 nt, Artificial Sequence
  Description of Artificial Sequence: Synthetic oligonucleotide
  Sense strand starting at position 1751 of SEQ ID NO: 584926
uuggguccuucccuguuaa

SEQ ID NO: 599877 - RNA, 19 nt, Artificial Sequence
  Description of Artificial Sequence: Synthetic oligonucleotide
  Antisense strand to SEQ ID NO: 599876
uuaacagggaaggacccaa

SEQ ID NO: 599878 - RNA, 19 nt, Artificial Sequence
  Description of Artificial Sequence: Synthetic oligonucleotide
  Sense strand starting at position 1752 of SEQ ID NO: 584926
uggguccuucccuguuaaa

SEQ ID NO: 599879 - RNA, 19 nt, Artificial Sequence
  Description of Artificial Sequence: Synthetic oligonucleotide
  Antisense strand to SEQ ID NO: 599878
uuuaacagggaaggaccca

SEQ ID NO: 599880 - RNA, 19 nt, Artificial Sequence
  Description of Artificial Sequence: Synthetic oligonucleotide
  Sense strand starting at position 2108 of SEQ ID NO: 584926
gaauuauucugguccugac

SEQ ID NO: 599881 - RNA, 19 nt, Artificial Sequence
  Description of Artificial Sequence: Synthetic oligonucleotide
  Antisense strand to SEQ ID NO: 599880
gucaggaccagaauaauuc

SEQ ID NO: 599882 - RNA, 19 nt, Artificial Sequence
  Description of Artificial Sequence: Synthetic oligonucleotide
  Sense strand starting at position 2238 of SEQ ID NO: 584926
cucuaaggcuguucugauc

SEQ ID NO: 599883 - RNA, 19 nt, Artificial Sequence
  Description of Artificial Sequence: Synthetic oligonucleotide
  Antisense strand to SEQ ID NO: 599882
gaucagaacagccuuagag

SEQ ID NO: 599884 - RNA, 19 nt, Artificial Sequence
  Description of Artificial Sequence: Synthetic oligonucleotide
  Sense strand starting at position 2524 of SEQ ID NO: 584926
ggcgcaguggcgucuaaau

SEQ ID NO: 599885 - RNA, 19 nt, Artificial Sequence
  Description of Artificial Sequence: Synthetic oligonucleotide
  Antisense strand to SEQ ID NO: 599884
auuuagacgccacugcgcc

SEQ ID NO: 599886 - RNA, 19 nt, Artificial Sequence
  Description of Artificial Sequence: Synthetic oligonucleotide
  Sense strand starting at position 2526 of SEQ ID NO: 584926
cgcaguggcgucuaaauuu

SEQ ID NO: 599887 - RNA, 19 nt, Artificial Sequence
  Description of Artificial Sequence: Synthetic oligonucleotide
  Antisense strand to SEQ ID NO: 599886
aaauuuagacgccacugcg

SEQ ID NO: 599888 - RNA, 19 nt, Artificial Sequence
  Description of Artificial Sequence: Synthetic oligonucleotide
  Sense strand starting at position 2551 of SEQ ID NO: 584926
acuaaaugcgucggagcau

SEQ ID NO: 599889 - RNA, 19 nt, Artificial Sequence
  Description of Artificial Sequence: Synthetic oligonucleotide
  Antisense strand to SEQ ID NO: 599888
augcuccgacgcauuuagu

SEQ ID NO: 599890 - RNA, 19 nt, Artificial Sequence
  Description of Artificial Sequence: Synthetic oligonucleotide
  Sense strand starting at position 2972 of SEQ ID NO: 584926
ccggguaugccuugcauga

SEQ ID NO: 599891 - RNA, 19 nt, Artificial Sequence
  Description of Artificial Sequence: Synthetic oligonucleotide
  Antisense strand to SEQ ID NO: 599890
ucaugcaaggcauacccgg

SEQ ID NO: 599892 - RNA, 19 nt, Artificial Sequence
  Description of Artificial Sequence: Synthetic oligonucleotide
  Sense strand starting at position 3050 of SEQ ID NO: 584926
gguccaauuuguuggagua

SEQ ID NO: 599893 - RNA, 19 nt, Artificial Sequence
  Description of Artificial Sequence: Synthetic oligonucleotide
  Antisense strand to SEQ ID NO: 599892
uacuccaacaaauuggacc

SEQ ID NO: 599894 - RNA, 19 nt, Artificial Sequence
  Description of Artificial Sequence: Synthetic oligonucleotide
  Sense strand starting at position 3051 of SEQ ID NO: 584926
guccaauuuguuggaguac

SEQ ID NO: 599895 - RNA, 19 nt, Artificial Sequence
  Description of Artificial Sequence: Synthetic oligonucleotide
  Antisense strand to SEQ ID NO: 599894
guacuccaacaaauuggac

SEQ ID NO: 599896 - RNA, 19 nt, Artificial Sequence
  Description of Artificial Sequence: Synthetic oligonucleotide
  Sense strand starting at position 3052 of SEQ ID NO: 584926
uccaauuuguuggaguacu

SEQ ID NO: 599897 - RNA, 19 nt, Artificial Sequence
  Description of Artificial Sequence: Synthetic oligonucleotide
  Antisense strand to SEQ ID NO: 599896
aguacuccaacaaauugga

SEQ ID NO: 599898 - RNA, 19 nt, Artificial Sequence
  Description of Artificial Sequence: Synthetic oligonucleotide
  Sense strand starting at position 3071 of SEQ ID NO: 584926
uaaggacucguuugcacuu

SEQ ID NO: 599899 - RNA, 19 nt, Artificial Sequence
  Description of Artificial Sequence: Synthetic oligonucleotide
  Antisense strand to SEQ ID NO: 599898
aagugcaaacgaguccuua

SEQ ID NO: 599900 - RNA, 19 nt, Artificial Sequence
  Description of Artificial Sequence: Synthetic oligonucleotide
  Sense strand starting at position 3974 of SEQ ID NO: 584926
ugaguaaggucuccacaag

SEQ ID NO: 599901 - RNA, 19 nt, Artificial Sequence
  Description of Artificial Sequence: Synthetic oligonucleotide
  Antisense strand to SEQ ID NO: 599900
cuuguggagaccuuacuca

SEQ ID NO: 599902 - RNA, 19 nt, Artificial Sequence
  Description of Artificial Sequence: Synthetic oligonucleotide
  Sense strand starting at position 19 of SEQ ID NO: 584927
gcagaaugauaucccagua

SEQ ID NO: 599903 - RNA, 19 nt, Artificial Sequence
  Description of Artificial Sequence: Synthetic oligonucleotide
  Antisense strand to SEQ ID NO: 599902
uacugggauaucauucugc

SEQ ID NO: 599904 - RNA, 19 nt, Artificial Sequence
  Description of Artificial Sequence: Synthetic oligonucleotide
  Sense strand starting at position 109 of SEQ ID NO: 584927
cagcauguccucuguaaag

SEQ ID NO: 599905 - RNA, 19 nt, Artificial Sequence
  Description of Artificial Sequence: Synthetic oligonucleotide
  Antisense strand to SEQ ID NO: 599904
cuuuacagaggacaugcug

SEQ ID NO: 599906 - RNA, 19 nt, Artificial Sequence
  Description of Artificial Sequence: Synthetic oligonucleotide
  Sense strand starting at position 121 of SEQ ID NO: 584927
uguaaaggcuuucuuccau

SEQ ID NO: 599907 - RNA, 19 nt, Artificial Sequence
  Description of Artificial Sequence: Synthetic oligonucleotide
  Antisense strand to SEQ ID NO: 599906
auggaagaaagccuuuaca

SEQ ID NO: 599908 - RNA, 19 nt, Artificial Sequence
  Description of Artificial Sequence: Synthetic oligonucleotide
  Sense strand starting at position 128 of SEQ ID NO: 584927
gcuuucuuccaucagaaug

SEQ ID NO: 599909 - RNA, 19 nt, Artificial Sequence
  Description of Artificial Sequence: Synthetic oligonucleotide
  Antisense strand to SEQ ID NO: 599908
cauucugauggaagaaagc

SEQ ID NO: 599910 - RNA, 19 nt, Artificial Sequence
  Description of Artificial Sequence: Synthetic oligonucleotide
  Sense strand starting at position 364 of SEQ ID NO: 584927
ggaacuaauugcuuacaua

SEQ ID NO: 599911 - RNA, 19 nt, Artificial Sequence
  Description of Artificial Sequence: Synthetic oligonucleotide
  Antisense strand to SEQ ID NO: 599910
uauguaagcaauuaguucc

SEQ ID NO: 599912 - RNA, 19 nt, Artificial Sequence
  Description of Artificial Sequence: Synthetic oligonucleotide
  Sense strand starting at position 388 of SEQ ID NO: 584927
gaguacguucuggaaacua

SEQ ID NO: 599913 - RNA, 19 nt, Artificial Sequence
  Description of Artificial Sequence: Synthetic oligonucleotide
  Antisense strand to SEQ ID NO: 599912
uaguuuccagaacguacuc

SEQ ID NO: 599914 - RNA, 19 nt, Artificial Sequence
  Description of Artificial Sequence: Synthetic oligonucleotide
  Sense strand starting at position 399 of SEQ ID NO: 584927
ggaaacuagggccgaaaua

SEQ ID NO: 599915 - RNA, 19 nt, Artificial Sequence
  Description of Artificial Sequence: Synthetic oligonucleotide
  Antisense strand to SEQ ID NO: 599914
uauuucggcccuaguuucc

SEQ ID NO: 599916 - RNA, 19 nt, Artificial Sequence
  Description of Artificial Sequence: Synthetic oligonucleotide
  Sense strand starting at position 418 of SEQ ID NO: 584927
ggguaaggaguuuauucca

SEQ ID NO: 599917 - RNA, 19 nt, Artificial Sequence
  Description of Artificial Sequence: Synthetic oligonucleotide
  Antisense strand to SEQ ID NO: 599916
uggaauaaacuccuuaccc

SEQ ID NO: 599918 - RNA, 19 nt, Artificial Sequence
  Description of Artificial Sequence: Synthetic oligonucleotide
  Sense strand starting at position 426 of SEQ ID NO: 584927
aguuuauuccagugaggaa

SEQ ID NO: 599919 - RNA, 19 nt, Artificial Sequence
  Description of Artificial Sequence: Synthetic oligonucleotide
  Antisense strand to SEQ ID NO: 599918
uuccucacuggaauaaacu

SEQ ID NO: 599920 - RNA, 19 nt, Artificial Sequence
  Description of Artificial Sequence: Synthetic oligonucleotide
  Sense strand starting at position 427 of SEQ ID NO: 584927
guuuauuccagugaggaag

SEQ ID NO: 599921 - RNA, 19 nt, Artificial Sequence
  Description of Artificial Sequence: Synthetic oligonucleotide
  Antisense strand to SEQ ID NO: 599920
cuuccucacuggaauaaac

SEQ ID NO: 599922 - RNA, 19 nt, Artificial Sequence
  Description of Artificial Sequence: Synthetic oligonucleotide
  Sense strand starting at position 439 of SEQ ID NO: 584927
gaggaagggucacuagcaa

SEQ ID NO: 599923 - RNA, 19 nt, Artificial Sequence
  Description of Artificial Sequence: Synthetic oligonucleotide
  Antisense strand to SEQ ID NO: 599922
uugcuagugacccuuccuc

SEQ ID NO: 599924 - RNA, 19 nt, Artificial Sequence
  Description of Artificial Sequence: Synthetic oligonucleotide
  Sense strand starting at position 553 of SEQ ID NO: 584927
ugaggucucugggugucua

SEQ ID NO: 599925 - RNA, 19 nt, Artificial Sequence
  Description of Artificial Sequence: Synthetic oligonucleotide
  Antisense strand to SEQ ID NO: 599924
uagacacccagagaccuca

SEQ ID NO: 599926 - RNA, 19 nt, Artificial Sequence
  Description of Artificial Sequence: Synthetic oligonucleotide
  Sense strand starting at position 638 of SEQ ID NO: 584927
gagccauucuuggcagagu

SEQ ID NO: 599927 - RNA, 19 nt, Artificial Sequence
  Description of Artificial Sequence: Synthetic oligonucleotide
  Antisense strand to SEQ ID NO: 599926
acucugccaagaauggcuc

SEQ ID NO: 599928 - RNA, 19 nt, Artificial Sequence
  Description of Artificial Sequence: Synthetic oligonucleotide
  Sense strand starting at position 641 of SEQ ID NO: 584927
ccauucuuggcagaguuga

SEQ ID NO: 599929 - RNA, 19 nt, Artificial Sequence
  Description of Artificial Sequence: Synthetic oligonucleotide
  Antisense strand to SEQ ID NO: 599928
ucaacucugccaagaaugg

SEQ ID NO: 599930 - RNA, 19 nt, Artificial Sequence
  Description of Artificial Sequence: Synthetic oligonucleotide
  Sense strand starting at position 943 of SEQ ID NO: 584927
gaauuauagccagguccac

SEQ ID NO: 599931 - RNA, 19 nt, Artificial Sequence
  Description of Artificial Sequence: Synthetic oligonucleotide
  Antisense strand to SEQ ID NO: 599930
guggaccuggcuauaauuc

SEQ ID NO: 599932 - RNA, 19 nt, Artificial Sequence
  Description of Artificial Sequence: Synthetic oligonucleotide
  Sense strand starting at position 1051 of SEQ ID NO: 584927
gcaacuaucaaguggagag

SEQ ID NO: 599933 - RNA, 19 nt, Artificial Sequence
  Description of Artificial Sequence: Synthetic oligonucleotide
  Antisense strand to SEQ ID NO: 599932
cucuccacuugauaguugc

SEQ ID NO: 599934 - RNA, 19 nt, Artificial Sequence
  Description of Artificial Sequence: Synthetic oligonucleotide
  Sense strand starting at position 1065 of SEQ ID NO: 584927
gagagaauuuacugaaaga

SEQ ID NO: 599935 - RNA, 19 nt, Artificial Sequence
  Description of Artificial Sequence: Synthetic oligonucleotide
  Antisense strand to SEQ ID NO: 599934
ucuuucaguaaauucucuc

SEQ ID NO: 599936 - RNA, 19 nt, Artificial Sequence
  Description of Artificial Sequence: Synthetic oligonucleotide
  Sense strand starting at position 1235 of SEQ ID NO: 584927
cagaguucucuccauggcu

SEQ ID NO: 599937 - RNA, 19 nt, Artificial Sequence
  Description of Artificial Sequence: Synthetic oligonucleotide
  Antisense strand to SEQ ID NO: 599936
agccauggagagaacucug

SEQ ID NO: 599938 - RNA, 19 nt, Artificial Sequence
  Description of Artificial Sequence: Synthetic oligonucleotide
  Sense strand starting at position 1237 of SEQ ID NO: 584927
gaguucucuccauggcuca

SEQ ID NO: 599939 - RNA, 19 nt, Artificial Sequence
  Description of Artificial Sequence: Synthetic oligonucleotide
  Antisense strand to SEQ ID NO: 599938
ugagccauggagagaacuc

SEQ ID NO: 599940 - RNA, 19 nt, Artificial Sequence
  Description of Artificial Sequence: Synthetic oligonucleotide
  Sense strand starting at position 1302 of SEQ ID NO: 584927
uuggguccuucccuguuaa

SEQ ID NO: 599941 - RNA, 19 nt, Artificial Sequence
  Description of Artificial Sequence: Synthetic oligonucleotide
  Antisense strand to SEQ ID NO: 599940
uuaacagggaaggacccaa

SEQ ID NO: 599942 - RNA, 19 nt, Artificial Sequence
  Description of Artificial Sequence: Synthetic oligonucleotide
  Sense strand starting at position 1303 of SEQ ID NO: 584927
uggguccuucccuguuaaa

SEQ ID NO: 599943 - RNA, 19 nt, Artificial Sequence
  Description of Artificial Sequence: Synthetic oligonucleotide
  Antisense strand to SEQ ID NO: 599942
uuuaacagggaaggaccca

SEQ ID NO: 599944 - RNA, 19 nt, Artificial Sequence
  Description of Artificial Sequence: Synthetic oligonucleotide
  Sense strand starting at position 1659 of SEQ ID NO: 584927
gaauuauucugguccugac

SEQ ID NO: 599945 - RNA, 19 nt, Artificial Sequence
  Description of Artificial Sequence: Synthetic oligonucleotide
  Antisense strand to SEQ ID NO: 599944
gucaggaccagaauaauuc

SEQ ID NO: 599946 - RNA, 19 nt, Artificial Sequence
  Description of Artificial Sequence: Synthetic oligonucleotide
  Sense strand starting at position 1789 of SEQ ID NO: 584927
cucuaaggcuguucugauc

SEQ ID NO: 599947 - RNA, 19 nt, Artificial Sequence
  Description of Artificial Sequence: Synthetic oligonucleotide
  Antisense strand to SEQ ID NO: 599946
gaucagaacagccuuagag

SEQ ID NO: 599948 - RNA, 19 nt, Artificial Sequence
  Description of Artificial Sequence: Synthetic oligonucleotide
  Sense strand starting at position 2075 of SEQ ID NO: 584927
ggcgcaguggcgucuaaau

SEQ ID NO: 599949 - RNA, 19 nt, Artificial Sequence
  Description of Artificial Sequence: Synthetic oligonucleotide
  Antisense strand to SEQ ID NO: 599948
auuuagacgccacugcgcc

SEQ ID NO: 599950 - RNA, 19 nt, Artificial Sequence
  Description of Artificial Sequence: Synthetic oligonucleotide
  Sense strand starting at position 2077 of SEQ ID NO: 584927
cgcaguggcgucuaaauuu

SEQ ID NO: 599951 - RNA, 19 nt, Artificial Sequence
  Description of Artificial Sequence: Synthetic oligonucleotide
  Antisense strand to SEQ ID NO: 599950
aaauuuagacgccacugcg

SEQ ID NO: 599952 - RNA, 19 nt, Artificial Sequence
  Description of Artificial Sequence: Synthetic oligonucleotide
  Sense strand starting at position 2602 of SEQ ID NO: 584927
guccaauuuguuggaguac

SEQ ID NO: 599953 - RNA, 19 nt, Artificial Sequence
  Description of Artificial Sequence: Synthetic oligonucleotide
  Antisense strand to SEQ ID NO: 599952
guacuccaacaaauuggac

SEQ ID NO: 599954 - RNA, 19 nt, Artificial Sequence
  Description of Artificial Sequence: Synthetic oligonucleotide
  Sense strand starting at position 3525 of SEQ ID NO: 584927
ugaguaaggucuccacaag

SEQ ID NO: 599955 - RNA, 19 nt, Artificial Sequence
  Description of Artificial Sequence: Synthetic oligonucleotide
  Antisense strand to SEQ ID NO: 599954
cuuguggagaccuuacuca

SEQ ID NO: 599956 - RNA, 19 nt, Artificial Sequence
  Description of Artificial Sequence: Synthetic oligonucleotide
  Sense strand starting at position 3631 of SEQ ID NO: 584927
ucagaagcucucugccaga

SEQ ID NO: 599957 - RNA, 19 nt, Artificial Sequence
  Description of Artificial Sequence: Synthetic oligonucleotide
  Antisense strand to SEQ ID NO: 599956
ucuggcagagagcuucuga

SEQ ID NO: 599958 - RNA, 19 nt, Artificial Sequence
  Description of Artificial Sequence: Synthetic oligonucleotide
  Sense strand starting at position 3688 of SEQ ID NO: 584927
gggauaucaucagaaagau

SEQ ID NO: 599959 - RNA, 19 nt, Artificial Sequence
  Description of Artificial Sequence: Synthetic oligonucleotide
  Antisense strand to SEQ ID NO: 599958
aucuuucugaugauauccc

SEQ ID NO: 599960 - RNA, 19 nt, Artificial Sequence
  Description of Artificial Sequence: Synthetic oligonucleotide
  Sense strand starting at position 3796 of SEQ ID NO: 584927
agggcaguucuauguugaa

SEQ ID NO: 599961 - RNA, 19 nt, Artificial Sequence
  Description of Artificial Sequence: Synthetic oligonucleotide
  Antisense strand to SEQ ID NO: 599960
uucaacauagaacugcccu

SEQ ID NO: 599962 - RNA, 19 nt, Artificial Sequence
  Description of Artificial Sequence: Synthetic oligonucleotide
  Sense strand starting at position 3822 of SEQ ID NO: 584927
uuuaauaaucugggcaugu

SEQ ID NO: 599963 - RNA, 19 nt, Artificial Sequence
  Description of Artificial Sequence: Synthetic oligonucleotide
  Antisense strand to SEQ ID NO: 599962
acaugcccagauuauuaaa

SEQ ID NO: 599964 - RNA, 19 nt, Artificial Sequence
  Description of Artificial Sequence: Synthetic oligonucleotide
  Sense strand starting at position 3824 of SEQ ID NO: 584927
uaauaaucugggcaugucu

SEQ ID NO: 599965 - RNA, 19 nt, Artificial Sequence
  Description of Artificial Sequence: Synthetic oligonucleotide
  Antisense strand to SEQ ID NO: 599964
agacaugcccagauuauua

SEQ ID NO: 599966 - RNA, 19 nt, Artificial Sequence
  Description of Artificial Sequence: Synthetic oligonucleotide
  Sense strand starting at position 3839 of SEQ ID NO: 584927
gucuuucuccgugacuuga

SEQ ID NO: 599967 - RNA, 19 nt, Artificial Sequence
  Description of Artificial Sequence: Synthetic oligonucleotide
  Antisense strand to SEQ ID NO: 599966
ucaagucacggagaaagac

SEQ ID NO: 599968 - RNA, 19 nt, Artificial Sequence
  Description of Artificial Sequence: Synthetic oligonucleotide
  Sense strand starting at position 3858 of SEQ ID NO: 584927
ggcaguuagccucagaaag

SEQ ID NO: 599969 - RNA, 19 nt, Artificial Sequence
  Description of Artificial Sequence: Synthetic oligonucleotide
  Antisense strand to SEQ ID NO: 599968
cuuucugaggcuaacugcc

SEQ ID NO: 599970 - RNA, 19 nt, Artificial Sequence
  Description of Artificial Sequence: Synthetic oligonucleotide
  Sense strand starting at position 3912 of SEQ ID NO: 584927
gguaaagucagcuguagga

SEQ ID NO: 599971 - RNA, 19 nt, Artificial Sequence
  Description of Artificial Sequence: Synthetic oligonucleotide
  Antisense strand to SEQ ID NO: 599970
uccuacagcugacuuuacc

SEQ ID NO: 599972 - RNA, 19 nt, Artificial Sequence
  Description of Artificial Sequence: Synthetic oligonucleotide
  Sense strand starting at position 3914 of SEQ ID NO: 584927
uaaagucagcuguaggagu

SEQ ID NO: 599973 - RNA, 19 nt, Artificial Sequence
  Description of Artificial Sequence: Synthetic oligonucleotide
  Antisense strand to SEQ ID NO: 599972
acuccuacagcugacuuua

SEQ ID NO: 599974 - RNA, 19 nt, Artificial Sequence
  Description of Artificial Sequence: Synthetic oligonucleotide
  Sense strand starting at position 3929 of SEQ ID NO: 584927
gaguguuaugguuauuaga

SEQ ID NO: 599975 - RNA, 19 nt, Artificial Sequence
  Description of Artificial Sequence: Synthetic oligonucleotide
  Antisense strand to SEQ ID NO: 599974
ucuaauaaccauaacacuc

SEQ ID NO: 599976 - RNA, 19 nt, Artificial Sequence
  Description of Artificial Sequence: Synthetic oligonucleotide
  Sense strand starting at position 3931 of SEQ ID NO: 584927
guguuaugguuauuagacu

SEQ ID NO: 599977 - RNA, 19 nt, Artificial Sequence
  Description of Artificial Sequence: Synthetic oligonucleotide
  Antisense strand to SEQ ID NO: 599976
agucuaauaaccauaacac

SEQ ID NO: 599978 - RNA, 19 nt, Artificial Sequence
  Description of Artificial Sequence: Synthetic oligonucleotide
  Sense strand starting at position 3937 of SEQ ID NO: 584927
ugguuauuagacuauagua

SEQ ID NO: 599979 - RNA, 19 nt, Artificial Sequence
  Description of Artificial Sequence: Synthetic oligonucleotide
  Antisense strand to SEQ ID NO: 599978
uacuauagucuaauaacca

SEQ ID NO: 599980 - RNA, 19 nt, Artificial Sequence
  Description of Artificial Sequence: Synthetic oligonucleotide
  Sense strand starting at position 3945 of SEQ ID NO: 584927
agacuauaguagccaacau

SEQ ID NO: 599981 - RNA, 19 nt, Artificial Sequence
  Description of Artificial Sequence: Synthetic oligonucleotide
  Antisense strand to SEQ ID NO: 599980
auguuggcuacuauagucu

SEQ ID NO: 599982 - RNA, 19 nt, Artificial Sequence
  Description of Artificial Sequence: Synthetic oligonucleotide
  Sense strand starting at position 125 of SEQ ID NO: 584928
agaauugucuugucuucca

SEQ ID NO: 599983 - RNA, 19 nt, Artificial Sequence
  Description of Artificial Sequence: Synthetic oligonucleotide
  Antisense strand to SEQ ID NO: 599982
uggaagacaagacaauucu

SEQ ID NO: 599984 - RNA, 19 nt, Artificial Sequence
  Description of Artificial Sequence: Synthetic oligonucleotide
  Sense strand starting at position 225 of SEQ ID NO: 584928
cuauuugaauugggagaaa

SEQ ID NO: 599985 - RNA, 19 nt, Artificial Sequence
  Description of Artificial Sequence: Synthetic oligonucleotide
  Antisense strand to SEQ ID NO: 599984
uuucucccaauucaaauag

SEQ ID NO: 599986 - RNA, 19 nt, Artificial Sequence
  Description of Artificial Sequence: Synthetic oligonucleotide
  Sense strand starting at position 403 of SEQ ID NO: 584928
acagucagcuacuugucaa

SEQ ID NO: 599987 - RNA, 19 nt, Artificial Sequence
  Description of Artificial Sequence: Synthetic oligonucleotide
  Antisense strand to SEQ ID NO: 599986
uugacaaguagcugacugu

SEQ ID NO: 599988 - RNA, 19 nt, Artificial Sequence
  Description of Artificial Sequence: Synthetic oligonucleotide
  Sense strand starting at position 624 of SEQ ID NO: 584928
cacauaugaucagugguaa

SEQ ID NO: 599989 - RNA, 19 nt, Artificial Sequence
  Description of Artificial Sequence: Synthetic oligonucleotide
  Antisense strand to SEQ ID NO: 599988
uuaccacugaucauaugug

SEQ ID NO: 599990 - RNA, 19 nt, Artificial Sequence
  Description of Artificial Sequence: Synthetic oligonucleotide
  Sense strand starting at position 625 of SEQ ID NO: 584928
acauaugaucagugguaaa

SEQ ID NO: 599991 - RNA, 19 nt, Artificial Sequence
  Description of Artificial Sequence: Synthetic oligonucleotide
  Antisense strand to SEQ ID NO: 599990
uuuaccacugaucauaugu

SEQ ID NO: 599992 - RNA, 19 nt, Artificial Sequence
  Description of Artificial Sequence: Synthetic oligonucleotide
  Sense strand starting at position 637 of SEQ ID NO: 584928
ugguaaagcuucuuuaaca

SEQ ID NO: 599993 - RNA, 19 nt, Artificial Sequence
  Description of Artificial Sequence: Synthetic oligonucleotide
  Antisense strand to SEQ ID NO: 599992
uguuaaagaagcuuuacca

SEQ ID NO: 599994 - RNA, 19 nt, Artificial Sequence
  Description of Artificial Sequence: Synthetic oligonucleotide
  Sense strand starting at position 638 of SEQ ID NO: 584928
gguaaagcuucuuuaacau

SEQ ID NO: 599995 - RNA, 19 nt, Artificial Sequence
  Description of Artificial Sequence: Synthetic oligonucleotide
  Antisense strand to SEQ ID NO: 599994
auguuaaagaagcuuuacc

SEQ ID NO: 599996 - RNA, 19 nt, Artificial Sequence
  Description of Artificial Sequence: Synthetic oligonucleotide
  Sense strand starting at position 884 of SEQ ID NO: 584928
uggaaagccuacucaaaug

SEQ ID NO: 599997 - RNA, 19 nt, Artificial Sequence
  Description of Artificial Sequence: Synthetic oligonucleotide
  Antisense strand to SEQ ID NO: 599996
cauuugaguaggcuuucca

SEQ ID NO: 599998 - RNA, 19 nt, Artificial Sequence
  Description of Artificial Sequence: Synthetic oligonucleotide
  Sense strand starting at position 985 of SEQ ID NO: 584928
ucacauggucacugacaga

SEQ ID NO: 599999 - RNA, 19 nt, Artificial Sequence
  Description of Artificial Sequence: Synthetic oligonucleotide
  Antisense strand to SEQ ID NO: 599998
ucugucagugaccauguga

SEQ ID NO: 600000 - RNA, 19 nt, Artificial Sequence
  Description of Artificial Sequence: Synthetic oligonucleotide
  Sense strand starting at position 1170 of SEQ ID NO: 584928
gcgcaagaagcgguuagua

SEQ ID NO: 600001 - RNA, 19 nt, Artificial Sequence
  Description of Artificial Sequence: Synthetic oligonucleotide
  Antisense strand to SEQ ID NO: 600000
uacuaaccgcuucuugcgc

SEQ ID NO: 600002 - RNA, 19 nt, Artificial Sequence
  Description of Artificial Sequence: Synthetic oligonucleotide
  Sense strand starting at position 1178 of SEQ ID NO: 584928
agcgguuaguaggcagaaa

SEQ ID NO: 600003 - RNA, 19 nt, Artificial Sequence
  Description of Artificial Sequence: Synthetic oligonucleotide
  Antisense strand to SEQ ID NO: 600002
uuucugccuacuaaccgcu

SEQ ID NO: 600004 - RNA, 19 nt, Artificial Sequence
  Description of Artificial Sequence: Synthetic oligonucleotide
  Sense strand starting at position 1270 of SEQ ID NO: 584928
cgccgaucacccgaagaaa

SEQ ID NO: 600005 - RNA, 19 nt, Artificial Sequence
  Description of Artificial Sequence: Synthetic oligonucleotide
  Antisense strand to SEQ ID NO: 600004
uuucuucgggugaucggcg

SEQ ID NO: 600006 - RNA, 19 nt, Artificial Sequence
  Description of Artificial Sequence: Synthetic oligonucleotide
  Sense strand starting at position 1333 of SEQ ID NO: 584928
acagucuugagcugaguca

SEQ ID NO: 600007 - RNA, 19 nt, Artificial Sequence
  Description of Artificial Sequence: Synthetic oligonucleotide
  Antisense strand to SEQ ID NO: 600006
ugacucagcucaagacugu

SEQ ID NO: 600008 - RNA, 19 nt, Artificial Sequence
  Description of Artificial Sequence: Synthetic oligonucleotide
  Sense strand starting at position 1665 of SEQ ID NO: 584928
gacggaagaucgcuuacua

SEQ ID NO: 600009 - RNA, 19 nt, Artificial Sequence
  Description of Artificial Sequence: Synthetic oligonucleotide
  Antisense strand to SEQ ID NO: 600008
uaguaagcgaucuuccguc

SEQ ID NO: 600010 - RNA, 19 nt, Artificial Sequence
  Description of Artificial Sequence: Synthetic oligonucleotide
  Sense strand starting at position 1999 of SEQ ID NO: 584928
agaacuaguguucacgaga

SEQ ID NO: 600011 - RNA, 19 nt, Artificial Sequence
  Description of Artificial Sequence: Synthetic oligonucleotide
  Antisense strand to SEQ ID NO: 600010
ucucgugaacacuaguucu

SEQ ID NO: 600012 - RNA, 19 nt, Artificial Sequence
  Description of Artificial Sequence: Synthetic oligonucleotide
  Sense strand starting at position 2002 of SEQ ID NO: 584928
acuaguguucacgagagcu

SEQ ID NO: 600013 - RNA, 19 nt, Artificial Sequence
  Description of Artificial Sequence: Synthetic oligonucleotide
  Antisense strand to SEQ ID NO: 600012
agcucucgugaacacuagu

SEQ ID NO: 600014 - RNA, 19 nt, Artificial Sequence
  Description of Artificial Sequence: Synthetic oligonucleotide
  Sense strand starting at position 2040 of SEQ ID NO: 584928
ucgcgagagcgucuugaga

SEQ ID NO: 600015 - RNA, 19 nt, Artificial Sequence
  Description of Artificial Sequence: Synthetic oligonucleotide
  Antisense strand to SEQ ID NO: 600014
ucucaagacgcucucgcga

SEQ ID NO: 600016 - RNA, 19 nt, Artificial Sequence
  Description of Artificial Sequence: Synthetic oligonucleotide
  Sense strand starting at position 2119 of SEQ ID NO: 584928
ggucuaaccuaggcgaagu

SEQ ID NO: 600017 - RNA, 19 nt, Artificial Sequence
  Description of Artificial Sequence: Synthetic oligonucleotide
  Antisense strand to SEQ ID NO: 600016
acuucgccuagguuagacc

SEQ ID NO: 600018 - RNA, 19 nt, Artificial Sequence
  Description of Artificial Sequence: Synthetic oligonucleotide
  Sense strand starting at position 2130 of SEQ ID NO: 584928
ggcgaaguggcucagauac

SEQ ID NO: 600019 - RNA, 19 nt, Artificial Sequence
  Description of Artificial Sequence: Synthetic oligonucleotide
  Antisense strand to SEQ ID NO: 600018
guaucugagccacuucgcc

SEQ ID NO: 600020 - RNA, 19 nt, Artificial Sequence
  Description of Artificial Sequence: Synthetic oligonucleotide
  Sense strand starting at position 2157 of SEQ ID NO: 584928
guuauuaccucuuccagga

SEQ ID NO: 600021 - RNA, 19 nt, Artificial Sequence
  Description of Artificial Sequence: Synthetic oligonucleotide
  Antisense strand to SEQ ID NO: 600020
uccuggaagagguaauaac

SEQ ID NO: 600022 - RNA, 19 nt, Artificial Sequence
  Description of Artificial Sequence: Synthetic oligonucleotide
  Sense strand starting at position 2232 of SEQ ID NO: 584928
uuuccugugauuggaaaga

SEQ ID NO: 600023 - RNA, 19 nt, Artificial Sequence
  Description of Artificial Sequence: Synthetic oligonucleotide
  Antisense strand to SEQ ID NO: 600022
ucuuuccaaucacaggaaa

SEQ ID NO: 600024 - RNA, 19 nt, Artificial Sequence
  Description of Artificial Sequence: Synthetic oligonucleotide
  Sense strand starting at position 2259 of SEQ ID NO: 584928
ugaagaugacuuuguucuc

SEQ ID NO: 600025 - RNA, 19 nt, Artificial Sequence
  Description of Artificial Sequence: Synthetic oligonucleotide
  Antisense strand to SEQ ID NO: 600024
gagaacaaagucaucuuca

SEQ ID NO: 600026 - RNA, 19 nt, Artificial Sequence
  Description of Artificial Sequence: Synthetic oligonucleotide
  Sense strand starting at position 2260 of SEQ ID NO: 584928
gaagaugacuuuguucuca

SEQ ID NO: 600027 - RNA, 19 nt, Artificial Sequence
  Description of Artificial Sequence: Synthetic oligonucleotide
  Antisense strand to SEQ ID NO: 600026
ugagaacaaagucaucuuc

SEQ ID NO: 600028 - RNA, 19 nt, Artificial Sequence
  Description of Artificial Sequence: Synthetic oligonucleotide
  Sense strand starting at position 2264 of SEQ ID NO: 584928
augacuuuguucucaggga

SEQ ID NO: 600029 - RNA, 19 nt, Artificial Sequence
  Description of Artificial Sequence: Synthetic oligonucleotide
  Antisense strand to SEQ ID NO: 600028
ucccugagaacaaagucau

SEQ ID NO: 600030 - RNA, 19 nt, Artificial Sequence
  Description of Artificial Sequence: Synthetic oligonucleotide
  Sense strand starting at position 2268 of SEQ ID NO: 584928
cuuuguucucagggaucaa

SEQ ID NO: 600031 - RNA, 19 nt, Artificial Sequence
  Description of Artificial Sequence: Synthetic oligonucleotide
  Antisense strand to SEQ ID NO: 600030
uugaucccugagaacaaag

SEQ ID NO: 600032 - RNA, 19 nt, Artificial Sequence
  Description of Artificial Sequence: Synthetic oligonucleotide
  Sense strand starting at position 3283 of SEQ ID NO: 584928
gcgagaucucggccgcgau

SEQ ID NO: 600033 - RNA, 19 nt, Artificial Sequence
  Description of Artificial Sequence: Synthetic oligonucleotide
  Antisense strand to SEQ ID NO: 600032
aucgcggccgagaucucgc

SEQ ID NO: 600034 - RNA, 19 nt, Artificial Sequence
  Description of Artificial Sequence: Synthetic oligonucleotide
  Sense strand starting at position 3296 of SEQ ID NO: 584928
cgcgaucuuaauggaguua

SEQ ID NO: 600035 - RNA, 19 nt, Artificial Sequence
  Description of Artificial Sequence: Synthetic oligonucleotide
  Antisense strand to SEQ ID NO: 600034
uaacuccauuaagaucgcg

SEQ ID NO: 600036 - RNA, 19 nt, Artificial Sequence
  Description of Artificial Sequence: Synthetic oligonucleotide
  Sense strand starting at position 3297 of SEQ ID NO: 584928
gcgaucuuaauggaguuau

SEQ ID NO: 600037 - RNA, 19 nt, Artificial Sequence
  Description of Artificial Sequence: Synthetic oligonucleotide
  Antisense strand to SEQ ID NO: 600036
auaacuccauuaagaucgc

SEQ ID NO: 600038 - RNA, 19 nt, Artificial Sequence
  Description of Artificial Sequence: Synthetic oligonucleotide
  Sense strand starting at position 3321 of SEQ ID NO: 584928
agugauaaagugcaaacuu

SEQ ID NO: 600039 - RNA, 19 nt, Artificial Sequence
  Description of Artificial Sequence: Synthetic oligonucleotide
  Antisense strand to SEQ ID NO: 600038
aaguuugcacuuuaucacu

SEQ ID NO: 600040 - RNA, 19 nt, Artificial Sequence
  Description of Artificial Sequence: Synthetic oligonucleotide
  Sense strand starting at position 3559 of SEQ ID NO: 584928
uccagaaacuuguuuauag

SEQ ID NO: 600041 - RNA, 19 nt, Artificial Sequence
  Description of Artificial Sequence: Synthetic oligonucleotide
  Antisense strand to SEQ ID NO: 600040
cuauaaacaaguuucugga

SEQ ID NO: 600042 - RNA, 19 nt, Artificial Sequence
  Description of Artificial Sequence: Synthetic oligonucleotide
  Sense strand starting at position 3560 of SEQ ID NO: 584928
ccagaaacuuguuuauaga

SEQ ID NO: 600043 - RNA, 19 nt, Artificial Sequence
  Description of Artificial Sequence: Synthetic oligonucleotide
  Antisense strand to SEQ ID NO: 600042
ucuauaaacaaguuucugg

SEQ ID NO: 600044 - RNA, 19 nt, Artificial Sequence
  Description of Artificial Sequence: Synthetic oligonucleotide
  Sense strand starting at position 3630 of SEQ ID NO: 584928
gaccaauuaggguguggua

SEQ ID NO: 600045 - RNA, 19 nt, Artificial Sequence
  Description of Artificial Sequence: Synthetic oligonucleotide
  Antisense strand to SEQ ID NO: 600044
uaccacacccuaauugguc

SEQ ID NO: 600046 - RNA, 19 nt, Artificial Sequence
  Description of Artificial Sequence: Synthetic oligonucleotide
  Sense strand starting at position 3632 of SEQ ID NO: 584928
ccaauuagggugugguaaa

SEQ ID NO: 600047 - RNA, 19 nt, Artificial Sequence
  Description of Artificial Sequence: Synthetic oligonucleotide
  Antisense strand to SEQ ID NO: 600046
uuuaccacacccuaauugg

SEQ ID NO: 600048 - RNA, 19 nt, Artificial Sequence
  Description of Artificial Sequence: Synthetic oligonucleotide
  Sense strand starting at position 3689 of SEQ ID NO: 584928
cuagguaaaucagaaauag

SEQ ID NO: 600049 - RNA, 19 nt, Artificial Sequence
  Description of Artificial Sequence: Synthetic oligonucleotide
  Antisense strand to SEQ ID NO: 600048
cuauuucugauuuaccuag

SEQ ID NO: 600050 - RNA, 19 nt, Artificial Sequence
  Description of Artificial Sequence: Synthetic oligonucleotide
  Sense strand starting at position 3733 of SEQ ID NO: 584928
ucaguuauauaugugugua

SEQ ID NO: 600051 - RNA, 19 nt, Artificial Sequence
  Description of Artificial Sequence: Synthetic oligonucleotide
  Antisense strand to SEQ ID NO: 600050
uacacacauauauaacuga

SEQ ID NO: 600052 - RNA, 19 nt, Artificial Sequence
  Description of Artificial Sequence: Synthetic oligonucleotide
  Sense strand starting at position 3781 of SEQ ID NO: 584928
acagucaagaugugaaaug

SEQ ID NO: 600053 - RNA, 19 nt, Artificial Sequence
  Description of Artificial Sequence: Synthetic oligonucleotide
  Antisense strand to SEQ ID NO: 600052
cauuucacaucuugacugu

SEQ ID NO: 600054 - RNA, 19 nt, Artificial Sequence
  Description of Artificial Sequence: Synthetic oligonucleotide
  Sense strand starting at position 3802 of SEQ ID NO: 584928
uuuguuuguaugugagaau

SEQ ID NO: 600055 - RNA, 19 nt, Artificial Sequence
  Description of Artificial Sequence: Synthetic oligonucleotide
  Antisense strand to SEQ ID NO: 600054
auucucacauacaaacaaa

SEQ ID NO: 600056 - RNA, 19 nt, Artificial Sequence
  Description of Artificial Sequence: Synthetic oligonucleotide
  Sense strand starting at position 3809 of SEQ ID NO: 584928
guaugugagaauuagucug

SEQ ID NO: 600057 - RNA, 19 nt, Artificial Sequence
  Description of Artificial Sequence: Synthetic oligonucleotide
  Antisense strand to SEQ ID NO: 600056
cagacuaauucucacauac

SEQ ID NO: 600058 - RNA, 19 nt, Artificial Sequence
  Description of Artificial Sequence: Synthetic oligonucleotide
  Sense strand starting at position 3814 of SEQ ID NO: 584928
ugagaauuagucugcauca

SEQ ID NO: 600059 - RNA, 19 nt, Artificial Sequence
  Description of Artificial Sequence: Synthetic oligonucleotide
  Antisense strand to SEQ ID NO: 600058
ugaugcagacuaauucuca

SEQ ID NO: 600060 - RNA, 19 nt, Artificial Sequence
  Description of Artificial Sequence: Synthetic oligonucleotide
  Sense strand starting at position 3815 of SEQ ID NO: 584928
gagaauuagucugcaucag

SEQ ID NO: 600061 - RNA, 19 nt, Artificial Sequence
  Description of Artificial Sequence: Synthetic oligonucleotide
  Antisense strand to SEQ ID NO: 600060
cugaugcagacuaauucuc

SEQ ID NO: 600062 - RNA, 19 nt, Artificial Sequence
  Description of Artificial Sequence: Synthetic oligonucleotide
  Sense strand starting at position 12 of SEQ ID NO: 584929
ucaagugaccuagguuuaa

SEQ ID NO: 600063 - RNA, 19 nt, Artificial Sequence
  Description of Artificial Sequence: Synthetic oligonucleotide
  Antisense strand to SEQ ID NO: 600062
uuaaaccuaggucacuuga

SEQ ID NO: 600064 - RNA, 19 nt, Artificial Sequence
  Description of Artificial Sequence: Synthetic oligonucleotide
  Sense strand starting at position 54 of SEQ ID NO: 584929
uugugucugaaggaagauu

SEQ ID NO: 600065 - RNA, 19 nt, Artificial Sequence
  Description of Artificial Sequence: Synthetic oligonucleotide
  Antisense strand to SEQ ID NO: 600064
aaucuuccuucagacacaa

SEQ ID NO: 600066 - RNA, 19 nt, Artificial Sequence
  Description of Artificial Sequence: Synthetic oligonucleotide
  Sense strand starting at position 88 of SEQ ID NO: 584929
cugcguuuccucgucuaua

SEQ ID NO: 600067 - RNA, 19 nt, Artificial Sequence
  Description of Artificial Sequence: Synthetic oligonucleotide
  Antisense strand to SEQ ID NO: 600066
uauagacgaggaaacgcag

SEQ ID NO: 600068 - RNA, 19 nt, Artificial Sequence
  Description of Artificial Sequence: Synthetic oligonucleotide
  Sense strand starting at position 90 of SEQ ID NO: 584929
gcguuuccucgucuauaaa

SEQ ID NO: 600069 - RNA, 19 nt, Artificial Sequence
  Description of Artificial Sequence: Synthetic oligonucleotide
  Antisense strand to SEQ ID NO: 600068
uuuauagacgaggaaacgc

SEQ ID NO: 600070 - RNA, 19 nt, Artificial Sequence
  Description of Artificial Sequence: Synthetic oligonucleotide
  Sense strand starting at position 140 of SEQ ID NO: 584929
acuauauuaggagguuuaa

SEQ ID NO: 600071 - RNA, 19 nt, Artificial Sequence
  Description of Artificial Sequence: Synthetic oligonucleotide
  Antisense strand to SEQ ID NO: 600070
uuaaaccuccuaauauagu

SEQ ID NO: 600072 - RNA, 19 nt, Artificial Sequence
  Description of Artificial Sequence: Synthetic oligonucleotide
  Sense strand starting at position 223 of SEQ ID NO: 584929
auucuaagcccuugaggga

SEQ ID NO: 600073 - RNA, 19 nt, Artificial Sequence
  Description of Artificial Sequence: Synthetic oligonucleotide
  Antisense strand to SEQ ID NO: 600072
ucccucaagggcuuagaau

SEQ ID NO: 600074 - RNA, 19 nt, Artificial Sequence
  Description of Artificial Sequence: Synthetic oligonucleotide
  Sense strand starting at position 304 of SEQ ID NO: 584929
agacuagaacucugcuaca

SEQ ID NO: 600075 - RNA, 19 nt, Artificial Sequence
  Description of Artificial Sequence: Synthetic oligonucleotide
  Antisense strand to SEQ ID NO: 600074
uguagcagaguucuagucu

SEQ ID NO: 600076 - RNA, 19 nt, Artificial Sequence
  Description of Artificial Sequence: Synthetic oligonucleotide
  Sense strand starting at position 366 of SEQ ID NO: 584929
ugauuugauuaccaugaca

SEQ ID NO: 600077 - RNA, 19 nt, Artificial Sequence
  Description of Artificial Sequence: Synthetic oligonucleotide
  Antisense strand to SEQ ID NO: 600076
ugucaugguaaucaaauca

SEQ ID NO: 600078 - RNA, 19 nt, Artificial Sequence
  Description of Artificial Sequence: Synthetic oligonucleotide
  Sense strand starting at position 418 of SEQ ID NO: 584929
ggaguauggccauagcaaa

SEQ ID NO: 600079 - RNA, 19 nt, Artificial Sequence
  Description of Artificial Sequence: Synthetic oligonucleotide
  Antisense strand to SEQ ID NO: 600078
uuugcuauggccauacucc

SEQ ID NO: 600080 - RNA, 19 nt, Artificial Sequence
  Description of Artificial Sequence: Synthetic oligonucleotide
  Sense strand starting at position 490 of SEQ ID NO: 584929
ccagaauugaacggccaga

SEQ ID NO: 600081 - RNA, 19 nt, Artificial Sequence
  Description of Artificial Sequence: Synthetic oligonucleotide
  Antisense strand to SEQ ID NO: 600080
ucuggccguucaauucugg

SEQ ID NO: 600082 - RNA, 19 nt, Artificial Sequence
  Description of Artificial Sequence: Synthetic oligonucleotide
  Sense strand starting at position 586 of SEQ ID NO: 584929
agggcaaggacucgucaga

SEQ ID NO: 600083 - RNA, 19 nt, Artificial Sequence
  Description of Artificial Sequence: Synthetic oligonucleotide
  Antisense strand to SEQ ID NO: 600082
ucugacgaguccuugcccu

SEQ ID NO: 600084 - RNA, 19 nt, Artificial Sequence
  Description of Artificial Sequence: Synthetic oligonucleotide
  Sense strand starting at position 593 of SEQ ID NO: 584929
ggacucgucagaggaaaca

SEQ ID NO: 600085 - RNA, 19 nt, Artificial Sequence
  Description of Artificial Sequence: Synthetic oligonucleotide
  Antisense strand to SEQ ID NO: 600084
uguuuccucugacgagucc

SEQ ID NO: 600086 - RNA, 19 nt, Artificial Sequence
  Description of Artificial Sequence: Synthetic oligonucleotide
  Sense strand starting at position 700 of SEQ ID NO: 584929
cugggaauuccuggguucu

SEQ ID NO: 600087 - RNA, 19 nt, Artificial Sequence
  Description of Artificial Sequence: Synthetic oligonucleotide
  Antisense strand to SEQ ID NO: 600086
agaacccaggaauucccag

SEQ ID NO: 600088 - RNA, 19 nt, Artificial Sequence
  Description of Artificial Sequence: Synthetic oligonucleotide
  Sense strand starting at position 701 of SEQ ID NO: 584929
ugggaauuccuggguucuu

SEQ ID NO: 600089 - RNA, 19 nt, Artificial Sequence
  Description of Artificial Sequence: Synthetic oligonucleotide
  Antisense strand to SEQ ID NO: 600088
aagaacccaggaauuccca

SEQ ID NO: 600090 - RNA, 19 nt, Artificial Sequence
  Description of Artificial Sequence: Synthetic oligonucleotide
  Sense strand starting at position 766 of SEQ ID NO: 584929
uucccuugaugguuagaca

SEQ ID NO: 600091 - RNA, 19 nt, Artificial Sequence
  Description of Artificial Sequence: Synthetic oligonucleotide
  Antisense strand to SEQ ID NO: 600090
ugucuaaccaucaagggaa

SEQ ID NO: 600092 - RNA, 19 nt, Artificial Sequence
  Description of Artificial Sequence: Synthetic oligonucleotide
  Sense strand starting at position 774 of SEQ ID NO: 584929
augguuagacaguggauua

SEQ ID NO: 600093 - RNA, 19 nt, Artificial Sequence
  Description of Artificial Sequence: Synthetic oligonucleotide
  Antisense strand to SEQ ID NO: 600092
uaauccacugucuaaccau

SEQ ID NO: 600094 - RNA, 19 nt, Artificial Sequence
  Description of Artificial Sequence: Synthetic oligonucleotide
  Sense strand starting at position 775 of SEQ ID NO: 584929
ugguuagacaguggauuaa

SEQ ID NO: 600095 - RNA, 19 nt, Artificial Sequence
  Description of Artificial Sequence: Synthetic oligonucleotide
  Antisense strand to SEQ ID NO: 600094
uuaauccacugucuaacca

SEQ ID NO: 600096 - RNA, 19 nt, Artificial Sequence
  Description of Artificial Sequence: Synthetic oligonucleotide
  Sense strand starting at position 857 of SEQ ID NO: 584929
caauccaguucuguggaau

SEQ ID NO: 600097 - RNA, 19 nt, Artificial Sequence
  Description of Artificial Sequence: Synthetic oligonucleotide
  Antisense strand to SEQ ID NO: 600096
auuccacagaacuggauug

SEQ ID NO: 600098 - RNA, 19 nt, Artificial Sequence
  Description of Artificial Sequence: Synthetic oligonucleotide
  Sense strand starting at position 858 of SEQ ID NO: 584929
aauccaguucuguggaaua

SEQ ID NO: 600099 - RNA, 19 nt, Artificial Sequence
  Description of Artificial Sequence: Synthetic oligonucleotide
  Antisense strand to SEQ ID NO: 600098
uauuccacagaacuggauu

SEQ ID NO: 600100 - RNA, 19 nt, Artificial Sequence
  Description of Artificial Sequence: Synthetic oligonucleotide
  Sense strand starting at position 860 of SEQ ID NO: 584929
uccaguucuguggaauaag

SEQ ID NO: 600101 - RNA, 19 nt, Artificial Sequence
  Description of Artificial Sequence: Synthetic oligonucleotide
  Antisense strand to SEQ ID NO: 600100
cuuauuccacagaacugga

SEQ ID NO: 600102 - RNA, 19 nt, Artificial Sequence
  Description of Artificial Sequence: Synthetic oligonucleotide
  Sense strand starting at position 998 of SEQ ID NO: 584929
gauccauauuagcugugga

SEQ ID NO: 600103 - RNA, 19 nt, Artificial Sequence
  Description of Artificial Sequence: Synthetic oligonucleotide
  Antisense strand to SEQ ID NO: 600102
uccacagcuaauauggauc

SEQ ID NO: 600104 - RNA, 19 nt, Artificial Sequence
  Description of Artificial Sequence: Synthetic oligonucleotide
  Sense strand starting at position 1001 of SEQ ID NO: 584929
ccauauuagcuguggauga

SEQ ID NO: 600105 - RNA, 19 nt, Artificial Sequence
  Description of Artificial Sequence: Synthetic oligonucleotide
  Antisense strand to SEQ ID NO: 600104
ucauccacagcuaauaugg

SEQ ID NO: 600106 - RNA, 19 nt, Artificial Sequence
  Description of Artificial Sequence: Synthetic oligonucleotide
  Sense strand starting at position 1003 of SEQ ID NO: 584929
auauuagcuguggaugaau

SEQ ID NO: 600107 - RNA, 19 nt, Artificial Sequence
  Description of Artificial Sequence: Synthetic oligonucleotide
  Antisense strand to SEQ ID NO: 600106
auucauccacagcuaauau

SEQ ID NO: 600108 - RNA, 19 nt, Artificial Sequence
  Description of Artificial Sequence: Synthetic oligonucleotide
  Sense strand starting at position 1005 of SEQ ID NO: 584929
auuagcuguggaugaauaa

SEQ ID NO: 600109 - RNA, 19 nt, Artificial Sequence
  Description of Artificial Sequence: Synthetic oligonucleotide
  Antisense strand to SEQ ID NO: 600108
uuauucauccacagcuaau

SEQ ID NO: 600110 - RNA, 19 nt, Artificial Sequence
  Description of Artificial Sequence: Synthetic oligonucleotide
  Sense strand starting at position 1306 of SEQ ID NO: 584929
aucuuugaggcaugagaag

SEQ ID NO: 600111 - RNA, 19 nt, Artificial Sequence
  Description of Artificial Sequence: Synthetic oligonucleotide
  Antisense strand to SEQ ID NO: 600110
cuucucaugccucaaagau

SEQ ID NO: 600112 - RNA, 19 nt, Artificial Sequence
  Description of Artificial Sequence: Synthetic oligonucleotide
  Sense strand starting at position 1371 of SEQ ID NO: 584929
gguugugccgaugugugua

SEQ ID NO: 600113 - RNA, 19 nt, Artificial Sequence
  Description of Artificial Sequence: Synthetic oligonucleotide
  Antisense strand to SEQ ID NO: 600112
uacacacaucggcacaacc

SEQ ID NO: 600114 - RNA, 19 nt, Artificial Sequence
  Description of Artificial Sequence: Synthetic oligonucleotide
  Sense strand starting at position 1446 of SEQ ID NO: 584929
caccucacucagugggaaa

SEQ ID NO: 600115 - RNA, 19 nt, Artificial Sequence
  Description of Artificial Sequence: Synthetic oligonucleotide
  Antisense strand to SEQ ID NO: 600114
uuucccacugagugaggug

SEQ ID NO: 600116 - RNA, 19 nt, Artificial Sequence
  Description of Artificial Sequence: Synthetic oligonucleotide
  Sense strand starting at position 1459 of SEQ ID NO: 584929
gggaaagugagccaagcuu

SEQ ID NO: 600117 - RNA, 19 nt, Artificial Sequence
  Description of Artificial Sequence: Synthetic oligonucleotide
  Antisense strand to SEQ ID NO: 600116
aagcuuggcucacuuuccc

SEQ ID NO: 600118 - RNA, 19 nt, Artificial Sequence
  Description of Artificial Sequence: Synthetic oligonucleotide
  Sense strand starting at position 1777 of SEQ ID NO: 584929
ugcaguggcgaaguguuua

SEQ ID NO: 600119 - RNA, 19 nt, Artificial Sequence
  Description of Artificial Sequence: Synthetic oligonucleotide
  Antisense strand to SEQ ID NO: 600118
uaaacacuucgccacugca

SEQ ID NO: 600120 - RNA, 19 nt, Artificial Sequence
  Description of Artificial Sequence: Synthetic oligonucleotide
  Sense strand starting at position 1782 of SEQ ID NO: 584929
uggcgaaguguuuacaaag

SEQ ID NO: 600121 - RNA, 19 nt, Artificial Sequence
  Description of Artificial Sequence: Synthetic oligonucleotide
  Antisense strand to SEQ ID NO: 600120
cuuuguaaacacuucgcca

SEQ ID NO: 600122 - RNA, 19 nt, Artificial Sequence
  Description of Artificial Sequence: Synthetic oligonucleotide
  Sense strand starting at position 2098 of SEQ ID NO: 584929
cgugcuauccaggaaguaa

SEQ ID NO: 600123 - RNA, 19 nt, Artificial Sequence
  Description of Artificial Sequence: Synthetic oligonucleotide
  Antisense strand to SEQ ID NO: 600122
uuacuuccuggauagcacg

SEQ ID NO: 600124 - RNA, 19 nt, Artificial Sequence
  Description of Artificial Sequence: Synthetic oligonucleotide
  Sense strand starting at position 2477 of SEQ ID NO: 584929
gacagacucuuucugugua

SEQ ID NO: 600125 - RNA, 19 nt, Artificial Sequence
  Description of Artificial Sequence: Synthetic oligonucleotide
  Antisense strand to SEQ ID NO: 600124
uacacagaaagagucuguc

SEQ ID NO: 600126 - RNA, 19 nt, Artificial Sequence
  Description of Artificial Sequence: Synthetic oligonucleotide
  Sense strand starting at position 2899 of SEQ ID NO: 584929
aggguuucccaacauuacu

SEQ ID NO: 600127 - RNA, 19 nt, Artificial Sequence
  Description of Artificial Sequence: Synthetic oligonucleotide
  Antisense strand to SEQ ID NO: 600126
aguaauguugggaaacccu

SEQ ID NO: 600128 - RNA, 19 nt, Artificial Sequence
  Description of Artificial Sequence: Synthetic oligonucleotide
  Sense strand starting at position 2910 of SEQ ID NO: 584929
acauuacucgcucagaaga

SEQ ID NO: 600129 - RNA, 19 nt, Artificial Sequence
  Description of Artificial Sequence: Synthetic oligonucleotide
  Antisense strand to SEQ ID NO: 600128
ucuucugagcgaguaaugu

SEQ ID NO: 600130 - RNA, 19 nt, Artificial Sequence
  Description of Artificial Sequence: Synthetic oligonucleotide
  Sense strand starting at position 2980 of SEQ ID NO: 584929
gagugaagucacugggauu

SEQ ID NO: 600131 - RNA, 19 nt, Artificial Sequence
  Description of Artificial Sequence: Synthetic oligonucleotide
  Antisense strand to SEQ ID NO: 600130
aaucccagugacuucacuc

SEQ ID NO: 600132 - RNA, 19 nt, Artificial Sequence
  Description of Artificial Sequence: Synthetic oligonucleotide
  Sense strand starting at position 2981 of SEQ ID NO: 584929
agugaagucacugggauug

SEQ ID NO: 600133 - RNA, 19 nt, Artificial Sequence
  Description of Artificial Sequence: Synthetic oligonucleotide
  Antisense strand to SEQ ID NO: 600132
caaucccagugacuucacu

SEQ ID NO: 600134 - RNA, 19 nt, Artificial Sequence
  Description of Artificial Sequence: Synthetic oligonucleotide
  Sense strand starting at position 3056 of SEQ ID NO: 584929
uguagaugaucuccuggua

SEQ ID NO: 600135 - RNA, 19 nt, Artificial Sequence
  Description of Artificial Sequence: Synthetic oligonucleotide
  Antisense strand to SEQ ID NO: 600134
uaccaggagaucaucuaca

SEQ ID NO: 600136 - RNA, 19 nt, Artificial Sequence
  Description of Artificial Sequence: Synthetic oligonucleotide
  Sense strand starting at position 3070 of SEQ ID NO: 584929
ugguaugcucuuuauaaga

SEQ ID NO: 600137 - RNA, 19 nt, Artificial Sequence
  Description of Artificial Sequence: Synthetic oligonucleotide
  Antisense strand to SEQ ID NO: 600136
ucuuauaaagagcauacca

SEQ ID NO: 600138 - RNA, 19 nt, Artificial Sequence
  Description of Artificial Sequence: Synthetic oligonucleotide
  Sense strand starting at position 3722 of SEQ ID NO: 584929
gagagaguuuggguauccu

SEQ ID NO: 600139 - RNA, 19 nt, Artificial Sequence
  Description of Artificial Sequence: Synthetic oligonucleotide
  Antisense strand to SEQ ID NO: 600138
aggauacccaaacucucuc

SEQ ID NO: 600140 - RNA, 19 nt, Artificial Sequence
  Description of Artificial Sequence: Synthetic oligonucleotide
  Sense strand starting at position 3730 of SEQ ID NO: 584929
uuggguauccugcaacuuu

SEQ ID NO: 600141 - RNA, 19 nt, Artificial Sequence
  Description of Artificial Sequence: Synthetic oligonucleotide
  Antisense strand to SEQ ID NO: 600140
aaaguugcaggauacccaa

SEQ ID NO: 600142 - RNA, 19 nt, Artificial Sequence
  Description of Artificial Sequence: Synthetic oligonucleotide
  Sense strand starting at position 211 of SEQ ID NO: 584930
aaguacuagugaguguaga

SEQ ID NO: 600143 - RNA, 19 nt, Artificial Sequence
  Description of Artificial Sequence: Synthetic oligonucleotide
  Antisense strand to SEQ ID NO: 600142
ucuacacucacuaguacuu

SEQ ID NO: 600144 - RNA, 19 nt, Artificial Sequence
  Description of Artificial Sequence: Synthetic oligonucleotide
  Sense strand starting at position 304 of SEQ ID NO: 584930
gguuuaaugccugccugca

SEQ ID NO: 600145 - RNA, 19 nt, Artificial Sequence
  Description of Artificial Sequence: Synthetic oligonucleotide
  Antisense strand to SEQ ID NO: 600144
ugcaggcaggcauuaaacc

SEQ ID NO: 600146 - RNA, 19 nt, Artificial Sequence
  Description of Artificial Sequence: Synthetic oligonucleotide
  Sense strand starting at position 434 of SEQ ID NO: 584930
gcagaaagccucugauauc

SEQ ID NO: 600147 - RNA, 19 nt, Artificial Sequence
  Description of Artificial Sequence: Synthetic oligonucleotide
  Antisense strand to SEQ ID NO: 600146
gauaucagaggcuuucugc

SEQ ID NO: 600148 - RNA, 19 nt, Artificial Sequence
  Description of Artificial Sequence: Synthetic oligonucleotide
  Sense strand starting at position 806 of SEQ ID NO: 584930
gcugaagugaggugggaua

SEQ ID NO: 600149 - RNA, 19 nt, Artificial Sequence
  Description of Artificial Sequence: Synthetic oligonucleotide
  Antisense strand to SEQ ID NO: 600148
uaucccaccucacuucagc

SEQ ID NO: 600150 - RNA, 19 nt, Artificial Sequence
  Description of Artificial Sequence: Synthetic oligonucleotide
  Sense strand starting at position 844 of SEQ ID NO: 584930
aggguaagcuacuuagaga

SEQ ID NO: 600151 - RNA, 19 nt, Artificial Sequence
  Description of Artificial Sequence: Synthetic oligonucleotide
  Antisense strand to SEQ ID NO: 600150
ucucuaaguagcuuacccu

SEQ ID NO: 600152 - RNA, 19 nt, Artificial Sequence
  Description of Artificial Sequence: Synthetic oligonucleotide
  Sense strand starting at position 1418 of SEQ ID NO: 584930
ccgauuagggcucgggaaa

SEQ ID NO: 600153 - RNA, 19 nt, Artificial Sequence
  Description of Artificial Sequence: Synthetic oligonucleotide
  Antisense strand to SEQ ID NO: 600152
uuucccgagcccuaaucgg

SEQ ID NO: 600154 - RNA, 19 nt, Artificial Sequence
  Description of Artificial Sequence: Synthetic oligonucleotide
  Sense strand starting at position 1419 of SEQ ID NO: 584930
cgauuagggcucgggaaag

SEQ ID NO: 600155 - RNA, 19 nt, Artificial Sequence
  Description of Artificial Sequence: Synthetic oligonucleotide
  Antisense strand to SEQ ID NO: 600154
cuuucccgagcccuaaucg

SEQ ID NO: 600156 - RNA, 19 nt, Artificial Sequence
  Description of Artificial Sequence: Synthetic oligonucleotide
  Sense strand starting at position 2221 of SEQ ID NO: 584930
ucuagucacccaggaaaca

SEQ ID NO: 600157 - RNA, 19 nt, Artificial Sequence
  Description of Artificial Sequence: Synthetic oligonucleotide
  Antisense strand to SEQ ID NO: 600156
uguuuccugggugacuaga

SEQ ID NO: 600158 - RNA, 19 nt, Artificial Sequence
  Description of Artificial Sequence: Synthetic oligonucleotide
  Sense strand starting at position 2295 of SEQ ID NO: 584930
ggcugcuugcucuaaggaa

SEQ ID NO: 600159 - RNA, 19 nt, Artificial Sequence
  Description of Artificial Sequence: Synthetic oligonucleotide
  Antisense strand to SEQ ID NO: 600158
uuccuuagagcaagcagcc

SEQ ID NO: 600160 - RNA, 19 nt, Artificial Sequence
  Description of Artificial Sequence: Synthetic oligonucleotide
  Sense strand starting at position 2302 of SEQ ID NO: 584930
ugcucuaaggaaugcgaua

SEQ ID NO: 600161 - RNA, 19 nt, Artificial Sequence
  Description of Artificial Sequence: Synthetic oligonucleotide
  Antisense strand to SEQ ID NO: 600160
uaucgcauuccuuagagca

SEQ ID NO: 600162 - RNA, 19 nt, Artificial Sequence
  Description of Artificial Sequence: Synthetic oligonucleotide
  Sense strand starting at position 2329 of SEQ ID NO: 584930
cagagcuaguucuuaguga

SEQ ID NO: 600163 - RNA, 19 nt, Artificial Sequence
  Description of Artificial Sequence: Synthetic oligonucleotide
  Antisense strand to SEQ ID NO: 600162
ucacuaagaacuagcucug

SEQ ID NO: 600164 - RNA, 19 nt, Artificial Sequence
  Description of Artificial Sequence: Synthetic oligonucleotide
  Sense strand starting at position 2476 of SEQ ID NO: 584930
uucuguguucuacaccauu

SEQ ID NO: 600165 - RNA, 19 nt, Artificial Sequence
  Description of Artificial Sequence: Synthetic oligonucleotide
  Antisense strand to SEQ ID NO: 600164
aaugguguagaacacagaa

SEQ ID NO: 600166 - RNA, 19 nt, Artificial Sequence
  Description of Artificial Sequence: Synthetic oligonucleotide
  Sense strand starting at position 2499 of SEQ ID NO: 584930
guuaaacugugaucccaga

SEQ ID NO: 600167 - RNA, 19 nt, Artificial Sequence
  Description of Artificial Sequence: Synthetic oligonucleotide
  Antisense strand to SEQ ID NO: 600166
ucugggaucacaguuuaac

SEQ ID NO: 600168 - RNA, 19 nt, Artificial Sequence
  Description of Artificial Sequence: Synthetic oligonucleotide
  Sense strand starting at position 2607 of SEQ ID NO: 584930
acuagauuucugugcacuu

SEQ ID NO: 600169 - RNA, 19 nt, Artificial Sequence
  Description of Artificial Sequence: Synthetic oligonucleotide
  Antisense strand to SEQ ID NO: 600168
aagugcacagaaaucuagu

SEQ ID NO: 600170 - RNA, 19 nt, Artificial Sequence
  Description of Artificial Sequence: Synthetic oligonucleotide
  Sense strand starting at position 2608 of SEQ ID NO: 584930
cuagauuucugugcacuuu

SEQ ID NO: 600171 - RNA, 19 nt, Artificial Sequence
  Description of Artificial Sequence: Synthetic oligonucleotide
  Antisense strand to SEQ ID NO: 600170
aaagugcacagaaaucuag

SEQ ID NO: 600172 - RNA, 19 nt, Artificial Sequence
  Description of Artificial Sequence: Synthetic oligonucleotide
  Sense strand starting at position 2614 of SEQ ID NO: 584930
uucugugcacuuuaaagua

SEQ ID NO: 600173 - RNA, 19 nt, Artificial Sequence
  Description of Artificial Sequence: Synthetic oligonucleotide
  Antisense strand to SEQ ID NO: 600172
uacuuuaaagugcacagaa

SEQ ID NO: 600174 - RNA, 19 nt, Artificial Sequence
  Description of Artificial Sequence: Synthetic oligonucleotide
  Sense strand starting at position 2630 of SEQ ID NO: 584930
guaugagagcuuuagucua

SEQ ID NO: 600175 - RNA, 19 nt, Artificial Sequence
  Description of Artificial Sequence: Synthetic oligonucleotide
  Antisense strand to SEQ ID NO: 600174
uagacuaaagcucucauac

SEQ ID NO: 600176 - RNA, 19 nt, Artificial Sequence
  Description of Artificial Sequence: Synthetic oligonucleotide
  Sense strand starting at position 2632 of SEQ ID NO: 584930
augagagcuuuagucuaag

SEQ ID NO: 600177 - RNA, 19 nt, Artificial Sequence
  Description of Artificial Sequence: Synthetic oligonucleotide
  Antisense strand to SEQ ID NO: 600176
cuuagacuaaagcucucau

SEQ ID NO: 600178 - RNA, 19 nt, Artificial Sequence
  Description of Artificial Sequence: Synthetic oligonucleotide
  Sense strand starting at position 2635 of SEQ ID NO: 584930
agagcuuuagucuaaguca

SEQ ID NO: 600179 - RNA, 19 nt, Artificial Sequence
  Description of Artificial Sequence: Synthetic oligonucleotide
  Antisense strand to SEQ ID NO: 600178
ugacuuagacuaaagcucu

SEQ ID NO: 600180 - RNA, 19 nt, Artificial Sequence
  Description of Artificial Sequence: Synthetic oligonucleotide
  Sense strand starting at position 2643 of SEQ ID NO: 584930
agucuaagucagcauauaa

SEQ ID NO: 600181 - RNA, 19 nt, Artificial Sequence
  Description of Artificial Sequence: Synthetic oligonucleotide
  Antisense strand to SEQ ID NO: 600180
uuauaugcugacuuagacu

SEQ ID NO: 600182 - RNA, 19 nt, Artificial Sequence
  Description of Artificial Sequence: Synthetic oligonucleotide
  Sense strand starting at position 2741 of SEQ ID NO: 584930
cuuaguuucuguuuggaga

SEQ ID NO: 600183 - RNA, 19 nt, Artificial Sequence
  Description of Artificial Sequence: Synthetic oligonucleotide
  Antisense strand to SEQ ID NO: 600182
ucuccaaacagaaacuaag

SEQ ID NO: 600184 - RNA, 19 nt, Artificial Sequence
  Description of Artificial Sequence: Synthetic oligonucleotide
  Sense strand starting at position 2789 of SEQ ID NO: 584930
ugaaucaguuucuugcaca

SEQ ID NO: 600185 - RNA, 19 nt, Artificial Sequence
  Description of Artificial Sequence: Synthetic oligonucleotide
  Antisense strand to SEQ ID NO: 600184
ugugcaagaaacugauuca

SEQ ID NO: 600186 - RNA, 19 nt, Artificial Sequence
  Description of Artificial Sequence: Synthetic oligonucleotide
  Sense strand starting at position 2802 of SEQ ID NO: 584930
ugcacagacucugugagau

SEQ ID NO: 600187 - RNA, 19 nt, Artificial Sequence
  Description of Artificial Sequence: Synthetic oligonucleotide
  Antisense strand to SEQ ID NO: 600186
aucucacagagucugugca

SEQ ID NO: 600188 - RNA, 19 nt, Artificial Sequence
  Description of Artificial Sequence: Synthetic oligonucleotide
  Sense strand starting at position 2966 of SEQ ID NO: 584930
ggguccuccugacuuagga

SEQ ID NO: 600189 - RNA, 19 nt, Artificial Sequence
  Description of Artificial Sequence: Synthetic oligonucleotide
  Antisense strand to SEQ ID NO: 600188
uccuaagucaggaggaccc

SEQ ID NO: 600190 - RNA, 19 nt, Artificial Sequence
  Description of Artificial Sequence: Synthetic oligonucleotide
  Sense strand starting at position 3579 of SEQ ID NO: 584930
gcuauuaaauauucuagga

SEQ ID NO: 600191 - RNA, 19 nt, Artificial Sequence
  Description of Artificial Sequence: Synthetic oligonucleotide
  Antisense strand to SEQ ID NO: 600190
uccuagaauauuuaauagc

SEQ ID NO: 600192 - RNA, 19 nt, Artificial Sequence
  Description of Artificial Sequence: Synthetic oligonucleotide
  Sense strand starting at position 3595 of SEQ ID NO: 584930
ggacauaauuuguaauagg

SEQ ID NO: 600193 - RNA, 19 nt, Artificial Sequence
  Description of Artificial Sequence: Synthetic oligonucleotide
  Antisense strand to SEQ ID NO: 600192
ccuauuacaaauuaugucc

SEQ ID NO: 600194 - RNA, 19 nt, Artificial Sequence
  Description of Artificial Sequence: Synthetic oligonucleotide
  Sense strand starting at position 3625 of SEQ ID NO: 584930
ccauuaggugaauguacaa

SEQ ID NO: 600195 - RNA, 19 nt, Artificial Sequence
  Description of Artificial Sequence: Synthetic oligonucleotide
  Antisense strand to SEQ ID NO: 600194
uuguacauucaccuaaugg

SEQ ID NO: 600196 - RNA, 19 nt, Artificial Sequence
  Description of Artificial Sequence: Synthetic oligonucleotide
  Sense strand starting at position 3657 of SEQ ID NO: 584930
aaaccuguauugguggaaa

SEQ ID NO: 600197 - RNA, 19 nt, Artificial Sequence
  Description of Artificial Sequence: Synthetic oligonucleotide
  Antisense strand to SEQ ID NO: 600196
uuuccaccaauacagguuu

SEQ ID NO: 600198 - RNA, 19 nt, Artificial Sequence
  Description of Artificial Sequence: Synthetic oligonucleotide
  Sense strand starting at position 3659 of SEQ ID NO: 584930
accuguauugguggaaauu

SEQ ID NO: 600199 - RNA, 19 nt, Artificial Sequence
  Description of Artificial Sequence: Synthetic oligonucleotide
  Antisense strand to SEQ ID NO: 600198
aauuuccaccaauacaggu

SEQ ID NO: 600200 - RNA, 19 nt, Artificial Sequence
  Description of Artificial Sequence: Synthetic oligonucleotide
  Sense strand starting at position 3687 of SEQ ID NO: 584930
ucuaguucuucucuauuag

SEQ ID NO: 600201 - RNA, 19 nt, Artificial Sequence
  Description of Artificial Sequence: Synthetic oligonucleotide
  Antisense strand to SEQ ID NO: 600200
cuaauagagaagaacuaga

SEQ ID NO: 600202 - RNA, 19 nt, Artificial Sequence
  Description of Artificial Sequence: Synthetic oligonucleotide
  Sense strand starting at position 3688 of SEQ ID NO: 584930
cuaguucuucucuauuaga

SEQ ID NO: 600203 - RNA, 19 nt, Artificial Sequence
  Description of Artificial Sequence: Synthetic oligonucleotide
  Antisense strand to SEQ ID NO: 600202
ucuaauagagaagaacuag

SEQ ID NO: 600204 - RNA, 19 nt, Artificial Sequence
  Description of Artificial Sequence: Synthetic oligonucleotide
  Sense strand starting at position 3731 of SEQ ID NO: 584930
gguaauaucuuugugcaca

SEQ ID NO: 600205 - RNA, 19 nt, Artificial Sequence
  Description of Artificial Sequence: Synthetic oligonucleotide
  Antisense strand to SEQ ID NO: 600204
ugugcacaaagauauuacc

SEQ ID NO: 600206 - RNA, 19 nt, Artificial Sequence
  Description of Artificial Sequence: Synthetic oligonucleotide
  Sense strand starting at position 3743 of SEQ ID NO: 584930
gugcacacucaugauuauu

SEQ ID NO: 600207 - RNA, 19 nt, Artificial Sequence
  Description of Artificial Sequence: Synthetic oligonucleotide
  Antisense strand to SEQ ID NO: 600206
aauaaucaugagugugcac

SEQ ID NO: 600208 - RNA, 19 nt, Artificial Sequence
  Description of Artificial Sequence: Synthetic oligonucleotide
  Sense strand starting at position 3786 of SEQ ID NO: 584930
aguggaauuucccaaucua

SEQ ID NO: 600209 - RNA, 19 nt, Artificial Sequence
  Description of Artificial Sequence: Synthetic oligonucleotide
  Antisense strand to SEQ ID NO: 600208
uagauugggaaauuccacu

SEQ ID NO: 600210 - RNA, 19 nt, Artificial Sequence
  Description of Artificial Sequence: Synthetic oligonucleotide
  Sense strand starting at position 3853 of SEQ ID NO: 584930
uuuccugcugaauaguuaa

SEQ ID NO: 600211 - RNA, 19 nt, Artificial Sequence
  Description of Artificial Sequence: Synthetic oligonucleotide
  Antisense strand to SEQ ID NO: 600210
uuaacuauucagcaggaaa

SEQ ID NO: 600212 - RNA, 19 nt, Artificial Sequence
  Description of Artificial Sequence: Synthetic oligonucleotide
  Sense strand starting at position 3921 of SEQ ID NO: 584930
ccaacuagagagugaaagu

SEQ ID NO: 600213 - RNA, 19 nt, Artificial Sequence
  Description of Artificial Sequence: Synthetic oligonucleotide
  Antisense strand to SEQ ID NO: 600212
acuuucacucucuaguugg

SEQ ID NO: 600214 - RNA, 19 nt, Artificial Sequence
  Description of Artificial Sequence: Synthetic oligonucleotide
  Sense strand starting at position 3930 of SEQ ID NO: 584930
gagugaaaguggcuuauua

SEQ ID NO: 600215 - RNA, 19 nt, Artificial Sequence
  Description of Artificial Sequence: Synthetic oligonucleotide
  Antisense strand to SEQ ID NO: 600214
uaauaagccacuuucacuc

SEQ ID NO: 600216 - RNA, 19 nt, Artificial Sequence
  Description of Artificial Sequence: Synthetic oligonucleotide
  Sense strand starting at position 3932 of SEQ ID NO: 584930
gugaaaguggcuuauuagu

SEQ ID NO: 600217 - RNA, 19 nt, Artificial Sequence
  Description of Artificial Sequence: Synthetic oligonucleotide
  Antisense strand to SEQ ID NO: 600216
acuaauaagccacuuucac

SEQ ID NO: 600218 - RNA, 19 nt, Artificial Sequence
  Description of Artificial Sequence: Synthetic oligonucleotide
  Sense strand starting at position 3934 of SEQ ID NO: 584930
gaaaguggcuuauuaguaa

SEQ ID NO: 600219 - RNA, 19 nt, Artificial Sequence
  Description of Artificial Sequence: Synthetic oligonucleotide
  Antisense strand to SEQ ID NO: 600218
uuacuaauaagccacuuuc

SEQ ID NO: 600220 - RNA, 19 nt, Artificial Sequence
  Description of Artificial Sequence: Synthetic oligonucleotide
  Sense strand starting at position 3937 of SEQ ID NO: 584930
aguggcuuauuaguaauaa

SEQ ID NO: 600221 - RNA, 19 nt, Artificial Sequence
  Description of Artificial Sequence: Synthetic oligonucleotide
  Antisense strand to SEQ ID NO: 600220
uuauuacuaauaagccacu

SEQ ID NO: 600222 - RNA, 19 nt, Artificial Sequence
  Description of Artificial Sequence: Synthetic oligonucleotide
  Sense strand starting at position 5 of SEQ ID NO: 584931
aaggaugcgcugcauauuu

SEQ ID NO: 600223 - RNA, 19 nt, Artificial Sequence
  Description of Artificial Sequence: Synthetic oligonucleotide
  Antisense strand to SEQ ID NO: 600222
aaauaugcagcgcauccuu

SEQ ID NO: 600224 - RNA, 19 nt, Artificial Sequence
  Description of Artificial Sequence: Synthetic oligonucleotide
  Sense strand starting at position 13 of SEQ ID NO: 584931
gcugcauauuuacuguauu

SEQ ID NO: 600225 - RNA, 19 nt, Artificial Sequence
  Description of Artificial Sequence: Synthetic oligonucleotide
  Antisense strand to SEQ ID NO: 600224
aauacaguaaauaugcagc

SEQ ID NO: 600226 - RNA, 19 nt, Artificial Sequence
  Description of Artificial Sequence: Synthetic oligonucleotide
  Sense strand starting at position 127 of SEQ ID NO: 584931
uugggaucugaugggugaa

SEQ ID NO: 600227 - RNA, 19 nt, Artificial Sequence
  Description of Artificial Sequence: Synthetic oligonucleotide
  Antisense strand to SEQ ID NO: 600226
uucacccaucagaucccaa

SEQ ID NO: 600228 - RNA, 19 nt, Artificial Sequence
  Description of Artificial Sequence: Synthetic oligonucleotide
  Sense strand starting at position 151 of SEQ ID NO: 584931
ugcuaagacaugugaugag

SEQ ID NO: 600229 - RNA, 19 nt, Artificial Sequence
  Description of Artificial Sequence: Synthetic oligonucleotide
  Antisense strand to SEQ ID NO: 600228
cucaucacaugucuuagca

SEQ ID NO: 600230 - RNA, 19 nt, Artificial Sequence
  Description of Artificial Sequence: Synthetic oligonucleotide
  Sense strand starting at position 166 of SEQ ID NO: 584931
ugagauuucuggcugucuc

SEQ ID NO: 600231 - RNA, 19 nt, Artificial Sequence
  Description of Artificial Sequence: Synthetic oligonucleotide
  Antisense strand to SEQ ID NO: 600230
gagacagccagaaaucuca

SEQ ID NO: 600232 - RNA, 19 nt, Artificial Sequence
  Description of Artificial Sequence: Synthetic oligonucleotide
  Sense strand starting at position 455 of SEQ ID NO: 584931
ugacauucccacugaaugu

SEQ ID NO: 600233 - RNA, 19 nt, Artificial Sequence
  Description of Artificial Sequence: Synthetic oligonucleotide
  Antisense strand to SEQ ID NO: 600232
acauucagugggaauguca

SEQ ID NO: 600234 - RNA, 19 nt, Artificial Sequence
  Description of Artificial Sequence: Synthetic oligonucleotide
  Sense strand starting at position 672 of SEQ ID NO: 584931
gccuuagagguugauauua

SEQ ID NO: 600235 - RNA, 19 nt, Artificial Sequence
  Description of Artificial Sequence: Synthetic oligonucleotide
  Antisense strand to SEQ ID NO: 600234
uaauaucaaccucuaaggc

SEQ ID NO: 600236 - RNA, 19 nt, Artificial Sequence
  Description of Artificial Sequence: Synthetic oligonucleotide
  Sense strand starting at position 699 of SEQ ID NO: 584931
gagagcuccagguaaguca

SEQ ID NO: 600237 - RNA, 19 nt, Artificial Sequence
  Description of Artificial Sequence: Synthetic oligonucleotide
  Antisense strand to SEQ ID NO: 600236
ugacuuaccuggagcucuc

SEQ ID NO: 600238 - RNA, 19 nt, Artificial Sequence
  Description of Artificial Sequence: Synthetic oligonucleotide
  Sense strand starting at position 731 of SEQ ID NO: 584931
ucagauguuuaauuagaga

SEQ ID NO: 600239 - RNA, 19 nt, Artificial Sequence
  Description of Artificial Sequence: Synthetic oligonucleotide
  Antisense strand to SEQ ID NO: 600238
ucucuaauuaaacaucuga

SEQ ID NO: 600240 - RNA, 19 nt, Artificial Sequence
  Description of Artificial Sequence: Synthetic oligonucleotide
  Sense strand starting at position 845 of SEQ ID NO: 584931
cagugaaacugauugucac

SEQ ID NO: 600241 - RNA, 19 nt, Artificial Sequence
  Description of Artificial Sequence: Synthetic oligonucleotide
  Antisense strand to SEQ ID NO: 600240
gugacaaucaguuucacug

SEQ ID NO: 600242 - RNA, 19 nt, Artificial Sequence
  Description of Artificial Sequence: Synthetic oligonucleotide
  Sense strand starting at position 951 of SEQ ID NO: 584931
ccaucaguguauccagaga

SEQ ID NO: 600243 - RNA, 19 nt, Artificial Sequence
  Description of Artificial Sequence: Synthetic oligonucleotide
  Antisense strand to SEQ ID NO: 600242
ucucuggauacacugaugg

SEQ ID NO: 600244 - RNA, 19 nt, Artificial Sequence
  Description of Artificial Sequence: Synthetic oligonucleotide
  Sense strand starting at position 1257 of SEQ ID NO: 584931
gucugugggaucugcauuu

SEQ ID NO: 600245 - RNA, 19 nt, Artificial Sequence
  Description of Artificial Sequence: Synthetic oligonucleotide
  Antisense strand to SEQ ID NO: 600244
aaaugcagaucccacagac

SEQ ID NO: 600246 - RNA, 19 nt, Artificial Sequence
  Description of Artificial Sequence: Synthetic oligonucleotide
  Sense strand starting at position 1269 of SEQ ID NO: 584931
ugcauuucuuccuuauagu

SEQ ID NO: 600247 - RNA, 19 nt, Artificial Sequence
  Description of Artificial Sequence: Synthetic oligonucleotide
  Antisense strand to SEQ ID NO: 600246
acuauaaggaagaaaugca

SEQ ID NO: 600248 - RNA, 19 nt, Artificial Sequence
  Description of Artificial Sequence: Synthetic oligonucleotide
  Sense strand starting at position 1283 of SEQ ID NO: 584931
auaguuauggcucauagag

SEQ ID NO: 600249 - RNA, 19 nt, Artificial Sequence
  Description of Artificial Sequence: Synthetic oligonucleotide
  Antisense strand to SEQ ID NO: 600248
cucuaugagccauaacuau

SEQ ID NO: 600250 - RNA, 19 nt, Artificial Sequence
  Description of Artificial Sequence: Synthetic oligonucleotide
  Sense strand starting at position 1400 of SEQ ID NO: 584931
auggaaugucuuugugaga

SEQ ID NO: 600251 - RNA, 19 nt, Artificial Sequence
  Description of Artificial Sequence: Synthetic oligonucleotide
  Antisense strand to SEQ ID NO: 600250
ucucacaaagacauuccau

SEQ ID NO: 600252 - RNA, 19 nt, Artificial Sequence
  Description of Artificial Sequence: Synthetic oligonucleotide
  Sense strand starting at position 1579 of SEQ ID NO: 584931
uagaauagagcaugucaca

SEQ ID NO: 600253 - RNA, 19 nt, Artificial Sequence
  Description of Artificial Sequence: Synthetic oligonucleotide
  Antisense strand to SEQ ID NO: 600252
ugugacaugcucuauucua

SEQ ID NO: 600254 - RNA, 19 nt, Artificial Sequence
  Description of Artificial Sequence: Synthetic oligonucleotide
  Sense strand starting at position 1642 of SEQ ID NO: 584931
ugacuaaaguagccuaaau

SEQ ID NO: 600255 - RNA, 19 nt, Artificial Sequence
  Description of Artificial Sequence: Synthetic oligonucleotide
  Antisense strand to SEQ ID NO: 600254
auuuaggcuacuuuaguca

SEQ ID NO: 600256 - RNA, 19 nt, Artificial Sequence
  Description of Artificial Sequence: Synthetic oligonucleotide
  Sense strand starting at position 2101 of SEQ ID NO: 584931
gguugauguaacuagguca

SEQ ID NO: 600257 - RNA, 19 nt, Artificial Sequence
  Description of Artificial Sequence: Synthetic oligonucleotide
  Antisense strand to SEQ ID NO: 600256
ugaccuaguuacaucaacc

SEQ ID NO: 600258 - RNA, 19 nt, Artificial Sequence
  Description of Artificial Sequence: Synthetic oligonucleotide
  Sense strand starting at position 2163 of SEQ ID NO: 584931
aauuauugaucuguggaau

SEQ ID NO: 600259 - RNA, 19 nt, Artificial Sequence
  Description of Artificial Sequence: Synthetic oligonucleotide
  Antisense strand to SEQ ID NO: 600258
auuccacagaucaauaauu

SEQ ID NO: 600260 - RNA, 19 nt, Artificial Sequence
  Description of Artificial Sequence: Synthetic oligonucleotide
  Sense strand starting at position 2164 of SEQ ID NO: 584931
auuauugaucuguggaaua

SEQ ID NO: 600261 - RNA, 19 nt, Artificial Sequence
  Description of Artificial Sequence: Synthetic oligonucleotide
  Antisense strand to SEQ ID NO: 600260
uauuccacagaucaauaau

SEQ ID NO: 600262 - RNA, 19 nt, Artificial Sequence
  Description of Artificial Sequence: Synthetic oligonucleotide
  Sense strand starting at position 2185 of SEQ ID NO: 584931
ucuugauucuucuuggaaa

SEQ ID NO: 600263 - RNA, 19 nt, Artificial Sequence
  Description of Artificial Sequence: Synthetic oligonucleotide
  Antisense strand to SEQ ID NO: 600262
uuuccaagaagaaucaaga

SEQ ID NO: 600264 - RNA, 19 nt, Artificial Sequence
  Description of Artificial Sequence: Synthetic oligonucleotide
  Sense strand starting at position 2187 of SEQ ID NO: 584931
uugauucuucuuggaaauu

SEQ ID NO: 600265 - RNA, 19 nt, Artificial Sequence
  Description of Artificial Sequence: Synthetic oligonucleotide
  Antisense strand to SEQ ID NO: 600264
aauuuccaagaagaaucaa

SEQ ID NO: 600266 - RNA, 19 nt, Artificial Sequence
  Description of Artificial Sequence: Synthetic oligonucleotide
  Sense strand starting at position 2223 of SEQ ID NO: 584931
auuguaaaguucucugaaa

SEQ ID NO: 600267 - RNA, 19 nt, Artificial Sequence
  Description of Artificial Sequence: Synthetic oligonucleotide
  Antisense strand to SEQ ID NO: 600266
uuucagagaacuuuacaau

SEQ ID NO: 600268 - RNA, 19 nt, Artificial Sequence
  Description of Artificial Sequence: Synthetic oligonucleotide
  Sense strand starting at position 2224 of SEQ ID NO: 584931
uuguaaaguucucugaaag

SEQ ID NO: 600269 - RNA, 19 nt, Artificial Sequence
  Description of Artificial Sequence: Synthetic oligonucleotide
  Antisense strand to SEQ ID NO: 600268
cuuucagagaacuuuacaa

SEQ ID NO: 600270 - RNA, 19 nt, Artificial Sequence
  Description of Artificial Sequence: Synthetic oligonucleotide
  Sense strand starting at position 2225 of SEQ ID NO: 584931
uguaaaguucucugaaagg

SEQ ID NO: 600271 - RNA, 19 nt, Artificial Sequence
  Description of Artificial Sequence: Synthetic oligonucleotide
  Antisense strand to SEQ ID NO: 600270
ccuuucagagaacuuuaca

SEQ ID NO: 600272 - RNA, 19 nt, Artificial Sequence
  Description of Artificial Sequence: Synthetic oligonucleotide
  Sense strand starting at position 2235 of SEQ ID NO: 584931
ucugaaaggcucuacaguu

SEQ ID NO: 600273 - RNA, 19 nt, Artificial Sequence
  Description of Artificial Sequence: Synthetic oligonucleotide
  Antisense strand to SEQ ID NO: 600272
aacuguagagccuuucaga

SEQ ID NO: 600274 - RNA, 19 nt, Artificial Sequence
  Description of Artificial Sequence: Synthetic oligonucleotide
  Sense strand starting at position 2289 of SEQ ID NO: 584931
ugauauaugcuuuaugagu

SEQ ID NO: 600275 - RNA, 19 nt, Artificial Sequence
  Description of Artificial Sequence: Synthetic oligonucleotide
  Antisense strand to SEQ ID NO: 600274
acucauaaagcauauauca

SEQ ID NO: 600276 - RNA, 19 nt, Artificial Sequence
  Description of Artificial Sequence: Synthetic oligonucleotide
  Sense strand starting at position 2294 of SEQ ID NO: 584931
uaugcuuuaugaguaaaga

SEQ ID NO: 600277 - RNA, 19 nt, Artificial Sequence
  Description of Artificial Sequence: Synthetic oligonucleotide
  Antisense strand to SEQ ID NO: 600276
ucuuuacucauaaagcaua

SEQ ID NO: 600278 - RNA, 19 nt, Artificial Sequence
  Description of Artificial Sequence: Synthetic oligonucleotide
  Sense strand starting at position 2295 of SEQ ID NO: 584931
augcuuuaugaguaaagac

SEQ ID NO: 600279 - RNA, 19 nt, Artificial Sequence
  Description of Artificial Sequence: Synthetic oligonucleotide
  Antisense strand to SEQ ID NO: 600278
gucuuuacucauaaagcau

SEQ ID NO: 600280 - RNA, 19 nt, Artificial Sequence
  Description of Artificial Sequence: Synthetic oligonucleotide
  Sense strand starting at position 2463 of SEQ ID NO: 584931
gugucacaacuugaccaau

SEQ ID NO: 600281 - RNA, 19 nt, Artificial Sequence
  Description of Artificial Sequence: Synthetic oligonucleotide
  Antisense strand to SEQ ID NO: 600280
auuggucaaguugugacac

SEQ ID NO: 600282 - RNA, 19 nt, Artificial Sequence
  Description of Artificial Sequence: Synthetic oligonucleotide
  Sense strand starting at position 2527 of SEQ ID NO: 584931
gucagcgcucagcuuaaga

SEQ ID NO: 600283 - RNA, 19 nt, Artificial Sequence
  Description of Artificial Sequence: Synthetic oligonucleotide
  Antisense strand to SEQ ID NO: 600282
ucuuaagcugagcgcugac

SEQ ID NO: 600284 - RNA, 19 nt, Artificial Sequence
  Description of Artificial Sequence: Synthetic oligonucleotide
  Sense strand starting at position 2893 of SEQ ID NO: 584931
uugaguaacuucccaagaa

SEQ ID NO: 600285 - RNA, 19 nt, Artificial Sequence
  Description of Artificial Sequence: Synthetic oligonucleotide
  Antisense strand to SEQ ID NO: 600284
uucuugggaaguuacucaa

SEQ ID NO: 600286 - RNA, 19 nt, Artificial Sequence
  Description of Artificial Sequence: Synthetic oligonucleotide
  Sense strand starting at position 2897 of SEQ ID NO: 584931
guaacuucccaagaaugua

SEQ ID NO: 600287 - RNA, 19 nt, Artificial Sequence
  Description of Artificial Sequence: Synthetic oligonucleotide
  Antisense strand to SEQ ID NO: 600286
uacauucuugggaaguuac

SEQ ID NO: 600288 - RNA, 19 nt, Artificial Sequence
  Description of Artificial Sequence: Synthetic oligonucleotide
  Sense strand starting at position 2909 of SEQ ID NO: 584931
gaauguaugagccaggagu

SEQ ID NO: 600289 - RNA, 19 nt, Artificial Sequence
  Description of Artificial Sequence: Synthetic oligonucleotide
  Antisense strand to SEQ ID NO: 600288
acuccuggcucauacauuc

SEQ ID NO: 600290 - RNA, 19 nt, Artificial Sequence
  Description of Artificial Sequence: Synthetic oligonucleotide
  Sense strand starting at position 3306 of SEQ ID NO: 584931
acauguguaccuggaggaa

SEQ ID NO: 600291 - RNA, 19 nt, Artificial Sequence
  Description of Artificial Sequence: Synthetic oligonucleotide
  Antisense strand to SEQ ID NO: 600290
uuccuccagguacacaugu

SEQ ID NO: 600292 - RNA, 19 nt, Artificial Sequence
  Description of Artificial Sequence: Synthetic oligonucleotide
  Sense strand starting at position 3415 of SEQ ID NO: 584931
ggaugagagcuguagucag

SEQ ID NO: 600293 - RNA, 19 nt, Artificial Sequence
  Description of Artificial Sequence: Synthetic oligonucleotide
  Antisense strand to SEQ ID NO: 600292
cugacuacagcucucaucc

SEQ ID NO: 600294 - RNA, 19 nt, Artificial Sequence
  Description of Artificial Sequence: Synthetic oligonucleotide
  Sense strand starting at position 3510 of SEQ ID NO: 584931
aagacuucggagugacauu

SEQ ID NO: 600295 - RNA, 19 nt, Artificial Sequence
  Description of Artificial Sequence: Synthetic oligonucleotide
  Antisense strand to SEQ ID NO: 600294
aaugucacuccgaagucuu

SEQ ID NO: 600296 - RNA, 19 nt, Artificial Sequence
  Description of Artificial Sequence: Synthetic oligonucleotide
  Sense strand starting at position 3519 of SEQ ID NO: 584931
gagugacauuaucugacuu

SEQ ID NO: 600297 - RNA, 19 nt, Artificial Sequence
  Description of Artificial Sequence: Synthetic oligonucleotide
  Antisense strand to SEQ ID NO: 600296
aagucagauaaugucacuc

SEQ ID NO: 600298 - RNA, 19 nt, Artificial Sequence
  Description of Artificial Sequence: Synthetic oligonucleotide
  Sense strand starting at position 3664 of SEQ ID NO: 584931
gcagacuggaugugagauu

SEQ ID NO: 600299 - RNA, 19 nt, Artificial Sequence
  Description of Artificial Sequence: Synthetic oligonucleotide
  Antisense strand to SEQ ID NO: 600298
aaucucacauccagucugc

SEQ ID NO: 600300 - RNA, 19 nt, Artificial Sequence
  Description of Artificial Sequence: Synthetic oligonucleotide
  Sense strand starting at position 3894 of SEQ ID NO: 584931
ugugcauuggcagaggaau

SEQ ID NO: 600301 - RNA, 19 nt, Artificial Sequence
  Description of Artificial Sequence: Synthetic oligonucleotide
  Antisense strand to SEQ ID NO: 600300
auuccucugccaaugcaca

SEQ ID NO: 600302 - RNA, 19 nt, Artificial Sequence
  Description of Artificial Sequence: Synthetic oligonucleotide
  Sense strand starting at position 82 of SEQ ID NO: 584932
gaguguagcucaucuagga

SEQ ID NO: 600303 - RNA, 19 nt, Artificial Sequence
  Description of Artificial Sequence: Synthetic oligonucleotide
  Antisense strand to SEQ ID NO: 600302
uccuagaugagcuacacuc

SEQ ID NO: 600304 - RNA, 19 nt, Artificial Sequence
  Description of Artificial Sequence: Synthetic oligonucleotide
  Sense strand starting at position 132 of SEQ ID NO: 584932
cucuuacucgccguucuaa

SEQ ID NO: 600305 - RNA, 19 nt, Artificial Sequence
  Description of Artificial Sequence: Synthetic oligonucleotide
  Antisense strand to SEQ ID NO: 600304
uuagaacggcgaguaagag

SEQ ID NO: 600306 - RNA, 19 nt, Artificial Sequence
  Description of Artificial Sequence: Synthetic oligonucleotide
  Sense strand starting at position 133 of SEQ ID NO: 584932
ucuuacucgccguucuaau

SEQ ID NO: 600307 - RNA, 19 nt, Artificial Sequence
  Description of Artificial Sequence: Synthetic oligonucleotide
  Antisense strand to SEQ ID NO: 600306
auuagaacggcgaguaaga

SEQ ID NO: 600308 - RNA, 19 nt, Artificial Sequence
  Description of Artificial Sequence: Synthetic oligonucleotide
  Sense strand starting at position 134 of SEQ ID NO: 584932
cuuacucgccguucuaauu

SEQ ID NO: 600309 - RNA, 19 nt, Artificial Sequence
  Description of Artificial Sequence: Synthetic oligonucleotide
  Antisense strand to SEQ ID NO: 600308
aauuagaacggcgaguaag

SEQ ID NO: 600310 - RNA, 19 nt, Artificial Sequence
  Description of Artificial Sequence: Synthetic oligonucleotide
  Sense strand starting at position 257 of SEQ ID NO: 584932
cuguaaugguagguguuca

SEQ ID NO: 600311 - RNA, 19 nt, Artificial Sequence
  Description of Artificial Sequence: Synthetic oligonucleotide
  Antisense strand to SEQ ID NO: 600310
ugaacaccuaccauuacag

SEQ ID NO: 600312 - RNA, 19 nt, Artificial Sequence
  Description of Artificial Sequence: Synthetic oligonucleotide
  Sense strand starting at position 383 of SEQ ID NO: 584932
uuugaaugagaguggcuaa

SEQ ID NO: 600313 - RNA, 19 nt, Artificial Sequence
  Description of Artificial Sequence: Synthetic oligonucleotide
  Antisense strand to SEQ ID NO: 600312
uuagccacucucauucaaa

SEQ ID NO: 600314 - RNA, 19 nt, Artificial Sequence
  Description of Artificial Sequence: Synthetic oligonucleotide
  Sense strand starting at position 440 of SEQ ID NO: 584932
cccggugauuuguuuauua

SEQ ID NO: 600315 - RNA, 19 nt, Artificial Sequence
  Description of Artificial Sequence: Synthetic oligonucleotide
  Antisense strand to SEQ ID NO: 600314
uaauaaacaaaucaccggg

SEQ ID NO: 600316 - RNA, 19 nt, Artificial Sequence
  Description of Artificial Sequence: Synthetic oligonucleotide
  Sense strand starting at position 444 of SEQ ID NO: 584932
gugauuuguuuauuaagcu

SEQ ID NO: 600317 - RNA, 19 nt, Artificial Sequence
  Description of Artificial Sequence: Synthetic oligonucleotide
  Antisense strand to SEQ ID NO: 600316
agcuuaauaaacaaaucac

SEQ ID NO: 600318 - RNA, 19 nt, Artificial Sequence
  Description of Artificial Sequence: Synthetic oligonucleotide
  Sense strand starting at position 577 of SEQ ID NO: 584932
uaguuauggccuugcauuu

SEQ ID NO: 600319 - RNA, 19 nt, Artificial Sequence
  Description of Artificial Sequence: Synthetic oligonucleotide
  Antisense strand to SEQ ID NO: 600318
aaaugcaaggccauaacua

SEQ ID NO: 600320 - RNA, 19 nt, Artificial Sequence
  Description of Artificial Sequence: Synthetic oligonucleotide
  Sense strand starting at position 931 of SEQ ID NO: 584932
ccuuuaauaucauugugua

SEQ ID NO: 600321 - RNA, 19 nt, Artificial Sequence
  Description of Artificial Sequence: Synthetic oligonucleotide
  Antisense strand to SEQ ID NO: 600320
uacacaaugauauuaaagg

SEQ ID NO: 600322 - RNA, 19 nt, Artificial Sequence
  Description of Artificial Sequence: Synthetic oligonucleotide
  Sense strand starting at position 977 of SEQ ID NO: 584932
ucauaaucacaguggcauu

SEQ ID NO: 600323 - RNA, 19 nt, Artificial Sequence
  Description of Artificial Sequence: Synthetic oligonucleotide
  Antisense strand to SEQ ID NO: 600322
aaugccacugugauuauga

SEQ ID NO: 600324 - RNA, 19 nt, Artificial Sequence
  Description of Artificial Sequence: Synthetic oligonucleotide
  Sense strand starting at position 1004 of SEQ ID NO: 584932
ucaugagagcuuugcaacu

SEQ ID NO: 600325 - RNA, 19 nt, Artificial Sequence
  Description of Artificial Sequence: Synthetic oligonucleotide
  Antisense strand to SEQ ID NO: 600324
aguugcaaagcucucauga

SEQ ID NO: 600326 - RNA, 19 nt, Artificial Sequence
  Description of Artificial Sequence: Synthetic oligonucleotide
  Sense strand starting at position 1017 of SEQ ID NO: 584932
gcaacugagacuuguugaa

SEQ ID NO: 600327 - RNA, 19 nt, Artificial Sequence
  Description of Artificial Sequence: Synthetic oligonucleotide
  Antisense strand to SEQ ID NO: 600326
uucaacaagucucaguugc

SEQ ID NO: 600328 - RNA, 19 nt, Artificial Sequence
  Description of Artificial Sequence: Synthetic oligonucleotide
  Sense strand starting at position 1019 of SEQ ID NO: 584932
aacugagacuuguugaaau

SEQ ID NO: 600329 - RNA, 19 nt, Artificial Sequence
  Description of Artificial Sequence: Synthetic oligonucleotide
  Antisense strand to SEQ ID NO: 600328
auuucaacaagucucaguu

SEQ ID NO: 600330 - RNA, 19 nt, Artificial Sequence
  Description of Artificial Sequence: Synthetic oligonucleotide
  Sense strand starting at position 1324 of SEQ ID NO: 584932
acuauacacuuagaggaaa

SEQ ID NO: 600331 - RNA, 19 nt, Artificial Sequence
  Description of Artificial Sequence: Synthetic oligonucleotide
  Antisense strand to SEQ ID NO: 600330
uuuccucuaaguguauagu

SEQ ID NO: 600332 - RNA, 19 nt, Artificial Sequence
  Description of Artificial Sequence: Synthetic oligonucleotide
  Sense strand starting at position 1393 of SEQ ID NO: 584932
ugucguuaagcauaaacau

SEQ ID NO: 600333 - RNA, 19 nt, Artificial Sequence
  Description of Artificial Sequence: Synthetic oligonucleotide
  Antisense strand to SEQ ID NO: 600332
auguuuaugcuuaacgaca

SEQ ID NO: 600334 - RNA, 19 nt, Artificial Sequence
  Description of Artificial Sequence: Synthetic oligonucleotide
  Sense strand starting at position 1402 of SEQ ID NO: 584932
gcauaaacauggucaauau

SEQ ID NO: 600335 - RNA, 19 nt, Artificial Sequence
  Description of Artificial Sequence: Synthetic oligonucleotide
  Antisense strand to SEQ ID NO: 600334
auauugaccauguuuaugc

SEQ ID NO: 600336 - RNA, 19 nt, Artificial Sequence
  Description of Artificial Sequence: Synthetic oligonucleotide
  Sense strand starting at position 1421 of SEQ ID NO: 584932
gccagcauucuggaagauu

SEQ ID NO: 600337 - RNA, 19 nt, Artificial Sequence
  Description of Artificial Sequence: Synthetic oligonucleotide
  Antisense strand to SEQ ID NO: 600336
aaucuuccagaaugcuggc

SEQ ID NO: 600338 - RNA, 19 nt, Artificial Sequence
  Description of Artificial Sequence: Synthetic oligonucleotide
  Sense strand starting at position 1989 of SEQ ID NO: 584932
ggccgugugaguuaaagac

SEQ ID NO: 600339 - RNA, 19 nt, Artificial Sequence
  Description of Artificial Sequence: Synthetic oligonucleotide
  Antisense strand to SEQ ID NO: 600338
gucuuuaacucacacggcc

SEQ ID NO: 600340 - RNA, 19 nt, Artificial Sequence
  Description of Artificial Sequence: Synthetic oligonucleotide
  Sense strand starting at position 2156 of SEQ ID NO: 584932
gagaaauagccaugcccgu

SEQ ID NO: 600341 - RNA, 19 nt, Artificial Sequence
  Description of Artificial Sequence: Synthetic oligonucleotide
  Antisense strand to SEQ ID NO: 600340
acgggcauggcuauuucuc

SEQ ID NO: 600342 - RNA, 19 nt, Artificial Sequence
  Description of Artificial Sequence: Synthetic oligonucleotide
  Sense strand starting at position 2312 of SEQ ID NO: 584932
agaaucucugggugacgau

SEQ ID NO: 600343 - RNA, 19 nt, Artificial Sequence
  Description of Artificial Sequence: Synthetic oligonucleotide
  Antisense strand to SEQ ID NO: 600342
aucgucacccagagauucu

SEQ ID NO: 600344 - RNA, 19 nt, Artificial Sequence
  Description of Artificial Sequence: Synthetic oligonucleotide
  Sense strand starting at position 2339 of SEQ ID NO: 584932
cugcccugucuuuagacau

SEQ ID NO: 600345 - RNA, 19 nt, Artificial Sequence
  Description of Artificial Sequence: Synthetic oligonucleotide
  Antisense strand to SEQ ID NO: 600344
augucuaaagacagggcag

SEQ ID NO: 600346 - RNA, 19 nt, Artificial Sequence
  Description of Artificial Sequence: Synthetic oligonucleotide
  Sense strand starting at position 2374 of SEQ ID NO: 584932
gacgacaagucacucagaa

SEQ ID NO: 600347 - RNA, 19 nt, Artificial Sequence
  Description of Artificial Sequence: Synthetic oligonucleotide
  Antisense strand to SEQ ID NO: 600346
uucugagugacuugucguc

SEQ ID NO: 600348 - RNA, 19 nt, Artificial Sequence
  Description of Artificial Sequence: Synthetic oligonucleotide
  Sense strand starting at position 2400 of SEQ ID NO: 584932
uguagaugcaagugcuuaa

SEQ ID NO: 600349 - RNA, 19 nt, Artificial Sequence
  Description of Artificial Sequence: Synthetic oligonucleotide
  Antisense strand to SEQ ID NO: 600348
uuaagcacuugcaucuaca

SEQ ID NO: 600350 - RNA, 19 nt, Artificial Sequence
  Description of Artificial Sequence: Synthetic oligonucleotide
  Sense strand starting at position 2504 of SEQ ID NO: 584932
agacaauagguucgugauc

SEQ ID NO: 600351 - RNA, 19 nt, Artificial Sequence
  Description of Artificial Sequence: Synthetic oligonucleotide
  Antisense strand to SEQ ID NO: 600350
gaucacgaaccuauugucu

SEQ ID NO: 600352 - RNA, 19 nt, Artificial Sequence
  Description of Artificial Sequence: Synthetic oligonucleotide
  Sense strand starting at position 2505 of SEQ ID NO: 584932
gacaauagguucgugauca

SEQ ID NO: 600353 - RNA, 19 nt, Artificial Sequence
  Description of Artificial Sequence: Synthetic oligonucleotide
  Antisense strand to SEQ ID NO: 600352
ugaucacgaaccuauuguc

SEQ ID NO: 600354 - RNA, 19 nt, Artificial Sequence
  Description of Artificial Sequence: Synthetic oligonucleotide
  Sense strand starting at position 2509 of SEQ ID NO: 584932
auagguucgugaucaauuc

SEQ ID NO: 600355 - RNA, 19 nt, Artificial Sequence
  Description of Artificial Sequence: Synthetic oligonucleotide
  Antisense strand to SEQ ID NO: 600354
gaauugaucacgaaccuau

SEQ ID NO: 600356 - RNA, 19 nt, Artificial Sequence
  Description of Artificial Sequence: Synthetic oligonucleotide
  Sense strand starting at position 2510 of SEQ ID NO: 584932
uagguucgugaucaauucu

SEQ ID NO: 600357 - RNA, 19 nt, Artificial Sequence
  Description of Artificial Sequence: Synthetic oligonucleotide
  Antisense strand to SEQ ID NO: 600356
agaauugaucacgaaccua

SEQ ID NO: 600358 - RNA, 19 nt, Artificial Sequence
  Description of Artificial Sequence: Synthetic oligonucleotide
  Sense strand starting at position 2977 of SEQ ID NO: 584932
ugacuaaguccuggcuguu

SEQ ID NO: 600359 - RNA, 19 nt, Artificial Sequence
  Description of Artificial Sequence: Synthetic oligonucleotide
  Antisense strand to SEQ ID NO: 600358
aacagccaggacuuaguca

SEQ ID NO: 600360 - RNA, 19 nt, Artificial Sequence
  Description of Artificial Sequence: Synthetic oligonucleotide
  Sense strand starting at position 3097 of SEQ ID NO: 584932
ccgaaaccugcugauuauu

SEQ ID NO: 600361 - RNA, 19 nt, Artificial Sequence
  Description of Artificial Sequence: Synthetic oligonucleotide
  Antisense strand to SEQ ID NO: 600360
aauaaucagcagguuucgg

SEQ ID NO: 600362 - RNA, 19 nt, Artificial Sequence
  Description of Artificial Sequence: Synthetic oligonucleotide
  Sense strand starting at position 3107 of SEQ ID NO: 584932
cugauuauuggauggcgaa

SEQ ID NO: 600363 - RNA, 19 nt, Artificial Sequence
  Description of Artificial Sequence: Synthetic oligonucleotide
  Antisense strand to SEQ ID NO: 600362
uucgccauccaauaaucag

SEQ ID NO: 600364 - RNA, 19 nt, Artificial Sequence
  Description of Artificial Sequence: Synthetic oligonucleotide
  Sense strand starting at position 3108 of SEQ ID NO: 584932
ugauuauuggauggcgaac

SEQ ID NO: 600365 - RNA, 19 nt, Artificial Sequence
  Description of Artificial Sequence: Synthetic oligonucleotide
  Antisense strand to SEQ ID NO: 600364
guucgccauccaauaauca

SEQ ID NO: 600366 - RNA, 19 nt, Artificial Sequence
  Description of Artificial Sequence: Synthetic oligonucleotide
  Sense strand starting at position 3362 of SEQ ID NO: 584932
gaugauuagcccuggcaau

SEQ ID NO: 600367 - RNA, 19 nt, Artificial Sequence
  Description of Artificial Sequence: Synthetic oligonucleotide
  Antisense strand to SEQ ID NO: 600366
auugccagggcuaaucauc

SEQ ID NO: 600368 - RNA, 19 nt, Artificial Sequence
  Description of Artificial Sequence: Synthetic oligonucleotide
  Sense strand starting at position 3363 of SEQ ID NO: 584932
augauuagcccuggcaaug

SEQ ID NO: 600369 - RNA, 19 nt, Artificial Sequence
  Description of Artificial Sequence: Synthetic oligonucleotide
  Antisense strand to SEQ ID NO: 600368
cauugccagggcuaaucau

SEQ ID NO: 600370 - RNA, 19 nt, Artificial Sequence
  Description of Artificial Sequence: Synthetic oligonucleotide
  Sense strand starting at position 3375 of SEQ ID NO: 584932
ggcaaugccugccuggaaa

SEQ ID NO: 600371 - RNA, 19 nt, Artificial Sequence
  Description of Artificial Sequence: Synthetic oligonucleotide
  Antisense strand to SEQ ID NO: 600370
uuuccaggcaggcauugcc

SEQ ID NO: 600372 - RNA, 19 nt, Artificial Sequence
  Description of Artificial Sequence: Synthetic oligonucleotide
  Sense strand starting at position 3459 of SEQ ID NO: 584932
agaaauguaacguguugaa

SEQ ID NO: 600373 - RNA, 19 nt, Artificial Sequence
  Description of Artificial Sequence: Synthetic oligonucleotide
  Antisense strand to SEQ ID NO: 600372
uucaacacguuacauuucu

SEQ ID NO: 600374 - RNA, 19 nt, Artificial Sequence
  Description of Artificial Sequence: Synthetic oligonucleotide
  Sense strand starting at position 3463 of SEQ ID NO: 584932
auguaacguguugaacaaa

SEQ ID NO: 600375 - RNA, 19 nt, Artificial Sequence
  Description of Artificial Sequence: Synthetic oligonucleotide
  Antisense strand to SEQ ID NO: 600374
uuuguucaacacguuacau

SEQ ID NO: 600376 - RNA, 19 nt, Artificial Sequence
  Description of Artificial Sequence: Synthetic oligonucleotide
  Sense strand starting at position 3609 of SEQ ID NO: 584932
ucuggaggucuccaagagu

SEQ ID NO: 600377 - RNA, 19 nt, Artificial Sequence
  Description of Artificial Sequence: Synthetic oligonucleotide
  Antisense strand to SEQ ID NO: 600376
acucuuggagaccuccaga

SEQ ID NO: 600378 - RNA, 19 nt, Artificial Sequence
  Description of Artificial Sequence: Synthetic oligonucleotide
  Sense strand starting at position 3720 of SEQ ID NO: 584932
gguugccuuuacuucgaga

SEQ ID NO: 600379 - RNA, 19 nt, Artificial Sequence
  Description of Artificial Sequence: Synthetic oligonucleotide
  Antisense strand to SEQ ID NO: 600378
ucucgaaguaaaggcaacc

SEQ ID NO: 600380 - RNA, 19 nt, Artificial Sequence
  Description of Artificial Sequence: Synthetic oligonucleotide
  Sense strand starting at position 3725 of SEQ ID NO: 584932
ccuuuacuucgagagcuga

SEQ ID NO: 600381 - RNA, 19 nt, Artificial Sequence
  Description of Artificial Sequence: Synthetic oligonucleotide
  Antisense strand to SEQ ID NO: 600380
ucagcucucgaaguaaagg

SEQ ID NO: 600382 - RNA, 19 nt, Artificial Sequence
  Description of Artificial Sequence: Synthetic oligonucleotide
  Sense strand starting at position 153 of SEQ ID NO: 584933
ugugaauaugagcaguagu

SEQ ID NO: 600383 - RNA, 19 nt, Artificial Sequence
  Description of Artificial Sequence: Synthetic oligonucleotide
  Antisense strand to SEQ ID NO: 600382
acuacugcucauauucaca

SEQ ID NO: 600384 - RNA, 19 nt, Artificial Sequence
  Description of Artificial Sequence: Synthetic oligonucleotide
  Sense strand starting at position 156 of SEQ ID NO: 584933
gaauaugagcaguagugau

SEQ ID NO: 600385 - RNA, 19 nt, Artificial Sequence
  Description of Artificial Sequence: Synthetic oligonucleotide
  Antisense strand to SEQ ID NO: 600384
aucacuacugcucauauuc

SEQ ID NO: 600386 - RNA, 19 nt, Artificial Sequence
  Description of Artificial Sequence: Synthetic oligonucleotide
  Sense strand starting at position 160 of SEQ ID NO: 584933
augagcaguagugauguaa

SEQ ID NO: 600387 - RNA, 19 nt, Artificial Sequence
  Description of Artificial Sequence: Synthetic oligonucleotide
  Antisense strand to SEQ ID NO: 600386
uuacaucacuacugcucau

SEQ ID NO: 600388 - RNA, 19 nt, Artificial Sequence
  Description of Artificial Sequence: Synthetic oligonucleotide
  Sense strand starting at position 276 of SEQ ID NO: 584933
uugggagccaagugaugau

SEQ ID NO: 600389 - RNA, 19 nt, Artificial Sequence
  Description of Artificial Sequence: Synthetic oligonucleotide
  Antisense strand to SEQ ID NO: 600388
aucaucacuuggcucccaa

SEQ ID NO: 600390 - RNA, 19 nt, Artificial Sequence
  Description of Artificial Sequence: Synthetic oligonucleotide
  Sense strand starting at position 316 of SEQ ID NO: 584933
gaaacugggucucugaauc

SEQ ID NO: 600391 - RNA, 19 nt, Artificial Sequence
  Description of Artificial Sequence: Synthetic oligonucleotide
  Antisense strand to SEQ ID NO: 600390
gauucagagacccaguuuc

SEQ ID NO: 600392 - RNA, 19 nt, Artificial Sequence
  Description of Artificial Sequence: Synthetic oligonucleotide
  Sense strand starting at position 370 of SEQ ID NO: 584933
acuuuacaugagugagaau

SEQ ID NO: 600393 - RNA, 19 nt, Artificial Sequence
  Description of Artificial Sequence: Synthetic oligonucleotide
  Antisense strand to SEQ ID NO: 600392
auucucacucauguaaagu

SEQ ID NO: 600394 - RNA, 19 nt, Artificial Sequence
  Description of Artificial Sequence: Synthetic oligonucleotide
  Sense strand starting at position 471 of SEQ ID NO: 584933
guuauuacugcagaagggu

SEQ ID NO: 600395 - RNA, 19 nt, Artificial Sequence
  Description of Artificial Sequence: Synthetic oligonucleotide
  Antisense strand to SEQ ID NO: 600394
acccuucugcaguaauaac

SEQ ID NO: 600396 - RNA, 19 nt, Artificial Sequence
  Description of Artificial Sequence: Synthetic oligonucleotide
  Sense strand starting at position 786 of SEQ ID NO: 584933
gcgccaauugcaguuguuu

SEQ ID NO: 600397 - RNA, 19 nt, Artificial Sequence
  Description of Artificial Sequence: Synthetic oligonucleotide
  Antisense strand to SEQ ID NO: 600396
aaacaacugcaauuggcgc

SEQ ID NO: 600398 - RNA, 19 nt, Artificial Sequence
  Description of Artificial Sequence: Synthetic oligonucleotide
  Sense strand starting at position 792 of SEQ ID NO: 584933
auugcaguuguuuccguua

SEQ ID NO: 600399 - RNA, 19 nt, Artificial Sequence
  Description of Artificial Sequence: Synthetic oligonucleotide
  Antisense strand to SEQ ID NO: 600398
uaacggaaacaacugcaau

SEQ ID NO: 600400 - RNA, 19 nt, Artificial Sequence
  Description of Artificial Sequence: Synthetic oligonucleotide
  Sense strand starting at position 1304 of SEQ ID NO: 584933
agaaaucuuuaggaaugaa

SEQ ID NO: 600401 - RNA, 19 nt, Artificial Sequence
  Description of Artificial Sequence: Synthetic oligonucleotide
  Antisense strand to SEQ ID NO: 600400
uucauuccuaaagauuucu

SEQ ID NO: 600402 - RNA, 19 nt, Artificial Sequence
  Description of Artificial Sequence: Synthetic oligonucleotide
  Sense strand starting at position 1411 of SEQ ID NO: 584933
caaugcuaagguugagaca

SEQ ID NO: 600403 - RNA, 19 nt, Artificial Sequence
  Description of Artificial Sequence: Synthetic oligonucleotide
  Antisense strand to SEQ ID NO: 600402
ugucucaaccuuagcauug

SEQ ID NO: 600404 - RNA, 19 nt, Artificial Sequence
  Description of Artificial Sequence: Synthetic oligonucleotide
  Sense strand starting at position 1422 of SEQ ID NO: 584933
uugagacaucuugguuaga

SEQ ID NO: 600405 - RNA, 19 nt, Artificial Sequence
  Description of Artificial Sequence: Synthetic oligonucleotide
  Antisense strand to SEQ ID NO: 600404
ucuaaccaagaugucucaa

SEQ ID NO: 600406 - RNA, 19 nt, Artificial Sequence
  Description of Artificial Sequence: Synthetic oligonucleotide
  Sense strand starting at position 1423 of SEQ ID NO: 584933
ugagacaucuugguuagaa

SEQ ID NO: 600407 - RNA, 19 nt, Artificial Sequence
  Description of Artificial Sequence: Synthetic oligonucleotide
  Antisense strand to SEQ ID NO: 600406
uucuaaccaagaugucuca

SEQ ID NO: 600408 - RNA, 19 nt, Artificial Sequence
  Description of Artificial Sequence: Synthetic oligonucleotide
  Sense strand starting at position 1446 of SEQ ID NO: 584933
uauaucaugucuuugagag

SEQ ID NO: 600409 - RNA, 19 nt, Artificial Sequence
  Description of Artificial Sequence: Synthetic oligonucleotide
  Antisense strand to SEQ ID NO: 600408
cucucaaagacaugauaua

SEQ ID NO: 600410 - RNA, 19 nt, Artificial Sequence
  Description of Artificial Sequence: Synthetic oligonucleotide
  Sense strand starting at position 1447 of SEQ ID NO: 584933
auaucaugucuuugagaga

SEQ ID NO: 600411 - RNA, 19 nt, Artificial Sequence
  Description of Artificial Sequence: Synthetic oligonucleotide
  Antisense strand to SEQ ID NO: 600410
ucucucaaagacaugauau

SEQ ID NO: 600412 - RNA, 19 nt, Artificial Sequence
  Description of Artificial Sequence: Synthetic oligonucleotide
  Sense strand starting at position 1597 of SEQ ID NO: 584933
uuaacugucccauggagag

SEQ ID NO: 600413 - RNA, 19 nt, Artificial Sequence
  Description of Artificial Sequence: Synthetic oligonucleotide
  Antisense strand to SEQ ID NO: 600412
cucuccaugggacaguuaa

SEQ ID NO: 600414 - RNA, 19 nt, Artificial Sequence
  Description of Artificial Sequence: Synthetic oligonucleotide
  Sense strand starting at position 1626 of SEQ ID NO: 584933
gcuacauauggucaaaccu

SEQ ID NO: 600415 - RNA, 19 nt, Artificial Sequence
  Description of Artificial Sequence: Synthetic oligonucleotide
  Antisense strand to SEQ ID NO: 600414
agguuugaccauauguagc

SEQ ID NO: 600416 - RNA, 19 nt, Artificial Sequence
  Description of Artificial Sequence: Synthetic oligonucleotide
  Sense strand starting at position 2019 of SEQ ID NO: 584933
gaucuaaauugagacagga

SEQ ID NO: 600417 - RNA, 19 nt, Artificial Sequence
  Description of Artificial Sequence: Synthetic oligonucleotide
  Antisense strand to SEQ ID NO: 600416
uccugucucaauuuagauc

SEQ ID NO: 600418 - RNA, 19 nt, Artificial Sequence
  Description of Artificial Sequence: Synthetic oligonucleotide
  Sense strand starting at position 2115 of SEQ ID NO: 584933
ugagaaagcaguugcuaaa

SEQ ID NO: 600419 - RNA, 19 nt, Artificial Sequence
  Description of Artificial Sequence: Synthetic oligonucleotide
  Antisense strand to SEQ ID NO: 600418
uuuagcaacugcuuucuca

SEQ ID NO: 600420 - RNA, 19 nt, Artificial Sequence
  Description of Artificial Sequence: Synthetic oligonucleotide
  Sense strand starting at position 2321 of SEQ ID NO: 584933
aucauuguccuccagacua

SEQ ID NO: 600421 - RNA, 19 nt, Artificial Sequence
  Description of Artificial Sequence: Synthetic oligonucleotide
  Antisense strand to SEQ ID NO: 600420
uagucuggaggacaaugau

SEQ ID NO: 600422 - RNA, 19 nt, Artificial Sequence
  Description of Artificial Sequence: Synthetic oligonucleotide
  Sense strand starting at position 2331 of SEQ ID NO: 584933
uccagacuaugagucagaa

SEQ ID NO: 600423 - RNA, 19 nt, Artificial Sequence
  Description of Artificial Sequence: Synthetic oligonucleotide
  Antisense strand to SEQ ID NO: 600422
uucugacucauagucugga

SEQ ID NO: 600424 - RNA, 19 nt, Artificial Sequence
  Description of Artificial Sequence: Synthetic oligonucleotide
  Sense strand starting at position 2415 of SEQ ID NO: 584933
cguauuuccuggguaguua

SEQ ID NO: 600425 - RNA, 19 nt, Artificial Sequence
  Description of Artificial Sequence: Synthetic oligonucleotide
  Antisense strand to SEQ ID NO: 600424
uaacuacccaggaaauacg

SEQ ID NO: 600426 - RNA, 19 nt, Artificial Sequence
  Description of Artificial Sequence: Synthetic oligonucleotide
  Sense strand starting at position 2609 of SEQ ID NO: 584933
cuaagaagaugccuuuaua

SEQ ID NO: 600427 - RNA, 19 nt, Artificial Sequence
  Description of Artificial Sequence: Synthetic oligonucleotide
  Antisense strand to SEQ ID NO: 600426
uauaaaggcaucuucuuag

SEQ ID NO: 600428 - RNA, 19 nt, Artificial Sequence
  Description of Artificial Sequence: Synthetic oligonucleotide
  Sense strand starting at position 2637 of SEQ ID NO: 584933
cagaaagaauuugguagaa

SEQ ID NO: 600429 - RNA, 19 nt, Artificial Sequence
  Description of Artificial Sequence: Synthetic oligonucleotide
  Antisense strand to SEQ ID NO: 600428
uucuaccaaauucuuucug

SEQ ID NO: 600430 - RNA, 19 nt, Artificial Sequence
  Description of Artificial Sequence: Synthetic oligonucleotide
  Sense strand starting at position 2639 of SEQ ID NO: 584933
gaaagaauuugguagaacu

SEQ ID NO: 600431 - RNA, 19 nt, Artificial Sequence
  Description of Artificial Sequence: Synthetic oligonucleotide
  Antisense strand to SEQ ID NO: 600430
aguucuaccaaauucuuuc

SEQ ID NO: 600432 - RNA, 19 nt, Artificial Sequence
  Description of Artificial Sequence: Synthetic oligonucleotide
  Sense strand starting at position 2647 of SEQ ID NO: 584933
uugguagaacuguaaagcu

SEQ ID NO: 600433 - RNA, 19 nt, Artificial Sequence
  Description of Artificial Sequence: Synthetic oligonucleotide
  Antisense strand to SEQ ID NO: 600432
agcuuuacaguucuaccaa

SEQ ID NO: 600434 - RNA, 19 nt, Artificial Sequence
  Description of Artificial Sequence: Synthetic oligonucleotide
  Sense strand starting at position 2655 of SEQ ID NO: 584933
acuguaaagcuuggagcaa

SEQ ID NO: 600435 - RNA, 19 nt, Artificial Sequence
  Description of Artificial Sequence: Synthetic oligonucleotide
  Antisense strand to SEQ ID NO: 600434
uugcuccaagcuuuacagu

SEQ ID NO: 600436 - RNA, 19 nt, Artificial Sequence
  Description of Artificial Sequence: Synthetic oligonucleotide
  Sense strand starting at position 2670 of SEQ ID NO: 584933
gcaaucucugaacacaguu

SEQ ID NO: 600437 - RNA, 19 nt, Artificial Sequence
  Description of Artificial Sequence: Synthetic oligonucleotide
  Antisense strand to SEQ ID NO: 600436
aacuguguucagagauugc

SEQ ID NO: 600438 - RNA, 19 nt, Artificial Sequence
  Description of Artificial Sequence: Synthetic oligonucleotide
  Sense strand starting at position 2735 of SEQ ID NO: 584933
gugcccaggaguuauugau

SEQ ID NO: 600439 - RNA, 19 nt, Artificial Sequence
  Description of Artificial Sequence: Synthetic oligonucleotide
  Antisense strand to SEQ ID NO: 600438
aucaauaacuccugggcac

SEQ ID NO: 600440 - RNA, 19 nt, Artificial Sequence
  Description of Artificial Sequence: Synthetic oligonucleotide
  Sense strand starting at position 3359 of SEQ ID NO: 584933
gugugugagaaucacauga

SEQ ID NO: 600441 - RNA, 19 nt, Artificial Sequence
  Description of Artificial Sequence: Synthetic oligonucleotide
  Antisense strand to SEQ ID NO: 600440
ucaugugauucucacacac

SEQ ID NO: 600442 - RNA, 19 nt, Artificial Sequence
  Description of Artificial Sequence: Synthetic oligonucleotide
  Sense strand starting at position 3415 of SEQ ID NO: 584933
gggauucugcuuuacuuua

SEQ ID NO: 600443 - RNA, 19 nt, Artificial Sequence
  Description of Artificial Sequence: Synthetic oligonucleotide
  Antisense strand to SEQ ID NO: 600442
uaaaguaaagcagaauccc

SEQ ID NO: 600444 - RNA, 19 nt, Artificial Sequence
  Description of Artificial Sequence: Synthetic oligonucleotide
  Sense strand starting at position 3420 of SEQ ID NO: 584933
ucugcuuuacuuuagcaga

SEQ ID NO: 600445 - RNA, 19 nt, Artificial Sequence
  Description of Artificial Sequence: Synthetic oligonucleotide
  Antisense strand to SEQ ID NO: 600444
ucugcuaaaguaaagcaga

SEQ ID NO: 600446 - RNA, 19 nt, Artificial Sequence
  Description of Artificial Sequence: Synthetic oligonucleotide
  Sense strand starting at position 3425 of SEQ ID NO: 584933
uuuacuuuagcagacagua

SEQ ID NO: 600447 - RNA, 19 nt, Artificial Sequence
  Description of Artificial Sequence: Synthetic oligonucleotide
  Antisense strand to SEQ ID NO: 600446
uacugucugcuaaaguaaa

SEQ ID NO: 600448 - RNA, 19 nt, Artificial Sequence
  Description of Artificial Sequence: Synthetic oligonucleotide
  Sense strand starting at position 3565 of SEQ ID NO: 584933
ucauucuagagguaggcaa

SEQ ID NO: 600449 - RNA, 19 nt, Artificial Sequence
  Description of Artificial Sequence: Synthetic oligonucleotide
  Antisense strand to SEQ ID NO: 600448
uugccuaccucuagaauga

SEQ ID NO: 600450 - RNA, 19 nt, Artificial Sequence
  Description of Artificial Sequence: Synthetic oligonucleotide
  Sense strand starting at position 3618 of SEQ ID NO: 584933
guugccucccgagaagacu

SEQ ID NO: 600451 - RNA, 19 nt, Artificial Sequence
  Description of Artificial Sequence: Synthetic oligonucleotide
  Antisense strand to SEQ ID NO: 600450
agucuucucgggaggcaac

SEQ ID NO: 600452 - RNA, 19 nt, Artificial Sequence
  Description of Artificial Sequence: Synthetic oligonucleotide
  Sense strand starting at position 3645 of SEQ ID NO: 584933
gucuuagaaccacauugua

SEQ ID NO: 600453 - RNA, 19 nt, Artificial Sequence
  Description of Artificial Sequence: Synthetic oligonucleotide
  Antisense strand to SEQ ID NO: 600452
uacaaugugguucuaagac

SEQ ID NO: 600454 - RNA, 19 nt, Artificial Sequence
  Description of Artificial Sequence: Synthetic oligonucleotide
  Sense strand starting at position 3659 of SEQ ID NO: 584933
uuguauaaaucugugugga

SEQ ID NO: 600455 - RNA, 19 nt, Artificial Sequence
  Description of Artificial Sequence: Synthetic oligonucleotide
  Antisense strand to SEQ ID NO: 600454
uccacacagauuuauacaa

SEQ ID NO: 600456 - RNA, 19 nt, Artificial Sequence
  Description of Artificial Sequence: Synthetic oligonucleotide
  Sense strand starting at position 3661 of SEQ ID NO: 584933
guauaaaucuguguggauu

SEQ ID NO: 600457 - RNA, 19 nt, Artificial Sequence
  Description of Artificial Sequence: Synthetic oligonucleotide
  Antisense strand to SEQ ID NO: 600456
aauccacacagauuuauac

SEQ ID NO: 600458 - RNA, 19 nt, Artificial Sequence
  Description of Artificial Sequence: Synthetic oligonucleotide
  Sense strand starting at position 3732 of SEQ ID NO: 584933
gucgaaaggcguagucaug

SEQ ID NO: 600459 - RNA, 19 nt, Artificial Sequence
  Description of Artificial Sequence: Synthetic oligonucleotide
  Antisense strand to SEQ ID NO: 600458
caugacuacgccuuucgac

SEQ ID NO: 600460 - RNA, 19 nt, Artificial Sequence
  Description of Artificial Sequence: Synthetic oligonucleotide
  Sense strand starting at position 3854 of SEQ ID NO: 584933
ucaucucagaagugggauu

SEQ ID NO: 600461 - RNA, 19 nt, Artificial Sequence
  Description of Artificial Sequence: Synthetic oligonucleotide
  Antisense strand to SEQ ID NO: 600460
aaucccacuucugagauga

SEQ ID NO: 600462 - RNA, 19 nt, Artificial Sequence
  Description of Artificial Sequence: Synthetic oligonucleotide
  Sense strand starting at position 80 of SEQ ID NO: 584934
gguguagcaaagugaaaug

SEQ ID NO: 600463 - RNA, 19 nt, Artificial Sequence
  Description of Artificial Sequence: Synthetic oligonucleotide
  Antisense strand to SEQ ID NO: 600462
cauuucacuuugcuacacc

SEQ ID NO: 600464 - RNA, 19 nt, Artificial Sequence
  Description of Artificial Sequence: Synthetic oligonucleotide
  Sense strand starting at position 85 of SEQ ID NO: 584934
agcaaagugaaaugucuga

SEQ ID NO: 600465 - RNA, 19 nt, Artificial Sequence
  Description of Artificial Sequence: Synthetic oligonucleotide
  Antisense strand to SEQ ID NO: 600464
ucagacauuucacuuugcu

SEQ ID NO: 600466 - RNA, 19 nt, Artificial Sequence
  Description of Artificial Sequence: Synthetic oligonucleotide
  Sense strand starting at position 89 of SEQ ID NO: 584934
aagugaaaugucugaaaug

SEQ ID NO: 600467 - RNA, 19 nt, Artificial Sequence
  Description of Artificial Sequence: Synthetic oligonucleotide
  Antisense strand to SEQ ID NO: 600466
cauuucagacauuucacuu

SEQ ID NO: 600468 - RNA, 19 nt, Artificial Sequence
  Description of Artificial Sequence: Synthetic oligonucleotide
  Sense strand starting at position 326 of SEQ ID NO: 584934
cgguuagaauucccaguau

SEQ ID NO: 600469 - RNA, 19 nt, Artificial Sequence
  Description of Artificial Sequence: Synthetic oligonucleotide
  Antisense strand to SEQ ID NO: 600468
auacugggaauucuaaccg

SEQ ID NO: 600470 - RNA, 19 nt, Artificial Sequence
  Description of Artificial Sequence: Synthetic oligonucleotide
  Sense strand starting at position 478 of SEQ ID NO: 584934
auaugaaugccgugauaaa

SEQ ID NO: 600471 - RNA, 19 nt, Artificial Sequence
  Description of Artificial Sequence: Synthetic oligonucleotide
  Antisense strand to SEQ ID NO: 600470
uuuaucacggcauucauau

SEQ ID NO: 600472 - RNA, 19 nt, Artificial Sequence
  Description of Artificial Sequence: Synthetic oligonucleotide
  Sense strand starting at position 512 of SEQ ID NO: 584934
gcauucuucggucaagaag

SEQ ID NO: 600473 - RNA, 19 nt, Artificial Sequence
  Description of Artificial Sequence: Synthetic oligonucleotide
  Antisense strand to SEQ ID NO: 600472
cuucuugaccgaagaaugc

SEQ ID NO: 600474 - RNA, 19 nt, Artificial Sequence
  Description of Artificial Sequence: Synthetic oligonucleotide
  Sense strand starting at position 523 of SEQ ID NO: 584934
ucaagaagccaauguuaac

SEQ ID NO: 600475 - RNA, 19 nt, Artificial Sequence
  Description of Artificial Sequence: Synthetic oligonucleotide
  Antisense strand to SEQ ID NO: 600474
guuaacauuggcuucuuga

SEQ ID NO: 600476 - RNA, 19 nt, Artificial Sequence
  Description of Artificial Sequence: Synthetic oligonucleotide
  Sense strand starting at position 615 of SEQ ID NO: 584934
aguguuucucccgcuuauu

SEQ ID NO: 600477 - RNA, 19 nt, Artificial Sequence
  Description of Artificial Sequence: Synthetic oligonucleotide
  Antisense strand to SEQ ID NO: 600476
aauaagcgggagaaacacu

SEQ ID NO: 600478 - RNA, 19 nt, Artificial Sequence
  Description of Artificial Sequence: Synthetic oligonucleotide
  Sense strand starting at position 616 of SEQ ID NO: 584934
guguuucucccgcuuauua

SEQ ID NO: 600479 - RNA, 19 nt, Artificial Sequence
  Description of Artificial Sequence: Synthetic oligonucleotide
  Antisense strand to SEQ ID NO: 600478
uaauaagcgggagaaacac

SEQ ID NO: 600480 - RNA, 19 nt, Artificial Sequence
  Description of Artificial Sequence: Synthetic oligonucleotide
  Sense strand starting at position 700 of SEQ ID NO: 584934
guauguaugccuuaaccag

SEQ ID NO: 600481 - RNA, 19 nt, Artificial Sequence
  Description of Artificial Sequence: Synthetic oligonucleotide
  Antisense strand to SEQ ID NO: 600480
cugguuaaggcauacauac

SEQ ID NO: 600482 - RNA, 19 nt, Artificial Sequence
  Description of Artificial Sequence: Synthetic oligonucleotide
  Sense strand starting at position 890 of SEQ ID NO: 584934
aggagaguuuacucaucuc

SEQ ID NO: 600483 - RNA, 19 nt, Artificial Sequence
  Description of Artificial Sequence: Synthetic oligonucleotide
  Antisense strand to SEQ ID NO: 600482
gagaugaguaaacucuccu

SEQ ID NO: 600484 - RNA, 19 nt, Artificial Sequence
  Description of Artificial Sequence: Synthetic oligonucleotide
  Sense strand starting at position 948 of SEQ ID NO: 584934
ccaguuuagccuuaggaua

SEQ ID NO: 600485 - RNA, 19 nt, Artificial Sequence
  Description of Artificial Sequence: Synthetic oligonucleotide
  Antisense strand to SEQ ID NO: 600484
uauccuaaggcuaaacugg

SEQ ID NO: 600486 - RNA, 19 nt, Artificial Sequence
  Description of Artificial Sequence: Synthetic oligonucleotide
  Sense strand starting at position 1118 of SEQ ID NO: 584934
cagacucaagucugagaca

SEQ ID NO: 600487 - RNA, 19 nt, Artificial Sequence
  Description of Artificial Sequence: Synthetic oligonucleotide
  Antisense strand to SEQ ID NO: 600486
ugucucagacuugagucug

SEQ ID NO: 600488 - RNA, 19 nt, Artificial Sequence
  Description of Artificial Sequence: Synthetic oligonucleotide
  Sense strand starting at position 1352 of SEQ ID NO: 584934
uaggaauuacgaugcacuu

SEQ ID NO: 600489 - RNA, 19 nt, Artificial Sequence
  Description of Artificial Sequence: Synthetic oligonucleotide
  Antisense strand to SEQ ID NO: 600488
aagugcaucguaauuccua

SEQ ID NO: 600490 - RNA, 19 nt, Artificial Sequence
  Description of Artificial Sequence: Synthetic oligonucleotide
  Sense strand starting at position 1994 of SEQ ID NO: 584934
ggacgauaccaacgggaau

SEQ ID NO: 600491 - RNA, 19 nt, Artificial Sequence
  Description of Artificial Sequence: Synthetic oligonucleotide
  Antisense strand to SEQ ID NO: 600490
auucccguugguaucgucc

SEQ ID NO: 600492 - RNA, 19 nt, Artificial Sequence
  Description of Artificial Sequence: Synthetic oligonucleotide
  Sense strand starting at position 2092 of SEQ ID NO: 584934
cugggagcuucugcaaauc

SEQ ID NO: 600493 - RNA, 19 nt, Artificial Sequence
  Description of Artificial Sequence: Synthetic oligonucleotide
  Antisense strand to SEQ ID NO: 600492
gauuugcagaagcucccag

SEQ ID NO: 600494 - RNA, 19 nt, Artificial Sequence
  Description of Artificial Sequence: Synthetic oligonucleotide
  Sense strand starting at position 2185 of SEQ ID NO: 584934
cccugacuugcauggaaca

SEQ ID NO: 600495 - RNA, 19 nt, Artificial Sequence
  Description of Artificial Sequence: Synthetic oligonucleotide
  Antisense strand to SEQ ID NO: 600494
uguuccaugcaagucaggg

SEQ ID NO: 600496 - RNA, 19 nt, Artificial Sequence
  Description of Artificial Sequence: Synthetic oligonucleotide
  Sense strand starting at position 2328 of SEQ ID NO: 584934
ugcggcucucaagaacuaa

SEQ ID NO: 600497 - RNA, 19 nt, Artificial Sequence
  Description of Artificial Sequence: Synthetic oligonucleotide
  Antisense strand to SEQ ID NO: 600496
uuaguucuugagagccgca

SEQ ID NO: 600498 - RNA, 19 nt, Artificial Sequence
  Description of Artificial Sequence: Synthetic oligonucleotide
  Sense strand starting at position 2371 of SEQ ID NO: 584934
cagggagcuuccuuauauc

SEQ ID NO: 600499 - RNA, 19 nt, Artificial Sequence
  Description of Artificial Sequence: Synthetic oligonucleotide
  Antisense strand to SEQ ID NO: 600498
gauauaaggaagcucccug

SEQ ID NO: 600500 - RNA, 19 nt, Artificial Sequence
  Description of Artificial Sequence: Synthetic oligonucleotide
  Sense strand starting at position 2430 of SEQ ID NO: 584934
gcuagaaguuauccuguga

SEQ ID NO: 600501 - RNA, 19 nt, Artificial Sequence
  Description of Artificial Sequence: Synthetic oligonucleotide
  Antisense strand to SEQ ID NO: 600500
ucacaggauaacuucuagc

SEQ ID NO: 600502 - RNA, 19 nt, Artificial Sequence
  Description of Artificial Sequence: Synthetic oligonucleotide
  Sense strand starting at position 2434 of SEQ ID NO: 584934
gaaguuauccugugauggg

SEQ ID NO: 600503 - RNA, 19 nt, Artificial Sequence
  Description of Artificial Sequence: Synthetic oligonucleotide
  Antisense strand to SEQ ID NO: 600502
cccaucacaggauaacuuc

SEQ ID NO: 600504 - RNA, 19 nt, Artificial Sequence
  Description of Artificial Sequence: Synthetic oligonucleotide
  Sense strand starting at position 2494 of SEQ ID NO: 584934
gugcguugccgcccacaua

SEQ ID NO: 600505 - RNA, 19 nt, Artificial Sequence
  Description of Artificial Sequence: Synthetic oligonucleotide
  Antisense strand to SEQ ID NO: 600504
uaugugggcggcaacgcac

SEQ ID NO: 600506 - RNA, 19 nt, Artificial Sequence
  Description of Artificial Sequence: Synthetic oligonucleotide
  Sense strand starting at position 2553 of SEQ ID NO: 584934
gcgucuacucugucacuuu

SEQ ID NO: 600507 - RNA, 19 nt, Artificial Sequence
  Description of Artificial Sequence: Synthetic oligonucleotide
  Antisense strand to SEQ ID NO: 600506
aaagugacagaguagacgc

SEQ ID NO: 600508 - RNA, 19 nt, Artificial Sequence
  Description of Artificial Sequence: Synthetic oligonucleotide
  Sense strand starting at position 2665 of SEQ ID NO: 584934
gucugaguugcgaggucau

SEQ ID NO: 600509 - RNA, 19 nt, Artificial Sequence
  Description of Artificial Sequence: Synthetic oligonucleotide
  Antisense strand to SEQ ID NO: 600508
augaccucgcaacucagac

SEQ ID NO: 600510 - RNA, 19 nt, Artificial Sequence
  Description of Artificial Sequence: Synthetic oligonucleotide
  Sense strand starting at position 2701 of SEQ ID NO: 584934
ccacauuaccagugaggaa

SEQ ID NO: 600511 - RNA, 19 nt, Artificial Sequence
  Description of Artificial Sequence: Synthetic oligonucleotide
  Antisense strand to SEQ ID NO: 600510
uuccucacugguaaugugg

SEQ ID NO: 600512 - RNA, 19 nt, Artificial Sequence
  Description of Artificial Sequence: Synthetic oligonucleotide
  Sense strand starting at position 2752 of SEQ ID NO: 584934
acgggauugccugacauca

SEQ ID NO: 600513 - RNA, 19 nt, Artificial Sequence
  Description of Artificial Sequence: Synthetic oligonucleotide
  Antisense strand to SEQ ID NO: 600512
ugaugucaggcaaucccgu

SEQ ID NO: 600514 - RNA, 19 nt, Artificial Sequence
  Description of Artificial Sequence: Synthetic oligonucleotide
  Sense strand starting at position 2765 of SEQ ID NO: 584934
acaucagagcuggauucuu

SEQ ID NO: 600515 - RNA, 19 nt, Artificial Sequence
  Description of Artificial Sequence: Synthetic oligonucleotide
  Antisense strand to SEQ ID NO: 600514
aagaauccagcucugaugu

SEQ ID NO: 600516 - RNA, 19 nt, Artificial Sequence
  Description of Artificial Sequence: Synthetic oligonucleotide
  Sense strand starting at position 2770 of SEQ ID NO: 584934
agagcuggauucuuaaguu

SEQ ID NO: 600517 - RNA, 19 nt, Artificial Sequence
  Description of Artificial Sequence: Synthetic oligonucleotide
  Antisense strand to SEQ ID NO: 600516
aacuuaagaauccagcucu

SEQ ID NO: 600518 - RNA, 19 nt, Artificial Sequence
  Description of Artificial Sequence: Synthetic oligonucleotide
  Sense strand starting at position 2877 of SEQ ID NO: 584934
acgguuaucacaugguaaa

SEQ ID NO: 600519 - RNA, 19 nt, Artificial Sequence
  Description of Artificial Sequence: Synthetic oligonucleotide
  Antisense strand to SEQ ID NO: 600518
uuuaccaugugauaaccgu

SEQ ID NO: 600520 - RNA, 19 nt, Artificial Sequence
  Description of Artificial Sequence: Synthetic oligonucleotide
  Sense strand starting at position 3140 of SEQ ID NO: 584934
cccucaggacuaugaacau

SEQ ID NO: 600521 - RNA, 19 nt, Artificial Sequence
  Description of Artificial Sequence: Synthetic oligonucleotide
  Antisense strand to SEQ ID NO: 600520
auguucauaguccugaggg

SEQ ID NO: 600522 - RNA, 19 nt, Artificial Sequence
  Description of Artificial Sequence: Synthetic oligonucleotide
  Sense strand starting at position 3190 of SEQ ID NO: 584934
guugcuuggauguaaacaa

SEQ ID NO: 600523 - RNA, 19 nt, Artificial Sequence
  Description of Artificial Sequence: Synthetic oligonucleotide
  Antisense strand to SEQ ID NO: 600522
uuguuuacauccaagcaac

SEQ ID NO: 600524 - RNA, 19 nt, Artificial Sequence
  Description of Artificial Sequence: Synthetic oligonucleotide
  Sense strand starting at position 3233 of SEQ ID NO: 584934
agcccagaagcaugagaau

SEQ ID NO: 600525 - RNA, 19 nt, Artificial Sequence
  Description of Artificial Sequence: Synthetic oligonucleotide
  Antisense strand to SEQ ID NO: 600524
auucucaugcuucugggcu

SEQ ID NO: 600526 - RNA, 19 nt, Artificial Sequence
  Description of Artificial Sequence: Synthetic oligonucleotide
  Sense strand starting at position 3249 of SEQ ID NO: 584934
aaugcugucagggaaguga

SEQ ID NO: 600527 - RNA, 19 nt, Artificial Sequence
  Description of Artificial Sequence: Synthetic oligonucleotide
  Antisense strand to SEQ ID NO: 600526
ucacuucccugacagcauu

SEQ ID NO: 600528 - RNA, 19 nt, Artificial Sequence
  Description of Artificial Sequence: Synthetic oligonucleotide
  Sense strand starting at position 3792 of SEQ ID NO: 584934
ugcagaccauuguuuaaca

SEQ ID NO: 600529 - RNA, 19 nt, Artificial Sequence
  Description of Artificial Sequence: Synthetic oligonucleotide
  Antisense strand to SEQ ID NO: 600528
uguuaaacaauggucugca

SEQ ID NO: 600530 - RNA, 19 nt, Artificial Sequence
  Description of Artificial Sequence: Synthetic oligonucleotide
  Sense strand starting at position 3793 of SEQ ID NO: 584934
gcagaccauuguuuaacaa

SEQ ID NO: 600531 - RNA, 19 nt, Artificial Sequence
  Description of Artificial Sequence: Synthetic oligonucleotide
  Antisense strand to SEQ ID NO: 600530
uuguuaaacaauggucugc

SEQ ID NO: 600532 - RNA, 19 nt, Artificial Sequence
  Description of Artificial Sequence: Synthetic oligonucleotide
  Sense strand starting at position 3813 of SEQ ID NO: 584934
uugucaccuggauguuuaa

SEQ ID NO: 600533 - RNA, 19 nt, Artificial Sequence
  Description of Artificial Sequence: Synthetic oligonucleotide
  Antisense strand to SEQ ID NO: 600532
uuaaacauccaggugacaa

SEQ ID NO: 600534 - RNA, 19 nt, Artificial Sequence
  Description of Artificial Sequence: Synthetic oligonucleotide
  Sense strand starting at position 3841 of SEQ ID NO: 584934
ucagauauuccucaguccu

SEQ ID NO: 600535 - RNA, 19 nt, Artificial Sequence
  Description of Artificial Sequence: Synthetic oligonucleotide
  Antisense strand to SEQ ID NO: 600534
aggacugaggaauaucuga

SEQ ID NO: 600536 - RNA, 19 nt, Artificial Sequence
  Description of Artificial Sequence: Synthetic oligonucleotide
  Sense strand starting at position 3843 of SEQ ID NO: 584934
agauauuccucaguccuga

SEQ ID NO: 600537 - RNA, 19 nt, Artificial Sequence
  Description of Artificial Sequence: Synthetic oligonucleotide
  Antisense strand to SEQ ID NO: 600536
ucaggacugaggaauaucu

SEQ ID NO: 600538 - RNA, 19 nt, Artificial Sequence
  Description of Artificial Sequence: Synthetic oligonucleotide
  Sense strand starting at position 3848 of SEQ ID NO: 584934
uuccucaguccugauaaag

SEQ ID NO: 600539 - RNA, 19 nt, Artificial Sequence
  Description of Artificial Sequence: Synthetic oligonucleotide
  Antisense strand to SEQ ID NO: 600538
cuuuaucaggacugaggaa

SEQ ID NO: 600540 - RNA, 19 nt, Artificial Sequence
  Description of Artificial Sequence: Synthetic oligonucleotide
  Sense strand starting at position 3935 of SEQ ID NO: 584934
gagguagaucaagggaguu

SEQ ID NO: 600541 - RNA, 19 nt, Artificial Sequence
  Description of Artificial Sequence: Synthetic oligonucleotide
  Antisense strand to SEQ ID NO: 600540
aacucccuugaucuaccuc

SEQ ID NO: 600542 - RNA, 19 nt, Artificial Sequence
  Description of Artificial Sequence: Synthetic oligonucleotide
  Sense strand starting at position 809 of SEQ ID NO: 584935
uggucagcuaagcaagauu

SEQ ID NO: 600543 - RNA, 19 nt, Artificial Sequence
  Description of Artificial Sequence: Synthetic oligonucleotide
  Antisense strand to SEQ ID NO: 600542
aaucuugcuuagcugacca

SEQ ID NO: 600544 - RNA, 19 nt, Artificial Sequence
  Description of Artificial Sequence: Synthetic oligonucleotide
  Sense strand starting at position 820 of SEQ ID NO: 584935
gcaagauucucucccgguc

SEQ ID NO: 600545 - RNA, 19 nt, Artificial Sequence
  Description of Artificial Sequence: Synthetic oligonucleotide
  Antisense strand to SEQ ID NO: 600544
gaccgggagagaaucuugc

SEQ ID NO: 600546 - RNA, 19 nt, Artificial Sequence
  Description of Artificial Sequence: Synthetic oligonucleotide
  Sense strand starting at position 2221 of SEQ ID NO: 584935
ccgucauucguuuaaagag

SEQ ID NO: 600547 - RNA, 19 nt, Artificial Sequence
  Description of Artificial Sequence: Synthetic oligonucleotide
  Antisense strand to SEQ ID NO: 600546
cucuuuaaacgaaugacgg

SEQ ID NO: 600548 - RNA, 19 nt, Artificial Sequence
  Description of Artificial Sequence: Synthetic oligonucleotide
  Sense strand starting at position 2238 of SEQ ID NO: 584935
agcagaaccguucgagaua

SEQ ID NO: 600549 - RNA, 19 nt, Artificial Sequence
  Description of Artificial Sequence: Synthetic oligonucleotide
  Antisense strand to SEQ ID NO: 600548
uaucucgaacgguucugcu

SEQ ID NO: 600550 - RNA, 19 nt, Artificial Sequence
  Description of Artificial Sequence: Synthetic oligonucleotide
  Sense strand starting at position 2259 of SEQ ID NO: 584935
ggcauuuacuuauccguag

SEQ ID NO: 600551 - RNA, 19 nt, Artificial Sequence
  Description of Artificial Sequence: Synthetic oligonucleotide
  Antisense strand to SEQ ID NO: 600550
cuacggauaaguaaaugcc

SEQ ID NO: 600552 - RNA, 19 nt, Artificial Sequence
  Description of Artificial Sequence: Synthetic oligonucleotide
  Sense strand starting at position 2260 of SEQ ID NO: 584935
gcauuuacuuauccguagu

SEQ ID NO: 600553 - RNA, 19 nt, Artificial Sequence
  Description of Artificial Sequence: Synthetic oligonucleotide
  Antisense strand to SEQ ID NO: 600552
acuacggauaaguaaaugc

SEQ ID NO: 600554 - RNA, 19 nt, Artificial Sequence
  Description of Artificial Sequence: Synthetic oligonucleotide
  Sense strand starting at position 2273 of SEQ ID NO: 584935
cguaguugccauuaggcaa

SEQ ID NO: 600555 - RNA, 19 nt, Artificial Sequence
  Description of Artificial Sequence: Synthetic oligonucleotide
  Antisense strand to SEQ ID NO: 600554
uugccuaauggcaacuacg

SEQ ID NO: 600556 - RNA, 19 nt, Artificial Sequence
  Description of Artificial Sequence: Synthetic oligonucleotide
  Sense strand starting at position 2310 of SEQ ID NO: 584935
agaggagauucgucaucac

SEQ ID NO: 600557 - RNA, 19 nt, Artificial Sequence
  Description of Artificial Sequence: Synthetic oligonucleotide
  Antisense strand to SEQ ID NO: 600556
gugaugacgaaucuccucu

SEQ ID NO: 600558 - RNA, 19 nt, Artificial Sequence
  Description of Artificial Sequence: Synthetic oligonucleotide
  Sense strand starting at position 2313 of SEQ ID NO: 584935
ggagauucgucaucacucu

SEQ ID NO: 600559 - RNA, 19 nt, Artificial Sequence
  Description of Artificial Sequence: Synthetic oligonucleotide
  Antisense strand to SEQ ID NO: 600558
agagugaugacgaaucucc

SEQ ID NO: 600560 - RNA, 19 nt, Artificial Sequence
  Description of Artificial Sequence: Synthetic oligonucleotide
  Sense strand starting at position 2314 of SEQ ID NO: 584935
gagauucgucaucacucuu

SEQ ID NO: 600561 - RNA, 19 nt, Artificial Sequence
  Description of Artificial Sequence: Synthetic oligonucleotide
  Antisense strand to SEQ ID NO: 600560
aagagugaugacgaaucuc

SEQ ID NO: 600562 - RNA, 19 nt, Artificial Sequence
  Description of Artificial Sequence: Synthetic oligonucleotide
  Sense strand starting at position 2320 of SEQ ID NO: 584935
cgucaucacucuuuagauu

SEQ ID NO: 600563 - RNA, 19 nt, Artificial Sequence
  Description of Artificial Sequence: Synthetic oligonucleotide
  Antisense strand to SEQ ID NO: 600562
aaucuaaagagugaugacg

SEQ ID NO: 600564 - RNA, 19 nt, Artificial Sequence
  Description of Artificial Sequence: Synthetic oligonucleotide
  Sense strand starting at position 2467 of SEQ ID NO: 584935
gaagguuuagcccaagugu

SEQ ID NO: 600565 - RNA, 19 nt, Artificial Sequence
  Description of Artificial Sequence: Synthetic oligonucleotide
  Antisense strand to SEQ ID NO: 600564
acacuugggcuaaaccuuc

SEQ ID NO: 600566 - RNA, 19 nt, Artificial Sequence
  Description of Artificial Sequence: Synthetic oligonucleotide
  Sense strand starting at position 2518 of SEQ ID NO: 584935
aaccuaguaugguuguaaa

SEQ ID NO: 600567 - RNA, 19 nt, Artificial Sequence
  Description of Artificial Sequence: Synthetic oligonucleotide
  Antisense strand to SEQ ID NO: 600566
uuuacaaccauacuagguu

SEQ ID NO: 600568 - RNA, 19 nt, Artificial Sequence
  Description of Artificial Sequence: Synthetic oligonucleotide
  Sense strand starting at position 2521 of SEQ ID NO: 584935
cuaguaugguuguaaauuu

SEQ ID NO: 600569 - RNA, 19 nt, Artificial Sequence
  Description of Artificial Sequence: Synthetic oligonucleotide
  Antisense strand to SEQ ID NO: 600568
aaauuuacaaccauacuag

SEQ ID NO: 600570 - RNA, 19 nt, Artificial Sequence
  Description of Artificial Sequence: Synthetic oligonucleotide
  Sense strand starting at position 2559 of SEQ ID NO: 584935
agaacacucucguuaguau

SEQ ID NO: 600571 - RNA, 19 nt, Artificial Sequence
  Description of Artificial Sequence: Synthetic oligonucleotide
  Antisense strand to SEQ ID NO: 600570
auacuaacgagaguguucu

SEQ ID NO: 600572 - RNA, 19 nt, Artificial Sequence
  Description of Artificial Sequence: Synthetic oligonucleotide
  Sense strand starting at position 2560 of SEQ ID NO: 584935
gaacacucucguuaguauu

SEQ ID NO: 600573 - RNA, 19 nt, Artificial Sequence
  Description of Artificial Sequence: Synthetic oligonucleotide
  Antisense strand to SEQ ID NO: 600572
aauacuaacgagaguguuc

SEQ ID NO: 600574 - RNA, 19 nt, Artificial Sequence
  Description of Artificial Sequence: Synthetic oligonucleotide
  Sense strand starting at position 2619 of SEQ ID NO: 584935
uaagguuuagcccaagcau

SEQ ID NO: 600575 - RNA, 19 nt, Artificial Sequence
  Description of Artificial Sequence: Synthetic oligonucleotide
  Antisense strand to SEQ ID NO: 600574
augcuugggcuaaaccuua

SEQ ID NO: 600576 - RNA, 19 nt, Artificial Sequence
  Description of Artificial Sequence: Synthetic oligonucleotide
  Sense strand starting at position 2699 of SEQ ID NO: 584935
uugcguggcagucucauua

SEQ ID NO: 600577 - RNA, 19 nt, Artificial Sequence
  Description of Artificial Sequence: Synthetic oligonucleotide
  Antisense strand to SEQ ID NO: 600576
uaaugagacugccacgcaa

SEQ ID NO: 600578 - RNA, 19 nt, Artificial Sequence
  Description of Artificial Sequence: Synthetic oligonucleotide
  Sense strand starting at position 2737 of SEQ ID NO: 584935
gaagcaaagugacaaugaa

SEQ ID NO: 600579 - RNA, 19 nt, Artificial Sequence
  Description of Artificial Sequence: Synthetic oligonucleotide
  Antisense strand to SEQ ID NO: 600578
uucauugucacuuugcuuc

SEQ ID NO: 600580 - RNA, 19 nt, Artificial Sequence
  Description of Artificial Sequence: Synthetic oligonucleotide
  Sense strand starting at position 2752 of SEQ ID NO: 584935
ugaaaucugcaguagguuu

SEQ ID NO: 600581 - RNA, 19 nt, Artificial Sequence
  Description of Artificial Sequence: Synthetic oligonucleotide
  Antisense strand to SEQ ID NO: 600580
aaaccuacugcagauuuca

SEQ ID NO: 600582 - RNA, 19 nt, Artificial Sequence
  Description of Artificial Sequence: Synthetic oligonucleotide
  Sense strand starting at position 2765 of SEQ ID NO: 584935
agguuuguugacugaauag

SEQ ID NO: 600583 - RNA, 19 nt, Artificial Sequence
  Description of Artificial Sequence: Synthetic oligonucleotide
  Antisense strand to SEQ ID NO: 600582
cuauucagucaacaaaccu

SEQ ID NO: 600584 - RNA, 19 nt, Artificial Sequence
  Description of Artificial Sequence: Synthetic oligonucleotide
  Sense strand starting at position 2775 of SEQ ID NO: 584935
acugaauagugacugaauu

SEQ ID NO: 600585 - RNA, 19 nt, Artificial Sequence
  Description of Artificial Sequence: Synthetic oligonucleotide
  Antisense strand to SEQ ID NO: 600584
aauucagucacuauucagu

SEQ ID NO: 600586 - RNA, 19 nt, Artificial Sequence
  Description of Artificial Sequence: Synthetic oligonucleotide
  Sense strand starting at position 2776 of SEQ ID NO: 584935
cugaauagugacugaauug

SEQ ID NO: 600587 - RNA, 19 nt, Artificial Sequence
  Description of Artificial Sequence: Synthetic oligonucleotide
  Antisense strand to SEQ ID NO: 600586
caauucagucacuauucag

SEQ ID NO: 600588 - RNA, 19 nt, Artificial Sequence
  Description of Artificial Sequence: Synthetic oligonucleotide
  Sense strand starting at position 2846 of SEQ ID NO: 584935
uuaagaugugcuugggaac

SEQ ID NO: 600589 - RNA, 19 nt, Artificial Sequence
  Description of Artificial Sequence: Synthetic oligonucleotide
  Antisense strand to SEQ ID NO: 600588
guucccaagcacaucuuaa

SEQ ID NO: 600590 - RNA, 19 nt, Artificial Sequence
  Description of Artificial Sequence: Synthetic oligonucleotide
  Sense strand starting at position 2847 of SEQ ID NO: 584935
uaagaugugcuugggaaca

SEQ ID NO: 600591 - RNA, 19 nt, Artificial Sequence
  Description of Artificial Sequence: Synthetic oligonucleotide
  Antisense strand to SEQ ID NO: 600590
uguucccaagcacaucuua

SEQ ID NO: 600592 - RNA, 19 nt, Artificial Sequence
  Description of Artificial Sequence: Synthetic oligonucleotide
  Sense strand starting at position 2890 of SEQ ID NO: 584935
ggacuuuccuguuuaacag

SEQ ID NO: 600593 - RNA, 19 nt, Artificial Sequence
  Description of Artificial Sequence: Synthetic oligonucleotide
  Antisense strand to SEQ ID NO: 600592
cuguuaaacaggaaagucc

SEQ ID NO: 600594 - RNA, 19 nt, Artificial Sequence
  Description of Artificial Sequence: Synthetic oligonucleotide
  Sense strand starting at position 2897 of SEQ ID NO: 584935
ccuguuuaacaguguacca

SEQ ID NO: 600595 - RNA, 19 nt, Artificial Sequence
  Description of Artificial Sequence: Synthetic oligonucleotide
  Antisense strand to SEQ ID NO: 600594
ugguacacuguuaaacagg

SEQ ID NO: 600596 - RNA, 19 nt, Artificial Sequence
  Description of Artificial Sequence: Synthetic oligonucleotide
  Sense strand starting at position 3307 of SEQ ID NO: 584935
gacuguuugugacucagga

SEQ ID NO: 600597 - RNA, 19 nt, Artificial Sequence
  Description of Artificial Sequence: Synthetic oligonucleotide
  Antisense strand to SEQ ID NO: 600596
uccugagucacaaacaguc

SEQ ID NO: 600598 - RNA, 19 nt, Artificial Sequence
  Description of Artificial Sequence: Synthetic oligonucleotide
  Sense strand starting at position 3309 of SEQ ID NO: 584935
cuguuugugacucaggagu

SEQ ID NO: 600599 - RNA, 19 nt, Artificial Sequence
  Description of Artificial Sequence: Synthetic oligonucleotide
  Antisense strand to SEQ ID NO: 600598
acuccugagucacaaacag

SEQ ID NO: 600600 - RNA, 19 nt, Artificial Sequence
  Description of Artificial Sequence: Synthetic oligonucleotide
  Sense strand starting at position 3362 of SEQ ID NO: 584935
ccacaagcugcuuguugaa

SEQ ID NO: 600601 - RNA, 19 nt, Artificial Sequence
  Description of Artificial Sequence: Synthetic oligonucleotide
  Antisense strand to SEQ ID NO: 600600
uucaacaagcagcuugugg

SEQ ID NO: 600602 - RNA, 19 nt, Artificial Sequence
  Description of Artificial Sequence: Synthetic oligonucleotide
  Sense strand starting at position 3388 of SEQ ID NO: 584935
gugguauuccuaggauaag

SEQ ID NO: 600603 - RNA, 19 nt, Artificial Sequence
  Description of Artificial Sequence: Synthetic oligonucleotide
  Antisense strand to SEQ ID NO: 600602
cuuauccuaggaauaccac

SEQ ID NO: 600604 - RNA, 19 nt, Artificial Sequence
  Description of Artificial Sequence: Synthetic oligonucleotide
  Sense strand starting at position 3648 of SEQ ID NO: 584935
cacugugugauacgugaaa

SEQ ID NO: 600605 - RNA, 19 nt, Artificial Sequence
  Description of Artificial Sequence: Synthetic oligonucleotide
  Antisense strand to SEQ ID NO: 600604
uuucacguaucacacagug

SEQ ID NO: 600606 - RNA, 19 nt, Artificial Sequence
  Description of Artificial Sequence: Synthetic oligonucleotide
  Sense strand starting at position 3650 of SEQ ID NO: 584935
cugugugauacgugaaaga

SEQ ID NO: 600607 - RNA, 19 nt, Artificial Sequence
  Description of Artificial Sequence: Synthetic oligonucleotide
  Antisense strand to SEQ ID NO: 600606
ucuuucacguaucacacag

SEQ ID NO: 600608 - RNA, 19 nt, Artificial Sequence
  Description of Artificial Sequence: Synthetic oligonucleotide
  Sense strand starting at position 3707 of SEQ ID NO: 584935
cucagaaucugugcuuugu

SEQ ID NO: 600609 - RNA, 19 nt, Artificial Sequence
  Description of Artificial Sequence: Synthetic oligonucleotide
  Antisense strand to SEQ ID NO: 600608
acaaagcacagauucugag

SEQ ID NO: 600610 - RNA, 19 nt, Artificial Sequence
  Description of Artificial Sequence: Synthetic oligonucleotide
  Sense strand starting at position 3709 of SEQ ID NO: 584935
cagaaucugugcuuuguga

SEQ ID NO: 600611 - RNA, 19 nt, Artificial Sequence
  Description of Artificial Sequence: Synthetic oligonucleotide
  Antisense strand to SEQ ID NO: 600610
ucacaaagcacagauucug

SEQ ID NO: 600612 - RNA, 19 nt, Artificial Sequence
  Description of Artificial Sequence: Synthetic oligonucleotide
  Sense strand starting at position 3711 of SEQ ID NO: 584935
gaaucugugcuuugugaac

SEQ ID NO: 600613 - RNA, 19 nt, Artificial Sequence
  Description of Artificial Sequence: Synthetic oligonucleotide
  Antisense strand to SEQ ID NO: 600612
guucacaaagcacagauuc

SEQ ID NO: 600614 - RNA, 19 nt, Artificial Sequence
  Description of Artificial Sequence: Synthetic oligonucleotide
  Sense strand starting at position 3818 of SEQ ID NO: 584935
ggguguugcccaggacuuu

SEQ ID NO: 600615 - RNA, 19 nt, Artificial Sequence
  Description of Artificial Sequence: Synthetic oligonucleotide
  Antisense strand to SEQ ID NO: 600614
aaaguccugggcaacaccc

SEQ ID NO: 600616 - RNA, 19 nt, Artificial Sequence
  Description of Artificial Sequence: Synthetic oligonucleotide
  Sense strand starting at position 3957 of SEQ ID NO: 584935
uugugauucuuucuuccua

SEQ ID NO: 600617 - RNA, 19 nt, Artificial Sequence
  Description of Artificial Sequence: Synthetic oligonucleotide
  Antisense strand to SEQ ID NO: 600616
uaggaagaaagaaucacaa

SEQ ID NO: 600618 - RNA, 19 nt, Artificial Sequence
  Description of Artificial Sequence: Synthetic oligonucleotide
  Sense strand starting at position 3958 of SEQ ID NO: 584935
ugugauucuuucuuccuau

SEQ ID NO: 600619 - RNA, 19 nt, Artificial Sequence
  Description of Artificial Sequence: Synthetic oligonucleotide
  Antisense strand to SEQ ID NO: 600618
auaggaagaaagaaucaca

SEQ ID NO: 600620 - RNA, 19 nt, Artificial Sequence
  Description of Artificial Sequence: Synthetic oligonucleotide
  Sense strand starting at position 3959 of SEQ ID NO: 584935
gugauucuuucuuccuauu

SEQ ID NO: 600621 - RNA, 19 nt, Artificial Sequence
  Description of Artificial Sequence: Synthetic oligonucleotide
  Antisense strand to SEQ ID NO: 600620
aauaggaagaaagaaucac

SEQ ID NO: 600622 - RNA, 19 nt, Artificial Sequence
  Description of Artificial Sequence: Synthetic oligonucleotide
  Sense strand starting at position 993 of SEQ ID NO: 584936
ccgucauucguuuaaagag

SEQ ID NO: 600623 - RNA, 19 nt, Artificial Sequence
  Description of Artificial Sequence: Synthetic oligonucleotide
  Antisense strand to SEQ ID NO: 600622
cucuuuaaacgaaugacgg

SEQ ID NO: 600624 - RNA, 19 nt, Artificial Sequence
  Description of Artificial Sequence: Synthetic oligonucleotide
  Sense strand starting at position 1010 of SEQ ID NO: 584936
agcagaaccguucgagaua

SEQ ID NO: 600625 - RNA, 19 nt, Artificial Sequence
  Description of Artificial Sequence: Synthetic oligonucleotide
  Antisense strand to SEQ ID NO: 600624
uaucucgaacgguucugcu

SEQ ID NO: 600626 - RNA, 19 nt, Artificial Sequence
  Description of Artificial Sequence: Synthetic oligonucleotide
  Sense strand starting at position 1031 of SEQ ID NO: 584936
ggcauuuacuuauccguag

SEQ ID NO: 600627 - RNA, 19 nt, Artificial Sequence
  Description of Artificial Sequence: Synthetic oligonucleotide
  Antisense strand to SEQ ID NO: 600626
cuacggauaaguaaaugcc

SEQ ID NO: 600628 - RNA, 19 nt, Artificial Sequence
  Description of Artificial Sequence: Synthetic oligonucleotide
  Sense strand starting at position 1032 of SEQ ID NO: 584936
gcauuuacuuauccguagu

SEQ ID NO: 600629 - RNA, 19 nt, Artificial Sequence
  Description of Artificial Sequence: Synthetic oligonucleotide
  Antisense strand to SEQ ID NO: 600628
acuacggauaaguaaaugc

SEQ ID NO: 600630 - RNA, 19 nt, Artificial Sequence
  Description of Artificial Sequence: Synthetic oligonucleotide
  Sense strand starting at position 1082 of SEQ ID NO: 584936
agaggagauucgucaucac

SEQ ID NO: 600631 - RNA, 19 nt, Artificial Sequence
  Description of Artificial Sequence: Synthetic oligonucleotide
  Antisense strand to SEQ ID NO: 600630
gugaugacgaaucuccucu

SEQ ID NO: 600632 - RNA, 19 nt, Artificial Sequence
  Description of Artificial Sequence: Synthetic oligonucleotide
  Sense strand starting at position 1085 of SEQ ID NO: 584936
ggagauucgucaucacucu

SEQ ID NO: 600633 - RNA, 19 nt, Artificial Sequence
  Description of Artificial Sequence: Synthetic oligonucleotide
  Antisense strand to SEQ ID NO: 600632
agagugaugacgaaucucc

SEQ ID NO: 600634 - RNA, 19 nt, Artificial Sequence
  Description of Artificial Sequence: Synthetic oligonucleotide
  Sense strand starting at position 1086 of SEQ ID NO: 584936
gagauucgucaucacucuu

SEQ ID NO: 600635 - RNA, 19 nt, Artificial Sequence
  Description of Artificial Sequence: Synthetic oligonucleotide
  Antisense strand to SEQ ID NO: 600634
aagagugaugacgaaucuc

SEQ ID NO: 600636 - RNA, 19 nt, Artificial Sequence
  Description of Artificial Sequence: Synthetic oligonucleotide
  Sense strand starting at position 1092 of SEQ ID NO: 584936
cgucaucacucuuuagauu

SEQ ID NO: 600637 - RNA, 19 nt, Artificial Sequence
  Description of Artificial Sequence: Synthetic oligonucleotide
  Antisense strand to SEQ ID NO: 600636
aaucuaaagagugaugacg

SEQ ID NO: 600638 - RNA, 19 nt, Artificial Sequence
  Description of Artificial Sequence: Synthetic oligonucleotide
  Sense strand starting at position 1239 of SEQ ID NO: 584936
gaagguuuagcccaagugu

SEQ ID NO: 600639 - RNA, 19 nt, Artificial Sequence
  Description of Artificial Sequence: Synthetic oligonucleotide
  Antisense strand to SEQ ID NO: 600638
acacuugggcuaaaccuuc

SEQ ID NO: 600640 - RNA, 19 nt, Artificial Sequence
  Description of Artificial Sequence: Synthetic oligonucleotide
  Sense strand starting at position 1290 of SEQ ID NO: 584936
aaccuaguaugguuguaaa

SEQ ID NO: 600641 - RNA, 19 nt, Artificial Sequence
  Description of Artificial Sequence: Synthetic oligonucleotide
  Antisense strand to SEQ ID NO: 600640
uuuacaaccauacuagguu

SEQ ID NO: 600642 - RNA, 19 nt, Artificial Sequence
  Description of Artificial Sequence: Synthetic oligonucleotide
  Sense strand starting at position 1331 of SEQ ID NO: 584936
agaacacucucguuaguau

SEQ ID NO: 600643 - RNA, 19 nt, Artificial Sequence
  Description of Artificial Sequence: Synthetic oligonucleotide
  Antisense strand to SEQ ID NO: 600642
auacuaacgagaguguucu

SEQ ID NO: 600644 - RNA, 19 nt, Artificial Sequence
  Description of Artificial Sequence: Synthetic oligonucleotide
  Sense strand starting at position 1332 of SEQ ID NO: 584936
gaacacucucguuaguauu

SEQ ID NO: 600645 - RNA, 19 nt, Artificial Sequence
  Description of Artificial Sequence: Synthetic oligonucleotide
  Antisense strand to SEQ ID NO: 600644
aauacuaacgagaguguuc

SEQ ID NO: 600646 - RNA, 19 nt, Artificial Sequence
  Description of Artificial Sequence: Synthetic oligonucleotide
  Sense strand starting at position 1391 of SEQ ID NO: 584936
uaagguuuagcccaagcau

SEQ ID NO: 600647 - RNA, 19 nt, Artificial Sequence
  Description of Artificial Sequence: Synthetic oligonucleotide
  Antisense strand to SEQ ID NO: 600646
augcuugggcuaaaccuua

SEQ ID NO: 600648 - RNA, 19 nt, Artificial Sequence
  Description of Artificial Sequence: Synthetic oligonucleotide
  Sense strand starting at position 1471 of SEQ ID NO: 584936
uugcguggcagucucauua

SEQ ID NO: 600649 - RNA, 19 nt, Artificial Sequence
  Description of Artificial Sequence: Synthetic oligonucleotide
  Antisense strand to SEQ ID NO: 600648
uaaugagacugccacgcaa

SEQ ID NO: 600650 - RNA, 19 nt, Artificial Sequence
  Description of Artificial Sequence: Synthetic oligonucleotide
  Sense strand starting at position 1524 of SEQ ID NO: 584936
ugaaaucugcaguagguuu

SEQ ID NO: 600651 - RNA, 19 nt, Artificial Sequence
  Description of Artificial Sequence: Synthetic oligonucleotide
  Antisense strand to SEQ ID NO: 600650
aaaccuacugcagauuuca

SEQ ID NO: 600652 - RNA, 19 nt, Artificial Sequence
  Description of Artificial Sequence: Synthetic oligonucleotide
  Sense strand starting at position 1537 of SEQ ID NO: 584936
agguuuguugacugaauag

SEQ ID NO: 600653 - RNA, 19 nt, Artificial Sequence
  Description of Artificial Sequence: Synthetic oligonucleotide
  Antisense strand to SEQ ID NO: 600652
cuauucagucaacaaaccu

SEQ ID NO: 600654 - RNA, 19 nt, Artificial Sequence
  Description of Artificial Sequence: Synthetic oligonucleotide
  Sense strand starting at position 1547 of SEQ ID NO: 584936
acugaauagugacugaauu

SEQ ID NO: 600655 - RNA, 19 nt, Artificial Sequence
  Description of Artificial Sequence: Synthetic oligonucleotide
  Antisense strand to SEQ ID NO: 600654
aauucagucacuauucagu

SEQ ID NO: 600656 - RNA, 19 nt, Artificial Sequence
  Description of Artificial Sequence: Synthetic oligonucleotide
  Sense strand starting at position 1548 of SEQ ID NO: 584936
cugaauagugacugaauug

SEQ ID NO: 600657 - RNA, 19 nt, Artificial Sequence
  Description of Artificial Sequence: Synthetic oligonucleotide
  Antisense strand to SEQ ID NO: 600656
caauucagucacuauucag

SEQ ID NO: 600658 - RNA, 19 nt, Artificial Sequence
  Description of Artificial Sequence: Synthetic oligonucleotide
  Sense strand starting at position 1618 of SEQ ID NO: 584936
uuaagaugugcuugggaac

SEQ ID NO: 600659 - RNA, 19 nt, Artificial Sequence
  Description of Artificial Sequence: Synthetic oligonucleotide
  Antisense strand to SEQ ID NO: 600658
guucccaagcacaucuuaa

SEQ ID NO: 600660 - RNA, 19 nt, Artificial Sequence
  Description of Artificial Sequence: Synthetic oligonucleotide
  Sense strand starting at position 1619 of SEQ ID NO: 584936
uaagaugugcuugggaaca

SEQ ID NO: 600661 - RNA, 19 nt, Artificial Sequence
  Description of Artificial Sequence: Synthetic oligonucleotide
  Antisense strand to SEQ ID NO: 600660
uguucccaagcacaucuua

SEQ ID NO: 600662 - RNA, 19 nt, Artificial Sequence
  Description of Artificial Sequence: Synthetic oligonucleotide
  Sense strand starting at position 1662 of SEQ ID NO: 584936
ggacuuuccuguuuaacag

SEQ ID NO: 600663 - RNA, 19 nt, Artificial Sequence
  Description of Artificial Sequence: Synthetic oligonucleotide
  Antisense strand to SEQ ID NO: 600662
cuguuaaacaggaaagucc

SEQ ID NO: 600664 - RNA, 19 nt, Artificial Sequence
  Description of Artificial Sequence: Synthetic oligonucleotide
  Sense strand starting at position 1669 of SEQ ID NO: 584936
ccuguuuaacaguguacca

SEQ ID NO: 600665 - RNA, 19 nt, Artificial Sequence
  Description of Artificial Sequence: Synthetic oligonucleotide
  Antisense strand to SEQ ID NO: 600664
ugguacacuguuaaacagg

SEQ ID NO: 600666 - RNA, 19 nt, Artificial Sequence
  Description of Artificial Sequence: Synthetic oligonucleotide
  Sense strand starting at position 2079 of SEQ ID NO: 584936
gacuguuugugacucagga

SEQ ID NO: 600667 - RNA, 19 nt, Artificial Sequence
  Description of Artificial Sequence: Synthetic oligonucleotide
  Antisense strand to SEQ ID NO: 600666
uccugagucacaaacaguc

SEQ ID NO: 600668 - RNA, 19 nt, Artificial Sequence
  Description of Artificial Sequence: Synthetic oligonucleotide
  Sense strand starting at position 2081 of SEQ ID NO: 584936
cuguuugugacucaggagu

SEQ ID NO: 600669 - RNA, 19 nt, Artificial Sequence
  Description of Artificial Sequence: Synthetic oligonucleotide
  Antisense strand to SEQ ID NO: 600668
acuccugagucacaaacag

SEQ ID NO: 600670 - RNA, 19 nt, Artificial Sequence
  Description of Artificial Sequence: Synthetic oligonucleotide
  Sense strand starting at position 2160 of SEQ ID NO: 584936
gugguauuccuaggauaag

SEQ ID NO: 600671 - RNA, 19 nt, Artificial Sequence
  Description of Artificial Sequence: Synthetic oligonucleotide
  Antisense strand to SEQ ID NO: 600670
cuuauccuaggaauaccac

SEQ ID NO: 600672 - RNA, 19 nt, Artificial Sequence
  Description of Artificial Sequence: Synthetic oligonucleotide
  Sense strand starting at position 2420 of SEQ ID NO: 584936
cacugugugauacgugaaa

SEQ ID NO: 600673 - RNA, 19 nt, Artificial Sequence
  Description of Artificial Sequence: Synthetic oligonucleotide
  Antisense strand to SEQ ID NO: 600672
uuucacguaucacacagug

SEQ ID NO: 600674 - RNA, 19 nt, Artificial Sequence
  Description of Artificial Sequence: Synthetic oligonucleotide
  Sense strand starting at position 2422 of SEQ ID NO: 584936
cugugugauacgugaaaga

SEQ ID NO: 600675 - RNA, 19 nt, Artificial Sequence
  Description of Artificial Sequence: Synthetic oligonucleotide
  Antisense strand to SEQ ID NO: 600674
ucuuucacguaucacacag

SEQ ID NO: 600676 - RNA, 19 nt, Artificial Sequence
  Description of Artificial Sequence: Synthetic oligonucleotide
  Sense strand starting at position 2481 of SEQ ID NO: 584936
cagaaucugugcuuuguga

SEQ ID NO: 600677 - RNA, 19 nt, Artificial Sequence
  Description of Artificial Sequence: Synthetic oligonucleotide
  Antisense strand to SEQ ID NO: 600676
ucacaaagcacagauucug

SEQ ID NO: 600678 - RNA, 19 nt, Artificial Sequence
  Description of Artificial Sequence: Synthetic oligonucleotide
  Sense strand starting at position 2483 of SEQ ID NO: 584936
gaaucugugcuuugugaac

SEQ ID NO: 600679 - RNA, 19 nt, Artificial Sequence
  Description of Artificial Sequence: Synthetic oligonucleotide
  Antisense strand to SEQ ID NO: 600678
guucacaaagcacagauuc

SEQ ID NO: 600680 - RNA, 19 nt, Artificial Sequence
  Description of Artificial Sequence: Synthetic oligonucleotide
  Sense strand starting at position 2729 of SEQ ID NO: 584936
uugugauucuuucuuccua

SEQ ID NO: 600681 - RNA, 19 nt, Artificial Sequence
  Description of Artificial Sequence: Synthetic oligonucleotide
  Antisense strand to SEQ ID NO: 600680
uaggaagaaagaaucacaa

SEQ ID NO: 600682 - RNA, 19 nt, Artificial Sequence
  Description of Artificial Sequence: Synthetic oligonucleotide
  Sense strand starting at position 2730 of SEQ ID NO: 584936
ugugauucuuucuuccuau

SEQ ID NO: 600683 - RNA, 19 nt, Artificial Sequence
  Description of Artificial Sequence: Synthetic oligonucleotide
  Antisense strand to SEQ ID NO: 600682
auaggaagaaagaaucaca

SEQ ID NO: 600684 - RNA, 19 nt, Artificial Sequence
  Description of Artificial Sequence: Synthetic oligonucleotide
  Sense strand starting at position 2731 of SEQ ID NO: 584936
gugauucuuucuuccuauu

SEQ ID NO: 600685 - RNA, 19 nt, Artificial Sequence
  Description of Artificial Sequence: Synthetic oligonucleotide
  Antisense strand to SEQ ID NO: 600684
aauaggaagaaagaaucac

SEQ ID NO: 600686 - RNA, 19 nt, Artificial Sequence
  Description of Artificial Sequence: Synthetic oligonucleotide
  Sense strand starting at position 3137 of SEQ ID NO: 584936
uugagacucuuaccaguua

SEQ ID NO: 600687 - RNA, 19 nt, Artificial Sequence
  Description of Artificial Sequence: Synthetic oligonucleotide
  Antisense strand to SEQ ID NO: 600686
uaacugguaagagucucaa

SEQ ID NO: 600688 - RNA, 19 nt, Artificial Sequence
  Description of Artificial Sequence: Synthetic oligonucleotide
  Sense strand starting at position 3204 of SEQ ID NO: 584936
aagugugguauagaaugau

SEQ ID NO: 600689 - RNA, 19 nt, Artificial Sequence
  Description of Artificial Sequence: Synthetic oligonucleotide
  Antisense strand to SEQ ID NO: 600688
aucauucuauaccacacuu

SEQ ID NO: 600690 - RNA, 19 nt, Artificial Sequence
  Description of Artificial Sequence: Synthetic oligonucleotide
  Sense strand starting at position 3245 of SEQ ID NO: 584936
aauugauguauguguggaa

SEQ ID NO: 600691 - RNA, 19 nt, Artificial Sequence
  Description of Artificial Sequence: Synthetic oligonucleotide
  Antisense strand to SEQ ID NO: 600690
uuccacacauacaucaauu

SEQ ID NO: 600692 - RNA, 19 nt, Artificial Sequence
  Description of Artificial Sequence: Synthetic oligonucleotide
  Sense strand starting at position 3246 of SEQ ID NO: 584936
auugauguauguguggaaa

SEQ ID NO: 600693 - RNA, 19 nt, Artificial Sequence
  Description of Artificial Sequence: Synthetic oligonucleotide
  Antisense strand to SEQ ID NO: 600692
uuuccacacauacaucaau

SEQ ID NO: 600694 - RNA, 19 nt, Artificial Sequence
  Description of Artificial Sequence: Synthetic oligonucleotide
  Sense strand starting at position 3249 of SEQ ID NO: 584936
gauguauguguggaaaguu

SEQ ID NO: 600695 - RNA, 19 nt, Artificial Sequence
  Description of Artificial Sequence: Synthetic oligonucleotide
  Antisense strand to SEQ ID NO: 600694
aacuuuccacacauacauc

SEQ ID NO: 600696 - RNA, 19 nt, Artificial Sequence
  Description of Artificial Sequence: Synthetic oligonucleotide
  Sense strand starting at position 3353 of SEQ ID NO: 584936
aggagcaaugcuuacaauu

SEQ ID NO: 600697 - RNA, 19 nt, Artificial Sequence
  Description of Artificial Sequence: Synthetic oligonucleotide
  Antisense strand to SEQ ID NO: 600696
aauuguaagcauugcuccu

SEQ ID NO: 600698 - RNA, 19 nt, Artificial Sequence
  Description of Artificial Sequence: Synthetic oligonucleotide
  Sense strand starting at position 3956 of SEQ ID NO: 584936
gcugguugaauggacuaau

SEQ ID NO: 600699 - RNA, 19 nt, Artificial Sequence
  Description of Artificial Sequence: Synthetic oligonucleotide
  Antisense strand to SEQ ID NO: 600698
auuaguccauucaaccagc

SEQ ID NO: 600700 - RNA, 19 nt, Artificial Sequence
  Description of Artificial Sequence: Synthetic oligonucleotide
  Sense strand starting at position 3965 of SEQ ID NO: 584936
auggacuaauauuaaggaa

SEQ ID NO: 600701 - RNA, 19 nt, Artificial Sequence
  Description of Artificial Sequence: Synthetic oligonucleotide
  Antisense strand to SEQ ID NO: 600700
uuccuuaauauuaguccau

SEQ ID NO: 600702 - RNA, 19 nt, Artificial Sequence
  Description of Artificial Sequence: Synthetic oligonucleotide
  Sense strand starting at position 58 of SEQ ID NO: 584937
uuuauuucuuugcaaagga

SEQ ID NO: 600703 - RNA, 19 nt, Artificial Sequence
  Description of Artificial Sequence: Synthetic oligonucleotide
  Antisense strand to SEQ ID NO: 600702
uccuuugcaaagaaauaaa

SEQ ID NO: 600704 - RNA, 19 nt, Artificial Sequence
  Description of Artificial Sequence: Synthetic oligonucleotide
  Sense strand starting at position 120 of SEQ ID NO: 584937
acuuaauggcauugcaaua

SEQ ID NO: 600705 - RNA, 19 nt, Artificial Sequence
  Description of Artificial Sequence: Synthetic oligonucleotide
  Antisense strand to SEQ ID NO: 600704
uauugcaaugccauuaagu

SEQ ID NO: 600706 - RNA, 19 nt, Artificial Sequence
  Description of Artificial Sequence: Synthetic oligonucleotide
  Sense strand starting at position 284 of SEQ ID NO: 584937
uuaauacagccuugguaac

SEQ ID NO: 600707 - RNA, 19 nt, Artificial Sequence
  Description of Artificial Sequence: Synthetic oligonucleotide
  Antisense strand to SEQ ID NO: 600706
guuaccaaggcuguauuaa

SEQ ID NO: 600708 - RNA, 19 nt, Artificial Sequence
  Description of Artificial Sequence: Synthetic oligonucleotide
  Sense strand starting at position 331 of SEQ ID NO: 584937
gucuuaucuucucccuuga

SEQ ID NO: 600709 - RNA, 19 nt, Artificial Sequence
  Description of Artificial Sequence: Synthetic oligonucleotide
  Antisense strand to SEQ ID NO: 600708
ucaagggagaagauaagac

SEQ ID NO: 600710 - RNA, 19 nt, Artificial Sequence
  Description of Artificial Sequence: Synthetic oligonucleotide
  Sense strand starting at position 381 of SEQ ID NO: 584937
ccacaauauuuguguuaaa

SEQ ID NO: 600711 - RNA, 19 nt, Artificial Sequence
  Description of Artificial Sequence: Synthetic oligonucleotide
  Antisense strand to SEQ ID NO: 600710
uuuaacacaaauauugugg

SEQ ID NO: 600712 - RNA, 19 nt, Artificial Sequence
  Description of Artificial Sequence: Synthetic oligonucleotide
  Sense strand starting at position 630 of SEQ ID NO: 584937
uccaguagggcacgugaua

SEQ ID NO: 600713 - RNA, 19 nt, Artificial Sequence
  Description of Artificial Sequence: Synthetic oligonucleotide
  Antisense strand to SEQ ID NO: 600712
uaucacgugcccuacugga

SEQ ID NO: 600714 - RNA, 19 nt, Artificial Sequence
  Description of Artificial Sequence: Synthetic oligonucleotide
  Sense strand starting at position 641 of SEQ ID NO: 584937
acgugauaaucucuccuuu

SEQ ID NO: 600715 - RNA, 19 nt, Artificial Sequence
  Description of Artificial Sequence: Synthetic oligonucleotide
  Antisense strand to SEQ ID NO: 600714
aaaggagagauuaucacgu

SEQ ID NO: 600716 - RNA, 19 nt, Artificial Sequence
  Description of Artificial Sequence: Synthetic oligonucleotide
  Sense strand starting at position 643 of SEQ ID NO: 584937
gugauaaucucuccuuugu

SEQ ID NO: 600717 - RNA, 19 nt, Artificial Sequence
  Description of Artificial Sequence: Synthetic oligonucleotide
  Antisense strand to SEQ ID NO: 600716
acaaaggagagauuaucac

SEQ ID NO: 600718 - RNA, 19 nt, Artificial Sequence
  Description of Artificial Sequence: Synthetic oligonucleotide
  Sense strand starting at position 650 of SEQ ID NO: 584937
ucucuccuuugucauggaa

SEQ ID NO: 600719 - RNA, 19 nt, Artificial Sequence
  Description of Artificial Sequence: Synthetic oligonucleotide
  Antisense strand to SEQ ID NO: 600718
uuccaugacaaaggagaga

SEQ ID NO: 600720 - RNA, 19 nt, Artificial Sequence
  Description of Artificial Sequence: Synthetic oligonucleotide
  Sense strand starting at position 653 of SEQ ID NO: 584937
cuccuuugucauggaacaa

SEQ ID NO: 600721 - RNA, 19 nt, Artificial Sequence
  Description of Artificial Sequence: Synthetic oligonucleotide
  Antisense strand to SEQ ID NO: 600720
uuguuccaugacaaaggag

SEQ ID NO: 600722 - RNA, 19 nt, Artificial Sequence
  Description of Artificial Sequence: Synthetic oligonucleotide
  Sense strand starting at position 714 of SEQ ID NO: 584937
acaagagcuucugauuaca

SEQ ID NO: 600723 - RNA, 19 nt, Artificial Sequence
  Description of Artificial Sequence: Synthetic oligonucleotide
  Antisense strand to SEQ ID NO: 600722
uguaaucagaagcucuugu

SEQ ID NO: 600724 - RNA, 19 nt, Artificial Sequence
  Description of Artificial Sequence: Synthetic oligonucleotide
  Sense strand starting at position 776 of SEQ ID NO: 584937
uguacauuuggcugccuau

SEQ ID NO: 600725 - RNA, 19 nt, Artificial Sequence
  Description of Artificial Sequence: Synthetic oligonucleotide
  Antisense strand to SEQ ID NO: 600724
auaggcagccaaauguaca

SEQ ID NO: 600726 - RNA, 19 nt, Artificial Sequence
  Description of Artificial Sequence: Synthetic oligonucleotide
  Sense strand starting at position 903 of SEQ ID NO: 584937
auagauuagugacaacaac

SEQ ID NO: 600727 - RNA, 19 nt, Artificial Sequence
  Description of Artificial Sequence: Synthetic oligonucleotide
  Antisense strand to SEQ ID NO: 600726
guuguugucacuaaucuau

SEQ ID NO: 600728 - RNA, 19 nt, Artificial Sequence
  Description of Artificial Sequence: Synthetic oligonucleotide
  Sense strand starting at position 959 of SEQ ID NO: 584937
accuacugugugcaagauu

SEQ ID NO: 600729 - RNA, 19 nt, Artificial Sequence
  Description of Artificial Sequence: Synthetic oligonucleotide
  Antisense strand to SEQ ID NO: 600728
aaucuugcacacaguaggu

SEQ ID NO: 600730 - RNA, 19 nt, Artificial Sequence
  Description of Artificial Sequence: Synthetic oligonucleotide
  Sense strand starting at position 974 of SEQ ID NO: 584937
gauuuagugugucccauca

SEQ ID NO: 600731 - RNA, 19 nt, Artificial Sequence
  Description of Artificial Sequence: Synthetic oligonucleotide
  Antisense strand to SEQ ID NO: 600730
ugaugggacacacuaaauc

SEQ ID NO: 600732 - RNA, 19 nt, Artificial Sequence
  Description of Artificial Sequence: Synthetic oligonucleotide
  Sense strand starting at position 998 of SEQ ID NO: 584937
cggcacucccaauaaagaa

SEQ ID NO: 600733 - RNA, 19 nt, Artificial Sequence
  Description of Artificial Sequence: Synthetic oligonucleotide
  Antisense strand to SEQ ID NO: 600732
uucuuuauugggagugccg

SEQ ID NO: 600734 - RNA, 19 nt, Artificial Sequence
  Description of Artificial Sequence: Synthetic oligonucleotide
  Sense strand starting at position 1151 of SEQ ID NO: 584937
gguguaucaaucugaggau

SEQ ID NO: 600735 - RNA, 19 nt, Artificial Sequence
  Description of Artificial Sequence: Synthetic oligonucleotide
  Antisense strand to SEQ ID NO: 600734
auccucagauugauacacc

SEQ ID NO: 600736 - RNA, 19 nt, Artificial Sequence
  Description of Artificial Sequence: Synthetic oligonucleotide
  Sense strand starting at position 1152 of SEQ ID NO: 584937
guguaucaaucugaggauc

SEQ ID NO: 600737 - RNA, 19 nt, Artificial Sequence
  Description of Artificial Sequence: Synthetic oligonucleotide
  Antisense strand to SEQ ID NO: 600736
gauccucagauugauacac

SEQ ID NO: 600738 - RNA, 19 nt, Artificial Sequence
  Description of Artificial Sequence: Synthetic oligonucleotide
  Sense strand starting at position 1154 of SEQ ID NO: 584937
guaucaaucugaggaucua

SEQ ID NO: 600739 - RNA, 19 nt, Artificial Sequence
  Description of Artificial Sequence: Synthetic oligonucleotide
  Antisense strand to SEQ ID NO: 600738
uagauccucagauugauac

SEQ ID NO: 600740 - RNA, 19 nt, Artificial Sequence
  Description of Artificial Sequence: Synthetic oligonucleotide
  Sense strand starting at position 1273 of SEQ ID NO: 584937
cuuacaauguuggaggaaa

SEQ ID NO: 600741 - RNA, 19 nt, Artificial Sequence
  Description of Artificial Sequence: Synthetic oligonucleotide
  Antisense strand to SEQ ID NO: 600740
uuuccuccaacauuguaag

SEQ ID NO: 600742 - RNA, 19 nt, Artificial Sequence
  Description of Artificial Sequence: Synthetic oligonucleotide
  Sense strand starting at position 1542 of SEQ ID NO: 584937
cagugacaguccucgauua

SEQ ID NO: 600743 - RNA, 19 nt, Artificial Sequence
  Description of Artificial Sequence: Synthetic oligonucleotide
  Antisense strand to SEQ ID NO: 600742
uaaucgaggacugucacug

SEQ ID NO: 600744 - RNA, 19 nt, Artificial Sequence
  Description of Artificial Sequence: Synthetic oligonucleotide
  Sense strand starting at position 1543 of SEQ ID NO: 584937
agugacaguccucgauuaa

SEQ ID NO: 600745 - RNA, 19 nt, Artificial Sequence
  Description of Artificial Sequence: Synthetic oligonucleotide
  Antisense strand to SEQ ID NO: 600744
uuaaucgaggacugucacu

SEQ ID NO: 600746 - RNA, 19 nt, Artificial Sequence
  Description of Artificial Sequence: Synthetic oligonucleotide
  Sense strand starting at position 1544 of SEQ ID NO: 584937
gugacaguccucgauuaac

SEQ ID NO: 600747 - RNA, 19 nt, Artificial Sequence
  Description of Artificial Sequence: Synthetic oligonucleotide
  Antisense strand to SEQ ID NO: 600746
guuaaucgaggacugucac

SEQ ID NO: 600748 - RNA, 19 nt, Artificial Sequence
  Description of Artificial Sequence: Synthetic oligonucleotide
  Sense strand starting at position 1829 of SEQ ID NO: 584937
acagaaucgucccaccaug

SEQ ID NO: 600749 - RNA, 19 nt, Artificial Sequence
  Description of Artificial Sequence: Synthetic oligonucleotide
  Antisense strand to SEQ ID NO: 600748
cauggugggacgauucugu

SEQ ID NO: 600750 - RNA, 19 nt, Artificial Sequence
  Description of Artificial Sequence: Synthetic oligonucleotide
  Sense strand starting at position 2010 of SEQ ID NO: 584937
gccguagcuucuccgggau

SEQ ID NO: 600751 - RNA, 19 nt, Artificial Sequence
  Description of Artificial Sequence: Synthetic oligonucleotide
  Antisense strand to SEQ ID NO: 600750
aucccggagaagcuacggc

SEQ ID NO: 600752 - RNA, 19 nt, Artificial Sequence
  Description of Artificial Sequence: Synthetic oligonucleotide
  Sense strand starting at position 2397 of SEQ ID NO: 584937
uggucagcuaagcaagauu

SEQ ID NO: 600753 - RNA, 19 nt, Artificial Sequence
  Description of Artificial Sequence: Synthetic oligonucleotide
  Antisense strand to SEQ ID NO: 600752
aaucuugcuuagcugacca

SEQ ID NO: 600754 - RNA, 19 nt, Artificial Sequence
  Description of Artificial Sequence: Synthetic oligonucleotide
  Sense strand starting at position 2408 of SEQ ID NO: 584937
gcaagauucucucccgguc

SEQ ID NO: 600755 - RNA, 19 nt, Artificial Sequence
  Description of Artificial Sequence: Synthetic oligonucleotide
  Antisense strand to SEQ ID NO: 600754
gaccgggagagaaucuugc

SEQ ID NO: 600756 - RNA, 19 nt, Artificial Sequence
  Description of Artificial Sequence: Synthetic oligonucleotide
  Sense strand starting at position 3056 of SEQ ID NO: 584937
gcccaaguuuccuuuguuu

SEQ ID NO: 600757 - RNA, 19 nt, Artificial Sequence
  Description of Artificial Sequence: Synthetic oligonucleotide
  Antisense strand to SEQ ID NO: 600756
aaacaaaggaaacuugggc

SEQ ID NO: 600758 - RNA, 19 nt, Artificial Sequence
  Description of Artificial Sequence: Synthetic oligonucleotide
  Sense strand starting at position 3798 of SEQ ID NO: 584937
gucucuguugcccgucauu

SEQ ID NO: 600759 - RNA, 19 nt, Artificial Sequence
  Description of Artificial Sequence: Synthetic oligonucleotide
  Antisense strand to SEQ ID NO: 600758
aaugacgggcaacagagac

SEQ ID NO: 600760 - RNA, 19 nt, Artificial Sequence
  Description of Artificial Sequence: Synthetic oligonucleotide
  Sense strand starting at position 3805 of SEQ ID NO: 584937
uugcccgucauucguuuaa

SEQ ID NO: 600761 - RNA, 19 nt, Artificial Sequence
  Description of Artificial Sequence: Synthetic oligonucleotide
  Antisense strand to SEQ ID NO: 600760
uuaaacgaaugacgggcaa

SEQ ID NO: 600762 - RNA, 19 nt, Artificial Sequence
  Description of Artificial Sequence: Synthetic oligonucleotide
  Sense strand starting at position 3807 of SEQ ID NO: 584937
gcccgucauucguuuaaag

SEQ ID NO: 600763 - RNA, 19 nt, Artificial Sequence
  Description of Artificial Sequence: Synthetic oligonucleotide
  Antisense strand to SEQ ID NO: 600762
cuuuaaacgaaugacgggc

SEQ ID NO: 600764 - RNA, 19 nt, Artificial Sequence
  Description of Artificial Sequence: Synthetic oligonucleotide
  Sense strand starting at position 3809 of SEQ ID NO: 584937
ccgucauucguuuaaagag

SEQ ID NO: 600765 - RNA, 19 nt, Artificial Sequence
  Description of Artificial Sequence: Synthetic oligonucleotide
  Antisense strand to SEQ ID NO: 600764
cucuuuaaacgaaugacgg

SEQ ID NO: 600766 - RNA, 19 nt, Artificial Sequence
  Description of Artificial Sequence: Synthetic oligonucleotide
  Sense strand starting at position 3826 of SEQ ID NO: 584937
agcagaaccguucgagaua

SEQ ID NO: 600767 - RNA, 19 nt, Artificial Sequence
  Description of Artificial Sequence: Synthetic oligonucleotide
  Antisense strand to SEQ ID NO: 600766
uaucucgaacgguucugcu

SEQ ID NO: 600768 - RNA, 19 nt, Artificial Sequence
  Description of Artificial Sequence: Synthetic oligonucleotide
  Sense strand starting at position 3847 of SEQ ID NO: 584937
ggcauuuacuuauccguag

SEQ ID NO: 600769 - RNA, 19 nt, Artificial Sequence
  Description of Artificial Sequence: Synthetic oligonucleotide
  Antisense strand to SEQ ID NO: 600768
cuacggauaaguaaaugcc

SEQ ID NO: 600770 - RNA, 19 nt, Artificial Sequence
  Description of Artificial Sequence: Synthetic oligonucleotide
  Sense strand starting at position 3848 of SEQ ID NO: 584937
gcauuuacuuauccguagu

SEQ ID NO: 600771 - RNA, 19 nt, Artificial Sequence
  Description of Artificial Sequence: Synthetic oligonucleotide
  Antisense strand to SEQ ID NO: 600770
acuacggauaaguaaaugc

SEQ ID NO: 600772 - RNA, 19 nt, Artificial Sequence
  Description of Artificial Sequence: Synthetic oligonucleotide
  Sense strand starting at position 3861 of SEQ ID NO: 584937
cguaguugccauuaggcaa

SEQ ID NO: 600773 - RNA, 19 nt, Artificial Sequence
  Description of Artificial Sequence: Synthetic oligonucleotide
  Antisense strand to SEQ ID NO: 600772
uugccuaauggcaacuacg

SEQ ID NO: 600774 - RNA, 19 nt, Artificial Sequence
  Description of Artificial Sequence: Synthetic oligonucleotide
  Sense strand starting at position 3898 of SEQ ID NO: 584937
agaggagauucgucaucac

SEQ ID NO: 600775 - RNA, 19 nt, Artificial Sequence
  Description of Artificial Sequence: Synthetic oligonucleotide
  Antisense strand to SEQ ID NO: 600774
gugaugacgaaucuccucu

SEQ ID NO: 600776 - RNA, 19 nt, Artificial Sequence
  Description of Artificial Sequence: Synthetic oligonucleotide
  Sense strand starting at position 3901 of SEQ ID NO: 584937
ggagauucgucaucacucu

SEQ ID NO: 600777 - RNA, 19 nt, Artificial Sequence
  Description of Artificial Sequence: Synthetic oligonucleotide
  Antisense strand to SEQ ID NO: 600776
agagugaugacgaaucucc

SEQ ID NO: 600778 - RNA, 19 nt, Artificial Sequence
  Description of Artificial Sequence: Synthetic oligonucleotide
  Sense strand starting at position 3902 of SEQ ID NO: 584937
gagauucgucaucacucuu

SEQ ID NO: 600779 - RNA, 19 nt, Artificial Sequence
  Description of Artificial Sequence: Synthetic oligonucleotide
  Antisense strand to SEQ ID NO: 600778
aagagugaugacgaaucuc

SEQ ID NO: 600780 - RNA, 19 nt, Artificial Sequence
  Description of Artificial Sequence: Synthetic oligonucleotide
  Sense strand starting at position 3908 of SEQ ID NO: 584937
cgucaucacucuuuagauu

SEQ ID NO: 600781 - RNA, 19 nt, Artificial Sequence
  Description of Artificial Sequence: Synthetic oligonucleotide
  Antisense strand to SEQ ID NO: 600780
aaucuaaagagugaugacg

SEQ ID NO: 600782 - RNA, 19 nt, Artificial Sequence
  Description of Artificial Sequence: Synthetic oligonucleotide
  Sense strand starting at position 116 of SEQ ID NO: 584938
cagugacaguccucgauua

SEQ ID NO: 600783 - RNA, 19 nt, Artificial Sequence
  Description of Artificial Sequence: Synthetic oligonucleotide
  Antisense strand to SEQ ID NO: 600782
uaaucgaggacugucacug

SEQ ID NO: 600784 - RNA, 19 nt, Artificial Sequence
  Description of Artificial Sequence: Synthetic oligonucleotide
  Sense strand starting at position 117 of SEQ ID NO: 584938
agugacaguccucgauuaa

SEQ ID NO: 600785 - RNA, 19 nt, Artificial Sequence
  Description of Artificial Sequence: Synthetic oligonucleotide
  Antisense strand to SEQ ID NO: 600784
uuaaucgaggacugucacu

SEQ ID NO: 600786 - RNA, 19 nt, Artificial Sequence
  Description of Artificial Sequence: Synthetic oligonucleotide
  Sense strand starting at position 118 of SEQ ID NO: 584938
gugacaguccucgauuaac

SEQ ID NO: 600787 - RNA, 19 nt, Artificial Sequence
  Description of Artificial Sequence: Synthetic oligonucleotide
  Antisense strand to SEQ ID NO: 600786
guuaaucgaggacugucac

SEQ ID NO: 600788 - RNA, 19 nt, Artificial Sequence
  Description of Artificial Sequence: Synthetic oligonucleotide
  Sense strand starting at position 971 of SEQ ID NO: 584938
uggucagcuaagcaagauu

SEQ ID NO: 600789 - RNA, 19 nt, Artificial Sequence
  Description of Artificial Sequence: Synthetic oligonucleotide
  Antisense strand to SEQ ID NO: 600788
aaucuugcuuagcugacca

SEQ ID NO: 600790 - RNA, 19 nt, Artificial Sequence
  Description of Artificial Sequence: Synthetic oligonucleotide
  Sense strand starting at position 982 of SEQ ID NO: 584938
gcaagauucucucccgguc

SEQ ID NO: 600791 - RNA, 19 nt, Artificial Sequence
  Description of Artificial Sequence: Synthetic oligonucleotide
  Antisense strand to SEQ ID NO: 600790
gaccgggagagaaucuugc

SEQ ID NO: 600792 - RNA, 19 nt, Artificial Sequence
  Description of Artificial Sequence: Synthetic oligonucleotide
  Sense strand starting at position 2383 of SEQ ID NO: 584938
ccgucauucguuuaaagag

SEQ ID NO: 600793 - RNA, 19 nt, Artificial Sequence
  Description of Artificial Sequence: Synthetic oligonucleotide
  Antisense strand to SEQ ID NO: 600792
cucuuuaaacgaaugacgg

SEQ ID NO: 600794 - RNA, 19 nt, Artificial Sequence
  Description of Artificial Sequence: Synthetic oligonucleotide
  Sense strand starting at position 2400 of SEQ ID NO: 584938
agcagaaccguucgagaua

SEQ ID NO: 600795 - RNA, 19 nt, Artificial Sequence
  Description of Artificial Sequence: Synthetic oligonucleotide
  Antisense strand to SEQ ID NO: 600794
uaucucgaacgguucugcu

SEQ ID NO: 600796 - RNA, 19 nt, Artificial Sequence
  Description of Artificial Sequence: Synthetic oligonucleotide
  Sense strand starting at position 2421 of SEQ ID NO: 584938
ggcauuuacuuauccguag

SEQ ID NO: 600797 - RNA, 19 nt, Artificial Sequence
  Description of Artificial Sequence: Synthetic oligonucleotide
  Antisense strand to SEQ ID NO: 600796
cuacggauaaguaaaugcc

SEQ ID NO: 600798 - RNA, 19 nt, Artificial Sequence
  Description of Artificial Sequence: Synthetic oligonucleotide
  Sense strand starting at position 2422 of SEQ ID NO: 584938
gcauuuacuuauccguagu

SEQ ID NO: 600799 - RNA, 19 nt, Artificial Sequence
  Description of Artificial Sequence: Synthetic oligonucleotide
  Antisense strand to SEQ ID NO: 600798
acuacggauaaguaaaugc

SEQ ID NO: 600800 - RNA, 19 nt, Artificial Sequence
  Description of Artificial Sequence: Synthetic oligonucleotide
  Sense strand starting at position 2435 of SEQ ID NO: 584938
cguaguugccauuaggcaa

SEQ ID NO: 600801 - RNA, 19 nt, Artificial Sequence
  Description of Artificial Sequence: Synthetic oligonucleotide
  Antisense strand to SEQ ID NO: 600800
uugccuaauggcaacuacg

SEQ ID NO: 600802 - RNA, 19 nt, Artificial Sequence
  Description of Artificial Sequence: Synthetic oligonucleotide
  Sense strand starting at position 2472 of SEQ ID NO: 584938
agaggagauucgucaucac

SEQ ID NO: 600803 - RNA, 19 nt, Artificial Sequence
  Description of Artificial Sequence: Synthetic oligonucleotide
  Antisense strand to SEQ ID NO: 600802
gugaugacgaaucuccucu

SEQ ID NO: 600804 - RNA, 19 nt, Artificial Sequence
  Description of Artificial Sequence: Synthetic oligonucleotide
  Sense strand starting at position 2475 of SEQ ID NO: 584938
ggagauucgucaucacucu

SEQ ID NO: 600805 - RNA, 19 nt, Artificial Sequence
  Description of Artificial Sequence: Synthetic oligonucleotide
  Antisense strand to SEQ ID NO: 600804
agagugaugacgaaucucc

SEQ ID NO: 600806 - RNA, 19 nt, Artificial Sequence
  Description of Artificial Sequence: Synthetic oligonucleotide
  Sense strand starting at position 2476 of SEQ ID NO: 584938
gagauucgucaucacucuu

SEQ ID NO: 600807 - RNA, 19 nt, Artificial Sequence
  Description of Artificial Sequence: Synthetic oligonucleotide
  Antisense strand to SEQ ID NO: 600806
aagagugaugacgaaucuc

SEQ ID NO: 600808 - RNA, 19 nt, Artificial Sequence
  Description of Artificial Sequence: Synthetic oligonucleotide
  Sense strand starting at position 2482 of SEQ ID NO: 584938
cgucaucacucuuuagauu

SEQ ID NO: 600809 - RNA, 19 nt, Artificial Sequence
  Description of Artificial Sequence: Synthetic oligonucleotide
  Antisense strand to SEQ ID NO: 600808
aaucuaaagagugaugacg

SEQ ID NO: 600810 - RNA, 19 nt, Artificial Sequence
  Description of Artificial Sequence: Synthetic oligonucleotide
  Sense strand starting at position 2629 of SEQ ID NO: 584938
gaagguuuagcccaagugu

SEQ ID NO: 600811 - RNA, 19 nt, Artificial Sequence
  Description of Artificial Sequence: Synthetic oligonucleotide
  Antisense strand to SEQ ID NO: 600810
acacuugggcuaaaccuuc

SEQ ID NO: 600812 - RNA, 19 nt, Artificial Sequence
  Description of Artificial Sequence: Synthetic oligonucleotide
  Sense strand starting at position 2680 of SEQ ID NO: 584938
aaccuaguaugguuguaaa

SEQ ID NO: 600813 - RNA, 19 nt, Artificial Sequence
  Description of Artificial Sequence: Synthetic oligonucleotide
  Antisense strand to SEQ ID NO: 600812
uuuacaaccauacuagguu

SEQ ID NO: 600814 - RNA, 19 nt, Artificial Sequence
  Description of Artificial Sequence: Synthetic oligonucleotide
  Sense strand starting at position 2683 of SEQ ID NO: 584938
cuaguaugguuguaaauuu

SEQ ID NO: 600815 - RNA, 19 nt, Artificial Sequence
  Description of Artificial Sequence: Synthetic oligonucleotide
  Antisense strand to SEQ ID NO: 600814
aaauuuacaaccauacuag

SEQ ID NO: 600816 - RNA, 19 nt, Artificial Sequence
  Description of Artificial Sequence: Synthetic oligonucleotide
  Sense strand starting at position 2721 of SEQ ID NO: 584938
agaacacucucguuaguau

SEQ ID NO: 600817 - RNA, 19 nt, Artificial Sequence
  Description of Artificial Sequence: Synthetic oligonucleotide
  Antisense strand to SEQ ID NO: 600816
auacuaacgagaguguucu

SEQ ID NO: 600818 - RNA, 19 nt, Artificial Sequence
  Description of Artificial Sequence: Synthetic oligonucleotide
  Sense strand starting at position 2722 of SEQ ID NO: 584938
gaacacucucguuaguauu

SEQ ID NO: 600819 - RNA, 19 nt, Artificial Sequence
  Description of Artificial Sequence: Synthetic oligonucleotide
  Antisense strand to SEQ ID NO: 600818
aauacuaacgagaguguuc

SEQ ID NO: 600820 - RNA, 19 nt, Artificial Sequence
  Description of Artificial Sequence: Synthetic oligonucleotide
  Sense strand starting at position 2781 of SEQ ID NO: 584938
uaagguuuagcccaagcau

SEQ ID NO: 600821 - RNA, 19 nt, Artificial Sequence
  Description of Artificial Sequence: Synthetic oligonucleotide
  Antisense strand to SEQ ID NO: 600820
augcuugggcuaaaccuua

SEQ ID NO: 600822 - RNA, 19 nt, Artificial Sequence
  Description of Artificial Sequence: Synthetic oligonucleotide
  Sense strand starting at position 2861 of SEQ ID NO: 584938
uugcguggcagucucauua

SEQ ID NO: 600823 - RNA, 19 nt, Artificial Sequence
  Description of Artificial Sequence: Synthetic oligonucleotide
  Antisense strand to SEQ ID NO: 600822
uaaugagacugccacgcaa

SEQ ID NO: 600824 - RNA, 19 nt, Artificial Sequence
  Description of Artificial Sequence: Synthetic oligonucleotide
  Sense strand starting at position 2899 of SEQ ID NO: 584938
gaagcaaagugacaaugaa

SEQ ID NO: 600825 - RNA, 19 nt, Artificial Sequence
  Description of Artificial Sequence: Synthetic oligonucleotide
  Antisense strand to SEQ ID NO: 600824
uucauugucacuuugcuuc

SEQ ID NO: 600826 - RNA, 19 nt, Artificial Sequence
  Description of Artificial Sequence: Synthetic oligonucleotide
  Sense strand starting at position 2914 of SEQ ID NO: 584938
ugaaaucugcaguagguuu

SEQ ID NO: 600827 - RNA, 19 nt, Artificial Sequence
  Description of Artificial Sequence: Synthetic oligonucleotide
  Antisense strand to SEQ ID NO: 600826
aaaccuacugcagauuuca

SEQ ID NO: 600828 - RNA, 19 nt, Artificial Sequence
  Description of Artificial Sequence: Synthetic oligonucleotide
  Sense strand starting at position 2927 of SEQ ID NO: 584938
agguuuguugacugaauag

SEQ ID NO: 600829 - RNA, 19 nt, Artificial Sequence
  Description of Artificial Sequence: Synthetic oligonucleotide
  Antisense strand to SEQ ID NO: 600828
cuauucagucaacaaaccu

SEQ ID NO: 600830 - RNA, 19 nt, Artificial Sequence
  Description of Artificial Sequence: Synthetic oligonucleotide
  Sense strand starting at position 2937 of SEQ ID NO: 584938
acugaauagugacugaauu

SEQ ID NO: 600831 - RNA, 19 nt, Artificial Sequence
  Description of Artificial Sequence: Synthetic oligonucleotide
  Antisense strand to SEQ ID NO: 600830
aauucagucacuauucagu

SEQ ID NO: 600832 - RNA, 19 nt, Artificial Sequence
  Description of Artificial Sequence: Synthetic oligonucleotide
  Sense strand starting at position 2938 of SEQ ID NO: 584938
cugaauagugacugaauug

SEQ ID NO: 600833 - RNA, 19 nt, Artificial Sequence
  Description of Artificial Sequence: Synthetic oligonucleotide
  Antisense strand to SEQ ID NO: 600832
caauucagucacuauucag

SEQ ID NO: 600834 - RNA, 19 nt, Artificial Sequence
  Description of Artificial Sequence: Synthetic oligonucleotide
  Sense strand starting at position 3008 of SEQ ID NO: 584938
uuaagaugugcuugggaac

SEQ ID NO: 600835 - RNA, 19 nt, Artificial Sequence
  Description of Artificial Sequence: Synthetic oligonucleotide
  Antisense strand to SEQ ID NO: 600834
guucccaagcacaucuuaa

SEQ ID NO: 600836 - RNA, 19 nt, Artificial Sequence
  Description of Artificial Sequence: Synthetic oligonucleotide
  Sense strand starting at position 3009 of SEQ ID NO: 584938
uaagaugugcuugggaaca

SEQ ID NO: 600837 - RNA, 19 nt, Artificial Sequence
  Description of Artificial Sequence: Synthetic oligonucleotide
  Antisense strand to SEQ ID NO: 600836
uguucccaagcacaucuua

SEQ ID NO: 600838 - RNA, 19 nt, Artificial Sequence
  Description of Artificial Sequence: Synthetic oligonucleotide
  Sense strand starting at position 3052 of SEQ ID NO: 584938
ggacuuuccuguuuaacag

SEQ ID NO: 600839 - RNA, 19 nt, Artificial Sequence
  Description of Artificial Sequence: Synthetic oligonucleotide
  Antisense strand to SEQ ID NO: 600838
cuguuaaacaggaaagucc

SEQ ID NO: 600840 - RNA, 19 nt, Artificial Sequence
  Description of Artificial Sequence: Synthetic oligonucleotide
  Sense strand starting at position 3059 of SEQ ID NO: 584938
ccuguuuaacaguguacca

SEQ ID NO: 600841 - RNA, 19 nt, Artificial Sequence
  Description of Artificial Sequence: Synthetic oligonucleotide
  Antisense strand to SEQ ID NO: 600840
ugguacacuguuaaacagg

SEQ ID NO: 600842 - RNA, 19 nt, Artificial Sequence
  Description of Artificial Sequence: Synthetic oligonucleotide
  Sense strand starting at position 3469 of SEQ ID NO: 584938
gacuguuugugacucagga

SEQ ID NO: 600843 - RNA, 19 nt, Artificial Sequence
  Description of Artificial Sequence: Synthetic oligonucleotide
  Antisense strand to SEQ ID NO: 600842
uccugagucacaaacaguc

SEQ ID NO: 600844 - RNA, 19 nt, Artificial Sequence
  Description of Artificial Sequence: Synthetic oligonucleotide
  Sense strand starting at position 3471 of SEQ ID NO: 584938
cuguuugugacucaggagu

SEQ ID NO: 600845 - RNA, 19 nt, Artificial Sequence
  Description of Artificial Sequence: Synthetic oligonucleotide
  Antisense strand to SEQ ID NO: 600844
acuccugagucacaaacag

SEQ ID NO: 600846 - RNA, 19 nt, Artificial Sequence
  Description of Artificial Sequence: Synthetic oligonucleotide
  Sense strand starting at position 3524 of SEQ ID NO: 584938
ccacaagcugcuuguugaa

SEQ ID NO: 600847 - RNA, 19 nt, Artificial Sequence
  Description of Artificial Sequence: Synthetic oligonucleotide
  Antisense strand to SEQ ID NO: 600846
uucaacaagcagcuugugg

SEQ ID NO: 600848 - RNA, 19 nt, Artificial Sequence
  Description of Artificial Sequence: Synthetic oligonucleotide
  Sense strand starting at position 3550 of SEQ ID NO: 584938
gugguauuccuaggauaag

SEQ ID NO: 600849 - RNA, 19 nt, Artificial Sequence
  Description of Artificial Sequence: Synthetic oligonucleotide
  Antisense strand to SEQ ID NO: 600848
cuuauccuaggaauaccac

SEQ ID NO: 600850 - RNA, 19 nt, Artificial Sequence
  Description of Artificial Sequence: Synthetic oligonucleotide
  Sense strand starting at position 3810 of SEQ ID NO: 584938
cacugugugauacgugaaa

SEQ ID NO: 600851 - RNA, 19 nt, Artificial Sequence
  Description of Artificial Sequence: Synthetic oligonucleotide
  Antisense strand to SEQ ID NO: 600850
uuucacguaucacacagug

SEQ ID NO: 600852 - RNA, 19 nt, Artificial Sequence
  Description of Artificial Sequence: Synthetic oligonucleotide
  Sense strand starting at position 3812 of SEQ ID NO: 584938
cugugugauacgugaaaga

SEQ ID NO: 600853 - RNA, 19 nt, Artificial Sequence
  Description of Artificial Sequence: Synthetic oligonucleotide
  Antisense strand to SEQ ID NO: 600852
ucuuucacguaucacacag

SEQ ID NO: 600854 - RNA, 19 nt, Artificial Sequence
  Description of Artificial Sequence: Synthetic oligonucleotide
  Sense strand starting at position 3869 of SEQ ID NO: 584938
cucagaaucugugcuuugu

SEQ ID NO: 600855 - RNA, 19 nt, Artificial Sequence
  Description of Artificial Sequence: Synthetic oligonucleotide
  Antisense strand to SEQ ID NO: 600854
acaaagcacagauucugag

SEQ ID NO: 600856 - RNA, 19 nt, Artificial Sequence
  Description of Artificial Sequence: Synthetic oligonucleotide
  Sense strand starting at position 3871 of SEQ ID NO: 584938
cagaaucugugcuuuguga

SEQ ID NO: 600857 - RNA, 19 nt, Artificial Sequence
  Description of Artificial Sequence: Synthetic oligonucleotide
  Antisense strand to SEQ ID NO: 600856
ucacaaagcacagauucug

SEQ ID NO: 600858 - RNA, 19 nt, Artificial Sequence
  Description of Artificial Sequence: Synthetic oligonucleotide
  Sense strand starting at position 3873 of SEQ ID NO: 584938
gaaucugugcuuugugaac

SEQ ID NO: 600859 - RNA, 19 nt, Artificial Sequence
  Description of Artificial Sequence: Synthetic oligonucleotide
  Antisense strand to SEQ ID NO: 600858
guucacaaagcacagauuc

SEQ ID NO: 600860 - RNA, 19 nt, Artificial Sequence
  Description of Artificial Sequence: Synthetic oligonucleotide
  Sense strand starting at position 3980 of SEQ ID NO: 584938
ggguguugcccaggacuuu

SEQ ID NO: 600861 - RNA, 19 nt, Artificial Sequence
  Description of Artificial Sequence: Synthetic oligonucleotide
  Antisense strand to SEQ ID NO: 600860
aaaguccugggcaacaccc

SEQ ID NO: 600862 - RNA, 19 nt, Artificial Sequence
  Description of Artificial Sequence: Synthetic oligonucleotide
  Sense strand starting at position 55 of SEQ ID NO: 584939
ggucauccaaaguaguuua

SEQ ID NO: 600863 - RNA, 19 nt, Artificial Sequence
  Description of Artificial Sequence: Synthetic oligonucleotide
  Antisense strand to SEQ ID NO: 600862
uaaacuacuuuggaugacc

SEQ ID NO: 600864 - RNA, 19 nt, Artificial Sequence
  Description of Artificial Sequence: Synthetic oligonucleotide
  Sense strand starting at position 105 of SEQ ID NO: 584939
agaacuguguaauuaacuu

SEQ ID NO: 600865 - RNA, 19 nt, Artificial Sequence
  Description of Artificial Sequence: Synthetic oligonucleotide
  Antisense strand to SEQ ID NO: 600864
aaguuaauuacacaguucu

SEQ ID NO: 600866 - RNA, 19 nt, Artificial Sequence
  Description of Artificial Sequence: Synthetic oligonucleotide
  Sense strand starting at position 295 of SEQ ID NO: 584939
guaugaaaguuaccugaaa

SEQ ID NO: 600867 - RNA, 19 nt, Artificial Sequence
  Description of Artificial Sequence: Synthetic oligonucleotide
  Antisense strand to SEQ ID NO: 600866
uuucagguaacuuucauac

SEQ ID NO: 600868 - RNA, 19 nt, Artificial Sequence
  Description of Artificial Sequence: Synthetic oligonucleotide
  Sense strand starting at position 452 of SEQ ID NO: 584939
gucuguauucguccugcuu

SEQ ID NO: 600869 - RNA, 19 nt, Artificial Sequence
  Description of Artificial Sequence: Synthetic oligonucleotide
  Antisense strand to SEQ ID NO: 600868
aagcaggacgaauacagac

SEQ ID NO: 600870 - RNA, 19 nt, Artificial Sequence
  Description of Artificial Sequence: Synthetic oligonucleotide
  Sense strand starting at position 455 of SEQ ID NO: 584939
uguauucguccugcuucua

SEQ ID NO: 600871 - RNA, 19 nt, Artificial Sequence
  Description of Artificial Sequence: Synthetic oligonucleotide
  Antisense strand to SEQ ID NO: 600870
uagaagcaggacgaauaca

SEQ ID NO: 600872 - RNA, 19 nt, Artificial Sequence
  Description of Artificial Sequence: Synthetic oligonucleotide
  Sense strand starting at position 498 of SEQ ID NO: 584939
auucauuucggugaucguu

SEQ ID NO: 600873 - RNA, 19 nt, Artificial Sequence
  Description of Artificial Sequence: Synthetic oligonucleotide
  Antisense strand to SEQ ID NO: 600872
aacgaucaccgaaaugaau

SEQ ID NO: 600874 - RNA, 19 nt, Artificial Sequence
  Description of Artificial Sequence: Synthetic oligonucleotide
  Sense strand starting at position 504 of SEQ ID NO: 584939
uucggugaucguuuguuga

SEQ ID NO: 600875 - RNA, 19 nt, Artificial Sequence
  Description of Artificial Sequence: Synthetic oligonucleotide
  Antisense strand to SEQ ID NO: 600874
ucaacaaacgaucaccgaa

SEQ ID NO: 600876 - RNA, 19 nt, Artificial Sequence
  Description of Artificial Sequence: Synthetic oligonucleotide
  Sense strand starting at position 555 of SEQ ID NO: 584939
gugauaggguccuccugau

SEQ ID NO: 600877 - RNA, 19 nt, Artificial Sequence
  Description of Artificial Sequence: Synthetic oligonucleotide
  Antisense strand to SEQ ID NO: 600876
aucaggaggacccuaucac

SEQ ID NO: 600878 - RNA, 19 nt, Artificial Sequence
  Description of Artificial Sequence: Synthetic oligonucleotide
  Sense strand starting at position 614 of SEQ ID NO: 584939
cacguucugccuuauagag

SEQ ID NO: 600879 - RNA, 19 nt, Artificial Sequence
  Description of Artificial Sequence: Synthetic oligonucleotide
  Antisense strand to SEQ ID NO: 600878
cucuauaaggcagaacgug

SEQ ID NO: 600880 - RNA, 19 nt, Artificial Sequence
  Description of Artificial Sequence: Synthetic oligonucleotide
  Sense strand starting at position 893 of SEQ ID NO: 584939
acaggaaacugcuccucaa

SEQ ID NO: 600881 - RNA, 19 nt, Artificial Sequence
  Description of Artificial Sequence: Synthetic oligonucleotide
  Antisense strand to SEQ ID NO: 600880
uugaggagcaguuuccugu

SEQ ID NO: 600882 - RNA, 19 nt, Artificial Sequence
  Description of Artificial Sequence: Synthetic oligonucleotide
  Sense strand starting at position 973 of SEQ ID NO: 584939
cacacuugccuagguagaa

SEQ ID NO: 600883 - RNA, 19 nt, Artificial Sequence
  Description of Artificial Sequence: Synthetic oligonucleotide
  Antisense strand to SEQ ID NO: 600882
uucuaccuaggcaagugug

SEQ ID NO: 600884 - RNA, 19 nt, Artificial Sequence
  Description of Artificial Sequence: Synthetic oligonucleotide
  Sense strand starting at position 982 of SEQ ID NO: 584939
cuagguagaacccgaguaa

SEQ ID NO: 600885 - RNA, 19 nt, Artificial Sequence
  Description of Artificial Sequence: Synthetic oligonucleotide
  Antisense strand to SEQ ID NO: 600884
uuacucggguucuaccuag

SEQ ID NO: 600886 - RNA, 19 nt, Artificial Sequence
  Description of Artificial Sequence: Synthetic oligonucleotide
  Sense strand starting at position 1356 of SEQ ID NO: 584939
caguuucuccgugagaaga

SEQ ID NO: 600887 - RNA, 19 nt, Artificial Sequence
  Description of Artificial Sequence: Synthetic oligonucleotide
  Antisense strand to SEQ ID NO: 600886
ucuucucacggagaaacug

SEQ ID NO: 600888 - RNA, 19 nt, Artificial Sequence
  Description of Artificial Sequence: Synthetic oligonucleotide
  Sense strand starting at position 2046 of SEQ ID NO: 584939
gcgagaacgcccucguucu

SEQ ID NO: 600889 - RNA, 19 nt, Artificial Sequence
  Description of Artificial Sequence: Synthetic oligonucleotide
  Antisense strand to SEQ ID NO: 600888
agaacgagggcguucucgc

SEQ ID NO: 600890 - RNA, 19 nt, Artificial Sequence
  Description of Artificial Sequence: Synthetic oligonucleotide
  Sense strand starting at position 2267 of SEQ ID NO: 584939
ucgccucagauggaucaaa

SEQ ID NO: 600891 - RNA, 19 nt, Artificial Sequence
  Description of Artificial Sequence: Synthetic oligonucleotide
  Antisense strand to SEQ ID NO: 600890
uuugauccaucugaggcga

SEQ ID NO: 600892 - RNA, 19 nt, Artificial Sequence
  Description of Artificial Sequence: Synthetic oligonucleotide
  Sense strand starting at position 2332 of SEQ ID NO: 584939
cgcggaguuacuuucugca

SEQ ID NO: 600893 - RNA, 19 nt, Artificial Sequence
  Description of Artificial Sequence: Synthetic oligonucleotide
  Antisense strand to SEQ ID NO: 600892
ugcagaaaguaacuccgcg

SEQ ID NO: 600894 - RNA, 19 nt, Artificial Sequence
  Description of Artificial Sequence: Synthetic oligonucleotide
  Sense strand starting at position 2619 of SEQ ID NO: 584939
uuguuacuugaucgagaga

SEQ ID NO: 600895 - RNA, 19 nt, Artificial Sequence
  Description of Artificial Sequence: Synthetic oligonucleotide
  Antisense strand to SEQ ID NO: 600894
ucucucgaucaaguaacaa

SEQ ID NO: 600896 - RNA, 19 nt, Artificial Sequence
  Description of Artificial Sequence: Synthetic oligonucleotide
  Sense strand starting at position 2645 of SEQ ID NO: 584939
gcaucaugauuugaaauac

SEQ ID NO: 600897 - RNA, 19 nt, Artificial Sequence
  Description of Artificial Sequence: Synthetic oligonucleotide
  Antisense strand to SEQ ID NO: 600896
guauuucaaaucaugaugc

SEQ ID NO: 600898 - RNA, 19 nt, Artificial Sequence
  Description of Artificial Sequence: Synthetic oligonucleotide
  Sense strand starting at position 2699 of SEQ ID NO: 584939
ggcauaggauuacuauagu

SEQ ID NO: 600899 - RNA, 19 nt, Artificial Sequence
  Description of Artificial Sequence: Synthetic oligonucleotide
  Antisense strand to SEQ ID NO: 600898
acuauaguaauccuaugcc

SEQ ID NO: 600900 - RNA, 19 nt, Artificial Sequence
  Description of Artificial Sequence: Synthetic oligonucleotide
  Sense strand starting at position 2705 of SEQ ID NO: 584939
ggauuacuauagucaguca

SEQ ID NO: 600901 - RNA, 19 nt, Artificial Sequence
  Description of Artificial Sequence: Synthetic oligonucleotide
  Antisense strand to SEQ ID NO: 600900
ugacugacuauaguaaucc

SEQ ID NO: 600902 - RNA, 19 nt, Artificial Sequence
  Description of Artificial Sequence: Synthetic oligonucleotide
  Sense strand starting at position 2708 of SEQ ID NO: 584939
uuacuauagucagucaaac

SEQ ID NO: 600903 - RNA, 19 nt, Artificial Sequence
  Description of Artificial Sequence: Synthetic oligonucleotide
  Antisense strand to SEQ ID NO: 600902
guuugacugacuauaguaa

SEQ ID NO: 600904 - RNA, 19 nt, Artificial Sequence
  Description of Artificial Sequence: Synthetic oligonucleotide
  Sense strand starting at position 2722 of SEQ ID NO: 584939
caaacaugagcuugguagu

SEQ ID NO: 600905 - RNA, 19 nt, Artificial Sequence
  Description of Artificial Sequence: Synthetic oligonucleotide
  Antisense strand to SEQ ID NO: 600904
acuaccaagcucauguuug

SEQ ID NO: 600906 - RNA, 19 nt, Artificial Sequence
  Description of Artificial Sequence: Synthetic oligonucleotide
  Sense strand starting at position 2735 of SEQ ID NO: 584939
gguaguuacgaagaaguau

SEQ ID NO: 600907 - RNA, 19 nt, Artificial Sequence
  Description of Artificial Sequence: Synthetic oligonucleotide
  Antisense strand to SEQ ID NO: 600906
auacuucuucguaacuacc

SEQ ID NO: 600908 - RNA, 19 nt, Artificial Sequence
  Description of Artificial Sequence: Synthetic oligonucleotide
  Sense strand starting at position 2796 of SEQ ID NO: 584939
acccaauuccagggcagau

SEQ ID NO: 600909 - RNA, 19 nt, Artificial Sequence
  Description of Artificial Sequence: Synthetic oligonucleotide
  Antisense strand to SEQ ID NO: 600908
aucugcccuggaauugggu

SEQ ID NO: 600910 - RNA, 19 nt, Artificial Sequence
  Description of Artificial Sequence: Synthetic oligonucleotide
  Sense strand starting at position 2817 of SEQ ID NO: 584939
gugugugagcguuuguuga

SEQ ID NO: 600911 - RNA, 19 nt, Artificial Sequence
  Description of Artificial Sequence: Synthetic oligonucleotide
  Antisense strand to SEQ ID NO: 600910
ucaacaaacgcucacacac

SEQ ID NO: 600912 - RNA, 19 nt, Artificial Sequence
  Description of Artificial Sequence: Synthetic oligonucleotide
  Sense strand starting at position 2882 of SEQ ID NO: 584939
ucagucauccagcacugaa

SEQ ID NO: 600913 - RNA, 19 nt, Artificial Sequence
  Description of Artificial Sequence: Synthetic oligonucleotide
  Antisense strand to SEQ ID NO: 600912
uucagugcuggaugacuga

SEQ ID NO: 600914 - RNA, 19 nt, Artificial Sequence
  Description of Artificial Sequence: Synthetic oligonucleotide
  Sense strand starting at position 2926 of SEQ ID NO: 584939
agacauggguccuugaaac

SEQ ID NO: 600915 - RNA, 19 nt, Artificial Sequence
  Description of Artificial Sequence: Synthetic oligonucleotide
  Antisense strand to SEQ ID NO: 600914
guuucaaggacccaugucu

SEQ ID NO: 600916 - RNA, 19 nt, Artificial Sequence
  Description of Artificial Sequence: Synthetic oligonucleotide
  Sense strand starting at position 3067 of SEQ ID NO: 584939
ggacguauccauuaccacu

SEQ ID NO: 600917 - RNA, 19 nt, Artificial Sequence
  Description of Artificial Sequence: Synthetic oligonucleotide
  Antisense strand to SEQ ID NO: 600916
agugguaauggauacgucc

SEQ ID NO: 600918 - RNA, 19 nt, Artificial Sequence
  Description of Artificial Sequence: Synthetic oligonucleotide
  Sense strand starting at position 3342 of SEQ ID NO: 584939
agcgcuaauccucagagau

SEQ ID NO: 600919 - RNA, 19 nt, Artificial Sequence
  Description of Artificial Sequence: Synthetic oligonucleotide
  Antisense strand to SEQ ID NO: 600918
aucucugaggauuagcgcu

SEQ ID NO: 600920 - RNA, 19 nt, Artificial Sequence
  Description of Artificial Sequence: Synthetic oligonucleotide
  Sense strand starting at position 3400 of SEQ ID NO: 584939
uaauuaacaguaugaggua

SEQ ID NO: 600921 - RNA, 19 nt, Artificial Sequence
  Description of Artificial Sequence: Synthetic oligonucleotide
  Antisense strand to SEQ ID NO: 600920
uaccucauacuguuaauua

SEQ ID NO: 600922 - RNA, 19 nt, Artificial Sequence
  Description of Artificial Sequence: Synthetic oligonucleotide
  Sense strand starting at position 3412 of SEQ ID NO: 584939
ugagguagugagggucaaa

SEQ ID NO: 600923 - RNA, 19 nt, Artificial Sequence
  Description of Artificial Sequence: Synthetic oligonucleotide
  Antisense strand to SEQ ID NO: 600922
uuugacccucacuaccuca

SEQ ID NO: 600924 - RNA, 19 nt, Artificial Sequence
  Description of Artificial Sequence: Synthetic oligonucleotide
  Sense strand starting at position 3422 of SEQ ID NO: 584939
agggucaaaugcuugagaa

SEQ ID NO: 600925 - RNA, 19 nt, Artificial Sequence
  Description of Artificial Sequence: Synthetic oligonucleotide
  Antisense strand to SEQ ID NO: 600924
uucucaagcauuugacccu

SEQ ID NO: 600926 - RNA, 19 nt, Artificial Sequence
  Description of Artificial Sequence: Synthetic oligonucleotide
  Sense strand starting at position 3423 of SEQ ID NO: 584939
gggucaaaugcuugagaau

SEQ ID NO: 600927 - RNA, 19 nt, Artificial Sequence
  Description of Artificial Sequence: Synthetic oligonucleotide
  Antisense strand to SEQ ID NO: 600926
auucucaagcauuugaccc

SEQ ID NO: 600928 - RNA, 19 nt, Artificial Sequence
  Description of Artificial Sequence: Synthetic oligonucleotide
  Sense strand starting at position 3424 of SEQ ID NO: 584939
ggucaaaugcuugagaauu

SEQ ID NO: 600929 - RNA, 19 nt, Artificial Sequence
  Description of Artificial Sequence: Synthetic oligonucleotide
  Antisense strand to SEQ ID NO: 600928
aauucucaagcauuugacc

SEQ ID NO: 600930 - RNA, 19 nt, Artificial Sequence
  Description of Artificial Sequence: Synthetic oligonucleotide
  Sense strand starting at position 3426 of SEQ ID NO: 584939
ucaaaugcuugagaauuua

SEQ ID NO: 600931 - RNA, 19 nt, Artificial Sequence
  Description of Artificial Sequence: Synthetic oligonucleotide
  Antisense strand to SEQ ID NO: 600930
uaaauucucaagcauuuga

SEQ ID NO: 600932 - RNA, 19 nt, Artificial Sequence
  Description of Artificial Sequence: Synthetic oligonucleotide
  Sense strand starting at position 3485 of SEQ ID NO: 584939
gaagguaugaguugaacga

SEQ ID NO: 600933 - RNA, 19 nt, Artificial Sequence
  Description of Artificial Sequence: Synthetic oligonucleotide
  Antisense strand to SEQ ID NO: 600932
ucguucaacucauaccuuc

SEQ ID NO: 600934 - RNA, 19 nt, Artificial Sequence
  Description of Artificial Sequence: Synthetic oligonucleotide
  Sense strand starting at position 3711 of SEQ ID NO: 584939
gcacauacauagguaguaa

SEQ ID NO: 600935 - RNA, 19 nt, Artificial Sequence
  Description of Artificial Sequence: Synthetic oligonucleotide
  Antisense strand to SEQ ID NO: 600934
uuacuaccuauguaugugc

SEQ ID NO: 600936 - RNA, 19 nt, Artificial Sequence
  Description of Artificial Sequence: Synthetic oligonucleotide
  Sense strand starting at position 3744 of SEQ ID NO: 584939
gcccuuaaguuucuagaga

SEQ ID NO: 600937 - RNA, 19 nt, Artificial Sequence
  Description of Artificial Sequence: Synthetic oligonucleotide
  Antisense strand to SEQ ID NO: 600936
ucucuagaaacuuaagggc

SEQ ID NO: 600938 - RNA, 19 nt, Artificial Sequence
  Description of Artificial Sequence: Synthetic oligonucleotide
  Sense strand starting at position 3760 of SEQ ID NO: 584939
agacuaaauuucuaggucu

SEQ ID NO: 600939 - RNA, 19 nt, Artificial Sequence
  Description of Artificial Sequence: Synthetic oligonucleotide
  Antisense strand to SEQ ID NO: 600938
agaccuagaaauuuagucu

SEQ ID NO: 600940 - RNA, 19 nt, Artificial Sequence
  Description of Artificial Sequence: Synthetic oligonucleotide
  Sense strand starting at position 3768 of SEQ ID NO: 584939
uuucuaggucucuagaauc

SEQ ID NO: 600941 - RNA, 19 nt, Artificial Sequence
  Description of Artificial Sequence: Synthetic oligonucleotide
  Antisense strand to SEQ ID NO: 600940
gauucuagagaccuagaaa

SEQ ID NO: 600942 - RNA, 19 nt, Artificial Sequence
  Description of Artificial Sequence: Synthetic oligonucleotide
  Sense strand starting at position 154 of SEQ ID NO: 584940
cauucuuccgauggaugga

SEQ ID NO: 600943 - RNA, 19 nt, Artificial Sequence
  Description of Artificial Sequence: Synthetic oligonucleotide
  Antisense strand to SEQ ID NO: 600942
uccauccaucggaagaaug

SEQ ID NO: 600944 - RNA, 19 nt, Artificial Sequence
  Description of Artificial Sequence: Synthetic oligonucleotide
  Sense strand starting at position 157 of SEQ ID NO: 584940
ucuuccgauggauggaaau

SEQ ID NO: 600945 - RNA, 19 nt, Artificial Sequence
  Description of Artificial Sequence: Synthetic oligonucleotide
  Antisense strand to SEQ ID NO: 600944
auuuccauccaucggaaga

SEQ ID NO: 600946 - RNA, 19 nt, Artificial Sequence
  Description of Artificial Sequence: Synthetic oligonucleotide
  Sense strand starting at position 273 of SEQ ID NO: 584940
ugagaacaauuucggaauu

SEQ ID NO: 600947 - RNA, 19 nt, Artificial Sequence
  Description of Artificial Sequence: Synthetic oligonucleotide
  Antisense strand to SEQ ID NO: 600946
aauuccgaaauuguucuca

SEQ ID NO: 600948 - RNA, 19 nt, Artificial Sequence
  Description of Artificial Sequence: Synthetic oligonucleotide
  Sense strand starting at position 275 of SEQ ID NO: 584940
agaacaauuucggaauugu

SEQ ID NO: 600949 - RNA, 19 nt, Artificial Sequence
  Description of Artificial Sequence: Synthetic oligonucleotide
  Antisense strand to SEQ ID NO: 600948
acaauuccgaaauuguucu

SEQ ID NO: 600950 - RNA, 19 nt, Artificial Sequence
  Description of Artificial Sequence: Synthetic oligonucleotide
  Sense strand starting at position 294 of SEQ ID NO: 584940
uguguucucugaucccaca

SEQ ID NO: 600951 - RNA, 19 nt, Artificial Sequence
  Description of Artificial Sequence: Synthetic oligonucleotide
  Antisense strand to SEQ ID NO: 600950
ugugggaucagagaacaca

SEQ ID NO: 600952 - RNA, 19 nt, Artificial Sequence
  Description of Artificial Sequence: Synthetic oligonucleotide
  Sense strand starting at position 549 of SEQ ID NO: 584940
caaagagaucaccgcaaug

SEQ ID NO: 600953 - RNA, 19 nt, Artificial Sequence
  Description of Artificial Sequence: Synthetic oligonucleotide
  Antisense strand to SEQ ID NO: 600952
cauugcggugaucucuuug

SEQ ID NO: 600954 - RNA, 19 nt, Artificial Sequence
  Description of Artificial Sequence: Synthetic oligonucleotide
  Sense strand starting at position 577 of SEQ ID NO: 584940
acuguuaaguggccaaaga

SEQ ID NO: 600955 - RNA, 19 nt, Artificial Sequence
  Description of Artificial Sequence: Synthetic oligonucleotide
  Antisense strand to SEQ ID NO: 600954
ucuuuggccacuuaacagu

SEQ ID NO: 600956 - RNA, 19 nt, Artificial Sequence
  Description of Artificial Sequence: Synthetic oligonucleotide
  Sense strand starting at position 630 of SEQ ID NO: 584940
agaagaacgcccugcauuu

SEQ ID NO: 600957 - RNA, 19 nt, Artificial Sequence
  Description of Artificial Sequence: Synthetic oligonucleotide
  Antisense strand to SEQ ID NO: 600956
aaaugcagggcguucuucu

SEQ ID NO: 600958 - RNA, 19 nt, Artificial Sequence
  Description of Artificial Sequence: Synthetic oligonucleotide
  Sense strand starting at position 699 of SEQ ID NO: 584940
cagugagagcuacagagua

SEQ ID NO: 600959 - RNA, 19 nt, Artificial Sequence
  Description of Artificial Sequence: Synthetic oligonucleotide
  Antisense strand to SEQ ID NO: 600958
uacucuguagcucucacug

SEQ ID NO: 600960 - RNA, 19 nt, Artificial Sequence
  Description of Artificial Sequence: Synthetic oligonucleotide
  Sense strand starting at position 785 of SEQ ID NO: 584940
aaggaccagugauaucaaa

SEQ ID NO: 600961 - RNA, 19 nt, Artificial Sequence
  Description of Artificial Sequence: Synthetic oligonucleotide
  Antisense strand to SEQ ID NO: 600960
uuugauaucacugguccuu

SEQ ID NO: 600962 - RNA, 19 nt, Artificial Sequence
  Description of Artificial Sequence: Synthetic oligonucleotide
  Sense strand starting at position 842 of SEQ ID NO: 584940
aucuuagaaucugagaaug

SEQ ID NO: 600963 - RNA, 19 nt, Artificial Sequence
  Description of Artificial Sequence: Synthetic oligonucleotide
  Antisense strand to SEQ ID NO: 600962
cauucucagauucuaagau

SEQ ID NO: 600964 - RNA, 19 nt, Artificial Sequence
  Description of Artificial Sequence: Synthetic oligonucleotide
  Sense strand starting at position 1089 of SEQ ID NO: 584940
gugucuuagccuuuccuuu

SEQ ID NO: 600965 - RNA, 19 nt, Artificial Sequence
  Description of Artificial Sequence: Synthetic oligonucleotide
  Antisense strand to SEQ ID NO: 600964
aaaggaaaggcuaagacac

SEQ ID NO: 600966 - RNA, 19 nt, Artificial Sequence
  Description of Artificial Sequence: Synthetic oligonucleotide
  Sense strand starting at position 1130 of SEQ ID NO: 584940
auguaucaugggcaucaca

SEQ ID NO: 600967 - RNA, 19 nt, Artificial Sequence
  Description of Artificial Sequence: Synthetic oligonucleotide
  Antisense strand to SEQ ID NO: 600966
ugugaugcccaugauacau

SEQ ID NO: 600968 - RNA, 19 nt, Artificial Sequence
  Description of Artificial Sequence: Synthetic oligonucleotide
  Sense strand starting at position 1250 of SEQ ID NO: 584940
acagguggccuccagaauu

SEQ ID NO: 600969 - RNA, 19 nt, Artificial Sequence
  Description of Artificial Sequence: Synthetic oligonucleotide
  Antisense strand to SEQ ID NO: 600968
aauucuggaggccaccugu

SEQ ID NO: 600970 - RNA, 19 nt, Artificial Sequence
  Description of Artificial Sequence: Synthetic oligonucleotide
  Sense strand starting at position 1348 of SEQ ID NO: 584940
ggauugaggucugcggaga

SEQ ID NO: 600971 - RNA, 19 nt, Artificial Sequence
  Description of Artificial Sequence: Synthetic oligonucleotide
  Antisense strand to SEQ ID NO: 600970
ucuccgcagaccucaaucc

SEQ ID NO: 600972 - RNA, 19 nt, Artificial Sequence
  Description of Artificial Sequence: Synthetic oligonucleotide
  Sense strand starting at position 1677 of SEQ ID NO: 584940
ggcuguaggcuacaagaaa

SEQ ID NO: 600973 - RNA, 19 nt, Artificial Sequence
  Description of Artificial Sequence: Synthetic oligonucleotide
  Antisense strand to SEQ ID NO: 600972
uuucuuguagccuacagcc

SEQ ID NO: 600974 - RNA, 19 nt, Artificial Sequence
  Description of Artificial Sequence: Synthetic oligonucleotide
  Sense strand starting at position 2385 of SEQ ID NO: 584940
cgcguuagauuuccaugga

SEQ ID NO: 600975 - RNA, 19 nt, Artificial Sequence
  Description of Artificial Sequence: Synthetic oligonucleotide
  Antisense strand to SEQ ID NO: 600974
uccauggaaaucuaacgcg

SEQ ID NO: 600976 - RNA, 19 nt, Artificial Sequence
  Description of Artificial Sequence: Synthetic oligonucleotide
  Sense strand starting at position 2455 of SEQ ID NO: 584940
gucaguaccguccuguuua

SEQ ID NO: 600977 - RNA, 19 nt, Artificial Sequence
  Description of Artificial Sequence: Synthetic oligonucleotide
  Antisense strand to SEQ ID NO: 600976
uaaacaggacgguacugac

SEQ ID NO: 600978 - RNA, 19 nt, Artificial Sequence
  Description of Artificial Sequence: Synthetic oligonucleotide
  Sense strand starting at position 2486 of SEQ ID NO: 584940
aaaggagagugucuccuau

SEQ ID NO: 600979 - RNA, 19 nt, Artificial Sequence
  Description of Artificial Sequence: Synthetic oligonucleotide
  Antisense strand to SEQ ID NO: 600978
auaggagacacucuccuuu

SEQ ID NO: 600980 - RNA, 19 nt, Artificial Sequence
  Description of Artificial Sequence: Synthetic oligonucleotide
  Sense strand starting at position 2488 of SEQ ID NO: 584940
aggagagugucuccuauua

SEQ ID NO: 600981 - RNA, 19 nt, Artificial Sequence
  Description of Artificial Sequence: Synthetic oligonucleotide
  Antisense strand to SEQ ID NO: 600980
uaauaggagacacucuccu

SEQ ID NO: 600982 - RNA, 19 nt, Artificial Sequence
  Description of Artificial Sequence: Synthetic oligonucleotide
  Sense strand starting at position 2747 of SEQ ID NO: 584940
gcgguuccacaucauuaaa

SEQ ID NO: 600983 - RNA, 19 nt, Artificial Sequence
  Description of Artificial Sequence: Synthetic oligonucleotide
  Antisense strand to SEQ ID NO: 600982
uuuaaugauguggaaccgc

SEQ ID NO: 600984 - RNA, 19 nt, Artificial Sequence
  Description of Artificial Sequence: Synthetic oligonucleotide
  Sense strand starting at position 2812 of SEQ ID NO: 584940
auuagaaucgauuaguguu

SEQ ID NO: 600985 - RNA, 19 nt, Artificial Sequence
  Description of Artificial Sequence: Synthetic oligonucleotide
  Antisense strand to SEQ ID NO: 600984
aacacuaaucgauucuaau

SEQ ID NO: 600986 - RNA, 19 nt, Artificial Sequence
  Description of Artificial Sequence: Synthetic oligonucleotide
  Sense strand starting at position 2828 of SEQ ID NO: 584940
guuagacauacagguuguu

SEQ ID NO: 600987 - RNA, 19 nt, Artificial Sequence
  Description of Artificial Sequence: Synthetic oligonucleotide
  Antisense strand to SEQ ID NO: 600986
aacaaccuguaugucuaac

SEQ ID NO: 600988 - RNA, 19 nt, Artificial Sequence
  Description of Artificial Sequence: Synthetic oligonucleotide
  Sense strand starting at position 2872 of SEQ ID NO: 584940
acaauacugugauugcuau

SEQ ID NO: 600989 - RNA, 19 nt, Artificial Sequence
  Description of Artificial Sequence: Synthetic oligonucleotide
  Antisense strand to SEQ ID NO: 600988
auagcaaucacaguauugu

SEQ ID NO: 600990 - RNA, 19 nt, Artificial Sequence
  Description of Artificial Sequence: Synthetic oligonucleotide
  Sense strand starting at position 2878 of SEQ ID NO: 584940
cugugauugcuaugggaaa

SEQ ID NO: 600991 - RNA, 19 nt, Artificial Sequence
  Description of Artificial Sequence: Synthetic oligonucleotide
  Antisense strand to SEQ ID NO: 600990
uuucccauagcaaucacag

SEQ ID NO: 600992 - RNA, 19 nt, Artificial Sequence
  Description of Artificial Sequence: Synthetic oligonucleotide
  Sense strand starting at position 2880 of SEQ ID NO: 584940
gugauugcuaugggaaacu

SEQ ID NO: 600993 - RNA, 19 nt, Artificial Sequence
  Description of Artificial Sequence: Synthetic oligonucleotide
  Antisense strand to SEQ ID NO: 600992
aguuucccauagcaaucac

SEQ ID NO: 600994 - RNA, 19 nt, Artificial Sequence
  Description of Artificial Sequence: Synthetic oligonucleotide
  Sense strand starting at position 2890 of SEQ ID NO: 584940
ugggaaacuucaguguaga

SEQ ID NO: 600995 - RNA, 19 nt, Artificial Sequence
  Description of Artificial Sequence: Synthetic oligonucleotide
  Antisense strand to SEQ ID NO: 600994
ucuacacugaaguuuccca

SEQ ID NO: 600996 - RNA, 19 nt, Artificial Sequence
  Description of Artificial Sequence: Synthetic oligonucleotide
  Sense strand starting at position 2891 of SEQ ID NO: 584940
gggaaacuucaguguagau

SEQ ID NO: 600997 - RNA, 19 nt, Artificial Sequence
  Description of Artificial Sequence: Synthetic oligonucleotide
  Antisense strand to SEQ ID NO: 600996
aucuacacugaaguuuccc

SEQ ID NO: 600998 - RNA, 19 nt, Artificial Sequence
  Description of Artificial Sequence: Synthetic oligonucleotide
  Sense strand starting at position 2904 of SEQ ID NO: 584940
guagauaaaucuuugcucu

SEQ ID NO: 600999 - RNA, 19 nt, Artificial Sequence
  Description of Artificial Sequence: Synthetic oligonucleotide
  Antisense strand to SEQ ID NO: 600998
agagcaaagauuuaucuac

SEQ ID NO: 601000 - RNA, 19 nt, Artificial Sequence
  Description of Artificial Sequence: Synthetic oligonucleotide
  Sense strand starting at position 2954 of SEQ ID NO: 584940
caaggaaauugugcuaggu

SEQ ID NO: 601001 - RNA, 19 nt, Artificial Sequence
  Description of Artificial Sequence: Synthetic oligonucleotide
  Antisense strand to SEQ ID NO: 601000
accuagcacaauuuccuug

SEQ ID NO: 601002 - RNA, 19 nt, Artificial Sequence
  Description of Artificial Sequence: Synthetic oligonucleotide
  Sense strand starting at position 2958 of SEQ ID NO: 584940
gaaauugugcuaggugaag

SEQ ID NO: 601003 - RNA, 19 nt, Artificial Sequence
  Description of Artificial Sequence: Synthetic oligonucleotide
  Antisense strand to SEQ ID NO: 601002
cuucaccuagcacaauuuc

SEQ ID NO: 601004 - RNA, 19 nt, Artificial Sequence
  Description of Artificial Sequence: Synthetic oligonucleotide
  Sense strand starting at position 3103 of SEQ ID NO: 584940
uuguccauccaagagguua

SEQ ID NO: 601005 - RNA, 19 nt, Artificial Sequence
  Description of Artificial Sequence: Synthetic oligonucleotide
  Antisense strand to SEQ ID NO: 601004
uaaccucuuggauggacaa

SEQ ID NO: 601006 - RNA, 19 nt, Artificial Sequence
  Description of Artificial Sequence: Synthetic oligonucleotide
  Sense strand starting at position 3148 of SEQ ID NO: 584940
guucuaaucugcucuugga

SEQ ID NO: 601007 - RNA, 19 nt, Artificial Sequence
  Description of Artificial Sequence: Synthetic oligonucleotide
  Antisense strand to SEQ ID NO: 601006
uccaagagcagauuagaac

SEQ ID NO: 601008 - RNA, 19 nt, Artificial Sequence
  Description of Artificial Sequence: Synthetic oligonucleotide
  Sense strand starting at position 3152 of SEQ ID NO: 584940
uaaucugcucuuggaagua

SEQ ID NO: 601009 - RNA, 19 nt, Artificial Sequence
  Description of Artificial Sequence: Synthetic oligonucleotide
  Antisense strand to SEQ ID NO: 601008
uacuuccaagagcagauua

SEQ ID NO: 601010 - RNA, 19 nt, Artificial Sequence
  Description of Artificial Sequence: Synthetic oligonucleotide
  Sense strand starting at position 3157 of SEQ ID NO: 584940
ugcucuuggaaguaguuau

SEQ ID NO: 601011 - RNA, 19 nt, Artificial Sequence
  Description of Artificial Sequence: Synthetic oligonucleotide
  Antisense strand to SEQ ID NO: 601010
auaacuacuuccaagagca

SEQ ID NO: 601012 - RNA, 19 nt, Artificial Sequence
  Description of Artificial Sequence: Synthetic oligonucleotide
  Sense strand starting at position 3708 of SEQ ID NO: 584940
guaauuacacugcauuguu

SEQ ID NO: 601013 - RNA, 19 nt, Artificial Sequence
  Description of Artificial Sequence: Synthetic oligonucleotide
  Antisense strand to SEQ ID NO: 601012
aacaaugcaguguaauuac

SEQ ID NO: 601014 - RNA, 19 nt, Artificial Sequence
  Description of Artificial Sequence: Synthetic oligonucleotide
  Sense strand starting at position 3782 of SEQ ID NO: 584940
aggucuuagcaugaucaga

SEQ ID NO: 601015 - RNA, 19 nt, Artificial Sequence
  Description of Artificial Sequence: Synthetic oligonucleotide
  Antisense strand to SEQ ID NO: 601014
ucugaucaugcuaagaccu

SEQ ID NO: 601016 - RNA, 19 nt, Artificial Sequence
  Description of Artificial Sequence: Synthetic oligonucleotide
  Sense strand starting at position 3784 of SEQ ID NO: 584940
gucuuagcaugaucagauu

SEQ ID NO: 601017 - RNA, 19 nt, Artificial Sequence
  Description of Artificial Sequence: Synthetic oligonucleotide
  Antisense strand to SEQ ID NO: 601016
aaucugaucaugcuaagac

SEQ ID NO: 601018 - RNA, 19 nt, Artificial Sequence
  Description of Artificial Sequence: Synthetic oligonucleotide
  Sense strand starting at position 3947 of SEQ ID NO: 584940
ccuaucuaaugagugugaa

SEQ ID NO: 601019 - RNA, 19 nt, Artificial Sequence
  Description of Artificial Sequence: Synthetic oligonucleotide
  Antisense strand to SEQ ID NO: 601018
uucacacucauuagauagg

SEQ ID NO: 601020 - RNA, 19 nt, Artificial Sequence
  Description of Artificial Sequence: Synthetic oligonucleotide
  Sense strand starting at position 3948 of SEQ ID NO: 584940
cuaucuaaugagugugaaa

SEQ ID NO: 601021 - RNA, 19 nt, Artificial Sequence
  Description of Artificial Sequence: Synthetic oligonucleotide
  Antisense strand to SEQ ID NO: 601020
uuucacacucauuagauag

SEQ ID NO: 601022 - RNA, 19 nt, Artificial Sequence
  Description of Artificial Sequence: Synthetic oligonucleotide
  Sense strand starting at position 171 of SEQ ID NO: 584941
caaagagaucaccgcaaug

SEQ ID NO: 601023 - RNA, 19 nt, Artificial Sequence
  Description of Artificial Sequence: Synthetic oligonucleotide
  Antisense strand to SEQ ID NO: 601022
cauugcggugaucucuuug

SEQ ID NO: 601024 - RNA, 19 nt, Artificial Sequence
  Description of Artificial Sequence: Synthetic oligonucleotide
  Sense strand starting at position 199 of SEQ ID NO: 584941
acuguuaaguggccaaaga

SEQ ID NO: 601025 - RNA, 19 nt, Artificial Sequence
  Description of Artificial Sequence: Synthetic oligonucleotide
  Antisense strand to SEQ ID NO: 601024
ucuuuggccacuuaacagu

SEQ ID NO: 601026 - RNA, 19 nt, Artificial Sequence
  Description of Artificial Sequence: Synthetic oligonucleotide
  Sense strand starting at position 252 of SEQ ID NO: 584941
agaagaacgcccugcauuu

SEQ ID NO: 601027 - RNA, 19 nt, Artificial Sequence
  Description of Artificial Sequence: Synthetic oligonucleotide
  Antisense strand to SEQ ID NO: 601026
aaaugcagggcguucuucu

SEQ ID NO: 601028 - RNA, 19 nt, Artificial Sequence
  Description of Artificial Sequence: Synthetic oligonucleotide
  Sense strand starting at position 321 of SEQ ID NO: 584941
cagugagagcuacagagua

SEQ ID NO: 601029 - RNA, 19 nt, Artificial Sequence
  Description of Artificial Sequence: Synthetic oligonucleotide
  Antisense strand to SEQ ID NO: 601028
uacucuguagcucucacug

SEQ ID NO: 601030 - RNA, 19 nt, Artificial Sequence
  Description of Artificial Sequence: Synthetic oligonucleotide
  Sense strand starting at position 711 of SEQ ID NO: 584941
gugucuuagccuuuccuuu

SEQ ID NO: 601031 - RNA, 19 nt, Artificial Sequence
  Description of Artificial Sequence: Synthetic oligonucleotide
  Antisense strand to SEQ ID NO: 601030
aaaggaaaggcuaagacac

SEQ ID NO: 601032 - RNA, 19 nt, Artificial Sequence
  Description of Artificial Sequence: Synthetic oligonucleotide
  Sense strand starting at position 752 of SEQ ID NO: 584941
auguaucaugggcaucaca

SEQ ID NO: 601033 - RNA, 19 nt, Artificial Sequence
  Description of Artificial Sequence: Synthetic oligonucleotide
  Antisense strand to SEQ ID NO: 601032
ugugaugcccaugauacau

SEQ ID NO: 601034 - RNA, 19 nt, Artificial Sequence
  Description of Artificial Sequence: Synthetic oligonucleotide
  Sense strand starting at position 872 of SEQ ID NO: 584941
acagguggccuccagaauu

SEQ ID NO: 601035 - RNA, 19 nt, Artificial Sequence
  Description of Artificial Sequence: Synthetic oligonucleotide
  Antisense strand to SEQ ID NO: 601034
aauucuggaggccaccugu

SEQ ID NO: 601036 - RNA, 19 nt, Artificial Sequence
  Description of Artificial Sequence: Synthetic oligonucleotide
  Sense strand starting at position 970 of SEQ ID NO: 584941
ggauugaggucugcggaga

SEQ ID NO: 601037 - RNA, 19 nt, Artificial Sequence
  Description of Artificial Sequence: Synthetic oligonucleotide
  Antisense strand to SEQ ID NO: 601036
ucuccgcagaccucaaucc

SEQ ID NO: 601038 - RNA, 19 nt, Artificial Sequence
  Description of Artificial Sequence: Synthetic oligonucleotide
  Sense strand starting at position 1299 of SEQ ID NO: 584941
ggcuguaggcuacaagaaa

SEQ ID NO: 601039 - RNA, 19 nt, Artificial Sequence
  Description of Artificial Sequence: Synthetic oligonucleotide
  Antisense strand to SEQ ID NO: 601038
uuucuuguagccuacagcc

SEQ ID NO: 601040 - RNA, 19 nt, Artificial Sequence
  Description of Artificial Sequence: Synthetic oligonucleotide
  Sense strand starting at position 2007 of SEQ ID NO: 584941
cgcguuagauuuccaugga

SEQ ID NO: 601041 - RNA, 19 nt, Artificial Sequence
  Description of Artificial Sequence: Synthetic oligonucleotide
  Antisense strand to SEQ ID NO: 601040
uccauggaaaucuaacgcg

SEQ ID NO: 601042 - RNA, 19 nt, Artificial Sequence
  Description of Artificial Sequence: Synthetic oligonucleotide
  Sense strand starting at position 2077 of SEQ ID NO: 584941
gucaguaccguccuguuua

SEQ ID NO: 601043 - RNA, 19 nt, Artificial Sequence
  Description of Artificial Sequence: Synthetic oligonucleotide
  Antisense strand to SEQ ID NO: 601042
uaaacaggacgguacugac

SEQ ID NO: 601044 - RNA, 19 nt, Artificial Sequence
  Description of Artificial Sequence: Synthetic oligonucleotide
  Sense strand starting at position 2108 of SEQ ID NO: 584941
aaaggagagugucuccuau

SEQ ID NO: 601045 - RNA, 19 nt, Artificial Sequence
  Description of Artificial Sequence: Synthetic oligonucleotide
  Antisense strand to SEQ ID NO: 601044
auaggagacacucuccuuu

SEQ ID NO: 601046 - RNA, 19 nt, Artificial Sequence
  Description of Artificial Sequence: Synthetic oligonucleotide
  Sense strand starting at position 2110 of SEQ ID NO: 584941
aggagagugucuccuauua

SEQ ID NO: 601047 - RNA, 19 nt, Artificial Sequence
  Description of Artificial Sequence: Synthetic oligonucleotide
  Antisense strand to SEQ ID NO: 601046
uaauaggagacacucuccu

SEQ ID NO: 601048 - RNA, 19 nt, Artificial Sequence
  Description of Artificial Sequence: Synthetic oligonucleotide
  Sense strand starting at position 2369 of SEQ ID NO: 584941
gcgguuccacaucauuaaa

SEQ ID NO: 601049 - RNA, 19 nt, Artificial Sequence
  Description of Artificial Sequence: Synthetic oligonucleotide
  Antisense strand to SEQ ID NO: 601048
uuuaaugauguggaaccgc

SEQ ID NO: 601050 - RNA, 19 nt, Artificial Sequence
  Description of Artificial Sequence: Synthetic oligonucleotide
  Sense strand starting at position 2434 of SEQ ID NO: 584941
auuagaaucgauuaguguu

SEQ ID NO: 601051 - RNA, 19 nt, Artificial Sequence
  Description of Artificial Sequence: Synthetic oligonucleotide
  Antisense strand to SEQ ID NO: 601050
aacacuaaucgauucuaau

SEQ ID NO: 601052 - RNA, 19 nt, Artificial Sequence
  Description of Artificial Sequence: Synthetic oligonucleotide
  Sense strand starting at position 2450 of SEQ ID NO: 584941
guuagacauacagguuguu

SEQ ID NO: 601053 - RNA, 19 nt, Artificial Sequence
  Description of Artificial Sequence: Synthetic oligonucleotide
  Antisense strand to SEQ ID NO: 601052
aacaaccuguaugucuaac

SEQ ID NO: 601054 - RNA, 19 nt, Artificial Sequence
  Description of Artificial Sequence: Synthetic oligonucleotide
  Sense strand starting at position 2494 of SEQ ID NO: 584941
acaauacugugauugcuau

SEQ ID NO: 601055 - RNA, 19 nt, Artificial Sequence
  Description of Artificial Sequence: Synthetic oligonucleotide
  Antisense strand to SEQ ID NO: 601054
auagcaaucacaguauugu

SEQ ID NO: 601056 - RNA, 19 nt, Artificial Sequence
  Description of Artificial Sequence: Synthetic oligonucleotide
  Sense strand starting at position 2500 of SEQ ID NO: 584941
cugugauugcuaugggaaa

SEQ ID NO: 601057 - RNA, 19 nt, Artificial Sequence
  Description of Artificial Sequence: Synthetic oligonucleotide
  Antisense strand to SEQ ID NO: 601056
uuucccauagcaaucacag

SEQ ID NO: 601058 - RNA, 19 nt, Artificial Sequence
  Description of Artificial Sequence: Synthetic oligonucleotide
  Sense strand starting at position 2502 of SEQ ID NO: 584941
gugauugcuaugggaaacu

SEQ ID NO: 601059 - RNA, 19 nt, Artificial Sequence
  Description of Artificial Sequence: Synthetic oligonucleotide
  Antisense strand to SEQ ID NO: 601058
aguuucccauagcaaucac

SEQ ID NO: 601060 - RNA, 19 nt, Artificial Sequence
  Description of Artificial Sequence: Synthetic oligonucleotide
  Sense strand starting at position 2512 of SEQ ID NO: 584941
ugggaaacuucaguguaga

SEQ ID NO: 601061 - RNA, 19 nt, Artificial Sequence
  Description of Artificial Sequence: Synthetic oligonucleotide
  Antisense strand to SEQ ID NO: 601060
ucuacacugaaguuuccca

SEQ ID NO: 601062 - RNA, 19 nt, Artificial Sequence
  Description of Artificial Sequence: Synthetic oligonucleotide
  Sense strand starting at position 2513 of SEQ ID NO: 584941
gggaaacuucaguguagau

SEQ ID NO: 601063 - RNA, 19 nt, Artificial Sequence
  Description of Artificial Sequence: Synthetic oligonucleotide
  Antisense strand to SEQ ID NO: 601062
aucuacacugaaguuuccc

SEQ ID NO: 601064 - RNA, 19 nt, Artificial Sequence
  Description of Artificial Sequence: Synthetic oligonucleotide
  Sense strand starting at position 2526 of SEQ ID NO: 584941
guagauaaaucuuugcucu

SEQ ID NO: 601065 - RNA, 19 nt, Artificial Sequence
  Description of Artificial Sequence: Synthetic oligonucleotide
  Antisense strand to SEQ ID NO: 601064
agagcaaagauuuaucuac

SEQ ID NO: 601066 - RNA, 19 nt, Artificial Sequence
  Description of Artificial Sequence: Synthetic oligonucleotide
  Sense strand starting at position 2576 of SEQ ID NO: 584941
caaggaaauugugcuaggu

SEQ ID NO: 601067 - RNA, 19 nt, Artificial Sequence
  Description of Artificial Sequence: Synthetic oligonucleotide
  Antisense strand to SEQ ID NO: 601066
accuagcacaauuuccuug

SEQ ID NO: 601068 - RNA, 19 nt, Artificial Sequence
  Description of Artificial Sequence: Synthetic oligonucleotide
  Sense strand starting at position 2580 of SEQ ID NO: 584941
gaaauugugcuaggugaag

SEQ ID NO: 601069 - RNA, 19 nt, Artificial Sequence
  Description of Artificial Sequence: Synthetic oligonucleotide
  Antisense strand to SEQ ID NO: 601068
cuucaccuagcacaauuuc

SEQ ID NO: 601070 - RNA, 19 nt, Artificial Sequence
  Description of Artificial Sequence: Synthetic oligonucleotide
  Sense strand starting at position 2725 of SEQ ID NO: 584941
uuguccauccaagagguua

SEQ ID NO: 601071 - RNA, 19 nt, Artificial Sequence
  Description of Artificial Sequence: Synthetic oligonucleotide
  Antisense strand to SEQ ID NO: 601070
uaaccucuuggauggacaa

SEQ ID NO: 601072 - RNA, 19 nt, Artificial Sequence
  Description of Artificial Sequence: Synthetic oligonucleotide
  Sense strand starting at position 2770 of SEQ ID NO: 584941
guucuaaucugcucuugga

SEQ ID NO: 601073 - RNA, 19 nt, Artificial Sequence
  Description of Artificial Sequence: Synthetic oligonucleotide
  Antisense strand to SEQ ID NO: 601072
uccaagagcagauuagaac

SEQ ID NO: 601074 - RNA, 19 nt, Artificial Sequence
  Description of Artificial Sequence: Synthetic oligonucleotide
  Sense strand starting at position 2774 of SEQ ID NO: 584941
uaaucugcucuuggaagua

SEQ ID NO: 601075 - RNA, 19 nt, Artificial Sequence
  Description of Artificial Sequence: Synthetic oligonucleotide
  Antisense strand to SEQ ID NO: 601074
uacuuccaagagcagauua

SEQ ID NO: 601076 - RNA, 19 nt, Artificial Sequence
  Description of Artificial Sequence: Synthetic oligonucleotide
  Sense strand starting at position 2779 of SEQ ID NO: 584941
ugcucuuggaaguaguuau

SEQ ID NO: 601077 - RNA, 19 nt, Artificial Sequence
  Description of Artificial Sequence: Synthetic oligonucleotide
  Antisense strand to SEQ ID NO: 601076
auaacuacuuccaagagca

SEQ ID NO: 601078 - RNA, 19 nt, Artificial Sequence
  Description of Artificial Sequence: Synthetic oligonucleotide
  Sense strand starting at position 3330 of SEQ ID NO: 584941
guaauuacacugcauuguu

SEQ ID NO: 601079 - RNA, 19 nt, Artificial Sequence
  Description of Artificial Sequence: Synthetic oligonucleotide
  Antisense strand to SEQ ID NO: 601078
aacaaugcaguguaauuac

SEQ ID NO: 601080 - RNA, 19 nt, Artificial Sequence
  Description of Artificial Sequence: Synthetic oligonucleotide
  Sense strand starting at position 3404 of SEQ ID NO: 584941
aggucuuagcaugaucaga

SEQ ID NO: 601081 - RNA, 19 nt, Artificial Sequence
  Description of Artificial Sequence: Synthetic oligonucleotide
  Antisense strand to SEQ ID NO: 601080
ucugaucaugcuaagaccu

SEQ ID NO: 601082 - RNA, 19 nt, Artificial Sequence
  Description of Artificial Sequence: Synthetic oligonucleotide
  Sense strand starting at position 3406 of SEQ ID NO: 584941
gucuuagcaugaucagauu

SEQ ID NO: 601083 - RNA, 19 nt, Artificial Sequence
  Description of Artificial Sequence: Synthetic oligonucleotide
  Antisense strand to SEQ ID NO: 601082
aaucugaucaugcuaagac

SEQ ID NO: 601084 - RNA, 19 nt, Artificial Sequence
  Description of Artificial Sequence: Synthetic oligonucleotide
  Sense strand starting at position 3569 of SEQ ID NO: 584941
ccuaucuaaugagugugaa

SEQ ID NO: 601085 - RNA, 19 nt, Artificial Sequence
  Description of Artificial Sequence: Synthetic oligonucleotide
  Antisense strand to SEQ ID NO: 601084
uucacacucauuagauagg

SEQ ID NO: 601086 - RNA, 19 nt, Artificial Sequence
  Description of Artificial Sequence: Synthetic oligonucleotide
  Sense strand starting at position 3570 of SEQ ID NO: 584941
cuaucuaaugagugugaaa

SEQ ID NO: 601087 - RNA, 19 nt, Artificial Sequence
  Description of Artificial Sequence: Synthetic oligonucleotide
  Antisense strand to SEQ ID NO: 601086
uuucacacucauuagauag

SEQ ID NO: 601088 - RNA, 19 nt, Artificial Sequence
  Description of Artificial Sequence: Synthetic oligonucleotide
  Sense strand starting at position 3636 of SEQ ID NO: 584941
ucaagaacauuggauauuu

SEQ ID NO: 601089 - RNA, 19 nt, Artificial Sequence
  Description of Artificial Sequence: Synthetic oligonucleotide
  Antisense strand to SEQ ID NO: 601088
aaauauccaauguucuuga

SEQ ID NO: 601090 - RNA, 19 nt, Artificial Sequence
  Description of Artificial Sequence: Synthetic oligonucleotide
  Sense strand starting at position 3651 of SEQ ID NO: 584941
auuucugagcauugucauu

SEQ ID NO: 601091 - RNA, 19 nt, Artificial Sequence
  Description of Artificial Sequence: Synthetic oligonucleotide
  Antisense strand to SEQ ID NO: 601090
aaugacaaugcucagaaau

SEQ ID NO: 601092 - RNA, 19 nt, Artificial Sequence
  Description of Artificial Sequence: Synthetic oligonucleotide
  Sense strand starting at position 3685 of SEQ ID NO: 584941
uuuccaugagcgcuguuua

SEQ ID NO: 601093 - RNA, 19 nt, Artificial Sequence
  Description of Artificial Sequence: Synthetic oligonucleotide
  Antisense strand to SEQ ID NO: 601092
uaaacagcgcucauggaaa

SEQ ID NO: 601094 - RNA, 19 nt, Artificial Sequence
  Description of Artificial Sequence: Synthetic oligonucleotide
  Sense strand starting at position 3719 of SEQ ID NO: 584941
auccuuucuugguuauauc

SEQ ID NO: 601095 - RNA, 19 nt, Artificial Sequence
  Description of Artificial Sequence: Synthetic oligonucleotide
  Antisense strand to SEQ ID NO: 601094
gauauaaccaagaaaggau

SEQ ID NO: 601096 - RNA, 19 nt, Artificial Sequence
  Description of Artificial Sequence: Synthetic oligonucleotide
  Sense strand starting at position 3728 of SEQ ID NO: 584941
ugguuauauccaugccaaa

SEQ ID NO: 601097 - RNA, 19 nt, Artificial Sequence
  Description of Artificial Sequence: Synthetic oligonucleotide
  Antisense strand to SEQ ID NO: 601096
uuuggcauggauauaacca

SEQ ID NO: 601098 - RNA, 19 nt, Artificial Sequence
  Description of Artificial Sequence: Synthetic oligonucleotide
  Sense strand starting at position 3855 of SEQ ID NO: 584941
ugguuuaugauuugugcuu

SEQ ID NO: 601099 - RNA, 19 nt, Artificial Sequence
  Description of Artificial Sequence: Synthetic oligonucleotide
  Antisense strand to SEQ ID NO: 601098
aagcacaaaucauaaacca

SEQ ID NO: 601100 - RNA, 19 nt, Artificial Sequence
  Description of Artificial Sequence: Synthetic oligonucleotide
  Sense strand starting at position 3971 of SEQ ID NO: 584941
guuggucuuuaauccauuu

SEQ ID NO: 601101 - RNA, 19 nt, Artificial Sequence
  Description of Artificial Sequence: Synthetic oligonucleotide
  Antisense strand to SEQ ID NO: 601100
aaauggauuaaagaccaac

SEQ ID NO: 601102 - RNA, 19 nt, Artificial Sequence
  Description of Artificial Sequence: Synthetic oligonucleotide
  Sense strand starting at position 56 of SEQ ID NO: 584942
guacaauuacugugggaga

SEQ ID NO: 601103 - RNA, 19 nt, Artificial Sequence
  Description of Artificial Sequence: Synthetic oligonucleotide
  Antisense strand to SEQ ID NO: 601102
ucucccacaguaauuguac

SEQ ID NO: 601104 - RNA, 19 nt, Artificial Sequence
  Description of Artificial Sequence: Synthetic oligonucleotide
  Sense strand starting at position 58 of SEQ ID NO: 584942
acaauuacugugggagauu

SEQ ID NO: 601105 - RNA, 19 nt, Artificial Sequence
  Description of Artificial Sequence: Synthetic oligonucleotide
  Antisense strand to SEQ ID NO: 601104
aaucucccacaguaauugu

SEQ ID NO: 601106 - RNA, 19 nt, Artificial Sequence
  Description of Artificial Sequence: Synthetic oligonucleotide
  Sense strand starting at position 59 of SEQ ID NO: 584942
caauuacugugggagauuu

SEQ ID NO: 601107 - RNA, 19 nt, Artificial Sequence
  Description of Artificial Sequence: Synthetic oligonucleotide
  Antisense strand to SEQ ID NO: 601106
aaaucucccacaguaauug

SEQ ID NO: 601108 - RNA, 19 nt, Artificial Sequence
  Description of Artificial Sequence: Synthetic oligonucleotide
  Sense strand starting at position 137 of SEQ ID NO: 584942
gcaagcauuuaauuagugu

SEQ ID NO: 601109 - RNA, 19 nt, Artificial Sequence
  Description of Artificial Sequence: Synthetic oligonucleotide
  Antisense strand to SEQ ID NO: 601108
acacuaauuaaaugcuugc

SEQ ID NO: 601110 - RNA, 19 nt, Artificial Sequence
  Description of Artificial Sequence: Synthetic oligonucleotide
  Sense strand starting at position 407 of SEQ ID NO: 584942
guugaagguaugggagaau

SEQ ID NO: 601111 - RNA, 19 nt, Artificial Sequence
  Description of Artificial Sequence: Synthetic oligonucleotide
  Antisense strand to SEQ ID NO: 601110
auucucccauaccuucaac

SEQ ID NO: 601112 - RNA, 19 nt, Artificial Sequence
  Description of Artificial Sequence: Synthetic oligonucleotide
  Sense strand starting at position 422 of SEQ ID NO: 584942
gaauauguggaaugcaaag

SEQ ID NO: 601113 - RNA, 19 nt, Artificial Sequence
  Description of Artificial Sequence: Synthetic oligonucleotide
  Antisense strand to SEQ ID NO: 601112
cuuugcauuccacauauuc

SEQ ID NO: 601114 - RNA, 19 nt, Artificial Sequence
  Description of Artificial Sequence: Synthetic oligonucleotide
  Sense strand starting at position 450 of SEQ ID NO: 584942
agcagaguccugggaaaca

SEQ ID NO: 601115 - RNA, 19 nt, Artificial Sequence
  Description of Artificial Sequence: Synthetic oligonucleotide
  Antisense strand to SEQ ID NO: 601114
uguuucccaggacucugcu

SEQ ID NO: 601116 - RNA, 19 nt, Artificial Sequence
  Description of Artificial Sequence: Synthetic oligonucleotide
  Sense strand starting at position 562 of SEQ ID NO: 584942
acuaaugaacagugucauu

SEQ ID NO: 601117 - RNA, 19 nt, Artificial Sequence
  Description of Artificial Sequence: Synthetic oligonucleotide
  Antisense strand to SEQ ID NO: 601116
aaugacacuguucauuagu

SEQ ID NO: 601118 - RNA, 19 nt, Artificial Sequence
  Description of Artificial Sequence: Synthetic oligonucleotide
  Sense strand starting at position 565 of SEQ ID NO: 584942
aaugaacagugucauuuga

SEQ ID NO: 601119 - RNA, 19 nt, Artificial Sequence
  Description of Artificial Sequence: Synthetic oligonucleotide
  Antisense strand to SEQ ID NO: 601118
ucaaaugacacuguucauu

SEQ ID NO: 601120 - RNA, 19 nt, Artificial Sequence
  Description of Artificial Sequence: Synthetic oligonucleotide
  Sense strand starting at position 589 of SEQ ID NO: 584942
acauuuaagucagauggcu

SEQ ID NO: 601121 - RNA, 19 nt, Artificial Sequence
  Description of Artificial Sequence: Synthetic oligonucleotide
  Antisense strand to SEQ ID NO: 601120
agccaucugacuuaaaugu

SEQ ID NO: 601122 - RNA, 19 nt, Artificial Sequence
  Description of Artificial Sequence: Synthetic oligonucleotide
  Sense strand starting at position 595 of SEQ ID NO: 584942
aagucagauggcugaacuu

SEQ ID NO: 601123 - RNA, 19 nt, Artificial Sequence
  Description of Artificial Sequence: Synthetic oligonucleotide
  Antisense strand to SEQ ID NO: 601122
aaguucagccaucugacuu

SEQ ID NO: 601124 - RNA, 19 nt, Artificial Sequence
  Description of Artificial Sequence: Synthetic oligonucleotide
  Sense strand starting at position 645 of SEQ ID NO: 584942
gacaguaguuucccaagag

SEQ ID NO: 601125 - RNA, 19 nt, Artificial Sequence
  Description of Artificial Sequence: Synthetic oligonucleotide
  Antisense strand to SEQ ID NO: 601124
cucuugggaaacuacuguc

SEQ ID NO: 601126 - RNA, 19 nt, Artificial Sequence
  Description of Artificial Sequence: Synthetic oligonucleotide
  Sense strand starting at position 677 of SEQ ID NO: 584942
ugcauuggguugaggagaa

SEQ ID NO: 601127 - RNA, 19 nt, Artificial Sequence
  Description of Artificial Sequence: Synthetic oligonucleotide
  Antisense strand to SEQ ID NO: 601126
uucuccucaacccaaugca

SEQ ID NO: 601128 - RNA, 19 nt, Artificial Sequence
  Description of Artificial Sequence: Synthetic oligonucleotide
  Sense strand starting at position 808 of SEQ ID NO: 584942
ggaggauucuaagcauucu

SEQ ID NO: 601129 - RNA, 19 nt, Artificial Sequence
  Description of Artificial Sequence: Synthetic oligonucleotide
  Antisense strand to SEQ ID NO: 601128
agaaugcuuagaauccucc

SEQ ID NO: 601130 - RNA, 19 nt, Artificial Sequence
  Description of Artificial Sequence: Synthetic oligonucleotide
  Sense strand starting at position 1102 of SEQ ID NO: 584942
ugucaccucugccuggaaa

SEQ ID NO: 601131 - RNA, 19 nt, Artificial Sequence
  Description of Artificial Sequence: Synthetic oligonucleotide
  Antisense strand to SEQ ID NO: 601130
uuuccaggcagaggugaca

SEQ ID NO: 601132 - RNA, 19 nt, Artificial Sequence
  Description of Artificial Sequence: Synthetic oligonucleotide
  Sense strand starting at position 1115 of SEQ ID NO: 584942
uggaaacucuugccuuauu

SEQ ID NO: 601133 - RNA, 19 nt, Artificial Sequence
  Description of Artificial Sequence: Synthetic oligonucleotide
  Antisense strand to SEQ ID NO: 601132
aauaaggcaagaguuucca

SEQ ID NO: 601134 - RNA, 19 nt, Artificial Sequence
  Description of Artificial Sequence: Synthetic oligonucleotide
  Sense strand starting at position 1116 of SEQ ID NO: 584942
ggaaacucuugccuuauua

SEQ ID NO: 601135 - RNA, 19 nt, Artificial Sequence
  Description of Artificial Sequence: Synthetic oligonucleotide
  Antisense strand to SEQ ID NO: 601134
uaauaaggcaagaguuucc

SEQ ID NO: 601136 - RNA, 19 nt, Artificial Sequence
  Description of Artificial Sequence: Synthetic oligonucleotide
  Sense strand starting at position 1138 of SEQ ID NO: 584942
agcuuccuccauugagauc

SEQ ID NO: 601137 - RNA, 19 nt, Artificial Sequence
  Description of Artificial Sequence: Synthetic oligonucleotide
  Antisense strand to SEQ ID NO: 601136
gaucucaauggaggaagcu

SEQ ID NO: 601138 - RNA, 19 nt, Artificial Sequence
  Description of Artificial Sequence: Synthetic oligonucleotide
  Sense strand starting at position 1247 of SEQ ID NO: 584942
ugugcuauaugcuuuauuu

SEQ ID NO: 601139 - RNA, 19 nt, Artificial Sequence
  Description of Artificial Sequence: Synthetic oligonucleotide
  Antisense strand to SEQ ID NO: 601138
aaauaaagcauauagcaca

SEQ ID NO: 601140 - RNA, 19 nt, Artificial Sequence
  Description of Artificial Sequence: Synthetic oligonucleotide
  Sense strand starting at position 1249 of SEQ ID NO: 584942
ugcuauaugcuuuauuugu

SEQ ID NO: 601141 - RNA, 19 nt, Artificial Sequence
  Description of Artificial Sequence: Synthetic oligonucleotide
  Antisense strand to SEQ ID NO: 601140
acaaauaaagcauauagca

SEQ ID NO: 601142 - RNA, 19 nt, Artificial Sequence
  Description of Artificial Sequence: Synthetic oligonucleotide
  Sense strand starting at position 1360 of SEQ ID NO: 584942
gcauaacuuguccaaguuc

SEQ ID NO: 601143 - RNA, 19 nt, Artificial Sequence
  Description of Artificial Sequence: Synthetic oligonucleotide
  Antisense strand to SEQ ID NO: 601142
gaacuuggacaaguuaugc

SEQ ID NO: 601144 - RNA, 19 nt, Artificial Sequence
  Description of Artificial Sequence: Synthetic oligonucleotide
  Sense strand starting at position 1448 of SEQ ID NO: 584942
acaauacucuaguuuggga

SEQ ID NO: 601145 - RNA, 19 nt, Artificial Sequence
  Description of Artificial Sequence: Synthetic oligonucleotide
  Antisense strand to SEQ ID NO: 601144
ucccaaacuagaguauugu

SEQ ID NO: 601146 - RNA, 19 nt, Artificial Sequence
  Description of Artificial Sequence: Synthetic oligonucleotide
  Sense strand starting at position 1516 of SEQ ID NO: 584942
aggcuaugucccuaaucca

SEQ ID NO: 601147 - RNA, 19 nt, Artificial Sequence
  Description of Artificial Sequence: Synthetic oligonucleotide
  Antisense strand to SEQ ID NO: 601146
uggauuagggacauagccu

SEQ ID NO: 601148 - RNA, 19 nt, Artificial Sequence
  Description of Artificial Sequence: Synthetic oligonucleotide
  Sense strand starting at position 1672 of SEQ ID NO: 584942
guuagcaacuuaucucuga

SEQ ID NO: 601149 - RNA, 19 nt, Artificial Sequence
  Description of Artificial Sequence: Synthetic oligonucleotide
  Antisense strand to SEQ ID NO: 601148
ucagagauaaguugcuaac

SEQ ID NO: 601150 - RNA, 19 nt, Artificial Sequence
  Description of Artificial Sequence: Synthetic oligonucleotide
  Sense strand starting at position 1676 of SEQ ID NO: 584942
gcaacuuaucucugagcac

SEQ ID NO: 601151 - RNA, 19 nt, Artificial Sequence
  Description of Artificial Sequence: Synthetic oligonucleotide
  Antisense strand to SEQ ID NO: 601150
gugcucagagauaaguugc

SEQ ID NO: 601152 - RNA, 19 nt, Artificial Sequence
  Description of Artificial Sequence: Synthetic oligonucleotide
  Sense strand starting at position 1679 of SEQ ID NO: 584942
acuuaucucugagcacuga

SEQ ID NO: 601153 - RNA, 19 nt, Artificial Sequence
  Description of Artificial Sequence: Synthetic oligonucleotide
  Antisense strand to SEQ ID NO: 601152
ucagugcucagagauaagu

SEQ ID NO: 601154 - RNA, 19 nt, Artificial Sequence
  Description of Artificial Sequence: Synthetic oligonucleotide
  Sense strand starting at position 1683 of SEQ ID NO: 584942
aucucugagcacugagaaa

SEQ ID NO: 601155 - RNA, 19 nt, Artificial Sequence
  Description of Artificial Sequence: Synthetic oligonucleotide
  Antisense strand to SEQ ID NO: 601154
uuucucagugcucagagau

SEQ ID NO: 601156 - RNA, 19 nt, Artificial Sequence
  Description of Artificial Sequence: Synthetic oligonucleotide
  Sense strand starting at position 1702 of SEQ ID NO: 584942
gagguaacccgguaccuaa

SEQ ID NO: 601157 - RNA, 19 nt, Artificial Sequence
  Description of Artificial Sequence: Synthetic oligonucleotide
  Antisense strand to SEQ ID NO: 601156
uuagguaccggguuaccuc

SEQ ID NO: 601158 - RNA, 19 nt, Artificial Sequence
  Description of Artificial Sequence: Synthetic oligonucleotide
  Sense strand starting at position 1984 of SEQ ID NO: 584942
aacaaaucuucugcggaga

SEQ ID NO: 601159 - RNA, 19 nt, Artificial Sequence
  Description of Artificial Sequence: Synthetic oligonucleotide
  Antisense strand to SEQ ID NO: 601158
ucuccgcagaagauuuguu

SEQ ID NO: 601160 - RNA, 19 nt, Artificial Sequence
  Description of Artificial Sequence: Synthetic oligonucleotide
  Sense strand starting at position 2029 of SEQ ID NO: 584942
cucccagguccugacagau

SEQ ID NO: 601161 - RNA, 19 nt, Artificial Sequence
  Description of Artificial Sequence: Synthetic oligonucleotide
  Antisense strand to SEQ ID NO: 601160
aucugucaggaccugggag

SEQ ID NO: 601162 - RNA, 19 nt, Artificial Sequence
  Description of Artificial Sequence: Synthetic oligonucleotide
  Sense strand starting at position 2174 of SEQ ID NO: 584942
aagggagaauuauaauagu

SEQ ID NO: 601163 - RNA, 19 nt, Artificial Sequence
  Description of Artificial Sequence: Synthetic oligonucleotide
  Antisense strand to SEQ ID NO: 601162
acuauuauaauucucccuu

SEQ ID NO: 601164 - RNA, 19 nt, Artificial Sequence
  Description of Artificial Sequence: Synthetic oligonucleotide
  Sense strand starting at position 2305 of SEQ ID NO: 584942
ugggaaguguaguuugcaa

SEQ ID NO: 601165 - RNA, 19 nt, Artificial Sequence
  Description of Artificial Sequence: Synthetic oligonucleotide
  Antisense strand to SEQ ID NO: 601164
uugcaaacuacacuuccca

SEQ ID NO: 601166 - RNA, 19 nt, Artificial Sequence
  Description of Artificial Sequence: Synthetic oligonucleotide
  Sense strand starting at position 3434 of SEQ ID NO: 584942
ccgcgagucggugucugaa

SEQ ID NO: 601167 - RNA, 19 nt, Artificial Sequence
  Description of Artificial Sequence: Synthetic oligonucleotide
  Antisense strand to SEQ ID NO: 601166
uucagacaccgacucgcgg

SEQ ID NO: 601168 - RNA, 19 nt, Artificial Sequence
  Description of Artificial Sequence: Synthetic oligonucleotide
  Sense strand starting at position 3435 of SEQ ID NO: 584942
cgcgagucggugucugaaa

SEQ ID NO: 601169 - RNA, 19 nt, Artificial Sequence
  Description of Artificial Sequence: Synthetic oligonucleotide
  Antisense strand to SEQ ID NO: 601168
uuucagacaccgacucgcg

SEQ ID NO: 601170 - RNA, 19 nt, Artificial Sequence
  Description of Artificial Sequence: Synthetic oligonucleotide
  Sense strand starting at position 3604 of SEQ ID NO: 584942
uugugccacccagauaauu

SEQ ID NO: 601171 - RNA, 19 nt, Artificial Sequence
  Description of Artificial Sequence: Synthetic oligonucleotide
  Antisense strand to SEQ ID NO: 601170
aauuaucuggguggcacaa

SEQ ID NO: 601172 - RNA, 19 nt, Artificial Sequence
  Description of Artificial Sequence: Synthetic oligonucleotide
  Sense strand starting at position 3716 of SEQ ID NO: 584942
ugcacuugcggaugaugaa

SEQ ID NO: 601173 - RNA, 19 nt, Artificial Sequence
  Description of Artificial Sequence: Synthetic oligonucleotide
  Antisense strand to SEQ ID NO: 601172
uucaucauccgcaagugca

SEQ ID NO: 601174 - RNA, 19 nt, Artificial Sequence
  Description of Artificial Sequence: Synthetic oligonucleotide
  Sense strand starting at position 3952 of SEQ ID NO: 584942
ugauguaauugacuuauug

SEQ ID NO: 601175 - RNA, 19 nt, Artificial Sequence
  Description of Artificial Sequence: Synthetic oligonucleotide
  Antisense strand to SEQ ID NO: 601174
caauaagucaauuacauca

SEQ ID NO: 601176 - RNA, 19 nt, Artificial Sequence
  Description of Artificial Sequence: Synthetic oligonucleotide
  Sense strand starting at position 3956 of SEQ ID NO: 584942
guaauugacuuauugguua

SEQ ID NO: 601177 - RNA, 19 nt, Artificial Sequence
  Description of Artificial Sequence: Synthetic oligonucleotide
  Antisense strand to SEQ ID NO: 601176
uaaccaauaagucaauuac

SEQ ID NO: 601178 - RNA, 19 nt, Artificial Sequence
  Description of Artificial Sequence: Synthetic oligonucleotide
  Sense strand starting at position 3980 of SEQ ID NO: 584942
uccgucuaauguucuuaaa

SEQ ID NO: 601179 - RNA, 19 nt, Artificial Sequence
  Description of Artificial Sequence: Synthetic oligonucleotide
  Antisense strand to SEQ ID NO: 601178
uuuaagaacauuagacgga

SEQ ID NO: 601180 - RNA, 19 nt, Artificial Sequence
  Description of Artificial Sequence: Synthetic oligonucleotide
  Sense strand starting at position 3982 of SEQ ID NO: 584942
cgucuaauguucuuaaauu

SEQ ID NO: 601181 - RNA, 19 nt, Artificial Sequence
  Description of Artificial Sequence: Synthetic oligonucleotide
  Antisense strand to SEQ ID NO: 601180
aauuuaagaacauuagacg

SEQ ID NO: 601182 - RNA, 19 nt, Artificial Sequence
  Description of Artificial Sequence: Synthetic oligonucleotide
  Sense strand starting at position 463 of SEQ ID NO: 584943
ugcugucuggugaggugaa

SEQ ID NO: 601183 - RNA, 19 nt, Artificial Sequence
  Description of Artificial Sequence: Synthetic oligonucleotide
  Antisense strand to SEQ ID NO: 601182
uucaccucaccagacagca

SEQ ID NO: 601184 - RNA, 19 nt, Artificial Sequence
  Description of Artificial Sequence: Synthetic oligonucleotide
  Sense strand starting at position 552 of SEQ ID NO: 584943
ucguguaauccucaagaga

SEQ ID NO: 601185 - RNA, 19 nt, Artificial Sequence
  Description of Artificial Sequence: Synthetic oligonucleotide
  Antisense strand to SEQ ID NO: 601184
ucucuugaggauuacacga

SEQ ID NO: 601186 - RNA, 19 nt, Artificial Sequence
  Description of Artificial Sequence: Synthetic oligonucleotide
  Sense strand starting at position 565 of SEQ ID NO: 584943
aagagagguuaaguauuau

SEQ ID NO: 601187 - RNA, 19 nt, Artificial Sequence
  Description of Artificial Sequence: Synthetic oligonucleotide
  Antisense strand to SEQ ID NO: 601186
auaauacuuaaccucucuu

SEQ ID NO: 601188 - RNA, 19 nt, Artificial Sequence
  Description of Artificial Sequence: Synthetic oligonucleotide
  Sense strand starting at position 626 of SEQ ID NO: 584943
uuaagaaacuuaccgagua

SEQ ID NO: 601189 - RNA, 19 nt, Artificial Sequence
  Description of Artificial Sequence: Synthetic oligonucleotide
  Antisense strand to SEQ ID NO: 601188
uacucgguaaguuucuuaa

SEQ ID NO: 601190 - RNA, 19 nt, Artificial Sequence
  Description of Artificial Sequence: Synthetic oligonucleotide
  Sense strand starting at position 885 of SEQ ID NO: 584943
caugaugugcuccagaaac

SEQ ID NO: 601191 - RNA, 19 nt, Artificial Sequence
  Description of Artificial Sequence: Synthetic oligonucleotide
  Antisense strand to SEQ ID NO: 601190
guuucuggagcacaucaug

SEQ ID NO: 601192 - RNA, 19 nt, Artificial Sequence
  Description of Artificial Sequence: Synthetic oligonucleotide
  Sense strand starting at position 887 of SEQ ID NO: 584943
ugaugugcuccagaaacug

SEQ ID NO: 601193 - RNA, 19 nt, Artificial Sequence
  Description of Artificial Sequence: Synthetic oligonucleotide
  Antisense strand to SEQ ID NO: 601192
caguuucuggagcacauca

SEQ ID NO: 601194 - RNA, 19 nt, Artificial Sequence
  Description of Artificial Sequence: Synthetic oligonucleotide
  Sense strand starting at position 903 of SEQ ID NO: 584943
cugauaaauucgguacacu

SEQ ID NO: 601195 - RNA, 19 nt, Artificial Sequence
  Description of Artificial Sequence: Synthetic oligonucleotide
  Antisense strand to SEQ ID NO: 601194
aguguaccgaauuuaucag

SEQ ID NO: 601196 - RNA, 19 nt, Artificial Sequence
  Description of Artificial Sequence: Synthetic oligonucleotide
  Sense strand starting at position 904 of SEQ ID NO: 584943
ugauaaauucgguacacuc

SEQ ID NO: 601197 - RNA, 19 nt, Artificial Sequence
  Description of Artificial Sequence: Synthetic oligonucleotide
  Antisense strand to SEQ ID NO: 601196
gaguguaccgaauuuauca

SEQ ID NO: 601198 - RNA, 19 nt, Artificial Sequence
  Description of Artificial Sequence: Synthetic oligonucleotide
  Sense strand starting at position 1093 of SEQ ID NO: 584943
gggaucugucgagauggca

SEQ ID NO: 601199 - RNA, 19 nt, Artificial Sequence
  Description of Artificial Sequence: Synthetic oligonucleotide
  Antisense strand to SEQ ID NO: 601198
ugccaucucgacagauccc

SEQ ID NO: 601200 - RNA, 19 nt, Artificial Sequence
  Description of Artificial Sequence: Synthetic oligonucleotide
  Sense strand starting at position 1115 of SEQ ID NO: 584943
agguuaugcccugauaaca

SEQ ID NO: 601201 - RNA, 19 nt, Artificial Sequence
  Description of Artificial Sequence: Synthetic oligonucleotide
  Antisense strand to SEQ ID NO: 601200
uguuaucagggcauaaccu

SEQ ID NO: 601202 - RNA, 19 nt, Artificial Sequence
  Description of Artificial Sequence: Synthetic oligonucleotide
  Sense strand starting at position 1140 of SEQ ID NO: 584943
cagagagaugcgggcauaa

SEQ ID NO: 601203 - RNA, 19 nt, Artificial Sequence
  Description of Artificial Sequence: Synthetic oligonucleotide
  Antisense strand to SEQ ID NO: 601202
uuaugcccgcaucucucug

SEQ ID NO: 601204 - RNA, 19 nt, Artificial Sequence
  Description of Artificial Sequence: Synthetic oligonucleotide
  Sense strand starting at position 1142 of SEQ ID NO: 584943
gagagaugcgggcauaaac

SEQ ID NO: 601205 - RNA, 19 nt, Artificial Sequence
  Description of Artificial Sequence: Synthetic oligonucleotide
  Antisense strand to SEQ ID NO: 601204
guuuaugcccgcaucucuc

SEQ ID NO: 601206 - RNA, 19 nt, Artificial Sequence
  Description of Artificial Sequence: Synthetic oligonucleotide
  Sense strand starting at position 2032 of SEQ ID NO: 584943
aacuuaguggugggauuga

SEQ ID NO: 601207 - RNA, 19 nt, Artificial Sequence
  Description of Artificial Sequence: Synthetic oligonucleotide
  Antisense strand to SEQ ID NO: 601206
ucaaucccaccacuaaguu

SEQ ID NO: 601208 - RNA, 19 nt, Artificial Sequence
  Description of Artificial Sequence: Synthetic oligonucleotide
  Sense strand starting at position 2117 of SEQ ID NO: 584943
gaagaaggcuuuguuaauu

SEQ ID NO: 601209 - RNA, 19 nt, Artificial Sequence
  Description of Artificial Sequence: Synthetic oligonucleotide
  Antisense strand to SEQ ID NO: 601208
aauuaacaaagccuucuuc

SEQ ID NO: 601210 - RNA, 19 nt, Artificial Sequence
  Description of Artificial Sequence: Synthetic oligonucleotide
  Sense strand starting at position 2272 of SEQ ID NO: 584943
ugucguaagggcuaaauga

SEQ ID NO: 601211 - RNA, 19 nt, Artificial Sequence
  Description of Artificial Sequence: Synthetic oligonucleotide
  Antisense strand to SEQ ID NO: 601210
ucauuuagcccuuacgaca

SEQ ID NO: 601212 - RNA, 19 nt, Artificial Sequence
  Description of Artificial Sequence: Synthetic oligonucleotide
  Sense strand starting at position 2393 of SEQ ID NO: 584943
gauccaggcuucuuccaga

SEQ ID NO: 601213 - RNA, 19 nt, Artificial Sequence
  Description of Artificial Sequence: Synthetic oligonucleotide
  Antisense strand to SEQ ID NO: 601212
ucuggaagaagccuggauc

SEQ ID NO: 601214 - RNA, 19 nt, Artificial Sequence
  Description of Artificial Sequence: Synthetic oligonucleotide
  Sense strand starting at position 2398 of SEQ ID NO: 584943
aggcuucuuccagaaaccu

SEQ ID NO: 601215 - RNA, 19 nt, Artificial Sequence
  Description of Artificial Sequence: Synthetic oligonucleotide
  Antisense strand to SEQ ID NO: 601214
agguuucuggaagaagccu

SEQ ID NO: 601216 - RNA, 19 nt, Artificial Sequence
  Description of Artificial Sequence: Synthetic oligonucleotide
  Sense strand starting at position 2500 of SEQ ID NO: 584943
ucgaguuggguugaaauau

SEQ ID NO: 601217 - RNA, 19 nt, Artificial Sequence
  Description of Artificial Sequence: Synthetic oligonucleotide
  Antisense strand to SEQ ID NO: 601216
auauuucaacccaacucga

SEQ ID NO: 601218 - RNA, 19 nt, Artificial Sequence
  Description of Artificial Sequence: Synthetic oligonucleotide
  Sense strand starting at position 2537 of SEQ ID NO: 584943
ucauaaguuuggguaauaa

SEQ ID NO: 601219 - RNA, 19 nt, Artificial Sequence
  Description of Artificial Sequence: Synthetic oligonucleotide
  Antisense strand to SEQ ID NO: 601218
uuauuacccaaacuuauga

SEQ ID NO: 601220 - RNA, 19 nt, Artificial Sequence
  Description of Artificial Sequence: Synthetic oligonucleotide
  Sense strand starting at position 2654 of SEQ ID NO: 584943
ugagguagggauuggcaaa

SEQ ID NO: 601221 - RNA, 19 nt, Artificial Sequence
  Description of Artificial Sequence: Synthetic oligonucleotide
  Antisense strand to SEQ ID NO: 601220
uuugccaaucccuaccuca

SEQ ID NO: 601222 - RNA, 19 nt, Artificial Sequence
  Description of Artificial Sequence: Synthetic oligonucleotide
  Sense strand starting at position 2910 of SEQ ID NO: 584943
caauuauggucagcaagag

SEQ ID NO: 601223 - RNA, 19 nt, Artificial Sequence
  Description of Artificial Sequence: Synthetic oligonucleotide
  Antisense strand to SEQ ID NO: 601222
cucuugcugaccauaauug

SEQ ID NO: 601224 - RNA, 19 nt, Artificial Sequence
  Description of Artificial Sequence: Synthetic oligonucleotide
  Sense strand starting at position 3010 of SEQ ID NO: 584943
cacugugugguguauaaga

SEQ ID NO: 601225 - RNA, 19 nt, Artificial Sequence
  Description of Artificial Sequence: Synthetic oligonucleotide
  Antisense strand to SEQ ID NO: 601224
ucuuauacaccacacagug

SEQ ID NO: 601226 - RNA, 19 nt, Artificial Sequence
  Description of Artificial Sequence: Synthetic oligonucleotide
  Sense strand starting at position 3012 of SEQ ID NO: 584943
cugugugguguauaagaaa

SEQ ID NO: 601227 - RNA, 19 nt, Artificial Sequence
  Description of Artificial Sequence: Synthetic oligonucleotide
  Antisense strand to SEQ ID NO: 601226
uuucuuauacaccacacag

SEQ ID NO: 601228 - RNA, 19 nt, Artificial Sequence
  Description of Artificial Sequence: Synthetic oligonucleotide
  Sense strand starting at position 3229 of SEQ ID NO: 584943
aucucaaguguuuaucuuu

SEQ ID NO: 601229 - RNA, 19 nt, Artificial Sequence
  Description of Artificial Sequence: Synthetic oligonucleotide
  Antisense strand to SEQ ID NO: 601228
aaagauaaacacuugagau

SEQ ID NO: 601230 - RNA, 19 nt, Artificial Sequence
  Description of Artificial Sequence: Synthetic oligonucleotide
  Sense strand starting at position 3338 of SEQ ID NO: 584943
aauacuaggucuucgagau

SEQ ID NO: 601231 - RNA, 19 nt, Artificial Sequence
  Description of Artificial Sequence: Synthetic oligonucleotide
  Antisense strand to SEQ ID NO: 601230
aucucgaagaccuaguauu

SEQ ID NO: 601232 - RNA, 19 nt, Artificial Sequence
  Description of Artificial Sequence: Synthetic oligonucleotide
  Sense strand starting at position 3376 of SEQ ID NO: 584943
ggaggucagucucuacuga

SEQ ID NO: 601233 - RNA, 19 nt, Artificial Sequence
  Description of Artificial Sequence: Synthetic oligonucleotide
  Antisense strand to SEQ ID NO: 601232
ucaguagagacugaccucc

SEQ ID NO: 601234 - RNA, 19 nt, Artificial Sequence
  Description of Artificial Sequence: Synthetic oligonucleotide
  Sense strand starting at position 3477 of SEQ ID NO: 584943
gauguaaguccugaccaug

SEQ ID NO: 601235 - RNA, 19 nt, Artificial Sequence
  Description of Artificial Sequence: Synthetic oligonucleotide
  Antisense strand to SEQ ID NO: 601234
cauggucaggacuuacauc

SEQ ID NO: 601236 - RNA, 19 nt, Artificial Sequence
  Description of Artificial Sequence: Synthetic oligonucleotide
  Sense strand starting at position 3480 of SEQ ID NO: 584943
guaaguccugaccauguca

SEQ ID NO: 601237 - RNA, 19 nt, Artificial Sequence
  Description of Artificial Sequence: Synthetic oligonucleotide
  Antisense strand to SEQ ID NO: 601236
ugacauggucaggacuuac

SEQ ID NO: 601238 - RNA, 19 nt, Artificial Sequence
  Description of Artificial Sequence: Synthetic oligonucleotide
  Sense strand starting at position 3482 of SEQ ID NO: 584943
aaguccugaccaugucaga

SEQ ID NO: 601239 - RNA, 19 nt, Artificial Sequence
  Description of Artificial Sequence: Synthetic oligonucleotide
  Antisense strand to SEQ ID NO: 601238
ucugacauggucaggacuu

SEQ ID NO: 601240 - RNA, 19 nt, Artificial Sequence
  Description of Artificial Sequence: Synthetic oligonucleotide
  Sense strand starting at position 3547 of SEQ ID NO: 584943
uugcauucugauuauuagu

SEQ ID NO: 601241 - RNA, 19 nt, Artificial Sequence
  Description of Artificial Sequence: Synthetic oligonucleotide
  Antisense strand to SEQ ID NO: 601240
acuaauaaucagaaugcaa

SEQ ID NO: 601242 - RNA, 19 nt, Artificial Sequence
  Description of Artificial Sequence: Synthetic oligonucleotide
  Sense strand starting at position 3561 of SEQ ID NO: 584943
uuaguuuccuauuuguguu

SEQ ID NO: 601243 - RNA, 19 nt, Artificial Sequence
  Description of Artificial Sequence: Synthetic oligonucleotide
  Antisense strand to SEQ ID NO: 601242
aacacaaauaggaaacuaa

SEQ ID NO: 601244 - RNA, 19 nt, Artificial Sequence
  Description of Artificial Sequence: Synthetic oligonucleotide
  Sense strand starting at position 3569 of SEQ ID NO: 584943
cuauuuguguuagccacuu

SEQ ID NO: 601245 - RNA, 19 nt, Artificial Sequence
  Description of Artificial Sequence: Synthetic oligonucleotide
  Antisense strand to SEQ ID NO: 601244
aaguggcuaacacaaauag

SEQ ID NO: 601246 - RNA, 19 nt, Artificial Sequence
  Description of Artificial Sequence: Synthetic oligonucleotide
  Sense strand starting at position 3588 of SEQ ID NO: 584943
ggaauuggguuucuauuau

SEQ ID NO: 601247 - RNA, 19 nt, Artificial Sequence
  Description of Artificial Sequence: Synthetic oligonucleotide
  Antisense strand to SEQ ID NO: 601246
auaauagaaacccaauucc

SEQ ID NO: 601248 - RNA, 19 nt, Artificial Sequence
  Description of Artificial Sequence: Synthetic oligonucleotide
  Sense strand starting at position 3639 of SEQ ID NO: 584943
ggaccaauacucugucaga

SEQ ID NO: 601249 - RNA, 19 nt, Artificial Sequence
  Description of Artificial Sequence: Synthetic oligonucleotide
  Antisense strand to SEQ ID NO: 601248
ucugacagaguauuggucc

SEQ ID NO: 601250 - RNA, 19 nt, Artificial Sequence
  Description of Artificial Sequence: Synthetic oligonucleotide
  Sense strand starting at position 3640 of SEQ ID NO: 584943
gaccaauacucugucagag

SEQ ID NO: 601251 - RNA, 19 nt, Artificial Sequence
  Description of Artificial Sequence: Synthetic oligonucleotide
  Antisense strand to SEQ ID NO: 601250
cucugacagaguauugguc

SEQ ID NO: 601252 - RNA, 19 nt, Artificial Sequence
  Description of Artificial Sequence: Synthetic oligonucleotide
  Sense strand starting at position 3712 of SEQ ID NO: 584943
gggccaccucuuuaccaua

SEQ ID NO: 601253 - RNA, 19 nt, Artificial Sequence
  Description of Artificial Sequence: Synthetic oligonucleotide
  Antisense strand to SEQ ID NO: 601252
uaugguaaagagguggccc

SEQ ID NO: 601254 - RNA, 19 nt, Artificial Sequence
  Description of Artificial Sequence: Synthetic oligonucleotide
  Sense strand starting at position 3807 of SEQ ID NO: 584943
aaauacugguguucugaga

SEQ ID NO: 601255 - RNA, 19 nt, Artificial Sequence
  Description of Artificial Sequence: Synthetic oligonucleotide
  Antisense strand to SEQ ID NO: 601254
ucucagaacaccaguauuu

SEQ ID NO: 601256 - RNA, 19 nt, Artificial Sequence
  Description of Artificial Sequence: Synthetic oligonucleotide
  Sense strand starting at position 3887 of SEQ ID NO: 584943
agagacaugcauuguacaa

SEQ ID NO: 601257 - RNA, 19 nt, Artificial Sequence
  Description of Artificial Sequence: Synthetic oligonucleotide
  Antisense strand to SEQ ID NO: 601256
uuguacaaugcaugucucu

SEQ ID NO: 601258 - RNA, 19 nt, Artificial Sequence
  Description of Artificial Sequence: Synthetic oligonucleotide
  Sense strand starting at position 3931 of SEQ ID NO: 584943
ugucaacugucccucauuu

SEQ ID NO: 601259 - RNA, 19 nt, Artificial Sequence
  Description of Artificial Sequence: Synthetic oligonucleotide
  Antisense strand to SEQ ID NO: 601258
aaaugagggacaguugaca

SEQ ID NO: 601260 - RNA, 19 nt, Artificial Sequence
  Description of Artificial Sequence: Synthetic oligonucleotide
  Sense strand starting at position 3957 of SEQ ID NO: 584943
gaacaugcagauuguauau

SEQ ID NO: 601261 - RNA, 19 nt, Artificial Sequence
  Description of Artificial Sequence: Synthetic oligonucleotide
  Antisense strand to SEQ ID NO: 601260
auauacaaucugcauguuc

SEQ ID NO: 601262 - RNA, 19 nt, Artificial Sequence
  Description of Artificial Sequence: Synthetic oligonucleotide
  Sense strand starting at position 48 of SEQ ID NO: 584944
caaaguuagcaugaggagu

SEQ ID NO: 601263 - RNA, 19 nt, Artificial Sequence
  Description of Artificial Sequence: Synthetic oligonucleotide
  Antisense strand to SEQ ID NO: 601262
acuccucaugcuaacuuug

SEQ ID NO: 601264 - RNA, 19 nt, Artificial Sequence
  Description of Artificial Sequence: Synthetic oligonucleotide
  Sense strand starting at position 348 of SEQ ID NO: 584944
uggauagcacuuugcaauu

SEQ ID NO: 601265 - RNA, 19 nt, Artificial Sequence
  Description of Artificial Sequence: Synthetic oligonucleotide
  Antisense strand to SEQ ID NO: 601264
aauugcaaagugcuaucca

SEQ ID NO: 601266 - RNA, 19 nt, Artificial Sequence
  Description of Artificial Sequence: Synthetic oligonucleotide
  Sense strand starting at position 434 of SEQ ID NO: 584944
aacguacuuuaguccuaga

SEQ ID NO: 601267 - RNA, 19 nt, Artificial Sequence
  Description of Artificial Sequence: Synthetic oligonucleotide
  Antisense strand to SEQ ID NO: 601266
ucuaggacuaaaguacguu

SEQ ID NO: 601268 - RNA, 19 nt, Artificial Sequence
  Description of Artificial Sequence: Synthetic oligonucleotide
  Sense strand starting at position 529 of SEQ ID NO: 584944
guggcugaucaucacuuua

SEQ ID NO: 601269 - RNA, 19 nt, Artificial Sequence
  Description of Artificial Sequence: Synthetic oligonucleotide
  Antisense strand to SEQ ID NO: 601268
uaaagugaugaucagccac

SEQ ID NO: 601270 - RNA, 19 nt, Artificial Sequence
  Description of Artificial Sequence: Synthetic oligonucleotide
  Sense strand starting at position 531 of SEQ ID NO: 584944
ggcugaucaucacuuuauu

SEQ ID NO: 601271 - RNA, 19 nt, Artificial Sequence
  Description of Artificial Sequence: Synthetic oligonucleotide
  Antisense strand to SEQ ID NO: 601270
aauaaagugaugaucagcc

SEQ ID NO: 601272 - RNA, 19 nt, Artificial Sequence
  Description of Artificial Sequence: Synthetic oligonucleotide
  Sense strand starting at position 549 of SEQ ID NO: 584944
ucagaaaugguccguuaca

SEQ ID NO: 601273 - RNA, 19 nt, Artificial Sequence
  Description of Artificial Sequence: Synthetic oligonucleotide
  Antisense strand to SEQ ID NO: 601272
uguaacggaccauuucuga

SEQ ID NO: 601274 - RNA, 19 nt, Artificial Sequence
  Description of Artificial Sequence: Synthetic oligonucleotide
  Sense strand starting at position 550 of SEQ ID NO: 584944
cagaaaugguccguuacaa

SEQ ID NO: 601275 - RNA, 19 nt, Artificial Sequence
  Description of Artificial Sequence: Synthetic oligonucleotide
  Antisense strand to SEQ ID NO: 601274
uuguaacggaccauuucug

SEQ ID NO: 601276 - RNA, 19 nt, Artificial Sequence
  Description of Artificial Sequence: Synthetic oligonucleotide
  Sense strand starting at position 567 of SEQ ID NO: 584944
aauccucuuccguagaguu

SEQ ID NO: 601277 - RNA, 19 nt, Artificial Sequence
  Description of Artificial Sequence: Synthetic oligonucleotide
  Antisense strand to SEQ ID NO: 601276
aacucuacggaagaggauu

SEQ ID NO: 601278 - RNA, 19 nt, Artificial Sequence
  Description of Artificial Sequence: Synthetic oligonucleotide
  Sense strand starting at position 577 of SEQ ID NO: 584944
cguagaguuugacucucuu

SEQ ID NO: 601279 - RNA, 19 nt, Artificial Sequence
  Description of Artificial Sequence: Synthetic oligonucleotide
  Antisense strand to SEQ ID NO: 601278
aagagagucaaacucuacg

SEQ ID NO: 601280 - RNA, 19 nt, Artificial Sequence
  Description of Artificial Sequence: Synthetic oligonucleotide
  Sense strand starting at position 583 of SEQ ID NO: 584944
guuugacucucuuuaaagu

SEQ ID NO: 601281 - RNA, 19 nt, Artificial Sequence
  Description of Artificial Sequence: Synthetic oligonucleotide
  Antisense strand to SEQ ID NO: 601280
acuuuaaagagagucaaac

SEQ ID NO: 601282 - RNA, 19 nt, Artificial Sequence
  Description of Artificial Sequence: Synthetic oligonucleotide
  Sense strand starting at position 593 of SEQ ID NO: 584944
cuuuaaagucuaugcugga

SEQ ID NO: 601283 - RNA, 19 nt, Artificial Sequence
  Description of Artificial Sequence: Synthetic oligonucleotide
  Antisense strand to SEQ ID NO: 601282
uccagcauagacuuuaaag

SEQ ID NO: 601284 - RNA, 19 nt, Artificial Sequence
  Description of Artificial Sequence: Synthetic oligonucleotide
  Sense strand starting at position 722 of SEQ ID NO: 584944
agguauucucaguacauua

SEQ ID NO: 601285 - RNA, 19 nt, Artificial Sequence
  Description of Artificial Sequence: Synthetic oligonucleotide
  Antisense strand to SEQ ID NO: 601284
uaauguacugagaauaccu

SEQ ID NO: 601286 - RNA, 19 nt, Artificial Sequence
  Description of Artificial Sequence: Synthetic oligonucleotide
  Sense strand starting at position 843 of SEQ ID NO: 584944
cuucguauuccguucuuga

SEQ ID NO: 601287 - RNA, 19 nt, Artificial Sequence
  Description of Artificial Sequence: Synthetic oligonucleotide
  Antisense strand to SEQ ID NO: 601286
ucaagaacggaauacgaag

SEQ ID NO: 601288 - RNA, 19 nt, Artificial Sequence
  Description of Artificial Sequence: Synthetic oligonucleotide
  Sense strand starting at position 844 of SEQ ID NO: 584944
uucguauuccguucuugau

SEQ ID NO: 601289 - RNA, 19 nt, Artificial Sequence
  Description of Artificial Sequence: Synthetic oligonucleotide
  Antisense strand to SEQ ID NO: 601288
aucaagaacggaauacgaa

SEQ ID NO: 601290 - RNA, 19 nt, Artificial Sequence
  Description of Artificial Sequence: Synthetic oligonucleotide
  Sense strand starting at position 959 of SEQ ID NO: 584944
ggguggguagcagagaauu

SEQ ID NO: 601291 - RNA, 19 nt, Artificial Sequence
  Description of Artificial Sequence: Synthetic oligonucleotide
  Antisense strand to SEQ ID NO: 601290
aauucucugcuacccaccc

SEQ ID NO: 601292 - RNA, 19 nt, Artificial Sequence
  Description of Artificial Sequence: Synthetic oligonucleotide
  Sense strand starting at position 988 of SEQ ID NO: 584944
uuaaguugccgcuugcgaa

SEQ ID NO: 601293 - RNA, 19 nt, Artificial Sequence
  Description of Artificial Sequence: Synthetic oligonucleotide
  Antisense strand to SEQ ID NO: 601292
uucgcaagcggcaacuuaa

SEQ ID NO: 601294 - RNA, 19 nt, Artificial Sequence
  Description of Artificial Sequence: Synthetic oligonucleotide
  Sense strand starting at position 2129 of SEQ ID NO: 584944
ccucgagcucauuagcgaa

SEQ ID NO: 601295 - RNA, 19 nt, Artificial Sequence
  Description of Artificial Sequence: Synthetic oligonucleotide
  Antisense strand to SEQ ID NO: 601294
uucgcuaaugagcucgagg

SEQ ID NO: 601296 - RNA, 19 nt, Artificial Sequence
  Description of Artificial Sequence: Synthetic oligonucleotide
  Sense strand starting at position 2341 of SEQ ID NO: 584944
gguuccugugaagguagaa

SEQ ID NO: 601297 - RNA, 19 nt, Artificial Sequence
  Description of Artificial Sequence: Synthetic oligonucleotide
  Antisense strand to SEQ ID NO: 601296
uucuaccuucacaggaacc

SEQ ID NO: 601298 - RNA, 19 nt, Artificial Sequence
  Description of Artificial Sequence: Synthetic oligonucleotide
  Sense strand starting at position 2353 of SEQ ID NO: 584944
gguagaaagcucgaaguuc

SEQ ID NO: 601299 - RNA, 19 nt, Artificial Sequence
  Description of Artificial Sequence: Synthetic oligonucleotide
  Antisense strand to SEQ ID NO: 601298
gaacuucgagcuuucuacc

SEQ ID NO: 601300 - RNA, 19 nt, Artificial Sequence
  Description of Artificial Sequence: Synthetic oligonucleotide
  Sense strand starting at position 2364 of SEQ ID NO: 584944
cgaaguuccagugugcuuu

SEQ ID NO: 601301 - RNA, 19 nt, Artificial Sequence
  Description of Artificial Sequence: Synthetic oligonucleotide
  Antisense strand to SEQ ID NO: 601300
aaagcacacuggaacuucg

SEQ ID NO: 601302 - RNA, 19 nt, Artificial Sequence
  Description of Artificial Sequence: Synthetic oligonucleotide
  Sense strand starting at position 2708 of SEQ ID NO: 584944
ucgguucuuccugauaggu

SEQ ID NO: 601303 - RNA, 19 nt, Artificial Sequence
  Description of Artificial Sequence: Synthetic oligonucleotide
  Antisense strand to SEQ ID NO: 601302
accuaucaggaagaaccga

SEQ ID NO: 601304 - RNA, 19 nt, Artificial Sequence
  Description of Artificial Sequence: Synthetic oligonucleotide
  Sense strand starting at position 2716 of SEQ ID NO: 584944
uccugauagguugaucuuu

SEQ ID NO: 601305 - RNA, 19 nt, Artificial Sequence
  Description of Artificial Sequence: Synthetic oligonucleotide
  Antisense strand to SEQ ID NO: 601304
aaagaucaaccuaucagga

SEQ ID NO: 601306 - RNA, 19 nt, Artificial Sequence
  Description of Artificial Sequence: Synthetic oligonucleotide
  Sense strand starting at position 2955 of SEQ ID NO: 584944
acgauccuuuggguugaau

SEQ ID NO: 601307 - RNA, 19 nt, Artificial Sequence
  Description of Artificial Sequence: Synthetic oligonucleotide
  Antisense strand to SEQ ID NO: 601306
auucaacccaaaggaucgu

SEQ ID NO: 601308 - RNA, 19 nt, Artificial Sequence
  Description of Artificial Sequence: Synthetic oligonucleotide
  Sense strand starting at position 2957 of SEQ ID NO: 584944
gauccuuuggguugaauug

SEQ ID NO: 601309 - RNA, 19 nt, Artificial Sequence
  Description of Artificial Sequence: Synthetic oligonucleotide
  Antisense strand to SEQ ID NO: 601308
caauucaacccaaaggauc

SEQ ID NO: 601310 - RNA, 19 nt, Artificial Sequence
  Description of Artificial Sequence: Synthetic oligonucleotide
  Sense strand starting at position 2990 of SEQ ID NO: 584944
uggucuaugcaugauguga

SEQ ID NO: 601311 - RNA, 19 nt, Artificial Sequence
  Description of Artificial Sequence: Synthetic oligonucleotide
  Antisense strand to SEQ ID NO: 601310
ucacaucaugcauagacca

SEQ ID NO: 601312 - RNA, 19 nt, Artificial Sequence
  Description of Artificial Sequence: Synthetic oligonucleotide
  Sense strand starting at position 2994 of SEQ ID NO: 584944
cuaugcaugaugugagguu

SEQ ID NO: 601313 - RNA, 19 nt, Artificial Sequence
  Description of Artificial Sequence: Synthetic oligonucleotide
  Antisense strand to SEQ ID NO: 601312
aaccucacaucaugcauag

SEQ ID NO: 601314 - RNA, 19 nt, Artificial Sequence
  Description of Artificial Sequence: Synthetic oligonucleotide
  Sense strand starting at position 3007 of SEQ ID NO: 584944
gagguucuagaauguuuaa

SEQ ID NO: 601315 - RNA, 19 nt, Artificial Sequence
  Description of Artificial Sequence: Synthetic oligonucleotide
  Antisense strand to SEQ ID NO: 601314
uuaaacauucuagaaccuc

SEQ ID NO: 601316 - RNA, 19 nt, Artificial Sequence
  Description of Artificial Sequence: Synthetic oligonucleotide
  Sense strand starting at position 3010 of SEQ ID NO: 584944
guucuagaauguuuaagaa

SEQ ID NO: 601317 - RNA, 19 nt, Artificial Sequence
  Description of Artificial Sequence: Synthetic oligonucleotide
  Antisense strand to SEQ ID NO: 601316
uucuuaaacauucuagaac

SEQ ID NO: 601318 - RNA, 19 nt, Artificial Sequence
  Description of Artificial Sequence: Synthetic oligonucleotide
  Sense strand starting at position 3035 of SEQ ID NO: 584944
uuuaguuagggugaacguu

SEQ ID NO: 601319 - RNA, 19 nt, Artificial Sequence
  Description of Artificial Sequence: Synthetic oligonucleotide
  Antisense strand to SEQ ID NO: 601318
aacguucacccuaacuaaa

SEQ ID NO: 601320 - RNA, 19 nt, Artificial Sequence
  Description of Artificial Sequence: Synthetic oligonucleotide
  Sense strand starting at position 3041 of SEQ ID NO: 584944
uagggugaacguugauuga

SEQ ID NO: 601321 - RNA, 19 nt, Artificial Sequence
  Description of Artificial Sequence: Synthetic oligonucleotide
  Antisense strand to SEQ ID NO: 601320
ucaaucaacguucacccua

SEQ ID NO: 601322 - RNA, 19 nt, Artificial Sequence
  Description of Artificial Sequence: Synthetic oligonucleotide
  Sense strand starting at position 3137 of SEQ ID NO: 584944
gccacucuggcauauugau

SEQ ID NO: 601323 - RNA, 19 nt, Artificial Sequence
  Description of Artificial Sequence: Synthetic oligonucleotide
  Antisense strand to SEQ ID NO: 601322
aucaauaugccagaguggc

SEQ ID NO: 601324 - RNA, 19 nt, Artificial Sequence
  Description of Artificial Sequence: Synthetic oligonucleotide
  Sense strand starting at position 3593 of SEQ ID NO: 584944
gauguaauauaagugucaa

SEQ ID NO: 601325 - RNA, 19 nt, Artificial Sequence
  Description of Artificial Sequence: Synthetic oligonucleotide
  Antisense strand to SEQ ID NO: 601324
uugacacuuauauuacauc

SEQ ID NO: 601326 - RNA, 19 nt, Artificial Sequence
  Description of Artificial Sequence: Synthetic oligonucleotide
  Sense strand starting at position 3644 of SEQ ID NO: 584944
ugggacucuugugcauaca

SEQ ID NO: 601327 - RNA, 19 nt, Artificial Sequence
  Description of Artificial Sequence: Synthetic oligonucleotide
  Antisense strand to SEQ ID NO: 601326
uguaugcacaagaguccca

SEQ ID NO: 601328 - RNA, 19 nt, Artificial Sequence
  Description of Artificial Sequence: Synthetic oligonucleotide
  Sense strand starting at position 3645 of SEQ ID NO: 584944
gggacucuugugcauacau

SEQ ID NO: 601329 - RNA, 19 nt, Artificial Sequence
  Description of Artificial Sequence: Synthetic oligonucleotide
  Antisense strand to SEQ ID NO: 601328
auguaugcacaagaguccc

SEQ ID NO: 601330 - RNA, 19 nt, Artificial Sequence
  Description of Artificial Sequence: Synthetic oligonucleotide
  Sense strand starting at position 3654 of SEQ ID NO: 584944
gugcauacauacguaauua

SEQ ID NO: 601331 - RNA, 19 nt, Artificial Sequence
  Description of Artificial Sequence: Synthetic oligonucleotide
  Antisense strand to SEQ ID NO: 601330
uaauuacguauguaugcac

SEQ ID NO: 601332 - RNA, 19 nt, Artificial Sequence
  Description of Artificial Sequence: Synthetic oligonucleotide
  Sense strand starting at position 3685 of SEQ ID NO: 584944
cuguuaaccugacugguau

SEQ ID NO: 601333 - RNA, 19 nt, Artificial Sequence
  Description of Artificial Sequence: Synthetic oligonucleotide
  Antisense strand to SEQ ID NO: 601332
auaccagucagguuaacag

SEQ ID NO: 601334 - RNA, 19 nt, Artificial Sequence
  Description of Artificial Sequence: Synthetic oligonucleotide
  Sense strand starting at position 3692 of SEQ ID NO: 584944
ccugacugguaucaauuua

SEQ ID NO: 601335 - RNA, 19 nt, Artificial Sequence
  Description of Artificial Sequence: Synthetic oligonucleotide
  Antisense strand to SEQ ID NO: 601334
uaaauugauaccagucagg

SEQ ID NO: 601336 - RNA, 19 nt, Artificial Sequence
  Description of Artificial Sequence: Synthetic oligonucleotide
  Sense strand starting at position 3749 of SEQ ID NO: 584944
cccuguaauggugagccua

SEQ ID NO: 601337 - RNA, 19 nt, Artificial Sequence
  Description of Artificial Sequence: Synthetic oligonucleotide
  Antisense strand to SEQ ID NO: 601336
uaggcucaccauuacaggg

SEQ ID NO: 601338 - RNA, 19 nt, Artificial Sequence
  Description of Artificial Sequence: Synthetic oligonucleotide
  Sense strand starting at position 3770 of SEQ ID NO: 584944
gucccaaauguuugggaua

SEQ ID NO: 601339 - RNA, 19 nt, Artificial Sequence
  Description of Artificial Sequence: Synthetic oligonucleotide
  Antisense strand to SEQ ID NO: 601338
uaucccaaacauuugggac

SEQ ID NO: 601340 - RNA, 19 nt, Artificial Sequence
  Description of Artificial Sequence: Synthetic oligonucleotide
  Sense strand starting at position 3856 of SEQ ID NO: 584944
ugucaauucuacccaaagu

SEQ ID NO: 601341 - RNA, 19 nt, Artificial Sequence
  Description of Artificial Sequence: Synthetic oligonucleotide
  Antisense strand to SEQ ID NO: 601340
acuuuggguagaauugaca

SEQ ID NO: 601342 - RNA, 19 nt, Artificial Sequence
  Description of Artificial Sequence: Synthetic oligonucleotide
  Sense strand starting at position 32 of SEQ ID NO: 584945
uggauagcacuuugcaauu

SEQ ID NO: 601343 - RNA, 19 nt, Artificial Sequence
  Description of Artificial Sequence: Synthetic oligonucleotide
  Antisense strand to SEQ ID NO: 601342
aauugcaaagugcuaucca

SEQ ID NO: 601344 - RNA, 19 nt, Artificial Sequence
  Description of Artificial Sequence: Synthetic oligonucleotide
  Sense strand starting at position 118 of SEQ ID NO: 584945
aacguacuuuaguccuaga

SEQ ID NO: 601345 - RNA, 19 nt, Artificial Sequence
  Description of Artificial Sequence: Synthetic oligonucleotide
  Antisense strand to SEQ ID NO: 601344
ucuaggacuaaaguacguu

SEQ ID NO: 601346 - RNA, 19 nt, Artificial Sequence
  Description of Artificial Sequence: Synthetic oligonucleotide
  Sense strand starting at position 213 of SEQ ID NO: 584945
guggcugaucaucacuuua

SEQ ID NO: 601347 - RNA, 19 nt, Artificial Sequence
  Description of Artificial Sequence: Synthetic oligonucleotide
  Antisense strand to SEQ ID NO: 601346
uaaagugaugaucagccac

SEQ ID NO: 601348 - RNA, 19 nt, Artificial Sequence
  Description of Artificial Sequence: Synthetic oligonucleotide
  Sense strand starting at position 215 of SEQ ID NO: 584945
ggcugaucaucacuuuauu

SEQ ID NO: 601349 - RNA, 19 nt, Artificial Sequence
  Description of Artificial Sequence: Synthetic oligonucleotide
  Antisense strand to SEQ ID NO: 601348
aauaaagugaugaucagcc

SEQ ID NO: 601350 - RNA, 19 nt, Artificial Sequence
  Description of Artificial Sequence: Synthetic oligonucleotide
  Sense strand starting at position 233 of SEQ ID NO: 584945
ucagaaaugguccguuaca

SEQ ID NO: 601351 - RNA, 19 nt, Artificial Sequence
  Description of Artificial Sequence: Synthetic oligonucleotide
  Antisense strand to SEQ ID NO: 601350
uguaacggaccauuucuga

SEQ ID NO: 601352 - RNA, 19 nt, Artificial Sequence
  Description of Artificial Sequence: Synthetic oligonucleotide
  Sense strand starting at position 234 of SEQ ID NO: 584945
cagaaaugguccguuacaa

SEQ ID NO: 601353 - RNA, 19 nt, Artificial Sequence
  Description of Artificial Sequence: Synthetic oligonucleotide
  Antisense strand to SEQ ID NO: 601352
uuguaacggaccauuucug

SEQ ID NO: 601354 - RNA, 19 nt, Artificial Sequence
  Description of Artificial Sequence: Synthetic oligonucleotide
  Sense strand starting at position 251 of SEQ ID NO: 584945
aauccucuuccguagaguu

SEQ ID NO: 601355 - RNA, 19 nt, Artificial Sequence
  Description of Artificial Sequence: Synthetic oligonucleotide
  Antisense strand to SEQ ID NO: 601354
aacucuacggaagaggauu

SEQ ID NO: 601356 - RNA, 19 nt, Artificial Sequence
  Description of Artificial Sequence: Synthetic oligonucleotide
  Sense strand starting at position 261 of SEQ ID NO: 584945
cguagaguuugacucucuu

SEQ ID NO: 601357 - RNA, 19 nt, Artificial Sequence
  Description of Artificial Sequence: Synthetic oligonucleotide
  Antisense strand to SEQ ID NO: 601356
aagagagucaaacucuacg

SEQ ID NO: 601358 - RNA, 19 nt, Artificial Sequence
  Description of Artificial Sequence: Synthetic oligonucleotide
  Sense strand starting at position 267 of SEQ ID NO: 584945
guuugacucucuuuaaagu

SEQ ID NO: 601359 - RNA, 19 nt, Artificial Sequence
  Description of Artificial Sequence: Synthetic oligonucleotide
  Antisense strand to SEQ ID NO: 601358
acuuuaaagagagucaaac

SEQ ID NO: 601360 - RNA, 19 nt, Artificial Sequence
  Description of Artificial Sequence: Synthetic oligonucleotide
  Sense strand starting at position 277 of SEQ ID NO: 584945
cuuuaaagucuaugcugga

SEQ ID NO: 601361 - RNA, 19 nt, Artificial Sequence
  Description of Artificial Sequence: Synthetic oligonucleotide
  Antisense strand to SEQ ID NO: 601360
uccagcauagacuuuaaag

SEQ ID NO: 601362 - RNA, 19 nt, Artificial Sequence
  Description of Artificial Sequence: Synthetic oligonucleotide
  Sense strand starting at position 406 of SEQ ID NO: 584945
agguauucucaguacauua

SEQ ID NO: 601363 - RNA, 19 nt, Artificial Sequence
  Description of Artificial Sequence: Synthetic oligonucleotide
  Antisense strand to SEQ ID NO: 601362
uaauguacugagaauaccu

SEQ ID NO: 601364 - RNA, 19 nt, Artificial Sequence
  Description of Artificial Sequence: Synthetic oligonucleotide
  Sense strand starting at position 527 of SEQ ID NO: 584945
cuucguauuccguucuuga

SEQ ID NO: 601365 - RNA, 19 nt, Artificial Sequence
  Description of Artificial Sequence: Synthetic oligonucleotide
  Antisense strand to SEQ ID NO: 601364
ucaagaacggaauacgaag

SEQ ID NO: 601366 - RNA, 19 nt, Artificial Sequence
  Description of Artificial Sequence: Synthetic oligonucleotide
  Sense strand starting at position 528 of SEQ ID NO: 584945
uucguauuccguucuugau

SEQ ID NO: 601367 - RNA, 19 nt, Artificial Sequence
  Description of Artificial Sequence: Synthetic oligonucleotide
  Antisense strand to SEQ ID NO: 601366
aucaagaacggaauacgaa

SEQ ID NO: 601368 - RNA, 19 nt, Artificial Sequence
  Description of Artificial Sequence: Synthetic oligonucleotide
  Sense strand starting at position 643 of SEQ ID NO: 584945
ggguggguagcagagaauu

SEQ ID NO: 601369 - RNA, 19 nt, Artificial Sequence
  Description of Artificial Sequence: Synthetic oligonucleotide
  Antisense strand to SEQ ID NO: 601368
aauucucugcuacccaccc

SEQ ID NO: 601370 - RNA, 19 nt, Artificial Sequence
  Description of Artificial Sequence: Synthetic oligonucleotide
  Sense strand starting at position 672 of SEQ ID NO: 584945
uuaaguugccgcuugcgaa

SEQ ID NO: 601371 - RNA, 19 nt, Artificial Sequence
  Description of Artificial Sequence: Synthetic oligonucleotide
  Antisense strand to SEQ ID NO: 601370
uucgcaagcggcaacuuaa

SEQ ID NO: 601372 - RNA, 19 nt, Artificial Sequence
  Description of Artificial Sequence: Synthetic oligonucleotide
  Sense strand starting at position 1813 of SEQ ID NO: 584945
ccucgagcucauuagcgaa

SEQ ID NO: 601373 - RNA, 19 nt, Artificial Sequence
  Description of Artificial Sequence: Synthetic oligonucleotide
  Antisense strand to SEQ ID NO: 601372
uucgcuaaugagcucgagg

SEQ ID NO: 601374 - RNA, 19 nt, Artificial Sequence
  Description of Artificial Sequence: Synthetic oligonucleotide
  Sense strand starting at position 1856 of SEQ ID NO: 584945
ggaggcuccugggaaauga

SEQ ID NO: 601375 - RNA, 19 nt, Artificial Sequence
  Description of Artificial Sequence: Synthetic oligonucleotide
  Antisense strand to SEQ ID NO: 601374
ucauuucccaggagccucc

SEQ ID NO: 601376 - RNA, 19 nt, Artificial Sequence
  Description of Artificial Sequence: Synthetic oligonucleotide
  Sense strand starting at position 2025 of SEQ ID NO: 584945
gguuccugugaagguagaa

SEQ ID NO: 601377 - RNA, 19 nt, Artificial Sequence
  Description of Artificial Sequence: Synthetic oligonucleotide
  Antisense strand to SEQ ID NO: 601376
uucuaccuucacaggaacc

SEQ ID NO: 601378 - RNA, 19 nt, Artificial Sequence
  Description of Artificial Sequence: Synthetic oligonucleotide
  Sense strand starting at position 2037 of SEQ ID NO: 584945
gguagaaagcucgaaguuc

SEQ ID NO: 601379 - RNA, 19 nt, Artificial Sequence
  Description of Artificial Sequence: Synthetic oligonucleotide
  Antisense strand to SEQ ID NO: 601378
gaacuucgagcuuucuacc

SEQ ID NO: 601380 - RNA, 19 nt, Artificial Sequence
  Description of Artificial Sequence: Synthetic oligonucleotide
  Sense strand starting at position 2048 of SEQ ID NO: 584945
cgaaguuccagugugcuuu

SEQ ID NO: 601381 - RNA, 19 nt, Artificial Sequence
  Description of Artificial Sequence: Synthetic oligonucleotide
  Antisense strand to SEQ ID NO: 601380
aaagcacacuggaacuucg

SEQ ID NO: 601382 - RNA, 19 nt, Artificial Sequence
  Description of Artificial Sequence: Synthetic oligonucleotide
  Sense strand starting at position 2392 of SEQ ID NO: 584945
ucgguucuuccugauaggu

SEQ ID NO: 601383 - RNA, 19 nt, Artificial Sequence
  Description of Artificial Sequence: Synthetic oligonucleotide
  Antisense strand to SEQ ID NO: 601382
accuaucaggaagaaccga

SEQ ID NO: 601384 - RNA, 19 nt, Artificial Sequence
  Description of Artificial Sequence: Synthetic oligonucleotide
  Sense strand starting at position 2400 of SEQ ID NO: 584945
uccugauagguugaucuuu

SEQ ID NO: 601385 - RNA, 19 nt, Artificial Sequence
  Description of Artificial Sequence: Synthetic oligonucleotide
  Antisense strand to SEQ ID NO: 601384
aaagaucaaccuaucagga

SEQ ID NO: 601386 - RNA, 19 nt, Artificial Sequence
  Description of Artificial Sequence: Synthetic oligonucleotide
  Sense strand starting at position 2639 of SEQ ID NO: 584945
acgauccuuuggguugaau

SEQ ID NO: 601387 - RNA, 19 nt, Artificial Sequence
  Description of Artificial Sequence: Synthetic oligonucleotide
  Antisense strand to SEQ ID NO: 601386
auucaacccaaaggaucgu

SEQ ID NO: 601388 - RNA, 19 nt, Artificial Sequence
  Description of Artificial Sequence: Synthetic oligonucleotide
  Sense strand starting at position 2641 of SEQ ID NO: 584945
gauccuuuggguugaauug

SEQ ID NO: 601389 - RNA, 19 nt, Artificial Sequence
  Description of Artificial Sequence: Synthetic oligonucleotide
  Antisense strand to SEQ ID NO: 601388
caauucaacccaaaggauc

SEQ ID NO: 601390 - RNA, 19 nt, Artificial Sequence
  Description of Artificial Sequence: Synthetic oligonucleotide
  Sense strand starting at position 2674 of SEQ ID NO: 584945
uggucuaugcaugauguga

SEQ ID NO: 601391 - RNA, 19 nt, Artificial Sequence
  Description of Artificial Sequence: Synthetic oligonucleotide
  Antisense strand to SEQ ID NO: 601390
ucacaucaugcauagacca

SEQ ID NO: 601392 - RNA, 19 nt, Artificial Sequence
  Description of Artificial Sequence: Synthetic oligonucleotide
  Sense strand starting at position 2678 of SEQ ID NO: 584945
cuaugcaugaugugagguu

SEQ ID NO: 601393 - RNA, 19 nt, Artificial Sequence
  Description of Artificial Sequence: Synthetic oligonucleotide
  Antisense strand to SEQ ID NO: 601392
aaccucacaucaugcauag

SEQ ID NO: 601394 - RNA, 19 nt, Artificial Sequence
  Description of Artificial Sequence: Synthetic oligonucleotide
  Sense strand starting at position 2691 of SEQ ID NO: 584945
gagguucuagaauguuuaa

SEQ ID NO: 601395 - RNA, 19 nt, Artificial Sequence
  Description of Artificial Sequence: Synthetic oligonucleotide
  Antisense strand to SEQ ID NO: 601394
uuaaacauucuagaaccuc

SEQ ID NO: 601396 - RNA, 19 nt, Artificial Sequence
  Description of Artificial Sequence: Synthetic oligonucleotide
  Sense strand starting at position 2694 of SEQ ID NO: 584945
guucuagaauguuuaagaa

SEQ ID NO: 601397 - RNA, 19 nt, Artificial Sequence
  Description of Artificial Sequence: Synthetic oligonucleotide
  Antisense strand to SEQ ID NO: 601396
uucuuaaacauucuagaac

SEQ ID NO: 601398 - RNA, 19 nt, Artificial Sequence
  Description of Artificial Sequence: Synthetic oligonucleotide
  Sense strand starting at position 2719 of SEQ ID NO: 584945
uuuaguuagggugaacguu

SEQ ID NO: 601399 - RNA, 19 nt, Artificial Sequence
  Description of Artificial Sequence: Synthetic oligonucleotide
  Antisense strand to SEQ ID NO: 601398
aacguucacccuaacuaaa

SEQ ID NO: 601400 - RNA, 19 nt, Artificial Sequence
  Description of Artificial Sequence: Synthetic oligonucleotide
  Sense strand starting at position 2725 of SEQ ID NO: 584945
uagggugaacguugauuga

SEQ ID NO: 601401 - RNA, 19 nt, Artificial Sequence
  Description of Artificial Sequence: Synthetic oligonucleotide
  Antisense strand to SEQ ID NO: 601400
ucaaucaacguucacccua

SEQ ID NO: 601402 - RNA, 19 nt, Artificial Sequence
  Description of Artificial Sequence: Synthetic oligonucleotide
  Sense strand starting at position 2821 of SEQ ID NO: 584945
gccacucuggcauauugau

SEQ ID NO: 601403 - RNA, 19 nt, Artificial Sequence
  Description of Artificial Sequence: Synthetic oligonucleotide
  Antisense strand to SEQ ID NO: 601402
aucaauaugccagaguggc

SEQ ID NO: 601404 - RNA, 19 nt, Artificial Sequence
  Description of Artificial Sequence: Synthetic oligonucleotide
  Sense strand starting at position 3277 of SEQ ID NO: 584945
gauguaauauaagugucaa

SEQ ID NO: 601405 - RNA, 19 nt, Artificial Sequence
  Description of Artificial Sequence: Synthetic oligonucleotide
  Antisense strand to SEQ ID NO: 601404
uugacacuuauauuacauc

SEQ ID NO: 601406 - RNA, 19 nt, Artificial Sequence
  Description of Artificial Sequence: Synthetic oligonucleotide
  Sense strand starting at position 3328 of SEQ ID NO: 584945
ugggacucuugugcauaca

SEQ ID NO: 601407 - RNA, 19 nt, Artificial Sequence
  Description of Artificial Sequence: Synthetic oligonucleotide
  Antisense strand to SEQ ID NO: 601406
uguaugcacaagaguccca

SEQ ID NO: 601408 - RNA, 19 nt, Artificial Sequence
  Description of Artificial Sequence: Synthetic oligonucleotide
  Sense strand starting at position 3329 of SEQ ID NO: 584945
gggacucuugugcauacau

SEQ ID NO: 601409 - RNA, 19 nt, Artificial Sequence
  Description of Artificial Sequence: Synthetic oligonucleotide
  Antisense strand to SEQ ID NO: 601408
auguaugcacaagaguccc

SEQ ID NO: 601410 - RNA, 19 nt, Artificial Sequence
  Description of Artificial Sequence: Synthetic oligonucleotide
  Sense strand starting at position 3338 of SEQ ID NO: 584945
gugcauacauacguaauua

SEQ ID NO: 601411 - RNA, 19 nt, Artificial Sequence
  Description of Artificial Sequence: Synthetic oligonucleotide
  Antisense strand to SEQ ID NO: 601410
uaauuacguauguaugcac

SEQ ID NO: 601412 - RNA, 19 nt, Artificial Sequence
  Description of Artificial Sequence: Synthetic oligonucleotide
  Sense strand starting at position 3369 of SEQ ID NO: 584945
cuguuaaccugacugguau

SEQ ID NO: 601413 - RNA, 19 nt, Artificial Sequence
  Description of Artificial Sequence: Synthetic oligonucleotide
  Antisense strand to SEQ ID NO: 601412
auaccagucagguuaacag

SEQ ID NO: 601414 - RNA, 19 nt, Artificial Sequence
  Description of Artificial Sequence: Synthetic oligonucleotide
  Sense strand starting at position 3376 of SEQ ID NO: 584945
ccugacugguaucaauuua

SEQ ID NO: 601415 - RNA, 19 nt, Artificial Sequence
  Description of Artificial Sequence: Synthetic oligonucleotide
  Antisense strand to SEQ ID NO: 601414
uaaauugauaccagucagg

SEQ ID NO: 601416 - RNA, 19 nt, Artificial Sequence
  Description of Artificial Sequence: Synthetic oligonucleotide
  Sense strand starting at position 3433 of SEQ ID NO: 584945
cccuguaauggugagccua

SEQ ID NO: 601417 - RNA, 19 nt, Artificial Sequence
  Description of Artificial Sequence: Synthetic oligonucleotide
  Antisense strand to SEQ ID NO: 601416
uaggcucaccauuacaggg

SEQ ID NO: 601418 - RNA, 19 nt, Artificial Sequence
  Description of Artificial Sequence: Synthetic oligonucleotide
  Sense strand starting at position 3454 of SEQ ID NO: 584945
gucccaaauguuugggaua

SEQ ID NO: 601419 - RNA, 19 nt, Artificial Sequence
  Description of Artificial Sequence: Synthetic oligonucleotide
  Antisense strand to SEQ ID NO: 601418
uaucccaaacauuugggac

SEQ ID NO: 601420 - RNA, 19 nt, Artificial Sequence
  Description of Artificial Sequence: Synthetic oligonucleotide
  Sense strand starting at position 3540 of SEQ ID NO: 584945
ugucaauucuacccaaagu

SEQ ID NO: 601421 - RNA, 19 nt, Artificial Sequence
  Description of Artificial Sequence: Synthetic oligonucleotide
  Antisense strand to SEQ ID NO: 601420
acuuuggguagaauugaca

SEQ ID NO: 601422 - RNA, 19 nt, Artificial Sequence
  Description of Artificial Sequence: Synthetic oligonucleotide
  Sense strand starting at position 8 of SEQ ID NO: 584946
cguagaguuugacucucuu

SEQ ID NO: 601423 - RNA, 19 nt, Artificial Sequence
  Description of Artificial Sequence: Synthetic oligonucleotide
  Antisense strand to SEQ ID NO: 601422
aagagagucaaacucuacg

SEQ ID NO: 601424 - RNA, 19 nt, Artificial Sequence
  Description of Artificial Sequence: Synthetic oligonucleotide
  Sense strand starting at position 14 of SEQ ID NO: 584946
guuugacucucuuuaaagu

SEQ ID NO: 601425 - RNA, 19 nt, Artificial Sequence
  Description of Artificial Sequence: Synthetic oligonucleotide
  Antisense strand to SEQ ID NO: 601424
acuuuaaagagagucaaac

SEQ ID NO: 601426 - RNA, 19 nt, Artificial Sequence
  Description of Artificial Sequence: Synthetic oligonucleotide
  Sense strand starting at position 24 of SEQ ID NO: 584946
cuuuaaagucuaugcugga

SEQ ID NO: 601427 - RNA, 19 nt, Artificial Sequence
  Description of Artificial Sequence: Synthetic oligonucleotide
  Antisense strand to SEQ ID NO: 601426
uccagcauagacuuuaaag

SEQ ID NO: 601428 - RNA, 19 nt, Artificial Sequence
  Description of Artificial Sequence: Synthetic oligonucleotide
  Sense strand starting at position 153 of SEQ ID NO: 584946
agguauucucaguacauua

SEQ ID NO: 601429 - RNA, 19 nt, Artificial Sequence
  Description of Artificial Sequence: Synthetic oligonucleotide
  Antisense strand to SEQ ID NO: 601428
uaauguacugagaauaccu

SEQ ID NO: 601430 - RNA, 19 nt, Artificial Sequence
  Description of Artificial Sequence: Synthetic oligonucleotide
  Sense strand starting at position 274 of SEQ ID NO: 584946
cuucguauuccguucuuga

SEQ ID NO: 601431 - RNA, 19 nt, Artificial Sequence
  Description of Artificial Sequence: Synthetic oligonucleotide
  Antisense strand to SEQ ID NO: 601430
ucaagaacggaauacgaag

SEQ ID NO: 601432 - RNA, 19 nt, Artificial Sequence
  Description of Artificial Sequence: Synthetic oligonucleotide
  Sense strand starting at position 275 of SEQ ID NO: 584946
uucguauuccguucuugau

SEQ ID NO: 601433 - RNA, 19 nt, Artificial Sequence
  Description of Artificial Sequence: Synthetic oligonucleotide
  Antisense strand to SEQ ID NO: 601432
aucaagaacggaauacgaa

SEQ ID NO: 601434 - RNA, 19 nt, Artificial Sequence
  Description of Artificial Sequence: Synthetic oligonucleotide
  Sense strand starting at position 277 of SEQ ID NO: 584946
cguauuccguucuugauaa

SEQ ID NO: 601435 - RNA, 19 nt, Artificial Sequence
  Description of Artificial Sequence: Synthetic oligonucleotide
  Antisense strand to SEQ ID NO: 601434
uuaucaagaacggaauacg

SEQ ID NO: 601436 - RNA, 19 nt, Artificial Sequence
  Description of Artificial Sequence: Synthetic oligonucleotide
  Sense strand starting at position 390 of SEQ ID NO: 584946
ggguggguagcagagaauu

SEQ ID NO: 601437 - RNA, 19 nt, Artificial Sequence
  Description of Artificial Sequence: Synthetic oligonucleotide
  Antisense strand to SEQ ID NO: 601436
aauucucugcuacccaccc

SEQ ID NO: 601438 - RNA, 19 nt, Artificial Sequence
  Description of Artificial Sequence: Synthetic oligonucleotide
  Sense strand starting at position 419 of SEQ ID NO: 584946
uuaaguugccgcuugcgaa

SEQ ID NO: 601439 - RNA, 19 nt, Artificial Sequence
  Description of Artificial Sequence: Synthetic oligonucleotide
  Antisense strand to SEQ ID NO: 601438
uucgcaagcggcaacuuaa

SEQ ID NO: 601440 - RNA, 19 nt, Artificial Sequence
  Description of Artificial Sequence: Synthetic oligonucleotide
  Sense strand starting at position 1224 of SEQ ID NO: 584946
ccagcuucgccuugaaauc

SEQ ID NO: 601441 - RNA, 19 nt, Artificial Sequence
  Description of Artificial Sequence: Synthetic oligonucleotide
  Antisense strand to SEQ ID NO: 601440
gauuucaaggcgaagcugg

SEQ ID NO: 601442 - RNA, 19 nt, Artificial Sequence
  Description of Artificial Sequence: Synthetic oligonucleotide
  Sense strand starting at position 1560 of SEQ ID NO: 584946
ccucgagcucauuagcgaa

SEQ ID NO: 601443 - RNA, 19 nt, Artificial Sequence
  Description of Artificial Sequence: Synthetic oligonucleotide
  Antisense strand to SEQ ID NO: 601442
uucgcuaaugagcucgagg

SEQ ID NO: 601444 - RNA, 19 nt, Artificial Sequence
  Description of Artificial Sequence: Synthetic oligonucleotide
  Sense strand starting at position 1603 of SEQ ID NO: 584946
ggaggcuccugggaaauga

SEQ ID NO: 601445 - RNA, 19 nt, Artificial Sequence
  Description of Artificial Sequence: Synthetic oligonucleotide
  Antisense strand to SEQ ID NO: 601444
ucauuucccaggagccucc

SEQ ID NO: 601446 - RNA, 19 nt, Artificial Sequence
  Description of Artificial Sequence: Synthetic oligonucleotide
  Sense strand starting at position 1772 of SEQ ID NO: 584946
gguuccugugaagguagaa

SEQ ID NO: 601447 - RNA, 19 nt, Artificial Sequence
  Description of Artificial Sequence: Synthetic oligonucleotide
  Antisense strand to SEQ ID NO: 601446
uucuaccuucacaggaacc

SEQ ID NO: 601448 - RNA, 19 nt, Artificial Sequence
  Description of Artificial Sequence: Synthetic oligonucleotide
  Sense strand starting at position 1784 of SEQ ID NO: 584946
gguagaaagcucgaaguuc

SEQ ID NO: 601449 - RNA, 19 nt, Artificial Sequence
  Description of Artificial Sequence: Synthetic oligonucleotide
  Antisense strand to SEQ ID NO: 601448
gaacuucgagcuuucuacc

SEQ ID NO: 601450 - RNA, 19 nt, Artificial Sequence
  Description of Artificial Sequence: Synthetic oligonucleotide
  Sense strand starting at position 1795 of SEQ ID NO: 584946
cgaaguuccagugugcuuu

SEQ ID NO: 601451 - RNA, 19 nt, Artificial Sequence
  Description of Artificial Sequence: Synthetic oligonucleotide
  Antisense strand to SEQ ID NO: 601450
aaagcacacuggaacuucg

SEQ ID NO: 601452 - RNA, 19 nt, Artificial Sequence
  Description of Artificial Sequence: Synthetic oligonucleotide
  Sense strand starting at position 2112 of SEQ ID NO: 584946
ccgcucuugauuggugauu

SEQ ID NO: 601453 - RNA, 19 nt, Artificial Sequence
  Description of Artificial Sequence: Synthetic oligonucleotide
  Antisense strand to SEQ ID NO: 601452
aaucaccaaucaagagcgg

SEQ ID NO: 601454 - RNA, 19 nt, Artificial Sequence
  Description of Artificial Sequence: Synthetic oligonucleotide
  Sense strand starting at position 2139 of SEQ ID NO: 584946
ucgguucuuccugauaggu

SEQ ID NO: 601455 - RNA, 19 nt, Artificial Sequence
  Description of Artificial Sequence: Synthetic oligonucleotide
  Antisense strand to SEQ ID NO: 601454
accuaucaggaagaaccga

SEQ ID NO: 601456 - RNA, 19 nt, Artificial Sequence
  Description of Artificial Sequence: Synthetic oligonucleotide
  Sense strand starting at position 2147 of SEQ ID NO: 584946
uccugauagguugaucuuu

SEQ ID NO: 601457 - RNA, 19 nt, Artificial Sequence
  Description of Artificial Sequence: Synthetic oligonucleotide
  Antisense strand to SEQ ID NO: 601456
aaagaucaaccuaucagga

SEQ ID NO: 601458 - RNA, 19 nt, Artificial Sequence
  Description of Artificial Sequence: Synthetic oligonucleotide
  Sense strand starting at position 2386 of SEQ ID NO: 584946
acgauccuuuggguugaau

SEQ ID NO: 601459 - RNA, 19 nt, Artificial Sequence
  Description of Artificial Sequence: Synthetic oligonucleotide
  Antisense strand to SEQ ID NO: 601458
auucaacccaaaggaucgu

SEQ ID NO: 601460 - RNA, 19 nt, Artificial Sequence
  Description of Artificial Sequence: Synthetic oligonucleotide
  Sense strand starting at position 2388 of SEQ ID NO: 584946
gauccuuuggguugaauug

SEQ ID NO: 601461 - RNA, 19 nt, Artificial Sequence
  Description of Artificial Sequence: Synthetic oligonucleotide
  Antisense strand to SEQ ID NO: 601460
caauucaacccaaaggauc

SEQ ID NO: 601462 - RNA, 19 nt, Artificial Sequence
  Description of Artificial Sequence: Synthetic oligonucleotide
  Sense strand starting at position 2421 of SEQ ID NO: 584946
uggucuaugcaugauguga

SEQ ID NO: 601463 - RNA, 19 nt, Artificial Sequence
  Description of Artificial Sequence: Synthetic oligonucleotide
  Antisense strand to SEQ ID NO: 601462
ucacaucaugcauagacca

SEQ ID NO: 601464 - RNA, 19 nt, Artificial Sequence
  Description of Artificial Sequence: Synthetic oligonucleotide
  Sense strand starting at position 2425 of SEQ ID NO: 584946
cuaugcaugaugugagguu

SEQ ID NO: 601465 - RNA, 19 nt, Artificial Sequence
  Description of Artificial Sequence: Synthetic oligonucleotide
  Antisense strand to SEQ ID NO: 601464
aaccucacaucaugcauag

SEQ ID NO: 601466 - RNA, 19 nt, Artificial Sequence
  Description of Artificial Sequence: Synthetic oligonucleotide
  Sense strand starting at position 2438 of SEQ ID NO: 584946
gagguucuagaauguuuaa

SEQ ID NO: 601467 - RNA, 19 nt, Artificial Sequence
  Description of Artificial Sequence: Synthetic oligonucleotide
  Antisense strand to SEQ ID NO: 601466
uuaaacauucuagaaccuc

SEQ ID NO: 601468 - RNA, 19 nt, Artificial Sequence
  Description of Artificial Sequence: Synthetic oligonucleotide
  Sense strand starting at position 2441 of SEQ ID NO: 584946
guucuagaauguuuaagaa

SEQ ID NO: 601469 - RNA, 19 nt, Artificial Sequence
  Description of Artificial Sequence: Synthetic oligonucleotide
  Antisense strand to SEQ ID NO: 601468
uucuuaaacauucuagaac

SEQ ID NO: 601470 - RNA, 19 nt, Artificial Sequence
  Description of Artificial Sequence: Synthetic oligonucleotide
  Sense strand starting at position 2466 of SEQ ID NO: 584946
uuuaguuagggugaacguu

SEQ ID NO: 601471 - RNA, 19 nt, Artificial Sequence
  Description of Artificial Sequence: Synthetic oligonucleotide
  Antisense strand to SEQ ID NO: 601470
aacguucacccuaacuaaa

SEQ ID NO: 601472 - RNA, 19 nt, Artificial Sequence
  Description of Artificial Sequence: Synthetic oligonucleotide
  Sense strand starting at position 2472 of SEQ ID NO: 584946
uagggugaacguugauuga

SEQ ID NO: 601473 - RNA, 19 nt, Artificial Sequence
  Description of Artificial Sequence: Synthetic oligonucleotide
  Antisense strand to SEQ ID NO: 601472
ucaaucaacguucacccua

SEQ ID NO: 601474 - RNA, 19 nt, Artificial Sequence
  Description of Artificial Sequence: Synthetic oligonucleotide
  Sense strand starting at position 2568 of SEQ ID NO: 584946
gccacucuggcauauugau

SEQ ID NO: 601475 - RNA, 19 nt, Artificial Sequence
  Description of Artificial Sequence: Synthetic oligonucleotide
  Antisense strand to SEQ ID NO: 601474
aucaauaugccagaguggc

SEQ ID NO: 601476 - RNA, 19 nt, Artificial Sequence
  Description of Artificial Sequence: Synthetic oligonucleotide
  Sense strand starting at position 3024 of SEQ ID NO: 584946
gauguaauauaagugucaa

SEQ ID NO: 601477 - RNA, 19 nt, Artificial Sequence
  Description of Artificial Sequence: Synthetic oligonucleotide
  Antisense strand to SEQ ID NO: 601476
uugacacuuauauuacauc

SEQ ID NO: 601478 - RNA, 19 nt, Artificial Sequence
  Description of Artificial Sequence: Synthetic oligonucleotide
  Sense strand starting at position 3075 of SEQ ID NO: 584946
ugggacucuugugcauaca

SEQ ID NO: 601479 - RNA, 19 nt, Artificial Sequence
  Description of Artificial Sequence: Synthetic oligonucleotide
  Antisense strand to SEQ ID NO: 601478
uguaugcacaagaguccca

SEQ ID NO: 601480 - RNA, 19 nt, Artificial Sequence
  Description of Artificial Sequence: Synthetic oligonucleotide
  Sense strand starting at position 3076 of SEQ ID NO: 584946
gggacucuugugcauacau

SEQ ID NO: 601481 - RNA, 19 nt, Artificial Sequence
  Description of Artificial Sequence: Synthetic oligonucleotide
  Antisense strand to SEQ ID NO: 601480
auguaugcacaagaguccc

SEQ ID NO: 601482 - RNA, 19 nt, Artificial Sequence
  Description of Artificial Sequence: Synthetic oligonucleotide
  Sense strand starting at position 3085 of SEQ ID NO: 584946
gugcauacauacguaauua

SEQ ID NO: 601483 - RNA, 19 nt, Artificial Sequence
  Description of Artificial Sequence: Synthetic oligonucleotide
  Antisense strand to SEQ ID NO: 601482
uaauuacguauguaugcac

SEQ ID NO: 601484 - RNA, 19 nt, Artificial Sequence
  Description of Artificial Sequence: Synthetic oligonucleotide
  Sense strand starting at position 3116 of SEQ ID NO: 584946
cuguuaaccugacugguau

SEQ ID NO: 601485 - RNA, 19 nt, Artificial Sequence
  Description of Artificial Sequence: Synthetic oligonucleotide
  Antisense strand to SEQ ID NO: 601484
auaccagucagguuaacag

SEQ ID NO: 601486 - RNA, 19 nt, Artificial Sequence
  Description of Artificial Sequence: Synthetic oligonucleotide
  Sense strand starting at position 3123 of SEQ ID NO: 584946
ccugacugguaucaauuua

SEQ ID NO: 601487 - RNA, 19 nt, Artificial Sequence
  Description of Artificial Sequence: Synthetic oligonucleotide
  Antisense strand to SEQ ID NO: 601486
uaaauugauaccagucagg

SEQ ID NO: 601488 - RNA, 19 nt, Artificial Sequence
  Description of Artificial Sequence: Synthetic oligonucleotide
  Sense strand starting at position 3180 of SEQ ID NO: 584946
cccuguaauggugagccua

SEQ ID NO: 601489 - RNA, 19 nt, Artificial Sequence
  Description of Artificial Sequence: Synthetic oligonucleotide
  Antisense strand to SEQ ID NO: 601488
uaggcucaccauuacaggg

SEQ ID NO: 601490 - RNA, 19 nt, Artificial Sequence
  Description of Artificial Sequence: Synthetic oligonucleotide
  Sense strand starting at position 3201 of SEQ ID NO: 584946
gucccaaauguuugggaua

SEQ ID NO: 601491 - RNA, 19 nt, Artificial Sequence
  Description of Artificial Sequence: Synthetic oligonucleotide
  Antisense strand to SEQ ID NO: 601490
uaucccaaacauuugggac

SEQ ID NO: 601492 - RNA, 19 nt, Artificial Sequence
  Description of Artificial Sequence: Synthetic oligonucleotide
  Sense strand starting at position 3287 of SEQ ID NO: 584946
ugucaauucuacccaaagu

SEQ ID NO: 601493 - RNA, 19 nt, Artificial Sequence
  Description of Artificial Sequence: Synthetic oligonucleotide
  Antisense strand to SEQ ID NO: 601492
acuuuggguagaauugaca

SEQ ID NO: 601494 - RNA, 19 nt, Artificial Sequence
  Description of Artificial Sequence: Synthetic oligonucleotide
  Sense strand starting at position 3733 of SEQ ID NO: 584946
ugguaucuuuaaucaagaa

SEQ ID NO: 601495 - RNA, 19 nt, Artificial Sequence
  Description of Artificial Sequence: Synthetic oligonucleotide
  Antisense strand to SEQ ID NO: 601494
uucuugauuaaagauacca

SEQ ID NO: 601496 - RNA, 19 nt, Artificial Sequence
  Description of Artificial Sequence: Synthetic oligonucleotide
  Sense strand starting at position 3769 of SEQ ID NO: 584946
guugccaugcacuauaaua

SEQ ID NO: 601497 - RNA, 19 nt, Artificial Sequence
  Description of Artificial Sequence: Synthetic oligonucleotide
  Antisense strand to SEQ ID NO: 601496
uauuauagugcauggcaac

SEQ ID NO: 601498 - RNA, 19 nt, Artificial Sequence
  Description of Artificial Sequence: Synthetic oligonucleotide
  Sense strand starting at position 3782 of SEQ ID NO: 584946
auaauaacugcuggagaua

SEQ ID NO: 601499 - RNA, 19 nt, Artificial Sequence
  Description of Artificial Sequence: Synthetic oligonucleotide
  Antisense strand to SEQ ID NO: 601498
uaucuccagcaguuauuau

SEQ ID NO: 601500 - RNA, 19 nt, Artificial Sequence
  Description of Artificial Sequence: Synthetic oligonucleotide
  Sense strand starting at position 3913 of SEQ ID NO: 584946
uucuaagugagucagggua

SEQ ID NO: 601501 - RNA, 19 nt, Artificial Sequence
  Description of Artificial Sequence: Synthetic oligonucleotide
  Antisense strand to SEQ ID NO: 601500
uacccugacucacuuagaa

SEQ ID NO: 601502 - RNA, 19 nt, Artificial Sequence
  Description of Artificial Sequence: Synthetic oligonucleotide
  Sense strand starting at position 651 of SEQ ID NO: 584947
uugacaggcauguggauua

SEQ ID NO: 601503 - RNA, 19 nt, Artificial Sequence
  Description of Artificial Sequence: Synthetic oligonucleotide
  Antisense strand to SEQ ID NO: 601502
uaauccacaugccugucaa

SEQ ID NO: 601504 - RNA, 19 nt, Artificial Sequence
  Description of Artificial Sequence: Synthetic oligonucleotide
  Sense strand starting at position 863 of SEQ ID NO: 584947
auggucaaugcuggugaau

SEQ ID NO: 601505 - RNA, 19 nt, Artificial Sequence
  Description of Artificial Sequence: Synthetic oligonucleotide
  Antisense strand to SEQ ID NO: 601504
auucaccagcauugaccau

SEQ ID NO: 601506 - RNA, 19 nt, Artificial Sequence
  Description of Artificial Sequence: Synthetic oligonucleotide
  Sense strand starting at position 866 of SEQ ID NO: 584947
gucaaugcuggugaaugaa

SEQ ID NO: 601507 - RNA, 19 nt, Artificial Sequence
  Description of Artificial Sequence: Synthetic oligonucleotide
  Antisense strand to SEQ ID NO: 601506
uucauucaccagcauugac

SEQ ID NO: 601508 - RNA, 19 nt, Artificial Sequence
  Description of Artificial Sequence: Synthetic oligonucleotide
  Sense strand starting at position 1163 of SEQ ID NO: 584947
cuguaaggauucuuuacuu

SEQ ID NO: 601509 - RNA, 19 nt, Artificial Sequence
  Description of Artificial Sequence: Synthetic oligonucleotide
  Antisense strand to SEQ ID NO: 601508
aaguaaagaauccuuacag

SEQ ID NO: 601510 - RNA, 19 nt, Artificial Sequence
  Description of Artificial Sequence: Synthetic oligonucleotide
  Sense strand starting at position 1210 of SEQ ID NO: 584947
cuuuauacagcaggauuaa

SEQ ID NO: 601511 - RNA, 19 nt, Artificial Sequence
  Description of Artificial Sequence: Synthetic oligonucleotide
  Antisense strand to SEQ ID NO: 601510
uuaauccugcuguauaaag

SEQ ID NO: 601512 - RNA, 19 nt, Artificial Sequence
  Description of Artificial Sequence: Synthetic oligonucleotide
  Sense strand starting at position 1301 of SEQ ID NO: 584947
agugucuggcuuuaguaau

SEQ ID NO: 601513 - RNA, 19 nt, Artificial Sequence
  Description of Artificial Sequence: Synthetic oligonucleotide
  Antisense strand to SEQ ID NO: 601512
auuacuaaagccagacacu

SEQ ID NO: 601514 - RNA, 19 nt, Artificial Sequence
  Description of Artificial Sequence: Synthetic oligonucleotide
  Sense strand starting at position 1415 of SEQ ID NO: 584947
ucacguuccauccgaaaga

SEQ ID NO: 601515 - RNA, 19 nt, Artificial Sequence
  Description of Artificial Sequence: Synthetic oligonucleotide
  Antisense strand to SEQ ID NO: 601514
ucuuucggauggaacguga

SEQ ID NO: 601516 - RNA, 19 nt, Artificial Sequence
  Description of Artificial Sequence: Synthetic oligonucleotide
  Sense strand starting at position 1435 of SEQ ID NO: 584947
aacugucgucccgagauuc

SEQ ID NO: 601517 - RNA, 19 nt, Artificial Sequence
  Description of Artificial Sequence: Synthetic oligonucleotide
  Antisense strand to SEQ ID NO: 601516
gaaucucgggacgacaguu

SEQ ID NO: 601518 - RNA, 19 nt, Artificial Sequence
  Description of Artificial Sequence: Synthetic oligonucleotide
  Sense strand starting at position 1813 of SEQ ID NO: 584947
gaaacaaggcuuggccaua

SEQ ID NO: 601519 - RNA, 19 nt, Artificial Sequence
  Description of Artificial Sequence: Synthetic oligonucleotide
  Antisense strand to SEQ ID NO: 601518
uauggccaagccuuguuuc

SEQ ID NO: 601520 - RNA, 19 nt, Artificial Sequence
  Description of Artificial Sequence: Synthetic oligonucleotide
  Sense strand starting at position 2037 of SEQ ID NO: 584947
auuacaucauugcugaaag

SEQ ID NO: 601521 - RNA, 19 nt, Artificial Sequence
  Description of Artificial Sequence: Synthetic oligonucleotide
  Antisense strand to SEQ ID NO: 601520
cuuucagcaaugauguaau

SEQ ID NO: 601522 - RNA, 19 nt, Artificial Sequence
  Description of Artificial Sequence: Synthetic oligonucleotide
  Sense strand starting at position 2055 of SEQ ID NO: 584947
gcgcuaguucugguuuaac

SEQ ID NO: 601523 - RNA, 19 nt, Artificial Sequence
  Description of Artificial Sequence: Synthetic oligonucleotide
  Antisense strand to SEQ ID NO: 601522
guuaaaccagaacuagcgc

SEQ ID NO: 601524 - RNA, 19 nt, Artificial Sequence
  Description of Artificial Sequence: Synthetic oligonucleotide
  Sense strand starting at position 2058 of SEQ ID NO: 584947
cuaguucugguuuaacuua

SEQ ID NO: 601525 - RNA, 19 nt, Artificial Sequence
  Description of Artificial Sequence: Synthetic oligonucleotide
  Antisense strand to SEQ ID NO: 601524
uaaguuaaaccagaacuag

SEQ ID NO: 601526 - RNA, 19 nt, Artificial Sequence
  Description of Artificial Sequence: Synthetic oligonucleotide
  Sense strand starting at position 2066 of SEQ ID NO: 584947
gguuuaacuuaguuuagga

SEQ ID NO: 601527 - RNA, 19 nt, Artificial Sequence
  Description of Artificial Sequence: Synthetic oligonucleotide
  Antisense strand to SEQ ID NO: 601526
uccuaaacuaaguuaaacc

SEQ ID NO: 601528 - RNA, 19 nt, Artificial Sequence
  Description of Artificial Sequence: Synthetic oligonucleotide
  Sense strand starting at position 2137 of SEQ ID NO: 584947
guccucggguuccuagaaa

SEQ ID NO: 601529 - RNA, 19 nt, Artificial Sequence
  Description of Artificial Sequence: Synthetic oligonucleotide
  Antisense strand to SEQ ID NO: 601528
uuucuaggaacccgaggac

SEQ ID NO: 601530 - RNA, 19 nt, Artificial Sequence
  Description of Artificial Sequence: Synthetic oligonucleotide
  Sense strand starting at position 2148 of SEQ ID NO: 584947
ccuagaaaugcuuaauagc

SEQ ID NO: 601531 - RNA, 19 nt, Artificial Sequence
  Description of Artificial Sequence: Synthetic oligonucleotide
  Antisense strand to SEQ ID NO: 601530
gcuauuaagcauuucuagg

SEQ ID NO: 601532 - RNA, 19 nt, Artificial Sequence
  Description of Artificial Sequence: Synthetic oligonucleotide
  Sense strand starting at position 2410 of SEQ ID NO: 584947
agaggucucuucuuuaaua

SEQ ID NO: 601533 - RNA, 19 nt, Artificial Sequence
  Description of Artificial Sequence: Synthetic oligonucleotide
  Antisense strand to SEQ ID NO: 601532
uauuaaagaagagaccucu

SEQ ID NO: 601534 - RNA, 19 nt, Artificial Sequence
  Description of Artificial Sequence: Synthetic oligonucleotide
  Sense strand starting at position 2449 of SEQ ID NO: 584947
ggauaaaggucaguuggua

SEQ ID NO: 601535 - RNA, 19 nt, Artificial Sequence
  Description of Artificial Sequence: Synthetic oligonucleotide
  Antisense strand to SEQ ID NO: 601534
uaccaacugaccuuuaucc

SEQ ID NO: 601536 - RNA, 19 nt, Artificial Sequence
  Description of Artificial Sequence: Synthetic oligonucleotide
  Sense strand starting at position 2651 of SEQ ID NO: 584947
ugaccauguguuuaccaga

SEQ ID NO: 601537 - RNA, 19 nt, Artificial Sequence
  Description of Artificial Sequence: Synthetic oligonucleotide
  Antisense strand to SEQ ID NO: 601536
ucugguaaacacaugguca

SEQ ID NO: 601538 - RNA, 19 nt, Artificial Sequence
  Description of Artificial Sequence: Synthetic oligonucleotide
  Sense strand starting at position 2706 of SEQ ID NO: 584947
ggcaauaggccaugaagaa

SEQ ID NO: 601539 - RNA, 19 nt, Artificial Sequence
  Description of Artificial Sequence: Synthetic oligonucleotide
  Antisense strand to SEQ ID NO: 601538
uucuucauggccuauugcc

SEQ ID NO: 601540 - RNA, 19 nt, Artificial Sequence
  Description of Artificial Sequence: Synthetic oligonucleotide
  Sense strand starting at position 3045 of SEQ ID NO: 584947
guauuuauguugcccuacu

SEQ ID NO: 601541 - RNA, 19 nt, Artificial Sequence
  Description of Artificial Sequence: Synthetic oligonucleotide
  Antisense strand to SEQ ID NO: 601540
aguagggcaacauaaauac

SEQ ID NO: 601542 - RNA, 19 nt, Artificial Sequence
  Description of Artificial Sequence: Synthetic oligonucleotide
  Sense strand starting at position 3260 of SEQ ID NO: 584947
aaaguaggcccuggguuau

SEQ ID NO: 601543 - RNA, 19 nt, Artificial Sequence
  Description of Artificial Sequence: Synthetic oligonucleotide
  Antisense strand to SEQ ID NO: 601542
auaacccagggccuacuuu

SEQ ID NO: 601544 - RNA, 19 nt, Artificial Sequence
  Description of Artificial Sequence: Synthetic oligonucleotide
  Sense strand starting at position 3447 of SEQ ID NO: 584947
gaccacaagcacugugaua

SEQ ID NO: 601545 - RNA, 19 nt, Artificial Sequence
  Description of Artificial Sequence: Synthetic oligonucleotide
  Antisense strand to SEQ ID NO: 601544
uaucacagugcuugugguc

SEQ ID NO: 601546 - RNA, 19 nt, Artificial Sequence
  Description of Artificial Sequence: Synthetic oligonucleotide
  Sense strand starting at position 3449 of SEQ ID NO: 584947
ccacaagcacugugauaga

SEQ ID NO: 601547 - RNA, 19 nt, Artificial Sequence
  Description of Artificial Sequence: Synthetic oligonucleotide
  Antisense strand to SEQ ID NO: 601546
ucuaucacagugcuugugg

SEQ ID NO: 601548 - RNA, 19 nt, Artificial Sequence
  Description of Artificial Sequence: Synthetic oligonucleotide
  Sense strand starting at position 3454 of SEQ ID NO: 584947
agcacugugauagaugcua

SEQ ID NO: 601549 - RNA, 19 nt, Artificial Sequence
  Description of Artificial Sequence: Synthetic oligonucleotide
  Antisense strand to SEQ ID NO: 601548
uagcaucuaucacagugcu

SEQ ID NO: 601550 - RNA, 19 nt, Artificial Sequence
  Description of Artificial Sequence: Synthetic oligonucleotide
  Sense strand starting at position 3626 of SEQ ID NO: 584947
gagagucagccagagcaaa

SEQ ID NO: 601551 - RNA, 19 nt, Artificial Sequence
  Description of Artificial Sequence: Synthetic oligonucleotide
  Antisense strand to SEQ ID NO: 601550
uuugcucuggcugacucuc

SEQ ID NO: 601552 - RNA, 19 nt, Artificial Sequence
  Description of Artificial Sequence: Synthetic oligonucleotide
  Sense strand starting at position 3665 of SEQ ID NO: 584947
ugaauuauuccacagugua

SEQ ID NO: 601553 - RNA, 19 nt, Artificial Sequence
  Description of Artificial Sequence: Synthetic oligonucleotide
  Antisense strand to SEQ ID NO: 601552
uacacuguggaauaauuca

SEQ ID NO: 601554 - RNA, 19 nt, Artificial Sequence
  Description of Artificial Sequence: Synthetic oligonucleotide
  Sense strand starting at position 3751 of SEQ ID NO: 584947
caaggugaaccuuguguau

SEQ ID NO: 601555 - RNA, 19 nt, Artificial Sequence
  Description of Artificial Sequence: Synthetic oligonucleotide
  Antisense strand to SEQ ID NO: 601554
auacacaagguucaccuug

SEQ ID NO: 601556 - RNA, 19 nt, Artificial Sequence
  Description of Artificial Sequence: Synthetic oligonucleotide
  Sense strand starting at position 3781 of SEQ ID NO: 584947
agacuuaauccuggaugua

SEQ ID NO: 601557 - RNA, 19 nt, Artificial Sequence
  Description of Artificial Sequence: Synthetic oligonucleotide
  Antisense strand to SEQ ID NO: 601556
uacauccaggauuaagucu

SEQ ID NO: 601558 - RNA, 19 nt, Artificial Sequence
  Description of Artificial Sequence: Synthetic oligonucleotide
  Sense strand starting at position 3784 of SEQ ID NO: 584947
cuuaauccuggauguaugu

SEQ ID NO: 601559 - RNA, 19 nt, Artificial Sequence
  Description of Artificial Sequence: Synthetic oligonucleotide
  Antisense strand to SEQ ID NO: 601558
acauacauccaggauuaag

SEQ ID NO: 601560 - RNA, 19 nt, Artificial Sequence
  Description of Artificial Sequence: Synthetic oligonucleotide
  Sense strand starting at position 3800 of SEQ ID NO: 584947
uguaguaggcaacaugaau

SEQ ID NO: 601561 - RNA, 19 nt, Artificial Sequence
  Description of Artificial Sequence: Synthetic oligonucleotide
  Antisense strand to SEQ ID NO: 601560
auucauguugccuacuaca

SEQ ID NO: 601562 - RNA, 19 nt, Artificial Sequence
  Description of Artificial Sequence: Synthetic oligonucleotide
  Sense strand starting at position 3818 of SEQ ID NO: 584947
uguguucgagcagauuauu

SEQ ID NO: 601563 - RNA, 19 nt, Artificial Sequence
  Description of Artificial Sequence: Synthetic oligonucleotide
  Antisense strand to SEQ ID NO: 601562
aauaaucugcucgaacaca

SEQ ID NO: 601564 - RNA, 19 nt, Artificial Sequence
  Description of Artificial Sequence: Synthetic oligonucleotide
  Sense strand starting at position 3824 of SEQ ID NO: 584947
cgagcagauuauucucuca

SEQ ID NO: 601565 - RNA, 19 nt, Artificial Sequence
  Description of Artificial Sequence: Synthetic oligonucleotide
  Antisense strand to SEQ ID NO: 601564
ugagagaauaaucugcucg

SEQ ID NO: 601566 - RNA, 19 nt, Artificial Sequence
  Description of Artificial Sequence: Synthetic oligonucleotide
  Sense strand starting at position 3827 of SEQ ID NO: 584947
gcagauuauucucucagga

SEQ ID NO: 601567 - RNA, 19 nt, Artificial Sequence
  Description of Artificial Sequence: Synthetic oligonucleotide
  Antisense strand to SEQ ID NO: 601566
uccugagagaauaaucugc

SEQ ID NO: 601568 - RNA, 19 nt, Artificial Sequence
  Description of Artificial Sequence: Synthetic oligonucleotide
  Sense strand starting at position 3849 of SEQ ID NO: 584947
uggguuugaggacgauauu

SEQ ID NO: 601569 - RNA, 19 nt, Artificial Sequence
  Description of Artificial Sequence: Synthetic oligonucleotide
  Antisense strand to SEQ ID NO: 601568
aauaucguccucaaaccca

SEQ ID NO: 601570 - RNA, 19 nt, Artificial Sequence
  Description of Artificial Sequence: Synthetic oligonucleotide
  Sense strand starting at position 3901 of SEQ ID NO: 584947
aguuguuggcugggaggaa

SEQ ID NO: 601571 - RNA, 19 nt, Artificial Sequence
  Description of Artificial Sequence: Synthetic oligonucleotide
  Antisense strand to SEQ ID NO: 601570
uuccucccagccaacaacu

SEQ ID NO: 601572 - RNA, 19 nt, Artificial Sequence
  Description of Artificial Sequence: Synthetic oligonucleotide
  Sense strand starting at position 3961 of SEQ ID NO: 584947
gcagcaagacuuggugauu

SEQ ID NO: 601573 - RNA, 19 nt, Artificial Sequence
  Description of Artificial Sequence: Synthetic oligonucleotide
  Antisense strand to SEQ ID NO: 601572
aaucaccaagucuugcugc

SEQ ID NO: 601574 - RNA, 19 nt, Artificial Sequence
  Description of Artificial Sequence: Synthetic oligonucleotide
  Sense strand starting at position 3964 of SEQ ID NO: 584947
gcaagacuuggugauugau

SEQ ID NO: 601575 - RNA, 19 nt, Artificial Sequence
  Description of Artificial Sequence: Synthetic oligonucleotide
  Antisense strand to SEQ ID NO: 601574
aucaaucaccaagucuugc

SEQ ID NO: 601576 - RNA, 19 nt, Artificial Sequence
  Description of Artificial Sequence: Synthetic oligonucleotide
  Sense strand starting at position 3972 of SEQ ID NO: 584947
uggugauugauagguacga

SEQ ID NO: 601577 - RNA, 19 nt, Artificial Sequence
  Description of Artificial Sequence: Synthetic oligonucleotide
  Antisense strand to SEQ ID NO: 601576
ucguaccuaucaaucacca

SEQ ID NO: 601578 - RNA, 19 nt, Artificial Sequence
  Description of Artificial Sequence: Synthetic oligonucleotide
  Sense strand starting at position 3973 of SEQ ID NO: 584947
ggugauugauagguacgaa

SEQ ID NO: 601579 - RNA, 19 nt, Artificial Sequence
  Description of Artificial Sequence: Synthetic oligonucleotide
  Antisense strand to SEQ ID NO: 601578
uucguaccuaucaaucacc

SEQ ID NO: 601580 - RNA, 19 nt, Artificial Sequence
  Description of Artificial Sequence: Synthetic oligonucleotide
  Sense strand starting at position 3974 of SEQ ID NO: 584947
gugauugauagguacgaaa

SEQ ID NO: 601581 - RNA, 19 nt, Artificial Sequence
  Description of Artificial Sequence: Synthetic oligonucleotide
  Antisense strand to SEQ ID NO: 601580
uuucguaccuaucaaucac

SEQ ID NO: 601582 - RNA, 19 nt, Artificial Sequence
  Description of Artificial Sequence: Synthetic oligonucleotide
  Sense strand starting at position 24 of SEQ ID NO: 584948
cgggaaagccugugugcua

SEQ ID NO: 601583 - RNA, 19 nt, Artificial Sequence
  Description of Artificial Sequence: Synthetic oligonucleotide
  Antisense strand to SEQ ID NO: 601582
uagcacacaggcuuucccg

SEQ ID NO: 601584 - RNA, 19 nt, Artificial Sequence
  Description of Artificial Sequence: Synthetic oligonucleotide
  Sense strand starting at position 25 of SEQ ID NO: 584948
gggaaagccugugugcuau

SEQ ID NO: 601585 - RNA, 19 nt, Artificial Sequence
  Description of Artificial Sequence: Synthetic oligonucleotide
  Antisense strand to SEQ ID NO: 601584
auagcacacaggcuuuccc

SEQ ID NO: 601586 - RNA, 19 nt, Artificial Sequence
  Description of Artificial Sequence: Synthetic oligonucleotide
  Sense strand starting at position 140 of SEQ ID NO: 584948
augagucaguuuccugcaa

SEQ ID NO: 601587 - RNA, 19 nt, Artificial Sequence
  Description of Artificial Sequence: Synthetic oligonucleotide
  Antisense strand to SEQ ID NO: 601586
uugcaggaaacugacucau

SEQ ID NO: 601588 - RNA, 19 nt, Artificial Sequence
  Description of Artificial Sequence: Synthetic oligonucleotide
  Sense strand starting at position 311 of SEQ ID NO: 584948
gcucuugugccgucucuga

SEQ ID NO: 601589 - RNA, 19 nt, Artificial Sequence
  Description of Artificial Sequence: Synthetic oligonucleotide
  Antisense strand to SEQ ID NO: 601588
ucagagacggcacaagagc

SEQ ID NO: 601590 - RNA, 19 nt, Artificial Sequence
  Description of Artificial Sequence: Synthetic oligonucleotide
  Sense strand starting at position 313 of SEQ ID NO: 584948
ucuugugccgucucugaca

SEQ ID NO: 601591 - RNA, 19 nt, Artificial Sequence
  Description of Artificial Sequence: Synthetic oligonucleotide
  Antisense strand to SEQ ID NO: 601590
ugucagagacggcacaaga

SEQ ID NO: 601592 - RNA, 19 nt, Artificial Sequence
  Description of Artificial Sequence: Synthetic oligonucleotide
  Sense strand starting at position 448 of SEQ ID NO: 584948
ugagucagaucccuggaaa

SEQ ID NO: 601593 - RNA, 19 nt, Artificial Sequence
  Description of Artificial Sequence: Synthetic oligonucleotide
  Antisense strand to SEQ ID NO: 601592
uuuccagggaucugacuca

SEQ ID NO: 601594 - RNA, 19 nt, Artificial Sequence
  Description of Artificial Sequence: Synthetic oligonucleotide
  Sense strand starting at position 715 of SEQ ID NO: 584948
guagcuuucggagagggaa

SEQ ID NO: 601595 - RNA, 19 nt, Artificial Sequence
  Description of Artificial Sequence: Synthetic oligonucleotide
  Antisense strand to SEQ ID NO: 601594
uucccucuccgaaagcuac

SEQ ID NO: 601596 - RNA, 19 nt, Artificial Sequence
  Description of Artificial Sequence: Synthetic oligonucleotide
  Sense strand starting at position 727 of SEQ ID NO: 584948
gagggaaucugggcuaggu

SEQ ID NO: 601597 - RNA, 19 nt, Artificial Sequence
  Description of Artificial Sequence: Synthetic oligonucleotide
  Antisense strand to SEQ ID NO: 601596
accuagcccagauucccuc

SEQ ID NO: 601598 - RNA, 19 nt, Artificial Sequence
  Description of Artificial Sequence: Synthetic oligonucleotide
  Sense strand starting at position 1072 of SEQ ID NO: 584948
cggcuuccuugggaacaaa

SEQ ID NO: 601599 - RNA, 19 nt, Artificial Sequence
  Description of Artificial Sequence: Synthetic oligonucleotide
  Antisense strand to SEQ ID NO: 601598
uuuguucccaaggaagccg

SEQ ID NO: 601600 - RNA, 19 nt, Artificial Sequence
  Description of Artificial Sequence: Synthetic oligonucleotide
  Sense strand starting at position 1610 of SEQ ID NO: 584948
cagggauuccuguacuugu

SEQ ID NO: 601601 - RNA, 19 nt, Artificial Sequence
  Description of Artificial Sequence: Synthetic oligonucleotide
  Antisense strand to SEQ ID NO: 601600
acaaguacaggaaucccug

SEQ ID NO: 601602 - RNA, 19 nt, Artificial Sequence
  Description of Artificial Sequence: Synthetic oligonucleotide
  Sense strand starting at position 1613 of SEQ ID NO: 584948
ggauuccuguacuuguaau

SEQ ID NO: 601603 - RNA, 19 nt, Artificial Sequence
  Description of Artificial Sequence: Synthetic oligonucleotide
  Antisense strand to SEQ ID NO: 601602
auuacaaguacaggaaucc

SEQ ID NO: 601604 - RNA, 19 nt, Artificial Sequence
  Description of Artificial Sequence: Synthetic oligonucleotide
  Sense strand starting at position 2230 of SEQ ID NO: 584948
cgaagugagccacaaaucu

SEQ ID NO: 601605 - RNA, 19 nt, Artificial Sequence
  Description of Artificial Sequence: Synthetic oligonucleotide
  Antisense strand to SEQ ID NO: 601604
agauuuguggcucacuucg

SEQ ID NO: 601606 - RNA, 19 nt, Artificial Sequence
  Description of Artificial Sequence: Synthetic oligonucleotide
  Sense strand starting at position 2262 of SEQ ID NO: 584948
uggagaaugaguuggcacu

SEQ ID NO: 601607 - RNA, 19 nt, Artificial Sequence
  Description of Artificial Sequence: Synthetic oligonucleotide
  Antisense strand to SEQ ID NO: 601606
agugccaacucauucucca

SEQ ID NO: 601608 - RNA, 19 nt, Artificial Sequence
  Description of Artificial Sequence: Synthetic oligonucleotide
  Sense strand starting at position 2378 of SEQ ID NO: 584948
ucaggaggaugacauuaau

SEQ ID NO: 601609 - RNA, 19 nt, Artificial Sequence
  Description of Artificial Sequence: Synthetic oligonucleotide
  Antisense strand to SEQ ID NO: 601608
auuaaugucauccuccuga

SEQ ID NO: 601610 - RNA, 19 nt, Artificial Sequence
  Description of Artificial Sequence: Synthetic oligonucleotide
  Sense strand starting at position 2384 of SEQ ID NO: 584948
ggaugacauuaauacauaa

SEQ ID NO: 601611 - RNA, 19 nt, Artificial Sequence
  Description of Artificial Sequence: Synthetic oligonucleotide
  Antisense strand to SEQ ID NO: 601610
uuauguauuaaugucaucc

SEQ ID NO: 601612 - RNA, 19 nt, Artificial Sequence
  Description of Artificial Sequence: Synthetic oligonucleotide
  Sense strand starting at position 2423 of SEQ ID NO: 584948
cgaugcaccucucugcaau

SEQ ID NO: 601613 - RNA, 19 nt, Artificial Sequence
  Description of Artificial Sequence: Synthetic oligonucleotide
  Antisense strand to SEQ ID NO: 601612
auugcagagaggugcaucg

SEQ ID NO: 601614 - RNA, 19 nt, Artificial Sequence
  Description of Artificial Sequence: Synthetic oligonucleotide
  Sense strand starting at position 2612 of SEQ ID NO: 584948
aguauacaaaguuguugau

SEQ ID NO: 601615 - RNA, 19 nt, Artificial Sequence
  Description of Artificial Sequence: Synthetic oligonucleotide
  Antisense strand to SEQ ID NO: 601614
aucaacaacuuuguauacu

SEQ ID NO: 601616 - RNA, 19 nt, Artificial Sequence
  Description of Artificial Sequence: Synthetic oligonucleotide
  Sense strand starting at position 2619 of SEQ ID NO: 584948
aaaguuguugauugucaca

SEQ ID NO: 601617 - RNA, 19 nt, Artificial Sequence
  Description of Artificial Sequence: Synthetic oligonucleotide
  Antisense strand to SEQ ID NO: 601616
ugugacaaucaacaacuuu

SEQ ID NO: 601618 - RNA, 19 nt, Artificial Sequence
  Description of Artificial Sequence: Synthetic oligonucleotide
  Sense strand starting at position 2621 of SEQ ID NO: 584948
aguuguugauugucacaug

SEQ ID NO: 601619 - RNA, 19 nt, Artificial Sequence
  Description of Artificial Sequence: Synthetic oligonucleotide
  Antisense strand to SEQ ID NO: 601618
caugugacaaucaacaacu

SEQ ID NO: 601620 - RNA, 19 nt, Artificial Sequence
  Description of Artificial Sequence: Synthetic oligonucleotide
  Sense strand starting at position 2979 of SEQ ID NO: 584948
uuauuucuguggcuccaaa

SEQ ID NO: 601621 - RNA, 19 nt, Artificial Sequence
  Description of Artificial Sequence: Synthetic oligonucleotide
  Antisense strand to SEQ ID NO: 601620
uuuggagccacagaaauaa

SEQ ID NO: 601622 - RNA, 19 nt, Artificial Sequence
  Description of Artificial Sequence: Synthetic oligonucleotide
  Sense strand starting at position 3027 of SEQ ID NO: 584948
gcagaugguuuauggagau

SEQ ID NO: 601623 - RNA, 19 nt, Artificial Sequence
  Description of Artificial Sequence: Synthetic oligonucleotide
  Antisense strand to SEQ ID NO: 601622
aucuccauaaaccaucugc

SEQ ID NO: 601624 - RNA, 19 nt, Artificial Sequence
  Description of Artificial Sequence: Synthetic oligonucleotide
  Sense strand starting at position 3055 of SEQ ID NO: 584948
aaaggacaauucuggaagu

SEQ ID NO: 601625 - RNA, 19 nt, Artificial Sequence
  Description of Artificial Sequence: Synthetic oligonucleotide
  Antisense strand to SEQ ID NO: 601624
acuuccagaauuguccuuu

SEQ ID NO: 601626 - RNA, 19 nt, Artificial Sequence
  Description of Artificial Sequence: Synthetic oligonucleotide
  Sense strand starting at position 3078 of SEQ ID NO: 584948
acugguucuucugacagac

SEQ ID NO: 601627 - RNA, 19 nt, Artificial Sequence
  Description of Artificial Sequence: Synthetic oligonucleotide
  Antisense strand to SEQ ID NO: 601626
gucugucagaagaaccagu

SEQ ID NO: 601628 - RNA, 19 nt, Artificial Sequence
  Description of Artificial Sequence: Synthetic oligonucleotide
  Sense strand starting at position 3097 of SEQ ID NO: 584948
acagaaaugagugaugugu

SEQ ID NO: 601629 - RNA, 19 nt, Artificial Sequence
  Description of Artificial Sequence: Synthetic oligonucleotide
  Antisense strand to SEQ ID NO: 601628
acacaucacucauuucugu

SEQ ID NO: 601630 - RNA, 19 nt, Artificial Sequence
  Description of Artificial Sequence: Synthetic oligonucleotide
  Sense strand starting at position 3099 of SEQ ID NO: 584948
agaaaugagugaugugucu

SEQ ID NO: 601631 - RNA, 19 nt, Artificial Sequence
  Description of Artificial Sequence: Synthetic oligonucleotide
  Antisense strand to SEQ ID NO: 601630
agacacaucacucauuucu

SEQ ID NO: 601632 - RNA, 19 nt, Artificial Sequence
  Description of Artificial Sequence: Synthetic oligonucleotide
  Sense strand starting at position 3172 of SEQ ID NO: 584948
ccuuucugugccugaaaca

SEQ ID NO: 601633 - RNA, 19 nt, Artificial Sequence
  Description of Artificial Sequence: Synthetic oligonucleotide
  Antisense strand to SEQ ID NO: 601632
uguuucaggcacagaaagg

SEQ ID NO: 601634 - RNA, 19 nt, Artificial Sequence
  Description of Artificial Sequence: Synthetic oligonucleotide
  Sense strand starting at position 3173 of SEQ ID NO: 584948
cuuucugugccugaaacau

SEQ ID NO: 601635 - RNA, 19 nt, Artificial Sequence
  Description of Artificial Sequence: Synthetic oligonucleotide
  Antisense strand to SEQ ID NO: 601634
auguuucaggcacagaaag

SEQ ID NO: 601636 - RNA, 19 nt, Artificial Sequence
  Description of Artificial Sequence: Synthetic oligonucleotide
  Sense strand starting at position 3303 of SEQ ID NO: 584948
cugcucagagucuggaaau

SEQ ID NO: 601637 - RNA, 19 nt, Artificial Sequence
  Description of Artificial Sequence: Synthetic oligonucleotide
  Antisense strand to SEQ ID NO: 601636
auuuccagacucugagcag

SEQ ID NO: 601638 - RNA, 19 nt, Artificial Sequence
  Description of Artificial Sequence: Synthetic oligonucleotide
  Sense strand starting at position 3314 of SEQ ID NO: 584948
cuggaaaucucugcccaga

SEQ ID NO: 601639 - RNA, 19 nt, Artificial Sequence
  Description of Artificial Sequence: Synthetic oligonucleotide
  Antisense strand to SEQ ID NO: 601638
ucugggcagagauuuccag

SEQ ID NO: 601640 - RNA, 19 nt, Artificial Sequence
  Description of Artificial Sequence: Synthetic oligonucleotide
  Sense strand starting at position 3316 of SEQ ID NO: 584948
ggaaaucucugcccagaca

SEQ ID NO: 601641 - RNA, 19 nt, Artificial Sequence
  Description of Artificial Sequence: Synthetic oligonucleotide
  Antisense strand to SEQ ID NO: 601640
ugucugggcagagauuucc

SEQ ID NO: 601642 - RNA, 19 nt, Artificial Sequence
  Description of Artificial Sequence: Synthetic oligonucleotide
  Sense strand starting at position 3341 of SEQ ID NO: 584948
gucuucuuccucuaacgca

SEQ ID NO: 601643 - RNA, 19 nt, Artificial Sequence
  Description of Artificial Sequence: Synthetic oligonucleotide
  Antisense strand to SEQ ID NO: 601642
ugcguuagaggaagaagac

SEQ ID NO: 601644 - RNA, 19 nt, Artificial Sequence
  Description of Artificial Sequence: Synthetic oligonucleotide
  Sense strand starting at position 3588 of SEQ ID NO: 584948
uugucaaauguccagcaga

SEQ ID NO: 601645 - RNA, 19 nt, Artificial Sequence
  Description of Artificial Sequence: Synthetic oligonucleotide
  Antisense strand to SEQ ID NO: 601644
ucugcuggacauuugacaa

SEQ ID NO: 601646 - RNA, 19 nt, Artificial Sequence
  Description of Artificial Sequence: Synthetic oligonucleotide
  Sense strand starting at position 3666 of SEQ ID NO: 584948
cuagacauugucugucugu

SEQ ID NO: 601647 - RNA, 19 nt, Artificial Sequence
  Description of Artificial Sequence: Synthetic oligonucleotide
  Antisense strand to SEQ ID NO: 601646
acagacagacaaugucuag

SEQ ID NO: 601648 - RNA, 19 nt, Artificial Sequence
  Description of Artificial Sequence: Synthetic oligonucleotide
  Sense strand starting at position 3667 of SEQ ID NO: 584948
uagacauugucugucuguu

SEQ ID NO: 601649 - RNA, 19 nt, Artificial Sequence
  Description of Artificial Sequence: Synthetic oligonucleotide
  Antisense strand to SEQ ID NO: 601648
aacagacagacaaugucua

SEQ ID NO: 601650 - RNA, 19 nt, Artificial Sequence
  Description of Artificial Sequence: Synthetic oligonucleotide
  Sense strand starting at position 3669 of SEQ ID NO: 584948
gacauugucugucuguuua

SEQ ID NO: 601651 - RNA, 19 nt, Artificial Sequence
  Description of Artificial Sequence: Synthetic oligonucleotide
  Antisense strand to SEQ ID NO: 601650
uaaacagacagacaauguc

SEQ ID NO: 601652 - RNA, 19 nt, Artificial Sequence
  Description of Artificial Sequence: Synthetic oligonucleotide
  Sense strand starting at position 3673 of SEQ ID NO: 584948
uugucugucuguuuacuuu

SEQ ID NO: 601653 - RNA, 19 nt, Artificial Sequence
  Description of Artificial Sequence: Synthetic oligonucleotide
  Antisense strand to SEQ ID NO: 601652
aaaguaaacagacagacaa

SEQ ID NO: 601654 - RNA, 19 nt, Artificial Sequence
  Description of Artificial Sequence: Synthetic oligonucleotide
  Sense strand starting at position 3708 of SEQ ID NO: 584948
uuaauaaaggcuuguaaug

SEQ ID NO: 601655 - RNA, 19 nt, Artificial Sequence
  Description of Artificial Sequence: Synthetic oligonucleotide
  Antisense strand to SEQ ID NO: 601654
cauuacaagccuuuauuaa

SEQ ID NO: 601656 - RNA, 19 nt, Artificial Sequence
  Description of Artificial Sequence: Synthetic oligonucleotide
  Sense strand starting at position 3855 of SEQ ID NO: 584948
cuacuaagugucuaguacu

SEQ ID NO: 601657 - RNA, 19 nt, Artificial Sequence
  Description of Artificial Sequence: Synthetic oligonucleotide
  Antisense strand to SEQ ID NO: 601656
aguacuagacacuuaguag

SEQ ID NO: 601658 - RNA, 19 nt, Artificial Sequence
  Description of Artificial Sequence: Synthetic oligonucleotide
  Sense strand starting at position 3912 of SEQ ID NO: 584948
uugaauguguacccagaca

SEQ ID NO: 601659 - RNA, 19 nt, Artificial Sequence
  Description of Artificial Sequence: Synthetic oligonucleotide
  Antisense strand to SEQ ID NO: 601658
ugucuggguacacauucaa

SEQ ID NO: 601660 - RNA, 19 nt, Artificial Sequence
  Description of Artificial Sequence: Synthetic oligonucleotide
  Sense strand starting at position 3941 of SEQ ID NO: 584948
gaggacuucugcccugaaa

SEQ ID NO: 601661 - RNA, 19 nt, Artificial Sequence
  Description of Artificial Sequence: Synthetic oligonucleotide
  Antisense strand to SEQ ID NO: 601660
uuucagggcagaaguccuc

SEQ ID NO: 601662 - RNA, 19 nt, Artificial Sequence
  Description of Artificial Sequence: Synthetic oligonucleotide
  Sense strand starting at position 11 of SEQ ID NO: 584949
cgaagugagccacaaaucu

SEQ ID NO: 601663 - RNA, 19 nt, Artificial Sequence
  Description of Artificial Sequence: Synthetic oligonucleotide
  Antisense strand to SEQ ID NO: 601662
agauuuguggcucacuucg

SEQ ID NO: 601664 - RNA, 19 nt, Artificial Sequence
  Description of Artificial Sequence: Synthetic oligonucleotide
  Sense strand starting at position 43 of SEQ ID NO: 584949
uggagaaugaguuggcacu

SEQ ID NO: 601665 - RNA, 19 nt, Artificial Sequence
  Description of Artificial Sequence: Synthetic oligonucleotide
  Antisense strand to SEQ ID NO: 601664
agugccaacucauucucca

SEQ ID NO: 601666 - RNA, 19 nt, Artificial Sequence
  Description of Artificial Sequence: Synthetic oligonucleotide
  Sense strand starting at position 159 of SEQ ID NO: 584949
ucaggaggaugacauuaau

SEQ ID NO: 601667 - RNA, 19 nt, Artificial Sequence
  Description of Artificial Sequence: Synthetic oligonucleotide
  Antisense strand to SEQ ID NO: 601666
auuaaugucauccuccuga

SEQ ID NO: 601668 - RNA, 19 nt, Artificial Sequence
  Description of Artificial Sequence: Synthetic oligonucleotide
  Sense strand starting at position 165 of SEQ ID NO: 584949
ggaugacauuaauacauaa

SEQ ID NO: 601669 - RNA, 19 nt, Artificial Sequence
  Description of Artificial Sequence: Synthetic oligonucleotide
  Antisense strand to SEQ ID NO: 601668
uuauguauuaaugucaucc

SEQ ID NO: 601670 - RNA, 19 nt, Artificial Sequence
  Description of Artificial Sequence: Synthetic oligonucleotide
  Sense strand starting at position 204 of SEQ ID NO: 584949
cgaugcaccucucugcaau

SEQ ID NO: 601671 - RNA, 19 nt, Artificial Sequence
  Description of Artificial Sequence: Synthetic oligonucleotide
  Antisense strand to SEQ ID NO: 601670
auugcagagaggugcaucg

SEQ ID NO: 601672 - RNA, 19 nt, Artificial Sequence
  Description of Artificial Sequence: Synthetic oligonucleotide
  Sense strand starting at position 393 of SEQ ID NO: 584949
aguauacaaaguuguugau

SEQ ID NO: 601673 - RNA, 19 nt, Artificial Sequence
  Description of Artificial Sequence: Synthetic oligonucleotide
  Antisense strand to SEQ ID NO: 601672
aucaacaacuuuguauacu

SEQ ID NO: 601674 - RNA, 19 nt, Artificial Sequence
  Description of Artificial Sequence: Synthetic oligonucleotide
  Sense strand starting at position 400 of SEQ ID NO: 584949
aaaguuguugauugucaca

SEQ ID NO: 601675 - RNA, 19 nt, Artificial Sequence
  Description of Artificial Sequence: Synthetic oligonucleotide
  Antisense strand to SEQ ID NO: 601674
ugugacaaucaacaacuuu

SEQ ID NO: 601676 - RNA, 19 nt, Artificial Sequence
  Description of Artificial Sequence: Synthetic oligonucleotide
  Sense strand starting at position 402 of SEQ ID NO: 584949
aguuguugauugucacaug

SEQ ID NO: 601677 - RNA, 19 nt, Artificial Sequence
  Description of Artificial Sequence: Synthetic oligonucleotide
  Antisense strand to SEQ ID NO: 601676
caugugacaaucaacaacu

SEQ ID NO: 601678 - RNA, 19 nt, Artificial Sequence
  Description of Artificial Sequence: Synthetic oligonucleotide
  Sense strand starting at position 760 of SEQ ID NO: 584949
uuauuucuguggcuccaaa

SEQ ID NO: 601679 - RNA, 19 nt, Artificial Sequence
  Description of Artificial Sequence: Synthetic oligonucleotide
  Antisense strand to SEQ ID NO: 601678
uuuggagccacagaaauaa

SEQ ID NO: 601680 - RNA, 19 nt, Artificial Sequence
  Description of Artificial Sequence: Synthetic oligonucleotide
  Sense strand starting at position 836 of SEQ ID NO: 584949
aaaggacaauucuggaagu

SEQ ID NO: 601681 - RNA, 19 nt, Artificial Sequence
  Description of Artificial Sequence: Synthetic oligonucleotide
  Antisense strand to SEQ ID NO: 601680
acuuccagaauuguccuuu

SEQ ID NO: 601682 - RNA, 19 nt, Artificial Sequence
  Description of Artificial Sequence: Synthetic oligonucleotide
  Sense strand starting at position 878 of SEQ ID NO: 584949
acagaaaugagugaugugu

SEQ ID NO: 601683 - RNA, 19 nt, Artificial Sequence
  Description of Artificial Sequence: Synthetic oligonucleotide
  Antisense strand to SEQ ID NO: 601682
acacaucacucauuucugu

SEQ ID NO: 601684 - RNA, 19 nt, Artificial Sequence
  Description of Artificial Sequence: Synthetic oligonucleotide
  Sense strand starting at position 953 of SEQ ID NO: 584949
ccuuucugugccugaaaca

SEQ ID NO: 601685 - RNA, 19 nt, Artificial Sequence
  Description of Artificial Sequence: Synthetic oligonucleotide
  Antisense strand to SEQ ID NO: 601684
uguuucaggcacagaaagg

SEQ ID NO: 601686 - RNA, 19 nt, Artificial Sequence
  Description of Artificial Sequence: Synthetic oligonucleotide
  Sense strand starting at position 954 of SEQ ID NO: 584949
cuuucugugccugaaacau

SEQ ID NO: 601687 - RNA, 19 nt, Artificial Sequence
  Description of Artificial Sequence: Synthetic oligonucleotide
  Antisense strand to SEQ ID NO: 601686
auguuucaggcacagaaag

SEQ ID NO: 601688 - RNA, 19 nt, Artificial Sequence
  Description of Artificial Sequence: Synthetic oligonucleotide
  Sense strand starting at position 1084 of SEQ ID NO: 584949
cugcucagagucuggaaau

SEQ ID NO: 601689 - RNA, 19 nt, Artificial Sequence
  Description of Artificial Sequence: Synthetic oligonucleotide
  Antisense strand to SEQ ID NO: 601688
auuuccagacucugagcag

SEQ ID NO: 601690 - RNA, 19 nt, Artificial Sequence
  Description of Artificial Sequence: Synthetic oligonucleotide
  Sense strand starting at position 1095 of SEQ ID NO: 584949
cuggaaaucucugcccaga

SEQ ID NO: 601691 - RNA, 19 nt, Artificial Sequence
  Description of Artificial Sequence: Synthetic oligonucleotide
  Antisense strand to SEQ ID NO: 601690
ucugggcagagauuuccag

SEQ ID NO: 601692 - RNA, 19 nt, Artificial Sequence
  Description of Artificial Sequence: Synthetic oligonucleotide
  Sense strand starting at position 1097 of SEQ ID NO: 584949
ggaaaucucugcccagaca

SEQ ID NO: 601693 - RNA, 19 nt, Artificial Sequence
  Description of Artificial Sequence: Synthetic oligonucleotide
  Antisense strand to SEQ ID NO: 601692
ugucugggcagagauuucc

SEQ ID NO: 601694 - RNA, 19 nt, Artificial Sequence
  Description of Artificial Sequence: Synthetic oligonucleotide
  Sense strand starting at position 1122 of SEQ ID NO: 584949
gucuucuuccucuaacgca

SEQ ID NO: 601695 - RNA, 19 nt, Artificial Sequence
  Description of Artificial Sequence: Synthetic oligonucleotide
  Antisense strand to SEQ ID NO: 601694
ugcguuagaggaagaagac

SEQ ID NO: 601696 - RNA, 19 nt, Artificial Sequence
  Description of Artificial Sequence: Synthetic oligonucleotide
  Sense strand starting at position 1369 of SEQ ID NO: 584949
uugucaaauguccagcaga

SEQ ID NO: 601697 - RNA, 19 nt, Artificial Sequence
  Description of Artificial Sequence: Synthetic oligonucleotide
  Antisense strand to SEQ ID NO: 601696
ucugcuggacauuugacaa

SEQ ID NO: 601698 - RNA, 19 nt, Artificial Sequence
  Description of Artificial Sequence: Synthetic oligonucleotide
  Sense strand starting at position 1447 of SEQ ID NO: 584949
cuagacauugucugucugu

SEQ ID NO: 601699 - RNA, 19 nt, Artificial Sequence
  Description of Artificial Sequence: Synthetic oligonucleotide
  Antisense strand to SEQ ID NO: 601698
acagacagacaaugucuag

SEQ ID NO: 601700 - RNA, 19 nt, Artificial Sequence
  Description of Artificial Sequence: Synthetic oligonucleotide
  Sense strand starting at position 1448 of SEQ ID NO: 584949
uagacauugucugucuguu

SEQ ID NO: 601701 - RNA, 19 nt, Artificial Sequence
  Description of Artificial Sequence: Synthetic oligonucleotide
  Antisense strand to SEQ ID NO: 601700
aacagacagacaaugucua

SEQ ID NO: 601702 - RNA, 19 nt, Artificial Sequence
  Description of Artificial Sequence: Synthetic oligonucleotide
  Sense strand starting at position 1450 of SEQ ID NO: 584949
gacauugucugucuguuua

SEQ ID NO: 601703 - RNA, 19 nt, Artificial Sequence
  Description of Artificial Sequence: Synthetic oligonucleotide
  Antisense strand to SEQ ID NO: 601702
uaaacagacagacaauguc

SEQ ID NO: 601704 - RNA, 19 nt, Artificial Sequence
  Description of Artificial Sequence: Synthetic oligonucleotide
  Sense strand starting at position 1454 of SEQ ID NO: 584949
uugucugucuguuuacuuu

SEQ ID NO: 601705 - RNA, 19 nt, Artificial Sequence
  Description of Artificial Sequence: Synthetic oligonucleotide
  Antisense strand to SEQ ID NO: 601704
aaaguaaacagacagacaa

SEQ ID NO: 601706 - RNA, 19 nt, Artificial Sequence
  Description of Artificial Sequence: Synthetic oligonucleotide
  Sense strand starting at position 1489 of SEQ ID NO: 584949
uuaauaaaggcuuguaaug

SEQ ID NO: 601707 - RNA, 19 nt, Artificial Sequence
  Description of Artificial Sequence: Synthetic oligonucleotide
  Antisense strand to SEQ ID NO: 601706
cauuacaagccuuuauuaa

SEQ ID NO: 601708 - RNA, 19 nt, Artificial Sequence
  Description of Artificial Sequence: Synthetic oligonucleotide
  Sense strand starting at position 1636 of SEQ ID NO: 584949
cuacuaagugucuaguacu

SEQ ID NO: 601709 - RNA, 19 nt, Artificial Sequence
  Description of Artificial Sequence: Synthetic oligonucleotide
  Antisense strand to SEQ ID NO: 601708
aguacuagacacuuaguag

SEQ ID NO: 601710 - RNA, 19 nt, Artificial Sequence
  Description of Artificial Sequence: Synthetic oligonucleotide
  Sense strand starting at position 1693 of SEQ ID NO: 584949
uugaauguguacccagaca

SEQ ID NO: 601711 - RNA, 19 nt, Artificial Sequence
  Description of Artificial Sequence: Synthetic oligonucleotide
  Antisense strand to SEQ ID NO: 601710
ugucuggguacacauucaa

SEQ ID NO: 601712 - RNA, 19 nt, Artificial Sequence
  Description of Artificial Sequence: Synthetic oligonucleotide
  Sense strand starting at position 1722 of SEQ ID NO: 584949
gaggacuucugcccugaaa

SEQ ID NO: 601713 - RNA, 19 nt, Artificial Sequence
  Description of Artificial Sequence: Synthetic oligonucleotide
  Antisense strand to SEQ ID NO: 601712
uuucagggcagaaguccuc

SEQ ID NO: 601714 - RNA, 19 nt, Artificial Sequence
  Description of Artificial Sequence: Synthetic oligonucleotide
  Sense strand starting at position 1836 of SEQ ID NO: 584949
caaggaucugcuggcagau

SEQ ID NO: 601715 - RNA, 19 nt, Artificial Sequence
  Description of Artificial Sequence: Synthetic oligonucleotide
  Antisense strand to SEQ ID NO: 601714
aucugccagcagauccuug

SEQ ID NO: 601716 - RNA, 19 nt, Artificial Sequence
  Description of Artificial Sequence: Synthetic oligonucleotide
  Sense strand starting at position 2052 of SEQ ID NO: 584949
ccaagcauguuccugggaa

SEQ ID NO: 601717 - RNA, 19 nt, Artificial Sequence
  Description of Artificial Sequence: Synthetic oligonucleotide
  Antisense strand to SEQ ID NO: 601716
uucccaggaacaugcuugg

SEQ ID NO: 601718 - RNA, 19 nt, Artificial Sequence
  Description of Artificial Sequence: Synthetic oligonucleotide
  Sense strand starting at position 2220 of SEQ ID NO: 584949
cucagugguggcugcagaa

SEQ ID NO: 601719 - RNA, 19 nt, Artificial Sequence
  Description of Artificial Sequence: Synthetic oligonucleotide
  Antisense strand to SEQ ID NO: 601718
uucugcagccaccacugag

SEQ ID NO: 601720 - RNA, 19 nt, Artificial Sequence
  Description of Artificial Sequence: Synthetic oligonucleotide
  Sense strand starting at position 2255 of SEQ ID NO: 584949
gaggaagugcugggaacaa

SEQ ID NO: 601721 - RNA, 19 nt, Artificial Sequence
  Description of Artificial Sequence: Synthetic oligonucleotide
  Antisense strand to SEQ ID NO: 601720
uuguucccagcacuuccuc

SEQ ID NO: 601722 - RNA, 19 nt, Artificial Sequence
  Description of Artificial Sequence: Synthetic oligonucleotide
  Sense strand starting at position 2265 of SEQ ID NO: 584949
ugggaacaaugucaccauu

SEQ ID NO: 601723 - RNA, 19 nt, Artificial Sequence
  Description of Artificial Sequence: Synthetic oligonucleotide
  Antisense strand to SEQ ID NO: 601722
aauggugacauuguuccca

SEQ ID NO: 601724 - RNA, 19 nt, Artificial Sequence
  Description of Artificial Sequence: Synthetic oligonucleotide
  Sense strand starting at position 2275 of SEQ ID NO: 584949
gucaccauuucucagaaag

SEQ ID NO: 601725 - RNA, 19 nt, Artificial Sequence
  Description of Artificial Sequence: Synthetic oligonucleotide
  Antisense strand to SEQ ID NO: 601724
cuuucugagaaauggugac

SEQ ID NO: 601726 - RNA, 19 nt, Artificial Sequence
  Description of Artificial Sequence: Synthetic oligonucleotide
  Sense strand starting at position 2632 of SEQ ID NO: 584949
ucugacaagugguuaguaa

SEQ ID NO: 601727 - RNA, 19 nt, Artificial Sequence
  Description of Artificial Sequence: Synthetic oligonucleotide
  Antisense strand to SEQ ID NO: 601726
uuacuaaccacuugucaga

SEQ ID NO: 601728 - RNA, 19 nt, Artificial Sequence
  Description of Artificial Sequence: Synthetic oligonucleotide
  Sense strand starting at position 2633 of SEQ ID NO: 584949
cugacaagugguuaguaau

SEQ ID NO: 601729 - RNA, 19 nt, Artificial Sequence
  Description of Artificial Sequence: Synthetic oligonucleotide
  Antisense strand to SEQ ID NO: 601728
auuacuaaccacuugucag

SEQ ID NO: 601730 - RNA, 19 nt, Artificial Sequence
  Description of Artificial Sequence: Synthetic oligonucleotide
  Sense strand starting at position 3250 of SEQ ID NO: 584949
ggucaugccuuuccauaga

SEQ ID NO: 601731 - RNA, 19 nt, Artificial Sequence
  Description of Artificial Sequence: Synthetic oligonucleotide
  Antisense strand to SEQ ID NO: 601730
ucuauggaaaggcaugacc

SEQ ID NO: 601732 - RNA, 19 nt, Artificial Sequence
  Description of Artificial Sequence: Synthetic oligonucleotide
  Sense strand starting at position 3345 of SEQ ID NO: 584949
ucaggaaugccgcagaugu

SEQ ID NO: 601733 - RNA, 19 nt, Artificial Sequence
  Description of Artificial Sequence: Synthetic oligonucleotide
  Antisense strand to SEQ ID NO: 601732
acaucugcggcauuccuga

SEQ ID NO: 601734 - RNA, 19 nt, Artificial Sequence
  Description of Artificial Sequence: Synthetic oligonucleotide
  Sense strand starting at position 3428 of SEQ ID NO: 584949
ugucuuguacaauguuuga

SEQ ID NO: 601735 - RNA, 19 nt, Artificial Sequence
  Description of Artificial Sequence: Synthetic oligonucleotide
  Antisense strand to SEQ ID NO: 601734
ucaaacauuguacaagaca

SEQ ID NO: 601736 - RNA, 19 nt, Artificial Sequence
  Description of Artificial Sequence: Synthetic oligonucleotide
  Sense strand starting at position 3603 of SEQ ID NO: 584949
gguuaaaugugugcacgua

SEQ ID NO: 601737 - RNA, 19 nt, Artificial Sequence
  Description of Artificial Sequence: Synthetic oligonucleotide
  Antisense strand to SEQ ID NO: 601736
uacgugcacacauuuaacc

SEQ ID NO: 601738 - RNA, 19 nt, Artificial Sequence
  Description of Artificial Sequence: Synthetic oligonucleotide
  Sense strand starting at position 3604 of SEQ ID NO: 584949
guuaaaugugugcacguaa

SEQ ID NO: 601739 - RNA, 19 nt, Artificial Sequence
  Description of Artificial Sequence: Synthetic oligonucleotide
  Antisense strand to SEQ ID NO: 601738
uuacgugcacacauuuaac

SEQ ID NO: 601740 - RNA, 19 nt, Artificial Sequence
  Description of Artificial Sequence: Synthetic oligonucleotide
  Sense strand starting at position 3778 of SEQ ID NO: 584949
aacugagauuugcagcaga

SEQ ID NO: 601741 - RNA, 19 nt, Artificial Sequence
  Description of Artificial Sequence: Synthetic oligonucleotide
  Antisense strand to SEQ ID NO: 601740
ucugcugcaaaucucaguu

SEQ ID NO: 601742 - RNA, 19 nt, Artificial Sequence
  Description of Artificial Sequence: Synthetic oligonucleotide
  Sense strand starting at position 55 of SEQ ID NO: 584950
cgggaaagccugugugcua

SEQ ID NO: 601743 - RNA, 19 nt, Artificial Sequence
  Description of Artificial Sequence: Synthetic oligonucleotide
  Antisense strand to SEQ ID NO: 601742
uagcacacaggcuuucccg

SEQ ID NO: 601744 - RNA, 19 nt, Artificial Sequence
  Description of Artificial Sequence: Synthetic oligonucleotide
  Sense strand starting at position 56 of SEQ ID NO: 584950
gggaaagccugugugcuau

SEQ ID NO: 601745 - RNA, 19 nt, Artificial Sequence
  Description of Artificial Sequence: Synthetic oligonucleotide
  Antisense strand to SEQ ID NO: 601744
auagcacacaggcuuuccc

SEQ ID NO: 601746 - RNA, 19 nt, Artificial Sequence
  Description of Artificial Sequence: Synthetic oligonucleotide
  Sense strand starting at position 171 of SEQ ID NO: 584950
augagucaguuuccugcaa

SEQ ID NO: 601747 - RNA, 19 nt, Artificial Sequence
  Description of Artificial Sequence: Synthetic oligonucleotide
  Antisense strand to SEQ ID NO: 601746
uugcaggaaacugacucau

SEQ ID NO: 601748 - RNA, 19 nt, Artificial Sequence
  Description of Artificial Sequence: Synthetic oligonucleotide
  Sense strand starting at position 342 of SEQ ID NO: 584950
gcucuugugccgucucuga

SEQ ID NO: 601749 - RNA, 19 nt, Artificial Sequence
  Description of Artificial Sequence: Synthetic oligonucleotide
  Antisense strand to SEQ ID NO: 601748
ucagagacggcacaagagc

SEQ ID NO: 601750 - RNA, 19 nt, Artificial Sequence
  Description of Artificial Sequence: Synthetic oligonucleotide
  Sense strand starting at position 344 of SEQ ID NO: 584950
ucuugugccgucucugaca

SEQ ID NO: 601751 - RNA, 19 nt, Artificial Sequence
  Description of Artificial Sequence: Synthetic oligonucleotide
  Antisense strand to SEQ ID NO: 601750
ugucagagacggcacaaga

SEQ ID NO: 601752 - RNA, 19 nt, Artificial Sequence
  Description of Artificial Sequence: Synthetic oligonucleotide
  Sense strand starting at position 479 of SEQ ID NO: 584950
ugagucagaucccuggaaa

SEQ ID NO: 601753 - RNA, 19 nt, Artificial Sequence
  Description of Artificial Sequence: Synthetic oligonucleotide
  Antisense strand to SEQ ID NO: 601752
uuuccagggaucugacuca

SEQ ID NO: 601754 - RNA, 19 nt, Artificial Sequence
  Description of Artificial Sequence: Synthetic oligonucleotide
  Sense strand starting at position 746 of SEQ ID NO: 584950
guagcuuucggagagggaa

SEQ ID NO: 601755 - RNA, 19 nt, Artificial Sequence
  Description of Artificial Sequence: Synthetic oligonucleotide
  Antisense strand to SEQ ID NO: 601754
uucccucuccgaaagcuac

SEQ ID NO: 601756 - RNA, 19 nt, Artificial Sequence
  Description of Artificial Sequence: Synthetic oligonucleotide
  Sense strand starting at position 758 of SEQ ID NO: 584950
gagggaaucugggcuaggu

SEQ ID NO: 601757 - RNA, 19 nt, Artificial Sequence
  Description of Artificial Sequence: Synthetic oligonucleotide
  Antisense strand to SEQ ID NO: 601756
accuagcccagauucccuc

SEQ ID NO: 601758 - RNA, 19 nt, Artificial Sequence
  Description of Artificial Sequence: Synthetic oligonucleotide
  Sense strand starting at position 1103 of SEQ ID NO: 584950
cggcuuccuugggaacaaa

SEQ ID NO: 601759 - RNA, 19 nt, Artificial Sequence
  Description of Artificial Sequence: Synthetic oligonucleotide
  Antisense strand to SEQ ID NO: 601758
uuuguucccaaggaagccg

SEQ ID NO: 601760 - RNA, 19 nt, Artificial Sequence
  Description of Artificial Sequence: Synthetic oligonucleotide
  Sense strand starting at position 1641 of SEQ ID NO: 584950
cagggauuccuguacuugu

SEQ ID NO: 601761 - RNA, 19 nt, Artificial Sequence
  Description of Artificial Sequence: Synthetic oligonucleotide
  Antisense strand to SEQ ID NO: 601760
acaaguacaggaaucccug

SEQ ID NO: 601762 - RNA, 19 nt, Artificial Sequence
  Description of Artificial Sequence: Synthetic oligonucleotide
  Sense strand starting at position 1644 of SEQ ID NO: 584950
ggauuccuguacuuguaau

SEQ ID NO: 601763 - RNA, 19 nt, Artificial Sequence
  Description of Artificial Sequence: Synthetic oligonucleotide
  Antisense strand to SEQ ID NO: 601762
auuacaaguacaggaaucc

SEQ ID NO: 601764 - RNA, 19 nt, Artificial Sequence
  Description of Artificial Sequence: Synthetic oligonucleotide
  Sense strand starting at position 2261 of SEQ ID NO: 584950
cgaagugagccacaaaucu

SEQ ID NO: 601765 - RNA, 19 nt, Artificial Sequence
  Description of Artificial Sequence: Synthetic oligonucleotide
  Antisense strand to SEQ ID NO: 601764
agauuuguggcucacuucg

SEQ ID NO: 601766 - RNA, 19 nt, Artificial Sequence
  Description of Artificial Sequence: Synthetic oligonucleotide
  Sense strand starting at position 2293 of SEQ ID NO: 584950
uggagaaugaguuggcacu

SEQ ID NO: 601767 - RNA, 19 nt, Artificial Sequence
  Description of Artificial Sequence: Synthetic oligonucleotide
  Antisense strand to SEQ ID NO: 601766
agugccaacucauucucca

SEQ ID NO: 601768 - RNA, 19 nt, Artificial Sequence
  Description of Artificial Sequence: Synthetic oligonucleotide
  Sense strand starting at position 2409 of SEQ ID NO: 584950
ucaggaggaugacauuaau

SEQ ID NO: 601769 - RNA, 19 nt, Artificial Sequence
  Description of Artificial Sequence: Synthetic oligonucleotide
  Antisense strand to SEQ ID NO: 601768
auuaaugucauccuccuga

SEQ ID NO: 601770 - RNA, 19 nt, Artificial Sequence
  Description of Artificial Sequence: Synthetic oligonucleotide
  Sense strand starting at position 2415 of SEQ ID NO: 584950
ggaugacauuaauacauaa

SEQ ID NO: 601771 - RNA, 19 nt, Artificial Sequence
  Description of Artificial Sequence: Synthetic oligonucleotide
  Antisense strand to SEQ ID NO: 601770
uuauguauuaaugucaucc

SEQ ID NO: 601772 - RNA, 19 nt, Artificial Sequence
  Description of Artificial Sequence: Synthetic oligonucleotide
  Sense strand starting at position 2454 of SEQ ID NO: 584950
cgaugcaccucucugcaau

SEQ ID NO: 601773 - RNA, 19 nt, Artificial Sequence
  Description of Artificial Sequence: Synthetic oligonucleotide
  Antisense strand to SEQ ID NO: 601772
auugcagagaggugcaucg

SEQ ID NO: 601774 - RNA, 19 nt, Artificial Sequence
  Description of Artificial Sequence: Synthetic oligonucleotide
  Sense strand starting at position 2643 of SEQ ID NO: 584950
aguauacaaaguuguugau

SEQ ID NO: 601775 - RNA, 19 nt, Artificial Sequence
  Description of Artificial Sequence: Synthetic oligonucleotide
  Antisense strand to SEQ ID NO: 601774
aucaacaacuuuguauacu

SEQ ID NO: 601776 - RNA, 19 nt, Artificial Sequence
  Description of Artificial Sequence: Synthetic oligonucleotide
  Sense strand starting at position 2650 of SEQ ID NO: 584950
aaaguuguugauugucaca

SEQ ID NO: 601777 - RNA, 19 nt, Artificial Sequence
  Description of Artificial Sequence: Synthetic oligonucleotide
  Antisense strand to SEQ ID NO: 601776
ugugacaaucaacaacuuu

SEQ ID NO: 601778 - RNA, 19 nt, Artificial Sequence
  Description of Artificial Sequence: Synthetic oligonucleotide
  Sense strand starting at position 2652 of SEQ ID NO: 584950
aguuguugauugucacaug

SEQ ID NO: 601779 - RNA, 19 nt, Artificial Sequence
  Description of Artificial Sequence: Synthetic oligonucleotide
  Antisense strand to SEQ ID NO: 601778
caugugacaaucaacaacu

SEQ ID NO: 601780 - RNA, 19 nt, Artificial Sequence
  Description of Artificial Sequence: Synthetic oligonucleotide
  Sense strand starting at position 3010 of SEQ ID NO: 584950
uuauuucuguggcuccaaa

SEQ ID NO: 601781 - RNA, 19 nt, Artificial Sequence
  Description of Artificial Sequence: Synthetic oligonucleotide
  Antisense strand to SEQ ID NO: 601780
uuuggagccacagaaauaa

SEQ ID NO: 601782 - RNA, 19 nt, Artificial Sequence
  Description of Artificial Sequence: Synthetic oligonucleotide
  Sense strand starting at position 3058 of SEQ ID NO: 584950
gcagaugguuuauggagau

SEQ ID NO: 601783 - RNA, 19 nt, Artificial Sequence
  Description of Artificial Sequence: Synthetic oligonucleotide
  Antisense strand to SEQ ID NO: 601782
aucuccauaaaccaucugc

SEQ ID NO: 601784 - RNA, 19 nt, Artificial Sequence
  Description of Artificial Sequence: Synthetic oligonucleotide
  Sense strand starting at position 3086 of SEQ ID NO: 584950
aaaggacaauucuggaagu

SEQ ID NO: 601785 - RNA, 19 nt, Artificial Sequence
  Description of Artificial Sequence: Synthetic oligonucleotide
  Antisense strand to SEQ ID NO: 601784
acuuccagaauuguccuuu

SEQ ID NO: 601786 - RNA, 19 nt, Artificial Sequence
  Description of Artificial Sequence: Synthetic oligonucleotide
  Sense strand starting at position 3109 of SEQ ID NO: 584950
acugguucuucugacagac

SEQ ID NO: 601787 - RNA, 19 nt, Artificial Sequence
  Description of Artificial Sequence: Synthetic oligonucleotide
  Antisense strand to SEQ ID NO: 601786
gucugucagaagaaccagu

SEQ ID NO: 601788 - RNA, 19 nt, Artificial Sequence
  Description of Artificial Sequence: Synthetic oligonucleotide
  Sense strand starting at position 3128 of SEQ ID NO: 584950
acagaaaugagugaugugu

SEQ ID NO: 601789 - RNA, 19 nt, Artificial Sequence
  Description of Artificial Sequence: Synthetic oligonucleotide
  Antisense strand to SEQ ID NO: 601788
acacaucacucauuucugu

SEQ ID NO: 601790 - RNA, 19 nt, Artificial Sequence
  Description of Artificial Sequence: Synthetic oligonucleotide
  Sense strand starting at position 3130 of SEQ ID NO: 584950
agaaaugagugaugugucu

SEQ ID NO: 601791 - RNA, 19 nt, Artificial Sequence
  Description of Artificial Sequence: Synthetic oligonucleotide
  Antisense strand to SEQ ID NO: 601790
agacacaucacucauuucu

SEQ ID NO: 601792 - RNA, 19 nt, Artificial Sequence
  Description of Artificial Sequence: Synthetic oligonucleotide
  Sense strand starting at position 3203 of SEQ ID NO: 584950
ccuuucugugccugaaaca

SEQ ID NO: 601793 - RNA, 19 nt, Artificial Sequence
  Description of Artificial Sequence: Synthetic oligonucleotide
  Antisense strand to SEQ ID NO: 601792
uguuucaggcacagaaagg

SEQ ID NO: 601794 - RNA, 19 nt, Artificial Sequence
  Description of Artificial Sequence: Synthetic oligonucleotide
  Sense strand starting at position 3204 of SEQ ID NO: 584950
cuuucugugccugaaacau

SEQ ID NO: 601795 - RNA, 19 nt, Artificial Sequence
  Description of Artificial Sequence: Synthetic oligonucleotide
  Antisense strand to SEQ ID NO: 601794
auguuucaggcacagaaag

SEQ ID NO: 601796 - RNA, 19 nt, Artificial Sequence
  Description of Artificial Sequence: Synthetic oligonucleotide
  Sense strand starting at position 3334 of SEQ ID NO: 584950
cugcucagagucuggaaau

SEQ ID NO: 601797 - RNA, 19 nt, Artificial Sequence
  Description of Artificial Sequence: Synthetic oligonucleotide
  Antisense strand to SEQ ID NO: 601796
auuuccagacucugagcag

SEQ ID NO: 601798 - RNA, 19 nt, Artificial Sequence
  Description of Artificial Sequence: Synthetic oligonucleotide
  Sense strand starting at position 3345 of SEQ ID NO: 584950
cuggaaaucucugcccaga

SEQ ID NO: 601799 - RNA, 19 nt, Artificial Sequence
  Description of Artificial Sequence: Synthetic oligonucleotide
  Antisense strand to SEQ ID NO: 601798
ucugggcagagauuuccag

SEQ ID NO: 601800 - RNA, 19 nt, Artificial Sequence
  Description of Artificial Sequence: Synthetic oligonucleotide
  Sense strand starting at position 3347 of SEQ ID NO: 584950
ggaaaucucugcccagaca

SEQ ID NO: 601801 - RNA, 19 nt, Artificial Sequence
  Description of Artificial Sequence: Synthetic oligonucleotide
  Antisense strand to SEQ ID NO: 601800
ugucugggcagagauuucc

SEQ ID NO: 601802 - RNA, 19 nt, Artificial Sequence
  Description of Artificial Sequence: Synthetic oligonucleotide
  Sense strand starting at position 3372 of SEQ ID NO: 584950
gucuucuuccucuaacgca

SEQ ID NO: 601803 - RNA, 19 nt, Artificial Sequence
  Description of Artificial Sequence: Synthetic oligonucleotide
  Antisense strand to SEQ ID NO: 601802
ugcguuagaggaagaagac

SEQ ID NO: 601804 - RNA, 19 nt, Artificial Sequence
  Description of Artificial Sequence: Synthetic oligonucleotide
  Sense strand starting at position 3619 of SEQ ID NO: 584950
uugucaaauguccagcaga

SEQ ID NO: 601805 - RNA, 19 nt, Artificial Sequence
  Description of Artificial Sequence: Synthetic oligonucleotide
  Antisense strand to SEQ ID NO: 601804
ucugcuggacauuugacaa

SEQ ID NO: 601806 - RNA, 19 nt, Artificial Sequence
  Description of Artificial Sequence: Synthetic oligonucleotide
  Sense strand starting at position 3697 of SEQ ID NO: 584950
cuagacauugucugucugu

SEQ ID NO: 601807 - RNA, 19 nt, Artificial Sequence
  Description of Artificial Sequence: Synthetic oligonucleotide
  Antisense strand to SEQ ID NO: 601806
acagacagacaaugucuag

SEQ ID NO: 601808 - RNA, 19 nt, Artificial Sequence
  Description of Artificial Sequence: Synthetic oligonucleotide
  Sense strand starting at position 3698 of SEQ ID NO: 584950
uagacauugucugucuguu

SEQ ID NO: 601809 - RNA, 19 nt, Artificial Sequence
  Description of Artificial Sequence: Synthetic oligonucleotide
  Antisense strand to SEQ ID NO: 601808
aacagacagacaaugucua

SEQ ID NO: 601810 - RNA, 19 nt, Artificial Sequence
  Description of Artificial Sequence: Synthetic oligonucleotide
  Sense strand starting at position 3700 of SEQ ID NO: 584950
gacauugucugucuguuua

SEQ ID NO: 601811 - RNA, 19 nt, Artificial Sequence
  Description of Artificial Sequence: Synthetic oligonucleotide
  Antisense strand to SEQ ID NO: 601810
uaaacagacagacaauguc

SEQ ID NO: 601812 - RNA, 19 nt, Artificial Sequence
  Description of Artificial Sequence: Synthetic oligonucleotide
  Sense strand starting at position 3704 of SEQ ID NO: 584950
uugucugucuguuuacuuu

SEQ ID NO: 601813 - RNA, 19 nt, Artificial Sequence
  Description of Artificial Sequence: Synthetic oligonucleotide
  Antisense strand to SEQ ID NO: 601812
aaaguaaacagacagacaa

SEQ ID NO: 601814 - RNA, 19 nt, Artificial Sequence
  Description of Artificial Sequence: Synthetic oligonucleotide
  Sense strand starting at position 3739 of SEQ ID NO: 584950
uuaauaaaggcuuguaaug

SEQ ID NO: 601815 - RNA, 19 nt, Artificial Sequence
  Description of Artificial Sequence: Synthetic oligonucleotide
  Antisense strand to SEQ ID NO: 601814
cauuacaagccuuuauuaa

SEQ ID NO: 601816 - RNA, 19 nt, Artificial Sequence
  Description of Artificial Sequence: Synthetic oligonucleotide
  Sense strand starting at position 3886 of SEQ ID NO: 584950
cuacuaagugucuaguacu

SEQ ID NO: 601817 - RNA, 19 nt, Artificial Sequence
  Description of Artificial Sequence: Synthetic oligonucleotide
  Antisense strand to SEQ ID NO: 601816
aguacuagacacuuaguag

SEQ ID NO: 601818 - RNA, 19 nt, Artificial Sequence
  Description of Artificial Sequence: Synthetic oligonucleotide
  Sense strand starting at position 3943 of SEQ ID NO: 584950
uugaauguguacccagaca

SEQ ID NO: 601819 - RNA, 19 nt, Artificial Sequence
  Description of Artificial Sequence: Synthetic oligonucleotide
  Antisense strand to SEQ ID NO: 601818
ugucuggguacacauucaa

SEQ ID NO: 601820 - RNA, 19 nt, Artificial Sequence
  Description of Artificial Sequence: Synthetic oligonucleotide
  Sense strand starting at position 3972 of SEQ ID NO: 584950
gaggacuucugcccugaaa

SEQ ID NO: 601821 - RNA, 19 nt, Artificial Sequence
  Description of Artificial Sequence: Synthetic oligonucleotide
  Antisense strand to SEQ ID NO: 601820
uuucagggcagaaguccuc

SEQ ID NO: 601822 - RNA, 19 nt, Artificial Sequence
  Description of Artificial Sequence: Synthetic oligonucleotide
  Sense strand starting at position 88 of SEQ ID NO: 584951
cgaagugagccacaaaucu

SEQ ID NO: 601823 - RNA, 19 nt, Artificial Sequence
  Description of Artificial Sequence: Synthetic oligonucleotide
  Antisense strand to SEQ ID NO: 601822
agauuuguggcucacuucg

SEQ ID NO: 601824 - RNA, 19 nt, Artificial Sequence
  Description of Artificial Sequence: Synthetic oligonucleotide
  Sense strand starting at position 120 of SEQ ID NO: 584951
uggagaaugaguuggcacu

SEQ ID NO: 601825 - RNA, 19 nt, Artificial Sequence
  Description of Artificial Sequence: Synthetic oligonucleotide
  Antisense strand to SEQ ID NO: 601824
agugccaacucauucucca

SEQ ID NO: 601826 - RNA, 19 nt, Artificial Sequence
  Description of Artificial Sequence: Synthetic oligonucleotide
  Sense strand starting at position 236 of SEQ ID NO: 584951
ucaggaggaugacauuaau

SEQ ID NO: 601827 - RNA, 19 nt, Artificial Sequence
  Description of Artificial Sequence: Synthetic oligonucleotide
  Antisense strand to SEQ ID NO: 601826
auuaaugucauccuccuga

SEQ ID NO: 601828 - RNA, 19 nt, Artificial Sequence
  Description of Artificial Sequence: Synthetic oligonucleotide
  Sense strand starting at position 242 of SEQ ID NO: 584951
ggaugacauuaauacauaa

SEQ ID NO: 601829 - RNA, 19 nt, Artificial Sequence
  Description of Artificial Sequence: Synthetic oligonucleotide
  Antisense strand to SEQ ID NO: 601828
uuauguauuaaugucaucc

SEQ ID NO: 601830 - RNA, 19 nt, Artificial Sequence
  Description of Artificial Sequence: Synthetic oligonucleotide
  Sense strand starting at position 281 of SEQ ID NO: 584951
cgaugcaccucucugcaau

SEQ ID NO: 601831 - RNA, 19 nt, Artificial Sequence
  Description of Artificial Sequence: Synthetic oligonucleotide
  Antisense strand to SEQ ID NO: 601830
auugcagagaggugcaucg

SEQ ID NO: 601832 - RNA, 19 nt, Artificial Sequence
  Description of Artificial Sequence: Synthetic oligonucleotide
  Sense strand starting at position 470 of SEQ ID NO: 584951
aguauacaaaguuguugau

SEQ ID NO: 601833 - RNA, 19 nt, Artificial Sequence
  Description of Artificial Sequence: Synthetic oligonucleotide
  Antisense strand to SEQ ID NO: 601832
aucaacaacuuuguauacu

SEQ ID NO: 601834 - RNA, 19 nt, Artificial Sequence
  Description of Artificial Sequence: Synthetic oligonucleotide
  Sense strand starting at position 477 of SEQ ID NO: 584951
aaaguuguugauugucaca

SEQ ID NO: 601835 - RNA, 19 nt, Artificial Sequence
  Description of Artificial Sequence: Synthetic oligonucleotide
  Antisense strand to SEQ ID NO: 601834
ugugacaaucaacaacuuu

SEQ ID NO: 601836 - RNA, 19 nt, Artificial Sequence
  Description of Artificial Sequence: Synthetic oligonucleotide
  Sense strand starting at position 479 of SEQ ID NO: 584951
aguuguugauugucacaug

SEQ ID NO: 601837 - RNA, 19 nt, Artificial Sequence
  Description of Artificial Sequence: Synthetic oligonucleotide
  Antisense strand to SEQ ID NO: 601836
caugugacaaucaacaacu

SEQ ID NO: 601838 - RNA, 19 nt, Artificial Sequence
  Description of Artificial Sequence: Synthetic oligonucleotide
  Sense strand starting at position 837 of SEQ ID NO: 584951
uuauuucuguggcuccaaa

SEQ ID NO: 601839 - RNA, 19 nt, Artificial Sequence
  Description of Artificial Sequence: Synthetic oligonucleotide
  Antisense strand to SEQ ID NO: 601838
uuuggagccacagaaauaa

SEQ ID NO: 601840 - RNA, 19 nt, Artificial Sequence
  Description of Artificial Sequence: Synthetic oligonucleotide
  Sense strand starting at position 913 of SEQ ID NO: 584951
aaaggacaauucuggaagu

SEQ ID NO: 601841 - RNA, 19 nt, Artificial Sequence
  Description of Artificial Sequence: Synthetic oligonucleotide
  Antisense strand to SEQ ID NO: 601840
acuuccagaauuguccuuu

SEQ ID NO: 601842 - RNA, 19 nt, Artificial Sequence
  Description of Artificial Sequence: Synthetic oligonucleotide
  Sense strand starting at position 955 of SEQ ID NO: 584951
acagaaaugagugaugugu

SEQ ID NO: 601843 - RNA, 19 nt, Artificial Sequence
  Description of Artificial Sequence: Synthetic oligonucleotide
  Antisense strand to SEQ ID NO: 601842
acacaucacucauuucugu

SEQ ID NO: 601844 - RNA, 19 nt, Artificial Sequence
  Description of Artificial Sequence: Synthetic oligonucleotide
  Sense strand starting at position 1030 of SEQ ID NO: 584951
ccuuucugugccugaaaca

SEQ ID NO: 601845 - RNA, 19 nt, Artificial Sequence
  Description of Artificial Sequence: Synthetic oligonucleotide
  Antisense strand to SEQ ID NO: 601844
uguuucaggcacagaaagg

SEQ ID NO: 601846 - RNA, 19 nt, Artificial Sequence
  Description of Artificial Sequence: Synthetic oligonucleotide
  Sense strand starting at position 1031 of SEQ ID NO: 584951
cuuucugugccugaaacau

SEQ ID NO: 601847 - RNA, 19 nt, Artificial Sequence
  Description of Artificial Sequence: Synthetic oligonucleotide
  Antisense strand to SEQ ID NO: 601846
auguuucaggcacagaaag

SEQ ID NO: 601848 - RNA, 19 nt, Artificial Sequence
  Description of Artificial Sequence: Synthetic oligonucleotide
  Sense strand starting at position 1161 of SEQ ID NO: 584951
cugcucagagucuggaaau

SEQ ID NO: 601849 - RNA, 19 nt, Artificial Sequence
  Description of Artificial Sequence: Synthetic oligonucleotide
  Antisense strand to SEQ ID NO: 601848
auuuccagacucugagcag

SEQ ID NO: 601850 - RNA, 19 nt, Artificial Sequence
  Description of Artificial Sequence: Synthetic oligonucleotide
  Sense strand starting at position 1172 of SEQ ID NO: 584951
cuggaaaucucugcccaga

SEQ ID NO: 601851 - RNA, 19 nt, Artificial Sequence
  Description of Artificial Sequence: Synthetic oligonucleotide
  Antisense strand to SEQ ID NO: 601850
ucugggcagagauuuccag

SEQ ID NO: 601852 - RNA, 19 nt, Artificial Sequence
  Description of Artificial Sequence: Synthetic oligonucleotide
  Sense strand starting at position 1174 of SEQ ID NO: 584951
ggaaaucucugcccagaca

SEQ ID NO: 601853 - RNA, 19 nt, Artificial Sequence
  Description of Artificial Sequence: Synthetic oligonucleotide
  Antisense strand to SEQ ID NO: 601852
ugucugggcagagauuucc

SEQ ID NO: 601854 - RNA, 19 nt, Artificial Sequence
  Description of Artificial Sequence: Synthetic oligonucleotide
  Sense strand starting at position 1199 of SEQ ID NO: 584951
gucuucuuccucuaacgca

SEQ ID NO: 601855 - RNA, 19 nt, Artificial Sequence
  Description of Artificial Sequence: Synthetic oligonucleotide
  Antisense strand to SEQ ID NO: 601854
ugcguuagaggaagaagac

SEQ ID NO: 601856 - RNA, 19 nt, Artificial Sequence
  Description of Artificial Sequence: Synthetic oligonucleotide
  Sense strand starting at position 1446 of SEQ ID NO: 584951
uugucaaauguccagcaga

SEQ ID NO: 601857 - RNA, 19 nt, Artificial Sequence
  Description of Artificial Sequence: Synthetic oligonucleotide
  Antisense strand to SEQ ID NO: 601856
ucugcuggacauuugacaa

SEQ ID NO: 601858 - RNA, 19 nt, Artificial Sequence
  Description of Artificial Sequence: Synthetic oligonucleotide
  Sense strand starting at position 1524 of SEQ ID NO: 584951
cuagacauugucugucugu

SEQ ID NO: 601859 - RNA, 19 nt, Artificial Sequence
  Description of Artificial Sequence: Synthetic oligonucleotide
  Antisense strand to SEQ ID NO: 601858
acagacagacaaugucuag

SEQ ID NO: 601860 - RNA, 19 nt, Artificial Sequence
  Description of Artificial Sequence: Synthetic oligonucleotide
  Sense strand starting at position 1525 of SEQ ID NO: 584951
uagacauugucugucuguu

SEQ ID NO: 601861 - RNA, 19 nt, Artificial Sequence
  Description of Artificial Sequence: Synthetic oligonucleotide
  Antisense strand to SEQ ID NO: 601860
aacagacagacaaugucua

SEQ ID NO: 601862 - RNA, 19 nt, Artificial Sequence
  Description of Artificial Sequence: Synthetic oligonucleotide
  Sense strand starting at position 1527 of SEQ ID NO: 584951
gacauugucugucuguuua

SEQ ID NO: 601863 - RNA, 19 nt, Artificial Sequence
  Description of Artificial Sequence: Synthetic oligonucleotide
  Antisense strand to SEQ ID NO: 601862
uaaacagacagacaauguc

SEQ ID NO: 601864 - RNA, 19 nt, Artificial Sequence
  Description of Artificial Sequence: Synthetic oligonucleotide
  Sense strand starting at position 1531 of SEQ ID NO: 584951
uugucugucuguuuacuuu

SEQ ID NO: 601865 - RNA, 19 nt, Artificial Sequence
  Description of Artificial Sequence: Synthetic oligonucleotide
  Antisense strand to SEQ ID NO: 601864
aaaguaaacagacagacaa

SEQ ID NO: 601866 - RNA, 19 nt, Artificial Sequence
  Description of Artificial Sequence: Synthetic oligonucleotide
  Sense strand starting at position 1566 of SEQ ID NO: 584951
uuaauaaaggcuuguaaug

SEQ ID NO: 601867 - RNA, 19 nt, Artificial Sequence
  Description of Artificial Sequence: Synthetic oligonucleotide
  Antisense strand to SEQ ID NO: 601866
cauuacaagccuuuauuaa

SEQ ID NO: 601868 - RNA, 19 nt, Artificial Sequence
  Description of Artificial Sequence: Synthetic oligonucleotide
  Sense strand starting at position 1713 of SEQ ID NO: 584951
cuacuaagugucuaguacu

SEQ ID NO: 601869 - RNA, 19 nt, Artificial Sequence
  Description of Artificial Sequence: Synthetic oligonucleotide
  Antisense strand to SEQ ID NO: 601868
aguacuagacacuuaguag

SEQ ID NO: 601870 - RNA, 19 nt, Artificial Sequence
  Description of Artificial Sequence: Synthetic oligonucleotide
  Sense strand starting at position 1770 of SEQ ID NO: 584951
uugaauguguacccagaca

SEQ ID NO: 601871 - RNA, 19 nt, Artificial Sequence
  Description of Artificial Sequence: Synthetic oligonucleotide
  Antisense strand to SEQ ID NO: 601870
ugucuggguacacauucaa

SEQ ID NO: 601872 - RNA, 19 nt, Artificial Sequence
  Description of Artificial Sequence: Synthetic oligonucleotide
  Sense strand starting at position 1799 of SEQ ID NO: 584951
gaggacuucugcccugaaa

SEQ ID NO: 601873 - RNA, 19 nt, Artificial Sequence
  Description of Artificial Sequence: Synthetic oligonucleotide
  Antisense strand to SEQ ID NO: 601872
uuucagggcagaaguccuc

SEQ ID NO: 601874 - RNA, 19 nt, Artificial Sequence
  Description of Artificial Sequence: Synthetic oligonucleotide
  Sense strand starting at position 1913 of SEQ ID NO: 584951
caaggaucugcuggcagau

SEQ ID NO: 601875 - RNA, 19 nt, Artificial Sequence
  Description of Artificial Sequence: Synthetic oligonucleotide
  Antisense strand to SEQ ID NO: 601874
aucugccagcagauccuug

SEQ ID NO: 601876 - RNA, 19 nt, Artificial Sequence
  Description of Artificial Sequence: Synthetic oligonucleotide
  Sense strand starting at position 2129 of SEQ ID NO: 584951
ccaagcauguuccugggaa

SEQ ID NO: 601877 - RNA, 19 nt, Artificial Sequence
  Description of Artificial Sequence: Synthetic oligonucleotide
  Antisense strand to SEQ ID NO: 601876
uucccaggaacaugcuugg

SEQ ID NO: 601878 - RNA, 19 nt, Artificial Sequence
  Description of Artificial Sequence: Synthetic oligonucleotide
  Sense strand starting at position 2297 of SEQ ID NO: 584951
cucagugguggcugcagaa

SEQ ID NO: 601879 - RNA, 19 nt, Artificial Sequence
  Description of Artificial Sequence: Synthetic oligonucleotide
  Antisense strand to SEQ ID NO: 601878
uucugcagccaccacugag

SEQ ID NO: 601880 - RNA, 19 nt, Artificial Sequence
  Description of Artificial Sequence: Synthetic oligonucleotide
  Sense strand starting at position 2332 of SEQ ID NO: 584951
gaggaagugcugggaacaa

SEQ ID NO: 601881 - RNA, 19 nt, Artificial Sequence
  Description of Artificial Sequence: Synthetic oligonucleotide
  Antisense strand to SEQ ID NO: 601880
uuguucccagcacuuccuc

SEQ ID NO: 601882 - RNA, 19 nt, Artificial Sequence
  Description of Artificial Sequence: Synthetic oligonucleotide
  Sense strand starting at position 2342 of SEQ ID NO: 584951
ugggaacaaugucaccauu

SEQ ID NO: 601883 - RNA, 19 nt, Artificial Sequence
  Description of Artificial Sequence: Synthetic oligonucleotide
  Antisense strand to SEQ ID NO: 601882
aauggugacauuguuccca

SEQ ID NO: 601884 - RNA, 19 nt, Artificial Sequence
  Description of Artificial Sequence: Synthetic oligonucleotide
  Sense strand starting at position 2352 of SEQ ID NO: 584951
gucaccauuucucagaaag

SEQ ID NO: 601885 - RNA, 19 nt, Artificial Sequence
  Description of Artificial Sequence: Synthetic oligonucleotide
  Antisense strand to SEQ ID NO: 601884
cuuucugagaaauggugac

SEQ ID NO: 601886 - RNA, 19 nt, Artificial Sequence
  Description of Artificial Sequence: Synthetic oligonucleotide
  Sense strand starting at position 2709 of SEQ ID NO: 584951
ucugacaagugguuaguaa

SEQ ID NO: 601887 - RNA, 19 nt, Artificial Sequence
  Description of Artificial Sequence: Synthetic oligonucleotide
  Antisense strand to SEQ ID NO: 601886
uuacuaaccacuugucaga

SEQ ID NO: 601888 - RNA, 19 nt, Artificial Sequence
  Description of Artificial Sequence: Synthetic oligonucleotide
  Sense strand starting at position 2710 of SEQ ID NO: 584951
cugacaagugguuaguaau

SEQ ID NO: 601889 - RNA, 19 nt, Artificial Sequence
  Description of Artificial Sequence: Synthetic oligonucleotide
  Antisense strand to SEQ ID NO: 601888
auuacuaaccacuugucag

SEQ ID NO: 601890 - RNA, 19 nt, Artificial Sequence
  Description of Artificial Sequence: Synthetic oligonucleotide
  Sense strand starting at position 3327 of SEQ ID NO: 584951
ggucaugccuuuccauaga

SEQ ID NO: 601891 - RNA, 19 nt, Artificial Sequence
  Description of Artificial Sequence: Synthetic oligonucleotide
  Antisense strand to SEQ ID NO: 601890
ucuauggaaaggcaugacc

SEQ ID NO: 601892 - RNA, 19 nt, Artificial Sequence
  Description of Artificial Sequence: Synthetic oligonucleotide
  Sense strand starting at position 3422 of SEQ ID NO: 584951
ucaggaaugccgcagaugu

SEQ ID NO: 601893 - RNA, 19 nt, Artificial Sequence
  Description of Artificial Sequence: Synthetic oligonucleotide
  Antisense strand to SEQ ID NO: 601892
acaucugcggcauuccuga

SEQ ID NO: 601894 - RNA, 19 nt, Artificial Sequence
  Description of Artificial Sequence: Synthetic oligonucleotide
  Sense strand starting at position 3505 of SEQ ID NO: 584951
ugucuuguacaauguuuga

SEQ ID NO: 601895 - RNA, 19 nt, Artificial Sequence
  Description of Artificial Sequence: Synthetic oligonucleotide
  Antisense strand to SEQ ID NO: 601894
ucaaacauuguacaagaca

SEQ ID NO: 601896 - RNA, 19 nt, Artificial Sequence
  Description of Artificial Sequence: Synthetic oligonucleotide
  Sense strand starting at position 3680 of SEQ ID NO: 584951
gguuaaaugugugcacgua

SEQ ID NO: 601897 - RNA, 19 nt, Artificial Sequence
  Description of Artificial Sequence: Synthetic oligonucleotide
  Antisense strand to SEQ ID NO: 601896
uacgugcacacauuuaacc

SEQ ID NO: 601898 - RNA, 19 nt, Artificial Sequence
  Description of Artificial Sequence: Synthetic oligonucleotide
  Sense strand starting at position 3681 of SEQ ID NO: 584951
guuaaaugugugcacguaa

SEQ ID NO: 601899 - RNA, 19 nt, Artificial Sequence
  Description of Artificial Sequence: Synthetic oligonucleotide
  Antisense strand to SEQ ID NO: 601898
uuacgugcacacauuuaac

SEQ ID NO: 601900 - RNA, 19 nt, Artificial Sequence
  Description of Artificial Sequence: Synthetic oligonucleotide
  Sense strand starting at position 3855 of SEQ ID NO: 584951
aacugagauuugcagcaga

SEQ ID NO: 601901 - RNA, 19 nt, Artificial Sequence
  Description of Artificial Sequence: Synthetic oligonucleotide
  Antisense strand to SEQ ID NO: 601900
ucugcugcaaaucucaguu

SEQ ID NO: 601902 - RNA, 19 nt, Artificial Sequence
  Description of Artificial Sequence: Synthetic oligonucleotide
  Sense strand starting at position 41 of SEQ ID NO: 584952
cgaagugagccacaaaucu

SEQ ID NO: 601903 - RNA, 19 nt, Artificial Sequence
  Description of Artificial Sequence: Synthetic oligonucleotide
  Antisense strand to SEQ ID NO: 601902
agauuuguggcucacuucg

SEQ ID NO: 601904 - RNA, 19 nt, Artificial Sequence
  Description of Artificial Sequence: Synthetic oligonucleotide
  Sense strand starting at position 73 of SEQ ID NO: 584952
uggagaaugaguuggcacu

SEQ ID NO: 601905 - RNA, 19 nt, Artificial Sequence
  Description of Artificial Sequence: Synthetic oligonucleotide
  Antisense strand to SEQ ID NO: 601904
agugccaacucauucucca

SEQ ID NO: 601906 - RNA, 19 nt, Artificial Sequence
  Description of Artificial Sequence: Synthetic oligonucleotide
  Sense strand starting at position 189 of SEQ ID NO: 584952
ucaggaggaugacauuaau

SEQ ID NO: 601907 - RNA, 19 nt, Artificial Sequence
  Description of Artificial Sequence: Synthetic oligonucleotide
  Antisense strand to SEQ ID NO: 601906
auuaaugucauccuccuga

SEQ ID NO: 601908 - RNA, 19 nt, Artificial Sequence
  Description of Artificial Sequence: Synthetic oligonucleotide
  Sense strand starting at position 195 of SEQ ID NO: 584952
ggaugacauuaauacauaa

SEQ ID NO: 601909 - RNA, 19 nt, Artificial Sequence
  Description of Artificial Sequence: Synthetic oligonucleotide
  Antisense strand to SEQ ID NO: 601908
uuauguauuaaugucaucc

SEQ ID NO: 601910 - RNA, 19 nt, Artificial Sequence
  Description of Artificial Sequence: Synthetic oligonucleotide
  Sense strand starting at position 234 of SEQ ID NO: 584952
cgaugcaccucucugcaau

SEQ ID NO: 601911 - RNA, 19 nt, Artificial Sequence
  Description of Artificial Sequence: Synthetic oligonucleotide
  Antisense strand to SEQ ID NO: 601910
auugcagagaggugcaucg

SEQ ID NO: 601912 - RNA, 19 nt, Artificial Sequence
  Description of Artificial Sequence: Synthetic oligonucleotide
  Sense strand starting at position 423 of SEQ ID NO: 584952
aguauacaaaguuguugau

SEQ ID NO: 601913 - RNA, 19 nt, Artificial Sequence
  Description of Artificial Sequence: Synthetic oligonucleotide
  Antisense strand to SEQ ID NO: 601912
aucaacaacuuuguauacu

SEQ ID NO: 601914 - RNA, 19 nt, Artificial Sequence
  Description of Artificial Sequence: Synthetic oligonucleotide
  Sense strand starting at position 430 of SEQ ID NO: 584952
aaaguuguugauugucaca

SEQ ID NO: 601915 - RNA, 19 nt, Artificial Sequence
  Description of Artificial Sequence: Synthetic oligonucleotide
  Antisense strand to SEQ ID NO: 601914
ugugacaaucaacaacuuu

SEQ ID NO: 601916 - RNA, 19 nt, Artificial Sequence
  Description of Artificial Sequence: Synthetic oligonucleotide
  Sense strand starting at position 432 of SEQ ID NO: 584952
aguuguugauugucacaug

SEQ ID NO: 601917 - RNA, 19 nt, Artificial Sequence
  Description of Artificial Sequence: Synthetic oligonucleotide
  Antisense strand to SEQ ID NO: 601916
caugugacaaucaacaacu

SEQ ID NO: 601918 - RNA, 19 nt, Artificial Sequence
  Description of Artificial Sequence: Synthetic oligonucleotide
  Sense strand starting at position 790 of SEQ ID NO: 584952
uuauuucuguggcuccaaa

SEQ ID NO: 601919 - RNA, 19 nt, Artificial Sequence
  Description of Artificial Sequence: Synthetic oligonucleotide
  Antisense strand to SEQ ID NO: 601918
uuuggagccacagaaauaa

SEQ ID NO: 601920 - RNA, 19 nt, Artificial Sequence
  Description of Artificial Sequence: Synthetic oligonucleotide
  Sense strand starting at position 866 of SEQ ID NO: 584952
aaaggacaauucuggaagu

SEQ ID NO: 601921 - RNA, 19 nt, Artificial Sequence
  Description of Artificial Sequence: Synthetic oligonucleotide
  Antisense strand to SEQ ID NO: 601920
acuuccagaauuguccuuu

SEQ ID NO: 601922 - RNA, 19 nt, Artificial Sequence
  Description of Artificial Sequence: Synthetic oligonucleotide
  Sense strand starting at position 908 of SEQ ID NO: 584952
acagaaaugagugaugugu

SEQ ID NO: 601923 - RNA, 19 nt, Artificial Sequence
  Description of Artificial Sequence: Synthetic oligonucleotide
  Antisense strand to SEQ ID NO: 601922
acacaucacucauuucugu

SEQ ID NO: 601924 - RNA, 19 nt, Artificial Sequence
  Description of Artificial Sequence: Synthetic oligonucleotide
  Sense strand starting at position 983 of SEQ ID NO: 584952
ccuuucugugccugaaaca

SEQ ID NO: 601925 - RNA, 19 nt, Artificial Sequence
  Description of Artificial Sequence: Synthetic oligonucleotide
  Antisense strand to SEQ ID NO: 601924
uguuucaggcacagaaagg

SEQ ID NO: 601926 - RNA, 19 nt, Artificial Sequence
  Description of Artificial Sequence: Synthetic oligonucleotide
  Sense strand starting at position 984 of SEQ ID NO: 584952
cuuucugugccugaaacau

SEQ ID NO: 601927 - RNA, 19 nt, Artificial Sequence
  Description of Artificial Sequence: Synthetic oligonucleotide
  Antisense strand to SEQ ID NO: 601926
auguuucaggcacagaaag

SEQ ID NO: 601928 - RNA, 19 nt, Artificial Sequence
  Description of Artificial Sequence: Synthetic oligonucleotide
  Sense strand starting at position 1114 of SEQ ID NO: 584952
cugcucagagucuggaaau

SEQ ID NO: 601929 - RNA, 19 nt, Artificial Sequence
  Description of Artificial Sequence: Synthetic oligonucleotide
  Antisense strand to SEQ ID NO: 601928
auuuccagacucugagcag

SEQ ID NO: 601930 - RNA, 19 nt, Artificial Sequence
  Description of Artificial Sequence: Synthetic oligonucleotide
  Sense strand starting at position 1125 of SEQ ID NO: 584952
cuggaaaucucugcccaga

SEQ ID NO: 601931 - RNA, 19 nt, Artificial Sequence
  Description of Artificial Sequence: Synthetic oligonucleotide
  Antisense strand to SEQ ID NO: 601930
ucugggcagagauuuccag

SEQ ID NO: 601932 - RNA, 19 nt, Artificial Sequence
  Description of Artificial Sequence: Synthetic oligonucleotide
  Sense strand starting at position 1127 of SEQ ID NO: 584952
ggaaaucucugcccagaca

SEQ ID NO: 601933 - RNA, 19 nt, Artificial Sequence
  Description of Artificial Sequence: Synthetic oligonucleotide
  Antisense strand to SEQ ID NO: 601932
ugucugggcagagauuucc

SEQ ID NO: 601934 - RNA, 19 nt, Artificial Sequence
  Description of Artificial Sequence: Synthetic oligonucleotide
  Sense strand starting at position 1152 of SEQ ID NO: 584952
gucuucuuccucuaacgca

SEQ ID NO: 601935 - RNA, 19 nt, Artificial Sequence
  Description of Artificial Sequence: Synthetic oligonucleotide
  Antisense strand to SEQ ID NO: 601934
ugcguuagaggaagaagac

SEQ ID NO: 601936 - RNA, 19 nt, Artificial Sequence
  Description of Artificial Sequence: Synthetic oligonucleotide
  Sense strand starting at position 1399 of SEQ ID NO: 584952
uugucaaauguccagcaga

SEQ ID NO: 601937 - RNA, 19 nt, Artificial Sequence
  Description of Artificial Sequence: Synthetic oligonucleotide
  Antisense strand to SEQ ID NO: 601936
ucugcuggacauuugacaa

SEQ ID NO: 601938 - RNA, 19 nt, Artificial Sequence
  Description of Artificial Sequence: Synthetic oligonucleotide
  Sense strand starting at position 1477 of SEQ ID NO: 584952
cuagacauugucugucugu

SEQ ID NO: 601939 - RNA, 19 nt, Artificial Sequence
  Description of Artificial Sequence: Synthetic oligonucleotide
  Antisense strand to SEQ ID NO: 601938
acagacagacaaugucuag

SEQ ID NO: 601940 - RNA, 19 nt, Artificial Sequence
  Description of Artificial Sequence: Synthetic oligonucleotide
  Sense strand starting at position 1478 of SEQ ID NO: 584952
uagacauugucugucuguu

SEQ ID NO: 601941 - RNA, 19 nt, Artificial Sequence
  Description of Artificial Sequence: Synthetic oligonucleotide
  Antisense strand to SEQ ID NO: 601940
aacagacagacaaugucua

SEQ ID NO: 601942 - RNA, 19 nt, Artificial Sequence
  Description of Artificial Sequence: Synthetic oligonucleotide
  Sense strand starting at position 1480 of SEQ ID NO: 584952
gacauugucugucuguuua

SEQ ID NO: 601943 - RNA, 19 nt, Artificial Sequence
  Description of Artificial Sequence: Synthetic oligonucleotide
  Antisense strand to SEQ ID NO: 601942
uaaacagacagacaauguc

SEQ ID NO: 601944 - RNA, 19 nt, Artificial Sequence
  Description of Artificial Sequence: Synthetic oligonucleotide
  Sense strand starting at position 1484 of SEQ ID NO: 584952
uugucugucuguuuacuuu

SEQ ID NO: 601945 - RNA, 19 nt, Artificial Sequence
  Description of Artificial Sequence: Synthetic oligonucleotide
  Antisense strand to SEQ ID NO: 601944
aaaguaaacagacagacaa

SEQ ID NO: 601946 - RNA, 19 nt, Artificial Sequence
  Description of Artificial Sequence: Synthetic oligonucleotide
  Sense strand starting at position 1519 of SEQ ID NO: 584952
uuaauaaaggcuuguaaug

SEQ ID NO: 601947 - RNA, 19 nt, Artificial Sequence
  Description of Artificial Sequence: Synthetic oligonucleotide
  Antisense strand to SEQ ID NO: 601946
cauuacaagccuuuauuaa

SEQ ID NO: 601948 - RNA, 19 nt, Artificial Sequence
  Description of Artificial Sequence: Synthetic oligonucleotide
  Sense strand starting at position 1666 of SEQ ID NO: 584952
cuacuaagugucuaguacu

SEQ ID NO: 601949 - RNA, 19 nt, Artificial Sequence
  Description of Artificial Sequence: Synthetic oligonucleotide
  Antisense strand to SEQ ID NO: 601948
aguacuagacacuuaguag

SEQ ID NO: 601950 - RNA, 19 nt, Artificial Sequence
  Description of Artificial Sequence: Synthetic oligonucleotide
  Sense strand starting at position 1723 of SEQ ID NO: 584952
uugaauguguacccagaca

SEQ ID NO: 601951 - RNA, 19 nt, Artificial Sequence
  Description of Artificial Sequence: Synthetic oligonucleotide
  Antisense strand to SEQ ID NO: 601950
ugucuggguacacauucaa

SEQ ID NO: 601952 - RNA, 19 nt, Artificial Sequence
  Description of Artificial Sequence: Synthetic oligonucleotide
  Sense strand starting at position 1752 of SEQ ID NO: 584952
gaggacuucugcccugaaa

SEQ ID NO: 601953 - RNA, 19 nt, Artificial Sequence
  Description of Artificial Sequence: Synthetic oligonucleotide
  Antisense strand to SEQ ID NO: 601952
uuucagggcagaaguccuc

SEQ ID NO: 601954 - RNA, 19 nt, Artificial Sequence
  Description of Artificial Sequence: Synthetic oligonucleotide
  Sense strand starting at position 1866 of SEQ ID NO: 584952
caaggaucugcuggcagau

SEQ ID NO: 601955 - RNA, 19 nt, Artificial Sequence
  Description of Artificial Sequence: Synthetic oligonucleotide
  Antisense strand to SEQ ID NO: 601954
aucugccagcagauccuug

SEQ ID NO: 601956 - RNA, 19 nt, Artificial Sequence
  Description of Artificial Sequence: Synthetic oligonucleotide
  Sense strand starting at position 2082 of SEQ ID NO: 584952
ccaagcauguuccugggaa

SEQ ID NO: 601957 - RNA, 19 nt, Artificial Sequence
  Description of Artificial Sequence: Synthetic oligonucleotide
  Antisense strand to SEQ ID NO: 601956
uucccaggaacaugcuugg

SEQ ID NO: 601958 - RNA, 19 nt, Artificial Sequence
  Description of Artificial Sequence: Synthetic oligonucleotide
  Sense strand starting at position 2250 of SEQ ID NO: 584952
cucagugguggcugcagaa

SEQ ID NO: 601959 - RNA, 19 nt, Artificial Sequence
  Description of Artificial Sequence: Synthetic oligonucleotide
  Antisense strand to SEQ ID NO: 601958
uucugcagccaccacugag

SEQ ID NO: 601960 - RNA, 19 nt, Artificial Sequence
  Description of Artificial Sequence: Synthetic oligonucleotide
  Sense strand starting at position 2285 of SEQ ID NO: 584952
gaggaagugcugggaacaa

SEQ ID NO: 601961 - RNA, 19 nt, Artificial Sequence
  Description of Artificial Sequence: Synthetic oligonucleotide
  Antisense strand to SEQ ID NO: 601960
uuguucccagcacuuccuc

SEQ ID NO: 601962 - RNA, 19 nt, Artificial Sequence
  Description of Artificial Sequence: Synthetic oligonucleotide
  Sense strand starting at position 2295 of SEQ ID NO: 584952
ugggaacaaugucaccauu

SEQ ID NO: 601963 - RNA, 19 nt, Artificial Sequence
  Description of Artificial Sequence: Synthetic oligonucleotide
  Antisense strand to SEQ ID NO: 601962
aauggugacauuguuccca

SEQ ID NO: 601964 - RNA, 19 nt, Artificial Sequence
  Description of Artificial Sequence: Synthetic oligonucleotide
  Sense strand starting at position 2305 of SEQ ID NO: 584952
gucaccauuucucagaaag

SEQ ID NO: 601965 - RNA, 19 nt, Artificial Sequence
  Description of Artificial Sequence: Synthetic oligonucleotide
  Antisense strand to SEQ ID NO: 601964
cuuucugagaaauggugac

SEQ ID NO: 601966 - RNA, 19 nt, Artificial Sequence
  Description of Artificial Sequence: Synthetic oligonucleotide
  Sense strand starting at position 2662 of SEQ ID NO: 584952
ucugacaagugguuaguaa

SEQ ID NO: 601967 - RNA, 19 nt, Artificial Sequence
  Description of Artificial Sequence: Synthetic oligonucleotide
  Antisense strand to SEQ ID NO: 601966
uuacuaaccacuugucaga

SEQ ID NO: 601968 - RNA, 19 nt, Artificial Sequence
  Description of Artificial Sequence: Synthetic oligonucleotide
  Sense strand starting at position 2663 of SEQ ID NO: 584952
cugacaagugguuaguaau

SEQ ID NO: 601969 - RNA, 19 nt, Artificial Sequence
  Description of Artificial Sequence: Synthetic oligonucleotide
  Antisense strand to SEQ ID NO: 601968
auuacuaaccacuugucag

SEQ ID NO: 601970 - RNA, 19 nt, Artificial Sequence
  Description of Artificial Sequence: Synthetic oligonucleotide
  Sense strand starting at position 3280 of SEQ ID NO: 584952
ggucaugccuuuccauaga

SEQ ID NO: 601971 - RNA, 19 nt, Artificial Sequence
  Description of Artificial Sequence: Synthetic oligonucleotide
  Antisense strand to SEQ ID NO: 601970
ucuauggaaaggcaugacc

SEQ ID NO: 601972 - RNA, 19 nt, Artificial Sequence
  Description of Artificial Sequence: Synthetic oligonucleotide
  Sense strand starting at position 3375 of SEQ ID NO: 584952
ucaggaaugccgcagaugu

SEQ ID NO: 601973 - RNA, 19 nt, Artificial Sequence
  Description of Artificial Sequence: Synthetic oligonucleotide
  Antisense strand to SEQ ID NO: 601972
acaucugcggcauuccuga

SEQ ID NO: 601974 - RNA, 19 nt, Artificial Sequence
  Description of Artificial Sequence: Synthetic oligonucleotide
  Sense strand starting at position 3458 of SEQ ID NO: 584952
ugucuuguacaauguuuga

SEQ ID NO: 601975 - RNA, 19 nt, Artificial Sequence
  Description of Artificial Sequence: Synthetic oligonucleotide
  Antisense strand to SEQ ID NO: 601974
ucaaacauuguacaagaca

SEQ ID NO: 601976 - RNA, 19 nt, Artificial Sequence
  Description of Artificial Sequence: Synthetic oligonucleotide
  Sense strand starting at position 3633 of SEQ ID NO: 584952
gguuaaaugugugcacgua

SEQ ID NO: 601977 - RNA, 19 nt, Artificial Sequence
  Description of Artificial Sequence: Synthetic oligonucleotide
  Antisense strand to SEQ ID NO: 601976
uacgugcacacauuuaacc

SEQ ID NO: 601978 - RNA, 19 nt, Artificial Sequence
  Description of Artificial Sequence: Synthetic oligonucleotide
  Sense strand starting at position 3634 of SEQ ID NO: 584952
guuaaaugugugcacguaa

SEQ ID NO: 601979 - RNA, 19 nt, Artificial Sequence
  Description of Artificial Sequence: Synthetic oligonucleotide
  Antisense strand to SEQ ID NO: 601978
uuacgugcacacauuuaac

SEQ ID NO: 601980 - RNA, 19 nt, Artificial Sequence
  Description of Artificial Sequence: Synthetic oligonucleotide
  Sense strand starting at position 3808 of SEQ ID NO: 584952
aacugagauuugcagcaga

SEQ ID NO: 601981 - RNA, 19 nt, Artificial Sequence
  Description of Artificial Sequence: Synthetic oligonucleotide
  Antisense strand to SEQ ID NO: 601980
ucugcugcaaaucucaguu

SEQ ID NO: 601982 - RNA, 19 nt, Artificial Sequence
  Description of Artificial Sequence: Synthetic oligonucleotide
  Sense strand starting at position 88 of SEQ ID NO: 584953
ggagccacaucuuuccuua

SEQ ID NO: 601983 - RNA, 19 nt, Artificial Sequence
  Description of Artificial Sequence: Synthetic oligonucleotide
  Antisense strand to SEQ ID NO: 601982
uaaggaaagauguggcucc

SEQ ID NO: 601984 - RNA, 19 nt, Artificial Sequence
  Description of Artificial Sequence: Synthetic oligonucleotide
  Sense strand starting at position 150 of SEQ ID NO: 584953
gugguuccuccaugacucu

SEQ ID NO: 601985 - RNA, 19 nt, Artificial Sequence
  Description of Artificial Sequence: Synthetic oligonucleotide
  Antisense strand to SEQ ID NO: 601984
agagucauggaggaaccac

SEQ ID NO: 601986 - RNA, 19 nt, Artificial Sequence
  Description of Artificial Sequence: Synthetic oligonucleotide
  Sense strand starting at position 203 of SEQ ID NO: 584953
ccaggucccacguguuaca

SEQ ID NO: 601987 - RNA, 19 nt, Artificial Sequence
  Description of Artificial Sequence: Synthetic oligonucleotide
  Antisense strand to SEQ ID NO: 601986
uguaacacgugggaccugg

SEQ ID NO: 601988 - RNA, 19 nt, Artificial Sequence
  Description of Artificial Sequence: Synthetic oligonucleotide
  Sense strand starting at position 228 of SEQ ID NO: 584953
gccacauacuagcaaguua

SEQ ID NO: 601989 - RNA, 19 nt, Artificial Sequence
  Description of Artificial Sequence: Synthetic oligonucleotide
  Antisense strand to SEQ ID NO: 601988
uaacuugcuaguauguggc

SEQ ID NO: 601990 - RNA, 19 nt, Artificial Sequence
  Description of Artificial Sequence: Synthetic oligonucleotide
  Sense strand starting at position 255 of SEQ ID NO: 584953
cucugagcuuuaguuuaua

SEQ ID NO: 601991 - RNA, 19 nt, Artificial Sequence
  Description of Artificial Sequence: Synthetic oligonucleotide
  Antisense strand to SEQ ID NO: 601990
uauaaacuaaagcucagag

SEQ ID NO: 601992 - RNA, 19 nt, Artificial Sequence
  Description of Artificial Sequence: Synthetic oligonucleotide
  Sense strand starting at position 258 of SEQ ID NO: 584953
ugagcuuuaguuuauacau

SEQ ID NO: 601993 - RNA, 19 nt, Artificial Sequence
  Description of Artificial Sequence: Synthetic oligonucleotide
  Antisense strand to SEQ ID NO: 601992
auguauaaacuaaagcuca

SEQ ID NO: 601994 - RNA, 19 nt, Artificial Sequence
  Description of Artificial Sequence: Synthetic oligonucleotide
  Sense strand starting at position 336 of SEQ ID NO: 584953
gaucauccaccuggaaguu

SEQ ID NO: 601995 - RNA, 19 nt, Artificial Sequence
  Description of Artificial Sequence: Synthetic oligonucleotide
  Antisense strand to SEQ ID NO: 601994
aacuuccagguggaugauc

SEQ ID NO: 601996 - RNA, 19 nt, Artificial Sequence
  Description of Artificial Sequence: Synthetic oligonucleotide
  Sense strand starting at position 749 of SEQ ID NO: 584953
cugccauccucugugaugu

SEQ ID NO: 601997 - RNA, 19 nt, Artificial Sequence
  Description of Artificial Sequence: Synthetic oligonucleotide
  Antisense strand to SEQ ID NO: 601996
acaucacagaggauggcag

SEQ ID NO: 601998 - RNA, 19 nt, Artificial Sequence
  Description of Artificial Sequence: Synthetic oligonucleotide
  Sense strand starting at position 759 of SEQ ID NO: 584953
cugugaugucccuguucuc

SEQ ID NO: 601999 - RNA, 19 nt, Artificial Sequence
  Description of Artificial Sequence: Synthetic oligonucleotide
  Antisense strand to SEQ ID NO: 601998
gagaacagggacaucacag

SEQ ID NO: 602000 - RNA, 19 nt, Artificial Sequence
  Description of Artificial Sequence: Synthetic oligonucleotide
  Sense strand starting at position 770 of SEQ ID NO: 584953
cuguucucuccucagaaag

SEQ ID NO: 602001 - RNA, 19 nt, Artificial Sequence
  Description of Artificial Sequence: Synthetic oligonucleotide
  Antisense strand to SEQ ID NO: 602000
cuuucugaggagagaacag

SEQ ID NO: 602002 - RNA, 19 nt, Artificial Sequence
  Description of Artificial Sequence: Synthetic oligonucleotide
  Sense strand starting at position 849 of SEQ ID NO: 584953
gcacgaauccaccaugcau

SEQ ID NO: 602003 - RNA, 19 nt, Artificial Sequence
  Description of Artificial Sequence: Synthetic oligonucleotide
  Antisense strand to SEQ ID NO: 602002
augcaugguggauucgugc

SEQ ID NO: 602004 - RNA, 19 nt, Artificial Sequence
  Description of Artificial Sequence: Synthetic oligonucleotide
  Sense strand starting at position 880 of SEQ ID NO: 584953
ucgcuauucccucagacac

SEQ ID NO: 602005 - RNA, 19 nt, Artificial Sequence
  Description of Artificial Sequence: Synthetic oligonucleotide
  Antisense strand to SEQ ID NO: 602004
gugucugagggaauagcga

SEQ ID NO: 602006 - RNA, 19 nt, Artificial Sequence
  Description of Artificial Sequence: Synthetic oligonucleotide
  Sense strand starting at position 916 of SEQ ID NO: 584953
augggaaggucgcagaaau

SEQ ID NO: 602007 - RNA, 19 nt, Artificial Sequence
  Description of Artificial Sequence: Synthetic oligonucleotide
  Antisense strand to SEQ ID NO: 602006
auuucugcgaccuucccau

SEQ ID NO: 602008 - RNA, 19 nt, Artificial Sequence
  Description of Artificial Sequence: Synthetic oligonucleotide
  Sense strand starting at position 947 of SEQ ID NO: 584953
auaaguacccgguggucaa

SEQ ID NO: 602009 - RNA, 19 nt, Artificial Sequence
  Description of Artificial Sequence: Synthetic oligonucleotide
  Antisense strand to SEQ ID NO: 602008
uugaccaccggguacuuau

SEQ ID NO: 602010 - RNA, 19 nt, Artificial Sequence
  Description of Artificial Sequence: Synthetic oligonucleotide
  Sense strand starting at position 996 of SEQ ID NO: 584953
gguugaaaucuuggcuuug

SEQ ID NO: 602011 - RNA, 19 nt, Artificial Sequence
  Description of Artificial Sequence: Synthetic oligonucleotide
  Antisense strand to SEQ ID NO: 602010
caaagccaagauuucaacc

SEQ ID NO: 602012 - RNA, 19 nt, Artificial Sequence
  Description of Artificial Sequence: Synthetic oligonucleotide
  Sense strand starting at position 998 of SEQ ID NO: 584953
uugaaaucuuggcuuugcu

SEQ ID NO: 602013 - RNA, 19 nt, Artificial Sequence
  Description of Artificial Sequence: Synthetic oligonucleotide
  Antisense strand to SEQ ID NO: 602012
agcaaagccaagauuucaa

SEQ ID NO: 602014 - RNA, 19 nt, Artificial Sequence
  Description of Artificial Sequence: Synthetic oligonucleotide
  Sense strand starting at position 1014 of SEQ ID NO: 584953
gcugccuucuaaugcauga

SEQ ID NO: 602015 - RNA, 19 nt, Artificial Sequence
  Description of Artificial Sequence: Synthetic oligonucleotide
  Antisense strand to SEQ ID NO: 602014
ucaugcauuagaaggcagc

SEQ ID NO: 602016 - RNA, 19 nt, Artificial Sequence
  Description of Artificial Sequence: Synthetic oligonucleotide
  Sense strand starting at position 1027 of SEQ ID NO: 584953
gcaugaucuugagcuacuu

SEQ ID NO: 602017 - RNA, 19 nt, Artificial Sequence
  Description of Artificial Sequence: Synthetic oligonucleotide
  Antisense strand to SEQ ID NO: 602016
aaguagcucaagaucaugc

SEQ ID NO: 602018 - RNA, 19 nt, Artificial Sequence
  Description of Artificial Sequence: Synthetic oligonucleotide
  Sense strand starting at position 1105 of SEQ ID NO: 584953
ucauaccguucuuguaaug

SEQ ID NO: 602019 - RNA, 19 nt, Artificial Sequence
  Description of Artificial Sequence: Synthetic oligonucleotide
  Antisense strand to SEQ ID NO: 602018
cauuacaagaacgguauga

SEQ ID NO: 602020 - RNA, 19 nt, Artificial Sequence
  Description of Artificial Sequence: Synthetic oligonucleotide
  Sense strand starting at position 1110 of SEQ ID NO: 584953
ccguucuuguaaugaucaa

SEQ ID NO: 602021 - RNA, 19 nt, Artificial Sequence
  Description of Artificial Sequence: Synthetic oligonucleotide
  Antisense strand to SEQ ID NO: 602020
uugaucauuacaagaacgg

SEQ ID NO: 602022 - RNA, 19 nt, Artificial Sequence
  Description of Artificial Sequence: Synthetic oligonucleotide
  Sense strand starting at position 1535 of SEQ ID NO: 584953
guccaaucauuaucuugua

SEQ ID NO: 602023 - RNA, 19 nt, Artificial Sequence
  Description of Artificial Sequence: Synthetic oligonucleotide
  Antisense strand to SEQ ID NO: 602022
uacaagauaaugauuggac

SEQ ID NO: 602024 - RNA, 19 nt, Artificial Sequence
  Description of Artificial Sequence: Synthetic oligonucleotide
  Sense strand starting at position 1649 of SEQ ID NO: 584953
acuagaguuaggugucauu

SEQ ID NO: 602025 - RNA, 19 nt, Artificial Sequence
  Description of Artificial Sequence: Synthetic oligonucleotide
  Antisense strand to SEQ ID NO: 602024
aaugacaccuaacucuagu

SEQ ID NO: 602026 - RNA, 19 nt, Artificial Sequence
  Description of Artificial Sequence: Synthetic oligonucleotide
  Sense strand starting at position 1652 of SEQ ID NO: 584953
agaguuaggugucauuaac

SEQ ID NO: 602027 - RNA, 19 nt, Artificial Sequence
  Description of Artificial Sequence: Synthetic oligonucleotide
  Antisense strand to SEQ ID NO: 602026
guuaaugacaccuaacucu

SEQ ID NO: 602028 - RNA, 19 nt, Artificial Sequence
  Description of Artificial Sequence: Synthetic oligonucleotide
  Sense strand starting at position 2090 of SEQ ID NO: 584953
ccgggaggagcgugguaau

SEQ ID NO: 602029 - RNA, 19 nt, Artificial Sequence
  Description of Artificial Sequence: Synthetic oligonucleotide
  Antisense strand to SEQ ID NO: 602028
auuaccacgcuccucccgg

SEQ ID NO: 602030 - RNA, 19 nt, Artificial Sequence
  Description of Artificial Sequence: Synthetic oligonucleotide
  Sense strand starting at position 2103 of SEQ ID NO: 584953
gguaaucagcccggugcau

SEQ ID NO: 602031 - RNA, 19 nt, Artificial Sequence
  Description of Artificial Sequence: Synthetic oligonucleotide
  Antisense strand to SEQ ID NO: 602030
augcaccgggcugauuacc

SEQ ID NO: 602032 - RNA, 19 nt, Artificial Sequence
  Description of Artificial Sequence: Synthetic oligonucleotide
  Sense strand starting at position 2575 of SEQ ID NO: 584953
ccuauuacguguuccauca

SEQ ID NO: 602033 - RNA, 19 nt, Artificial Sequence
  Description of Artificial Sequence: Synthetic oligonucleotide
  Antisense strand to SEQ ID NO: 602032
ugauggaacacguaauagg

SEQ ID NO: 602034 - RNA, 19 nt, Artificial Sequence
  Description of Artificial Sequence: Synthetic oligonucleotide
  Sense strand starting at position 2743 of SEQ ID NO: 584953
gcugaugaccucugucaaa

SEQ ID NO: 602035 - RNA, 19 nt, Artificial Sequence
  Description of Artificial Sequence: Synthetic oligonucleotide
  Antisense strand to SEQ ID NO: 602034
uuugacagaggucaucagc

SEQ ID NO: 602036 - RNA, 19 nt, Artificial Sequence
  Description of Artificial Sequence: Synthetic oligonucleotide
  Sense strand starting at position 3093 of SEQ ID NO: 584953
ucacuaguauugcgggagu

SEQ ID NO: 602037 - RNA, 19 nt, Artificial Sequence
  Description of Artificial Sequence: Synthetic oligonucleotide
  Antisense strand to SEQ ID NO: 602036
acucccgcaauacuaguga

SEQ ID NO: 602038 - RNA, 19 nt, Artificial Sequence
  Description of Artificial Sequence: Synthetic oligonucleotide
  Sense strand starting at position 3095 of SEQ ID NO: 584953
acuaguauugcgggaguau

SEQ ID NO: 602039 - RNA, 19 nt, Artificial Sequence
  Description of Artificial Sequence: Synthetic oligonucleotide
  Antisense strand to SEQ ID NO: 602038
auacucccgcaauacuagu

SEQ ID NO: 602040 - RNA, 19 nt, Artificial Sequence
  Description of Artificial Sequence: Synthetic oligonucleotide
  Sense strand starting at position 3096 of SEQ ID NO: 584953
cuaguauugcgggaguauc

SEQ ID NO: 602041 - RNA, 19 nt, Artificial Sequence
  Description of Artificial Sequence: Synthetic oligonucleotide
  Antisense strand to SEQ ID NO: 602040
gauacucccgcaauacuag

SEQ ID NO: 602042 - RNA, 19 nt, Artificial Sequence
  Description of Artificial Sequence: Synthetic oligonucleotide
  Sense strand starting at position 3105 of SEQ ID NO: 584953
cgggaguaucaguaucgga

SEQ ID NO: 602043 - RNA, 19 nt, Artificial Sequence
  Description of Artificial Sequence: Synthetic oligonucleotide
  Antisense strand to SEQ ID NO: 602042
uccgauacugauacucccg

SEQ ID NO: 602044 - RNA, 19 nt, Artificial Sequence
  Description of Artificial Sequence: Synthetic oligonucleotide
  Sense strand starting at position 3307 of SEQ ID NO: 584953
gcaggaggauggaaauguu

SEQ ID NO: 602045 - RNA, 19 nt, Artificial Sequence
  Description of Artificial Sequence: Synthetic oligonucleotide
  Antisense strand to SEQ ID NO: 602044
aacauuuccauccuccugc

SEQ ID NO: 602046 - RNA, 19 nt, Artificial Sequence
  Description of Artificial Sequence: Synthetic oligonucleotide
  Sense strand starting at position 3317 of SEQ ID NO: 584953
ggaaauguuuccugucugu

SEQ ID NO: 602047 - RNA, 19 nt, Artificial Sequence
  Description of Artificial Sequence: Synthetic oligonucleotide
  Antisense strand to SEQ ID NO: 602046
acagacaggaaacauuucc

SEQ ID NO: 602048 - RNA, 19 nt, Artificial Sequence
  Description of Artificial Sequence: Synthetic oligonucleotide
  Sense strand starting at position 3328 of SEQ ID NO: 584953
cugucugugcuguccgaua

SEQ ID NO: 602049 - RNA, 19 nt, Artificial Sequence
  Description of Artificial Sequence: Synthetic oligonucleotide
  Antisense strand to SEQ ID NO: 602048
uaucggacagcacagacag

SEQ ID NO: 602050 - RNA, 19 nt, Artificial Sequence
  Description of Artificial Sequence: Synthetic oligonucleotide
  Sense strand starting at position 3462 of SEQ ID NO: 584953
gcucuugacuugcuaguga

SEQ ID NO: 602051 - RNA, 19 nt, Artificial Sequence
  Description of Artificial Sequence: Synthetic oligonucleotide
  Antisense strand to SEQ ID NO: 602050
ucacuagcaagucaagagc

SEQ ID NO: 602052 - RNA, 19 nt, Artificial Sequence
  Description of Artificial Sequence: Synthetic oligonucleotide
  Sense strand starting at position 3466 of SEQ ID NO: 584953
uugacuugcuagugacacu

SEQ ID NO: 602053 - RNA, 19 nt, Artificial Sequence
  Description of Artificial Sequence: Synthetic oligonucleotide
  Antisense strand to SEQ ID NO: 602052
agugucacuagcaagucaa

SEQ ID NO: 602054 - RNA, 19 nt, Artificial Sequence
  Description of Artificial Sequence: Synthetic oligonucleotide
  Sense strand starting at position 3473 of SEQ ID NO: 584953
gcuagugacacucagaaug

SEQ ID NO: 602055 - RNA, 19 nt, Artificial Sequence
  Description of Artificial Sequence: Synthetic oligonucleotide
  Antisense strand to SEQ ID NO: 602054
cauucugagugucacuagc

SEQ ID NO: 602056 - RNA, 19 nt, Artificial Sequence
  Description of Artificial Sequence: Synthetic oligonucleotide
  Sense strand starting at position 3561 of SEQ ID NO: 584953
gggcuaaugccuugggaaa

SEQ ID NO: 602057 - RNA, 19 nt, Artificial Sequence
  Description of Artificial Sequence: Synthetic oligonucleotide
  Antisense strand to SEQ ID NO: 602056
uuucccaaggcauuagccc

SEQ ID NO: 602058 - RNA, 19 nt, Artificial Sequence
  Description of Artificial Sequence: Synthetic oligonucleotide
  Sense strand starting at position 3612 of SEQ ID NO: 584953
gaagaugacguggguucaa

SEQ ID NO: 602059 - RNA, 19 nt, Artificial Sequence
  Description of Artificial Sequence: Synthetic oligonucleotide
  Antisense strand to SEQ ID NO: 602058
uugaacccacgucaucuuc

SEQ ID NO: 602060 - RNA, 19 nt, Artificial Sequence
  Description of Artificial Sequence: Synthetic oligonucleotide
  Sense strand starting at position 17 of SEQ ID NO: 584954
uuuacagccuggugugaua

SEQ ID NO: 602061 - RNA, 19 nt, Artificial Sequence
  Description of Artificial Sequence: Synthetic oligonucleotide
  Antisense strand to SEQ ID NO: 602060
uaucacaccaggcuguaaa

SEQ ID NO: 602062 - RNA, 19 nt, Artificial Sequence
  Description of Artificial Sequence: Synthetic oligonucleotide
  Sense strand starting at position 29 of SEQ ID NO: 584954
ugugauagcucacaagugu

SEQ ID NO: 602063 - RNA, 19 nt, Artificial Sequence
  Description of Artificial Sequence: Synthetic oligonucleotide
  Antisense strand to SEQ ID NO: 602062
acacuugugagcuaucaca

SEQ ID NO: 602064 - RNA, 19 nt, Artificial Sequence
  Description of Artificial Sequence: Synthetic oligonucleotide
  Sense strand starting at position 303 of SEQ ID NO: 584954
gucuuaaaccaacgggaaa

SEQ ID NO: 602065 - RNA, 19 nt, Artificial Sequence
  Description of Artificial Sequence: Synthetic oligonucleotide
  Antisense strand to SEQ ID NO: 602064
uuucccguugguuuaagac

SEQ ID NO: 602066 - RNA, 19 nt, Artificial Sequence
  Description of Artificial Sequence: Synthetic oligonucleotide
  Sense strand starting at position 499 of SEQ ID NO: 584954
cccagaaacucaugaggcu

SEQ ID NO: 602067 - RNA, 19 nt, Artificial Sequence
  Description of Artificial Sequence: Synthetic oligonucleotide
  Antisense strand to SEQ ID NO: 602066
agccucaugaguuucuggg

SEQ ID NO: 602068 - RNA, 19 nt, Artificial Sequence
  Description of Artificial Sequence: Synthetic oligonucleotide
  Sense strand starting at position 667 of SEQ ID NO: 584954
uuguaauguacaggugauc

SEQ ID NO: 602069 - RNA, 19 nt, Artificial Sequence
  Description of Artificial Sequence: Synthetic oligonucleotide
  Antisense strand to SEQ ID NO: 602068
gaucaccuguacauuacaa

SEQ ID NO: 602070 - RNA, 19 nt, Artificial Sequence
  Description of Artificial Sequence: Synthetic oligonucleotide
  Sense strand starting at position 678 of SEQ ID NO: 584954
aggugaucccuuuauugua

SEQ ID NO: 602071 - RNA, 19 nt, Artificial Sequence
  Description of Artificial Sequence: Synthetic oligonucleotide
  Antisense strand to SEQ ID NO: 602070
uacaauaaagggaucaccu

SEQ ID NO: 602072 - RNA, 19 nt, Artificial Sequence
  Description of Artificial Sequence: Synthetic oligonucleotide
  Sense strand starting at position 836 of SEQ ID NO: 584954
gugccuccauuugaaugau

SEQ ID NO: 602073 - RNA, 19 nt, Artificial Sequence
  Description of Artificial Sequence: Synthetic oligonucleotide
  Antisense strand to SEQ ID NO: 602072
aucauucaaauggaggcac

SEQ ID NO: 602074 - RNA, 19 nt, Artificial Sequence
  Description of Artificial Sequence: Synthetic oligonucleotide
  Sense strand starting at position 857 of SEQ ID NO: 584954
auuauauugucacucaagu

SEQ ID NO: 602075 - RNA, 19 nt, Artificial Sequence
  Description of Artificial Sequence: Synthetic oligonucleotide
  Antisense strand to SEQ ID NO: 602074
acuugagugacaauauaau

SEQ ID NO: 602076 - RNA, 19 nt, Artificial Sequence
  Description of Artificial Sequence: Synthetic oligonucleotide
  Sense strand starting at position 866 of SEQ ID NO: 584954
ucacucaaguuguaacacu

SEQ ID NO: 602077 - RNA, 19 nt, Artificial Sequence
  Description of Artificial Sequence: Synthetic oligonucleotide
  Antisense strand to SEQ ID NO: 602076
aguguuacaacuugaguga

SEQ ID NO: 602078 - RNA, 19 nt, Artificial Sequence
  Description of Artificial Sequence: Synthetic oligonucleotide
  Sense strand starting at position 874 of SEQ ID NO: 584954
guuguaacacugugaggaa

SEQ ID NO: 602079 - RNA, 19 nt, Artificial Sequence
  Description of Artificial Sequence: Synthetic oligonucleotide
  Antisense strand to SEQ ID NO: 602078
uuccucacaguguuacaac

SEQ ID NO: 602080 - RNA, 19 nt, Artificial Sequence
  Description of Artificial Sequence: Synthetic oligonucleotide
  Sense strand starting at position 875 of SEQ ID NO: 584954
uuguaacacugugaggaau

SEQ ID NO: 602081 - RNA, 19 nt, Artificial Sequence
  Description of Artificial Sequence: Synthetic oligonucleotide
  Antisense strand to SEQ ID NO: 602080
auuccucacaguguuacaa

SEQ ID NO: 602082 - RNA, 19 nt, Artificial Sequence
  Description of Artificial Sequence: Synthetic oligonucleotide
  Sense strand starting at position 969 of SEQ ID NO: 584954
ggucuaugccuuuaacaau

SEQ ID NO: 602083 - RNA, 19 nt, Artificial Sequence
  Description of Artificial Sequence: Synthetic oligonucleotide
  Antisense strand to SEQ ID NO: 602082
auuguuaaaggcauagacc

SEQ ID NO: 602084 - RNA, 19 nt, Artificial Sequence
  Description of Artificial Sequence: Synthetic oligonucleotide
  Sense strand starting at position 975 of SEQ ID NO: 584954
ugccuuuaacaaugauuga

SEQ ID NO: 602085 - RNA, 19 nt, Artificial Sequence
  Description of Artificial Sequence: Synthetic oligonucleotide
  Antisense strand to SEQ ID NO: 602084
ucaaucauuguuaaaggca

SEQ ID NO: 602086 - RNA, 19 nt, Artificial Sequence
  Description of Artificial Sequence: Synthetic oligonucleotide
  Sense strand starting at position 991 of SEQ ID NO: 584954
ugaccuaucuuaucuggau

SEQ ID NO: 602087 - RNA, 19 nt, Artificial Sequence
  Description of Artificial Sequence: Synthetic oligonucleotide
  Antisense strand to SEQ ID NO: 602086
auccagauaagauagguca

SEQ ID NO: 602088 - RNA, 19 nt, Artificial Sequence
  Description of Artificial Sequence: Synthetic oligonucleotide
  Sense strand starting at position 1023 of SEQ ID NO: 584954
gcaagagagugucugcuau

SEQ ID NO: 602089 - RNA, 19 nt, Artificial Sequence
  Description of Artificial Sequence: Synthetic oligonucleotide
  Antisense strand to SEQ ID NO: 602088
auagcagacacucucuugc

SEQ ID NO: 602090 - RNA, 19 nt, Artificial Sequence
  Description of Artificial Sequence: Synthetic oligonucleotide
  Sense strand starting at position 1025 of SEQ ID NO: 584954
aagagagugucugcuaugu

SEQ ID NO: 602091 - RNA, 19 nt, Artificial Sequence
  Description of Artificial Sequence: Synthetic oligonucleotide
  Antisense strand to SEQ ID NO: 602090
acauagcagacacucucuu

SEQ ID NO: 602092 - RNA, 19 nt, Artificial Sequence
  Description of Artificial Sequence: Synthetic oligonucleotide
  Sense strand starting at position 1027 of SEQ ID NO: 584954
gagagugucugcuauguau

SEQ ID NO: 602093 - RNA, 19 nt, Artificial Sequence
  Description of Artificial Sequence: Synthetic oligonucleotide
  Antisense strand to SEQ ID NO: 602092
auacauagcagacacucuc

SEQ ID NO: 602094 - RNA, 19 nt, Artificial Sequence
  Description of Artificial Sequence: Synthetic oligonucleotide
  Sense strand starting at position 1029 of SEQ ID NO: 584954
gagugucugcuauguauaa

SEQ ID NO: 602095 - RNA, 19 nt, Artificial Sequence
  Description of Artificial Sequence: Synthetic oligonucleotide
  Antisense strand to SEQ ID NO: 602094
uuauacauagcagacacuc

SEQ ID NO: 602096 - RNA, 19 nt, Artificial Sequence
  Description of Artificial Sequence: Synthetic oligonucleotide
  Sense strand starting at position 1033 of SEQ ID NO: 584954
gucugcuauguauaaggca

SEQ ID NO: 602097 - RNA, 19 nt, Artificial Sequence
  Description of Artificial Sequence: Synthetic oligonucleotide
  Antisense strand to SEQ ID NO: 602096
ugccuuauacauagcagac

SEQ ID NO: 602098 - RNA, 19 nt, Artificial Sequence
  Description of Artificial Sequence: Synthetic oligonucleotide
  Sense strand starting at position 1092 of SEQ ID NO: 584954
ugcccucacucucaugaga

SEQ ID NO: 602099 - RNA, 19 nt, Artificial Sequence
  Description of Artificial Sequence: Synthetic oligonucleotide
  Antisense strand to SEQ ID NO: 602098
ucucaugagagugagggca

SEQ ID NO: 602100 - RNA, 19 nt, Artificial Sequence
  Description of Artificial Sequence: Synthetic oligonucleotide
  Sense strand starting at position 1094 of SEQ ID NO: 584954
cccucacucucaugagaga

SEQ ID NO: 602101 - RNA, 19 nt, Artificial Sequence
  Description of Artificial Sequence: Synthetic oligonucleotide
  Antisense strand to SEQ ID NO: 602100
ucucucaugagagugaggg

SEQ ID NO: 602102 - RNA, 19 nt, Artificial Sequence
  Description of Artificial Sequence: Synthetic oligonucleotide
  Sense strand starting at position 1240 of SEQ ID NO: 584954
gcgcaaggucuacaaguga

SEQ ID NO: 602103 - RNA, 19 nt, Artificial Sequence
  Description of Artificial Sequence: Synthetic oligonucleotide
  Antisense strand to SEQ ID NO: 602102
ucacuuguagaccuugcgc

SEQ ID NO: 602104 - RNA, 19 nt, Artificial Sequence
  Description of Artificial Sequence: Synthetic oligonucleotide
  Sense strand starting at position 1278 of SEQ ID NO: 584954
gugccagaaucagaaaugu

SEQ ID NO: 602105 - RNA, 19 nt, Artificial Sequence
  Description of Artificial Sequence: Synthetic oligonucleotide
  Antisense strand to SEQ ID NO: 602104
acauuucugauucuggcac

SEQ ID NO: 602106 - RNA, 19 nt, Artificial Sequence
  Description of Artificial Sequence: Synthetic oligonucleotide
  Sense strand starting at position 1439 of SEQ ID NO: 584954
cugcaugguggucagcaua

SEQ ID NO: 602107 - RNA, 19 nt, Artificial Sequence
  Description of Artificial Sequence: Synthetic oligonucleotide
  Antisense strand to SEQ ID NO: 602106
uaugcugaccaccaugcag

SEQ ID NO: 602108 - RNA, 19 nt, Artificial Sequence
  Description of Artificial Sequence: Synthetic oligonucleotide
  Sense strand starting at position 1442 of SEQ ID NO: 584954
caugguggucagcauagaa

SEQ ID NO: 602109 - RNA, 19 nt, Artificial Sequence
  Description of Artificial Sequence: Synthetic oligonucleotide
  Antisense strand to SEQ ID NO: 602108
uucuaugcugaccaccaug

SEQ ID NO: 602110 - RNA, 19 nt, Artificial Sequence
  Description of Artificial Sequence: Synthetic oligonucleotide
  Sense strand starting at position 1446 of SEQ ID NO: 584954
guggucagcauagaaauaa

SEQ ID NO: 602111 - RNA, 19 nt, Artificial Sequence
  Description of Artificial Sequence: Synthetic oligonucleotide
  Antisense strand to SEQ ID NO: 602110
uuauuucuaugcugaccac

SEQ ID NO: 602112 - RNA, 19 nt, Artificial Sequence
  Description of Artificial Sequence: Synthetic oligonucleotide
  Sense strand starting at position 1582 of SEQ ID NO: 584954
agccaugcucucgaaugga

SEQ ID NO: 602113 - RNA, 19 nt, Artificial Sequence
  Description of Artificial Sequence: Synthetic oligonucleotide
  Antisense strand to SEQ ID NO: 602112
uccauucgagagcauggcu

SEQ ID NO: 602114 - RNA, 19 nt, Artificial Sequence
  Description of Artificial Sequence: Synthetic oligonucleotide
  Sense strand starting at position 1606 of SEQ ID NO: 584954
aguggcaagugguaucaca

SEQ ID NO: 602115 - RNA, 19 nt, Artificial Sequence
  Description of Artificial Sequence: Synthetic oligonucleotide
  Antisense strand to SEQ ID NO: 602114
ugugauaccacuugccacu

SEQ ID NO: 602116 - RNA, 19 nt, Artificial Sequence
  Description of Artificial Sequence: Synthetic oligonucleotide
  Sense strand starting at position 1613 of SEQ ID NO: 584954
agugguaucacaggaagga

SEQ ID NO: 602117 - RNA, 19 nt, Artificial Sequence
  Description of Artificial Sequence: Synthetic oligonucleotide
  Antisense strand to SEQ ID NO: 602116
uccuuccugugauaccacu

SEQ ID NO: 602118 - RNA, 19 nt, Artificial Sequence
  Description of Artificial Sequence: Synthetic oligonucleotide
  Sense strand starting at position 2692 of SEQ ID NO: 584954
gcauucgugguucaugaua

SEQ ID NO: 602119 - RNA, 19 nt, Artificial Sequence
  Description of Artificial Sequence: Synthetic oligonucleotide
  Antisense strand to SEQ ID NO: 602118
uaucaugaaccacgaaugc

SEQ ID NO: 602120 - RNA, 19 nt, Artificial Sequence
  Description of Artificial Sequence: Synthetic oligonucleotide
  Sense strand starting at position 497 of SEQ ID NO: 584955
guggauaugcauuagguga

SEQ ID NO: 602121 - RNA, 19 nt, Artificial Sequence
  Description of Artificial Sequence: Synthetic oligonucleotide
  Antisense strand to SEQ ID NO: 602120
ucaccuaaugcauauccac

SEQ ID NO: 602122 - RNA, 19 nt, Artificial Sequence
  Description of Artificial Sequence: Synthetic oligonucleotide
  Sense strand starting at position 502 of SEQ ID NO: 584955
uaugcauuaggugacuuau

SEQ ID NO: 602123 - RNA, 19 nt, Artificial Sequence
  Description of Artificial Sequence: Synthetic oligonucleotide
  Antisense strand to SEQ ID NO: 602122
auaagucaccuaaugcaua

SEQ ID NO: 602124 - RNA, 19 nt, Artificial Sequence
  Description of Artificial Sequence: Synthetic oligonucleotide
  Sense strand starting at position 520 of SEQ ID NO: 584955
uguuucuugugacugaaag

SEQ ID NO: 602125 - RNA, 19 nt, Artificial Sequence
  Description of Artificial Sequence: Synthetic oligonucleotide
  Antisense strand to SEQ ID NO: 602124
cuuucagucacaagaaaca

SEQ ID NO: 602126 - RNA, 19 nt, Artificial Sequence
  Description of Artificial Sequence: Synthetic oligonucleotide
  Sense strand starting at position 521 of SEQ ID NO: 584955
guuucuugugacugaaagg

SEQ ID NO: 602127 - RNA, 19 nt, Artificial Sequence
  Description of Artificial Sequence: Synthetic oligonucleotide
  Antisense strand to SEQ ID NO: 602126
ccuuucagucacaagaaac

SEQ ID NO: 602128 - RNA, 19 nt, Artificial Sequence
  Description of Artificial Sequence: Synthetic oligonucleotide
  Sense strand starting at position 546 of SEQ ID NO: 584955
cugcuauuucuguguugaa

SEQ ID NO: 602129 - RNA, 19 nt, Artificial Sequence
  Description of Artificial Sequence: Synthetic oligonucleotide
  Antisense strand to SEQ ID NO: 602128
uucaacacagaaauagcag

SEQ ID NO: 602130 - RNA, 19 nt, Artificial Sequence
  Description of Artificial Sequence: Synthetic oligonucleotide
  Sense strand starting at position 901 of SEQ ID NO: 584955
agaugcuguuaaucauuga

SEQ ID NO: 602131 - RNA, 19 nt, Artificial Sequence
  Description of Artificial Sequence: Synthetic oligonucleotide
  Antisense strand to SEQ ID NO: 602130
ucaaugauuaacagcaucu

SEQ ID NO: 602132 - RNA, 19 nt, Artificial Sequence
  Description of Artificial Sequence: Synthetic oligonucleotide
  Sense strand starting at position 904 of SEQ ID NO: 584955
ugcuguuaaucauugaaau

SEQ ID NO: 602133 - RNA, 19 nt, Artificial Sequence
  Description of Artificial Sequence: Synthetic oligonucleotide
  Antisense strand to SEQ ID NO: 602132
auuucaaugauuaacagca

SEQ ID NO: 602134 - RNA, 19 nt, Artificial Sequence
  Description of Artificial Sequence: Synthetic oligonucleotide
  Sense strand starting at position 905 of SEQ ID NO: 584955
gcuguuaaucauugaaaug

SEQ ID NO: 602135 - RNA, 19 nt, Artificial Sequence
  Description of Artificial Sequence: Synthetic oligonucleotide
  Antisense strand to SEQ ID NO: 602134
cauuucaaugauuaacagc

SEQ ID NO: 602136 - RNA, 19 nt, Artificial Sequence
  Description of Artificial Sequence: Synthetic oligonucleotide
  Sense strand starting at position 1057 of SEQ ID NO: 584955
augaacgagaguuauguga

SEQ ID NO: 602137 - RNA, 19 nt, Artificial Sequence
  Description of Artificial Sequence: Synthetic oligonucleotide
  Antisense strand to SEQ ID NO: 602136
ucacauaacucucguucau

SEQ ID NO: 602138 - RNA, 19 nt, Artificial Sequence
  Description of Artificial Sequence: Synthetic oligonucleotide
  Sense strand starting at position 1061 of SEQ ID NO: 584955
acgagaguuaugugacaca

SEQ ID NO: 602139 - RNA, 19 nt, Artificial Sequence
  Description of Artificial Sequence: Synthetic oligonucleotide
  Antisense strand to SEQ ID NO: 602138
ugugucacauaacucucgu

SEQ ID NO: 602140 - RNA, 19 nt, Artificial Sequence
  Description of Artificial Sequence: Synthetic oligonucleotide
  Sense strand starting at position 1084 of SEQ ID NO: 584955
cuccauacguuacugaaga

SEQ ID NO: 602141 - RNA, 19 nt, Artificial Sequence
  Description of Artificial Sequence: Synthetic oligonucleotide
  Antisense strand to SEQ ID NO: 602140
ucuucaguaacguauggag

SEQ ID NO: 602142 - RNA, 19 nt, Artificial Sequence
  Description of Artificial Sequence: Synthetic oligonucleotide
  Sense strand starting at position 1212 of SEQ ID NO: 584955
guggcucuuuaauuaagaa

SEQ ID NO: 602143 - RNA, 19 nt, Artificial Sequence
  Description of Artificial Sequence: Synthetic oligonucleotide
  Antisense strand to SEQ ID NO: 602142
uucuuaauuaaagagccac

SEQ ID NO: 602144 - RNA, 19 nt, Artificial Sequence
  Description of Artificial Sequence: Synthetic oligonucleotide
  Sense strand starting at position 1251 of SEQ ID NO: 584955
aauuauuaagaacgucagu

SEQ ID NO: 602145 - RNA, 19 nt, Artificial Sequence
  Description of Artificial Sequence: Synthetic oligonucleotide
  Antisense strand to SEQ ID NO: 602144
acugacguucuuaauaauu

SEQ ID NO: 602146 - RNA, 19 nt, Artificial Sequence
  Description of Artificial Sequence: Synthetic oligonucleotide
  Sense strand starting at position 1256 of SEQ ID NO: 584955
uuaagaacgucaguacauu

SEQ ID NO: 602147 - RNA, 19 nt, Artificial Sequence
  Description of Artificial Sequence: Synthetic oligonucleotide
  Antisense strand to SEQ ID NO: 602146
aauguacugacguucuuaa

SEQ ID NO: 602148 - RNA, 19 nt, Artificial Sequence
  Description of Artificial Sequence: Synthetic oligonucleotide
  Sense strand starting at position 1278 of SEQ ID NO: 584955
ggcaguuagagguagguca

SEQ ID NO: 602149 - RNA, 19 nt, Artificial Sequence
  Description of Artificial Sequence: Synthetic oligonucleotide
  Antisense strand to SEQ ID NO: 602148
ugaccuaccucuaacugcc

SEQ ID NO: 602150 - RNA, 19 nt, Artificial Sequence
  Description of Artificial Sequence: Synthetic oligonucleotide
  Sense strand starting at position 1342 of SEQ ID NO: 584955
gagccuaaugaguagaagu

SEQ ID NO: 602151 - RNA, 19 nt, Artificial Sequence
  Description of Artificial Sequence: Synthetic oligonucleotide
  Antisense strand to SEQ ID NO: 602150
acuucuacucauuaggcuc

SEQ ID NO: 602152 - RNA, 19 nt, Artificial Sequence
  Description of Artificial Sequence: Synthetic oligonucleotide
  Sense strand starting at position 1352 of SEQ ID NO: 584955
aguagaagugcugaugauc

SEQ ID NO: 602153 - RNA, 19 nt, Artificial Sequence
  Description of Artificial Sequence: Synthetic oligonucleotide
  Antisense strand to SEQ ID NO: 602152
gaucaucagcacuucuacu

SEQ ID NO: 602154 - RNA, 19 nt, Artificial Sequence
  Description of Artificial Sequence: Synthetic oligonucleotide
  Sense strand starting at position 1355 of SEQ ID NO: 584955
agaagugcugaugaucgua

SEQ ID NO: 602155 - RNA, 19 nt, Artificial Sequence
  Description of Artificial Sequence: Synthetic oligonucleotide
  Antisense strand to SEQ ID NO: 602154
uacgaucaucagcacuucu

SEQ ID NO: 602156 - RNA, 19 nt, Artificial Sequence
  Description of Artificial Sequence: Synthetic oligonucleotide
  Sense strand starting at position 1593 of SEQ ID NO: 584955
cagaauuaacgucagguca

SEQ ID NO: 602157 - RNA, 19 nt, Artificial Sequence
  Description of Artificial Sequence: Synthetic oligonucleotide
  Antisense strand to SEQ ID NO: 602156
ugaccugacguuaauucug

SEQ ID NO: 602158 - RNA, 19 nt, Artificial Sequence
  Description of Artificial Sequence: Synthetic oligonucleotide
  Sense strand starting at position 1689 of SEQ ID NO: 584955
ugaauaguuguguaugagg

SEQ ID NO: 602159 - RNA, 19 nt, Artificial Sequence
  Description of Artificial Sequence: Synthetic oligonucleotide
  Antisense strand to SEQ ID NO: 602158
ccucauacacaacuauuca

SEQ ID NO: 602160 - RNA, 19 nt, Artificial Sequence
  Description of Artificial Sequence: Synthetic oligonucleotide
  Sense strand starting at position 1697 of SEQ ID NO: 584955
uguguaugaggguguauuu

SEQ ID NO: 602161 - RNA, 19 nt, Artificial Sequence
  Description of Artificial Sequence: Synthetic oligonucleotide
  Antisense strand to SEQ ID NO: 602160
aaauacacccucauacaca

SEQ ID NO: 602162 - RNA, 19 nt, Artificial Sequence
  Description of Artificial Sequence: Synthetic oligonucleotide
  Sense strand starting at position 1768 of SEQ ID NO: 584955
gcagaaauaguuuaagagu

SEQ ID NO: 602163 - RNA, 19 nt, Artificial Sequence
  Description of Artificial Sequence: Synthetic oligonucleotide
  Antisense strand to SEQ ID NO: 602162
acucuuaaacuauuucugc

SEQ ID NO: 602164 - RNA, 19 nt, Artificial Sequence
  Description of Artificial Sequence: Synthetic oligonucleotide
  Sense strand starting at position 1800 of SEQ ID NO: 584955
gggcaaugagauuaugucu

SEQ ID NO: 602165 - RNA, 19 nt, Artificial Sequence
  Description of Artificial Sequence: Synthetic oligonucleotide
  Antisense strand to SEQ ID NO: 602164
agacauaaucucauugccc

SEQ ID NO: 602166 - RNA, 19 nt, Artificial Sequence
  Description of Artificial Sequence: Synthetic oligonucleotide
  Sense strand starting at position 1803 of SEQ ID NO: 584955
caaugagauuaugucuugu

SEQ ID NO: 602167 - RNA, 19 nt, Artificial Sequence
  Description of Artificial Sequence: Synthetic oligonucleotide
  Antisense strand to SEQ ID NO: 602166
acaagacauaaucucauug

SEQ ID NO: 602168 - RNA, 19 nt, Artificial Sequence
  Description of Artificial Sequence: Synthetic oligonucleotide
  Sense strand starting at position 1805 of SEQ ID NO: 584955
augagauuaugucuuguag

SEQ ID NO: 602169 - RNA, 19 nt, Artificial Sequence
  Description of Artificial Sequence: Synthetic oligonucleotide
  Antisense strand to SEQ ID NO: 602168
cuacaagacauaaucucau

SEQ ID NO: 602170 - RNA, 19 nt, Artificial Sequence
  Description of Artificial Sequence: Synthetic oligonucleotide
  Sense strand starting at position 1820 of SEQ ID NO: 584955
guaggaaagcuauguuuaa

SEQ ID NO: 602171 - RNA, 19 nt, Artificial Sequence
  Description of Artificial Sequence: Synthetic oligonucleotide
  Antisense strand to SEQ ID NO: 602170
uuaaacauagcuuuccuac

SEQ ID NO: 602172 - RNA, 19 nt, Artificial Sequence
  Description of Artificial Sequence: Synthetic oligonucleotide
  Sense strand starting at position 1821 of SEQ ID NO: 584955
uaggaaagcuauguuuaau

SEQ ID NO: 602173 - RNA, 19 nt, Artificial Sequence
  Description of Artificial Sequence: Synthetic oligonucleotide
  Antisense strand to SEQ ID NO: 602172
auuaaacauagcuuuccua

SEQ ID NO: 602174 - RNA, 19 nt, Artificial Sequence
  Description of Artificial Sequence: Synthetic oligonucleotide
  Sense strand starting at position 1824 of SEQ ID NO: 584955
gaaagcuauguuuaauguu

SEQ ID NO: 602175 - RNA, 19 nt, Artificial Sequence
  Description of Artificial Sequence: Synthetic oligonucleotide
  Antisense strand to SEQ ID NO: 602174
aacauuaaacauagcuuuc

SEQ ID NO: 602176 - RNA, 19 nt, Artificial Sequence
  Description of Artificial Sequence: Synthetic oligonucleotide
  Sense strand starting at position 2188 of SEQ ID NO: 584955
ggaagucauaguggacaca

SEQ ID NO: 602177 - RNA, 19 nt, Artificial Sequence
  Description of Artificial Sequence: Synthetic oligonucleotide
  Antisense strand to SEQ ID NO: 602176
uguguccacuaugacuucc

SEQ ID NO: 602178 - RNA, 19 nt, Artificial Sequence
  Description of Artificial Sequence: Synthetic oligonucleotide
  Sense strand starting at position 2218 of SEQ ID NO: 584955
guuggcaaacuuuacauaa

SEQ ID NO: 602179 - RNA, 19 nt, Artificial Sequence
  Description of Artificial Sequence: Synthetic oligonucleotide
  Antisense strand to SEQ ID NO: 602178
uuauguaaaguuugccaac

SEQ ID NO: 602180 - RNA, 19 nt, Artificial Sequence
  Description of Artificial Sequence: Synthetic oligonucleotide
  Sense strand starting at position 2299 of SEQ ID NO: 584955
uucuuauagcaaggaagua

SEQ ID NO: 602181 - RNA, 19 nt, Artificial Sequence
  Description of Artificial Sequence: Synthetic oligonucleotide
  Antisense strand to SEQ ID NO: 602180
uacuuccuugcuauaagaa

SEQ ID NO: 602182 - RNA, 19 nt, Artificial Sequence
  Description of Artificial Sequence: Synthetic oligonucleotide
  Sense strand starting at position 2805 of SEQ ID NO: 584955
cagccauagcuugagaucu

SEQ ID NO: 602183 - RNA, 19 nt, Artificial Sequence
  Description of Artificial Sequence: Synthetic oligonucleotide
  Antisense strand to SEQ ID NO: 602182
agaucucaagcuauggcug

SEQ ID NO: 602184 - RNA, 19 nt, Artificial Sequence
  Description of Artificial Sequence: Synthetic oligonucleotide
  Sense strand starting at position 2917 of SEQ ID NO: 584955
ggagauaacucugcaccca

SEQ ID NO: 602185 - RNA, 19 nt, Artificial Sequence
  Description of Artificial Sequence: Synthetic oligonucleotide
  Antisense strand to SEQ ID NO: 602184
ugggugcagaguuaucucc

SEQ ID NO: 602186 - RNA, 19 nt, Artificial Sequence
  Description of Artificial Sequence: Synthetic oligonucleotide
  Sense strand starting at position 3006 of SEQ ID NO: 584955
uuaagauaagcucaguaca

SEQ ID NO: 602187 - RNA, 19 nt, Artificial Sequence
  Description of Artificial Sequence: Synthetic oligonucleotide
  Antisense strand to SEQ ID NO: 602186
uguacugagcuuaucuuaa

SEQ ID NO: 602188 - RNA, 19 nt, Artificial Sequence
  Description of Artificial Sequence: Synthetic oligonucleotide
  Sense strand starting at position 3227 of SEQ ID NO: 584955
gagggaaauuucuaccagu

SEQ ID NO: 602189 - RNA, 19 nt, Artificial Sequence
  Description of Artificial Sequence: Synthetic oligonucleotide
  Antisense strand to SEQ ID NO: 602188
acugguagaaauuucccuc

SEQ ID NO: 602190 - RNA, 19 nt, Artificial Sequence
  Description of Artificial Sequence: Synthetic oligonucleotide
  Sense strand starting at position 3230 of SEQ ID NO: 584955
ggaaauuucuaccagugaa

SEQ ID NO: 602191 - RNA, 19 nt, Artificial Sequence
  Description of Artificial Sequence: Synthetic oligonucleotide
  Antisense strand to SEQ ID NO: 602190
uucacugguagaaauuucc

SEQ ID NO: 602192 - RNA, 19 nt, Artificial Sequence
  Description of Artificial Sequence: Synthetic oligonucleotide
  Sense strand starting at position 3791 of SEQ ID NO: 584955
uuuauaugaggccacuauu

SEQ ID NO: 602193 - RNA, 19 nt, Artificial Sequence
  Description of Artificial Sequence: Synthetic oligonucleotide
  Antisense strand to SEQ ID NO: 602192
aauaguggccucauauaaa

SEQ ID NO: 602194 - RNA, 19 nt, Artificial Sequence
  Description of Artificial Sequence: Synthetic oligonucleotide
  Sense strand starting at position 3908 of SEQ ID NO: 584955
ugaauuccgcaauauacaa

SEQ ID NO: 602195 - RNA, 19 nt, Artificial Sequence
  Description of Artificial Sequence: Synthetic oligonucleotide
  Antisense strand to SEQ ID NO: 602194
uuguauauugcggaauuca

SEQ ID NO: 602196 - RNA, 19 nt, Artificial Sequence
  Description of Artificial Sequence: Synthetic oligonucleotide
  Sense strand starting at position 3969 of SEQ ID NO: 584955
cugguuuaauaugugaaag

SEQ ID NO: 602197 - RNA, 19 nt, Artificial Sequence
  Description of Artificial Sequence: Synthetic oligonucleotide
  Antisense strand to SEQ ID NO: 602196
cuuucacauauuaaaccag

SEQ ID NO: 602198 - RNA, 19 nt, Artificial Sequence
  Description of Artificial Sequence: Synthetic oligonucleotide
  Sense strand starting at position 3970 of SEQ ID NO: 584955
ugguuuaauaugugaaagu

SEQ ID NO: 602199 - RNA, 19 nt, Artificial Sequence
  Description of Artificial Sequence: Synthetic oligonucleotide
  Antisense strand to SEQ ID NO: 602198
acuuucacauauuaaacca

SEQ ID NO: 602200 - RNA, 19 nt, Artificial Sequence
  Description of Artificial Sequence: Synthetic oligonucleotide
  Sense strand starting at position 91 of SEQ ID NO: 584956
ggauacaacuuacguauaa

SEQ ID NO: 602201 - RNA, 19 nt, Artificial Sequence
  Description of Artificial Sequence: Synthetic oligonucleotide
  Antisense strand to SEQ ID NO: 602200
uuauacguaaguuguaucc

SEQ ID NO: 602202 - RNA, 19 nt, Artificial Sequence
  Description of Artificial Sequence: Synthetic oligonucleotide
  Sense strand starting at position 132 of SEQ ID NO: 584956
ggaacugauuauguaauca

SEQ ID NO: 602203 - RNA, 19 nt, Artificial Sequence
  Description of Artificial Sequence: Synthetic oligonucleotide
  Antisense strand to SEQ ID NO: 602202
ugauuacauaaucaguucc

SEQ ID NO: 602204 - RNA, 19 nt, Artificial Sequence
  Description of Artificial Sequence: Synthetic oligonucleotide
  Sense strand starting at position 161 of SEQ ID NO: 584956
agcaaaugccaagagugaa

SEQ ID NO: 602205 - RNA, 19 nt, Artificial Sequence
  Description of Artificial Sequence: Synthetic oligonucleotide
  Antisense strand to SEQ ID NO: 602204
uucacucuuggcauuugcu

SEQ ID NO: 602206 - RNA, 19 nt, Artificial Sequence
  Description of Artificial Sequence: Synthetic oligonucleotide
  Sense strand starting at position 174 of SEQ ID NO: 584956
agugaacacucaugacuaa

SEQ ID NO: 602207 - RNA, 19 nt, Artificial Sequence
  Description of Artificial Sequence: Synthetic oligonucleotide
  Antisense strand to SEQ ID NO: 602206
uuagucaugaguguucacu

SEQ ID NO: 602208 - RNA, 19 nt, Artificial Sequence
  Description of Artificial Sequence: Synthetic oligonucleotide
  Sense strand starting at position 347 of SEQ ID NO: 584956
aaggaaagcuccugagaac

SEQ ID NO: 602209 - RNA, 19 nt, Artificial Sequence
  Description of Artificial Sequence: Synthetic oligonucleotide
  Antisense strand to SEQ ID NO: 602208
guucucaggagcuuuccuu

SEQ ID NO: 602210 - RNA, 19 nt, Artificial Sequence
  Description of Artificial Sequence: Synthetic oligonucleotide
  Sense strand starting at position 556 of SEQ ID NO: 584956
cugagaacuucugcaaaca

SEQ ID NO: 602211 - RNA, 19 nt, Artificial Sequence
  Description of Artificial Sequence: Synthetic oligonucleotide
  Antisense strand to SEQ ID NO: 602210
uguuugcagaaguucucag

SEQ ID NO: 602212 - RNA, 19 nt, Artificial Sequence
  Description of Artificial Sequence: Synthetic oligonucleotide
  Sense strand starting at position 609 of SEQ ID NO: 584956
agacuaacaucgcagacaa

SEQ ID NO: 602213 - RNA, 19 nt, Artificial Sequence
  Description of Artificial Sequence: Synthetic oligonucleotide
  Antisense strand to SEQ ID NO: 602212
uugucugcgauguuagucu

SEQ ID NO: 602214 - RNA, 19 nt, Artificial Sequence
  Description of Artificial Sequence: Synthetic oligonucleotide
  Sense strand starting at position 712 of SEQ ID NO: 584956
uguuacagaugcuuccuua

SEQ ID NO: 602215 - RNA, 19 nt, Artificial Sequence
  Description of Artificial Sequence: Synthetic oligonucleotide
  Antisense strand to SEQ ID NO: 602214
uaaggaagcaucuguaaca

SEQ ID NO: 602216 - RNA, 19 nt, Artificial Sequence
  Description of Artificial Sequence: Synthetic oligonucleotide
  Sense strand starting at position 716 of SEQ ID NO: 584956
acagaugcuuccuuaaguc

SEQ ID NO: 602217 - RNA, 19 nt, Artificial Sequence
  Description of Artificial Sequence: Synthetic oligonucleotide
  Antisense strand to SEQ ID NO: 602216
gacuuaaggaagcaucugu

SEQ ID NO: 602218 - RNA, 19 nt, Artificial Sequence
  Description of Artificial Sequence: Synthetic oligonucleotide
  Sense strand starting at position 758 of SEQ ID NO: 584956
gcaucauaaaggugagucu

SEQ ID NO: 602219 - RNA, 19 nt, Artificial Sequence
  Description of Artificial Sequence: Synthetic oligonucleotide
  Antisense strand to SEQ ID NO: 602218
agacucaccuuuaugaugc

SEQ ID NO: 602220 - RNA, 19 nt, Artificial Sequence
  Description of Artificial Sequence: Synthetic oligonucleotide
  Sense strand starting at position 761 of SEQ ID NO: 584956
ucauaaaggugagucuaga

SEQ ID NO: 602221 - RNA, 19 nt, Artificial Sequence
  Description of Artificial Sequence: Synthetic oligonucleotide
  Antisense strand to SEQ ID NO: 602220
ucuagacucaccuuuauga

SEQ ID NO: 602222 - RNA, 19 nt, Artificial Sequence
  Description of Artificial Sequence: Synthetic oligonucleotide
  Sense strand starting at position 774 of SEQ ID NO: 584956
ucuagagagucuucgcaag

SEQ ID NO: 602223 - RNA, 19 nt, Artificial Sequence
  Description of Artificial Sequence: Synthetic oligonucleotide
  Antisense strand to SEQ ID NO: 602222
cuugcgaagacucucuaga

SEQ ID NO: 602224 - RNA, 19 nt, Artificial Sequence
  Description of Artificial Sequence: Synthetic oligonucleotide
  Sense strand starting at position 776 of SEQ ID NO: 584956
uagagagucuucgcaaguu

SEQ ID NO: 602225 - RNA, 19 nt, Artificial Sequence
  Description of Artificial Sequence: Synthetic oligonucleotide
  Antisense strand to SEQ ID NO: 602224
aacuugcgaagacucucua

SEQ ID NO: 602226 - RNA, 19 nt, Artificial Sequence
  Description of Artificial Sequence: Synthetic oligonucleotide
  Sense strand starting at position 887 of SEQ ID NO: 584956
caggaagucuacuuugaaa

SEQ ID NO: 602227 - RNA, 19 nt, Artificial Sequence
  Description of Artificial Sequence: Synthetic oligonucleotide
  Antisense strand to SEQ ID NO: 602226
uuucaaaguagacuuccug

SEQ ID NO: 602228 - RNA, 19 nt, Artificial Sequence
  Description of Artificial Sequence: Synthetic oligonucleotide
  Sense strand starting at position 972 of SEQ ID NO: 584956
acuugaagcugguuuaaac

SEQ ID NO: 602229 - RNA, 19 nt, Artificial Sequence
  Description of Artificial Sequence: Synthetic oligonucleotide
  Antisense strand to SEQ ID NO: 602228
guuuaaaccagcuucaagu

SEQ ID NO: 602230 - RNA, 19 nt, Artificial Sequence
  Description of Artificial Sequence: Synthetic oligonucleotide
  Sense strand starting at position 1050 of SEQ ID NO: 584956
aaugaaugacgguguauca

SEQ ID NO: 602231 - RNA, 19 nt, Artificial Sequence
  Description of Artificial Sequence: Synthetic oligonucleotide
  Antisense strand to SEQ ID NO: 602230
ugauacaccgucauucauu

SEQ ID NO: 602232 - RNA, 19 nt, Artificial Sequence
  Description of Artificial Sequence: Synthetic oligonucleotide
  Sense strand starting at position 1057 of SEQ ID NO: 584956
gacgguguaucagcguuaa

SEQ ID NO: 602233 - RNA, 19 nt, Artificial Sequence
  Description of Artificial Sequence: Synthetic oligonucleotide
  Antisense strand to SEQ ID NO: 602232
uuaacgcugauacaccguc

SEQ ID NO: 602234 - RNA, 19 nt, Artificial Sequence
  Description of Artificial Sequence: Synthetic oligonucleotide
  Sense strand starting at position 1059 of SEQ ID NO: 584956
cgguguaucagcguuaaau

SEQ ID NO: 602235 - RNA, 19 nt, Artificial Sequence
  Description of Artificial Sequence: Synthetic oligonucleotide
  Antisense strand to SEQ ID NO: 602234
auuuaacgcugauacaccg

SEQ ID NO: 602236 - RNA, 19 nt, Artificial Sequence
  Description of Artificial Sequence: Synthetic oligonucleotide
  Sense strand starting at position 1061 of SEQ ID NO: 584956
guguaucagcguuaaauuu

SEQ ID NO: 602237 - RNA, 19 nt, Artificial Sequence
  Description of Artificial Sequence: Synthetic oligonucleotide
  Antisense strand to SEQ ID NO: 602236
aaauuuaacgcugauacac

SEQ ID NO: 602238 - RNA, 19 nt, Artificial Sequence
  Description of Artificial Sequence: Synthetic oligonucleotide
  Sense strand starting at position 1116 of SEQ ID NO: 584956
aaagcauguggucaacguu

SEQ ID NO: 602239 - RNA, 19 nt, Artificial Sequence
  Description of Artificial Sequence: Synthetic oligonucleotide
  Antisense strand to SEQ ID NO: 602238
aacguugaccacaugcuuu

SEQ ID NO: 602240 - RNA, 19 nt, Artificial Sequence
  Description of Artificial Sequence: Synthetic oligonucleotide
  Sense strand starting at position 1123 of SEQ ID NO: 584956
guggucaacguuuagcauu

SEQ ID NO: 602241 - RNA, 19 nt, Artificial Sequence
  Description of Artificial Sequence: Synthetic oligonucleotide
  Antisense strand to SEQ ID NO: 602240
aaugcuaaacguugaccac

SEQ ID NO: 602242 - RNA, 19 nt, Artificial Sequence
  Description of Artificial Sequence: Synthetic oligonucleotide
  Sense strand starting at position 1155 of SEQ ID NO: 584956
uuugcaucgcuuuggcgaa

SEQ ID NO: 602243 - RNA, 19 nt, Artificial Sequence
  Description of Artificial Sequence: Synthetic oligonucleotide
  Antisense strand to SEQ ID NO: 602242
uucgccaaagcgaugcaaa

SEQ ID NO: 602244 - RNA, 19 nt, Artificial Sequence
  Description of Artificial Sequence: Synthetic oligonucleotide
  Sense strand starting at position 2020 of SEQ ID NO: 584956
gcagaaagcuuccuacuug

SEQ ID NO: 602245 - RNA, 19 nt, Artificial Sequence
  Description of Artificial Sequence: Synthetic oligonucleotide
  Antisense strand to SEQ ID NO: 602244
caaguaggaagcuuucugc

SEQ ID NO: 602246 - RNA, 19 nt, Artificial Sequence
  Description of Artificial Sequence: Synthetic oligonucleotide
  Sense strand starting at position 2934 of SEQ ID NO: 584956
cagggagguccggguucua

SEQ ID NO: 602247 - RNA, 19 nt, Artificial Sequence
  Description of Artificial Sequence: Synthetic oligonucleotide
  Antisense strand to SEQ ID NO: 602246
uagaacccggaccucccug

SEQ ID NO: 602248 - RNA, 19 nt, Artificial Sequence
  Description of Artificial Sequence: Synthetic oligonucleotide
  Sense strand starting at position 2943 of SEQ ID NO: 584956
ccggguucuaaucgaacga

SEQ ID NO: 602249 - RNA, 19 nt, Artificial Sequence
  Description of Artificial Sequence: Synthetic oligonucleotide
  Antisense strand to SEQ ID NO: 602248
ucguucgauuagaacccgg

SEQ ID NO: 602250 - RNA, 19 nt, Artificial Sequence
  Description of Artificial Sequence: Synthetic oligonucleotide
  Sense strand starting at position 2947 of SEQ ID NO: 584956
guucuaaucgaacgaggcu

SEQ ID NO: 602251 - RNA, 19 nt, Artificial Sequence
  Description of Artificial Sequence: Synthetic oligonucleotide
  Antisense strand to SEQ ID NO: 602250
agccucguucgauuagaac

SEQ ID NO: 602252 - RNA, 19 nt, Artificial Sequence
  Description of Artificial Sequence: Synthetic oligonucleotide
  Sense strand starting at position 2953 of SEQ ID NO: 584956
aucgaacgaggcugucaau

SEQ ID NO: 602253 - RNA, 19 nt, Artificial Sequence
  Description of Artificial Sequence: Synthetic oligonucleotide
  Antisense strand to SEQ ID NO: 602252
auugacagccucguucgau

SEQ ID NO: 602254 - RNA, 19 nt, Artificial Sequence
  Description of Artificial Sequence: Synthetic oligonucleotide
  Sense strand starting at position 3045 of SEQ ID NO: 584956
uccacuucccagggaagau

SEQ ID NO: 602255 - RNA, 19 nt, Artificial Sequence
  Description of Artificial Sequence: Synthetic oligonucleotide
  Antisense strand to SEQ ID NO: 602254
aucuucccugggaagugga

SEQ ID NO: 602256 - RNA, 19 nt, Artificial Sequence
  Description of Artificial Sequence: Synthetic oligonucleotide
  Sense strand starting at position 3160 of SEQ ID NO: 584956
cgaucacucuggccgagua

SEQ ID NO: 602257 - RNA, 19 nt, Artificial Sequence
  Description of Artificial Sequence: Synthetic oligonucleotide
  Antisense strand to SEQ ID NO: 602256
uacucggccagagugaucg

SEQ ID NO: 602258 - RNA, 19 nt, Artificial Sequence
  Description of Artificial Sequence: Synthetic oligonucleotide
  Sense strand starting at position 3161 of SEQ ID NO: 584956
gaucacucuggccgaguau

SEQ ID NO: 602259 - RNA, 19 nt, Artificial Sequence
  Description of Artificial Sequence: Synthetic oligonucleotide
  Antisense strand to SEQ ID NO: 602258
auacucggccagagugauc

SEQ ID NO: 602260 - RNA, 19 nt, Artificial Sequence
  Description of Artificial Sequence: Synthetic oligonucleotide
  Sense strand starting at position 3483 of SEQ ID NO: 584956
cccuuaagucacugcgagu

SEQ ID NO: 602261 - RNA, 19 nt, Artificial Sequence
  Description of Artificial Sequence: Synthetic oligonucleotide
  Antisense strand to SEQ ID NO: 602260
acucgcagugacuuaaggg

SEQ ID NO: 602262 - RNA, 19 nt, Artificial Sequence
  Description of Artificial Sequence: Synthetic oligonucleotide
  Sense strand starting at position 3586 of SEQ ID NO: 584956
aggauagccuuccugacuu

SEQ ID NO: 602263 - RNA, 19 nt, Artificial Sequence
  Description of Artificial Sequence: Synthetic oligonucleotide
  Antisense strand to SEQ ID NO: 602262
aagucaggaaggcuauccu

SEQ ID NO: 602264 - RNA, 19 nt, Artificial Sequence
  Description of Artificial Sequence: Synthetic oligonucleotide
  Sense strand starting at position 3665 of SEQ ID NO: 584956
gcagcacucgucucuguau

SEQ ID NO: 602265 - RNA, 19 nt, Artificial Sequence
  Description of Artificial Sequence: Synthetic oligonucleotide
  Antisense strand to SEQ ID NO: 602264
auacagagacgagugcugc

SEQ ID NO: 602266 - RNA, 19 nt, Artificial Sequence
  Description of Artificial Sequence: Synthetic oligonucleotide
  Sense strand starting at position 3666 of SEQ ID NO: 584956
cagcacucgucucuguauu

SEQ ID NO: 602267 - RNA, 19 nt, Artificial Sequence
  Description of Artificial Sequence: Synthetic oligonucleotide
  Antisense strand to SEQ ID NO: 602266
aauacagagacgagugcug

SEQ ID NO: 602268 - RNA, 19 nt, Artificial Sequence
  Description of Artificial Sequence: Synthetic oligonucleotide
  Sense strand starting at position 3667 of SEQ ID NO: 584956
agcacucgucucuguauuu

SEQ ID NO: 602269 - RNA, 19 nt, Artificial Sequence
  Description of Artificial Sequence: Synthetic oligonucleotide
  Antisense strand to SEQ ID NO: 602268
aaauacagagacgagugcu

SEQ ID NO: 602270 - RNA, 19 nt, Artificial Sequence
  Description of Artificial Sequence: Synthetic oligonucleotide
  Sense strand starting at position 3787 of SEQ ID NO: 584956
caggaaauaagguguuguu

SEQ ID NO: 602271 - RNA, 19 nt, Artificial Sequence
  Description of Artificial Sequence: Synthetic oligonucleotide
  Antisense strand to SEQ ID NO: 602270
aacaacaccuuauuuccug

SEQ ID NO: 602272 - RNA, 19 nt, Artificial Sequence
  Description of Artificial Sequence: Synthetic oligonucleotide
  Sense strand starting at position 3797 of SEQ ID NO: 584956
gguguuguucaaugaaugg

SEQ ID NO: 602273 - RNA, 19 nt, Artificial Sequence
  Description of Artificial Sequence: Synthetic oligonucleotide
  Antisense strand to SEQ ID NO: 602272
ccauucauugaacaacacc

SEQ ID NO: 602274 - RNA, 19 nt, Artificial Sequence
  Description of Artificial Sequence: Synthetic oligonucleotide
  Sense strand starting at position 3819 of SEQ ID NO: 584956
uucaguguccacgagaaag

SEQ ID NO: 602275 - RNA, 19 nt, Artificial Sequence
  Description of Artificial Sequence: Synthetic oligonucleotide
  Antisense strand to SEQ ID NO: 602274
cuuucucguggacacugaa

SEQ ID NO: 602276 - RNA, 19 nt, Artificial Sequence
  Description of Artificial Sequence: Synthetic oligonucleotide
  Sense strand starting at position 3866 of SEQ ID NO: 584956
aucaaauguuugcacaaga

SEQ ID NO: 602277 - RNA, 19 nt, Artificial Sequence
  Description of Artificial Sequence: Synthetic oligonucleotide
  Antisense strand to SEQ ID NO: 602276
ucuugugcaaacauuugau

SEQ ID NO: 602278 - RNA, 19 nt, Artificial Sequence
  Description of Artificial Sequence: Synthetic oligonucleotide
  Sense strand starting at position 3877 of SEQ ID NO: 584956
gcacaagaaucgcaaauua

SEQ ID NO: 602279 - RNA, 19 nt, Artificial Sequence
  Description of Artificial Sequence: Synthetic oligonucleotide
  Antisense strand to SEQ ID NO: 602278
uaauuugcgauucuugugc

SEQ ID NO: 602280 - RNA, 19 nt, Artificial Sequence
  Description of Artificial Sequence: Synthetic oligonucleotide
  Sense strand starting at position 21 of SEQ ID NO: 584957
ugaaauauccuagggcucu

SEQ ID NO: 602281 - RNA, 19 nt, Artificial Sequence
  Description of Artificial Sequence: Synthetic oligonucleotide
  Antisense strand to SEQ ID NO: 602280
agagcccuaggauauuuca

SEQ ID NO: 602282 - RNA, 19 nt, Artificial Sequence
  Description of Artificial Sequence: Synthetic oligonucleotide
  Sense strand starting at position 64 of SEQ ID NO: 584957
gugcucuggaaauggaaga

SEQ ID NO: 602283 - RNA, 19 nt, Artificial Sequence
  Description of Artificial Sequence: Synthetic oligonucleotide
  Antisense strand to SEQ ID NO: 602282
ucuuccauuuccagagcac

SEQ ID NO: 602284 - RNA, 19 nt, Artificial Sequence
  Description of Artificial Sequence: Synthetic oligonucleotide
  Sense strand starting at position 531 of SEQ ID NO: 584957
cuuuguaaaggucaugacu

SEQ ID NO: 602285 - RNA, 19 nt, Artificial Sequence
  Description of Artificial Sequence: Synthetic oligonucleotide
  Antisense strand to SEQ ID NO: 602284
agucaugaccuuuacaaag

SEQ ID NO: 602286 - RNA, 19 nt, Artificial Sequence
  Description of Artificial Sequence: Synthetic oligonucleotide
  Sense strand starting at position 579 of SEQ ID NO: 584957
gaaagaucugguggcaaua

SEQ ID NO: 602287 - RNA, 19 nt, Artificial Sequence
  Description of Artificial Sequence: Synthetic oligonucleotide
  Antisense strand to SEQ ID NO: 602286
uauugccaccagaucuuuc

SEQ ID NO: 602288 - RNA, 19 nt, Artificial Sequence
  Description of Artificial Sequence: Synthetic oligonucleotide
  Sense strand starting at position 606 of SEQ ID NO: 584957
aauaguggagccugaagau

SEQ ID NO: 602289 - RNA, 19 nt, Artificial Sequence
  Description of Artificial Sequence: Synthetic oligonucleotide
  Antisense strand to SEQ ID NO: 602288
aucuucaggcuccacuauu

SEQ ID NO: 602290 - RNA, 19 nt, Artificial Sequence
  Description of Artificial Sequence: Synthetic oligonucleotide
  Sense strand starting at position 618 of SEQ ID NO: 584957
ugaagauguaccugaauug

SEQ ID NO: 602291 - RNA, 19 nt, Artificial Sequence
  Description of Artificial Sequence: Synthetic oligonucleotide
  Antisense strand to SEQ ID NO: 602290
caauucagguacaucuuca

SEQ ID NO: 602292 - RNA, 19 nt, Artificial Sequence
  Description of Artificial Sequence: Synthetic oligonucleotide
  Sense strand starting at position 678 of SEQ ID NO: 584957
uuaugaaugagcgaaguuc

SEQ ID NO: 602293 - RNA, 19 nt, Artificial Sequence
  Description of Artificial Sequence: Synthetic oligonucleotide
  Antisense strand to SEQ ID NO: 602292
gaacuucgcucauucauaa

SEQ ID NO: 602294 - RNA, 19 nt, Artificial Sequence
  Description of Artificial Sequence: Synthetic oligonucleotide
  Sense strand starting at position 895 of SEQ ID NO: 584957
ggaagagucaacugcugua

SEQ ID NO: 602295 - RNA, 19 nt, Artificial Sequence
  Description of Artificial Sequence: Synthetic oligonucleotide
  Antisense strand to SEQ ID NO: 602294
uacagcaguugacucuucc

SEQ ID NO: 602296 - RNA, 19 nt, Artificial Sequence
  Description of Artificial Sequence: Synthetic oligonucleotide
  Sense strand starting at position 980 of SEQ ID NO: 584957
cugauuggucaacagccau

SEQ ID NO: 602297 - RNA, 19 nt, Artificial Sequence
  Description of Artificial Sequence: Synthetic oligonucleotide
  Antisense strand to SEQ ID NO: 602296
auggcuguugaccaaucag

SEQ ID NO: 602298 - RNA, 19 nt, Artificial Sequence
  Description of Artificial Sequence: Synthetic oligonucleotide
  Sense strand starting at position 1050 of SEQ ID NO: 584957
cugagaugauuaguagcau

SEQ ID NO: 602299 - RNA, 19 nt, Artificial Sequence
  Description of Artificial Sequence: Synthetic oligonucleotide
  Antisense strand to SEQ ID NO: 602298
augcuacuaaucaucucag

SEQ ID NO: 602300 - RNA, 19 nt, Artificial Sequence
  Description of Artificial Sequence: Synthetic oligonucleotide
  Sense strand starting at position 1144 of SEQ ID NO: 584957
guuacaauacaguguaaau

SEQ ID NO: 602301 - RNA, 19 nt, Artificial Sequence
  Description of Artificial Sequence: Synthetic oligonucleotide
  Antisense strand to SEQ ID NO: 602300
auuuacacuguauuguaac

SEQ ID NO: 602302 - RNA, 19 nt, Artificial Sequence
  Description of Artificial Sequence: Synthetic oligonucleotide
  Sense strand starting at position 1205 of SEQ ID NO: 584957
aggcuuuauuggucuggaa

SEQ ID NO: 602303 - RNA, 19 nt, Artificial Sequence
  Description of Artificial Sequence: Synthetic oligonucleotide
  Antisense strand to SEQ ID NO: 602302
uuccagaccaauaaagccu

SEQ ID NO: 602304 - RNA, 19 nt, Artificial Sequence
  Description of Artificial Sequence: Synthetic oligonucleotide
  Sense strand starting at position 1209 of SEQ ID NO: 584957
uuuauuggucuggaaccga

SEQ ID NO: 602305 - RNA, 19 nt, Artificial Sequence
  Description of Artificial Sequence: Synthetic oligonucleotide
  Antisense strand to SEQ ID NO: 602304
ucgguuccagaccaauaaa

SEQ ID NO: 602306 - RNA, 19 nt, Artificial Sequence
  Description of Artificial Sequence: Synthetic oligonucleotide
  Sense strand starting at position 1391 of SEQ ID NO: 584957
cguguucagggacaggaua

SEQ ID NO: 602307 - RNA, 19 nt, Artificial Sequence
  Description of Artificial Sequence: Synthetic oligonucleotide
  Antisense strand to SEQ ID NO: 602306
uauccugucccugaacacg

SEQ ID NO: 602308 - RNA, 19 nt, Artificial Sequence
  Description of Artificial Sequence: Synthetic oligonucleotide
  Sense strand starting at position 1405 of SEQ ID NO: 584957
ggauaauccagcgaggcuu

SEQ ID NO: 602309 - RNA, 19 nt, Artificial Sequence
  Description of Artificial Sequence: Synthetic oligonucleotide
  Antisense strand to SEQ ID NO: 602308
aagccucgcuggauuaucc

SEQ ID NO: 602310 - RNA, 19 nt, Artificial Sequence
  Description of Artificial Sequence: Synthetic oligonucleotide
  Sense strand starting at position 1447 of SEQ ID NO: 584957
aagaaauaaggcugguaca

SEQ ID NO: 602311 - RNA, 19 nt, Artificial Sequence
  Description of Artificial Sequence: Synthetic oligonucleotide
  Antisense strand to SEQ ID NO: 602310
uguaccagccuuauuucuu

SEQ ID NO: 602312 - RNA, 19 nt, Artificial Sequence
  Description of Artificial Sequence: Synthetic oligonucleotide
  Sense strand starting at position 1465 of SEQ ID NO: 584957
aguaguuugccgccagacu

SEQ ID NO: 602313 - RNA, 19 nt, Artificial Sequence
  Description of Artificial Sequence: Synthetic oligonucleotide
  Antisense strand to SEQ ID NO: 602312
agucuggcggcaaacuacu

SEQ ID NO: 602314 - RNA, 19 nt, Artificial Sequence
  Description of Artificial Sequence: Synthetic oligonucleotide
  Sense strand starting at position 1478 of SEQ ID NO: 584957
cagacuauaugcuuuagga

SEQ ID NO: 602315 - RNA, 19 nt, Artificial Sequence
  Description of Artificial Sequence: Synthetic oligonucleotide
  Antisense strand to SEQ ID NO: 602314
uccuaaagcauauagucug

SEQ ID NO: 602316 - RNA, 19 nt, Artificial Sequence
  Description of Artificial Sequence: Synthetic oligonucleotide
  Sense strand starting at position 1665 of SEQ ID NO: 584957
ggagaaauuuagcaaugag

SEQ ID NO: 602317 - RNA, 19 nt, Artificial Sequence
  Description of Artificial Sequence: Synthetic oligonucleotide
  Antisense strand to SEQ ID NO: 602316
cucauugcuaaauuucucc

SEQ ID NO: 602318 - RNA, 19 nt, Artificial Sequence
  Description of Artificial Sequence: Synthetic oligonucleotide
  Sense strand starting at position 1715 of SEQ ID NO: 584957
ggaaguauucauggcuuug

SEQ ID NO: 602319 - RNA, 19 nt, Artificial Sequence
  Description of Artificial Sequence: Synthetic oligonucleotide
  Antisense strand to SEQ ID NO: 602318
caaagccaugaauacuucc

SEQ ID NO: 602320 - RNA, 19 nt, Artificial Sequence
  Description of Artificial Sequence: Synthetic oligonucleotide
  Sense strand starting at position 2052 of SEQ ID NO: 584957
cccuaaacgucaucaggaa

SEQ ID NO: 602321 - RNA, 19 nt, Artificial Sequence
  Description of Artificial Sequence: Synthetic oligonucleotide
  Antisense strand to SEQ ID NO: 602320
uuccugaugacguuuaggg

SEQ ID NO: 602322 - RNA, 19 nt, Artificial Sequence
  Description of Artificial Sequence: Synthetic oligonucleotide
  Sense strand starting at position 2053 of SEQ ID NO: 584957
ccuaaacgucaucaggaau

SEQ ID NO: 602323 - RNA, 19 nt, Artificial Sequence
  Description of Artificial Sequence: Synthetic oligonucleotide
  Antisense strand to SEQ ID NO: 602322
auuccugaugacguuuagg

SEQ ID NO: 602324 - RNA, 19 nt, Artificial Sequence
  Description of Artificial Sequence: Synthetic oligonucleotide
  Sense strand starting at position 2065 of SEQ ID NO: 584957
caggaaugcgcccaugaga

SEQ ID NO: 602325 - RNA, 19 nt, Artificial Sequence
  Description of Artificial Sequence: Synthetic oligonucleotide
  Antisense strand to SEQ ID NO: 602324
ucucaugggcgcauuccug

SEQ ID NO: 602326 - RNA, 19 nt, Artificial Sequence
  Description of Artificial Sequence: Synthetic oligonucleotide
  Sense strand starting at position 2076 of SEQ ID NO: 584957
ccaugagagcgcuauuaga

SEQ ID NO: 602327 - RNA, 19 nt, Artificial Sequence
  Description of Artificial Sequence: Synthetic oligonucleotide
  Antisense strand to SEQ ID NO: 602326
ucuaauagcgcucucaugg

SEQ ID NO: 602328 - RNA, 19 nt, Artificial Sequence
  Description of Artificial Sequence: Synthetic oligonucleotide
  Sense strand starting at position 2434 of SEQ ID NO: 584957
ccuucuccuuagguuuaga

SEQ ID NO: 602329 - RNA, 19 nt, Artificial Sequence
  Description of Artificial Sequence: Synthetic oligonucleotide
  Antisense strand to SEQ ID NO: 602328
ucuaaaccuaaggagaagg

SEQ ID NO: 602330 - RNA, 19 nt, Artificial Sequence
  Description of Artificial Sequence: Synthetic oligonucleotide
  Sense strand starting at position 2720 of SEQ ID NO: 584957
guguguaaacaggauuaag

SEQ ID NO: 602331 - RNA, 19 nt, Artificial Sequence
  Description of Artificial Sequence: Synthetic oligonucleotide
  Antisense strand to SEQ ID NO: 602330
cuuaauccuguuuacacac

SEQ ID NO: 602332 - RNA, 19 nt, Artificial Sequence
  Description of Artificial Sequence: Synthetic oligonucleotide
  Sense strand starting at position 2729 of SEQ ID NO: 584957
caggauuaagaguguaaac

SEQ ID NO: 602333 - RNA, 19 nt, Artificial Sequence
  Description of Artificial Sequence: Synthetic oligonucleotide
  Antisense strand to SEQ ID NO: 602332
guuuacacucuuaauccug

SEQ ID NO: 602334 - RNA, 19 nt, Artificial Sequence
  Description of Artificial Sequence: Synthetic oligonucleotide
  Sense strand starting at position 2738 of SEQ ID NO: 584957
gaguguaaacaguguuaag

SEQ ID NO: 602335 - RNA, 19 nt, Artificial Sequence
  Description of Artificial Sequence: Synthetic oligonucleotide
  Antisense strand to SEQ ID NO: 602334
cuuaacacuguuuacacuc

SEQ ID NO: 602336 - RNA, 19 nt, Artificial Sequence
  Description of Artificial Sequence: Synthetic oligonucleotide
  Sense strand starting at position 2936 of SEQ ID NO: 584957
ugauguacuuaugcuaaua

SEQ ID NO: 602337 - RNA, 19 nt, Artificial Sequence
  Description of Artificial Sequence: Synthetic oligonucleotide
  Antisense strand to SEQ ID NO: 602336
uauuagcauaaguacauca

SEQ ID NO: 602338 - RNA, 19 nt, Artificial Sequence
  Description of Artificial Sequence: Synthetic oligonucleotide
  Sense strand starting at position 3027 of SEQ ID NO: 584957
aguauuaaugugcaaucau

SEQ ID NO: 602339 - RNA, 19 nt, Artificial Sequence
  Description of Artificial Sequence: Synthetic oligonucleotide
  Antisense strand to SEQ ID NO: 602338
augauugcacauuaauacu

SEQ ID NO: 602340 - RNA, 19 nt, Artificial Sequence
  Description of Artificial Sequence: Synthetic oligonucleotide
  Sense strand starting at position 3122 of SEQ ID NO: 584957
ugggauuaaucauugcucu

SEQ ID NO: 602341 - RNA, 19 nt, Artificial Sequence
  Description of Artificial Sequence: Synthetic oligonucleotide
  Antisense strand to SEQ ID NO: 602340
agagcaaugauuaauccca

SEQ ID NO: 602342 - RNA, 19 nt, Artificial Sequence
  Description of Artificial Sequence: Synthetic oligonucleotide
  Sense strand starting at position 3123 of SEQ ID NO: 584957
gggauuaaucauugcucuu

SEQ ID NO: 602343 - RNA, 19 nt, Artificial Sequence
  Description of Artificial Sequence: Synthetic oligonucleotide
  Antisense strand to SEQ ID NO: 602342
aagagcaaugauuaauccc

SEQ ID NO: 602344 - RNA, 19 nt, Artificial Sequence
  Description of Artificial Sequence: Synthetic oligonucleotide
  Sense strand starting at position 3161 of SEQ ID NO: 584957
guaacauauuugcuuugca

SEQ ID NO: 602345 - RNA, 19 nt, Artificial Sequence
  Description of Artificial Sequence: Synthetic oligonucleotide
  Antisense strand to SEQ ID NO: 602344
ugcaaagcaaauauguuac

SEQ ID NO: 602346 - RNA, 19 nt, Artificial Sequence
  Description of Artificial Sequence: Synthetic oligonucleotide
  Sense strand starting at position 3164 of SEQ ID NO: 584957
acauauuugcuuugcaugu

SEQ ID NO: 602347 - RNA, 19 nt, Artificial Sequence
  Description of Artificial Sequence: Synthetic oligonucleotide
  Antisense strand to SEQ ID NO: 602346
acaugcaaagcaaauaugu

SEQ ID NO: 602348 - RNA, 19 nt, Artificial Sequence
  Description of Artificial Sequence: Synthetic oligonucleotide
  Sense strand starting at position 3208 of SEQ ID NO: 584957
ucuugauggucuucugaga

SEQ ID NO: 602349 - RNA, 19 nt, Artificial Sequence
  Description of Artificial Sequence: Synthetic oligonucleotide
  Antisense strand to SEQ ID NO: 602348
ucucagaagaccaucaaga

SEQ ID NO: 602350 - RNA, 19 nt, Artificial Sequence
  Description of Artificial Sequence: Synthetic oligonucleotide
  Sense strand starting at position 3365 of SEQ ID NO: 584957
uaggaaagcccacgugaaa

SEQ ID NO: 602351 - RNA, 19 nt, Artificial Sequence
  Description of Artificial Sequence: Synthetic oligonucleotide
  Antisense strand to SEQ ID NO: 602350
uuucacgugggcuuuccua

SEQ ID NO: 602352 - RNA, 19 nt, Artificial Sequence
  Description of Artificial Sequence: Synthetic oligonucleotide
  Sense strand starting at position 3376 of SEQ ID NO: 584957
acgugaaaugagugugaua

SEQ ID NO: 602353 - RNA, 19 nt, Artificial Sequence
  Description of Artificial Sequence: Synthetic oligonucleotide
  Antisense strand to SEQ ID NO: 602352
uaucacacucauuucacgu

SEQ ID NO: 602354 - RNA, 19 nt, Artificial Sequence
  Description of Artificial Sequence: Synthetic oligonucleotide
  Sense strand starting at position 3378 of SEQ ID NO: 584957
gugaaaugagugugauauu

SEQ ID NO: 602355 - RNA, 19 nt, Artificial Sequence
  Description of Artificial Sequence: Synthetic oligonucleotide
  Antisense strand to SEQ ID NO: 602354
aauaucacacucauuucac

SEQ ID NO: 602356 - RNA, 19 nt, Artificial Sequence
  Description of Artificial Sequence: Synthetic oligonucleotide
  Sense strand starting at position 3379 of SEQ ID NO: 584957
ugaaaugagugugauauuu

SEQ ID NO: 602357 - RNA, 19 nt, Artificial Sequence
  Description of Artificial Sequence: Synthetic oligonucleotide
  Antisense strand to SEQ ID NO: 602356
aaauaucacacucauuuca

SEQ ID NO: 602358 - RNA, 19 nt, Artificial Sequence
  Description of Artificial Sequence: Synthetic oligonucleotide
  Sense strand starting at position 3387 of SEQ ID NO: 584957
gugugauauuuccugccaa

SEQ ID NO: 602359 - RNA, 19 nt, Artificial Sequence
  Description of Artificial Sequence: Synthetic oligonucleotide
  Antisense strand to SEQ ID NO: 602358
uuggcaggaaauaucacac

SEQ ID NO: 602360 - RNA, 19 nt, Artificial Sequence
  Description of Artificial Sequence: Synthetic oligonucleotide
  Sense strand starting at position 2 of SEQ ID NO: 584958
cuuggauaucuuugaucag

SEQ ID NO: 602361 - RNA, 19 nt, Artificial Sequence
  Description of Artificial Sequence: Synthetic oligonucleotide
  Antisense strand to SEQ ID NO: 602360
cugaucaaagauauccaag

SEQ ID NO: 602362 - RNA, 19 nt, Artificial Sequence
  Description of Artificial Sequence: Synthetic oligonucleotide
  Sense strand starting at position 5 of SEQ ID NO: 584958
ggauaucuuugaucaggua

SEQ ID NO: 602363 - RNA, 19 nt, Artificial Sequence
  Description of Artificial Sequence: Synthetic oligonucleotide
  Antisense strand to SEQ ID NO: 602362
uaccugaucaaagauaucc

SEQ ID NO: 602364 - RNA, 19 nt, Artificial Sequence
  Description of Artificial Sequence: Synthetic oligonucleotide
  Sense strand starting at position 54 of SEQ ID NO: 584958
gugaaagcuccauaauaua

SEQ ID NO: 602365 - RNA, 19 nt, Artificial Sequence
  Description of Artificial Sequence: Synthetic oligonucleotide
  Antisense strand to SEQ ID NO: 602364
uauauuauggagcuuucac

SEQ ID NO: 602366 - RNA, 19 nt, Artificial Sequence
  Description of Artificial Sequence: Synthetic oligonucleotide
  Sense strand starting at position 176 of SEQ ID NO: 584958
gccuguauugccucuucuu

SEQ ID NO: 602367 - RNA, 19 nt, Artificial Sequence
  Description of Artificial Sequence: Synthetic oligonucleotide
  Antisense strand to SEQ ID NO: 602366
aagaagaggcaauacaggc

SEQ ID NO: 602368 - RNA, 19 nt, Artificial Sequence
  Description of Artificial Sequence: Synthetic oligonucleotide
  Sense strand starting at position 358 of SEQ ID NO: 584958
uggagaaguccaggaagca

SEQ ID NO: 602369 - RNA, 19 nt, Artificial Sequence
  Description of Artificial Sequence: Synthetic oligonucleotide
  Antisense strand to SEQ ID NO: 602368
ugcuuccuggacuucucca

SEQ ID NO: 602370 - RNA, 19 nt, Artificial Sequence
  Description of Artificial Sequence: Synthetic oligonucleotide
  Sense strand starting at position 399 of SEQ ID NO: 584958
aaaccaaugucguuuaaga

SEQ ID NO: 602371 - RNA, 19 nt, Artificial Sequence
  Description of Artificial Sequence: Synthetic oligonucleotide
  Antisense strand to SEQ ID NO: 602370
ucuuaaacgacauugguuu

SEQ ID NO: 602372 - RNA, 19 nt, Artificial Sequence
  Description of Artificial Sequence: Synthetic oligonucleotide
  Sense strand starting at position 401 of SEQ ID NO: 584958
accaaugucguuuaagaac

SEQ ID NO: 602373 - RNA, 19 nt, Artificial Sequence
  Description of Artificial Sequence: Synthetic oligonucleotide
  Antisense strand to SEQ ID NO: 602372
guucuuaaacgacauuggu

SEQ ID NO: 602374 - RNA, 19 nt, Artificial Sequence
  Description of Artificial Sequence: Synthetic oligonucleotide
  Sense strand starting at position 464 of SEQ ID NO: 584958
guaccuugaucuccuggaa

SEQ ID NO: 602375 - RNA, 19 nt, Artificial Sequence
  Description of Artificial Sequence: Synthetic oligonucleotide
  Antisense strand to SEQ ID NO: 602374
uuccaggagaucaagguac

SEQ ID NO: 602376 - RNA, 19 nt, Artificial Sequence
  Description of Artificial Sequence: Synthetic oligonucleotide
  Sense strand starting at position 478 of SEQ ID NO: 584958
uggaaauuauguguccauu

SEQ ID NO: 602377 - RNA, 19 nt, Artificial Sequence
  Description of Artificial Sequence: Synthetic oligonucleotide
  Antisense strand to SEQ ID NO: 602376
aauggacacauaauuucca

SEQ ID NO: 602378 - RNA, 19 nt, Artificial Sequence
  Description of Artificial Sequence: Synthetic oligonucleotide
  Sense strand starting at position 502 of SEQ ID NO: 584958
uggcuccuuuacucaaaga

SEQ ID NO: 602379 - RNA, 19 nt, Artificial Sequence
  Description of Artificial Sequence: Synthetic oligonucleotide
  Antisense strand to SEQ ID NO: 602378
ucuuugaguaaaggagcca

SEQ ID NO: 602380 - RNA, 19 nt, Artificial Sequence
  Description of Artificial Sequence: Synthetic oligonucleotide
  Sense strand starting at position 587 of SEQ ID NO: 584958
agaggaauauguguuccag

SEQ ID NO: 602381 - RNA, 19 nt, Artificial Sequence
  Description of Artificial Sequence: Synthetic oligonucleotide
  Antisense strand to SEQ ID NO: 602380
cuggaacacauauuccucu

SEQ ID NO: 602382 - RNA, 19 nt, Artificial Sequence
  Description of Artificial Sequence: Synthetic oligonucleotide
  Sense strand starting at position 589 of SEQ ID NO: 584958
aggaauauguguuccaggu

SEQ ID NO: 602383 - RNA, 19 nt, Artificial Sequence
  Description of Artificial Sequence: Synthetic oligonucleotide
  Antisense strand to SEQ ID NO: 602382
accuggaacacauauuccu

SEQ ID NO: 602384 - RNA, 19 nt, Artificial Sequence
  Description of Artificial Sequence: Synthetic oligonucleotide
  Sense strand starting at position 649 of SEQ ID NO: 584958
auuauacagugguuugauu

SEQ ID NO: 602385 - RNA, 19 nt, Artificial Sequence
  Description of Artificial Sequence: Synthetic oligonucleotide
  Antisense strand to SEQ ID NO: 602384
aaucaaaccacuguauaau

SEQ ID NO: 602386 - RNA, 19 nt, Artificial Sequence
  Description of Artificial Sequence: Synthetic oligonucleotide
  Sense strand starting at position 697 of SEQ ID NO: 584958
ucagguauuaugggucaga

SEQ ID NO: 602387 - RNA, 19 nt, Artificial Sequence
  Description of Artificial Sequence: Synthetic oligonucleotide
  Antisense strand to SEQ ID NO: 602386
ucugacccauaauaccuga

SEQ ID NO: 602388 - RNA, 19 nt, Artificial Sequence
  Description of Artificial Sequence: Synthetic oligonucleotide
  Sense strand starting at position 698 of SEQ ID NO: 584958
cagguauuaugggucagau

SEQ ID NO: 602389 - RNA, 19 nt, Artificial Sequence
  Description of Artificial Sequence: Synthetic oligonucleotide
  Antisense strand to SEQ ID NO: 602388
aucugacccauaauaccug

SEQ ID NO: 602390 - RNA, 19 nt, Artificial Sequence
  Description of Artificial Sequence: Synthetic oligonucleotide
  Sense strand starting at position 746 of SEQ ID NO: 584958
cugacuagguguucuauua

SEQ ID NO: 602391 - RNA, 19 nt, Artificial Sequence
  Description of Artificial Sequence: Synthetic oligonucleotide
  Antisense strand to SEQ ID NO: 602390
uaauagaacaccuagucag

SEQ ID NO: 602392 - RNA, 19 nt, Artificial Sequence
  Description of Artificial Sequence: Synthetic oligonucleotide
  Sense strand starting at position 759 of SEQ ID NO: 584958
cuauuacuugucuagcgaa

SEQ ID NO: 602393 - RNA, 19 nt, Artificial Sequence
  Description of Artificial Sequence: Synthetic oligonucleotide
  Antisense strand to SEQ ID NO: 602392
uucgcuagacaaguaauag

SEQ ID NO: 602394 - RNA, 19 nt, Artificial Sequence
  Description of Artificial Sequence: Synthetic oligonucleotide
  Sense strand starting at position 772 of SEQ ID NO: 584958
agcgaaaugaauuaacagu

SEQ ID NO: 602395 - RNA, 19 nt, Artificial Sequence
  Description of Artificial Sequence: Synthetic oligonucleotide
  Antisense strand to SEQ ID NO: 602394
acuguuaauucauuucgcu

SEQ ID NO: 602396 - RNA, 19 nt, Artificial Sequence
  Description of Artificial Sequence: Synthetic oligonucleotide
  Sense strand starting at position 873 of SEQ ID NO: 584958
ugguuaaaugcguaaauag

SEQ ID NO: 602397 - RNA, 19 nt, Artificial Sequence
  Description of Artificial Sequence: Synthetic oligonucleotide
  Antisense strand to SEQ ID NO: 602396
cuauuuacgcauuuaacca

SEQ ID NO: 602398 - RNA, 19 nt, Artificial Sequence
  Description of Artificial Sequence: Synthetic oligonucleotide
  Sense strand starting at position 1200 of SEQ ID NO: 584958
acaacugagcgccaggaau

SEQ ID NO: 602399 - RNA, 19 nt, Artificial Sequence
  Description of Artificial Sequence: Synthetic oligonucleotide
  Antisense strand to SEQ ID NO: 602398
auuccuggcgcucaguugu

SEQ ID NO: 602400 - RNA, 19 nt, Artificial Sequence
  Description of Artificial Sequence: Synthetic oligonucleotide
  Sense strand starting at position 2384 of SEQ ID NO: 584958
cuaacaagucagggacauu

SEQ ID NO: 602401 - RNA, 19 nt, Artificial Sequence
  Description of Artificial Sequence: Synthetic oligonucleotide
  Antisense strand to SEQ ID NO: 602400
aaugucccugacuuguuag

SEQ ID NO: 602402 - RNA, 19 nt, Artificial Sequence
  Description of Artificial Sequence: Synthetic oligonucleotide
  Sense strand starting at position 2418 of SEQ ID NO: 584958
gcagaccaaucuuugagau

SEQ ID NO: 602403 - RNA, 19 nt, Artificial Sequence
  Description of Artificial Sequence: Synthetic oligonucleotide
  Antisense strand to SEQ ID NO: 602402
aucucaaagauuggucugc

SEQ ID NO: 602404 - RNA, 19 nt, Artificial Sequence
  Description of Artificial Sequence: Synthetic oligonucleotide
  Sense strand starting at position 2576 of SEQ ID NO: 584958
cuucuacacccuugaguua

SEQ ID NO: 602405 - RNA, 19 nt, Artificial Sequence
  Description of Artificial Sequence: Synthetic oligonucleotide
  Antisense strand to SEQ ID NO: 602404
uaacucaaggguguagaag

SEQ ID NO: 602406 - RNA, 19 nt, Artificial Sequence
  Description of Artificial Sequence: Synthetic oligonucleotide
  Sense strand starting at position 2577 of SEQ ID NO: 584958
uucuacacccuugaguuau

SEQ ID NO: 602407 - RNA, 19 nt, Artificial Sequence
  Description of Artificial Sequence: Synthetic oligonucleotide
  Antisense strand to SEQ ID NO: 602406
auaacucaaggguguagaa

SEQ ID NO: 602408 - RNA, 19 nt, Artificial Sequence
  Description of Artificial Sequence: Synthetic oligonucleotide
  Sense strand starting at position 2833 of SEQ ID NO: 584958
uuaugcaucgaucaucaua

SEQ ID NO: 602409 - RNA, 19 nt, Artificial Sequence
  Description of Artificial Sequence: Synthetic oligonucleotide
  Antisense strand to SEQ ID NO: 602408
uaugaugaucgaugcauaa

SEQ ID NO: 602410 - RNA, 19 nt, Artificial Sequence
  Description of Artificial Sequence: Synthetic oligonucleotide
  Sense strand starting at position 2835 of SEQ ID NO: 584958
augcaucgaucaucauaau

SEQ ID NO: 602411 - RNA, 19 nt, Artificial Sequence
  Description of Artificial Sequence: Synthetic oligonucleotide
  Antisense strand to SEQ ID NO: 602410
auuaugaugaucgaugcau

SEQ ID NO: 602412 - RNA, 19 nt, Artificial Sequence
  Description of Artificial Sequence: Synthetic oligonucleotide
  Sense strand starting at position 2836 of SEQ ID NO: 584958
ugcaucgaucaucauaaua

SEQ ID NO: 602413 - RNA, 19 nt, Artificial Sequence
  Description of Artificial Sequence: Synthetic oligonucleotide
  Antisense strand to SEQ ID NO: 602412
uauuaugaugaucgaugca

SEQ ID NO: 602414 - RNA, 19 nt, Artificial Sequence
  Description of Artificial Sequence: Synthetic oligonucleotide
  Sense strand starting at position 2970 of SEQ ID NO: 584958
guauuaauauuggcauaag

SEQ ID NO: 602415 - RNA, 19 nt, Artificial Sequence
  Description of Artificial Sequence: Synthetic oligonucleotide
  Antisense strand to SEQ ID NO: 602414
cuuaugccaauauuaauac

SEQ ID NO: 602416 - RNA, 19 nt, Artificial Sequence
  Description of Artificial Sequence: Synthetic oligonucleotide
  Sense strand starting at position 3001 of SEQ ID NO: 584958
acagguauaugucugaucu

SEQ ID NO: 602417 - RNA, 19 nt, Artificial Sequence
  Description of Artificial Sequence: Synthetic oligonucleotide
  Antisense strand to SEQ ID NO: 602416
agaucagacauauaccugu

SEQ ID NO: 602418 - RNA, 19 nt, Artificial Sequence
  Description of Artificial Sequence: Synthetic oligonucleotide
  Sense strand starting at position 3154 of SEQ ID NO: 584958
cucaaucuccagugaugac

SEQ ID NO: 602419 - RNA, 19 nt, Artificial Sequence
  Description of Artificial Sequence: Synthetic oligonucleotide
  Antisense strand to SEQ ID NO: 602418
gucaucacuggagauugag

SEQ ID NO: 602420 - RNA, 19 nt, Artificial Sequence
  Description of Artificial Sequence: Synthetic oligonucleotide
  Sense strand starting at position 3208 of SEQ ID NO: 584958
cauggagacuuucuguaug

SEQ ID NO: 602421 - RNA, 19 nt, Artificial Sequence
  Description of Artificial Sequence: Synthetic oligonucleotide
  Antisense strand to SEQ ID NO: 602420
cauacagaaagucuccaug

SEQ ID NO: 602422 - RNA, 19 nt, Artificial Sequence
  Description of Artificial Sequence: Synthetic oligonucleotide
  Sense strand starting at position 3211 of SEQ ID NO: 584958
ggagacuuucuguaugcuu

SEQ ID NO: 602423 - RNA, 19 nt, Artificial Sequence
  Description of Artificial Sequence: Synthetic oligonucleotide
  Antisense strand to SEQ ID NO: 602422
aagcauacagaaagucucc

SEQ ID NO: 602424 - RNA, 19 nt, Artificial Sequence
  Description of Artificial Sequence: Synthetic oligonucleotide
  Sense strand starting at position 3259 of SEQ ID NO: 584958
ccugcucccauggaugaga

SEQ ID NO: 602425 - RNA, 19 nt, Artificial Sequence
  Description of Artificial Sequence: Synthetic oligonucleotide
  Antisense strand to SEQ ID NO: 602424
ucucauccaugggagcagg

SEQ ID NO: 602426 - RNA, 19 nt, Artificial Sequence
  Description of Artificial Sequence: Synthetic oligonucleotide
  Sense strand starting at position 3291 of SEQ ID NO: 584958
acuugugcccgagaucaag

SEQ ID NO: 602427 - RNA, 19 nt, Artificial Sequence
  Description of Artificial Sequence: Synthetic oligonucleotide
  Antisense strand to SEQ ID NO: 602426
cuugaucucgggcacaagu

SEQ ID NO: 602428 - RNA, 19 nt, Artificial Sequence
  Description of Artificial Sequence: Synthetic oligonucleotide
  Sense strand starting at position 3493 of SEQ ID NO: 584958
uagaaaccguuggcuaaau

SEQ ID NO: 602429 - RNA, 19 nt, Artificial Sequence
  Description of Artificial Sequence: Synthetic oligonucleotide
  Antisense strand to SEQ ID NO: 602428
auuuagccaacgguuucua

SEQ ID NO: 602430 - RNA, 19 nt, Artificial Sequence
  Description of Artificial Sequence: Synthetic oligonucleotide
  Sense strand starting at position 3494 of SEQ ID NO: 584958
agaaaccguuggcuaaauu

SEQ ID NO: 602431 - RNA, 19 nt, Artificial Sequence
  Description of Artificial Sequence: Synthetic oligonucleotide
  Antisense strand to SEQ ID NO: 602430
aauuuagccaacgguuucu

SEQ ID NO: 602432 - RNA, 19 nt, Artificial Sequence
  Description of Artificial Sequence: Synthetic oligonucleotide
  Sense strand starting at position 3544 of SEQ ID NO: 584958
uguuaaauccaguacaauc

SEQ ID NO: 602433 - RNA, 19 nt, Artificial Sequence
  Description of Artificial Sequence: Synthetic oligonucleotide
  Antisense strand to SEQ ID NO: 602432
gauuguacuggauuuaaca

SEQ ID NO: 602434 - RNA, 19 nt, Artificial Sequence
  Description of Artificial Sequence: Synthetic oligonucleotide
  Sense strand starting at position 3749 of SEQ ID NO: 584958
uucuuuguacuugauagca

SEQ ID NO: 602435 - RNA, 19 nt, Artificial Sequence
  Description of Artificial Sequence: Synthetic oligonucleotide
  Antisense strand to SEQ ID NO: 602434
ugcuaucaaguacaaagaa

SEQ ID NO: 602436 - RNA, 19 nt, Artificial Sequence
  Description of Artificial Sequence: Synthetic oligonucleotide
  Sense strand starting at position 3873 of SEQ ID NO: 584958
ugugaucuucuccaguaua

SEQ ID NO: 602437 - RNA, 19 nt, Artificial Sequence
  Description of Artificial Sequence: Synthetic oligonucleotide
  Antisense strand to SEQ ID NO: 602436
uauacuggagaagaucaca

SEQ ID NO: 602438 - RNA, 19 nt, Artificial Sequence
  Description of Artificial Sequence: Synthetic oligonucleotide
  Sense strand starting at position 3953 of SEQ ID NO: 584958
auccauuucucugauggau

SEQ ID NO: 602439 - RNA, 19 nt, Artificial Sequence
  Description of Artificial Sequence: Synthetic oligonucleotide
  Antisense strand to SEQ ID NO: 602438
auccaucagagaaauggau

SEQ ID NO: 602440 - RNA, 19 nt, Artificial Sequence
  Description of Artificial Sequence: Synthetic oligonucleotide
  Sense strand starting at position 226 of SEQ ID NO: 584959
gcauuauuggcagagggaa

SEQ ID NO: 602441 - RNA, 19 nt, Artificial Sequence
  Description of Artificial Sequence: Synthetic oligonucleotide
  Antisense strand to SEQ ID NO: 602440
uucccucugccaauaaugc

SEQ ID NO: 602442 - RNA, 19 nt, Artificial Sequence
  Description of Artificial Sequence: Synthetic oligonucleotide
  Sense strand starting at position 278 of SEQ ID NO: 584959
uugcaaugucugggaaaga

SEQ ID NO: 602443 - RNA, 19 nt, Artificial Sequence
  Description of Artificial Sequence: Synthetic oligonucleotide
  Antisense strand to SEQ ID NO: 602442
ucuuucccagacauugcaa

SEQ ID NO: 602444 - RNA, 19 nt, Artificial Sequence
  Description of Artificial Sequence: Synthetic oligonucleotide
  Sense strand starting at position 338 of SEQ ID NO: 584959
auaugaaggcagugagaua

SEQ ID NO: 602445 - RNA, 19 nt, Artificial Sequence
  Description of Artificial Sequence: Synthetic oligonucleotide
  Antisense strand to SEQ ID NO: 602444
uaucucacugccuucauau

SEQ ID NO: 602446 - RNA, 19 nt, Artificial Sequence
  Description of Artificial Sequence: Synthetic oligonucleotide
  Sense strand starting at position 345 of SEQ ID NO: 584959
ggcagugagauauguaaga

SEQ ID NO: 602447 - RNA, 19 nt, Artificial Sequence
  Description of Artificial Sequence: Synthetic oligonucleotide
  Antisense strand to SEQ ID NO: 602446
ucuuacauaucucacugcc

SEQ ID NO: 602448 - RNA, 19 nt, Artificial Sequence
  Description of Artificial Sequence: Synthetic oligonucleotide
  Sense strand starting at position 347 of SEQ ID NO: 584959
cagugagauauguaagagu

SEQ ID NO: 602449 - RNA, 19 nt, Artificial Sequence
  Description of Artificial Sequence: Synthetic oligonucleotide
  Antisense strand to SEQ ID NO: 602448
acucuuacauaucucacug

SEQ ID NO: 602450 - RNA, 19 nt, Artificial Sequence
  Description of Artificial Sequence: Synthetic oligonucleotide
  Sense strand starting at position 537 of SEQ ID NO: 584959
agaugauggcacugaacua

SEQ ID NO: 602451 - RNA, 19 nt, Artificial Sequence
  Description of Artificial Sequence: Synthetic oligonucleotide
  Antisense strand to SEQ ID NO: 602450
uaguucagugccaucaucu

SEQ ID NO: 602452 - RNA, 19 nt, Artificial Sequence
  Description of Artificial Sequence: Synthetic oligonucleotide
  Sense strand starting at position 601 of SEQ ID NO: 584959
gaguuuggugauggacuaa

SEQ ID NO: 602453 - RNA, 19 nt, Artificial Sequence
  Description of Artificial Sequence: Synthetic oligonucleotide
  Antisense strand to SEQ ID NO: 602452
uuaguccaucaccaaacuc

SEQ ID NO: 602454 - RNA, 19 nt, Artificial Sequence
  Description of Artificial Sequence: Synthetic oligonucleotide
  Sense strand starting at position 616 of SEQ ID NO: 584959
cuaacuguaucuucgagau

SEQ ID NO: 602455 - RNA, 19 nt, Artificial Sequence
  Description of Artificial Sequence: Synthetic oligonucleotide
  Antisense strand to SEQ ID NO: 602454
aucucgaagauacaguuag

SEQ ID NO: 602456 - RNA, 19 nt, Artificial Sequence
  Description of Artificial Sequence: Synthetic oligonucleotide
  Sense strand starting at position 620 of SEQ ID NO: 584959
cuguaucuucgagaugaca

SEQ ID NO: 602457 - RNA, 19 nt, Artificial Sequence
  Description of Artificial Sequence: Synthetic oligonucleotide
  Antisense strand to SEQ ID NO: 602456
ugucaucucgaagauacag

SEQ ID NO: 602458 - RNA, 19 nt, Artificial Sequence
  Description of Artificial Sequence: Synthetic oligonucleotide
  Sense strand starting at position 622 of SEQ ID NO: 584959
guaucuucgagaugacaga

SEQ ID NO: 602459 - RNA, 19 nt, Artificial Sequence
  Description of Artificial Sequence: Synthetic oligonucleotide
  Antisense strand to SEQ ID NO: 602458
ucugucaucucgaagauac

SEQ ID NO: 602460 - RNA, 19 nt, Artificial Sequence
  Description of Artificial Sequence: Synthetic oligonucleotide
  Sense strand starting at position 731 of SEQ ID NO: 584959
cuagcucuucuugggaaca

SEQ ID NO: 602461 - RNA, 19 nt, Artificial Sequence
  Description of Artificial Sequence: Synthetic oligonucleotide
  Antisense strand to SEQ ID NO: 602460
uguucccaagaagagcuag

SEQ ID NO: 602462 - RNA, 19 nt, Artificial Sequence
  Description of Artificial Sequence: Synthetic oligonucleotide
  Sense strand starting at position 743 of SEQ ID NO: 584959
gggaacaguuagccauagu

SEQ ID NO: 602463 - RNA, 19 nt, Artificial Sequence
  Description of Artificial Sequence: Synthetic oligonucleotide
  Antisense strand to SEQ ID NO: 602462
acuauggcuaacuguuccc

SEQ ID NO: 602464 - RNA, 19 nt, Artificial Sequence
  Description of Artificial Sequence: Synthetic oligonucleotide
  Sense strand starting at position 877 of SEQ ID NO: 584959
agacuuaaacuucggacau

SEQ ID NO: 602465 - RNA, 19 nt, Artificial Sequence
  Description of Artificial Sequence: Synthetic oligonucleotide
  Antisense strand to SEQ ID NO: 602464
auguccgaaguuuaagucu

SEQ ID NO: 602466 - RNA, 19 nt, Artificial Sequence
  Description of Artificial Sequence: Synthetic oligonucleotide
  Sense strand starting at position 932 of SEQ ID NO: 584959
accaguaagagcuggucaa

SEQ ID NO: 602467 - RNA, 19 nt, Artificial Sequence
  Description of Artificial Sequence: Synthetic oligonucleotide
  Antisense strand to SEQ ID NO: 602466
uugaccagcucuuacuggu

SEQ ID NO: 602468 - RNA, 19 nt, Artificial Sequence
  Description of Artificial Sequence: Synthetic oligonucleotide
  Sense strand starting at position 933 of SEQ ID NO: 584959
ccaguaagagcuggucaag

SEQ ID NO: 602469 - RNA, 19 nt, Artificial Sequence
  Description of Artificial Sequence: Synthetic oligonucleotide
  Antisense strand to SEQ ID NO: 602468
cuugaccagcucuuacugg

SEQ ID NO: 602470 - RNA, 19 nt, Artificial Sequence
  Description of Artificial Sequence: Synthetic oligonucleotide
  Sense strand starting at position 936 of SEQ ID NO: 584959
guaagagcuggucaagaga

SEQ ID NO: 602471 - RNA, 19 nt, Artificial Sequence
  Description of Artificial Sequence: Synthetic oligonucleotide
  Antisense strand to SEQ ID NO: 602470
ucucuugaccagcucuuac

SEQ ID NO: 602472 - RNA, 19 nt, Artificial Sequence
  Description of Artificial Sequence: Synthetic oligonucleotide
  Sense strand starting at position 1091 of SEQ ID NO: 584959
guuugugugcauguguuaa

SEQ ID NO: 602473 - RNA, 19 nt, Artificial Sequence
  Description of Artificial Sequence: Synthetic oligonucleotide
  Antisense strand to SEQ ID NO: 602472
uuaacacaugcacacaaac

SEQ ID NO: 602474 - RNA, 19 nt, Artificial Sequence
  Description of Artificial Sequence: Synthetic oligonucleotide
  Sense strand starting at position 1105 of SEQ ID NO: 584959
guuaauuaguaccucucaa

SEQ ID NO: 602475 - RNA, 19 nt, Artificial Sequence
  Description of Artificial Sequence: Synthetic oligonucleotide
  Antisense strand to SEQ ID NO: 602474
uugagagguacuaauuaac

SEQ ID NO: 602476 - RNA, 19 nt, Artificial Sequence
  Description of Artificial Sequence: Synthetic oligonucleotide
  Sense strand starting at position 1292 of SEQ ID NO: 584959
agcagacuguauccagaua

SEQ ID NO: 602477 - RNA, 19 nt, Artificial Sequence
  Description of Artificial Sequence: Synthetic oligonucleotide
  Antisense strand to SEQ ID NO: 602476
uaucuggauacagucugcu

SEQ ID NO: 602478 - RNA, 19 nt, Artificial Sequence
  Description of Artificial Sequence: Synthetic oligonucleotide
  Sense strand starting at position 1399 of SEQ ID NO: 584959
guacacaaaucaguacuau

SEQ ID NO: 602479 - RNA, 19 nt, Artificial Sequence
  Description of Artificial Sequence: Synthetic oligonucleotide
  Antisense strand to SEQ ID NO: 602478
auaguacugauuuguguac

SEQ ID NO: 602480 - RNA, 19 nt, Artificial Sequence
  Description of Artificial Sequence: Synthetic oligonucleotide
  Sense strand starting at position 1573 of SEQ ID NO: 584959
agcuuucuucuguagagau

SEQ ID NO: 602481 - RNA, 19 nt, Artificial Sequence
  Description of Artificial Sequence: Synthetic oligonucleotide
  Antisense strand to SEQ ID NO: 602480
aucucuacagaagaaagcu

SEQ ID NO: 602482 - RNA, 19 nt, Artificial Sequence
  Description of Artificial Sequence: Synthetic oligonucleotide
  Sense strand starting at position 1672 of SEQ ID NO: 584959
uuucgaucaguucagggua

SEQ ID NO: 602483 - RNA, 19 nt, Artificial Sequence
  Description of Artificial Sequence: Synthetic oligonucleotide
  Antisense strand to SEQ ID NO: 602482
uacccugaacugaucgaaa

SEQ ID NO: 602484 - RNA, 19 nt, Artificial Sequence
  Description of Artificial Sequence: Synthetic oligonucleotide
  Sense strand starting at position 1700 of SEQ ID NO: 584959
aaggucuuggccugaauag

SEQ ID NO: 602485 - RNA, 19 nt, Artificial Sequence
  Description of Artificial Sequence: Synthetic oligonucleotide
  Antisense strand to SEQ ID NO: 602484
cuauucaggccaagaccuu

SEQ ID NO: 602486 - RNA, 19 nt, Artificial Sequence
  Description of Artificial Sequence: Synthetic oligonucleotide
  Sense strand starting at position 1962 of SEQ ID NO: 584959
gcgcuuucccggaaggucu

SEQ ID NO: 602487 - RNA, 19 nt, Artificial Sequence
  Description of Artificial Sequence: Synthetic oligonucleotide
  Antisense strand to SEQ ID NO: 602486
agaccuuccgggaaagcgc

SEQ ID NO: 602488 - RNA, 19 nt, Artificial Sequence
  Description of Artificial Sequence: Synthetic oligonucleotide
  Sense strand starting at position 1991 of SEQ ID NO: 584959
accaguugucaggguaaca

SEQ ID NO: 602489 - RNA, 19 nt, Artificial Sequence
  Description of Artificial Sequence: Synthetic oligonucleotide
  Antisense strand to SEQ ID NO: 602488
uguuacccugacaacuggu

SEQ ID NO: 602490 - RNA, 19 nt, Artificial Sequence
  Description of Artificial Sequence: Synthetic oligonucleotide
  Sense strand starting at position 2023 of SEQ ID NO: 584959
ggguucuggagucacauga

SEQ ID NO: 602491 - RNA, 19 nt, Artificial Sequence
  Description of Artificial Sequence: Synthetic oligonucleotide
  Antisense strand to SEQ ID NO: 602490
ucaugugacuccagaaccc

SEQ ID NO: 602492 - RNA, 19 nt, Artificial Sequence
  Description of Artificial Sequence: Synthetic oligonucleotide
  Sense strand starting at position 2365 of SEQ ID NO: 584959
ucauucgagcgcucuguuu

SEQ ID NO: 602493 - RNA, 19 nt, Artificial Sequence
  Description of Artificial Sequence: Synthetic oligonucleotide
  Antisense strand to SEQ ID NO: 602492
aaacagagcgcucgaauga

SEQ ID NO: 602494 - RNA, 19 nt, Artificial Sequence
  Description of Artificial Sequence: Synthetic oligonucleotide
  Sense strand starting at position 2419 of SEQ ID NO: 584959
ggauuucuuuggccugcaa

SEQ ID NO: 602495 - RNA, 19 nt, Artificial Sequence
  Description of Artificial Sequence: Synthetic oligonucleotide
  Antisense strand to SEQ ID NO: 602494
uugcaggccaaagaaaucc

SEQ ID NO: 602496 - RNA, 19 nt, Artificial Sequence
  Description of Artificial Sequence: Synthetic oligonucleotide
  Sense strand starting at position 2421 of SEQ ID NO: 584959
auuucuuuggccugcaaag

SEQ ID NO: 602497 - RNA, 19 nt, Artificial Sequence
  Description of Artificial Sequence: Synthetic oligonucleotide
  Antisense strand to SEQ ID NO: 602496
cuuugcaggccaaagaaau

SEQ ID NO: 602498 - RNA, 19 nt, Artificial Sequence
  Description of Artificial Sequence: Synthetic oligonucleotide
  Sense strand starting at position 2551 of SEQ ID NO: 584959
gcaagauucuuauuaaguu

SEQ ID NO: 602499 - RNA, 19 nt, Artificial Sequence
  Description of Artificial Sequence: Synthetic oligonucleotide
  Antisense strand to SEQ ID NO: 602498
aacuuaauaagaaucuugc

SEQ ID NO: 602500 - RNA, 19 nt, Artificial Sequence
  Description of Artificial Sequence: Synthetic oligonucleotide
  Sense strand starting at position 2567 of SEQ ID NO: 584959
guuauugcuccucccgcua

SEQ ID NO: 602501 - RNA, 19 nt, Artificial Sequence
  Description of Artificial Sequence: Synthetic oligonucleotide
  Antisense strand to SEQ ID NO: 602500
uagcgggaggagcaauaac

SEQ ID NO: 602502 - RNA, 19 nt, Artificial Sequence
  Description of Artificial Sequence: Synthetic oligonucleotide
  Sense strand starting at position 2708 of SEQ ID NO: 584959
uuuagcauaguguaaguaa

SEQ ID NO: 602503 - RNA, 19 nt, Artificial Sequence
  Description of Artificial Sequence: Synthetic oligonucleotide
  Antisense strand to SEQ ID NO: 602502
uuacuuacacuaugcuaaa

SEQ ID NO: 602504 - RNA, 19 nt, Artificial Sequence
  Description of Artificial Sequence: Synthetic oligonucleotide
  Sense strand starting at position 2770 of SEQ ID NO: 584959
aggaccucaucuuuagcua

SEQ ID NO: 602505 - RNA, 19 nt, Artificial Sequence
  Description of Artificial Sequence: Synthetic oligonucleotide
  Antisense strand to SEQ ID NO: 602504
uagcuaaagaugagguccu

SEQ ID NO: 602506 - RNA, 19 nt, Artificial Sequence
  Description of Artificial Sequence: Synthetic oligonucleotide
  Sense strand starting at position 2946 of SEQ ID NO: 584959
acauaugaucuagagccuu

SEQ ID NO: 602507 - RNA, 19 nt, Artificial Sequence
  Description of Artificial Sequence: Synthetic oligonucleotide
  Antisense strand to SEQ ID NO: 602506
aaggcucuagaucauaugu

SEQ ID NO: 602508 - RNA, 19 nt, Artificial Sequence
  Description of Artificial Sequence: Synthetic oligonucleotide
  Sense strand starting at position 3063 of SEQ ID NO: 584959
uugaacaugccuugagauc

SEQ ID NO: 602509 - RNA, 19 nt, Artificial Sequence
  Description of Artificial Sequence: Synthetic oligonucleotide
  Antisense strand to SEQ ID NO: 602508
gaucucaaggcauguucaa

SEQ ID NO: 602510 - RNA, 19 nt, Artificial Sequence
  Description of Artificial Sequence: Synthetic oligonucleotide
  Sense strand starting at position 3127 of SEQ ID NO: 584959
uucccagugguugaaauga

SEQ ID NO: 602511 - RNA, 19 nt, Artificial Sequence
  Description of Artificial Sequence: Synthetic oligonucleotide
  Antisense strand to SEQ ID NO: 602510
ucauuucaaccacugggaa

SEQ ID NO: 602512 - RNA, 19 nt, Artificial Sequence
  Description of Artificial Sequence: Synthetic oligonucleotide
  Sense strand starting at position 3137 of SEQ ID NO: 584959
uugaaaugaucugucuccu

SEQ ID NO: 602513 - RNA, 19 nt, Artificial Sequence
  Description of Artificial Sequence: Synthetic oligonucleotide
  Antisense strand to SEQ ID NO: 602512
aggagacagaucauuucaa

SEQ ID NO: 602514 - RNA, 19 nt, Artificial Sequence
  Description of Artificial Sequence: Synthetic oligonucleotide
  Sense strand starting at position 3260 of SEQ ID NO: 584959
cgcuuuauuugaucuccca

SEQ ID NO: 602515 - RNA, 19 nt, Artificial Sequence
  Description of Artificial Sequence: Synthetic oligonucleotide
  Antisense strand to SEQ ID NO: 602514
ugggagaucaaauaaagcg

SEQ ID NO: 602516 - RNA, 19 nt, Artificial Sequence
  Description of Artificial Sequence: Synthetic oligonucleotide
  Sense strand starting at position 3370 of SEQ ID NO: 584959
cuagcugaccucuaaaugu

SEQ ID NO: 602517 - RNA, 19 nt, Artificial Sequence
  Description of Artificial Sequence: Synthetic oligonucleotide
  Antisense strand to SEQ ID NO: 602516
acauuuagaggucagcuag

SEQ ID NO: 602518 - RNA, 19 nt, Artificial Sequence
  Description of Artificial Sequence: Synthetic oligonucleotide
  Sense strand starting at position 3847 of SEQ ID NO: 584959
uuuauucgucaagacuugu

SEQ ID NO: 602519 - RNA, 19 nt, Artificial Sequence
  Description of Artificial Sequence: Synthetic oligonucleotide
  Antisense strand to SEQ ID NO: 602518
acaagucuugacgaauaaa

SEQ ID NO: 602520 - RNA, 19 nt, Artificial Sequence
  Description of Artificial Sequence: Synthetic oligonucleotide
  Sense strand starting at position 42 of SEQ ID NO: 584960
caaguagauggauaguagu

SEQ ID NO: 602521 - RNA, 19 nt, Artificial Sequence
  Description of Artificial Sequence: Synthetic oligonucleotide
  Antisense strand to SEQ ID NO: 602520
acuacuauccaucuacuug

SEQ ID NO: 602522 - RNA, 19 nt, Artificial Sequence
  Description of Artificial Sequence: Synthetic oligonucleotide
  Sense strand starting at position 59 of SEQ ID NO: 584960
guguccuuugcugaaauaa

SEQ ID NO: 602523 - RNA, 19 nt, Artificial Sequence
  Description of Artificial Sequence: Synthetic oligonucleotide
  Antisense strand to SEQ ID NO: 602522
uuauuucagcaaaggacac

SEQ ID NO: 602524 - RNA, 19 nt, Artificial Sequence
  Description of Artificial Sequence: Synthetic oligonucleotide
  Sense strand starting at position 227 of SEQ ID NO: 584960
uugagagucauagguguug

SEQ ID NO: 602525 - RNA, 19 nt, Artificial Sequence
  Description of Artificial Sequence: Synthetic oligonucleotide
  Antisense strand to SEQ ID NO: 602524
caacaccuaugacucucaa

SEQ ID NO: 602526 - RNA, 19 nt, Artificial Sequence
  Description of Artificial Sequence: Synthetic oligonucleotide
  Sense strand starting at position 244 of SEQ ID NO: 584960
uggugaagccauggguaua

SEQ ID NO: 602527 - RNA, 19 nt, Artificial Sequence
  Description of Artificial Sequence: Synthetic oligonucleotide
  Antisense strand to SEQ ID NO: 602526
uauacccauggcuucacca

SEQ ID NO: 602528 - RNA, 19 nt, Artificial Sequence
  Description of Artificial Sequence: Synthetic oligonucleotide
  Sense strand starting at position 294 of SEQ ID NO: 584960
ggcacccagccuuaagaaa

SEQ ID NO: 602529 - RNA, 19 nt, Artificial Sequence
  Description of Artificial Sequence: Synthetic oligonucleotide
  Antisense strand to SEQ ID NO: 602528
uuucuuaaggcugggugcc

SEQ ID NO: 602530 - RNA, 19 nt, Artificial Sequence
  Description of Artificial Sequence: Synthetic oligonucleotide
  Sense strand starting at position 322 of SEQ ID NO: 584960
ccuuuaugggcuggauaga

SEQ ID NO: 602531 - RNA, 19 nt, Artificial Sequence
  Description of Artificial Sequence: Synthetic oligonucleotide
  Antisense strand to SEQ ID NO: 602530
ucuauccagcccauaaagg

SEQ ID NO: 602532 - RNA, 19 nt, Artificial Sequence
  Description of Artificial Sequence: Synthetic oligonucleotide
  Sense strand starting at position 622 of SEQ ID NO: 584960
guaugcaugauuuggcuua

SEQ ID NO: 602533 - RNA, 19 nt, Artificial Sequence
  Description of Artificial Sequence: Synthetic oligonucleotide
  Antisense strand to SEQ ID NO: 602532
uaagccaaaucaugcauac

SEQ ID NO: 602534 - RNA, 19 nt, Artificial Sequence
  Description of Artificial Sequence: Synthetic oligonucleotide
  Sense strand starting at position 624 of SEQ ID NO: 584960
augcaugauuuggcuuacu

SEQ ID NO: 602535 - RNA, 19 nt, Artificial Sequence
  Description of Artificial Sequence: Synthetic oligonucleotide
  Antisense strand to SEQ ID NO: 602534
aguaagccaaaucaugcau

SEQ ID NO: 602536 - RNA, 19 nt, Artificial Sequence
  Description of Artificial Sequence: Synthetic oligonucleotide
  Sense strand starting at position 639 of SEQ ID NO: 584960
uacugacguuuccugaaag

SEQ ID NO: 602537 - RNA, 19 nt, Artificial Sequence
  Description of Artificial Sequence: Synthetic oligonucleotide
  Antisense strand to SEQ ID NO: 602536
cuuucaggaaacgucagua

SEQ ID NO: 602538 - RNA, 19 nt, Artificial Sequence
  Description of Artificial Sequence: Synthetic oligonucleotide
  Sense strand starting at position 738 of SEQ ID NO: 584960
uuccaagauugggcuaagu

SEQ ID NO: 602539 - RNA, 19 nt, Artificial Sequence
  Description of Artificial Sequence: Synthetic oligonucleotide
  Antisense strand to SEQ ID NO: 602538
acuuagcccaaucuuggaa

SEQ ID NO: 602540 - RNA, 19 nt, Artificial Sequence
  Description of Artificial Sequence: Synthetic oligonucleotide
  Sense strand starting at position 740 of SEQ ID NO: 584960
ccaagauugggcuaaguca

SEQ ID NO: 602541 - RNA, 19 nt, Artificial Sequence
  Description of Artificial Sequence: Synthetic oligonucleotide
  Antisense strand to SEQ ID NO: 602540
ugacuuagcccaaucuugg

SEQ ID NO: 602542 - RNA, 19 nt, Artificial Sequence
  Description of Artificial Sequence: Synthetic oligonucleotide
  Sense strand starting at position 901 of SEQ ID NO: 584960
gcaauucugcaauguaaag

SEQ ID NO: 602543 - RNA, 19 nt, Artificial Sequence
  Description of Artificial Sequence: Synthetic oligonucleotide
  Antisense strand to SEQ ID NO: 602542
cuuuacauugcagaauugc

SEQ ID NO: 602544 - RNA, 19 nt, Artificial Sequence
  Description of Artificial Sequence: Synthetic oligonucleotide
  Sense strand starting at position 935 of SEQ ID NO: 584960
cgauuaucaguccacugau

SEQ ID NO: 602545 - RNA, 19 nt, Artificial Sequence
  Description of Artificial Sequence: Synthetic oligonucleotide
  Antisense strand to SEQ ID NO: 602544
aucaguggacugauaaucg

SEQ ID NO: 602546 - RNA, 19 nt, Artificial Sequence
  Description of Artificial Sequence: Synthetic oligonucleotide
  Sense strand starting at position 1089 of SEQ ID NO: 584960
auccuuaaagccugcaaga

SEQ ID NO: 602547 - RNA, 19 nt, Artificial Sequence
  Description of Artificial Sequence: Synthetic oligonucleotide
  Antisense strand to SEQ ID NO: 602546
ucuugcaggcuuuaaggau

SEQ ID NO: 602548 - RNA, 19 nt, Artificial Sequence
  Description of Artificial Sequence: Synthetic oligonucleotide
  Sense strand starting at position 1091 of SEQ ID NO: 584960
ccuuaaagccugcaagaau

SEQ ID NO: 602549 - RNA, 19 nt, Artificial Sequence
  Description of Artificial Sequence: Synthetic oligonucleotide
  Antisense strand to SEQ ID NO: 602548
auucuugcaggcuuuaagg

SEQ ID NO: 602550 - RNA, 19 nt, Artificial Sequence
  Description of Artificial Sequence: Synthetic oligonucleotide
  Sense strand starting at position 1140 of SEQ ID NO: 584960
cgagauggauuugacaacu

SEQ ID NO: 602551 - RNA, 19 nt, Artificial Sequence
  Description of Artificial Sequence: Synthetic oligonucleotide
  Antisense strand to SEQ ID NO: 602550
aguugucaaauccaucucg

SEQ ID NO: 602552 - RNA, 19 nt, Artificial Sequence
  Description of Artificial Sequence: Synthetic oligonucleotide
  Sense strand starting at position 2941 of SEQ ID NO: 584960
aaaugucacccagaugugu

SEQ ID NO: 602553 - RNA, 19 nt, Artificial Sequence
  Description of Artificial Sequence: Synthetic oligonucleotide
  Antisense strand to SEQ ID NO: 602552
acacaucugggugacauuu

SEQ ID NO: 602554 - RNA, 19 nt, Artificial Sequence
  Description of Artificial Sequence: Synthetic oligonucleotide
  Sense strand starting at position 3040 of SEQ ID NO: 584960
gcugaaagguaacugaaga

SEQ ID NO: 602555 - RNA, 19 nt, Artificial Sequence
  Description of Artificial Sequence: Synthetic oligonucleotide
  Antisense strand to SEQ ID NO: 602554
ucuucaguuaccuuucagc

SEQ ID NO: 602556 - RNA, 19 nt, Artificial Sequence
  Description of Artificial Sequence: Synthetic oligonucleotide
  Sense strand starting at position 3071 of SEQ ID NO: 584960
aacuauugucauggcugaa

SEQ ID NO: 602557 - RNA, 19 nt, Artificial Sequence
  Description of Artificial Sequence: Synthetic oligonucleotide
  Antisense strand to SEQ ID NO: 602556
uucagccaugacaauaguu

SEQ ID NO: 602558 - RNA, 19 nt, Artificial Sequence
  Description of Artificial Sequence: Synthetic oligonucleotide
  Sense strand starting at position 3074 of SEQ ID NO: 584960
uauugucauggcugaagga

SEQ ID NO: 602559 - RNA, 19 nt, Artificial Sequence
  Description of Artificial Sequence: Synthetic oligonucleotide
  Antisense strand to SEQ ID NO: 602558
uccuucagccaugacaaua

SEQ ID NO: 602560 - RNA, 19 nt, Artificial Sequence
  Description of Artificial Sequence: Synthetic oligonucleotide
  Sense strand starting at position 3113 of SEQ ID NO: 584960
uggacucugcagcagagau

SEQ ID NO: 602561 - RNA, 19 nt, Artificial Sequence
  Description of Artificial Sequence: Synthetic oligonucleotide
  Antisense strand to SEQ ID NO: 602560
aucucugcugcagagucca

SEQ ID NO: 602562 - RNA, 19 nt, Artificial Sequence
  Description of Artificial Sequence: Synthetic oligonucleotide
  Sense strand starting at position 3249 of SEQ ID NO: 584960
gagucuucggauggguuga

SEQ ID NO: 602563 - RNA, 19 nt, Artificial Sequence
  Description of Artificial Sequence: Synthetic oligonucleotide
  Antisense strand to SEQ ID NO: 602562
ucaacccauccgaagacuc

SEQ ID NO: 602564 - RNA, 19 nt, Artificial Sequence
  Description of Artificial Sequence: Synthetic oligonucleotide
  Sense strand starting at position 3250 of SEQ ID NO: 584960
agucuucggauggguugaa

SEQ ID NO: 602565 - RNA, 19 nt, Artificial Sequence
  Description of Artificial Sequence: Synthetic oligonucleotide
  Antisense strand to SEQ ID NO: 602564
uucaacccauccgaagacu

SEQ ID NO: 602566 - RNA, 19 nt, Artificial Sequence
  Description of Artificial Sequence: Synthetic oligonucleotide
  Sense strand starting at position 3251 of SEQ ID NO: 584960
gucuucggauggguugaau

SEQ ID NO: 602567 - RNA, 19 nt, Artificial Sequence
  Description of Artificial Sequence: Synthetic oligonucleotide
  Antisense strand to SEQ ID NO: 602566
auucaacccauccgaagac

SEQ ID NO: 602568 - RNA, 19 nt, Artificial Sequence
  Description of Artificial Sequence: Synthetic oligonucleotide
  Sense strand starting at position 3265 of SEQ ID NO: 584960
ugaauaagcuacuugcuca

SEQ ID NO: 602569 - RNA, 19 nt, Artificial Sequence
  Description of Artificial Sequence: Synthetic oligonucleotide
  Antisense strand to SEQ ID NO: 602568
ugagcaaguagcuuauuca

SEQ ID NO: 602570 - RNA, 19 nt, Artificial Sequence
  Description of Artificial Sequence: Synthetic oligonucleotide
  Sense strand starting at position 3332 of SEQ ID NO: 584960
aagugaguuuauucugaag

SEQ ID NO: 602571 - RNA, 19 nt, Artificial Sequence
  Description of Artificial Sequence: Synthetic oligonucleotide
  Antisense strand to SEQ ID NO: 602570
cuucagaauaaacucacuu

SEQ ID NO: 602572 - RNA, 19 nt, Artificial Sequence
  Description of Artificial Sequence: Synthetic oligonucleotide
  Sense strand starting at position 3338 of SEQ ID NO: 584960
guuuauucugaagagcauc

SEQ ID NO: 602573 - RNA, 19 nt, Artificial Sequence
  Description of Artificial Sequence: Synthetic oligonucleotide
  Antisense strand to SEQ ID NO: 602572
gaugcucuucagaauaaac

SEQ ID NO: 602574 - RNA, 19 nt, Artificial Sequence
  Description of Artificial Sequence: Synthetic oligonucleotide
  Sense strand starting at position 3387 of SEQ ID NO: 584960
augucucuacuacaguuaa

SEQ ID NO: 602575 - RNA, 19 nt, Artificial Sequence
  Description of Artificial Sequence: Synthetic oligonucleotide
  Antisense strand to SEQ ID NO: 602574
uuaacuguaguagagacau

SEQ ID NO: 602576 - RNA, 19 nt, Artificial Sequence
  Description of Artificial Sequence: Synthetic oligonucleotide
  Sense strand starting at position 3415 of SEQ ID NO: 584960
gccguuauucacguugugu

SEQ ID NO: 602577 - RNA, 19 nt, Artificial Sequence
  Description of Artificial Sequence: Synthetic oligonucleotide
  Antisense strand to SEQ ID NO: 602576
acacaacgugaauaacggc

SEQ ID NO: 602578 - RNA, 19 nt, Artificial Sequence
  Description of Artificial Sequence: Synthetic oligonucleotide
  Sense strand starting at position 3443 of SEQ ID NO: 584960
uuagguuguuauguaaacu

SEQ ID NO: 602579 - RNA, 19 nt, Artificial Sequence
  Description of Artificial Sequence: Synthetic oligonucleotide
  Antisense strand to SEQ ID NO: 602578
aguuuacauaacaaccuaa

SEQ ID NO: 602580 - RNA, 19 nt, Artificial Sequence
  Description of Artificial Sequence: Synthetic oligonucleotide
  Sense strand starting at position 3483 of SEQ ID NO: 584960
uagaguguucuguaaguaa

SEQ ID NO: 602581 - RNA, 19 nt, Artificial Sequence
  Description of Artificial Sequence: Synthetic oligonucleotide
  Antisense strand to SEQ ID NO: 602580
uuacuuacagaacacucua

SEQ ID NO: 602582 - RNA, 19 nt, Artificial Sequence
  Description of Artificial Sequence: Synthetic oligonucleotide
  Sense strand starting at position 3486 of SEQ ID NO: 584960
aguguucuguaaguaaaca

SEQ ID NO: 602583 - RNA, 19 nt, Artificial Sequence
  Description of Artificial Sequence: Synthetic oligonucleotide
  Antisense strand to SEQ ID NO: 602582
uguuuacuuacagaacacu

SEQ ID NO: 602584 - RNA, 19 nt, Artificial Sequence
  Description of Artificial Sequence: Synthetic oligonucleotide
  Sense strand starting at position 3487 of SEQ ID NO: 584960
guguucuguaaguaaacaa

SEQ ID NO: 602585 - RNA, 19 nt, Artificial Sequence
  Description of Artificial Sequence: Synthetic oligonucleotide
  Antisense strand to SEQ ID NO: 602584
uuguuuacuuacagaacac

SEQ ID NO: 602586 - RNA, 19 nt, Artificial Sequence
  Description of Artificial Sequence: Synthetic oligonucleotide
  Sense strand starting at position 3537 of SEQ ID NO: 584960
ugcuuugcuccuggaagaa

SEQ ID NO: 602587 - RNA, 19 nt, Artificial Sequence
  Description of Artificial Sequence: Synthetic oligonucleotide
  Antisense strand to SEQ ID NO: 602586
uucuuccaggagcaaagca

SEQ ID NO: 602588 - RNA, 19 nt, Artificial Sequence
  Description of Artificial Sequence: Synthetic oligonucleotide
  Sense strand starting at position 3714 of SEQ ID NO: 584960
auuaaauguuuccuaguca

SEQ ID NO: 602589 - RNA, 19 nt, Artificial Sequence
  Description of Artificial Sequence: Synthetic oligonucleotide
  Antisense strand to SEQ ID NO: 602588
ugacuaggaaacauuuaau

SEQ ID NO: 602590 - RNA, 19 nt, Artificial Sequence
  Description of Artificial Sequence: Synthetic oligonucleotide
  Sense strand starting at position 3790 of SEQ ID NO: 584960
caggauguguucucuaaau

SEQ ID NO: 602591 - RNA, 19 nt, Artificial Sequence
  Description of Artificial Sequence: Synthetic oligonucleotide
  Antisense strand to SEQ ID NO: 602590
auuuagagaacacauccug

SEQ ID NO: 602592 - RNA, 19 nt, Artificial Sequence
  Description of Artificial Sequence: Synthetic oligonucleotide
  Sense strand starting at position 3792 of SEQ ID NO: 584960
ggauguguucucuaaaugc

SEQ ID NO: 602593 - RNA, 19 nt, Artificial Sequence
  Description of Artificial Sequence: Synthetic oligonucleotide
  Antisense strand to SEQ ID NO: 602592
gcauuuagagaacacaucc

SEQ ID NO: 602594 - RNA, 19 nt, Artificial Sequence
  Description of Artificial Sequence: Synthetic oligonucleotide
  Sense strand starting at position 3929 of SEQ ID NO: 584960
auggcaaauugcucaacua

SEQ ID NO: 602595 - RNA, 19 nt, Artificial Sequence
  Description of Artificial Sequence: Synthetic oligonucleotide
  Antisense strand to SEQ ID NO: 602594
uaguugagcaauuugccau

SEQ ID NO: 602596 - RNA, 19 nt, Artificial Sequence
  Description of Artificial Sequence: Synthetic oligonucleotide
  Sense strand starting at position 3930 of SEQ ID NO: 584960
uggcaaauugcucaacuag

SEQ ID NO: 602597 - RNA, 19 nt, Artificial Sequence
  Description of Artificial Sequence: Synthetic oligonucleotide
  Antisense strand to SEQ ID NO: 602596
cuaguugagcaauuugcca

SEQ ID NO: 602598 - RNA, 19 nt, Artificial Sequence
  Description of Artificial Sequence: Synthetic oligonucleotide
  Sense strand starting at position 3981 of SEQ ID NO: 584960
ucacauguguagcuauuua

SEQ ID NO: 602599 - RNA, 19 nt, Artificial Sequence
  Description of Artificial Sequence: Synthetic oligonucleotide
  Antisense strand to SEQ ID NO: 602598
uaaauagcuacacauguga

SEQ ID NO: 602600 - RNA, 19 nt, Artificial Sequence
  Description of Artificial Sequence: Synthetic oligonucleotide
  Sense strand starting at position 8 of SEQ ID NO: 584961
ggucuuaggcacuauauau

SEQ ID NO: 602601 - RNA, 19 nt, Artificial Sequence
  Description of Artificial Sequence: Synthetic oligonucleotide
  Antisense strand to SEQ ID NO: 602600
auauauagugccuaagacc

SEQ ID NO: 602602 - RNA, 19 nt, Artificial Sequence
  Description of Artificial Sequence: Synthetic oligonucleotide
  Sense strand starting at position 89 of SEQ ID NO: 584961
uuagaagcaguuuaaguau

SEQ ID NO: 602603 - RNA, 19 nt, Artificial Sequence
  Description of Artificial Sequence: Synthetic oligonucleotide
  Antisense strand to SEQ ID NO: 602602
auacuuaaacugcuucuaa

SEQ ID NO: 602604 - RNA, 19 nt, Artificial Sequence
  Description of Artificial Sequence: Synthetic oligonucleotide
  Sense strand starting at position 375 of SEQ ID NO: 584961
cccauagagugcuuauaag

SEQ ID NO: 602605 - RNA, 19 nt, Artificial Sequence
  Description of Artificial Sequence: Synthetic oligonucleotide
  Antisense strand to SEQ ID NO: 602604
cuuauaagcacucuauggg

SEQ ID NO: 602606 - RNA, 19 nt, Artificial Sequence
  Description of Artificial Sequence: Synthetic oligonucleotide
  Sense strand starting at position 465 of SEQ ID NO: 584961
ucaccugugagagguagaa

SEQ ID NO: 602607 - RNA, 19 nt, Artificial Sequence
  Description of Artificial Sequence: Synthetic oligonucleotide
  Antisense strand to SEQ ID NO: 602606
uucuaccucucacagguga

SEQ ID NO: 602608 - RNA, 19 nt, Artificial Sequence
  Description of Artificial Sequence: Synthetic oligonucleotide
  Sense strand starting at position 492 of SEQ ID NO: 584961
ugugccucuggauaugaaa

SEQ ID NO: 602609 - RNA, 19 nt, Artificial Sequence
  Description of Artificial Sequence: Synthetic oligonucleotide
  Antisense strand to SEQ ID NO: 602608
uuucauauccagaggcaca

SEQ ID NO: 602610 - RNA, 19 nt, Artificial Sequence
  Description of Artificial Sequence: Synthetic oligonucleotide
  Sense strand starting at position 541 of SEQ ID NO: 584961
guauucuggccagaaagca

SEQ ID NO: 602611 - RNA, 19 nt, Artificial Sequence
  Description of Artificial Sequence: Synthetic oligonucleotide
  Antisense strand to SEQ ID NO: 602610
ugcuuucuggccagaauac

SEQ ID NO: 602612 - RNA, 19 nt, Artificial Sequence
  Description of Artificial Sequence: Synthetic oligonucleotide
  Sense strand starting at position 758 of SEQ ID NO: 584961
guauuuguauaccuauguu

SEQ ID NO: 602613 - RNA, 19 nt, Artificial Sequence
  Description of Artificial Sequence: Synthetic oligonucleotide
  Antisense strand to SEQ ID NO: 602612
aacauagguauacaaauac

SEQ ID NO: 602614 - RNA, 19 nt, Artificial Sequence
  Description of Artificial Sequence: Synthetic oligonucleotide
  Sense strand starting at position 824 of SEQ ID NO: 584961
gcccauugauagguaaaca

SEQ ID NO: 602615 - RNA, 19 nt, Artificial Sequence
  Description of Artificial Sequence: Synthetic oligonucleotide
  Antisense strand to SEQ ID NO: 602614
uguuuaccuaucaaugggc

SEQ ID NO: 602616 - RNA, 19 nt, Artificial Sequence
  Description of Artificial Sequence: Synthetic oligonucleotide
  Sense strand starting at position 1033 of SEQ ID NO: 584961
ucuaaaguagucgaacuua

SEQ ID NO: 602617 - RNA, 19 nt, Artificial Sequence
  Description of Artificial Sequence: Synthetic oligonucleotide
  Antisense strand to SEQ ID NO: 602616
uaaguucgacuacuuuaga

SEQ ID NO: 602618 - RNA, 19 nt, Artificial Sequence
  Description of Artificial Sequence: Synthetic oligonucleotide
  Sense strand starting at position 1038 of SEQ ID NO: 584961
aguagucgaacuuacagaa

SEQ ID NO: 602619 - RNA, 19 nt, Artificial Sequence
  Description of Artificial Sequence: Synthetic oligonucleotide
  Antisense strand to SEQ ID NO: 602618
uucuguaaguucgacuacu

SEQ ID NO: 602620 - RNA, 19 nt, Artificial Sequence
  Description of Artificial Sequence: Synthetic oligonucleotide
  Sense strand starting at position 1132 of SEQ ID NO: 584961
uuuagagauugguugcaua

SEQ ID NO: 602621 - RNA, 19 nt, Artificial Sequence
  Description of Artificial Sequence: Synthetic oligonucleotide
  Antisense strand to SEQ ID NO: 602620
uaugcaaccaaucucuaaa

SEQ ID NO: 602622 - RNA, 19 nt, Artificial Sequence
  Description of Artificial Sequence: Synthetic oligonucleotide
  Sense strand starting at position 1361 of SEQ ID NO: 584961
agagaaguuuagguuaaua

SEQ ID NO: 602623 - RNA, 19 nt, Artificial Sequence
  Description of Artificial Sequence: Synthetic oligonucleotide
  Antisense strand to SEQ ID NO: 602622
uauuaaccuaaacuucucu

SEQ ID NO: 602624 - RNA, 19 nt, Artificial Sequence
  Description of Artificial Sequence: Synthetic oligonucleotide
  Sense strand starting at position 1373 of SEQ ID NO: 584961
guuaauauggcagagugaa

SEQ ID NO: 602625 - RNA, 19 nt, Artificial Sequence
  Description of Artificial Sequence: Synthetic oligonucleotide
  Antisense strand to SEQ ID NO: 602624
uucacucugccauauuaac

SEQ ID NO: 602626 - RNA, 19 nt, Artificial Sequence
  Description of Artificial Sequence: Synthetic oligonucleotide
  Sense strand starting at position 1504 of SEQ ID NO: 584961
gauauaaaccugcgaagag

SEQ ID NO: 602627 - RNA, 19 nt, Artificial Sequence
  Description of Artificial Sequence: Synthetic oligonucleotide
  Antisense strand to SEQ ID NO: 602626
cucuucgcagguuuauauc

SEQ ID NO: 602628 - RNA, 19 nt, Artificial Sequence
  Description of Artificial Sequence: Synthetic oligonucleotide
  Sense strand starting at position 1568 of SEQ ID NO: 584961
acagauguaugaguaguaa

SEQ ID NO: 602629 - RNA, 19 nt, Artificial Sequence
  Description of Artificial Sequence: Synthetic oligonucleotide
  Antisense strand to SEQ ID NO: 602628
uuacuacucauacaucugu

SEQ ID NO: 602630 - RNA, 19 nt, Artificial Sequence
  Description of Artificial Sequence: Synthetic oligonucleotide
  Sense strand starting at position 1654 of SEQ ID NO: 584961
ccaauaggauccucgaaug

SEQ ID NO: 602631 - RNA, 19 nt, Artificial Sequence
  Description of Artificial Sequence: Synthetic oligonucleotide
  Antisense strand to SEQ ID NO: 602630
cauucgaggauccuauugg

SEQ ID NO: 602632 - RNA, 19 nt, Artificial Sequence
  Description of Artificial Sequence: Synthetic oligonucleotide
  Sense strand starting at position 1664 of SEQ ID NO: 584961
ccucgaauggcucaggaau

SEQ ID NO: 602633 - RNA, 19 nt, Artificial Sequence
  Description of Artificial Sequence: Synthetic oligonucleotide
  Antisense strand to SEQ ID NO: 602632
auuccugagccauucgagg

SEQ ID NO: 602634 - RNA, 19 nt, Artificial Sequence
  Description of Artificial Sequence: Synthetic oligonucleotide
  Sense strand starting at position 1692 of SEQ ID NO: 584961
cucuguaagcaguagguaa

SEQ ID NO: 602635 - RNA, 19 nt, Artificial Sequence
  Description of Artificial Sequence: Synthetic oligonucleotide
  Antisense strand to SEQ ID NO: 602634
uuaccuacugcuuacagag

SEQ ID NO: 602636 - RNA, 19 nt, Artificial Sequence
  Description of Artificial Sequence: Synthetic oligonucleotide
  Sense strand starting at position 1696 of SEQ ID NO: 584961
guaagcaguagguaagauu

SEQ ID NO: 602637 - RNA, 19 nt, Artificial Sequence
  Description of Artificial Sequence: Synthetic oligonucleotide
  Antisense strand to SEQ ID NO: 602636
aaucuuaccuacugcuuac

SEQ ID NO: 602638 - RNA, 19 nt, Artificial Sequence
  Description of Artificial Sequence: Synthetic oligonucleotide
  Sense strand starting at position 1705 of SEQ ID NO: 584961
agguaagauugagcuggaa

SEQ ID NO: 602639 - RNA, 19 nt, Artificial Sequence
  Description of Artificial Sequence: Synthetic oligonucleotide
  Antisense strand to SEQ ID NO: 602638
uuccagcucaaucuuaccu

SEQ ID NO: 602640 - RNA, 19 nt, Artificial Sequence
  Description of Artificial Sequence: Synthetic oligonucleotide
  Sense strand starting at position 1707 of SEQ ID NO: 584961
guaagauugagcuggaaac

SEQ ID NO: 602641 - RNA, 19 nt, Artificial Sequence
  Description of Artificial Sequence: Synthetic oligonucleotide
  Antisense strand to SEQ ID NO: 602640
guuuccagcucaaucuuac

SEQ ID NO: 602642 - RNA, 19 nt, Artificial Sequence
  Description of Artificial Sequence: Synthetic oligonucleotide
  Sense strand starting at position 1708 of SEQ ID NO: 584961
uaagauugagcuggaaacu

SEQ ID NO: 602643 - RNA, 19 nt, Artificial Sequence
  Description of Artificial Sequence: Synthetic oligonucleotide
  Antisense strand to SEQ ID NO: 602642
aguuuccagcucaaucuua

SEQ ID NO: 602644 - RNA, 19 nt, Artificial Sequence
  Description of Artificial Sequence: Synthetic oligonucleotide
  Sense strand starting at position 1796 of SEQ ID NO: 584961
ccagaagaguacucuaccu

SEQ ID NO: 602645 - RNA, 19 nt, Artificial Sequence
  Description of Artificial Sequence: Synthetic oligonucleotide
  Antisense strand to SEQ ID NO: 602644
agguagaguacucuucugg

SEQ ID NO: 602646 - RNA, 19 nt, Artificial Sequence
  Description of Artificial Sequence: Synthetic oligonucleotide
  Sense strand starting at position 2484 of SEQ ID NO: 584961
auaagagguuuagcaggaa

SEQ ID NO: 602647 - RNA, 19 nt, Artificial Sequence
  Description of Artificial Sequence: Synthetic oligonucleotide
  Antisense strand to SEQ ID NO: 602646
uuccugcuaaaccucuuau

SEQ ID NO: 602648 - RNA, 19 nt, Artificial Sequence
  Description of Artificial Sequence: Synthetic oligonucleotide
  Sense strand starting at position 2578 of SEQ ID NO: 584961
uuguuuggaguauagugaa

SEQ ID NO: 602649 - RNA, 19 nt, Artificial Sequence
  Description of Artificial Sequence: Synthetic oligonucleotide
  Antisense strand to SEQ ID NO: 602648
uucacuauacuccaaacaa

SEQ ID NO: 602650 - RNA, 19 nt, Artificial Sequence
  Description of Artificial Sequence: Synthetic oligonucleotide
  Sense strand starting at position 2593 of SEQ ID NO: 584961
ugaauaaauguuggcagua

SEQ ID NO: 602651 - RNA, 19 nt, Artificial Sequence
  Description of Artificial Sequence: Synthetic oligonucleotide
  Antisense strand to SEQ ID NO: 602650
uacugccaacauuuauuca

SEQ ID NO: 602652 - RNA, 19 nt, Artificial Sequence
  Description of Artificial Sequence: Synthetic oligonucleotide
  Sense strand starting at position 2594 of SEQ ID NO: 584961
gaauaaauguuggcaguaa

SEQ ID NO: 602653 - RNA, 19 nt, Artificial Sequence
  Description of Artificial Sequence: Synthetic oligonucleotide
  Antisense strand to SEQ ID NO: 602652
uuacugccaacauuuauuc

SEQ ID NO: 602654 - RNA, 19 nt, Artificial Sequence
  Description of Artificial Sequence: Synthetic oligonucleotide
  Sense strand starting at position 2659 of SEQ ID NO: 584961
auaucacaucaaggaguuu

SEQ ID NO: 602655 - RNA, 19 nt, Artificial Sequence
  Description of Artificial Sequence: Synthetic oligonucleotide
  Antisense strand to SEQ ID NO: 602654
aaacuccuugaugugauau

SEQ ID NO: 602656 - RNA, 19 nt, Artificial Sequence
  Description of Artificial Sequence: Synthetic oligonucleotide
  Sense strand starting at position 2768 of SEQ ID NO: 584961
cggcuuuaaggugaacaga

SEQ ID NO: 602657 - RNA, 19 nt, Artificial Sequence
  Description of Artificial Sequence: Synthetic oligonucleotide
  Antisense strand to SEQ ID NO: 602656
ucuguucaccuuaaagccg

SEQ ID NO: 602658 - RNA, 19 nt, Artificial Sequence
  Description of Artificial Sequence: Synthetic oligonucleotide
  Sense strand starting at position 2931 of SEQ ID NO: 584961
acgaaucugcuacaaauau

SEQ ID NO: 602659 - RNA, 19 nt, Artificial Sequence
  Description of Artificial Sequence: Synthetic oligonucleotide
  Antisense strand to SEQ ID NO: 602658
auauuuguagcagauucgu

SEQ ID NO: 602660 - RNA, 19 nt, Artificial Sequence
  Description of Artificial Sequence: Synthetic oligonucleotide
  Sense strand starting at position 2962 of SEQ ID NO: 584961
aggaaagacucagaaauac

SEQ ID NO: 602661 - RNA, 19 nt, Artificial Sequence
  Description of Artificial Sequence: Synthetic oligonucleotide
  Antisense strand to SEQ ID NO: 602660
guauuucugagucuuuccu

SEQ ID NO: 602662 - RNA, 19 nt, Artificial Sequence
  Description of Artificial Sequence: Synthetic oligonucleotide
  Sense strand starting at position 3006 of SEQ ID NO: 584961
uggguagauaguggugaau

SEQ ID NO: 602663 - RNA, 19 nt, Artificial Sequence
  Description of Artificial Sequence: Synthetic oligonucleotide
  Antisense strand to SEQ ID NO: 602662
auucaccacuaucuaccca

SEQ ID NO: 602664 - RNA, 19 nt, Artificial Sequence
  Description of Artificial Sequence: Synthetic oligonucleotide
  Sense strand starting at position 3009 of SEQ ID NO: 584961
guagauaguggugaauuaa

SEQ ID NO: 602665 - RNA, 19 nt, Artificial Sequence
  Description of Artificial Sequence: Synthetic oligonucleotide
  Antisense strand to SEQ ID NO: 602664
uuaauucaccacuaucuac

SEQ ID NO: 602666 - RNA, 19 nt, Artificial Sequence
  Description of Artificial Sequence: Synthetic oligonucleotide
  Sense strand starting at position 3194 of SEQ ID NO: 584961
agauuugguuaucaauuag

SEQ ID NO: 602667 - RNA, 19 nt, Artificial Sequence
  Description of Artificial Sequence: Synthetic oligonucleotide
  Antisense strand to SEQ ID NO: 602666
cuaauugauaaccaaaucu

SEQ ID NO: 602668 - RNA, 19 nt, Artificial Sequence
  Description of Artificial Sequence: Synthetic oligonucleotide
  Sense strand starting at position 3294 of SEQ ID NO: 584961
gccuuuguccauuagggaa

SEQ ID NO: 602669 - RNA, 19 nt, Artificial Sequence
  Description of Artificial Sequence: Synthetic oligonucleotide
  Antisense strand to SEQ ID NO: 602668
uucccuaauggacaaaggc

SEQ ID NO: 602670 - RNA, 19 nt, Artificial Sequence
  Description of Artificial Sequence: Synthetic oligonucleotide
  Sense strand starting at position 3325 of SEQ ID NO: 584961
cuccucagauguguugaga

SEQ ID NO: 602671 - RNA, 19 nt, Artificial Sequence
  Description of Artificial Sequence: Synthetic oligonucleotide
  Antisense strand to SEQ ID NO: 602670
ucucaacacaucugaggag

SEQ ID NO: 602672 - RNA, 19 nt, Artificial Sequence
  Description of Artificial Sequence: Synthetic oligonucleotide
  Sense strand starting at position 3708 of SEQ ID NO: 584961
auaacagauuugggagaca

SEQ ID NO: 602673 - RNA, 19 nt, Artificial Sequence
  Description of Artificial Sequence: Synthetic oligonucleotide
  Antisense strand to SEQ ID NO: 602672
ugucucccaaaucuguuau

SEQ ID NO: 602674 - RNA, 19 nt, Artificial Sequence
  Description of Artificial Sequence: Synthetic oligonucleotide
  Sense strand starting at position 3803 of SEQ ID NO: 584961
agugguaacaaaggaguaa

SEQ ID NO: 602675 - RNA, 19 nt, Artificial Sequence
  Description of Artificial Sequence: Synthetic oligonucleotide
  Antisense strand to SEQ ID NO: 602674
uuacuccuuuguuaccacu

SEQ ID NO: 602676 - RNA, 19 nt, Artificial Sequence
  Description of Artificial Sequence: Synthetic oligonucleotide
  Sense strand starting at position 3895 of SEQ ID NO: 584961
ucugcuaucugacugaauu

SEQ ID NO: 602677 - RNA, 19 nt, Artificial Sequence
  Description of Artificial Sequence: Synthetic oligonucleotide
  Antisense strand to SEQ ID NO: 602676
aauucagucagauagcaga

SEQ ID NO: 602678 - RNA, 19 nt, Artificial Sequence
  Description of Artificial Sequence: Synthetic oligonucleotide
  Sense strand starting at position 3982 of SEQ ID NO: 584961
gugagucaacaguauauca

SEQ ID NO: 602679 - RNA, 19 nt, Artificial Sequence
  Description of Artificial Sequence: Synthetic oligonucleotide
  Antisense strand to SEQ ID NO: 602678
ugauauacuguugacucac

SEQ ID NO: 602680 - RNA, 19 nt, Artificial Sequence
  Description of Artificial Sequence: Synthetic oligonucleotide
  Sense strand starting at position 95 of SEQ ID NO: 584962
agaauugcauuauucgaaa

SEQ ID NO: 602681 - RNA, 19 nt, Artificial Sequence
  Description of Artificial Sequence: Synthetic oligonucleotide
  Antisense strand to SEQ ID NO: 602680
uuucgaauaaugcaauucu

SEQ ID NO: 602682 - RNA, 19 nt, Artificial Sequence
  Description of Artificial Sequence: Synthetic oligonucleotide
  Sense strand starting at position 295 of SEQ ID NO: 584962
ggagcaagguuacuuaaca

SEQ ID NO: 602683 - RNA, 19 nt, Artificial Sequence
  Description of Artificial Sequence: Synthetic oligonucleotide
  Antisense strand to SEQ ID NO: 602682
uguuaaguaaccuugcucc

SEQ ID NO: 602684 - RNA, 19 nt, Artificial Sequence
  Description of Artificial Sequence: Synthetic oligonucleotide
  Sense strand starting at position 383 of SEQ ID NO: 584962
gcagaauguccauauaacu

SEQ ID NO: 602685 - RNA, 19 nt, Artificial Sequence
  Description of Artificial Sequence: Synthetic oligonucleotide
  Antisense strand to SEQ ID NO: 602684
aguuauauggacauucugc

SEQ ID NO: 602686 - RNA, 19 nt, Artificial Sequence
  Description of Artificial Sequence: Synthetic oligonucleotide
  Sense strand starting at position 570 of SEQ ID NO: 584962
auggcuguccgauacaaac

SEQ ID NO: 602687 - RNA, 19 nt, Artificial Sequence
  Description of Artificial Sequence: Synthetic oligonucleotide
  Antisense strand to SEQ ID NO: 602686
guuuguaucggacagccau

SEQ ID NO: 602688 - RNA, 19 nt, Artificial Sequence
  Description of Artificial Sequence: Synthetic oligonucleotide
  Sense strand starting at position 1320 of SEQ ID NO: 584962
ggcgcugucccguuccuua

SEQ ID NO: 602689 - RNA, 19 nt, Artificial Sequence
  Description of Artificial Sequence: Synthetic oligonucleotide
  Antisense strand to SEQ ID NO: 602688
uaaggaacgggacagcgcc

SEQ ID NO: 602690 - RNA, 19 nt, Artificial Sequence
  Description of Artificial Sequence: Synthetic oligonucleotide
  Sense strand starting at position 1470 of SEQ ID NO: 584962
gcuucuucggcggcggaaa

SEQ ID NO: 602691 - RNA, 19 nt, Artificial Sequence
  Description of Artificial Sequence: Synthetic oligonucleotide
  Antisense strand to SEQ ID NO: 602690
uuuccgccgccgaagaagc

SEQ ID NO: 602692 - RNA, 19 nt, Artificial Sequence
  Description of Artificial Sequence: Synthetic oligonucleotide
  Sense strand starting at position 2047 of SEQ ID NO: 584962
ugugaagacacguggaaga

SEQ ID NO: 602693 - RNA, 19 nt, Artificial Sequence
  Description of Artificial Sequence: Synthetic oligonucleotide
  Antisense strand to SEQ ID NO: 602692
ucuuccacgugucuucaca

SEQ ID NO: 602694 - RNA, 19 nt, Artificial Sequence
  Description of Artificial Sequence: Synthetic oligonucleotide
  Sense strand starting at position 2081 of SEQ ID NO: 584962
acaaccgcucgagaugaaa

SEQ ID NO: 602695 - RNA, 19 nt, Artificial Sequence
  Description of Artificial Sequence: Synthetic oligonucleotide
  Antisense strand to SEQ ID NO: 602694
uuucaucucgagcgguugu

SEQ ID NO: 602696 - RNA, 19 nt, Artificial Sequence
  Description of Artificial Sequence: Synthetic oligonucleotide
  Sense strand starting at position 2131 of SEQ ID NO: 584962
ccagccucccuuggaauua

SEQ ID NO: 602697 - RNA, 19 nt, Artificial Sequence
  Description of Artificial Sequence: Synthetic oligonucleotide
  Antisense strand to SEQ ID NO: 602696
uaauuccaagggaggcugg

SEQ ID NO: 602698 - RNA, 19 nt, Artificial Sequence
  Description of Artificial Sequence: Synthetic oligonucleotide
  Sense strand starting at position 2144 of SEQ ID NO: 584962
gaauuaggauugggauuua

SEQ ID NO: 602699 - RNA, 19 nt, Artificial Sequence
  Description of Artificial Sequence: Synthetic oligonucleotide
  Antisense strand to SEQ ID NO: 602698
uaaaucccaauccuaauuc

SEQ ID NO: 602700 - RNA, 19 nt, Artificial Sequence
  Description of Artificial Sequence: Synthetic oligonucleotide
  Sense strand starting at position 2554 of SEQ ID NO: 584962
uggcaauauggugaugcuu

SEQ ID NO: 602701 - RNA, 19 nt, Artificial Sequence
  Description of Artificial Sequence: Synthetic oligonucleotide
  Antisense strand to SEQ ID NO: 602700
aagcaucaccauauugcca

SEQ ID NO: 602702 - RNA, 19 nt, Artificial Sequence
  Description of Artificial Sequence: Synthetic oligonucleotide
  Sense strand starting at position 2586 of SEQ ID NO: 584962
acgaacuaguucguauaaa

SEQ ID NO: 602703 - RNA, 19 nt, Artificial Sequence
  Description of Artificial Sequence: Synthetic oligonucleotide
  Antisense strand to SEQ ID NO: 602702
uuuauacgaacuaguucgu

SEQ ID NO: 602704 - RNA, 19 nt, Artificial Sequence
  Description of Artificial Sequence: Synthetic oligonucleotide
  Sense strand starting at position 2712 of SEQ ID NO: 584962
uuuccuguucuggaaucuu

SEQ ID NO: 602705 - RNA, 19 nt, Artificial Sequence
  Description of Artificial Sequence: Synthetic oligonucleotide
  Antisense strand to SEQ ID NO: 602704
aagauuccagaacaggaaa

SEQ ID NO: 602706 - RNA, 19 nt, Artificial Sequence
  Description of Artificial Sequence: Synthetic oligonucleotide
  Sense strand starting at position 2720 of SEQ ID NO: 584962
ucuggaaucuugcuaacaa

SEQ ID NO: 602707 - RNA, 19 nt, Artificial Sequence
  Description of Artificial Sequence: Synthetic oligonucleotide
  Antisense strand to SEQ ID NO: 602706
uuguuagcaagauuccaga

SEQ ID NO: 602708 - RNA, 19 nt, Artificial Sequence
  Description of Artificial Sequence: Synthetic oligonucleotide
  Sense strand starting at position 2826 of SEQ ID NO: 584962
uguguucuaucacuuacca

SEQ ID NO: 602709 - RNA, 19 nt, Artificial Sequence
  Description of Artificial Sequence: Synthetic oligonucleotide
  Antisense strand to SEQ ID NO: 602708
ugguaagugauagaacaca

SEQ ID NO: 602710 - RNA, 19 nt, Artificial Sequence
  Description of Artificial Sequence: Synthetic oligonucleotide
  Sense strand starting at position 2854 of SEQ ID NO: 584962
uguaauuuaucugauugga

SEQ ID NO: 602711 - RNA, 19 nt, Artificial Sequence
  Description of Artificial Sequence: Synthetic oligonucleotide
  Antisense strand to SEQ ID NO: 602710
uccaaucagauaaauuaca

SEQ ID NO: 602712 - RNA, 19 nt, Artificial Sequence
  Description of Artificial Sequence: Synthetic oligonucleotide
  Sense strand starting at position 2924 of SEQ ID NO: 584962
uguaauguuagccaagggu

SEQ ID NO: 602713 - RNA, 19 nt, Artificial Sequence
  Description of Artificial Sequence: Synthetic oligonucleotide
  Antisense strand to SEQ ID NO: 602712
acccuuggcuaacauuaca

SEQ ID NO: 602714 - RNA, 19 nt, Artificial Sequence
  Description of Artificial Sequence: Synthetic oligonucleotide
  Sense strand starting at position 2976 of SEQ ID NO: 584962
augaaagacgaaugugauu

SEQ ID NO: 602715 - RNA, 19 nt, Artificial Sequence
  Description of Artificial Sequence: Synthetic oligonucleotide
  Antisense strand to SEQ ID NO: 602714
aaucacauucgucuuucau

SEQ ID NO: 602716 - RNA, 19 nt, Artificial Sequence
  Description of Artificial Sequence: Synthetic oligonucleotide
  Sense strand starting at position 2981 of SEQ ID NO: 584962
agacgaaugugauugguuc

SEQ ID NO: 602717 - RNA, 19 nt, Artificial Sequence
  Description of Artificial Sequence: Synthetic oligonucleotide
  Antisense strand to SEQ ID NO: 602716
gaaccaaucacauucgucu

SEQ ID NO: 602718 - RNA, 19 nt, Artificial Sequence
  Description of Artificial Sequence: Synthetic oligonucleotide
  Sense strand starting at position 2985 of SEQ ID NO: 584962
gaaugugauugguuccuuu

SEQ ID NO: 602719 - RNA, 19 nt, Artificial Sequence
  Description of Artificial Sequence: Synthetic oligonucleotide
  Antisense strand to SEQ ID NO: 602718
aaaggaaccaaucacauuc

SEQ ID NO: 602720 - RNA, 19 nt, Artificial Sequence
  Description of Artificial Sequence: Synthetic oligonucleotide
  Sense strand starting at position 3090 of SEQ ID NO: 584962
gcuauagcacuauguauag

SEQ ID NO: 602721 - RNA, 19 nt, Artificial Sequence
  Description of Artificial Sequence: Synthetic oligonucleotide
  Antisense strand to SEQ ID NO: 602720
cuauacauagugcuauagc

SEQ ID NO: 602722 - RNA, 19 nt, Artificial Sequence
  Description of Artificial Sequence: Synthetic oligonucleotide
  Sense strand starting at position 3204 of SEQ ID NO: 584962
agaaauaucuuggccuuug

SEQ ID NO: 602723 - RNA, 19 nt, Artificial Sequence
  Description of Artificial Sequence: Synthetic oligonucleotide
  Antisense strand to SEQ ID NO: 602722
caaaggccaagauauuucu

SEQ ID NO: 602724 - RNA, 19 nt, Artificial Sequence
  Description of Artificial Sequence: Synthetic oligonucleotide
  Sense strand starting at position 3269 of SEQ ID NO: 584962
ucuaaacaguguuuaaaga

SEQ ID NO: 602725 - RNA, 19 nt, Artificial Sequence
  Description of Artificial Sequence: Synthetic oligonucleotide
  Antisense strand to SEQ ID NO: 602724
ucuuuaaacacuguuuaga

SEQ ID NO: 602726 - RNA, 19 nt, Artificial Sequence
  Description of Artificial Sequence: Synthetic oligonucleotide
  Sense strand starting at position 3355 of SEQ ID NO: 584962
aguacaugcgaaggugaaa

SEQ ID NO: 602727 - RNA, 19 nt, Artificial Sequence
  Description of Artificial Sequence: Synthetic oligonucleotide
  Antisense strand to SEQ ID NO: 602726
uuucaccuucgcauguacu

SEQ ID NO: 602728 - RNA, 19 nt, Artificial Sequence
  Description of Artificial Sequence: Synthetic oligonucleotide
  Sense strand starting at position 3439 of SEQ ID NO: 584962
ggcacuuggcaccaaauau

SEQ ID NO: 602729 - RNA, 19 nt, Artificial Sequence
  Description of Artificial Sequence: Synthetic oligonucleotide
  Antisense strand to SEQ ID NO: 602728
auauuuggugccaagugcc

SEQ ID NO: 602730 - RNA, 19 nt, Artificial Sequence
  Description of Artificial Sequence: Synthetic oligonucleotide
  Sense strand starting at position 3468 of SEQ ID NO: 584962
ugucccuaguaauuaaacu

SEQ ID NO: 602731 - RNA, 19 nt, Artificial Sequence
  Description of Artificial Sequence: Synthetic oligonucleotide
  Antisense strand to SEQ ID NO: 602730
aguuuaauuacuagggaca

SEQ ID NO: 602732 - RNA, 19 nt, Artificial Sequence
  Description of Artificial Sequence: Synthetic oligonucleotide
  Sense strand starting at position 3478 of SEQ ID NO: 584962
aauuaaacuugggaggaua

SEQ ID NO: 602733 - RNA, 19 nt, Artificial Sequence
  Description of Artificial Sequence: Synthetic oligonucleotide
  Antisense strand to SEQ ID NO: 602732
uauccucccaaguuuaauu

SEQ ID NO: 602734 - RNA, 19 nt, Artificial Sequence
  Description of Artificial Sequence: Synthetic oligonucleotide
  Sense strand starting at position 3534 of SEQ ID NO: 584962
ugagaauauuauguugcua

SEQ ID NO: 602735 - RNA, 19 nt, Artificial Sequence
  Description of Artificial Sequence: Synthetic oligonucleotide
  Antisense strand to SEQ ID NO: 602734
uagcaacauaauauucuca

SEQ ID NO: 602736 - RNA, 19 nt, Artificial Sequence
  Description of Artificial Sequence: Synthetic oligonucleotide
  Sense strand starting at position 3631 of SEQ ID NO: 584962
augauauguacaugguaug

SEQ ID NO: 602737 - RNA, 19 nt, Artificial Sequence
  Description of Artificial Sequence: Synthetic oligonucleotide
  Antisense strand to SEQ ID NO: 602736
cauaccauguacauaucau

SEQ ID NO: 602738 - RNA, 19 nt, Artificial Sequence
  Description of Artificial Sequence: Synthetic oligonucleotide
  Sense strand starting at position 3632 of SEQ ID NO: 584962
ugauauguacaugguauga

SEQ ID NO: 602739 - RNA, 19 nt, Artificial Sequence
  Description of Artificial Sequence: Synthetic oligonucleotide
  Antisense strand to SEQ ID NO: 602738
ucauaccauguacauauca

SEQ ID NO: 602740 - RNA, 19 nt, Artificial Sequence
  Description of Artificial Sequence: Synthetic oligonucleotide
  Sense strand starting at position 3636 of SEQ ID NO: 584962
auguacaugguaugauaca

SEQ ID NO: 602741 - RNA, 19 nt, Artificial Sequence
  Description of Artificial Sequence: Synthetic oligonucleotide
  Antisense strand to SEQ ID NO: 602740
uguaucauaccauguacau

SEQ ID NO: 602742 - RNA, 19 nt, Artificial Sequence
  Description of Artificial Sequence: Synthetic oligonucleotide
  Sense strand starting at position 3645 of SEQ ID NO: 584962
guaugauacagccaugguu

SEQ ID NO: 602743 - RNA, 19 nt, Artificial Sequence
  Description of Artificial Sequence: Synthetic oligonucleotide
  Antisense strand to SEQ ID NO: 602742
aaccauggcuguaucauac

SEQ ID NO: 602744 - RNA, 19 nt, Artificial Sequence
  Description of Artificial Sequence: Synthetic oligonucleotide
  Sense strand starting at position 3802 of SEQ ID NO: 584962
agcaaagacaguuaucguu

SEQ ID NO: 602745 - RNA, 19 nt, Artificial Sequence
  Description of Artificial Sequence: Synthetic oligonucleotide
  Antisense strand to SEQ ID NO: 602744
aacgauaacugucuuugcu

SEQ ID NO: 602746 - RNA, 19 nt, Artificial Sequence
  Description of Artificial Sequence: Synthetic oligonucleotide
  Sense strand starting at position 3804 of SEQ ID NO: 584962
caaagacaguuaucguuga

SEQ ID NO: 602747 - RNA, 19 nt, Artificial Sequence
  Description of Artificial Sequence: Synthetic oligonucleotide
  Antisense strand to SEQ ID NO: 602746
ucaacgauaacugucuuug

SEQ ID NO: 602748 - RNA, 19 nt, Artificial Sequence
  Description of Artificial Sequence: Synthetic oligonucleotide
  Sense strand starting at position 3808 of SEQ ID NO: 584962
gacaguuaucguugaaccu

SEQ ID NO: 602749 - RNA, 19 nt, Artificial Sequence
  Description of Artificial Sequence: Synthetic oligonucleotide
  Antisense strand to SEQ ID NO: 602748
agguucaacgauaacuguc

SEQ ID NO: 602750 - RNA, 19 nt, Artificial Sequence
  Description of Artificial Sequence: Synthetic oligonucleotide
  Sense strand starting at position 3847 of SEQ ID NO: 584962
aguuguucugugcagauau

SEQ ID NO: 602751 - RNA, 19 nt, Artificial Sequence
  Description of Artificial Sequence: Synthetic oligonucleotide
  Antisense strand to SEQ ID NO: 602750
auaucugcacagaacaacu

SEQ ID NO: 602752 - RNA, 19 nt, Artificial Sequence
  Description of Artificial Sequence: Synthetic oligonucleotide
  Sense strand starting at position 3849 of SEQ ID NO: 584962
uuguucugugcagauauaa

SEQ ID NO: 602753 - RNA, 19 nt, Artificial Sequence
  Description of Artificial Sequence: Synthetic oligonucleotide
  Antisense strand to SEQ ID NO: 602752
uuauaucugcacagaacaa

SEQ ID NO: 602754 - RNA, 19 nt, Artificial Sequence
  Description of Artificial Sequence: Synthetic oligonucleotide
  Sense strand starting at position 3918 of SEQ ID NO: 584962
guauaaguaucauugcuca

SEQ ID NO: 602755 - RNA, 19 nt, Artificial Sequence
  Description of Artificial Sequence: Synthetic oligonucleotide
  Antisense strand to SEQ ID NO: 602754
ugagcaaugauacuuauac

SEQ ID NO: 602756 - RNA, 19 nt, Artificial Sequence
  Description of Artificial Sequence: Synthetic oligonucleotide
  Sense strand starting at position 3922 of SEQ ID NO: 584962
aaguaucauugcucagaug

SEQ ID NO: 602757 - RNA, 19 nt, Artificial Sequence
  Description of Artificial Sequence: Synthetic oligonucleotide
  Antisense strand to SEQ ID NO: 602756
caucugagcaaugauacuu

SEQ ID NO: 602758 - RNA, 19 nt, Artificial Sequence
  Description of Artificial Sequence: Synthetic oligonucleotide
  Sense strand starting at position 3923 of SEQ ID NO: 584962
aguaucauugcucagauga

SEQ ID NO: 602759 - RNA, 19 nt, Artificial Sequence
  Description of Artificial Sequence: Synthetic oligonucleotide
  Antisense strand to SEQ ID NO: 602758
ucaucugagcaaugauacu

SEQ ID NO: 602760 - RNA, 19 nt, Artificial Sequence
  Description of Artificial Sequence: Synthetic oligonucleotide
  Sense strand starting at position 285 of SEQ ID NO: 584963
cuuccaaggccuuggauua

SEQ ID NO: 602761 - RNA, 19 nt, Artificial Sequence
  Description of Artificial Sequence: Synthetic oligonucleotide
  Antisense strand to SEQ ID NO: 602760
uaauccaaggccuuggaag

SEQ ID NO: 602762 - RNA, 19 nt, Artificial Sequence
  Description of Artificial Sequence: Synthetic oligonucleotide
  Sense strand starting at position 286 of SEQ ID NO: 584963
uuccaaggccuuggauuaa

SEQ ID NO: 602763 - RNA, 19 nt, Artificial Sequence
  Description of Artificial Sequence: Synthetic oligonucleotide
  Antisense strand to SEQ ID NO: 602762
uuaauccaaggccuuggaa

SEQ ID NO: 602764 - RNA, 19 nt, Artificial Sequence
  Description of Artificial Sequence: Synthetic oligonucleotide
  Sense strand starting at position 304 of SEQ ID NO: 584963
aguugugugguccaggaua

SEQ ID NO: 602765 - RNA, 19 nt, Artificial Sequence
  Description of Artificial Sequence: Synthetic oligonucleotide
  Antisense strand to SEQ ID NO: 602764
uauccuggaccacacaacu

SEQ ID NO: 602766 - RNA, 19 nt, Artificial Sequence
  Description of Artificial Sequence: Synthetic oligonucleotide
  Sense strand starting at position 560 of SEQ ID NO: 584963
uugaaagcuauguguugaa

SEQ ID NO: 602767 - RNA, 19 nt, Artificial Sequence
  Description of Artificial Sequence: Synthetic oligonucleotide
  Antisense strand to SEQ ID NO: 602766
uucaacacauagcuuucaa

SEQ ID NO: 602768 - RNA, 19 nt, Artificial Sequence
  Description of Artificial Sequence: Synthetic oligonucleotide
  Sense strand starting at position 564 of SEQ ID NO: 584963
aagcuauguguugaaucaa

SEQ ID NO: 602769 - RNA, 19 nt, Artificial Sequence
  Description of Artificial Sequence: Synthetic oligonucleotide
  Antisense strand to SEQ ID NO: 602768
uugauucaacacauagcuu

SEQ ID NO: 602770 - RNA, 19 nt, Artificial Sequence
  Description of Artificial Sequence: Synthetic oligonucleotide
  Sense strand starting at position 1105 of SEQ ID NO: 584963
gguagcgaccuccaugaaa

SEQ ID NO: 602771 - RNA, 19 nt, Artificial Sequence
  Description of Artificial Sequence: Synthetic oligonucleotide
  Antisense strand to SEQ ID NO: 602770
uuucauggaggucgcuacc

SEQ ID NO: 602772 - RNA, 19 nt, Artificial Sequence
  Description of Artificial Sequence: Synthetic oligonucleotide
  Sense strand starting at position 1118 of SEQ ID NO: 584963
augaaaucaugagaacauu

SEQ ID NO: 602773 - RNA, 19 nt, Artificial Sequence
  Description of Artificial Sequence: Synthetic oligonucleotide
  Antisense strand to SEQ ID NO: 602772
aauguucucaugauuucau

SEQ ID NO: 602774 - RNA, 19 nt, Artificial Sequence
  Description of Artificial Sequence: Synthetic oligonucleotide
  Sense strand starting at position 1222 of SEQ ID NO: 584963
ucauuaauguuuguccaga

SEQ ID NO: 602775 - RNA, 19 nt, Artificial Sequence
  Description of Artificial Sequence: Synthetic oligonucleotide
  Antisense strand to SEQ ID NO: 602774
ucuggacaaacauuaauga

SEQ ID NO: 602776 - RNA, 19 nt, Artificial Sequence
  Description of Artificial Sequence: Synthetic oligonucleotide
  Sense strand starting at position 1223 of SEQ ID NO: 584963
cauuaauguuuguccagag

SEQ ID NO: 602777 - RNA, 19 nt, Artificial Sequence
  Description of Artificial Sequence: Synthetic oligonucleotide
  Antisense strand to SEQ ID NO: 602776
cucuggacaaacauuaaug

SEQ ID NO: 602778 - RNA, 19 nt, Artificial Sequence
  Description of Artificial Sequence: Synthetic oligonucleotide
  Sense strand starting at position 1268 of SEQ ID NO: 584963
cuuuguaaaguaugucaaa

SEQ ID NO: 602779 - RNA, 19 nt, Artificial Sequence
  Description of Artificial Sequence: Synthetic oligonucleotide
  Antisense strand to SEQ ID NO: 602778
uuugacauacuuuacaaag

SEQ ID NO: 602780 - RNA, 19 nt, Artificial Sequence
  Description of Artificial Sequence: Synthetic oligonucleotide
  Sense strand starting at position 1563 of SEQ ID NO: 584963
aggaaagacuuuccagcuu

SEQ ID NO: 602781 - RNA, 19 nt, Artificial Sequence
  Description of Artificial Sequence: Synthetic oligonucleotide
  Antisense strand to SEQ ID NO: 602780
aagcuggaaagucuuuccu

SEQ ID NO: 602782 - RNA, 19 nt, Artificial Sequence
  Description of Artificial Sequence: Synthetic oligonucleotide
  Sense strand starting at position 1617 of SEQ ID NO: 584963
guaaaugcagaguaacagu

SEQ ID NO: 602783 - RNA, 19 nt, Artificial Sequence
  Description of Artificial Sequence: Synthetic oligonucleotide
  Antisense strand to SEQ ID NO: 602782
acuguuacucugcauuuac

SEQ ID NO: 602784 - RNA, 19 nt, Artificial Sequence
  Description of Artificial Sequence: Synthetic oligonucleotide
  Sense strand starting at position 1788 of SEQ ID NO: 584963
ggguguuuccuugaacuuu

SEQ ID NO: 602785 - RNA, 19 nt, Artificial Sequence
  Description of Artificial Sequence: Synthetic oligonucleotide
  Antisense strand to SEQ ID NO: 602784
aaaguucaaggaaacaccc

SEQ ID NO: 602786 - RNA, 19 nt, Artificial Sequence
  Description of Artificial Sequence: Synthetic oligonucleotide
  Sense strand starting at position 1814 of SEQ ID NO: 584963
gcuucuaagcaagagguau

SEQ ID NO: 602787 - RNA, 19 nt, Artificial Sequence
  Description of Artificial Sequence: Synthetic oligonucleotide
  Antisense strand to SEQ ID NO: 602786
auaccucuugcuuagaagc

SEQ ID NO: 602788 - RNA, 19 nt, Artificial Sequence
  Description of Artificial Sequence: Synthetic oligonucleotide
  Sense strand starting at position 1882 of SEQ ID NO: 584963
aauaaaucaggguguaguu

SEQ ID NO: 602789 - RNA, 19 nt, Artificial Sequence
  Description of Artificial Sequence: Synthetic oligonucleotide
  Antisense strand to SEQ ID NO: 602788
aacuacacccugauuuauu

SEQ ID NO: 602790 - RNA, 19 nt, Artificial Sequence
  Description of Artificial Sequence: Synthetic oligonucleotide
  Sense strand starting at position 1900 of SEQ ID NO: 584963
uugucaucaucuuuaagag

SEQ ID NO: 602791 - RNA, 19 nt, Artificial Sequence
  Description of Artificial Sequence: Synthetic oligonucleotide
  Antisense strand to SEQ ID NO: 602790
cucuuaaagaugaugacaa

SEQ ID NO: 602792 - RNA, 19 nt, Artificial Sequence
  Description of Artificial Sequence: Synthetic oligonucleotide
  Sense strand starting at position 2021 of SEQ ID NO: 584963
uuaaguuaagcucaaguaa

SEQ ID NO: 602793 - RNA, 19 nt, Artificial Sequence
  Description of Artificial Sequence: Synthetic oligonucleotide
  Antisense strand to SEQ ID NO: 602792
uuacuugagcuuaacuuaa

SEQ ID NO: 602794 - RNA, 19 nt, Artificial Sequence
  Description of Artificial Sequence: Synthetic oligonucleotide
  Sense strand starting at position 2260 of SEQ ID NO: 584963
ggauguucuccauaggccu

SEQ ID NO: 602795 - RNA, 19 nt, Artificial Sequence
  Description of Artificial Sequence: Synthetic oligonucleotide
  Antisense strand to SEQ ID NO: 602794
aggccuauggagaacaucc

SEQ ID NO: 602796 - RNA, 19 nt, Artificial Sequence
  Description of Artificial Sequence: Synthetic oligonucleotide
  Sense strand starting at position 2267 of SEQ ID NO: 584963
cuccauaggccuuaugaca

SEQ ID NO: 602797 - RNA, 19 nt, Artificial Sequence
  Description of Artificial Sequence: Synthetic oligonucleotide
  Antisense strand to SEQ ID NO: 602796
ugucauaaggccuauggag

SEQ ID NO: 602798 - RNA, 19 nt, Artificial Sequence
  Description of Artificial Sequence: Synthetic oligonucleotide
  Sense strand starting at position 2289 of SEQ ID NO: 584963
caagaaguaucugucagga

SEQ ID NO: 602799 - RNA, 19 nt, Artificial Sequence
  Description of Artificial Sequence: Synthetic oligonucleotide
  Antisense strand to SEQ ID NO: 602798
uccugacagauacuucuug

SEQ ID NO: 602800 - RNA, 19 nt, Artificial Sequence
  Description of Artificial Sequence: Synthetic oligonucleotide
  Sense strand starting at position 2303 of SEQ ID NO: 584963
caggaugcaguuugaaaga

SEQ ID NO: 602801 - RNA, 19 nt, Artificial Sequence
  Description of Artificial Sequence: Synthetic oligonucleotide
  Antisense strand to SEQ ID NO: 602800
ucuuucaaacugcauccug

SEQ ID NO: 602802 - RNA, 19 nt, Artificial Sequence
  Description of Artificial Sequence: Synthetic oligonucleotide
  Sense strand starting at position 2316 of SEQ ID NO: 584963
gaaagacaucauugugcaa

SEQ ID NO: 602803 - RNA, 19 nt, Artificial Sequence
  Description of Artificial Sequence: Synthetic oligonucleotide
  Antisense strand to SEQ ID NO: 602802
uugcacaaugaugucuuuc

SEQ ID NO: 602804 - RNA, 19 nt, Artificial Sequence
  Description of Artificial Sequence: Synthetic oligonucleotide
  Sense strand starting at position 2320 of SEQ ID NO: 584963
gacaucauugugcaagugu

SEQ ID NO: 602805 - RNA, 19 nt, Artificial Sequence
  Description of Artificial Sequence: Synthetic oligonucleotide
  Antisense strand to SEQ ID NO: 602804
acacuugcacaaugauguc

SEQ ID NO: 602806 - RNA, 19 nt, Artificial Sequence
  Description of Artificial Sequence: Synthetic oligonucleotide
  Sense strand starting at position 2393 of SEQ ID NO: 584963
ucaauaaagcauugggcau

SEQ ID NO: 602807 - RNA, 19 nt, Artificial Sequence
  Description of Artificial Sequence: Synthetic oligonucleotide
  Antisense strand to SEQ ID NO: 602806
augcccaaugcuuuauuga

SEQ ID NO: 602808 - RNA, 19 nt, Artificial Sequence
  Description of Artificial Sequence: Synthetic oligonucleotide
  Sense strand starting at position 2404 of SEQ ID NO: 584963
uugggcauuuauuacuaau

SEQ ID NO: 602809 - RNA, 19 nt, Artificial Sequence
  Description of Artificial Sequence: Synthetic oligonucleotide
  Antisense strand to SEQ ID NO: 602808
auuaguaauaaaugcccaa

SEQ ID NO: 602810 - RNA, 19 nt, Artificial Sequence
  Description of Artificial Sequence: Synthetic oligonucleotide
  Sense strand starting at position 2439 of SEQ ID NO: 584963
aggucagucuaaccaacau

SEQ ID NO: 602811 - RNA, 19 nt, Artificial Sequence
  Description of Artificial Sequence: Synthetic oligonucleotide
  Antisense strand to SEQ ID NO: 602810
auguugguuagacugaccu

SEQ ID NO: 602812 - RNA, 19 nt, Artificial Sequence
  Description of Artificial Sequence: Synthetic oligonucleotide
  Sense strand starting at position 2617 of SEQ ID NO: 584963
aguagaauuugggaaggca

SEQ ID NO: 602813 - RNA, 19 nt, Artificial Sequence
  Description of Artificial Sequence: Synthetic oligonucleotide
  Antisense strand to SEQ ID NO: 602812
ugccuucccaaauucuacu

SEQ ID NO: 602814 - RNA, 19 nt, Artificial Sequence
  Description of Artificial Sequence: Synthetic oligonucleotide
  Sense strand starting at position 2760 of SEQ ID NO: 584963
cuaugaucgcggaguguuu

SEQ ID NO: 602815 - RNA, 19 nt, Artificial Sequence
  Description of Artificial Sequence: Synthetic oligonucleotide
  Antisense strand to SEQ ID NO: 602814
aaacacuccgcgaucauag

SEQ ID NO: 602816 - RNA, 19 nt, Artificial Sequence
  Description of Artificial Sequence: Synthetic oligonucleotide
  Sense strand starting at position 2864 of SEQ ID NO: 584963
ucaaaugcccucgaugacu

SEQ ID NO: 602817 - RNA, 19 nt, Artificial Sequence
  Description of Artificial Sequence: Synthetic oligonucleotide
  Antisense strand to SEQ ID NO: 602816
agucaucgagggcauuuga

SEQ ID NO: 602818 - RNA, 19 nt, Artificial Sequence
  Description of Artificial Sequence: Synthetic oligonucleotide
  Sense strand starting at position 2872 of SEQ ID NO: 584963
ccucgaugacucugucaau

SEQ ID NO: 602819 - RNA, 19 nt, Artificial Sequence
  Description of Artificial Sequence: Synthetic oligonucleotide
  Antisense strand to SEQ ID NO: 602818
auugacagagucaucgagg

SEQ ID NO: 602820 - RNA, 19 nt, Artificial Sequence
  Description of Artificial Sequence: Synthetic oligonucleotide
  Sense strand starting at position 2873 of SEQ ID NO: 584963
cucgaugacucugucaaug

SEQ ID NO: 602821 - RNA, 19 nt, Artificial Sequence
  Description of Artificial Sequence: Synthetic oligonucleotide
  Antisense strand to SEQ ID NO: 602820
cauugacagagucaucgag

SEQ ID NO: 602822 - RNA, 19 nt, Artificial Sequence
  Description of Artificial Sequence: Synthetic oligonucleotide
  Sense strand starting at position 2878 of SEQ ID NO: 584963
ugacucugucaaugaaguu

SEQ ID NO: 602823 - RNA, 19 nt, Artificial Sequence
  Description of Artificial Sequence: Synthetic oligonucleotide
  Antisense strand to SEQ ID NO: 602822
aacuucauugacagaguca

SEQ ID NO: 602824 - RNA, 19 nt, Artificial Sequence
  Description of Artificial Sequence: Synthetic oligonucleotide
  Sense strand starting at position 2910 of SEQ ID NO: 584963
auaugugcuguuugaaaga

SEQ ID NO: 602825 - RNA, 19 nt, Artificial Sequence
  Description of Artificial Sequence: Synthetic oligonucleotide
  Antisense strand to SEQ ID NO: 602824
ucuuucaaacagcacauau

SEQ ID NO: 602826 - RNA, 19 nt, Artificial Sequence
  Description of Artificial Sequence: Synthetic oligonucleotide
  Sense strand starting at position 2988 of SEQ ID NO: 584963
uuaccuuuaugauugggaa

SEQ ID NO: 602827 - RNA, 19 nt, Artificial Sequence
  Description of Artificial Sequence: Synthetic oligonucleotide
  Antisense strand to SEQ ID NO: 602826
uucccaaucauaaagguaa

SEQ ID NO: 602828 - RNA, 19 nt, Artificial Sequence
  Description of Artificial Sequence: Synthetic oligonucleotide
  Sense strand starting at position 3167 of SEQ ID NO: 584963
agauguaucaucugagguc

SEQ ID NO: 602829 - RNA, 19 nt, Artificial Sequence
  Description of Artificial Sequence: Synthetic oligonucleotide
  Antisense strand to SEQ ID NO: 602828
gaccucagaugauacaucu

SEQ ID NO: 602830 - RNA, 19 nt, Artificial Sequence
  Description of Artificial Sequence: Synthetic oligonucleotide
  Sense strand starting at position 3478 of SEQ ID NO: 584963
ggucuugugaacuaaguug

SEQ ID NO: 602831 - RNA, 19 nt, Artificial Sequence
  Description of Artificial Sequence: Synthetic oligonucleotide
  Antisense strand to SEQ ID NO: 602830
caacuuaguucacaagacc

SEQ ID NO: 602832 - RNA, 19 nt, Artificial Sequence
  Description of Artificial Sequence: Synthetic oligonucleotide
  Sense strand starting at position 3586 of SEQ ID NO: 584963
cugaaaguguaugcuaacu

SEQ ID NO: 602833 - RNA, 19 nt, Artificial Sequence
  Description of Artificial Sequence: Synthetic oligonucleotide
  Antisense strand to SEQ ID NO: 602832
aguuagcauacacuuucag

SEQ ID NO: 602834 - RNA, 19 nt, Artificial Sequence
  Description of Artificial Sequence: Synthetic oligonucleotide
  Sense strand starting at position 3591 of SEQ ID NO: 584963
aguguaugcuaacucauaa

SEQ ID NO: 602835 - RNA, 19 nt, Artificial Sequence
  Description of Artificial Sequence: Synthetic oligonucleotide
  Antisense strand to SEQ ID NO: 602834
uuaugaguuagcauacacu

SEQ ID NO: 602836 - RNA, 19 nt, Artificial Sequence
  Description of Artificial Sequence: Synthetic oligonucleotide
  Sense strand starting at position 3653 of SEQ ID NO: 584963
ccaaauccauuugggaauu

SEQ ID NO: 602837 - RNA, 19 nt, Artificial Sequence
  Description of Artificial Sequence: Synthetic oligonucleotide
  Antisense strand to SEQ ID NO: 602836
aauucccaaauggauuugg

SEQ ID NO: 602838 - RNA, 19 nt, Artificial Sequence
  Description of Artificial Sequence: Synthetic oligonucleotide
  Sense strand starting at position 3818 of SEQ ID NO: 584963
gggcuuagauggcuagaca

SEQ ID NO: 602839 - RNA, 19 nt, Artificial Sequence
  Description of Artificial Sequence: Synthetic oligonucleotide
  Antisense strand to SEQ ID NO: 602838
ugucuagccaucuaagccc

SEQ ID NO: 602840 - RNA, 19 nt, Artificial Sequence
  Description of Artificial Sequence: Synthetic oligonucleotide
  Sense strand starting at position 195 of SEQ ID NO: 584964
ugaaggagucugggagagu

SEQ ID NO: 602841 - RNA, 19 nt, Artificial Sequence
  Description of Artificial Sequence: Synthetic oligonucleotide
  Antisense strand to SEQ ID NO: 602840
acucucccagacuccuuca

SEQ ID NO: 602842 - RNA, 19 nt, Artificial Sequence
  Description of Artificial Sequence: Synthetic oligonucleotide
  Sense strand starting at position 204 of SEQ ID NO: 584964
cugggagagucagaaauga

SEQ ID NO: 602843 - RNA, 19 nt, Artificial Sequence
  Description of Artificial Sequence: Synthetic oligonucleotide
  Antisense strand to SEQ ID NO: 602842
ucauuucugacucucccag

SEQ ID NO: 602844 - RNA, 19 nt, Artificial Sequence
  Description of Artificial Sequence: Synthetic oligonucleotide
  Sense strand starting at position 222 of SEQ ID NO: 584964
aggucaaaugucugggagu

SEQ ID NO: 602845 - RNA, 19 nt, Artificial Sequence
  Description of Artificial Sequence: Synthetic oligonucleotide
  Antisense strand to SEQ ID NO: 602844
acucccagacauuugaccu

SEQ ID NO: 602846 - RNA, 19 nt, Artificial Sequence
  Description of Artificial Sequence: Synthetic oligonucleotide
  Sense strand starting at position 223 of SEQ ID NO: 584964
ggucaaaugucugggagug

SEQ ID NO: 602847 - RNA, 19 nt, Artificial Sequence
  Description of Artificial Sequence: Synthetic oligonucleotide
  Antisense strand to SEQ ID NO: 602846
cacucccagacauuugacc

SEQ ID NO: 602848 - RNA, 19 nt, Artificial Sequence
  Description of Artificial Sequence: Synthetic oligonucleotide
  Sense strand starting at position 224 of SEQ ID NO: 584964
gucaaaugucugggagugu

SEQ ID NO: 602849 - RNA, 19 nt, Artificial Sequence
  Description of Artificial Sequence: Synthetic oligonucleotide
  Antisense strand to SEQ ID NO: 602848
acacucccagacauuugac

SEQ ID NO: 602850 - RNA, 19 nt, Artificial Sequence
  Description of Artificial Sequence: Synthetic oligonucleotide
  Sense strand starting at position 275 of SEQ ID NO: 584964
auggguuuccaggguauaa

SEQ ID NO: 602851 - RNA, 19 nt, Artificial Sequence
  Description of Artificial Sequence: Synthetic oligonucleotide
  Antisense strand to SEQ ID NO: 602850
uuauacccuggaaacccau

SEQ ID NO: 602852 - RNA, 19 nt, Artificial Sequence
  Description of Artificial Sequence: Synthetic oligonucleotide
  Sense strand starting at position 303 of SEQ ID NO: 584964
aagugagauaguuguacag

SEQ ID NO: 602853 - RNA, 19 nt, Artificial Sequence
  Description of Artificial Sequence: Synthetic oligonucleotide
  Antisense strand to SEQ ID NO: 602852
cuguacaacuaucucacuu

SEQ ID NO: 602854 - RNA, 19 nt, Artificial Sequence
  Description of Artificial Sequence: Synthetic oligonucleotide
  Sense strand starting at position 313 of SEQ ID NO: 584964
guuguacagggagguuuaa

SEQ ID NO: 602855 - RNA, 19 nt, Artificial Sequence
  Description of Artificial Sequence: Synthetic oligonucleotide
  Antisense strand to SEQ ID NO: 602854
uuaaaccucccuguacaac

SEQ ID NO: 602856 - RNA, 19 nt, Artificial Sequence
  Description of Artificial Sequence: Synthetic oligonucleotide
  Sense strand starting at position 597 of SEQ ID NO: 584964
gcugcagagguaugagaca

SEQ ID NO: 602857 - RNA, 19 nt, Artificial Sequence
  Description of Artificial Sequence: Synthetic oligonucleotide
  Antisense strand to SEQ ID NO: 602856
ugucucauaccucugcagc

SEQ ID NO: 602858 - RNA, 19 nt, Artificial Sequence
  Description of Artificial Sequence: Synthetic oligonucleotide
  Sense strand starting at position 606 of SEQ ID NO: 584964
guaugagacaucgagguaa

SEQ ID NO: 602859 - RNA, 19 nt, Artificial Sequence
  Description of Artificial Sequence: Synthetic oligonucleotide
  Antisense strand to SEQ ID NO: 602858
uuaccucgaugucucauac

SEQ ID NO: 602860 - RNA, 19 nt, Artificial Sequence
  Description of Artificial Sequence: Synthetic oligonucleotide
  Sense strand starting at position 930 of SEQ ID NO: 584964
aguggauugcuuugagaag

SEQ ID NO: 602861 - RNA, 19 nt, Artificial Sequence
  Description of Artificial Sequence: Synthetic oligonucleotide
  Antisense strand to SEQ ID NO: 602860
cuucucaaagcaauccacu

SEQ ID NO: 602862 - RNA, 19 nt, Artificial Sequence
  Description of Artificial Sequence: Synthetic oligonucleotide
  Sense strand starting at position 931 of SEQ ID NO: 584964
guggauugcuuugagaagg

SEQ ID NO: 602863 - RNA, 19 nt, Artificial Sequence
  Description of Artificial Sequence: Synthetic oligonucleotide
  Antisense strand to SEQ ID NO: 602862
ccuucucaaagcaauccac

SEQ ID NO: 602864 - RNA, 19 nt, Artificial Sequence
  Description of Artificial Sequence: Synthetic oligonucleotide
  Sense strand starting at position 1107 of SEQ ID NO: 584964
cccauuucugaguguucuc

SEQ ID NO: 602865 - RNA, 19 nt, Artificial Sequence
  Description of Artificial Sequence: Synthetic oligonucleotide
  Antisense strand to SEQ ID NO: 602864
gagaacacucagaaauggg

SEQ ID NO: 602866 - RNA, 19 nt, Artificial Sequence
  Description of Artificial Sequence: Synthetic oligonucleotide
  Sense strand starting at position 1112 of SEQ ID NO: 584964
uucugaguguucucuugac

SEQ ID NO: 602867 - RNA, 19 nt, Artificial Sequence
  Description of Artificial Sequence: Synthetic oligonucleotide
  Antisense strand to SEQ ID NO: 602866
gucaagagaacacucagaa

SEQ ID NO: 602868 - RNA, 19 nt, Artificial Sequence
  Description of Artificial Sequence: Synthetic oligonucleotide
  Sense strand starting at position 1152 of SEQ ID NO: 584964
caggguaaaugcuuaguaa

SEQ ID NO: 602869 - RNA, 19 nt, Artificial Sequence
  Description of Artificial Sequence: Synthetic oligonucleotide
  Antisense strand to SEQ ID NO: 602868
uuacuaagcauuuacccug

SEQ ID NO: 602870 - RNA, 19 nt, Artificial Sequence
  Description of Artificial Sequence: Synthetic oligonucleotide
  Sense strand starting at position 1153 of SEQ ID NO: 584964
aggguaaaugcuuaguaag

SEQ ID NO: 602871 - RNA, 19 nt, Artificial Sequence
  Description of Artificial Sequence: Synthetic oligonucleotide
  Antisense strand to SEQ ID NO: 602870
cuuacuaagcauuuacccu

SEQ ID NO: 602872 - RNA, 19 nt, Artificial Sequence
  Description of Artificial Sequence: Synthetic oligonucleotide
  Sense strand starting at position 1156 of SEQ ID NO: 584964
guaaaugcuuaguaagggu

SEQ ID NO: 602873 - RNA, 19 nt, Artificial Sequence
  Description of Artificial Sequence: Synthetic oligonucleotide
  Antisense strand to SEQ ID NO: 602872
acccuuacuaagcauuuac

SEQ ID NO: 602874 - RNA, 19 nt, Artificial Sequence
  Description of Artificial Sequence: Synthetic oligonucleotide
  Sense strand starting at position 1159 of SEQ ID NO: 584964
aaugcuuaguaaggguuaa

SEQ ID NO: 602875 - RNA, 19 nt, Artificial Sequence
  Description of Artificial Sequence: Synthetic oligonucleotide
  Antisense strand to SEQ ID NO: 602874
uuaacccuuacuaagcauu

SEQ ID NO: 602876 - RNA, 19 nt, Artificial Sequence
  Description of Artificial Sequence: Synthetic oligonucleotide
  Sense strand starting at position 1254 of SEQ ID NO: 584964
ugccuagucucauccuagu

SEQ ID NO: 602877 - RNA, 19 nt, Artificial Sequence
  Description of Artificial Sequence: Synthetic oligonucleotide
  Antisense strand to SEQ ID NO: 602876
acuaggaugagacuaggca

SEQ ID NO: 602878 - RNA, 19 nt, Artificial Sequence
  Description of Artificial Sequence: Synthetic oligonucleotide
  Sense strand starting at position 1562 of SEQ ID NO: 584964
gguggucacaccugaagag

SEQ ID NO: 602879 - RNA, 19 nt, Artificial Sequence
  Description of Artificial Sequence: Synthetic oligonucleotide
  Antisense strand to SEQ ID NO: 602878
cucuucaggugugaccacc

SEQ ID NO: 602880 - RNA, 19 nt, Artificial Sequence
  Description of Artificial Sequence: Synthetic oligonucleotide
  Sense strand starting at position 1651 of SEQ ID NO: 584964
cucgcuuaccuccagacaa

SEQ ID NO: 602881 - RNA, 19 nt, Artificial Sequence
  Description of Artificial Sequence: Synthetic oligonucleotide
  Antisense strand to SEQ ID NO: 602880
uugucuggagguaagcgag

SEQ ID NO: 602882 - RNA, 19 nt, Artificial Sequence
  Description of Artificial Sequence: Synthetic oligonucleotide
  Sense strand starting at position 1653 of SEQ ID NO: 584964
cgcuuaccuccagacaaga

SEQ ID NO: 602883 - RNA, 19 nt, Artificial Sequence
  Description of Artificial Sequence: Synthetic oligonucleotide
  Antisense strand to SEQ ID NO: 602882
ucuugucuggagguaagcg

SEQ ID NO: 602884 - RNA, 19 nt, Artificial Sequence
  Description of Artificial Sequence: Synthetic oligonucleotide
  Sense strand starting at position 2123 of SEQ ID NO: 584964
cccuguugauuguguguua

SEQ ID NO: 602885 - RNA, 19 nt, Artificial Sequence
  Description of Artificial Sequence: Synthetic oligonucleotide
  Antisense strand to SEQ ID NO: 602884
uaacacacaaucaacaggg

SEQ ID NO: 602886 - RNA, 19 nt, Artificial Sequence
  Description of Artificial Sequence: Synthetic oligonucleotide
  Sense strand starting at position 2124 of SEQ ID NO: 584964
ccuguugauuguguguuau

SEQ ID NO: 602887 - RNA, 19 nt, Artificial Sequence
  Description of Artificial Sequence: Synthetic oligonucleotide
  Antisense strand to SEQ ID NO: 602886
auaacacacaaucaacagg

SEQ ID NO: 602888 - RNA, 19 nt, Artificial Sequence
  Description of Artificial Sequence: Synthetic oligonucleotide
  Sense strand starting at position 2130 of SEQ ID NO: 584964
gauuguguguuauggugca

SEQ ID NO: 602889 - RNA, 19 nt, Artificial Sequence
  Description of Artificial Sequence: Synthetic oligonucleotide
  Antisense strand to SEQ ID NO: 602888
ugcaccauaacacacaauc

SEQ ID NO: 602890 - RNA, 19 nt, Artificial Sequence
  Description of Artificial Sequence: Synthetic oligonucleotide
  Sense strand starting at position 2134 of SEQ ID NO: 584964
guguguuauggugcagagu

SEQ ID NO: 602891 - RNA, 19 nt, Artificial Sequence
  Description of Artificial Sequence: Synthetic oligonucleotide
  Antisense strand to SEQ ID NO: 602890
acucugcaccauaacacac

SEQ ID NO: 602892 - RNA, 19 nt, Artificial Sequence
  Description of Artificial Sequence: Synthetic oligonucleotide
  Sense strand starting at position 2261 of SEQ ID NO: 584964
ggcacugagagauguggaa

SEQ ID NO: 602893 - RNA, 19 nt, Artificial Sequence
  Description of Artificial Sequence: Synthetic oligonucleotide
  Antisense strand to SEQ ID NO: 602892
uuccacaucucucagugcc

SEQ ID NO: 602894 - RNA, 19 nt, Artificial Sequence
  Description of Artificial Sequence: Synthetic oligonucleotide
  Sense strand starting at position 2958 of SEQ ID NO: 584964
agauucuccugccagcaaa

SEQ ID NO: 602895 - RNA, 19 nt, Artificial Sequence
  Description of Artificial Sequence: Synthetic oligonucleotide
  Antisense strand to SEQ ID NO: 602894
uuugcuggcaggagaaucu

SEQ ID NO: 602896 - RNA, 19 nt, Artificial Sequence
  Description of Artificial Sequence: Synthetic oligonucleotide
  Sense strand starting at position 2990 of SEQ ID NO: 584964
cagugucaucuagggcagu

SEQ ID NO: 602897 - RNA, 19 nt, Artificial Sequence
  Description of Artificial Sequence: Synthetic oligonucleotide
  Antisense strand to SEQ ID NO: 602896
acugcccuagaugacacug

SEQ ID NO: 602898 - RNA, 19 nt, Artificial Sequence
  Description of Artificial Sequence: Synthetic oligonucleotide
  Sense strand starting at position 3659 of SEQ ID NO: 584964
gagagacauucugggagcu

SEQ ID NO: 602899 - RNA, 19 nt, Artificial Sequence
  Description of Artificial Sequence: Synthetic oligonucleotide
  Antisense strand to SEQ ID NO: 602898
agcucccagaaugucucuc

SEQ ID NO: 602900 - RNA, 19 nt, Artificial Sequence
  Description of Artificial Sequence: Synthetic oligonucleotide
  Sense strand starting at position 3661 of SEQ ID NO: 584964
gagacauucugggagcugu

SEQ ID NO: 602901 - RNA, 19 nt, Artificial Sequence
  Description of Artificial Sequence: Synthetic oligonucleotide
  Antisense strand to SEQ ID NO: 602900
acagcucccagaaugucuc

SEQ ID NO: 602902 - RNA, 19 nt, Artificial Sequence
  Description of Artificial Sequence: Synthetic oligonucleotide
  Sense strand starting at position 3881 of SEQ ID NO: 584964
gcagccuaguccuuguuau

SEQ ID NO: 602903 - RNA, 19 nt, Artificial Sequence
  Description of Artificial Sequence: Synthetic oligonucleotide
  Antisense strand to SEQ ID NO: 602902
auaacaaggacuaggcugc

SEQ ID NO: 602904 - RNA, 19 nt, Artificial Sequence
  Description of Artificial Sequence: Synthetic oligonucleotide
  Sense strand starting at position 24 of SEQ ID NO: 584965
gccaaaguugcucagaaag

SEQ ID NO: 602905 - RNA, 19 nt, Artificial Sequence
  Description of Artificial Sequence: Synthetic oligonucleotide
  Antisense strand to SEQ ID NO: 602904
cuuucugagcaacuuuggc

SEQ ID NO: 602906 - RNA, 19 nt, Artificial Sequence
  Description of Artificial Sequence: Synthetic oligonucleotide
  Sense strand starting at position 34 of SEQ ID NO: 584965
cucagaaagugaucugaug

SEQ ID NO: 602907 - RNA, 19 nt, Artificial Sequence
  Description of Artificial Sequence: Synthetic oligonucleotide
  Antisense strand to SEQ ID NO: 602906
caucagaucacuuucugag

SEQ ID NO: 602908 - RNA, 19 nt, Artificial Sequence
  Description of Artificial Sequence: Synthetic oligonucleotide
  Sense strand starting at position 82 of SEQ ID NO: 584965
cccuauagccuagaaguau

SEQ ID NO: 602909 - RNA, 19 nt, Artificial Sequence
  Description of Artificial Sequence: Synthetic oligonucleotide
  Antisense strand to SEQ ID NO: 602908
auacuucuaggcuauaggg

SEQ ID NO: 602910 - RNA, 19 nt, Artificial Sequence
  Description of Artificial Sequence: Synthetic oligonucleotide
  Sense strand starting at position 88 of SEQ ID NO: 584965
agccuagaaguauaccauu

SEQ ID NO: 602911 - RNA, 19 nt, Artificial Sequence
  Description of Artificial Sequence: Synthetic oligonucleotide
  Antisense strand to SEQ ID NO: 602910
aaugguauacuucuaggcu

SEQ ID NO: 602912 - RNA, 19 nt, Artificial Sequence
  Description of Artificial Sequence: Synthetic oligonucleotide
  Sense strand starting at position 119 of SEQ ID NO: 584965
ccuuuauaacuuggaguca

SEQ ID NO: 602913 - RNA, 19 nt, Artificial Sequence
  Description of Artificial Sequence: Synthetic oligonucleotide
  Antisense strand to SEQ ID NO: 602912
ugacuccaaguuauaaagg

SEQ ID NO: 602914 - RNA, 19 nt, Artificial Sequence
  Description of Artificial Sequence: Synthetic oligonucleotide
  Sense strand starting at position 130 of SEQ ID NO: 584965
uggagucacacauggauca

SEQ ID NO: 602915 - RNA, 19 nt, Artificial Sequence
  Description of Artificial Sequence: Synthetic oligonucleotide
  Antisense strand to SEQ ID NO: 602914
ugauccaugugugacucca

SEQ ID NO: 602916 - RNA, 19 nt, Artificial Sequence
  Description of Artificial Sequence: Synthetic oligonucleotide
  Sense strand starting at position 131 of SEQ ID NO: 584965
ggagucacacauggaucau

SEQ ID NO: 602917 - RNA, 19 nt, Artificial Sequence
  Description of Artificial Sequence: Synthetic oligonucleotide
  Antisense strand to SEQ ID NO: 602916
augauccaugugugacucc

SEQ ID NO: 602918 - RNA, 19 nt, Artificial Sequence
  Description of Artificial Sequence: Synthetic oligonucleotide
  Sense strand starting at position 229 of SEQ ID NO: 584965
gaguguuaaagaugcugga

SEQ ID NO: 602919 - RNA, 19 nt, Artificial Sequence
  Description of Artificial Sequence: Synthetic oligonucleotide
  Antisense strand to SEQ ID NO: 602918
uccagcaucuuuaacacuc

SEQ ID NO: 602920 - RNA, 19 nt, Artificial Sequence
  Description of Artificial Sequence: Synthetic oligonucleotide
  Sense strand starting at position 233 of SEQ ID NO: 584965
guuaaagaugcuggaucau

SEQ ID NO: 602921 - RNA, 19 nt, Artificial Sequence
  Description of Artificial Sequence: Synthetic oligonucleotide
  Antisense strand to SEQ ID NO: 602920
augauccagcaucuuuaac

SEQ ID NO: 602922 - RNA, 19 nt, Artificial Sequence
  Description of Artificial Sequence: Synthetic oligonucleotide
  Sense strand starting at position 243 of SEQ ID NO: 584965
cuggaucauuucuacaaug

SEQ ID NO: 602923 - RNA, 19 nt, Artificial Sequence
  Description of Artificial Sequence: Synthetic oligonucleotide
  Antisense strand to SEQ ID NO: 602922
cauuguagaaaugauccag

SEQ ID NO: 602924 - RNA, 19 nt, Artificial Sequence
  Description of Artificial Sequence: Synthetic oligonucleotide
  Sense strand starting at position 295 of SEQ ID NO: 584965
agacuacuuugugcaacau

SEQ ID NO: 602925 - RNA, 19 nt, Artificial Sequence
  Description of Artificial Sequence: Synthetic oligonucleotide
  Antisense strand to SEQ ID NO: 602924
auguugcacaaaguagucu

SEQ ID NO: 602926 - RNA, 19 nt, Artificial Sequence
  Description of Artificial Sequence: Synthetic oligonucleotide
  Sense strand starting at position 482 of SEQ ID NO: 584965
gaaaguagauuacuuugau

SEQ ID NO: 602927 - RNA, 19 nt, Artificial Sequence
  Description of Artificial Sequence: Synthetic oligonucleotide
  Antisense strand to SEQ ID NO: 602926
aucaaaguaaucuacuuuc

SEQ ID NO: 602928 - RNA, 19 nt, Artificial Sequence
  Description of Artificial Sequence: Synthetic oligonucleotide
  Sense strand starting at position 483 of SEQ ID NO: 584965
aaaguagauuacuuugaug

SEQ ID NO: 602929 - RNA, 19 nt, Artificial Sequence
  Description of Artificial Sequence: Synthetic oligonucleotide
  Antisense strand to SEQ ID NO: 602928
caucaaaguaaucuacuuu

SEQ ID NO: 602930 - RNA, 19 nt, Artificial Sequence
  Description of Artificial Sequence: Synthetic oligonucleotide
  Sense strand starting at position 485 of SEQ ID NO: 584965
aguagauuacuuugaugug

SEQ ID NO: 602931 - RNA, 19 nt, Artificial Sequence
  Description of Artificial Sequence: Synthetic oligonucleotide
  Antisense strand to SEQ ID NO: 602930
cacaucaaaguaaucuacu

SEQ ID NO: 602932 - RNA, 19 nt, Artificial Sequence
  Description of Artificial Sequence: Synthetic oligonucleotide
  Sense strand starting at position 600 of SEQ ID NO: 584965
agaaauguacacugcaacu

SEQ ID NO: 602933 - RNA, 19 nt, Artificial Sequence
  Description of Artificial Sequence: Synthetic oligonucleotide
  Antisense strand to SEQ ID NO: 602932
aguugcaguguacauuucu

SEQ ID NO: 602934 - RNA, 19 nt, Artificial Sequence
  Description of Artificial Sequence: Synthetic oligonucleotide
  Sense strand starting at position 624 of SEQ ID NO: 584965
ucugcucuggaacauaauu

SEQ ID NO: 602935 - RNA, 19 nt, Artificial Sequence
  Description of Artificial Sequence: Synthetic oligonucleotide
  Antisense strand to SEQ ID NO: 602934
aauuauguuccagagcaga

SEQ ID NO: 602936 - RNA, 19 nt, Artificial Sequence
  Description of Artificial Sequence: Synthetic oligonucleotide
  Sense strand starting at position 1252 of SEQ ID NO: 584965
gggcaagugacuuaucauu

SEQ ID NO: 602937 - RNA, 19 nt, Artificial Sequence
  Description of Artificial Sequence: Synthetic oligonucleotide
  Antisense strand to SEQ ID NO: 602936
aaugauaagucacuugccc

SEQ ID NO: 602938 - RNA, 19 nt, Artificial Sequence
  Description of Artificial Sequence: Synthetic oligonucleotide
  Sense strand starting at position 1257 of SEQ ID NO: 584965
agugacuuaucauugcaaa

SEQ ID NO: 602939 - RNA, 19 nt, Artificial Sequence
  Description of Artificial Sequence: Synthetic oligonucleotide
  Antisense strand to SEQ ID NO: 602938
uuugcaaugauaagucacu

SEQ ID NO: 602940 - RNA, 19 nt, Artificial Sequence
  Description of Artificial Sequence: Synthetic oligonucleotide
  Sense strand starting at position 1381 of SEQ ID NO: 584965
ucaagucugcaugagaaca

SEQ ID NO: 602941 - RNA, 19 nt, Artificial Sequence
  Description of Artificial Sequence: Synthetic oligonucleotide
  Antisense strand to SEQ ID NO: 602940
uguucucaugcagacuuga

SEQ ID NO: 602942 - RNA, 19 nt, Artificial Sequence
  Description of Artificial Sequence: Synthetic oligonucleotide
  Sense strand starting at position 1386 of SEQ ID NO: 584965
ucugcaugagaacaucuau

SEQ ID NO: 602943 - RNA, 19 nt, Artificial Sequence
  Description of Artificial Sequence: Synthetic oligonucleotide
  Antisense strand to SEQ ID NO: 602942
auagauguucucaugcaga

SEQ ID NO: 602944 - RNA, 19 nt, Artificial Sequence
  Description of Artificial Sequence: Synthetic oligonucleotide
  Sense strand starting at position 1627 of SEQ ID NO: 584965
caagcaucucagcaggaga

SEQ ID NO: 602945 - RNA, 19 nt, Artificial Sequence
  Description of Artificial Sequence: Synthetic oligonucleotide
  Antisense strand to SEQ ID NO: 602944
ucuccugcugagaugcuug

SEQ ID NO: 602946 - RNA, 19 nt, Artificial Sequence
  Description of Artificial Sequence: Synthetic oligonucleotide
  Sense strand starting at position 2011 of SEQ ID NO: 584965
aucuaagcccugggaucaa

SEQ ID NO: 602947 - RNA, 19 nt, Artificial Sequence
  Description of Artificial Sequence: Synthetic oligonucleotide
  Antisense strand to SEQ ID NO: 602946
uugaucccagggcuuagau

SEQ ID NO: 602948 - RNA, 19 nt, Artificial Sequence
  Description of Artificial Sequence: Synthetic oligonucleotide
  Sense strand starting at position 2055 of SEQ ID NO: 584965
ggguacuugguguaauuac

SEQ ID NO: 602949 - RNA, 19 nt, Artificial Sequence
  Description of Artificial Sequence: Synthetic oligonucleotide
  Antisense strand to SEQ ID NO: 602948
guaauuacaccaaguaccc

SEQ ID NO: 602950 - RNA, 19 nt, Artificial Sequence
  Description of Artificial Sequence: Synthetic oligonucleotide
  Sense strand starting at position 2065 of SEQ ID NO: 584965
uguaauuaccaugacguca

SEQ ID NO: 602951 - RNA, 19 nt, Artificial Sequence
  Description of Artificial Sequence: Synthetic oligonucleotide
  Antisense strand to SEQ ID NO: 602950
ugacgucaugguaauuaca

SEQ ID NO: 602952 - RNA, 19 nt, Artificial Sequence
  Description of Artificial Sequence: Synthetic oligonucleotide
  Sense strand starting at position 2201 of SEQ ID NO: 584965
gucacuuuguacguaauuu

SEQ ID NO: 602953 - RNA, 19 nt, Artificial Sequence
  Description of Artificial Sequence: Synthetic oligonucleotide
  Antisense strand to SEQ ID NO: 602952
aaauuacguacaaagugac

SEQ ID NO: 602954 - RNA, 19 nt, Artificial Sequence
  Description of Artificial Sequence: Synthetic oligonucleotide
  Sense strand starting at position 2477 of SEQ ID NO: 584965
aggacugaaugguucucaa

SEQ ID NO: 602955 - RNA, 19 nt, Artificial Sequence
  Description of Artificial Sequence: Synthetic oligonucleotide
  Antisense strand to SEQ ID NO: 602954
uugagaaccauucaguccu

SEQ ID NO: 602956 - RNA, 19 nt, Artificial Sequence
  Description of Artificial Sequence: Synthetic oligonucleotide
  Sense strand starting at position 2480 of SEQ ID NO: 584965
acugaaugguucucaauau

SEQ ID NO: 602957 - RNA, 19 nt, Artificial Sequence
  Description of Artificial Sequence: Synthetic oligonucleotide
  Antisense strand to SEQ ID NO: 602956
auauugagaaccauucagu

SEQ ID NO: 602958 - RNA, 19 nt, Artificial Sequence
  Description of Artificial Sequence: Synthetic oligonucleotide
  Sense strand starting at position 2484 of SEQ ID NO: 584965
aaugguucucaauauacgu

SEQ ID NO: 602959 - RNA, 19 nt, Artificial Sequence
  Description of Artificial Sequence: Synthetic oligonucleotide
  Antisense strand to SEQ ID NO: 602958
acguauauugagaaccauu

SEQ ID NO: 602960 - RNA, 19 nt, Artificial Sequence
  Description of Artificial Sequence: Synthetic oligonucleotide
  Sense strand starting at position 2551 of SEQ ID NO: 584965
caguuucugccugaacaga

SEQ ID NO: 602961 - RNA, 19 nt, Artificial Sequence
  Description of Artificial Sequence: Synthetic oligonucleotide
  Antisense strand to SEQ ID NO: 602960
ucuguucaggcagaaacug

SEQ ID NO: 602962 - RNA, 19 nt, Artificial Sequence
  Description of Artificial Sequence: Synthetic oligonucleotide
  Sense strand starting at position 2601 of SEQ ID NO: 584965
gacacuuagcuccaagguu

SEQ ID NO: 602963 - RNA, 19 nt, Artificial Sequence
  Description of Artificial Sequence: Synthetic oligonucleotide
  Antisense strand to SEQ ID NO: 602962
aaccuuggagcuaaguguc

SEQ ID NO: 602964 - RNA, 19 nt, Artificial Sequence
  Description of Artificial Sequence: Synthetic oligonucleotide
  Sense strand starting at position 2795 of SEQ ID NO: 584965
uuagaagaucuaugugaug

SEQ ID NO: 602965 - RNA, 19 nt, Artificial Sequence
  Description of Artificial Sequence: Synthetic oligonucleotide
  Antisense strand to SEQ ID NO: 602964
caucacauagaucuucuaa

SEQ ID NO: 602966 - RNA, 19 nt, Artificial Sequence
  Description of Artificial Sequence: Synthetic oligonucleotide
  Sense strand starting at position 2797 of SEQ ID NO: 584965
agaagaucuaugugaugca

SEQ ID NO: 602967 - RNA, 19 nt, Artificial Sequence
  Description of Artificial Sequence: Synthetic oligonucleotide
  Antisense strand to SEQ ID NO: 602966
ugcaucacauagaucuucu

SEQ ID NO: 602968 - RNA, 19 nt, Artificial Sequence
  Description of Artificial Sequence: Synthetic oligonucleotide
  Sense strand starting at position 2929 of SEQ ID NO: 584965
cguuguuuccuuccaguau

SEQ ID NO: 602969 - RNA, 19 nt, Artificial Sequence
  Description of Artificial Sequence: Synthetic oligonucleotide
  Antisense strand to SEQ ID NO: 602968
auacuggaaggaaacaacg

SEQ ID NO: 602970 - RNA, 19 nt, Artificial Sequence
  Description of Artificial Sequence: Synthetic oligonucleotide
  Sense strand starting at position 3275 of SEQ ID NO: 584965
ggccuuccuagugaugauu

SEQ ID NO: 602971 - RNA, 19 nt, Artificial Sequence
  Description of Artificial Sequence: Synthetic oligonucleotide
  Antisense strand to SEQ ID NO: 602970
aaucaucacuaggaaggcc

SEQ ID NO: 602972 - RNA, 19 nt, Artificial Sequence
  Description of Artificial Sequence: Synthetic oligonucleotide
  Sense strand starting at position 3278 of SEQ ID NO: 584965
cuuccuagugaugauugau

SEQ ID NO: 602973 - RNA, 19 nt, Artificial Sequence
  Description of Artificial Sequence: Synthetic oligonucleotide
  Antisense strand to SEQ ID NO: 602972
aucaaucaucacuaggaag

SEQ ID NO: 602974 - RNA, 19 nt, Artificial Sequence
  Description of Artificial Sequence: Synthetic oligonucleotide
  Sense strand starting at position 3428 of SEQ ID NO: 584965
auuugugccuucuuuacau

SEQ ID NO: 602975 - RNA, 19 nt, Artificial Sequence
  Description of Artificial Sequence: Synthetic oligonucleotide
  Antisense strand to SEQ ID NO: 602974
auguaaagaaggcacaaau

SEQ ID NO: 602976 - RNA, 19 nt, Artificial Sequence
  Description of Artificial Sequence: Synthetic oligonucleotide
  Sense strand starting at position 3481 of SEQ ID NO: 584965
gaaacaauguuucuaggau

SEQ ID NO: 602977 - RNA, 19 nt, Artificial Sequence
  Description of Artificial Sequence: Synthetic oligonucleotide
  Antisense strand to SEQ ID NO: 602976
auccuagaaacauuguuuc

SEQ ID NO: 602978 - RNA, 19 nt, Artificial Sequence
  Description of Artificial Sequence: Synthetic oligonucleotide
  Sense strand starting at position 3651 of SEQ ID NO: 584965
uagugauguggcuacauaa

SEQ ID NO: 602979 - RNA, 19 nt, Artificial Sequence
  Description of Artificial Sequence: Synthetic oligonucleotide
  Antisense strand to SEQ ID NO: 602978
uuauguagccacaucacua

SEQ ID NO: 602980 - RNA, 19 nt, Artificial Sequence
  Description of Artificial Sequence: Synthetic oligonucleotide
  Sense strand starting at position 3884 of SEQ ID NO: 584965
uagagaaucucuguuggua

SEQ ID NO: 602981 - RNA, 19 nt, Artificial Sequence
  Description of Artificial Sequence: Synthetic oligonucleotide
  Antisense strand to SEQ ID NO: 602980
uaccaacagagauucucua

SEQ ID NO: 602982 - RNA, 19 nt, Artificial Sequence
  Description of Artificial Sequence: Synthetic oligonucleotide
  Sense strand starting at position 3896 of SEQ ID NO: 584965
guugguaugguauaaauua

SEQ ID NO: 602983 - RNA, 19 nt, Artificial Sequence
  Description of Artificial Sequence: Synthetic oligonucleotide
  Antisense strand to SEQ ID NO: 602982
uaauuuauaccauaccaac

SEQ ID NO: 602984 - RNA, 19 nt, Artificial Sequence
  Description of Artificial Sequence: Synthetic oligonucleotide
  Sense strand starting at position 183 of SEQ ID NO: 584966
aagugaacaguaugacuuu

SEQ ID NO: 602985 - RNA, 19 nt, Artificial Sequence
  Description of Artificial Sequence: Synthetic oligonucleotide
  Antisense strand to SEQ ID NO: 602984
aaagucauacuguucacuu

SEQ ID NO: 602986 - RNA, 19 nt, Artificial Sequence
  Description of Artificial Sequence: Synthetic oligonucleotide
  Sense strand starting at position 195 of SEQ ID NO: 584966
ugacuuuccugauccagaa

SEQ ID NO: 602987 - RNA, 19 nt, Artificial Sequence
  Description of Artificial Sequence: Synthetic oligonucleotide
  Antisense strand to SEQ ID NO: 602986
uucuggaucaggaaaguca

SEQ ID NO: 602988 - RNA, 19 nt, Artificial Sequence
  Description of Artificial Sequence: Synthetic oligonucleotide
  Sense strand starting at position 262 of SEQ ID NO: 584966
auuagucuguacucaaaug

SEQ ID NO: 602989 - RNA, 19 nt, Artificial Sequence
  Description of Artificial Sequence: Synthetic oligonucleotide
  Antisense strand to SEQ ID NO: 602988
cauuugaguacagacuaau

SEQ ID NO: 602990 - RNA, 19 nt, Artificial Sequence
  Description of Artificial Sequence: Synthetic oligonucleotide
  Sense strand starting at position 432 of SEQ ID NO: 584966
gcaguuugccaagauuaau

SEQ ID NO: 602991 - RNA, 19 nt, Artificial Sequence
  Description of Artificial Sequence: Synthetic oligonucleotide
  Antisense strand to SEQ ID NO: 602990
auuaaucuuggcaaacugc

SEQ ID NO: 602992 - RNA, 19 nt, Artificial Sequence
  Description of Artificial Sequence: Synthetic oligonucleotide
  Sense strand starting at position 456 of SEQ ID NO: 584966
acaguugagcacuggagaa

SEQ ID NO: 602993 - RNA, 19 nt, Artificial Sequence
  Description of Artificial Sequence: Synthetic oligonucleotide
  Antisense strand to SEQ ID NO: 602992
uucuccagugcucaacugu

SEQ ID NO: 602994 - RNA, 19 nt, Artificial Sequence
  Description of Artificial Sequence: Synthetic oligonucleotide
  Sense strand starting at position 509 of SEQ ID NO: 584966
agaccaaguuagcuagaua

SEQ ID NO: 602995 - RNA, 19 nt, Artificial Sequence
  Description of Artificial Sequence: Synthetic oligonucleotide
  Antisense strand to SEQ ID NO: 602994
uaucuagcuaacuuggucu

SEQ ID NO: 602996 - RNA, 19 nt, Artificial Sequence
  Description of Artificial Sequence: Synthetic oligonucleotide
  Sense strand starting at position 550 of SEQ ID NO: 584966
ggugaaugucaaggcuaca

SEQ ID NO: 602997 - RNA, 19 nt, Artificial Sequence
  Description of Artificial Sequence: Synthetic oligonucleotide
  Antisense strand to SEQ ID NO: 602996
uguagccuugacauucacc

SEQ ID NO: 602998 - RNA, 19 nt, Artificial Sequence
  Description of Artificial Sequence: Synthetic oligonucleotide
  Sense strand starting at position 682 of SEQ ID NO: 584966
gugagauacugugucuaag

SEQ ID NO: 602999 - RNA, 19 nt, Artificial Sequence
  Description of Artificial Sequence: Synthetic oligonucleotide
  Antisense strand to SEQ ID NO: 602998
cuuagacacaguaucucac

SEQ ID NO: 603000 - RNA, 19 nt, Artificial Sequence
  Description of Artificial Sequence: Synthetic oligonucleotide
  Sense strand starting at position 690 of SEQ ID NO: 584966
cugugucuaagggaauguu

SEQ ID NO: 603001 - RNA, 19 nt, Artificial Sequence
  Description of Artificial Sequence: Synthetic oligonucleotide
  Antisense strand to SEQ ID NO: 603000
aacauucccuuagacacag

SEQ ID NO: 603002 - RNA, 19 nt, Artificial Sequence
  Description of Artificial Sequence: Synthetic oligonucleotide
  Sense strand starting at position 693 of SEQ ID NO: 584966
ugucuaagggaauguuucu

SEQ ID NO: 603003 - RNA, 19 nt, Artificial Sequence
  Description of Artificial Sequence: Synthetic oligonucleotide
  Antisense strand to SEQ ID NO: 603002
agaaacauucccuuagaca

SEQ ID NO: 603004 - RNA, 19 nt, Artificial Sequence
  Description of Artificial Sequence: Synthetic oligonucleotide
  Sense strand starting at position 897 of SEQ ID NO: 584966
auaagaacuuccucgucga

SEQ ID NO: 603005 - RNA, 19 nt, Artificial Sequence
  Description of Artificial Sequence: Synthetic oligonucleotide
  Antisense strand to SEQ ID NO: 603004
ucgacgaggaaguucuuau

SEQ ID NO: 603006 - RNA, 19 nt, Artificial Sequence
  Description of Artificial Sequence: Synthetic oligonucleotide
  Sense strand starting at position 902 of SEQ ID NO: 584966
aacuuccucgucgaugaaa

SEQ ID NO: 603007 - RNA, 19 nt, Artificial Sequence
  Description of Artificial Sequence: Synthetic oligonucleotide
  Antisense strand to SEQ ID NO: 603006
uuucaucgacgaggaaguu

SEQ ID NO: 603008 - RNA, 19 nt, Artificial Sequence
  Description of Artificial Sequence: Synthetic oligonucleotide
  Sense strand starting at position 913 of SEQ ID NO: 584966
cgaugaaaucagugucuau

SEQ ID NO: 603009 - RNA, 19 nt, Artificial Sequence
  Description of Artificial Sequence: Synthetic oligonucleotide
  Antisense strand to SEQ ID NO: 603008
auagacacugauuucaucg

SEQ ID NO: 603010 - RNA, 19 nt, Artificial Sequence
  Description of Artificial Sequence: Synthetic oligonucleotide
  Sense strand starting at position 1131 of SEQ ID NO: 584966
ugguuugucccguucaucu

SEQ ID NO: 603011 - RNA, 19 nt, Artificial Sequence
  Description of Artificial Sequence: Synthetic oligonucleotide
  Antisense strand to SEQ ID NO: 603010
agaugaacgggacaaacca

SEQ ID NO: 603012 - RNA, 19 nt, Artificial Sequence
  Description of Artificial Sequence: Synthetic oligonucleotide
  Sense strand starting at position 1209 of SEQ ID NO: 584966
uugaaauacugguuguuga

SEQ ID NO: 603013 - RNA, 19 nt, Artificial Sequence
  Description of Artificial Sequence: Synthetic oligonucleotide
  Antisense strand to SEQ ID NO: 603012
ucaacaaccaguauuucaa

SEQ ID NO: 603014 - RNA, 19 nt, Artificial Sequence
  Description of Artificial Sequence: Synthetic oligonucleotide
  Sense strand starting at position 1288 of SEQ ID NO: 584966
ugaacugggaguuguuaaa

SEQ ID NO: 603015 - RNA, 19 nt, Artificial Sequence
  Description of Artificial Sequence: Synthetic oligonucleotide
  Antisense strand to SEQ ID NO: 603014
uuuaacaacucccaguuca

SEQ ID NO: 603016 - RNA, 19 nt, Artificial Sequence
  Description of Artificial Sequence: Synthetic oligonucleotide
  Sense strand starting at position 1412 of SEQ ID NO: 584966
guguaugugcucgcccauu

SEQ ID NO: 603017 - RNA, 19 nt, Artificial Sequence
  Description of Artificial Sequence: Synthetic oligonucleotide
  Antisense strand to SEQ ID NO: 603016
aaugggcgagcacauacac

SEQ ID NO: 603018 - RNA, 19 nt, Artificial Sequence
  Description of Artificial Sequence: Synthetic oligonucleotide
  Sense strand starting at position 1566 of SEQ ID NO: 584966
aucauauggucugccauuu

SEQ ID NO: 603019 - RNA, 19 nt, Artificial Sequence
  Description of Artificial Sequence: Synthetic oligonucleotide
  Antisense strand to SEQ ID NO: 603018
aaauggcagaccauaugau

SEQ ID NO: 603020 - RNA, 19 nt, Artificial Sequence
  Description of Artificial Sequence: Synthetic oligonucleotide
  Sense strand starting at position 1582 of SEQ ID NO: 584966
uuuccaguccuggaaguga

SEQ ID NO: 603021 - RNA, 19 nt, Artificial Sequence
  Description of Artificial Sequence: Synthetic oligonucleotide
  Antisense strand to SEQ ID NO: 603020
ucacuuccaggacuggaaa

SEQ ID NO: 603022 - RNA, 19 nt, Artificial Sequence
  Description of Artificial Sequence: Synthetic oligonucleotide
  Sense strand starting at position 1855 of SEQ ID NO: 584966
cccgaaguggccuaauaaa

SEQ ID NO: 603023 - RNA, 19 nt, Artificial Sequence
  Description of Artificial Sequence: Synthetic oligonucleotide
  Antisense strand to SEQ ID NO: 603022
uuuauuaggccacuucggg

SEQ ID NO: 603024 - RNA, 19 nt, Artificial Sequence
  Description of Artificial Sequence: Synthetic oligonucleotide
  Sense strand starting at position 2061 of SEQ ID NO: 584966
ugcgauuucugcuccgaag

SEQ ID NO: 603025 - RNA, 19 nt, Artificial Sequence
  Description of Artificial Sequence: Synthetic oligonucleotide
  Antisense strand to SEQ ID NO: 603024
cuucggagcagaaaucgca

SEQ ID NO: 603026 - RNA, 19 nt, Artificial Sequence
  Description of Artificial Sequence: Synthetic oligonucleotide
  Sense strand starting at position 2063 of SEQ ID NO: 584966
cgauuucugcuccgaagac

SEQ ID NO: 603027 - RNA, 19 nt, Artificial Sequence
  Description of Artificial Sequence: Synthetic oligonucleotide
  Antisense strand to SEQ ID NO: 603026
gucuucggagcagaaaucg

SEQ ID NO: 603028 - RNA, 19 nt, Artificial Sequence
  Description of Artificial Sequence: Synthetic oligonucleotide
  Sense strand starting at position 2295 of SEQ ID NO: 584966
gggcuuuggccacaguuaa

SEQ ID NO: 603029 - RNA, 19 nt, Artificial Sequence
  Description of Artificial Sequence: Synthetic oligonucleotide
  Antisense strand to SEQ ID NO: 603028
uuaacuguggccaaagccc

SEQ ID NO: 603030 - RNA, 19 nt, Artificial Sequence
  Description of Artificial Sequence: Synthetic oligonucleotide
  Sense strand starting at position 3075 of SEQ ID NO: 584966
guacgugugcuucugcuaa

SEQ ID NO: 603031 - RNA, 19 nt, Artificial Sequence
  Description of Artificial Sequence: Synthetic oligonucleotide
  Antisense strand to SEQ ID NO: 603030
uuagcagaagcacacguac

SEQ ID NO: 603032 - RNA, 19 nt, Artificial Sequence
  Description of Artificial Sequence: Synthetic oligonucleotide
  Sense strand starting at position 3098 of SEQ ID NO: 584966
gcguuugcagcucuuggua

SEQ ID NO: 603033 - RNA, 19 nt, Artificial Sequence
  Description of Artificial Sequence: Synthetic oligonucleotide
  Antisense strand to SEQ ID NO: 603032
uaccaagagcugcaaacgc

SEQ ID NO: 603034 - RNA, 19 nt, Artificial Sequence
  Description of Artificial Sequence: Synthetic oligonucleotide
  Sense strand starting at position 3136 of SEQ ID NO: 584966
ggcgucucugcucuguaaa

SEQ ID NO: 603035 - RNA, 19 nt, Artificial Sequence
  Description of Artificial Sequence: Synthetic oligonucleotide
  Antisense strand to SEQ ID NO: 603034
uuuacagagcagagacgcc

SEQ ID NO: 603036 - RNA, 19 nt, Artificial Sequence
  Description of Artificial Sequence: Synthetic oligonucleotide
  Sense strand starting at position 3139 of SEQ ID NO: 584966
gucucugcucuguaaacaa

SEQ ID NO: 603037 - RNA, 19 nt, Artificial Sequence
  Description of Artificial Sequence: Synthetic oligonucleotide
  Antisense strand to SEQ ID NO: 603036
uuguuuacagagcagagac

SEQ ID NO: 603038 - RNA, 19 nt, Artificial Sequence
  Description of Artificial Sequence: Synthetic oligonucleotide
  Sense strand starting at position 3311 of SEQ ID NO: 584966
acggguuuguaauuaagaa

SEQ ID NO: 603039 - RNA, 19 nt, Artificial Sequence
  Description of Artificial Sequence: Synthetic oligonucleotide
  Antisense strand to SEQ ID NO: 603038
uucuuaauuacaaacccgu

SEQ ID NO: 603040 - RNA, 19 nt, Artificial Sequence
  Description of Artificial Sequence: Synthetic oligonucleotide
  Sense strand starting at position 3312 of SEQ ID NO: 584966
cggguuuguaauuaagaaa

SEQ ID NO: 603041 - RNA, 19 nt, Artificial Sequence
  Description of Artificial Sequence: Synthetic oligonucleotide
  Antisense strand to SEQ ID NO: 603040
uuucuuaauuacaaacccg

SEQ ID NO: 603042 - RNA, 19 nt, Artificial Sequence
  Description of Artificial Sequence: Synthetic oligonucleotide
  Sense strand starting at position 3324 of SEQ ID NO: 584966
uaagaaauuugagggcuga

SEQ ID NO: 603043 - RNA, 19 nt, Artificial Sequence
  Description of Artificial Sequence: Synthetic oligonucleotide
  Antisense strand to SEQ ID NO: 603042
ucagcccucaaauuucuua

SEQ ID NO: 603044 - RNA, 19 nt, Artificial Sequence
  Description of Artificial Sequence: Synthetic oligonucleotide
  Sense strand starting at position 3374 of SEQ ID NO: 584966
aauagauaacgugguaauc

SEQ ID NO: 603045 - RNA, 19 nt, Artificial Sequence
  Description of Artificial Sequence: Synthetic oligonucleotide
  Antisense strand to SEQ ID NO: 603044
gauuaccacguuaucuauu

SEQ ID NO: 603046 - RNA, 19 nt, Artificial Sequence
  Description of Artificial Sequence: Synthetic oligonucleotide
  Sense strand starting at position 3383 of SEQ ID NO: 584966
cgugguaaucgcuuuguaa

SEQ ID NO: 603047 - RNA, 19 nt, Artificial Sequence
  Description of Artificial Sequence: Synthetic oligonucleotide
  Antisense strand to SEQ ID NO: 603046
uuacaaagcgauuaccacg

SEQ ID NO: 603048 - RNA, 19 nt, Artificial Sequence
  Description of Artificial Sequence: Synthetic oligonucleotide
  Sense strand starting at position 3399 of SEQ ID NO: 584966
uaaauaaagucguucugga

SEQ ID NO: 603049 - RNA, 19 nt, Artificial Sequence
  Description of Artificial Sequence: Synthetic oligonucleotide
  Antisense strand to SEQ ID NO: 603048
uccagaacgacuuuauuua

SEQ ID NO: 603050 - RNA, 19 nt, Artificial Sequence
  Description of Artificial Sequence: Synthetic oligonucleotide
  Sense strand starting at position 3504 of SEQ ID NO: 584966
ggcaaugggcgauaauaau

SEQ ID NO: 603051 - RNA, 19 nt, Artificial Sequence
  Description of Artificial Sequence: Synthetic oligonucleotide
  Antisense strand to SEQ ID NO: 603050
auuauuaucgcccauugcc

SEQ ID NO: 603052 - RNA, 19 nt, Artificial Sequence
  Description of Artificial Sequence: Synthetic oligonucleotide
  Sense strand starting at position 3721 of SEQ ID NO: 584966
ucgaguuuagcgcuccgaa

SEQ ID NO: 603053 - RNA, 19 nt, Artificial Sequence
  Description of Artificial Sequence: Synthetic oligonucleotide
  Antisense strand to SEQ ID NO: 603052
uucggagcgcuaaacucga

SEQ ID NO: 603054 - RNA, 19 nt, Artificial Sequence
  Description of Artificial Sequence: Synthetic oligonucleotide
  Sense strand starting at position 3722 of SEQ ID NO: 584966
cgaguuuagcgcuccgaau

SEQ ID NO: 603055 - RNA, 19 nt, Artificial Sequence
  Description of Artificial Sequence: Synthetic oligonucleotide
  Antisense strand to SEQ ID NO: 603054
auucggagcgcuaaacucg

SEQ ID NO: 603056 - RNA, 19 nt, Artificial Sequence
  Description of Artificial Sequence: Synthetic oligonucleotide
  Sense strand starting at position 3740 of SEQ ID NO: 584966
uaaggacuucugggcaguu

SEQ ID NO: 603057 - RNA, 19 nt, Artificial Sequence
  Description of Artificial Sequence: Synthetic oligonucleotide
  Antisense strand to SEQ ID NO: 603056
aacugcccagaaguccuua

SEQ ID NO: 603058 - RNA, 19 nt, Artificial Sequence
  Description of Artificial Sequence: Synthetic oligonucleotide
  Sense strand starting at position 3771 of SEQ ID NO: 584966
cucgauagccauugaagac

SEQ ID NO: 603059 - RNA, 19 nt, Artificial Sequence
  Description of Artificial Sequence: Synthetic oligonucleotide
  Antisense strand to SEQ ID NO: 603058
gucuucaauggcuaucgag

SEQ ID NO: 603060 - RNA, 19 nt, Artificial Sequence
  Description of Artificial Sequence: Synthetic oligonucleotide
  Sense strand starting at position 3772 of SEQ ID NO: 584966
ucgauagccauugaagacu

SEQ ID NO: 603061 - RNA, 19 nt, Artificial Sequence
  Description of Artificial Sequence: Synthetic oligonucleotide
  Antisense strand to SEQ ID NO: 603060
agucuucaauggcuaucga

SEQ ID NO: 603062 - RNA, 19 nt, Artificial Sequence
  Description of Artificial Sequence: Synthetic oligonucleotide
  Sense strand starting at position 3887 of SEQ ID NO: 584966
uggaaauucugauacauuu

SEQ ID NO: 603063 - RNA, 19 nt, Artificial Sequence
  Description of Artificial Sequence: Synthetic oligonucleotide
  Antisense strand to SEQ ID NO: 603062
aaauguaucagaauuucca

SEQ ID NO: 603064 - RNA, 19 nt, Artificial Sequence
  Description of Artificial Sequence: Synthetic oligonucleotide
  Sense strand starting at position 191 of SEQ ID NO: 584967
cuauuagcacagugucaaa

SEQ ID NO: 603065 - RNA, 19 nt, Artificial Sequence
  Description of Artificial Sequence: Synthetic oligonucleotide
  Antisense strand to SEQ ID NO: 603064
uuugacacugugcuaauag

SEQ ID NO: 603066 - RNA, 19 nt, Artificial Sequence
  Description of Artificial Sequence: Synthetic oligonucleotide
  Sense strand starting at position 332 of SEQ ID NO: 584967
aagugaacaguaugacuuu

SEQ ID NO: 603067 - RNA, 19 nt, Artificial Sequence
  Description of Artificial Sequence: Synthetic oligonucleotide
  Antisense strand to SEQ ID NO: 603066
aaagucauacuguucacuu

SEQ ID NO: 603068 - RNA, 19 nt, Artificial Sequence
  Description of Artificial Sequence: Synthetic oligonucleotide
  Sense strand starting at position 344 of SEQ ID NO: 584967
ugacuuuccugauccagaa

SEQ ID NO: 603069 - RNA, 19 nt, Artificial Sequence
  Description of Artificial Sequence: Synthetic oligonucleotide
  Antisense strand to SEQ ID NO: 603068
uucuggaucaggaaaguca

SEQ ID NO: 603070 - RNA, 19 nt, Artificial Sequence
  Description of Artificial Sequence: Synthetic oligonucleotide
  Sense strand starting at position 411 of SEQ ID NO: 584967
auuagucuguacucaaaug

SEQ ID NO: 603071 - RNA, 19 nt, Artificial Sequence
  Description of Artificial Sequence: Synthetic oligonucleotide
  Antisense strand to SEQ ID NO: 603070
cauuugaguacagacuaau

SEQ ID NO: 603072 - RNA, 19 nt, Artificial Sequence
  Description of Artificial Sequence: Synthetic oligonucleotide
  Sense strand starting at position 581 of SEQ ID NO: 584967
gcaguuugccaagauuaau

SEQ ID NO: 603073 - RNA, 19 nt, Artificial Sequence
  Description of Artificial Sequence: Synthetic oligonucleotide
  Antisense strand to SEQ ID NO: 603072
auuaaucuuggcaaacugc

SEQ ID NO: 603074 - RNA, 19 nt, Artificial Sequence
  Description of Artificial Sequence: Synthetic oligonucleotide
  Sense strand starting at position 605 of SEQ ID NO: 584967
acaguugagcacuggagaa

SEQ ID NO: 603075 - RNA, 19 nt, Artificial Sequence
  Description of Artificial Sequence: Synthetic oligonucleotide
  Antisense strand to SEQ ID NO: 603074
uucuccagugcucaacugu

SEQ ID NO: 603076 - RNA, 19 nt, Artificial Sequence
  Description of Artificial Sequence: Synthetic oligonucleotide
  Sense strand starting at position 658 of SEQ ID NO: 584967
agaccaaguuagcuagaua

SEQ ID NO: 603077 - RNA, 19 nt, Artificial Sequence
  Description of Artificial Sequence: Synthetic oligonucleotide
  Antisense strand to SEQ ID NO: 603076
uaucuagcuaacuuggucu

SEQ ID NO: 603078 - RNA, 19 nt, Artificial Sequence
  Description of Artificial Sequence: Synthetic oligonucleotide
  Sense strand starting at position 699 of SEQ ID NO: 584967
ggugaaugucaaggcuaca

SEQ ID NO: 603079 - RNA, 19 nt, Artificial Sequence
  Description of Artificial Sequence: Synthetic oligonucleotide
  Antisense strand to SEQ ID NO: 603078
uguagccuugacauucacc

SEQ ID NO: 603080 - RNA, 19 nt, Artificial Sequence
  Description of Artificial Sequence: Synthetic oligonucleotide
  Sense strand starting at position 831 of SEQ ID NO: 584967
gugagauacugugucuaag

SEQ ID NO: 603081 - RNA, 19 nt, Artificial Sequence
  Description of Artificial Sequence: Synthetic oligonucleotide
  Antisense strand to SEQ ID NO: 603080
cuuagacacaguaucucac

SEQ ID NO: 603082 - RNA, 19 nt, Artificial Sequence
  Description of Artificial Sequence: Synthetic oligonucleotide
  Sense strand starting at position 839 of SEQ ID NO: 584967
cugugucuaagggaauguu

SEQ ID NO: 603083 - RNA, 19 nt, Artificial Sequence
  Description of Artificial Sequence: Synthetic oligonucleotide
  Antisense strand to SEQ ID NO: 603082
aacauucccuuagacacag

SEQ ID NO: 603084 - RNA, 19 nt, Artificial Sequence
  Description of Artificial Sequence: Synthetic oligonucleotide
  Sense strand starting at position 842 of SEQ ID NO: 584967
ugucuaagggaauguuucu

SEQ ID NO: 603085 - RNA, 19 nt, Artificial Sequence
  Description of Artificial Sequence: Synthetic oligonucleotide
  Antisense strand to SEQ ID NO: 603084
agaaacauucccuuagaca

SEQ ID NO: 603086 - RNA, 19 nt, Artificial Sequence
  Description of Artificial Sequence: Synthetic oligonucleotide
  Sense strand starting at position 1046 of SEQ ID NO: 584967
auaagaacuuccucgucga

SEQ ID NO: 603087 - RNA, 19 nt, Artificial Sequence
  Description of Artificial Sequence: Synthetic oligonucleotide
  Antisense strand to SEQ ID NO: 603086
ucgacgaggaaguucuuau

SEQ ID NO: 603088 - RNA, 19 nt, Artificial Sequence
  Description of Artificial Sequence: Synthetic oligonucleotide
  Sense strand starting at position 1051 of SEQ ID NO: 584967
aacuuccucgucgaugaaa

SEQ ID NO: 603089 - RNA, 19 nt, Artificial Sequence
  Description of Artificial Sequence: Synthetic oligonucleotide
  Antisense strand to SEQ ID NO: 603088
uuucaucgacgaggaaguu

SEQ ID NO: 603090 - RNA, 19 nt, Artificial Sequence
  Description of Artificial Sequence: Synthetic oligonucleotide
  Sense strand starting at position 1062 of SEQ ID NO: 584967
cgaugaaaucagugucuau

SEQ ID NO: 603091 - RNA, 19 nt, Artificial Sequence
  Description of Artificial Sequence: Synthetic oligonucleotide
  Antisense strand to SEQ ID NO: 603090
auagacacugauuucaucg

SEQ ID NO: 603092 - RNA, 19 nt, Artificial Sequence
  Description of Artificial Sequence: Synthetic oligonucleotide
  Sense strand starting at position 1280 of SEQ ID NO: 584967
ugguuugucccguucaucu

SEQ ID NO: 603093 - RNA, 19 nt, Artificial Sequence
  Description of Artificial Sequence: Synthetic oligonucleotide
  Antisense strand to SEQ ID NO: 603092
agaugaacgggacaaacca

SEQ ID NO: 603094 - RNA, 19 nt, Artificial Sequence
  Description of Artificial Sequence: Synthetic oligonucleotide
  Sense strand starting at position 1358 of SEQ ID NO: 584967
uugaaauacugguuguuga

SEQ ID NO: 603095 - RNA, 19 nt, Artificial Sequence
  Description of Artificial Sequence: Synthetic oligonucleotide
  Antisense strand to SEQ ID NO: 603094
ucaacaaccaguauuucaa

SEQ ID NO: 603096 - RNA, 19 nt, Artificial Sequence
  Description of Artificial Sequence: Synthetic oligonucleotide
  Sense strand starting at position 1437 of SEQ ID NO: 584967
ugaacugggaguuguuaaa

SEQ ID NO: 603097 - RNA, 19 nt, Artificial Sequence
  Description of Artificial Sequence: Synthetic oligonucleotide
  Antisense strand to SEQ ID NO: 603096
uuuaacaacucccaguuca

SEQ ID NO: 603098 - RNA, 19 nt, Artificial Sequence
  Description of Artificial Sequence: Synthetic oligonucleotide
  Sense strand starting at position 1561 of SEQ ID NO: 584967
guguaugugcucgcccauu

SEQ ID NO: 603099 - RNA, 19 nt, Artificial Sequence
  Description of Artificial Sequence: Synthetic oligonucleotide
  Antisense strand to SEQ ID NO: 603098
aaugggcgagcacauacac

SEQ ID NO: 603100 - RNA, 19 nt, Artificial Sequence
  Description of Artificial Sequence: Synthetic oligonucleotide
  Sense strand starting at position 1715 of SEQ ID NO: 584967
aucauauggucugccauuu

SEQ ID NO: 603101 - RNA, 19 nt, Artificial Sequence
  Description of Artificial Sequence: Synthetic oligonucleotide
  Antisense strand to SEQ ID NO: 603100
aaauggcagaccauaugau

SEQ ID NO: 603102 - RNA, 19 nt, Artificial Sequence
  Description of Artificial Sequence: Synthetic oligonucleotide
  Sense strand starting at position 1731 of SEQ ID NO: 584967
uuuccaguccuggaaguga

SEQ ID NO: 603103 - RNA, 19 nt, Artificial Sequence
  Description of Artificial Sequence: Synthetic oligonucleotide
  Antisense strand to SEQ ID NO: 603102
ucacuuccaggacuggaaa

SEQ ID NO: 603104 - RNA, 19 nt, Artificial Sequence
  Description of Artificial Sequence: Synthetic oligonucleotide
  Sense strand starting at position 2004 of SEQ ID NO: 584967
cccgaaguggccuaauaaa

SEQ ID NO: 603105 - RNA, 19 nt, Artificial Sequence
  Description of Artificial Sequence: Synthetic oligonucleotide
  Antisense strand to SEQ ID NO: 603104
uuuauuaggccacuucggg

SEQ ID NO: 603106 - RNA, 19 nt, Artificial Sequence
  Description of Artificial Sequence: Synthetic oligonucleotide
  Sense strand starting at position 2210 of SEQ ID NO: 584967
ugcgauuucugcuccgaag

SEQ ID NO: 603107 - RNA, 19 nt, Artificial Sequence
  Description of Artificial Sequence: Synthetic oligonucleotide
  Antisense strand to SEQ ID NO: 603106
cuucggagcagaaaucgca

SEQ ID NO: 603108 - RNA, 19 nt, Artificial Sequence
  Description of Artificial Sequence: Synthetic oligonucleotide
  Sense strand starting at position 2212 of SEQ ID NO: 584967
cgauuucugcuccgaagac

SEQ ID NO: 603109 - RNA, 19 nt, Artificial Sequence
  Description of Artificial Sequence: Synthetic oligonucleotide
  Antisense strand to SEQ ID NO: 603108
gucuucggagcagaaaucg

SEQ ID NO: 603110 - RNA, 19 nt, Artificial Sequence
  Description of Artificial Sequence: Synthetic oligonucleotide
  Sense strand starting at position 2444 of SEQ ID NO: 584967
gggcuuuggccacaguuaa

SEQ ID NO: 603111 - RNA, 19 nt, Artificial Sequence
  Description of Artificial Sequence: Synthetic oligonucleotide
  Antisense strand to SEQ ID NO: 603110
uuaacuguggccaaagccc

SEQ ID NO: 603112 - RNA, 19 nt, Artificial Sequence
  Description of Artificial Sequence: Synthetic oligonucleotide
  Sense strand starting at position 3224 of SEQ ID NO: 584967
guacgugugcuucugcuaa

SEQ ID NO: 603113 - RNA, 19 nt, Artificial Sequence
  Description of Artificial Sequence: Synthetic oligonucleotide
  Antisense strand to SEQ ID NO: 603112
uuagcagaagcacacguac

SEQ ID NO: 603114 - RNA, 19 nt, Artificial Sequence
  Description of Artificial Sequence: Synthetic oligonucleotide
  Sense strand starting at position 3247 of SEQ ID NO: 584967
gcguuugcagcucuuggua

SEQ ID NO: 603115 - RNA, 19 nt, Artificial Sequence
  Description of Artificial Sequence: Synthetic oligonucleotide
  Antisense strand to SEQ ID NO: 603114
uaccaagagcugcaaacgc

SEQ ID NO: 603116 - RNA, 19 nt, Artificial Sequence
  Description of Artificial Sequence: Synthetic oligonucleotide
  Sense strand starting at position 3285 of SEQ ID NO: 584967
ggcgucucugcucuguaaa

SEQ ID NO: 603117 - RNA, 19 nt, Artificial Sequence
  Description of Artificial Sequence: Synthetic oligonucleotide
  Antisense strand to SEQ ID NO: 603116
uuuacagagcagagacgcc

SEQ ID NO: 603118 - RNA, 19 nt, Artificial Sequence
  Description of Artificial Sequence: Synthetic oligonucleotide
  Sense strand starting at position 3288 of SEQ ID NO: 584967
gucucugcucuguaaacaa

SEQ ID NO: 603119 - RNA, 19 nt, Artificial Sequence
  Description of Artificial Sequence: Synthetic oligonucleotide
  Antisense strand to SEQ ID NO: 603118
uuguuuacagagcagagac

SEQ ID NO: 603120 - RNA, 19 nt, Artificial Sequence
  Description of Artificial Sequence: Synthetic oligonucleotide
  Sense strand starting at position 3460 of SEQ ID NO: 584967
acggguuuguaauuaagaa

SEQ ID NO: 603121 - RNA, 19 nt, Artificial Sequence
  Description of Artificial Sequence: Synthetic oligonucleotide
  Antisense strand to SEQ ID NO: 603120
uucuuaauuacaaacccgu

SEQ ID NO: 603122 - RNA, 19 nt, Artificial Sequence
  Description of Artificial Sequence: Synthetic oligonucleotide
  Sense strand starting at position 3461 of SEQ ID NO: 584967
cggguuuguaauuaagaaa

SEQ ID NO: 603123 - RNA, 19 nt, Artificial Sequence
  Description of Artificial Sequence: Synthetic oligonucleotide
  Antisense strand to SEQ ID NO: 603122
uuucuuaauuacaaacccg

SEQ ID NO: 603124 - RNA, 19 nt, Artificial Sequence
  Description of Artificial Sequence: Synthetic oligonucleotide
  Sense strand starting at position 3473 of SEQ ID NO: 584967
uaagaaauuugagggcuga

SEQ ID NO: 603125 - RNA, 19 nt, Artificial Sequence
  Description of Artificial Sequence: Synthetic oligonucleotide
  Antisense strand to SEQ ID NO: 603124
ucagcccucaaauuucuua

SEQ ID NO: 603126 - RNA, 19 nt, Artificial Sequence
  Description of Artificial Sequence: Synthetic oligonucleotide
  Sense strand starting at position 3523 of SEQ ID NO: 584967
aauagauaacgugguaauc

SEQ ID NO: 603127 - RNA, 19 nt, Artificial Sequence
  Description of Artificial Sequence: Synthetic oligonucleotide
  Antisense strand to SEQ ID NO: 603126
gauuaccacguuaucuauu

SEQ ID NO: 603128 - RNA, 19 nt, Artificial Sequence
  Description of Artificial Sequence: Synthetic oligonucleotide
  Sense strand starting at position 3532 of SEQ ID NO: 584967
cgugguaaucgcuuuguaa

SEQ ID NO: 603129 - RNA, 19 nt, Artificial Sequence
  Description of Artificial Sequence: Synthetic oligonucleotide
  Antisense strand to SEQ ID NO: 603128
uuacaaagcgauuaccacg

SEQ ID NO: 603130 - RNA, 19 nt, Artificial Sequence
  Description of Artificial Sequence: Synthetic oligonucleotide
  Sense strand starting at position 3548 of SEQ ID NO: 584967
uaaauaaagucguucugga

SEQ ID NO: 603131 - RNA, 19 nt, Artificial Sequence
  Description of Artificial Sequence: Synthetic oligonucleotide
  Antisense strand to SEQ ID NO: 603130
uccagaacgacuuuauuua

SEQ ID NO: 603132 - RNA, 19 nt, Artificial Sequence
  Description of Artificial Sequence: Synthetic oligonucleotide
  Sense strand starting at position 3653 of SEQ ID NO: 584967
ggcaaugggcgauaauaau

SEQ ID NO: 603133 - RNA, 19 nt, Artificial Sequence
  Description of Artificial Sequence: Synthetic oligonucleotide
  Antisense strand to SEQ ID NO: 603132
auuauuaucgcccauugcc

SEQ ID NO: 603134 - RNA, 19 nt, Artificial Sequence
  Description of Artificial Sequence: Synthetic oligonucleotide
  Sense strand starting at position 3870 of SEQ ID NO: 584967
ucgaguuuagcgcuccgaa

SEQ ID NO: 603135 - RNA, 19 nt, Artificial Sequence
  Description of Artificial Sequence: Synthetic oligonucleotide
  Antisense strand to SEQ ID NO: 603134
uucggagcgcuaaacucga

SEQ ID NO: 603136 - RNA, 19 nt, Artificial Sequence
  Description of Artificial Sequence: Synthetic oligonucleotide
  Sense strand starting at position 3871 of SEQ ID NO: 584967
cgaguuuagcgcuccgaau

SEQ ID NO: 603137 - RNA, 19 nt, Artificial Sequence
  Description of Artificial Sequence: Synthetic oligonucleotide
  Antisense strand to SEQ ID NO: 603136
auucggagcgcuaaacucg

SEQ ID NO: 603138 - RNA, 19 nt, Artificial Sequence
  Description of Artificial Sequence: Synthetic oligonucleotide
  Sense strand starting at position 3889 of SEQ ID NO: 584967
uaaggacuucugggcaguu

SEQ ID NO: 603139 - RNA, 19 nt, Artificial Sequence
  Description of Artificial Sequence: Synthetic oligonucleotide
  Antisense strand to SEQ ID NO: 603138
aacugcccagaaguccuua

SEQ ID NO: 603140 - RNA, 19 nt, Artificial Sequence
  Description of Artificial Sequence: Synthetic oligonucleotide
  Sense strand starting at position 3920 of SEQ ID NO: 584967
cucgauagccauugaagac

SEQ ID NO: 603141 - RNA, 19 nt, Artificial Sequence
  Description of Artificial Sequence: Synthetic oligonucleotide
  Antisense strand to SEQ ID NO: 603140
gucuucaauggcuaucgag

SEQ ID NO: 603142 - RNA, 19 nt, Artificial Sequence
  Description of Artificial Sequence: Synthetic oligonucleotide
  Sense strand starting at position 3921 of SEQ ID NO: 584967
ucgauagccauugaagacu

SEQ ID NO: 603143 - RNA, 19 nt, Artificial Sequence
  Description of Artificial Sequence: Synthetic oligonucleotide
  Antisense strand to SEQ ID NO: 603142
agucuucaauggcuaucga

SEQ ID NO: 603144 - RNA, 19 nt, Artificial Sequence
  Description of Artificial Sequence: Synthetic oligonucleotide
  Sense strand starting at position 144 of SEQ ID NO: 584968
gcaguuugccaagauuaau

SEQ ID NO: 603145 - RNA, 19 nt, Artificial Sequence
  Description of Artificial Sequence: Synthetic oligonucleotide
  Antisense strand to SEQ ID NO: 603144
auuaaucuuggcaaacugc

SEQ ID NO: 603146 - RNA, 19 nt, Artificial Sequence
  Description of Artificial Sequence: Synthetic oligonucleotide
  Sense strand starting at position 168 of SEQ ID NO: 584968
acaguugagcacuggagaa

SEQ ID NO: 603147 - RNA, 19 nt, Artificial Sequence
  Description of Artificial Sequence: Synthetic oligonucleotide
  Antisense strand to SEQ ID NO: 603146
uucuccagugcucaacugu

SEQ ID NO: 603148 - RNA, 19 nt, Artificial Sequence
  Description of Artificial Sequence: Synthetic oligonucleotide
  Sense strand starting at position 221 of SEQ ID NO: 584968
agaccaaguuagcuagaua

SEQ ID NO: 603149 - RNA, 19 nt, Artificial Sequence
  Description of Artificial Sequence: Synthetic oligonucleotide
  Antisense strand to SEQ ID NO: 603148
uaucuagcuaacuuggucu

SEQ ID NO: 603150 - RNA, 19 nt, Artificial Sequence
  Description of Artificial Sequence: Synthetic oligonucleotide
  Sense strand starting at position 262 of SEQ ID NO: 584968
ggugaaugucaaggcuaca

SEQ ID NO: 603151 - RNA, 19 nt, Artificial Sequence
  Description of Artificial Sequence: Synthetic oligonucleotide
  Antisense strand to SEQ ID NO: 603150
uguagccuugacauucacc

SEQ ID NO: 603152 - RNA, 19 nt, Artificial Sequence
  Description of Artificial Sequence: Synthetic oligonucleotide
  Sense strand starting at position 394 of SEQ ID NO: 584968
gugagauacugugucuaag

SEQ ID NO: 603153 - RNA, 19 nt, Artificial Sequence
  Description of Artificial Sequence: Synthetic oligonucleotide
  Antisense strand to SEQ ID NO: 603152
cuuagacacaguaucucac

SEQ ID NO: 603154 - RNA, 19 nt, Artificial Sequence
  Description of Artificial Sequence: Synthetic oligonucleotide
  Sense strand starting at position 402 of SEQ ID NO: 584968
cugugucuaagggaauguu

SEQ ID NO: 603155 - RNA, 19 nt, Artificial Sequence
  Description of Artificial Sequence: Synthetic oligonucleotide
  Antisense strand to SEQ ID NO: 603154
aacauucccuuagacacag

SEQ ID NO: 603156 - RNA, 19 nt, Artificial Sequence
  Description of Artificial Sequence: Synthetic oligonucleotide
  Sense strand starting at position 405 of SEQ ID NO: 584968
ugucuaagggaauguuucu

SEQ ID NO: 603157 - RNA, 19 nt, Artificial Sequence
  Description of Artificial Sequence: Synthetic oligonucleotide
  Antisense strand to SEQ ID NO: 603156
agaaacauucccuuagaca

SEQ ID NO: 603158 - RNA, 19 nt, Artificial Sequence
  Description of Artificial Sequence: Synthetic oligonucleotide
  Sense strand starting at position 609 of SEQ ID NO: 584968
auaagaacuuccucgucga

SEQ ID NO: 603159 - RNA, 19 nt, Artificial Sequence
  Description of Artificial Sequence: Synthetic oligonucleotide
  Antisense strand to SEQ ID NO: 603158
ucgacgaggaaguucuuau

SEQ ID NO: 603160 - RNA, 19 nt, Artificial Sequence
  Description of Artificial Sequence: Synthetic oligonucleotide
  Sense strand starting at position 612 of SEQ ID NO: 584968
agaacuuccucgucgauga

SEQ ID NO: 603161 - RNA, 19 nt, Artificial Sequence
  Description of Artificial Sequence: Synthetic oligonucleotide
  Antisense strand to SEQ ID NO: 603160
ucaucgacgaggaaguucu

SEQ ID NO: 603162 - RNA, 19 nt, Artificial Sequence
  Description of Artificial Sequence: Synthetic oligonucleotide
  Sense strand starting at position 614 of SEQ ID NO: 584968
aacuuccucgucgaugaaa

SEQ ID NO: 603163 - RNA, 19 nt, Artificial Sequence
  Description of Artificial Sequence: Synthetic oligonucleotide
  Antisense strand to SEQ ID NO: 603162
uuucaucgacgaggaaguu

SEQ ID NO: 603164 - RNA, 19 nt, Artificial Sequence
  Description of Artificial Sequence: Synthetic oligonucleotide
  Sense strand starting at position 625 of SEQ ID NO: 584968
cgaugaaaucagugucuau

SEQ ID NO: 603165 - RNA, 19 nt, Artificial Sequence
  Description of Artificial Sequence: Synthetic oligonucleotide
  Antisense strand to SEQ ID NO: 603164
auagacacugauuucaucg

SEQ ID NO: 603166 - RNA, 19 nt, Artificial Sequence
  Description of Artificial Sequence: Synthetic oligonucleotide
  Sense strand starting at position 843 of SEQ ID NO: 584968
ugguuugucccguucaucu

SEQ ID NO: 603167 - RNA, 19 nt, Artificial Sequence
  Description of Artificial Sequence: Synthetic oligonucleotide
  Antisense strand to SEQ ID NO: 603166
agaugaacgggacaaacca

SEQ ID NO: 603168 - RNA, 19 nt, Artificial Sequence
  Description of Artificial Sequence: Synthetic oligonucleotide
  Sense strand starting at position 919 of SEQ ID NO: 584968
gguugaaauacugguuguu

SEQ ID NO: 603169 - RNA, 19 nt, Artificial Sequence
  Description of Artificial Sequence: Synthetic oligonucleotide
  Antisense strand to SEQ ID NO: 603168
aacaaccaguauuucaacc

SEQ ID NO: 603170 - RNA, 19 nt, Artificial Sequence
  Description of Artificial Sequence: Synthetic oligonucleotide
  Sense strand starting at position 921 of SEQ ID NO: 584968
uugaaauacugguuguuga

SEQ ID NO: 603171 - RNA, 19 nt, Artificial Sequence
  Description of Artificial Sequence: Synthetic oligonucleotide
  Antisense strand to SEQ ID NO: 603170
ucaacaaccaguauuucaa

SEQ ID NO: 603172 - RNA, 19 nt, Artificial Sequence
  Description of Artificial Sequence: Synthetic oligonucleotide
  Sense strand starting at position 1000 of SEQ ID NO: 584968
ugaacugggaguuguuaaa

SEQ ID NO: 603173 - RNA, 19 nt, Artificial Sequence
  Description of Artificial Sequence: Synthetic oligonucleotide
  Antisense strand to SEQ ID NO: 603172
uuuaacaacucccaguuca

SEQ ID NO: 603174 - RNA, 19 nt, Artificial Sequence
  Description of Artificial Sequence: Synthetic oligonucleotide
  Sense strand starting at position 1124 of SEQ ID NO: 584968
guguaugugcucgcccauu

SEQ ID NO: 603175 - RNA, 19 nt, Artificial Sequence
  Description of Artificial Sequence: Synthetic oligonucleotide
  Antisense strand to SEQ ID NO: 603174
aaugggcgagcacauacac

SEQ ID NO: 603176 - RNA, 19 nt, Artificial Sequence
  Description of Artificial Sequence: Synthetic oligonucleotide
  Sense strand starting at position 1278 of SEQ ID NO: 584968
aucauauggucugccauuu

SEQ ID NO: 603177 - RNA, 19 nt, Artificial Sequence
  Description of Artificial Sequence: Synthetic oligonucleotide
  Antisense strand to SEQ ID NO: 603176
aaauggcagaccauaugau

SEQ ID NO: 603178 - RNA, 19 nt, Artificial Sequence
  Description of Artificial Sequence: Synthetic oligonucleotide
  Sense strand starting at position 1294 of SEQ ID NO: 584968
uuuccaguccuggaaguga

SEQ ID NO: 603179 - RNA, 19 nt, Artificial Sequence
  Description of Artificial Sequence: Synthetic oligonucleotide
  Antisense strand to SEQ ID NO: 603178
ucacuuccaggacuggaaa

SEQ ID NO: 603180 - RNA, 19 nt, Artificial Sequence
  Description of Artificial Sequence: Synthetic oligonucleotide
  Sense strand starting at position 1567 of SEQ ID NO: 584968
cccgaaguggccuaauaaa

SEQ ID NO: 603181 - RNA, 19 nt, Artificial Sequence
  Description of Artificial Sequence: Synthetic oligonucleotide
  Antisense strand to SEQ ID NO: 603180
uuuauuaggccacuucggg

SEQ ID NO: 603182 - RNA, 19 nt, Artificial Sequence
  Description of Artificial Sequence: Synthetic oligonucleotide
  Sense strand starting at position 1773 of SEQ ID NO: 584968
ugcgauuucugcuccgaag

SEQ ID NO: 603183 - RNA, 19 nt, Artificial Sequence
  Description of Artificial Sequence: Synthetic oligonucleotide
  Antisense strand to SEQ ID NO: 603182
cuucggagcagaaaucgca

SEQ ID NO: 603184 - RNA, 19 nt, Artificial Sequence
  Description of Artificial Sequence: Synthetic oligonucleotide
  Sense strand starting at position 1775 of SEQ ID NO: 584968
cgauuucugcuccgaagac

SEQ ID NO: 603185 - RNA, 19 nt, Artificial Sequence
  Description of Artificial Sequence: Synthetic oligonucleotide
  Antisense strand to SEQ ID NO: 603184
gucuucggagcagaaaucg

SEQ ID NO: 603186 - RNA, 19 nt, Artificial Sequence
  Description of Artificial Sequence: Synthetic oligonucleotide
  Sense strand starting at position 2007 of SEQ ID NO: 584968
gggcuuuggccacaguuaa

SEQ ID NO: 603187 - RNA, 19 nt, Artificial Sequence
  Description of Artificial Sequence: Synthetic oligonucleotide
  Antisense strand to SEQ ID NO: 603186
uuaacuguggccaaagccc

SEQ ID NO: 603188 - RNA, 19 nt, Artificial Sequence
  Description of Artificial Sequence: Synthetic oligonucleotide
  Sense strand starting at position 2787 of SEQ ID NO: 584968
guacgugugcuucugcuaa

SEQ ID NO: 603189 - RNA, 19 nt, Artificial Sequence
  Description of Artificial Sequence: Synthetic oligonucleotide
  Antisense strand to SEQ ID NO: 603188
uuagcagaagcacacguac

SEQ ID NO: 603190 - RNA, 19 nt, Artificial Sequence
  Description of Artificial Sequence: Synthetic oligonucleotide
  Sense strand starting at position 2810 of SEQ ID NO: 584968
gcguuugcagcucuuggua

SEQ ID NO: 603191 - RNA, 19 nt, Artificial Sequence
  Description of Artificial Sequence: Synthetic oligonucleotide
  Antisense strand to SEQ ID NO: 603190
uaccaagagcugcaaacgc

SEQ ID NO: 603192 - RNA, 19 nt, Artificial Sequence
  Description of Artificial Sequence: Synthetic oligonucleotide
  Sense strand starting at position 2848 of SEQ ID NO: 584968
ggcgucucugcucuguaaa

SEQ ID NO: 603193 - RNA, 19 nt, Artificial Sequence
  Description of Artificial Sequence: Synthetic oligonucleotide
  Antisense strand to SEQ ID NO: 603192
uuuacagagcagagacgcc

SEQ ID NO: 603194 - RNA, 19 nt, Artificial Sequence
  Description of Artificial Sequence: Synthetic oligonucleotide
  Sense strand starting at position 2851 of SEQ ID NO: 584968
gucucugcucuguaaacaa

SEQ ID NO: 603195 - RNA, 19 nt, Artificial Sequence
  Description of Artificial Sequence: Synthetic oligonucleotide
  Antisense strand to SEQ ID NO: 603194
uuguuuacagagcagagac

SEQ ID NO: 603196 - RNA, 19 nt, Artificial Sequence
  Description of Artificial Sequence: Synthetic oligonucleotide
  Sense strand starting at position 3023 of SEQ ID NO: 584968
acggguuuguaauuaagaa

SEQ ID NO: 603197 - RNA, 19 nt, Artificial Sequence
  Description of Artificial Sequence: Synthetic oligonucleotide
  Antisense strand to SEQ ID NO: 603196
uucuuaauuacaaacccgu

SEQ ID NO: 603198 - RNA, 19 nt, Artificial Sequence
  Description of Artificial Sequence: Synthetic oligonucleotide
  Sense strand starting at position 3024 of SEQ ID NO: 584968
cggguuuguaauuaagaaa

SEQ ID NO: 603199 - RNA, 19 nt, Artificial Sequence
  Description of Artificial Sequence: Synthetic oligonucleotide
  Antisense strand to SEQ ID NO: 603198
uuucuuaauuacaaacccg

SEQ ID NO: 603200 - RNA, 19 nt, Artificial Sequence
  Description of Artificial Sequence: Synthetic oligonucleotide
  Sense strand starting at position 3036 of SEQ ID NO: 584968
uaagaaauuugagggcuga

SEQ ID NO: 603201 - RNA, 19 nt, Artificial Sequence
  Description of Artificial Sequence: Synthetic oligonucleotide
  Antisense strand to SEQ ID NO: 603200
ucagcccucaaauuucuua

SEQ ID NO: 603202 - RNA, 19 nt, Artificial Sequence
  Description of Artificial Sequence: Synthetic oligonucleotide
  Sense strand starting at position 3086 of SEQ ID NO: 584968
aauagauaacgugguaauc

SEQ ID NO: 603203 - RNA, 19 nt, Artificial Sequence
  Description of Artificial Sequence: Synthetic oligonucleotide
  Antisense strand to SEQ ID NO: 603202
gauuaccacguuaucuauu

SEQ ID NO: 603204 - RNA, 19 nt, Artificial Sequence
  Description of Artificial Sequence: Synthetic oligonucleotide
  Sense strand starting at position 3095 of SEQ ID NO: 584968
cgugguaaucgcuuuguaa

SEQ ID NO: 603205 - RNA, 19 nt, Artificial Sequence
  Description of Artificial Sequence: Synthetic oligonucleotide
  Antisense strand to SEQ ID NO: 603204
uuacaaagcgauuaccacg

SEQ ID NO: 603206 - RNA, 19 nt, Artificial Sequence
  Description of Artificial Sequence: Synthetic oligonucleotide
  Sense strand starting at position 3111 of SEQ ID NO: 584968
uaaauaaagucguucugga

SEQ ID NO: 603207 - RNA, 19 nt, Artificial Sequence
  Description of Artificial Sequence: Synthetic oligonucleotide
  Antisense strand to SEQ ID NO: 603206
uccagaacgacuuuauuua

SEQ ID NO: 603208 - RNA, 19 nt, Artificial Sequence
  Description of Artificial Sequence: Synthetic oligonucleotide
  Sense strand starting at position 3216 of SEQ ID NO: 584968
ggcaaugggcgauaauaau

SEQ ID NO: 603209 - RNA, 19 nt, Artificial Sequence
  Description of Artificial Sequence: Synthetic oligonucleotide
  Antisense strand to SEQ ID NO: 603208
auuauuaucgcccauugcc

SEQ ID NO: 603210 - RNA, 19 nt, Artificial Sequence
  Description of Artificial Sequence: Synthetic oligonucleotide
  Sense strand starting at position 3433 of SEQ ID NO: 584968
ucgaguuuagcgcuccgaa

SEQ ID NO: 603211 - RNA, 19 nt, Artificial Sequence
  Description of Artificial Sequence: Synthetic oligonucleotide
  Antisense strand to SEQ ID NO: 603210
uucggagcgcuaaacucga

SEQ ID NO: 603212 - RNA, 19 nt, Artificial Sequence
  Description of Artificial Sequence: Synthetic oligonucleotide
  Sense strand starting at position 3434 of SEQ ID NO: 584968
cgaguuuagcgcuccgaau

SEQ ID NO: 603213 - RNA, 19 nt, Artificial Sequence
  Description of Artificial Sequence: Synthetic oligonucleotide
  Antisense strand to SEQ ID NO: 603212
auucggagcgcuaaacucg

SEQ ID NO: 603214 - RNA, 19 nt, Artificial Sequence
  Description of Artificial Sequence: Synthetic oligonucleotide
  Sense strand starting at position 3452 of SEQ ID NO: 584968
uaaggacuucugggcaguu

SEQ ID NO: 603215 - RNA, 19 nt, Artificial Sequence
  Description of Artificial Sequence: Synthetic oligonucleotide
  Antisense strand to SEQ ID NO: 603214
aacugcccagaaguccuua

SEQ ID NO: 603216 - RNA, 19 nt, Artificial Sequence
  Description of Artificial Sequence: Synthetic oligonucleotide
  Sense strand starting at position 3483 of SEQ ID NO: 584968
cucgauagccauugaagac

SEQ ID NO: 603217 - RNA, 19 nt, Artificial Sequence
  Description of Artificial Sequence: Synthetic oligonucleotide
  Antisense strand to SEQ ID NO: 603216
gucuucaauggcuaucgag

SEQ ID NO: 603218 - RNA, 19 nt, Artificial Sequence
  Description of Artificial Sequence: Synthetic oligonucleotide
  Sense strand starting at position 3484 of SEQ ID NO: 584968
ucgauagccauugaagacu

SEQ ID NO: 603219 - RNA, 19 nt, Artificial Sequence
  Description of Artificial Sequence: Synthetic oligonucleotide
  Antisense strand to SEQ ID NO: 603218
agucuucaauggcuaucga

SEQ ID NO: 603220 - RNA, 19 nt, Artificial Sequence
  Description of Artificial Sequence: Synthetic oligonucleotide
  Sense strand starting at position 3599 of SEQ ID NO: 584968
uggaaauucugauacauuu

SEQ ID NO: 603221 - RNA, 19 nt, Artificial Sequence
  Description of Artificial Sequence: Synthetic oligonucleotide
  Antisense strand to SEQ ID NO: 603220
aaauguaucagaauuucca

SEQ ID NO: 603222 - RNA, 19 nt, Artificial Sequence
  Description of Artificial Sequence: Synthetic oligonucleotide
  Sense strand starting at position 3907 of SEQ ID NO: 584968
guaucagaggcuuggauac

SEQ ID NO: 603223 - RNA, 19 nt, Artificial Sequence
  Description of Artificial Sequence: Synthetic oligonucleotide
  Antisense strand to SEQ ID NO: 603222
guauccaagccucugauac

SEQ ID NO: 603224 - RNA, 19 nt, Artificial Sequence
  Description of Artificial Sequence: Synthetic oligonucleotide
  Sense strand starting at position 553 of SEQ ID NO: 584969
gaauguacugaccaagcau

SEQ ID NO: 603225 - RNA, 19 nt, Artificial Sequence
  Description of Artificial Sequence: Synthetic oligonucleotide
  Antisense strand to SEQ ID NO: 603224
augcuuggucaguacauuc

SEQ ID NO: 603226 - RNA, 19 nt, Artificial Sequence
  Description of Artificial Sequence: Synthetic oligonucleotide
  Sense strand starting at position 577 of SEQ ID NO: 584969
gugugaugucuaguccguu

SEQ ID NO: 603227 - RNA, 19 nt, Artificial Sequence
  Description of Artificial Sequence: Synthetic oligonucleotide
  Antisense strand to SEQ ID NO: 603226
aacggacuagacaucacac

SEQ ID NO: 603228 - RNA, 19 nt, Artificial Sequence
  Description of Artificial Sequence: Synthetic oligonucleotide
  Sense strand starting at position 591 of SEQ ID NO: 584969
ccguuugauaauuaugguu

SEQ ID NO: 603229 - RNA, 19 nt, Artificial Sequence
  Description of Artificial Sequence: Synthetic oligonucleotide
  Antisense strand to SEQ ID NO: 603228
aaccauaauuaucaaacgg

SEQ ID NO: 603230 - RNA, 19 nt, Artificial Sequence
  Description of Artificial Sequence: Synthetic oligonucleotide
  Sense strand starting at position 621 of SEQ ID NO: 584969
acuauauuuguaugcaugu

SEQ ID NO: 603231 - RNA, 19 nt, Artificial Sequence
  Description of Artificial Sequence: Synthetic oligonucleotide
  Antisense strand to SEQ ID NO: 603230
acaugcauacaaauauagu

SEQ ID NO: 603232 - RNA, 19 nt, Artificial Sequence
  Description of Artificial Sequence: Synthetic oligonucleotide
  Sense strand starting at position 622 of SEQ ID NO: 584969
cuauauuuguaugcauguu

SEQ ID NO: 603233 - RNA, 19 nt, Artificial Sequence
  Description of Artificial Sequence: Synthetic oligonucleotide
  Antisense strand to SEQ ID NO: 603232
aacaugcauacaaauauag

SEQ ID NO: 603234 - RNA, 19 nt, Artificial Sequence
  Description of Artificial Sequence: Synthetic oligonucleotide
  Sense strand starting at position 628 of SEQ ID NO: 584969
uuguaugcauguucuauuu

SEQ ID NO: 603235 - RNA, 19 nt, Artificial Sequence
  Description of Artificial Sequence: Synthetic oligonucleotide
  Antisense strand to SEQ ID NO: 603234
aaauagaacaugcauacaa

SEQ ID NO: 603236 - RNA, 19 nt, Artificial Sequence
  Description of Artificial Sequence: Synthetic oligonucleotide
  Sense strand starting at position 685 of SEQ ID NO: 584969
gugccuucugaguuuguuu

SEQ ID NO: 603237 - RNA, 19 nt, Artificial Sequence
  Description of Artificial Sequence: Synthetic oligonucleotide
  Antisense strand to SEQ ID NO: 603236
aaacaaacucagaaggcac

SEQ ID NO: 603238 - RNA, 19 nt, Artificial Sequence
  Description of Artificial Sequence: Synthetic oligonucleotide
  Sense strand starting at position 727 of SEQ ID NO: 584969
cugucuucucucugaggga

SEQ ID NO: 603239 - RNA, 19 nt, Artificial Sequence
  Description of Artificial Sequence: Synthetic oligonucleotide
  Antisense strand to SEQ ID NO: 603238
ucccucagagagaagacag

SEQ ID NO: 603240 - RNA, 19 nt, Artificial Sequence
  Description of Artificial Sequence: Synthetic oligonucleotide
  Sense strand starting at position 1044 of SEQ ID NO: 584969
gucaguucuuguuccauuu

SEQ ID NO: 603241 - RNA, 19 nt, Artificial Sequence
  Description of Artificial Sequence: Synthetic oligonucleotide
  Antisense strand to SEQ ID NO: 603240
aaauggaacaagaacugac

SEQ ID NO: 603242 - RNA, 19 nt, Artificial Sequence
  Description of Artificial Sequence: Synthetic oligonucleotide
  Sense strand starting at position 1064 of SEQ ID NO: 584969
ugcuuucuugaggauuaca

SEQ ID NO: 603243 - RNA, 19 nt, Artificial Sequence
  Description of Artificial Sequence: Synthetic oligonucleotide
  Antisense strand to SEQ ID NO: 603242
uguaauccucaagaaagca

SEQ ID NO: 603244 - RNA, 19 nt, Artificial Sequence
  Description of Artificial Sequence: Synthetic oligonucleotide
  Sense strand starting at position 1084 of SEQ ID NO: 584969
gugcaucucccugaaauug

SEQ ID NO: 603245 - RNA, 19 nt, Artificial Sequence
  Description of Artificial Sequence: Synthetic oligonucleotide
  Antisense strand to SEQ ID NO: 603244
caauuucagggagaugcac

SEQ ID NO: 603246 - RNA, 19 nt, Artificial Sequence
  Description of Artificial Sequence: Synthetic oligonucleotide
  Sense strand starting at position 1099 of SEQ ID NO: 584969
auuguuuaaucucuuggga

SEQ ID NO: 603247 - RNA, 19 nt, Artificial Sequence
  Description of Artificial Sequence: Synthetic oligonucleotide
  Antisense strand to SEQ ID NO: 603246
ucccaagagauuaaacaau

SEQ ID NO: 603248 - RNA, 19 nt, Artificial Sequence
  Description of Artificial Sequence: Synthetic oligonucleotide
  Sense strand starting at position 1102 of SEQ ID NO: 584969
guuuaaucucuugggacca

SEQ ID NO: 603249 - RNA, 19 nt, Artificial Sequence
  Description of Artificial Sequence: Synthetic oligonucleotide
  Antisense strand to SEQ ID NO: 603248
uggucccaagagauuaaac

SEQ ID NO: 603250 - RNA, 19 nt, Artificial Sequence
  Description of Artificial Sequence: Synthetic oligonucleotide
  Sense strand starting at position 1241 of SEQ ID NO: 584969
agucuuauuucucuuguga

SEQ ID NO: 603251 - RNA, 19 nt, Artificial Sequence
  Description of Artificial Sequence: Synthetic oligonucleotide
  Antisense strand to SEQ ID NO: 603250
ucacaagagaaauaagacu

SEQ ID NO: 603252 - RNA, 19 nt, Artificial Sequence
  Description of Artificial Sequence: Synthetic oligonucleotide
  Sense strand starting at position 1321 of SEQ ID NO: 584969
acacuaugugacuguuuaa

SEQ ID NO: 603253 - RNA, 19 nt, Artificial Sequence
  Description of Artificial Sequence: Synthetic oligonucleotide
  Antisense strand to SEQ ID NO: 603252
uuaaacagucacauagugu

SEQ ID NO: 603254 - RNA, 19 nt, Artificial Sequence
  Description of Artificial Sequence: Synthetic oligonucleotide
  Sense strand starting at position 1485 of SEQ ID NO: 584969
guaguugaucuuuauugaa

SEQ ID NO: 603255 - RNA, 19 nt, Artificial Sequence
  Description of Artificial Sequence: Synthetic oligonucleotide
  Antisense strand to SEQ ID NO: 603254
uucaauaaagaucaacuac

SEQ ID NO: 603256 - RNA, 19 nt, Artificial Sequence
  Description of Artificial Sequence: Synthetic oligonucleotide
  Sense strand starting at position 1500 of SEQ ID NO: 584969
ugaaccaguugguuugaaa

SEQ ID NO: 603257 - RNA, 19 nt, Artificial Sequence
  Description of Artificial Sequence: Synthetic oligonucleotide
  Antisense strand to SEQ ID NO: 603256
uuucaaaccaacugguuca

SEQ ID NO: 603258 - RNA, 19 nt, Artificial Sequence
  Description of Artificial Sequence: Synthetic oligonucleotide
  Sense strand starting at position 1507 of SEQ ID NO: 584969
guugguuugaaauacuuag

SEQ ID NO: 603259 - RNA, 19 nt, Artificial Sequence
  Description of Artificial Sequence: Synthetic oligonucleotide
  Antisense strand to SEQ ID NO: 603258
cuaaguauuucaaaccaac

SEQ ID NO: 603260 - RNA, 19 nt, Artificial Sequence
  Description of Artificial Sequence: Synthetic oligonucleotide
  Sense strand starting at position 1551 of SEQ ID NO: 584969
aguggaaauucuuuccuua

SEQ ID NO: 603261 - RNA, 19 nt, Artificial Sequence
  Description of Artificial Sequence: Synthetic oligonucleotide
  Antisense strand to SEQ ID NO: 603260
uaaggaaagaauuuccacu

SEQ ID NO: 603262 - RNA, 19 nt, Artificial Sequence
  Description of Artificial Sequence: Synthetic oligonucleotide
  Sense strand starting at position 1710 of SEQ ID NO: 584969
cugggauucuccuuaccug

SEQ ID NO: 603263 - RNA, 19 nt, Artificial Sequence
  Description of Artificial Sequence: Synthetic oligonucleotide
  Antisense strand to SEQ ID NO: 603262
cagguaaggagaaucccag

SEQ ID NO: 603264 - RNA, 19 nt, Artificial Sequence
  Description of Artificial Sequence: Synthetic oligonucleotide
  Sense strand starting at position 1717 of SEQ ID NO: 584969
ucuccuuaccugggaaagu

SEQ ID NO: 603265 - RNA, 19 nt, Artificial Sequence
  Description of Artificial Sequence: Synthetic oligonucleotide
  Antisense strand to SEQ ID NO: 603264
acuuucccagguaaggaga

SEQ ID NO: 603266 - RNA, 19 nt, Artificial Sequence
  Description of Artificial Sequence: Synthetic oligonucleotide
  Sense strand starting at position 2102 of SEQ ID NO: 584969
ugucuuggcuauuuacaua

SEQ ID NO: 603267 - RNA, 19 nt, Artificial Sequence
  Description of Artificial Sequence: Synthetic oligonucleotide
  Antisense strand to SEQ ID NO: 603266
uauguaaauagccaagaca

SEQ ID NO: 603268 - RNA, 19 nt, Artificial Sequence
  Description of Artificial Sequence: Synthetic oligonucleotide
  Sense strand starting at position 2180 of SEQ ID NO: 584969
gugagaguguugaaugaag

SEQ ID NO: 603269 - RNA, 19 nt, Artificial Sequence
  Description of Artificial Sequence: Synthetic oligonucleotide
  Antisense strand to SEQ ID NO: 603268
cuucauucaacacucucac

SEQ ID NO: 603270 - RNA, 19 nt, Artificial Sequence
  Description of Artificial Sequence: Synthetic oligonucleotide
  Sense strand starting at position 2182 of SEQ ID NO: 584969
gagaguguugaaugaagac

SEQ ID NO: 603271 - RNA, 19 nt, Artificial Sequence
  Description of Artificial Sequence: Synthetic oligonucleotide
  Antisense strand to SEQ ID NO: 603270
gucuucauucaacacucuc

SEQ ID NO: 603272 - RNA, 19 nt, Artificial Sequence
  Description of Artificial Sequence: Synthetic oligonucleotide
  Sense strand starting at position 2238 of SEQ ID NO: 584969
gugcauguggucgugacuu

SEQ ID NO: 603273 - RNA, 19 nt, Artificial Sequence
  Description of Artificial Sequence: Synthetic oligonucleotide
  Antisense strand to SEQ ID NO: 603272
aagucacgaccacaugcac

SEQ ID NO: 603274 - RNA, 19 nt, Artificial Sequence
  Description of Artificial Sequence: Synthetic oligonucleotide
  Sense strand starting at position 2316 of SEQ ID NO: 584969
guauaucauguugauuaca

SEQ ID NO: 603275 - RNA, 19 nt, Artificial Sequence
  Description of Artificial Sequence: Synthetic oligonucleotide
  Antisense strand to SEQ ID NO: 603274
uguaaucaacaugauauac

SEQ ID NO: 603276 - RNA, 19 nt, Artificial Sequence
  Description of Artificial Sequence: Synthetic oligonucleotide
  Sense strand starting at position 2318 of SEQ ID NO: 584969
auaucauguugauuacagu

SEQ ID NO: 603277 - RNA, 19 nt, Artificial Sequence
  Description of Artificial Sequence: Synthetic oligonucleotide
  Antisense strand to SEQ ID NO: 603276
acuguaaucaacaugauau

SEQ ID NO: 603278 - RNA, 19 nt, Artificial Sequence
  Description of Artificial Sequence: Synthetic oligonucleotide
  Sense strand starting at position 2496 of SEQ ID NO: 584969
ggcugcuaacacugagaaa

SEQ ID NO: 603279 - RNA, 19 nt, Artificial Sequence
  Description of Artificial Sequence: Synthetic oligonucleotide
  Antisense strand to SEQ ID NO: 603278
uuucucaguguuagcagcc

SEQ ID NO: 603280 - RNA, 19 nt, Artificial Sequence
  Description of Artificial Sequence: Synthetic oligonucleotide
  Sense strand starting at position 2527 of SEQ ID NO: 584969
guuacagcguugacguaua

SEQ ID NO: 603281 - RNA, 19 nt, Artificial Sequence
  Description of Artificial Sequence: Synthetic oligonucleotide
  Antisense strand to SEQ ID NO: 603280
uauacgucaacgcuguaac

SEQ ID NO: 603282 - RNA, 19 nt, Artificial Sequence
  Description of Artificial Sequence: Synthetic oligonucleotide
  Sense strand starting at position 2638 of SEQ ID NO: 584969
aaaggcuggcggcauuaaa

SEQ ID NO: 603283 - RNA, 19 nt, Artificial Sequence
  Description of Artificial Sequence: Synthetic oligonucleotide
  Antisense strand to SEQ ID NO: 603282
uuuaaugccgccagccuuu

SEQ ID NO: 603284 - RNA, 19 nt, Artificial Sequence
  Description of Artificial Sequence: Synthetic oligonucleotide
  Sense strand starting at position 3277 of SEQ ID NO: 584969
guuucuguacuggaagaga

SEQ ID NO: 603285 - RNA, 19 nt, Artificial Sequence
  Description of Artificial Sequence: Synthetic oligonucleotide
  Antisense strand to SEQ ID NO: 603284
ucucuuccaguacagaaac

SEQ ID NO: 603286 - RNA, 19 nt, Artificial Sequence
  Description of Artificial Sequence: Synthetic oligonucleotide
  Sense strand starting at position 3297 of SEQ ID NO: 584969
ugcaucuaucucuguauuu

SEQ ID NO: 603287 - RNA, 19 nt, Artificial Sequence
  Description of Artificial Sequence: Synthetic oligonucleotide
  Antisense strand to SEQ ID NO: 603286
aaauacagagauagaugca

SEQ ID NO: 603288 - RNA, 19 nt, Artificial Sequence
  Description of Artificial Sequence: Synthetic oligonucleotide
  Sense strand starting at position 3298 of SEQ ID NO: 584969
gcaucuaucucuguauuug

SEQ ID NO: 603289 - RNA, 19 nt, Artificial Sequence
  Description of Artificial Sequence: Synthetic oligonucleotide
  Antisense strand to SEQ ID NO: 603288
caaauacagagauagaugc

SEQ ID NO: 603290 - RNA, 19 nt, Artificial Sequence
  Description of Artificial Sequence: Synthetic oligonucleotide
  Sense strand starting at position 3447 of SEQ ID NO: 584969
gcuaguaagaauugauaga

SEQ ID NO: 603291 - RNA, 19 nt, Artificial Sequence
  Description of Artificial Sequence: Synthetic oligonucleotide
  Antisense strand to SEQ ID NO: 603290
ucuaucaauucuuacuagc

SEQ ID NO: 603292 - RNA, 19 nt, Artificial Sequence
  Description of Artificial Sequence: Synthetic oligonucleotide
  Sense strand starting at position 3458 of SEQ ID NO: 584969
uugauagaauuggcucuuu

SEQ ID NO: 603293 - RNA, 19 nt, Artificial Sequence
  Description of Artificial Sequence: Synthetic oligonucleotide
  Antisense strand to SEQ ID NO: 603292
aaagagccaauucuaucaa

SEQ ID NO: 603294 - RNA, 19 nt, Artificial Sequence
  Description of Artificial Sequence: Synthetic oligonucleotide
  Sense strand starting at position 3471 of SEQ ID NO: 584969
cucuuugucacugggagaa

SEQ ID NO: 603295 - RNA, 19 nt, Artificial Sequence
  Description of Artificial Sequence: Synthetic oligonucleotide
  Antisense strand to SEQ ID NO: 603294
uucucccagugacaaagag

SEQ ID NO: 603296 - RNA, 19 nt, Artificial Sequence
  Description of Artificial Sequence: Synthetic oligonucleotide
  Sense strand starting at position 3577 of SEQ ID NO: 584969
uggagaguccagugagaga

SEQ ID NO: 603297 - RNA, 19 nt, Artificial Sequence
  Description of Artificial Sequence: Synthetic oligonucleotide
  Antisense strand to SEQ ID NO: 603296
ucucucacuggacucucca

SEQ ID NO: 603298 - RNA, 19 nt, Artificial Sequence
  Description of Artificial Sequence: Synthetic oligonucleotide
  Sense strand starting at position 3641 of SEQ ID NO: 584969
gggaccacuucucuauaca

SEQ ID NO: 603299 - RNA, 19 nt, Artificial Sequence
  Description of Artificial Sequence: Synthetic oligonucleotide
  Antisense strand to SEQ ID NO: 603298
uguauagagaagugguccc

SEQ ID NO: 603300 - RNA, 19 nt, Artificial Sequence
  Description of Artificial Sequence: Synthetic oligonucleotide
  Sense strand starting at position 3688 of SEQ ID NO: 584969
aguucagaguuugugggaa

SEQ ID NO: 603301 - RNA, 19 nt, Artificial Sequence
  Description of Artificial Sequence: Synthetic oligonucleotide
  Antisense strand to SEQ ID NO: 603300
uucccacaaacucugaacu

SEQ ID NO: 603302 - RNA, 19 nt, Artificial Sequence
  Description of Artificial Sequence: Synthetic oligonucleotide
  Sense strand starting at position 3983 of SEQ ID NO: 584969
ggaagagguaguuguuacu

SEQ ID NO: 603303 - RNA, 19 nt, Artificial Sequence
  Description of Artificial Sequence: Synthetic oligonucleotide
  Antisense strand to SEQ ID NO: 603302
aguaacaacuaccucuucc

SEQ ID NO: 603304 - RNA, 19 nt, Artificial Sequence
  Description of Artificial Sequence: Synthetic oligonucleotide
  Sense strand starting at position 266 of SEQ ID NO: 584970
ccuugugguagcuacguua

SEQ ID NO: 603305 - RNA, 19 nt, Artificial Sequence
  Description of Artificial Sequence: Synthetic oligonucleotide
  Antisense strand to SEQ ID NO: 603304
uaacguagcuaccacaagg

SEQ ID NO: 603306 - RNA, 19 nt, Artificial Sequence
  Description of Artificial Sequence: Synthetic oligonucleotide
  Sense strand starting at position 569 of SEQ ID NO: 584970
ggacacauguccuaacuga

SEQ ID NO: 603307 - RNA, 19 nt, Artificial Sequence
  Description of Artificial Sequence: Synthetic oligonucleotide
  Antisense strand to SEQ ID NO: 603306
ucaguuaggacaugugucc

SEQ ID NO: 603308 - RNA, 19 nt, Artificial Sequence
  Description of Artificial Sequence: Synthetic oligonucleotide
  Sense strand starting at position 701 of SEQ ID NO: 584970
cuuccuuuagucugcuaga

SEQ ID NO: 603309 - RNA, 19 nt, Artificial Sequence
  Description of Artificial Sequence: Synthetic oligonucleotide
  Antisense strand to SEQ ID NO: 603308
ucuagcagacuaaaggaag

SEQ ID NO: 603310 - RNA, 19 nt, Artificial Sequence
  Description of Artificial Sequence: Synthetic oligonucleotide
  Sense strand starting at position 702 of SEQ ID NO: 584970
uuccuuuagucugcuagaa

SEQ ID NO: 603311 - RNA, 19 nt, Artificial Sequence
  Description of Artificial Sequence: Synthetic oligonucleotide
  Antisense strand to SEQ ID NO: 603310
uucuagcagacuaaaggaa

SEQ ID NO: 603312 - RNA, 19 nt, Artificial Sequence
  Description of Artificial Sequence: Synthetic oligonucleotide
  Sense strand starting at position 706 of SEQ ID NO: 584970
uuuagucugcuagaaacuu

SEQ ID NO: 603313 - RNA, 19 nt, Artificial Sequence
  Description of Artificial Sequence: Synthetic oligonucleotide
  Antisense strand to SEQ ID NO: 603312
aaguuucuagcagacuaaa

SEQ ID NO: 603314 - RNA, 19 nt, Artificial Sequence
  Description of Artificial Sequence: Synthetic oligonucleotide
  Sense strand starting at position 923 of SEQ ID NO: 584970
ugaggagagaaguguucuu

SEQ ID NO: 603315 - RNA, 19 nt, Artificial Sequence
  Description of Artificial Sequence: Synthetic oligonucleotide
  Antisense strand to SEQ ID NO: 603314
aagaacacuucucuccuca

SEQ ID NO: 603316 - RNA, 19 nt, Artificial Sequence
  Description of Artificial Sequence: Synthetic oligonucleotide
  Sense strand starting at position 928 of SEQ ID NO: 584970
agagaaguguucuuaccuu

SEQ ID NO: 603317 - RNA, 19 nt, Artificial Sequence
  Description of Artificial Sequence: Synthetic oligonucleotide
  Antisense strand to SEQ ID NO: 603316
aagguaagaacacuucucu

SEQ ID NO: 603318 - RNA, 19 nt, Artificial Sequence
  Description of Artificial Sequence: Synthetic oligonucleotide
  Sense strand starting at position 1482 of SEQ ID NO: 584970
ugggcacacccgugaagau

SEQ ID NO: 603319 - RNA, 19 nt, Artificial Sequence
  Description of Artificial Sequence: Synthetic oligonucleotide
  Antisense strand to SEQ ID NO: 603318
aucuucacgggugugccca

SEQ ID NO: 603320 - RNA, 19 nt, Artificial Sequence
  Description of Artificial Sequence: Synthetic oligonucleotide
  Sense strand starting at position 1483 of SEQ ID NO: 584970
gggcacacccgugaagauu

SEQ ID NO: 603321 - RNA, 19 nt, Artificial Sequence
  Description of Artificial Sequence: Synthetic oligonucleotide
  Antisense strand to SEQ ID NO: 603320
aaucuucacgggugugccc

SEQ ID NO: 603322 - RNA, 19 nt, Artificial Sequence
  Description of Artificial Sequence: Synthetic oligonucleotide
  Sense strand starting at position 1520 of SEQ ID NO: 584970
auggaaagguggucguuua

SEQ ID NO: 603323 - RNA, 19 nt, Artificial Sequence
  Description of Artificial Sequence: Synthetic oligonucleotide
  Antisense strand to SEQ ID NO: 603322
uaaacgaccaccuuuccau

SEQ ID NO: 603324 - RNA, 19 nt, Artificial Sequence
  Description of Artificial Sequence: Synthetic oligonucleotide
  Sense strand starting at position 1521 of SEQ ID NO: 584970
uggaaagguggucguuuaa

SEQ ID NO: 603325 - RNA, 19 nt, Artificial Sequence
  Description of Artificial Sequence: Synthetic oligonucleotide
  Antisense strand to SEQ ID NO: 603324
uuaaacgaccaccuuucca

SEQ ID NO: 603326 - RNA, 19 nt, Artificial Sequence
  Description of Artificial Sequence: Synthetic oligonucleotide
  Sense strand starting at position 1583 of SEQ ID NO: 584970
cugggacuguggucugaga

SEQ ID NO: 603327 - RNA, 19 nt, Artificial Sequence
  Description of Artificial Sequence: Synthetic oligonucleotide
  Antisense strand to SEQ ID NO: 603326
ucucagaccacagucccag

SEQ ID NO: 603328 - RNA, 19 nt, Artificial Sequence
  Description of Artificial Sequence: Synthetic oligonucleotide
  Sense strand starting at position 1585 of SEQ ID NO: 584970
gggacuguggucugagaga

SEQ ID NO: 603329 - RNA, 19 nt, Artificial Sequence
  Description of Artificial Sequence: Synthetic oligonucleotide
  Antisense strand to SEQ ID NO: 603328
ucucucagaccacaguccc

SEQ ID NO: 603330 - RNA, 19 nt, Artificial Sequence
  Description of Artificial Sequence: Synthetic oligonucleotide
  Sense strand starting at position 1700 of SEQ ID NO: 584970
ccagacuggugucucagua

SEQ ID NO: 603331 - RNA, 19 nt, Artificial Sequence
  Description of Artificial Sequence: Synthetic oligonucleotide
  Antisense strand to SEQ ID NO: 603330
uacugagacaccagucugg

SEQ ID NO: 603332 - RNA, 19 nt, Artificial Sequence
  Description of Artificial Sequence: Synthetic oligonucleotide
  Sense strand starting at position 2324 of SEQ ID NO: 584970
acagguugccuuggagaug

SEQ ID NO: 603333 - RNA, 19 nt, Artificial Sequence
  Description of Artificial Sequence: Synthetic oligonucleotide
  Antisense strand to SEQ ID NO: 603332
caucuccaaggcaaccugu

SEQ ID NO: 603334 - RNA, 19 nt, Artificial Sequence
  Description of Artificial Sequence: Synthetic oligonucleotide
  Sense strand starting at position 2354 of SEQ ID NO: 584970
ugggauuaucauggcccga

SEQ ID NO: 603335 - RNA, 19 nt, Artificial Sequence
  Description of Artificial Sequence: Synthetic oligonucleotide
  Antisense strand to SEQ ID NO: 603334
ucgggccaugauaauccca

SEQ ID NO: 603336 - RNA, 19 nt, Artificial Sequence
  Description of Artificial Sequence: Synthetic oligonucleotide
  Sense strand starting at position 2356 of SEQ ID NO: 584970
ggauuaucauggcccgauc

SEQ ID NO: 603337 - RNA, 19 nt, Artificial Sequence
  Description of Artificial Sequence: Synthetic oligonucleotide
  Antisense strand to SEQ ID NO: 603336
gaucgggccaugauaaucc

SEQ ID NO: 603338 - RNA, 19 nt, Artificial Sequence
  Description of Artificial Sequence: Synthetic oligonucleotide
  Sense strand starting at position 2365 of SEQ ID NO: 584970
uggcccgauccugaaguau

SEQ ID NO: 603339 - RNA, 19 nt, Artificial Sequence
  Description of Artificial Sequence: Synthetic oligonucleotide
  Antisense strand to SEQ ID NO: 603338
auacuucaggaucgggcca

SEQ ID NO: 603340 - RNA, 19 nt, Artificial Sequence
  Description of Artificial Sequence: Synthetic oligonucleotide
  Sense strand starting at position 2371 of SEQ ID NO: 584970
gauccugaaguauguguau

SEQ ID NO: 603341 - RNA, 19 nt, Artificial Sequence
  Description of Artificial Sequence: Synthetic oligonucleotide
  Antisense strand to SEQ ID NO: 603340
auacacauacuucaggauc

SEQ ID NO: 603342 - RNA, 19 nt, Artificial Sequence
  Description of Artificial Sequence: Synthetic oligonucleotide
  Sense strand starting at position 2373 of SEQ ID NO: 584970
uccugaaguauguguauag

SEQ ID NO: 603343 - RNA, 19 nt, Artificial Sequence
  Description of Artificial Sequence: Synthetic oligonucleotide
  Antisense strand to SEQ ID NO: 603342
cuauacacauacuucagga

SEQ ID NO: 603344 - RNA, 19 nt, Artificial Sequence
  Description of Artificial Sequence: Synthetic oligonucleotide
  Sense strand starting at position 2448 of SEQ ID NO: 584970
acagaauagugggaguaga

SEQ ID NO: 603345 - RNA, 19 nt, Artificial Sequence
  Description of Artificial Sequence: Synthetic oligonucleotide
  Antisense strand to SEQ ID NO: 603344
ucuacucccacuauucugu

SEQ ID NO: 603346 - RNA, 19 nt, Artificial Sequence
  Description of Artificial Sequence: Synthetic oligonucleotide
  Sense strand starting at position 2890 of SEQ ID NO: 584970
guucguucccuugaacugu

SEQ ID NO: 603347 - RNA, 19 nt, Artificial Sequence
  Description of Artificial Sequence: Synthetic oligonucleotide
  Antisense strand to SEQ ID NO: 603346
acaguucaagggaacgaac

SEQ ID NO: 603348 - RNA, 19 nt, Artificial Sequence
  Description of Artificial Sequence: Synthetic oligonucleotide
  Sense strand starting at position 2906 of SEQ ID NO: 584970
uguaacauccuguaagggu

SEQ ID NO: 603349 - RNA, 19 nt, Artificial Sequence
  Description of Artificial Sequence: Synthetic oligonucleotide
  Antisense strand to SEQ ID NO: 603348
acccuuacaggauguuaca

SEQ ID NO: 603350 - RNA, 19 nt, Artificial Sequence
  Description of Artificial Sequence: Synthetic oligonucleotide
  Sense strand starting at position 2945 of SEQ ID NO: 584970
gggugugaauucccucaug

SEQ ID NO: 603351 - RNA, 19 nt, Artificial Sequence
  Description of Artificial Sequence: Synthetic oligonucleotide
  Antisense strand to SEQ ID NO: 603350
caugagggaauucacaccc

SEQ ID NO: 603352 - RNA, 19 nt, Artificial Sequence
  Description of Artificial Sequence: Synthetic oligonucleotide
  Sense strand starting at position 2948 of SEQ ID NO: 584970
ugugaauucccucauggug

SEQ ID NO: 603353 - RNA, 19 nt, Artificial Sequence
  Description of Artificial Sequence: Synthetic oligonucleotide
  Antisense strand to SEQ ID NO: 603352
caccaugagggaauucaca

SEQ ID NO: 603354 - RNA, 19 nt, Artificial Sequence
  Description of Artificial Sequence: Synthetic oligonucleotide
  Sense strand starting at position 3050 of SEQ ID NO: 584970
ccaacuggucuguguccaa

SEQ ID NO: 603355 - RNA, 19 nt, Artificial Sequence
  Description of Artificial Sequence: Synthetic oligonucleotide
  Antisense strand to SEQ ID NO: 603354
uuggacacagaccaguugg

SEQ ID NO: 603356 - RNA, 19 nt, Artificial Sequence
  Description of Artificial Sequence: Synthetic oligonucleotide
  Sense strand starting at position 3054 of SEQ ID NO: 584970
cuggucuguguccaagaga

SEQ ID NO: 603357 - RNA, 19 nt, Artificial Sequence
  Description of Artificial Sequence: Synthetic oligonucleotide
  Antisense strand to SEQ ID NO: 603356
ucucuuggacacagaccag

SEQ ID NO: 603358 - RNA, 19 nt, Artificial Sequence
  Description of Artificial Sequence: Synthetic oligonucleotide
  Sense strand starting at position 3157 of SEQ ID NO: 584970
agcuacagcugccuugaua

SEQ ID NO: 603359 - RNA, 19 nt, Artificial Sequence
  Description of Artificial Sequence: Synthetic oligonucleotide
  Antisense strand to SEQ ID NO: 603358
uaucaaggcagcuguagcu

SEQ ID NO: 603360 - RNA, 19 nt, Artificial Sequence
  Description of Artificial Sequence: Synthetic oligonucleotide
  Sense strand starting at position 3213 of SEQ ID NO: 584970
aggguaucgugccuuaauu

SEQ ID NO: 603361 - RNA, 19 nt, Artificial Sequence
  Description of Artificial Sequence: Synthetic oligonucleotide
  Antisense strand to SEQ ID NO: 603360
aauuaaggcacgauacccu

SEQ ID NO: 603362 - RNA, 19 nt, Artificial Sequence
  Description of Artificial Sequence: Synthetic oligonucleotide
  Sense strand starting at position 3215 of SEQ ID NO: 584970
gguaucgugccuuaauuua

SEQ ID NO: 603363 - RNA, 19 nt, Artificial Sequence
  Description of Artificial Sequence: Synthetic oligonucleotide
  Antisense strand to SEQ ID NO: 603362
uaaauuaaggcacgauacc

SEQ ID NO: 603364 - RNA, 19 nt, Artificial Sequence
  Description of Artificial Sequence: Synthetic oligonucleotide
  Sense strand starting at position 3223 of SEQ ID NO: 584970
gccuuaauuuaccagguga

SEQ ID NO: 603365 - RNA, 19 nt, Artificial Sequence
  Description of Artificial Sequence: Synthetic oligonucleotide
  Antisense strand to SEQ ID NO: 603364
ucaccugguaaauuaaggc

SEQ ID NO: 603366 - RNA, 19 nt, Artificial Sequence
  Description of Artificial Sequence: Synthetic oligonucleotide
  Sense strand starting at position 3402 of SEQ ID NO: 584970
ccuuccugggcuugguaaa

SEQ ID NO: 603367 - RNA, 19 nt, Artificial Sequence
  Description of Artificial Sequence: Synthetic oligonucleotide
  Antisense strand to SEQ ID NO: 603366
uuuaccaagcccaggaagg

SEQ ID NO: 603368 - RNA, 19 nt, Artificial Sequence
  Description of Artificial Sequence: Synthetic oligonucleotide
  Sense strand starting at position 3413 of SEQ ID NO: 584970
uugguaaacuagucccuaa

SEQ ID NO: 603369 - RNA, 19 nt, Artificial Sequence
  Description of Artificial Sequence: Synthetic oligonucleotide
  Antisense strand to SEQ ID NO: 603368
uuagggacuaguuuaccaa

SEQ ID NO: 603370 - RNA, 19 nt, Artificial Sequence
  Description of Artificial Sequence: Synthetic oligonucleotide
  Sense strand starting at position 3416 of SEQ ID NO: 584970
guaaacuagucccuaaucu

SEQ ID NO: 603371 - RNA, 19 nt, Artificial Sequence
  Description of Artificial Sequence: Synthetic oligonucleotide
  Antisense strand to SEQ ID NO: 603370
agauuagggacuaguuuac

SEQ ID NO: 603372 - RNA, 19 nt, Artificial Sequence
  Description of Artificial Sequence: Synthetic oligonucleotide
  Sense strand starting at position 3512 of SEQ ID NO: 584970
agcuccauugcucaacaga

SEQ ID NO: 603373 - RNA, 19 nt, Artificial Sequence
  Description of Artificial Sequence: Synthetic oligonucleotide
  Antisense strand to SEQ ID NO: 603372
ucuguugagcaauggagcu

SEQ ID NO: 603374 - RNA, 19 nt, Artificial Sequence
  Description of Artificial Sequence: Synthetic oligonucleotide
  Sense strand starting at position 3600 of SEQ ID NO: 584970
ccaauuacugguuagcaca

SEQ ID NO: 603375 - RNA, 19 nt, Artificial Sequence
  Description of Artificial Sequence: Synthetic oligonucleotide
  Antisense strand to SEQ ID NO: 603374
ugugcuaaccaguaauugg

SEQ ID NO: 603376 - RNA, 19 nt, Artificial Sequence
  Description of Artificial Sequence: Synthetic oligonucleotide
  Sense strand starting at position 3909 of SEQ ID NO: 584970
gcacuaaauaguugccgaa

SEQ ID NO: 603377 - RNA, 19 nt, Artificial Sequence
  Description of Artificial Sequence: Synthetic oligonucleotide
  Antisense strand to SEQ ID NO: 603376
uucggcaacuauuuagugc

SEQ ID NO: 603378 - RNA, 19 nt, Artificial Sequence
  Description of Artificial Sequence: Synthetic oligonucleotide
  Sense strand starting at position 3913 of SEQ ID NO: 584970
uaaauaguugccgaaugca

SEQ ID NO: 603379 - RNA, 19 nt, Artificial Sequence
  Description of Artificial Sequence: Synthetic oligonucleotide
  Antisense strand to SEQ ID NO: 603378
ugcauucggcaacuauuua

SEQ ID NO: 603380 - RNA, 19 nt, Artificial Sequence
  Description of Artificial Sequence: Synthetic oligonucleotide
  Sense strand starting at position 3921 of SEQ ID NO: 584970
ugccgaaugcaugaaugau

SEQ ID NO: 603381 - RNA, 19 nt, Artificial Sequence
  Description of Artificial Sequence: Synthetic oligonucleotide
  Antisense strand to SEQ ID NO: 603380
aucauucaugcauucggca

SEQ ID NO: 603382 - RNA, 19 nt, Artificial Sequence
  Description of Artificial Sequence: Synthetic oligonucleotide
  Sense strand starting at position 3938 of SEQ ID NO: 584970
auagauaccucucugucuu

SEQ ID NO: 603383 - RNA, 19 nt, Artificial Sequence
  Description of Artificial Sequence: Synthetic oligonucleotide
  Antisense strand to SEQ ID NO: 603382
aagacagagagguaucuau

SEQ ID NO: 603384 - RNA, 19 nt, Artificial Sequence
  Description of Artificial Sequence: Synthetic oligonucleotide
  Sense strand starting at position 30 of SEQ ID NO: 584971
gccagaguuguaggcuaga

SEQ ID NO: 603385 - RNA, 19 nt, Artificial Sequence
  Description of Artificial Sequence: Synthetic oligonucleotide
  Antisense strand to SEQ ID NO: 603384
ucuagccuacaacucuggc

SEQ ID NO: 603386 - RNA, 19 nt, Artificial Sequence
  Description of Artificial Sequence: Synthetic oligonucleotide
  Sense strand starting at position 60 of SEQ ID NO: 584971
cuggguuccugaagggagu

SEQ ID NO: 603387 - RNA, 19 nt, Artificial Sequence
  Description of Artificial Sequence: Synthetic oligonucleotide
  Antisense strand to SEQ ID NO: 603386
acucccuucaggaacccag

SEQ ID NO: 603388 - RNA, 19 nt, Artificial Sequence
  Description of Artificial Sequence: Synthetic oligonucleotide
  Sense strand starting at position 74 of SEQ ID NO: 584971
ggaguagagucugaagaca

SEQ ID NO: 603389 - RNA, 19 nt, Artificial Sequence
  Description of Artificial Sequence: Synthetic oligonucleotide
  Antisense strand to SEQ ID NO: 603388
ugucuucagacucuacucc

SEQ ID NO: 603390 - RNA, 19 nt, Artificial Sequence
  Description of Artificial Sequence: Synthetic oligonucleotide
  Sense strand starting at position 106 of SEQ ID NO: 584971
ggguuugggagccagaguu

SEQ ID NO: 603391 - RNA, 19 nt, Artificial Sequence
  Description of Artificial Sequence: Synthetic oligonucleotide
  Antisense strand to SEQ ID NO: 603390
aacucuggcucccaaaccc

SEQ ID NO: 603392 - RNA, 19 nt, Artificial Sequence
  Description of Artificial Sequence: Synthetic oligonucleotide
  Sense strand starting at position 185 of SEQ ID NO: 584971
ugggccucgcgcuagagau

SEQ ID NO: 603393 - RNA, 19 nt, Artificial Sequence
  Description of Artificial Sequence: Synthetic oligonucleotide
  Antisense strand to SEQ ID NO: 603392
aucucuagcgcgaggccca

SEQ ID NO: 603394 - RNA, 19 nt, Artificial Sequence
  Description of Artificial Sequence: Synthetic oligonucleotide
  Sense strand starting at position 451 of SEQ ID NO: 584971
ccggaaucucugcggcaca

SEQ ID NO: 603395 - RNA, 19 nt, Artificial Sequence
  Description of Artificial Sequence: Synthetic oligonucleotide
  Antisense strand to SEQ ID NO: 603394
ugugccgcagagauuccgg

SEQ ID NO: 603396 - RNA, 19 nt, Artificial Sequence
  Description of Artificial Sequence: Synthetic oligonucleotide
  Sense strand starting at position 580 of SEQ ID NO: 584971
gggaauggcugcccgagaa

SEQ ID NO: 603397 - RNA, 19 nt, Artificial Sequence
  Description of Artificial Sequence: Synthetic oligonucleotide
  Antisense strand to SEQ ID NO: 603396
uucucgggcagccauuccc

SEQ ID NO: 603398 - RNA, 19 nt, Artificial Sequence
  Description of Artificial Sequence: Synthetic oligonucleotide
  Sense strand starting at position 745 of SEQ ID NO: 584971
agaggacacuguuaaggaa

SEQ ID NO: 603399 - RNA, 19 nt, Artificial Sequence
  Description of Artificial Sequence: Synthetic oligonucleotide
  Antisense strand to SEQ ID NO: 603398
uuccuuaacaguguccucu

SEQ ID NO: 603400 - RNA, 19 nt, Artificial Sequence
  Description of Artificial Sequence: Synthetic oligonucleotide
  Sense strand starting at position 1039 of SEQ ID NO: 584971
ccuugugguagcuacguua

SEQ ID NO: 603401 - RNA, 19 nt, Artificial Sequence
  Description of Artificial Sequence: Synthetic oligonucleotide
  Antisense strand to SEQ ID NO: 603400
uaacguagcuaccacaagg

SEQ ID NO: 603402 - RNA, 19 nt, Artificial Sequence
  Description of Artificial Sequence: Synthetic oligonucleotide
  Sense strand starting at position 1342 of SEQ ID NO: 584971
ggacacauguccuaacuga

SEQ ID NO: 603403 - RNA, 19 nt, Artificial Sequence
  Description of Artificial Sequence: Synthetic oligonucleotide
  Antisense strand to SEQ ID NO: 603402
ucaguuaggacaugugucc

SEQ ID NO: 603404 - RNA, 19 nt, Artificial Sequence
  Description of Artificial Sequence: Synthetic oligonucleotide
  Sense strand starting at position 1474 of SEQ ID NO: 584971
cuuccuuuagucugcuaga

SEQ ID NO: 603405 - RNA, 19 nt, Artificial Sequence
  Description of Artificial Sequence: Synthetic oligonucleotide
  Antisense strand to SEQ ID NO: 603404
ucuagcagacuaaaggaag

SEQ ID NO: 603406 - RNA, 19 nt, Artificial Sequence
  Description of Artificial Sequence: Synthetic oligonucleotide
  Sense strand starting at position 1475 of SEQ ID NO: 584971
uuccuuuagucugcuagaa

SEQ ID NO: 603407 - RNA, 19 nt, Artificial Sequence
  Description of Artificial Sequence: Synthetic oligonucleotide
  Antisense strand to SEQ ID NO: 603406
uucuagcagacuaaaggaa

SEQ ID NO: 603408 - RNA, 19 nt, Artificial Sequence
  Description of Artificial Sequence: Synthetic oligonucleotide
  Sense strand starting at position 1479 of SEQ ID NO: 584971
uuuagucugcuagaaacuu

SEQ ID NO: 603409 - RNA, 19 nt, Artificial Sequence
  Description of Artificial Sequence: Synthetic oligonucleotide
  Antisense strand to SEQ ID NO: 603408
aaguuucuagcagacuaaa

SEQ ID NO: 603410 - RNA, 19 nt, Artificial Sequence
  Description of Artificial Sequence: Synthetic oligonucleotide
  Sense strand starting at position 1516 of SEQ ID NO: 584971
caggguugauccuagaauu

SEQ ID NO: 603411 - RNA, 19 nt, Artificial Sequence
  Description of Artificial Sequence: Synthetic oligonucleotide
  Antisense strand to SEQ ID NO: 603410
aauucuaggaucaacccug

SEQ ID NO: 603412 - RNA, 19 nt, Artificial Sequence
  Description of Artificial Sequence: Synthetic oligonucleotide
  Sense strand starting at position 1696 of SEQ ID NO: 584971
ugaggagagaaguguucuu

SEQ ID NO: 603413 - RNA, 19 nt, Artificial Sequence
  Description of Artificial Sequence: Synthetic oligonucleotide
  Antisense strand to SEQ ID NO: 603412
aagaacacuucucuccuca

SEQ ID NO: 603414 - RNA, 19 nt, Artificial Sequence
  Description of Artificial Sequence: Synthetic oligonucleotide
  Sense strand starting at position 1701 of SEQ ID NO: 584971
agagaaguguucuuaccuu

SEQ ID NO: 603415 - RNA, 19 nt, Artificial Sequence
  Description of Artificial Sequence: Synthetic oligonucleotide
  Antisense strand to SEQ ID NO: 603414
aagguaagaacacuucucu

SEQ ID NO: 603416 - RNA, 19 nt, Artificial Sequence
  Description of Artificial Sequence: Synthetic oligonucleotide
  Sense strand starting at position 2255 of SEQ ID NO: 584971
ugggcacacccgugaagau

SEQ ID NO: 603417 - RNA, 19 nt, Artificial Sequence
  Description of Artificial Sequence: Synthetic oligonucleotide
  Antisense strand to SEQ ID NO: 603416
aucuucacgggugugccca

SEQ ID NO: 603418 - RNA, 19 nt, Artificial Sequence
  Description of Artificial Sequence: Synthetic oligonucleotide
  Sense strand starting at position 2256 of SEQ ID NO: 584971
gggcacacccgugaagauu

SEQ ID NO: 603419 - RNA, 19 nt, Artificial Sequence
  Description of Artificial Sequence: Synthetic oligonucleotide
  Antisense strand to SEQ ID NO: 603418
aaucuucacgggugugccc

SEQ ID NO: 603420 - RNA, 19 nt, Artificial Sequence
  Description of Artificial Sequence: Synthetic oligonucleotide
  Sense strand starting at position 2293 of SEQ ID NO: 584971
auggaaagguggucguuua

SEQ ID NO: 603421 - RNA, 19 nt, Artificial Sequence
  Description of Artificial Sequence: Synthetic oligonucleotide
  Antisense strand to SEQ ID NO: 603420
uaaacgaccaccuuuccau

SEQ ID NO: 603422 - RNA, 19 nt, Artificial Sequence
  Description of Artificial Sequence: Synthetic oligonucleotide
  Sense strand starting at position 2294 of SEQ ID NO: 584971
uggaaagguggucguuuaa

SEQ ID NO: 603423 - RNA, 19 nt, Artificial Sequence
  Description of Artificial Sequence: Synthetic oligonucleotide
  Antisense strand to SEQ ID NO: 603422
uuaaacgaccaccuuucca

SEQ ID NO: 603424 - RNA, 19 nt, Artificial Sequence
  Description of Artificial Sequence: Synthetic oligonucleotide
  Sense strand starting at position 2304 of SEQ ID NO: 584971
gucguuuaaucauucugca

SEQ ID NO: 603425 - RNA, 19 nt, Artificial Sequence
  Description of Artificial Sequence: Synthetic oligonucleotide
  Antisense strand to SEQ ID NO: 603424
ugcagaaugauuaaacgac

SEQ ID NO: 603426 - RNA, 19 nt, Artificial Sequence
  Description of Artificial Sequence: Synthetic oligonucleotide
  Sense strand starting at position 2356 of SEQ ID NO: 584971
cugggacuguggucugaga

SEQ ID NO: 603427 - RNA, 19 nt, Artificial Sequence
  Description of Artificial Sequence: Synthetic oligonucleotide
  Antisense strand to SEQ ID NO: 603426
ucucagaccacagucccag

SEQ ID NO: 603428 - RNA, 19 nt, Artificial Sequence
  Description of Artificial Sequence: Synthetic oligonucleotide
  Sense strand starting at position 2358 of SEQ ID NO: 584971
gggacuguggucugagaga

SEQ ID NO: 603429 - RNA, 19 nt, Artificial Sequence
  Description of Artificial Sequence: Synthetic oligonucleotide
  Antisense strand to SEQ ID NO: 603428
ucucucagaccacaguccc

SEQ ID NO: 603430 - RNA, 19 nt, Artificial Sequence
  Description of Artificial Sequence: Synthetic oligonucleotide
  Sense strand starting at position 2473 of SEQ ID NO: 584971
ccagacuggugucucagua

SEQ ID NO: 603431 - RNA, 19 nt, Artificial Sequence
  Description of Artificial Sequence: Synthetic oligonucleotide
  Antisense strand to SEQ ID NO: 603430
uacugagacaccagucugg

SEQ ID NO: 603432 - RNA, 19 nt, Artificial Sequence
  Description of Artificial Sequence: Synthetic oligonucleotide
  Sense strand starting at position 3097 of SEQ ID NO: 584971
acagguugccuuggagaug

SEQ ID NO: 603433 - RNA, 19 nt, Artificial Sequence
  Description of Artificial Sequence: Synthetic oligonucleotide
  Antisense strand to SEQ ID NO: 603432
caucuccaaggcaaccugu

SEQ ID NO: 603434 - RNA, 19 nt, Artificial Sequence
  Description of Artificial Sequence: Synthetic oligonucleotide
  Sense strand starting at position 3127 of SEQ ID NO: 584971
ugggauuaucauggcccga

SEQ ID NO: 603435 - RNA, 19 nt, Artificial Sequence
  Description of Artificial Sequence: Synthetic oligonucleotide
  Antisense strand to SEQ ID NO: 603434
ucgggccaugauaauccca

SEQ ID NO: 603436 - RNA, 19 nt, Artificial Sequence
  Description of Artificial Sequence: Synthetic oligonucleotide
  Sense strand starting at position 3129 of SEQ ID NO: 584971
ggauuaucauggcccgauc

SEQ ID NO: 603437 - RNA, 19 nt, Artificial Sequence
  Description of Artificial Sequence: Synthetic oligonucleotide
  Antisense strand to SEQ ID NO: 603436
gaucgggccaugauaaucc

SEQ ID NO: 603438 - RNA, 19 nt, Artificial Sequence
  Description of Artificial Sequence: Synthetic oligonucleotide
  Sense strand starting at position 3138 of SEQ ID NO: 584971
uggcccgauccugaaguau

SEQ ID NO: 603439 - RNA, 19 nt, Artificial Sequence
  Description of Artificial Sequence: Synthetic oligonucleotide
  Antisense strand to SEQ ID NO: 603438
auacuucaggaucgggcca

SEQ ID NO: 603440 - RNA, 19 nt, Artificial Sequence
  Description of Artificial Sequence: Synthetic oligonucleotide
  Sense strand starting at position 3144 of SEQ ID NO: 584971
gauccugaaguauguguau

SEQ ID NO: 603441 - RNA, 19 nt, Artificial Sequence
  Description of Artificial Sequence: Synthetic oligonucleotide
  Antisense strand to SEQ ID NO: 603440
auacacauacuucaggauc

SEQ ID NO: 603442 - RNA, 19 nt, Artificial Sequence
  Description of Artificial Sequence: Synthetic oligonucleotide
  Sense strand starting at position 3146 of SEQ ID NO: 584971
uccugaaguauguguauag

SEQ ID NO: 603443 - RNA, 19 nt, Artificial Sequence
  Description of Artificial Sequence: Synthetic oligonucleotide
  Antisense strand to SEQ ID NO: 603442
cuauacacauacuucagga

SEQ ID NO: 603444 - RNA, 19 nt, Artificial Sequence
  Description of Artificial Sequence: Synthetic oligonucleotide
  Sense strand starting at position 3221 of SEQ ID NO: 584971
acagaauagugggaguaga

SEQ ID NO: 603445 - RNA, 19 nt, Artificial Sequence
  Description of Artificial Sequence: Synthetic oligonucleotide
  Antisense strand to SEQ ID NO: 603444
ucuacucccacuauucugu

SEQ ID NO: 603446 - RNA, 19 nt, Artificial Sequence
  Description of Artificial Sequence: Synthetic oligonucleotide
  Sense strand starting at position 3659 of SEQ ID NO: 584971
ugguguucguucccuugaa

SEQ ID NO: 603447 - RNA, 19 nt, Artificial Sequence
  Description of Artificial Sequence: Synthetic oligonucleotide
  Antisense strand to SEQ ID NO: 603446
uucaagggaacgaacacca

SEQ ID NO: 603448 - RNA, 19 nt, Artificial Sequence
  Description of Artificial Sequence: Synthetic oligonucleotide
  Sense strand starting at position 3660 of SEQ ID NO: 584971
gguguucguucccuugaac

SEQ ID NO: 603449 - RNA, 19 nt, Artificial Sequence
  Description of Artificial Sequence: Synthetic oligonucleotide
  Antisense strand to SEQ ID NO: 603448
guucaagggaacgaacacc

SEQ ID NO: 603450 - RNA, 19 nt, Artificial Sequence
  Description of Artificial Sequence: Synthetic oligonucleotide
  Sense strand starting at position 3663 of SEQ ID NO: 584971
guucguucccuugaacugu

SEQ ID NO: 603451 - RNA, 19 nt, Artificial Sequence
  Description of Artificial Sequence: Synthetic oligonucleotide
  Antisense strand to SEQ ID NO: 603450
acaguucaagggaacgaac

SEQ ID NO: 603452 - RNA, 19 nt, Artificial Sequence
  Description of Artificial Sequence: Synthetic oligonucleotide
  Sense strand starting at position 3679 of SEQ ID NO: 584971
uguaacauccuguaagggu

SEQ ID NO: 603453 - RNA, 19 nt, Artificial Sequence
  Description of Artificial Sequence: Synthetic oligonucleotide
  Antisense strand to SEQ ID NO: 603452
acccuuacaggauguuaca

SEQ ID NO: 603454 - RNA, 19 nt, Artificial Sequence
  Description of Artificial Sequence: Synthetic oligonucleotide
  Sense strand starting at position 3718 of SEQ ID NO: 584971
gggugugaauucccucaug

SEQ ID NO: 603455 - RNA, 19 nt, Artificial Sequence
  Description of Artificial Sequence: Synthetic oligonucleotide
  Antisense strand to SEQ ID NO: 603454
caugagggaauucacaccc

SEQ ID NO: 603456 - RNA, 19 nt, Artificial Sequence
  Description of Artificial Sequence: Synthetic oligonucleotide
  Sense strand starting at position 3721 of SEQ ID NO: 584971
ugugaauucccucauggug

SEQ ID NO: 603457 - RNA, 19 nt, Artificial Sequence
  Description of Artificial Sequence: Synthetic oligonucleotide
  Antisense strand to SEQ ID NO: 603456
caccaugagggaauucaca

SEQ ID NO: 603458 - RNA, 19 nt, Artificial Sequence
  Description of Artificial Sequence: Synthetic oligonucleotide
  Sense strand starting at position 3823 of SEQ ID NO: 584971
ccaacuggucuguguccaa

SEQ ID NO: 603459 - RNA, 19 nt, Artificial Sequence
  Description of Artificial Sequence: Synthetic oligonucleotide
  Antisense strand to SEQ ID NO: 603458
uuggacacagaccaguugg

SEQ ID NO: 603460 - RNA, 19 nt, Artificial Sequence
  Description of Artificial Sequence: Synthetic oligonucleotide
  Sense strand starting at position 3827 of SEQ ID NO: 584971
cuggucuguguccaagaga

SEQ ID NO: 603461 - RNA, 19 nt, Artificial Sequence
  Description of Artificial Sequence: Synthetic oligonucleotide
  Antisense strand to SEQ ID NO: 603460
ucucuuggacacagaccag

SEQ ID NO: 603462 - RNA, 19 nt, Artificial Sequence
  Description of Artificial Sequence: Synthetic oligonucleotide
  Sense strand starting at position 3930 of SEQ ID NO: 584971
agcuacagcugccuugaua

SEQ ID NO: 603463 - RNA, 19 nt, Artificial Sequence
  Description of Artificial Sequence: Synthetic oligonucleotide
  Antisense strand to SEQ ID NO: 603462
uaucaaggcagcuguagcu

SEQ ID NO: 603464 - RNA, 19 nt, Artificial Sequence
  Description of Artificial Sequence: Synthetic oligonucleotide
  Sense strand starting at position 11 of SEQ ID NO: 584972
gccagaguuguaggcuaga

SEQ ID NO: 603465 - RNA, 19 nt, Artificial Sequence
  Description of Artificial Sequence: Synthetic oligonucleotide
  Antisense strand to SEQ ID NO: 603464
ucuagccuacaacucuggc

SEQ ID NO: 603466 - RNA, 19 nt, Artificial Sequence
  Description of Artificial Sequence: Synthetic oligonucleotide
  Sense strand starting at position 41 of SEQ ID NO: 584972
cuggguuccugaagggagu

SEQ ID NO: 603467 - RNA, 19 nt, Artificial Sequence
  Description of Artificial Sequence: Synthetic oligonucleotide
  Antisense strand to SEQ ID NO: 603466
acucccuucaggaacccag

SEQ ID NO: 603468 - RNA, 19 nt, Artificial Sequence
  Description of Artificial Sequence: Synthetic oligonucleotide
  Sense strand starting at position 55 of SEQ ID NO: 584972
ggaguagagucugaagaca

SEQ ID NO: 603469 - RNA, 19 nt, Artificial Sequence
  Description of Artificial Sequence: Synthetic oligonucleotide
  Antisense strand to SEQ ID NO: 603468
ugucuucagacucuacucc

SEQ ID NO: 603470 - RNA, 19 nt, Artificial Sequence
  Description of Artificial Sequence: Synthetic oligonucleotide
  Sense strand starting at position 87 of SEQ ID NO: 584972
ggguuugggagccagaguu

SEQ ID NO: 603471 - RNA, 19 nt, Artificial Sequence
  Description of Artificial Sequence: Synthetic oligonucleotide
  Antisense strand to SEQ ID NO: 603470
aacucuggcucccaaaccc

SEQ ID NO: 603472 - RNA, 19 nt, Artificial Sequence
  Description of Artificial Sequence: Synthetic oligonucleotide
  Sense strand starting at position 166 of SEQ ID NO: 584972
ugggccucgcgcuagagau

SEQ ID NO: 603473 - RNA, 19 nt, Artificial Sequence
  Description of Artificial Sequence: Synthetic oligonucleotide
  Antisense strand to SEQ ID NO: 603472
aucucuagcgcgaggccca

SEQ ID NO: 603474 - RNA, 19 nt, Artificial Sequence
  Description of Artificial Sequence: Synthetic oligonucleotide
  Sense strand starting at position 432 of SEQ ID NO: 584972
ccggaaucucugcggcaca

SEQ ID NO: 603475 - RNA, 19 nt, Artificial Sequence
  Description of Artificial Sequence: Synthetic oligonucleotide
  Antisense strand to SEQ ID NO: 603474
ugugccgcagagauuccgg

SEQ ID NO: 603476 - RNA, 19 nt, Artificial Sequence
  Description of Artificial Sequence: Synthetic oligonucleotide
  Sense strand starting at position 561 of SEQ ID NO: 584972
gggaauggcugcccgagaa

SEQ ID NO: 603477 - RNA, 19 nt, Artificial Sequence
  Description of Artificial Sequence: Synthetic oligonucleotide
  Antisense strand to SEQ ID NO: 603476
uucucgggcagccauuccc

SEQ ID NO: 603478 - RNA, 19 nt, Artificial Sequence
  Description of Artificial Sequence: Synthetic oligonucleotide
  Sense strand starting at position 726 of SEQ ID NO: 584972
agaggacacuguuaaggaa

SEQ ID NO: 603479 - RNA, 19 nt, Artificial Sequence
  Description of Artificial Sequence: Synthetic oligonucleotide
  Antisense strand to SEQ ID NO: 603478
uuccuuaacaguguccucu

SEQ ID NO: 603480 - RNA, 19 nt, Artificial Sequence
  Description of Artificial Sequence: Synthetic oligonucleotide
  Sense strand starting at position 1020 of SEQ ID NO: 584972
ccuugugguagcuacguua

SEQ ID NO: 603481 - RNA, 19 nt, Artificial Sequence
  Description of Artificial Sequence: Synthetic oligonucleotide
  Antisense strand to SEQ ID NO: 603480
uaacguagcuaccacaagg

SEQ ID NO: 603482 - RNA, 19 nt, Artificial Sequence
  Description of Artificial Sequence: Synthetic oligonucleotide
  Sense strand starting at position 1323 of SEQ ID NO: 584972
ggacacauguccuaacuga

SEQ ID NO: 603483 - RNA, 19 nt, Artificial Sequence
  Description of Artificial Sequence: Synthetic oligonucleotide
  Antisense strand to SEQ ID NO: 603482
ucaguuaggacaugugucc

SEQ ID NO: 603484 - RNA, 19 nt, Artificial Sequence
  Description of Artificial Sequence: Synthetic oligonucleotide
  Sense strand starting at position 1455 of SEQ ID NO: 584972
cuuccuuuagucugcuaga

SEQ ID NO: 603485 - RNA, 19 nt, Artificial Sequence
  Description of Artificial Sequence: Synthetic oligonucleotide
  Antisense strand to SEQ ID NO: 603484
ucuagcagacuaaaggaag

SEQ ID NO: 603486 - RNA, 19 nt, Artificial Sequence
  Description of Artificial Sequence: Synthetic oligonucleotide
  Sense strand starting at position 1456 of SEQ ID NO: 584972
uuccuuuagucugcuagaa

SEQ ID NO: 603487 - RNA, 19 nt, Artificial Sequence
  Description of Artificial Sequence: Synthetic oligonucleotide
  Antisense strand to SEQ ID NO: 603486
uucuagcagacuaaaggaa

SEQ ID NO: 603488 - RNA, 19 nt, Artificial Sequence
  Description of Artificial Sequence: Synthetic oligonucleotide
  Sense strand starting at position 1460 of SEQ ID NO: 584972
uuuagucugcuagaaacuu

SEQ ID NO: 603489 - RNA, 19 nt, Artificial Sequence
  Description of Artificial Sequence: Synthetic oligonucleotide
  Antisense strand to SEQ ID NO: 603488
aaguuucuagcagacuaaa

SEQ ID NO: 603490 - RNA, 19 nt, Artificial Sequence
  Description of Artificial Sequence: Synthetic oligonucleotide
  Sense strand starting at position 1677 of SEQ ID NO: 584972
ugaggagagaaguguucuu

SEQ ID NO: 603491 - RNA, 19 nt, Artificial Sequence
  Description of Artificial Sequence: Synthetic oligonucleotide
  Antisense strand to SEQ ID NO: 603490
aagaacacuucucuccuca

SEQ ID NO: 603492 - RNA, 19 nt, Artificial Sequence
  Description of Artificial Sequence: Synthetic oligonucleotide
  Sense strand starting at position 1682 of SEQ ID NO: 584972
agagaaguguucuuaccuu

SEQ ID NO: 603493 - RNA, 19 nt, Artificial Sequence
  Description of Artificial Sequence: Synthetic oligonucleotide
  Antisense strand to SEQ ID NO: 603492
aagguaagaacacuucucu

SEQ ID NO: 603494 - RNA, 19 nt, Artificial Sequence
  Description of Artificial Sequence: Synthetic oligonucleotide
  Sense strand starting at position 2236 of SEQ ID NO: 584972
ugggcacacccgugaagau

SEQ ID NO: 603495 - RNA, 19 nt, Artificial Sequence
  Description of Artificial Sequence: Synthetic oligonucleotide
  Antisense strand to SEQ ID NO: 603494
aucuucacgggugugccca

SEQ ID NO: 603496 - RNA, 19 nt, Artificial Sequence
  Description of Artificial Sequence: Synthetic oligonucleotide
  Sense strand starting at position 2237 of SEQ ID NO: 584972
gggcacacccgugaagauu

SEQ ID NO: 603497 - RNA, 19 nt, Artificial Sequence
  Description of Artificial Sequence: Synthetic oligonucleotide
  Antisense strand to SEQ ID NO: 603496
aaucuucacgggugugccc

SEQ ID NO: 603498 - RNA, 19 nt, Artificial Sequence
  Description of Artificial Sequence: Synthetic oligonucleotide
  Sense strand starting at position 2274 of SEQ ID NO: 584972
auggaaagguggucguuua

SEQ ID NO: 603499 - RNA, 19 nt, Artificial Sequence
  Description of Artificial Sequence: Synthetic oligonucleotide
  Antisense strand to SEQ ID NO: 603498
uaaacgaccaccuuuccau

SEQ ID NO: 603500 - RNA, 19 nt, Artificial Sequence
  Description of Artificial Sequence: Synthetic oligonucleotide
  Sense strand starting at position 2275 of SEQ ID NO: 584972
uggaaagguggucguuuaa

SEQ ID NO: 603501 - RNA, 19 nt, Artificial Sequence
  Description of Artificial Sequence: Synthetic oligonucleotide
  Antisense strand to SEQ ID NO: 603500
uuaaacgaccaccuuucca

SEQ ID NO: 603502 - RNA, 19 nt, Artificial Sequence
  Description of Artificial Sequence: Synthetic oligonucleotide
  Sense strand starting at position 2337 of SEQ ID NO: 584972
cugggacuguggucugaga

SEQ ID NO: 603503 - RNA, 19 nt, Artificial Sequence
  Description of Artificial Sequence: Synthetic oligonucleotide
  Antisense strand to SEQ ID NO: 603502
ucucagaccacagucccag

SEQ ID NO: 603504 - RNA, 19 nt, Artificial Sequence
  Description of Artificial Sequence: Synthetic oligonucleotide
  Sense strand starting at position 2339 of SEQ ID NO: 584972
gggacuguggucugagaga

SEQ ID NO: 603505 - RNA, 19 nt, Artificial Sequence
  Description of Artificial Sequence: Synthetic oligonucleotide
  Antisense strand to SEQ ID NO: 603504
ucucucagaccacaguccc

SEQ ID NO: 603506 - RNA, 19 nt, Artificial Sequence
  Description of Artificial Sequence: Synthetic oligonucleotide
  Sense strand starting at position 2454 of SEQ ID NO: 584972
ccagacuggugucucagua

SEQ ID NO: 603507 - RNA, 19 nt, Artificial Sequence
  Description of Artificial Sequence: Synthetic oligonucleotide
  Antisense strand to SEQ ID NO: 603506
uacugagacaccagucugg

SEQ ID NO: 603508 - RNA, 19 nt, Artificial Sequence
  Description of Artificial Sequence: Synthetic oligonucleotide
  Sense strand starting at position 3078 of SEQ ID NO: 584972
acagguugccuuggagaug

SEQ ID NO: 603509 - RNA, 19 nt, Artificial Sequence
  Description of Artificial Sequence: Synthetic oligonucleotide
  Antisense strand to SEQ ID NO: 603508
caucuccaaggcaaccugu

SEQ ID NO: 603510 - RNA, 19 nt, Artificial Sequence
  Description of Artificial Sequence: Synthetic oligonucleotide
  Sense strand starting at position 3108 of SEQ ID NO: 584972
ugggauuaucauggcccga

SEQ ID NO: 603511 - RNA, 19 nt, Artificial Sequence
  Description of Artificial Sequence: Synthetic oligonucleotide
  Antisense strand to SEQ ID NO: 603510
ucgggccaugauaauccca

SEQ ID NO: 603512 - RNA, 19 nt, Artificial Sequence
  Description of Artificial Sequence: Synthetic oligonucleotide
  Sense strand starting at position 3110 of SEQ ID NO: 584972
ggauuaucauggcccgauc

SEQ ID NO: 603513 - RNA, 19 nt, Artificial Sequence
  Description of Artificial Sequence: Synthetic oligonucleotide
  Antisense strand to SEQ ID NO: 603512
gaucgggccaugauaaucc

SEQ ID NO: 603514 - RNA, 19 nt, Artificial Sequence
  Description of Artificial Sequence: Synthetic oligonucleotide
  Sense strand starting at position 3119 of SEQ ID NO: 584972
uggcccgauccugaaguau

SEQ ID NO: 603515 - RNA, 19 nt, Artificial Sequence
  Description of Artificial Sequence: Synthetic oligonucleotide
  Antisense strand to SEQ ID NO: 603514
auacuucaggaucgggcca

SEQ ID NO: 603516 - RNA, 19 nt, Artificial Sequence
  Description of Artificial Sequence: Synthetic oligonucleotide
  Sense strand starting at position 3125 of SEQ ID NO: 584972
gauccugaaguauguguau

SEQ ID NO: 603517 - RNA, 19 nt, Artificial Sequence
  Description of Artificial Sequence: Synthetic oligonucleotide
  Antisense strand to SEQ ID NO: 603516
auacacauacuucaggauc

SEQ ID NO: 603518 - RNA, 19 nt, Artificial Sequence
  Description of Artificial Sequence: Synthetic oligonucleotide
  Sense strand starting at position 3127 of SEQ ID NO: 584972
uccugaaguauguguauag

SEQ ID NO: 603519 - RNA, 19 nt, Artificial Sequence
  Description of Artificial Sequence: Synthetic oligonucleotide
  Antisense strand to SEQ ID NO: 603518
cuauacacauacuucagga

SEQ ID NO: 603520 - RNA, 19 nt, Artificial Sequence
  Description of Artificial Sequence: Synthetic oligonucleotide
  Sense strand starting at position 3202 of SEQ ID NO: 584972
acagaauagugggaguaga

SEQ ID NO: 603521 - RNA, 19 nt, Artificial Sequence
  Description of Artificial Sequence: Synthetic oligonucleotide
  Antisense strand to SEQ ID NO: 603520
ucuacucccacuauucugu

SEQ ID NO: 603522 - RNA, 19 nt, Artificial Sequence
  Description of Artificial Sequence: Synthetic oligonucleotide
  Sense strand starting at position 3640 of SEQ ID NO: 584972
ugguguucguucccuugaa

SEQ ID NO: 603523 - RNA, 19 nt, Artificial Sequence
  Description of Artificial Sequence: Synthetic oligonucleotide
  Antisense strand to SEQ ID NO: 603522
uucaagggaacgaacacca

SEQ ID NO: 603524 - RNA, 19 nt, Artificial Sequence
  Description of Artificial Sequence: Synthetic oligonucleotide
  Sense strand starting at position 3644 of SEQ ID NO: 584972
guucguucccuugaacugu

SEQ ID NO: 603525 - RNA, 19 nt, Artificial Sequence
  Description of Artificial Sequence: Synthetic oligonucleotide
  Antisense strand to SEQ ID NO: 603524
acaguucaagggaacgaac

SEQ ID NO: 603526 - RNA, 19 nt, Artificial Sequence
  Description of Artificial Sequence: Synthetic oligonucleotide
  Sense strand starting at position 3660 of SEQ ID NO: 584972
uguaacauccuguaagggu

SEQ ID NO: 603527 - RNA, 19 nt, Artificial Sequence
  Description of Artificial Sequence: Synthetic oligonucleotide
  Antisense strand to SEQ ID NO: 603526
acccuuacaggauguuaca

SEQ ID NO: 603528 - RNA, 19 nt, Artificial Sequence
  Description of Artificial Sequence: Synthetic oligonucleotide
  Sense strand starting at position 3699 of SEQ ID NO: 584972
gggugugaauucccucaug

SEQ ID NO: 603529 - RNA, 19 nt, Artificial Sequence
  Description of Artificial Sequence: Synthetic oligonucleotide
  Antisense strand to SEQ ID NO: 603528
caugagggaauucacaccc

SEQ ID NO: 603530 - RNA, 19 nt, Artificial Sequence
  Description of Artificial Sequence: Synthetic oligonucleotide
  Sense strand starting at position 3702 of SEQ ID NO: 584972
ugugaauucccucauggug

SEQ ID NO: 603531 - RNA, 19 nt, Artificial Sequence
  Description of Artificial Sequence: Synthetic oligonucleotide
  Antisense strand to SEQ ID NO: 603530
caccaugagggaauucaca

SEQ ID NO: 603532 - RNA, 19 nt, Artificial Sequence
  Description of Artificial Sequence: Synthetic oligonucleotide
  Sense strand starting at position 3804 of SEQ ID NO: 584972
ccaacuggucuguguccaa

SEQ ID NO: 603533 - RNA, 19 nt, Artificial Sequence
  Description of Artificial Sequence: Synthetic oligonucleotide
  Antisense strand to SEQ ID NO: 603532
uuggacacagaccaguugg

SEQ ID NO: 603534 - RNA, 19 nt, Artificial Sequence
  Description of Artificial Sequence: Synthetic oligonucleotide
  Sense strand starting at position 3808 of SEQ ID NO: 584972
cuggucuguguccaagaga

SEQ ID NO: 603535 - RNA, 19 nt, Artificial Sequence
  Description of Artificial Sequence: Synthetic oligonucleotide
  Antisense strand to SEQ ID NO: 603534
ucucuuggacacagaccag

SEQ ID NO: 603536 - RNA, 19 nt, Artificial Sequence
  Description of Artificial Sequence: Synthetic oligonucleotide
  Sense strand starting at position 3911 of SEQ ID NO: 584972
agcuacagcugccuugaua

SEQ ID NO: 603537 - RNA, 19 nt, Artificial Sequence
  Description of Artificial Sequence: Synthetic oligonucleotide
  Antisense strand to SEQ ID NO: 603536
uaucaaggcagcuguagcu

SEQ ID NO: 603538 - RNA, 19 nt, Artificial Sequence
  Description of Artificial Sequence: Synthetic oligonucleotide
  Sense strand starting at position 3967 of SEQ ID NO: 584972
aggguaucgugccuuaauu

SEQ ID NO: 603539 - RNA, 19 nt, Artificial Sequence
  Description of Artificial Sequence: Synthetic oligonucleotide
  Antisense strand to SEQ ID NO: 603538
aauuaaggcacgauacccu

SEQ ID NO: 603540 - RNA, 19 nt, Artificial Sequence
  Description of Artificial Sequence: Synthetic oligonucleotide
  Sense strand starting at position 3969 of SEQ ID NO: 584972
gguaucgugccuuaauuua

SEQ ID NO: 603541 - RNA, 19 nt, Artificial Sequence
  Description of Artificial Sequence: Synthetic oligonucleotide
  Antisense strand to SEQ ID NO: 603540
uaaauuaaggcacgauacc

SEQ ID NO: 603542 - RNA, 19 nt, Artificial Sequence
  Description of Artificial Sequence: Synthetic oligonucleotide
  Sense strand starting at position 3977 of SEQ ID NO: 584972
gccuuaauuuaccagguga

SEQ ID NO: 603543 - RNA, 19 nt, Artificial Sequence
  Description of Artificial Sequence: Synthetic oligonucleotide
  Antisense strand to SEQ ID NO: 603542
ucaccugguaaauuaaggc

SEQ ID NO: 603544 - RNA, 19 nt, Artificial Sequence
  Description of Artificial Sequence: Synthetic oligonucleotide
  Sense strand starting at position 59 of SEQ ID NO: 584973
uguggauauggaggucaga

SEQ ID NO: 603545 - RNA, 19 nt, Artificial Sequence
  Description of Artificial Sequence: Synthetic oligonucleotide
  Antisense strand to SEQ ID NO: 603544
ucugaccuccauauccaca

SEQ ID NO: 603546 - RNA, 19 nt, Artificial Sequence
  Description of Artificial Sequence: Synthetic oligonucleotide
  Sense strand starting at position 83 of SEQ ID NO: 584973
gcgugaaugcaccuguucu

SEQ ID NO: 603547 - RNA, 19 nt, Artificial Sequence
  Description of Artificial Sequence: Synthetic oligonucleotide
  Antisense strand to SEQ ID NO: 603546
agaacaggugcauucacgc

SEQ ID NO: 603548 - RNA, 19 nt, Artificial Sequence
  Description of Artificial Sequence: Synthetic oligonucleotide
  Sense strand starting at position 302 of SEQ ID NO: 584973
ccaaaugcucagcagagua

SEQ ID NO: 603549 - RNA, 19 nt, Artificial Sequence
  Description of Artificial Sequence: Synthetic oligonucleotide
  Antisense strand to SEQ ID NO: 603548
uacucugcugagcauuugg

SEQ ID NO: 603550 - RNA, 19 nt, Artificial Sequence
  Description of Artificial Sequence: Synthetic oligonucleotide
  Sense strand starting at position 387 of SEQ ID NO: 584973
cuuguaguagaauaaguga

SEQ ID NO: 603551 - RNA, 19 nt, Artificial Sequence
  Description of Artificial Sequence: Synthetic oligonucleotide
  Antisense strand to SEQ ID NO: 603550
ucacuuauucuacuacaag

SEQ ID NO: 603552 - RNA, 19 nt, Artificial Sequence
  Description of Artificial Sequence: Synthetic oligonucleotide
  Sense strand starting at position 523 of SEQ ID NO: 584973
gaguaugaacuaugguuuc

SEQ ID NO: 603553 - RNA, 19 nt, Artificial Sequence
  Description of Artificial Sequence: Synthetic oligonucleotide
  Antisense strand to SEQ ID NO: 603552
gaaaccauaguucauacuc

SEQ ID NO: 603554 - RNA, 19 nt, Artificial Sequence
  Description of Artificial Sequence: Synthetic oligonucleotide
  Sense strand starting at position 782 of SEQ ID NO: 584973
caagguucuguuuagauau

SEQ ID NO: 603555 - RNA, 19 nt, Artificial Sequence
  Description of Artificial Sequence: Synthetic oligonucleotide
  Antisense strand to SEQ ID NO: 603554
auaucuaaacagaaccuug

SEQ ID NO: 603556 - RNA, 19 nt, Artificial Sequence
  Description of Artificial Sequence: Synthetic oligonucleotide
  Sense strand starting at position 931 of SEQ ID NO: 584973
cugacaaaucugugaccuu

SEQ ID NO: 603557 - RNA, 19 nt, Artificial Sequence
  Description of Artificial Sequence: Synthetic oligonucleotide
  Antisense strand to SEQ ID NO: 603556
aaggucacagauuugucag

SEQ ID NO: 603558 - RNA, 19 nt, Artificial Sequence
  Description of Artificial Sequence: Synthetic oligonucleotide
  Sense strand starting at position 934 of SEQ ID NO: 584973
acaaaucugugaccuuaga

SEQ ID NO: 603559 - RNA, 19 nt, Artificial Sequence
  Description of Artificial Sequence: Synthetic oligonucleotide
  Antisense strand to SEQ ID NO: 603558
ucuaaggucacagauuugu

SEQ ID NO: 603560 - RNA, 19 nt, Artificial Sequence
  Description of Artificial Sequence: Synthetic oligonucleotide
  Sense strand starting at position 1181 of SEQ ID NO: 584973
uugugaagagcugaguaca

SEQ ID NO: 603561 - RNA, 19 nt, Artificial Sequence
  Description of Artificial Sequence: Synthetic oligonucleotide
  Antisense strand to SEQ ID NO: 603560
uguacucagcucuucacaa

SEQ ID NO: 603562 - RNA, 19 nt, Artificial Sequence
  Description of Artificial Sequence: Synthetic oligonucleotide
  Sense strand starting at position 1265 of SEQ ID NO: 584973
augaaucuuucccugguca

SEQ ID NO: 603563 - RNA, 19 nt, Artificial Sequence
  Description of Artificial Sequence: Synthetic oligonucleotide
  Antisense strand to SEQ ID NO: 603562
ugaccagggaaagauucau

SEQ ID NO: 603564 - RNA, 19 nt, Artificial Sequence
  Description of Artificial Sequence: Synthetic oligonucleotide
  Sense strand starting at position 1309 of SEQ ID NO: 584973
auaauaucugcaugaacag

SEQ ID NO: 603565 - RNA, 19 nt, Artificial Sequence
  Description of Artificial Sequence: Synthetic oligonucleotide
  Antisense strand to SEQ ID NO: 603564
cuguucaugcagauauuau

SEQ ID NO: 603566 - RNA, 19 nt, Artificial Sequence
  Description of Artificial Sequence: Synthetic oligonucleotide
  Sense strand starting at position 1430 of SEQ ID NO: 584973
ggaauacuuggugguagag

SEQ ID NO: 603567 - RNA, 19 nt, Artificial Sequence
  Description of Artificial Sequence: Synthetic oligonucleotide
  Antisense strand to SEQ ID NO: 603566
cucuaccaccaaguauucc

SEQ ID NO: 603568 - RNA, 19 nt, Artificial Sequence
  Description of Artificial Sequence: Synthetic oligonucleotide
  Sense strand starting at position 1466 of SEQ ID NO: 584973
aauggugaagcuugaagga

SEQ ID NO: 603569 - RNA, 19 nt, Artificial Sequence
  Description of Artificial Sequence: Synthetic oligonucleotide
  Antisense strand to SEQ ID NO: 603568
uccuucaagcuucaccauu

SEQ ID NO: 603570 - RNA, 19 nt, Artificial Sequence
  Description of Artificial Sequence: Synthetic oligonucleotide
  Sense strand starting at position 1521 of SEQ ID NO: 584973
uggaguucugcugcgcaga

SEQ ID NO: 603571 - RNA, 19 nt, Artificial Sequence
  Description of Artificial Sequence: Synthetic oligonucleotide
  Antisense strand to SEQ ID NO: 603570
ucugcgcagcagaacucca

SEQ ID NO: 603572 - RNA, 19 nt, Artificial Sequence
  Description of Artificial Sequence: Synthetic oligonucleotide
  Sense strand starting at position 1545 of SEQ ID NO: 584973
ugguccuggguugaugaau

SEQ ID NO: 603573 - RNA, 19 nt, Artificial Sequence
  Description of Artificial Sequence: Synthetic oligonucleotide
  Antisense strand to SEQ ID NO: 603572
auucaucaacccaggacca

SEQ ID NO: 603574 - RNA, 19 nt, Artificial Sequence
  Description of Artificial Sequence: Synthetic oligonucleotide
  Sense strand starting at position 1660 of SEQ ID NO: 584973
ugucuucugacuggacaga

SEQ ID NO: 603575 - RNA, 19 nt, Artificial Sequence
  Description of Artificial Sequence: Synthetic oligonucleotide
  Antisense strand to SEQ ID NO: 603574
ucuguccagucagaagaca

SEQ ID NO: 603576 - RNA, 19 nt, Artificial Sequence
  Description of Artificial Sequence: Synthetic oligonucleotide
  Sense strand starting at position 1743 of SEQ ID NO: 584973
agcugaguggcauauaaau

SEQ ID NO: 603577 - RNA, 19 nt, Artificial Sequence
  Description of Artificial Sequence: Synthetic oligonucleotide
  Antisense strand to SEQ ID NO: 603576
auuuauaugccacucagcu

SEQ ID NO: 603578 - RNA, 19 nt, Artificial Sequence
  Description of Artificial Sequence: Synthetic oligonucleotide
  Sense strand starting at position 1774 of SEQ ID NO: 584973
uuaaguacucauggacauc

SEQ ID NO: 603579 - RNA, 19 nt, Artificial Sequence
  Description of Artificial Sequence: Synthetic oligonucleotide
  Antisense strand to SEQ ID NO: 603578
gauguccaugaguacuuaa

SEQ ID NO: 603580 - RNA, 19 nt, Artificial Sequence
  Description of Artificial Sequence: Synthetic oligonucleotide
  Sense strand starting at position 1856 of SEQ ID NO: 584973
gauugugucauagauggug

SEQ ID NO: 603581 - RNA, 19 nt, Artificial Sequence
  Description of Artificial Sequence: Synthetic oligonucleotide
  Antisense strand to SEQ ID NO: 603580
caccaucuaugacacaauc

SEQ ID NO: 603582 - RNA, 19 nt, Artificial Sequence
  Description of Artificial Sequence: Synthetic oligonucleotide
  Sense strand starting at position 2043 of SEQ ID NO: 584973
acaauuauuuacuggagag

SEQ ID NO: 603583 - RNA, 19 nt, Artificial Sequence
  Description of Artificial Sequence: Synthetic oligonucleotide
  Antisense strand to SEQ ID NO: 603582
cucuccaguaaauaauugu

SEQ ID NO: 603584 - RNA, 19 nt, Artificial Sequence
  Description of Artificial Sequence: Synthetic oligonucleotide
  Sense strand starting at position 2178 of SEQ ID NO: 584973
cuccaagauucuuugggua

SEQ ID NO: 603585 - RNA, 19 nt, Artificial Sequence
  Description of Artificial Sequence: Synthetic oligonucleotide
  Antisense strand to SEQ ID NO: 603584
uacccaaagaaucuuggag

SEQ ID NO: 603586 - RNA, 19 nt, Artificial Sequence
  Description of Artificial Sequence: Synthetic oligonucleotide
  Sense strand starting at position 2183 of SEQ ID NO: 584973
agauucuuuggguaagcca

SEQ ID NO: 603587 - RNA, 19 nt, Artificial Sequence
  Description of Artificial Sequence: Synthetic oligonucleotide
  Antisense strand to SEQ ID NO: 603586
uggcuuacccaaagaaucu

SEQ ID NO: 603588 - RNA, 19 nt, Artificial Sequence
  Description of Artificial Sequence: Synthetic oligonucleotide
  Sense strand starting at position 2210 of SEQ ID NO: 584973
auugaauuaucuuccuggu

SEQ ID NO: 603589 - RNA, 19 nt, Artificial Sequence
  Description of Artificial Sequence: Synthetic oligonucleotide
  Antisense strand to SEQ ID NO: 603588
accaggaagauaauucaau

SEQ ID NO: 603590 - RNA, 19 nt, Artificial Sequence
  Description of Artificial Sequence: Synthetic oligonucleotide
  Sense strand starting at position 2212 of SEQ ID NO: 584973
ugaauuaucuuccugguau

SEQ ID NO: 603591 - RNA, 19 nt, Artificial Sequence
  Description of Artificial Sequence: Synthetic oligonucleotide
  Antisense strand to SEQ ID NO: 603590
auaccaggaagauaauuca

SEQ ID NO: 603592 - RNA, 19 nt, Artificial Sequence
  Description of Artificial Sequence: Synthetic oligonucleotide
  Sense strand starting at position 2223 of SEQ ID NO: 584973
ccugguauacacugaaauu

SEQ ID NO: 603593 - RNA, 19 nt, Artificial Sequence
  Description of Artificial Sequence: Synthetic oligonucleotide
  Antisense strand to SEQ ID NO: 603592
aauuucaguguauaccagg

SEQ ID NO: 603594 - RNA, 19 nt, Artificial Sequence
  Description of Artificial Sequence: Synthetic oligonucleotide
  Sense strand starting at position 2406 of SEQ ID NO: 584973
auugauacccugugauaaa

SEQ ID NO: 603595 - RNA, 19 nt, Artificial Sequence
  Description of Artificial Sequence: Synthetic oligonucleotide
  Antisense strand to SEQ ID NO: 603594
uuuaucacaggguaucaau

SEQ ID NO: 603596 - RNA, 19 nt, Artificial Sequence
  Description of Artificial Sequence: Synthetic oligonucleotide
  Sense strand starting at position 2664 of SEQ ID NO: 584973
ugcugaauugagcacaaca

SEQ ID NO: 603597 - RNA, 19 nt, Artificial Sequence
  Description of Artificial Sequence: Synthetic oligonucleotide
  Antisense strand to SEQ ID NO: 603596
uguugugcucaauucagca

SEQ ID NO: 603598 - RNA, 19 nt, Artificial Sequence
  Description of Artificial Sequence: Synthetic oligonucleotide
  Sense strand starting at position 2951 of SEQ ID NO: 584973
aucuuucuccuugaaguga

SEQ ID NO: 603599 - RNA, 19 nt, Artificial Sequence
  Description of Artificial Sequence: Synthetic oligonucleotide
  Antisense strand to SEQ ID NO: 603598
ucacuucaaggagaaagau

SEQ ID NO: 603600 - RNA, 19 nt, Artificial Sequence
  Description of Artificial Sequence: Synthetic oligonucleotide
  Sense strand starting at position 2991 of SEQ ID NO: 584973
ggacuuuaaugucuagaaa

SEQ ID NO: 603601 - RNA, 19 nt, Artificial Sequence
  Description of Artificial Sequence: Synthetic oligonucleotide
  Antisense strand to SEQ ID NO: 603600
uuucuagacauuaaagucc

SEQ ID NO: 603602 - RNA, 19 nt, Artificial Sequence
  Description of Artificial Sequence: Synthetic oligonucleotide
  Sense strand starting at position 3103 of SEQ ID NO: 584973
ucaauauuguauccaggaa

SEQ ID NO: 603603 - RNA, 19 nt, Artificial Sequence
  Description of Artificial Sequence: Synthetic oligonucleotide
  Antisense strand to SEQ ID NO: 603602
uuccuggauacaauauuga

SEQ ID NO: 603604 - RNA, 19 nt, Artificial Sequence
  Description of Artificial Sequence: Synthetic oligonucleotide
  Sense strand starting at position 3130 of SEQ ID NO: 584973
ugggaauuagagcagcauu

SEQ ID NO: 603605 - RNA, 19 nt, Artificial Sequence
  Description of Artificial Sequence: Synthetic oligonucleotide
  Antisense strand to SEQ ID NO: 603604
aaugcugcucuaauuccca

SEQ ID NO: 603606 - RNA, 19 nt, Artificial Sequence
  Description of Artificial Sequence: Synthetic oligonucleotide
  Sense strand starting at position 3150 of SEQ ID NO: 584973
cuagaauucuagcuuaaag

SEQ ID NO: 603607 - RNA, 19 nt, Artificial Sequence
  Description of Artificial Sequence: Synthetic oligonucleotide
  Antisense strand to SEQ ID NO: 603606
cuuuaagcuagaauucuag

SEQ ID NO: 603608 - RNA, 19 nt, Artificial Sequence
  Description of Artificial Sequence: Synthetic oligonucleotide
  Sense strand starting at position 3159 of SEQ ID NO: 584973
uagcuuaaagaauggguaa

SEQ ID NO: 603609 - RNA, 19 nt, Artificial Sequence
  Description of Artificial Sequence: Synthetic oligonucleotide
  Antisense strand to SEQ ID NO: 603608
uuacccauucuuuaagcua

SEQ ID NO: 603610 - RNA, 19 nt, Artificial Sequence
  Description of Artificial Sequence: Synthetic oligonucleotide
  Sense strand starting at position 3203 of SEQ ID NO: 584973
ggcuauugacacuggacau

SEQ ID NO: 603611 - RNA, 19 nt, Artificial Sequence
  Description of Artificial Sequence: Synthetic oligonucleotide
  Antisense strand to SEQ ID NO: 603610
auguccagugucaauagcc

SEQ ID NO: 603612 - RNA, 19 nt, Artificial Sequence
  Description of Artificial Sequence: Synthetic oligonucleotide
  Sense strand starting at position 3216 of SEQ ID NO: 584973
ggacauuuaucuuauugaa

SEQ ID NO: 603613 - RNA, 19 nt, Artificial Sequence
  Description of Artificial Sequence: Synthetic oligonucleotide
  Antisense strand to SEQ ID NO: 603612
uucaauaagauaaaugucc

SEQ ID NO: 603614 - RNA, 19 nt, Artificial Sequence
  Description of Artificial Sequence: Synthetic oligonucleotide
  Sense strand starting at position 3409 of SEQ ID NO: 584973
guggaagugaaugguccaa

SEQ ID NO: 603615 - RNA, 19 nt, Artificial Sequence
  Description of Artificial Sequence: Synthetic oligonucleotide
  Antisense strand to SEQ ID NO: 603614
uuggaccauucacuuccac

SEQ ID NO: 603616 - RNA, 19 nt, Artificial Sequence
  Description of Artificial Sequence: Synthetic oligonucleotide
  Sense strand starting at position 3411 of SEQ ID NO: 584973
ggaagugaaugguccaagu

SEQ ID NO: 603617 - RNA, 19 nt, Artificial Sequence
  Description of Artificial Sequence: Synthetic oligonucleotide
  Antisense strand to SEQ ID NO: 603616
acuuggaccauucacuucc

SEQ ID NO: 603618 - RNA, 19 nt, Artificial Sequence
  Description of Artificial Sequence: Synthetic oligonucleotide
  Sense strand starting at position 3413 of SEQ ID NO: 584973
aagugaaugguccaaguuu

SEQ ID NO: 603619 - RNA, 19 nt, Artificial Sequence
  Description of Artificial Sequence: Synthetic oligonucleotide
  Antisense strand to SEQ ID NO: 603618
aaacuuggaccauucacuu

SEQ ID NO: 603620 - RNA, 19 nt, Artificial Sequence
  Description of Artificial Sequence: Synthetic oligonucleotide
  Sense strand starting at position 3845 of SEQ ID NO: 584973
acagcaugugcauauggau

SEQ ID NO: 603621 - RNA, 19 nt, Artificial Sequence
  Description of Artificial Sequence: Synthetic oligonucleotide
  Antisense strand to SEQ ID NO: 603620
auccauaugcacaugcugu

SEQ ID NO: 603622 - RNA, 19 nt, Artificial Sequence
  Description of Artificial Sequence: Synthetic oligonucleotide
  Sense strand starting at position 3872 of SEQ ID NO: 584973
uugucaaguccucaccaca

SEQ ID NO: 603623 - RNA, 19 nt, Artificial Sequence
  Description of Artificial Sequence: Synthetic oligonucleotide
  Antisense strand to SEQ ID NO: 603622
uguggugaggacuugacaa

SEQ ID NO: 603624 - RNA, 19 nt, Artificial Sequence
  Description of Artificial Sequence: Synthetic oligonucleotide
  Sense strand starting at position 78 of SEQ ID NO: 584974
cccagcaucagacgagaaa

SEQ ID NO: 603625 - RNA, 19 nt, Artificial Sequence
  Description of Artificial Sequence: Synthetic oligonucleotide
  Antisense strand to SEQ ID NO: 603624
uuucucgucugaugcuggg

SEQ ID NO: 603626 - RNA, 19 nt, Artificial Sequence
  Description of Artificial Sequence: Synthetic oligonucleotide
  Sense strand starting at position 221 of SEQ ID NO: 584974
aagcaagugucacuaaaug

SEQ ID NO: 603627 - RNA, 19 nt, Artificial Sequence
  Description of Artificial Sequence: Synthetic oligonucleotide
  Antisense strand to SEQ ID NO: 603626
cauuuagugacacuugcuu

SEQ ID NO: 603628 - RNA, 19 nt, Artificial Sequence
  Description of Artificial Sequence: Synthetic oligonucleotide
  Sense strand starting at position 295 of SEQ ID NO: 584974
uuaacaaaccuuuguggua

SEQ ID NO: 603629 - RNA, 19 nt, Artificial Sequence
  Description of Artificial Sequence: Synthetic oligonucleotide
  Antisense strand to SEQ ID NO: 603628
uaccacaaagguuuguuaa

SEQ ID NO: 603630 - RNA, 19 nt, Artificial Sequence
  Description of Artificial Sequence: Synthetic oligonucleotide
  Sense strand starting at position 390 of SEQ ID NO: 584974
cacagauuguuaucaaggu

SEQ ID NO: 603631 - RNA, 19 nt, Artificial Sequence
  Description of Artificial Sequence: Synthetic oligonucleotide
  Antisense strand to SEQ ID NO: 603630
accuugauaacaaucugug

SEQ ID NO: 603632 - RNA, 19 nt, Artificial Sequence
  Description of Artificial Sequence: Synthetic oligonucleotide
  Sense strand starting at position 394 of SEQ ID NO: 584974
gauuguuaucaagguuuau

SEQ ID NO: 603633 - RNA, 19 nt, Artificial Sequence
  Description of Artificial Sequence: Synthetic oligonucleotide
  Antisense strand to SEQ ID NO: 603632
auaaaccuugauaacaauc

SEQ ID NO: 603634 - RNA, 19 nt, Artificial Sequence
  Description of Artificial Sequence: Synthetic oligonucleotide
  Sense strand starting at position 404 of SEQ ID NO: 584974
aagguuuauguagaucuca

SEQ ID NO: 603635 - RNA, 19 nt, Artificial Sequence
  Description of Artificial Sequence: Synthetic oligonucleotide
  Antisense strand to SEQ ID NO: 603634
ugagaucuacauaaaccuu

SEQ ID NO: 603636 - RNA, 19 nt, Artificial Sequence
  Description of Artificial Sequence: Synthetic oligonucleotide
  Sense strand starting at position 450 of SEQ ID NO: 584974
gcuuguagagaaggaucuu

SEQ ID NO: 603637 - RNA, 19 nt, Artificial Sequence
  Description of Artificial Sequence: Synthetic oligonucleotide
  Antisense strand to SEQ ID NO: 603636
aagauccuucucuacaagc

SEQ ID NO: 603638 - RNA, 19 nt, Artificial Sequence
  Description of Artificial Sequence: Synthetic oligonucleotide
  Sense strand starting at position 486 of SEQ ID NO: 584974
uucccaauuccagggaaua

SEQ ID NO: 603639 - RNA, 19 nt, Artificial Sequence
  Description of Artificial Sequence: Synthetic oligonucleotide
  Antisense strand to SEQ ID NO: 603638
uauucccuggaauugggaa

SEQ ID NO: 603640 - RNA, 19 nt, Artificial Sequence
  Description of Artificial Sequence: Synthetic oligonucleotide
  Sense strand starting at position 487 of SEQ ID NO: 584974
ucccaauuccagggaauau

SEQ ID NO: 603641 - RNA, 19 nt, Artificial Sequence
  Description of Artificial Sequence: Synthetic oligonucleotide
  Antisense strand to SEQ ID NO: 603640
auauucccuggaauuggga

SEQ ID NO: 603642 - RNA, 19 nt, Artificial Sequence
  Description of Artificial Sequence: Synthetic oligonucleotide
  Sense strand starting at position 563 of SEQ ID NO: 584974
cucagcgaucugcauauuu

SEQ ID NO: 603643 - RNA, 19 nt, Artificial Sequence
  Description of Artificial Sequence: Synthetic oligonucleotide
  Antisense strand to SEQ ID NO: 603642
aaauaugcagaucgcugag

SEQ ID NO: 603644 - RNA, 19 nt, Artificial Sequence
  Description of Artificial Sequence: Synthetic oligonucleotide
  Sense strand starting at position 565 of SEQ ID NO: 584974
cagcgaucugcauauuucu

SEQ ID NO: 603645 - RNA, 19 nt, Artificial Sequence
  Description of Artificial Sequence: Synthetic oligonucleotide
  Antisense strand to SEQ ID NO: 603644
agaaauaugcagaucgcug

SEQ ID NO: 603646 - RNA, 19 nt, Artificial Sequence
  Description of Artificial Sequence: Synthetic oligonucleotide
  Sense strand starting at position 583 of SEQ ID NO: 584974
uagggaaacuuugcacuga

SEQ ID NO: 603647 - RNA, 19 nt, Artificial Sequence
  Description of Artificial Sequence: Synthetic oligonucleotide
  Antisense strand to SEQ ID NO: 603646
ucagugcaaaguuucccua

SEQ ID NO: 603648 - RNA, 19 nt, Artificial Sequence
  Description of Artificial Sequence: Synthetic oligonucleotide
  Sense strand starting at position 587 of SEQ ID NO: 584974
gaaacuuugcacugagaga

SEQ ID NO: 603649 - RNA, 19 nt, Artificial Sequence
  Description of Artificial Sequence: Synthetic oligonucleotide
  Antisense strand to SEQ ID NO: 603648
ucucucagugcaaaguuuc

SEQ ID NO: 603650 - RNA, 19 nt, Artificial Sequence
  Description of Artificial Sequence: Synthetic oligonucleotide
  Sense strand starting at position 742 of SEQ ID NO: 584974
gcaccaagggcugaucaaa

SEQ ID NO: 603651 - RNA, 19 nt, Artificial Sequence
  Description of Artificial Sequence: Synthetic oligonucleotide
  Antisense strand to SEQ ID NO: 603650
uuugaucagcccuuggugc

SEQ ID NO: 603652 - RNA, 19 nt, Artificial Sequence
  Description of Artificial Sequence: Synthetic oligonucleotide
  Sense strand starting at position 880 of SEQ ID NO: 584974
ggagcaaggugacuucauu

SEQ ID NO: 603653 - RNA, 19 nt, Artificial Sequence
  Description of Artificial Sequence: Synthetic oligonucleotide
  Antisense strand to SEQ ID NO: 603652
aaugaagucaccuugcucc

SEQ ID NO: 603654 - RNA, 19 nt, Artificial Sequence
  Description of Artificial Sequence: Synthetic oligonucleotide
  Sense strand starting at position 967 of SEQ ID NO: 584974
cgccuaacauuuccuugau

SEQ ID NO: 603655 - RNA, 19 nt, Artificial Sequence
  Description of Artificial Sequence: Synthetic oligonucleotide
  Antisense strand to SEQ ID NO: 603654
aucaaggaaauguuaggcg

SEQ ID NO: 603656 - RNA, 19 nt, Artificial Sequence
  Description of Artificial Sequence: Synthetic oligonucleotide
  Sense strand starting at position 979 of SEQ ID NO: 584974
ccuugauacugccuugaaa

SEQ ID NO: 603657 - RNA, 19 nt, Artificial Sequence
  Description of Artificial Sequence: Synthetic oligonucleotide
  Antisense strand to SEQ ID NO: 603656
uuucaaggcaguaucaagg

SEQ ID NO: 603658 - RNA, 19 nt, Artificial Sequence
  Description of Artificial Sequence: Synthetic oligonucleotide
  Sense strand starting at position 1015 of SEQ ID NO: 584974
aaauaauaacgucggagaa

SEQ ID NO: 603659 - RNA, 19 nt, Artificial Sequence
  Description of Artificial Sequence: Synthetic oligonucleotide
  Antisense strand to SEQ ID NO: 603658
uucuccgacguuauuauuu

SEQ ID NO: 603660 - RNA, 19 nt, Artificial Sequence
  Description of Artificial Sequence: Synthetic oligonucleotide
  Sense strand starting at position 1016 of SEQ ID NO: 584974
aauaauaacgucggagaau

SEQ ID NO: 603661 - RNA, 19 nt, Artificial Sequence
  Description of Artificial Sequence: Synthetic oligonucleotide
  Antisense strand to SEQ ID NO: 603660
auucuccgacguuauuauu

SEQ ID NO: 603662 - RNA, 19 nt, Artificial Sequence
  Description of Artificial Sequence: Synthetic oligonucleotide
  Sense strand starting at position 1103 of SEQ ID NO: 584974
uaggaucucugagcgaaag

SEQ ID NO: 603663 - RNA, 19 nt, Artificial Sequence
  Description of Artificial Sequence: Synthetic oligonucleotide
  Antisense strand to SEQ ID NO: 603662
cuuucgcucagagauccua

SEQ ID NO: 603664 - RNA, 19 nt, Artificial Sequence
  Description of Artificial Sequence: Synthetic oligonucleotide
  Sense strand starting at position 1104 of SEQ ID NO: 584974
aggaucucugagcgaaaga

SEQ ID NO: 603665 - RNA, 19 nt, Artificial Sequence
  Description of Artificial Sequence: Synthetic oligonucleotide
  Antisense strand to SEQ ID NO: 603664
ucuuucgcucagagauccu

SEQ ID NO: 603666 - RNA, 19 nt, Artificial Sequence
  Description of Artificial Sequence: Synthetic oligonucleotide
  Sense strand starting at position 1368 of SEQ ID NO: 584974
cggaucaacucuccgagaa

SEQ ID NO: 603667 - RNA, 19 nt, Artificial Sequence
  Description of Artificial Sequence: Synthetic oligonucleotide
  Antisense strand to SEQ ID NO: 603666
uucucggagaguugauccg

SEQ ID NO: 603668 - RNA, 19 nt, Artificial Sequence
  Description of Artificial Sequence: Synthetic oligonucleotide
  Sense strand starting at position 1369 of SEQ ID NO: 584974
ggaucaacucuccgagaag

SEQ ID NO: 603669 - RNA, 19 nt, Artificial Sequence
  Description of Artificial Sequence: Synthetic oligonucleotide
  Antisense strand to SEQ ID NO: 603668
cuucucggagaguugaucc

SEQ ID NO: 603670 - RNA, 19 nt, Artificial Sequence
  Description of Artificial Sequence: Synthetic oligonucleotide
  Sense strand starting at position 1815 of SEQ ID NO: 584974
cugagagaucaguguccca

SEQ ID NO: 603671 - RNA, 19 nt, Artificial Sequence
  Description of Artificial Sequence: Synthetic oligonucleotide
  Antisense strand to SEQ ID NO: 603670
ugggacacugaucucucag

SEQ ID NO: 603672 - RNA, 19 nt, Artificial Sequence
  Description of Artificial Sequence: Synthetic oligonucleotide
  Sense strand starting at position 1818 of SEQ ID NO: 584974
agagaucagugucccagau

SEQ ID NO: 603673 - RNA, 19 nt, Artificial Sequence
  Description of Artificial Sequence: Synthetic oligonucleotide
  Antisense strand to SEQ ID NO: 603672
aucugggacacugaucucu

SEQ ID NO: 603674 - RNA, 19 nt, Artificial Sequence
  Description of Artificial Sequence: Synthetic oligonucleotide
  Sense strand starting at position 2751 of SEQ ID NO: 584974
agguguaugccucaaugaa

SEQ ID NO: 603675 - RNA, 19 nt, Artificial Sequence
  Description of Artificial Sequence: Synthetic oligonucleotide
  Antisense strand to SEQ ID NO: 603674
uucauugaggcauacaccu

SEQ ID NO: 603676 - RNA, 19 nt, Artificial Sequence
  Description of Artificial Sequence: Synthetic oligonucleotide
  Sense strand starting at position 2800 of SEQ ID NO: 584974
gcgccagaugaagaauaaa

SEQ ID NO: 603677 - RNA, 19 nt, Artificial Sequence
  Description of Artificial Sequence: Synthetic oligonucleotide
  Antisense strand to SEQ ID NO: 603676
uuuauucuucaucuggcgc

SEQ ID NO: 603678 - RNA, 19 nt, Artificial Sequence
  Description of Artificial Sequence: Synthetic oligonucleotide
  Sense strand starting at position 2966 of SEQ ID NO: 584974
cauuacuauguuugugaga

SEQ ID NO: 603679 - RNA, 19 nt, Artificial Sequence
  Description of Artificial Sequence: Synthetic oligonucleotide
  Antisense strand to SEQ ID NO: 603678
ucucacaaacauaguaaug

SEQ ID NO: 603680 - RNA, 19 nt, Artificial Sequence
  Description of Artificial Sequence: Synthetic oligonucleotide
  Sense strand starting at position 2967 of SEQ ID NO: 584974
auuacuauguuugugagau

SEQ ID NO: 603681 - RNA, 19 nt, Artificial Sequence
  Description of Artificial Sequence: Synthetic oligonucleotide
  Antisense strand to SEQ ID NO: 603680
aucucacaaacauaguaau

SEQ ID NO: 603682 - RNA, 19 nt, Artificial Sequence
  Description of Artificial Sequence: Synthetic oligonucleotide
  Sense strand starting at position 3006 of SEQ ID NO: 584974
aguuguguaucauccauuu

SEQ ID NO: 603683 - RNA, 19 nt, Artificial Sequence
  Description of Artificial Sequence: Synthetic oligonucleotide
  Antisense strand to SEQ ID NO: 603682
aaauggaugauacacaacu

SEQ ID NO: 603684 - RNA, 19 nt, Artificial Sequence
  Description of Artificial Sequence: Synthetic oligonucleotide
  Sense strand starting at position 3062 of SEQ ID NO: 584974
gacauuugugcaggugacu

SEQ ID NO: 603685 - RNA, 19 nt, Artificial Sequence
  Description of Artificial Sequence: Synthetic oligonucleotide
  Antisense strand to SEQ ID NO: 603684
agucaccugcacaaauguc

SEQ ID NO: 603686 - RNA, 19 nt, Artificial Sequence
  Description of Artificial Sequence: Synthetic oligonucleotide
  Sense strand starting at position 3088 of SEQ ID NO: 584974
cuacucugucacgaacauu

SEQ ID NO: 603687 - RNA, 19 nt, Artificial Sequence
  Description of Artificial Sequence: Synthetic oligonucleotide
  Antisense strand to SEQ ID NO: 603686
aauguucgugacagaguag

SEQ ID NO: 603688 - RNA, 19 nt, Artificial Sequence
  Description of Artificial Sequence: Synthetic oligonucleotide
  Sense strand starting at position 3180 of SEQ ID NO: 584974
ugaguuguaguguauaaga

SEQ ID NO: 603689 - RNA, 19 nt, Artificial Sequence
  Description of Artificial Sequence: Synthetic oligonucleotide
  Antisense strand to SEQ ID NO: 603688
ucuuauacacuacaacuca

SEQ ID NO: 603690 - RNA, 19 nt, Artificial Sequence
  Description of Artificial Sequence: Synthetic oligonucleotide
  Sense strand starting at position 3182 of SEQ ID NO: 584974
aguuguaguguauaagaau

SEQ ID NO: 603691 - RNA, 19 nt, Artificial Sequence
  Description of Artificial Sequence: Synthetic oligonucleotide
  Antisense strand to SEQ ID NO: 603690
auucuuauacacuacaacu

SEQ ID NO: 603692 - RNA, 19 nt, Artificial Sequence
  Description of Artificial Sequence: Synthetic oligonucleotide
  Sense strand starting at position 3303 of SEQ ID NO: 584974
ccagaaucugguggaauuc

SEQ ID NO: 603693 - RNA, 19 nt, Artificial Sequence
  Description of Artificial Sequence: Synthetic oligonucleotide
  Antisense strand to SEQ ID NO: 603692
gaauuccaccagauucugg

SEQ ID NO: 603694 - RNA, 19 nt, Artificial Sequence
  Description of Artificial Sequence: Synthetic oligonucleotide
  Sense strand starting at position 3568 of SEQ ID NO: 584974
guaacuuaucccuagucau

SEQ ID NO: 603695 - RNA, 19 nt, Artificial Sequence
  Description of Artificial Sequence: Synthetic oligonucleotide
  Antisense strand to SEQ ID NO: 603694
augacuagggauaaguuac

SEQ ID NO: 603696 - RNA, 19 nt, Artificial Sequence
  Description of Artificial Sequence: Synthetic oligonucleotide
  Sense strand starting at position 3895 of SEQ ID NO: 584974
agcugaaccuuccugaaag

SEQ ID NO: 603697 - RNA, 19 nt, Artificial Sequence
  Description of Artificial Sequence: Synthetic oligonucleotide
  Antisense strand to SEQ ID NO: 603696
cuuucaggaagguucagcu

SEQ ID NO: 603698 - RNA, 19 nt, Artificial Sequence
  Description of Artificial Sequence: Synthetic oligonucleotide
  Sense strand starting at position 3918 of SEQ ID NO: 584974
ggcaucugauaggcaaaga

SEQ ID NO: 603699 - RNA, 19 nt, Artificial Sequence
  Description of Artificial Sequence: Synthetic oligonucleotide
  Antisense strand to SEQ ID NO: 603698
ucuuugccuaucagaugcc

SEQ ID NO: 603700 - RNA, 19 nt, Artificial Sequence
  Description of Artificial Sequence: Synthetic oligonucleotide
  Sense strand starting at position 3939 of SEQ ID NO: 584974
agggaaagauguccucacu

SEQ ID NO: 603701 - RNA, 19 nt, Artificial Sequence
  Description of Artificial Sequence: Synthetic oligonucleotide
  Antisense strand to SEQ ID NO: 603700
agugaggacaucuuucccu

SEQ ID NO: 603702 - RNA, 19 nt, Artificial Sequence
  Description of Artificial Sequence: Synthetic oligonucleotide
  Sense strand starting at position 3983 of SEQ ID NO: 584974
acagacucucagugcaaau

SEQ ID NO: 603703 - RNA, 19 nt, Artificial Sequence
  Description of Artificial Sequence: Synthetic oligonucleotide
  Antisense strand to SEQ ID NO: 603702
auuugcacugagagucugu

SEQ ID NO: 603704 - RNA, 19 nt, Artificial Sequence
  Description of Artificial Sequence: Synthetic oligonucleotide
  Sense strand starting at position 238 of SEQ ID NO: 584975
augggaaagugcuuugaca

SEQ ID NO: 603705 - RNA, 19 nt, Artificial Sequence
  Description of Artificial Sequence: Synthetic oligonucleotide
  Antisense strand to SEQ ID NO: 603704
ugucaaagcacuuucccau

SEQ ID NO: 603706 - RNA, 19 nt, Artificial Sequence
  Description of Artificial Sequence: Synthetic oligonucleotide
  Sense strand starting at position 458 of SEQ ID NO: 584975
ggcagcaauugcucuuaca

SEQ ID NO: 603707 - RNA, 19 nt, Artificial Sequence
  Description of Artificial Sequence: Synthetic oligonucleotide
  Antisense strand to SEQ ID NO: 603706
uguaagagcaauugcugcc

SEQ ID NO: 603708 - RNA, 19 nt, Artificial Sequence
  Description of Artificial Sequence: Synthetic oligonucleotide
  Sense strand starting at position 873 of SEQ ID NO: 584975
uaaggaggcggugaagauu

SEQ ID NO: 603709 - RNA, 19 nt, Artificial Sequence
  Description of Artificial Sequence: Synthetic oligonucleotide
  Antisense strand to SEQ ID NO: 603708
aaucuucaccgccuccuua

SEQ ID NO: 603710 - RNA, 19 nt, Artificial Sequence
  Description of Artificial Sequence: Synthetic oligonucleotide
  Sense strand starting at position 889 of SEQ ID NO: 584975
auugcaucucccugcaaga

SEQ ID NO: 603711 - RNA, 19 nt, Artificial Sequence
  Description of Artificial Sequence: Synthetic oligonucleotide
  Antisense strand to SEQ ID NO: 603710
ucuugcagggagaugcaau

SEQ ID NO: 603712 - RNA, 19 nt, Artificial Sequence
  Description of Artificial Sequence: Synthetic oligonucleotide
  Sense strand starting at position 891 of SEQ ID NO: 584975
ugcaucucccugcaagacu

SEQ ID NO: 603713 - RNA, 19 nt, Artificial Sequence
  Description of Artificial Sequence: Synthetic oligonucleotide
  Antisense strand to SEQ ID NO: 603712
agucuugcagggagaugca

SEQ ID NO: 603714 - RNA, 19 nt, Artificial Sequence
  Description of Artificial Sequence: Synthetic oligonucleotide
  Sense strand starting at position 1168 of SEQ ID NO: 584975
cucccucagugguuauuau

SEQ ID NO: 603715 - RNA, 19 nt, Artificial Sequence
  Description of Artificial Sequence: Synthetic oligonucleotide
  Antisense strand to SEQ ID NO: 603714
auaauaaccacugagggag

SEQ ID NO: 603716 - RNA, 19 nt, Artificial Sequence
  Description of Artificial Sequence: Synthetic oligonucleotide
  Sense strand starting at position 1175 of SEQ ID NO: 584975
agugguuauuaugagaaca

SEQ ID NO: 603717 - RNA, 19 nt, Artificial Sequence
  Description of Artificial Sequence: Synthetic oligonucleotide
  Antisense strand to SEQ ID NO: 603716
uguucucauaauaaccacu

SEQ ID NO: 603718 - RNA, 19 nt, Artificial Sequence
  Description of Artificial Sequence: Synthetic oligonucleotide
  Sense strand starting at position 1177 of SEQ ID NO: 584975
ugguuauuaugagaacaga

SEQ ID NO: 603719 - RNA, 19 nt, Artificial Sequence
  Description of Artificial Sequence: Synthetic oligonucleotide
  Antisense strand to SEQ ID NO: 603718
ucuguucucauaauaacca

SEQ ID NO: 603720 - RNA, 19 nt, Artificial Sequence
  Description of Artificial Sequence: Synthetic oligonucleotide
  Sense strand starting at position 1212 of SEQ ID NO: 584975
gaggcaucuccauaaguca

SEQ ID NO: 603721 - RNA, 19 nt, Artificial Sequence
  Description of Artificial Sequence: Synthetic oligonucleotide
  Antisense strand to SEQ ID NO: 603720
ugacuuauggagaugccuc

SEQ ID NO: 603722 - RNA, 19 nt, Artificial Sequence
  Description of Artificial Sequence: Synthetic oligonucleotide
  Sense strand starting at position 1215 of SEQ ID NO: 584975
gcaucuccauaagucagaa

SEQ ID NO: 603723 - RNA, 19 nt, Artificial Sequence
  Description of Artificial Sequence: Synthetic oligonucleotide
  Antisense strand to SEQ ID NO: 603722
uucugacuuauggagaugc

SEQ ID NO: 603724 - RNA, 19 nt, Artificial Sequence
  Description of Artificial Sequence: Synthetic oligonucleotide
  Sense strand starting at position 1234 of SEQ ID NO: 584975
gcuggaaugauuggcgcaa

SEQ ID NO: 603725 - RNA, 19 nt, Artificial Sequence
  Description of Artificial Sequence: Synthetic oligonucleotide
  Antisense strand to SEQ ID NO: 603724
uugcgccaaucauuccagc

SEQ ID NO: 603726 - RNA, 19 nt, Artificial Sequence
  Description of Artificial Sequence: Synthetic oligonucleotide
  Sense strand starting at position 1235 of SEQ ID NO: 584975
cuggaaugauuggcgcaaa

SEQ ID NO: 603727 - RNA, 19 nt, Artificial Sequence
  Description of Artificial Sequence: Synthetic oligonucleotide
  Antisense strand to SEQ ID NO: 603726
uuugcgccaaucauuccag

SEQ ID NO: 603728 - RNA, 19 nt, Artificial Sequence
  Description of Artificial Sequence: Synthetic oligonucleotide
  Sense strand starting at position 1238 of SEQ ID NO: 584975
gaaugauuggcgcaaagca

SEQ ID NO: 603729 - RNA, 19 nt, Artificial Sequence
  Description of Artificial Sequence: Synthetic oligonucleotide
  Antisense strand to SEQ ID NO: 603728
ugcuuugcgccaaucauuc

SEQ ID NO: 603730 - RNA, 19 nt, Artificial Sequence
  Description of Artificial Sequence: Synthetic oligonucleotide
  Sense strand starting at position 1854 of SEQ ID NO: 584975
cucuuaccagguugauaau

SEQ ID NO: 603731 - RNA, 19 nt, Artificial Sequence
  Description of Artificial Sequence: Synthetic oligonucleotide
  Antisense strand to SEQ ID NO: 603730
auuaucaaccugguaagag

SEQ ID NO: 603732 - RNA, 19 nt, Artificial Sequence
  Description of Artificial Sequence: Synthetic oligonucleotide
  Sense strand starting at position 1857 of SEQ ID NO: 584975
uuaccagguugauaaugau

SEQ ID NO: 603733 - RNA, 19 nt, Artificial Sequence
  Description of Artificial Sequence: Synthetic oligonucleotide
  Antisense strand to SEQ ID NO: 603732
aucauuaucaaccugguaa

SEQ ID NO: 603734 - RNA, 19 nt, Artificial Sequence
  Description of Artificial Sequence: Synthetic oligonucleotide
  Sense strand starting at position 1926 of SEQ ID NO: 584975
ggaucaggaucuucuccau

SEQ ID NO: 603735 - RNA, 19 nt, Artificial Sequence
  Description of Artificial Sequence: Synthetic oligonucleotide
  Antisense strand to SEQ ID NO: 603734
auggagaagauccugaucc

SEQ ID NO: 603736 - RNA, 19 nt, Artificial Sequence
  Description of Artificial Sequence: Synthetic oligonucleotide
  Sense strand starting at position 1932 of SEQ ID NO: 584975
ggaucuucuccauggugag

SEQ ID NO: 603737 - RNA, 19 nt, Artificial Sequence
  Description of Artificial Sequence: Synthetic oligonucleotide
  Antisense strand to SEQ ID NO: 603736
cucaccauggagaagaucc

SEQ ID NO: 603738 - RNA, 19 nt, Artificial Sequence
  Description of Artificial Sequence: Synthetic oligonucleotide
  Sense strand starting at position 2180 of SEQ ID NO: 584975
ggugauaauuguguugcau

SEQ ID NO: 603739 - RNA, 19 nt, Artificial Sequence
  Description of Artificial Sequence: Synthetic oligonucleotide
  Antisense strand to SEQ ID NO: 603738
augcaacacaauuaucacc

SEQ ID NO: 603740 - RNA, 19 nt, Artificial Sequence
  Description of Artificial Sequence: Synthetic oligonucleotide
  Sense strand starting at position 2188 of SEQ ID NO: 584975
uuguguugcaucgugguua

SEQ ID NO: 603741 - RNA, 19 nt, Artificial Sequence
  Description of Artificial Sequence: Synthetic oligonucleotide
  Antisense strand to SEQ ID NO: 603740
uaaccacgaugcaacacaa

SEQ ID NO: 603742 - RNA, 19 nt, Artificial Sequence
  Description of Artificial Sequence: Synthetic oligonucleotide
  Sense strand starting at position 2192 of SEQ ID NO: 584975
guugcaucgugguuaagag

SEQ ID NO: 603743 - RNA, 19 nt, Artificial Sequence
  Description of Artificial Sequence: Synthetic oligonucleotide
  Antisense strand to SEQ ID NO: 603742
cucuuaaccacgaugcaac

SEQ ID NO: 603744 - RNA, 19 nt, Artificial Sequence
  Description of Artificial Sequence: Synthetic oligonucleotide
  Sense strand starting at position 2193 of SEQ ID NO: 584975
uugcaucgugguuaagagu

SEQ ID NO: 603745 - RNA, 19 nt, Artificial Sequence
  Description of Artificial Sequence: Synthetic oligonucleotide
  Antisense strand to SEQ ID NO: 603744
acucuuaaccacgaugcaa

SEQ ID NO: 603746 - RNA, 19 nt, Artificial Sequence
  Description of Artificial Sequence: Synthetic oligonucleotide
  Sense strand starting at position 2208 of SEQ ID NO: 584975
gaguauggacuguguacaa

SEQ ID NO: 603747 - RNA, 19 nt, Artificial Sequence
  Description of Artificial Sequence: Synthetic oligonucleotide
  Antisense strand to SEQ ID NO: 603746
uuguacacaguccauacuc

SEQ ID NO: 603748 - RNA, 19 nt, Artificial Sequence
  Description of Artificial Sequence: Synthetic oligonucleotide
  Sense strand starting at position 2217 of SEQ ID NO: 584975
cuguguacaaguuauuagu

SEQ ID NO: 603749 - RNA, 19 nt, Artificial Sequence
  Description of Artificial Sequence: Synthetic oligonucleotide
  Antisense strand to SEQ ID NO: 603748
acuaauaacuuguacacag

SEQ ID NO: 603750 - RNA, 19 nt, Artificial Sequence
  Description of Artificial Sequence: Synthetic oligonucleotide
  Sense strand starting at position 2219 of SEQ ID NO: 584975
guguacaaguuauuaguga

SEQ ID NO: 603751 - RNA, 19 nt, Artificial Sequence
  Description of Artificial Sequence: Synthetic oligonucleotide
  Antisense strand to SEQ ID NO: 603750
ucacuaauaacuuguacac

SEQ ID NO: 603752 - RNA, 19 nt, Artificial Sequence
  Description of Artificial Sequence: Synthetic oligonucleotide
  Sense strand starting at position 2303 of SEQ ID NO: 584975
aagaguugugaggguugaa

SEQ ID NO: 603753 - RNA, 19 nt, Artificial Sequence
  Description of Artificial Sequence: Synthetic oligonucleotide
  Antisense strand to SEQ ID NO: 603752
uucaacccucacaacucuu

SEQ ID NO: 603754 - RNA, 19 nt, Artificial Sequence
  Description of Artificial Sequence: Synthetic oligonucleotide
  Sense strand starting at position 2306 of SEQ ID NO: 584975
aguugugaggguugaauua

SEQ ID NO: 603755 - RNA, 19 nt, Artificial Sequence
  Description of Artificial Sequence: Synthetic oligonucleotide
  Antisense strand to SEQ ID NO: 603754
uaauucaacccucacaacu

SEQ ID NO: 603756 - RNA, 19 nt, Artificial Sequence
  Description of Artificial Sequence: Synthetic oligonucleotide
  Sense strand starting at position 2390 of SEQ ID NO: 584975
uguauauucccauaugcca

SEQ ID NO: 603757 - RNA, 19 nt, Artificial Sequence
  Description of Artificial Sequence: Synthetic oligonucleotide
  Antisense strand to SEQ ID NO: 603756
uggcauaugggaauauaca

SEQ ID NO: 603758 - RNA, 19 nt, Artificial Sequence
  Description of Artificial Sequence: Synthetic oligonucleotide
  Sense strand starting at position 2465 of SEQ ID NO: 584975
ggacgaauccaaggcaaga

SEQ ID NO: 603759 - RNA, 19 nt, Artificial Sequence
  Description of Artificial Sequence: Synthetic oligonucleotide
  Antisense strand to SEQ ID NO: 603758
ucuugccuuggauucgucc

SEQ ID NO: 603760 - RNA, 19 nt, Artificial Sequence
  Description of Artificial Sequence: Synthetic oligonucleotide
  Sense strand starting at position 2496 of SEQ ID NO: 584975
gugugagugccugcuuaca

SEQ ID NO: 603761 - RNA, 19 nt, Artificial Sequence
  Description of Artificial Sequence: Synthetic oligonucleotide
  Antisense strand to SEQ ID NO: 603760
uguaagcaggcacucacac

SEQ ID NO: 603762 - RNA, 19 nt, Artificial Sequence
  Description of Artificial Sequence: Synthetic oligonucleotide
  Sense strand starting at position 2508 of SEQ ID NO: 584975
gcuuacauucuguguacuu

SEQ ID NO: 603763 - RNA, 19 nt, Artificial Sequence
  Description of Artificial Sequence: Synthetic oligonucleotide
  Antisense strand to SEQ ID NO: 603762
aaguacacagaauguaagc

SEQ ID NO: 603764 - RNA, 19 nt, Artificial Sequence
  Description of Artificial Sequence: Synthetic oligonucleotide
  Sense strand starting at position 2581 of SEQ ID NO: 584975
ggugucuagcagugucaga

SEQ ID NO: 603765 - RNA, 19 nt, Artificial Sequence
  Description of Artificial Sequence: Synthetic oligonucleotide
  Antisense strand to SEQ ID NO: 603764
ucugacacugcuagacacc

SEQ ID NO: 603766 - RNA, 19 nt, Artificial Sequence
  Description of Artificial Sequence: Synthetic oligonucleotide
  Sense strand starting at position 2850 of SEQ ID NO: 584975
cugcaauuccagcaucaga

SEQ ID NO: 603767 - RNA, 19 nt, Artificial Sequence
  Description of Artificial Sequence: Synthetic oligonucleotide
  Antisense strand to SEQ ID NO: 603766
ucugaugcuggaauugcag

SEQ ID NO: 603768 - RNA, 19 nt, Artificial Sequence
  Description of Artificial Sequence: Synthetic oligonucleotide
  Sense strand starting at position 2941 of SEQ ID NO: 584975
gcuaguccuggcugagaau

SEQ ID NO: 603769 - RNA, 19 nt, Artificial Sequence
  Description of Artificial Sequence: Synthetic oligonucleotide
  Antisense strand to SEQ ID NO: 603768
auucucagccaggacuagc

SEQ ID NO: 603770 - RNA, 19 nt, Artificial Sequence
  Description of Artificial Sequence: Synthetic oligonucleotide
  Sense strand starting at position 3520 of SEQ ID NO: 584975
acuuccugaggucaugauu

SEQ ID NO: 603771 - RNA, 19 nt, Artificial Sequence
  Description of Artificial Sequence: Synthetic oligonucleotide
  Antisense strand to SEQ ID NO: 603770
aaucaugaccucaggaagu

SEQ ID NO: 603772 - RNA, 19 nt, Artificial Sequence
  Description of Artificial Sequence: Synthetic oligonucleotide
  Sense strand starting at position 3529 of SEQ ID NO: 584975
ggucaugauuaagacaaug

SEQ ID NO: 603773 - RNA, 19 nt, Artificial Sequence
  Description of Artificial Sequence: Synthetic oligonucleotide
  Antisense strand to SEQ ID NO: 603772
cauugucuuaaucaugacc

SEQ ID NO: 603774 - RNA, 19 nt, Artificial Sequence
  Description of Artificial Sequence: Synthetic oligonucleotide
  Sense strand starting at position 3585 of SEQ ID NO: 584975
ggugcccagccauguaaua

SEQ ID NO: 603775 - RNA, 19 nt, Artificial Sequence
  Description of Artificial Sequence: Synthetic oligonucleotide
  Antisense strand to SEQ ID NO: 603774
uauuacauggcugggcacc

SEQ ID NO: 603776 - RNA, 19 nt, Artificial Sequence
  Description of Artificial Sequence: Synthetic oligonucleotide
  Sense strand starting at position 3696 of SEQ ID NO: 584975
ccaauuugguuccagcgau

SEQ ID NO: 603777 - RNA, 19 nt, Artificial Sequence
  Description of Artificial Sequence: Synthetic oligonucleotide
  Antisense strand to SEQ ID NO: 603776
aucgcuggaaccaaauugg

SEQ ID NO: 603778 - RNA, 19 nt, Artificial Sequence
  Description of Artificial Sequence: Synthetic oligonucleotide
  Sense strand starting at position 3704 of SEQ ID NO: 584975
guuccagcgaugcagaaau

SEQ ID NO: 603779 - RNA, 19 nt, Artificial Sequence
  Description of Artificial Sequence: Synthetic oligonucleotide
  Antisense strand to SEQ ID NO: 603778
auuucugcaucgcuggaac

SEQ ID NO: 603780 - RNA, 19 nt, Artificial Sequence
  Description of Artificial Sequence: Synthetic oligonucleotide
  Sense strand starting at position 3942 of SEQ ID NO: 584975
caugaagggagcugugaaa

SEQ ID NO: 603781 - RNA, 19 nt, Artificial Sequence
  Description of Artificial Sequence: Synthetic oligonucleotide
  Antisense strand to SEQ ID NO: 603780
uuucacagcucccuucaug

SEQ ID NO: 603782 - RNA, 19 nt, Artificial Sequence
  Description of Artificial Sequence: Synthetic oligonucleotide
  Sense strand starting at position 3980 of SEQ ID NO: 584975
guuggucucagccaagcuu

SEQ ID NO: 603783 - RNA, 19 nt, Artificial Sequence
  Description of Artificial Sequence: Synthetic oligonucleotide
  Antisense strand to SEQ ID NO: 603782
aagcuuggcugagaccaac

SEQ ID NO: 603784 - RNA, 19 nt, Artificial Sequence
  Description of Artificial Sequence: Synthetic oligonucleotide
  Sense strand starting at position 125 of SEQ ID NO: 584976
guauaauccuauuauguac

SEQ ID NO: 603785 - RNA, 19 nt, Artificial Sequence
  Description of Artificial Sequence: Synthetic oligonucleotide
  Antisense strand to SEQ ID NO: 603784
guacauaauaggauuauac

SEQ ID NO: 603786 - RNA, 19 nt, Artificial Sequence
  Description of Artificial Sequence: Synthetic oligonucleotide
  Sense strand starting at position 131 of SEQ ID NO: 584976
uccuauuauguacgauuau

SEQ ID NO: 603787 - RNA, 19 nt, Artificial Sequence
  Description of Artificial Sequence: Synthetic oligonucleotide
  Antisense strand to SEQ ID NO: 603786
auaaucguacauaauagga

SEQ ID NO: 603788 - RNA, 19 nt, Artificial Sequence
  Description of Artificial Sequence: Synthetic oligonucleotide
  Sense strand starting at position 140 of SEQ ID NO: 584976
guacgauuaugugcuauaa

SEQ ID NO: 603789 - RNA, 19 nt, Artificial Sequence
  Description of Artificial Sequence: Synthetic oligonucleotide
  Antisense strand to SEQ ID NO: 603788
uuauagcacauaaucguac

SEQ ID NO: 603790 - RNA, 19 nt, Artificial Sequence
  Description of Artificial Sequence: Synthetic oligonucleotide
  Sense strand starting at position 142 of SEQ ID NO: 584976
acgauuaugugcuauaaag

SEQ ID NO: 603791 - RNA, 19 nt, Artificial Sequence
  Description of Artificial Sequence: Synthetic oligonucleotide
  Antisense strand to SEQ ID NO: 603790
cuuuauagcacauaaucgu

SEQ ID NO: 603792 - RNA, 19 nt, Artificial Sequence
  Description of Artificial Sequence: Synthetic oligonucleotide
  Sense strand starting at position 291 of SEQ ID NO: 584976
gucaguucuucccagaaua

SEQ ID NO: 603793 - RNA, 19 nt, Artificial Sequence
  Description of Artificial Sequence: Synthetic oligonucleotide
  Antisense strand to SEQ ID NO: 603792
uauucugggaagaacugac

SEQ ID NO: 603794 - RNA, 19 nt, Artificial Sequence
  Description of Artificial Sequence: Synthetic oligonucleotide
  Sense strand starting at position 488 of SEQ ID NO: 584976
gcugaagacuuccuggaca

SEQ ID NO: 603795 - RNA, 19 nt, Artificial Sequence
  Description of Artificial Sequence: Synthetic oligonucleotide
  Antisense strand to SEQ ID NO: 603794
uguccaggaagucuucagc

SEQ ID NO: 603796 - RNA, 19 nt, Artificial Sequence
  Description of Artificial Sequence: Synthetic oligonucleotide
  Sense strand starting at position 678 of SEQ ID NO: 584976
ggacuaaaguccuuacaca

SEQ ID NO: 603797 - RNA, 19 nt, Artificial Sequence
  Description of Artificial Sequence: Synthetic oligonucleotide
  Antisense strand to SEQ ID NO: 603796
uguguaaggacuuuagucc

SEQ ID NO: 603798 - RNA, 19 nt, Artificial Sequence
  Description of Artificial Sequence: Synthetic oligonucleotide
  Sense strand starting at position 699 of SEQ ID NO: 584976
gcaggugcugaaugcauaa

SEQ ID NO: 603799 - RNA, 19 nt, Artificial Sequence
  Description of Artificial Sequence: Synthetic oligonucleotide
  Antisense strand to SEQ ID NO: 603798
uuaugcauucagcaccugc

SEQ ID NO: 603800 - RNA, 19 nt, Artificial Sequence
  Description of Artificial Sequence: Synthetic oligonucleotide
  Sense strand starting at position 710 of SEQ ID NO: 584976
augcauaacuguugaauaa

SEQ ID NO: 603801 - RNA, 19 nt, Artificial Sequence
  Description of Artificial Sequence: Synthetic oligonucleotide
  Antisense strand to SEQ ID NO: 603800
uuauucaacaguuaugcau

SEQ ID NO: 603802 - RNA, 19 nt, Artificial Sequence
  Description of Artificial Sequence: Synthetic oligonucleotide
  Sense strand starting at position 711 of SEQ ID NO: 584976
ugcauaacuguugaauaaa

SEQ ID NO: 603803 - RNA, 19 nt, Artificial Sequence
  Description of Artificial Sequence: Synthetic oligonucleotide
  Antisense strand to SEQ ID NO: 603802
uuuauucaacaguuaugca

SEQ ID NO: 603804 - RNA, 19 nt, Artificial Sequence
  Description of Artificial Sequence: Synthetic oligonucleotide
  Sense strand starting at position 729 of SEQ ID NO: 584976
augagaauauuguaacugu

SEQ ID NO: 603805 - RNA, 19 nt, Artificial Sequence
  Description of Artificial Sequence: Synthetic oligonucleotide
  Antisense strand to SEQ ID NO: 603804
acaguuacaauauucucau

SEQ ID NO: 603806 - RNA, 19 nt, Artificial Sequence
  Description of Artificial Sequence: Synthetic oligonucleotide
  Sense strand starting at position 732 of SEQ ID NO: 584976
agaauauuguaacuguguu

SEQ ID NO: 603807 - RNA, 19 nt, Artificial Sequence
  Description of Artificial Sequence: Synthetic oligonucleotide
  Antisense strand to SEQ ID NO: 603806
aacacaguuacaauauucu

SEQ ID NO: 603808 - RNA, 19 nt, Artificial Sequence
  Description of Artificial Sequence: Synthetic oligonucleotide
  Sense strand starting at position 738 of SEQ ID NO: 584976
uuguaacuguguuccauuu

SEQ ID NO: 603809 - RNA, 19 nt, Artificial Sequence
  Description of Artificial Sequence: Synthetic oligonucleotide
  Antisense strand to SEQ ID NO: 603808
aaauggaacacaguuacaa

SEQ ID NO: 603810 - RNA, 19 nt, Artificial Sequence
  Description of Artificial Sequence: Synthetic oligonucleotide
  Sense strand starting at position 740 of SEQ ID NO: 584976
guaacuguguuccauuuau

SEQ ID NO: 603811 - RNA, 19 nt, Artificial Sequence
  Description of Artificial Sequence: Synthetic oligonucleotide
  Antisense strand to SEQ ID NO: 603810
auaaauggaacacaguuac

SEQ ID NO: 603812 - RNA, 19 nt, Artificial Sequence
  Description of Artificial Sequence: Synthetic oligonucleotide
  Sense strand starting at position 813 of SEQ ID NO: 584976
ccuugaauaugccagcaca

SEQ ID NO: 603813 - RNA, 19 nt, Artificial Sequence
  Description of Artificial Sequence: Synthetic oligonucleotide
  Antisense strand to SEQ ID NO: 603812
ugugcuggcauauucaagg

SEQ ID NO: 603814 - RNA, 19 nt, Artificial Sequence
  Description of Artificial Sequence: Synthetic oligonucleotide
  Sense strand starting at position 928 of SEQ ID NO: 584976
cccuuuaggucuuugcuaa

SEQ ID NO: 603815 - RNA, 19 nt, Artificial Sequence
  Description of Artificial Sequence: Synthetic oligonucleotide
  Antisense strand to SEQ ID NO: 603814
uuagcaaagaccuaaaggg

SEQ ID NO: 603816 - RNA, 19 nt, Artificial Sequence
  Description of Artificial Sequence: Synthetic oligonucleotide
  Sense strand starting at position 929 of SEQ ID NO: 584976
ccuuuaggucuuugcuaaa

SEQ ID NO: 603817 - RNA, 19 nt, Artificial Sequence
  Description of Artificial Sequence: Synthetic oligonucleotide
  Antisense strand to SEQ ID NO: 603816
uuuagcaaagaccuaaagg

SEQ ID NO: 603818 - RNA, 19 nt, Artificial Sequence
  Description of Artificial Sequence: Synthetic oligonucleotide
  Sense strand starting at position 962 of SEQ ID NO: 584976
guaaacucuucccugagca

SEQ ID NO: 603819 - RNA, 19 nt, Artificial Sequence
  Description of Artificial Sequence: Synthetic oligonucleotide
  Antisense strand to SEQ ID NO: 603818
ugcucagggaagaguuuac

SEQ ID NO: 603820 - RNA, 19 nt, Artificial Sequence
  Description of Artificial Sequence: Synthetic oligonucleotide
  Sense strand starting at position 1384 of SEQ ID NO: 584976
ccuugcuuaucaccugaga

SEQ ID NO: 603821 - RNA, 19 nt, Artificial Sequence
  Description of Artificial Sequence: Synthetic oligonucleotide
  Antisense strand to SEQ ID NO: 603820
ucucaggugauaagcaagg

SEQ ID NO: 603822 - RNA, 19 nt, Artificial Sequence
  Description of Artificial Sequence: Synthetic oligonucleotide
  Sense strand starting at position 1387 of SEQ ID NO: 584976
ugcuuaucaccugagauag

SEQ ID NO: 603823 - RNA, 19 nt, Artificial Sequence
  Description of Artificial Sequence: Synthetic oligonucleotide
  Antisense strand to SEQ ID NO: 603822
cuaucucaggugauaagca

SEQ ID NO: 603824 - RNA, 19 nt, Artificial Sequence
  Description of Artificial Sequence: Synthetic oligonucleotide
  Sense strand starting at position 1389 of SEQ ID NO: 584976
cuuaucaccugagauagau

SEQ ID NO: 603825 - RNA, 19 nt, Artificial Sequence
  Description of Artificial Sequence: Synthetic oligonucleotide
  Antisense strand to SEQ ID NO: 603824
aucuaucucaggugauaag

SEQ ID NO: 603826 - RNA, 19 nt, Artificial Sequence
  Description of Artificial Sequence: Synthetic oligonucleotide
  Sense strand starting at position 1560 of SEQ ID NO: 584976
aaauguguugcaugaguga

SEQ ID NO: 603827 - RNA, 19 nt, Artificial Sequence
  Description of Artificial Sequence: Synthetic oligonucleotide
  Antisense strand to SEQ ID NO: 603826
ucacucaugcaacacauuu

SEQ ID NO: 603828 - RNA, 19 nt, Artificial Sequence
  Description of Artificial Sequence: Synthetic oligonucleotide
  Sense strand starting at position 1563 of SEQ ID NO: 584976
uguguugcaugagugaaua

SEQ ID NO: 603829 - RNA, 19 nt, Artificial Sequence
  Description of Artificial Sequence: Synthetic oligonucleotide
  Antisense strand to SEQ ID NO: 603828
uauucacucaugcaacaca

SEQ ID NO: 603830 - RNA, 19 nt, Artificial Sequence
  Description of Artificial Sequence: Synthetic oligonucleotide
  Sense strand starting at position 1575 of SEQ ID NO: 584976
gugaauaucugucucccuu

SEQ ID NO: 603831 - RNA, 19 nt, Artificial Sequence
  Description of Artificial Sequence: Synthetic oligonucleotide
  Antisense strand to SEQ ID NO: 603830
aagggagacagauauucac

SEQ ID NO: 603832 - RNA, 19 nt, Artificial Sequence
  Description of Artificial Sequence: Synthetic oligonucleotide
  Sense strand starting at position 1703 of SEQ ID NO: 584976
cgagacaucuuccacccaa

SEQ ID NO: 603833 - RNA, 19 nt, Artificial Sequence
  Description of Artificial Sequence: Synthetic oligonucleotide
  Antisense strand to SEQ ID NO: 603832
uuggguggaagaugucucg

SEQ ID NO: 603834 - RNA, 19 nt, Artificial Sequence
  Description of Artificial Sequence: Synthetic oligonucleotide
  Sense strand starting at position 2152 of SEQ ID NO: 584976
aaccgaucuuaggauguuu

SEQ ID NO: 603835 - RNA, 19 nt, Artificial Sequence
  Description of Artificial Sequence: Synthetic oligonucleotide
  Antisense strand to SEQ ID NO: 603834
aaacauccuaagaucgguu

SEQ ID NO: 603836 - RNA, 19 nt, Artificial Sequence
  Description of Artificial Sequence: Synthetic oligonucleotide
  Sense strand starting at position 2218 of SEQ ID NO: 584976
uauugauguacauggugga

SEQ ID NO: 603837 - RNA, 19 nt, Artificial Sequence
  Description of Artificial Sequence: Synthetic oligonucleotide
  Antisense strand to SEQ ID NO: 603836
uccaccauguacaucaaua

SEQ ID NO: 603838 - RNA, 19 nt, Artificial Sequence
  Description of Artificial Sequence: Synthetic oligonucleotide
  Sense strand starting at position 2266 of SEQ ID NO: 584976
aggauugucuggguucaag

SEQ ID NO: 603839 - RNA, 19 nt, Artificial Sequence
  Description of Artificial Sequence: Synthetic oligonucleotide
  Antisense strand to SEQ ID NO: 603838
cuugaacccagacaauccu

SEQ ID NO: 603840 - RNA, 19 nt, Artificial Sequence
  Description of Artificial Sequence: Synthetic oligonucleotide
  Sense strand starting at position 2314 of SEQ ID NO: 584976
ucgauacccuguuuguaaa

SEQ ID NO: 603841 - RNA, 19 nt, Artificial Sequence
  Description of Artificial Sequence: Synthetic oligonucleotide
  Antisense strand to SEQ ID NO: 603840
uuuacaaacaggguaucga

SEQ ID NO: 603842 - RNA, 19 nt, Artificial Sequence
  Description of Artificial Sequence: Synthetic oligonucleotide
  Sense strand starting at position 2752 of SEQ ID NO: 584976
ggaagugcucaauaaaucc

SEQ ID NO: 603843 - RNA, 19 nt, Artificial Sequence
  Description of Artificial Sequence: Synthetic oligonucleotide
  Antisense strand to SEQ ID NO: 603842
ggauuuauugagcacuucc

SEQ ID NO: 603844 - RNA, 19 nt, Artificial Sequence
  Description of Artificial Sequence: Synthetic oligonucleotide
  Sense strand starting at position 2782 of SEQ ID NO: 584976
aggugacaccuggaauguu

SEQ ID NO: 603845 - RNA, 19 nt, Artificial Sequence
  Description of Artificial Sequence: Synthetic oligonucleotide
  Antisense strand to SEQ ID NO: 603844
aacauuccaggugucaccu

SEQ ID NO: 603846 - RNA, 19 nt, Artificial Sequence
  Description of Artificial Sequence: Synthetic oligonucleotide
  Sense strand starting at position 2790 of SEQ ID NO: 584976
ccuggaauguuugugacua

SEQ ID NO: 603847 - RNA, 19 nt, Artificial Sequence
  Description of Artificial Sequence: Synthetic oligonucleotide
  Antisense strand to SEQ ID NO: 603846
uagucacaaacauuccagg

SEQ ID NO: 603848 - RNA, 19 nt, Artificial Sequence
  Description of Artificial Sequence: Synthetic oligonucleotide
  Sense strand starting at position 2792 of SEQ ID NO: 584976
uggaauguuugugacuacu

SEQ ID NO: 603849 - RNA, 19 nt, Artificial Sequence
  Description of Artificial Sequence: Synthetic oligonucleotide
  Antisense strand to SEQ ID NO: 603848
aguagucacaaacauucca

SEQ ID NO: 603850 - RNA, 19 nt, Artificial Sequence
  Description of Artificial Sequence: Synthetic oligonucleotide
  Sense strand starting at position 2801 of SEQ ID NO: 584976
ugugacuacugggaaggaa

SEQ ID NO: 603851 - RNA, 19 nt, Artificial Sequence
  Description of Artificial Sequence: Synthetic oligonucleotide
  Antisense strand to SEQ ID NO: 603850
uuccuucccaguagucaca

SEQ ID NO: 603852 - RNA, 19 nt, Artificial Sequence
  Description of Artificial Sequence: Synthetic oligonucleotide
  Sense strand starting at position 2933 of SEQ ID NO: 584976
uuaagauacuugcagcaga

SEQ ID NO: 603853 - RNA, 19 nt, Artificial Sequence
  Description of Artificial Sequence: Synthetic oligonucleotide
  Antisense strand to SEQ ID NO: 603852
ucugcugcaaguaucuuaa

SEQ ID NO: 603854 - RNA, 19 nt, Artificial Sequence
  Description of Artificial Sequence: Synthetic oligonucleotide
  Sense strand starting at position 3714 of SEQ ID NO: 584976
guaugagaaucgggaguca

SEQ ID NO: 603855 - RNA, 19 nt, Artificial Sequence
  Description of Artificial Sequence: Synthetic oligonucleotide
  Antisense strand to SEQ ID NO: 603854
ugacucccgauucucauac

SEQ ID NO: 603856 - RNA, 19 nt, Artificial Sequence
  Description of Artificial Sequence: Synthetic oligonucleotide
  Sense strand starting at position 3826 of SEQ ID NO: 584976
gcuuauaacugcgugaccu

SEQ ID NO: 603857 - RNA, 19 nt, Artificial Sequence
  Description of Artificial Sequence: Synthetic oligonucleotide
  Antisense strand to SEQ ID NO: 603856
aggucacgcaguuauaagc

SEQ ID NO: 603858 - RNA, 19 nt, Artificial Sequence
  Description of Artificial Sequence: Synthetic oligonucleotide
  Sense strand starting at position 3827 of SEQ ID NO: 584976
cuuauaacugcgugaccuu

SEQ ID NO: 603859 - RNA, 19 nt, Artificial Sequence
  Description of Artificial Sequence: Synthetic oligonucleotide
  Antisense strand to SEQ ID NO: 603858
aaggucacgcaguuauaag

SEQ ID NO: 603860 - RNA, 19 nt, Artificial Sequence
  Description of Artificial Sequence: Synthetic oligonucleotide
  Sense strand starting at position 3949 of SEQ ID NO: 584976
agcagaucaaguggugaua

SEQ ID NO: 603861 - RNA, 19 nt, Artificial Sequence
  Description of Artificial Sequence: Synthetic oligonucleotide
  Antisense strand to SEQ ID NO: 603860
uaucaccacuugaucugcu

SEQ ID NO: 603862 - RNA, 19 nt, Artificial Sequence
  Description of Artificial Sequence: Synthetic oligonucleotide
  Sense strand starting at position 3951 of SEQ ID NO: 584976
cagaucaaguggugauaau

SEQ ID NO: 603863 - RNA, 19 nt, Artificial Sequence
  Description of Artificial Sequence: Synthetic oligonucleotide
  Antisense strand to SEQ ID NO: 603862
auuaucaccacuugaucug

SEQ ID NO: 603864 - RNA, 19 nt, Artificial Sequence
  Description of Artificial Sequence: Synthetic oligonucleotide
  Sense strand starting at position 71 of SEQ ID NO: 584977
uuagccucuccuuguagau

SEQ ID NO: 603865 - RNA, 19 nt, Artificial Sequence
  Description of Artificial Sequence: Synthetic oligonucleotide
  Antisense strand to SEQ ID NO: 603864
aucuacaaggagaggcuaa

SEQ ID NO: 603866 - RNA, 19 nt, Artificial Sequence
  Description of Artificial Sequence: Synthetic oligonucleotide
  Sense strand starting at position 206 of SEQ ID NO: 584977
gugccaugcuccucucaag

SEQ ID NO: 603867 - RNA, 19 nt, Artificial Sequence
  Description of Artificial Sequence: Synthetic oligonucleotide
  Antisense strand to SEQ ID NO: 603866
cuugagaggagcauggcac

SEQ ID NO: 603868 - RNA, 19 nt, Artificial Sequence
  Description of Artificial Sequence: Synthetic oligonucleotide
  Sense strand starting at position 225 of SEQ ID NO: 584977
aaaucaugucacuguggca

SEQ ID NO: 603869 - RNA, 19 nt, Artificial Sequence
  Description of Artificial Sequence: Synthetic oligonucleotide
  Antisense strand to SEQ ID NO: 603868
ugccacagugacaugauuu

SEQ ID NO: 603870 - RNA, 19 nt, Artificial Sequence
  Description of Artificial Sequence: Synthetic oligonucleotide
  Sense strand starting at position 289 of SEQ ID NO: 584977
gccucaguggugugagaga

SEQ ID NO: 603871 - RNA, 19 nt, Artificial Sequence
  Description of Artificial Sequence: Synthetic oligonucleotide
  Antisense strand to SEQ ID NO: 603870
ucucucacaccacugaggc

SEQ ID NO: 603872 - RNA, 19 nt, Artificial Sequence
  Description of Artificial Sequence: Synthetic oligonucleotide
  Sense strand starting at position 662 of SEQ ID NO: 584977
cuacuaugugcagauacua

SEQ ID NO: 603873 - RNA, 19 nt, Artificial Sequence
  Description of Artificial Sequence: Synthetic oligonucleotide
  Antisense strand to SEQ ID NO: 603872
uaguaucugcacauaguag

SEQ ID NO: 603874 - RNA, 19 nt, Artificial Sequence
  Description of Artificial Sequence: Synthetic oligonucleotide
  Sense strand starting at position 869 of SEQ ID NO: 584977
gcaccaugaguaggaguuu

SEQ ID NO: 603875 - RNA, 19 nt, Artificial Sequence
  Description of Artificial Sequence: Synthetic oligonucleotide
  Antisense strand to SEQ ID NO: 603874
aaacuccuacucauggugc

SEQ ID NO: 603876 - RNA, 19 nt, Artificial Sequence
  Description of Artificial Sequence: Synthetic oligonucleotide
  Sense strand starting at position 882 of SEQ ID NO: 584977
gaguuugccaaguggagaa

SEQ ID NO: 603877 - RNA, 19 nt, Artificial Sequence
  Description of Artificial Sequence: Synthetic oligonucleotide
  Antisense strand to SEQ ID NO: 603876
uucuccacuuggcaaacuc

SEQ ID NO: 603878 - RNA, 19 nt, Artificial Sequence
  Description of Artificial Sequence: Synthetic oligonucleotide
  Sense strand starting at position 1169 of SEQ ID NO: 584977
ggagcaaucccugagucgu

SEQ ID NO: 603879 - RNA, 19 nt, Artificial Sequence
  Description of Artificial Sequence: Synthetic oligonucleotide
  Antisense strand to SEQ ID NO: 603878
acgacucagggauugcucc

SEQ ID NO: 603880 - RNA, 19 nt, Artificial Sequence
  Description of Artificial Sequence: Synthetic oligonucleotide
  Sense strand starting at position 1506 of SEQ ID NO: 584977
gcccucgugccuggaagaa

SEQ ID NO: 603881 - RNA, 19 nt, Artificial Sequence
  Description of Artificial Sequence: Synthetic oligonucleotide
  Antisense strand to SEQ ID NO: 603880
uucuuccaggcacgagggc

SEQ ID NO: 603882 - RNA, 19 nt, Artificial Sequence
  Description of Artificial Sequence: Synthetic oligonucleotide
  Sense strand starting at position 1580 of SEQ ID NO: 584977
guggguuugccugugagca

SEQ ID NO: 603883 - RNA, 19 nt, Artificial Sequence
  Description of Artificial Sequence: Synthetic oligonucleotide
  Antisense strand to SEQ ID NO: 603882
ugcucacaggcaaacccac

SEQ ID NO: 603884 - RNA, 19 nt, Artificial Sequence
  Description of Artificial Sequence: Synthetic oligonucleotide
  Sense strand starting at position 1581 of SEQ ID NO: 584977
uggguuugccugugagcag

SEQ ID NO: 603885 - RNA, 19 nt, Artificial Sequence
  Description of Artificial Sequence: Synthetic oligonucleotide
  Antisense strand to SEQ ID NO: 603884
cugcucacaggcaaaccca

SEQ ID NO: 603886 - RNA, 19 nt, Artificial Sequence
  Description of Artificial Sequence: Synthetic oligonucleotide
  Sense strand starting at position 2171 of SEQ ID NO: 584977
ggagccuccauacguguua

SEQ ID NO: 603887 - RNA, 19 nt, Artificial Sequence
  Description of Artificial Sequence: Synthetic oligonucleotide
  Antisense strand to SEQ ID NO: 603886
uaacacguauggaggcucc

SEQ ID NO: 603888 - RNA, 19 nt, Artificial Sequence
  Description of Artificial Sequence: Synthetic oligonucleotide
  Sense strand starting at position 2178 of SEQ ID NO: 584977
ccauacguguuacuuccaa

SEQ ID NO: 603889 - RNA, 19 nt, Artificial Sequence
  Description of Artificial Sequence: Synthetic oligonucleotide
  Antisense strand to SEQ ID NO: 603888
uuggaaguaacacguaugg

SEQ ID NO: 603890 - RNA, 19 nt, Artificial Sequence
  Description of Artificial Sequence: Synthetic oligonucleotide
  Sense strand starting at position 2657 of SEQ ID NO: 584977
ccuuaccuucgggauaauc

SEQ ID NO: 603891 - RNA, 19 nt, Artificial Sequence
  Description of Artificial Sequence: Synthetic oligonucleotide
  Antisense strand to SEQ ID NO: 603890
gauuaucccgaagguaagg

SEQ ID NO: 603892 - RNA, 19 nt, Artificial Sequence
  Description of Artificial Sequence: Synthetic oligonucleotide
  Sense strand starting at position 2659 of SEQ ID NO: 584977
uuaccuucgggauaaucca

SEQ ID NO: 603893 - RNA, 19 nt, Artificial Sequence
  Description of Artificial Sequence: Synthetic oligonucleotide
  Antisense strand to SEQ ID NO: 603892
uggauuaucccgaagguaa

SEQ ID NO: 603894 - RNA, 19 nt, Artificial Sequence
  Description of Artificial Sequence: Synthetic oligonucleotide
  Sense strand starting at position 2749 of SEQ ID NO: 584977
acaagauggucucuaaguc

SEQ ID NO: 603895 - RNA, 19 nt, Artificial Sequence
  Description of Artificial Sequence: Synthetic oligonucleotide
  Antisense strand to SEQ ID NO: 603894
gacuuagagaccaucuugu

SEQ ID NO: 603896 - RNA, 19 nt, Artificial Sequence
  Description of Artificial Sequence: Synthetic oligonucleotide
  Sense strand starting at position 2750 of SEQ ID NO: 584977
caagauggucucuaagucu

SEQ ID NO: 603897 - RNA, 19 nt, Artificial Sequence
  Description of Artificial Sequence: Synthetic oligonucleotide
  Antisense strand to SEQ ID NO: 603896
agacuuagagaccaucuug

SEQ ID NO: 603898 - RNA, 19 nt, Artificial Sequence
  Description of Artificial Sequence: Synthetic oligonucleotide
  Sense strand starting at position 2753 of SEQ ID NO: 584977
gauggucucuaagucuuaa

SEQ ID NO: 603899 - RNA, 19 nt, Artificial Sequence
  Description of Artificial Sequence: Synthetic oligonucleotide
  Antisense strand to SEQ ID NO: 603898
uuaagacuuagagaccauc

SEQ ID NO: 603900 - RNA, 19 nt, Artificial Sequence
  Description of Artificial Sequence: Synthetic oligonucleotide
  Sense strand starting at position 2793 of SEQ ID NO: 584977
ucuauuaauugucuaagga

SEQ ID NO: 603901 - RNA, 19 nt, Artificial Sequence
  Description of Artificial Sequence: Synthetic oligonucleotide
  Antisense strand to SEQ ID NO: 603900
uccuuagacaauuaauaga

SEQ ID NO: 603902 - RNA, 19 nt, Artificial Sequence
  Description of Artificial Sequence: Synthetic oligonucleotide
  Sense strand starting at position 2797 of SEQ ID NO: 584977
uuaauugucuaaggauuug

SEQ ID NO: 603903 - RNA, 19 nt, Artificial Sequence
  Description of Artificial Sequence: Synthetic oligonucleotide
  Antisense strand to SEQ ID NO: 603902
caaauccuuagacaauuaa

SEQ ID NO: 603904 - RNA, 19 nt, Artificial Sequence
  Description of Artificial Sequence: Synthetic oligonucleotide
  Sense strand starting at position 2809 of SEQ ID NO: 584977
ggauuugucugugaauugu

SEQ ID NO: 603905 - RNA, 19 nt, Artificial Sequence
  Description of Artificial Sequence: Synthetic oligonucleotide
  Antisense strand to SEQ ID NO: 603904
acaauucacagacaaaucc

SEQ ID NO: 603906 - RNA, 19 nt, Artificial Sequence
  Description of Artificial Sequence: Synthetic oligonucleotide
  Sense strand starting at position 2813 of SEQ ID NO: 584977
uugucugugaauuguguga

SEQ ID NO: 603907 - RNA, 19 nt, Artificial Sequence
  Description of Artificial Sequence: Synthetic oligonucleotide
  Antisense strand to SEQ ID NO: 603906
ucacacaauucacagacaa

SEQ ID NO: 603908 - RNA, 19 nt, Artificial Sequence
  Description of Artificial Sequence: Synthetic oligonucleotide
  Sense strand starting at position 2817 of SEQ ID NO: 584977
cugugaauugugugaaagu

SEQ ID NO: 603909 - RNA, 19 nt, Artificial Sequence
  Description of Artificial Sequence: Synthetic oligonucleotide
  Antisense strand to SEQ ID NO: 603908
acuuucacacaauucacag

SEQ ID NO: 603910 - RNA, 19 nt, Artificial Sequence
  Description of Artificial Sequence: Synthetic oligonucleotide
  Sense strand starting at position 2958 of SEQ ID NO: 584977
ggacuucccuauggaugaa

SEQ ID NO: 603911 - RNA, 19 nt, Artificial Sequence
  Description of Artificial Sequence: Synthetic oligonucleotide
  Antisense strand to SEQ ID NO: 603910
uucauccauagggaagucc

SEQ ID NO: 603912 - RNA, 19 nt, Artificial Sequence
  Description of Artificial Sequence: Synthetic oligonucleotide
  Sense strand starting at position 3061 of SEQ ID NO: 584977
gagacagguuguccuuaug

SEQ ID NO: 603913 - RNA, 19 nt, Artificial Sequence
  Description of Artificial Sequence: Synthetic oligonucleotide
  Antisense strand to SEQ ID NO: 603912
cauaaggacaaccugucuc

SEQ ID NO: 603914 - RNA, 19 nt, Artificial Sequence
  Description of Artificial Sequence: Synthetic oligonucleotide
  Sense strand starting at position 3187 of SEQ ID NO: 584977
uuugaaguuucgcuuaaga

SEQ ID NO: 603915 - RNA, 19 nt, Artificial Sequence
  Description of Artificial Sequence: Synthetic oligonucleotide
  Antisense strand to SEQ ID NO: 603914
ucuuaagcgaaacuucaaa

SEQ ID NO: 603916 - RNA, 19 nt, Artificial Sequence
  Description of Artificial Sequence: Synthetic oligonucleotide
  Sense strand starting at position 3189 of SEQ ID NO: 584977
ugaaguuucgcuuaagaaa

SEQ ID NO: 603917 - RNA, 19 nt, Artificial Sequence
  Description of Artificial Sequence: Synthetic oligonucleotide
  Antisense strand to SEQ ID NO: 603916
uuucuuaagcgaaacuuca

SEQ ID NO: 603918 - RNA, 19 nt, Artificial Sequence
  Description of Artificial Sequence: Synthetic oligonucleotide
  Sense strand starting at position 3214 of SEQ ID NO: 584977
gaggaauccugucuuggug

SEQ ID NO: 603919 - RNA, 19 nt, Artificial Sequence
  Description of Artificial Sequence: Synthetic oligonucleotide
  Antisense strand to SEQ ID NO: 603918
caccaagacaggauuccuc

SEQ ID NO: 603920 - RNA, 19 nt, Artificial Sequence
  Description of Artificial Sequence: Synthetic oligonucleotide
  Sense strand starting at position 3273 of SEQ ID NO: 584977
agggccuuguauccauuau

SEQ ID NO: 603921 - RNA, 19 nt, Artificial Sequence
  Description of Artificial Sequence: Synthetic oligonucleotide
  Antisense strand to SEQ ID NO: 603920
auaauggauacaaggcccu

SEQ ID NO: 603922 - RNA, 19 nt, Artificial Sequence
  Description of Artificial Sequence: Synthetic oligonucleotide
  Sense strand starting at position 3286 of SEQ ID NO: 584977
cauuauuuccgugagcccu

SEQ ID NO: 603923 - RNA, 19 nt, Artificial Sequence
  Description of Artificial Sequence: Synthetic oligonucleotide
  Antisense strand to SEQ ID NO: 603922
agggcucacggaaauaaug

SEQ ID NO: 603924 - RNA, 19 nt, Artificial Sequence
  Description of Artificial Sequence: Synthetic oligonucleotide
  Sense strand starting at position 3294 of SEQ ID NO: 584977
ccgugagcccucccuguau

SEQ ID NO: 603925 - RNA, 19 nt, Artificial Sequence
  Description of Artificial Sequence: Synthetic oligonucleotide
  Antisense strand to SEQ ID NO: 603924
auacagggagggcucacgg

SEQ ID NO: 603926 - RNA, 19 nt, Artificial Sequence
  Description of Artificial Sequence: Synthetic oligonucleotide
  Sense strand starting at position 3296 of SEQ ID NO: 584977
gugagcccucccuguauua

SEQ ID NO: 603927 - RNA, 19 nt, Artificial Sequence
  Description of Artificial Sequence: Synthetic oligonucleotide
  Antisense strand to SEQ ID NO: 603926
uaauacagggagggcucac

SEQ ID NO: 603928 - RNA, 19 nt, Artificial Sequence
  Description of Artificial Sequence: Synthetic oligonucleotide
  Sense strand starting at position 3321 of SEQ ID NO: 584977
gcugucacagaguaauuaa

SEQ ID NO: 603929 - RNA, 19 nt, Artificial Sequence
  Description of Artificial Sequence: Synthetic oligonucleotide
  Antisense strand to SEQ ID NO: 603928
uuaauuacucugugacagc

SEQ ID NO: 603930 - RNA, 19 nt, Artificial Sequence
  Description of Artificial Sequence: Synthetic oligonucleotide
  Sense strand starting at position 3365 of SEQ ID NO: 584977
ggaauuucguggcuuggca

SEQ ID NO: 603931 - RNA, 19 nt, Artificial Sequence
  Description of Artificial Sequence: Synthetic oligonucleotide
  Antisense strand to SEQ ID NO: 603930
ugccaagccacgaaauucc

SEQ ID NO: 603932 - RNA, 19 nt, Artificial Sequence
  Description of Artificial Sequence: Synthetic oligonucleotide
  Sense strand starting at position 3372 of SEQ ID NO: 584977
cguggcuuggcacaauaau

SEQ ID NO: 603933 - RNA, 19 nt, Artificial Sequence
  Description of Artificial Sequence: Synthetic oligonucleotide
  Antisense strand to SEQ ID NO: 603932
auuauugugccaagccacg

SEQ ID NO: 603934 - RNA, 19 nt, Artificial Sequence
  Description of Artificial Sequence: Synthetic oligonucleotide
  Sense strand starting at position 3381 of SEQ ID NO: 584977
gcacaauaaugcuuuaugu

SEQ ID NO: 603935 - RNA, 19 nt, Artificial Sequence
  Description of Artificial Sequence: Synthetic oligonucleotide
  Antisense strand to SEQ ID NO: 603934
acauaaagcauuauugugc

SEQ ID NO: 603936 - RNA, 19 nt, Artificial Sequence
  Description of Artificial Sequence: Synthetic oligonucleotide
  Sense strand starting at position 3437 of SEQ ID NO: 584977
uguagccaucuauaagacu

SEQ ID NO: 603937 - RNA, 19 nt, Artificial Sequence
  Description of Artificial Sequence: Synthetic oligonucleotide
  Antisense strand to SEQ ID NO: 603936
agucuuauagauggcuaca

SEQ ID NO: 603938 - RNA, 19 nt, Artificial Sequence
  Description of Artificial Sequence: Synthetic oligonucleotide
  Sense strand starting at position 3514 of SEQ ID NO: 584977
gagagaggaucaguuguuu

SEQ ID NO: 603939 - RNA, 19 nt, Artificial Sequence
  Description of Artificial Sequence: Synthetic oligonucleotide
  Antisense strand to SEQ ID NO: 603938
aaacaacugauccucucuc

SEQ ID NO: 603940 - RNA, 19 nt, Artificial Sequence
  Description of Artificial Sequence: Synthetic oligonucleotide
  Sense strand starting at position 3657 of SEQ ID NO: 584977
ugggauuaccagugggagu

SEQ ID NO: 603941 - RNA, 19 nt, Artificial Sequence
  Description of Artificial Sequence: Synthetic oligonucleotide
  Antisense strand to SEQ ID NO: 603940
acucccacugguaauccca

SEQ ID NO: 603942 - RNA, 19 nt, Artificial Sequence
  Description of Artificial Sequence: Synthetic oligonucleotide
  Sense strand starting at position 3691 of SEQ ID NO: 584977
agaggaucucgugagcuca

SEQ ID NO: 603943 - RNA, 19 nt, Artificial Sequence
  Description of Artificial Sequence: Synthetic oligonucleotide
  Antisense strand to SEQ ID NO: 603942
ugagcucacgagauccucu

SEQ ID NO: 603944 - RNA, 19 nt, Artificial Sequence
  Description of Artificial Sequence: Synthetic oligonucleotide
  Sense strand starting at position 744 of SEQ ID NO: 584978
gagagaucaucuuugccag

SEQ ID NO: 603945 - RNA, 19 nt, Artificial Sequence
  Description of Artificial Sequence: Synthetic oligonucleotide
  Antisense strand to SEQ ID NO: 603944
cuggcaaagaugaucucuc

SEQ ID NO: 603946 - RNA, 19 nt, Artificial Sequence
  Description of Artificial Sequence: Synthetic oligonucleotide
  Sense strand starting at position 745 of SEQ ID NO: 584978
agagaucaucuuugccaga

SEQ ID NO: 603947 - RNA, 19 nt, Artificial Sequence
  Description of Artificial Sequence: Synthetic oligonucleotide
  Antisense strand to SEQ ID NO: 603946
ucuggcaaagaugaucucu

SEQ ID NO: 603948 - RNA, 19 nt, Artificial Sequence
  Description of Artificial Sequence: Synthetic oligonucleotide
  Sense strand starting at position 747 of SEQ ID NO: 584978
agaucaucuuugccagaaa

SEQ ID NO: 603949 - RNA, 19 nt, Artificial Sequence
  Description of Artificial Sequence: Synthetic oligonucleotide
  Antisense strand to SEQ ID NO: 603948
uuucuggcaaagaugaucu

SEQ ID NO: 603950 - RNA, 19 nt, Artificial Sequence
  Description of Artificial Sequence: Synthetic oligonucleotide
  Sense strand starting at position 868 of SEQ ID NO: 584978
agauuauugugauccaauu

SEQ ID NO: 603951 - RNA, 19 nt, Artificial Sequence
  Description of Artificial Sequence: Synthetic oligonucleotide
  Antisense strand to SEQ ID NO: 603950
aauuggaucacaauaaucu

SEQ ID NO: 603952 - RNA, 19 nt, Artificial Sequence
  Description of Artificial Sequence: Synthetic oligonucleotide
  Sense strand starting at position 874 of SEQ ID NO: 584978
uugugauccaauuagguga

SEQ ID NO: 603953 - RNA, 19 nt, Artificial Sequence
  Description of Artificial Sequence: Synthetic oligonucleotide
  Antisense strand to SEQ ID NO: 603952
ucaccuaauuggaucacaa

SEQ ID NO: 603954 - RNA, 19 nt, Artificial Sequence
  Description of Artificial Sequence: Synthetic oligonucleotide
  Sense strand starting at position 887 of SEQ ID NO: 584978
aggugaagacucugcagau

SEQ ID NO: 603955 - RNA, 19 nt, Artificial Sequence
  Description of Artificial Sequence: Synthetic oligonucleotide
  Antisense strand to SEQ ID NO: 603954
aucugcagagucuucaccu

SEQ ID NO: 603956 - RNA, 19 nt, Artificial Sequence
  Description of Artificial Sequence: Synthetic oligonucleotide
  Sense strand starting at position 888 of SEQ ID NO: 584978
ggugaagacucugcagaua

SEQ ID NO: 603957 - RNA, 19 nt, Artificial Sequence
  Description of Artificial Sequence: Synthetic oligonucleotide
  Antisense strand to SEQ ID NO: 603956
uaucugcagagucuucacc

SEQ ID NO: 603958 - RNA, 19 nt, Artificial Sequence
  Description of Artificial Sequence: Synthetic oligonucleotide
  Sense strand starting at position 929 of SEQ ID NO: 584978
ugagauacaccgugaucuc

SEQ ID NO: 603959 - RNA, 19 nt, Artificial Sequence
  Description of Artificial Sequence: Synthetic oligonucleotide
  Antisense strand to SEQ ID NO: 603958
gagaucacgguguaucuca

SEQ ID NO: 603960 - RNA, 19 nt, Artificial Sequence
  Description of Artificial Sequence: Synthetic oligonucleotide
  Sense strand starting at position 930 of SEQ ID NO: 584978
gagauacaccgugaucuca

SEQ ID NO: 603961 - RNA, 19 nt, Artificial Sequence
  Description of Artificial Sequence: Synthetic oligonucleotide
  Antisense strand to SEQ ID NO: 603960
ugagaucacgguguaucuc

SEQ ID NO: 603962 - RNA, 19 nt, Artificial Sequence
  Description of Artificial Sequence: Synthetic oligonucleotide
  Sense strand starting at position 932 of SEQ ID NO: 584978
gauacaccgugaucucaua

SEQ ID NO: 603963 - RNA, 19 nt, Artificial Sequence
  Description of Artificial Sequence: Synthetic oligonucleotide
  Antisense strand to SEQ ID NO: 603962
uaugagaucacgguguauc

SEQ ID NO: 603964 - RNA, 19 nt, Artificial Sequence
  Description of Artificial Sequence: Synthetic oligonucleotide
  Sense strand starting at position 1095 of SEQ ID NO: 584978
gggauaucucugggaaugc

SEQ ID NO: 603965 - RNA, 19 nt, Artificial Sequence
  Description of Artificial Sequence: Synthetic oligonucleotide
  Antisense strand to SEQ ID NO: 603964
gcauucccagagauauccc

SEQ ID NO: 603966 - RNA, 19 nt, Artificial Sequence
  Description of Artificial Sequence: Synthetic oligonucleotide
  Sense strand starting at position 2012 of SEQ ID NO: 584978
ccagaucagccuggagagu

SEQ ID NO: 603967 - RNA, 19 nt, Artificial Sequence
  Description of Artificial Sequence: Synthetic oligonucleotide
  Antisense strand to SEQ ID NO: 603966
acucuccaggcugaucugg

SEQ ID NO: 603968 - RNA, 19 nt, Artificial Sequence
  Description of Artificial Sequence: Synthetic oligonucleotide
  Sense strand starting at position 2034 of SEQ ID NO: 584978
uguuguagacgguaauuca

SEQ ID NO: 603969 - RNA, 19 nt, Artificial Sequence
  Description of Artificial Sequence: Synthetic oligonucleotide
  Antisense strand to SEQ ID NO: 603968
ugaauuaccgucuacaaca

SEQ ID NO: 603970 - RNA, 19 nt, Artificial Sequence
  Description of Artificial Sequence: Synthetic oligonucleotide
  Sense strand starting at position 2108 of SEQ ID NO: 584978
cggaaacauucuguacuuu

SEQ ID NO: 603971 - RNA, 19 nt, Artificial Sequence
  Description of Artificial Sequence: Synthetic oligonucleotide
  Antisense strand to SEQ ID NO: 603970
aaaguacagaauguuuccg

SEQ ID NO: 603972 - RNA, 19 nt, Artificial Sequence
  Description of Artificial Sequence: Synthetic oligonucleotide
  Sense strand starting at position 2172 of SEQ ID NO: 584978
gugguuccaagacaaugua

SEQ ID NO: 603973 - RNA, 19 nt, Artificial Sequence
  Description of Artificial Sequence: Synthetic oligonucleotide
  Antisense strand to SEQ ID NO: 603972
uacauugucuuggaaccac

SEQ ID NO: 603974 - RNA, 19 nt, Artificial Sequence
  Description of Artificial Sequence: Synthetic oligonucleotide
  Sense strand starting at position 2195 of SEQ ID NO: 584978
ugauuaagccuccggagga

SEQ ID NO: 603975 - RNA, 19 nt, Artificial Sequence
  Description of Artificial Sequence: Synthetic oligonucleotide
  Antisense strand to SEQ ID NO: 603974
uccuccggaggcuuaauca

SEQ ID NO: 603976 - RNA, 19 nt, Artificial Sequence
  Description of Artificial Sequence: Synthetic oligonucleotide
  Sense strand starting at position 2272 of SEQ ID NO: 584978
aaaugagcacuaggguaaa

SEQ ID NO: 603977 - RNA, 19 nt, Artificial Sequence
  Description of Artificial Sequence: Synthetic oligonucleotide
  Antisense strand to SEQ ID NO: 603976
uuuacccuagugcucauuu

SEQ ID NO: 603978 - RNA, 19 nt, Artificial Sequence
  Description of Artificial Sequence: Synthetic oligonucleotide
  Sense strand starting at position 2398 of SEQ ID NO: 584978
uaugcaucuguauaugaga

SEQ ID NO: 603979 - RNA, 19 nt, Artificial Sequence
  Description of Artificial Sequence: Synthetic oligonucleotide
  Antisense strand to SEQ ID NO: 603978
ucucauauacagaugcaua

SEQ ID NO: 603980 - RNA, 19 nt, Artificial Sequence
  Description of Artificial Sequence: Synthetic oligonucleotide
  Sense strand starting at position 2562 of SEQ ID NO: 584978
gggucuugaauugaaguua

SEQ ID NO: 603981 - RNA, 19 nt, Artificial Sequence
  Description of Artificial Sequence: Synthetic oligonucleotide
  Antisense strand to SEQ ID NO: 603980
uaacuucaauucaagaccc

SEQ ID NO: 603982 - RNA, 19 nt, Artificial Sequence
  Description of Artificial Sequence: Synthetic oligonucleotide
  Sense strand starting at position 2631 of SEQ ID NO: 584978
cugcauucuguguauagga

SEQ ID NO: 603983 - RNA, 19 nt, Artificial Sequence
  Description of Artificial Sequence: Synthetic oligonucleotide
  Antisense strand to SEQ ID NO: 603982
uccuauacacagaaugcag

SEQ ID NO: 603984 - RNA, 19 nt, Artificial Sequence
  Description of Artificial Sequence: Synthetic oligonucleotide
  Sense strand starting at position 2718 of SEQ ID NO: 584978
uguugaugacuaugagaac

SEQ ID NO: 603985 - RNA, 19 nt, Artificial Sequence
  Description of Artificial Sequence: Synthetic oligonucleotide
  Antisense strand to SEQ ID NO: 603984
guucucauagucaucaaca

SEQ ID NO: 603986 - RNA, 19 nt, Artificial Sequence
  Description of Artificial Sequence: Synthetic oligonucleotide
  Sense strand starting at position 2815 of SEQ ID NO: 584978
augguagagcuagagcauu

SEQ ID NO: 603987 - RNA, 19 nt, Artificial Sequence
  Description of Artificial Sequence: Synthetic oligonucleotide
  Antisense strand to SEQ ID NO: 603986
aaugcucuagcucuaccau

SEQ ID NO: 603988 - RNA, 19 nt, Artificial Sequence
  Description of Artificial Sequence: Synthetic oligonucleotide
  Sense strand starting at position 2912 of SEQ ID NO: 584978
cagucauuauugucaagga

SEQ ID NO: 603989 - RNA, 19 nt, Artificial Sequence
  Description of Artificial Sequence: Synthetic oligonucleotide
  Antisense strand to SEQ ID NO: 603988
uccuugacaauaaugacug

SEQ ID NO: 603990 - RNA, 19 nt, Artificial Sequence
  Description of Artificial Sequence: Synthetic oligonucleotide
  Sense strand starting at position 3155 of SEQ ID NO: 584978
ucguaucaacuguaugaag

SEQ ID NO: 603991 - RNA, 19 nt, Artificial Sequence
  Description of Artificial Sequence: Synthetic oligonucleotide
  Antisense strand to SEQ ID NO: 603990
cuucauacaguugauacga

SEQ ID NO: 603992 - RNA, 19 nt, Artificial Sequence
  Description of Artificial Sequence: Synthetic oligonucleotide
  Sense strand starting at position 3157 of SEQ ID NO: 584978
guaucaacuguaugaagaa

SEQ ID NO: 603993 - RNA, 19 nt, Artificial Sequence
  Description of Artificial Sequence: Synthetic oligonucleotide
  Antisense strand to SEQ ID NO: 603992
uucuucauacaguugauac

SEQ ID NO: 603994 - RNA, 19 nt, Artificial Sequence
  Description of Artificial Sequence: Synthetic oligonucleotide
  Sense strand starting at position 3200 of SEQ ID NO: 584978
agacaauucucccuggauc

SEQ ID NO: 603995 - RNA, 19 nt, Artificial Sequence
  Description of Artificial Sequence: Synthetic oligonucleotide
  Antisense strand to SEQ ID NO: 603994
gauccagggagaauugucu

SEQ ID NO: 603996 - RNA, 19 nt, Artificial Sequence
  Description of Artificial Sequence: Synthetic oligonucleotide
  Sense strand starting at position 3233 of SEQ ID NO: 584978
cugucuuaugaccaaggca

SEQ ID NO: 603997 - RNA, 19 nt, Artificial Sequence
  Description of Artificial Sequence: Synthetic oligonucleotide
  Antisense strand to SEQ ID NO: 603996
ugccuuggucauaagacag

SEQ ID NO: 603998 - RNA, 19 nt, Artificial Sequence
  Description of Artificial Sequence: Synthetic oligonucleotide
  Sense strand starting at position 3298 of SEQ ID NO: 584978
guaaauagucuuggaagau

SEQ ID NO: 603999 - RNA, 19 nt, Artificial Sequence
  Description of Artificial Sequence: Synthetic oligonucleotide
  Antisense strand to SEQ ID NO: 603998
aucuuccaagacuauuuac

SEQ ID NO: 604000 - RNA, 19 nt, Artificial Sequence
  Description of Artificial Sequence: Synthetic oligonucleotide
  Sense strand starting at position 3355 of SEQ ID NO: 584978
ccuugaaagcugugauauc

SEQ ID NO: 604001 - RNA, 19 nt, Artificial Sequence
  Description of Artificial Sequence: Synthetic oligonucleotide
  Antisense strand to SEQ ID NO: 604000
gauaucacagcuuucaagg

SEQ ID NO: 604002 - RNA, 19 nt, Artificial Sequence
  Description of Artificial Sequence: Synthetic oligonucleotide
  Sense strand starting at position 3483 of SEQ ID NO: 584978
uagcuaucugugggaauua

SEQ ID NO: 604003 - RNA, 19 nt, Artificial Sequence
  Description of Artificial Sequence: Synthetic oligonucleotide
  Antisense strand to SEQ ID NO: 604002
uaauucccacagauagcua

SEQ ID NO: 604004 - RNA, 19 nt, Artificial Sequence
  Description of Artificial Sequence: Synthetic oligonucleotide
  Sense strand starting at position 3510 of SEQ ID NO: 584978
gggaccagucaaugcaaga

SEQ ID NO: 604005 - RNA, 19 nt, Artificial Sequence
  Description of Artificial Sequence: Synthetic oligonucleotide
  Antisense strand to SEQ ID NO: 604004
ucuugcauugacugguccc

SEQ ID NO: 604006 - RNA, 19 nt, Artificial Sequence
  Description of Artificial Sequence: Synthetic oligonucleotide
  Sense strand starting at position 3570 of SEQ ID NO: 584978
auccuuuaucucgaagcca

SEQ ID NO: 604007 - RNA, 19 nt, Artificial Sequence
  Description of Artificial Sequence: Synthetic oligonucleotide
  Antisense strand to SEQ ID NO: 604006
uggcuucgagauaaaggau

SEQ ID NO: 604008 - RNA, 19 nt, Artificial Sequence
  Description of Artificial Sequence: Synthetic oligonucleotide
  Sense strand starting at position 3606 of SEQ ID NO: 584978
aucggcauccaugaaacua

SEQ ID NO: 604009 - RNA, 19 nt, Artificial Sequence
  Description of Artificial Sequence: Synthetic oligonucleotide
  Antisense strand to SEQ ID NO: 604008
uaguuucauggaugccgau

SEQ ID NO: 604010 - RNA, 19 nt, Artificial Sequence
  Description of Artificial Sequence: Synthetic oligonucleotide
  Sense strand starting at position 3705 of SEQ ID NO: 584978
guucucugagauggacaua

SEQ ID NO: 604011 - RNA, 19 nt, Artificial Sequence
  Description of Artificial Sequence: Synthetic oligonucleotide
  Antisense strand to SEQ ID NO: 604010
uauguccaucucagagaac

SEQ ID NO: 604012 - RNA, 19 nt, Artificial Sequence
  Description of Artificial Sequence: Synthetic oligonucleotide
  Sense strand starting at position 3778 of SEQ ID NO: 584978
auauguuaugaccaguauu

SEQ ID NO: 604013 - RNA, 19 nt, Artificial Sequence
  Description of Artificial Sequence: Synthetic oligonucleotide
  Antisense strand to SEQ ID NO: 604012
aauacuggucauaacauau

SEQ ID NO: 604014 - RNA, 19 nt, Artificial Sequence
  Description of Artificial Sequence: Synthetic oligonucleotide
  Sense strand starting at position 3781 of SEQ ID NO: 584978
uguuaugaccaguauugaa

SEQ ID NO: 604015 - RNA, 19 nt, Artificial Sequence
  Description of Artificial Sequence: Synthetic oligonucleotide
  Antisense strand to SEQ ID NO: 604014
uucaauacuggucauaaca

SEQ ID NO: 604016 - RNA, 19 nt, Artificial Sequence
  Description of Artificial Sequence: Synthetic oligonucleotide
  Sense strand starting at position 3788 of SEQ ID NO: 584978
accaguauugaagguugaa

SEQ ID NO: 604017 - RNA, 19 nt, Artificial Sequence
  Description of Artificial Sequence: Synthetic oligonucleotide
  Antisense strand to SEQ ID NO: 604016
uucaaccuucaauacuggu

SEQ ID NO: 604018 - RNA, 19 nt, Artificial Sequence
  Description of Artificial Sequence: Synthetic oligonucleotide
  Sense strand starting at position 3791 of SEQ ID NO: 584978
aguauugaagguugaagga

SEQ ID NO: 604019 - RNA, 19 nt, Artificial Sequence
  Description of Artificial Sequence: Synthetic oligonucleotide
  Antisense strand to SEQ ID NO: 604018
uccuucaaccuucaauacu

SEQ ID NO: 604020 - RNA, 19 nt, Artificial Sequence
  Description of Artificial Sequence: Synthetic oligonucleotide
  Sense strand starting at position 3897 of SEQ ID NO: 584978
ucuaucacccaguaggauu

SEQ ID NO: 604021 - RNA, 19 nt, Artificial Sequence
  Description of Artificial Sequence: Synthetic oligonucleotide
  Antisense strand to SEQ ID NO: 604020
aauccuacugggugauaga

SEQ ID NO: 604022 - RNA, 19 nt, Artificial Sequence
  Description of Artificial Sequence: Synthetic oligonucleotide
  Sense strand starting at position 3924 of SEQ ID NO: 584978
aggucaguuagguauauau

SEQ ID NO: 604023 - RNA, 19 nt, Artificial Sequence
  Description of Artificial Sequence: Synthetic oligonucleotide
  Antisense strand to SEQ ID NO: 604022
auauauaccuaacugaccu

SEQ ID NO: 604024 - RNA, 19 nt, Artificial Sequence
  Description of Artificial Sequence: Synthetic oligonucleotide
  Sense strand starting at position 125 of SEQ ID NO: 584979
guuauugggacuggaggua

SEQ ID NO: 604025 - RNA, 19 nt, Artificial Sequence
  Description of Artificial Sequence: Synthetic oligonucleotide
  Antisense strand to SEQ ID NO: 604024
uaccuccagucccaauaac

SEQ ID NO: 604026 - RNA, 19 nt, Artificial Sequence
  Description of Artificial Sequence: Synthetic oligonucleotide
  Sense strand starting at position 141 of SEQ ID NO: 584979
guagcuauaccacagaacu

SEQ ID NO: 604027 - RNA, 19 nt, Artificial Sequence
  Description of Artificial Sequence: Synthetic oligonucleotide
  Antisense strand to SEQ ID NO: 604026
aguucugugguauagcuac

SEQ ID NO: 604028 - RNA, 19 nt, Artificial Sequence
  Description of Artificial Sequence: Synthetic oligonucleotide
  Sense strand starting at position 397 of SEQ ID NO: 584979
aggagaaccgcuugaauug

SEQ ID NO: 604029 - RNA, 19 nt, Artificial Sequence
  Description of Artificial Sequence: Synthetic oligonucleotide
  Antisense strand to SEQ ID NO: 604028
caauucaagcgguucuccu

SEQ ID NO: 604030 - RNA, 19 nt, Artificial Sequence
  Description of Artificial Sequence: Synthetic oligonucleotide
  Sense strand starting at position 547 of SEQ ID NO: 584979
ugguuagguacaugagaga

SEQ ID NO: 604031 - RNA, 19 nt, Artificial Sequence
  Description of Artificial Sequence: Synthetic oligonucleotide
  Antisense strand to SEQ ID NO: 604030
ucucucauguaccuaacca

SEQ ID NO: 604032 - RNA, 19 nt, Artificial Sequence
  Description of Artificial Sequence: Synthetic oligonucleotide
  Sense strand starting at position 550 of SEQ ID NO: 584979
uuagguacaugagagauaa

SEQ ID NO: 604033 - RNA, 19 nt, Artificial Sequence
  Description of Artificial Sequence: Synthetic oligonucleotide
  Antisense strand to SEQ ID NO: 604032
uuaucucucauguaccuaa

SEQ ID NO: 604034 - RNA, 19 nt, Artificial Sequence
  Description of Artificial Sequence: Synthetic oligonucleotide
  Sense strand starting at position 618 of SEQ ID NO: 584979
cuuaacgaauuaucaaguu

SEQ ID NO: 604035 - RNA, 19 nt, Artificial Sequence
  Description of Artificial Sequence: Synthetic oligonucleotide
  Antisense strand to SEQ ID NO: 604034
aacuugauaauucguuaag

SEQ ID NO: 604036 - RNA, 19 nt, Artificial Sequence
  Description of Artificial Sequence: Synthetic oligonucleotide
  Sense strand starting at position 680 of SEQ ID NO: 584979
acaacugauuggcuguaga

SEQ ID NO: 604037 - RNA, 19 nt, Artificial Sequence
  Description of Artificial Sequence: Synthetic oligonucleotide
  Antisense strand to SEQ ID NO: 604036
ucuacagccaaucaguugu

SEQ ID NO: 604038 - RNA, 19 nt, Artificial Sequence
  Description of Artificial Sequence: Synthetic oligonucleotide
  Sense strand starting at position 905 of SEQ ID NO: 584979
agcagccucuuacuagaua

SEQ ID NO: 604039 - RNA, 19 nt, Artificial Sequence
  Description of Artificial Sequence: Synthetic oligonucleotide
  Antisense strand to SEQ ID NO: 604038
uaucuaguaagaggcugcu

SEQ ID NO: 604040 - RNA, 19 nt, Artificial Sequence
  Description of Artificial Sequence: Synthetic oligonucleotide
  Sense strand starting at position 1158 of SEQ ID NO: 584979
guugaacagcugugugaaa

SEQ ID NO: 604041 - RNA, 19 nt, Artificial Sequence
  Description of Artificial Sequence: Synthetic oligonucleotide
  Antisense strand to SEQ ID NO: 604040
uuucacacagcuguucaac

SEQ ID NO: 604042 - RNA, 19 nt, Artificial Sequence
  Description of Artificial Sequence: Synthetic oligonucleotide
  Sense strand starting at position 1531 of SEQ ID NO: 584979
auaacaugagcgugugaau

SEQ ID NO: 604043 - RNA, 19 nt, Artificial Sequence
  Description of Artificial Sequence: Synthetic oligonucleotide
  Antisense strand to SEQ ID NO: 604042
auucacacgcucauguuau

SEQ ID NO: 604044 - RNA, 19 nt, Artificial Sequence
  Description of Artificial Sequence: Synthetic oligonucleotide
  Sense strand starting at position 2093 of SEQ ID NO: 584979
cuccuuuggcucugaggaa

SEQ ID NO: 604045 - RNA, 19 nt, Artificial Sequence
  Description of Artificial Sequence: Synthetic oligonucleotide
  Antisense strand to SEQ ID NO: 604044
uuccucagagccaaaggag

SEQ ID NO: 604046 - RNA, 19 nt, Artificial Sequence
  Description of Artificial Sequence: Synthetic oligonucleotide
  Sense strand starting at position 2224 of SEQ ID NO: 584979
gguaaacugguugagcgaa

SEQ ID NO: 604047 - RNA, 19 nt, Artificial Sequence
  Description of Artificial Sequence: Synthetic oligonucleotide
  Antisense strand to SEQ ID NO: 604046
uucgcucaaccaguuuacc

SEQ ID NO: 604048 - RNA, 19 nt, Artificial Sequence
  Description of Artificial Sequence: Synthetic oligonucleotide
  Sense strand starting at position 2550 of SEQ ID NO: 584979
ugaggaaucucccucuucu

SEQ ID NO: 604049 - RNA, 19 nt, Artificial Sequence
  Description of Artificial Sequence: Synthetic oligonucleotide
  Antisense strand to SEQ ID NO: 604048
agaagagggagauuccuca

SEQ ID NO: 604050 - RNA, 19 nt, Artificial Sequence
  Description of Artificial Sequence: Synthetic oligonucleotide
  Sense strand starting at position 2865 of SEQ ID NO: 584979
augucccauugcucuuaga

SEQ ID NO: 604051 - RNA, 19 nt, Artificial Sequence
  Description of Artificial Sequence: Synthetic oligonucleotide
  Antisense strand to SEQ ID NO: 604050
ucuaagagcaaugggacau

SEQ ID NO: 604052 - RNA, 19 nt, Artificial Sequence
  Description of Artificial Sequence: Synthetic oligonucleotide
  Sense strand starting at position 2953 of SEQ ID NO: 584979
acugcuaucccuuaguucu

SEQ ID NO: 604053 - RNA, 19 nt, Artificial Sequence
  Description of Artificial Sequence: Synthetic oligonucleotide
  Antisense strand to SEQ ID NO: 604052
agaacuaagggauagcagu

SEQ ID NO: 604054 - RNA, 19 nt, Artificial Sequence
  Description of Artificial Sequence: Synthetic oligonucleotide
  Sense strand starting at position 2980 of SEQ ID NO: 584979
ugacucuucucaguuuauc

SEQ ID NO: 604055 - RNA, 19 nt, Artificial Sequence
  Description of Artificial Sequence: Synthetic oligonucleotide
  Antisense strand to SEQ ID NO: 604054
gauaaacugagaagaguca

SEQ ID NO: 604056 - RNA, 19 nt, Artificial Sequence
  Description of Artificial Sequence: Synthetic oligonucleotide
  Sense strand starting at position 3359 of SEQ ID NO: 584979
ggaucaugcuucuccucuu

SEQ ID NO: 604057 - RNA, 19 nt, Artificial Sequence
  Description of Artificial Sequence: Synthetic oligonucleotide
  Antisense strand to SEQ ID NO: 604056
aagaggagaagcaugaucc

SEQ ID NO: 604058 - RNA, 19 nt, Artificial Sequence
  Description of Artificial Sequence: Synthetic oligonucleotide
  Sense strand starting at position 3416 of SEQ ID NO: 584979
uagugucccuaucucgaaa

SEQ ID NO: 604059 - RNA, 19 nt, Artificial Sequence
  Description of Artificial Sequence: Synthetic oligonucleotide
  Antisense strand to SEQ ID NO: 604058
uuucgagauagggacacua

SEQ ID NO: 604060 - RNA, 19 nt, Artificial Sequence
  Description of Artificial Sequence: Synthetic oligonucleotide
  Sense strand starting at position 3419 of SEQ ID NO: 584979
ugucccuaucucgaaauau

SEQ ID NO: 604061 - RNA, 19 nt, Artificial Sequence
  Description of Artificial Sequence: Synthetic oligonucleotide
  Antisense strand to SEQ ID NO: 604060
auauuucgagauagggaca

SEQ ID NO: 604062 - RNA, 19 nt, Artificial Sequence
  Description of Artificial Sequence: Synthetic oligonucleotide
  Sense strand starting at position 3447 of SEQ ID NO: 584979
ucacaaaucuagguuggga

SEQ ID NO: 604063 - RNA, 19 nt, Artificial Sequence
  Description of Artificial Sequence: Synthetic oligonucleotide
  Antisense strand to SEQ ID NO: 604062
ucccaaccuagauuuguga

SEQ ID NO: 604064 - RNA, 19 nt, Artificial Sequence
  Description of Artificial Sequence: Synthetic oligonucleotide
  Sense strand starting at position 3528 of SEQ ID NO: 584979
uguauaauggccuguggac

SEQ ID NO: 604065 - RNA, 19 nt, Artificial Sequence
  Description of Artificial Sequence: Synthetic oligonucleotide
  Antisense strand to SEQ ID NO: 604064
guccacaggccauuauaca

SEQ ID NO: 604066 - RNA, 19 nt, Artificial Sequence
  Description of Artificial Sequence: Synthetic oligonucleotide
  Sense strand starting at position 3568 of SEQ ID NO: 584979
cuguaaacucuguacagga

SEQ ID NO: 604067 - RNA, 19 nt, Artificial Sequence
  Description of Artificial Sequence: Synthetic oligonucleotide
  Antisense strand to SEQ ID NO: 604066
uccuguacagaguuuacag

SEQ ID NO: 604068 - RNA, 19 nt, Artificial Sequence
  Description of Artificial Sequence: Synthetic oligonucleotide
  Sense strand starting at position 3582 of SEQ ID NO: 584979
caggaaagauugucugucu

SEQ ID NO: 604069 - RNA, 19 nt, Artificial Sequence
  Description of Artificial Sequence: Synthetic oligonucleotide
  Antisense strand to SEQ ID NO: 604068
agacagacaaucuuuccug

SEQ ID NO: 604070 - RNA, 19 nt, Artificial Sequence
  Description of Artificial Sequence: Synthetic oligonucleotide
  Sense strand starting at position 3585 of SEQ ID NO: 584979
gaaagauugucugucugua

SEQ ID NO: 604071 - RNA, 19 nt, Artificial Sequence
  Description of Artificial Sequence: Synthetic oligonucleotide
  Antisense strand to SEQ ID NO: 604070
uacagacagacaaucuuuc

SEQ ID NO: 604072 - RNA, 19 nt, Artificial Sequence
  Description of Artificial Sequence: Synthetic oligonucleotide
  Sense strand starting at position 3587 of SEQ ID NO: 584979
aagauugucugucuguauu

SEQ ID NO: 604073 - RNA, 19 nt, Artificial Sequence
  Description of Artificial Sequence: Synthetic oligonucleotide
  Antisense strand to SEQ ID NO: 604072
aauacagacagacaaucuu

SEQ ID NO: 604074 - RNA, 19 nt, Artificial Sequence
  Description of Artificial Sequence: Synthetic oligonucleotide
  Sense strand starting at position 3589 of SEQ ID NO: 584979
gauugucugucuguauuaa

SEQ ID NO: 604075 - RNA, 19 nt, Artificial Sequence
  Description of Artificial Sequence: Synthetic oligonucleotide
  Antisense strand to SEQ ID NO: 604074
uuaauacagacagacaauc

SEQ ID NO: 604076 - RNA, 19 nt, Artificial Sequence
  Description of Artificial Sequence: Synthetic oligonucleotide
  Sense strand starting at position 3590 of SEQ ID NO: 584979
auugucugucuguauuaaa

SEQ ID NO: 604077 - RNA, 19 nt, Artificial Sequence
  Description of Artificial Sequence: Synthetic oligonucleotide
  Antisense strand to SEQ ID NO: 604076
uuuaauacagacagacaau

SEQ ID NO: 604078 - RNA, 19 nt, Artificial Sequence
  Description of Artificial Sequence: Synthetic oligonucleotide
  Sense strand starting at position 3632 of SEQ ID NO: 584979
guggucagugcucaauaga

SEQ ID NO: 604079 - RNA, 19 nt, Artificial Sequence
  Description of Artificial Sequence: Synthetic oligonucleotide
  Antisense strand to SEQ ID NO: 604078
ucuauugagcacugaccac

SEQ ID NO: 604080 - RNA, 19 nt, Artificial Sequence
  Description of Artificial Sequence: Synthetic oligonucleotide
  Sense strand starting at position 3635 of SEQ ID NO: 584979
gucagugcucaauagauau

SEQ ID NO: 604081 - RNA, 19 nt, Artificial Sequence
  Description of Artificial Sequence: Synthetic oligonucleotide
  Antisense strand to SEQ ID NO: 604080
auaucuauugagcacugac

SEQ ID NO: 604082 - RNA, 19 nt, Artificial Sequence
  Description of Artificial Sequence: Synthetic oligonucleotide
  Sense strand starting at position 3656 of SEQ ID NO: 584979
acugaaucuguggaagugu

SEQ ID NO: 604083 - RNA, 19 nt, Artificial Sequence
  Description of Artificial Sequence: Synthetic oligonucleotide
  Antisense strand to SEQ ID NO: 604082
acacuuccacagauucagu

SEQ ID NO: 604084 - RNA, 19 nt, Artificial Sequence
  Description of Artificial Sequence: Synthetic oligonucleotide
  Sense strand starting at position 3665 of SEQ ID NO: 584979
guggaaguguggaauauga

SEQ ID NO: 604085 - RNA, 19 nt, Artificial Sequence
  Description of Artificial Sequence: Synthetic oligonucleotide
  Antisense strand to SEQ ID NO: 604084
ucauauuccacacuuccac

SEQ ID NO: 604086 - RNA, 19 nt, Artificial Sequence
  Description of Artificial Sequence: Synthetic oligonucleotide
  Sense strand starting at position 3673 of SEQ ID NO: 584979
guggaauaugaaugaaggu

SEQ ID NO: 604087 - RNA, 19 nt, Artificial Sequence
  Description of Artificial Sequence: Synthetic oligonucleotide
  Antisense strand to SEQ ID NO: 604086
accuucauucauauuccac

SEQ ID NO: 604088 - RNA, 19 nt, Artificial Sequence
  Description of Artificial Sequence: Synthetic oligonucleotide
  Sense strand starting at position 3683 of SEQ ID NO: 584979
aaugaagguugagugauau

SEQ ID NO: 604089 - RNA, 19 nt, Artificial Sequence
  Description of Artificial Sequence: Synthetic oligonucleotide
  Antisense strand to SEQ ID NO: 604088
auaucacucaaccuucauu

SEQ ID NO: 604090 - RNA, 19 nt, Artificial Sequence
  Description of Artificial Sequence: Synthetic oligonucleotide
  Sense strand starting at position 3740 of SEQ ID NO: 584979
uuaccuaguucucuauguu

SEQ ID NO: 604091 - RNA, 19 nt, Artificial Sequence
  Description of Artificial Sequence: Synthetic oligonucleotide
  Antisense strand to SEQ ID NO: 604090
aacauagagaacuagguaa

SEQ ID NO: 604092 - RNA, 19 nt, Artificial Sequence
  Description of Artificial Sequence: Synthetic oligonucleotide
  Sense strand starting at position 3744 of SEQ ID NO: 584979
cuaguucucuauguucuaa

SEQ ID NO: 604093 - RNA, 19 nt, Artificial Sequence
  Description of Artificial Sequence: Synthetic oligonucleotide
  Antisense strand to SEQ ID NO: 604092
uuagaacauagagaacuag

SEQ ID NO: 604094 - RNA, 19 nt, Artificial Sequence
  Description of Artificial Sequence: Synthetic oligonucleotide
  Sense strand starting at position 3746 of SEQ ID NO: 584979
aguucucuauguucuaaag

SEQ ID NO: 604095 - RNA, 19 nt, Artificial Sequence
  Description of Artificial Sequence: Synthetic oligonucleotide
  Antisense strand to SEQ ID NO: 604094
cuuuagaacauagagaacu

SEQ ID NO: 604096 - RNA, 19 nt, Artificial Sequence
  Description of Artificial Sequence: Synthetic oligonucleotide
  Sense strand starting at position 3787 of SEQ ID NO: 584979
cacugaggcuucuuagcau

SEQ ID NO: 604097 - RNA, 19 nt, Artificial Sequence
  Description of Artificial Sequence: Synthetic oligonucleotide
  Antisense strand to SEQ ID NO: 604096
augcuaagaagccucagug

SEQ ID NO: 604098 - RNA, 19 nt, Artificial Sequence
  Description of Artificial Sequence: Synthetic oligonucleotide
  Sense strand starting at position 3798 of SEQ ID NO: 584979
cuuagcaugcauuaugaca

SEQ ID NO: 604099 - RNA, 19 nt, Artificial Sequence
  Description of Artificial Sequence: Synthetic oligonucleotide
  Antisense strand to SEQ ID NO: 604098
ugucauaaugcaugcuaag

SEQ ID NO: 604100 - RNA, 19 nt, Artificial Sequence
  Description of Artificial Sequence: Synthetic oligonucleotide
  Sense strand starting at position 3828 of SEQ ID NO: 584979
gguaaucuuguagagcuua

SEQ ID NO: 604101 - RNA, 19 nt, Artificial Sequence
  Description of Artificial Sequence: Synthetic oligonucleotide
  Antisense strand to SEQ ID NO: 604100
uaagcucuacaagauuacc

SEQ ID NO: 604102 - RNA, 19 nt, Artificial Sequence
  Description of Artificial Sequence: Synthetic oligonucleotide
  Sense strand starting at position 3895 of SEQ ID NO: 584979
ggaaaugaguuauauugaa

SEQ ID NO: 604103 - RNA, 19 nt, Artificial Sequence
  Description of Artificial Sequence: Synthetic oligonucleotide
  Antisense strand to SEQ ID NO: 604102
uucaauauaacucauuucc

SEQ ID NO: 604104 - RNA, 19 nt, Artificial Sequence
  Description of Artificial Sequence: Synthetic oligonucleotide
  Sense strand starting at position 118 of SEQ ID NO: 584980
ccaggaaauucugcucacu

SEQ ID NO: 604105 - RNA, 19 nt, Artificial Sequence
  Description of Artificial Sequence: Synthetic oligonucleotide
  Antisense strand to SEQ ID NO: 604104
agugagcagaauuuccugg

SEQ ID NO: 604106 - RNA, 19 nt, Artificial Sequence
  Description of Artificial Sequence: Synthetic oligonucleotide
  Sense strand starting at position 121 of SEQ ID NO: 584980
ggaaauucugcucacuuga

SEQ ID NO: 604107 - RNA, 19 nt, Artificial Sequence
  Description of Artificial Sequence: Synthetic oligonucleotide
  Antisense strand to SEQ ID NO: 604106
ucaagugagcagaauuucc

SEQ ID NO: 604108 - RNA, 19 nt, Artificial Sequence
  Description of Artificial Sequence: Synthetic oligonucleotide
  Sense strand starting at position 155 of SEQ ID NO: 584980
ggaguucucccagaggagc

SEQ ID NO: 604109 - RNA, 19 nt, Artificial Sequence
  Description of Artificial Sequence: Synthetic oligonucleotide
  Antisense strand to SEQ ID NO: 604108
gcuccucugggagaacucc

SEQ ID NO: 604110 - RNA, 19 nt, Artificial Sequence
  Description of Artificial Sequence: Synthetic oligonucleotide
  Sense strand starting at position 246 of SEQ ID NO: 584980
aagucacaggcgugagaaa

SEQ ID NO: 604111 - RNA, 19 nt, Artificial Sequence
  Description of Artificial Sequence: Synthetic oligonucleotide
  Antisense strand to SEQ ID NO: 604110
uuucucacgccugugacuu

SEQ ID NO: 604112 - RNA, 19 nt, Artificial Sequence
  Description of Artificial Sequence: Synthetic oligonucleotide
  Sense strand starting at position 247 of SEQ ID NO: 584980
agucacaggcgugagaaau

SEQ ID NO: 604113 - RNA, 19 nt, Artificial Sequence
  Description of Artificial Sequence: Synthetic oligonucleotide
  Antisense strand to SEQ ID NO: 604112
auuucucacgccugugacu

SEQ ID NO: 604114 - RNA, 19 nt, Artificial Sequence
  Description of Artificial Sequence: Synthetic oligonucleotide
  Sense strand starting at position 264 of SEQ ID NO: 584980
augagauguagcggugauc

SEQ ID NO: 604115 - RNA, 19 nt, Artificial Sequence
  Description of Artificial Sequence: Synthetic oligonucleotide
  Antisense strand to SEQ ID NO: 604114
gaucaccgcuacaucucau

SEQ ID NO: 604116 - RNA, 19 nt, Artificial Sequence
  Description of Artificial Sequence: Synthetic oligonucleotide
  Sense strand starting at position 267 of SEQ ID NO: 584980
agauguagcggugaucagu

SEQ ID NO: 604117 - RNA, 19 nt, Artificial Sequence
  Description of Artificial Sequence: Synthetic oligonucleotide
  Antisense strand to SEQ ID NO: 604116
acugaucaccgcuacaucu

SEQ ID NO: 604118 - RNA, 19 nt, Artificial Sequence
  Description of Artificial Sequence: Synthetic oligonucleotide
  Sense strand starting at position 307 of SEQ ID NO: 584980
ggugggacgguuugaaaga

SEQ ID NO: 604119 - RNA, 19 nt, Artificial Sequence
  Description of Artificial Sequence: Synthetic oligonucleotide
  Antisense strand to SEQ ID NO: 604118
ucuuucaaaccgucccacc

SEQ ID NO: 604120 - RNA, 19 nt, Artificial Sequence
  Description of Artificial Sequence: Synthetic oligonucleotide
  Sense strand starting at position 320 of SEQ ID NO: 584980
gaaagacgaccuggucuua

SEQ ID NO: 604121 - RNA, 19 nt, Artificial Sequence
  Description of Artificial Sequence: Synthetic oligonucleotide
  Antisense strand to SEQ ID NO: 604120
uaagaccaggucgucuuuc

SEQ ID NO: 604122 - RNA, 19 nt, Artificial Sequence
  Description of Artificial Sequence: Synthetic oligonucleotide
  Sense strand starting at position 408 of SEQ ID NO: 584980
uguaaagcgcuacacaauu

SEQ ID NO: 604123 - RNA, 19 nt, Artificial Sequence
  Description of Artificial Sequence: Synthetic oligonucleotide
  Antisense strand to SEQ ID NO: 604122
aauuguguagcgcuuuaca

SEQ ID NO: 604124 - RNA, 19 nt, Artificial Sequence
  Description of Artificial Sequence: Synthetic oligonucleotide
  Sense strand starting at position 493 of SEQ ID NO: 584980
uugaaacagagaugucguu

SEQ ID NO: 604125 - RNA, 19 nt, Artificial Sequence
  Description of Artificial Sequence: Synthetic oligonucleotide
  Antisense strand to SEQ ID NO: 604124
aacgacaucucuguuucaa

SEQ ID NO: 604126 - RNA, 19 nt, Artificial Sequence
  Description of Artificial Sequence: Synthetic oligonucleotide
  Sense strand starting at position 553 of SEQ ID NO: 584980
ggacuuuguucucuugaaa

SEQ ID NO: 604127 - RNA, 19 nt, Artificial Sequence
  Description of Artificial Sequence: Synthetic oligonucleotide
  Antisense strand to SEQ ID NO: 604126
uuucaagagaacaaagucc

SEQ ID NO: 604128 - RNA, 19 nt, Artificial Sequence
  Description of Artificial Sequence: Synthetic oligonucleotide
  Sense strand starting at position 599 of SEQ ID NO: 584980
guaccuuucccucgaaauc

SEQ ID NO: 604129 - RNA, 19 nt, Artificial Sequence
  Description of Artificial Sequence: Synthetic oligonucleotide
  Antisense strand to SEQ ID NO: 604128
gauuucgagggaaagguac

SEQ ID NO: 604130 - RNA, 19 nt, Artificial Sequence
  Description of Artificial Sequence: Synthetic oligonucleotide
  Sense strand starting at position 609 of SEQ ID NO: 584980
cucgaaaucguaggagaca

SEQ ID NO: 604131 - RNA, 19 nt, Artificial Sequence
  Description of Artificial Sequence: Synthetic oligonucleotide
  Antisense strand to SEQ ID NO: 604130
ugucuccuacgauuucgag

SEQ ID NO: 604132 - RNA, 19 nt, Artificial Sequence
  Description of Artificial Sequence: Synthetic oligonucleotide
  Sense strand starting at position 741 of SEQ ID NO: 584980
ucaagacagugguuccaaa

SEQ ID NO: 604133 - RNA, 19 nt, Artificial Sequence
  Description of Artificial Sequence: Synthetic oligonucleotide
  Antisense strand to SEQ ID NO: 604132
uuuggaaccacugucuuga

SEQ ID NO: 604134 - RNA, 19 nt, Artificial Sequence
  Description of Artificial Sequence: Synthetic oligonucleotide
  Sense strand starting at position 783 of SEQ ID NO: 584980
gcuuacauguggccugaaa

SEQ ID NO: 604135 - RNA, 19 nt, Artificial Sequence
  Description of Artificial Sequence: Synthetic oligonucleotide
  Antisense strand to SEQ ID NO: 604134
uuucaggccacauguaagc

SEQ ID NO: 604136 - RNA, 19 nt, Artificial Sequence
  Description of Artificial Sequence: Synthetic oligonucleotide
  Sense strand starting at position 1040 of SEQ ID NO: 584980
gcgggagucacccacacaa

SEQ ID NO: 604137 - RNA, 19 nt, Artificial Sequence
  Description of Artificial Sequence: Synthetic oligonucleotide
  Antisense strand to SEQ ID NO: 604136
uugugugggugacucccgc

SEQ ID NO: 604138 - RNA, 19 nt, Artificial Sequence
  Description of Artificial Sequence: Synthetic oligonucleotide
  Sense strand starting at position 1523 of SEQ ID NO: 584980
uggagagucgcagauaaag

SEQ ID NO: 604139 - RNA, 19 nt, Artificial Sequence
  Description of Artificial Sequence: Synthetic oligonucleotide
  Antisense strand to SEQ ID NO: 604138
cuuuaucugcgacucucca

SEQ ID NO: 604140 - RNA, 19 nt, Artificial Sequence
  Description of Artificial Sequence: Synthetic oligonucleotide
  Sense strand starting at position 1607 of SEQ ID NO: 584980
gagcgacuccgucaagacu

SEQ ID NO: 604141 - RNA, 19 nt, Artificial Sequence
  Description of Artificial Sequence: Synthetic oligonucleotide
  Antisense strand to SEQ ID NO: 604140
agucuugacggagucgcuc

SEQ ID NO: 604142 - RNA, 19 nt, Artificial Sequence
  Description of Artificial Sequence: Synthetic oligonucleotide
  Sense strand starting at position 2297 of SEQ ID NO: 584980
cgcugugagcaacaauaca

SEQ ID NO: 604143 - RNA, 19 nt, Artificial Sequence
  Description of Artificial Sequence: Synthetic oligonucleotide
  Antisense strand to SEQ ID NO: 604142
uguauuguugcucacagcg

SEQ ID NO: 604144 - RNA, 19 nt, Artificial Sequence
  Description of Artificial Sequence: Synthetic oligonucleotide
  Sense strand starting at position 2341 of SEQ ID NO: 584980
aaaguaagaucugcauguu

SEQ ID NO: 604145 - RNA, 19 nt, Artificial Sequence
  Description of Artificial Sequence: Synthetic oligonucleotide
  Antisense strand to SEQ ID NO: 604144
aacaugcagaucuuacuuu

SEQ ID NO: 604146 - RNA, 19 nt, Artificial Sequence
  Description of Artificial Sequence: Synthetic oligonucleotide
  Sense strand starting at position 2748 of SEQ ID NO: 584980
uuauauguugacugaaauc

SEQ ID NO: 604147 - RNA, 19 nt, Artificial Sequence
  Description of Artificial Sequence: Synthetic oligonucleotide
  Antisense strand to SEQ ID NO: 604146
gauuucagucaacauauaa

SEQ ID NO: 604148 - RNA, 19 nt, Artificial Sequence
  Description of Artificial Sequence: Synthetic oligonucleotide
  Sense strand starting at position 2754 of SEQ ID NO: 584980
guugacugaaaucguaaca

SEQ ID NO: 604149 - RNA, 19 nt, Artificial Sequence
  Description of Artificial Sequence: Synthetic oligonucleotide
  Antisense strand to SEQ ID NO: 604148
uguuacgauuucagucaac

SEQ ID NO: 604150 - RNA, 19 nt, Artificial Sequence
  Description of Artificial Sequence: Synthetic oligonucleotide
  Sense strand starting at position 2787 of SEQ ID NO: 584980
augcuauugcuaugaaauu

SEQ ID NO: 604151 - RNA, 19 nt, Artificial Sequence
  Description of Artificial Sequence: Synthetic oligonucleotide
  Antisense strand to SEQ ID NO: 604150
aauuucauagcaauagcau

SEQ ID NO: 604152 - RNA, 19 nt, Artificial Sequence
  Description of Artificial Sequence: Synthetic oligonucleotide
  Sense strand starting at position 2884 of SEQ ID NO: 584980
agcuaaugcuccuugggau

SEQ ID NO: 604153 - RNA, 19 nt, Artificial Sequence
  Description of Artificial Sequence: Synthetic oligonucleotide
  Antisense strand to SEQ ID NO: 604152
aucccaaggagcauuagcu

SEQ ID NO: 604154 - RNA, 19 nt, Artificial Sequence
  Description of Artificial Sequence: Synthetic oligonucleotide
  Sense strand starting at position 2891 of SEQ ID NO: 584980
gcuccuugggauuagucau

SEQ ID NO: 604155 - RNA, 19 nt, Artificial Sequence
  Description of Artificial Sequence: Synthetic oligonucleotide
  Antisense strand to SEQ ID NO: 604154
augacuaaucccaaggagc

SEQ ID NO: 604156 - RNA, 19 nt, Artificial Sequence
  Description of Artificial Sequence: Synthetic oligonucleotide
  Sense strand starting at position 2898 of SEQ ID NO: 584980
gggauuagucauuaaccgu

SEQ ID NO: 604157 - RNA, 19 nt, Artificial Sequence
  Description of Artificial Sequence: Synthetic oligonucleotide
  Antisense strand to SEQ ID NO: 604156
acgguuaaugacuaauccc

SEQ ID NO: 604158 - RNA, 19 nt, Artificial Sequence
  Description of Artificial Sequence: Synthetic oligonucleotide
  Sense strand starting at position 2902 of SEQ ID NO: 584980
uuagucauuaaccgugaga

SEQ ID NO: 604159 - RNA, 19 nt, Artificial Sequence
  Description of Artificial Sequence: Synthetic oligonucleotide
  Antisense strand to SEQ ID NO: 604158
ucucacgguuaaugacuaa

SEQ ID NO: 604160 - RNA, 19 nt, Artificial Sequence
  Description of Artificial Sequence: Synthetic oligonucleotide
  Sense strand starting at position 2904 of SEQ ID NO: 584980
agucauuaaccgugagagg

SEQ ID NO: 604161 - RNA, 19 nt, Artificial Sequence
  Description of Artificial Sequence: Synthetic oligonucleotide
  Antisense strand to SEQ ID NO: 604160
ccucucacgguuaaugacu

SEQ ID NO: 604162 - RNA, 19 nt, Artificial Sequence
  Description of Artificial Sequence: Synthetic oligonucleotide
  Sense strand starting at position 2905 of SEQ ID NO: 584980
gucauuaaccgugagagga

SEQ ID NO: 604163 - RNA, 19 nt, Artificial Sequence
  Description of Artificial Sequence: Synthetic oligonucleotide
  Antisense strand to SEQ ID NO: 604162
uccucucacgguuaaugac

SEQ ID NO: 604164 - RNA, 19 nt, Artificial Sequence
  Description of Artificial Sequence: Synthetic oligonucleotide
  Sense strand starting at position 2922 of SEQ ID NO: 584980
gaaagcuguuagccaagaa

SEQ ID NO: 604165 - RNA, 19 nt, Artificial Sequence
  Description of Artificial Sequence: Synthetic oligonucleotide
  Antisense strand to SEQ ID NO: 604164
uucuuggcuaacagcuuuc

SEQ ID NO: 604166 - RNA, 19 nt, Artificial Sequence
  Description of Artificial Sequence: Synthetic oligonucleotide
  Sense strand starting at position 3253 of SEQ ID NO: 584980
cuuccucuuggagacuauu

SEQ ID NO: 604167 - RNA, 19 nt, Artificial Sequence
  Description of Artificial Sequence: Synthetic oligonucleotide
  Antisense strand to SEQ ID NO: 604166
aauagucuccaagaggaag

SEQ ID NO: 604168 - RNA, 19 nt, Artificial Sequence
  Description of Artificial Sequence: Synthetic oligonucleotide
  Sense strand starting at position 3283 of SEQ ID NO: 584980
ggcagaaccuacuugaucu

SEQ ID NO: 604169 - RNA, 19 nt, Artificial Sequence
  Description of Artificial Sequence: Synthetic oligonucleotide
  Antisense strand to SEQ ID NO: 604168
agaucaaguagguucugcc

SEQ ID NO: 604170 - RNA, 19 nt, Artificial Sequence
  Description of Artificial Sequence: Synthetic oligonucleotide
  Sense strand starting at position 3391 of SEQ ID NO: 584980
ucaguaaauauccgggaau

SEQ ID NO: 604171 - RNA, 19 nt, Artificial Sequence
  Description of Artificial Sequence: Synthetic oligonucleotide
  Antisense strand to SEQ ID NO: 604170
auucccggauauuuacuga

SEQ ID NO: 604172 - RNA, 19 nt, Artificial Sequence
  Description of Artificial Sequence: Synthetic oligonucleotide
  Sense strand starting at position 3394 of SEQ ID NO: 584980
guaaauauccgggaaugcu

SEQ ID NO: 604173 - RNA, 19 nt, Artificial Sequence
  Description of Artificial Sequence: Synthetic oligonucleotide
  Antisense strand to SEQ ID NO: 604172
agcauucccggauauuuac

SEQ ID NO: 604174 - RNA, 19 nt, Artificial Sequence
  Description of Artificial Sequence: Synthetic oligonucleotide
  Sense strand starting at position 3444 of SEQ ID NO: 584980
auuuguugaauucguguga

SEQ ID NO: 604175 - RNA, 19 nt, Artificial Sequence
  Description of Artificial Sequence: Synthetic oligonucleotide
  Antisense strand to SEQ ID NO: 604174
ucacacgaauucaacaaau

SEQ ID NO: 604176 - RNA, 19 nt, Artificial Sequence
  Description of Artificial Sequence: Synthetic oligonucleotide
  Sense strand starting at position 3883 of SEQ ID NO: 584980
ccuguugugugauuucuga

SEQ ID NO: 604177 - RNA, 19 nt, Artificial Sequence
  Description of Artificial Sequence: Synthetic oligonucleotide
  Antisense strand to SEQ ID NO: 604176
ucagaaaucacacaacagg

SEQ ID NO: 604178 - RNA, 19 nt, Artificial Sequence
  Description of Artificial Sequence: Synthetic oligonucleotide
  Sense strand starting at position 3893 of SEQ ID NO: 584980
gauuucugauuaugauuag

SEQ ID NO: 604179 - RNA, 19 nt, Artificial Sequence
  Description of Artificial Sequence: Synthetic oligonucleotide
  Antisense strand to SEQ ID NO: 604178
cuaaucauaaucagaaauc

SEQ ID NO: 604180 - RNA, 19 nt, Artificial Sequence
  Description of Artificial Sequence: Synthetic oligonucleotide
  Sense strand starting at position 3905 of SEQ ID NO: 584980
ugauuagggugaccacaua

SEQ ID NO: 604181 - RNA, 19 nt, Artificial Sequence
  Description of Artificial Sequence: Synthetic oligonucleotide
  Antisense strand to SEQ ID NO: 604180
uauguggucacccuaauca

SEQ ID NO: 604182 - RNA, 19 nt, Artificial Sequence
  Description of Artificial Sequence: Synthetic oligonucleotide
  Sense strand starting at position 3973 of SEQ ID NO: 584980
agaauuacauuggaauaac

SEQ ID NO: 604183 - RNA, 19 nt, Artificial Sequence
  Description of Artificial Sequence: Synthetic oligonucleotide
  Antisense strand to SEQ ID NO: 604182
guuauuccaauguaauucu

SEQ ID NO: 604184 - RNA, 19 nt, Artificial Sequence
  Description of Artificial Sequence: Synthetic oligonucleotide
  Sense strand starting at position 294 of SEQ ID NO: 584981
gaagucggcuuaucucuaa

SEQ ID NO: 604185 - RNA, 19 nt, Artificial Sequence
  Description of Artificial Sequence: Synthetic oligonucleotide
  Antisense strand to SEQ ID NO: 604184
uuagagauaagccgacuuc

SEQ ID NO: 604186 - RNA, 19 nt, Artificial Sequence
  Description of Artificial Sequence: Synthetic oligonucleotide
  Sense strand starting at position 298 of SEQ ID NO: 584981
ucggcuuaucucuaaagca

SEQ ID NO: 604187 - RNA, 19 nt, Artificial Sequence
  Description of Artificial Sequence: Synthetic oligonucleotide
  Antisense strand to SEQ ID NO: 604186
ugcuuuagagauaagccga

SEQ ID NO: 604188 - RNA, 19 nt, Artificial Sequence
  Description of Artificial Sequence: Synthetic oligonucleotide
  Sense strand starting at position 337 of SEQ ID NO: 584981
gaaggauuauguguccgaa

SEQ ID NO: 604189 - RNA, 19 nt, Artificial Sequence
  Description of Artificial Sequence: Synthetic oligonucleotide
  Antisense strand to SEQ ID NO: 604188
uucggacacauaauccuuc

SEQ ID NO: 604190 - RNA, 19 nt, Artificial Sequence
  Description of Artificial Sequence: Synthetic oligonucleotide
  Sense strand starting at position 339 of SEQ ID NO: 584981
aggauuauguguccgaaac

SEQ ID NO: 604191 - RNA, 19 nt, Artificial Sequence
  Description of Artificial Sequence: Synthetic oligonucleotide
  Antisense strand to SEQ ID NO: 604190
guuucggacacauaauccu

SEQ ID NO: 604192 - RNA, 19 nt, Artificial Sequence
  Description of Artificial Sequence: Synthetic oligonucleotide
  Sense strand starting at position 340 of SEQ ID NO: 584981
ggauuauguguccgaaacu

SEQ ID NO: 604193 - RNA, 19 nt, Artificial Sequence
  Description of Artificial Sequence: Synthetic oligonucleotide
  Antisense strand to SEQ ID NO: 604192
aguuucggacacauaaucc

SEQ ID NO: 604194 - RNA, 19 nt, Artificial Sequence
  Description of Artificial Sequence: Synthetic oligonucleotide
  Sense strand starting at position 368 of SEQ ID NO: 584981
cccacuuuccaguguuuag

SEQ ID NO: 604195 - RNA, 19 nt, Artificial Sequence
  Description of Artificial Sequence: Synthetic oligonucleotide
  Antisense strand to SEQ ID NO: 604194
cuaaacacuggaaaguggg

SEQ ID NO: 604196 - RNA, 19 nt, Artificial Sequence
  Description of Artificial Sequence: Synthetic oligonucleotide
  Sense strand starting at position 372 of SEQ ID NO: 584981
cuuuccaguguuuagggaa

SEQ ID NO: 604197 - RNA, 19 nt, Artificial Sequence
  Description of Artificial Sequence: Synthetic oligonucleotide
  Antisense strand to SEQ ID NO: 604196
uucccuaaacacuggaaag

SEQ ID NO: 604198 - RNA, 19 nt, Artificial Sequence
  Description of Artificial Sequence: Synthetic oligonucleotide
  Sense strand starting at position 388 of SEQ ID NO: 584981
gaacaucuggccugaugua

SEQ ID NO: 604199 - RNA, 19 nt, Artificial Sequence
  Description of Artificial Sequence: Synthetic oligonucleotide
  Antisense strand to SEQ ID NO: 604198
uacaucaggccagauguuc

SEQ ID NO: 604200 - RNA, 19 nt, Artificial Sequence
  Description of Artificial Sequence: Synthetic oligonucleotide
  Sense strand starting at position 529 of SEQ ID NO: 584981
agaaauagguccuuuauag

SEQ ID NO: 604201 - RNA, 19 nt, Artificial Sequence
  Description of Artificial Sequence: Synthetic oligonucleotide
  Antisense strand to SEQ ID NO: 604200
cuauaaaggaccuauuucu

SEQ ID NO: 604202 - RNA, 19 nt, Artificial Sequence
  Description of Artificial Sequence: Synthetic oligonucleotide
  Sense strand starting at position 770 of SEQ ID NO: 584981
accagacacugugugaaua

SEQ ID NO: 604203 - RNA, 19 nt, Artificial Sequence
  Description of Artificial Sequence: Synthetic oligonucleotide
  Antisense strand to SEQ ID NO: 604202
uauucacacagugucuggu

SEQ ID NO: 604204 - RNA, 19 nt, Artificial Sequence
  Description of Artificial Sequence: Synthetic oligonucleotide
  Sense strand starting at position 778 of SEQ ID NO: 584981
cugugugaauacguaucua

SEQ ID NO: 604205 - RNA, 19 nt, Artificial Sequence
  Description of Artificial Sequence: Synthetic oligonucleotide
  Antisense strand to SEQ ID NO: 604204
uagauacguauucacacag

SEQ ID NO: 604206 - RNA, 19 nt, Artificial Sequence
  Description of Artificial Sequence: Synthetic oligonucleotide
  Sense strand starting at position 782 of SEQ ID NO: 584981
gugaauacguaucuaagac

SEQ ID NO: 604207 - RNA, 19 nt, Artificial Sequence
  Description of Artificial Sequence: Synthetic oligonucleotide
  Antisense strand to SEQ ID NO: 604206
gucuuagauacguauucac

SEQ ID NO: 604208 - RNA, 19 nt, Artificial Sequence
  Description of Artificial Sequence: Synthetic oligonucleotide
  Sense strand starting at position 816 of SEQ ID NO: 584981
cgaggaguuguuagugggu

SEQ ID NO: 604209 - RNA, 19 nt, Artificial Sequence
  Description of Artificial Sequence: Synthetic oligonucleotide
  Antisense strand to SEQ ID NO: 604208
acccacuaacaacuccucg

SEQ ID NO: 604210 - RNA, 19 nt, Artificial Sequence
  Description of Artificial Sequence: Synthetic oligonucleotide
  Sense strand starting at position 905 of SEQ ID NO: 584981
agaugagucaucuggagcu

SEQ ID NO: 604211 - RNA, 19 nt, Artificial Sequence
  Description of Artificial Sequence: Synthetic oligonucleotide
  Antisense strand to SEQ ID NO: 604210
agcuccagaugacucaucu

SEQ ID NO: 604212 - RNA, 19 nt, Artificial Sequence
  Description of Artificial Sequence: Synthetic oligonucleotide
  Sense strand starting at position 907 of SEQ ID NO: 584981
augagucaucuggagcuuu

SEQ ID NO: 604213 - RNA, 19 nt, Artificial Sequence
  Description of Artificial Sequence: Synthetic oligonucleotide
  Antisense strand to SEQ ID NO: 604212
aaagcuccagaugacucau

SEQ ID NO: 604214 - RNA, 19 nt, Artificial Sequence
  Description of Artificial Sequence: Synthetic oligonucleotide
  Sense strand starting at position 1041 of SEQ ID NO: 584981
ucgugcuuccuguaugaag

SEQ ID NO: 604215 - RNA, 19 nt, Artificial Sequence
  Description of Artificial Sequence: Synthetic oligonucleotide
  Antisense strand to SEQ ID NO: 604214
cuucauacaggaagcacga

SEQ ID NO: 604216 - RNA, 19 nt, Artificial Sequence
  Description of Artificial Sequence: Synthetic oligonucleotide
  Sense strand starting at position 1174 of SEQ ID NO: 584981
ggcaucuacuacucugaau

SEQ ID NO: 604217 - RNA, 19 nt, Artificial Sequence
  Description of Artificial Sequence: Synthetic oligonucleotide
  Antisense strand to SEQ ID NO: 604216
auucagaguaguagaugcc

SEQ ID NO: 604218 - RNA, 19 nt, Artificial Sequence
  Description of Artificial Sequence: Synthetic oligonucleotide
  Sense strand starting at position 1186 of SEQ ID NO: 584981
ucugaauuaucauugcuug

SEQ ID NO: 604219 - RNA, 19 nt, Artificial Sequence
  Description of Artificial Sequence: Synthetic oligonucleotide
  Antisense strand to SEQ ID NO: 604218
caagcaaugauaauucaga

SEQ ID NO: 604220 - RNA, 19 nt, Artificial Sequence
  Description of Artificial Sequence: Synthetic oligonucleotide
  Sense strand starting at position 1187 of SEQ ID NO: 584981
cugaauuaucauugcuugu

SEQ ID NO: 604221 - RNA, 19 nt, Artificial Sequence
  Description of Artificial Sequence: Synthetic oligonucleotide
  Antisense strand to SEQ ID NO: 604220
acaagcaaugauaauucag

SEQ ID NO: 604222 - RNA, 19 nt, Artificial Sequence
  Description of Artificial Sequence: Synthetic oligonucleotide
  Sense strand starting at position 1203 of SEQ ID NO: 584981
uguuucuaccaauguguga

SEQ ID NO: 604223 - RNA, 19 nt, Artificial Sequence
  Description of Artificial Sequence: Synthetic oligonucleotide
  Antisense strand to SEQ ID NO: 604222
ucacacauugguagaaaca

SEQ ID NO: 604224 - RNA, 19 nt, Artificial Sequence
  Description of Artificial Sequence: Synthetic oligonucleotide
  Sense strand starting at position 2038 of SEQ ID NO: 584981
gccgcaaguccuuacugaa

SEQ ID NO: 604225 - RNA, 19 nt, Artificial Sequence
  Description of Artificial Sequence: Synthetic oligonucleotide
  Antisense strand to SEQ ID NO: 604224
uucaguaaggacuugcggc

SEQ ID NO: 604226 - RNA, 19 nt, Artificial Sequence
  Description of Artificial Sequence: Synthetic oligonucleotide
  Sense strand starting at position 2176 of SEQ ID NO: 584981
ccaguagauuuguccuagu

SEQ ID NO: 604227 - RNA, 19 nt, Artificial Sequence
  Description of Artificial Sequence: Synthetic oligonucleotide
  Antisense strand to SEQ ID NO: 604226
acuaggacaaaucuacugg

SEQ ID NO: 604228 - RNA, 19 nt, Artificial Sequence
  Description of Artificial Sequence: Synthetic oligonucleotide
  Sense strand starting at position 2225 of SEQ ID NO: 584981
gccuguuucuauuuguaug

SEQ ID NO: 604229 - RNA, 19 nt, Artificial Sequence
  Description of Artificial Sequence: Synthetic oligonucleotide
  Antisense strand to SEQ ID NO: 604228
cauacaaauagaaacaggc

SEQ ID NO: 604230 - RNA, 19 nt, Artificial Sequence
  Description of Artificial Sequence: Synthetic oligonucleotide
  Sense strand starting at position 2231 of SEQ ID NO: 584981
uucuauuuguaugacgaca

SEQ ID NO: 604231 - RNA, 19 nt, Artificial Sequence
  Description of Artificial Sequence: Synthetic oligonucleotide
  Antisense strand to SEQ ID NO: 604230
ugucgucauacaaauagaa

SEQ ID NO: 604232 - RNA, 19 nt, Artificial Sequence
  Description of Artificial Sequence: Synthetic oligonucleotide
  Sense strand starting at position 2233 of SEQ ID NO: 584981
cuauuuguaugacgacaaa

SEQ ID NO: 604233 - RNA, 19 nt, Artificial Sequence
  Description of Artificial Sequence: Synthetic oligonucleotide
  Antisense strand to SEQ ID NO: 604232
uuugucgucauacaaauag

SEQ ID NO: 604234 - RNA, 19 nt, Artificial Sequence
  Description of Artificial Sequence: Synthetic oligonucleotide
  Sense strand starting at position 2318 of SEQ ID NO: 584981
aagcuuaucgagcagauug

SEQ ID NO: 604235 - RNA, 19 nt, Artificial Sequence
  Description of Artificial Sequence: Synthetic oligonucleotide
  Antisense strand to SEQ ID NO: 604234
caaucugcucgauaagcuu

SEQ ID NO: 604236 - RNA, 19 nt, Artificial Sequence
  Description of Artificial Sequence: Synthetic oligonucleotide
  Sense strand starting at position 2320 of SEQ ID NO: 584981
gcuuaucgagcagauugua

SEQ ID NO: 604237 - RNA, 19 nt, Artificial Sequence
  Description of Artificial Sequence: Synthetic oligonucleotide
  Antisense strand to SEQ ID NO: 604236
uacaaucugcucgauaagc

SEQ ID NO: 604238 - RNA, 19 nt, Artificial Sequence
  Description of Artificial Sequence: Synthetic oligonucleotide
  Sense strand starting at position 2406 of SEQ ID NO: 584981
ucuugauucugagcucuca

SEQ ID NO: 604239 - RNA, 19 nt, Artificial Sequence
  Description of Artificial Sequence: Synthetic oligonucleotide
  Antisense strand to SEQ ID NO: 604238
ugagagcucagaaucaaga

SEQ ID NO: 604240 - RNA, 19 nt, Artificial Sequence
  Description of Artificial Sequence: Synthetic oligonucleotide
  Sense strand starting at position 2441 of SEQ ID NO: 584981
ccgauuaacgauugucucu

SEQ ID NO: 604241 - RNA, 19 nt, Artificial Sequence
  Description of Artificial Sequence: Synthetic oligonucleotide
  Antisense strand to SEQ ID NO: 604240
agagacaaucguuaaucgg

SEQ ID NO: 604242 - RNA, 19 nt, Artificial Sequence
  Description of Artificial Sequence: Synthetic oligonucleotide
  Sense strand starting at position 3468 of SEQ ID NO: 584981
cccugaacucaguguccua

SEQ ID NO: 604243 - RNA, 19 nt, Artificial Sequence
  Description of Artificial Sequence: Synthetic oligonucleotide
  Antisense strand to SEQ ID NO: 604242
uaggacacugaguucaggg

SEQ ID NO: 604244 - RNA, 19 nt, Artificial Sequence
  Description of Artificial Sequence: Synthetic oligonucleotide
  Sense strand starting at position 3502 of SEQ ID NO: 584981
caaaguugcuucucuggga

SEQ ID NO: 604245 - RNA, 19 nt, Artificial Sequence
  Description of Artificial Sequence: Synthetic oligonucleotide
  Antisense strand to SEQ ID NO: 604244
ucccagagaagcaacuuug

SEQ ID NO: 604246 - RNA, 19 nt, Artificial Sequence
  Description of Artificial Sequence: Synthetic oligonucleotide
  Sense strand starting at position 3503 of SEQ ID NO: 584981
aaaguugcuucucugggaa

SEQ ID NO: 604247 - RNA, 19 nt, Artificial Sequence
  Description of Artificial Sequence: Synthetic oligonucleotide
  Antisense strand to SEQ ID NO: 604246
uucccagagaagcaacuuu

SEQ ID NO: 604248 - RNA, 19 nt, Artificial Sequence
  Description of Artificial Sequence: Synthetic oligonucleotide
  Sense strand starting at position 3515 of SEQ ID NO: 584981
cugggaaguugucugcaaa

SEQ ID NO: 604249 - RNA, 19 nt, Artificial Sequence
  Description of Artificial Sequence: Synthetic oligonucleotide
  Antisense strand to SEQ ID NO: 604248
uuugcagacaacuucccag

SEQ ID NO: 604250 - RNA, 19 nt, Artificial Sequence
  Description of Artificial Sequence: Synthetic oligonucleotide
  Sense strand starting at position 3516 of SEQ ID NO: 584981
ugggaaguugucugcaaau

SEQ ID NO: 604251 - RNA, 19 nt, Artificial Sequence
  Description of Artificial Sequence: Synthetic oligonucleotide
  Antisense strand to SEQ ID NO: 604250
auuugcagacaacuuccca

SEQ ID NO: 604252 - RNA, 19 nt, Artificial Sequence
  Description of Artificial Sequence: Synthetic oligonucleotide
  Sense strand starting at position 3518 of SEQ ID NO: 584981
ggaaguugucugcaaauug

SEQ ID NO: 604253 - RNA, 19 nt, Artificial Sequence
  Description of Artificial Sequence: Synthetic oligonucleotide
  Antisense strand to SEQ ID NO: 604252
caauuugcagacaacuucc

SEQ ID NO: 604254 - RNA, 19 nt, Artificial Sequence
  Description of Artificial Sequence: Synthetic oligonucleotide
  Sense strand starting at position 3526 of SEQ ID NO: 584981
ucugcaaauuggccauaaa

SEQ ID NO: 604255 - RNA, 19 nt, Artificial Sequence
  Description of Artificial Sequence: Synthetic oligonucleotide
  Antisense strand to SEQ ID NO: 604254
uuuauggccaauuugcaga

SEQ ID NO: 604256 - RNA, 19 nt, Artificial Sequence
  Description of Artificial Sequence: Synthetic oligonucleotide
  Sense strand starting at position 3573 of SEQ ID NO: 584981
cuuccuagagguuggauau

SEQ ID NO: 604257 - RNA, 19 nt, Artificial Sequence
  Description of Artificial Sequence: Synthetic oligonucleotide
  Antisense strand to SEQ ID NO: 604256
auauccaaccucuaggaag

SEQ ID NO: 604258 - RNA, 19 nt, Artificial Sequence
  Description of Artificial Sequence: Synthetic oligonucleotide
  Sense strand starting at position 3574 of SEQ ID NO: 584981
uuccuagagguuggauauu

SEQ ID NO: 604259 - RNA, 19 nt, Artificial Sequence
  Description of Artificial Sequence: Synthetic oligonucleotide
  Antisense strand to SEQ ID NO: 604258
aauauccaaccucuaggaa

SEQ ID NO: 604260 - RNA, 19 nt, Artificial Sequence
  Description of Artificial Sequence: Synthetic oligonucleotide
  Sense strand starting at position 3637 of SEQ ID NO: 584981
gccacuuucugacuuuagu

SEQ ID NO: 604261 - RNA, 19 nt, Artificial Sequence
  Description of Artificial Sequence: Synthetic oligonucleotide
  Antisense strand to SEQ ID NO: 604260
acuaaagucagaaaguggc

SEQ ID NO: 604262 - RNA, 19 nt, Artificial Sequence
  Description of Artificial Sequence: Synthetic oligonucleotide
  Sense strand starting at position 3716 of SEQ ID NO: 584981
ggaauuccacaguguacaa

SEQ ID NO: 604263 - RNA, 19 nt, Artificial Sequence
  Description of Artificial Sequence: Synthetic oligonucleotide
  Antisense strand to SEQ ID NO: 604262
uuguacacuguggaauucc

SEQ ID NO: 604264 - RNA, 19 nt, Artificial Sequence
  Description of Artificial Sequence: Synthetic oligonucleotide
  Sense strand starting at position 77 of SEQ ID NO: 584982
cgaguaugcaagcacagua

SEQ ID NO: 604265 - RNA, 19 nt, Artificial Sequence
  Description of Artificial Sequence: Synthetic oligonucleotide
  Antisense strand to SEQ ID NO: 604264
uacugugcuugcauacucg

SEQ ID NO: 604266 - RNA, 19 nt, Artificial Sequence
  Description of Artificial Sequence: Synthetic oligonucleotide
  Sense strand starting at position 271 of SEQ ID NO: 584982
acaguaaguucuccugaua

SEQ ID NO: 604267 - RNA, 19 nt, Artificial Sequence
  Description of Artificial Sequence: Synthetic oligonucleotide
  Antisense strand to SEQ ID NO: 604266
uaucaggagaacuuacugu

SEQ ID NO: 604268 - RNA, 19 nt, Artificial Sequence
  Description of Artificial Sequence: Synthetic oligonucleotide
  Sense strand starting at position 274 of SEQ ID NO: 584982
guaaguucuccugauaagc

SEQ ID NO: 604269 - RNA, 19 nt, Artificial Sequence
  Description of Artificial Sequence: Synthetic oligonucleotide
  Antisense strand to SEQ ID NO: 604268
gcuuaucaggagaacuuac

SEQ ID NO: 604270 - RNA, 19 nt, Artificial Sequence
  Description of Artificial Sequence: Synthetic oligonucleotide
  Sense strand starting at position 355 of SEQ ID NO: 584982
ugccauugugccuacaaau

SEQ ID NO: 604271 - RNA, 19 nt, Artificial Sequence
  Description of Artificial Sequence: Synthetic oligonucleotide
  Antisense strand to SEQ ID NO: 604270
auuuguaggcacaauggca

SEQ ID NO: 604272 - RNA, 19 nt, Artificial Sequence
  Description of Artificial Sequence: Synthetic oligonucleotide
  Sense strand starting at position 409 of SEQ ID NO: 584982
ggugcaugucuucugcuca

SEQ ID NO: 604273 - RNA, 19 nt, Artificial Sequence
  Description of Artificial Sequence: Synthetic oligonucleotide
  Antisense strand to SEQ ID NO: 604272
ugagcagaagacaugcacc

SEQ ID NO: 604274 - RNA, 19 nt, Artificial Sequence
  Description of Artificial Sequence: Synthetic oligonucleotide
  Sense strand starting at position 412 of SEQ ID NO: 584982
gcaugucuucugcucaugu

SEQ ID NO: 604275 - RNA, 19 nt, Artificial Sequence
  Description of Artificial Sequence: Synthetic oligonucleotide
  Antisense strand to SEQ ID NO: 604274
acaugagcagaagacaugc

SEQ ID NO: 604276 - RNA, 19 nt, Artificial Sequence
  Description of Artificial Sequence: Synthetic oligonucleotide
  Sense strand starting at position 420 of SEQ ID NO: 584982
ucugcucauguauggauau

SEQ ID NO: 604277 - RNA, 19 nt, Artificial Sequence
  Description of Artificial Sequence: Synthetic oligonucleotide
  Antisense strand to SEQ ID NO: 604276
auauccauacaugagcaga

SEQ ID NO: 604278 - RNA, 19 nt, Artificial Sequence
  Description of Artificial Sequence: Synthetic oligonucleotide
  Sense strand starting at position 500 of SEQ ID NO: 584982
gcucuuaacugaguuagag

SEQ ID NO: 604279 - RNA, 19 nt, Artificial Sequence
  Description of Artificial Sequence: Synthetic oligonucleotide
  Antisense strand to SEQ ID NO: 604278
cucuaacucaguuaagagc

SEQ ID NO: 604280 - RNA, 19 nt, Artificial Sequence
  Description of Artificial Sequence: Synthetic oligonucleotide
  Sense strand starting at position 587 of SEQ ID NO: 584982
gcaaacugucaguagggua

SEQ ID NO: 604281 - RNA, 19 nt, Artificial Sequence
  Description of Artificial Sequence: Synthetic oligonucleotide
  Antisense strand to SEQ ID NO: 604280
uacccuacugacaguuugc

SEQ ID NO: 604282 - RNA, 19 nt, Artificial Sequence
  Description of Artificial Sequence: Synthetic oligonucleotide
  Sense strand starting at position 592 of SEQ ID NO: 584982
cugucaguaggguaggauu

SEQ ID NO: 604283 - RNA, 19 nt, Artificial Sequence
  Description of Artificial Sequence: Synthetic oligonucleotide
  Antisense strand to SEQ ID NO: 604282
aauccuacccuacugacag

SEQ ID NO: 604284 - RNA, 19 nt, Artificial Sequence
  Description of Artificial Sequence: Synthetic oligonucleotide
  Sense strand starting at position 633 of SEQ ID NO: 584982
cauaaaguccuaugggaac

SEQ ID NO: 604285 - RNA, 19 nt, Artificial Sequence
  Description of Artificial Sequence: Synthetic oligonucleotide
  Antisense strand to SEQ ID NO: 604284
guucccauaggacuuuaug

SEQ ID NO: 604286 - RNA, 19 nt, Artificial Sequence
  Description of Artificial Sequence: Synthetic oligonucleotide
  Sense strand starting at position 696 of SEQ ID NO: 584982
gauugaugucaguggugac

SEQ ID NO: 604287 - RNA, 19 nt, Artificial Sequence
  Description of Artificial Sequence: Synthetic oligonucleotide
  Antisense strand to SEQ ID NO: 604286
gucaccacugacaucaauc

SEQ ID NO: 604288 - RNA, 19 nt, Artificial Sequence
  Description of Artificial Sequence: Synthetic oligonucleotide
  Sense strand starting at position 849 of SEQ ID NO: 584982
accaguaaaucuguucuaa

SEQ ID NO: 604289 - RNA, 19 nt, Artificial Sequence
  Description of Artificial Sequence: Synthetic oligonucleotide
  Antisense strand to SEQ ID NO: 604288
uuagaacagauuuacuggu

SEQ ID NO: 604290 - RNA, 19 nt, Artificial Sequence
  Description of Artificial Sequence: Synthetic oligonucleotide
  Sense strand starting at position 889 of SEQ ID NO: 584982
cgaggaggcuuacuauauc

SEQ ID NO: 604291 - RNA, 19 nt, Artificial Sequence
  Description of Artificial Sequence: Synthetic oligonucleotide
  Antisense strand to SEQ ID NO: 604290
gauauaguaagccuccucg

SEQ ID NO: 604292 - RNA, 19 nt, Artificial Sequence
  Description of Artificial Sequence: Synthetic oligonucleotide
  Sense strand starting at position 934 of SEQ ID NO: 584982
agcacuuauuuggaggaaa

SEQ ID NO: 604293 - RNA, 19 nt, Artificial Sequence
  Description of Artificial Sequence: Synthetic oligonucleotide
  Antisense strand to SEQ ID NO: 604292
uuuccuccaaauaagugcu

SEQ ID NO: 604294 - RNA, 19 nt, Artificial Sequence
  Description of Artificial Sequence: Synthetic oligonucleotide
  Sense strand starting at position 1025 of SEQ ID NO: 584982
uuaaauaucugagagacaa

SEQ ID NO: 604295 - RNA, 19 nt, Artificial Sequence
  Description of Artificial Sequence: Synthetic oligonucleotide
  Antisense strand to SEQ ID NO: 604294
uugucucucagauauuuaa

SEQ ID NO: 604296 - RNA, 19 nt, Artificial Sequence
  Description of Artificial Sequence: Synthetic oligonucleotide
  Sense strand starting at position 1101 of SEQ ID NO: 584982
guuucucaugucuauuaca

SEQ ID NO: 604297 - RNA, 19 nt, Artificial Sequence
  Description of Artificial Sequence: Synthetic oligonucleotide
  Antisense strand to SEQ ID NO: 604296
uguaauagacaugagaaac

SEQ ID NO: 604298 - RNA, 19 nt, Artificial Sequence
  Description of Artificial Sequence: Synthetic oligonucleotide
  Sense strand starting at position 1141 of SEQ ID NO: 584982
aggugauccguuuaugauu

SEQ ID NO: 604299 - RNA, 19 nt, Artificial Sequence
  Description of Artificial Sequence: Synthetic oligonucleotide
  Antisense strand to SEQ ID NO: 604298
aaucauaaacggaucaccu

SEQ ID NO: 604300 - RNA, 19 nt, Artificial Sequence
  Description of Artificial Sequence: Synthetic oligonucleotide
  Sense strand starting at position 1146 of SEQ ID NO: 584982
auccguuuaugauuuguaa

SEQ ID NO: 604301 - RNA, 19 nt, Artificial Sequence
  Description of Artificial Sequence: Synthetic oligonucleotide
  Antisense strand to SEQ ID NO: 604300
uuacaaaucauaaacggau

SEQ ID NO: 604302 - RNA, 19 nt, Artificial Sequence
  Description of Artificial Sequence: Synthetic oligonucleotide
  Sense strand starting at position 1369 of SEQ ID NO: 584982
uuacauuagucaguuucua

SEQ ID NO: 604303 - RNA, 19 nt, Artificial Sequence
  Description of Artificial Sequence: Synthetic oligonucleotide
  Antisense strand to SEQ ID NO: 604302
uagaaacugacuaauguaa

SEQ ID NO: 604304 - RNA, 19 nt, Artificial Sequence
  Description of Artificial Sequence: Synthetic oligonucleotide
  Sense strand starting at position 1385 of SEQ ID NO: 584982
cuaggcuugcagcagagau

SEQ ID NO: 604305 - RNA, 19 nt, Artificial Sequence
  Description of Artificial Sequence: Synthetic oligonucleotide
  Antisense strand to SEQ ID NO: 604304
aucucugcugcaagccuag

SEQ ID NO: 604306 - RNA, 19 nt, Artificial Sequence
  Description of Artificial Sequence: Synthetic oligonucleotide
  Sense strand starting at position 1393 of SEQ ID NO: 584982
gcagcagagaucgauguau

SEQ ID NO: 604307 - RNA, 19 nt, Artificial Sequence
  Description of Artificial Sequence: Synthetic oligonucleotide
  Antisense strand to SEQ ID NO: 604306
auacaucgaucucugcugc

SEQ ID NO: 604308 - RNA, 19 nt, Artificial Sequence
  Description of Artificial Sequence: Synthetic oligonucleotide
  Sense strand starting at position 1408 of SEQ ID NO: 584982
guauuucccugggaagacu

SEQ ID NO: 604309 - RNA, 19 nt, Artificial Sequence
  Description of Artificial Sequence: Synthetic oligonucleotide
  Antisense strand to SEQ ID NO: 604308
agucuucccagggaaauac

SEQ ID NO: 604310 - RNA, 19 nt, Artificial Sequence
  Description of Artificial Sequence: Synthetic oligonucleotide
  Sense strand starting at position 1417 of SEQ ID NO: 584982
ugggaagacuuagcugcua

SEQ ID NO: 604311 - RNA, 19 nt, Artificial Sequence
  Description of Artificial Sequence: Synthetic oligonucleotide
  Antisense strand to SEQ ID NO: 604310
uagcagcuaagucuuccca

SEQ ID NO: 604312 - RNA, 19 nt, Artificial Sequence
  Description of Artificial Sequence: Synthetic oligonucleotide
  Sense strand starting at position 1608 of SEQ ID NO: 584982
gggccauacagcuaaguaa

SEQ ID NO: 604313 - RNA, 19 nt, Artificial Sequence
  Description of Artificial Sequence: Synthetic oligonucleotide
  Antisense strand to SEQ ID NO: 604312
uuacuuagcuguauggccc

SEQ ID NO: 604314 - RNA, 19 nt, Artificial Sequence
  Description of Artificial Sequence: Synthetic oligonucleotide
  Sense strand starting at position 1816 of SEQ ID NO: 584982
gcugguuguccgcuagaac

SEQ ID NO: 604315 - RNA, 19 nt, Artificial Sequence
  Description of Artificial Sequence: Synthetic oligonucleotide
  Antisense strand to SEQ ID NO: 604314
guucuagcggacaaccagc

SEQ ID NO: 604316 - RNA, 19 nt, Artificial Sequence
  Description of Artificial Sequence: Synthetic oligonucleotide
  Sense strand starting at position 1823 of SEQ ID NO: 584982
guccgcuagaacgaaauau

SEQ ID NO: 604317 - RNA, 19 nt, Artificial Sequence
  Description of Artificial Sequence: Synthetic oligonucleotide
  Antisense strand to SEQ ID NO: 604316
auauuucguucuagcggac

SEQ ID NO: 604318 - RNA, 19 nt, Artificial Sequence
  Description of Artificial Sequence: Synthetic oligonucleotide
  Sense strand starting at position 2345 of SEQ ID NO: 584982
cguguuaaugagccuuugu

SEQ ID NO: 604319 - RNA, 19 nt, Artificial Sequence
  Description of Artificial Sequence: Synthetic oligonucleotide
  Antisense strand to SEQ ID NO: 604318
acaaaggcucauuaacacg

SEQ ID NO: 604320 - RNA, 19 nt, Artificial Sequence
  Description of Artificial Sequence: Synthetic oligonucleotide
  Sense strand starting at position 2587 of SEQ ID NO: 584982
cucgcugugcucccggaua

SEQ ID NO: 604321 - RNA, 19 nt, Artificial Sequence
  Description of Artificial Sequence: Synthetic oligonucleotide
  Antisense strand to SEQ ID NO: 604320
uauccgggagcacagcgag

SEQ ID NO: 604322 - RNA, 19 nt, Artificial Sequence
  Description of Artificial Sequence: Synthetic oligonucleotide
  Sense strand starting at position 3450 of SEQ ID NO: 584982
ggucgugguuauuuagaca

SEQ ID NO: 604323 - RNA, 19 nt, Artificial Sequence
  Description of Artificial Sequence: Synthetic oligonucleotide
  Antisense strand to SEQ ID NO: 604322
ugucuaaauaaccacgacc

SEQ ID NO: 604324 - RNA, 19 nt, Artificial Sequence
  Description of Artificial Sequence: Synthetic oligonucleotide
  Sense strand starting at position 3466 of SEQ ID NO: 584982
acaucuuuaucucucguga

SEQ ID NO: 604325 - RNA, 19 nt, Artificial Sequence
  Description of Artificial Sequence: Synthetic oligonucleotide
  Antisense strand to SEQ ID NO: 604324
ucacgagagauaaagaugu

SEQ ID NO: 604326 - RNA, 19 nt, Artificial Sequence
  Description of Artificial Sequence: Synthetic oligonucleotide
  Sense strand starting at position 3480 of SEQ ID NO: 584982
cgugaguuggaucgggaga

SEQ ID NO: 604327 - RNA, 19 nt, Artificial Sequence
  Description of Artificial Sequence: Synthetic oligonucleotide
  Antisense strand to SEQ ID NO: 604326
ucucccgauccaacucacg

SEQ ID NO: 604328 - RNA, 19 nt, Artificial Sequence
  Description of Artificial Sequence: Synthetic oligonucleotide
  Sense strand starting at position 3709 of SEQ ID NO: 584982
guacuauaucuggacccua

SEQ ID NO: 604329 - RNA, 19 nt, Artificial Sequence
  Description of Artificial Sequence: Synthetic oligonucleotide
  Antisense strand to SEQ ID NO: 604328
uaggguccagauauaguac

SEQ ID NO: 604330 - RNA, 19 nt, Artificial Sequence
  Description of Artificial Sequence: Synthetic oligonucleotide
  Sense strand starting at position 3741 of SEQ ID NO: 584982
uggugagaaucugugaaag

SEQ ID NO: 604331 - RNA, 19 nt, Artificial Sequence
  Description of Artificial Sequence: Synthetic oligonucleotide
  Antisense strand to SEQ ID NO: 604330
cuuucacagauucucacca

SEQ ID NO: 604332 - RNA, 19 nt, Artificial Sequence
  Description of Artificial Sequence: Synthetic oligonucleotide
  Sense strand starting at position 3898 of SEQ ID NO: 584982
ccuagacugcuuuagacua

SEQ ID NO: 604333 - RNA, 19 nt, Artificial Sequence
  Description of Artificial Sequence: Synthetic oligonucleotide
  Antisense strand to SEQ ID NO: 604332
uagucuaaagcagucuagg

SEQ ID NO: 604334 - RNA, 19 nt, Artificial Sequence
  Description of Artificial Sequence: Synthetic oligonucleotide
  Sense strand starting at position 3903 of SEQ ID NO: 584982
acugcuuuagacuagaagu

SEQ ID NO: 604335 - RNA, 19 nt, Artificial Sequence
  Description of Artificial Sequence: Synthetic oligonucleotide
  Antisense strand to SEQ ID NO: 604334
acuucuagucuaaagcagu

SEQ ID NO: 604336 - RNA, 19 nt, Artificial Sequence
  Description of Artificial Sequence: Synthetic oligonucleotide
  Sense strand starting at position 3905 of SEQ ID NO: 584982
ugcuuuagacuagaaguau

SEQ ID NO: 604337 - RNA, 19 nt, Artificial Sequence
  Description of Artificial Sequence: Synthetic oligonucleotide
  Antisense strand to SEQ ID NO: 604336
auacuucuagucuaaagca

SEQ ID NO: 604338 - RNA, 19 nt, Artificial Sequence
  Description of Artificial Sequence: Synthetic oligonucleotide
  Sense strand starting at position 3916 of SEQ ID NO: 584982
agaaguauuuccgucaagc

SEQ ID NO: 604339 - RNA, 19 nt, Artificial Sequence
  Description of Artificial Sequence: Synthetic oligonucleotide
  Antisense strand to SEQ ID NO: 604338
gcuugacggaaauacuucu

SEQ ID NO: 604340 - RNA, 19 nt, Artificial Sequence
  Description of Artificial Sequence: Synthetic oligonucleotide
  Sense strand starting at position 3960 of SEQ ID NO: 584982
gagagaguccaccgcugaa

SEQ ID NO: 604341 - RNA, 19 nt, Artificial Sequence
  Description of Artificial Sequence: Synthetic oligonucleotide
  Antisense strand to SEQ ID NO: 604340
uucagcgguggacucucuc

SEQ ID NO: 604342 - RNA, 19 nt, Artificial Sequence
  Description of Artificial Sequence: Synthetic oligonucleotide
  Sense strand starting at position 3964 of SEQ ID NO: 584982
gaguccaccgcugaaauga

SEQ ID NO: 604343 - RNA, 19 nt, Artificial Sequence
  Description of Artificial Sequence: Synthetic oligonucleotide
  Antisense strand to SEQ ID NO: 604342
ucauuucagcgguggacuc

SEQ ID NO: 604344 - RNA, 19 nt, Artificial Sequence
  Description of Artificial Sequence: Synthetic oligonucleotide
  Sense strand starting at position 108 of SEQ ID NO: 584983
cuaguacuauaacuuguaa

SEQ ID NO: 604345 - RNA, 19 nt, Artificial Sequence
  Description of Artificial Sequence: Synthetic oligonucleotide
  Antisense strand to SEQ ID NO: 604344
uuacaaguuauaguacuag

SEQ ID NO: 604346 - RNA, 19 nt, Artificial Sequence
  Description of Artificial Sequence: Synthetic oligonucleotide
  Sense strand starting at position 174 of SEQ ID NO: 584983
gaaaguugugguuacaaag

SEQ ID NO: 604347 - RNA, 19 nt, Artificial Sequence
  Description of Artificial Sequence: Synthetic oligonucleotide
  Antisense strand to SEQ ID NO: 604346
cuuuguaaccacaacuuuc

SEQ ID NO: 604348 - RNA, 19 nt, Artificial Sequence
  Description of Artificial Sequence: Synthetic oligonucleotide
  Sense strand starting at position 180 of SEQ ID NO: 584983
ugugguuacaaaggcauua

SEQ ID NO: 604349 - RNA, 19 nt, Artificial Sequence
  Description of Artificial Sequence: Synthetic oligonucleotide
  Antisense strand to SEQ ID NO: 604348
uaaugccuuuguaaccaca

SEQ ID NO: 604350 - RNA, 19 nt, Artificial Sequence
  Description of Artificial Sequence: Synthetic oligonucleotide
  Sense strand starting at position 216 of SEQ ID NO: 584983
uuccauggguucuuagacu

SEQ ID NO: 604351 - RNA, 19 nt, Artificial Sequence
  Description of Artificial Sequence: Synthetic oligonucleotide
  Antisense strand to SEQ ID NO: 604350
agucuaagaacccauggaa

SEQ ID NO: 604352 - RNA, 19 nt, Artificial Sequence
  Description of Artificial Sequence: Synthetic oligonucleotide
  Sense strand starting at position 233 of SEQ ID NO: 584983
cuuccaauuguguagccaa

SEQ ID NO: 604353 - RNA, 19 nt, Artificial Sequence
  Description of Artificial Sequence: Synthetic oligonucleotide
  Antisense strand to SEQ ID NO: 604352
uuggcuacacaauuggaag

SEQ ID NO: 604354 - RNA, 19 nt, Artificial Sequence
  Description of Artificial Sequence: Synthetic oligonucleotide
  Sense strand starting at position 247 of SEQ ID NO: 584983
gccaaagguuucccuccua

SEQ ID NO: 604355 - RNA, 19 nt, Artificial Sequence
  Description of Artificial Sequence: Synthetic oligonucleotide
  Antisense strand to SEQ ID NO: 604354
uaggagggaaaccuuuggc

SEQ ID NO: 604356 - RNA, 19 nt, Artificial Sequence
  Description of Artificial Sequence: Synthetic oligonucleotide
  Sense strand starting at position 273 of SEQ ID NO: 584983
gagacuuugaaggaucguu

SEQ ID NO: 604357 - RNA, 19 nt, Artificial Sequence
  Description of Artificial Sequence: Synthetic oligonucleotide
  Antisense strand to SEQ ID NO: 604356
aacgauccuucaaagucuc

SEQ ID NO: 604358 - RNA, 19 nt, Artificial Sequence
  Description of Artificial Sequence: Synthetic oligonucleotide
  Sense strand starting at position 336 of SEQ ID NO: 584983
aauggaguuugaguaccua

SEQ ID NO: 604359 - RNA, 19 nt, Artificial Sequence
  Description of Artificial Sequence: Synthetic oligonucleotide
  Antisense strand to SEQ ID NO: 604358
uagguacucaaacuccauu

SEQ ID NO: 604360 - RNA, 19 nt, Artificial Sequence
  Description of Artificial Sequence: Synthetic oligonucleotide
  Sense strand starting at position 375 of SEQ ID NO: 584983
acugauaagugaucauggu

SEQ ID NO: 604361 - RNA, 19 nt, Artificial Sequence
  Description of Artificial Sequence: Synthetic oligonucleotide
  Antisense strand to SEQ ID NO: 604360
accaugaucacuuaucagu

SEQ ID NO: 604362 - RNA, 19 nt, Artificial Sequence
  Description of Artificial Sequence: Synthetic oligonucleotide
  Sense strand starting at position 379 of SEQ ID NO: 584983
auaagugaucauggugaca

SEQ ID NO: 604363 - RNA, 19 nt, Artificial Sequence
  Description of Artificial Sequence: Synthetic oligonucleotide
  Antisense strand to SEQ ID NO: 604362
ugucaccaugaucacuuau

SEQ ID NO: 604364 - RNA, 19 nt, Artificial Sequence
  Description of Artificial Sequence: Synthetic oligonucleotide
  Sense strand starting at position 698 of SEQ ID NO: 584983
agggaaacaugcuccggaa

SEQ ID NO: 604365 - RNA, 19 nt, Artificial Sequence
  Description of Artificial Sequence: Synthetic oligonucleotide
  Antisense strand to SEQ ID NO: 604364
uuccggagcauguuucccu

SEQ ID NO: 604366 - RNA, 19 nt, Artificial Sequence
  Description of Artificial Sequence: Synthetic oligonucleotide
  Sense strand starting at position 700 of SEQ ID NO: 584983
ggaaacaugcuccggaaag

SEQ ID NO: 604367 - RNA, 19 nt, Artificial Sequence
  Description of Artificial Sequence: Synthetic oligonucleotide
  Antisense strand to SEQ ID NO: 604366
cuuuccggagcauguuucc

SEQ ID NO: 604368 - RNA, 19 nt, Artificial Sequence
  Description of Artificial Sequence: Synthetic oligonucleotide
  Sense strand starting at position 729 of SEQ ID NO: 584983
guccuuacuccucagagca

SEQ ID NO: 604369 - RNA, 19 nt, Artificial Sequence
  Description of Artificial Sequence: Synthetic oligonucleotide
  Antisense strand to SEQ ID NO: 604368
ugcucugaggaguaaggac

SEQ ID NO: 604370 - RNA, 19 nt, Artificial Sequence
  Description of Artificial Sequence: Synthetic oligonucleotide
  Sense strand starting at position 903 of SEQ ID NO: 584983
cagggucuuggcuaaccua

SEQ ID NO: 604371 - RNA, 19 nt, Artificial Sequence
  Description of Artificial Sequence: Synthetic oligonucleotide
  Antisense strand to SEQ ID NO: 604370
uagguuagccaagacccug

SEQ ID NO: 604372 - RNA, 19 nt, Artificial Sequence
  Description of Artificial Sequence: Synthetic oligonucleotide
  Sense strand starting at position 965 of SEQ ID NO: 584983
cauccucagacguguggau

SEQ ID NO: 604373 - RNA, 19 nt, Artificial Sequence
  Description of Artificial Sequence: Synthetic oligonucleotide
  Antisense strand to SEQ ID NO: 604372
auccacacgucugaggaug

SEQ ID NO: 604374 - RNA, 19 nt, Artificial Sequence
  Description of Artificial Sequence: Synthetic oligonucleotide
  Sense strand starting at position 1032 of SEQ ID NO: 584983
gugagccuuccagagaaua

SEQ ID NO: 604375 - RNA, 19 nt, Artificial Sequence
  Description of Artificial Sequence: Synthetic oligonucleotide
  Antisense strand to SEQ ID NO: 604374
uauucucuggaaggcucac

SEQ ID NO: 604376 - RNA, 19 nt, Artificial Sequence
  Description of Artificial Sequence: Synthetic oligonucleotide
  Sense strand starting at position 1250 of SEQ ID NO: 584983
uggugacaauccucuuaua

SEQ ID NO: 604377 - RNA, 19 nt, Artificial Sequence
  Description of Artificial Sequence: Synthetic oligonucleotide
  Antisense strand to SEQ ID NO: 604376
uauaagaggauugucacca

SEQ ID NO: 604378 - RNA, 19 nt, Artificial Sequence
  Description of Artificial Sequence: Synthetic oligonucleotide
  Sense strand starting at position 1286 of SEQ ID NO: 584983
uggauauguaccugucgau

SEQ ID NO: 604379 - RNA, 19 nt, Artificial Sequence
  Description of Artificial Sequence: Synthetic oligonucleotide
  Antisense strand to SEQ ID NO: 604378
aucgacagguacauaucca

SEQ ID NO: 604380 - RNA, 19 nt, Artificial Sequence
  Description of Artificial Sequence: Synthetic oligonucleotide
  Sense strand starting at position 1403 of SEQ ID NO: 584983
cguggaagucaaugaagcu

SEQ ID NO: 604381 - RNA, 19 nt, Artificial Sequence
  Description of Artificial Sequence: Synthetic oligonucleotide
  Antisense strand to SEQ ID NO: 604380
agcuucauugacuuccacg

SEQ ID NO: 604382 - RNA, 19 nt, Artificial Sequence
  Description of Artificial Sequence: Synthetic oligonucleotide
  Sense strand starting at position 1619 of SEQ ID NO: 584983
acucuauguccaugaaguu

SEQ ID NO: 604383 - RNA, 19 nt, Artificial Sequence
  Description of Artificial Sequence: Synthetic oligonucleotide
  Antisense strand to SEQ ID NO: 604382
aacuucauggacauagagu

SEQ ID NO: 604384 - RNA, 19 nt, Artificial Sequence
  Description of Artificial Sequence: Synthetic oligonucleotide
  Sense strand starting at position 1646 of SEQ ID NO: 584983
acuggauguucuccucauu

SEQ ID NO: 604385 - RNA, 19 nt, Artificial Sequence
  Description of Artificial Sequence: Synthetic oligonucleotide
  Antisense strand to SEQ ID NO: 604384
aaugaggagaacauccagu

SEQ ID NO: 604386 - RNA, 19 nt, Artificial Sequence
  Description of Artificial Sequence: Synthetic oligonucleotide
  Sense strand starting at position 1658 of SEQ ID NO: 584983
ccucauucuccuugaagga

SEQ ID NO: 604387 - RNA, 19 nt, Artificial Sequence
  Description of Artificial Sequence: Synthetic oligonucleotide
  Antisense strand to SEQ ID NO: 604386
uccuucaaggagaaugagg

SEQ ID NO: 604388 - RNA, 19 nt, Artificial Sequence
  Description of Artificial Sequence: Synthetic oligonucleotide
  Sense strand starting at position 1794 of SEQ ID NO: 584983
gaauuucugugggaaguac

SEQ ID NO: 604389 - RNA, 19 nt, Artificial Sequence
  Description of Artificial Sequence: Synthetic oligonucleotide
  Antisense strand to SEQ ID NO: 604388
guacuucccacagaaauuc

SEQ ID NO: 604390 - RNA, 19 nt, Artificial Sequence
  Description of Artificial Sequence: Synthetic oligonucleotide
  Sense strand starting at position 1874 of SEQ ID NO: 584983
acaggaggucaguggugau

SEQ ID NO: 604391 - RNA, 19 nt, Artificial Sequence
  Description of Artificial Sequence: Synthetic oligonucleotide
  Antisense strand to SEQ ID NO: 604390
aucaccacugaccuccugu

SEQ ID NO: 604392 - RNA, 19 nt, Artificial Sequence
  Description of Artificial Sequence: Synthetic oligonucleotide
  Sense strand starting at position 1950 of SEQ ID NO: 584983
ugauuaggcugagcucaaa

SEQ ID NO: 604393 - RNA, 19 nt, Artificial Sequence
  Description of Artificial Sequence: Synthetic oligonucleotide
  Antisense strand to SEQ ID NO: 604392
uuugagcucagccuaauca

SEQ ID NO: 604394 - RNA, 19 nt, Artificial Sequence
  Description of Artificial Sequence: Synthetic oligonucleotide
  Sense strand starting at position 2201 of SEQ ID NO: 584983
uggcacaugccagaaaugu

SEQ ID NO: 604395 - RNA, 19 nt, Artificial Sequence
  Description of Artificial Sequence: Synthetic oligonucleotide
  Antisense strand to SEQ ID NO: 604394
acauuucuggcaugugcca

SEQ ID NO: 604396 - RNA, 19 nt, Artificial Sequence
  Description of Artificial Sequence: Synthetic oligonucleotide
  Sense strand starting at position 2248 of SEQ ID NO: 584983
uauugaagucaguguguga

SEQ ID NO: 604397 - RNA, 19 nt, Artificial Sequence
  Description of Artificial Sequence: Synthetic oligonucleotide
  Antisense strand to SEQ ID NO: 604396
ucacacacugacuucaaua

SEQ ID NO: 604398 - RNA, 19 nt, Artificial Sequence
  Description of Artificial Sequence: Synthetic oligonucleotide
  Sense strand starting at position 2418 of SEQ ID NO: 584983
agagcacugaugugucaca

SEQ ID NO: 604399 - RNA, 19 nt, Artificial Sequence
  Description of Artificial Sequence: Synthetic oligonucleotide
  Antisense strand to SEQ ID NO: 604398
ugugacacaucagugcucu

SEQ ID NO: 604400 - RNA, 19 nt, Artificial Sequence
  Description of Artificial Sequence: Synthetic oligonucleotide
  Sense strand starting at position 2466 of SEQ ID NO: 584983
ucagacaaaugagacuaaa

SEQ ID NO: 604401 - RNA, 19 nt, Artificial Sequence
  Description of Artificial Sequence: Synthetic oligonucleotide
  Antisense strand to SEQ ID NO: 604400
uuuagucucauuugucuga

SEQ ID NO: 604402 - RNA, 19 nt, Artificial Sequence
  Description of Artificial Sequence: Synthetic oligonucleotide
  Sense strand starting at position 2513 of SEQ ID NO: 584983
uguagaaucaagugaugag

SEQ ID NO: 604403 - RNA, 19 nt, Artificial Sequence
  Description of Artificial Sequence: Synthetic oligonucleotide
  Antisense strand to SEQ ID NO: 604402
cucaucacuugauucuaca

SEQ ID NO: 604404 - RNA, 19 nt, Artificial Sequence
  Description of Artificial Sequence: Synthetic oligonucleotide
  Sense strand starting at position 2514 of SEQ ID NO: 584983
guagaaucaagugaugagu

SEQ ID NO: 604405 - RNA, 19 nt, Artificial Sequence
  Description of Artificial Sequence: Synthetic oligonucleotide
  Antisense strand to SEQ ID NO: 604404
acucaucacuugauucuac

SEQ ID NO: 604406 - RNA, 19 nt, Artificial Sequence
  Description of Artificial Sequence: Synthetic oligonucleotide
  Sense strand starting at position 2517 of SEQ ID NO: 584983
gaaucaagugaugaguugu

SEQ ID NO: 604407 - RNA, 19 nt, Artificial Sequence
  Description of Artificial Sequence: Synthetic oligonucleotide
  Antisense strand to SEQ ID NO: 604406
acaacucaucacuugauuc

SEQ ID NO: 604408 - RNA, 19 nt, Artificial Sequence
  Description of Artificial Sequence: Synthetic oligonucleotide
  Sense strand starting at position 2572 of SEQ ID NO: 584983
gcuagugagaacugaggaa

SEQ ID NO: 604409 - RNA, 19 nt, Artificial Sequence
  Description of Artificial Sequence: Synthetic oligonucleotide
  Antisense strand to SEQ ID NO: 604408
uuccucaguucucacuagc

SEQ ID NO: 604410 - RNA, 19 nt, Artificial Sequence
  Description of Artificial Sequence: Synthetic oligonucleotide
  Sense strand starting at position 2608 of SEQ ID NO: 584983
gagagaugcuccucaagac

SEQ ID NO: 604411 - RNA, 19 nt, Artificial Sequence
  Description of Artificial Sequence: Synthetic oligonucleotide
  Antisense strand to SEQ ID NO: 604410
gucuugaggagcaucucuc

SEQ ID NO: 604412 - RNA, 19 nt, Artificial Sequence
  Description of Artificial Sequence: Synthetic oligonucleotide
  Sense strand starting at position 2729 of SEQ ID NO: 584983
ugcaaugaggcguauagga

SEQ ID NO: 604413 - RNA, 19 nt, Artificial Sequence
  Description of Artificial Sequence: Synthetic oligonucleotide
  Antisense strand to SEQ ID NO: 604412
uccuauacgccucauugca

SEQ ID NO: 604414 - RNA, 19 nt, Artificial Sequence
  Description of Artificial Sequence: Synthetic oligonucleotide
  Sense strand starting at position 3221 of SEQ ID NO: 584983
acuuuaagguucuucgauu

SEQ ID NO: 604415 - RNA, 19 nt, Artificial Sequence
  Description of Artificial Sequence: Synthetic oligonucleotide
  Antisense strand to SEQ ID NO: 604414
aaucgaagaaccuuaaagu

SEQ ID NO: 604416 - RNA, 19 nt, Artificial Sequence
  Description of Artificial Sequence: Synthetic oligonucleotide
  Sense strand starting at position 3357 of SEQ ID NO: 584983
agaaguauagagugauauc

SEQ ID NO: 604417 - RNA, 19 nt, Artificial Sequence
  Description of Artificial Sequence: Synthetic oligonucleotide
  Antisense strand to SEQ ID NO: 604416
gauaucacucuauacuucu

SEQ ID NO: 604418 - RNA, 19 nt, Artificial Sequence
  Description of Artificial Sequence: Synthetic oligonucleotide
  Sense strand starting at position 3426 of SEQ ID NO: 584983
uuuguuguuccugaaacau

SEQ ID NO: 604419 - RNA, 19 nt, Artificial Sequence
  Description of Artificial Sequence: Synthetic oligonucleotide
  Antisense strand to SEQ ID NO: 604418
auguuucaggaacaacaaa

SEQ ID NO: 604420 - RNA, 19 nt, Artificial Sequence
  Description of Artificial Sequence: Synthetic oligonucleotide
  Sense strand starting at position 3626 of SEQ ID NO: 584983
gguacuagacacuaguguu

SEQ ID NO: 604421 - RNA, 19 nt, Artificial Sequence
  Description of Artificial Sequence: Synthetic oligonucleotide
  Antisense strand to SEQ ID NO: 604420
aacacuagugucuaguacc

SEQ ID NO: 604422 - RNA, 19 nt, Artificial Sequence
  Description of Artificial Sequence: Synthetic oligonucleotide
  Sense strand starting at position 3638 of SEQ ID NO: 584983
uaguguugacagcaucaag

SEQ ID NO: 604423 - RNA, 19 nt, Artificial Sequence
  Description of Artificial Sequence: Synthetic oligonucleotide
  Antisense strand to SEQ ID NO: 604422
cuugaugcugucaacacua

SEQ ID NO: 604424 - RNA, 19 nt, Artificial Sequence
  Description of Artificial Sequence: Synthetic oligonucleotide
  Sense strand starting at position 284 of SEQ ID NO: 584984
cuuugagaaccuuagugcu

SEQ ID NO: 604425 - RNA, 19 nt, Artificial Sequence
  Description of Artificial Sequence: Synthetic oligonucleotide
  Antisense strand to SEQ ID NO: 604424
agcacuaagguucucaaag

SEQ ID NO: 604426 - RNA, 19 nt, Artificial Sequence
  Description of Artificial Sequence: Synthetic oligonucleotide
  Sense strand starting at position 286 of SEQ ID NO: 584984
uugagaaccuuagugcuuu

SEQ ID NO: 604427 - RNA, 19 nt, Artificial Sequence
  Description of Artificial Sequence: Synthetic oligonucleotide
  Antisense strand to SEQ ID NO: 604426
aaagcacuaagguucucaa

SEQ ID NO: 604428 - RNA, 19 nt, Artificial Sequence
  Description of Artificial Sequence: Synthetic oligonucleotide
  Sense strand starting at position 292 of SEQ ID NO: 584984
accuuagugcuuuacauau

SEQ ID NO: 604429 - RNA, 19 nt, Artificial Sequence
  Description of Artificial Sequence: Synthetic oligonucleotide
  Antisense strand to SEQ ID NO: 604428
auauguaaagcacuaaggu

SEQ ID NO: 604430 - RNA, 19 nt, Artificial Sequence
  Description of Artificial Sequence: Synthetic oligonucleotide
  Sense strand starting at position 384 of SEQ ID NO: 584984
cuuauugaaggcuauauua

SEQ ID NO: 604431 - RNA, 19 nt, Artificial Sequence
  Description of Artificial Sequence: Synthetic oligonucleotide
  Antisense strand to SEQ ID NO: 604430
uaauauagccuucaauaag

SEQ ID NO: 604432 - RNA, 19 nt, Artificial Sequence
  Description of Artificial Sequence: Synthetic oligonucleotide
  Sense strand starting at position 386 of SEQ ID NO: 584984
uauugaaggcuauauuagu

SEQ ID NO: 604433 - RNA, 19 nt, Artificial Sequence
  Description of Artificial Sequence: Synthetic oligonucleotide
  Antisense strand to SEQ ID NO: 604432
acuaauauagccuucaaua

SEQ ID NO: 604434 - RNA, 19 nt, Artificial Sequence
  Description of Artificial Sequence: Synthetic oligonucleotide
  Sense strand starting at position 432 of SEQ ID NO: 584984
gaguaacagaaguaguagu

SEQ ID NO: 604435 - RNA, 19 nt, Artificial Sequence
  Description of Artificial Sequence: Synthetic oligonucleotide
  Antisense strand to SEQ ID NO: 604434
acuacuacuucuguuacuc

SEQ ID NO: 604436 - RNA, 19 nt, Artificial Sequence
  Description of Artificial Sequence: Synthetic oligonucleotide
  Sense strand starting at position 440 of SEQ ID NO: 584984
gaaguaguaguagaaguaa

SEQ ID NO: 604437 - RNA, 19 nt, Artificial Sequence
  Description of Artificial Sequence: Synthetic oligonucleotide
  Antisense strand to SEQ ID NO: 604436
uuacuucuacuacuacuuc

SEQ ID NO: 604438 - RNA, 19 nt, Artificial Sequence
  Description of Artificial Sequence: Synthetic oligonucleotide
  Sense strand starting at position 1035 of SEQ ID NO: 584984
uggauauucuuguucuacu

SEQ ID NO: 604439 - RNA, 19 nt, Artificial Sequence
  Description of Artificial Sequence: Synthetic oligonucleotide
  Antisense strand to SEQ ID NO: 604438
aguagaacaagaauaucca

SEQ ID NO: 604440 - RNA, 19 nt, Artificial Sequence
  Description of Artificial Sequence: Synthetic oligonucleotide
  Sense strand starting at position 1036 of SEQ ID NO: 584984
ggauauucuuguucuacuu

SEQ ID NO: 604441 - RNA, 19 nt, Artificial Sequence
  Description of Artificial Sequence: Synthetic oligonucleotide
  Antisense strand to SEQ ID NO: 604440
aaguagaacaagaauaucc

SEQ ID NO: 604442 - RNA, 19 nt, Artificial Sequence
  Description of Artificial Sequence: Synthetic oligonucleotide
  Sense strand starting at position 1060 of SEQ ID NO: 584984
acagaucacuuuguuguaa

SEQ ID NO: 604443 - RNA, 19 nt, Artificial Sequence
  Description of Artificial Sequence: Synthetic oligonucleotide
  Antisense strand to SEQ ID NO: 604442
uuacaacaaagugaucugu

SEQ ID NO: 604444 - RNA, 19 nt, Artificial Sequence
  Description of Artificial Sequence: Synthetic oligonucleotide
  Sense strand starting at position 1211 of SEQ ID NO: 584984
cucuuuaugguguagggaa

SEQ ID NO: 604445 - RNA, 19 nt, Artificial Sequence
  Description of Artificial Sequence: Synthetic oligonucleotide
  Antisense strand to SEQ ID NO: 604444
uucccuacaccauaaagag

SEQ ID NO: 604446 - RNA, 19 nt, Artificial Sequence
  Description of Artificial Sequence: Synthetic oligonucleotide
  Sense strand starting at position 1231 of SEQ ID NO: 584984
gaagaacugugucuuggug

SEQ ID NO: 604447 - RNA, 19 nt, Artificial Sequence
  Description of Artificial Sequence: Synthetic oligonucleotide
  Antisense strand to SEQ ID NO: 604446
caccaagacacaguucuuc

SEQ ID NO: 604448 - RNA, 19 nt, Artificial Sequence
  Description of Artificial Sequence: Synthetic oligonucleotide
  Sense strand starting at position 1442 of SEQ ID NO: 584984
acagaugaguucuuuauac

SEQ ID NO: 604449 - RNA, 19 nt, Artificial Sequence
  Description of Artificial Sequence: Synthetic oligonucleotide
  Antisense strand to SEQ ID NO: 604448
guauaaagaacucaucugu

SEQ ID NO: 604450 - RNA, 19 nt, Artificial Sequence
  Description of Artificial Sequence: Synthetic oligonucleotide
  Sense strand starting at position 1619 of SEQ ID NO: 584984
aacagaaauuaggauugga

SEQ ID NO: 604451 - RNA, 19 nt, Artificial Sequence
  Description of Artificial Sequence: Synthetic oligonucleotide
  Antisense strand to SEQ ID NO: 604450
uccaauccuaauuucuguu

SEQ ID NO: 604452 - RNA, 19 nt, Artificial Sequence
  Description of Artificial Sequence: Synthetic oligonucleotide
  Sense strand starting at position 1629 of SEQ ID NO: 584984
aggauuggaugucuguauu

SEQ ID NO: 604453 - RNA, 19 nt, Artificial Sequence
  Description of Artificial Sequence: Synthetic oligonucleotide
  Antisense strand to SEQ ID NO: 604452
aauacagacauccaauccu

SEQ ID NO: 604454 - RNA, 19 nt, Artificial Sequence
  Description of Artificial Sequence: Synthetic oligonucleotide
  Sense strand starting at position 1632 of SEQ ID NO: 584984
auuggaugucuguauuaaa

SEQ ID NO: 604455 - RNA, 19 nt, Artificial Sequence
  Description of Artificial Sequence: Synthetic oligonucleotide
  Antisense strand to SEQ ID NO: 604454
uuuaauacagacauccaau

SEQ ID NO: 604456 - RNA, 19 nt, Artificial Sequence
  Description of Artificial Sequence: Synthetic oligonucleotide
  Sense strand starting at position 1663 of SEQ ID NO: 584984
uuugacauagccugaaaua

SEQ ID NO: 604457 - RNA, 19 nt, Artificial Sequence
  Description of Artificial Sequence: Synthetic oligonucleotide
  Antisense strand to SEQ ID NO: 604456
uauuucaggcuaugucaaa

SEQ ID NO: 604458 - RNA, 19 nt, Artificial Sequence
  Description of Artificial Sequence: Synthetic oligonucleotide
  Sense strand starting at position 1927 of SEQ ID NO: 584984
cugggaguuccuggagaug

SEQ ID NO: 604459 - RNA, 19 nt, Artificial Sequence
  Description of Artificial Sequence: Synthetic oligonucleotide
  Antisense strand to SEQ ID NO: 604458
caucuccaggaacucccag

SEQ ID NO: 604460 - RNA, 19 nt, Artificial Sequence
  Description of Artificial Sequence: Synthetic oligonucleotide
  Sense strand starting at position 1967 of SEQ ID NO: 584984
gcuuccucugcccagauga

SEQ ID NO: 604461 - RNA, 19 nt, Artificial Sequence
  Description of Artificial Sequence: Synthetic oligonucleotide
  Antisense strand to SEQ ID NO: 604460
ucaucugggcagaggaagc

SEQ ID NO: 604462 - RNA, 19 nt, Artificial Sequence
  Description of Artificial Sequence: Synthetic oligonucleotide
  Sense strand starting at position 2050 of SEQ ID NO: 584984
ugagguuacccugagcuua

SEQ ID NO: 604463 - RNA, 19 nt, Artificial Sequence
  Description of Artificial Sequence: Synthetic oligonucleotide
  Antisense strand to SEQ ID NO: 604462
uaagcucaggguaaccuca

SEQ ID NO: 604464 - RNA, 19 nt, Artificial Sequence
  Description of Artificial Sequence: Synthetic oligonucleotide
  Sense strand starting at position 2085 of SEQ ID NO: 584984
guugguaagcacuaauuau

SEQ ID NO: 604465 - RNA, 19 nt, Artificial Sequence
  Description of Artificial Sequence: Synthetic oligonucleotide
  Antisense strand to SEQ ID NO: 604464
auaauuagugcuuaccaac

SEQ ID NO: 604466 - RNA, 19 nt, Artificial Sequence
  Description of Artificial Sequence: Synthetic oligonucleotide
  Sense strand starting at position 2095 of SEQ ID NO: 584984
acuaauuaugguggaaagu

SEQ ID NO: 604467 - RNA, 19 nt, Artificial Sequence
  Description of Artificial Sequence: Synthetic oligonucleotide
  Antisense strand to SEQ ID NO: 604466
acuuuccaccauaauuagu

SEQ ID NO: 604468 - RNA, 19 nt, Artificial Sequence
  Description of Artificial Sequence: Synthetic oligonucleotide
  Sense strand starting at position 2587 of SEQ ID NO: 584984
uuggguuuacuuuagaguu

SEQ ID NO: 604469 - RNA, 19 nt, Artificial Sequence
  Description of Artificial Sequence: Synthetic oligonucleotide
  Antisense strand to SEQ ID NO: 604468
aacucuaaaguaaacccaa

SEQ ID NO: 604470 - RNA, 19 nt, Artificial Sequence
  Description of Artificial Sequence: Synthetic oligonucleotide
  Sense strand starting at position 2726 of SEQ ID NO: 584984
auauuauuggcuuaacuug

SEQ ID NO: 604471 - RNA, 19 nt, Artificial Sequence
  Description of Artificial Sequence: Synthetic oligonucleotide
  Antisense strand to SEQ ID NO: 604470
caaguuaagccaauaauau

SEQ ID NO: 604472 - RNA, 19 nt, Artificial Sequence
  Description of Artificial Sequence: Synthetic oligonucleotide
  Sense strand starting at position 2817 of SEQ ID NO: 584984
guaguuagacucuguuuaa

SEQ ID NO: 604473 - RNA, 19 nt, Artificial Sequence
  Description of Artificial Sequence: Synthetic oligonucleotide
  Antisense strand to SEQ ID NO: 604472
uuaaacagagucuaacuac

SEQ ID NO: 604474 - RNA, 19 nt, Artificial Sequence
  Description of Artificial Sequence: Synthetic oligonucleotide
  Sense strand starting at position 2820 of SEQ ID NO: 584984
guuagacucuguuuaacaa

SEQ ID NO: 604475 - RNA, 19 nt, Artificial Sequence
  Description of Artificial Sequence: Synthetic oligonucleotide
  Antisense strand to SEQ ID NO: 604474
uuguuaaacagagucuaac

SEQ ID NO: 604476 - RNA, 19 nt, Artificial Sequence
  Description of Artificial Sequence: Synthetic oligonucleotide
  Sense strand starting at position 2882 of SEQ ID NO: 584984
cuaauaaaggugggaaguu

SEQ ID NO: 604477 - RNA, 19 nt, Artificial Sequence
  Description of Artificial Sequence: Synthetic oligonucleotide
  Antisense strand to SEQ ID NO: 604476
aacuucccaccuuuauuag

SEQ ID NO: 604478 - RNA, 19 nt, Artificial Sequence
  Description of Artificial Sequence: Synthetic oligonucleotide
  Sense strand starting at position 3076 of SEQ ID NO: 584984
uugaaaguuugaccaguga

SEQ ID NO: 604479 - RNA, 19 nt, Artificial Sequence
  Description of Artificial Sequence: Synthetic oligonucleotide
  Antisense strand to SEQ ID NO: 604478
ucacuggucaaacuuucaa

SEQ ID NO: 604480 - RNA, 19 nt, Artificial Sequence
  Description of Artificial Sequence: Synthetic oligonucleotide
  Sense strand starting at position 3080 of SEQ ID NO: 584984
aaguuugaccagugaauga

SEQ ID NO: 604481 - RNA, 19 nt, Artificial Sequence
  Description of Artificial Sequence: Synthetic oligonucleotide
  Antisense strand to SEQ ID NO: 604480
ucauucacuggucaaacuu

SEQ ID NO: 604482 - RNA, 19 nt, Artificial Sequence
  Description of Artificial Sequence: Synthetic oligonucleotide
  Sense strand starting at position 3171 of SEQ ID NO: 584984
uguauagcccuuuauggaa

SEQ ID NO: 604483 - RNA, 19 nt, Artificial Sequence
  Description of Artificial Sequence: Synthetic oligonucleotide
  Antisense strand to SEQ ID NO: 604482
uuccauaaagggcuauaca

SEQ ID NO: 604484 - RNA, 19 nt, Artificial Sequence
  Description of Artificial Sequence: Synthetic oligonucleotide
  Sense strand starting at position 3243 of SEQ ID NO: 584984
uguugauugccauauuaaa

SEQ ID NO: 604485 - RNA, 19 nt, Artificial Sequence
  Description of Artificial Sequence: Synthetic oligonucleotide
  Antisense strand to SEQ ID NO: 604484
uuuaauauggcaaucaaca

SEQ ID NO: 604486 - RNA, 19 nt, Artificial Sequence
  Description of Artificial Sequence: Synthetic oligonucleotide
  Sense strand starting at position 3323 of SEQ ID NO: 584984
cuuauagcaguuuagaaua

SEQ ID NO: 604487 - RNA, 19 nt, Artificial Sequence
  Description of Artificial Sequence: Synthetic oligonucleotide
  Antisense strand to SEQ ID NO: 604486
uauucuaaacugcuauaag

SEQ ID NO: 604488 - RNA, 19 nt, Artificial Sequence
  Description of Artificial Sequence: Synthetic oligonucleotide
  Sense strand starting at position 3416 of SEQ ID NO: 584984
cugcuacaucuguaggaga

SEQ ID NO: 604489 - RNA, 19 nt, Artificial Sequence
  Description of Artificial Sequence: Synthetic oligonucleotide
  Antisense strand to SEQ ID NO: 604488
ucuccuacagauguagcag

SEQ ID NO: 604490 - RNA, 19 nt, Artificial Sequence
  Description of Artificial Sequence: Synthetic oligonucleotide
  Sense strand starting at position 3418 of SEQ ID NO: 584984
gcuacaucuguaggagacu

SEQ ID NO: 604491 - RNA, 19 nt, Artificial Sequence
  Description of Artificial Sequence: Synthetic oligonucleotide
  Antisense strand to SEQ ID NO: 604490
agucuccuacagauguagc

SEQ ID NO: 604492 - RNA, 19 nt, Artificial Sequence
  Description of Artificial Sequence: Synthetic oligonucleotide
  Sense strand starting at position 3531 of SEQ ID NO: 584984
uuugaaugcuagguugaau

SEQ ID NO: 604493 - RNA, 19 nt, Artificial Sequence
  Description of Artificial Sequence: Synthetic oligonucleotide
  Antisense strand to SEQ ID NO: 604492
auucaaccuagcauucaaa

SEQ ID NO: 604494 - RNA, 19 nt, Artificial Sequence
  Description of Artificial Sequence: Synthetic oligonucleotide
  Sense strand starting at position 3595 of SEQ ID NO: 584984
uguauauauggugauacac

SEQ ID NO: 604495 - RNA, 19 nt, Artificial Sequence
  Description of Artificial Sequence: Synthetic oligonucleotide
  Antisense strand to SEQ ID NO: 604494
guguaucaccauauauaca

SEQ ID NO: 604496 - RNA, 19 nt, Artificial Sequence
  Description of Artificial Sequence: Synthetic oligonucleotide
  Sense strand starting at position 3645 of SEQ ID NO: 584984
ugagacugauacccuguua

SEQ ID NO: 604497 - RNA, 19 nt, Artificial Sequence
  Description of Artificial Sequence: Synthetic oligonucleotide
  Antisense strand to SEQ ID NO: 604496
uaacaggguaucagucuca

SEQ ID NO: 604498 - RNA, 19 nt, Artificial Sequence
  Description of Artificial Sequence: Synthetic oligonucleotide
  Sense strand starting at position 3867 of SEQ ID NO: 584984
agauuauuccugugcuuga

SEQ ID NO: 604499 - RNA, 19 nt, Artificial Sequence
  Description of Artificial Sequence: Synthetic oligonucleotide
  Antisense strand to SEQ ID NO: 604498
ucaagcacaggaauaaucu

SEQ ID NO: 604500 - RNA, 19 nt, Artificial Sequence
  Description of Artificial Sequence: Synthetic oligonucleotide
  Sense strand starting at position 3868 of SEQ ID NO: 584984
gauuauuccugugcuugag

SEQ ID NO: 604501 - RNA, 19 nt, Artificial Sequence
  Description of Artificial Sequence: Synthetic oligonucleotide
  Antisense strand to SEQ ID NO: 604500
cucaagcacaggaauaauc

SEQ ID NO: 604502 - RNA, 19 nt, Artificial Sequence
  Description of Artificial Sequence: Synthetic oligonucleotide
  Sense strand starting at position 3872 of SEQ ID NO: 584984
auuccugugcuugagguau

SEQ ID NO: 604503 - RNA, 19 nt, Artificial Sequence
  Description of Artificial Sequence: Synthetic oligonucleotide
  Antisense strand to SEQ ID NO: 604502
auaccucaagcacaggaau

SEQ ID NO: 604504 - RNA, 19 nt, Artificial Sequence
  Description of Artificial Sequence: Synthetic oligonucleotide
  Sense strand starting at position 60 of SEQ ID NO: 584985
caaagagaguuccagcaaa

SEQ ID NO: 604505 - RNA, 19 nt, Artificial Sequence
  Description of Artificial Sequence: Synthetic oligonucleotide
  Antisense strand to SEQ ID NO: 604504
uuugcuggaacucucuuug

SEQ ID NO: 604506 - RNA, 19 nt, Artificial Sequence
  Description of Artificial Sequence: Synthetic oligonucleotide
  Sense strand starting at position 382 of SEQ ID NO: 584985
gggaguacaauucgaucau

SEQ ID NO: 604507 - RNA, 19 nt, Artificial Sequence
  Description of Artificial Sequence: Synthetic oligonucleotide
  Antisense strand to SEQ ID NO: 604506
augaucgaauuguacuccc

SEQ ID NO: 604508 - RNA, 19 nt, Artificial Sequence
  Description of Artificial Sequence: Synthetic oligonucleotide
  Sense strand starting at position 383 of SEQ ID NO: 584985
ggaguacaauucgaucaua

SEQ ID NO: 604509 - RNA, 19 nt, Artificial Sequence
  Description of Artificial Sequence: Synthetic oligonucleotide
  Antisense strand to SEQ ID NO: 604508
uaugaucgaauuguacucc

SEQ ID NO: 604510 - RNA, 19 nt, Artificial Sequence
  Description of Artificial Sequence: Synthetic oligonucleotide
  Sense strand starting at position 683 of SEQ ID NO: 584985
aagaaagacuccuagaguc

SEQ ID NO: 604511 - RNA, 19 nt, Artificial Sequence
  Description of Artificial Sequence: Synthetic oligonucleotide
  Antisense strand to SEQ ID NO: 604510
gacucuaggagucuuucuu

SEQ ID NO: 604512 - RNA, 19 nt, Artificial Sequence
  Description of Artificial Sequence: Synthetic oligonucleotide
  Sense strand starting at position 745 of SEQ ID NO: 584985
guccucacaucuuggaagu

SEQ ID NO: 604513 - RNA, 19 nt, Artificial Sequence
  Description of Artificial Sequence: Synthetic oligonucleotide
  Antisense strand to SEQ ID NO: 604512
acuuccaagaugugaggac

SEQ ID NO: 604514 - RNA, 19 nt, Artificial Sequence
  Description of Artificial Sequence: Synthetic oligonucleotide
  Sense strand starting at position 746 of SEQ ID NO: 584985
uccucacaucuuggaaguu

SEQ ID NO: 604515 - RNA, 19 nt, Artificial Sequence
  Description of Artificial Sequence: Synthetic oligonucleotide
  Antisense strand to SEQ ID NO: 604514
aacuuccaagaugugagga

SEQ ID NO: 604516 - RNA, 19 nt, Artificial Sequence
  Description of Artificial Sequence: Synthetic oligonucleotide
  Sense strand starting at position 761 of SEQ ID NO: 584985
aguucuuccuucuguaauc

SEQ ID NO: 604517 - RNA, 19 nt, Artificial Sequence
  Description of Artificial Sequence: Synthetic oligonucleotide
  Antisense strand to SEQ ID NO: 604516
gauuacagaaggaagaacu

SEQ ID NO: 604518 - RNA, 19 nt, Artificial Sequence
  Description of Artificial Sequence: Synthetic oligonucleotide
  Sense strand starting at position 762 of SEQ ID NO: 584985
guucuuccuucuguaaucu

SEQ ID NO: 604519 - RNA, 19 nt, Artificial Sequence
  Description of Artificial Sequence: Synthetic oligonucleotide
  Antisense strand to SEQ ID NO: 604518
agauuacagaaggaagaac

SEQ ID NO: 604520 - RNA, 19 nt, Artificial Sequence
  Description of Artificial Sequence: Synthetic oligonucleotide
  Sense strand starting at position 833 of SEQ ID NO: 584985
agaauugaauagucaaguu

SEQ ID NO: 604521 - RNA, 19 nt, Artificial Sequence
  Description of Artificial Sequence: Synthetic oligonucleotide
  Antisense strand to SEQ ID NO: 604520
aacuugacuauucaauucu

SEQ ID NO: 604522 - RNA, 19 nt, Artificial Sequence
  Description of Artificial Sequence: Synthetic oligonucleotide
  Sense strand starting at position 865 of SEQ ID NO: 584985
cccucagugucuccagaaa

SEQ ID NO: 604523 - RNA, 19 nt, Artificial Sequence
  Description of Artificial Sequence: Synthetic oligonucleotide
  Antisense strand to SEQ ID NO: 604522
uuucuggagacacugaggg

SEQ ID NO: 604524 - RNA, 19 nt, Artificial Sequence
  Description of Artificial Sequence: Synthetic oligonucleotide
  Sense strand starting at position 963 of SEQ ID NO: 584985
aauucuggguccugggaaa

SEQ ID NO: 604525 - RNA, 19 nt, Artificial Sequence
  Description of Artificial Sequence: Synthetic oligonucleotide
  Antisense strand to SEQ ID NO: 604524
uuucccaggacccagaauu

SEQ ID NO: 604526 - RNA, 19 nt, Artificial Sequence
  Description of Artificial Sequence: Synthetic oligonucleotide
  Sense strand starting at position 1510 of SEQ ID NO: 584985
agagauuccuacccugaug

SEQ ID NO: 604527 - RNA, 19 nt, Artificial Sequence
  Description of Artificial Sequence: Synthetic oligonucleotide
  Antisense strand to SEQ ID NO: 604526
caucaggguaggaaucucu

SEQ ID NO: 604528 - RNA, 19 nt, Artificial Sequence
  Description of Artificial Sequence: Synthetic oligonucleotide
  Sense strand starting at position 2179 of SEQ ID NO: 584985
cggccuguacccuaagauu

SEQ ID NO: 604529 - RNA, 19 nt, Artificial Sequence
  Description of Artificial Sequence: Synthetic oligonucleotide
  Antisense strand to SEQ ID NO: 604528
aaucuuaggguacaggccg

SEQ ID NO: 604530 - RNA, 19 nt, Artificial Sequence
  Description of Artificial Sequence: Synthetic oligonucleotide
  Sense strand starting at position 2474 of SEQ ID NO: 584985
ggcuauagauagcgacgaa

SEQ ID NO: 604531 - RNA, 19 nt, Artificial Sequence
  Description of Artificial Sequence: Synthetic oligonucleotide
  Antisense strand to SEQ ID NO: 604530
uucgucgcuaucuauagcc

SEQ ID NO: 604532 - RNA, 19 nt, Artificial Sequence
  Description of Artificial Sequence: Synthetic oligonucleotide
  Sense strand starting at position 2513 of SEQ ID NO: 584985
gaagguguucuacggagag

SEQ ID NO: 604533 - RNA, 19 nt, Artificial Sequence
  Description of Artificial Sequence: Synthetic oligonucleotide
  Antisense strand to SEQ ID NO: 604532
cucuccguagaacaccuuc

SEQ ID NO: 604534 - RNA, 19 nt, Artificial Sequence
  Description of Artificial Sequence: Synthetic oligonucleotide
  Sense strand starting at position 2515 of SEQ ID NO: 584985
agguguucuacggagagca

SEQ ID NO: 604535 - RNA, 19 nt, Artificial Sequence
  Description of Artificial Sequence: Synthetic oligonucleotide
  Antisense strand to SEQ ID NO: 604534
ugcucuccguagaacaccu

SEQ ID NO: 604536 - RNA, 19 nt, Artificial Sequence
  Description of Artificial Sequence: Synthetic oligonucleotide
  Sense strand starting at position 2565 of SEQ ID NO: 584985
acaggauagucagguccaa

SEQ ID NO: 604537 - RNA, 19 nt, Artificial Sequence
  Description of Artificial Sequence: Synthetic oligonucleotide
  Antisense strand to SEQ ID NO: 604536
uuggaccugacuauccugu

SEQ ID NO: 604538 - RNA, 19 nt, Artificial Sequence
  Description of Artificial Sequence: Synthetic oligonucleotide
  Sense strand starting at position 3332 of SEQ ID NO: 584985
cgggacuacacucgugaaa

SEQ ID NO: 604539 - RNA, 19 nt, Artificial Sequence
  Description of Artificial Sequence: Synthetic oligonucleotide
  Antisense strand to SEQ ID NO: 604538
uuucacgaguguagucccg

SEQ ID NO: 604540 - RNA, 19 nt, Artificial Sequence
  Description of Artificial Sequence: Synthetic oligonucleotide
  Sense strand starting at position 3334 of SEQ ID NO: 584985
ggacuacacucgugaaacc

SEQ ID NO: 604541 - RNA, 19 nt, Artificial Sequence
  Description of Artificial Sequence: Synthetic oligonucleotide
  Antisense strand to SEQ ID NO: 604540
gguuucacgaguguagucc

SEQ ID NO: 604542 - RNA, 19 nt, Artificial Sequence
  Description of Artificial Sequence: Synthetic oligonucleotide
  Sense strand starting at position 3335 of SEQ ID NO: 584985
gacuacacucgugaaacca

SEQ ID NO: 604543 - RNA, 19 nt, Artificial Sequence
  Description of Artificial Sequence: Synthetic oligonucleotide
  Antisense strand to SEQ ID NO: 604542
ugguuucacgaguguaguc

SEQ ID NO: 604544 - RNA, 19 nt, Artificial Sequence
  Description of Artificial Sequence: Synthetic oligonucleotide
  Sense strand starting at position 3438 of SEQ ID NO: 584985
gaaggcuagugcuuggaga

SEQ ID NO: 604545 - RNA, 19 nt, Artificial Sequence
  Description of Artificial Sequence: Synthetic oligonucleotide
  Antisense strand to SEQ ID NO: 604544
ucuccaagcacuagccuuc

SEQ ID NO: 604546 - RNA, 19 nt, Artificial Sequence
  Description of Artificial Sequence: Synthetic oligonucleotide
  Sense strand starting at position 3512 of SEQ ID NO: 584985
acuggcauuucuuagucaa

SEQ ID NO: 604547 - RNA, 19 nt, Artificial Sequence
  Description of Artificial Sequence: Synthetic oligonucleotide
  Antisense strand to SEQ ID NO: 604546
uugacuaagaaaugccagu

SEQ ID NO: 604548 - RNA, 19 nt, Artificial Sequence
  Description of Artificial Sequence: Synthetic oligonucleotide
  Sense strand starting at position 3515 of SEQ ID NO: 584985
ggcauuucuuagucaaccu

SEQ ID NO: 604549 - RNA, 19 nt, Artificial Sequence
  Description of Artificial Sequence: Synthetic oligonucleotide
  Antisense strand to SEQ ID NO: 604548
agguugacuaagaaaugcc

SEQ ID NO: 604550 - RNA, 19 nt, Artificial Sequence
  Description of Artificial Sequence: Synthetic oligonucleotide
  Sense strand starting at position 3523 of SEQ ID NO: 584985
uuagucaaccugggaaagu

SEQ ID NO: 604551 - RNA, 19 nt, Artificial Sequence
  Description of Artificial Sequence: Synthetic oligonucleotide
  Antisense strand to SEQ ID NO: 604550
acuuucccagguugacuaa

SEQ ID NO: 604552 - RNA, 19 nt, Artificial Sequence
  Description of Artificial Sequence: Synthetic oligonucleotide
  Sense strand starting at position 3524 of SEQ ID NO: 584985
uagucaaccugggaaagua

SEQ ID NO: 604553 - RNA, 19 nt, Artificial Sequence
  Description of Artificial Sequence: Synthetic oligonucleotide
  Antisense strand to SEQ ID NO: 604552
uacuuucccagguugacua

SEQ ID NO: 604554 - RNA, 19 nt, Artificial Sequence
  Description of Artificial Sequence: Synthetic oligonucleotide
  Sense strand starting at position 3542 of SEQ ID NO: 584985
acaguacuucuuugagucu

SEQ ID NO: 604555 - RNA, 19 nt, Artificial Sequence
  Description of Artificial Sequence: Synthetic oligonucleotide
  Antisense strand to SEQ ID NO: 604554
agacucaaagaaguacugu

SEQ ID NO: 604556 - RNA, 19 nt, Artificial Sequence
  Description of Artificial Sequence: Synthetic oligonucleotide
  Sense strand starting at position 3545 of SEQ ID NO: 584985
guacuucuuugagucuaac

SEQ ID NO: 604557 - RNA, 19 nt, Artificial Sequence
  Description of Artificial Sequence: Synthetic oligonucleotide
  Antisense strand to SEQ ID NO: 604556
guuagacucaaagaaguac

SEQ ID NO: 604558 - RNA, 19 nt, Artificial Sequence
  Description of Artificial Sequence: Synthetic oligonucleotide
  Sense strand starting at position 3776 of SEQ ID NO: 584985
gcccuacucucauguccau

SEQ ID NO: 604559 - RNA, 19 nt, Artificial Sequence
  Description of Artificial Sequence: Synthetic oligonucleotide
  Antisense strand to SEQ ID NO: 604558
auggacaugagaguagggc

SEQ ID NO: 604560 - RNA, 19 nt, Artificial Sequence
  Description of Artificial Sequence: Synthetic oligonucleotide
  Sense strand starting at position 84 of SEQ ID NO: 584986
ccaaauuauuggcacaaag

SEQ ID NO: 604561 - RNA, 19 nt, Artificial Sequence
  Description of Artificial Sequence: Synthetic oligonucleotide
  Antisense strand to SEQ ID NO: 604560
cuuugugccaauaauuugg

SEQ ID NO: 604562 - RNA, 19 nt, Artificial Sequence
  Description of Artificial Sequence: Synthetic oligonucleotide
  Sense strand starting at position 211 of SEQ ID NO: 584986
uuggcacugcccuaaguau

SEQ ID NO: 604563 - RNA, 19 nt, Artificial Sequence
  Description of Artificial Sequence: Synthetic oligonucleotide
  Antisense strand to SEQ ID NO: 604562
auacuuagggcagugccaa

SEQ ID NO: 604564 - RNA, 19 nt, Artificial Sequence
  Description of Artificial Sequence: Synthetic oligonucleotide
  Sense strand starting at position 314 of SEQ ID NO: 584986
gugagacuggcccauuguu

SEQ ID NO: 604565 - RNA, 19 nt, Artificial Sequence
  Description of Artificial Sequence: Synthetic oligonucleotide
  Antisense strand to SEQ ID NO: 604564
aacaaugggccagucucac

SEQ ID NO: 604566 - RNA, 19 nt, Artificial Sequence
  Description of Artificial Sequence: Synthetic oligonucleotide
  Sense strand starting at position 344 of SEQ ID NO: 584986
gccuuaacuuugguauaau

SEQ ID NO: 604567 - RNA, 19 nt, Artificial Sequence
  Description of Artificial Sequence: Synthetic oligonucleotide
  Antisense strand to SEQ ID NO: 604566
auuauaccaaaguuaaggc

SEQ ID NO: 604568 - RNA, 19 nt, Artificial Sequence
  Description of Artificial Sequence: Synthetic oligonucleotide
  Sense strand starting at position 380 of SEQ ID NO: 584986
gcagucgugcucgcgagaa

SEQ ID NO: 604569 - RNA, 19 nt, Artificial Sequence
  Description of Artificial Sequence: Synthetic oligonucleotide
  Antisense strand to SEQ ID NO: 604568
uucucgcgagcacgacugc

SEQ ID NO: 604570 - RNA, 19 nt, Artificial Sequence
  Description of Artificial Sequence: Synthetic oligonucleotide
  Sense strand starting at position 385 of SEQ ID NO: 584986
cgugcucgcgagaaguuaa

SEQ ID NO: 604571 - RNA, 19 nt, Artificial Sequence
  Description of Artificial Sequence: Synthetic oligonucleotide
  Antisense strand to SEQ ID NO: 604570
uuaacuucucgcgagcacg

SEQ ID NO: 604572 - RNA, 19 nt, Artificial Sequence
  Description of Artificial Sequence: Synthetic oligonucleotide
  Sense strand starting at position 395 of SEQ ID NO: 584986
agaaguuaaaggcgaacaa

SEQ ID NO: 604573 - RNA, 19 nt, Artificial Sequence
  Description of Artificial Sequence: Synthetic oligonucleotide
  Antisense strand to SEQ ID NO: 604572
uuguucgccuuuaacuucu

SEQ ID NO: 604574 - RNA, 19 nt, Artificial Sequence
  Description of Artificial Sequence: Synthetic oligonucleotide
  Sense strand starting at position 520 of SEQ ID NO: 584986
ccgacuuagcugcaagaau

SEQ ID NO: 604575 - RNA, 19 nt, Artificial Sequence
  Description of Artificial Sequence: Synthetic oligonucleotide
  Antisense strand to SEQ ID NO: 604574
auucuugcagcuaagucgg

SEQ ID NO: 604576 - RNA, 19 nt, Artificial Sequence
  Description of Artificial Sequence: Synthetic oligonucleotide
  Sense strand starting at position 1280 of SEQ ID NO: 584986
gaaugaguacccuagugcu

SEQ ID NO: 604577 - RNA, 19 nt, Artificial Sequence
  Description of Artificial Sequence: Synthetic oligonucleotide
  Antisense strand to SEQ ID NO: 604576
agcacuaggguacucauuc

SEQ ID NO: 604578 - RNA, 19 nt, Artificial Sequence
  Description of Artificial Sequence: Synthetic oligonucleotide
  Sense strand starting at position 1310 of SEQ ID NO: 584986
caucucggaugcucugaaa

SEQ ID NO: 604579 - RNA, 19 nt, Artificial Sequence
  Description of Artificial Sequence: Synthetic oligonucleotide
  Antisense strand to SEQ ID NO: 604578
uuucagagcauccgagaug

SEQ ID NO: 604580 - RNA, 19 nt, Artificial Sequence
  Description of Artificial Sequence: Synthetic oligonucleotide
  Sense strand starting at position 1550 of SEQ ID NO: 584986
gcgcgcccuccauugaaau

SEQ ID NO: 604581 - RNA, 19 nt, Artificial Sequence
  Description of Artificial Sequence: Synthetic oligonucleotide
  Antisense strand to SEQ ID NO: 604580
auuucaauggagggcgcgc

SEQ ID NO: 604582 - RNA, 19 nt, Artificial Sequence
  Description of Artificial Sequence: Synthetic oligonucleotide
  Sense strand starting at position 1618 of SEQ ID NO: 584986
gaugcuuugcgugcacaaa

SEQ ID NO: 604583 - RNA, 19 nt, Artificial Sequence
  Description of Artificial Sequence: Synthetic oligonucleotide
  Antisense strand to SEQ ID NO: 604582
uuugugcacgcaaagcauc

SEQ ID NO: 604584 - RNA, 19 nt, Artificial Sequence
  Description of Artificial Sequence: Synthetic oligonucleotide
  Sense strand starting at position 1805 of SEQ ID NO: 584986
gccguuucccgaguugucu

SEQ ID NO: 604585 - RNA, 19 nt, Artificial Sequence
  Description of Artificial Sequence: Synthetic oligonucleotide
  Antisense strand to SEQ ID NO: 604584
agacaacucgggaaacggc

SEQ ID NO: 604586 - RNA, 19 nt, Artificial Sequence
  Description of Artificial Sequence: Synthetic oligonucleotide
  Sense strand starting at position 1813 of SEQ ID NO: 584986
ccgaguugucucugggaau

SEQ ID NO: 604587 - RNA, 19 nt, Artificial Sequence
  Description of Artificial Sequence: Synthetic oligonucleotide
  Antisense strand to SEQ ID NO: 604586
auucccagagacaacucgg

SEQ ID NO: 604588 - RNA, 19 nt, Artificial Sequence
  Description of Artificial Sequence: Synthetic oligonucleotide
  Sense strand starting at position 2193 of SEQ ID NO: 584986
cucucaguuuacucgguua

SEQ ID NO: 604589 - RNA, 19 nt, Artificial Sequence
  Description of Artificial Sequence: Synthetic oligonucleotide
  Antisense strand to SEQ ID NO: 604588
uaaccgaguaaacugagag

SEQ ID NO: 604590 - RNA, 19 nt, Artificial Sequence
  Description of Artificial Sequence: Synthetic oligonucleotide
  Sense strand starting at position 2196 of SEQ ID NO: 584986
ucaguuuacucgguuacga

SEQ ID NO: 604591 - RNA, 19 nt, Artificial Sequence
  Description of Artificial Sequence: Synthetic oligonucleotide
  Antisense strand to SEQ ID NO: 604590
ucguaaccgaguaaacuga

SEQ ID NO: 604592 - RNA, 19 nt, Artificial Sequence
  Description of Artificial Sequence: Synthetic oligonucleotide
  Sense strand starting at position 2198 of SEQ ID NO: 584986
aguuuacucgguuacgaaa

SEQ ID NO: 604593 - RNA, 19 nt, Artificial Sequence
  Description of Artificial Sequence: Synthetic oligonucleotide
  Antisense strand to SEQ ID NO: 604592
uuucguaaccgaguaaacu

SEQ ID NO: 604594 - RNA, 19 nt, Artificial Sequence
  Description of Artificial Sequence: Synthetic oligonucleotide
  Sense strand starting at position 2296 of SEQ ID NO: 584986
gcauacuucgagcauuccu

SEQ ID NO: 604595 - RNA, 19 nt, Artificial Sequence
  Description of Artificial Sequence: Synthetic oligonucleotide
  Antisense strand to SEQ ID NO: 604594
aggaaugcucgaaguaugc

SEQ ID NO: 604596 - RNA, 19 nt, Artificial Sequence
  Description of Artificial Sequence: Synthetic oligonucleotide
  Sense strand starting at position 2452 of SEQ ID NO: 584986
ggauuucuuuaaugaagcu

SEQ ID NO: 604597 - RNA, 19 nt, Artificial Sequence
  Description of Artificial Sequence: Synthetic oligonucleotide
  Antisense strand to SEQ ID NO: 604596
agcuucauuaaagaaaucc

SEQ ID NO: 604598 - RNA, 19 nt, Artificial Sequence
  Description of Artificial Sequence: Synthetic oligonucleotide
  Sense strand starting at position 2680 of SEQ ID NO: 584986
uuaacuaacugucuguaca

SEQ ID NO: 604599 - RNA, 19 nt, Artificial Sequence
  Description of Artificial Sequence: Synthetic oligonucleotide
  Antisense strand to SEQ ID NO: 604598
uguacagacaguuaguuaa

SEQ ID NO: 604600 - RNA, 19 nt, Artificial Sequence
  Description of Artificial Sequence: Synthetic oligonucleotide
  Sense strand starting at position 2868 of SEQ ID NO: 584986
cuaugaaacccaggaguuc

SEQ ID NO: 604601 - RNA, 19 nt, Artificial Sequence
  Description of Artificial Sequence: Synthetic oligonucleotide
  Antisense strand to SEQ ID NO: 604600
gaacuccuggguuucauag

SEQ ID NO: 604602 - RNA, 19 nt, Artificial Sequence
  Description of Artificial Sequence: Synthetic oligonucleotide
  Sense strand starting at position 2913 of SEQ ID NO: 584986
aguugcauccacugcagaa

SEQ ID NO: 604603 - RNA, 19 nt, Artificial Sequence
  Description of Artificial Sequence: Synthetic oligonucleotide
  Antisense strand to SEQ ID NO: 604602
uucugcaguggaugcaacu

SEQ ID NO: 604604 - RNA, 19 nt, Artificial Sequence
  Description of Artificial Sequence: Synthetic oligonucleotide
  Sense strand starting at position 2981 of SEQ ID NO: 584986
acugaaagcucugcccuua

SEQ ID NO: 604605 - RNA, 19 nt, Artificial Sequence
  Description of Artificial Sequence: Synthetic oligonucleotide
  Antisense strand to SEQ ID NO: 604604
uaagggcagagcuuucagu

SEQ ID NO: 604606 - RNA, 19 nt, Artificial Sequence
  Description of Artificial Sequence: Synthetic oligonucleotide
  Sense strand starting at position 3020 of SEQ ID NO: 584986
ggcgaagaggaguaaguuu

SEQ ID NO: 604607 - RNA, 19 nt, Artificial Sequence
  Description of Artificial Sequence: Synthetic oligonucleotide
  Antisense strand to SEQ ID NO: 604606
aaacuuacuccucuucgcc

SEQ ID NO: 604608 - RNA, 19 nt, Artificial Sequence
  Description of Artificial Sequence: Synthetic oligonucleotide
  Sense strand starting at position 3176 of SEQ ID NO: 584986
uacucaggguugccagauu

SEQ ID NO: 604609 - RNA, 19 nt, Artificial Sequence
  Description of Artificial Sequence: Synthetic oligonucleotide
  Antisense strand to SEQ ID NO: 604608
aaucuggcaacccugagua

SEQ ID NO: 604610 - RNA, 19 nt, Artificial Sequence
  Description of Artificial Sequence: Synthetic oligonucleotide
  Sense strand starting at position 3213 of SEQ ID NO: 584986
gaagcuucgagcgcucaca

SEQ ID NO: 604611 - RNA, 19 nt, Artificial Sequence
  Description of Artificial Sequence: Synthetic oligonucleotide
  Antisense strand to SEQ ID NO: 604610
ugugagcgcucgaagcuuc

SEQ ID NO: 604612 - RNA, 19 nt, Artificial Sequence
  Description of Artificial Sequence: Synthetic oligonucleotide
  Sense strand starting at position 3221 of SEQ ID NO: 584986
gagcgcucacaccaagaaa

SEQ ID NO: 604613 - RNA, 19 nt, Artificial Sequence
  Description of Artificial Sequence: Synthetic oligonucleotide
  Antisense strand to SEQ ID NO: 604612
uuucuuggugugagcgcuc

SEQ ID NO: 604614 - RNA, 19 nt, Artificial Sequence
  Description of Artificial Sequence: Synthetic oligonucleotide
  Sense strand starting at position 3255 of SEQ ID NO: 584986
uggagagauucugauuaua

SEQ ID NO: 604615 - RNA, 19 nt, Artificial Sequence
  Description of Artificial Sequence: Synthetic oligonucleotide
  Antisense strand to SEQ ID NO: 604614
uauaaucagaaucucucca

SEQ ID NO: 604616 - RNA, 19 nt, Artificial Sequence
  Description of Artificial Sequence: Synthetic oligonucleotide
  Sense strand starting at position 3273 of SEQ ID NO: 584986
aacgucugaccucaguaua

SEQ ID NO: 604617 - RNA, 19 nt, Artificial Sequence
  Description of Artificial Sequence: Synthetic oligonucleotide
  Antisense strand to SEQ ID NO: 604616
uauacugaggucagacguu

SEQ ID NO: 604618 - RNA, 19 nt, Artificial Sequence
  Description of Artificial Sequence: Synthetic oligonucleotide
  Sense strand starting at position 3325 of SEQ ID NO: 584986
agguuacuccuguaacgcu

SEQ ID NO: 604619 - RNA, 19 nt, Artificial Sequence
  Description of Artificial Sequence: Synthetic oligonucleotide
  Antisense strand to SEQ ID NO: 604618
agcguuacaggaguaaccu

SEQ ID NO: 604620 - RNA, 19 nt, Artificial Sequence
  Description of Artificial Sequence: Synthetic oligonucleotide
  Sense strand starting at position 3392 of SEQ ID NO: 584986
aggagcugcuucucuggaa

SEQ ID NO: 604621 - RNA, 19 nt, Artificial Sequence
  Description of Artificial Sequence: Synthetic oligonucleotide
  Antisense strand to SEQ ID NO: 604620
uuccagagaagcagcuccu

SEQ ID NO: 604622 - RNA, 19 nt, Artificial Sequence
  Description of Artificial Sequence: Synthetic oligonucleotide
  Sense strand starting at position 3396 of SEQ ID NO: 584986
gcugcuucucuggaacuaa

SEQ ID NO: 604623 - RNA, 19 nt, Artificial Sequence
  Description of Artificial Sequence: Synthetic oligonucleotide
  Antisense strand to SEQ ID NO: 604622
uuaguuccagagaagcagc

SEQ ID NO: 604624 - RNA, 19 nt, Artificial Sequence
  Description of Artificial Sequence: Synthetic oligonucleotide
  Sense strand starting at position 3440 of SEQ ID NO: 584986
gcauguucccaauguaaau

SEQ ID NO: 604625 - RNA, 19 nt, Artificial Sequence
  Description of Artificial Sequence: Synthetic oligonucleotide
  Antisense strand to SEQ ID NO: 604624
auuuacauugggaacaugc

SEQ ID NO: 604626 - RNA, 19 nt, Artificial Sequence
  Description of Artificial Sequence: Synthetic oligonucleotide
  Sense strand starting at position 3502 of SEQ ID NO: 584986
cucuccacuaggcgugaua

SEQ ID NO: 604627 - RNA, 19 nt, Artificial Sequence
  Description of Artificial Sequence: Synthetic oligonucleotide
  Antisense strand to SEQ ID NO: 604626
uaucacgccuaguggagag

SEQ ID NO: 604628 - RNA, 19 nt, Artificial Sequence
  Description of Artificial Sequence: Synthetic oligonucleotide
  Sense strand starting at position 3514 of SEQ ID NO: 584986
cgugauagccuccaaacuu

SEQ ID NO: 604629 - RNA, 19 nt, Artificial Sequence
  Description of Artificial Sequence: Synthetic oligonucleotide
  Antisense strand to SEQ ID NO: 604628
aaguuuggaggcuaucacg

SEQ ID NO: 604630 - RNA, 19 nt, Artificial Sequence
  Description of Artificial Sequence: Synthetic oligonucleotide
  Sense strand starting at position 3531 of SEQ ID NO: 584986
uugccuuucgacugacaag

SEQ ID NO: 604631 - RNA, 19 nt, Artificial Sequence
  Description of Artificial Sequence: Synthetic oligonucleotide
  Antisense strand to SEQ ID NO: 604630
cuugucagucgaaaggcaa

SEQ ID NO: 604632 - RNA, 19 nt, Artificial Sequence
  Description of Artificial Sequence: Synthetic oligonucleotide
  Sense strand starting at position 3532 of SEQ ID NO: 584986
ugccuuucgacugacaaga

SEQ ID NO: 604633 - RNA, 19 nt, Artificial Sequence
  Description of Artificial Sequence: Synthetic oligonucleotide
  Antisense strand to SEQ ID NO: 604632
ucuugucagucgaaaggca

SEQ ID NO: 604634 - RNA, 19 nt, Artificial Sequence
  Description of Artificial Sequence: Synthetic oligonucleotide
  Sense strand starting at position 3805 of SEQ ID NO: 584986
gcgcgucccagggaugaaa

SEQ ID NO: 604635 - RNA, 19 nt, Artificial Sequence
  Description of Artificial Sequence: Synthetic oligonucleotide
  Antisense strand to SEQ ID NO: 604634
uuucaucccugggacgcgc

SEQ ID NO: 604636 - RNA, 19 nt, Artificial Sequence
  Description of Artificial Sequence: Synthetic oligonucleotide
  Sense strand starting at position 3864 of SEQ ID NO: 584986
ccacauugcccugguauca

SEQ ID NO: 604637 - RNA, 19 nt, Artificial Sequence
  Description of Artificial Sequence: Synthetic oligonucleotide
  Antisense strand to SEQ ID NO: 604636
ugauaccagggcaaugugg

SEQ ID NO: 604638 - RNA, 19 nt, Artificial Sequence
  Description of Artificial Sequence: Synthetic oligonucleotide
  Sense strand starting at position 3889 of SEQ ID NO: 584986
cccgaauuugucgacagcu

SEQ ID NO: 604639 - RNA, 19 nt, Artificial Sequence
  Description of Artificial Sequence: Synthetic oligonucleotide
  Antisense strand to SEQ ID NO: 604638
agcugucgacaaauucggg

SEQ ID NO: 604640 - RNA, 19 nt, Artificial Sequence
  Description of Artificial Sequence: Synthetic oligonucleotide
  Sense strand starting at position 231 of SEQ ID NO: 584987
uuugcaggcccauaucaaa

SEQ ID NO: 604641 - RNA, 19 nt, Artificial Sequence
  Description of Artificial Sequence: Synthetic oligonucleotide
  Antisense strand to SEQ ID NO: 604640
uuugauaugggccugcaaa

SEQ ID NO: 604642 - RNA, 19 nt, Artificial Sequence
  Description of Artificial Sequence: Synthetic oligonucleotide
  Sense strand starting at position 374 of SEQ ID NO: 584987
gaauuauagcaguguuuga

SEQ ID NO: 604643 - RNA, 19 nt, Artificial Sequence
  Description of Artificial Sequence: Synthetic oligonucleotide
  Antisense strand to SEQ ID NO: 604642
ucaaacacugcuauaauuc

SEQ ID NO: 604644 - RNA, 19 nt, Artificial Sequence
  Description of Artificial Sequence: Synthetic oligonucleotide
  Sense strand starting at position 510 of SEQ ID NO: 584987
ccuacagcagagugauuau

SEQ ID NO: 604645 - RNA, 19 nt, Artificial Sequence
  Description of Artificial Sequence: Synthetic oligonucleotide
  Antisense strand to SEQ ID NO: 604644
auaaucacucugcuguagg

SEQ ID NO: 604646 - RNA, 19 nt, Artificial Sequence
  Description of Artificial Sequence: Synthetic oligonucleotide
  Sense strand starting at position 520 of SEQ ID NO: 584987
agugauuauccucacaucu

SEQ ID NO: 604647 - RNA, 19 nt, Artificial Sequence
  Description of Artificial Sequence: Synthetic oligonucleotide
  Antisense strand to SEQ ID NO: 604646
agaugugaggauaaucacu

SEQ ID NO: 604648 - RNA, 19 nt, Artificial Sequence
  Description of Artificial Sequence: Synthetic oligonucleotide
  Sense strand starting at position 571 of SEQ ID NO: 584987
gggacugagucgucuugga

SEQ ID NO: 604649 - RNA, 19 nt, Artificial Sequence
  Description of Artificial Sequence: Synthetic oligonucleotide
  Antisense strand to SEQ ID NO: 604648
uccaagacgacucaguccc

SEQ ID NO: 604650 - RNA, 19 nt, Artificial Sequence
  Description of Artificial Sequence: Synthetic oligonucleotide
  Sense strand starting at position 575 of SEQ ID NO: 584987
cugagucgucuuggaauug

SEQ ID NO: 604651 - RNA, 19 nt, Artificial Sequence
  Description of Artificial Sequence: Synthetic oligonucleotide
  Antisense strand to SEQ ID NO: 604650
caauuccaagacgacucag

SEQ ID NO: 604652 - RNA, 19 nt, Artificial Sequence
  Description of Artificial Sequence: Synthetic oligonucleotide
  Sense strand starting at position 656 of SEQ ID NO: 584987
ggccgaugaucacucucuu

SEQ ID NO: 604653 - RNA, 19 nt, Artificial Sequence
  Description of Artificial Sequence: Synthetic oligonucleotide
  Antisense strand to SEQ ID NO: 604652
aagagagugaucaucggcc

SEQ ID NO: 604654 - RNA, 19 nt, Artificial Sequence
  Description of Artificial Sequence: Synthetic oligonucleotide
  Sense strand starting at position 1221 of SEQ ID NO: 584987
caugcugcaggguaauuaa

SEQ ID NO: 604655 - RNA, 19 nt, Artificial Sequence
  Description of Artificial Sequence: Synthetic oligonucleotide
  Antisense strand to SEQ ID NO: 604654
uuaauuacccugcagcaug

SEQ ID NO: 604656 - RNA, 19 nt, Artificial Sequence
  Description of Artificial Sequence: Synthetic oligonucleotide
  Sense strand starting at position 1339 of SEQ ID NO: 584987
ccacauguggaguagguaa

SEQ ID NO: 604657 - RNA, 19 nt, Artificial Sequence
  Description of Artificial Sequence: Synthetic oligonucleotide
  Antisense strand to SEQ ID NO: 604656
uuaccuacuccacaugugg

SEQ ID NO: 604658 - RNA, 19 nt, Artificial Sequence
  Description of Artificial Sequence: Synthetic oligonucleotide
  Sense strand starting at position 1480 of SEQ ID NO: 584987
aauugauagugaguuuguu

SEQ ID NO: 604659 - RNA, 19 nt, Artificial Sequence
  Description of Artificial Sequence: Synthetic oligonucleotide
  Antisense strand to SEQ ID NO: 604658
aacaaacucacuaucaauu

SEQ ID NO: 604660 - RNA, 19 nt, Artificial Sequence
  Description of Artificial Sequence: Synthetic oligonucleotide
  Sense strand starting at position 1628 of SEQ ID NO: 584987
gcaugaagccugcaucaug

SEQ ID NO: 604661 - RNA, 19 nt, Artificial Sequence
  Description of Artificial Sequence: Synthetic oligonucleotide
  Antisense strand to SEQ ID NO: 604660
caugaugcaggcuucaugc

SEQ ID NO: 604662 - RNA, 19 nt, Artificial Sequence
  Description of Artificial Sequence: Synthetic oligonucleotide
  Sense strand starting at position 1672 of SEQ ID NO: 584987
guauguaccacaugagagu

SEQ ID NO: 604663 - RNA, 19 nt, Artificial Sequence
  Description of Artificial Sequence: Synthetic oligonucleotide
  Antisense strand to SEQ ID NO: 604662
acucucaugugguacauac

SEQ ID NO: 604664 - RNA, 19 nt, Artificial Sequence
  Description of Artificial Sequence: Synthetic oligonucleotide
  Sense strand starting at position 1748 of SEQ ID NO: 584987
gcaggugugcauuauuuau

SEQ ID NO: 604665 - RNA, 19 nt, Artificial Sequence
  Description of Artificial Sequence: Synthetic oligonucleotide
  Antisense strand to SEQ ID NO: 604664
auaaauaaugcacaccugc

SEQ ID NO: 604666 - RNA, 19 nt, Artificial Sequence
  Description of Artificial Sequence: Synthetic oligonucleotide
  Sense strand starting at position 2134 of SEQ ID NO: 584987
gccuuagagcugggaguaa

SEQ ID NO: 604667 - RNA, 19 nt, Artificial Sequence
  Description of Artificial Sequence: Synthetic oligonucleotide
  Antisense strand to SEQ ID NO: 604666
uuacucccagcucuaaggc

SEQ ID NO: 604668 - RNA, 19 nt, Artificial Sequence
  Description of Artificial Sequence: Synthetic oligonucleotide
  Sense strand starting at position 2205 of SEQ ID NO: 584987
gaugcaaaugccuagaguu

SEQ ID NO: 604669 - RNA, 19 nt, Artificial Sequence
  Description of Artificial Sequence: Synthetic oligonucleotide
  Antisense strand to SEQ ID NO: 604668
aacucuaggcauuugcauc

SEQ ID NO: 604670 - RNA, 19 nt, Artificial Sequence
  Description of Artificial Sequence: Synthetic oligonucleotide
  Sense strand starting at position 2228 of SEQ ID NO: 584987
acuucugaucaugaagugu

SEQ ID NO: 604671 - RNA, 19 nt, Artificial Sequence
  Description of Artificial Sequence: Synthetic oligonucleotide
  Antisense strand to SEQ ID NO: 604670
acacuucaugaucagaagu

SEQ ID NO: 604672 - RNA, 19 nt, Artificial Sequence
  Description of Artificial Sequence: Synthetic oligonucleotide
  Sense strand starting at position 2272 of SEQ ID NO: 584987
aacguucacgaguagguaa

SEQ ID NO: 604673 - RNA, 19 nt, Artificial Sequence
  Description of Artificial Sequence: Synthetic oligonucleotide
  Antisense strand to SEQ ID NO: 604672
uuaccuacucgugaacguu

SEQ ID NO: 604674 - RNA, 19 nt, Artificial Sequence
  Description of Artificial Sequence: Synthetic oligonucleotide
  Sense strand starting at position 2521 of SEQ ID NO: 584987
uugggaucccuuugaauau

SEQ ID NO: 604675 - RNA, 19 nt, Artificial Sequence
  Description of Artificial Sequence: Synthetic oligonucleotide
  Antisense strand to SEQ ID NO: 604674
auauucaaagggaucccaa

SEQ ID NO: 604676 - RNA, 19 nt, Artificial Sequence
  Description of Artificial Sequence: Synthetic oligonucleotide
  Sense strand starting at position 2528 of SEQ ID NO: 584987
cccuuugaauaugugaaag

SEQ ID NO: 604677 - RNA, 19 nt, Artificial Sequence
  Description of Artificial Sequence: Synthetic oligonucleotide
  Antisense strand to SEQ ID NO: 604676
cuuucacauauucaaaggg

SEQ ID NO: 604678 - RNA, 19 nt, Artificial Sequence
  Description of Artificial Sequence: Synthetic oligonucleotide
  Sense strand starting at position 2555 of SEQ ID NO: 584987
uccugcagauuucugugua

SEQ ID NO: 604679 - RNA, 19 nt, Artificial Sequence
  Description of Artificial Sequence: Synthetic oligonucleotide
  Antisense strand to SEQ ID NO: 604678
uacacagaaaucugcagga

SEQ ID NO: 604680 - RNA, 19 nt, Artificial Sequence
  Description of Artificial Sequence: Synthetic oligonucleotide
  Sense strand starting at position 2558 of SEQ ID NO: 584987
ugcagauuucuguguaggu

SEQ ID NO: 604681 - RNA, 19 nt, Artificial Sequence
  Description of Artificial Sequence: Synthetic oligonucleotide
  Antisense strand to SEQ ID NO: 604680
accuacacagaaaucugca

SEQ ID NO: 604682 - RNA, 19 nt, Artificial Sequence
  Description of Artificial Sequence: Synthetic oligonucleotide
  Sense strand starting at position 2559 of SEQ ID NO: 584987
gcagauuucuguguaggug

SEQ ID NO: 604683 - RNA, 19 nt, Artificial Sequence
  Description of Artificial Sequence: Synthetic oligonucleotide
  Antisense strand to SEQ ID NO: 604682
caccuacacagaaaucugc

SEQ ID NO: 604684 - RNA, 19 nt, Artificial Sequence
  Description of Artificial Sequence: Synthetic oligonucleotide
  Sense strand starting at position 2618 of SEQ ID NO: 584987
gcauauauaguagguuuau

SEQ ID NO: 604685 - RNA, 19 nt, Artificial Sequence
  Description of Artificial Sequence: Synthetic oligonucleotide
  Antisense strand to SEQ ID NO: 604684
auaaaccuacuauauaugc

SEQ ID NO: 604686 - RNA, 19 nt, Artificial Sequence
  Description of Artificial Sequence: Synthetic oligonucleotide
  Sense strand starting at position 2651 of SEQ ID NO: 584987
gguauauauggauacuugu

SEQ ID NO: 604687 - RNA, 19 nt, Artificial Sequence
  Description of Artificial Sequence: Synthetic oligonucleotide
  Antisense strand to SEQ ID NO: 604686
acaaguauccauauauacc

SEQ ID NO: 604688 - RNA, 19 nt, Artificial Sequence
  Description of Artificial Sequence: Synthetic oligonucleotide
  Sense strand starting at position 2659 of SEQ ID NO: 584987
uggauacuuguaggcauau

SEQ ID NO: 604689 - RNA, 19 nt, Artificial Sequence
  Description of Artificial Sequence: Synthetic oligonucleotide
  Antisense strand to SEQ ID NO: 604688
auaugccuacaaguaucca

SEQ ID NO: 604690 - RNA, 19 nt, Artificial Sequence
  Description of Artificial Sequence: Synthetic oligonucleotide
  Sense strand starting at position 2660 of SEQ ID NO: 584987
ggauacuuguaggcauaua

SEQ ID NO: 604691 - RNA, 19 nt, Artificial Sequence
  Description of Artificial Sequence: Synthetic oligonucleotide
  Antisense strand to SEQ ID NO: 604690
uauaugccuacaaguaucc

SEQ ID NO: 604692 - RNA, 19 nt, Artificial Sequence
  Description of Artificial Sequence: Synthetic oligonucleotide
  Sense strand starting at position 2721 of SEQ ID NO: 584987
acauauaguguaugcauau

SEQ ID NO: 604693 - RNA, 19 nt, Artificial Sequence
  Description of Artificial Sequence: Synthetic oligonucleotide
  Antisense strand to SEQ ID NO: 604692
auaugcauacacuauaugu

SEQ ID NO: 604694 - RNA, 19 nt, Artificial Sequence
  Description of Artificial Sequence: Synthetic oligonucleotide
  Sense strand starting at position 2782 of SEQ ID NO: 584987
aagaguaaaccaggcauua

SEQ ID NO: 604695 - RNA, 19 nt, Artificial Sequence
  Description of Artificial Sequence: Synthetic oligonucleotide
  Antisense strand to SEQ ID NO: 604694
uaaugccugguuuacucuu

SEQ ID NO: 604696 - RNA, 19 nt, Artificial Sequence
  Description of Artificial Sequence: Synthetic oligonucleotide
  Sense strand starting at position 2873 of SEQ ID NO: 584987
auugauccacaauggugaa

SEQ ID NO: 604697 - RNA, 19 nt, Artificial Sequence
  Description of Artificial Sequence: Synthetic oligonucleotide
  Antisense strand to SEQ ID NO: 604696
uucaccauuguggaucaau

SEQ ID NO: 604698 - RNA, 19 nt, Artificial Sequence
  Description of Artificial Sequence: Synthetic oligonucleotide
  Sense strand starting at position 3049 of SEQ ID NO: 584987
auuaaaguaucacuuguga

SEQ ID NO: 604699 - RNA, 19 nt, Artificial Sequence
  Description of Artificial Sequence: Synthetic oligonucleotide
  Antisense strand to SEQ ID NO: 604698
ucacaagugauacuuuaau

SEQ ID NO: 604700 - RNA, 19 nt, Artificial Sequence
  Description of Artificial Sequence: Synthetic oligonucleotide
  Sense strand starting at position 3119 of SEQ ID NO: 584987
ggcauucauggugaugcaa

SEQ ID NO: 604701 - RNA, 19 nt, Artificial Sequence
  Description of Artificial Sequence: Synthetic oligonucleotide
  Antisense strand to SEQ ID NO: 604700
uugcaucaccaugaaugcc

SEQ ID NO: 604702 - RNA, 19 nt, Artificial Sequence
  Description of Artificial Sequence: Synthetic oligonucleotide
  Sense strand starting at position 3139 of SEQ ID NO: 584987
ccauguuucuaugucagga

SEQ ID NO: 604703 - RNA, 19 nt, Artificial Sequence
  Description of Artificial Sequence: Synthetic oligonucleotide
  Antisense strand to SEQ ID NO: 604702
uccugacauagaaacaugg

SEQ ID NO: 604704 - RNA, 19 nt, Artificial Sequence
  Description of Artificial Sequence: Synthetic oligonucleotide
  Sense strand starting at position 3239 of SEQ ID NO: 584987
gaggauauugcaugaguca

SEQ ID NO: 604705 - RNA, 19 nt, Artificial Sequence
  Description of Artificial Sequence: Synthetic oligonucleotide
  Antisense strand to SEQ ID NO: 604704
ugacucaugcaauauccuc

SEQ ID NO: 604706 - RNA, 19 nt, Artificial Sequence
  Description of Artificial Sequence: Synthetic oligonucleotide
  Sense strand starting at position 3240 of SEQ ID NO: 584987
aggauauugcaugagucac

SEQ ID NO: 604707 - RNA, 19 nt, Artificial Sequence
  Description of Artificial Sequence: Synthetic oligonucleotide
  Antisense strand to SEQ ID NO: 604706
gugacucaugcaauauccu

SEQ ID NO: 604708 - RNA, 19 nt, Artificial Sequence
  Description of Artificial Sequence: Synthetic oligonucleotide
  Sense strand starting at position 3252 of SEQ ID NO: 584987
gagucacgcuacucaaaug

SEQ ID NO: 604709 - RNA, 19 nt, Artificial Sequence
  Description of Artificial Sequence: Synthetic oligonucleotide
  Antisense strand to SEQ ID NO: 604708
cauuugaguagcgugacuc

SEQ ID NO: 604710 - RNA, 19 nt, Artificial Sequence
  Description of Artificial Sequence: Synthetic oligonucleotide
  Sense strand starting at position 3425 of SEQ ID NO: 584987
aggcuuuauuucuuuguca

SEQ ID NO: 604711 - RNA, 19 nt, Artificial Sequence
  Description of Artificial Sequence: Synthetic oligonucleotide
  Antisense strand to SEQ ID NO: 604710
ugacaaagaaauaaagccu

SEQ ID NO: 604712 - RNA, 19 nt, Artificial Sequence
  Description of Artificial Sequence: Synthetic oligonucleotide
  Sense strand starting at position 3426 of SEQ ID NO: 584987
ggcuuuauuucuuugucag

SEQ ID NO: 604713 - RNA, 19 nt, Artificial Sequence
  Description of Artificial Sequence: Synthetic oligonucleotide
  Antisense strand to SEQ ID NO: 604712
cugacaaagaaauaaagcc

SEQ ID NO: 604714 - RNA, 19 nt, Artificial Sequence
  Description of Artificial Sequence: Synthetic oligonucleotide
  Sense strand starting at position 3427 of SEQ ID NO: 584987
gcuuuauuucuuugucaga

SEQ ID NO: 604715 - RNA, 19 nt, Artificial Sequence
  Description of Artificial Sequence: Synthetic oligonucleotide
  Antisense strand to SEQ ID NO: 604714
ucugacaaagaaauaaagc

SEQ ID NO: 604716 - RNA, 19 nt, Artificial Sequence
  Description of Artificial Sequence: Synthetic oligonucleotide
  Sense strand starting at position 3612 of SEQ ID NO: 584987
uaagauauuugagagagcu

SEQ ID NO: 604717 - RNA, 19 nt, Artificial Sequence
  Description of Artificial Sequence: Synthetic oligonucleotide
  Antisense strand to SEQ ID NO: 604716
agcucucucaaauaucuua

SEQ ID NO: 604718 - RNA, 19 nt, Artificial Sequence
  Description of Artificial Sequence: Synthetic oligonucleotide
  Sense strand starting at position 3756 of SEQ ID NO: 584987
cuuauucuguuucuagaua

SEQ ID NO: 604719 - RNA, 19 nt, Artificial Sequence
  Description of Artificial Sequence: Synthetic oligonucleotide
  Antisense strand to SEQ ID NO: 604718
uaucuagaaacagaauaag

SEQ ID NO: 604720 - RNA, 19 nt, Artificial Sequence
  Description of Artificial Sequence: Synthetic oligonucleotide
  Sense strand starting at position 25 of SEQ ID NO: 584988
cucugacaacaaugugaau

SEQ ID NO: 604721 - RNA, 19 nt, Artificial Sequence
  Description of Artificial Sequence: Synthetic oligonucleotide
  Antisense strand to SEQ ID NO: 604720
auucacauuguugucagag

SEQ ID NO: 604722 - RNA, 19 nt, Artificial Sequence
  Description of Artificial Sequence: Synthetic oligonucleotide
  Sense strand starting at position 39 of SEQ ID NO: 584988
ugaauuaugagguaagugu

SEQ ID NO: 604723 - RNA, 19 nt, Artificial Sequence
  Description of Artificial Sequence: Synthetic oligonucleotide
  Antisense strand to SEQ ID NO: 604722
acacuuaccucauaauuca

SEQ ID NO: 604724 - RNA, 19 nt, Artificial Sequence
  Description of Artificial Sequence: Synthetic oligonucleotide
  Sense strand starting at position 43 of SEQ ID NO: 584988
uuaugagguaaguguacua

SEQ ID NO: 604725 - RNA, 19 nt, Artificial Sequence
  Description of Artificial Sequence: Synthetic oligonucleotide
  Antisense strand to SEQ ID NO: 604724
uaguacacuuaccucauaa

SEQ ID NO: 604726 - RNA, 19 nt, Artificial Sequence
  Description of Artificial Sequence: Synthetic oligonucleotide
  Sense strand starting at position 111 of SEQ ID NO: 584988
gcaacuauccaagagcaca

SEQ ID NO: 604727 - RNA, 19 nt, Artificial Sequence
  Description of Artificial Sequence: Synthetic oligonucleotide
  Antisense strand to SEQ ID NO: 604726
ugugcucuuggauaguugc

SEQ ID NO: 604728 - RNA, 19 nt, Artificial Sequence
  Description of Artificial Sequence: Synthetic oligonucleotide
  Sense strand starting at position 301 of SEQ ID NO: 584988
auaaauguucucuguacag

SEQ ID NO: 604729 - RNA, 19 nt, Artificial Sequence
  Description of Artificial Sequence: Synthetic oligonucleotide
  Antisense strand to SEQ ID NO: 604728
cuguacagagaacauuuau

SEQ ID NO: 604730 - RNA, 19 nt, Artificial Sequence
  Description of Artificial Sequence: Synthetic oligonucleotide
  Sense strand starting at position 303 of SEQ ID NO: 584988
aaauguucucuguacagga

SEQ ID NO: 604731 - RNA, 19 nt, Artificial Sequence
  Description of Artificial Sequence: Synthetic oligonucleotide
  Antisense strand to SEQ ID NO: 604730
uccuguacagagaacauuu

SEQ ID NO: 604732 - RNA, 19 nt, Artificial Sequence
  Description of Artificial Sequence: Synthetic oligonucleotide
  Sense strand starting at position 317 of SEQ ID NO: 584988
caggaagucuugguacagu

SEQ ID NO: 604733 - RNA, 19 nt, Artificial Sequence
  Description of Artificial Sequence: Synthetic oligonucleotide
  Antisense strand to SEQ ID NO: 604732
acuguaccaagacuuccug

SEQ ID NO: 604734 - RNA, 19 nt, Artificial Sequence
  Description of Artificial Sequence: Synthetic oligonucleotide
  Sense strand starting at position 373 of SEQ ID NO: 584988
uggagucaugccuauucua

SEQ ID NO: 604735 - RNA, 19 nt, Artificial Sequence
  Description of Artificial Sequence: Synthetic oligonucleotide
  Antisense strand to SEQ ID NO: 604734
uagaauaggcaugacucca

SEQ ID NO: 604736 - RNA, 19 nt, Artificial Sequence
  Description of Artificial Sequence: Synthetic oligonucleotide
  Sense strand starting at position 455 of SEQ ID NO: 584988
uugaacuaauggcuuagaa

SEQ ID NO: 604737 - RNA, 19 nt, Artificial Sequence
  Description of Artificial Sequence: Synthetic oligonucleotide
  Antisense strand to SEQ ID NO: 604736
uucuaagccauuaguucaa

SEQ ID NO: 604738 - RNA, 19 nt, Artificial Sequence
  Description of Artificial Sequence: Synthetic oligonucleotide
  Sense strand starting at position 589 of SEQ ID NO: 584988
agagaauuggcaugaaucc

SEQ ID NO: 604739 - RNA, 19 nt, Artificial Sequence
  Description of Artificial Sequence: Synthetic oligonucleotide
  Antisense strand to SEQ ID NO: 604738
ggauucaugccaauucucu

SEQ ID NO: 604740 - RNA, 19 nt, Artificial Sequence
  Description of Artificial Sequence: Synthetic oligonucleotide
  Sense strand starting at position 596 of SEQ ID NO: 584988
uggcaugaaucccuuaaac

SEQ ID NO: 604741 - RNA, 19 nt, Artificial Sequence
  Description of Artificial Sequence: Synthetic oligonucleotide
  Antisense strand to SEQ ID NO: 604740
guuuaagggauucaugcca

SEQ ID NO: 604742 - RNA, 19 nt, Artificial Sequence
  Description of Artificial Sequence: Synthetic oligonucleotide
  Sense strand starting at position 704 of SEQ ID NO: 584988
ggucaaagauuccuguuau

SEQ ID NO: 604743 - RNA, 19 nt, Artificial Sequence
  Description of Artificial Sequence: Synthetic oligonucleotide
  Antisense strand to SEQ ID NO: 604742
auaacaggaaucuuugacc

SEQ ID NO: 604744 - RNA, 19 nt, Artificial Sequence
  Description of Artificial Sequence: Synthetic oligonucleotide
  Sense strand starting at position 717 of SEQ ID NO: 584988
uguuauuacagcuggaaga

SEQ ID NO: 604745 - RNA, 19 nt, Artificial Sequence
  Description of Artificial Sequence: Synthetic oligonucleotide
  Antisense strand to SEQ ID NO: 604744
ucuuccagcuguaauaaca

SEQ ID NO: 604746 - RNA, 19 nt, Artificial Sequence
  Description of Artificial Sequence: Synthetic oligonucleotide
  Sense strand starting at position 966 of SEQ ID NO: 584988
ucccuuggugaagggaaau

SEQ ID NO: 604747 - RNA, 19 nt, Artificial Sequence
  Description of Artificial Sequence: Synthetic oligonucleotide
  Antisense strand to SEQ ID NO: 604746
auuucccuucaccaaggga

SEQ ID NO: 604748 - RNA, 19 nt, Artificial Sequence
  Description of Artificial Sequence: Synthetic oligonucleotide
  Sense strand starting at position 993 of SEQ ID NO: 584988
gucuucucugauuaaguaa

SEQ ID NO: 604749 - RNA, 19 nt, Artificial Sequence
  Description of Artificial Sequence: Synthetic oligonucleotide
  Antisense strand to SEQ ID NO: 604748
uuacuuaaucagagaagac

SEQ ID NO: 604750 - RNA, 19 nt, Artificial Sequence
  Description of Artificial Sequence: Synthetic oligonucleotide
  Sense strand starting at position 1215 of SEQ ID NO: 584988
uguaguucgcugcuuucua

SEQ ID NO: 604751 - RNA, 19 nt, Artificial Sequence
  Description of Artificial Sequence: Synthetic oligonucleotide
  Antisense strand to SEQ ID NO: 604750
uagaaagcagcgaacuaca

SEQ ID NO: 604752 - RNA, 19 nt, Artificial Sequence
  Description of Artificial Sequence: Synthetic oligonucleotide
  Sense strand starting at position 1217 of SEQ ID NO: 584988
uaguucgcugcuuucuaua

SEQ ID NO: 604753 - RNA, 19 nt, Artificial Sequence
  Description of Artificial Sequence: Synthetic oligonucleotide
  Antisense strand to SEQ ID NO: 604752
uauagaaagcagcgaacua

SEQ ID NO: 604754 - RNA, 19 nt, Artificial Sequence
  Description of Artificial Sequence: Synthetic oligonucleotide
  Sense strand starting at position 1301 of SEQ ID NO: 584988
cagagauucugaguaauug

SEQ ID NO: 604755 - RNA, 19 nt, Artificial Sequence
  Description of Artificial Sequence: Synthetic oligonucleotide
  Antisense strand to SEQ ID NO: 604754
caauuacucagaaucucug

SEQ ID NO: 604756 - RNA, 19 nt, Artificial Sequence
  Description of Artificial Sequence: Synthetic oligonucleotide
  Sense strand starting at position 1305 of SEQ ID NO: 584988
gauucugaguaauuggucu

SEQ ID NO: 604757 - RNA, 19 nt, Artificial Sequence
  Description of Artificial Sequence: Synthetic oligonucleotide
  Antisense strand to SEQ ID NO: 604756
agaccaauuacucagaauc

SEQ ID NO: 604758 - RNA, 19 nt, Artificial Sequence
  Description of Artificial Sequence: Synthetic oligonucleotide
  Sense strand starting at position 1598 of SEQ ID NO: 584988
ugaaguaacuuugcaagac

SEQ ID NO: 604759 - RNA, 19 nt, Artificial Sequence
  Description of Artificial Sequence: Synthetic oligonucleotide
  Antisense strand to SEQ ID NO: 604758
gucuugcaaaguuacuuca

SEQ ID NO: 604760 - RNA, 19 nt, Artificial Sequence
  Description of Artificial Sequence: Synthetic oligonucleotide
  Sense strand starting at position 1602 of SEQ ID NO: 584988
guaacuuugcaagacaaau

SEQ ID NO: 604761 - RNA, 19 nt, Artificial Sequence
  Description of Artificial Sequence: Synthetic oligonucleotide
  Antisense strand to SEQ ID NO: 604760
auuugucuugcaaaguuac

SEQ ID NO: 604762 - RNA, 19 nt, Artificial Sequence
  Description of Artificial Sequence: Synthetic oligonucleotide
  Sense strand starting at position 1673 of SEQ ID NO: 584988
cugcuuuggcgcagggaga

SEQ ID NO: 604763 - RNA, 19 nt, Artificial Sequence
  Description of Artificial Sequence: Synthetic oligonucleotide
  Antisense strand to SEQ ID NO: 604762
ucucccugcgccaaagcag

SEQ ID NO: 604764 - RNA, 19 nt, Artificial Sequence
  Description of Artificial Sequence: Synthetic oligonucleotide
  Sense strand starting at position 2476 of SEQ ID NO: 584988
ggcagugaccuuuaagggu

SEQ ID NO: 604765 - RNA, 19 nt, Artificial Sequence
  Description of Artificial Sequence: Synthetic oligonucleotide
  Antisense strand to SEQ ID NO: 604764
acccuuaaaggucacugcc

SEQ ID NO: 604766 - RNA, 19 nt, Artificial Sequence
  Description of Artificial Sequence: Synthetic oligonucleotide
  Sense strand starting at position 2484 of SEQ ID NO: 584988
ccuuuaaggguuuagcaau

SEQ ID NO: 604767 - RNA, 19 nt, Artificial Sequence
  Description of Artificial Sequence: Synthetic oligonucleotide
  Antisense strand to SEQ ID NO: 604766
auugcuaaacccuuaaagg

SEQ ID NO: 604768 - RNA, 19 nt, Artificial Sequence
  Description of Artificial Sequence: Synthetic oligonucleotide
  Sense strand starting at position 2506 of SEQ ID NO: 584988
aaaggaagccucggaauaa

SEQ ID NO: 604769 - RNA, 19 nt, Artificial Sequence
  Description of Artificial Sequence: Synthetic oligonucleotide
  Antisense strand to SEQ ID NO: 604768
uuauuccgaggcuuccuuu

SEQ ID NO: 604770 - RNA, 19 nt, Artificial Sequence
  Description of Artificial Sequence: Synthetic oligonucleotide
  Sense strand starting at position 2524 of SEQ ID NO: 584988
aggugacagccuuaugaca

SEQ ID NO: 604771 - RNA, 19 nt, Artificial Sequence
  Description of Artificial Sequence: Synthetic oligonucleotide
  Antisense strand to SEQ ID NO: 604770
ugucauaaggcugucaccu

SEQ ID NO: 604772 - RNA, 19 nt, Artificial Sequence
  Description of Artificial Sequence: Synthetic oligonucleotide
  Sense strand starting at position 2761 of SEQ ID NO: 584988
ugucccagaccuuaucaua

SEQ ID NO: 604773 - RNA, 19 nt, Artificial Sequence
  Description of Artificial Sequence: Synthetic oligonucleotide
  Antisense strand to SEQ ID NO: 604772
uaugauaaggucugggaca

SEQ ID NO: 604774 - RNA, 19 nt, Artificial Sequence
  Description of Artificial Sequence: Synthetic oligonucleotide
  Sense strand starting at position 2964 of SEQ ID NO: 584988
caagguaugcucuaugagg

SEQ ID NO: 604775 - RNA, 19 nt, Artificial Sequence
  Description of Artificial Sequence: Synthetic oligonucleotide
  Antisense strand to SEQ ID NO: 604774
ccucauagagcauaccuug

SEQ ID NO: 604776 - RNA, 19 nt, Artificial Sequence
  Description of Artificial Sequence: Synthetic oligonucleotide
  Sense strand starting at position 2972 of SEQ ID NO: 584988
gcucuaugagggcaggaaa

SEQ ID NO: 604777 - RNA, 19 nt, Artificial Sequence
  Description of Artificial Sequence: Synthetic oligonucleotide
  Antisense strand to SEQ ID NO: 604776
uuuccugcccucauagagc

SEQ ID NO: 604778 - RNA, 19 nt, Artificial Sequence
  Description of Artificial Sequence: Synthetic oligonucleotide
  Sense strand starting at position 3063 of SEQ ID NO: 584988
uggcuaaaugaauguguga

SEQ ID NO: 604779 - RNA, 19 nt, Artificial Sequence
  Description of Artificial Sequence: Synthetic oligonucleotide
  Antisense strand to SEQ ID NO: 604778
ucacacauucauuuagcca

SEQ ID NO: 604780 - RNA, 19 nt, Artificial Sequence
  Description of Artificial Sequence: Synthetic oligonucleotide
  Sense strand starting at position 3065 of SEQ ID NO: 584988
gcuaaaugaaugugugaau

SEQ ID NO: 604781 - RNA, 19 nt, Artificial Sequence
  Description of Artificial Sequence: Synthetic oligonucleotide
  Antisense strand to SEQ ID NO: 604780
auucacacauucauuuagc

SEQ ID NO: 604782 - RNA, 19 nt, Artificial Sequence
  Description of Artificial Sequence: Synthetic oligonucleotide
  Sense strand starting at position 3066 of SEQ ID NO: 584988
cuaaaugaaugugugaauu

SEQ ID NO: 604783 - RNA, 19 nt, Artificial Sequence
  Description of Artificial Sequence: Synthetic oligonucleotide
  Antisense strand to SEQ ID NO: 604782
aauucacacauucauuuag

SEQ ID NO: 604784 - RNA, 19 nt, Artificial Sequence
  Description of Artificial Sequence: Synthetic oligonucleotide
  Sense strand starting at position 3237 of SEQ ID NO: 584988
aggagaacauugcuuugga

SEQ ID NO: 604785 - RNA, 19 nt, Artificial Sequence
  Description of Artificial Sequence: Synthetic oligonucleotide
  Antisense strand to SEQ ID NO: 604784
uccaaagcaauguucuccu

SEQ ID NO: 604786 - RNA, 19 nt, Artificial Sequence
  Description of Artificial Sequence: Synthetic oligonucleotide
  Sense strand starting at position 3238 of SEQ ID NO: 584988
ggagaacauugcuuuggau

SEQ ID NO: 604787 - RNA, 19 nt, Artificial Sequence
  Description of Artificial Sequence: Synthetic oligonucleotide
  Antisense strand to SEQ ID NO: 604786
auccaaagcaauguucucc

SEQ ID NO: 604788 - RNA, 19 nt, Artificial Sequence
  Description of Artificial Sequence: Synthetic oligonucleotide
  Sense strand starting at position 3417 of SEQ ID NO: 584988
agauucuuguguccagaua

SEQ ID NO: 604789 - RNA, 19 nt, Artificial Sequence
  Description of Artificial Sequence: Synthetic oligonucleotide
  Antisense strand to SEQ ID NO: 604788
uaucuggacacaagaaucu

SEQ ID NO: 604790 - RNA, 19 nt, Artificial Sequence
  Description of Artificial Sequence: Synthetic oligonucleotide
  Sense strand starting at position 3418 of SEQ ID NO: 584988
gauucuuguguccagauau

SEQ ID NO: 604791 - RNA, 19 nt, Artificial Sequence
  Description of Artificial Sequence: Synthetic oligonucleotide
  Antisense strand to SEQ ID NO: 604790
auaucuggacacaagaauc

SEQ ID NO: 604792 - RNA, 19 nt, Artificial Sequence
  Description of Artificial Sequence: Synthetic oligonucleotide
  Sense strand starting at position 3491 of SEQ ID NO: 584988
uuagacguuucuccaaaga

SEQ ID NO: 604793 - RNA, 19 nt, Artificial Sequence
  Description of Artificial Sequence: Synthetic oligonucleotide
  Antisense strand to SEQ ID NO: 604792
ucuuuggagaaacgucuaa

SEQ ID NO: 604794 - RNA, 19 nt, Artificial Sequence
  Description of Artificial Sequence: Synthetic oligonucleotide
  Sense strand starting at position 3516 of SEQ ID NO: 584988
acuaauggccaaugagaac

SEQ ID NO: 604795 - RNA, 19 nt, Artificial Sequence
  Description of Artificial Sequence: Synthetic oligonucleotide
  Antisense strand to SEQ ID NO: 604794
guucucauuggccauuagu

SEQ ID NO: 604796 - RNA, 19 nt, Artificial Sequence
  Description of Artificial Sequence: Synthetic oligonucleotide
  Sense strand starting at position 3919 of SEQ ID NO: 584988
guuauaucgcuacaaugga

SEQ ID NO: 604797 - RNA, 19 nt, Artificial Sequence
  Description of Artificial Sequence: Synthetic oligonucleotide
  Antisense strand to SEQ ID NO: 604796
uccauuguagcgauauaac

SEQ ID NO: 604798 - RNA, 19 nt, Artificial Sequence
  Description of Artificial Sequence: Synthetic oligonucleotide
  Sense strand starting at position 3973 of SEQ ID NO: 584988
augcuaaaucaugguugaa

SEQ ID NO: 604799 - RNA, 19 nt, Artificial Sequence
  Description of Artificial Sequence: Synthetic oligonucleotide
  Antisense strand to SEQ ID NO: 604798
uucaaccaugauuuagcau

SEQ ID NO: 604800 - RNA, 19 nt, Artificial Sequence
  Description of Artificial Sequence: Synthetic oligonucleotide
  Sense strand starting at position 44 of SEQ ID NO: 584989
auggaauuguguucuccuu

SEQ ID NO: 604801 - RNA, 19 nt, Artificial Sequence
  Description of Artificial Sequence: Synthetic oligonucleotide
  Antisense strand to SEQ ID NO: 604800
aaggagaacacaauuccau

SEQ ID NO: 604802 - RNA, 19 nt, Artificial Sequence
  Description of Artificial Sequence: Synthetic oligonucleotide
  Sense strand starting at position 46 of SEQ ID NO: 584989
ggaauuguguucuccuuac

SEQ ID NO: 604803 - RNA, 19 nt, Artificial Sequence
  Description of Artificial Sequence: Synthetic oligonucleotide
  Antisense strand to SEQ ID NO: 604802
guaaggagaacacaauucc

SEQ ID NO: 604804 - RNA, 19 nt, Artificial Sequence
  Description of Artificial Sequence: Synthetic oligonucleotide
  Sense strand starting at position 50 of SEQ ID NO: 584989
uuguguucuccuuacacaa

SEQ ID NO: 604805 - RNA, 19 nt, Artificial Sequence
  Description of Artificial Sequence: Synthetic oligonucleotide
  Antisense strand to SEQ ID NO: 604804
uuguguaaggagaacacaa

SEQ ID NO: 604806 - RNA, 19 nt, Artificial Sequence
  Description of Artificial Sequence: Synthetic oligonucleotide
  Sense strand starting at position 105 of SEQ ID NO: 584989
acagaaggcuucuuggaaa

SEQ ID NO: 604807 - RNA, 19 nt, Artificial Sequence
  Description of Artificial Sequence: Synthetic oligonucleotide
  Antisense strand to SEQ ID NO: 604806
uuuccaagaagccuucugu

SEQ ID NO: 604808 - RNA, 19 nt, Artificial Sequence
  Description of Artificial Sequence: Synthetic oligonucleotide
  Sense strand starting at position 132 of SEQ ID NO: 584989
cucagugccuugcuaagau

SEQ ID NO: 604809 - RNA, 19 nt, Artificial Sequence
  Description of Artificial Sequence: Synthetic oligonucleotide
  Antisense strand to SEQ ID NO: 604808
aucuuagcaaggcacugag

SEQ ID NO: 604810 - RNA, 19 nt, Artificial Sequence
  Description of Artificial Sequence: Synthetic oligonucleotide
  Sense strand starting at position 862 of SEQ ID NO: 584989
ccugaucauuucugggaau

SEQ ID NO: 604811 - RNA, 19 nt, Artificial Sequence
  Description of Artificial Sequence: Synthetic oligonucleotide
  Antisense strand to SEQ ID NO: 604810
auucccagaaaugaucagg

SEQ ID NO: 604812 - RNA, 19 nt, Artificial Sequence
  Description of Artificial Sequence: Synthetic oligonucleotide
  Sense strand starting at position 863 of SEQ ID NO: 584989
cugaucauuucugggaaua

SEQ ID NO: 604813 - RNA, 19 nt, Artificial Sequence
  Description of Artificial Sequence: Synthetic oligonucleotide
  Antisense strand to SEQ ID NO: 604812
uauucccagaaaugaucag

SEQ ID NO: 604814 - RNA, 19 nt, Artificial Sequence
  Description of Artificial Sequence: Synthetic oligonucleotide
  Sense strand starting at position 865 of SEQ ID NO: 584989
gaucauuucugggaauaag

SEQ ID NO: 604815 - RNA, 19 nt, Artificial Sequence
  Description of Artificial Sequence: Synthetic oligonucleotide
  Antisense strand to SEQ ID NO: 604814
cuuauucccagaaaugauc

SEQ ID NO: 604816 - RNA, 19 nt, Artificial Sequence
  Description of Artificial Sequence: Synthetic oligonucleotide
  Sense strand starting at position 879 of SEQ ID NO: 584989
auaagugaucuuugaaagu

SEQ ID NO: 604817 - RNA, 19 nt, Artificial Sequence
  Description of Artificial Sequence: Synthetic oligonucleotide
  Antisense strand to SEQ ID NO: 604816
acuuucaaagaucacuuau

SEQ ID NO: 604818 - RNA, 19 nt, Artificial Sequence
  Description of Artificial Sequence: Synthetic oligonucleotide
  Sense strand starting at position 1079 of SEQ ID NO: 584989
aauguaaggugaucaaauc

SEQ ID NO: 604819 - RNA, 19 nt, Artificial Sequence
  Description of Artificial Sequence: Synthetic oligonucleotide
  Antisense strand to SEQ ID NO: 604818
gauuugaucaccuuacauu

SEQ ID NO: 604820 - RNA, 19 nt, Artificial Sequence
  Description of Artificial Sequence: Synthetic oligonucleotide
  Sense strand starting at position 1460 of SEQ ID NO: 584989
aggaacucauguuuccaga

SEQ ID NO: 604821 - RNA, 19 nt, Artificial Sequence
  Description of Artificial Sequence: Synthetic oligonucleotide
  Antisense strand to SEQ ID NO: 604820
ucuggaaacaugaguuccu

SEQ ID NO: 604822 - RNA, 19 nt, Artificial Sequence
  Description of Artificial Sequence: Synthetic oligonucleotide
  Sense strand starting at position 1648 of SEQ ID NO: 584989
gucugucuucgguuucuca

SEQ ID NO: 604823 - RNA, 19 nt, Artificial Sequence
  Description of Artificial Sequence: Synthetic oligonucleotide
  Antisense strand to SEQ ID NO: 604822
ugagaaaccgaagacagac

SEQ ID NO: 604824 - RNA, 19 nt, Artificial Sequence
  Description of Artificial Sequence: Synthetic oligonucleotide
  Sense strand starting at position 1801 of SEQ ID NO: 584989
ccacucuuuccaggguuau

SEQ ID NO: 604825 - RNA, 19 nt, Artificial Sequence
  Description of Artificial Sequence: Synthetic oligonucleotide
  Antisense strand to SEQ ID NO: 604824
auaacccuggaaagagugg

SEQ ID NO: 604826 - RNA, 19 nt, Artificial Sequence
  Description of Artificial Sequence: Synthetic oligonucleotide
  Sense strand starting at position 1811 of SEQ ID NO: 584989
caggguuauugucuuacca

SEQ ID NO: 604827 - RNA, 19 nt, Artificial Sequence
  Description of Artificial Sequence: Synthetic oligonucleotide
  Antisense strand to SEQ ID NO: 604826
ugguaagacaauaacccug

SEQ ID NO: 604828 - RNA, 19 nt, Artificial Sequence
  Description of Artificial Sequence: Synthetic oligonucleotide
  Sense strand starting at position 1865 of SEQ ID NO: 584989
ugccaacagucccuaugaa

SEQ ID NO: 604829 - RNA, 19 nt, Artificial Sequence
  Description of Artificial Sequence: Synthetic oligonucleotide
  Antisense strand to SEQ ID NO: 604828
uucauagggacuguuggca

SEQ ID NO: 604830 - RNA, 19 nt, Artificial Sequence
  Description of Artificial Sequence: Synthetic oligonucleotide
  Sense strand starting at position 1926 of SEQ ID NO: 584989
acuguuacccuaggacuau

SEQ ID NO: 604831 - RNA, 19 nt, Artificial Sequence
  Description of Artificial Sequence: Synthetic oligonucleotide
  Antisense strand to SEQ ID NO: 604830
auaguccuaggguaacagu

SEQ ID NO: 604832 - RNA, 19 nt, Artificial Sequence
  Description of Artificial Sequence: Synthetic oligonucleotide
  Sense strand starting at position 2011 of SEQ ID NO: 584989
gaggcaucucgugacacuu

SEQ ID NO: 604833 - RNA, 19 nt, Artificial Sequence
  Description of Artificial Sequence: Synthetic oligonucleotide
  Antisense strand to SEQ ID NO: 604832
aagugucacgagaugccuc

SEQ ID NO: 604834 - RNA, 19 nt, Artificial Sequence
  Description of Artificial Sequence: Synthetic oligonucleotide
  Sense strand starting at position 2102 of SEQ ID NO: 584989
cuaacaagguuauacugaa

SEQ ID NO: 604835 - RNA, 19 nt, Artificial Sequence
  Description of Artificial Sequence: Synthetic oligonucleotide
  Antisense strand to SEQ ID NO: 604834
uucaguauaaccuuguuag

SEQ ID NO: 604836 - RNA, 19 nt, Artificial Sequence
  Description of Artificial Sequence: Synthetic oligonucleotide
  Sense strand starting at position 2231 of SEQ ID NO: 584989
uuagaucugcuauaggagu

SEQ ID NO: 604837 - RNA, 19 nt, Artificial Sequence
  Description of Artificial Sequence: Synthetic oligonucleotide
  Antisense strand to SEQ ID NO: 604836
acuccuauagcagaucuaa

SEQ ID NO: 604838 - RNA, 19 nt, Artificial Sequence
  Description of Artificial Sequence: Synthetic oligonucleotide
  Sense strand starting at position 2237 of SEQ ID NO: 584989
cugcuauaggaguacaaug

SEQ ID NO: 604839 - RNA, 19 nt, Artificial Sequence
  Description of Artificial Sequence: Synthetic oligonucleotide
  Antisense strand to SEQ ID NO: 604838
cauuguacuccuauagcag

SEQ ID NO: 604840 - RNA, 19 nt, Artificial Sequence
  Description of Artificial Sequence: Synthetic oligonucleotide
  Sense strand starting at position 2414 of SEQ ID NO: 584989
agcuguguguccuugagag

SEQ ID NO: 604841 - RNA, 19 nt, Artificial Sequence
  Description of Artificial Sequence: Synthetic oligonucleotide
  Antisense strand to SEQ ID NO: 604840
cucucaaggacacacagcu

SEQ ID NO: 604842 - RNA, 19 nt, Artificial Sequence
  Description of Artificial Sequence: Synthetic oligonucleotide
  Sense strand starting at position 2766 of SEQ ID NO: 584989
ucucuaccucauggauaga

SEQ ID NO: 604843 - RNA, 19 nt, Artificial Sequence
  Description of Artificial Sequence: Synthetic oligonucleotide
  Antisense strand to SEQ ID NO: 604842
ucuauccaugagguagaga

SEQ ID NO: 604844 - RNA, 19 nt, Artificial Sequence
  Description of Artificial Sequence: Synthetic oligonucleotide
  Sense strand starting at position 2896 of SEQ ID NO: 584989
cuccguuaacaaggugaga

SEQ ID NO: 604845 - RNA, 19 nt, Artificial Sequence
  Description of Artificial Sequence: Synthetic oligonucleotide
  Antisense strand to SEQ ID NO: 604844
ucucaccuuguuaacggag

SEQ ID NO: 604846 - RNA, 19 nt, Artificial Sequence
  Description of Artificial Sequence: Synthetic oligonucleotide
  Sense strand starting at position 2943 of SEQ ID NO: 584989
agaggcauguuaucagcau

SEQ ID NO: 604847 - RNA, 19 nt, Artificial Sequence
  Description of Artificial Sequence: Synthetic oligonucleotide
  Antisense strand to SEQ ID NO: 604846
augcugauaacaugccucu

SEQ ID NO: 604848 - RNA, 19 nt, Artificial Sequence
  Description of Artificial Sequence: Synthetic oligonucleotide
  Sense strand starting at position 3308 of SEQ ID NO: 584989
gaguaacugggaugauagu

SEQ ID NO: 604849 - RNA, 19 nt, Artificial Sequence
  Description of Artificial Sequence: Synthetic oligonucleotide
  Antisense strand to SEQ ID NO: 604848
acuaucaucccaguuacuc

SEQ ID NO: 604850 - RNA, 19 nt, Artificial Sequence
  Description of Artificial Sequence: Synthetic oligonucleotide
  Sense strand starting at position 3314 of SEQ ID NO: 584989
cugggaugauagucaugca

SEQ ID NO: 604851 - RNA, 19 nt, Artificial Sequence
  Description of Artificial Sequence: Synthetic oligonucleotide
  Antisense strand to SEQ ID NO: 604850
ugcaugacuaucaucccag

SEQ ID NO: 604852 - RNA, 19 nt, Artificial Sequence
  Description of Artificial Sequence: Synthetic oligonucleotide
  Sense strand starting at position 3338 of SEQ ID NO: 584989
gcaccuggcuucuugaaau

SEQ ID NO: 604853 - RNA, 19 nt, Artificial Sequence
  Description of Artificial Sequence: Synthetic oligonucleotide
  Antisense strand to SEQ ID NO: 604852
auuucaagaagccaggugc

SEQ ID NO: 604854 - RNA, 19 nt, Artificial Sequence
  Description of Artificial Sequence: Synthetic oligonucleotide
  Sense strand starting at position 3616 of SEQ ID NO: 584989
ucuacaagucccugucauu

SEQ ID NO: 604855 - RNA, 19 nt, Artificial Sequence
  Description of Artificial Sequence: Synthetic oligonucleotide
  Antisense strand to SEQ ID NO: 604854
aaugacagggacuuguaga

SEQ ID NO: 604856 - RNA, 19 nt, Artificial Sequence
  Description of Artificial Sequence: Synthetic oligonucleotide
  Sense strand starting at position 3673 of SEQ ID NO: 584989
ccauccuggcucugugaca

SEQ ID NO: 604857 - RNA, 19 nt, Artificial Sequence
  Description of Artificial Sequence: Synthetic oligonucleotide
  Antisense strand to SEQ ID NO: 604856
ugucacagagccaggaugg

SEQ ID NO: 604858 - RNA, 19 nt, Artificial Sequence
  Description of Artificial Sequence: Synthetic oligonucleotide
  Sense strand starting at position 3730 of SEQ ID NO: 584989
ucagucagggcucaugaga

SEQ ID NO: 604859 - RNA, 19 nt, Artificial Sequence
  Description of Artificial Sequence: Synthetic oligonucleotide
  Antisense strand to SEQ ID NO: 604858
ucucaugagcccugacuga

SEQ ID NO: 604860 - RNA, 19 nt, Artificial Sequence
  Description of Artificial Sequence: Synthetic oligonucleotide
  Sense strand starting at position 3735 of SEQ ID NO: 584989
cagggcucaugagaaagaa

SEQ ID NO: 604861 - RNA, 19 nt, Artificial Sequence
  Description of Artificial Sequence: Synthetic oligonucleotide
  Antisense strand to SEQ ID NO: 604860
uucuuucucaugagcccug

SEQ ID NO: 604862 - RNA, 19 nt, Artificial Sequence
  Description of Artificial Sequence: Synthetic oligonucleotide
  Sense strand starting at position 3744 of SEQ ID NO: 584989
ugagaaagaagcggucuau

SEQ ID NO: 604863 - RNA, 19 nt, Artificial Sequence
  Description of Artificial Sequence: Synthetic oligonucleotide
  Antisense strand to SEQ ID NO: 604862
auagaccgcuucuuucuca

SEQ ID NO: 604864 - RNA, 19 nt, Artificial Sequence
  Description of Artificial Sequence: Synthetic oligonucleotide
  Sense strand starting at position 3748 of SEQ ID NO: 584989
aaagaagcggucuauuaac

SEQ ID NO: 604865 - RNA, 19 nt, Artificial Sequence
  Description of Artificial Sequence: Synthetic oligonucleotide
  Antisense strand to SEQ ID NO: 604864
guuaauagaccgcuucuuu

SEQ ID NO: 604866 - RNA, 19 nt, Artificial Sequence
  Description of Artificial Sequence: Synthetic oligonucleotide
  Sense strand starting at position 3754 of SEQ ID NO: 584989
gcggucuauuaaccucaga

SEQ ID NO: 604867 - RNA, 19 nt, Artificial Sequence
  Description of Artificial Sequence: Synthetic oligonucleotide
  Antisense strand to SEQ ID NO: 604866
ucugagguuaauagaccgc

SEQ ID NO: 604868 - RNA, 19 nt, Artificial Sequence
  Description of Artificial Sequence: Synthetic oligonucleotide
  Sense strand starting at position 3759 of SEQ ID NO: 584989
cuauuaaccucagaggaga

SEQ ID NO: 604869 - RNA, 19 nt, Artificial Sequence
  Description of Artificial Sequence: Synthetic oligonucleotide
  Antisense strand to SEQ ID NO: 604868
ucuccucugagguuaauag

SEQ ID NO: 604870 - RNA, 19 nt, Artificial Sequence
  Description of Artificial Sequence: Synthetic oligonucleotide
  Sense strand starting at position 3796 of SEQ ID NO: 584989
uccugacauccugaaguca

SEQ ID NO: 604871 - RNA, 19 nt, Artificial Sequence
  Description of Artificial Sequence: Synthetic oligonucleotide
  Antisense strand to SEQ ID NO: 604870
ugacuucaggaugucagga

SEQ ID NO: 604872 - RNA, 19 nt, Artificial Sequence
  Description of Artificial Sequence: Synthetic oligonucleotide
  Sense strand starting at position 3805 of SEQ ID NO: 584989
ccugaagucacaggaggua

SEQ ID NO: 604873 - RNA, 19 nt, Artificial Sequence
  Description of Artificial Sequence: Synthetic oligonucleotide
  Antisense strand to SEQ ID NO: 604872
uaccuccugugacuucagg

SEQ ID NO: 604874 - RNA, 19 nt, Artificial Sequence
  Description of Artificial Sequence: Synthetic oligonucleotide
  Sense strand starting at position 3864 of SEQ ID NO: 584989
gggacuguccauugaagcu

SEQ ID NO: 604875 - RNA, 19 nt, Artificial Sequence
  Description of Artificial Sequence: Synthetic oligonucleotide
  Antisense strand to SEQ ID NO: 604874
agcuucaauggacaguccc

SEQ ID NO: 604876 - RNA, 19 nt, Artificial Sequence
  Description of Artificial Sequence: Synthetic oligonucleotide
  Sense strand starting at position 3880 of SEQ ID NO: 584989
gcuauuuauuugcaugauu

SEQ ID NO: 604877 - RNA, 19 nt, Artificial Sequence
  Description of Artificial Sequence: Synthetic oligonucleotide
  Antisense strand to SEQ ID NO: 604876
aaucaugcaaauaaauagc

SEQ ID NO: 604878 - RNA, 19 nt, Artificial Sequence
  Description of Artificial Sequence: Synthetic oligonucleotide
  Sense strand starting at position 3952 of SEQ ID NO: 584989
uaaugaaguguuugggaaa

SEQ ID NO: 604879 - RNA, 19 nt, Artificial Sequence
  Description of Artificial Sequence: Synthetic oligonucleotide
  Antisense strand to SEQ ID NO: 604878
uuucccaaacacuucauua

SEQ ID NO: 604880 - RNA, 19 nt, Artificial Sequence
  Description of Artificial Sequence: Synthetic oligonucleotide
  Sense strand starting at position 398 of SEQ ID NO: 584990
gucucagaccuccaagcaa

SEQ ID NO: 604881 - RNA, 19 nt, Artificial Sequence
  Description of Artificial Sequence: Synthetic oligonucleotide
  Antisense strand to SEQ ID NO: 604880
uugcuuggaggucugagac

SEQ ID NO: 604882 - RNA, 19 nt, Artificial Sequence
  Description of Artificial Sequence: Synthetic oligonucleotide
  Sense strand starting at position 515 of SEQ ID NO: 584990
cucugcagagugcauuaaa

SEQ ID NO: 604883 - RNA, 19 nt, Artificial Sequence
  Description of Artificial Sequence: Synthetic oligonucleotide
  Antisense strand to SEQ ID NO: 604882
uuuaaugcacucugcagag

SEQ ID NO: 604884 - RNA, 19 nt, Artificial Sequence
  Description of Artificial Sequence: Synthetic oligonucleotide
  Sense strand starting at position 694 of SEQ ID NO: 584990
aucuuuguccaguagaaug

SEQ ID NO: 604885 - RNA, 19 nt, Artificial Sequence
  Description of Artificial Sequence: Synthetic oligonucleotide
  Antisense strand to SEQ ID NO: 604884
cauucuacuggacaaagau

SEQ ID NO: 604886 - RNA, 19 nt, Artificial Sequence
  Description of Artificial Sequence: Synthetic oligonucleotide
  Sense strand starting at position 721 of SEQ ID NO: 584990
gggcguacacuugaggaaa

SEQ ID NO: 604887 - RNA, 19 nt, Artificial Sequence
  Description of Artificial Sequence: Synthetic oligonucleotide
  Antisense strand to SEQ ID NO: 604886
uuuccucaaguguacgccc

SEQ ID NO: 604888 - RNA, 19 nt, Artificial Sequence
  Description of Artificial Sequence: Synthetic oligonucleotide
  Sense strand starting at position 944 of SEQ ID NO: 584990
uggcgucugaaauaguaua

SEQ ID NO: 604889 - RNA, 19 nt, Artificial Sequence
  Description of Artificial Sequence: Synthetic oligonucleotide
  Antisense strand to SEQ ID NO: 604888
uauacuauuucagacgcca

SEQ ID NO: 604890 - RNA, 19 nt, Artificial Sequence
  Description of Artificial Sequence: Synthetic oligonucleotide
  Sense strand starting at position 949 of SEQ ID NO: 584990
ucugaaauaguauaaacgu

SEQ ID NO: 604891 - RNA, 19 nt, Artificial Sequence
  Description of Artificial Sequence: Synthetic oligonucleotide
  Antisense strand to SEQ ID NO: 604890
acguuuauacuauuucaga

SEQ ID NO: 604892 - RNA, 19 nt, Artificial Sequence
  Description of Artificial Sequence: Synthetic oligonucleotide
  Sense strand starting at position 962 of SEQ ID NO: 584990
aaacguguugcuuagggaa

SEQ ID NO: 604893 - RNA, 19 nt, Artificial Sequence
  Description of Artificial Sequence: Synthetic oligonucleotide
  Antisense strand to SEQ ID NO: 604892
uucccuaagcaacacguuu

SEQ ID NO: 604894 - RNA, 19 nt, Artificial Sequence
  Description of Artificial Sequence: Synthetic oligonucleotide
  Sense strand starting at position 1189 of SEQ ID NO: 584990
ugcugaaaugcugauggaa

SEQ ID NO: 604895 - RNA, 19 nt, Artificial Sequence
  Description of Artificial Sequence: Synthetic oligonucleotide
  Antisense strand to SEQ ID NO: 604894
uuccaucagcauuucagca

SEQ ID NO: 604896 - RNA, 19 nt, Artificial Sequence
  Description of Artificial Sequence: Synthetic oligonucleotide
  Sense strand starting at position 2218 of SEQ ID NO: 584990
gccaguagaacucaagugu

SEQ ID NO: 604897 - RNA, 19 nt, Artificial Sequence
  Description of Artificial Sequence: Synthetic oligonucleotide
  Antisense strand to SEQ ID NO: 604896
acacuugaguucuacuggc

SEQ ID NO: 604898 - RNA, 19 nt, Artificial Sequence
  Description of Artificial Sequence: Synthetic oligonucleotide
  Sense strand starting at position 2225 of SEQ ID NO: 584990
gaacucaaguguucuugga

SEQ ID NO: 604899 - RNA, 19 nt, Artificial Sequence
  Description of Artificial Sequence: Synthetic oligonucleotide
  Antisense strand to SEQ ID NO: 604898
uccaagaacacuugaguuc

SEQ ID NO: 604900 - RNA, 19 nt, Artificial Sequence
  Description of Artificial Sequence: Synthetic oligonucleotide
  Sense strand starting at position 2227 of SEQ ID NO: 584990
acucaaguguucuuggaca

SEQ ID NO: 604901 - RNA, 19 nt, Artificial Sequence
  Description of Artificial Sequence: Synthetic oligonucleotide
  Antisense strand to SEQ ID NO: 604900
uguccaagaacacuugagu

SEQ ID NO: 604902 - RNA, 19 nt, Artificial Sequence
  Description of Artificial Sequence: Synthetic oligonucleotide
  Sense strand starting at position 2238 of SEQ ID NO: 584990
cuuggacauguuugagagu

SEQ ID NO: 604903 - RNA, 19 nt, Artificial Sequence
  Description of Artificial Sequence: Synthetic oligonucleotide
  Antisense strand to SEQ ID NO: 604902
acucucaaacauguccaag

SEQ ID NO: 604904 - RNA, 19 nt, Artificial Sequence
  Description of Artificial Sequence: Synthetic oligonucleotide
  Sense strand starting at position 2362 of SEQ ID NO: 584990
aguguacuucccuaauauu

SEQ ID NO: 604905 - RNA, 19 nt, Artificial Sequence
  Description of Artificial Sequence: Synthetic oligonucleotide
  Antisense strand to SEQ ID NO: 604904
aauauuagggaaguacacu

SEQ ID NO: 604906 - RNA, 19 nt, Artificial Sequence
  Description of Artificial Sequence: Synthetic oligonucleotide
  Sense strand starting at position 2406 of SEQ ID NO: 584990
ggcucucuuagcgaaagag

SEQ ID NO: 604907 - RNA, 19 nt, Artificial Sequence
  Description of Artificial Sequence: Synthetic oligonucleotide
  Antisense strand to SEQ ID NO: 604906
cucuuucgcuaagagagcc

SEQ ID NO: 604908 - RNA, 19 nt, Artificial Sequence
  Description of Artificial Sequence: Synthetic oligonucleotide
  Sense strand starting at position 2479 of SEQ ID NO: 584990
gaggguugagcuggguaga

SEQ ID NO: 604909 - RNA, 19 nt, Artificial Sequence
  Description of Artificial Sequence: Synthetic oligonucleotide
  Antisense strand to SEQ ID NO: 604908
ucuacccagcucaacccuc

SEQ ID NO: 604910 - RNA, 19 nt, Artificial Sequence
  Description of Artificial Sequence: Synthetic oligonucleotide
  Sense strand starting at position 2480 of SEQ ID NO: 584990
aggguugagcuggguagaa

SEQ ID NO: 604911 - RNA, 19 nt, Artificial Sequence
  Description of Artificial Sequence: Synthetic oligonucleotide
  Antisense strand to SEQ ID NO: 604910
uucuacccagcucaacccu

SEQ ID NO: 604912 - RNA, 19 nt, Artificial Sequence
  Description of Artificial Sequence: Synthetic oligonucleotide
  Sense strand starting at position 2482 of SEQ ID NO: 584990
gguugagcuggguagaagu

SEQ ID NO: 604913 - RNA, 19 nt, Artificial Sequence
  Description of Artificial Sequence: Synthetic oligonucleotide
  Antisense strand to SEQ ID NO: 604912
acuucuacccagcucaacc

SEQ ID NO: 604914 - RNA, 19 nt, Artificial Sequence
  Description of Artificial Sequence: Synthetic oligonucleotide
  Sense strand starting at position 2623 of SEQ ID NO: 584990
guaguagacagucagguaa

SEQ ID NO: 604915 - RNA, 19 nt, Artificial Sequence
  Description of Artificial Sequence: Synthetic oligonucleotide
  Antisense strand to SEQ ID NO: 604914
uuaccugacugucuacuac

SEQ ID NO: 604916 - RNA, 19 nt, Artificial Sequence
  Description of Artificial Sequence: Synthetic oligonucleotide
  Sense strand starting at position 2627 of SEQ ID NO: 584990
uagacagucagguaagguu

SEQ ID NO: 604917 - RNA, 19 nt, Artificial Sequence
  Description of Artificial Sequence: Synthetic oligonucleotide
  Antisense strand to SEQ ID NO: 604916
aaccuuaccugacugucua

SEQ ID NO: 604918 - RNA, 19 nt, Artificial Sequence
  Description of Artificial Sequence: Synthetic oligonucleotide
  Sense strand starting at position 2807 of SEQ ID NO: 584990
uuucucugauuauuaggua

SEQ ID NO: 604919 - RNA, 19 nt, Artificial Sequence
  Description of Artificial Sequence: Synthetic oligonucleotide
  Antisense strand to SEQ ID NO: 604918
uaccuaauaaucagagaaa

SEQ ID NO: 604920 - RNA, 19 nt, Artificial Sequence
  Description of Artificial Sequence: Synthetic oligonucleotide
  Sense strand starting at position 2811 of SEQ ID NO: 584990
ucugauuauuagguauaga

SEQ ID NO: 604921 - RNA, 19 nt, Artificial Sequence
  Description of Artificial Sequence: Synthetic oligonucleotide
  Antisense strand to SEQ ID NO: 604920
ucuauaccuaauaaucaga

SEQ ID NO: 604922 - RNA, 19 nt, Artificial Sequence
  Description of Artificial Sequence: Synthetic oligonucleotide
  Sense strand starting at position 2971 of SEQ ID NO: 584990
gucacaaaccaauaagugu

SEQ ID NO: 604923 - RNA, 19 nt, Artificial Sequence
  Description of Artificial Sequence: Synthetic oligonucleotide
  Antisense strand to SEQ ID NO: 604922
acacuuauugguuugugac

SEQ ID NO: 604924 - RNA, 19 nt, Artificial Sequence
  Description of Artificial Sequence: Synthetic oligonucleotide
  Sense strand starting at position 2988 of SEQ ID NO: 584990
gucagagucuggguugaaa

SEQ ID NO: 604925 - RNA, 19 nt, Artificial Sequence
  Description of Artificial Sequence: Synthetic oligonucleotide
  Antisense strand to SEQ ID NO: 604924
uuucaacccagacucugac

SEQ ID NO: 604926 - RNA, 19 nt, Artificial Sequence
  Description of Artificial Sequence: Synthetic oligonucleotide
  Sense strand starting at position 2999 of SEQ ID NO: 584990
gguugaaacccagggcuau

SEQ ID NO: 604927 - RNA, 19 nt, Artificial Sequence
  Description of Artificial Sequence: Synthetic oligonucleotide
  Antisense strand to SEQ ID NO: 604926
auagcccuggguuucaacc

SEQ ID NO: 604928 - RNA, 19 nt, Artificial Sequence
  Description of Artificial Sequence: Synthetic oligonucleotide
  Sense strand starting at position 3000 of SEQ ID NO: 584990
guugaaacccagggcuauu

SEQ ID NO: 604929 - RNA, 19 nt, Artificial Sequence
  Description of Artificial Sequence: Synthetic oligonucleotide
  Antisense strand to SEQ ID NO: 604928
aauagcccuggguuucaac

SEQ ID NO: 604930 - RNA, 19 nt, Artificial Sequence
  Description of Artificial Sequence: Synthetic oligonucleotide
  Sense strand starting at position 3027 of SEQ ID NO: 584990
cagggaauauaugcuguaa

SEQ ID NO: 604931 - RNA, 19 nt, Artificial Sequence
  Description of Artificial Sequence: Synthetic oligonucleotide
  Antisense strand to SEQ ID NO: 604930
uuacagcauauauucccug

SEQ ID NO: 604932 - RNA, 19 nt, Artificial Sequence
  Description of Artificial Sequence: Synthetic oligonucleotide
  Sense strand starting at position 3031 of SEQ ID NO: 584990
gaauauaugcuguaagauu

SEQ ID NO: 604933 - RNA, 19 nt, Artificial Sequence
  Description of Artificial Sequence: Synthetic oligonucleotide
  Antisense strand to SEQ ID NO: 604932
aaucuuacagcauauauuc

SEQ ID NO: 604934 - RNA, 19 nt, Artificial Sequence
  Description of Artificial Sequence: Synthetic oligonucleotide
  Sense strand starting at position 3144 of SEQ ID NO: 584990
agaagauauucuccgugga

SEQ ID NO: 604935 - RNA, 19 nt, Artificial Sequence
  Description of Artificial Sequence: Synthetic oligonucleotide
  Antisense strand to SEQ ID NO: 604934
uccacggagaauaucuucu

SEQ ID NO: 604936 - RNA, 19 nt, Artificial Sequence
  Description of Artificial Sequence: Synthetic oligonucleotide
  Sense strand starting at position 3145 of SEQ ID NO: 584990
gaagauauucuccguggag

SEQ ID NO: 604937 - RNA, 19 nt, Artificial Sequence
  Description of Artificial Sequence: Synthetic oligonucleotide
  Antisense strand to SEQ ID NO: 604936
cuccacggagaauaucuuc

SEQ ID NO: 604938 - RNA, 19 nt, Artificial Sequence
  Description of Artificial Sequence: Synthetic oligonucleotide
  Sense strand starting at position 3286 of SEQ ID NO: 584990
agauguaacuuucuagaca

SEQ ID NO: 604939 - RNA, 19 nt, Artificial Sequence
  Description of Artificial Sequence: Synthetic oligonucleotide
  Antisense strand to SEQ ID NO: 604938
ugucuagaaaguuacaucu

SEQ ID NO: 604940 - RNA, 19 nt, Artificial Sequence
  Description of Artificial Sequence: Synthetic oligonucleotide
  Sense strand starting at position 3311 of SEQ ID NO: 584990
auccaaauguguucugaca

SEQ ID NO: 604941 - RNA, 19 nt, Artificial Sequence
  Description of Artificial Sequence: Synthetic oligonucleotide
  Antisense strand to SEQ ID NO: 604940
ugucagaacacauuuggau

SEQ ID NO: 604942 - RNA, 19 nt, Artificial Sequence
  Description of Artificial Sequence: Synthetic oligonucleotide
  Sense strand starting at position 3346 of SEQ ID NO: 584990
gcagguguuacaggauaaa

SEQ ID NO: 604943 - RNA, 19 nt, Artificial Sequence
  Description of Artificial Sequence: Synthetic oligonucleotide
  Antisense strand to SEQ ID NO: 604942
uuuauccuguaacaccugc

SEQ ID NO: 604944 - RNA, 19 nt, Artificial Sequence
  Description of Artificial Sequence: Synthetic oligonucleotide
  Sense strand starting at position 3498 of SEQ ID NO: 584990
gguaucucuuaauuaagga

SEQ ID NO: 604945 - RNA, 19 nt, Artificial Sequence
  Description of Artificial Sequence: Synthetic oligonucleotide
  Antisense strand to SEQ ID NO: 604944
uccuuaauuaagagauacc

SEQ ID NO: 604946 - RNA, 19 nt, Artificial Sequence
  Description of Artificial Sequence: Synthetic oligonucleotide
  Sense strand starting at position 3516 of SEQ ID NO: 584990
agcuuucugcuaggcauuu

SEQ ID NO: 604947 - RNA, 19 nt, Artificial Sequence
  Description of Artificial Sequence: Synthetic oligonucleotide
  Antisense strand to SEQ ID NO: 604946
aaaugccuagcagaaagcu

SEQ ID NO: 604948 - RNA, 19 nt, Artificial Sequence
  Description of Artificial Sequence: Synthetic oligonucleotide
  Sense strand starting at position 3549 of SEQ ID NO: 584990
auuucuuugucauugaugu

SEQ ID NO: 604949 - RNA, 19 nt, Artificial Sequence
  Description of Artificial Sequence: Synthetic oligonucleotide
  Antisense strand to SEQ ID NO: 604948
acaucaaugacaaagaaau

SEQ ID NO: 604950 - RNA, 19 nt, Artificial Sequence
  Description of Artificial Sequence: Synthetic oligonucleotide
  Sense strand starting at position 3931 of SEQ ID NO: 584990
auguaauucucucuggaua

SEQ ID NO: 604951 - RNA, 19 nt, Artificial Sequence
  Description of Artificial Sequence: Synthetic oligonucleotide
  Antisense strand to SEQ ID NO: 604950
uauccagagagaauuacau

SEQ ID NO: 604952 - RNA, 19 nt, Artificial Sequence
  Description of Artificial Sequence: Synthetic oligonucleotide
  Sense strand starting at position 3932 of SEQ ID NO: 584990
uguaauucucucuggauaa

SEQ ID NO: 604953 - RNA, 19 nt, Artificial Sequence
  Description of Artificial Sequence: Synthetic oligonucleotide
  Antisense strand to SEQ ID NO: 604952
uuauccagagagaauuaca

SEQ ID NO: 604954 - RNA, 19 nt, Artificial Sequence
  Description of Artificial Sequence: Synthetic oligonucleotide
  Sense strand starting at position 3953 of SEQ ID NO: 584990
ugguacaccuguuuaaaua

SEQ ID NO: 604955 - RNA, 19 nt, Artificial Sequence
  Description of Artificial Sequence: Synthetic oligonucleotide
  Antisense strand to SEQ ID NO: 604954
uauuuaaacagguguacca

SEQ ID NO: 604956 - RNA, 19 nt, Artificial Sequence
  Description of Artificial Sequence: Synthetic oligonucleotide
  Sense strand starting at position 3954 of SEQ ID NO: 584990
gguacaccuguuuaaauau

SEQ ID NO: 604957 - RNA, 19 nt, Artificial Sequence
  Description of Artificial Sequence: Synthetic oligonucleotide
  Antisense strand to SEQ ID NO: 604956
auauuuaaacagguguacc

SEQ ID NO: 604958 - RNA, 19 nt, Artificial Sequence
  Description of Artificial Sequence: Synthetic oligonucleotide
  Sense strand starting at position 3980 of SEQ ID NO: 584990
gcaauuguggcacaggaua

SEQ ID NO: 604959 - RNA, 19 nt, Artificial Sequence
  Description of Artificial Sequence: Synthetic oligonucleotide
  Antisense strand to SEQ ID NO: 604958
uauccugugccacaauugc

SEQ ID NO: 604960 - RNA, 19 nt, Artificial Sequence
  Description of Artificial Sequence: Synthetic oligonucleotide
  Sense strand starting at position 92 of SEQ ID NO: 584991
ucuggauugcucuaagguc

SEQ ID NO: 604961 - RNA, 19 nt, Artificial Sequence
  Description of Artificial Sequence: Synthetic oligonucleotide
  Antisense strand to SEQ ID NO: 604960
gaccuuagagcaauccaga

SEQ ID NO: 604962 - RNA, 19 nt, Artificial Sequence
  Description of Artificial Sequence: Synthetic oligonucleotide
  Sense strand starting at position 140 of SEQ ID NO: 584991
cccacauucuauguagaca

SEQ ID NO: 604963 - RNA, 19 nt, Artificial Sequence
  Description of Artificial Sequence: Synthetic oligonucleotide
  Antisense strand to SEQ ID NO: 604962
ugucuacauagaauguggg

SEQ ID NO: 604964 - RNA, 19 nt, Artificial Sequence
  Description of Artificial Sequence: Synthetic oligonucleotide
  Sense strand starting at position 161 of SEQ ID NO: 584991
ugccaaguguuauuucuua

SEQ ID NO: 604965 - RNA, 19 nt, Artificial Sequence
  Description of Artificial Sequence: Synthetic oligonucleotide
  Antisense strand to SEQ ID NO: 604964
uaagaaauaacacuuggca

SEQ ID NO: 604966 - RNA, 19 nt, Artificial Sequence
  Description of Artificial Sequence: Synthetic oligonucleotide
  Sense strand starting at position 227 of SEQ ID NO: 584991
gggauagucuaccucagga

SEQ ID NO: 604967 - RNA, 19 nt, Artificial Sequence
  Description of Artificial Sequence: Synthetic oligonucleotide
  Antisense strand to SEQ ID NO: 604966
uccugagguagacuauccc

SEQ ID NO: 604968 - RNA, 19 nt, Artificial Sequence
  Description of Artificial Sequence: Synthetic oligonucleotide
  Sense strand starting at position 667 of SEQ ID NO: 584991
ucgaccaacugcuucuaaa

SEQ ID NO: 604969 - RNA, 19 nt, Artificial Sequence
  Description of Artificial Sequence: Synthetic oligonucleotide
  Antisense strand to SEQ ID NO: 604968
uuuagaagcaguuggucga

SEQ ID NO: 604970 - RNA, 19 nt, Artificial Sequence
  Description of Artificial Sequence: Synthetic oligonucleotide
  Sense strand starting at position 724 of SEQ ID NO: 584991
ucaagaaguuuccuugauc

SEQ ID NO: 604971 - RNA, 19 nt, Artificial Sequence
  Description of Artificial Sequence: Synthetic oligonucleotide
  Antisense strand to SEQ ID NO: 604970
gaucaaggaaacuucuuga

SEQ ID NO: 604972 - RNA, 19 nt, Artificial Sequence
  Description of Artificial Sequence: Synthetic oligonucleotide
  Sense strand starting at position 727 of SEQ ID NO: 584991
agaaguuuccuugauccca

SEQ ID NO: 604973 - RNA, 19 nt, Artificial Sequence
  Description of Artificial Sequence: Synthetic oligonucleotide
  Antisense strand to SEQ ID NO: 604972
ugggaucaaggaaacuucu

SEQ ID NO: 604974 - RNA, 19 nt, Artificial Sequence
  Description of Artificial Sequence: Synthetic oligonucleotide
  Sense strand starting at position 1000 of SEQ ID NO: 584991
uggcuccuuccaggaaaca

SEQ ID NO: 604975 - RNA, 19 nt, Artificial Sequence
  Description of Artificial Sequence: Synthetic oligonucleotide
  Antisense strand to SEQ ID NO: 604974
uguuuccuggaaggagcca

SEQ ID NO: 604976 - RNA, 19 nt, Artificial Sequence
  Description of Artificial Sequence: Synthetic oligonucleotide
  Sense strand starting at position 1056 of SEQ ID NO: 584991
uuuccauguggguacaaau

SEQ ID NO: 604977 - RNA, 19 nt, Artificial Sequence
  Description of Artificial Sequence: Synthetic oligonucleotide
  Antisense strand to SEQ ID NO: 604976
auuuguacccacauggaaa

SEQ ID NO: 604978 - RNA, 19 nt, Artificial Sequence
  Description of Artificial Sequence: Synthetic oligonucleotide
  Sense strand starting at position 1182 of SEQ ID NO: 584991
uccugaucuuagguuuauc

SEQ ID NO: 604979 - RNA, 19 nt, Artificial Sequence
  Description of Artificial Sequence: Synthetic oligonucleotide
  Antisense strand to SEQ ID NO: 604978
gauaaaccuaagaucagga

SEQ ID NO: 604980 - RNA, 19 nt, Artificial Sequence
  Description of Artificial Sequence: Synthetic oligonucleotide
  Sense strand starting at position 1185 of SEQ ID NO: 584991
ugaucuuagguuuauccua

SEQ ID NO: 604981 - RNA, 19 nt, Artificial Sequence
  Description of Artificial Sequence: Synthetic oligonucleotide
  Antisense strand to SEQ ID NO: 604980
uaggauaaaccuaagauca

SEQ ID NO: 604982 - RNA, 19 nt, Artificial Sequence
  Description of Artificial Sequence: Synthetic oligonucleotide
  Sense strand starting at position 1284 of SEQ ID NO: 584991
uuaagaguuccaugugaaa

SEQ ID NO: 604983 - RNA, 19 nt, Artificial Sequence
  Description of Artificial Sequence: Synthetic oligonucleotide
  Antisense strand to SEQ ID NO: 604982
uuucacauggaacucuuaa

SEQ ID NO: 604984 - RNA, 19 nt, Artificial Sequence
  Description of Artificial Sequence: Synthetic oligonucleotide
  Sense strand starting at position 1293 of SEQ ID NO: 584991
ccaugugaaagaugagcuu

SEQ ID NO: 604985 - RNA, 19 nt, Artificial Sequence
  Description of Artificial Sequence: Synthetic oligonucleotide
  Antisense strand to SEQ ID NO: 604984
aagcucaucuuucacaugg

SEQ ID NO: 604986 - RNA, 19 nt, Artificial Sequence
  Description of Artificial Sequence: Synthetic oligonucleotide
  Sense strand starting at position 1302 of SEQ ID NO: 584991
agaugagcuuaaguuucua

SEQ ID NO: 604987 - RNA, 19 nt, Artificial Sequence
  Description of Artificial Sequence: Synthetic oligonucleotide
  Antisense strand to SEQ ID NO: 604986
uagaaacuuaagcucaucu

SEQ ID NO: 604988 - RNA, 19 nt, Artificial Sequence
  Description of Artificial Sequence: Synthetic oligonucleotide
  Sense strand starting at position 1362 of SEQ ID NO: 584991
cacugagcagugcauuauu

SEQ ID NO: 604989 - RNA, 19 nt, Artificial Sequence
  Description of Artificial Sequence: Synthetic oligonucleotide
  Antisense strand to SEQ ID NO: 604988
aauaaugcacugcucagug

SEQ ID NO: 604990 - RNA, 19 nt, Artificial Sequence
  Description of Artificial Sequence: Synthetic oligonucleotide
  Sense strand starting at position 1515 of SEQ ID NO: 584991
cuacgaggcgugaguuauu

SEQ ID NO: 604991 - RNA, 19 nt, Artificial Sequence
  Description of Artificial Sequence: Synthetic oligonucleotide
  Antisense strand to SEQ ID NO: 604990
aauaacucacgccucguag

SEQ ID NO: 604992 - RNA, 19 nt, Artificial Sequence
  Description of Artificial Sequence: Synthetic oligonucleotide
  Sense strand starting at position 1547 of SEQ ID NO: 584991
aggaaagaugcaugaccuu

SEQ ID NO: 604993 - RNA, 19 nt, Artificial Sequence
  Description of Artificial Sequence: Synthetic oligonucleotide
  Antisense strand to SEQ ID NO: 604992
aaggucaugcaucuuuccu

SEQ ID NO: 604994 - RNA, 19 nt, Artificial Sequence
  Description of Artificial Sequence: Synthetic oligonucleotide
  Sense strand starting at position 1704 of SEQ ID NO: 584991
cgagguuuacaauggagag

SEQ ID NO: 604995 - RNA, 19 nt, Artificial Sequence
  Description of Artificial Sequence: Synthetic oligonucleotide
  Antisense strand to SEQ ID NO: 604994
cucuccauuguaaaccucg

SEQ ID NO: 604996 - RNA, 19 nt, Artificial Sequence
  Description of Artificial Sequence: Synthetic oligonucleotide
  Sense strand starting at position 1764 of SEQ ID NO: 584991
ucgcgagguccagagacaa

SEQ ID NO: 604997 - RNA, 19 nt, Artificial Sequence
  Description of Artificial Sequence: Synthetic oligonucleotide
  Antisense strand to SEQ ID NO: 604996
uugucucuggaccucgcga

SEQ ID NO: 604998 - RNA, 19 nt, Artificial Sequence
  Description of Artificial Sequence: Synthetic oligonucleotide
  Sense strand starting at position 2364 of SEQ ID NO: 584991
auuaaacugcaagauguuu

SEQ ID NO: 604999 - RNA, 19 nt, Artificial Sequence
  Description of Artificial Sequence: Synthetic oligonucleotide
  Antisense strand to SEQ ID NO: 604998
aaacaucuugcaguuuaau

SEQ ID NO: 605000 - RNA, 19 nt, Artificial Sequence
  Description of Artificial Sequence: Synthetic oligonucleotide
  Sense strand starting at position 2409 of SEQ ID NO: 584991
acuuuauugcuauaggaca

SEQ ID NO: 605001 - RNA, 19 nt, Artificial Sequence
  Description of Artificial Sequence: Synthetic oligonucleotide
  Antisense strand to SEQ ID NO: 605000
uguccuauagcaauaaagu

SEQ ID NO: 605002 - RNA, 19 nt, Artificial Sequence
  Description of Artificial Sequence: Synthetic oligonucleotide
  Sense strand starting at position 2464 of SEQ ID NO: 584991
ccauuacuucgugcugugu

SEQ ID NO: 605003 - RNA, 19 nt, Artificial Sequence
  Description of Artificial Sequence: Synthetic oligonucleotide
  Antisense strand to SEQ ID NO: 605002
acacagcacgaaguaaugg

SEQ ID NO: 605004 - RNA, 19 nt, Artificial Sequence
  Description of Artificial Sequence: Synthetic oligonucleotide
  Sense strand starting at position 2589 of SEQ ID NO: 584991
gggagcacuucuuccucaa

SEQ ID NO: 605005 - RNA, 19 nt, Artificial Sequence
  Description of Artificial Sequence: Synthetic oligonucleotide
  Antisense strand to SEQ ID NO: 605004
uugaggaagaagugcuccc

SEQ ID NO: 605006 - RNA, 19 nt, Artificial Sequence
  Description of Artificial Sequence: Synthetic oligonucleotide
  Sense strand starting at position 2593 of SEQ ID NO: 584991
gcacuucuuccucaaggga

SEQ ID NO: 605007 - RNA, 19 nt, Artificial Sequence
  Description of Artificial Sequence: Synthetic oligonucleotide
  Antisense strand to SEQ ID NO: 605006
ucccuugaggaagaagugc

SEQ ID NO: 605008 - RNA, 19 nt, Artificial Sequence
  Description of Artificial Sequence: Synthetic oligonucleotide
  Sense strand starting at position 2596 of SEQ ID NO: 584991
cuucuuccucaagggaaga

SEQ ID NO: 605009 - RNA, 19 nt, Artificial Sequence
  Description of Artificial Sequence: Synthetic oligonucleotide
  Antisense strand to SEQ ID NO: 605008
ucuucccuugaggaagaag

SEQ ID NO: 605010 - RNA, 19 nt, Artificial Sequence
  Description of Artificial Sequence: Synthetic oligonucleotide
  Sense strand starting at position 2694 of SEQ ID NO: 584991
uaucuuguacaggguauau

SEQ ID NO: 605011 - RNA, 19 nt, Artificial Sequence
  Description of Artificial Sequence: Synthetic oligonucleotide
  Antisense strand to SEQ ID NO: 605010
auauacccuguacaagaua

SEQ ID NO: 605012 - RNA, 19 nt, Artificial Sequence
  Description of Artificial Sequence: Synthetic oligonucleotide
  Sense strand starting at position 2768 of SEQ ID NO: 584991
uaggaacagugaucaguaa

SEQ ID NO: 605013 - RNA, 19 nt, Artificial Sequence
  Description of Artificial Sequence: Synthetic oligonucleotide
  Antisense strand to SEQ ID NO: 605012
uuacugaucacuguuccua

SEQ ID NO: 605014 - RNA, 19 nt, Artificial Sequence
  Description of Artificial Sequence: Synthetic oligonucleotide
  Sense strand starting at position 2806 of SEQ ID NO: 584991
caaagucuuucuuugggua

SEQ ID NO: 605015 - RNA, 19 nt, Artificial Sequence
  Description of Artificial Sequence: Synthetic oligonucleotide
  Antisense strand to SEQ ID NO: 605014
uacccaaagaaagacuuug

SEQ ID NO: 605016 - RNA, 19 nt, Artificial Sequence
  Description of Artificial Sequence: Synthetic oligonucleotide
  Sense strand starting at position 2807 of SEQ ID NO: 584991
aaagucuuucuuuggguaa

SEQ ID NO: 605017 - RNA, 19 nt, Artificial Sequence
  Description of Artificial Sequence: Synthetic oligonucleotide
  Antisense strand to SEQ ID NO: 605016
uuacccaaagaaagacuuu

SEQ ID NO: 605018 - RNA, 19 nt, Artificial Sequence
  Description of Artificial Sequence: Synthetic oligonucleotide
  Sense strand starting at position 2810 of SEQ ID NO: 584991
gucuuucuuuggguaagaa

SEQ ID NO: 605019 - RNA, 19 nt, Artificial Sequence
  Description of Artificial Sequence: Synthetic oligonucleotide
  Antisense strand to SEQ ID NO: 605018
uucuuacccaaagaaagac

SEQ ID NO: 605020 - RNA, 19 nt, Artificial Sequence
  Description of Artificial Sequence: Synthetic oligonucleotide
  Sense strand starting at position 2811 of SEQ ID NO: 584991
ucuuucuuuggguaagaac

SEQ ID NO: 605021 - RNA, 19 nt, Artificial Sequence
  Description of Artificial Sequence: Synthetic oligonucleotide
  Antisense strand to SEQ ID NO: 605020
guucuuacccaaagaaaga

SEQ ID NO: 605022 - RNA, 19 nt, Artificial Sequence
  Description of Artificial Sequence: Synthetic oligonucleotide
  Sense strand starting at position 2914 of SEQ ID NO: 584991
uagcgaaauuuaccgcuca

SEQ ID NO: 605023 - RNA, 19 nt, Artificial Sequence
  Description of Artificial Sequence: Synthetic oligonucleotide
  Antisense strand to SEQ ID NO: 605022
ugagcgguaaauuucgcua

SEQ ID NO: 605024 - RNA, 19 nt, Artificial Sequence
  Description of Artificial Sequence: Synthetic oligonucleotide
  Sense strand starting at position 3458 of SEQ ID NO: 584991
aauaaaguucuaggagcuu

SEQ ID NO: 605025 - RNA, 19 nt, Artificial Sequence
  Description of Artificial Sequence: Synthetic oligonucleotide
  Antisense strand to SEQ ID NO: 605024
aagcuccuagaacuuuauu

SEQ ID NO: 605026 - RNA, 19 nt, Artificial Sequence
  Description of Artificial Sequence: Synthetic oligonucleotide
  Sense strand starting at position 3478 of SEQ ID NO: 584991
auauguacuuucuuugaag

SEQ ID NO: 605027 - RNA, 19 nt, Artificial Sequence
  Description of Artificial Sequence: Synthetic oligonucleotide
  Antisense strand to SEQ ID NO: 605026
cuucaaagaaaguacauau

SEQ ID NO: 605028 - RNA, 19 nt, Artificial Sequence
  Description of Artificial Sequence: Synthetic oligonucleotide
  Sense strand starting at position 3601 of SEQ ID NO: 584991
acaggucuggcccaaauaa

SEQ ID NO: 605029 - RNA, 19 nt, Artificial Sequence
  Description of Artificial Sequence: Synthetic oligonucleotide
  Antisense strand to SEQ ID NO: 605028
uuauuugggccagaccugu

SEQ ID NO: 605030 - RNA, 19 nt, Artificial Sequence
  Description of Artificial Sequence: Synthetic oligonucleotide
  Sense strand starting at position 3630 of SEQ ID NO: 584991
cucauaguauuucucgcua

SEQ ID NO: 605031 - RNA, 19 nt, Artificial Sequence
  Description of Artificial Sequence: Synthetic oligonucleotide
  Antisense strand to SEQ ID NO: 605030
uagcgagaaauacuaugag

SEQ ID NO: 605032 - RNA, 19 nt, Artificial Sequence
  Description of Artificial Sequence: Synthetic oligonucleotide
  Sense strand starting at position 3687 of SEQ ID NO: 584991
cuaagugguauuggaaagu

SEQ ID NO: 605033 - RNA, 19 nt, Artificial Sequence
  Description of Artificial Sequence: Synthetic oligonucleotide
  Antisense strand to SEQ ID NO: 605032
acuuuccaauaccacuuag

SEQ ID NO: 605034 - RNA, 19 nt, Artificial Sequence
  Description of Artificial Sequence: Synthetic oligonucleotide
  Sense strand starting at position 3728 of SEQ ID NO: 584991
auggccauuguuggagaua

SEQ ID NO: 605035 - RNA, 19 nt, Artificial Sequence
  Description of Artificial Sequence: Synthetic oligonucleotide
  Antisense strand to SEQ ID NO: 605034
uaucuccaacaauggccau

SEQ ID NO: 605036 - RNA, 19 nt, Artificial Sequence
  Description of Artificial Sequence: Synthetic oligonucleotide
  Sense strand starting at position 3751 of SEQ ID NO: 584991
cccagacuauuauuguuau

SEQ ID NO: 605037 - RNA, 19 nt, Artificial Sequence
  Description of Artificial Sequence: Synthetic oligonucleotide
  Antisense strand to SEQ ID NO: 605036
auaacaauaauagucuggg

SEQ ID NO: 605038 - RNA, 19 nt, Artificial Sequence
  Description of Artificial Sequence: Synthetic oligonucleotide
  Sense strand starting at position 3754 of SEQ ID NO: 584991
agacuauuauuguuauggu

SEQ ID NO: 605039 - RNA, 19 nt, Artificial Sequence
  Description of Artificial Sequence: Synthetic oligonucleotide
  Antisense strand to SEQ ID NO: 605038
accauaacaauaauagucu

SEQ ID NO: 605040 - RNA, 19 nt, Artificial Sequence
  Description of Artificial Sequence: Synthetic oligonucleotide
  Sense strand starting at position 979 of SEQ ID NO: 584992
cuggcaugauuccuucuca

SEQ ID NO: 605041 - RNA, 19 nt, Artificial Sequence
  Description of Artificial Sequence: Synthetic oligonucleotide
  Antisense strand to SEQ ID NO: 605040
ugagaaggaaucaugccag

SEQ ID NO: 605042 - RNA, 19 nt, Artificial Sequence
  Description of Artificial Sequence: Synthetic oligonucleotide
  Sense strand starting at position 980 of SEQ ID NO: 584992
uggcaugauuccuucucaa

SEQ ID NO: 605043 - RNA, 19 nt, Artificial Sequence
  Description of Artificial Sequence: Synthetic oligonucleotide
  Antisense strand to SEQ ID NO: 605042
uugagaaggaaucaugcca

SEQ ID NO: 605044 - RNA, 19 nt, Artificial Sequence
  Description of Artificial Sequence: Synthetic oligonucleotide
  Sense strand starting at position 1266 of SEQ ID NO: 584992
gcacaaucgccugacggaa

SEQ ID NO: 605045 - RNA, 19 nt, Artificial Sequence
  Description of Artificial Sequence: Synthetic oligonucleotide
  Antisense strand to SEQ ID NO: 605044
uuccgucaggcgauugugc

SEQ ID NO: 605046 - RNA, 19 nt, Artificial Sequence
  Description of Artificial Sequence: Synthetic oligonucleotide
  Sense strand starting at position 1280 of SEQ ID NO: 584992
cggaaauaacacugcacuu

SEQ ID NO: 605047 - RNA, 19 nt, Artificial Sequence
  Description of Artificial Sequence: Synthetic oligonucleotide
  Antisense strand to SEQ ID NO: 605046
aagugcaguguuauuuccg

SEQ ID NO: 605048 - RNA, 19 nt, Artificial Sequence
  Description of Artificial Sequence: Synthetic oligonucleotide
  Sense strand starting at position 1430 of SEQ ID NO: 584992
gaugcuuccgggugucaga

SEQ ID NO: 605049 - RNA, 19 nt, Artificial Sequence
  Description of Artificial Sequence: Synthetic oligonucleotide
  Antisense strand to SEQ ID NO: 605048
ucugacacccggaagcauc

SEQ ID NO: 605050 - RNA, 19 nt, Artificial Sequence
  Description of Artificial Sequence: Synthetic oligonucleotide
  Sense strand starting at position 1891 of SEQ ID NO: 584992
uugcguaugcauucacgaa

SEQ ID NO: 605051 - RNA, 19 nt, Artificial Sequence
  Description of Artificial Sequence: Synthetic oligonucleotide
  Antisense strand to SEQ ID NO: 605050
uucgugaaugcauacgcaa

SEQ ID NO: 605052 - RNA, 19 nt, Artificial Sequence
  Description of Artificial Sequence: Synthetic oligonucleotide
  Sense strand starting at position 1912 of SEQ ID NO: 584992
uaaaucuuuccgggccgaa

SEQ ID NO: 605053 - RNA, 19 nt, Artificial Sequence
  Description of Artificial Sequence: Synthetic oligonucleotide
  Antisense strand to SEQ ID NO: 605052
uucggcccggaaagauuua

SEQ ID NO: 605054 - RNA, 19 nt, Artificial Sequence
  Description of Artificial Sequence: Synthetic oligonucleotide
  Sense strand starting at position 2093 of SEQ ID NO: 584992
aacgauuuaugagacgaau

SEQ ID NO: 605055 - RNA, 19 nt, Artificial Sequence
  Description of Artificial Sequence: Synthetic oligonucleotide
  Antisense strand to SEQ ID NO: 605054
auucgucucauaaaucguu

SEQ ID NO: 605056 - RNA, 19 nt, Artificial Sequence
  Description of Artificial Sequence: Synthetic oligonucleotide
  Sense strand starting at position 2099 of SEQ ID NO: 584992
uuaugagacgaauguaaua

SEQ ID NO: 605057 - RNA, 19 nt, Artificial Sequence
  Description of Artificial Sequence: Synthetic oligonucleotide
  Antisense strand to SEQ ID NO: 605056
uauuacauucgucucauaa

SEQ ID NO: 605058 - RNA, 19 nt, Artificial Sequence
  Description of Artificial Sequence: Synthetic oligonucleotide
  Sense strand starting at position 2139 of SEQ ID NO: 584992
agaccaggcuaucaaagaa

SEQ ID NO: 605059 - RNA, 19 nt, Artificial Sequence
  Description of Artificial Sequence: Synthetic oligonucleotide
  Antisense strand to SEQ ID NO: 605058
uucuuugauagccuggucu

SEQ ID NO: 605060 - RNA, 19 nt, Artificial Sequence
  Description of Artificial Sequence: Synthetic oligonucleotide
  Sense strand starting at position 2335 of SEQ ID NO: 584992
cauuacuguuccuuguguu

SEQ ID NO: 605061 - RNA, 19 nt, Artificial Sequence
  Description of Artificial Sequence: Synthetic oligonucleotide
  Antisense strand to SEQ ID NO: 605060
aacacaaggaacaguaaug

SEQ ID NO: 605062 - RNA, 19 nt, Artificial Sequence
  Description of Artificial Sequence: Synthetic oligonucleotide
  Sense strand starting at position 2339 of SEQ ID NO: 584992
acuguuccuuguguugaga

SEQ ID NO: 605063 - RNA, 19 nt, Artificial Sequence
  Description of Artificial Sequence: Synthetic oligonucleotide
  Antisense strand to SEQ ID NO: 605062
ucucaacacaaggaacagu

SEQ ID NO: 605064 - RNA, 19 nt, Artificial Sequence
  Description of Artificial Sequence: Synthetic oligonucleotide
  Sense strand starting at position 2342 of SEQ ID NO: 584992
guuccuuguguugagaaua

SEQ ID NO: 605065 - RNA, 19 nt, Artificial Sequence
  Description of Artificial Sequence: Synthetic oligonucleotide
  Antisense strand to SEQ ID NO: 605064
uauucucaacacaaggaac

SEQ ID NO: 605066 - RNA, 19 nt, Artificial Sequence
  Description of Artificial Sequence: Synthetic oligonucleotide
  Sense strand starting at position 2350 of SEQ ID NO: 584992
uguugagaauaugcuguaa

SEQ ID NO: 605067 - RNA, 19 nt, Artificial Sequence
  Description of Artificial Sequence: Synthetic oligonucleotide
  Antisense strand to SEQ ID NO: 605066
uuacagcauauucucaaca

SEQ ID NO: 605068 - RNA, 19 nt, Artificial Sequence
  Description of Artificial Sequence: Synthetic oligonucleotide
  Sense strand starting at position 2362 of SEQ ID NO: 584992
gcuguaagagcugugucga

SEQ ID NO: 605069 - RNA, 19 nt, Artificial Sequence
  Description of Artificial Sequence: Synthetic oligonucleotide
  Antisense strand to SEQ ID NO: 605068
ucgacacagcucuuacagc

SEQ ID NO: 605070 - RNA, 19 nt, Artificial Sequence
  Description of Artificial Sequence: Synthetic oligonucleotide
  Sense strand starting at position 2431 of SEQ ID NO: 584992
gcaagaaguucuuccacag

SEQ ID NO: 605071 - RNA, 19 nt, Artificial Sequence
  Description of Artificial Sequence: Synthetic oligonucleotide
  Antisense strand to SEQ ID NO: 605070
cuguggaagaacuucuugc

SEQ ID NO: 605072 - RNA, 19 nt, Artificial Sequence
  Description of Artificial Sequence: Synthetic oligonucleotide
  Sense strand starting at position 2532 of SEQ ID NO: 584992
aagucuugcugucccagau

SEQ ID NO: 605073 - RNA, 19 nt, Artificial Sequence
  Description of Artificial Sequence: Synthetic oligonucleotide
  Antisense strand to SEQ ID NO: 605072
aucugggacagcaagacuu

SEQ ID NO: 605074 - RNA, 19 nt, Artificial Sequence
  Description of Artificial Sequence: Synthetic oligonucleotide
  Sense strand starting at position 2657 of SEQ ID NO: 584992
aguguuuauuucuuguacu

SEQ ID NO: 605075 - RNA, 19 nt, Artificial Sequence
  Description of Artificial Sequence: Synthetic oligonucleotide
  Antisense strand to SEQ ID NO: 605074
aguacaagaaauaaacacu

SEQ ID NO: 605076 - RNA, 19 nt, Artificial Sequence
  Description of Artificial Sequence: Synthetic oligonucleotide
  Sense strand starting at position 2670 of SEQ ID NO: 584992
uguacuuacccucaaguau

SEQ ID NO: 605077 - RNA, 19 nt, Artificial Sequence
  Description of Artificial Sequence: Synthetic oligonucleotide
  Antisense strand to SEQ ID NO: 605076
auacuugaggguaaguaca

SEQ ID NO: 605078 - RNA, 19 nt, Artificial Sequence
  Description of Artificial Sequence: Synthetic oligonucleotide
  Sense strand starting at position 2941 of SEQ ID NO: 584992
ucaugucuuccuuagauug

SEQ ID NO: 605079 - RNA, 19 nt, Artificial Sequence
  Description of Artificial Sequence: Synthetic oligonucleotide
  Antisense strand to SEQ ID NO: 605078
caaucuaaggaagacauga

SEQ ID NO: 605080 - RNA, 19 nt, Artificial Sequence
  Description of Artificial Sequence: Synthetic oligonucleotide
  Sense strand starting at position 2948 of SEQ ID NO: 584992
uuccuuagauugguacuga

SEQ ID NO: 605081 - RNA, 19 nt, Artificial Sequence
  Description of Artificial Sequence: Synthetic oligonucleotide
  Antisense strand to SEQ ID NO: 605080
ucaguaccaaucuaaggaa

SEQ ID NO: 605082 - RNA, 19 nt, Artificial Sequence
  Description of Artificial Sequence: Synthetic oligonucleotide
  Sense strand starting at position 3061 of SEQ ID NO: 584992
uuaaguacauuguccauaa

SEQ ID NO: 605083 - RNA, 19 nt, Artificial Sequence
  Description of Artificial Sequence: Synthetic oligonucleotide
  Antisense strand to SEQ ID NO: 605082
uuauggacaauguacuuaa

SEQ ID NO: 605084 - RNA, 19 nt, Artificial Sequence
  Description of Artificial Sequence: Synthetic oligonucleotide
  Sense strand starting at position 3065 of SEQ ID NO: 584992
guacauuguccauaaucug

SEQ ID NO: 605085 - RNA, 19 nt, Artificial Sequence
  Description of Artificial Sequence: Synthetic oligonucleotide
  Antisense strand to SEQ ID NO: 605084
cagauuauggacaauguac

SEQ ID NO: 605086 - RNA, 19 nt, Artificial Sequence
  Description of Artificial Sequence: Synthetic oligonucleotide
  Sense strand starting at position 3071 of SEQ ID NO: 584992
uguccauaaucugaauuug

SEQ ID NO: 605087 - RNA, 19 nt, Artificial Sequence
  Description of Artificial Sequence: Synthetic oligonucleotide
  Antisense strand to SEQ ID NO: 605086
caaauucagauuauggaca

SEQ ID NO: 605088 - RNA, 19 nt, Artificial Sequence
  Description of Artificial Sequence: Synthetic oligonucleotide
  Sense strand starting at position 3079 of SEQ ID NO: 584992
aucugaauuuguuaguugu

SEQ ID NO: 605089 - RNA, 19 nt, Artificial Sequence
  Description of Artificial Sequence: Synthetic oligonucleotide
  Antisense strand to SEQ ID NO: 605088
acaacuaacaaauucagau

SEQ ID NO: 605090 - RNA, 19 nt, Artificial Sequence
  Description of Artificial Sequence: Synthetic oligonucleotide
  Sense strand starting at position 3081 of SEQ ID NO: 584992
cugaauuuguuaguuguau

SEQ ID NO: 605091 - RNA, 19 nt, Artificial Sequence
  Description of Artificial Sequence: Synthetic oligonucleotide
  Antisense strand to SEQ ID NO: 605090
auacaacuaacaaauucag

SEQ ID NO: 605092 - RNA, 19 nt, Artificial Sequence
  Description of Artificial Sequence: Synthetic oligonucleotide
  Sense strand starting at position 3093 of SEQ ID NO: 584992
guuguaugugcucucuuau

SEQ ID NO: 605093 - RNA, 19 nt, Artificial Sequence
  Description of Artificial Sequence: Synthetic oligonucleotide
  Antisense strand to SEQ ID NO: 605092
auaagagagcacauacaac

SEQ ID NO: 605094 - RNA, 19 nt, Artificial Sequence
  Description of Artificial Sequence: Synthetic oligonucleotide
  Sense strand starting at position 3096 of SEQ ID NO: 584992
guaugugcucucuuauguu

SEQ ID NO: 605095 - RNA, 19 nt, Artificial Sequence
  Description of Artificial Sequence: Synthetic oligonucleotide
  Antisense strand to SEQ ID NO: 605094
aacauaagagagcacauac

SEQ ID NO: 605096 - RNA, 19 nt, Artificial Sequence
  Description of Artificial Sequence: Synthetic oligonucleotide
  Sense strand starting at position 3193 of SEQ ID NO: 584992
ugcuaaagacaguauuaac

SEQ ID NO: 605097 - RNA, 19 nt, Artificial Sequence
  Description of Artificial Sequence: Synthetic oligonucleotide
  Antisense strand to SEQ ID NO: 605096
guuaauacugucuuuagca

SEQ ID NO: 605098 - RNA, 19 nt, Artificial Sequence
  Description of Artificial Sequence: Synthetic oligonucleotide
  Sense strand starting at position 3221 of SEQ ID NO: 584992
aauuaauuacauuggguga

SEQ ID NO: 605099 - RNA, 19 nt, Artificial Sequence
  Description of Artificial Sequence: Synthetic oligonucleotide
  Antisense strand to SEQ ID NO: 605098
ucacccaauguaauuaauu

SEQ ID NO: 605100 - RNA, 19 nt, Artificial Sequence
  Description of Artificial Sequence: Synthetic oligonucleotide
  Sense strand starting at position 3251 of SEQ ID NO: 584992
agcuuaugacccuguccaa

SEQ ID NO: 605101 - RNA, 19 nt, Artificial Sequence
  Description of Artificial Sequence: Synthetic oligonucleotide
  Antisense strand to SEQ ID NO: 605100
uuggacagggucauaagcu

SEQ ID NO: 605102 - RNA, 19 nt, Artificial Sequence
  Description of Artificial Sequence: Synthetic oligonucleotide
  Sense strand starting at position 3368 of SEQ ID NO: 584992
cuuggcuaaagccgugaaa

SEQ ID NO: 605103 - RNA, 19 nt, Artificial Sequence
  Description of Artificial Sequence: Synthetic oligonucleotide
  Antisense strand to SEQ ID NO: 605102
uuucacggcuuuagccaag

SEQ ID NO: 605104 - RNA, 19 nt, Artificial Sequence
  Description of Artificial Sequence: Synthetic oligonucleotide
  Sense strand starting at position 3610 of SEQ ID NO: 584992
agacauagauucuuguaug

SEQ ID NO: 605105 - RNA, 19 nt, Artificial Sequence
  Description of Artificial Sequence: Synthetic oligonucleotide
  Antisense strand to SEQ ID NO: 605104
cauacaagaaucuaugucu

SEQ ID NO: 605106 - RNA, 19 nt, Artificial Sequence
  Description of Artificial Sequence: Synthetic oligonucleotide
  Sense strand starting at position 3702 of SEQ ID NO: 584992
cgaacaaacuccuuugauu

SEQ ID NO: 605107 - RNA, 19 nt, Artificial Sequence
  Description of Artificial Sequence: Synthetic oligonucleotide
  Antisense strand to SEQ ID NO: 605106
aaucaaaggaguuuguucg

SEQ ID NO: 605108 - RNA, 19 nt, Artificial Sequence
  Description of Artificial Sequence: Synthetic oligonucleotide
  Sense strand starting at position 3714 of SEQ ID NO: 584992
uuugauuaccguuaccauc

SEQ ID NO: 605109 - RNA, 19 nt, Artificial Sequence
  Description of Artificial Sequence: Synthetic oligonucleotide
  Antisense strand to SEQ ID NO: 605108
gaugguaacgguaaucaaa

SEQ ID NO: 605110 - RNA, 19 nt, Artificial Sequence
  Description of Artificial Sequence: Synthetic oligonucleotide
  Sense strand starting at position 3816 of SEQ ID NO: 584992
uguuuagaaucaccaauag

SEQ ID NO: 605111 - RNA, 19 nt, Artificial Sequence
  Description of Artificial Sequence: Synthetic oligonucleotide
  Antisense strand to SEQ ID NO: 605110
cuauuggugauucuaaaca

SEQ ID NO: 605112 - RNA, 19 nt, Artificial Sequence
  Description of Artificial Sequence: Synthetic oligonucleotide
  Sense strand starting at position 3834 of SEQ ID NO: 584992
gcuuccagguugcuaaaua

SEQ ID NO: 605113 - RNA, 19 nt, Artificial Sequence
  Description of Artificial Sequence: Synthetic oligonucleotide
  Antisense strand to SEQ ID NO: 605112
uauuuagcaaccuggaagc

SEQ ID NO: 605114 - RNA, 19 nt, Artificial Sequence
  Description of Artificial Sequence: Synthetic oligonucleotide
  Sense strand starting at position 3954 of SEQ ID NO: 584992
ccauacauguaagaaagaa

SEQ ID NO: 605115 - RNA, 19 nt, Artificial Sequence
  Description of Artificial Sequence: Synthetic oligonucleotide
  Antisense strand to SEQ ID NO: 605114
uucuuucuuacauguaugg

SEQ ID NO: 605116 - RNA, 19 nt, Artificial Sequence
  Description of Artificial Sequence: Synthetic oligonucleotide
  Sense strand starting at position 3978 of SEQ ID NO: 584992
uaguuugaagcauggucuu

SEQ ID NO: 605117 - RNA, 19 nt, Artificial Sequence
  Description of Artificial Sequence: Synthetic oligonucleotide
  Antisense strand to SEQ ID NO: 605116
aagaccaugcuucaaacua

SEQ ID NO: 605118 - RNA, 19 nt, Artificial Sequence
  Description of Artificial Sequence: Synthetic oligonucleotide
  Sense strand starting at position 3981 of SEQ ID NO: 584992
uuugaagcauggucuuaaa

SEQ ID NO: 605119 - RNA, 19 nt, Artificial Sequence
  Description of Artificial Sequence: Synthetic oligonucleotide
  Antisense strand to SEQ ID NO: 605118
uuuaagaccaugcuucaaa

SEQ ID NO: 605120 - RNA, 19 nt, Artificial Sequence
  Description of Artificial Sequence: Synthetic oligonucleotide
  Sense strand starting at position 4 of SEQ ID NO: 584993
ggugcaugggucugacuca

SEQ ID NO: 605121 - RNA, 19 nt, Artificial Sequence
  Description of Artificial Sequence: Synthetic oligonucleotide
  Antisense strand to SEQ ID NO: 605120
ugagucagacccaugcacc

SEQ ID NO: 605122 - RNA, 19 nt, Artificial Sequence
  Description of Artificial Sequence: Synthetic oligonucleotide
  Sense strand starting at position 27 of SEQ ID NO: 584993
gggaaucccugcccucaaa

SEQ ID NO: 605123 - RNA, 19 nt, Artificial Sequence
  Description of Artificial Sequence: Synthetic oligonucleotide
  Antisense strand to SEQ ID NO: 605122
uuugagggcagggauuccc

SEQ ID NO: 605124 - RNA, 19 nt, Artificial Sequence
  Description of Artificial Sequence: Synthetic oligonucleotide
  Sense strand starting at position 49 of SEQ ID NO: 584993
uuacacaguugcuuugaga

SEQ ID NO: 605125 - RNA, 19 nt, Artificial Sequence
  Description of Artificial Sequence: Synthetic oligonucleotide
  Antisense strand to SEQ ID NO: 605124
ucucaaagcaacuguguaa

SEQ ID NO: 605126 - RNA, 19 nt, Artificial Sequence
  Description of Artificial Sequence: Synthetic oligonucleotide
  Sense strand starting at position 179 of SEQ ID NO: 584993
aaugauuugagcugugugu

SEQ ID NO: 605127 - RNA, 19 nt, Artificial Sequence
  Description of Artificial Sequence: Synthetic oligonucleotide
  Antisense strand to SEQ ID NO: 605126
acacacagcucaaaucauu

SEQ ID NO: 605128 - RNA, 19 nt, Artificial Sequence
  Description of Artificial Sequence: Synthetic oligonucleotide
  Sense strand starting at position 181 of SEQ ID NO: 584993
ugauuugagcugugugucu

SEQ ID NO: 605129 - RNA, 19 nt, Artificial Sequence
  Description of Artificial Sequence: Synthetic oligonucleotide
  Antisense strand to SEQ ID NO: 605128
agacacacagcucaaauca

SEQ ID NO: 605130 - RNA, 19 nt, Artificial Sequence
  Description of Artificial Sequence: Synthetic oligonucleotide
  Sense strand starting at position 192 of SEQ ID NO: 584993
gugugucucaugggugaga

SEQ ID NO: 605131 - RNA, 19 nt, Artificial Sequence
  Description of Artificial Sequence: Synthetic oligonucleotide
  Antisense strand to SEQ ID NO: 605130
ucucacccaugagacacac

SEQ ID NO: 605132 - RNA, 19 nt, Artificial Sequence
  Description of Artificial Sequence: Synthetic oligonucleotide
  Sense strand starting at position 331 of SEQ ID NO: 584993
ugggaaggaucccaagaca

SEQ ID NO: 605133 - RNA, 19 nt, Artificial Sequence
  Description of Artificial Sequence: Synthetic oligonucleotide
  Antisense strand to SEQ ID NO: 605132
ugucuugggauccuuccca

SEQ ID NO: 605134 - RNA, 19 nt, Artificial Sequence
  Description of Artificial Sequence: Synthetic oligonucleotide
  Sense strand starting at position 479 of SEQ ID NO: 584993
ucaggaaucucccagcaga

SEQ ID NO: 605135 - RNA, 19 nt, Artificial Sequence
  Description of Artificial Sequence: Synthetic oligonucleotide
  Antisense strand to SEQ ID NO: 605134
ucugcugggagauuccuga

SEQ ID NO: 605136 - RNA, 19 nt, Artificial Sequence
  Description of Artificial Sequence: Synthetic oligonucleotide
  Sense strand starting at position 482 of SEQ ID NO: 584993
ggaaucucccagcagagua

SEQ ID NO: 605137 - RNA, 19 nt, Artificial Sequence
  Description of Artificial Sequence: Synthetic oligonucleotide
  Antisense strand to SEQ ID NO: 605136
uacucugcugggagauucc

SEQ ID NO: 605138 - RNA, 19 nt, Artificial Sequence
  Description of Artificial Sequence: Synthetic oligonucleotide
  Sense strand starting at position 511 of SEQ ID NO: 584993
gcaaauggcguugggagau

SEQ ID NO: 605139 - RNA, 19 nt, Artificial Sequence
  Description of Artificial Sequence: Synthetic oligonucleotide
  Antisense strand to SEQ ID NO: 605138
aucucccaacgccauuugc

SEQ ID NO: 605140 - RNA, 19 nt, Artificial Sequence
  Description of Artificial Sequence: Synthetic oligonucleotide
  Sense strand starting at position 524 of SEQ ID NO: 584993
ggagaugauccugacggca

SEQ ID NO: 605141 - RNA, 19 nt, Artificial Sequence
  Description of Artificial Sequence: Synthetic oligonucleotide
  Antisense strand to SEQ ID NO: 605140
ugccgucaggaucaucucc

SEQ ID NO: 605142 - RNA, 19 nt, Artificial Sequence
  Description of Artificial Sequence: Synthetic oligonucleotide
  Sense strand starting at position 732 of SEQ ID NO: 584993
acaacuuuguaauacagga

SEQ ID NO: 605143 - RNA, 19 nt, Artificial Sequence
  Description of Artificial Sequence: Synthetic oligonucleotide
  Antisense strand to SEQ ID NO: 605142
uccuguauuacaaaguugu

SEQ ID NO: 605144 - RNA, 19 nt, Artificial Sequence
  Description of Artificial Sequence: Synthetic oligonucleotide
  Sense strand starting at position 816 of SEQ ID NO: 584993
augggugauuucgaacaag

SEQ ID NO: 605145 - RNA, 19 nt, Artificial Sequence
  Description of Artificial Sequence: Synthetic oligonucleotide
  Antisense strand to SEQ ID NO: 605144
cuuguucgaaaucacccau

SEQ ID NO: 605146 - RNA, 19 nt, Artificial Sequence
  Description of Artificial Sequence: Synthetic oligonucleotide
  Sense strand starting at position 839 of SEQ ID NO: 584993
cagccagggcuccagaaau

SEQ ID NO: 605147 - RNA, 19 nt, Artificial Sequence
  Description of Artificial Sequence: Synthetic oligonucleotide
  Antisense strand to SEQ ID NO: 605146
auuucuggagcccuggcug

SEQ ID NO: 605148 - RNA, 19 nt, Artificial Sequence
  Description of Artificial Sequence: Synthetic oligonucleotide
  Sense strand starting at position 852 of SEQ ID NO: 584993
agaaaugcugucggugauc

SEQ ID NO: 605149 - RNA, 19 nt, Artificial Sequence
  Description of Artificial Sequence: Synthetic oligonucleotide
  Antisense strand to SEQ ID NO: 605148
gaucaccgacagcauuucu

SEQ ID NO: 605150 - RNA, 19 nt, Artificial Sequence
  Description of Artificial Sequence: Synthetic oligonucleotide
  Sense strand starting at position 1079 of SEQ ID NO: 584993
cccugugugacaugaguga

SEQ ID NO: 605151 - RNA, 19 nt, Artificial Sequence
  Description of Artificial Sequence: Synthetic oligonucleotide
  Antisense strand to SEQ ID NO: 605150
ucacucaugucacacaggg

SEQ ID NO: 605152 - RNA, 19 nt, Artificial Sequence
  Description of Artificial Sequence: Synthetic oligonucleotide
  Sense strand starting at position 1083 of SEQ ID NO: 584993
gugugacaugagugaagau

SEQ ID NO: 605153 - RNA, 19 nt, Artificial Sequence
  Description of Artificial Sequence: Synthetic oligonucleotide
  Antisense strand to SEQ ID NO: 605152
aucuucacucaugucacac

SEQ ID NO: 605154 - RNA, 19 nt, Artificial Sequence
  Description of Artificial Sequence: Synthetic oligonucleotide
  Sense strand starting at position 1095 of SEQ ID NO: 584993
ugaagauuugggcguggua

SEQ ID NO: 605155 - RNA, 19 nt, Artificial Sequence
  Description of Artificial Sequence: Synthetic oligonucleotide
  Antisense strand to SEQ ID NO: 605154
uaccacgcccaaaucuuca

SEQ ID NO: 605156 - RNA, 19 nt, Artificial Sequence
  Description of Artificial Sequence: Synthetic oligonucleotide
  Sense strand starting at position 1168 of SEQ ID NO: 584993
guguucuauuccuuuggcu

SEQ ID NO: 605157 - RNA, 19 nt, Artificial Sequence
  Description of Artificial Sequence: Synthetic oligonucleotide
  Antisense strand to SEQ ID NO: 605156
agccaaaggaauagaacac

SEQ ID NO: 605158 - RNA, 19 nt, Artificial Sequence
  Description of Artificial Sequence: Synthetic oligonucleotide
  Sense strand starting at position 1170 of SEQ ID NO: 584993
guucuauuccuuuggcuua

SEQ ID NO: 605159 - RNA, 19 nt, Artificial Sequence
  Description of Artificial Sequence: Synthetic oligonucleotide
  Antisense strand to SEQ ID NO: 605158
uaagccaaaggaauagaac

SEQ ID NO: 605160 - RNA, 19 nt, Artificial Sequence
  Description of Artificial Sequence: Synthetic oligonucleotide
  Sense strand starting at position 1173 of SEQ ID NO: 584993
cuauuccuuuggcuuaaga

SEQ ID NO: 605161 - RNA, 19 nt, Artificial Sequence
  Description of Artificial Sequence: Synthetic oligonucleotide
  Antisense strand to SEQ ID NO: 605160
ucuuaagccaaaggaauag

SEQ ID NO: 605162 - RNA, 19 nt, Artificial Sequence
  Description of Artificial Sequence: Synthetic oligonucleotide
  Sense strand starting at position 1175 of SEQ ID NO: 584993
auuccuuuggcuuaagauu

SEQ ID NO: 605163 - RNA, 19 nt, Artificial Sequence
  Description of Artificial Sequence: Synthetic oligonucleotide
  Antisense strand to SEQ ID NO: 605162
aaucuuaagccaaaggaau

SEQ ID NO: 605164 - RNA, 19 nt, Artificial Sequence
  Description of Artificial Sequence: Synthetic oligonucleotide
  Sense strand starting at position 1219 of SEQ ID NO: 584993
gugccacuuuaaguuguua

SEQ ID NO: 605165 - RNA, 19 nt, Artificial Sequence
  Description of Artificial Sequence: Synthetic oligonucleotide
  Antisense strand to SEQ ID NO: 605164
uaacaacuuaaaguggcac

SEQ ID NO: 605166 - RNA, 19 nt, Artificial Sequence
  Description of Artificial Sequence: Synthetic oligonucleotide
  Sense strand starting at position 1262 of SEQ ID NO: 584993
augagucaaucugauccuu

SEQ ID NO: 605167 - RNA, 19 nt, Artificial Sequence
  Description of Artificial Sequence: Synthetic oligonucleotide
  Antisense strand to SEQ ID NO: 605166
aaggaucagauugacucau

SEQ ID NO: 605168 - RNA, 19 nt, Artificial Sequence
  Description of Artificial Sequence: Synthetic oligonucleotide
  Sense strand starting at position 1288 of SEQ ID NO: 584993
agucgauuucguuguugau

SEQ ID NO: 605169 - RNA, 19 nt, Artificial Sequence
  Description of Artificial Sequence: Synthetic oligonucleotide
  Antisense strand to SEQ ID NO: 605168
aucaacaacgaaaucgacu

SEQ ID NO: 605170 - RNA, 19 nt, Artificial Sequence
  Description of Artificial Sequence: Synthetic oligonucleotide
  Sense strand starting at position 1290 of SEQ ID NO: 584993
ucgauuucguuguugauag

SEQ ID NO: 605171 - RNA, 19 nt, Artificial Sequence
  Description of Artificial Sequence: Synthetic oligonucleotide
  Antisense strand to SEQ ID NO: 605170
cuaucaacaacgaaaucga

SEQ ID NO: 605172 - RNA, 19 nt, Artificial Sequence
  Description of Artificial Sequence: Synthetic oligonucleotide
  Sense strand starting at position 1588 of SEQ ID NO: 584993
ucauaucuccucgaugcaa

SEQ ID NO: 605173 - RNA, 19 nt, Artificial Sequence
  Description of Artificial Sequence: Synthetic oligonucleotide
  Antisense strand to SEQ ID NO: 605172
uugcaucgaggagauauga

SEQ ID NO: 605174 - RNA, 19 nt, Artificial Sequence
  Description of Artificial Sequence: Synthetic oligonucleotide
  Sense strand starting at position 1590 of SEQ ID NO: 584993
auaucuccucgaugcaaca

SEQ ID NO: 605175 - RNA, 19 nt, Artificial Sequence
  Description of Artificial Sequence: Synthetic oligonucleotide
  Antisense strand to SEQ ID NO: 605174
uguugcaucgaggagauau

SEQ ID NO: 605176 - RNA, 19 nt, Artificial Sequence
  Description of Artificial Sequence: Synthetic oligonucleotide
  Sense strand starting at position 1615 of SEQ ID NO: 584993
agcgcaaacuuucugggau

SEQ ID NO: 605177 - RNA, 19 nt, Artificial Sequence
  Description of Artificial Sequence: Synthetic oligonucleotide
  Antisense strand to SEQ ID NO: 605176
aucccagaaaguuugcgcu

SEQ ID NO: 605178 - RNA, 19 nt, Artificial Sequence
  Description of Artificial Sequence: Synthetic oligonucleotide
  Sense strand starting at position 1618 of SEQ ID NO: 584993
gcaaacuuucugggauaug

SEQ ID NO: 605179 - RNA, 19 nt, Artificial Sequence
  Description of Artificial Sequence: Synthetic oligonucleotide
  Antisense strand to SEQ ID NO: 605178
cauaucccagaaaguuugc

SEQ ID NO: 605180 - RNA, 19 nt, Artificial Sequence
  Description of Artificial Sequence: Synthetic oligonucleotide
  Sense strand starting at position 1960 of SEQ ID NO: 584993
uagucaaucccugcgcgau

SEQ ID NO: 605181 - RNA, 19 nt, Artificial Sequence
  Description of Artificial Sequence: Synthetic oligonucleotide
  Antisense strand to SEQ ID NO: 605180
aucgcgcagggauugacua

SEQ ID NO: 605182 - RNA, 19 nt, Artificial Sequence
  Description of Artificial Sequence: Synthetic oligonucleotide
  Sense strand starting at position 1961 of SEQ ID NO: 584993
agucaaucccugcgcgauu

SEQ ID NO: 605183 - RNA, 19 nt, Artificial Sequence
  Description of Artificial Sequence: Synthetic oligonucleotide
  Antisense strand to SEQ ID NO: 605182
aaucgcgcagggauugacu

SEQ ID NO: 605184 - RNA, 19 nt, Artificial Sequence
  Description of Artificial Sequence: Synthetic oligonucleotide
  Sense strand starting at position 2305 of SEQ ID NO: 584993
gcgucugugggcagaggua

SEQ ID NO: 605185 - RNA, 19 nt, Artificial Sequence
  Description of Artificial Sequence: Synthetic oligonucleotide
  Antisense strand to SEQ ID NO: 605184
uaccucugcccacagacgc

SEQ ID NO: 605186 - RNA, 19 nt, Artificial Sequence
  Description of Artificial Sequence: Synthetic oligonucleotide
  Sense strand starting at position 3447 of SEQ ID NO: 584993
agaggcgucucccugagua

SEQ ID NO: 605187 - RNA, 19 nt, Artificial Sequence
  Description of Artificial Sequence: Synthetic oligonucleotide
  Antisense strand to SEQ ID NO: 605186
uacucagggagacgccucu

SEQ ID NO: 605188 - RNA, 19 nt, Artificial Sequence
  Description of Artificial Sequence: Synthetic oligonucleotide
  Sense strand starting at position 3449 of SEQ ID NO: 584993
aggcgucucccugaguaag

SEQ ID NO: 605189 - RNA, 19 nt, Artificial Sequence
  Description of Artificial Sequence: Synthetic oligonucleotide
  Antisense strand to SEQ ID NO: 605188
cuuacucagggagacgccu

SEQ ID NO: 605190 - RNA, 19 nt, Artificial Sequence
  Description of Artificial Sequence: Synthetic oligonucleotide
  Sense strand starting at position 3672 of SEQ ID NO: 584993
uccggauucuguuugaagu

SEQ ID NO: 605191 - RNA, 19 nt, Artificial Sequence
  Description of Artificial Sequence: Synthetic oligonucleotide
  Antisense strand to SEQ ID NO: 605190
acuucaaacagaauccgga

SEQ ID NO: 605192 - RNA, 19 nt, Artificial Sequence
  Description of Artificial Sequence: Synthetic oligonucleotide
  Sense strand starting at position 3673 of SEQ ID NO: 584993
ccggauucuguuugaaguc

SEQ ID NO: 605193 - RNA, 19 nt, Artificial Sequence
  Description of Artificial Sequence: Synthetic oligonucleotide
  Antisense strand to SEQ ID NO: 605192
gacuucaaacagaauccgg

SEQ ID NO: 605194 - RNA, 19 nt, Artificial Sequence
  Description of Artificial Sequence: Synthetic oligonucleotide
  Sense strand starting at position 3704 of SEQ ID NO: 584993
aucagauacugucagucaa

SEQ ID NO: 605195 - RNA, 19 nt, Artificial Sequence
  Description of Artificial Sequence: Synthetic oligonucleotide
  Antisense strand to SEQ ID NO: 605194
uugacugacaguaucugau

SEQ ID NO: 605196 - RNA, 19 nt, Artificial Sequence
  Description of Artificial Sequence: Synthetic oligonucleotide
  Sense strand starting at position 3706 of SEQ ID NO: 584993
cagauacugucagucaaag

SEQ ID NO: 605197 - RNA, 19 nt, Artificial Sequence
  Description of Artificial Sequence: Synthetic oligonucleotide
  Antisense strand to SEQ ID NO: 605196
cuuugacugacaguaucug

SEQ ID NO: 605198 - RNA, 19 nt, Artificial Sequence
  Description of Artificial Sequence: Synthetic oligonucleotide
  Sense strand starting at position 3816 of SEQ ID NO: 584993
agggacagaggcuguuaau

SEQ ID NO: 605199 - RNA, 19 nt, Artificial Sequence
  Description of Artificial Sequence: Synthetic oligonucleotide
  Antisense strand to SEQ ID NO: 605198
auuaacagccucugucccu

SEQ ID NO: 605200 - RNA, 19 nt, Artificial Sequence
  Description of Artificial Sequence: Synthetic oligonucleotide
  Sense strand starting at position 13 of SEQ ID NO: 584994
ggaaacuugagcugauaua

SEQ ID NO: 605201 - RNA, 19 nt, Artificial Sequence
  Description of Artificial Sequence: Synthetic oligonucleotide
  Antisense strand to SEQ ID NO: 605200
uauaucagcucaaguuucc

SEQ ID NO: 605202 - RNA, 19 nt, Artificial Sequence
  Description of Artificial Sequence: Synthetic oligonucleotide
  Sense strand starting at position 67 of SEQ ID NO: 584994
agcacagugucauugccua

SEQ ID NO: 605203 - RNA, 19 nt, Artificial Sequence
  Description of Artificial Sequence: Synthetic oligonucleotide
  Antisense strand to SEQ ID NO: 605202
uaggcaaugacacugugcu

SEQ ID NO: 605204 - RNA, 19 nt, Artificial Sequence
  Description of Artificial Sequence: Synthetic oligonucleotide
  Sense strand starting at position 681 of SEQ ID NO: 584994
uagagaagacuuugccaag

SEQ ID NO: 605205 - RNA, 19 nt, Artificial Sequence
  Description of Artificial Sequence: Synthetic oligonucleotide
  Antisense strand to SEQ ID NO: 605204
cuuggcaaagucuucucua

SEQ ID NO: 605206 - RNA, 19 nt, Artificial Sequence
  Description of Artificial Sequence: Synthetic oligonucleotide
  Sense strand starting at position 684 of SEQ ID NO: 584994
agaagacuuugccaagaau

SEQ ID NO: 605207 - RNA, 19 nt, Artificial Sequence
  Description of Artificial Sequence: Synthetic oligonucleotide
  Antisense strand to SEQ ID NO: 605206
auucuuggcaaagucuucu

SEQ ID NO: 605208 - RNA, 19 nt, Artificial Sequence
  Description of Artificial Sequence: Synthetic oligonucleotide
  Sense strand starting at position 699 of SEQ ID NO: 584994
gaaugaaguugugagaaug

SEQ ID NO: 605209 - RNA, 19 nt, Artificial Sequence
  Description of Artificial Sequence: Synthetic oligonucleotide
  Antisense strand to SEQ ID NO: 605208
cauucucacaacuucauuc

SEQ ID NO: 605210 - RNA, 19 nt, Artificial Sequence
  Description of Artificial Sequence: Synthetic oligonucleotide
  Sense strand starting at position 1005 of SEQ ID NO: 584994
gaggguucugcugacccau

SEQ ID NO: 605211 - RNA, 19 nt, Artificial Sequence
  Description of Artificial Sequence: Synthetic oligonucleotide
  Antisense strand to SEQ ID NO: 605210
augggucagcagaacccuc

SEQ ID NO: 605212 - RNA, 19 nt, Artificial Sequence
  Description of Artificial Sequence: Synthetic oligonucleotide
  Sense strand starting at position 1252 of SEQ ID NO: 584994
gcauuuccacuguggucaa

SEQ ID NO: 605213 - RNA, 19 nt, Artificial Sequence
  Description of Artificial Sequence: Synthetic oligonucleotide
  Antisense strand to SEQ ID NO: 605212
uugaccacaguggaaaugc

SEQ ID NO: 605214 - RNA, 19 nt, Artificial Sequence
  Description of Artificial Sequence: Synthetic oligonucleotide
  Sense strand starting at position 1473 of SEQ ID NO: 584994
ggugggaggcagugaugua

SEQ ID NO: 605215 - RNA, 19 nt, Artificial Sequence
  Description of Artificial Sequence: Synthetic oligonucleotide
  Antisense strand to SEQ ID NO: 605214
uacaucacugccucccacc

SEQ ID NO: 605216 - RNA, 19 nt, Artificial Sequence
  Description of Artificial Sequence: Synthetic oligonucleotide
  Sense strand starting at position 1585 of SEQ ID NO: 584994
gccaguucuugcccaggga

SEQ ID NO: 605217 - RNA, 19 nt, Artificial Sequence
  Description of Artificial Sequence: Synthetic oligonucleotide
  Antisense strand to SEQ ID NO: 605216
ucccugggcaagaacuggc

SEQ ID NO: 605218 - RNA, 19 nt, Artificial Sequence
  Description of Artificial Sequence: Synthetic oligonucleotide
  Sense strand starting at position 1728 of SEQ ID NO: 584994
agaugagugucuccaggag

SEQ ID NO: 605219 - RNA, 19 nt, Artificial Sequence
  Description of Artificial Sequence: Synthetic oligonucleotide
  Antisense strand to SEQ ID NO: 605218
cuccuggagacacucaucu

SEQ ID NO: 605220 - RNA, 19 nt, Artificial Sequence
  Description of Artificial Sequence: Synthetic oligonucleotide
  Sense strand starting at position 2127 of SEQ ID NO: 584994
gcgcucauugguuaucaga

SEQ ID NO: 605221 - RNA, 19 nt, Artificial Sequence
  Description of Artificial Sequence: Synthetic oligonucleotide
  Antisense strand to SEQ ID NO: 605220
ucugauaaccaaugagcgc

SEQ ID NO: 605222 - RNA, 19 nt, Artificial Sequence
  Description of Artificial Sequence: Synthetic oligonucleotide
  Sense strand starting at position 2129 of SEQ ID NO: 584994
gcucauugguuaucagaaa

SEQ ID NO: 605223 - RNA, 19 nt, Artificial Sequence
  Description of Artificial Sequence: Synthetic oligonucleotide
  Antisense strand to SEQ ID NO: 605222
uuucugauaaccaaugagc

SEQ ID NO: 605224 - RNA, 19 nt, Artificial Sequence
  Description of Artificial Sequence: Synthetic oligonucleotide
  Sense strand starting at position 2174 of SEQ ID NO: 584994
aagggcuauuucgcuguua

SEQ ID NO: 605225 - RNA, 19 nt, Artificial Sequence
  Description of Artificial Sequence: Synthetic oligonucleotide
  Antisense strand to SEQ ID NO: 605224
uaacagcgaaauagcccuu

SEQ ID NO: 605226 - RNA, 19 nt, Artificial Sequence
  Description of Artificial Sequence: Synthetic oligonucleotide
  Sense strand starting at position 2176 of SEQ ID NO: 584994
gggcuauuucgcuguuacu

SEQ ID NO: 605227 - RNA, 19 nt, Artificial Sequence
  Description of Artificial Sequence: Synthetic oligonucleotide
  Antisense strand to SEQ ID NO: 605226
aguaacagcgaaauagccc

SEQ ID NO: 605228 - RNA, 19 nt, Artificial Sequence
  Description of Artificial Sequence: Synthetic oligonucleotide
  Sense strand starting at position 2203 of SEQ ID NO: 584994
cauuaaagccucggucaga

SEQ ID NO: 605229 - RNA, 19 nt, Artificial Sequence
  Description of Artificial Sequence: Synthetic oligonucleotide
  Antisense strand to SEQ ID NO: 605228
ucugaccgaggcuuuaaug

SEQ ID NO: 605230 - RNA, 19 nt, Artificial Sequence
  Description of Artificial Sequence: Synthetic oligonucleotide
  Sense strand starting at position 2391 of SEQ ID NO: 584994
guaggcauucuuugaaaug

SEQ ID NO: 605231 - RNA, 19 nt, Artificial Sequence
  Description of Artificial Sequence: Synthetic oligonucleotide
  Antisense strand to SEQ ID NO: 605230
cauuucaaagaaugccuac

SEQ ID NO: 605232 - RNA, 19 nt, Artificial Sequence
  Description of Artificial Sequence: Synthetic oligonucleotide
  Sense strand starting at position 2426 of SEQ ID NO: 584994
caguauagcaagugguuga

SEQ ID NO: 605233 - RNA, 19 nt, Artificial Sequence
  Description of Artificial Sequence: Synthetic oligonucleotide
  Antisense strand to SEQ ID NO: 605232
ucaaccacuugcuauacug

SEQ ID NO: 605234 - RNA, 19 nt, Artificial Sequence
  Description of Artificial Sequence: Synthetic oligonucleotide
  Sense strand starting at position 2427 of SEQ ID NO: 584994
aguauagcaagugguugaa

SEQ ID NO: 605235 - RNA, 19 nt, Artificial Sequence
  Description of Artificial Sequence: Synthetic oligonucleotide
  Antisense strand to SEQ ID NO: 605234
uucaaccacuugcuauacu

SEQ ID NO: 605236 - RNA, 19 nt, Artificial Sequence
  Description of Artificial Sequence: Synthetic oligonucleotide
  Sense strand starting at position 2473 of SEQ ID NO: 584994
guacccuacucuuugacuu

SEQ ID NO: 605237 - RNA, 19 nt, Artificial Sequence
  Description of Artificial Sequence: Synthetic oligonucleotide
  Antisense strand to SEQ ID NO: 605236
aagucaaagaguaggguac

SEQ ID NO: 605238 - RNA, 19 nt, Artificial Sequence
  Description of Artificial Sequence: Synthetic oligonucleotide
  Sense strand starting at position 2531 of SEQ ID NO: 584994
ucaucugugcaaugaguau

SEQ ID NO: 605239 - RNA, 19 nt, Artificial Sequence
  Description of Artificial Sequence: Synthetic oligonucleotide
  Antisense strand to SEQ ID NO: 605238
auacucauugcacagauga

SEQ ID NO: 605240 - RNA, 19 nt, Artificial Sequence
  Description of Artificial Sequence: Synthetic oligonucleotide
  Sense strand starting at position 2535 of SEQ ID NO: 584994
cugugcaaugaguaugaua

SEQ ID NO: 605241 - RNA, 19 nt, Artificial Sequence
  Description of Artificial Sequence: Synthetic oligonucleotide
  Antisense strand to SEQ ID NO: 605240
uaucauacucauugcacag

SEQ ID NO: 605242 - RNA, 19 nt, Artificial Sequence
  Description of Artificial Sequence: Synthetic oligonucleotide
  Sense strand starting at position 2537 of SEQ ID NO: 584994
gugcaaugaguaugauaac

SEQ ID NO: 605243 - RNA, 19 nt, Artificial Sequence
  Description of Artificial Sequence: Synthetic oligonucleotide
  Antisense strand to SEQ ID NO: 605242
guuaucauacucauugcac

SEQ ID NO: 605244 - RNA, 19 nt, Artificial Sequence
  Description of Artificial Sequence: Synthetic oligonucleotide
  Sense strand starting at position 2540 of SEQ ID NO: 584994
caaugaguaugauaacagu

SEQ ID NO: 605245 - RNA, 19 nt, Artificial Sequence
  Description of Artificial Sequence: Synthetic oligonucleotide
  Antisense strand to SEQ ID NO: 605244
acuguuaucauacucauug

SEQ ID NO: 605246 - RNA, 19 nt, Artificial Sequence
  Description of Artificial Sequence: Synthetic oligonucleotide
  Sense strand starting at position 2563 of SEQ ID NO: 584994
gccucauaggauuguuaug

SEQ ID NO: 605247 - RNA, 19 nt, Artificial Sequence
  Description of Artificial Sequence: Synthetic oligonucleotide
  Antisense strand to SEQ ID NO: 605246
cauaacaauccuaugaggc

SEQ ID NO: 605248 - RNA, 19 nt, Artificial Sequence
  Description of Artificial Sequence: Synthetic oligonucleotide
  Sense strand starting at position 2593 of SEQ ID NO: 584994
gguuaauacauguagagug

SEQ ID NO: 605249 - RNA, 19 nt, Artificial Sequence
  Description of Artificial Sequence: Synthetic oligonucleotide
  Antisense strand to SEQ ID NO: 605248
cacucuacauguauuaacc

SEQ ID NO: 605250 - RNA, 19 nt, Artificial Sequence
  Description of Artificial Sequence: Synthetic oligonucleotide
  Sense strand starting at position 2627 of SEQ ID NO: 584994
gcauguaaacgcuguaaca

SEQ ID NO: 605251 - RNA, 19 nt, Artificial Sequence
  Description of Artificial Sequence: Synthetic oligonucleotide
  Antisense strand to SEQ ID NO: 605250
uguuacagcguuuacaugc

SEQ ID NO: 605252 - RNA, 19 nt, Artificial Sequence
  Description of Artificial Sequence: Synthetic oligonucleotide
  Sense strand starting at position 2650 of SEQ ID NO: 584994
uagcuaucacuaugaugga

SEQ ID NO: 605253 - RNA, 19 nt, Artificial Sequence
  Description of Artificial Sequence: Synthetic oligonucleotide
  Antisense strand to SEQ ID NO: 605252
uccaucauagugauagcua

SEQ ID NO: 605254 - RNA, 19 nt, Artificial Sequence
  Description of Artificial Sequence: Synthetic oligonucleotide
  Sense strand starting at position 2680 of SEQ ID NO: 584994
acucaagacucgguuugga

SEQ ID NO: 605255 - RNA, 19 nt, Artificial Sequence
  Description of Artificial Sequence: Synthetic oligonucleotide
  Antisense strand to SEQ ID NO: 605254
uccaaaccgagucuugagu

SEQ ID NO: 605256 - RNA, 19 nt, Artificial Sequence
  Description of Artificial Sequence: Synthetic oligonucleotide
  Sense strand starting at position 2702 of SEQ ID NO: 584994
cucagaacauggucuguau

SEQ ID NO: 605257 - RNA, 19 nt, Artificial Sequence
  Description of Artificial Sequence: Synthetic oligonucleotide
  Antisense strand to SEQ ID NO: 605256
auacagaccauguucugag

SEQ ID NO: 605258 - RNA, 19 nt, Artificial Sequence
  Description of Artificial Sequence: Synthetic oligonucleotide
  Sense strand starting at position 2705 of SEQ ID NO: 584994
agaacauggucuguauaca

SEQ ID NO: 605259 - RNA, 19 nt, Artificial Sequence
  Description of Artificial Sequence: Synthetic oligonucleotide
  Antisense strand to SEQ ID NO: 605258
uguauacagaccauguucu

SEQ ID NO: 605260 - RNA, 19 nt, Artificial Sequence
  Description of Artificial Sequence: Synthetic oligonucleotide
  Sense strand starting at position 3073 of SEQ ID NO: 584994
uuucuaaucugguuugcuu

SEQ ID NO: 605261 - RNA, 19 nt, Artificial Sequence
  Description of Artificial Sequence: Synthetic oligonucleotide
  Antisense strand to SEQ ID NO: 605260
aagcaaaccagauuagaaa

SEQ ID NO: 605262 - RNA, 19 nt, Artificial Sequence
  Description of Artificial Sequence: Synthetic oligonucleotide
  Sense strand starting at position 3075 of SEQ ID NO: 584994
ucuaaucugguuugcuuua

SEQ ID NO: 605263 - RNA, 19 nt, Artificial Sequence
  Description of Artificial Sequence: Synthetic oligonucleotide
  Antisense strand to SEQ ID NO: 605262
uaaagcaaaccagauuaga

SEQ ID NO: 605264 - RNA, 19 nt, Artificial Sequence
  Description of Artificial Sequence: Synthetic oligonucleotide
  Sense strand starting at position 3076 of SEQ ID NO: 584994
cuaaucugguuugcuuuaa

SEQ ID NO: 605265 - RNA, 19 nt, Artificial Sequence
  Description of Artificial Sequence: Synthetic oligonucleotide
  Antisense strand to SEQ ID NO: 605264
uuaaagcaaaccagauuag

SEQ ID NO: 605266 - RNA, 19 nt, Artificial Sequence
  Description of Artificial Sequence: Synthetic oligonucleotide
  Sense strand starting at position 3687 of SEQ ID NO: 584994
uugcaaaucugauaaggau

SEQ ID NO: 605267 - RNA, 19 nt, Artificial Sequence
  Description of Artificial Sequence: Synthetic oligonucleotide
  Antisense strand to SEQ ID NO: 605266
auccuuaucagauuugcaa

SEQ ID NO: 605268 - RNA, 19 nt, Artificial Sequence
  Description of Artificial Sequence: Synthetic oligonucleotide
  Sense strand starting at position 3770 of SEQ ID NO: 584994
agcaaaguauuugaauaga

SEQ ID NO: 605269 - RNA, 19 nt, Artificial Sequence
  Description of Artificial Sequence: Synthetic oligonucleotide
  Antisense strand to SEQ ID NO: 605268
ucuauucaaauacuuugcu

SEQ ID NO: 605270 - RNA, 19 nt, Artificial Sequence
  Description of Artificial Sequence: Synthetic oligonucleotide
  Sense strand starting at position 3835 of SEQ ID NO: 584994
gcugaauaucaauagucau

SEQ ID NO: 605271 - RNA, 19 nt, Artificial Sequence
  Description of Artificial Sequence: Synthetic oligonucleotide
  Antisense strand to SEQ ID NO: 605270
augacuauugauauucagc

SEQ ID NO: 605272 - RNA, 19 nt, Artificial Sequence
  Description of Artificial Sequence: Synthetic oligonucleotide
  Sense strand starting at position 3841 of SEQ ID NO: 584994
uaucaauagucauuaggga

SEQ ID NO: 605273 - RNA, 19 nt, Artificial Sequence
  Description of Artificial Sequence: Synthetic oligonucleotide
  Antisense strand to SEQ ID NO: 605272
ucccuaaugacuauugaua

SEQ ID NO: 605274 - RNA, 19 nt, Artificial Sequence
  Description of Artificial Sequence: Synthetic oligonucleotide
  Sense strand starting at position 3895 of SEQ ID NO: 584994
uacugacuaggaugguuau

SEQ ID NO: 605275 - RNA, 19 nt, Artificial Sequence
  Description of Artificial Sequence: Synthetic oligonucleotide
  Antisense strand to SEQ ID NO: 605274
auaaccauccuagucagua

SEQ ID NO: 605276 - RNA, 19 nt, Artificial Sequence
  Description of Artificial Sequence: Synthetic oligonucleotide
  Sense strand starting at position 3896 of SEQ ID NO: 584994
acugacuaggaugguuaua

SEQ ID NO: 605277 - RNA, 19 nt, Artificial Sequence
  Description of Artificial Sequence: Synthetic oligonucleotide
  Antisense strand to SEQ ID NO: 605276
uauaaccauccuagucagu

SEQ ID NO: 605278 - RNA, 19 nt, Artificial Sequence
  Description of Artificial Sequence: Synthetic oligonucleotide
  Sense strand starting at position 3898 of SEQ ID NO: 584994
ugacuaggaugguuauaau

SEQ ID NO: 605279 - RNA, 19 nt, Artificial Sequence
  Description of Artificial Sequence: Synthetic oligonucleotide
  Antisense strand to SEQ ID NO: 605278
auuauaaccauccuaguca

SEQ ID NO: 605280 - RNA, 19 nt, Artificial Sequence
  Description of Artificial Sequence: Synthetic oligonucleotide
  Sense strand starting at position 60 of SEQ ID NO: 584995
uuauuuguauucucagcuu

SEQ ID NO: 605281 - RNA, 19 nt, Artificial Sequence
  Description of Artificial Sequence: Synthetic oligonucleotide
  Antisense strand to SEQ ID NO: 605280
aagcugagaauacaaauaa

SEQ ID NO: 605282 - RNA, 19 nt, Artificial Sequence
  Description of Artificial Sequence: Synthetic oligonucleotide
  Sense strand starting at position 150 of SEQ ID NO: 584995
acaagauauugagcuuauu

SEQ ID NO: 605283 - RNA, 19 nt, Artificial Sequence
  Description of Artificial Sequence: Synthetic oligonucleotide
  Antisense strand to SEQ ID NO: 605282
aauaagcucaauaucuugu

SEQ ID NO: 605284 - RNA, 19 nt, Artificial Sequence
  Description of Artificial Sequence: Synthetic oligonucleotide
  Sense strand starting at position 207 of SEQ ID NO: 584995
guaaucucuguugaauguu

SEQ ID NO: 605285 - RNA, 19 nt, Artificial Sequence
  Description of Artificial Sequence: Synthetic oligonucleotide
  Antisense strand to SEQ ID NO: 605284
aacauucaacagagauuac

SEQ ID NO: 605286 - RNA, 19 nt, Artificial Sequence
  Description of Artificial Sequence: Synthetic oligonucleotide
  Sense strand starting at position 270 of SEQ ID NO: 584995
guaugaauucuuuacaugu

SEQ ID NO: 605287 - RNA, 19 nt, Artificial Sequence
  Description of Artificial Sequence: Synthetic oligonucleotide
  Antisense strand to SEQ ID NO: 605286
acauguaaagaauucauac

SEQ ID NO: 605288 - RNA, 19 nt, Artificial Sequence
  Description of Artificial Sequence: Synthetic oligonucleotide
  Sense strand starting at position 285 of SEQ ID NO: 584995
auguucuugauagggcaau

SEQ ID NO: 605289 - RNA, 19 nt, Artificial Sequence
  Description of Artificial Sequence: Synthetic oligonucleotide
  Antisense strand to SEQ ID NO: 605288
auugcccuaucaagaacau

SEQ ID NO: 605290 - RNA, 19 nt, Artificial Sequence
  Description of Artificial Sequence: Synthetic oligonucleotide
  Sense strand starting at position 351 of SEQ ID NO: 584995
ugaacuaucuuaguuguag

SEQ ID NO: 605291 - RNA, 19 nt, Artificial Sequence
  Description of Artificial Sequence: Synthetic oligonucleotide
  Antisense strand to SEQ ID NO: 605290
cuacaacuaagauaguuca

SEQ ID NO: 605292 - RNA, 19 nt, Artificial Sequence
  Description of Artificial Sequence: Synthetic oligonucleotide
  Sense strand starting at position 600 of SEQ ID NO: 584995
ugcugaagucauuaagaca

SEQ ID NO: 605293 - RNA, 19 nt, Artificial Sequence
  Description of Artificial Sequence: Synthetic oligonucleotide
  Antisense strand to SEQ ID NO: 605292
ugucuuaaugacuucagca

SEQ ID NO: 605294 - RNA, 19 nt, Artificial Sequence
  Description of Artificial Sequence: Synthetic oligonucleotide
  Sense strand starting at position 698 of SEQ ID NO: 584995
ucugauuuaugacaaaguc

SEQ ID NO: 605295 - RNA, 19 nt, Artificial Sequence
  Description of Artificial Sequence: Synthetic oligonucleotide
  Antisense strand to SEQ ID NO: 605294
gacuuugucauaaaucaga

SEQ ID NO: 605296 - RNA, 19 nt, Artificial Sequence
  Description of Artificial Sequence: Synthetic oligonucleotide
  Sense strand starting at position 799 of SEQ ID NO: 584995
ggauucugauaacuaccuu

SEQ ID NO: 605297 - RNA, 19 nt, Artificial Sequence
  Description of Artificial Sequence: Synthetic oligonucleotide
  Antisense strand to SEQ ID NO: 605296
aagguaguuaucagaaucc

SEQ ID NO: 605298 - RNA, 19 nt, Artificial Sequence
  Description of Artificial Sequence: Synthetic oligonucleotide
  Sense strand starting at position 856 of SEQ ID NO: 584995
uuuaaaugugaguaccauc

SEQ ID NO: 605299 - RNA, 19 nt, Artificial Sequence
  Description of Artificial Sequence: Synthetic oligonucleotide
  Antisense strand to SEQ ID NO: 605298
gaugguacucacauuuaaa

SEQ ID NO: 605300 - RNA, 19 nt, Artificial Sequence
  Description of Artificial Sequence: Synthetic oligonucleotide
  Sense strand starting at position 1524 of SEQ ID NO: 584995
accacuaccuguuugacua

SEQ ID NO: 605301 - RNA, 19 nt, Artificial Sequence
  Description of Artificial Sequence: Synthetic oligonucleotide
  Antisense strand to SEQ ID NO: 605300
uagucaaacagguaguggu

SEQ ID NO: 605302 - RNA, 19 nt, Artificial Sequence
  Description of Artificial Sequence: Synthetic oligonucleotide
  Sense strand starting at position 1525 of SEQ ID NO: 584995
ccacuaccuguuugacuau

SEQ ID NO: 605303 - RNA, 19 nt, Artificial Sequence
  Description of Artificial Sequence: Synthetic oligonucleotide
  Antisense strand to SEQ ID NO: 605302
auagucaaacagguagugg

SEQ ID NO: 605304 - RNA, 19 nt, Artificial Sequence
  Description of Artificial Sequence: Synthetic oligonucleotide
  Sense strand starting at position 1773 of SEQ ID NO: 584995
ggagauaacuaacauuuac

SEQ ID NO: 605305 - RNA, 19 nt, Artificial Sequence
  Description of Artificial Sequence: Synthetic oligonucleotide
  Antisense strand to SEQ ID NO: 605304
guaaauguuaguuaucucc

SEQ ID NO: 605306 - RNA, 19 nt, Artificial Sequence
  Description of Artificial Sequence: Synthetic oligonucleotide
  Sense strand starting at position 1860 of SEQ ID NO: 584995
uggguagucacuuaugaau

SEQ ID NO: 605307 - RNA, 19 nt, Artificial Sequence
  Description of Artificial Sequence: Synthetic oligonucleotide
  Antisense strand to SEQ ID NO: 605306
auucauaagugacuaccca

SEQ ID NO: 605308 - RNA, 19 nt, Artificial Sequence
  Description of Artificial Sequence: Synthetic oligonucleotide
  Sense strand starting at position 2035 of SEQ ID NO: 584995
uagucaguacaagguaaau

SEQ ID NO: 605309 - RNA, 19 nt, Artificial Sequence
  Description of Artificial Sequence: Synthetic oligonucleotide
  Antisense strand to SEQ ID NO: 605308
auuuaccuuguacugacua

SEQ ID NO: 605310 - RNA, 19 nt, Artificial Sequence
  Description of Artificial Sequence: Synthetic oligonucleotide
  Sense strand starting at position 2115 of SEQ ID NO: 584995
aaaucuagagucugugaag

SEQ ID NO: 605311 - RNA, 19 nt, Artificial Sequence
  Description of Artificial Sequence: Synthetic oligonucleotide
  Antisense strand to SEQ ID NO: 605310
cuucacagacucuagauuu

SEQ ID NO: 605312 - RNA, 19 nt, Artificial Sequence
  Description of Artificial Sequence: Synthetic oligonucleotide
  Sense strand starting at position 2116 of SEQ ID NO: 584995
aaucuagagucugugaaga

SEQ ID NO: 605313 - RNA, 19 nt, Artificial Sequence
  Description of Artificial Sequence: Synthetic oligonucleotide
  Antisense strand to SEQ ID NO: 605312
ucuucacagacucuagauu

SEQ ID NO: 605314 - RNA, 19 nt, Artificial Sequence
  Description of Artificial Sequence: Synthetic oligonucleotide
  Sense strand starting at position 2296 of SEQ ID NO: 584995
augacuugcugguccagaa

SEQ ID NO: 605315 - RNA, 19 nt, Artificial Sequence
  Description of Artificial Sequence: Synthetic oligonucleotide
  Antisense strand to SEQ ID NO: 605314
uucuggaccagcaagucau

SEQ ID NO: 605316 - RNA, 19 nt, Artificial Sequence
  Description of Artificial Sequence: Synthetic oligonucleotide
  Sense strand starting at position 2300 of SEQ ID NO: 584995
cuugcugguccagaaacuu

SEQ ID NO: 605317 - RNA, 19 nt, Artificial Sequence
  Description of Artificial Sequence: Synthetic oligonucleotide
  Antisense strand to SEQ ID NO: 605316
aaguuucuggaccagcaag

SEQ ID NO: 605318 - RNA, 19 nt, Artificial Sequence
  Description of Artificial Sequence: Synthetic oligonucleotide
  Sense strand starting at position 2440 of SEQ ID NO: 584995
uuugguaacuguucuauaa

SEQ ID NO: 605319 - RNA, 19 nt, Artificial Sequence
  Description of Artificial Sequence: Synthetic oligonucleotide
  Antisense strand to SEQ ID NO: 605318
uuauagaacaguuaccaaa

SEQ ID NO: 605320 - RNA, 19 nt, Artificial Sequence
  Description of Artificial Sequence: Synthetic oligonucleotide
  Sense strand starting at position 2444 of SEQ ID NO: 584995
guaacuguucuauaaugug

SEQ ID NO: 605321 - RNA, 19 nt, Artificial Sequence
  Description of Artificial Sequence: Synthetic oligonucleotide
  Antisense strand to SEQ ID NO: 605320
cacauuauagaacaguuac

SEQ ID NO: 605322 - RNA, 19 nt, Artificial Sequence
  Description of Artificial Sequence: Synthetic oligonucleotide
  Sense strand starting at position 2542 of SEQ ID NO: 584995
ucugcaauuugggagaauu

SEQ ID NO: 605323 - RNA, 19 nt, Artificial Sequence
  Description of Artificial Sequence: Synthetic oligonucleotide
  Antisense strand to SEQ ID NO: 605322
aauucucccaaauugcaga

SEQ ID NO: 605324 - RNA, 19 nt, Artificial Sequence
  Description of Artificial Sequence: Synthetic oligonucleotide
  Sense strand starting at position 2593 of SEQ ID NO: 584995
gcaacuaacuaccuugaga

SEQ ID NO: 605325 - RNA, 19 nt, Artificial Sequence
  Description of Artificial Sequence: Synthetic oligonucleotide
  Antisense strand to SEQ ID NO: 605324
ucucaagguaguuaguugc

SEQ ID NO: 605326 - RNA, 19 nt, Artificial Sequence
  Description of Artificial Sequence: Synthetic oligonucleotide
  Sense strand starting at position 2662 of SEQ ID NO: 584995
ucauuugagucacaugaug

SEQ ID NO: 605327 - RNA, 19 nt, Artificial Sequence
  Description of Artificial Sequence: Synthetic oligonucleotide
  Antisense strand to SEQ ID NO: 605326
caucaugugacucaaauga

SEQ ID NO: 605328 - RNA, 19 nt, Artificial Sequence
  Description of Artificial Sequence: Synthetic oligonucleotide
  Sense strand starting at position 2690 of SEQ ID NO: 584995
acaggacacuuagaacaaa

SEQ ID NO: 605329 - RNA, 19 nt, Artificial Sequence
  Description of Artificial Sequence: Synthetic oligonucleotide
  Antisense strand to SEQ ID NO: 605328
uuuguucuaaguguccugu

SEQ ID NO: 605330 - RNA, 19 nt, Artificial Sequence
  Description of Artificial Sequence: Synthetic oligonucleotide
  Sense strand starting at position 2758 of SEQ ID NO: 584995
cucugaaacuagguguaau

SEQ ID NO: 605331 - RNA, 19 nt, Artificial Sequence
  Description of Artificial Sequence: Synthetic oligonucleotide
  Antisense strand to SEQ ID NO: 605330
auuacaccuaguuucagag

SEQ ID NO: 605332 - RNA, 19 nt, Artificial Sequence
  Description of Artificial Sequence: Synthetic oligonucleotide
  Sense strand starting at position 2812 of SEQ ID NO: 584995
uugggaaauguuuguauau

SEQ ID NO: 605333 - RNA, 19 nt, Artificial Sequence
  Description of Artificial Sequence: Synthetic oligonucleotide
  Antisense strand to SEQ ID NO: 605332
auauacaaacauuucccaa

SEQ ID NO: 605334 - RNA, 19 nt, Artificial Sequence
  Description of Artificial Sequence: Synthetic oligonucleotide
  Sense strand starting at position 2813 of SEQ ID NO: 584995
ugggaaauguuuguauaug

SEQ ID NO: 605335 - RNA, 19 nt, Artificial Sequence
  Description of Artificial Sequence: Synthetic oligonucleotide
  Antisense strand to SEQ ID NO: 605334
cauauacaaacauuuccca

SEQ ID NO: 605336 - RNA, 19 nt, Artificial Sequence
  Description of Artificial Sequence: Synthetic oligonucleotide
  Sense strand starting at position 2835 of SEQ ID NO: 584995
gugcauggucgcuuauauu

SEQ ID NO: 605337 - RNA, 19 nt, Artificial Sequence
  Description of Artificial Sequence: Synthetic oligonucleotide
  Antisense strand to SEQ ID NO: 605336
aauauaagcgaccaugcac

SEQ ID NO: 605338 - RNA, 19 nt, Artificial Sequence
  Description of Artificial Sequence: Synthetic oligonucleotide
  Sense strand starting at position 2950 of SEQ ID NO: 584995
uuguaucuugcuuaagaaa

SEQ ID NO: 605339 - RNA, 19 nt, Artificial Sequence
  Description of Artificial Sequence: Synthetic oligonucleotide
  Antisense strand to SEQ ID NO: 605338
uuucuuaagcaagauacaa

SEQ ID NO: 605340 - RNA, 19 nt, Artificial Sequence
  Description of Artificial Sequence: Synthetic oligonucleotide
  Sense strand starting at position 3010 of SEQ ID NO: 584995
agaauuguguagucauaag

SEQ ID NO: 605341 - RNA, 19 nt, Artificial Sequence
  Description of Artificial Sequence: Synthetic oligonucleotide
  Antisense strand to SEQ ID NO: 605340
cuuaugacuacacaauucu

SEQ ID NO: 605342 - RNA, 19 nt, Artificial Sequence
  Description of Artificial Sequence: Synthetic oligonucleotide
  Sense strand starting at position 3080 of SEQ ID NO: 584995
agaucagagucucuuaaga

SEQ ID NO: 605343 - RNA, 19 nt, Artificial Sequence
  Description of Artificial Sequence: Synthetic oligonucleotide
  Antisense strand to SEQ ID NO: 605342
ucuuaagagacucugaucu

SEQ ID NO: 605344 - RNA, 19 nt, Artificial Sequence
  Description of Artificial Sequence: Synthetic oligonucleotide
  Sense strand starting at position 3426 of SEQ ID NO: 584995
accagcaugguuuauauau

SEQ ID NO: 605345 - RNA, 19 nt, Artificial Sequence
  Description of Artificial Sequence: Synthetic oligonucleotide
  Antisense strand to SEQ ID NO: 605344
auauauaaaccaugcuggu

SEQ ID NO: 605346 - RNA, 19 nt, Artificial Sequence
  Description of Artificial Sequence: Synthetic oligonucleotide
  Sense strand starting at position 3482 of SEQ ID NO: 584995
gcuguuuauaaaggagagu

SEQ ID NO: 605347 - RNA, 19 nt, Artificial Sequence
  Description of Artificial Sequence: Synthetic oligonucleotide
  Antisense strand to SEQ ID NO: 605346
acucuccuuuauaaacagc

SEQ ID NO: 605348 - RNA, 19 nt, Artificial Sequence
  Description of Artificial Sequence: Synthetic oligonucleotide
  Sense strand starting at position 3488 of SEQ ID NO: 584995
uauaaaggagaguguugau

SEQ ID NO: 605349 - RNA, 19 nt, Artificial Sequence
  Description of Artificial Sequence: Synthetic oligonucleotide
  Antisense strand to SEQ ID NO: 605348
aucaacacucuccuuuaua

SEQ ID NO: 605350 - RNA, 19 nt, Artificial Sequence
  Description of Artificial Sequence: Synthetic oligonucleotide
  Sense strand starting at position 3514 of SEQ ID NO: 584995
caagucaaguguuuaugga

SEQ ID NO: 605351 - RNA, 19 nt, Artificial Sequence
  Description of Artificial Sequence: Synthetic oligonucleotide
  Antisense strand to SEQ ID NO: 605350
uccauaaacacuugacuug

SEQ ID NO: 605352 - RNA, 19 nt, Artificial Sequence
  Description of Artificial Sequence: Synthetic oligonucleotide
  Sense strand starting at position 3515 of SEQ ID NO: 584995
aagucaaguguuuauggaa

SEQ ID NO: 605353 - RNA, 19 nt, Artificial Sequence
  Description of Artificial Sequence: Synthetic oligonucleotide
  Antisense strand to SEQ ID NO: 605352
uuccauaaacacuugacuu

SEQ ID NO: 605354 - RNA, 19 nt, Artificial Sequence
  Description of Artificial Sequence: Synthetic oligonucleotide
  Sense strand starting at position 3699 of SEQ ID NO: 584995
acuugauuugcaugugagu

SEQ ID NO: 605355 - RNA, 19 nt, Artificial Sequence
  Description of Artificial Sequence: Synthetic oligonucleotide
  Antisense strand to SEQ ID NO: 605354
acucacaugcaaaucaagu

SEQ ID NO: 605356 - RNA, 19 nt, Artificial Sequence
  Description of Artificial Sequence: Synthetic oligonucleotide
  Sense strand starting at position 3932 of SEQ ID NO: 584995
ggcuaauguguuuacaauc

SEQ ID NO: 605357 - RNA, 19 nt, Artificial Sequence
  Description of Artificial Sequence: Synthetic oligonucleotide
  Antisense strand to SEQ ID NO: 605356
gauuguaaacacauuagcc

SEQ ID NO: 605358 - RNA, 19 nt, Artificial Sequence
  Description of Artificial Sequence: Synthetic oligonucleotide
  Sense strand starting at position 3951 of SEQ ID NO: 584995
acaucauguuugucugaau

SEQ ID NO: 605359 - RNA, 19 nt, Artificial Sequence
  Description of Artificial Sequence: Synthetic oligonucleotide
  Antisense strand to SEQ ID NO: 605358
auucagacaaacaugaugu

SEQ ID NO: 605360 - RNA, 19 nt, Artificial Sequence
  Description of Artificial Sequence: Synthetic oligonucleotide
  Sense strand starting at position 62 of SEQ ID NO: 584996
uccauugucucaucccaga

SEQ ID NO: 605361 - RNA, 19 nt, Artificial Sequence
  Description of Artificial Sequence: Synthetic oligonucleotide
  Antisense strand to SEQ ID NO: 605360
ucugggaugagacaaugga

SEQ ID NO: 605362 - RNA, 19 nt, Artificial Sequence
  Description of Artificial Sequence: Synthetic oligonucleotide
  Sense strand starting at position 67 of SEQ ID NO: 584996
ugucucaucccagaagauu

SEQ ID NO: 605363 - RNA, 19 nt, Artificial Sequence
  Description of Artificial Sequence: Synthetic oligonucleotide
  Antisense strand to SEQ ID NO: 605362
aaucuucugggaugagaca

SEQ ID NO: 605364 - RNA, 19 nt, Artificial Sequence
  Description of Artificial Sequence: Synthetic oligonucleotide
  Sense strand starting at position 870 of SEQ ID NO: 584996
ccauucuagccauaggcau

SEQ ID NO: 605365 - RNA, 19 nt, Artificial Sequence
  Description of Artificial Sequence: Synthetic oligonucleotide
  Antisense strand to SEQ ID NO: 605364
augccuauggcuagaaugg

SEQ ID NO: 605366 - RNA, 19 nt, Artificial Sequence
  Description of Artificial Sequence: Synthetic oligonucleotide
  Sense strand starting at position 1157 of SEQ ID NO: 584996
aagacauucgugcaggcaa

SEQ ID NO: 605367 - RNA, 19 nt, Artificial Sequence
  Description of Artificial Sequence: Synthetic oligonucleotide
  Antisense strand to SEQ ID NO: 605366
uugccugcacgaaugucuu

SEQ ID NO: 605368 - RNA, 19 nt, Artificial Sequence
  Description of Artificial Sequence: Synthetic oligonucleotide
  Sense strand starting at position 1548 of SEQ ID NO: 584996
ucaauuauaggcuggguaa

SEQ ID NO: 605369 - RNA, 19 nt, Artificial Sequence
  Description of Artificial Sequence: Synthetic oligonucleotide
  Antisense strand to SEQ ID NO: 605368
uuacccagccuauaauuga

SEQ ID NO: 605370 - RNA, 19 nt, Artificial Sequence
  Description of Artificial Sequence: Synthetic oligonucleotide
  Sense strand starting at position 1549 of SEQ ID NO: 584996
caauuauaggcuggguaaa

SEQ ID NO: 605371 - RNA, 19 nt, Artificial Sequence
  Description of Artificial Sequence: Synthetic oligonucleotide
  Antisense strand to SEQ ID NO: 605370
uuuacccagccuauaauug

SEQ ID NO: 605372 - RNA, 19 nt, Artificial Sequence
  Description of Artificial Sequence: Synthetic oligonucleotide
  Sense strand starting at position 1551 of SEQ ID NO: 584996
auuauaggcuggguaaaga

SEQ ID NO: 605373 - RNA, 19 nt, Artificial Sequence
  Description of Artificial Sequence: Synthetic oligonucleotide
  Antisense strand to SEQ ID NO: 605372
ucuuuacccagccuauaau

SEQ ID NO: 605374 - RNA, 19 nt, Artificial Sequence
  Description of Artificial Sequence: Synthetic oligonucleotide
  Sense strand starting at position 1771 of SEQ ID NO: 584996
cacacuagggucugucaga

SEQ ID NO: 605375 - RNA, 19 nt, Artificial Sequence
  Description of Artificial Sequence: Synthetic oligonucleotide
  Antisense strand to SEQ ID NO: 605374
ucugacagacccuagugug

SEQ ID NO: 605376 - RNA, 19 nt, Artificial Sequence
  Description of Artificial Sequence: Synthetic oligonucleotide
  Sense strand starting at position 1772 of SEQ ID NO: 584996
acacuagggucugucagaa

SEQ ID NO: 605377 - RNA, 19 nt, Artificial Sequence
  Description of Artificial Sequence: Synthetic oligonucleotide
  Antisense strand to SEQ ID NO: 605376
uucugacagacccuagugu

SEQ ID NO: 605378 - RNA, 19 nt, Artificial Sequence
  Description of Artificial Sequence: Synthetic oligonucleotide
  Sense strand starting at position 1999 of SEQ ID NO: 584996
cuggacuaugaaugcguaa

SEQ ID NO: 605379 - RNA, 19 nt, Artificial Sequence
  Description of Artificial Sequence: Synthetic oligonucleotide
  Antisense strand to SEQ ID NO: 605378
uuacgcauucauaguccag

SEQ ID NO: 605380 - RNA, 19 nt, Artificial Sequence
  Description of Artificial Sequence: Synthetic oligonucleotide
  Sense strand starting at position 2001 of SEQ ID NO: 584996
ggacuaugaaugcguaaag

SEQ ID NO: 605381 - RNA, 19 nt, Artificial Sequence
  Description of Artificial Sequence: Synthetic oligonucleotide
  Antisense strand to SEQ ID NO: 605380
cuuuacgcauucauagucc

SEQ ID NO: 605382 - RNA, 19 nt, Artificial Sequence
  Description of Artificial Sequence: Synthetic oligonucleotide
  Sense strand starting at position 2082 of SEQ ID NO: 584996
auucgagcccuuuaaagcu

SEQ ID NO: 605383 - RNA, 19 nt, Artificial Sequence
  Description of Artificial Sequence: Synthetic oligonucleotide
  Antisense strand to SEQ ID NO: 605382
agcuuuaaagggcucgaau

SEQ ID NO: 605384 - RNA, 19 nt, Artificial Sequence
  Description of Artificial Sequence: Synthetic oligonucleotide
  Sense strand starting at position 2205 of SEQ ID NO: 584996
gauucuuucugguccagaa

SEQ ID NO: 605385 - RNA, 19 nt, Artificial Sequence
  Description of Artificial Sequence: Synthetic oligonucleotide
  Antisense strand to SEQ ID NO: 605384
uucuggaccagaaagaauc

SEQ ID NO: 605386 - RNA, 19 nt, Artificial Sequence
  Description of Artificial Sequence: Synthetic oligonucleotide
  Sense strand starting at position 2207 of SEQ ID NO: 584996
uucuuucugguccagaaau

SEQ ID NO: 605387 - RNA, 19 nt, Artificial Sequence
  Description of Artificial Sequence: Synthetic oligonucleotide
  Antisense strand to SEQ ID NO: 605386
auuucuggaccagaaagaa

SEQ ID NO: 605388 - RNA, 19 nt, Artificial Sequence
  Description of Artificial Sequence: Synthetic oligonucleotide
  Sense strand starting at position 2209 of SEQ ID NO: 584996
cuuucugguccagaaauuc

SEQ ID NO: 605389 - RNA, 19 nt, Artificial Sequence
  Description of Artificial Sequence: Synthetic oligonucleotide
  Antisense strand to SEQ ID NO: 605388
gaauuucuggaccagaaag

SEQ ID NO: 605390 - RNA, 19 nt, Artificial Sequence
  Description of Artificial Sequence: Synthetic oligonucleotide
  Sense strand starting at position 2333 of SEQ ID NO: 584996
auggaauguuuauugacaa

SEQ ID NO: 605391 - RNA, 19 nt, Artificial Sequence
  Description of Artificial Sequence: Synthetic oligonucleotide
  Antisense strand to SEQ ID NO: 605390
uugucaauaaacauuccau

SEQ ID NO: 605392 - RNA, 19 nt, Artificial Sequence
  Description of Artificial Sequence: Synthetic oligonucleotide
  Sense strand starting at position 2375 of SEQ ID NO: 584996
auauaaauuugggagccaa

SEQ ID NO: 605393 - RNA, 19 nt, Artificial Sequence
  Description of Artificial Sequence: Synthetic oligonucleotide
  Antisense strand to SEQ ID NO: 605392
uuggcucccaaauuuauau

SEQ ID NO: 605394 - RNA, 19 nt, Artificial Sequence
  Description of Artificial Sequence: Synthetic oligonucleotide
  Sense strand starting at position 2514 of SEQ ID NO: 584996
cugaucuaguaaucacagu

SEQ ID NO: 605395 - RNA, 19 nt, Artificial Sequence
  Description of Artificial Sequence: Synthetic oligonucleotide
  Antisense strand to SEQ ID NO: 605394
acugugauuacuagaucag

SEQ ID NO: 605396 - RNA, 19 nt, Artificial Sequence
  Description of Artificial Sequence: Synthetic oligonucleotide
  Sense strand starting at position 2522 of SEQ ID NO: 584996
guaaucacagugcacaaau

SEQ ID NO: 605397 - RNA, 19 nt, Artificial Sequence
  Description of Artificial Sequence: Synthetic oligonucleotide
  Antisense strand to SEQ ID NO: 605396
auuugugcacugugauuac

SEQ ID NO: 605398 - RNA, 19 nt, Artificial Sequence
  Description of Artificial Sequence: Synthetic oligonucleotide
  Sense strand starting at position 2569 of SEQ ID NO: 584996
cagaguaugcuguauauua

SEQ ID NO: 605399 - RNA, 19 nt, Artificial Sequence
  Description of Artificial Sequence: Synthetic oligonucleotide
  Antisense strand to SEQ ID NO: 605398
uaauauacagcauacucug

SEQ ID NO: 605400 - RNA, 19 nt, Artificial Sequence
  Description of Artificial Sequence: Synthetic oligonucleotide
  Sense strand starting at position 2571 of SEQ ID NO: 584996
gaguaugcuguauauuauc

SEQ ID NO: 605401 - RNA, 19 nt, Artificial Sequence
  Description of Artificial Sequence: Synthetic oligonucleotide
  Antisense strand to SEQ ID NO: 605400
gauaauauacagcauacuc

SEQ ID NO: 605402 - RNA, 19 nt, Artificial Sequence
  Description of Artificial Sequence: Synthetic oligonucleotide
  Sense strand starting at position 2576 of SEQ ID NO: 584996
ugcuguauauuauccgaau

SEQ ID NO: 605403 - RNA, 19 nt, Artificial Sequence
  Description of Artificial Sequence: Synthetic oligonucleotide
  Antisense strand to SEQ ID NO: 605402
auucggauaauauacagca

SEQ ID NO: 605404 - RNA, 19 nt, Artificial Sequence
  Description of Artificial Sequence: Synthetic oligonucleotide
  Sense strand starting at position 2577 of SEQ ID NO: 584996
gcuguauauuauccgaaua

SEQ ID NO: 605405 - RNA, 19 nt, Artificial Sequence
  Description of Artificial Sequence: Synthetic oligonucleotide
  Antisense strand to SEQ ID NO: 605404
uauucggauaauauacagc

SEQ ID NO: 605406 - RNA, 19 nt, Artificial Sequence
  Description of Artificial Sequence: Synthetic oligonucleotide
  Sense strand starting at position 2643 of SEQ ID NO: 584996
aaggcauauguuuaauugu

SEQ ID NO: 605407 - RNA, 19 nt, Artificial Sequence
  Description of Artificial Sequence: Synthetic oligonucleotide
  Antisense strand to SEQ ID NO: 605406
acaauuaaacauaugccuu

SEQ ID NO: 605408 - RNA, 19 nt, Artificial Sequence
  Description of Artificial Sequence: Synthetic oligonucleotide
  Sense strand starting at position 2789 of SEQ ID NO: 584996
augacaauauuccugugua

SEQ ID NO: 605409 - RNA, 19 nt, Artificial Sequence
  Description of Artificial Sequence: Synthetic oligonucleotide
  Antisense strand to SEQ ID NO: 605408
uacacaggaauauugucau

SEQ ID NO: 605410 - RNA, 19 nt, Artificial Sequence
  Description of Artificial Sequence: Synthetic oligonucleotide
  Sense strand starting at position 2792 of SEQ ID NO: 584996
acaauauuccuguguaaua

SEQ ID NO: 605411 - RNA, 19 nt, Artificial Sequence
  Description of Artificial Sequence: Synthetic oligonucleotide
  Antisense strand to SEQ ID NO: 605410
uauuacacaggaauauugu

SEQ ID NO: 605412 - RNA, 19 nt, Artificial Sequence
  Description of Artificial Sequence: Synthetic oligonucleotide
  Sense strand starting at position 2831 of SEQ ID NO: 584996
cuuauaugcgaauggagua

SEQ ID NO: 605413 - RNA, 19 nt, Artificial Sequence
  Description of Artificial Sequence: Synthetic oligonucleotide
  Antisense strand to SEQ ID NO: 605412
uacuccauucgcauauaag

SEQ ID NO: 605414 - RNA, 19 nt, Artificial Sequence
  Description of Artificial Sequence: Synthetic oligonucleotide
  Sense strand starting at position 2832 of SEQ ID NO: 584996
uuauaugcgaauggaguau

SEQ ID NO: 605415 - RNA, 19 nt, Artificial Sequence
  Description of Artificial Sequence: Synthetic oligonucleotide
  Antisense strand to SEQ ID NO: 605414
auacuccauucgcauauaa

SEQ ID NO: 605416 - RNA, 19 nt, Artificial Sequence
  Description of Artificial Sequence: Synthetic oligonucleotide
  Sense strand starting at position 2836 of SEQ ID NO: 584996
augcgaauggaguaugguu

SEQ ID NO: 605417 - RNA, 19 nt, Artificial Sequence
  Description of Artificial Sequence: Synthetic oligonucleotide
  Antisense strand to SEQ ID NO: 605416
aaccauacuccauucgcau

SEQ ID NO: 605418 - RNA, 19 nt, Artificial Sequence
  Description of Artificial Sequence: Synthetic oligonucleotide
  Sense strand starting at position 2932 of SEQ ID NO: 584996
ugucuucugcuuuacauca

SEQ ID NO: 605419 - RNA, 19 nt, Artificial Sequence
  Description of Artificial Sequence: Synthetic oligonucleotide
  Antisense strand to SEQ ID NO: 605418
ugauguaaagcagaagaca

SEQ ID NO: 605420 - RNA, 19 nt, Artificial Sequence
  Description of Artificial Sequence: Synthetic oligonucleotide
  Sense strand starting at position 3019 of SEQ ID NO: 584996
gggugauauuucuacuaau

SEQ ID NO: 605421 - RNA, 19 nt, Artificial Sequence
  Description of Artificial Sequence: Synthetic oligonucleotide
  Antisense strand to SEQ ID NO: 605420
auuaguagaaauaucaccc

SEQ ID NO: 605422 - RNA, 19 nt, Artificial Sequence
  Description of Artificial Sequence: Synthetic oligonucleotide
  Sense strand starting at position 3169 of SEQ ID NO: 584996
guuugauguggcuauauua

SEQ ID NO: 605423 - RNA, 19 nt, Artificial Sequence
  Description of Artificial Sequence: Synthetic oligonucleotide
  Antisense strand to SEQ ID NO: 605422
uaauauagccacaucaaac

SEQ ID NO: 605424 - RNA, 19 nt, Artificial Sequence
  Description of Artificial Sequence: Synthetic oligonucleotide
  Sense strand starting at position 3189 of SEQ ID NO: 584996
ugaaacauagguugaguau

SEQ ID NO: 605425 - RNA, 19 nt, Artificial Sequence
  Description of Artificial Sequence: Synthetic oligonucleotide
  Antisense strand to SEQ ID NO: 605424
auacucaaccuauguuuca

SEQ ID NO: 605426 - RNA, 19 nt, Artificial Sequence
  Description of Artificial Sequence: Synthetic oligonucleotide
  Sense strand starting at position 3229 of SEQ ID NO: 584996
accagacacguuugggauu

SEQ ID NO: 605427 - RNA, 19 nt, Artificial Sequence
  Description of Artificial Sequence: Synthetic oligonucleotide
  Antisense strand to SEQ ID NO: 605426
aaucccaaacgugucuggu

SEQ ID NO: 605428 - RNA, 19 nt, Artificial Sequence
  Description of Artificial Sequence: Synthetic oligonucleotide
  Sense strand starting at position 3235 of SEQ ID NO: 584996
cacguuugggauuacaaau

SEQ ID NO: 605429 - RNA, 19 nt, Artificial Sequence
  Description of Artificial Sequence: Synthetic oligonucleotide
  Antisense strand to SEQ ID NO: 605428
auuuguaaucccaaacgug

SEQ ID NO: 605430 - RNA, 19 nt, Artificial Sequence
  Description of Artificial Sequence: Synthetic oligonucleotide
  Sense strand starting at position 3395 of SEQ ID NO: 584996
gaaccaagguuuguguaca

SEQ ID NO: 605431 - RNA, 19 nt, Artificial Sequence
  Description of Artificial Sequence: Synthetic oligonucleotide
  Antisense strand to SEQ ID NO: 605430
uguacacaaaccuugguuc

SEQ ID NO: 605432 - RNA, 19 nt, Artificial Sequence
  Description of Artificial Sequence: Synthetic oligonucleotide
  Sense strand starting at position 3600 of SEQ ID NO: 584996
aaaucauguguuuaggcua

SEQ ID NO: 605433 - RNA, 19 nt, Artificial Sequence
  Description of Artificial Sequence: Synthetic oligonucleotide
  Antisense strand to SEQ ID NO: 605432
uagccuaaacacaugauuu

SEQ ID NO: 605434 - RNA, 19 nt, Artificial Sequence
  Description of Artificial Sequence: Synthetic oligonucleotide
  Sense strand starting at position 3603 of SEQ ID NO: 584996
ucauguguuuaggcuaacu

SEQ ID NO: 605435 - RNA, 19 nt, Artificial Sequence
  Description of Artificial Sequence: Synthetic oligonucleotide
  Antisense strand to SEQ ID NO: 605434
aguuagccuaaacacauga

SEQ ID NO: 605436 - RNA, 19 nt, Artificial Sequence
  Description of Artificial Sequence: Synthetic oligonucleotide
  Sense strand starting at position 3605 of SEQ ID NO: 584996
auguguuuaggcuaacuaa

SEQ ID NO: 605437 - RNA, 19 nt, Artificial Sequence
  Description of Artificial Sequence: Synthetic oligonucleotide
  Antisense strand to SEQ ID NO: 605436
uuaguuagccuaaacacau

SEQ ID NO: 605438 - RNA, 19 nt, Artificial Sequence
  Description of Artificial Sequence: Synthetic oligonucleotide
  Sense strand starting at position 3629 of SEQ ID NO: 584996
agaguagcaucaccagaau

SEQ ID NO: 605439 - RNA, 19 nt, Artificial Sequence
  Description of Artificial Sequence: Synthetic oligonucleotide
  Antisense strand to SEQ ID NO: 605438
auucuggugaugcuacucu

SEQ ID NO: 605440 - RNA, 19 nt, Artificial Sequence
  Description of Artificial Sequence: Synthetic oligonucleotide
  Sense strand starting at position 56 of SEQ ID NO: 584997
cugugaagguuaccaggau

SEQ ID NO: 605441 - RNA, 19 nt, Artificial Sequence
  Description of Artificial Sequence: Synthetic oligonucleotide
  Antisense strand to SEQ ID NO: 605440
auccugguaaccuucacag

SEQ ID NO: 605442 - RNA, 19 nt, Artificial Sequence
  Description of Artificial Sequence: Synthetic oligonucleotide
  Sense strand starting at position 68 of SEQ ID NO: 584997
ccaggauucugccuuauag

SEQ ID NO: 605443 - RNA, 19 nt, Artificial Sequence
  Description of Artificial Sequence: Synthetic oligonucleotide
  Antisense strand to SEQ ID NO: 605442
cuauaaggcagaauccugg

SEQ ID NO: 605444 - RNA, 19 nt, Artificial Sequence
  Description of Artificial Sequence: Synthetic oligonucleotide
  Sense strand starting at position 70 of SEQ ID NO: 584997
aggauucugccuuauagcu

SEQ ID NO: 605445 - RNA, 19 nt, Artificial Sequence
  Description of Artificial Sequence: Synthetic oligonucleotide
  Antisense strand to SEQ ID NO: 605444
agcuauaaggcagaauccu

SEQ ID NO: 605446 - RNA, 19 nt, Artificial Sequence
  Description of Artificial Sequence: Synthetic oligonucleotide
  Sense strand starting at position 177 of SEQ ID NO: 584997
ccaucaggucugggaaauc

SEQ ID NO: 605447 - RNA, 19 nt, Artificial Sequence
  Description of Artificial Sequence: Synthetic oligonucleotide
  Antisense strand to SEQ ID NO: 605446
gauuucccagaccugaugg

SEQ ID NO: 605448 - RNA, 19 nt, Artificial Sequence
  Description of Artificial Sequence: Synthetic oligonucleotide
  Sense strand starting at position 186 of SEQ ID NO: 584997
cugggaaaucuaugccaag

SEQ ID NO: 605449 - RNA, 19 nt, Artificial Sequence
  Description of Artificial Sequence: Synthetic oligonucleotide
  Antisense strand to SEQ ID NO: 605448
cuuggcauagauuucccag

SEQ ID NO: 605450 - RNA, 19 nt, Artificial Sequence
  Description of Artificial Sequence: Synthetic oligonucleotide
  Sense strand starting at position 270 of SEQ ID NO: 584997
agggacaauguauguaaca

SEQ ID NO: 605451 - RNA, 19 nt, Artificial Sequence
  Description of Artificial Sequence: Synthetic oligonucleotide
  Antisense strand to SEQ ID NO: 605450
uguuacauacauugucccu

SEQ ID NO: 605452 - RNA, 19 nt, Artificial Sequence
  Description of Artificial Sequence: Synthetic oligonucleotide
  Sense strand starting at position 359 of SEQ ID NO: 584997
uugcaaugucugcuaguuu

SEQ ID NO: 605453 - RNA, 19 nt, Artificial Sequence
  Description of Artificial Sequence: Synthetic oligonucleotide
  Antisense strand to SEQ ID NO: 605452
aaacuagcagacauugcaa

SEQ ID NO: 605454 - RNA, 19 nt, Artificial Sequence
  Description of Artificial Sequence: Synthetic oligonucleotide
  Sense strand starting at position 374 of SEQ ID NO: 584997
guuuguugagcucauaaga

SEQ ID NO: 605455 - RNA, 19 nt, Artificial Sequence
  Description of Artificial Sequence: Synthetic oligonucleotide
  Antisense strand to SEQ ID NO: 605454
ucuuaugagcucaacaaac

SEQ ID NO: 605456 - RNA, 19 nt, Artificial Sequence
  Description of Artificial Sequence: Synthetic oligonucleotide
  Sense strand starting at position 430 of SEQ ID NO: 584997
auuacuaaguguuuaagag

SEQ ID NO: 605457 - RNA, 19 nt, Artificial Sequence
  Description of Artificial Sequence: Synthetic oligonucleotide
  Antisense strand to SEQ ID NO: 605456
cucuuaaacacuuaguaau

SEQ ID NO: 605458 - RNA, 19 nt, Artificial Sequence
  Description of Artificial Sequence: Synthetic oligonucleotide
  Sense strand starting at position 438 of SEQ ID NO: 584997
guguuuaagagacaugugu

SEQ ID NO: 605459 - RNA, 19 nt, Artificial Sequence
  Description of Artificial Sequence: Synthetic oligonucleotide
  Antisense strand to SEQ ID NO: 605458
acacaugucucuuaaacac

SEQ ID NO: 605460 - RNA, 19 nt, Artificial Sequence
  Description of Artificial Sequence: Synthetic oligonucleotide
  Sense strand starting at position 488 of SEQ ID NO: 584997
aguauaaucuaauucgaga

SEQ ID NO: 605461 - RNA, 19 nt, Artificial Sequence
  Description of Artificial Sequence: Synthetic oligonucleotide
  Antisense strand to SEQ ID NO: 605460
ucucgaauuagauuauacu

SEQ ID NO: 605462 - RNA, 19 nt, Artificial Sequence
  Description of Artificial Sequence: Synthetic oligonucleotide
  Sense strand starting at position 660 of SEQ ID NO: 584997
ucugaugagccagaauucu

SEQ ID NO: 605463 - RNA, 19 nt, Artificial Sequence
  Description of Artificial Sequence: Synthetic oligonucleotide
  Antisense strand to SEQ ID NO: 605462
agaauucuggcucaucaga

SEQ ID NO: 605464 - RNA, 19 nt, Artificial Sequence
  Description of Artificial Sequence: Synthetic oligonucleotide
  Sense strand starting at position 790 of SEQ ID NO: 584997
gugagaguauauucaagga

SEQ ID NO: 605465 - RNA, 19 nt, Artificial Sequence
  Description of Artificial Sequence: Synthetic oligonucleotide
  Antisense strand to SEQ ID NO: 605464
uccuugaauauacucucac

SEQ ID NO: 605466 - RNA, 19 nt, Artificial Sequence
  Description of Artificial Sequence: Synthetic oligonucleotide
  Sense strand starting at position 971 of SEQ ID NO: 584997
ccuagagugucuuuaggag

SEQ ID NO: 605467 - RNA, 19 nt, Artificial Sequence
  Description of Artificial Sequence: Synthetic oligonucleotide
  Antisense strand to SEQ ID NO: 605466
cuccuaaagacacucuagg

SEQ ID NO: 605468 - RNA, 19 nt, Artificial Sequence
  Description of Artificial Sequence: Synthetic oligonucleotide
  Sense strand starting at position 988 of SEQ ID NO: 584997
agggccaugguguauaauu

SEQ ID NO: 605469 - RNA, 19 nt, Artificial Sequence
  Description of Artificial Sequence: Synthetic oligonucleotide
  Antisense strand to SEQ ID NO: 605468
aauuauacaccauggcccu

SEQ ID NO: 605470 - RNA, 19 nt, Artificial Sequence
  Description of Artificial Sequence: Synthetic oligonucleotide
  Sense strand starting at position 1049 of SEQ ID NO: 584997
ugugaagaauacccuuaua

SEQ ID NO: 605471 - RNA, 19 nt, Artificial Sequence
  Description of Artificial Sequence: Synthetic oligonucleotide
  Antisense strand to SEQ ID NO: 605470
uauaaggguauucuucaca

SEQ ID NO: 605472 - RNA, 19 nt, Artificial Sequence
  Description of Artificial Sequence: Synthetic oligonucleotide
  Sense strand starting at position 1368 of SEQ ID NO: 584997
cccacaugguaaguauuaa

SEQ ID NO: 605473 - RNA, 19 nt, Artificial Sequence
  Description of Artificial Sequence: Synthetic oligonucleotide
  Antisense strand to SEQ ID NO: 605472
uuaauacuuaccauguggg

SEQ ID NO: 605474 - RNA, 19 nt, Artificial Sequence
  Description of Artificial Sequence: Synthetic oligonucleotide
  Sense strand starting at position 1547 of SEQ ID NO: 584997
gucuuaauuugacuucgua

SEQ ID NO: 605475 - RNA, 19 nt, Artificial Sequence
  Description of Artificial Sequence: Synthetic oligonucleotide
  Antisense strand to SEQ ID NO: 605474
uacgaagucaaauuaagac

SEQ ID NO: 605476 - RNA, 19 nt, Artificial Sequence
  Description of Artificial Sequence: Synthetic oligonucleotide
  Sense strand starting at position 1612 of SEQ ID NO: 584997
ggucuuauguacuuagaau

SEQ ID NO: 605477 - RNA, 19 nt, Artificial Sequence
  Description of Artificial Sequence: Synthetic oligonucleotide
  Antisense strand to SEQ ID NO: 605476
auucuaaguacauaagacc

SEQ ID NO: 605478 - RNA, 19 nt, Artificial Sequence
  Description of Artificial Sequence: Synthetic oligonucleotide
  Sense strand starting at position 1673 of SEQ ID NO: 584997
cauagagaagcauguugaa

SEQ ID NO: 605479 - RNA, 19 nt, Artificial Sequence
  Description of Artificial Sequence: Synthetic oligonucleotide
  Antisense strand to SEQ ID NO: 605478
uucaacaugcuucucuaug

SEQ ID NO: 605480 - RNA, 19 nt, Artificial Sequence
  Description of Artificial Sequence: Synthetic oligonucleotide
  Sense strand starting at position 2504 of SEQ ID NO: 584997
cgcagaacuccugacccaa

SEQ ID NO: 605481 - RNA, 19 nt, Artificial Sequence
  Description of Artificial Sequence: Synthetic oligonucleotide
  Antisense strand to SEQ ID NO: 605480
uugggucaggaguucugcg

SEQ ID NO: 605482 - RNA, 19 nt, Artificial Sequence
  Description of Artificial Sequence: Synthetic oligonucleotide
  Sense strand starting at position 2583 of SEQ ID NO: 584997
ucagaaggcggaugaguaa

SEQ ID NO: 605483 - RNA, 19 nt, Artificial Sequence
  Description of Artificial Sequence: Synthetic oligonucleotide
  Antisense strand to SEQ ID NO: 605482
uuacucauccgccuucuga

SEQ ID NO: 605484 - RNA, 19 nt, Artificial Sequence
  Description of Artificial Sequence: Synthetic oligonucleotide
  Sense strand starting at position 2592 of SEQ ID NO: 584997
ggaugaguaauaggugcau

SEQ ID NO: 605485 - RNA, 19 nt, Artificial Sequence
  Description of Artificial Sequence: Synthetic oligonucleotide
  Antisense strand to SEQ ID NO: 605484
augcaccuauuacucaucc

SEQ ID NO: 605486 - RNA, 19 nt, Artificial Sequence
  Description of Artificial Sequence: Synthetic oligonucleotide
  Sense strand starting at position 2654 of SEQ ID NO: 584997
ucgcuuaugaccuagagga

SEQ ID NO: 605487 - RNA, 19 nt, Artificial Sequence
  Description of Artificial Sequence: Synthetic oligonucleotide
  Antisense strand to SEQ ID NO: 605486
uccucuaggucauaagcga

SEQ ID NO: 605488 - RNA, 19 nt, Artificial Sequence
  Description of Artificial Sequence: Synthetic oligonucleotide
  Sense strand starting at position 2691 of SEQ ID NO: 584997
augucaagccaaggauuaa

SEQ ID NO: 605489 - RNA, 19 nt, Artificial Sequence
  Description of Artificial Sequence: Synthetic oligonucleotide
  Antisense strand to SEQ ID NO: 605488
uuaauccuuggcuugacau

SEQ ID NO: 605490 - RNA, 19 nt, Artificial Sequence
  Description of Artificial Sequence: Synthetic oligonucleotide
  Sense strand starting at position 2701 of SEQ ID NO: 584997
aaggauuaauauccgucau

SEQ ID NO: 605491 - RNA, 19 nt, Artificial Sequence
  Description of Artificial Sequence: Synthetic oligonucleotide
  Antisense strand to SEQ ID NO: 605490
augacggauauuaauccuu

SEQ ID NO: 605492 - RNA, 19 nt, Artificial Sequence
  Description of Artificial Sequence: Synthetic oligonucleotide
  Sense strand starting at position 2703 of SEQ ID NO: 584997
ggauuaauauccgucauac

SEQ ID NO: 605493 - RNA, 19 nt, Artificial Sequence
  Description of Artificial Sequence: Synthetic oligonucleotide
  Antisense strand to SEQ ID NO: 605492
guaugacggauauuaaucc

SEQ ID NO: 605494 - RNA, 19 nt, Artificial Sequence
  Description of Artificial Sequence: Synthetic oligonucleotide
  Sense strand starting at position 2743 of SEQ ID NO: 584997
caauaagaggcuugagauu

SEQ ID NO: 605495 - RNA, 19 nt, Artificial Sequence
  Description of Artificial Sequence: Synthetic oligonucleotide
  Antisense strand to SEQ ID NO: 605494
aaucucaagccucuuauug

SEQ ID NO: 605496 - RNA, 19 nt, Artificial Sequence
  Description of Artificial Sequence: Synthetic oligonucleotide
  Sense strand starting at position 3217 of SEQ ID NO: 584997
ggagaagagucauuccugu

SEQ ID NO: 605497 - RNA, 19 nt, Artificial Sequence
  Description of Artificial Sequence: Synthetic oligonucleotide
  Antisense strand to SEQ ID NO: 605496
acaggaaugacucuucucc

SEQ ID NO: 605498 - RNA, 19 nt, Artificial Sequence
  Description of Artificial Sequence: Synthetic oligonucleotide
  Sense strand starting at position 3290 of SEQ ID NO: 584997
agcgcuguggugccagaua

SEQ ID NO: 605499 - RNA, 19 nt, Artificial Sequence
  Description of Artificial Sequence: Synthetic oligonucleotide
  Antisense strand to SEQ ID NO: 605498
uaucuggcaccacagcgcu

SEQ ID NO: 605500 - RNA, 19 nt, Artificial Sequence
  Description of Artificial Sequence: Synthetic oligonucleotide
  Sense strand starting at position 3302 of SEQ ID NO: 584997
ccagauauuguuggugaac

SEQ ID NO: 605501 - RNA, 19 nt, Artificial Sequence
  Description of Artificial Sequence: Synthetic oligonucleotide
  Antisense strand to SEQ ID NO: 605500
guucaccaacaauaucugg

SEQ ID NO: 605502 - RNA, 19 nt, Artificial Sequence
  Description of Artificial Sequence: Synthetic oligonucleotide
  Sense strand starting at position 3328 of SEQ ID NO: 584997
ucagaaauuggcuaugucu

SEQ ID NO: 605503 - RNA, 19 nt, Artificial Sequence
  Description of Artificial Sequence: Synthetic oligonucleotide
  Antisense strand to SEQ ID NO: 605502
agacauagccaauuucuga

SEQ ID NO: 605504 - RNA, 19 nt, Artificial Sequence
  Description of Artificial Sequence: Synthetic oligonucleotide
  Sense strand starting at position 3423 of SEQ ID NO: 584997
aguaaauauugacccgaca

SEQ ID NO: 605505 - RNA, 19 nt, Artificial Sequence
  Description of Artificial Sequence: Synthetic oligonucleotide
  Antisense strand to SEQ ID NO: 605504
ugucgggucaauauuuacu

SEQ ID NO: 605506 - RNA, 19 nt, Artificial Sequence
  Description of Artificial Sequence: Synthetic oligonucleotide
  Sense strand starting at position 3494 of SEQ ID NO: 584997
cucauaguacuaugagaga

SEQ ID NO: 605507 - RNA, 19 nt, Artificial Sequence
  Description of Artificial Sequence: Synthetic oligonucleotide
  Antisense strand to SEQ ID NO: 605506
ucucucauaguacuaugag

SEQ ID NO: 605508 - RNA, 19 nt, Artificial Sequence
  Description of Artificial Sequence: Synthetic oligonucleotide
  Sense strand starting at position 3614 of SEQ ID NO: 584997
guugauaugaucuggguaa

SEQ ID NO: 605509 - RNA, 19 nt, Artificial Sequence
  Description of Artificial Sequence: Synthetic oligonucleotide
  Antisense strand to SEQ ID NO: 605508
uuacccagaucauaucaac

SEQ ID NO: 605510 - RNA, 19 nt, Artificial Sequence
  Description of Artificial Sequence: Synthetic oligonucleotide
  Sense strand starting at position 3673 of SEQ ID NO: 584997
ugcguauggcuugauuuga

SEQ ID NO: 605511 - RNA, 19 nt, Artificial Sequence
  Description of Artificial Sequence: Synthetic oligonucleotide
  Antisense strand to SEQ ID NO: 605510
ucaaaucaagccauacgca

SEQ ID NO: 605512 - RNA, 19 nt, Artificial Sequence
  Description of Artificial Sequence: Synthetic oligonucleotide
  Sense strand starting at position 3801 of SEQ ID NO: 584997
gagauuugcuucucuguau

SEQ ID NO: 605513 - RNA, 19 nt, Artificial Sequence
  Description of Artificial Sequence: Synthetic oligonucleotide
  Antisense strand to SEQ ID NO: 605512
auacagagaagcaaaucuc

SEQ ID NO: 605514 - RNA, 19 nt, Artificial Sequence
  Description of Artificial Sequence: Synthetic oligonucleotide
  Sense strand starting at position 3802 of SEQ ID NO: 584997
agauuugcuucucuguaua

SEQ ID NO: 605515 - RNA, 19 nt, Artificial Sequence
  Description of Artificial Sequence: Synthetic oligonucleotide
  Antisense strand to SEQ ID NO: 605514
uauacagagaagcaaaucu

SEQ ID NO: 605516 - RNA, 19 nt, Artificial Sequence
  Description of Artificial Sequence: Synthetic oligonucleotide
  Sense strand starting at position 3814 of SEQ ID NO: 584997
cuguauaacaugggaaagu

SEQ ID NO: 605517 - RNA, 19 nt, Artificial Sequence
  Description of Artificial Sequence: Synthetic oligonucleotide
  Antisense strand to SEQ ID NO: 605516
acuuucccauguuauacag

SEQ ID NO: 605518 - RNA, 19 nt, Artificial Sequence
  Description of Artificial Sequence: Synthetic oligonucleotide
  Sense strand starting at position 3856 of SEQ ID NO: 584997
uugggaaauucuuugauca

SEQ ID NO: 605519 - RNA, 19 nt, Artificial Sequence
  Description of Artificial Sequence: Synthetic oligonucleotide
  Antisense strand to SEQ ID NO: 605518
ugaucaaagaauuucccaa

SEQ ID NO: 605520 - RNA, 19 nt, Artificial Sequence
  Description of Artificial Sequence: Synthetic oligonucleotide
  Sense strand starting at position 245 of SEQ ID NO: 584998
agaauuaauuggguuaucu

SEQ ID NO: 605521 - RNA, 19 nt, Artificial Sequence
  Description of Artificial Sequence: Synthetic oligonucleotide
  Antisense strand to SEQ ID NO: 605520
agauaacccaauuaauucu

SEQ ID NO: 605522 - RNA, 19 nt, Artificial Sequence
  Description of Artificial Sequence: Synthetic oligonucleotide
  Sense strand starting at position 432 of SEQ ID NO: 584998
aaaggauuacguggauuag

SEQ ID NO: 605523 - RNA, 19 nt, Artificial Sequence
  Description of Artificial Sequence: Synthetic oligonucleotide
  Antisense strand to SEQ ID NO: 605522
cuaauccacguaauccuuu

SEQ ID NO: 605524 - RNA, 19 nt, Artificial Sequence
  Description of Artificial Sequence: Synthetic oligonucleotide
  Sense strand starting at position 635 of SEQ ID NO: 584998
agccuaugccaauaugcaa

SEQ ID NO: 605525 - RNA, 19 nt, Artificial Sequence
  Description of Artificial Sequence: Synthetic oligonucleotide
  Antisense strand to SEQ ID NO: 605524
uugcauauuggcauaggcu

SEQ ID NO: 605526 - RNA, 19 nt, Artificial Sequence
  Description of Artificial Sequence: Synthetic oligonucleotide
  Sense strand starting at position 691 of SEQ ID NO: 584998
ucguaaagauauccaaaua

SEQ ID NO: 605527 - RNA, 19 nt, Artificial Sequence
  Description of Artificial Sequence: Synthetic oligonucleotide
  Antisense strand to SEQ ID NO: 605526
uauuuggauaucuuuacga

SEQ ID NO: 605528 - RNA, 19 nt, Artificial Sequence
  Description of Artificial Sequence: Synthetic oligonucleotide
  Sense strand starting at position 917 of SEQ ID NO: 584998
ggguaacucccaggcuuga

SEQ ID NO: 605529 - RNA, 19 nt, Artificial Sequence
  Description of Artificial Sequence: Synthetic oligonucleotide
  Antisense strand to SEQ ID NO: 605528
ucaagccugggaguuaccc

SEQ ID NO: 605530 - RNA, 19 nt, Artificial Sequence
  Description of Artificial Sequence: Synthetic oligonucleotide
  Sense strand starting at position 930 of SEQ ID NO: 584998
gcuugaaacuugucaucaa

SEQ ID NO: 605531 - RNA, 19 nt, Artificial Sequence
  Description of Artificial Sequence: Synthetic oligonucleotide
  Antisense strand to SEQ ID NO: 605530
uugaugacaaguuucaagc

SEQ ID NO: 605532 - RNA, 19 nt, Artificial Sequence
  Description of Artificial Sequence: Synthetic oligonucleotide
  Sense strand starting at position 1062 of SEQ ID NO: 584998
cucccagaguuuccuggau

SEQ ID NO: 605533 - RNA, 19 nt, Artificial Sequence
  Description of Artificial Sequence: Synthetic oligonucleotide
  Antisense strand to SEQ ID NO: 605532
auccaggaaacucugggag

SEQ ID NO: 605534 - RNA, 19 nt, Artificial Sequence
  Description of Artificial Sequence: Synthetic oligonucleotide
  Sense strand starting at position 1066 of SEQ ID NO: 584998
cagaguuuccuggauagca

SEQ ID NO: 605535 - RNA, 19 nt, Artificial Sequence
  Description of Artificial Sequence: Synthetic oligonucleotide
  Antisense strand to SEQ ID NO: 605534
ugcuauccaggaaacucug

SEQ ID NO: 605536 - RNA, 19 nt, Artificial Sequence
  Description of Artificial Sequence: Synthetic oligonucleotide
  Sense strand starting at position 1068 of SEQ ID NO: 584998
gaguuuccuggauagcauu

SEQ ID NO: 605537 - RNA, 19 nt, Artificial Sequence
  Description of Artificial Sequence: Synthetic oligonucleotide
  Antisense strand to SEQ ID NO: 605536
aaugcuauccaggaaacuc

SEQ ID NO: 605538 - RNA, 19 nt, Artificial Sequence
  Description of Artificial Sequence: Synthetic oligonucleotide
  Sense strand starting at position 1149 of SEQ ID NO: 584998
ucauguugucauuagguag

SEQ ID NO: 605539 - RNA, 19 nt, Artificial Sequence
  Description of Artificial Sequence: Synthetic oligonucleotide
  Antisense strand to SEQ ID NO: 605538
cuaccuaaugacaacauga

SEQ ID NO: 605540 - RNA, 19 nt, Artificial Sequence
  Description of Artificial Sequence: Synthetic oligonucleotide
  Sense strand starting at position 1206 of SEQ ID NO: 584998
ucuaauaugcuacggaaga

SEQ ID NO: 605541 - RNA, 19 nt, Artificial Sequence
  Description of Artificial Sequence: Synthetic oligonucleotide
  Antisense strand to SEQ ID NO: 605540
ucuuccguagcauauuaga

SEQ ID NO: 605542 - RNA, 19 nt, Artificial Sequence
  Description of Artificial Sequence: Synthetic oligonucleotide
  Sense strand starting at position 1238 of SEQ ID NO: 584998
ggaaauugcuuccuuagau

SEQ ID NO: 605543 - RNA, 19 nt, Artificial Sequence
  Description of Artificial Sequence: Synthetic oligonucleotide
  Antisense strand to SEQ ID NO: 605542
aucuaaggaagcaauuucc

SEQ ID NO: 605544 - RNA, 19 nt, Artificial Sequence
  Description of Artificial Sequence: Synthetic oligonucleotide
  Sense strand starting at position 1245 of SEQ ID NO: 584998
gcuuccuuagaugaaauau

SEQ ID NO: 605545 - RNA, 19 nt, Artificial Sequence
  Description of Artificial Sequence: Synthetic oligonucleotide
  Antisense strand to SEQ ID NO: 605544
auauuucaucuaaggaagc

SEQ ID NO: 605546 - RNA, 19 nt, Artificial Sequence
  Description of Artificial Sequence: Synthetic oligonucleotide
  Sense strand starting at position 1255 of SEQ ID NO: 584998
augaaauaugcacgauaga

SEQ ID NO: 605547 - RNA, 19 nt, Artificial Sequence
  Description of Artificial Sequence: Synthetic oligonucleotide
  Antisense strand to SEQ ID NO: 605546
ucuaucgugcauauuucau

SEQ ID NO: 605548 - RNA, 19 nt, Artificial Sequence
  Description of Artificial Sequence: Synthetic oligonucleotide
  Sense strand starting at position 1303 of SEQ ID NO: 584998
gacugaguagacugacuuu

SEQ ID NO: 605549 - RNA, 19 nt, Artificial Sequence
  Description of Artificial Sequence: Synthetic oligonucleotide
  Antisense strand to SEQ ID NO: 605548
aaagucagucuacucaguc

SEQ ID NO: 605550 - RNA, 19 nt, Artificial Sequence
  Description of Artificial Sequence: Synthetic oligonucleotide
  Sense strand starting at position 1397 of SEQ ID NO: 584998
uguugauggucuuuaauaa

SEQ ID NO: 605551 - RNA, 19 nt, Artificial Sequence
  Description of Artificial Sequence: Synthetic oligonucleotide
  Antisense strand to SEQ ID NO: 605550
uuauuaaagaccaucaaca

SEQ ID NO: 605552 - RNA, 19 nt, Artificial Sequence
  Description of Artificial Sequence: Synthetic oligonucleotide
  Sense strand starting at position 1398 of SEQ ID NO: 584998
guugauggucuuuaauaaa

SEQ ID NO: 605553 - RNA, 19 nt, Artificial Sequence
  Description of Artificial Sequence: Synthetic oligonucleotide
  Antisense strand to SEQ ID NO: 605552
uuuauuaaagaccaucaac

SEQ ID NO: 605554 - RNA, 19 nt, Artificial Sequence
  Description of Artificial Sequence: Synthetic oligonucleotide
  Sense strand starting at position 1587 of SEQ ID NO: 584998
guacaauuguuuccacaag

SEQ ID NO: 605555 - RNA, 19 nt, Artificial Sequence
  Description of Artificial Sequence: Synthetic oligonucleotide
  Antisense strand to SEQ ID NO: 605554
cuuguggaaacaauuguac

SEQ ID NO: 605556 - RNA, 19 nt, Artificial Sequence
  Description of Artificial Sequence: Synthetic oligonucleotide
  Sense strand starting at position 1961 of SEQ ID NO: 584998
agguuagagccguauauau

SEQ ID NO: 605557 - RNA, 19 nt, Artificial Sequence
  Description of Artificial Sequence: Synthetic oligonucleotide
  Antisense strand to SEQ ID NO: 605556
auauauacggcucuaaccu

SEQ ID NO: 605558 - RNA, 19 nt, Artificial Sequence
  Description of Artificial Sequence: Synthetic oligonucleotide
  Sense strand starting at position 1963 of SEQ ID NO: 584998
guuagagccguauauauga

SEQ ID NO: 605559 - RNA, 19 nt, Artificial Sequence
  Description of Artificial Sequence: Synthetic oligonucleotide
  Antisense strand to SEQ ID NO: 605558
ucauauauacggcucuaac

SEQ ID NO: 605560 - RNA, 19 nt, Artificial Sequence
  Description of Artificial Sequence: Synthetic oligonucleotide
  Sense strand starting at position 2057 of SEQ ID NO: 584998
ucauaccaguagucucaaa

SEQ ID NO: 605561 - RNA, 19 nt, Artificial Sequence
  Description of Artificial Sequence: Synthetic oligonucleotide
  Antisense strand to SEQ ID NO: 605560
uuugagacuacugguauga

SEQ ID NO: 605562 - RNA, 19 nt, Artificial Sequence
  Description of Artificial Sequence: Synthetic oligonucleotide
  Sense strand starting at position 2113 of SEQ ID NO: 584998
uuuggugauuccucaaaug

SEQ ID NO: 605563 - RNA, 19 nt, Artificial Sequence
  Description of Artificial Sequence: Synthetic oligonucleotide
  Antisense strand to SEQ ID NO: 605562
cauuugaggaaucaccaaa

SEQ ID NO: 605564 - RNA, 19 nt, Artificial Sequence
  Description of Artificial Sequence: Synthetic oligonucleotide
  Sense strand starting at position 2171 of SEQ ID NO: 584998
ugcauuuauucuuugaagu

SEQ ID NO: 605565 - RNA, 19 nt, Artificial Sequence
  Description of Artificial Sequence: Synthetic oligonucleotide
  Antisense strand to SEQ ID NO: 605564
acuucaaagaauaaaugca

SEQ ID NO: 605566 - RNA, 19 nt, Artificial Sequence
  Description of Artificial Sequence: Synthetic oligonucleotide
  Sense strand starting at position 2172 of SEQ ID NO: 584998
gcauuuauucuuugaaguu

SEQ ID NO: 605567 - RNA, 19 nt, Artificial Sequence
  Description of Artificial Sequence: Synthetic oligonucleotide
  Antisense strand to SEQ ID NO: 605566
aacuucaaagaauaaaugc

SEQ ID NO: 605568 - RNA, 19 nt, Artificial Sequence
  Description of Artificial Sequence: Synthetic oligonucleotide
  Sense strand starting at position 2256 of SEQ ID NO: 584998
gcaucacaacauuagaguu

SEQ ID NO: 605569 - RNA, 19 nt, Artificial Sequence
  Description of Artificial Sequence: Synthetic oligonucleotide
  Antisense strand to SEQ ID NO: 605568
aacucuaauguugugaugc

SEQ ID NO: 605570 - RNA, 19 nt, Artificial Sequence
  Description of Artificial Sequence: Synthetic oligonucleotide
  Sense strand starting at position 2502 of SEQ ID NO: 584998
ugcuguauuuacuuguauu

SEQ ID NO: 605571 - RNA, 19 nt, Artificial Sequence
  Description of Artificial Sequence: Synthetic oligonucleotide
  Antisense strand to SEQ ID NO: 605570
aauacaaguaaauacagca

SEQ ID NO: 605572 - RNA, 19 nt, Artificial Sequence
  Description of Artificial Sequence: Synthetic oligonucleotide
  Sense strand starting at position 2568 of SEQ ID NO: 584998
aucauuauuugguucuguu

SEQ ID NO: 605573 - RNA, 19 nt, Artificial Sequence
  Description of Artificial Sequence: Synthetic oligonucleotide
  Antisense strand to SEQ ID NO: 605572
aacagaaccaaauaaugau

SEQ ID NO: 605574 - RNA, 19 nt, Artificial Sequence
  Description of Artificial Sequence: Synthetic oligonucleotide
  Sense strand starting at position 2761 of SEQ ID NO: 584998
gcagacauuucugcaugcu

SEQ ID NO: 605575 - RNA, 19 nt, Artificial Sequence
  Description of Artificial Sequence: Synthetic oligonucleotide
  Antisense strand to SEQ ID NO: 605574
agcaugcagaaaugucugc

SEQ ID NO: 605576 - RNA, 19 nt, Artificial Sequence
  Description of Artificial Sequence: Synthetic oligonucleotide
  Sense strand starting at position 2778 of SEQ ID NO: 584998
cucauauuggcauauagau

SEQ ID NO: 605577 - RNA, 19 nt, Artificial Sequence
  Description of Artificial Sequence: Synthetic oligonucleotide
  Antisense strand to SEQ ID NO: 605576
aucuauaugccaauaugag

SEQ ID NO: 605578 - RNA, 19 nt, Artificial Sequence
  Description of Artificial Sequence: Synthetic oligonucleotide
  Sense strand starting at position 2854 of SEQ ID NO: 584998
uuuauugaucaaugugaca

SEQ ID NO: 605579 - RNA, 19 nt, Artificial Sequence
  Description of Artificial Sequence: Synthetic oligonucleotide
  Antisense strand to SEQ ID NO: 605578
ugucacauugaucaauaaa

SEQ ID NO: 605580 - RNA, 19 nt, Artificial Sequence
  Description of Artificial Sequence: Synthetic oligonucleotide
  Sense strand starting at position 3105 of SEQ ID NO: 584998
ccaaaucagcuauguggaa

SEQ ID NO: 605581 - RNA, 19 nt, Artificial Sequence
  Description of Artificial Sequence: Synthetic oligonucleotide
  Antisense strand to SEQ ID NO: 605580
uuccacauagcugauuugg

SEQ ID NO: 605582 - RNA, 19 nt, Artificial Sequence
  Description of Artificial Sequence: Synthetic oligonucleotide
  Sense strand starting at position 3106 of SEQ ID NO: 584998
caaaucagcuauguggaaa

SEQ ID NO: 605583 - RNA, 19 nt, Artificial Sequence
  Description of Artificial Sequence: Synthetic oligonucleotide
  Antisense strand to SEQ ID NO: 605582
uuuccacauagcugauuug

SEQ ID NO: 605584 - RNA, 19 nt, Artificial Sequence
  Description of Artificial Sequence: Synthetic oligonucleotide
  Sense strand starting at position 3228 of SEQ ID NO: 584998
uacuuagugguguagaaug

SEQ ID NO: 605585 - RNA, 19 nt, Artificial Sequence
  Description of Artificial Sequence: Synthetic oligonucleotide
  Antisense strand to SEQ ID NO: 605584
cauucuacaccacuaagua

SEQ ID NO: 605586 - RNA, 19 nt, Artificial Sequence
  Description of Artificial Sequence: Synthetic oligonucleotide
  Sense strand starting at position 3482 of SEQ ID NO: 584998
cauggugugcacuacuaua

SEQ ID NO: 605587 - RNA, 19 nt, Artificial Sequence
  Description of Artificial Sequence: Synthetic oligonucleotide
  Antisense strand to SEQ ID NO: 605586
uauaguagugcacaccaug

SEQ ID NO: 605588 - RNA, 19 nt, Artificial Sequence
  Description of Artificial Sequence: Synthetic oligonucleotide
  Sense strand starting at position 3634 of SEQ ID NO: 584998
gcaccuacuuuauuaggaa

SEQ ID NO: 605589 - RNA, 19 nt, Artificial Sequence
  Description of Artificial Sequence: Synthetic oligonucleotide
  Antisense strand to SEQ ID NO: 605588
uuccuaauaaaguaggugc

SEQ ID NO: 605590 - RNA, 19 nt, Artificial Sequence
  Description of Artificial Sequence: Synthetic oligonucleotide
  Sense strand starting at position 3750 of SEQ ID NO: 584998
uguaguaaguauuuccagu

SEQ ID NO: 605591 - RNA, 19 nt, Artificial Sequence
  Description of Artificial Sequence: Synthetic oligonucleotide
  Antisense strand to SEQ ID NO: 605590
acuggaaauacuuacuaca

SEQ ID NO: 605592 - RNA, 19 nt, Artificial Sequence
  Description of Artificial Sequence: Synthetic oligonucleotide
  Sense strand starting at position 3752 of SEQ ID NO: 584998
uaguaaguauuuccagugu

SEQ ID NO: 605593 - RNA, 19 nt, Artificial Sequence
  Description of Artificial Sequence: Synthetic oligonucleotide
  Antisense strand to SEQ ID NO: 605592
acacuggaaauacuuacua

SEQ ID NO: 605594 - RNA, 19 nt, Artificial Sequence
  Description of Artificial Sequence: Synthetic oligonucleotide
  Sense strand starting at position 3795 of SEQ ID NO: 584998
uuucuucuguaucuagaca

SEQ ID NO: 605595 - RNA, 19 nt, Artificial Sequence
  Description of Artificial Sequence: Synthetic oligonucleotide
  Antisense strand to SEQ ID NO: 605594
ugucuagauacagaagaaa

SEQ ID NO: 605596 - RNA, 19 nt, Artificial Sequence
  Description of Artificial Sequence: Synthetic oligonucleotide
  Sense strand starting at position 3859 of SEQ ID NO: 584998
uaggacaugguuugacuua

SEQ ID NO: 605597 - RNA, 19 nt, Artificial Sequence
  Description of Artificial Sequence: Synthetic oligonucleotide
  Antisense strand to SEQ ID NO: 605596
uaagucaaaccauguccua

SEQ ID NO: 605598 - RNA, 19 nt, Artificial Sequence
  Description of Artificial Sequence: Synthetic oligonucleotide
  Sense strand starting at position 3885 of SEQ ID NO: 584998
auaggcaguucugugagaa

SEQ ID NO: 605599 - RNA, 19 nt, Artificial Sequence
  Description of Artificial Sequence: Synthetic oligonucleotide
  Antisense strand to SEQ ID NO: 605598
uucucacagaacugccuau

SEQ ID NO: 605600 - RNA, 19 nt, Artificial Sequence
  Description of Artificial Sequence: Synthetic oligonucleotide
  Sense strand starting at position 227 of SEQ ID NO: 584999
agaauuaauuggguuaucu

SEQ ID NO: 605601 - RNA, 19 nt, Artificial Sequence
  Description of Artificial Sequence: Synthetic oligonucleotide
  Antisense strand to SEQ ID NO: 605600
agauaacccaauuaauucu

SEQ ID NO: 605602 - RNA, 19 nt, Artificial Sequence
  Description of Artificial Sequence: Synthetic oligonucleotide
  Sense strand starting at position 414 of SEQ ID NO: 584999
aaaggauuacguggauuag

SEQ ID NO: 605603 - RNA, 19 nt, Artificial Sequence
  Description of Artificial Sequence: Synthetic oligonucleotide
  Antisense strand to SEQ ID NO: 605602
cuaauccacguaauccuuu

SEQ ID NO: 605604 - RNA, 19 nt, Artificial Sequence
  Description of Artificial Sequence: Synthetic oligonucleotide
  Sense strand starting at position 617 of SEQ ID NO: 584999
agccuaugccaauaugcaa

SEQ ID NO: 605605 - RNA, 19 nt, Artificial Sequence
  Description of Artificial Sequence: Synthetic oligonucleotide
  Antisense strand to SEQ ID NO: 605604
uugcauauuggcauaggcu

SEQ ID NO: 605606 - RNA, 19 nt, Artificial Sequence
  Description of Artificial Sequence: Synthetic oligonucleotide
  Sense strand starting at position 673 of SEQ ID NO: 584999
ucguaaagauauccaaaua

SEQ ID NO: 605607 - RNA, 19 nt, Artificial Sequence
  Description of Artificial Sequence: Synthetic oligonucleotide
  Antisense strand to SEQ ID NO: 605606
uauuuggauaucuuuacga

SEQ ID NO: 605608 - RNA, 19 nt, Artificial Sequence
  Description of Artificial Sequence: Synthetic oligonucleotide
  Sense strand starting at position 899 of SEQ ID NO: 584999
ggguaacucccaggcuuga

SEQ ID NO: 605609 - RNA, 19 nt, Artificial Sequence
  Description of Artificial Sequence: Synthetic oligonucleotide
  Antisense strand to SEQ ID NO: 605608
ucaagccugggaguuaccc

SEQ ID NO: 605610 - RNA, 19 nt, Artificial Sequence
  Description of Artificial Sequence: Synthetic oligonucleotide
  Sense strand starting at position 912 of SEQ ID NO: 584999
gcuugaaacuugucaucaa

SEQ ID NO: 605611 - RNA, 19 nt, Artificial Sequence
  Description of Artificial Sequence: Synthetic oligonucleotide
  Antisense strand to SEQ ID NO: 605610
uugaugacaaguuucaagc

SEQ ID NO: 605612 - RNA, 19 nt, Artificial Sequence
  Description of Artificial Sequence: Synthetic oligonucleotide
  Sense strand starting at position 1044 of SEQ ID NO: 584999
cucccagaguuuccuggau

SEQ ID NO: 605613 - RNA, 19 nt, Artificial Sequence
  Description of Artificial Sequence: Synthetic oligonucleotide
  Antisense strand to SEQ ID NO: 605612
auccaggaaacucugggag

SEQ ID NO: 605614 - RNA, 19 nt, Artificial Sequence
  Description of Artificial Sequence: Synthetic oligonucleotide
  Sense strand starting at position 1048 of SEQ ID NO: 584999
cagaguuuccuggauagca

SEQ ID NO: 605615 - RNA, 19 nt, Artificial Sequence
  Description of Artificial Sequence: Synthetic oligonucleotide
  Antisense strand to SEQ ID NO: 605614
ugcuauccaggaaacucug

SEQ ID NO: 605616 - RNA, 19 nt, Artificial Sequence
  Description of Artificial Sequence: Synthetic oligonucleotide
  Sense strand starting at position 1050 of SEQ ID NO: 584999
gaguuuccuggauagcauu

SEQ ID NO: 605617 - RNA, 19 nt, Artificial Sequence
  Description of Artificial Sequence: Synthetic oligonucleotide
  Antisense strand to SEQ ID NO: 605616
aaugcuauccaggaaacuc

SEQ ID NO: 605618 - RNA, 19 nt, Artificial Sequence
  Description of Artificial Sequence: Synthetic oligonucleotide
  Sense strand starting at position 1131 of SEQ ID NO: 584999
ucauguugucauuagguag

SEQ ID NO: 605619 - RNA, 19 nt, Artificial Sequence
  Description of Artificial Sequence: Synthetic oligonucleotide
  Antisense strand to SEQ ID NO: 605618
cuaccuaaugacaacauga

SEQ ID NO: 605620 - RNA, 19 nt, Artificial Sequence
  Description of Artificial Sequence: Synthetic oligonucleotide
  Sense strand starting at position 1188 of SEQ ID NO: 584999
ucuaauaugcuacggaaga

SEQ ID NO: 605621 - RNA, 19 nt, Artificial Sequence
  Description of Artificial Sequence: Synthetic oligonucleotide
  Antisense strand to SEQ ID NO: 605620
ucuuccguagcauauuaga

SEQ ID NO: 605622 - RNA, 19 nt, Artificial Sequence
  Description of Artificial Sequence: Synthetic oligonucleotide
  Sense strand starting at position 1220 of SEQ ID NO: 584999
ggaaauugcuuccuuagau

SEQ ID NO: 605623 - RNA, 19 nt, Artificial Sequence
  Description of Artificial Sequence: Synthetic oligonucleotide
  Antisense strand to SEQ ID NO: 605622
aucuaaggaagcaauuucc

SEQ ID NO: 605624 - RNA, 19 nt, Artificial Sequence
  Description of Artificial Sequence: Synthetic oligonucleotide
  Sense strand starting at position 1227 of SEQ ID NO: 584999
gcuuccuuagaugaaauau

SEQ ID NO: 605625 - RNA, 19 nt, Artificial Sequence
  Description of Artificial Sequence: Synthetic oligonucleotide
  Antisense strand to SEQ ID NO: 605624
auauuucaucuaaggaagc

SEQ ID NO: 605626 - RNA, 19 nt, Artificial Sequence
  Description of Artificial Sequence: Synthetic oligonucleotide
  Sense strand starting at position 1237 of SEQ ID NO: 584999
augaaauaugcacgauaga

SEQ ID NO: 605627 - RNA, 19 nt, Artificial Sequence
  Description of Artificial Sequence: Synthetic oligonucleotide
  Antisense strand to SEQ ID NO: 605626
ucuaucgugcauauuucau

SEQ ID NO: 605628 - RNA, 19 nt, Artificial Sequence
  Description of Artificial Sequence: Synthetic oligonucleotide
  Sense strand starting at position 1285 of SEQ ID NO: 584999
gacugaguagacugacuuu

SEQ ID NO: 605629 - RNA, 19 nt, Artificial Sequence
  Description of Artificial Sequence: Synthetic oligonucleotide
  Antisense strand to SEQ ID NO: 605628
aaagucagucuacucaguc

SEQ ID NO: 605630 - RNA, 19 nt, Artificial Sequence
  Description of Artificial Sequence: Synthetic oligonucleotide
  Sense strand starting at position 1379 of SEQ ID NO: 584999
uguugauggucuuuaauaa

SEQ ID NO: 605631 - RNA, 19 nt, Artificial Sequence
  Description of Artificial Sequence: Synthetic oligonucleotide
  Antisense strand to SEQ ID NO: 605630
uuauuaaagaccaucaaca

SEQ ID NO: 605632 - RNA, 19 nt, Artificial Sequence
  Description of Artificial Sequence: Synthetic oligonucleotide
  Sense strand starting at position 1380 of SEQ ID NO: 584999
guugauggucuuuaauaaa

SEQ ID NO: 605633 - RNA, 19 nt, Artificial Sequence
  Description of Artificial Sequence: Synthetic oligonucleotide
  Antisense strand to SEQ ID NO: 605632
uuuauuaaagaccaucaac

SEQ ID NO: 605634 - RNA, 19 nt, Artificial Sequence
  Description of Artificial Sequence: Synthetic oligonucleotide
  Sense strand starting at position 1569 of SEQ ID NO: 584999
guacaauuguuuccacaag

SEQ ID NO: 605635 - RNA, 19 nt, Artificial Sequence
  Description of Artificial Sequence: Synthetic oligonucleotide
  Antisense strand to SEQ ID NO: 605634
cuuguggaaacaauuguac

SEQ ID NO: 605636 - RNA, 19 nt, Artificial Sequence
  Description of Artificial Sequence: Synthetic oligonucleotide
  Sense strand starting at position 1943 of SEQ ID NO: 584999
agguuagagccguauauau

SEQ ID NO: 605637 - RNA, 19 nt, Artificial Sequence
  Description of Artificial Sequence: Synthetic oligonucleotide
  Antisense strand to SEQ ID NO: 605636
auauauacggcucuaaccu

SEQ ID NO: 605638 - RNA, 19 nt, Artificial Sequence
  Description of Artificial Sequence: Synthetic oligonucleotide
  Sense strand starting at position 1945 of SEQ ID NO: 584999
guuagagccguauauauga

SEQ ID NO: 605639 - RNA, 19 nt, Artificial Sequence
  Description of Artificial Sequence: Synthetic oligonucleotide
  Antisense strand to SEQ ID NO: 605638
ucauauauacggcucuaac

SEQ ID NO: 605640 - RNA, 19 nt, Artificial Sequence
  Description of Artificial Sequence: Synthetic oligonucleotide
  Sense strand starting at position 2039 of SEQ ID NO: 584999
ucauaccaguagucucaaa

SEQ ID NO: 605641 - RNA, 19 nt, Artificial Sequence
  Description of Artificial Sequence: Synthetic oligonucleotide
  Antisense strand to SEQ ID NO: 605640
uuugagacuacugguauga

SEQ ID NO: 605642 - RNA, 19 nt, Artificial Sequence
  Description of Artificial Sequence: Synthetic oligonucleotide
  Sense strand starting at position 2095 of SEQ ID NO: 584999
uuuggugauuccucaaaug

SEQ ID NO: 605643 - RNA, 19 nt, Artificial Sequence
  Description of Artificial Sequence: Synthetic oligonucleotide
  Antisense strand to SEQ ID NO: 605642
cauuugaggaaucaccaaa

SEQ ID NO: 605644 - RNA, 19 nt, Artificial Sequence
  Description of Artificial Sequence: Synthetic oligonucleotide
  Sense strand starting at position 2153 of SEQ ID NO: 584999
ugcauuuauucuuugaagu

SEQ ID NO: 605645 - RNA, 19 nt, Artificial Sequence
  Description of Artificial Sequence: Synthetic oligonucleotide
  Antisense strand to SEQ ID NO: 605644
acuucaaagaauaaaugca

SEQ ID NO: 605646 - RNA, 19 nt, Artificial Sequence
  Description of Artificial Sequence: Synthetic oligonucleotide
  Sense strand starting at position 2154 of SEQ ID NO: 584999
gcauuuauucuuugaaguu

SEQ ID NO: 605647 - RNA, 19 nt, Artificial Sequence
  Description of Artificial Sequence: Synthetic oligonucleotide
  Antisense strand to SEQ ID NO: 605646
aacuucaaagaauaaaugc

SEQ ID NO: 605648 - RNA, 19 nt, Artificial Sequence
  Description of Artificial Sequence: Synthetic oligonucleotide
  Sense strand starting at position 2238 of SEQ ID NO: 584999
gcaucacaacauuagaguu

SEQ ID NO: 605649 - RNA, 19 nt, Artificial Sequence
  Description of Artificial Sequence: Synthetic oligonucleotide
  Antisense strand to SEQ ID NO: 605648
aacucuaauguugugaugc

SEQ ID NO: 605650 - RNA, 19 nt, Artificial Sequence
  Description of Artificial Sequence: Synthetic oligonucleotide
  Sense strand starting at position 2484 of SEQ ID NO: 584999
ugcuguauuuacuuguauu

SEQ ID NO: 605651 - RNA, 19 nt, Artificial Sequence
  Description of Artificial Sequence: Synthetic oligonucleotide
  Antisense strand to SEQ ID NO: 605650
aauacaaguaaauacagca

SEQ ID NO: 605652 - RNA, 19 nt, Artificial Sequence
  Description of Artificial Sequence: Synthetic oligonucleotide
  Sense strand starting at position 2550 of SEQ ID NO: 584999
aucauuauuugguucuguu

SEQ ID NO: 605653 - RNA, 19 nt, Artificial Sequence
  Description of Artificial Sequence: Synthetic oligonucleotide
  Antisense strand to SEQ ID NO: 605652
aacagaaccaaauaaugau

SEQ ID NO: 605654 - RNA, 19 nt, Artificial Sequence
  Description of Artificial Sequence: Synthetic oligonucleotide
  Sense strand starting at position 2743 of SEQ ID NO: 584999
gcagacauuucugcaugcu

SEQ ID NO: 605655 - RNA, 19 nt, Artificial Sequence
  Description of Artificial Sequence: Synthetic oligonucleotide
  Antisense strand to SEQ ID NO: 605654
agcaugcagaaaugucugc

SEQ ID NO: 605656 - RNA, 19 nt, Artificial Sequence
  Description of Artificial Sequence: Synthetic oligonucleotide
  Sense strand starting at position 2760 of SEQ ID NO: 584999
cucauauuggcauauagau

SEQ ID NO: 605657 - RNA, 19 nt, Artificial Sequence
  Description of Artificial Sequence: Synthetic oligonucleotide
  Antisense strand to SEQ ID NO: 605656
aucuauaugccaauaugag

SEQ ID NO: 605658 - RNA, 19 nt, Artificial Sequence
  Description of Artificial Sequence: Synthetic oligonucleotide
  Sense strand starting at position 2836 of SEQ ID NO: 584999
uuuauugaucaaugugaca

SEQ ID NO: 605659 - RNA, 19 nt, Artificial Sequence
  Description of Artificial Sequence: Synthetic oligonucleotide
  Antisense strand to SEQ ID NO: 605658
ugucacauugaucaauaaa

SEQ ID NO: 605660 - RNA, 19 nt, Artificial Sequence
  Description of Artificial Sequence: Synthetic oligonucleotide
  Sense strand starting at position 3087 of SEQ ID NO: 584999
ccaaaucagcuauguggaa

SEQ ID NO: 605661 - RNA, 19 nt, Artificial Sequence
  Description of Artificial Sequence: Synthetic oligonucleotide
  Antisense strand to SEQ ID NO: 605660
uuccacauagcugauuugg

SEQ ID NO: 605662 - RNA, 19 nt, Artificial Sequence
  Description of Artificial Sequence: Synthetic oligonucleotide
  Sense strand starting at position 3088 of SEQ ID NO: 584999
caaaucagcuauguggaaa

SEQ ID NO: 605663 - RNA, 19 nt, Artificial Sequence
  Description of Artificial Sequence: Synthetic oligonucleotide
  Antisense strand to SEQ ID NO: 605662
uuuccacauagcugauuug

SEQ ID NO: 605664 - RNA, 19 nt, Artificial Sequence
  Description of Artificial Sequence: Synthetic oligonucleotide
  Sense strand starting at position 3210 of SEQ ID NO: 584999
uacuuagugguguagaaug

SEQ ID NO: 605665 - RNA, 19 nt, Artificial Sequence
  Description of Artificial Sequence: Synthetic oligonucleotide
  Antisense strand to SEQ ID NO: 605664
cauucuacaccacuaagua

SEQ ID NO: 605666 - RNA, 19 nt, Artificial Sequence
  Description of Artificial Sequence: Synthetic oligonucleotide
  Sense strand starting at position 3464 of SEQ ID NO: 584999
cauggugugcacuacuaua

SEQ ID NO: 605667 - RNA, 19 nt, Artificial Sequence
  Description of Artificial Sequence: Synthetic oligonucleotide
  Antisense strand to SEQ ID NO: 605666
uauaguagugcacaccaug

SEQ ID NO: 605668 - RNA, 19 nt, Artificial Sequence
  Description of Artificial Sequence: Synthetic oligonucleotide
  Sense strand starting at position 3616 of SEQ ID NO: 584999
gcaccuacuuuauuaggaa

SEQ ID NO: 605669 - RNA, 19 nt, Artificial Sequence
  Description of Artificial Sequence: Synthetic oligonucleotide
  Antisense strand to SEQ ID NO: 605668
uuccuaauaaaguaggugc

SEQ ID NO: 605670 - RNA, 19 nt, Artificial Sequence
  Description of Artificial Sequence: Synthetic oligonucleotide
  Sense strand starting at position 3732 of SEQ ID NO: 584999
uguaguaaguauuuccagu

SEQ ID NO: 605671 - RNA, 19 nt, Artificial Sequence
  Description of Artificial Sequence: Synthetic oligonucleotide
  Antisense strand to SEQ ID NO: 605670
acuggaaauacuuacuaca

SEQ ID NO: 605672 - RNA, 19 nt, Artificial Sequence
  Description of Artificial Sequence: Synthetic oligonucleotide
  Sense strand starting at position 3734 of SEQ ID NO: 584999
uaguaaguauuuccagugu

SEQ ID NO: 605673 - RNA, 19 nt, Artificial Sequence
  Description of Artificial Sequence: Synthetic oligonucleotide
  Antisense strand to SEQ ID NO: 605672
acacuggaaauacuuacua

SEQ ID NO: 605674 - RNA, 19 nt, Artificial Sequence
  Description of Artificial Sequence: Synthetic oligonucleotide
  Sense strand starting at position 3777 of SEQ ID NO: 584999
uuucuucuguaucuagaca

SEQ ID NO: 605675 - RNA, 19 nt, Artificial Sequence
  Description of Artificial Sequence: Synthetic oligonucleotide
  Antisense strand to SEQ ID NO: 605674
ugucuagauacagaagaaa

SEQ ID NO: 605676 - RNA, 19 nt, Artificial Sequence
  Description of Artificial Sequence: Synthetic oligonucleotide
  Sense strand starting at position 3841 of SEQ ID NO: 584999
uaggacaugguuugacuua

SEQ ID NO: 605677 - RNA, 19 nt, Artificial Sequence
  Description of Artificial Sequence: Synthetic oligonucleotide
  Antisense strand to SEQ ID NO: 605676
uaagucaaaccauguccua

SEQ ID NO: 605678 - RNA, 19 nt, Artificial Sequence
  Description of Artificial Sequence: Synthetic oligonucleotide
  Sense strand starting at position 3867 of SEQ ID NO: 584999
auaggcaguucugugagaa

SEQ ID NO: 605679 - RNA, 19 nt, Artificial Sequence
  Description of Artificial Sequence: Synthetic oligonucleotide
  Antisense strand to SEQ ID NO: 605678
uucucacagaacugccuau

SEQ ID NO: 605680 - RNA, 19 nt, Artificial Sequence
  Description of Artificial Sequence: Synthetic oligonucleotide
  Sense strand starting at position 85 of SEQ ID NO: 585000
agugaugccuuaucaucaa

SEQ ID NO: 605681 - RNA, 19 nt, Artificial Sequence
  Description of Artificial Sequence: Synthetic oligonucleotide
  Antisense strand to SEQ ID NO: 605680
uugaugauaaggcaucacu

SEQ ID NO: 605682 - RNA, 19 nt, Artificial Sequence
  Description of Artificial Sequence: Synthetic oligonucleotide
  Sense strand starting at position 144 of SEQ ID NO: 585000
agcagaaguacuugugucu

SEQ ID NO: 605683 - RNA, 19 nt, Artificial Sequence
  Description of Artificial Sequence: Synthetic oligonucleotide
  Antisense strand to SEQ ID NO: 605682
agacacaaguacuucugcu

SEQ ID NO: 605684 - RNA, 19 nt, Artificial Sequence
  Description of Artificial Sequence: Synthetic oligonucleotide
  Sense strand starting at position 151 of SEQ ID NO: 585000
guacuugugucucucccua

SEQ ID NO: 605685 - RNA, 19 nt, Artificial Sequence
  Description of Artificial Sequence: Synthetic oligonucleotide
  Antisense strand to SEQ ID NO: 605684
uagggagagacacaaguac

SEQ ID NO: 605686 - RNA, 19 nt, Artificial Sequence
  Description of Artificial Sequence: Synthetic oligonucleotide
  Sense strand starting at position 345 of SEQ ID NO: 585000
acagcaugguuucugaaca

SEQ ID NO: 605687 - RNA, 19 nt, Artificial Sequence
  Description of Artificial Sequence: Synthetic oligonucleotide
  Antisense strand to SEQ ID NO: 605686
uguucagaaaccaugcugu

SEQ ID NO: 605688 - RNA, 19 nt, Artificial Sequence
  Description of Artificial Sequence: Synthetic oligonucleotide
  Sense strand starting at position 755 of SEQ ID NO: 585000
ugacuagcccaacguuaua

SEQ ID NO: 605689 - RNA, 19 nt, Artificial Sequence
  Description of Artificial Sequence: Synthetic oligonucleotide
  Antisense strand to SEQ ID NO: 605688
uauaacguugggcuaguca

SEQ ID NO: 605690 - RNA, 19 nt, Artificial Sequence
  Description of Artificial Sequence: Synthetic oligonucleotide
  Sense strand starting at position 851 of SEQ ID NO: 585000
ggacucuuugcugauagga

SEQ ID NO: 605691 - RNA, 19 nt, Artificial Sequence
  Description of Artificial Sequence: Synthetic oligonucleotide
  Antisense strand to SEQ ID NO: 605690
uccuaucagcaaagagucc

SEQ ID NO: 605692 - RNA, 19 nt, Artificial Sequence
  Description of Artificial Sequence: Synthetic oligonucleotide
  Sense strand starting at position 853 of SEQ ID NO: 585000
acucuuugcugauaggaag

SEQ ID NO: 605693 - RNA, 19 nt, Artificial Sequence
  Description of Artificial Sequence: Synthetic oligonucleotide
  Antisense strand to SEQ ID NO: 605692
cuuccuaucagcaaagagu

SEQ ID NO: 605694 - RNA, 19 nt, Artificial Sequence
  Description of Artificial Sequence: Synthetic oligonucleotide
  Sense strand starting at position 886 of SEQ ID NO: 585000
guaagagaacagugcagaa

SEQ ID NO: 605695 - RNA, 19 nt, Artificial Sequence
  Description of Artificial Sequence: Synthetic oligonucleotide
  Antisense strand to SEQ ID NO: 605694
uucugcacuguucucuuac

SEQ ID NO: 605696 - RNA, 19 nt, Artificial Sequence
  Description of Artificial Sequence: Synthetic oligonucleotide
  Sense strand starting at position 899 of SEQ ID NO: 585000
gcagaaguggaauauguga

SEQ ID NO: 605697 - RNA, 19 nt, Artificial Sequence
  Description of Artificial Sequence: Synthetic oligonucleotide
  Antisense strand to SEQ ID NO: 605696
ucacauauuccacuucugc

SEQ ID NO: 605698 - RNA, 19 nt, Artificial Sequence
  Description of Artificial Sequence: Synthetic oligonucleotide
  Sense strand starting at position 904 of SEQ ID NO: 585000
aguggaauaugugaaggaa

SEQ ID NO: 605699 - RNA, 19 nt, Artificial Sequence
  Description of Artificial Sequence: Synthetic oligonucleotide
  Antisense strand to SEQ ID NO: 605698
uuccuucacauauuccacu

SEQ ID NO: 605700 - RNA, 19 nt, Artificial Sequence
  Description of Artificial Sequence: Synthetic oligonucleotide
  Sense strand starting at position 907 of SEQ ID NO: 585000
ggaauaugugaaggaacgu

SEQ ID NO: 605701 - RNA, 19 nt, Artificial Sequence
  Description of Artificial Sequence: Synthetic oligonucleotide
  Antisense strand to SEQ ID NO: 605700
acguuccuucacauauucc

SEQ ID NO: 605702 - RNA, 19 nt, Artificial Sequence
  Description of Artificial Sequence: Synthetic oligonucleotide
  Sense strand starting at position 920 of SEQ ID NO: 585000
gaacgucuggugggaagau

SEQ ID NO: 605703 - RNA, 19 nt, Artificial Sequence
  Description of Artificial Sequence: Synthetic oligonucleotide
  Antisense strand to SEQ ID NO: 605702
aucuucccaccagacguuc

SEQ ID NO: 605704 - RNA, 19 nt, Artificial Sequence
  Description of Artificial Sequence: Synthetic oligonucleotide
  Sense strand starting at position 930 of SEQ ID NO: 585000
ugggaagauaugugaagcu

SEQ ID NO: 605705 - RNA, 19 nt, Artificial Sequence
  Description of Artificial Sequence: Synthetic oligonucleotide
  Antisense strand to SEQ ID NO: 605704
agcuucacauaucuuccca

SEQ ID NO: 605706 - RNA, 19 nt, Artificial Sequence
  Description of Artificial Sequence: Synthetic oligonucleotide
  Sense strand starting at position 1067 of SEQ ID NO: 585000
aaagaacagugucaguaaa

SEQ ID NO: 605707 - RNA, 19 nt, Artificial Sequence
  Description of Artificial Sequence: Synthetic oligonucleotide
  Antisense strand to SEQ ID NO: 605706
uuuacugacacuguucuuu

SEQ ID NO: 605708 - RNA, 19 nt, Artificial Sequence
  Description of Artificial Sequence: Synthetic oligonucleotide
  Sense strand starting at position 1433 of SEQ ID NO: 585000
gguuuccaaguuuaucauu

SEQ ID NO: 605709 - RNA, 19 nt, Artificial Sequence
  Description of Artificial Sequence: Synthetic oligonucleotide
  Antisense strand to SEQ ID NO: 605708
aaugauaaacuuggaaacc

SEQ ID NO: 605710 - RNA, 19 nt, Artificial Sequence
  Description of Artificial Sequence: Synthetic oligonucleotide
  Sense strand starting at position 2061 of SEQ ID NO: 585000
ugugcucacugggugaaga

SEQ ID NO: 605711 - RNA, 19 nt, Artificial Sequence
  Description of Artificial Sequence: Synthetic oligonucleotide
  Antisense strand to SEQ ID NO: 605710
ucuucacccagugagcaca

SEQ ID NO: 605712 - RNA, 19 nt, Artificial Sequence
  Description of Artificial Sequence: Synthetic oligonucleotide
  Sense strand starting at position 2071 of SEQ ID NO: 585000
gggugaagaggcugacuua

SEQ ID NO: 605713 - RNA, 19 nt, Artificial Sequence
  Description of Artificial Sequence: Synthetic oligonucleotide
  Antisense strand to SEQ ID NO: 605712
uaagucagccucuucaccc

SEQ ID NO: 605714 - RNA, 19 nt, Artificial Sequence
  Description of Artificial Sequence: Synthetic oligonucleotide
  Sense strand starting at position 2462 of SEQ ID NO: 585000
gaacccuggucagaguaau

SEQ ID NO: 605715 - RNA, 19 nt, Artificial Sequence
  Description of Artificial Sequence: Synthetic oligonucleotide
  Antisense strand to SEQ ID NO: 605714
auuacucugaccaggguuc

SEQ ID NO: 605716 - RNA, 19 nt, Artificial Sequence
  Description of Artificial Sequence: Synthetic oligonucleotide
  Sense strand starting at position 2493 of SEQ ID NO: 585000
gcgugacguuauuucauua

SEQ ID NO: 605717 - RNA, 19 nt, Artificial Sequence
  Description of Artificial Sequence: Synthetic oligonucleotide
  Antisense strand to SEQ ID NO: 605716
uaaugaaauaacgucacgc

SEQ ID NO: 605718 - RNA, 19 nt, Artificial Sequence
  Description of Artificial Sequence: Synthetic oligonucleotide
  Sense strand starting at position 2575 of SEQ ID NO: 585000
guggauuccuggcuccaga

SEQ ID NO: 605719 - RNA, 19 nt, Artificial Sequence
  Description of Artificial Sequence: Synthetic oligonucleotide
  Antisense strand to SEQ ID NO: 605718
ucuggagccaggaauccac

SEQ ID NO: 605720 - RNA, 19 nt, Artificial Sequence
  Description of Artificial Sequence: Synthetic oligonucleotide
  Sense strand starting at position 2707 of SEQ ID NO: 585000
ggagcuuugcucguuuacu

SEQ ID NO: 605721 - RNA, 19 nt, Artificial Sequence
  Description of Artificial Sequence: Synthetic oligonucleotide
  Antisense strand to SEQ ID NO: 605720
aguaaacgagcaaagcucc

SEQ ID NO: 605722 - RNA, 19 nt, Artificial Sequence
  Description of Artificial Sequence: Synthetic oligonucleotide
  Sense strand starting at position 2708 of SEQ ID NO: 585000
gagcuuugcucguuuacua

SEQ ID NO: 605723 - RNA, 19 nt, Artificial Sequence
  Description of Artificial Sequence: Synthetic oligonucleotide
  Antisense strand to SEQ ID NO: 605722
uaguaaacgagcaaagcuc

SEQ ID NO: 605724 - RNA, 19 nt, Artificial Sequence
  Description of Artificial Sequence: Synthetic oligonucleotide
  Sense strand starting at position 2709 of SEQ ID NO: 585000
agcuuugcucguuuacuau

SEQ ID NO: 605725 - RNA, 19 nt, Artificial Sequence
  Description of Artificial Sequence: Synthetic oligonucleotide
  Antisense strand to SEQ ID NO: 605724
auaguaaacgagcaaagcu

SEQ ID NO: 605726 - RNA, 19 nt, Artificial Sequence
  Description of Artificial Sequence: Synthetic oligonucleotide
  Sense strand starting at position 2845 of SEQ ID NO: 585000
uggcuauuugauuguguca

SEQ ID NO: 605727 - RNA, 19 nt, Artificial Sequence
  Description of Artificial Sequence: Synthetic oligonucleotide
  Antisense strand to SEQ ID NO: 605726
ugacacaaucaaauagcca

SEQ ID NO: 605728 - RNA, 19 nt, Artificial Sequence
  Description of Artificial Sequence: Synthetic oligonucleotide
  Sense strand starting at position 2850 of SEQ ID NO: 585000
auuugauugugucaacucu

SEQ ID NO: 605729 - RNA, 19 nt, Artificial Sequence
  Description of Artificial Sequence: Synthetic oligonucleotide
  Antisense strand to SEQ ID NO: 605728
agaguugacacaaucaaau

SEQ ID NO: 605730 - RNA, 19 nt, Artificial Sequence
  Description of Artificial Sequence: Synthetic oligonucleotide
  Sense strand starting at position 2857 of SEQ ID NO: 585000
ugugucaacucuucugauu

SEQ ID NO: 605731 - RNA, 19 nt, Artificial Sequence
  Description of Artificial Sequence: Synthetic oligonucleotide
  Antisense strand to SEQ ID NO: 605730
aaucagaagaguugacaca

SEQ ID NO: 605732 - RNA, 19 nt, Artificial Sequence
  Description of Artificial Sequence: Synthetic oligonucleotide
  Sense strand starting at position 2935 of SEQ ID NO: 585000
cgagaucuucuagggagug

SEQ ID NO: 605733 - RNA, 19 nt, Artificial Sequence
  Description of Artificial Sequence: Synthetic oligonucleotide
  Antisense strand to SEQ ID NO: 605732
cacucccuagaagaucucg

SEQ ID NO: 605734 - RNA, 19 nt, Artificial Sequence
  Description of Artificial Sequence: Synthetic oligonucleotide
  Sense strand starting at position 3032 of SEQ ID NO: 585000
uuccuacugguaugucuua

SEQ ID NO: 605735 - RNA, 19 nt, Artificial Sequence
  Description of Artificial Sequence: Synthetic oligonucleotide
  Antisense strand to SEQ ID NO: 605734
uaagacauaccaguaggaa

SEQ ID NO: 605736 - RNA, 19 nt, Artificial Sequence
  Description of Artificial Sequence: Synthetic oligonucleotide
  Sense strand starting at position 3055 of SEQ ID NO: 585000
gugggaaagugguuucaga

SEQ ID NO: 605737 - RNA, 19 nt, Artificial Sequence
  Description of Artificial Sequence: Synthetic oligonucleotide
  Antisense strand to SEQ ID NO: 605736
ucugaaaccacuuucccac

SEQ ID NO: 605738 - RNA, 19 nt, Artificial Sequence
  Description of Artificial Sequence: Synthetic oligonucleotide
  Sense strand starting at position 3081 of SEQ ID NO: 585000
ugguguuuauuguugguga

SEQ ID NO: 605739 - RNA, 19 nt, Artificial Sequence
  Description of Artificial Sequence: Synthetic oligonucleotide
  Antisense strand to SEQ ID NO: 605738
ucaccaacaauaaacacca

SEQ ID NO: 605740 - RNA, 19 nt, Artificial Sequence
  Description of Artificial Sequence: Synthetic oligonucleotide
  Sense strand starting at position 3084 of SEQ ID NO: 585000
uguuuauuguuggugagga

SEQ ID NO: 605741 - RNA, 19 nt, Artificial Sequence
  Description of Artificial Sequence: Synthetic oligonucleotide
  Antisense strand to SEQ ID NO: 605740
uccucaccaacaauaaaca

SEQ ID NO: 605742 - RNA, 19 nt, Artificial Sequence
  Description of Artificial Sequence: Synthetic oligonucleotide
  Sense strand starting at position 3170 of SEQ ID NO: 585000
ggagcaaagucgguauugu

SEQ ID NO: 605743 - RNA, 19 nt, Artificial Sequence
  Description of Artificial Sequence: Synthetic oligonucleotide
  Antisense strand to SEQ ID NO: 605742
acaauaccgacuuugcucc

SEQ ID NO: 605744 - RNA, 19 nt, Artificial Sequence
  Description of Artificial Sequence: Synthetic oligonucleotide
  Sense strand starting at position 3171 of SEQ ID NO: 585000
gagcaaagucgguauugua

SEQ ID NO: 605745 - RNA, 19 nt, Artificial Sequence
  Description of Artificial Sequence: Synthetic oligonucleotide
  Antisense strand to SEQ ID NO: 605744
uacaauaccgacuuugcuc

SEQ ID NO: 605746 - RNA, 19 nt, Artificial Sequence
  Description of Artificial Sequence: Synthetic oligonucleotide
  Sense strand starting at position 3255 of SEQ ID NO: 585000
acuuuaguggcaggaaagu

SEQ ID NO: 605747 - RNA, 19 nt, Artificial Sequence
  Description of Artificial Sequence: Synthetic oligonucleotide
  Antisense strand to SEQ ID NO: 605746
acuuuccugccacuaaagu

SEQ ID NO: 605748 - RNA, 19 nt, Artificial Sequence
  Description of Artificial Sequence: Synthetic oligonucleotide
  Sense strand starting at position 3447 of SEQ ID NO: 585000
cagcgaccucuggaaggau

SEQ ID NO: 605749 - RNA, 19 nt, Artificial Sequence
  Description of Artificial Sequence: Synthetic oligonucleotide
  Antisense strand to SEQ ID NO: 605748
auccuuccagaggucgcug

SEQ ID NO: 605750 - RNA, 19 nt, Artificial Sequence
  Description of Artificial Sequence: Synthetic oligonucleotide
  Sense strand starting at position 3585 of SEQ ID NO: 585000
gacugaaccugccagagaa

SEQ ID NO: 605751 - RNA, 19 nt, Artificial Sequence
  Description of Artificial Sequence: Synthetic oligonucleotide
  Antisense strand to SEQ ID NO: 605750
uucucuggcagguucaguc

SEQ ID NO: 605752 - RNA, 19 nt, Artificial Sequence
  Description of Artificial Sequence: Synthetic oligonucleotide
  Sense strand starting at position 3691 of SEQ ID NO: 585000
ucccuugaggcugaggaua

SEQ ID NO: 605753 - RNA, 19 nt, Artificial Sequence
  Description of Artificial Sequence: Synthetic oligonucleotide
  Antisense strand to SEQ ID NO: 605752
uauccucagccucaaggga

SEQ ID NO: 605754 - RNA, 19 nt, Artificial Sequence
  Description of Artificial Sequence: Synthetic oligonucleotide
  Sense strand starting at position 3708 of SEQ ID NO: 585000
uaagaugacucaccggaua

SEQ ID NO: 605755 - RNA, 19 nt, Artificial Sequence
  Description of Artificial Sequence: Synthetic oligonucleotide
  Antisense strand to SEQ ID NO: 605754
uauccggugagucaucuua

SEQ ID NO: 605756 - RNA, 19 nt, Artificial Sequence
  Description of Artificial Sequence: Synthetic oligonucleotide
  Sense strand starting at position 3710 of SEQ ID NO: 585000
agaugacucaccggauacu

SEQ ID NO: 605757 - RNA, 19 nt, Artificial Sequence
  Description of Artificial Sequence: Synthetic oligonucleotide
  Antisense strand to SEQ ID NO: 605756
aguauccggugagucaucu

SEQ ID NO: 605758 - RNA, 19 nt, Artificial Sequence
  Description of Artificial Sequence: Synthetic oligonucleotide
  Sense strand starting at position 3942 of SEQ ID NO: 585000
ggcucagcucgcugaagaa

SEQ ID NO: 605759 - RNA, 19 nt, Artificial Sequence
  Description of Artificial Sequence: Synthetic oligonucleotide
  Antisense strand to SEQ ID NO: 605758
uucuucagcgagcugagcc

SEQ ID NO: 605760 - RNA, 19 nt, Artificial Sequence
  Description of Artificial Sequence: Synthetic oligonucleotide
  Sense strand starting at position 1060 of SEQ ID NO: 585001
gcuccuuucggaggaucau

SEQ ID NO: 605761 - RNA, 19 nt, Artificial Sequence
  Description of Artificial Sequence: Synthetic oligonucleotide
  Antisense strand to SEQ ID NO: 605760
augauccuccgaaaggagc

SEQ ID NO: 605762 - RNA, 19 nt, Artificial Sequence
  Description of Artificial Sequence: Synthetic oligonucleotide
  Sense strand starting at position 1066 of SEQ ID NO: 585001
uucggaggaucaucuaagu

SEQ ID NO: 605763 - RNA, 19 nt, Artificial Sequence
  Description of Artificial Sequence: Synthetic oligonucleotide
  Antisense strand to SEQ ID NO: 605762
acuuagaugauccuccgaa

SEQ ID NO: 605764 - RNA, 19 nt, Artificial Sequence
  Description of Artificial Sequence: Synthetic oligonucleotide
  Sense strand starting at position 2390 of SEQ ID NO: 585001
ugcuuuaucugauaugcau

SEQ ID NO: 605765 - RNA, 19 nt, Artificial Sequence
  Description of Artificial Sequence: Synthetic oligonucleotide
  Antisense strand to SEQ ID NO: 605764
augcauaucagauaaagca

SEQ ID NO: 605766 - RNA, 19 nt, Artificial Sequence
  Description of Artificial Sequence: Synthetic oligonucleotide
  Sense strand starting at position 2929 of SEQ ID NO: 585001
guaguauaauggucuuaca

SEQ ID NO: 605767 - RNA, 19 nt, Artificial Sequence
  Description of Artificial Sequence: Synthetic oligonucleotide
  Antisense strand to SEQ ID NO: 605766
uguaagaccauuauacuac

SEQ ID NO: 605768 - RNA, 19 nt, Artificial Sequence
  Description of Artificial Sequence: Synthetic oligonucleotide
  Sense strand starting at position 3361 of SEQ ID NO: 585001
uaagcuguguuaugauaau

SEQ ID NO: 605769 - RNA, 19 nt, Artificial Sequence
  Description of Artificial Sequence: Synthetic oligonucleotide
  Antisense strand to SEQ ID NO: 605768
auuaucauaacacagcuua

SEQ ID NO: 605770 - RNA, 19 nt, Artificial Sequence
  Description of Artificial Sequence: Synthetic oligonucleotide
  Sense strand starting at position 3425 of SEQ ID NO: 585001
cugcaccucuccuaagaga

SEQ ID NO: 605771 - RNA, 19 nt, Artificial Sequence
  Description of Artificial Sequence: Synthetic oligonucleotide
  Antisense strand to SEQ ID NO: 605770
ucucuuaggagaggugcag

SEQ ID NO: 605772 - RNA, 19 nt, Artificial Sequence
  Description of Artificial Sequence: Synthetic oligonucleotide
  Sense strand starting at position 3512 of SEQ ID NO: 585001
ccaguagcuuuccaagaag

SEQ ID NO: 605773 - RNA, 19 nt, Artificial Sequence
  Description of Artificial Sequence: Synthetic oligonucleotide
  Antisense strand to SEQ ID NO: 605772
cuucuuggaaagcuacugg

SEQ ID NO: 605774 - RNA, 19 nt, Artificial Sequence
  Description of Artificial Sequence: Synthetic oligonucleotide
  Sense strand starting at position 3515 of SEQ ID NO: 585001
guagcuuuccaagaaguuu

SEQ ID NO: 605775 - RNA, 19 nt, Artificial Sequence
  Description of Artificial Sequence: Synthetic oligonucleotide
  Antisense strand to SEQ ID NO: 605774
aaacuucuuggaaagcuac

SEQ ID NO: 605776 - RNA, 19 nt, Artificial Sequence
  Description of Artificial Sequence: Synthetic oligonucleotide
  Sense strand starting at position 3552 of SEQ ID NO: 585001
uuaugcuuucuguauccca

SEQ ID NO: 605777 - RNA, 19 nt, Artificial Sequence
  Description of Artificial Sequence: Synthetic oligonucleotide
  Antisense strand to SEQ ID NO: 605776
ugggauacagaaagcauaa

SEQ ID NO: 605778 - RNA, 19 nt, Artificial Sequence
  Description of Artificial Sequence: Synthetic oligonucleotide
  Sense strand starting at position 3857 of SEQ ID NO: 585001
gccucaccuuccugaaaga

SEQ ID NO: 605779 - RNA, 19 nt, Artificial Sequence
  Description of Artificial Sequence: Synthetic oligonucleotide
  Antisense strand to SEQ ID NO: 605778
ucuuucaggaaggugaggc

SEQ ID NO: 605780 - RNA, 19 nt, Artificial Sequence
  Description of Artificial Sequence: Synthetic oligonucleotide
  Sense strand starting at position 86 of SEQ ID NO: 585002
agaauuuagcucgguaugu

SEQ ID NO: 605781 - RNA, 19 nt, Artificial Sequence
  Description of Artificial Sequence: Synthetic oligonucleotide
  Antisense strand to SEQ ID NO: 605780
acauaccgagcuaaauucu

SEQ ID NO: 605782 - RNA, 19 nt, Artificial Sequence
  Description of Artificial Sequence: Synthetic oligonucleotide
  Sense strand starting at position 87 of SEQ ID NO: 585002
gaauuuagcucgguauguc

SEQ ID NO: 605783 - RNA, 19 nt, Artificial Sequence
  Description of Artificial Sequence: Synthetic oligonucleotide
  Antisense strand to SEQ ID NO: 605782
gacauaccgagcuaaauuc

SEQ ID NO: 605784 - RNA, 19 nt, Artificial Sequence
  Description of Artificial Sequence: Synthetic oligonucleotide
  Sense strand starting at position 134 of SEQ ID NO: 585002
acuugauaggcuuggagau

SEQ ID NO: 605785 - RNA, 19 nt, Artificial Sequence
  Description of Artificial Sequence: Synthetic oligonucleotide
  Antisense strand to SEQ ID NO: 605784
aucuccaagccuaucaagu

SEQ ID NO: 605786 - RNA, 19 nt, Artificial Sequence
  Description of Artificial Sequence: Synthetic oligonucleotide
  Sense strand starting at position 135 of SEQ ID NO: 585002
cuugauaggcuuggagauu

SEQ ID NO: 605787 - RNA, 19 nt, Artificial Sequence
  Description of Artificial Sequence: Synthetic oligonucleotide
  Antisense strand to SEQ ID NO: 605786
aaucuccaagccuaucaag

SEQ ID NO: 605788 - RNA, 19 nt, Artificial Sequence
  Description of Artificial Sequence: Synthetic oligonucleotide
  Sense strand starting at position 307 of SEQ ID NO: 585002
gaggaaguuugagucucau

SEQ ID NO: 605789 - RNA, 19 nt, Artificial Sequence
  Description of Artificial Sequence: Synthetic oligonucleotide
  Antisense strand to SEQ ID NO: 605788
augagacucaaacuuccuc

SEQ ID NO: 605790 - RNA, 19 nt, Artificial Sequence
  Description of Artificial Sequence: Synthetic oligonucleotide
  Sense strand starting at position 313 of SEQ ID NO: 585002
guuugagucucauuugcua

SEQ ID NO: 605791 - RNA, 19 nt, Artificial Sequence
  Description of Artificial Sequence: Synthetic oligonucleotide
  Antisense strand to SEQ ID NO: 605790
uagcaaaugagacucaaac

SEQ ID NO: 605792 - RNA, 19 nt, Artificial Sequence
  Description of Artificial Sequence: Synthetic oligonucleotide
  Sense strand starting at position 371 of SEQ ID NO: 585002
auuaacuaacccuguggaa

SEQ ID NO: 605793 - RNA, 19 nt, Artificial Sequence
  Description of Artificial Sequence: Synthetic oligonucleotide
  Antisense strand to SEQ ID NO: 605792
uuccacaggguuaguuaau

SEQ ID NO: 605794 - RNA, 19 nt, Artificial Sequence
  Description of Artificial Sequence: Synthetic oligonucleotide
  Sense strand starting at position 445 of SEQ ID NO: 585002
acagcucaaugguuagaua

SEQ ID NO: 605795 - RNA, 19 nt, Artificial Sequence
  Description of Artificial Sequence: Synthetic oligonucleotide
  Antisense strand to SEQ ID NO: 605794
uaucuaaccauugagcugu

SEQ ID NO: 605796 - RNA, 19 nt, Artificial Sequence
  Description of Artificial Sequence: Synthetic oligonucleotide
  Sense strand starting at position 471 of SEQ ID NO: 585002
agauaacgggcuuauacua

SEQ ID NO: 605797 - RNA, 19 nt, Artificial Sequence
  Description of Artificial Sequence: Synthetic oligonucleotide
  Antisense strand to SEQ ID NO: 605796
uaguauaagcccguuaucu

SEQ ID NO: 605798 - RNA, 19 nt, Artificial Sequence
  Description of Artificial Sequence: Synthetic oligonucleotide
  Sense strand starting at position 757 of SEQ ID NO: 585002
gccaaacgugucuuccagu

SEQ ID NO: 605799 - RNA, 19 nt, Artificial Sequence
  Description of Artificial Sequence: Synthetic oligonucleotide
  Antisense strand to SEQ ID NO: 605798
acuggaagacacguuuggc

SEQ ID NO: 605800 - RNA, 19 nt, Artificial Sequence
  Description of Artificial Sequence: Synthetic oligonucleotide
  Sense strand starting at position 762 of SEQ ID NO: 585002
acgugucuuccagucggua

SEQ ID NO: 605801 - RNA, 19 nt, Artificial Sequence
  Description of Artificial Sequence: Synthetic oligonucleotide
  Antisense strand to SEQ ID NO: 605800
uaccgacuggaagacacgu

SEQ ID NO: 605802 - RNA, 19 nt, Artificial Sequence
  Description of Artificial Sequence: Synthetic oligonucleotide
  Sense strand starting at position 763 of SEQ ID NO: 585002
cgugucuuccagucgguaa

SEQ ID NO: 605803 - RNA, 19 nt, Artificial Sequence
  Description of Artificial Sequence: Synthetic oligonucleotide
  Antisense strand to SEQ ID NO: 605802
uuaccgacuggaagacacg

SEQ ID NO: 605804 - RNA, 19 nt, Artificial Sequence
  Description of Artificial Sequence: Synthetic oligonucleotide
  Sense strand starting at position 1154 of SEQ ID NO: 585002
caccaucuuuggcuggaga

SEQ ID NO: 605805 - RNA, 19 nt, Artificial Sequence
  Description of Artificial Sequence: Synthetic oligonucleotide
  Antisense strand to SEQ ID NO: 605804
ucuccagccaaagauggug

SEQ ID NO: 605806 - RNA, 19 nt, Artificial Sequence
  Description of Artificial Sequence: Synthetic oligonucleotide
  Sense strand starting at position 1155 of SEQ ID NO: 585002
accaucuuuggcuggagaa

SEQ ID NO: 605807 - RNA, 19 nt, Artificial Sequence
  Description of Artificial Sequence: Synthetic oligonucleotide
  Antisense strand to SEQ ID NO: 605806
uucuccagccaaagauggu

SEQ ID NO: 605808 - RNA, 19 nt, Artificial Sequence
  Description of Artificial Sequence: Synthetic oligonucleotide
  Sense strand starting at position 1156 of SEQ ID NO: 585002
ccaucuuuggcuggagaag

SEQ ID NO: 605809 - RNA, 19 nt, Artificial Sequence
  Description of Artificial Sequence: Synthetic oligonucleotide
  Antisense strand to SEQ ID NO: 605808
cuucuccagccaaagaugg

SEQ ID NO: 605810 - RNA, 19 nt, Artificial Sequence
  Description of Artificial Sequence: Synthetic oligonucleotide
  Sense strand starting at position 2450 of SEQ ID NO: 585002
uuagcaaugauuugcguuu

SEQ ID NO: 605811 - RNA, 19 nt, Artificial Sequence
  Description of Artificial Sequence: Synthetic oligonucleotide
  Antisense strand to SEQ ID NO: 605810
aaacgcaaaucauugcuaa

SEQ ID NO: 605812 - RNA, 19 nt, Artificial Sequence
  Description of Artificial Sequence: Synthetic oligonucleotide
  Sense strand starting at position 2738 of SEQ ID NO: 585002
aggaguggccaucaauguu

SEQ ID NO: 605813 - RNA, 19 nt, Artificial Sequence
  Description of Artificial Sequence: Synthetic oligonucleotide
  Antisense strand to SEQ ID NO: 605812
aacauugauggccacuccu

SEQ ID NO: 605814 - RNA, 19 nt, Artificial Sequence
  Description of Artificial Sequence: Synthetic oligonucleotide
  Sense strand starting at position 2744 of SEQ ID NO: 585002
ggccaucaauguuuccaga

SEQ ID NO: 605815 - RNA, 19 nt, Artificial Sequence
  Description of Artificial Sequence: Synthetic oligonucleotide
  Antisense strand to SEQ ID NO: 605814
ucuggaaacauugauggcc

SEQ ID NO: 605816 - RNA, 19 nt, Artificial Sequence
  Description of Artificial Sequence: Synthetic oligonucleotide
  Sense strand starting at position 2767 of SEQ ID NO: 585002
gggauccauuguucuauca

SEQ ID NO: 605817 - RNA, 19 nt, Artificial Sequence
  Description of Artificial Sequence: Synthetic oligonucleotide
  Antisense strand to SEQ ID NO: 605816
ugauagaacaauggauccc

SEQ ID NO: 605818 - RNA, 19 nt, Artificial Sequence
  Description of Artificial Sequence: Synthetic oligonucleotide
  Sense strand starting at position 2777 of SEQ ID NO: 585002
guucuaucagagcaaauga

SEQ ID NO: 605819 - RNA, 19 nt, Artificial Sequence
  Description of Artificial Sequence: Synthetic oligonucleotide
  Antisense strand to SEQ ID NO: 605818
ucauuugcucugauagaac

SEQ ID NO: 605820 - RNA, 19 nt, Artificial Sequence
  Description of Artificial Sequence: Synthetic oligonucleotide
  Sense strand starting at position 2885 of SEQ ID NO: 585002
ucacuagggucuuugagaa

SEQ ID NO: 605821 - RNA, 19 nt, Artificial Sequence
  Description of Artificial Sequence: Synthetic oligonucleotide
  Antisense strand to SEQ ID NO: 605820
uucucaaagacccuaguga

SEQ ID NO: 605822 - RNA, 19 nt, Artificial Sequence
  Description of Artificial Sequence: Synthetic oligonucleotide
  Sense strand starting at position 2952 of SEQ ID NO: 585002
ggauuugguuugucuuguu

SEQ ID NO: 605823 - RNA, 19 nt, Artificial Sequence
  Description of Artificial Sequence: Synthetic oligonucleotide
  Antisense strand to SEQ ID NO: 605822
aacaagacaaaccaaaucc

SEQ ID NO: 605824 - RNA, 19 nt, Artificial Sequence
  Description of Artificial Sequence: Synthetic oligonucleotide
  Sense strand starting at position 3012 of SEQ ID NO: 585002
guuguaucuggauauaaac

SEQ ID NO: 605825 - RNA, 19 nt, Artificial Sequence
  Description of Artificial Sequence: Synthetic oligonucleotide
  Antisense strand to SEQ ID NO: 605824
guuuauauccagauacaac

SEQ ID NO: 605826 - RNA, 19 nt, Artificial Sequence
  Description of Artificial Sequence: Synthetic oligonucleotide
  Sense strand starting at position 3077 of SEQ ID NO: 585002
uaugaauagugauugugac

SEQ ID NO: 605827 - RNA, 19 nt, Artificial Sequence
  Description of Artificial Sequence: Synthetic oligonucleotide
  Antisense strand to SEQ ID NO: 605826
gucacaaucacuauucaua

SEQ ID NO: 605828 - RNA, 19 nt, Artificial Sequence
  Description of Artificial Sequence: Synthetic oligonucleotide
  Sense strand starting at position 3078 of SEQ ID NO: 585002
augaauagugauugugacu

SEQ ID NO: 605829 - RNA, 19 nt, Artificial Sequence
  Description of Artificial Sequence: Synthetic oligonucleotide
  Antisense strand to SEQ ID NO: 605828
agucacaaucacuauucau

SEQ ID NO: 605830 - RNA, 19 nt, Artificial Sequence
  Description of Artificial Sequence: Synthetic oligonucleotide
  Sense strand starting at position 3090 of SEQ ID NO: 585002
ugugacuucucauuaccca

SEQ ID NO: 605831 - RNA, 19 nt, Artificial Sequence
  Description of Artificial Sequence: Synthetic oligonucleotide
  Antisense strand to SEQ ID NO: 605830
uggguaaugagaagucaca

SEQ ID NO: 605832 - RNA, 19 nt, Artificial Sequence
  Description of Artificial Sequence: Synthetic oligonucleotide
  Sense strand starting at position 3183 of SEQ ID NO: 585002
uguugaauauggccaauaa

SEQ ID NO: 605833 - RNA, 19 nt, Artificial Sequence
  Description of Artificial Sequence: Synthetic oligonucleotide
  Antisense strand to SEQ ID NO: 605832
uuauuggccauauucaaca

SEQ ID NO: 605834 - RNA, 19 nt, Artificial Sequence
  Description of Artificial Sequence: Synthetic oligonucleotide
  Sense strand starting at position 3398 of SEQ ID NO: 585002
ugguguuaccaaugaguag

SEQ ID NO: 605835 - RNA, 19 nt, Artificial Sequence
  Description of Artificial Sequence: Synthetic oligonucleotide
  Antisense strand to SEQ ID NO: 605834
cuacucauugguaacacca

SEQ ID NO: 605836 - RNA, 19 nt, Artificial Sequence
  Description of Artificial Sequence: Synthetic oligonucleotide
  Sense strand starting at position 3399 of SEQ ID NO: 585002
gguguuaccaaugaguaga

SEQ ID NO: 605837 - RNA, 19 nt, Artificial Sequence
  Description of Artificial Sequence: Synthetic oligonucleotide
  Antisense strand to SEQ ID NO: 605836
ucuacucauugguaacacc

SEQ ID NO: 605838 - RNA, 19 nt, Artificial Sequence
  Description of Artificial Sequence: Synthetic oligonucleotide
  Sense strand starting at position 3401 of SEQ ID NO: 585002
uguuaccaaugaguagauu

SEQ ID NO: 605839 - RNA, 19 nt, Artificial Sequence
  Description of Artificial Sequence: Synthetic oligonucleotide
  Antisense strand to SEQ ID NO: 605838
aaucuacucauugguaaca

SEQ ID NO: 605840 - RNA, 19 nt, Artificial Sequence
  Description of Artificial Sequence: Synthetic oligonucleotide
  Sense strand starting at position 3409 of SEQ ID NO: 585002
augaguagauuccuuuaag

SEQ ID NO: 605841 - RNA, 19 nt, Artificial Sequence
  Description of Artificial Sequence: Synthetic oligonucleotide
  Antisense strand to SEQ ID NO: 605840
cuuaaaggaaucuacucau

SEQ ID NO: 605842 - RNA, 19 nt, Artificial Sequence
  Description of Artificial Sequence: Synthetic oligonucleotide
  Sense strand starting at position 3410 of SEQ ID NO: 585002
ugaguagauuccuuuaagu

SEQ ID NO: 605843 - RNA, 19 nt, Artificial Sequence
  Description of Artificial Sequence: Synthetic oligonucleotide
  Antisense strand to SEQ ID NO: 605842
acuuaaaggaaucuacuca

SEQ ID NO: 605844 - RNA, 19 nt, Artificial Sequence
  Description of Artificial Sequence: Synthetic oligonucleotide
  Sense strand starting at position 3412 of SEQ ID NO: 585002
aguagauuccuuuaaguug

SEQ ID NO: 605845 - RNA, 19 nt, Artificial Sequence
  Description of Artificial Sequence: Synthetic oligonucleotide
  Antisense strand to SEQ ID NO: 605844
caacuuaaaggaaucuacu

SEQ ID NO: 605846 - RNA, 19 nt, Artificial Sequence
  Description of Artificial Sequence: Synthetic oligonucleotide
  Sense strand starting at position 3452 of SEQ ID NO: 585002
ucaagauaagcauaucugu

SEQ ID NO: 605847 - RNA, 19 nt, Artificial Sequence
  Description of Artificial Sequence: Synthetic oligonucleotide
  Antisense strand to SEQ ID NO: 605846
acagauaugcuuaucuuga

SEQ ID NO: 605848 - RNA, 19 nt, Artificial Sequence
  Description of Artificial Sequence: Synthetic oligonucleotide
  Sense strand starting at position 3657 of SEQ ID NO: 585002
ccacauguuauagagugua

SEQ ID NO: 605849 - RNA, 19 nt, Artificial Sequence
  Description of Artificial Sequence: Synthetic oligonucleotide
  Antisense strand to SEQ ID NO: 605848
uacacucuauaacaugugg

SEQ ID NO: 605850 - RNA, 19 nt, Artificial Sequence
  Description of Artificial Sequence: Synthetic oligonucleotide
  Sense strand starting at position 3744 of SEQ ID NO: 585002
ucgucauuguuauuuaaug

SEQ ID NO: 605851 - RNA, 19 nt, Artificial Sequence
  Description of Artificial Sequence: Synthetic oligonucleotide
  Antisense strand to SEQ ID NO: 605850
cauuaaauaacaaugacga

SEQ ID NO: 605852 - RNA, 19 nt, Artificial Sequence
  Description of Artificial Sequence: Synthetic oligonucleotide
  Sense strand starting at position 3745 of SEQ ID NO: 585002
cgucauuguuauuuaaugu

SEQ ID NO: 605853 - RNA, 19 nt, Artificial Sequence
  Description of Artificial Sequence: Synthetic oligonucleotide
  Antisense strand to SEQ ID NO: 605852
acauuaaauaacaaugacg

SEQ ID NO: 605854 - RNA, 19 nt, Artificial Sequence
  Description of Artificial Sequence: Synthetic oligonucleotide
  Sense strand starting at position 3833 of SEQ ID NO: 585002
acuuaauagccacaugugu

SEQ ID NO: 605855 - RNA, 19 nt, Artificial Sequence
  Description of Artificial Sequence: Synthetic oligonucleotide
  Antisense strand to SEQ ID NO: 605854
acacauguggcuauuaagu

SEQ ID NO: 605856 - RNA, 19 nt, Artificial Sequence
  Description of Artificial Sequence: Synthetic oligonucleotide
  Sense strand starting at position 3965 of SEQ ID NO: 585002
uaccucuaaugguuggaaa

SEQ ID NO: 605857 - RNA, 19 nt, Artificial Sequence
  Description of Artificial Sequence: Synthetic oligonucleotide
  Antisense strand to SEQ ID NO: 605856
uuuccaaccauuagaggua

SEQ ID NO: 605858 - RNA, 19 nt, Artificial Sequence
  Description of Artificial Sequence: Synthetic oligonucleotide
  Sense strand starting at position 3966 of SEQ ID NO: 585002
accucuaaugguuggaaag

SEQ ID NO: 605859 - RNA, 19 nt, Artificial Sequence
  Description of Artificial Sequence: Synthetic oligonucleotide
  Antisense strand to SEQ ID NO: 605858
cuuuccaaccauuagaggu

SEQ ID NO: 605860 - RNA, 19 nt, Artificial Sequence
  Description of Artificial Sequence: Synthetic oligonucleotide
  Sense strand starting at position 51 of SEQ ID NO: 585003
auaugagguucuugaagau

SEQ ID NO: 605861 - RNA, 19 nt, Artificial Sequence
  Description of Artificial Sequence: Synthetic oligonucleotide
  Antisense strand to SEQ ID NO: 605860
aucuucaagaaccucauau

SEQ ID NO: 605862 - RNA, 19 nt, Artificial Sequence
  Description of Artificial Sequence: Synthetic oligonucleotide
  Sense strand starting at position 57 of SEQ ID NO: 585003
gguucuugaagauagucuu

SEQ ID NO: 605863 - RNA, 19 nt, Artificial Sequence
  Description of Artificial Sequence: Synthetic oligonucleotide
  Antisense strand to SEQ ID NO: 605862
aagacuaucuucaagaacc

SEQ ID NO: 605864 - RNA, 19 nt, Artificial Sequence
  Description of Artificial Sequence: Synthetic oligonucleotide
  Sense strand starting at position 160 of SEQ ID NO: 585003
uuacguacugaugagauca

SEQ ID NO: 605865 - RNA, 19 nt, Artificial Sequence
  Description of Artificial Sequence: Synthetic oligonucleotide
  Antisense strand to SEQ ID NO: 605864
ugaucucaucaguacguaa

SEQ ID NO: 605866 - RNA, 19 nt, Artificial Sequence
  Description of Artificial Sequence: Synthetic oligonucleotide
  Sense strand starting at position 162 of SEQ ID NO: 585003
acguacugaugagaucaga

SEQ ID NO: 605867 - RNA, 19 nt, Artificial Sequence
  Description of Artificial Sequence: Synthetic oligonucleotide
  Antisense strand to SEQ ID NO: 605866
ucugaucucaucaguacgu

SEQ ID NO: 605868 - RNA, 19 nt, Artificial Sequence
  Description of Artificial Sequence: Synthetic oligonucleotide
  Sense strand starting at position 275 of SEQ ID NO: 585003
gaggacagggcuuguauca

SEQ ID NO: 605869 - RNA, 19 nt, Artificial Sequence
  Description of Artificial Sequence: Synthetic oligonucleotide
  Antisense strand to SEQ ID NO: 605868
ugauacaagcccuguccuc

SEQ ID NO: 605870 - RNA, 19 nt, Artificial Sequence
  Description of Artificial Sequence: Synthetic oligonucleotide
  Sense strand starting at position 308 of SEQ ID NO: 585003
cagcgaaucugauaaucag

SEQ ID NO: 605871 - RNA, 19 nt, Artificial Sequence
  Description of Artificial Sequence: Synthetic oligonucleotide
  Antisense strand to SEQ ID NO: 605870
cugauuaucagauucgcug

SEQ ID NO: 605872 - RNA, 19 nt, Artificial Sequence
  Description of Artificial Sequence: Synthetic oligonucleotide
  Sense strand starting at position 333 of SEQ ID NO: 585003
ucaacaugugcaugagcaa

SEQ ID NO: 605873 - RNA, 19 nt, Artificial Sequence
  Description of Artificial Sequence: Synthetic oligonucleotide
  Antisense strand to SEQ ID NO: 605872
uugcucaugcacauguuga

SEQ ID NO: 605874 - RNA, 19 nt, Artificial Sequence
  Description of Artificial Sequence: Synthetic oligonucleotide
  Sense strand starting at position 359 of SEQ ID NO: 585003
acccuuggguccuugaaua

SEQ ID NO: 605875 - RNA, 19 nt, Artificial Sequence
  Description of Artificial Sequence: Synthetic oligonucleotide
  Antisense strand to SEQ ID NO: 605874
uauucaaggacccaagggu

SEQ ID NO: 605876 - RNA, 19 nt, Artificial Sequence
  Description of Artificial Sequence: Synthetic oligonucleotide
  Sense strand starting at position 444 of SEQ ID NO: 585003
gagggauagugcccacaca

SEQ ID NO: 605877 - RNA, 19 nt, Artificial Sequence
  Description of Artificial Sequence: Synthetic oligonucleotide
  Antisense strand to SEQ ID NO: 605876
ugugugggcacuaucccuc

SEQ ID NO: 605878 - RNA, 19 nt, Artificial Sequence
  Description of Artificial Sequence: Synthetic oligonucleotide
  Sense strand starting at position 480 of SEQ ID NO: 585003
gggcucucugaaugaggga

SEQ ID NO: 605879 - RNA, 19 nt, Artificial Sequence
  Description of Artificial Sequence: Synthetic oligonucleotide
  Antisense strand to SEQ ID NO: 605878
ucccucauucagagagccc

SEQ ID NO: 605880 - RNA, 19 nt, Artificial Sequence
  Description of Artificial Sequence: Synthetic oligonucleotide
  Sense strand starting at position 610 of SEQ ID NO: 585003
gcaguuggcauagaucuca

SEQ ID NO: 605881 - RNA, 19 nt, Artificial Sequence
  Description of Artificial Sequence: Synthetic oligonucleotide
  Antisense strand to SEQ ID NO: 605880
ugagaucuaugccaacugc

SEQ ID NO: 605882 - RNA, 19 nt, Artificial Sequence
  Description of Artificial Sequence: Synthetic oligonucleotide
  Sense strand starting at position 621 of SEQ ID NO: 585003
agaucucauccuuggacau

SEQ ID NO: 605883 - RNA, 19 nt, Artificial Sequence
  Description of Artificial Sequence: Synthetic oligonucleotide
  Antisense strand to SEQ ID NO: 605882
auguccaaggaugagaucu

SEQ ID NO: 605884 - RNA, 19 nt, Artificial Sequence
  Description of Artificial Sequence: Synthetic oligonucleotide
  Sense strand starting at position 645 of SEQ ID NO: 585003
gcaggaugugcucagccuu

SEQ ID NO: 605885 - RNA, 19 nt, Artificial Sequence
  Description of Artificial Sequence: Synthetic oligonucleotide
  Antisense strand to SEQ ID NO: 605884
aaggcugagcacauccugc

SEQ ID NO: 605886 - RNA, 19 nt, Artificial Sequence
  Description of Artificial Sequence: Synthetic oligonucleotide
  Sense strand starting at position 812 of SEQ ID NO: 585003
cugaauucccuguagcgga

SEQ ID NO: 605887 - RNA, 19 nt, Artificial Sequence
  Description of Artificial Sequence: Synthetic oligonucleotide
  Antisense strand to SEQ ID NO: 605886
uccgcuacagggaauucag

SEQ ID NO: 605888 - RNA, 19 nt, Artificial Sequence
  Description of Artificial Sequence: Synthetic oligonucleotide
  Sense strand starting at position 1092 of SEQ ID NO: 585003
ggccuggaguggguugaua

SEQ ID NO: 605889 - RNA, 19 nt, Artificial Sequence
  Description of Artificial Sequence: Synthetic oligonucleotide
  Antisense strand to SEQ ID NO: 605888
uaucaacccacuccaggcc

SEQ ID NO: 605890 - RNA, 19 nt, Artificial Sequence
  Description of Artificial Sequence: Synthetic oligonucleotide
  Sense strand starting at position 1094 of SEQ ID NO: 585003
ccuggaguggguugauaug

SEQ ID NO: 605891 - RNA, 19 nt, Artificial Sequence
  Description of Artificial Sequence: Synthetic oligonucleotide
  Antisense strand to SEQ ID NO: 605890
cauaucaacccacuccagg

SEQ ID NO: 605892 - RNA, 19 nt, Artificial Sequence
  Description of Artificial Sequence: Synthetic oligonucleotide
  Sense strand starting at position 1097 of SEQ ID NO: 585003
ggaguggguugauauggaa

SEQ ID NO: 605893 - RNA, 19 nt, Artificial Sequence
  Description of Artificial Sequence: Synthetic oligonucleotide
  Antisense strand to SEQ ID NO: 605892
uuccauaucaacccacucc

SEQ ID NO: 605894 - RNA, 19 nt, Artificial Sequence
  Description of Artificial Sequence: Synthetic oligonucleotide
  Sense strand starting at position 1217 of SEQ ID NO: 585003
guauguuugggagggagau

SEQ ID NO: 605895 - RNA, 19 nt, Artificial Sequence
  Description of Artificial Sequence: Synthetic oligonucleotide
  Antisense strand to SEQ ID NO: 605894
aucucccucccaaacauac

SEQ ID NO: 605896 - RNA, 19 nt, Artificial Sequence
  Description of Artificial Sequence: Synthetic oligonucleotide
  Sense strand starting at position 1255 of SEQ ID NO: 585003
gggugcugucucuaaggau

SEQ ID NO: 605897 - RNA, 19 nt, Artificial Sequence
  Description of Artificial Sequence: Synthetic oligonucleotide
  Antisense strand to SEQ ID NO: 605896
auccuuagagacagcaccc

SEQ ID NO: 605898 - RNA, 19 nt, Artificial Sequence
  Description of Artificial Sequence: Synthetic oligonucleotide
  Sense strand starting at position 1259 of SEQ ID NO: 585003
gcugucucuaaggauugga

SEQ ID NO: 605899 - RNA, 19 nt, Artificial Sequence
  Description of Artificial Sequence: Synthetic oligonucleotide
  Antisense strand to SEQ ID NO: 605898
uccaauccuuagagacagc

SEQ ID NO: 605900 - RNA, 19 nt, Artificial Sequence
  Description of Artificial Sequence: Synthetic oligonucleotide
  Sense strand starting at position 1263 of SEQ ID NO: 585003
ucucuaaggauuggagcau

SEQ ID NO: 605901 - RNA, 19 nt, Artificial Sequence
  Description of Artificial Sequence: Synthetic oligonucleotide
  Antisense strand to SEQ ID NO: 605900
augcuccaauccuuagaga

SEQ ID NO: 605902 - RNA, 19 nt, Artificial Sequence
  Description of Artificial Sequence: Synthetic oligonucleotide
  Sense strand starting at position 2115 of SEQ ID NO: 585003
cuccauuacuuguaaggga

SEQ ID NO: 605903 - RNA, 19 nt, Artificial Sequence
  Description of Artificial Sequence: Synthetic oligonucleotide
  Antisense strand to SEQ ID NO: 605902
ucccuuacaaguaauggag

SEQ ID NO: 605904 - RNA, 19 nt, Artificial Sequence
  Description of Artificial Sequence: Synthetic oligonucleotide
  Sense strand starting at position 2118 of SEQ ID NO: 585003
cauuacuuguaagggaauu

SEQ ID NO: 605905 - RNA, 19 nt, Artificial Sequence
  Description of Artificial Sequence: Synthetic oligonucleotide
  Antisense strand to SEQ ID NO: 605904
aauucccuuacaaguaaug

SEQ ID NO: 605906 - RNA, 19 nt, Artificial Sequence
  Description of Artificial Sequence: Synthetic oligonucleotide
  Sense strand starting at position 2196 of SEQ ID NO: 585003
ccacguuuagucuguacca

SEQ ID NO: 605907 - RNA, 19 nt, Artificial Sequence
  Description of Artificial Sequence: Synthetic oligonucleotide
  Antisense strand to SEQ ID NO: 605906
ugguacagacuaaacgugg

SEQ ID NO: 605908 - RNA, 19 nt, Artificial Sequence
  Description of Artificial Sequence: Synthetic oligonucleotide
  Sense strand starting at position 2197 of SEQ ID NO: 585003
cacguuuagucuguaccau

SEQ ID NO: 605909 - RNA, 19 nt, Artificial Sequence
  Description of Artificial Sequence: Synthetic oligonucleotide
  Antisense strand to SEQ ID NO: 605908
augguacagacuaaacgug

SEQ ID NO: 605910 - RNA, 19 nt, Artificial Sequence
  Description of Artificial Sequence: Synthetic oligonucleotide
  Sense strand starting at position 2475 of SEQ ID NO: 585003
caaugacccguuuguuaug

SEQ ID NO: 605911 - RNA, 19 nt, Artificial Sequence
  Description of Artificial Sequence: Synthetic oligonucleotide
  Antisense strand to SEQ ID NO: 605910
cauaacaaacgggucauug

SEQ ID NO: 605912 - RNA, 19 nt, Artificial Sequence
  Description of Artificial Sequence: Synthetic oligonucleotide
  Sense strand starting at position 2484 of SEQ ID NO: 585003
guuuguuaugaucaacguu

SEQ ID NO: 605913 - RNA, 19 nt, Artificial Sequence
  Description of Artificial Sequence: Synthetic oligonucleotide
  Antisense strand to SEQ ID NO: 605912
aacguugaucauaacaaac

SEQ ID NO: 605914 - RNA, 19 nt, Artificial Sequence
  Description of Artificial Sequence: Synthetic oligonucleotide
  Sense strand starting at position 2487 of SEQ ID NO: 585003
uguuaugaucaacguugga

SEQ ID NO: 605915 - RNA, 19 nt, Artificial Sequence
  Description of Artificial Sequence: Synthetic oligonucleotide
  Antisense strand to SEQ ID NO: 605914
uccaacguugaucauaaca

SEQ ID NO: 605916 - RNA, 19 nt, Artificial Sequence
  Description of Artificial Sequence: Synthetic oligonucleotide
  Sense strand starting at position 2500 of SEQ ID NO: 585003
guuggauacucggccuacu

SEQ ID NO: 605917 - RNA, 19 nt, Artificial Sequence
  Description of Artificial Sequence: Synthetic oligonucleotide
  Antisense strand to SEQ ID NO: 605916
aguaggccgaguauccaac

SEQ ID NO: 605918 - RNA, 19 nt, Artificial Sequence
  Description of Artificial Sequence: Synthetic oligonucleotide
  Sense strand starting at position 2527 of SEQ ID NO: 585003
gcacguuuccagcaccuga

SEQ ID NO: 605919 - RNA, 19 nt, Artificial Sequence
  Description of Artificial Sequence: Synthetic oligonucleotide
  Antisense strand to SEQ ID NO: 605918
ucaggugcuggaaacgugc

SEQ ID NO: 605920 - RNA, 19 nt, Artificial Sequence
  Description of Artificial Sequence: Synthetic oligonucleotide
  Sense strand starting at position 2557 of SEQ ID NO: 585003
gauggagauucuguacaau

SEQ ID NO: 605921 - RNA, 19 nt, Artificial Sequence
  Description of Artificial Sequence: Synthetic oligonucleotide
  Antisense strand to SEQ ID NO: 605920
auuguacagaaucuccauc

SEQ ID NO: 605922 - RNA, 19 nt, Artificial Sequence
  Description of Artificial Sequence: Synthetic oligonucleotide
  Sense strand starting at position 2582 of SEQ ID NO: 585003
gaaagagcuugacaauguu

SEQ ID NO: 605923 - RNA, 19 nt, Artificial Sequence
  Description of Artificial Sequence: Synthetic oligonucleotide
  Antisense strand to SEQ ID NO: 605922
aacauugucaagcucuuuc

SEQ ID NO: 605924 - RNA, 19 nt, Artificial Sequence
  Description of Artificial Sequence: Synthetic oligonucleotide
  Sense strand starting at position 2591 of SEQ ID NO: 585003
ugacaauguugagagcaca

SEQ ID NO: 605925 - RNA, 19 nt, Artificial Sequence
  Description of Artificial Sequence: Synthetic oligonucleotide
  Antisense strand to SEQ ID NO: 605924
ugugcucucaacauuguca

SEQ ID NO: 605926 - RNA, 19 nt, Artificial Sequence
  Description of Artificial Sequence: Synthetic oligonucleotide
  Sense strand starting at position 2662 of SEQ ID NO: 585003
gcauaagauggcugacacu

SEQ ID NO: 605927 - RNA, 19 nt, Artificial Sequence
  Description of Artificial Sequence: Synthetic oligonucleotide
  Antisense strand to SEQ ID NO: 605926
agugucagccaucuuaugc

SEQ ID NO: 605928 - RNA, 19 nt, Artificial Sequence
  Description of Artificial Sequence: Synthetic oligonucleotide
  Sense strand starting at position 2681 of SEQ ID NO: 585003
aagugaagguccuacagua

SEQ ID NO: 605929 - RNA, 19 nt, Artificial Sequence
  Description of Artificial Sequence: Synthetic oligonucleotide
  Antisense strand to SEQ ID NO: 605928
uacuguaggaccuucacuu

SEQ ID NO: 605930 - RNA, 19 nt, Artificial Sequence
  Description of Artificial Sequence: Synthetic oligonucleotide
  Sense strand starting at position 2697 of SEQ ID NO: 585003
guaggaacuaaguaguuga

SEQ ID NO: 605931 - RNA, 19 nt, Artificial Sequence
  Description of Artificial Sequence: Synthetic oligonucleotide
  Antisense strand to SEQ ID NO: 605930
ucaacuacuuaguuccuac

SEQ ID NO: 605932 - RNA, 19 nt, Artificial Sequence
  Description of Artificial Sequence: Synthetic oligonucleotide
  Sense strand starting at position 2721 of SEQ ID NO: 585003
aagagcucacgccaguaau

SEQ ID NO: 605933 - RNA, 19 nt, Artificial Sequence
  Description of Artificial Sequence: Synthetic oligonucleotide
  Antisense strand to SEQ ID NO: 605932
auuacuggcgugagcucuu

SEQ ID NO: 605934 - RNA, 19 nt, Artificial Sequence
  Description of Artificial Sequence: Synthetic oligonucleotide
  Sense strand starting at position 3456 of SEQ ID NO: 585003
accugagucauguggcaga

SEQ ID NO: 605935 - RNA, 19 nt, Artificial Sequence
  Description of Artificial Sequence: Synthetic oligonucleotide
  Antisense strand to SEQ ID NO: 605934
ucugccacaugacucaggu

SEQ ID NO: 605936 - RNA, 19 nt, Artificial Sequence
  Description of Artificial Sequence: Synthetic oligonucleotide
  Sense strand starting at position 3626 of SEQ ID NO: 585003
ggauaauggcugugccauu

SEQ ID NO: 605937 - RNA, 19 nt, Artificial Sequence
  Description of Artificial Sequence: Synthetic oligonucleotide
  Antisense strand to SEQ ID NO: 605936
aauggcacagccauuaucc

SEQ ID NO: 605938 - RNA, 19 nt, Artificial Sequence
  Description of Artificial Sequence: Synthetic oligonucleotide
  Sense strand starting at position 3869 of SEQ ID NO: 585003
gccaguaccagauguggaa

SEQ ID NO: 605939 - RNA, 19 nt, Artificial Sequence
  Description of Artificial Sequence: Synthetic oligonucleotide
  Antisense strand to SEQ ID NO: 605938
uuccacaucugguacuggc

SEQ ID NO: 605940 - RNA, 19 nt, Artificial Sequence
  Description of Artificial Sequence: Synthetic oligonucleotide
  Sense strand starting at position 48 of SEQ ID NO: 585004
cugaacauacuuugggauu

SEQ ID NO: 605941 - RNA, 19 nt, Artificial Sequence
  Description of Artificial Sequence: Synthetic oligonucleotide
  Antisense strand to SEQ ID NO: 605940
aaucccaaaguauguucag

SEQ ID NO: 605942 - RNA, 19 nt, Artificial Sequence
  Description of Artificial Sequence: Synthetic oligonucleotide
  Sense strand starting at position 49 of SEQ ID NO: 585004
ugaacauacuuugggauuu

SEQ ID NO: 605943 - RNA, 19 nt, Artificial Sequence
  Description of Artificial Sequence: Synthetic oligonucleotide
  Antisense strand to SEQ ID NO: 605942
aaaucccaaaguauguuca

SEQ ID NO: 605944 - RNA, 19 nt, Artificial Sequence
  Description of Artificial Sequence: Synthetic oligonucleotide
  Sense strand starting at position 539 of SEQ ID NO: 585004
uaaacagagugacaguuaa

SEQ ID NO: 605945 - RNA, 19 nt, Artificial Sequence
  Description of Artificial Sequence: Synthetic oligonucleotide
  Antisense strand to SEQ ID NO: 605944
uuaacugucacucuguuua

SEQ ID NO: 605946 - RNA, 19 nt, Artificial Sequence
  Description of Artificial Sequence: Synthetic oligonucleotide
  Sense strand starting at position 547 of SEQ ID NO: 585004
gugacaguuaagcaagaca

SEQ ID NO: 605947 - RNA, 19 nt, Artificial Sequence
  Description of Artificial Sequence: Synthetic oligonucleotide
  Antisense strand to SEQ ID NO: 605946
ugucuugcuuaacugucac

SEQ ID NO: 605948 - RNA, 19 nt, Artificial Sequence
  Description of Artificial Sequence: Synthetic oligonucleotide
  Sense strand starting at position 550 of SEQ ID NO: 585004
acaguuaagcaagacaguu

SEQ ID NO: 605949 - RNA, 19 nt, Artificial Sequence
  Description of Artificial Sequence: Synthetic oligonucleotide
  Antisense strand to SEQ ID NO: 605948
aacugucuugcuuaacugu

SEQ ID NO: 605950 - RNA, 19 nt, Artificial Sequence
  Description of Artificial Sequence: Synthetic oligonucleotide
  Sense strand starting at position 585 of SEQ ID NO: 585004
guggcugaggguuacagau

SEQ ID NO: 605951 - RNA, 19 nt, Artificial Sequence
  Description of Artificial Sequence: Synthetic oligonucleotide
  Antisense strand to SEQ ID NO: 605950
aucuguaacccucagccac

SEQ ID NO: 605952 - RNA, 19 nt, Artificial Sequence
  Description of Artificial Sequence: Synthetic oligonucleotide
  Sense strand starting at position 663 of SEQ ID NO: 585004
aucagaacaugugaggaaa

SEQ ID NO: 605953 - RNA, 19 nt, Artificial Sequence
  Description of Artificial Sequence: Synthetic oligonucleotide
  Antisense strand to SEQ ID NO: 605952
uuuccucacauguucugau

SEQ ID NO: 605954 - RNA, 19 nt, Artificial Sequence
  Description of Artificial Sequence: Synthetic oligonucleotide
  Sense strand starting at position 709 of SEQ ID NO: 585004
gagcauaaaugacagagua

SEQ ID NO: 605955 - RNA, 19 nt, Artificial Sequence
  Description of Artificial Sequence: Synthetic oligonucleotide
  Antisense strand to SEQ ID NO: 605954
uacucugucauuuaugcuc

SEQ ID NO: 605956 - RNA, 19 nt, Artificial Sequence
  Description of Artificial Sequence: Synthetic oligonucleotide
  Sense strand starting at position 903 of SEQ ID NO: 585004
gcccuuauacugcauguau

SEQ ID NO: 605957 - RNA, 19 nt, Artificial Sequence
  Description of Artificial Sequence: Synthetic oligonucleotide
  Antisense strand to SEQ ID NO: 605956
auacaugcaguauaagggc

SEQ ID NO: 605958 - RNA, 19 nt, Artificial Sequence
  Description of Artificial Sequence: Synthetic oligonucleotide
  Sense strand starting at position 915 of SEQ ID NO: 585004
cauguaugguaaggauuua

SEQ ID NO: 605959 - RNA, 19 nt, Artificial Sequence
  Description of Artificial Sequence: Synthetic oligonucleotide
  Antisense strand to SEQ ID NO: 605958
uaaauccuuaccauacaug

SEQ ID NO: 605960 - RNA, 19 nt, Artificial Sequence
  Description of Artificial Sequence: Synthetic oligonucleotide
  Sense strand starting at position 972 of SEQ ID NO: 585004
gguuaaagguaggaaauga

SEQ ID NO: 605961 - RNA, 19 nt, Artificial Sequence
  Description of Artificial Sequence: Synthetic oligonucleotide
  Antisense strand to SEQ ID NO: 605960
ucauuuccuaccuuuaacc

SEQ ID NO: 605962 - RNA, 19 nt, Artificial Sequence
  Description of Artificial Sequence: Synthetic oligonucleotide
  Sense strand starting at position 1080 of SEQ ID NO: 585004
ggaacaaguuacuuaaccu

SEQ ID NO: 605963 - RNA, 19 nt, Artificial Sequence
  Description of Artificial Sequence: Synthetic oligonucleotide
  Antisense strand to SEQ ID NO: 605962
agguuaaguaacuuguucc

SEQ ID NO: 605964 - RNA, 19 nt, Artificial Sequence
  Description of Artificial Sequence: Synthetic oligonucleotide
  Sense strand starting at position 1103 of SEQ ID NO: 585004
gcuuguuuccucuucugca

SEQ ID NO: 605965 - RNA, 19 nt, Artificial Sequence
  Description of Artificial Sequence: Synthetic oligonucleotide
  Antisense strand to SEQ ID NO: 605964
ugcagaagaggaaacaagc

SEQ ID NO: 605966 - RNA, 19 nt, Artificial Sequence
  Description of Artificial Sequence: Synthetic oligonucleotide
  Sense strand starting at position 1111 of SEQ ID NO: 585004
ccucuucugcaagauggua

SEQ ID NO: 605967 - RNA, 19 nt, Artificial Sequence
  Description of Artificial Sequence: Synthetic oligonucleotide
  Antisense strand to SEQ ID NO: 605966
uaccaucuugcagaagagg

SEQ ID NO: 605968 - RNA, 19 nt, Artificial Sequence
  Description of Artificial Sequence: Synthetic oligonucleotide
  Sense strand starting at position 1148 of SEQ ID NO: 585004
ucaugaauuuaguaggauc

SEQ ID NO: 605969 - RNA, 19 nt, Artificial Sequence
  Description of Artificial Sequence: Synthetic oligonucleotide
  Antisense strand to SEQ ID NO: 605968
gauccuacuaaauucauga

SEQ ID NO: 605970 - RNA, 19 nt, Artificial Sequence
  Description of Artificial Sequence: Synthetic oligonucleotide
  Sense strand starting at position 1151 of SEQ ID NO: 585004
ugaauuuaguaggaucaug

SEQ ID NO: 605971 - RNA, 19 nt, Artificial Sequence
  Description of Artificial Sequence: Synthetic oligonucleotide
  Antisense strand to SEQ ID NO: 605970
caugauccuacuaaauuca

SEQ ID NO: 605972 - RNA, 19 nt, Artificial Sequence
  Description of Artificial Sequence: Synthetic oligonucleotide
  Sense strand starting at position 1160 of SEQ ID NO: 585004
uaggaucauguauguaaag

SEQ ID NO: 605973 - RNA, 19 nt, Artificial Sequence
  Description of Artificial Sequence: Synthetic oligonucleotide
  Antisense strand to SEQ ID NO: 605972
cuuuacauacaugauccua

SEQ ID NO: 605974 - RNA, 19 nt, Artificial Sequence
  Description of Artificial Sequence: Synthetic oligonucleotide
  Sense strand starting at position 1162 of SEQ ID NO: 585004
ggaucauguauguaaagca

SEQ ID NO: 605975 - RNA, 19 nt, Artificial Sequence
  Description of Artificial Sequence: Synthetic oligonucleotide
  Antisense strand to SEQ ID NO: 605974
ugcuuuacauacaugaucc

SEQ ID NO: 605976 - RNA, 19 nt, Artificial Sequence
  Description of Artificial Sequence: Synthetic oligonucleotide
  Sense strand starting at position 1226 of SEQ ID NO: 585004
cuguuauuauucuuagaug

SEQ ID NO: 605977 - RNA, 19 nt, Artificial Sequence
  Description of Artificial Sequence: Synthetic oligonucleotide
  Antisense strand to SEQ ID NO: 605976
caucuaagaauaauaacag

SEQ ID NO: 605978 - RNA, 19 nt, Artificial Sequence
  Description of Artificial Sequence: Synthetic oligonucleotide
  Sense strand starting at position 1229 of SEQ ID NO: 585004
uuauuauucuuagauggag

SEQ ID NO: 605979 - RNA, 19 nt, Artificial Sequence
  Description of Artificial Sequence: Synthetic oligonucleotide
  Antisense strand to SEQ ID NO: 605978
cuccaucuaagaauaauaa

SEQ ID NO: 605980 - RNA, 19 nt, Artificial Sequence
  Description of Artificial Sequence: Synthetic oligonucleotide
  Sense strand starting at position 1274 of SEQ ID NO: 585004
caaaguuauuaagaccgau

SEQ ID NO: 605981 - RNA, 19 nt, Artificial Sequence
  Description of Artificial Sequence: Synthetic oligonucleotide
  Antisense strand to SEQ ID NO: 605980
aucggucuuaauaacuuug

SEQ ID NO: 605982 - RNA, 19 nt, Artificial Sequence
  Description of Artificial Sequence: Synthetic oligonucleotide
  Sense strand starting at position 1277 of SEQ ID NO: 585004
aguuauuaagaccgauuau

SEQ ID NO: 605983 - RNA, 19 nt, Artificial Sequence
  Description of Artificial Sequence: Synthetic oligonucleotide
  Antisense strand to SEQ ID NO: 605982
auaaucggucuuaauaacu

SEQ ID NO: 605984 - RNA, 19 nt, Artificial Sequence
  Description of Artificial Sequence: Synthetic oligonucleotide
  Sense strand starting at position 1287 of SEQ ID NO: 585004
accgauuauaaaugggagu

SEQ ID NO: 605985 - RNA, 19 nt, Artificial Sequence
  Description of Artificial Sequence: Synthetic oligonucleotide
  Antisense strand to SEQ ID NO: 605984
acucccauuuauaaucggu

SEQ ID NO: 605986 - RNA, 19 nt, Artificial Sequence
  Description of Artificial Sequence: Synthetic oligonucleotide
  Sense strand starting at position 1304 of SEQ ID NO: 585004
guggaauaaucaggaaaga

SEQ ID NO: 605987 - RNA, 19 nt, Artificial Sequence
  Description of Artificial Sequence: Synthetic oligonucleotide
  Antisense strand to SEQ ID NO: 605986
ucuuuccugauuauuccac

SEQ ID NO: 605988 - RNA, 19 nt, Artificial Sequence
  Description of Artificial Sequence: Synthetic oligonucleotide
  Sense strand starting at position 1313 of SEQ ID NO: 585004
ucaggaaagauaugcguga

SEQ ID NO: 605989 - RNA, 19 nt, Artificial Sequence
  Description of Artificial Sequence: Synthetic oligonucleotide
  Antisense strand to SEQ ID NO: 605988
ucacgcauaucuuuccuga

SEQ ID NO: 605990 - RNA, 19 nt, Artificial Sequence
  Description of Artificial Sequence: Synthetic oligonucleotide
  Sense strand starting at position 1314 of SEQ ID NO: 585004
caggaaagauaugcgugau

SEQ ID NO: 605991 - RNA, 19 nt, Artificial Sequence
  Description of Artificial Sequence: Synthetic oligonucleotide
  Antisense strand to SEQ ID NO: 605990
aucacgcauaucuuuccug

SEQ ID NO: 605992 - RNA, 19 nt, Artificial Sequence
  Description of Artificial Sequence: Synthetic oligonucleotide
  Sense strand starting at position 1315 of SEQ ID NO: 585004
aggaaagauaugcgugaua

SEQ ID NO: 605993 - RNA, 19 nt, Artificial Sequence
  Description of Artificial Sequence: Synthetic oligonucleotide
  Antisense strand to SEQ ID NO: 605992
uaucacgcauaucuuuccu

SEQ ID NO: 605994 - RNA, 19 nt, Artificial Sequence
  Description of Artificial Sequence: Synthetic oligonucleotide
  Sense strand starting at position 1317 of SEQ ID NO: 585004
gaaagauaugcgugauaug

SEQ ID NO: 605995 - RNA, 19 nt, Artificial Sequence
  Description of Artificial Sequence: Synthetic oligonucleotide
  Antisense strand to SEQ ID NO: 605994
cauaucacgcauaucuuuc

SEQ ID NO: 605996 - RNA, 19 nt, Artificial Sequence
  Description of Artificial Sequence: Synthetic oligonucleotide
  Sense strand starting at position 1318 of SEQ ID NO: 585004
aaagauaugcgugauauga

SEQ ID NO: 605997 - RNA, 19 nt, Artificial Sequence
  Description of Artificial Sequence: Synthetic oligonucleotide
  Antisense strand to SEQ ID NO: 605996
ucauaucacgcauaucuuu

SEQ ID NO: 605998 - RNA, 19 nt, Artificial Sequence
  Description of Artificial Sequence: Synthetic oligonucleotide
  Sense strand starting at position 1354 of SEQ ID NO: 585004
agggaauagugagaauaag

SEQ ID NO: 605999 - RNA, 19 nt, Artificial Sequence
  Description of Artificial Sequence: Synthetic oligonucleotide
  Antisense strand to SEQ ID NO: 605998
cuuauucucacuauucccu

SEQ ID NO: 606000 - RNA, 19 nt, Artificial Sequence
  Description of Artificial Sequence: Synthetic oligonucleotide
  Sense strand starting at position 1655 of SEQ ID NO: 585004
gggugagcucuggacgcau

SEQ ID NO: 606001 - RNA, 19 nt, Artificial Sequence
  Description of Artificial Sequence: Synthetic oligonucleotide
  Antisense strand to SEQ ID NO: 606000
augcguccagagcucaccc

SEQ ID NO: 606002 - RNA, 19 nt, Artificial Sequence
  Description of Artificial Sequence: Synthetic oligonucleotide
  Sense strand starting at position 1816 of SEQ ID NO: 585004
cagugaaucucagagagca

SEQ ID NO: 606003 - RNA, 19 nt, Artificial Sequence
  Description of Artificial Sequence: Synthetic oligonucleotide
  Antisense strand to SEQ ID NO: 606002
ugcucucugagauucacug

SEQ ID NO: 606004 - RNA, 19 nt, Artificial Sequence
  Description of Artificial Sequence: Synthetic oligonucleotide
  Sense strand starting at position 2281 of SEQ ID NO: 585004
cucccaucacagcgaucau

SEQ ID NO: 606005 - RNA, 19 nt, Artificial Sequence
  Description of Artificial Sequence: Synthetic oligonucleotide
  Antisense strand to SEQ ID NO: 606004
augaucgcugugaugggag

SEQ ID NO: 606006 - RNA, 19 nt, Artificial Sequence
  Description of Artificial Sequence: Synthetic oligonucleotide
  Sense strand starting at position 2291 of SEQ ID NO: 585004
agcgaucaugcugacgaaa

SEQ ID NO: 606007 - RNA, 19 nt, Artificial Sequence
  Description of Artificial Sequence: Synthetic oligonucleotide
  Antisense strand to SEQ ID NO: 606006
uuucgucagcaugaucgcu

SEQ ID NO: 606008 - RNA, 19 nt, Artificial Sequence
  Description of Artificial Sequence: Synthetic oligonucleotide
  Sense strand starting at position 2294 of SEQ ID NO: 585004
gaucaugcugacgaaacau

SEQ ID NO: 606009 - RNA, 19 nt, Artificial Sequence
  Description of Artificial Sequence: Synthetic oligonucleotide
  Antisense strand to SEQ ID NO: 606008
auguuucgucagcaugauc

SEQ ID NO: 606010 - RNA, 19 nt, Artificial Sequence
  Description of Artificial Sequence: Synthetic oligonucleotide
  Sense strand starting at position 2369 of SEQ ID NO: 585004
gcccaugaguuucccaaac

SEQ ID NO: 606011 - RNA, 19 nt, Artificial Sequence
  Description of Artificial Sequence: Synthetic oligonucleotide
  Antisense strand to SEQ ID NO: 606010
guuugggaaacucaugggc

SEQ ID NO: 606012 - RNA, 19 nt, Artificial Sequence
  Description of Artificial Sequence: Synthetic oligonucleotide
  Sense strand starting at position 2391 of SEQ ID NO: 585004
ucagcaaugcuuuggauua

SEQ ID NO: 606013 - RNA, 19 nt, Artificial Sequence
  Description of Artificial Sequence: Synthetic oligonucleotide
  Antisense strand to SEQ ID NO: 606012
uaauccaaagcauugcuga

SEQ ID NO: 606014 - RNA, 19 nt, Artificial Sequence
  Description of Artificial Sequence: Synthetic oligonucleotide
  Sense strand starting at position 2403 of SEQ ID NO: 585004
uggauuaguugugucacuu

SEQ ID NO: 606015 - RNA, 19 nt, Artificial Sequence
  Description of Artificial Sequence: Synthetic oligonucleotide
  Antisense strand to SEQ ID NO: 606014
aagugacacaacuaaucca

SEQ ID NO: 606016 - RNA, 19 nt, Artificial Sequence
  Description of Artificial Sequence: Synthetic oligonucleotide
  Sense strand starting at position 2559 of SEQ ID NO: 585004
gcauuaccguucucaucaa

SEQ ID NO: 606017 - RNA, 19 nt, Artificial Sequence
  Description of Artificial Sequence: Synthetic oligonucleotide
  Antisense strand to SEQ ID NO: 606016
uugaugagaacgguaaugc

SEQ ID NO: 606018 - RNA, 19 nt, Artificial Sequence
  Description of Artificial Sequence: Synthetic oligonucleotide
  Sense strand starting at position 2612 of SEQ ID NO: 585004
ggaguuugccucgcguuca

SEQ ID NO: 606019 - RNA, 19 nt, Artificial Sequence
  Description of Artificial Sequence: Synthetic oligonucleotide
  Antisense strand to SEQ ID NO: 606018
ugaacgcgaggcaaacucc

SEQ ID NO: 606020 - RNA, 19 nt, Artificial Sequence
  Description of Artificial Sequence: Synthetic oligonucleotide
  Sense strand starting at position 158 of SEQ ID NO: 585005
agcucugagucauucugaa

SEQ ID NO: 606021 - RNA, 19 nt, Artificial Sequence
  Description of Artificial Sequence: Synthetic oligonucleotide
  Antisense strand to SEQ ID NO: 606020
uucagaaugacucagagcu

SEQ ID NO: 606022 - RNA, 19 nt, Artificial Sequence
  Description of Artificial Sequence: Synthetic oligonucleotide
  Sense strand starting at position 290 of SEQ ID NO: 585005
cagucaucaccuggaaguc

SEQ ID NO: 606023 - RNA, 19 nt, Artificial Sequence
  Description of Artificial Sequence: Synthetic oligonucleotide
  Antisense strand to SEQ ID NO: 606022
gacuuccaggugaugacug

SEQ ID NO: 606024 - RNA, 19 nt, Artificial Sequence
  Description of Artificial Sequence: Synthetic oligonucleotide
  Sense strand starting at position 291 of SEQ ID NO: 585005
agucaucaccuggaaguca

SEQ ID NO: 606025 - RNA, 19 nt, Artificial Sequence
  Description of Artificial Sequence: Synthetic oligonucleotide
  Antisense strand to SEQ ID NO: 606024
ugacuuccaggugaugacu

SEQ ID NO: 606026 - RNA, 19 nt, Artificial Sequence
  Description of Artificial Sequence: Synthetic oligonucleotide
  Sense strand starting at position 303 of SEQ ID NO: 585005
gaagucagaaggcguugaa

SEQ ID NO: 606027 - RNA, 19 nt, Artificial Sequence
  Description of Artificial Sequence: Synthetic oligonucleotide
  Antisense strand to SEQ ID NO: 606026
uucaacgccuucugacuuc

SEQ ID NO: 606028 - RNA, 19 nt, Artificial Sequence
  Description of Artificial Sequence: Synthetic oligonucleotide
  Sense strand starting at position 307 of SEQ ID NO: 585005
ucagaaggcguugaaguau

SEQ ID NO: 606029 - RNA, 19 nt, Artificial Sequence
  Description of Artificial Sequence: Synthetic oligonucleotide
  Antisense strand to SEQ ID NO: 606028
auacuucaacgccuucuga

SEQ ID NO: 606030 - RNA, 19 nt, Artificial Sequence
  Description of Artificial Sequence: Synthetic oligonucleotide
  Sense strand starting at position 364 of SEQ ID NO: 585005
auggcaggacugugauaga

SEQ ID NO: 606031 - RNA, 19 nt, Artificial Sequence
  Description of Artificial Sequence: Synthetic oligonucleotide
  Antisense strand to SEQ ID NO: 606030
ucuaucacaguccugccau

SEQ ID NO: 606032 - RNA, 19 nt, Artificial Sequence
  Description of Artificial Sequence: Synthetic oligonucleotide
  Sense strand starting at position 956 of SEQ ID NO: 585005
gacucacauggauguaauc

SEQ ID NO: 606033 - RNA, 19 nt, Artificial Sequence
  Description of Artificial Sequence: Synthetic oligonucleotide
  Antisense strand to SEQ ID NO: 606032
gauuacauccaugugaguc

SEQ ID NO: 606034 - RNA, 19 nt, Artificial Sequence
  Description of Artificial Sequence: Synthetic oligonucleotide
  Sense strand starting at position 970 of SEQ ID NO: 585005
uaaucugagggaugagguu

SEQ ID NO: 606035 - RNA, 19 nt, Artificial Sequence
  Description of Artificial Sequence: Synthetic oligonucleotide
  Antisense strand to SEQ ID NO: 606034
aaccucaucccucagauua

SEQ ID NO: 606036 - RNA, 19 nt, Artificial Sequence
  Description of Artificial Sequence: Synthetic oligonucleotide
  Sense strand starting at position 1315 of SEQ ID NO: 585005
ggccauggucagcaagacu

SEQ ID NO: 606037 - RNA, 19 nt, Artificial Sequence
  Description of Artificial Sequence: Synthetic oligonucleotide
  Antisense strand to SEQ ID NO: 606036
agucuugcugaccauggcc

SEQ ID NO: 606038 - RNA, 19 nt, Artificial Sequence
  Description of Artificial Sequence: Synthetic oligonucleotide
  Sense strand starting at position 1806 of SEQ ID NO: 585005
gcagccacgugauuagaaa

SEQ ID NO: 606039 - RNA, 19 nt, Artificial Sequence
  Description of Artificial Sequence: Synthetic oligonucleotide
  Antisense strand to SEQ ID NO: 606038
uuucuaaucacguggcugc

SEQ ID NO: 606040 - RNA, 19 nt, Artificial Sequence
  Description of Artificial Sequence: Synthetic oligonucleotide
  Sense strand starting at position 2345 of SEQ ID NO: 585005
uuuaguugggcagagauau

SEQ ID NO: 606041 - RNA, 19 nt, Artificial Sequence
  Description of Artificial Sequence: Synthetic oligonucleotide
  Antisense strand to SEQ ID NO: 606040
auaucucugcccaacuaaa

SEQ ID NO: 606042 - RNA, 19 nt, Artificial Sequence
  Description of Artificial Sequence: Synthetic oligonucleotide
  Sense strand starting at position 2356 of SEQ ID NO: 585005
agagauaugccuggguuug

SEQ ID NO: 606043 - RNA, 19 nt, Artificial Sequence
  Description of Artificial Sequence: Synthetic oligonucleotide
  Antisense strand to SEQ ID NO: 606042
caaacccaggcauaucucu

SEQ ID NO: 606044 - RNA, 19 nt, Artificial Sequence
  Description of Artificial Sequence: Synthetic oligonucleotide
  Sense strand starting at position 2377 of SEQ ID NO: 585005
aaugaacaacggugaucua

SEQ ID NO: 606045 - RNA, 19 nt, Artificial Sequence
  Description of Artificial Sequence: Synthetic oligonucleotide
  Antisense strand to SEQ ID NO: 606044
uagaucaccguuguucauu

SEQ ID NO: 606046 - RNA, 19 nt, Artificial Sequence
  Description of Artificial Sequence: Synthetic oligonucleotide
  Sense strand starting at position 2380 of SEQ ID NO: 585005
gaacaacggugaucuagaa

SEQ ID NO: 606047 - RNA, 19 nt, Artificial Sequence
  Description of Artificial Sequence: Synthetic oligonucleotide
  Antisense strand to SEQ ID NO: 606046
uucuagaucaccguuguuc

SEQ ID NO: 606048 - RNA, 19 nt, Artificial Sequence
  Description of Artificial Sequence: Synthetic oligonucleotide
  Sense strand starting at position 2563 of SEQ ID NO: 585005
acuacugaaucagagggaa

SEQ ID NO: 606049 - RNA, 19 nt, Artificial Sequence
  Description of Artificial Sequence: Synthetic oligonucleotide
  Antisense strand to SEQ ID NO: 606048
uucccucugauucaguagu

SEQ ID NO: 606050 - RNA, 19 nt, Artificial Sequence
  Description of Artificial Sequence: Synthetic oligonucleotide
  Sense strand starting at position 2927 of SEQ ID NO: 585005
guuauaccucucggagguu

SEQ ID NO: 606051 - RNA, 19 nt, Artificial Sequence
  Description of Artificial Sequence: Synthetic oligonucleotide
  Antisense strand to SEQ ID NO: 606050
aaccuccgagagguauaac

SEQ ID NO: 606052 - RNA, 19 nt, Artificial Sequence
  Description of Artificial Sequence: Synthetic oligonucleotide
  Sense strand starting at position 2978 of SEQ ID NO: 585005
ugagaucucugucuuugag

SEQ ID NO: 606053 - RNA, 19 nt, Artificial Sequence
  Description of Artificial Sequence: Synthetic oligonucleotide
  Antisense strand to SEQ ID NO: 606052
cucaaagacagagaucuca

SEQ ID NO: 606054 - RNA, 19 nt, Artificial Sequence
  Description of Artificial Sequence: Synthetic oligonucleotide
  Sense strand starting at position 2980 of SEQ ID NO: 585005
agaucucugucuuugaguu

SEQ ID NO: 606055 - RNA, 19 nt, Artificial Sequence
  Description of Artificial Sequence: Synthetic oligonucleotide
  Antisense strand to SEQ ID NO: 606054
aacucaaagacagagaucu

SEQ ID NO: 606056 - RNA, 19 nt, Artificial Sequence
  Description of Artificial Sequence: Synthetic oligonucleotide
  Sense strand starting at position 2981 of SEQ ID NO: 585005
gaucucugucuuugaguuu

SEQ ID NO: 606057 - RNA, 19 nt, Artificial Sequence
  Description of Artificial Sequence: Synthetic oligonucleotide
  Antisense strand to SEQ ID NO: 606056
aaacucaaagacagagauc

SEQ ID NO: 606058 - RNA, 19 nt, Artificial Sequence
  Description of Artificial Sequence: Synthetic oligonucleotide
  Sense strand starting at position 2984 of SEQ ID NO: 585005
cucugucuuugaguuugga

SEQ ID NO: 606059 - RNA, 19 nt, Artificial Sequence
  Description of Artificial Sequence: Synthetic oligonucleotide
  Antisense strand to SEQ ID NO: 606058
uccaaacucaaagacagag

SEQ ID NO: 606060 - RNA, 19 nt, Artificial Sequence
  Description of Artificial Sequence: Synthetic oligonucleotide
  Sense strand starting at position 2999 of SEQ ID NO: 585005
uggaguuugucucugagac

SEQ ID NO: 606061 - RNA, 19 nt, Artificial Sequence
  Description of Artificial Sequence: Synthetic oligonucleotide
  Antisense strand to SEQ ID NO: 606060
gucucagagacaaacucca

SEQ ID NO: 606062 - RNA, 19 nt, Artificial Sequence
  Description of Artificial Sequence: Synthetic oligonucleotide
  Sense strand starting at position 3000 of SEQ ID NO: 585005
ggaguuugucucugagaca

SEQ ID NO: 606063 - RNA, 19 nt, Artificial Sequence
  Description of Artificial Sequence: Synthetic oligonucleotide
  Antisense strand to SEQ ID NO: 606062
ugucucagagacaaacucc

SEQ ID NO: 606064 - RNA, 19 nt, Artificial Sequence
  Description of Artificial Sequence: Synthetic oligonucleotide
  Sense strand starting at position 3048 of SEQ ID NO: 585005
uggagaucuuucuuaggau

SEQ ID NO: 606065 - RNA, 19 nt, Artificial Sequence
  Description of Artificial Sequence: Synthetic oligonucleotide
  Antisense strand to SEQ ID NO: 606064
auccuaagaaagaucucca

SEQ ID NO: 606066 - RNA, 19 nt, Artificial Sequence
  Description of Artificial Sequence: Synthetic oligonucleotide
  Sense strand starting at position 3055 of SEQ ID NO: 585005
cuuucuuaggauugaguuu

SEQ ID NO: 606067 - RNA, 19 nt, Artificial Sequence
  Description of Artificial Sequence: Synthetic oligonucleotide
  Antisense strand to SEQ ID NO: 606066
aaacucaauccuaagaaag

SEQ ID NO: 606068 - RNA, 19 nt, Artificial Sequence
  Description of Artificial Sequence: Synthetic oligonucleotide
  Sense strand starting at position 3218 of SEQ ID NO: 585005
aggagugucucugucucua

SEQ ID NO: 606069 - RNA, 19 nt, Artificial Sequence
  Description of Artificial Sequence: Synthetic oligonucleotide
  Antisense strand to SEQ ID NO: 606068
uagagacagagacacuccu

SEQ ID NO: 606070 - RNA, 19 nt, Artificial Sequence
  Description of Artificial Sequence: Synthetic oligonucleotide
  Sense strand starting at position 3223 of SEQ ID NO: 585005
ugucucugucucuaaguua

SEQ ID NO: 606071 - RNA, 19 nt, Artificial Sequence
  Description of Artificial Sequence: Synthetic oligonucleotide
  Antisense strand to SEQ ID NO: 606070
uaacuuagagacagagaca

SEQ ID NO: 606072 - RNA, 19 nt, Artificial Sequence
  Description of Artificial Sequence: Synthetic oligonucleotide
  Sense strand starting at position 3226 of SEQ ID NO: 585005
cucugucucuaaguuauca

SEQ ID NO: 606073 - RNA, 19 nt, Artificial Sequence
  Description of Artificial Sequence: Synthetic oligonucleotide
  Antisense strand to SEQ ID NO: 606072
ugauaacuuagagacagag

SEQ ID NO: 606074 - RNA, 19 nt, Artificial Sequence
  Description of Artificial Sequence: Synthetic oligonucleotide
  Sense strand starting at position 3237 of SEQ ID NO: 585005
aguuaucagucucugagau

SEQ ID NO: 606075 - RNA, 19 nt, Artificial Sequence
  Description of Artificial Sequence: Synthetic oligonucleotide
  Antisense strand to SEQ ID NO: 606074
aucucagagacugauaacu

SEQ ID NO: 606076 - RNA, 19 nt, Artificial Sequence
  Description of Artificial Sequence: Synthetic oligonucleotide
  Sense strand starting at position 3238 of SEQ ID NO: 585005
guuaucagucucugagauc

SEQ ID NO: 606077 - RNA, 19 nt, Artificial Sequence
  Description of Artificial Sequence: Synthetic oligonucleotide
  Antisense strand to SEQ ID NO: 606076
gaucucagagacugauaac

SEQ ID NO: 606078 - RNA, 19 nt, Artificial Sequence
  Description of Artificial Sequence: Synthetic oligonucleotide
  Sense strand starting at position 3245 of SEQ ID NO: 585005
gucucugagaucugagucu

SEQ ID NO: 606079 - RNA, 19 nt, Artificial Sequence
  Description of Artificial Sequence: Synthetic oligonucleotide
  Antisense strand to SEQ ID NO: 606078
agacucagaucucagagac

SEQ ID NO: 606080 - RNA, 19 nt, Artificial Sequence
  Description of Artificial Sequence: Synthetic oligonucleotide
  Sense strand starting at position 3266 of SEQ ID NO: 585005
ggucucuuucuaggucuga

SEQ ID NO: 606081 - RNA, 19 nt, Artificial Sequence
  Description of Artificial Sequence: Synthetic oligonucleotide
  Antisense strand to SEQ ID NO: 606080
ucagaccuagaaagagacc

SEQ ID NO: 606082 - RNA, 19 nt, Artificial Sequence
  Description of Artificial Sequence: Synthetic oligonucleotide
  Sense strand starting at position 3279 of SEQ ID NO: 585005
gucugaguucucuaagcuc

SEQ ID NO: 606083 - RNA, 19 nt, Artificial Sequence
  Description of Artificial Sequence: Synthetic oligonucleotide
  Antisense strand to SEQ ID NO: 606082
gagcuuagagaacucagac

SEQ ID NO: 606084 - RNA, 19 nt, Artificial Sequence
  Description of Artificial Sequence: Synthetic oligonucleotide
  Sense strand starting at position 3282 of SEQ ID NO: 585005
ugaguucucuaagcucuaa

SEQ ID NO: 606085 - RNA, 19 nt, Artificial Sequence
  Description of Artificial Sequence: Synthetic oligonucleotide
  Antisense strand to SEQ ID NO: 606084
uuagagcuuagagaacuca

SEQ ID NO: 606086 - RNA, 19 nt, Artificial Sequence
  Description of Artificial Sequence: Synthetic oligonucleotide
  Sense strand starting at position 3305 of SEQ ID NO: 585005
acaucuggcucuuucugaa

SEQ ID NO: 606087 - RNA, 19 nt, Artificial Sequence
  Description of Artificial Sequence: Synthetic oligonucleotide
  Antisense strand to SEQ ID NO: 606086
uucagaaagagccagaugu

SEQ ID NO: 606088 - RNA, 19 nt, Artificial Sequence
  Description of Artificial Sequence: Synthetic oligonucleotide
  Sense strand starting at position 3357 of SEQ ID NO: 585005
agguccuggucccugaaau

SEQ ID NO: 606089 - RNA, 19 nt, Artificial Sequence
  Description of Artificial Sequence: Synthetic oligonucleotide
  Antisense strand to SEQ ID NO: 606088
auuucagggaccaggaccu

SEQ ID NO: 606090 - RNA, 19 nt, Artificial Sequence
  Description of Artificial Sequence: Synthetic oligonucleotide
  Sense strand starting at position 3391 of SEQ ID NO: 585005
uggagucuaagauaucugu

SEQ ID NO: 606091 - RNA, 19 nt, Artificial Sequence
  Description of Artificial Sequence: Synthetic oligonucleotide
  Antisense strand to SEQ ID NO: 606090
acagauaucuuagacucca

SEQ ID NO: 606092 - RNA, 19 nt, Artificial Sequence
  Description of Artificial Sequence: Synthetic oligonucleotide
  Sense strand starting at position 3395 of SEQ ID NO: 585005
gucuaagauaucuguaggu

SEQ ID NO: 606093 - RNA, 19 nt, Artificial Sequence
  Description of Artificial Sequence: Synthetic oligonucleotide
  Antisense strand to SEQ ID NO: 606092
accuacagauaucuuagac

SEQ ID NO: 606094 - RNA, 19 nt, Artificial Sequence
  Description of Artificial Sequence: Synthetic oligonucleotide
  Sense strand starting at position 3397 of SEQ ID NO: 585005
cuaagauaucuguagguau

SEQ ID NO: 606095 - RNA, 19 nt, Artificial Sequence
  Description of Artificial Sequence: Synthetic oligonucleotide
  Antisense strand to SEQ ID NO: 606094
auaccuacagauaucuuag

SEQ ID NO: 606096 - RNA, 19 nt, Artificial Sequence
  Description of Artificial Sequence: Synthetic oligonucleotide
  Sense strand starting at position 3400 of SEQ ID NO: 585005
agauaucuguagguaugga

SEQ ID NO: 606097 - RNA, 19 nt, Artificial Sequence
  Description of Artificial Sequence: Synthetic oligonucleotide
  Antisense strand to SEQ ID NO: 606096
uccauaccuacagauaucu

SEQ ID NO: 606098 - RNA, 19 nt, Artificial Sequence
  Description of Artificial Sequence: Synthetic oligonucleotide
  Sense strand starting at position 3561 of SEQ ID NO: 585005
ggugaaguaucuuucucug

SEQ ID NO: 606099 - RNA, 19 nt, Artificial Sequence
  Description of Artificial Sequence: Synthetic oligonucleotide
  Antisense strand to SEQ ID NO: 606098
cagagaaagauacuucacc

SEQ ID NO: 606100 - RNA, 19 nt, Artificial Sequence
  Description of Artificial Sequence: Synthetic oligonucleotide
  Sense strand starting at position 185 of SEQ ID NO: 585006
cuaaaugcuguugaaugaa

SEQ ID NO: 606101 - RNA, 19 nt, Artificial Sequence
  Description of Artificial Sequence: Synthetic oligonucleotide
  Antisense strand to SEQ ID NO: 606100
uucauucaacagcauuuag

SEQ ID NO: 606102 - RNA, 19 nt, Artificial Sequence
  Description of Artificial Sequence: Synthetic oligonucleotide
  Sense strand starting at position 619 of SEQ ID NO: 585006
acaugauuggauggcuaga

SEQ ID NO: 606103 - RNA, 19 nt, Artificial Sequence
  Description of Artificial Sequence: Synthetic oligonucleotide
  Antisense strand to SEQ ID NO: 606102
ucuagccauccaaucaugu

SEQ ID NO: 606104 - RNA, 19 nt, Artificial Sequence
  Description of Artificial Sequence: Synthetic oligonucleotide
  Sense strand starting at position 629 of SEQ ID NO: 585006
auggcuagaugauugauau

SEQ ID NO: 606105 - RNA, 19 nt, Artificial Sequence
  Description of Artificial Sequence: Synthetic oligonucleotide
  Antisense strand to SEQ ID NO: 606104
auaucaaucaucuagccau

SEQ ID NO: 606106 - RNA, 19 nt, Artificial Sequence
  Description of Artificial Sequence: Synthetic oligonucleotide
  Sense strand starting at position 630 of SEQ ID NO: 585006
uggcuagaugauugauaua

SEQ ID NO: 606107 - RNA, 19 nt, Artificial Sequence
  Description of Artificial Sequence: Synthetic oligonucleotide
  Antisense strand to SEQ ID NO: 606106
uauaucaaucaucuagcca

SEQ ID NO: 606108 - RNA, 19 nt, Artificial Sequence
  Description of Artificial Sequence: Synthetic oligonucleotide
  Sense strand starting at position 825 of SEQ ID NO: 585006
acccguaaguacuuaagaa

SEQ ID NO: 606109 - RNA, 19 nt, Artificial Sequence
  Description of Artificial Sequence: Synthetic oligonucleotide
  Antisense strand to SEQ ID NO: 606108
uucuuaaguacuuacgggu

SEQ ID NO: 606110 - RNA, 19 nt, Artificial Sequence
  Description of Artificial Sequence: Synthetic oligonucleotide
  Sense strand starting at position 903 of SEQ ID NO: 585006
aucagaacgccaggucuaa

SEQ ID NO: 606111 - RNA, 19 nt, Artificial Sequence
  Description of Artificial Sequence: Synthetic oligonucleotide
  Antisense strand to SEQ ID NO: 606110
uuagaccuggcguucugau

SEQ ID NO: 606112 - RNA, 19 nt, Artificial Sequence
  Description of Artificial Sequence: Synthetic oligonucleotide
  Sense strand starting at position 912 of SEQ ID NO: 585006
ccaggucuaaguggagaaa

SEQ ID NO: 606113 - RNA, 19 nt, Artificial Sequence
  Description of Artificial Sequence: Synthetic oligonucleotide
  Antisense strand to SEQ ID NO: 606112
uuucuccacuuagaccugg

SEQ ID NO: 606114 - RNA, 19 nt, Artificial Sequence
  Description of Artificial Sequence: Synthetic oligonucleotide
  Sense strand starting at position 979 of SEQ ID NO: 585006
aaccgaguggcccaaguua

SEQ ID NO: 606115 - RNA, 19 nt, Artificial Sequence
  Description of Artificial Sequence: Synthetic oligonucleotide
  Antisense strand to SEQ ID NO: 606114
uaacuugggccacucgguu

SEQ ID NO: 606116 - RNA, 19 nt, Artificial Sequence
  Description of Artificial Sequence: Synthetic oligonucleotide
  Sense strand starting at position 1188 of SEQ ID NO: 585006
uuauauuugcuucgaaguu

SEQ ID NO: 606117 - RNA, 19 nt, Artificial Sequence
  Description of Artificial Sequence: Synthetic oligonucleotide
  Antisense strand to SEQ ID NO: 606116
aacuucgaagcaaauauaa

SEQ ID NO: 606118 - RNA, 19 nt, Artificial Sequence
  Description of Artificial Sequence: Synthetic oligonucleotide
  Sense strand starting at position 1267 of SEQ ID NO: 585006
aaggcaguaugucuuggau

SEQ ID NO: 606119 - RNA, 19 nt, Artificial Sequence
  Description of Artificial Sequence: Synthetic oligonucleotide
  Antisense strand to SEQ ID NO: 606118
auccaagacauacugccuu

SEQ ID NO: 606120 - RNA, 19 nt, Artificial Sequence
  Description of Artificial Sequence: Synthetic oligonucleotide
  Sense strand starting at position 1279 of SEQ ID NO: 585006
cuuggauagugucuguaaa

SEQ ID NO: 606121 - RNA, 19 nt, Artificial Sequence
  Description of Artificial Sequence: Synthetic oligonucleotide
  Antisense strand to SEQ ID NO: 606120
uuuacagacacuauccaag

SEQ ID NO: 606122 - RNA, 19 nt, Artificial Sequence
  Description of Artificial Sequence: Synthetic oligonucleotide
  Sense strand starting at position 1280 of SEQ ID NO: 585006
uuggauagugucuguaaac

SEQ ID NO: 606123 - RNA, 19 nt, Artificial Sequence
  Description of Artificial Sequence: Synthetic oligonucleotide
  Antisense strand to SEQ ID NO: 606122
guuuacagacacuauccaa

SEQ ID NO: 606124 - RNA, 19 nt, Artificial Sequence
  Description of Artificial Sequence: Synthetic oligonucleotide
  Sense strand starting at position 1467 of SEQ ID NO: 585006
ggcuaauaccgagagccua

SEQ ID NO: 606125 - RNA, 19 nt, Artificial Sequence
  Description of Artificial Sequence: Synthetic oligonucleotide
  Antisense strand to SEQ ID NO: 606124
uaggcucucgguauuagcc

SEQ ID NO: 606126 - RNA, 19 nt, Artificial Sequence
  Description of Artificial Sequence: Synthetic oligonucleotide
  Sense strand starting at position 1524 of SEQ ID NO: 585006
uuuaaaucgcgggaaagga

SEQ ID NO: 606127 - RNA, 19 nt, Artificial Sequence
  Description of Artificial Sequence: Synthetic oligonucleotide
  Antisense strand to SEQ ID NO: 606126
uccuuucccgcgauuuaaa

SEQ ID NO: 606128 - RNA, 19 nt, Artificial Sequence
  Description of Artificial Sequence: Synthetic oligonucleotide
  Sense strand starting at position 1557 of SEQ ID NO: 585006
acggauagagcgggauaaa

SEQ ID NO: 606129 - RNA, 19 nt, Artificial Sequence
  Description of Artificial Sequence: Synthetic oligonucleotide
  Antisense strand to SEQ ID NO: 606128
uuuaucccgcucuauccgu

SEQ ID NO: 606130 - RNA, 19 nt, Artificial Sequence
  Description of Artificial Sequence: Synthetic oligonucleotide
  Sense strand starting at position 2078 of SEQ ID NO: 585006
gcuaguuccgcaucccgaa

SEQ ID NO: 606131 - RNA, 19 nt, Artificial Sequence
  Description of Artificial Sequence: Synthetic oligonucleotide
  Antisense strand to SEQ ID NO: 606130
uucgggaugcggaacuagc

SEQ ID NO: 606132 - RNA, 19 nt, Artificial Sequence
  Description of Artificial Sequence: Synthetic oligonucleotide
  Sense strand starting at position 2459 of SEQ ID NO: 585006
caugcugagggcuaaugaa

SEQ ID NO: 606133 - RNA, 19 nt, Artificial Sequence
  Description of Artificial Sequence: Synthetic oligonucleotide
  Antisense strand to SEQ ID NO: 606132
uucauuagcccucagcaug

SEQ ID NO: 606134 - RNA, 19 nt, Artificial Sequence
  Description of Artificial Sequence: Synthetic oligonucleotide
  Sense strand starting at position 2471 of SEQ ID NO: 585006
uaaugaaugcgcgaaagac

SEQ ID NO: 606135 - RNA, 19 nt, Artificial Sequence
  Description of Artificial Sequence: Synthetic oligonucleotide
  Antisense strand to SEQ ID NO: 606134
gucuuucgcgcauucauua

SEQ ID NO: 606136 - RNA, 19 nt, Artificial Sequence
  Description of Artificial Sequence: Synthetic oligonucleotide
  Sense strand starting at position 2479 of SEQ ID NO: 585006
gcgcgaaagacguuaguaa

SEQ ID NO: 606137 - RNA, 19 nt, Artificial Sequence
  Description of Artificial Sequence: Synthetic oligonucleotide
  Antisense strand to SEQ ID NO: 606136
uuacuaacgucuuucgcgc

SEQ ID NO: 606138 - RNA, 19 nt, Artificial Sequence
  Description of Artificial Sequence: Synthetic oligonucleotide
  Sense strand starting at position 2562 of SEQ ID NO: 585006
cugggaauuguguacugau

SEQ ID NO: 606139 - RNA, 19 nt, Artificial Sequence
  Description of Artificial Sequence: Synthetic oligonucleotide
  Antisense strand to SEQ ID NO: 606138
aucaguacacaauucccag

SEQ ID NO: 606140 - RNA, 19 nt, Artificial Sequence
  Description of Artificial Sequence: Synthetic oligonucleotide
  Sense strand starting at position 2594 of SEQ ID NO: 585006
agcuguggugaugaaguaa

SEQ ID NO: 606141 - RNA, 19 nt, Artificial Sequence
  Description of Artificial Sequence: Synthetic oligonucleotide
  Antisense strand to SEQ ID NO: 606140
uuacuucaucaccacagcu

SEQ ID NO: 606142 - RNA, 19 nt, Artificial Sequence
  Description of Artificial Sequence: Synthetic oligonucleotide
  Sense strand starting at position 2712 of SEQ ID NO: 585006
ucugcauaauggguuuauu

SEQ ID NO: 606143 - RNA, 19 nt, Artificial Sequence
  Description of Artificial Sequence: Synthetic oligonucleotide
  Antisense strand to SEQ ID NO: 606142
aauaaacccauuaugcaga

SEQ ID NO: 606144 - RNA, 19 nt, Artificial Sequence
  Description of Artificial Sequence: Synthetic oligonucleotide
  Sense strand starting at position 2715 of SEQ ID NO: 585006
gcauaauggguuuauuaaa

SEQ ID NO: 606145 - RNA, 19 nt, Artificial Sequence
  Description of Artificial Sequence: Synthetic oligonucleotide
  Antisense strand to SEQ ID NO: 606144
uuuaauaaacccauuaugc

SEQ ID NO: 606146 - RNA, 19 nt, Artificial Sequence
  Description of Artificial Sequence: Synthetic oligonucleotide
  Sense strand starting at position 2738 of SEQ ID NO: 585006
aaaggaucauguguaaacu

SEQ ID NO: 606147 - RNA, 19 nt, Artificial Sequence
  Description of Artificial Sequence: Synthetic oligonucleotide
  Antisense strand to SEQ ID NO: 606146
aguuuacacaugauccuuu

SEQ ID NO: 606148 - RNA, 19 nt, Artificial Sequence
  Description of Artificial Sequence: Synthetic oligonucleotide
  Sense strand starting at position 2761 of SEQ ID NO: 585006
acugcagugccugauuaau

SEQ ID NO: 606149 - RNA, 19 nt, Artificial Sequence
  Description of Artificial Sequence: Synthetic oligonucleotide
  Antisense strand to SEQ ID NO: 606148
auuaaucaggcacugcagu

SEQ ID NO: 606150 - RNA, 19 nt, Artificial Sequence
  Description of Artificial Sequence: Synthetic oligonucleotide
  Sense strand starting at position 2773 of SEQ ID NO: 585006
gauuaauauuagguacuga

SEQ ID NO: 606151 - RNA, 19 nt, Artificial Sequence
  Description of Artificial Sequence: Synthetic oligonucleotide
  Antisense strand to SEQ ID NO: 606150
ucaguaccuaauauuaauc

SEQ ID NO: 606152 - RNA, 19 nt, Artificial Sequence
  Description of Artificial Sequence: Synthetic oligonucleotide
  Sense strand starting at position 3081 of SEQ ID NO: 585006
acuacuuaguucuuaaagu

SEQ ID NO: 606153 - RNA, 19 nt, Artificial Sequence
  Description of Artificial Sequence: Synthetic oligonucleotide
  Antisense strand to SEQ ID NO: 606152
acuuuaagaacuaaguagu

SEQ ID NO: 606154 - RNA, 19 nt, Artificial Sequence
  Description of Artificial Sequence: Synthetic oligonucleotide
  Sense strand starting at position 3111 of SEQ ID NO: 585006
caagguuauguuugcagaa

SEQ ID NO: 606155 - RNA, 19 nt, Artificial Sequence
  Description of Artificial Sequence: Synthetic oligonucleotide
  Antisense strand to SEQ ID NO: 606154
uucugcaaacauaaccuug

SEQ ID NO: 606156 - RNA, 19 nt, Artificial Sequence
  Description of Artificial Sequence: Synthetic oligonucleotide
  Sense strand starting at position 3112 of SEQ ID NO: 585006
aagguuauguuugcagaau

SEQ ID NO: 606157 - RNA, 19 nt, Artificial Sequence
  Description of Artificial Sequence: Synthetic oligonucleotide
  Antisense strand to SEQ ID NO: 606156
auucugcaaacauaaccuu

SEQ ID NO: 606158 - RNA, 19 nt, Artificial Sequence
  Description of Artificial Sequence: Synthetic oligonucleotide
  Sense strand starting at position 3186 of SEQ ID NO: 585006
gguagccaccuaugacauu

SEQ ID NO: 606159 - RNA, 19 nt, Artificial Sequence
  Description of Artificial Sequence: Synthetic oligonucleotide
  Antisense strand to SEQ ID NO: 606158
aaugucauagguggcuacc

SEQ ID NO: 606160 - RNA, 19 nt, Artificial Sequence
  Description of Artificial Sequence: Synthetic oligonucleotide
  Sense strand starting at position 3230 of SEQ ID NO: 585006
uugaaaugcuuauuaugag

SEQ ID NO: 606161 - RNA, 19 nt, Artificial Sequence
  Description of Artificial Sequence: Synthetic oligonucleotide
  Antisense strand to SEQ ID NO: 606160
cucauaauaagcauuucaa

SEQ ID NO: 606162 - RNA, 19 nt, Artificial Sequence
  Description of Artificial Sequence: Synthetic oligonucleotide
  Sense strand starting at position 3290 of SEQ ID NO: 585006
acuguauuacuuugacuuu

SEQ ID NO: 606163 - RNA, 19 nt, Artificial Sequence
  Description of Artificial Sequence: Synthetic oligonucleotide
  Antisense strand to SEQ ID NO: 606162
aaagucaaaguaauacagu

SEQ ID NO: 606164 - RNA, 19 nt, Artificial Sequence
  Description of Artificial Sequence: Synthetic oligonucleotide
  Sense strand starting at position 3307 of SEQ ID NO: 585006
uugcaaauugcuucugugu

SEQ ID NO: 606165 - RNA, 19 nt, Artificial Sequence
  Description of Artificial Sequence: Synthetic oligonucleotide
  Antisense strand to SEQ ID NO: 606164
acacagaagcaauuugcaa

SEQ ID NO: 606166 - RNA, 19 nt, Artificial Sequence
  Description of Artificial Sequence: Synthetic oligonucleotide
  Sense strand starting at position 3308 of SEQ ID NO: 585006
ugcaaauugcuucuguguu

SEQ ID NO: 606167 - RNA, 19 nt, Artificial Sequence
  Description of Artificial Sequence: Synthetic oligonucleotide
  Antisense strand to SEQ ID NO: 606166
aacacagaagcaauuugca

SEQ ID NO: 606168 - RNA, 19 nt, Artificial Sequence
  Description of Artificial Sequence: Synthetic oligonucleotide
  Sense strand starting at position 3610 of SEQ ID NO: 585006
gggaucccucaauguagua

SEQ ID NO: 606169 - RNA, 19 nt, Artificial Sequence
  Description of Artificial Sequence: Synthetic oligonucleotide
  Antisense strand to SEQ ID NO: 606168
uacuacauugagggauccc

SEQ ID NO: 606170 - RNA, 19 nt, Artificial Sequence
  Description of Artificial Sequence: Synthetic oligonucleotide
  Sense strand starting at position 3698 of SEQ ID NO: 585006
aguuacuuugcucaucauu

SEQ ID NO: 606171 - RNA, 19 nt, Artificial Sequence
  Description of Artificial Sequence: Synthetic oligonucleotide
  Antisense strand to SEQ ID NO: 606170
aaugaugagcaaaguaacu

SEQ ID NO: 606172 - RNA, 19 nt, Artificial Sequence
  Description of Artificial Sequence: Synthetic oligonucleotide
  Sense strand starting at position 3825 of SEQ ID NO: 585006
augagugauuucuaacaua

SEQ ID NO: 606173 - RNA, 19 nt, Artificial Sequence
  Description of Artificial Sequence: Synthetic oligonucleotide
  Antisense strand to SEQ ID NO: 606172
uauguuagaaaucacucau

SEQ ID NO: 606174 - RNA, 19 nt, Artificial Sequence
  Description of Artificial Sequence: Synthetic oligonucleotide
  Sense strand starting at position 3828 of SEQ ID NO: 585006
agugauuucuaacauaagu

SEQ ID NO: 606175 - RNA, 19 nt, Artificial Sequence
  Description of Artificial Sequence: Synthetic oligonucleotide
  Antisense strand to SEQ ID NO: 606174
acuuauguuagaaaucacu

SEQ ID NO: 606176 - RNA, 19 nt, Artificial Sequence
  Description of Artificial Sequence: Synthetic oligonucleotide
  Sense strand starting at position 3901 of SEQ ID NO: 585006
cuggcaucaguaggaaaua

SEQ ID NO: 606177 - RNA, 19 nt, Artificial Sequence
  Description of Artificial Sequence: Synthetic oligonucleotide
  Antisense strand to SEQ ID NO: 606176
uauuuccuacugaugccag

SEQ ID NO: 606178 - RNA, 19 nt, Artificial Sequence
  Description of Artificial Sequence: Synthetic oligonucleotide
  Sense strand starting at position 3913 of SEQ ID NO: 585006
ggaaauagcagauguuaaa

SEQ ID NO: 606179 - RNA, 19 nt, Artificial Sequence
  Description of Artificial Sequence: Synthetic oligonucleotide
  Antisense strand to SEQ ID NO: 606178
uuuaacaucugcuauuucc

SEQ ID NO: 606180 - RNA, 19 nt, Artificial Sequence
  Description of Artificial Sequence: Synthetic oligonucleotide
  Sense strand starting at position 759 of SEQ ID NO: 585007
uuaaguugucguccugcca

SEQ ID NO: 606181 - RNA, 19 nt, Artificial Sequence
  Description of Artificial Sequence: Synthetic oligonucleotide
  Antisense strand to SEQ ID NO: 606180
uggcaggacgacaacuuaa

SEQ ID NO: 606182 - RNA, 19 nt, Artificial Sequence
  Description of Artificial Sequence: Synthetic oligonucleotide
  Sense strand starting at position 2322 of SEQ ID NO: 585007
augugauuuguguggguug

SEQ ID NO: 606183 - RNA, 19 nt, Artificial Sequence
  Description of Artificial Sequence: Synthetic oligonucleotide
  Antisense strand to SEQ ID NO: 606182
caacccacacaaaucacau

SEQ ID NO: 606184 - RNA, 19 nt, Artificial Sequence
  Description of Artificial Sequence: Synthetic oligonucleotide
  Sense strand starting at position 2324 of SEQ ID NO: 585007
gugauuuguguggguuguu

SEQ ID NO: 606185 - RNA, 19 nt, Artificial Sequence
  Description of Artificial Sequence: Synthetic oligonucleotide
  Antisense strand to SEQ ID NO: 606184
aacaacccacacaaaucac

SEQ ID NO: 606186 - RNA, 19 nt, Artificial Sequence
  Description of Artificial Sequence: Synthetic oligonucleotide
  Sense strand starting at position 2325 of SEQ ID NO: 585007
ugauuuguguggguuguuu

SEQ ID NO: 606187 - RNA, 19 nt, Artificial Sequence
  Description of Artificial Sequence: Synthetic oligonucleotide
  Antisense strand to SEQ ID NO: 606186
aaacaacccacacaaauca

SEQ ID NO: 606188 - RNA, 19 nt, Artificial Sequence
  Description of Artificial Sequence: Synthetic oligonucleotide
  Sense strand starting at position 2329 of SEQ ID NO: 585007
uuguguggguuguuuguua

SEQ ID NO: 606189 - RNA, 19 nt, Artificial Sequence
  Description of Artificial Sequence: Synthetic oligonucleotide
  Antisense strand to SEQ ID NO: 606188
uaacaaacaacccacacaa

SEQ ID NO: 606190 - RNA, 19 nt, Artificial Sequence
  Description of Artificial Sequence: Synthetic oligonucleotide
  Sense strand starting at position 2331 of SEQ ID NO: 585007
guguggguuguuuguuagu

SEQ ID NO: 606191 - RNA, 19 nt, Artificial Sequence
  Description of Artificial Sequence: Synthetic oligonucleotide
  Antisense strand to SEQ ID NO: 606190
acuaacaaacaacccacac

SEQ ID NO: 606192 - RNA, 19 nt, Artificial Sequence
  Description of Artificial Sequence: Synthetic oligonucleotide
  Sense strand starting at position 2334 of SEQ ID NO: 585007
uggguuguuuguuaguuua

SEQ ID NO: 606193 - RNA, 19 nt, Artificial Sequence
  Description of Artificial Sequence: Synthetic oligonucleotide
  Antisense strand to SEQ ID NO: 606192
uaaacuaacaaacaaccca

SEQ ID NO: 606194 - RNA, 19 nt, Artificial Sequence
  Description of Artificial Sequence: Synthetic oligonucleotide
  Sense strand starting at position 2336 of SEQ ID NO: 585007
gguuguuuguuaguuuaag

SEQ ID NO: 606195 - RNA, 19 nt, Artificial Sequence
  Description of Artificial Sequence: Synthetic oligonucleotide
  Antisense strand to SEQ ID NO: 606194
cuuaaacuaacaaacaacc

SEQ ID NO: 606196 - RNA, 19 nt, Artificial Sequence
  Description of Artificial Sequence: Synthetic oligonucleotide
  Sense strand starting at position 2697 of SEQ ID NO: 585007
uugagcugguuugagauaa

SEQ ID NO: 606197 - RNA, 19 nt, Artificial Sequence
  Description of Artificial Sequence: Synthetic oligonucleotide
  Antisense strand to SEQ ID NO: 606196
uuaucucaaaccagcucaa

SEQ ID NO: 606198 - RNA, 19 nt, Artificial Sequence
  Description of Artificial Sequence: Synthetic oligonucleotide
  Sense strand starting at position 81 of SEQ ID NO: 585008
ucaagaucauaugcauaag

SEQ ID NO: 606199 - RNA, 19 nt, Artificial Sequence
  Description of Artificial Sequence: Synthetic oligonucleotide
  Antisense strand to SEQ ID NO: 606198
cuuaugcauaugaucuuga

SEQ ID NO: 606200 - RNA, 19 nt, Artificial Sequence
  Description of Artificial Sequence: Synthetic oligonucleotide
  Sense strand starting at position 122 of SEQ ID NO: 585008
guauuucuuuaggagauau

SEQ ID NO: 606201 - RNA, 19 nt, Artificial Sequence
  Description of Artificial Sequence: Synthetic oligonucleotide
  Antisense strand to SEQ ID NO: 606200
auaucuccuaaagaaauac

SEQ ID NO: 606202 - RNA, 19 nt, Artificial Sequence
  Description of Artificial Sequence: Synthetic oligonucleotide
  Sense strand starting at position 338 of SEQ ID NO: 585008
ggaauuuauucugaguaaa

SEQ ID NO: 606203 - RNA, 19 nt, Artificial Sequence
  Description of Artificial Sequence: Synthetic oligonucleotide
  Antisense strand to SEQ ID NO: 606202
uuuacucagaauaaauucc

SEQ ID NO: 606204 - RNA, 19 nt, Artificial Sequence
  Description of Artificial Sequence: Synthetic oligonucleotide
  Sense strand starting at position 772 of SEQ ID NO: 585008
auuggaaucucagagauuu

SEQ ID NO: 606205 - RNA, 19 nt, Artificial Sequence
  Description of Artificial Sequence: Synthetic oligonucleotide
  Antisense strand to SEQ ID NO: 606204
aaaucucugagauuccaau

SEQ ID NO: 606206 - RNA, 19 nt, Artificial Sequence
  Description of Artificial Sequence: Synthetic oligonucleotide
  Sense strand starting at position 795 of SEQ ID NO: 585008
ggcaaaugaucagugguaa

SEQ ID NO: 606207 - RNA, 19 nt, Artificial Sequence
  Description of Artificial Sequence: Synthetic oligonucleotide
  Antisense strand to SEQ ID NO: 606206
uuaccacugaucauuugcc

SEQ ID NO: 606208 - RNA, 19 nt, Artificial Sequence
  Description of Artificial Sequence: Synthetic oligonucleotide
  Sense strand starting at position 796 of SEQ ID NO: 585008
gcaaaugaucagugguaaa

SEQ ID NO: 606209 - RNA, 19 nt, Artificial Sequence
  Description of Artificial Sequence: Synthetic oligonucleotide
  Antisense strand to SEQ ID NO: 606208
uuuaccacugaucauuugc

SEQ ID NO: 606210 - RNA, 19 nt, Artificial Sequence
  Description of Artificial Sequence: Synthetic oligonucleotide
  Sense strand starting at position 993 of SEQ ID NO: 585008
aaaggucuguuccuuaaag

SEQ ID NO: 606211 - RNA, 19 nt, Artificial Sequence
  Description of Artificial Sequence: Synthetic oligonucleotide
  Antisense strand to SEQ ID NO: 606210
cuuuaaggaacagaccuuu

SEQ ID NO: 606212 - RNA, 19 nt, Artificial Sequence
  Description of Artificial Sequence: Synthetic oligonucleotide
  Sense strand starting at position 995 of SEQ ID NO: 585008
aggucuguuccuuaaagug

SEQ ID NO: 606213 - RNA, 19 nt, Artificial Sequence
  Description of Artificial Sequence: Synthetic oligonucleotide
  Antisense strand to SEQ ID NO: 606212
cacuuuaaggaacagaccu

SEQ ID NO: 606214 - RNA, 19 nt, Artificial Sequence
  Description of Artificial Sequence: Synthetic oligonucleotide
  Sense strand starting at position 1003 of SEQ ID NO: 585008
uccuuaaagugcucagaca

SEQ ID NO: 606215 - RNA, 19 nt, Artificial Sequence
  Description of Artificial Sequence: Synthetic oligonucleotide
  Antisense strand to SEQ ID NO: 606214
ugucugagcacuuuaagga

SEQ ID NO: 606216 - RNA, 19 nt, Artificial Sequence
  Description of Artificial Sequence: Synthetic oligonucleotide
  Sense strand starting at position 1004 of SEQ ID NO: 585008
ccuuaaagugcucagacau

SEQ ID NO: 606217 - RNA, 19 nt, Artificial Sequence
  Description of Artificial Sequence: Synthetic oligonucleotide
  Antisense strand to SEQ ID NO: 606216
augucugagcacuuuaagg

SEQ ID NO: 606218 - RNA, 19 nt, Artificial Sequence
  Description of Artificial Sequence: Synthetic oligonucleotide
  Sense strand starting at position 1061 of SEQ ID NO: 585008
gaggauuacuagucucuuc

SEQ ID NO: 606219 - RNA, 19 nt, Artificial Sequence
  Description of Artificial Sequence: Synthetic oligonucleotide
  Antisense strand to SEQ ID NO: 606218
gaagagacuaguaauccuc

SEQ ID NO: 606220 - RNA, 19 nt, Artificial Sequence
  Description of Artificial Sequence: Synthetic oligonucleotide
  Sense strand starting at position 1095 of SEQ ID NO: 585008
uggaguacaucaucaucaa

SEQ ID NO: 606221 - RNA, 19 nt, Artificial Sequence
  Description of Artificial Sequence: Synthetic oligonucleotide
  Antisense strand to SEQ ID NO: 606220
uugaugaugauguacucca

SEQ ID NO: 606222 - RNA, 19 nt, Artificial Sequence
  Description of Artificial Sequence: Synthetic oligonucleotide
  Sense strand starting at position 1299 of SEQ ID NO: 585008
ggaacuuaacuucgaugaa

SEQ ID NO: 606223 - RNA, 19 nt, Artificial Sequence
  Description of Artificial Sequence: Synthetic oligonucleotide
  Antisense strand to SEQ ID NO: 606222
uucaucgaaguuaaguucc

SEQ ID NO: 606224 - RNA, 19 nt, Artificial Sequence
  Description of Artificial Sequence: Synthetic oligonucleotide
  Sense strand starting at position 1302 of SEQ ID NO: 585008
acuuaacuucgaugaagua

SEQ ID NO: 606225 - RNA, 19 nt, Artificial Sequence
  Description of Artificial Sequence: Synthetic oligonucleotide
  Antisense strand to SEQ ID NO: 606224
uacuucaucgaaguuaagu

SEQ ID NO: 606226 - RNA, 19 nt, Artificial Sequence
  Description of Artificial Sequence: Synthetic oligonucleotide
  Sense strand starting at position 1303 of SEQ ID NO: 585008
cuuaacuucgaugaaguaa

SEQ ID NO: 606227 - RNA, 19 nt, Artificial Sequence
  Description of Artificial Sequence: Synthetic oligonucleotide
  Antisense strand to SEQ ID NO: 606226
uuacuucaucgaaguuaag

SEQ ID NO: 606228 - RNA, 19 nt, Artificial Sequence
  Description of Artificial Sequence: Synthetic oligonucleotide
  Sense strand starting at position 1404 of SEQ ID NO: 585008
aggauauuguuguuaauug

SEQ ID NO: 606229 - RNA, 19 nt, Artificial Sequence
  Description of Artificial Sequence: Synthetic oligonucleotide
  Antisense strand to SEQ ID NO: 606228
caauuaacaacaauauccu

SEQ ID NO: 606230 - RNA, 19 nt, Artificial Sequence
  Description of Artificial Sequence: Synthetic oligonucleotide
  Sense strand starting at position 1442 of SEQ ID NO: 585008
augacuagauccuuuaguu

SEQ ID NO: 606231 - RNA, 19 nt, Artificial Sequence
  Description of Artificial Sequence: Synthetic oligonucleotide
  Antisense strand to SEQ ID NO: 606230
aacuaaaggaucuagucau

SEQ ID NO: 606232 - RNA, 19 nt, Artificial Sequence
  Description of Artificial Sequence: Synthetic oligonucleotide
  Sense strand starting at position 1449 of SEQ ID NO: 585008
gauccuuuaguugaggcaa

SEQ ID NO: 606233 - RNA, 19 nt, Artificial Sequence
  Description of Artificial Sequence: Synthetic oligonucleotide
  Antisense strand to SEQ ID NO: 606232
uugccucaacuaaaggauc

SEQ ID NO: 606234 - RNA, 19 nt, Artificial Sequence
  Description of Artificial Sequence: Synthetic oligonucleotide
  Sense strand starting at position 1676 of SEQ ID NO: 585008
aaauucuuccgcugaagga

SEQ ID NO: 606235 - RNA, 19 nt, Artificial Sequence
  Description of Artificial Sequence: Synthetic oligonucleotide
  Antisense strand to SEQ ID NO: 606234
uccuucagcggaagaauuu

SEQ ID NO: 606236 - RNA, 19 nt, Artificial Sequence
  Description of Artificial Sequence: Synthetic oligonucleotide
  Sense strand starting at position 1716 of SEQ ID NO: 585008
ccaggauuauaaucacugu

SEQ ID NO: 606237 - RNA, 19 nt, Artificial Sequence
  Description of Artificial Sequence: Synthetic oligonucleotide
  Antisense strand to SEQ ID NO: 606236
acagugauuauaauccugg

SEQ ID NO: 606238 - RNA, 19 nt, Artificial Sequence
  Description of Artificial Sequence: Synthetic oligonucleotide
  Sense strand starting at position 2693 of SEQ ID NO: 585008
ugugcuguggugcuugaau

SEQ ID NO: 606239 - RNA, 19 nt, Artificial Sequence
  Description of Artificial Sequence: Synthetic oligonucleotide
  Antisense strand to SEQ ID NO: 606238
auucaagcaccacagcaca

SEQ ID NO: 606240 - RNA, 19 nt, Artificial Sequence
  Description of Artificial Sequence: Synthetic oligonucleotide
  Sense strand starting at position 2724 of SEQ ID NO: 585008
gaagcuucgcgagcuguca

SEQ ID NO: 606241 - RNA, 19 nt, Artificial Sequence
  Description of Artificial Sequence: Synthetic oligonucleotide
  Antisense strand to SEQ ID NO: 606240
ugacagcucgcgaagcuuc

SEQ ID NO: 606242 - RNA, 19 nt, Artificial Sequence
  Description of Artificial Sequence: Synthetic oligonucleotide
  Sense strand starting at position 2739 of SEQ ID NO: 585008
gucauuccucuguaggaau

SEQ ID NO: 606243 - RNA, 19 nt, Artificial Sequence
  Description of Artificial Sequence: Synthetic oligonucleotide
  Antisense strand to SEQ ID NO: 606242
auuccuacagaggaaugac

SEQ ID NO: 606244 - RNA, 19 nt, Artificial Sequence
  Description of Artificial Sequence: Synthetic oligonucleotide
  Sense strand starting at position 2895 of SEQ ID NO: 585008
ugggacuuccguuauuaac

SEQ ID NO: 606245 - RNA, 19 nt, Artificial Sequence
  Description of Artificial Sequence: Synthetic oligonucleotide
  Antisense strand to SEQ ID NO: 606244
guuaauaacggaaguccca

SEQ ID NO: 606246 - RNA, 19 nt, Artificial Sequence
  Description of Artificial Sequence: Synthetic oligonucleotide
  Sense strand starting at position 3171 of SEQ ID NO: 585008
agauauuauuaggugucau

SEQ ID NO: 606247 - RNA, 19 nt, Artificial Sequence
  Description of Artificial Sequence: Synthetic oligonucleotide
  Antisense strand to SEQ ID NO: 606246
augacaccuaauaauaucu

SEQ ID NO: 606248 - RNA, 19 nt, Artificial Sequence
  Description of Artificial Sequence: Synthetic oligonucleotide
  Sense strand starting at position 3207 of SEQ ID NO: 585008
guuacaucugccuacauga

SEQ ID NO: 606249 - RNA, 19 nt, Artificial Sequence
  Description of Artificial Sequence: Synthetic oligonucleotide
  Antisense strand to SEQ ID NO: 606248
ucauguaggcagauguaac

SEQ ID NO: 606250 - RNA, 19 nt, Artificial Sequence
  Description of Artificial Sequence: Synthetic oligonucleotide
  Sense strand starting at position 3214 of SEQ ID NO: 585008
cugccuacaugaguaagaa

SEQ ID NO: 606251 - RNA, 19 nt, Artificial Sequence
  Description of Artificial Sequence: Synthetic oligonucleotide
  Antisense strand to SEQ ID NO: 606250
uucuuacucauguaggcag

SEQ ID NO: 606252 - RNA, 19 nt, Artificial Sequence
  Description of Artificial Sequence: Synthetic oligonucleotide
  Sense strand starting at position 3246 of SEQ ID NO: 585008
gccaucuagaguggaauga

SEQ ID NO: 606253 - RNA, 19 nt, Artificial Sequence
  Description of Artificial Sequence: Synthetic oligonucleotide
  Antisense strand to SEQ ID NO: 606252
ucauuccacucuagauggc

SEQ ID NO: 606254 - RNA, 19 nt, Artificial Sequence
  Description of Artificial Sequence: Synthetic oligonucleotide
  Sense strand starting at position 3259 of SEQ ID NO: 585008
gaaugaugaugcccuugaa

SEQ ID NO: 606255 - RNA, 19 nt, Artificial Sequence
  Description of Artificial Sequence: Synthetic oligonucleotide
  Antisense strand to SEQ ID NO: 606254
uucaagggcaucaucauuc

SEQ ID NO: 606256 - RNA, 19 nt, Artificial Sequence
  Description of Artificial Sequence: Synthetic oligonucleotide
  Sense strand starting at position 3262 of SEQ ID NO: 585008
ugaugaugcccuugaauga

SEQ ID NO: 606257 - RNA, 19 nt, Artificial Sequence
  Description of Artificial Sequence: Synthetic oligonucleotide
  Antisense strand to SEQ ID NO: 606256
ucauucaagggcaucauca

SEQ ID NO: 606258 - RNA, 19 nt, Artificial Sequence
  Description of Artificial Sequence: Synthetic oligonucleotide
  Sense strand starting at position 3306 of SEQ ID NO: 585008
uugugaguaguauacucau

SEQ ID NO: 606259 - RNA, 19 nt, Artificial Sequence
  Description of Artificial Sequence: Synthetic oligonucleotide
  Antisense strand to SEQ ID NO: 606258
augaguauacuacucacaa

SEQ ID NO: 606260 - RNA, 19 nt, Artificial Sequence
  Description of Artificial Sequence: Synthetic oligonucleotide
  Sense strand starting at position 3414 of SEQ ID NO: 585008
gcguuaucauuuguaaaug

SEQ ID NO: 606261 - RNA, 19 nt, Artificial Sequence
  Description of Artificial Sequence: Synthetic oligonucleotide
  Antisense strand to SEQ ID NO: 606260
cauuuacaaaugauaacgc

SEQ ID NO: 606262 - RNA, 19 nt, Artificial Sequence
  Description of Artificial Sequence: Synthetic oligonucleotide
  Sense strand starting at position 3493 of SEQ ID NO: 585008
uguuucgugcucuuccauu

SEQ ID NO: 606263 - RNA, 19 nt, Artificial Sequence
  Description of Artificial Sequence: Synthetic oligonucleotide
  Antisense strand to SEQ ID NO: 606262
aauggaagagcacgaaaca

SEQ ID NO: 606264 - RNA, 19 nt, Artificial Sequence
  Description of Artificial Sequence: Synthetic oligonucleotide
  Sense strand starting at position 3636 of SEQ ID NO: 585008
gaaugauauuuccagguuu

SEQ ID NO: 606265 - RNA, 19 nt, Artificial Sequence
  Description of Artificial Sequence: Synthetic oligonucleotide
  Antisense strand to SEQ ID NO: 606264
aaaccuggaaauaucauuc

SEQ ID NO: 606266 - RNA, 19 nt, Artificial Sequence
  Description of Artificial Sequence: Synthetic oligonucleotide
  Sense strand starting at position 3699 of SEQ ID NO: 585008
caggacuauuccucguuaa

SEQ ID NO: 606267 - RNA, 19 nt, Artificial Sequence
  Description of Artificial Sequence: Synthetic oligonucleotide
  Antisense strand to SEQ ID NO: 606266
uuaacgaggaauaguccug

SEQ ID NO: 606268 - RNA, 19 nt, Artificial Sequence
  Description of Artificial Sequence: Synthetic oligonucleotide
  Sense strand starting at position 3700 of SEQ ID NO: 585008
aggacuauuccucguuaaa

SEQ ID NO: 606269 - RNA, 19 nt, Artificial Sequence
  Description of Artificial Sequence: Synthetic oligonucleotide
  Antisense strand to SEQ ID NO: 606268
uuuaacgaggaauaguccu

SEQ ID NO: 606270 - RNA, 19 nt, Artificial Sequence
  Description of Artificial Sequence: Synthetic oligonucleotide
  Sense strand starting at position 3850 of SEQ ID NO: 585008
acauaaucuguguaauaug

SEQ ID NO: 606271 - RNA, 19 nt, Artificial Sequence
  Description of Artificial Sequence: Synthetic oligonucleotide
  Antisense strand to SEQ ID NO: 606270
cauauuacacagauuaugu

SEQ ID NO: 606272 - RNA, 19 nt, Artificial Sequence
  Description of Artificial Sequence: Synthetic oligonucleotide
  Sense strand starting at position 3855 of SEQ ID NO: 585008
aucuguguaauauggagaa

SEQ ID NO: 606273 - RNA, 19 nt, Artificial Sequence
  Description of Artificial Sequence: Synthetic oligonucleotide
  Antisense strand to SEQ ID NO: 606272
uucuccauauuacacagau

SEQ ID NO: 606274 - RNA, 19 nt, Artificial Sequence
  Description of Artificial Sequence: Synthetic oligonucleotide
  Sense strand starting at position 3936 of SEQ ID NO: 585008
acuucuguucuagggaaac

SEQ ID NO: 606275 - RNA, 19 nt, Artificial Sequence
  Description of Artificial Sequence: Synthetic oligonucleotide
  Antisense strand to SEQ ID NO: 606274
guuucccuagaacagaagu

SEQ ID NO: 606276 - RNA, 19 nt, Artificial Sequence
  Description of Artificial Sequence: Synthetic oligonucleotide
  Sense strand starting at position 3948 of SEQ ID NO: 585008
gggaaacugucagcaagau

SEQ ID NO: 606277 - RNA, 19 nt, Artificial Sequence
  Description of Artificial Sequence: Synthetic oligonucleotide
  Antisense strand to SEQ ID NO: 606276
aucuugcugacaguuuccc

SEQ ID NO: 606278 - RNA, 19 nt, Artificial Sequence
  Description of Artificial Sequence: Synthetic oligonucleotide
  Sense strand starting at position 63 of SEQ ID NO: 585009
uggaguucccagcacagau

SEQ ID NO: 606279 - RNA, 19 nt, Artificial Sequence
  Description of Artificial Sequence: Synthetic oligonucleotide
  Antisense strand to SEQ ID NO: 606278
aucugugcugggaacucca

SEQ ID NO: 606280 - RNA, 19 nt, Artificial Sequence
  Description of Artificial Sequence: Synthetic oligonucleotide
  Sense strand starting at position 133 of SEQ ID NO: 585009
acagucauguauguguaaa

SEQ ID NO: 606281 - RNA, 19 nt, Artificial Sequence
  Description of Artificial Sequence: Synthetic oligonucleotide
  Antisense strand to SEQ ID NO: 606280
uuuacacauacaugacugu

SEQ ID NO: 606282 - RNA, 19 nt, Artificial Sequence
  Description of Artificial Sequence: Synthetic oligonucleotide
  Sense strand starting at position 209 of SEQ ID NO: 585009
guuuacauugccuauggga

SEQ ID NO: 606283 - RNA, 19 nt, Artificial Sequence
  Description of Artificial Sequence: Synthetic oligonucleotide
  Antisense strand to SEQ ID NO: 606282
ucccauaggcaauguaaac

SEQ ID NO: 606284 - RNA, 19 nt, Artificial Sequence
  Description of Artificial Sequence: Synthetic oligonucleotide
  Sense strand starting at position 211 of SEQ ID NO: 585009
uuacauugccuaugggaug

SEQ ID NO: 606285 - RNA, 19 nt, Artificial Sequence
  Description of Artificial Sequence: Synthetic oligonucleotide
  Antisense strand to SEQ ID NO: 606284
caucccauaggcaauguaa

SEQ ID NO: 606286 - RNA, 19 nt, Artificial Sequence
  Description of Artificial Sequence: Synthetic oligonucleotide
  Sense strand starting at position 261 of SEQ ID NO: 585009
caacguacuccugaaguua

SEQ ID NO: 606287 - RNA, 19 nt, Artificial Sequence
  Description of Artificial Sequence: Synthetic oligonucleotide
  Antisense strand to SEQ ID NO: 606286
uaacuucaggaguacguug

SEQ ID NO: 606288 - RNA, 19 nt, Artificial Sequence
  Description of Artificial Sequence: Synthetic oligonucleotide
  Sense strand starting at position 273 of SEQ ID NO: 585009
gaaguuaaaugagucuguu

SEQ ID NO: 606289 - RNA, 19 nt, Artificial Sequence
  Description of Artificial Sequence: Synthetic oligonucleotide
  Antisense strand to SEQ ID NO: 606288
aacagacucauuuaacuuc

SEQ ID NO: 606290 - RNA, 19 nt, Artificial Sequence
  Description of Artificial Sequence: Synthetic oligonucleotide
  Sense strand starting at position 279 of SEQ ID NO: 585009
aaaugagucuguuucugac

SEQ ID NO: 606291 - RNA, 19 nt, Artificial Sequence
  Description of Artificial Sequence: Synthetic oligonucleotide
  Antisense strand to SEQ ID NO: 606290
gucagaaacagacucauuu

SEQ ID NO: 606292 - RNA, 19 nt, Artificial Sequence
  Description of Artificial Sequence: Synthetic oligonucleotide
  Sense strand starting at position 281 of SEQ ID NO: 585009
augagucuguuucugacau

SEQ ID NO: 606293 - RNA, 19 nt, Artificial Sequence
  Description of Artificial Sequence: Synthetic oligonucleotide
  Antisense strand to SEQ ID NO: 606292
augucagaaacagacucau

SEQ ID NO: 606294 - RNA, 19 nt, Artificial Sequence
  Description of Artificial Sequence: Synthetic oligonucleotide
  Sense strand starting at position 448 of SEQ ID NO: 585009
gggagaguccaguaaucuu

SEQ ID NO: 606295 - RNA, 19 nt, Artificial Sequence
  Description of Artificial Sequence: Synthetic oligonucleotide
  Antisense strand to SEQ ID NO: 606294
aagauuacuggacucuccc

SEQ ID NO: 606296 - RNA, 19 nt, Artificial Sequence
  Description of Artificial Sequence: Synthetic oligonucleotide
  Sense strand starting at position 604 of SEQ ID NO: 585009
ugugcuacucagggaugau

SEQ ID NO: 606297 - RNA, 19 nt, Artificial Sequence
  Description of Artificial Sequence: Synthetic oligonucleotide
  Antisense strand to SEQ ID NO: 606296
aucaucccugaguagcaca

SEQ ID NO: 606298 - RNA, 19 nt, Artificial Sequence
  Description of Artificial Sequence: Synthetic oligonucleotide
  Sense strand starting at position 605 of SEQ ID NO: 585009
gugcuacucagggaugaug

SEQ ID NO: 606299 - RNA, 19 nt, Artificial Sequence
  Description of Artificial Sequence: Synthetic oligonucleotide
  Antisense strand to SEQ ID NO: 606298
caucaucccugaguagcac

SEQ ID NO: 606300 - RNA, 19 nt, Artificial Sequence
  Description of Artificial Sequence: Synthetic oligonucleotide
  Sense strand starting at position 872 of SEQ ID NO: 585009
ccucuaacccuccgagaaa

SEQ ID NO: 606301 - RNA, 19 nt, Artificial Sequence
  Description of Artificial Sequence: Synthetic oligonucleotide
  Antisense strand to SEQ ID NO: 606300
uuucucggaggguuagagg

SEQ ID NO: 606302 - RNA, 19 nt, Artificial Sequence
  Description of Artificial Sequence: Synthetic oligonucleotide
  Sense strand starting at position 1749 of SEQ ID NO: 585009
cugcaaacacuuuggagaa

SEQ ID NO: 606303 - RNA, 19 nt, Artificial Sequence
  Description of Artificial Sequence: Synthetic oligonucleotide
  Antisense strand to SEQ ID NO: 606302
uucuccaaaguguuugcag

SEQ ID NO: 606304 - RNA, 19 nt, Artificial Sequence
  Description of Artificial Sequence: Synthetic oligonucleotide
  Sense strand starting at position 2094 of SEQ ID NO: 585009
ggauauuuauggcaagguu

SEQ ID NO: 606305 - RNA, 19 nt, Artificial Sequence
  Description of Artificial Sequence: Synthetic oligonucleotide
  Antisense strand to SEQ ID NO: 606304
aaccuugccauaaauaucc

SEQ ID NO: 606306 - RNA, 19 nt, Artificial Sequence
  Description of Artificial Sequence: Synthetic oligonucleotide
  Sense strand starting at position 2103 of SEQ ID NO: 585009
uggcaagguuacucugaau

SEQ ID NO: 606307 - RNA, 19 nt, Artificial Sequence
  Description of Artificial Sequence: Synthetic oligonucleotide
  Antisense strand to SEQ ID NO: 606306
auucagaguaaccuugcca

SEQ ID NO: 606308 - RNA, 19 nt, Artificial Sequence
  Description of Artificial Sequence: Synthetic oligonucleotide
  Sense strand starting at position 2132 of SEQ ID NO: 585009
uagacuucugauugcaguu

SEQ ID NO: 606309 - RNA, 19 nt, Artificial Sequence
  Description of Artificial Sequence: Synthetic oligonucleotide
  Antisense strand to SEQ ID NO: 606308
aacugcaaucagaagucua

SEQ ID NO: 606310 - RNA, 19 nt, Artificial Sequence
  Description of Artificial Sequence: Synthetic oligonucleotide
  Sense strand starting at position 2141 of SEQ ID NO: 585009
gauugcaguuucuugggau

SEQ ID NO: 606311 - RNA, 19 nt, Artificial Sequence
  Description of Artificial Sequence: Synthetic oligonucleotide
  Antisense strand to SEQ ID NO: 606310
aucccaagaaacugcaauc

SEQ ID NO: 606312 - RNA, 19 nt, Artificial Sequence
  Description of Artificial Sequence: Synthetic oligonucleotide
  Sense strand starting at position 2685 of SEQ ID NO: 585009
guuugagcaguuuacaaua

SEQ ID NO: 606313 - RNA, 19 nt, Artificial Sequence
  Description of Artificial Sequence: Synthetic oligonucleotide
  Antisense strand to SEQ ID NO: 606312
uauuguaaacugcucaaac

SEQ ID NO: 606314 - RNA, 19 nt, Artificial Sequence
  Description of Artificial Sequence: Synthetic oligonucleotide
  Sense strand starting at position 2772 of SEQ ID NO: 585009
gucugucuccuugacugaa

SEQ ID NO: 606315 - RNA, 19 nt, Artificial Sequence
  Description of Artificial Sequence: Synthetic oligonucleotide
  Antisense strand to SEQ ID NO: 606314
uucagucaaggagacagac

SEQ ID NO: 606316 - RNA, 19 nt, Artificial Sequence
  Description of Artificial Sequence: Synthetic oligonucleotide
  Sense strand starting at position 2775 of SEQ ID NO: 585009
ugucuccuugacugaacua

SEQ ID NO: 606317 - RNA, 19 nt, Artificial Sequence
  Description of Artificial Sequence: Synthetic oligonucleotide
  Antisense strand to SEQ ID NO: 606316
uaguucagucaaggagaca

SEQ ID NO: 606318 - RNA, 19 nt, Artificial Sequence
  Description of Artificial Sequence: Synthetic oligonucleotide
  Sense strand starting at position 2792 of SEQ ID NO: 585009
uagagauugcuuuggucaa

SEQ ID NO: 606319 - RNA, 19 nt, Artificial Sequence
  Description of Artificial Sequence: Synthetic oligonucleotide
  Antisense strand to SEQ ID NO: 606318
uugaccaaagcaaucucua

SEQ ID NO: 606320 - RNA, 19 nt, Artificial Sequence
  Description of Artificial Sequence: Synthetic oligonucleotide
  Sense strand starting at position 2794 of SEQ ID NO: 585009
gagauugcuuuggucaaga

SEQ ID NO: 606321 - RNA, 19 nt, Artificial Sequence
  Description of Artificial Sequence: Synthetic oligonucleotide
  Antisense strand to SEQ ID NO: 606320
ucuugaccaaagcaaucuc

SEQ ID NO: 606322 - RNA, 19 nt, Artificial Sequence
  Description of Artificial Sequence: Synthetic oligonucleotide
  Sense strand starting at position 2799 of SEQ ID NO: 585009
ugcuuuggucaagagcaau

SEQ ID NO: 606323 - RNA, 19 nt, Artificial Sequence
  Description of Artificial Sequence: Synthetic oligonucleotide
  Antisense strand to SEQ ID NO: 606322
auugcucuugaccaaagca

SEQ ID NO: 606324 - RNA, 19 nt, Artificial Sequence
  Description of Artificial Sequence: Synthetic oligonucleotide
  Sense strand starting at position 2815 of SEQ ID NO: 585009
aauuguccucucugggauu

SEQ ID NO: 606325 - RNA, 19 nt, Artificial Sequence
  Description of Artificial Sequence: Synthetic oligonucleotide
  Antisense strand to SEQ ID NO: 606324
aaucccagagaggacaauu

SEQ ID NO: 606326 - RNA, 19 nt, Artificial Sequence
  Description of Artificial Sequence: Synthetic oligonucleotide
  Sense strand starting at position 2852 of SEQ ID NO: 585009
aguauuugaucuucucugu

SEQ ID NO: 606327 - RNA, 19 nt, Artificial Sequence
  Description of Artificial Sequence: Synthetic oligonucleotide
  Antisense strand to SEQ ID NO: 606326
acagagaagaucaaauacu

SEQ ID NO: 606328 - RNA, 19 nt, Artificial Sequence
  Description of Artificial Sequence: Synthetic oligonucleotide
  Sense strand starting at position 2918 of SEQ ID NO: 585009
ggugaugaccuguauacag

SEQ ID NO: 606329 - RNA, 19 nt, Artificial Sequence
  Description of Artificial Sequence: Synthetic oligonucleotide
  Antisense strand to SEQ ID NO: 606328
cuguauacaggucaucacc

SEQ ID NO: 606330 - RNA, 19 nt, Artificial Sequence
  Description of Artificial Sequence: Synthetic oligonucleotide
  Sense strand starting at position 2920 of SEQ ID NO: 585009
ugaugaccuguauacaguu

SEQ ID NO: 606331 - RNA, 19 nt, Artificial Sequence
  Description of Artificial Sequence: Synthetic oligonucleotide
  Antisense strand to SEQ ID NO: 606330
aacuguauacaggucauca

SEQ ID NO: 606332 - RNA, 19 nt, Artificial Sequence
  Description of Artificial Sequence: Synthetic oligonucleotide
  Sense strand starting at position 2963 of SEQ ID NO: 585009
guguuagugguugucuguu

SEQ ID NO: 606333 - RNA, 19 nt, Artificial Sequence
  Description of Artificial Sequence: Synthetic oligonucleotide
  Antisense strand to SEQ ID NO: 606332
aacagacaaccacuaacac

SEQ ID NO: 606334 - RNA, 19 nt, Artificial Sequence
  Description of Artificial Sequence: Synthetic oligonucleotide
  Sense strand starting at position 3005 of SEQ ID NO: 585009
agggaaauggcuugguuua

SEQ ID NO: 606335 - RNA, 19 nt, Artificial Sequence
  Description of Artificial Sequence: Synthetic oligonucleotide
  Antisense strand to SEQ ID NO: 606334
uaaaccaagccauuucccu

SEQ ID NO: 606336 - RNA, 19 nt, Artificial Sequence
  Description of Artificial Sequence: Synthetic oligonucleotide
  Sense strand starting at position 3006 of SEQ ID NO: 585009
gggaaauggcuugguuuaa

SEQ ID NO: 606337 - RNA, 19 nt, Artificial Sequence
  Description of Artificial Sequence: Synthetic oligonucleotide
  Antisense strand to SEQ ID NO: 606336
uuaaaccaagccauuuccc

SEQ ID NO: 606338 - RNA, 19 nt, Artificial Sequence
  Description of Artificial Sequence: Synthetic oligonucleotide
  Sense strand starting at position 3007 of SEQ ID NO: 585009
ggaaauggcuugguuuaag

SEQ ID NO: 606339 - RNA, 19 nt, Artificial Sequence
  Description of Artificial Sequence: Synthetic oligonucleotide
  Antisense strand to SEQ ID NO: 606338
cuuaaaccaagccauuucc

SEQ ID NO: 606340 - RNA, 19 nt, Artificial Sequence
  Description of Artificial Sequence: Synthetic oligonucleotide
  Sense strand starting at position 3051 of SEQ ID NO: 585009
gaauguaaugcaugaucuu

SEQ ID NO: 606341 - RNA, 19 nt, Artificial Sequence
  Description of Artificial Sequence: Synthetic oligonucleotide
  Antisense strand to SEQ ID NO: 606340
aagaucaugcauuacauuc

SEQ ID NO: 606342 - RNA, 19 nt, Artificial Sequence
  Description of Artificial Sequence: Synthetic oligonucleotide
  Sense strand starting at position 3174 of SEQ ID NO: 585009
auacuuauaugguuagaca

SEQ ID NO: 606343 - RNA, 19 nt, Artificial Sequence
  Description of Artificial Sequence: Synthetic oligonucleotide
  Antisense strand to SEQ ID NO: 606342
ugucuaaccauauaaguau

SEQ ID NO: 606344 - RNA, 19 nt, Artificial Sequence
  Description of Artificial Sequence: Synthetic oligonucleotide
  Sense strand starting at position 3191 of SEQ ID NO: 585009
caacauaaguguuuaggua

SEQ ID NO: 606345 - RNA, 19 nt, Artificial Sequence
  Description of Artificial Sequence: Synthetic oligonucleotide
  Antisense strand to SEQ ID NO: 606344
uaccuaaacacuuauguug

SEQ ID NO: 606346 - RNA, 19 nt, Artificial Sequence
  Description of Artificial Sequence: Synthetic oligonucleotide
  Sense strand starting at position 3192 of SEQ ID NO: 585009
aacauaaguguuuagguau

SEQ ID NO: 606347 - RNA, 19 nt, Artificial Sequence
  Description of Artificial Sequence: Synthetic oligonucleotide
  Antisense strand to SEQ ID NO: 606346
auaccuaaacacuuauguu

SEQ ID NO: 606348 - RNA, 19 nt, Artificial Sequence
  Description of Artificial Sequence: Synthetic oligonucleotide
  Sense strand starting at position 3350 of SEQ ID NO: 585009
ggacuuggaauguguuuac

SEQ ID NO: 606349 - RNA, 19 nt, Artificial Sequence
  Description of Artificial Sequence: Synthetic oligonucleotide
  Antisense strand to SEQ ID NO: 606348
guaaacacauuccaagucc

SEQ ID NO: 606350 - RNA, 19 nt, Artificial Sequence
  Description of Artificial Sequence: Synthetic oligonucleotide
  Sense strand starting at position 3391 of SEQ ID NO: 585009
agcugauugccagaaggag

SEQ ID NO: 606351 - RNA, 19 nt, Artificial Sequence
  Description of Artificial Sequence: Synthetic oligonucleotide
  Antisense strand to SEQ ID NO: 606350
cuccuucuggcaaucagcu

SEQ ID NO: 606352 - RNA, 19 nt, Artificial Sequence
  Description of Artificial Sequence: Synthetic oligonucleotide
  Sense strand starting at position 3607 of SEQ ID NO: 585009
gcaaauagguuuccagaag

SEQ ID NO: 606353 - RNA, 19 nt, Artificial Sequence
  Description of Artificial Sequence: Synthetic oligonucleotide
  Antisense strand to SEQ ID NO: 606352
cuucuggaaaccuauuugc

SEQ ID NO: 606354 - RNA, 19 nt, Artificial Sequence
  Description of Artificial Sequence: Synthetic oligonucleotide
  Sense strand starting at position 3712 of SEQ ID NO: 585009
ucacaauugcuaugagacc

SEQ ID NO: 606355 - RNA, 19 nt, Artificial Sequence
  Description of Artificial Sequence: Synthetic oligonucleotide
  Antisense strand to SEQ ID NO: 606354
ggucucauagcaauuguga

SEQ ID NO: 606356 - RNA, 19 nt, Artificial Sequence
  Description of Artificial Sequence: Synthetic oligonucleotide
  Sense strand starting at position 3732 of SEQ ID NO: 585009
aguucugaccagugagauu

SEQ ID NO: 606357 - RNA, 19 nt, Artificial Sequence
  Description of Artificial Sequence: Synthetic oligonucleotide
  Antisense strand to SEQ ID NO: 606356
aaucucacuggucagaacu

SEQ ID NO: 606358 - RNA, 19 nt, Artificial Sequence
  Description of Artificial Sequence: Synthetic oligonucleotide
  Sense strand starting at position 34 of SEQ ID NO: 585010
ucaccugucccugaggagu

SEQ ID NO: 606359 - RNA, 19 nt, Artificial Sequence
  Description of Artificial Sequence: Synthetic oligonucleotide
  Antisense strand to SEQ ID NO: 606358
acuccucagggacagguga

SEQ ID NO: 606360 - RNA, 19 nt, Artificial Sequence
  Description of Artificial Sequence: Synthetic oligonucleotide
  Sense strand starting at position 137 of SEQ ID NO: 585010
ggaaaugaaugagaacauu

SEQ ID NO: 606361 - RNA, 19 nt, Artificial Sequence
  Description of Artificial Sequence: Synthetic oligonucleotide
  Antisense strand to SEQ ID NO: 606360
aauguucucauucauuucc

SEQ ID NO: 606362 - RNA, 19 nt, Artificial Sequence
  Description of Artificial Sequence: Synthetic oligonucleotide
  Sense strand starting at position 168 of SEQ ID NO: 585010
uuccauuggcucuaguaaa

SEQ ID NO: 606363 - RNA, 19 nt, Artificial Sequence
  Description of Artificial Sequence: Synthetic oligonucleotide
  Antisense strand to SEQ ID NO: 606362
uuuacuagagccaauggaa

SEQ ID NO: 606364 - RNA, 19 nt, Artificial Sequence
  Description of Artificial Sequence: Synthetic oligonucleotide
  Sense strand starting at position 273 of SEQ ID NO: 585010
auccaaggcucuuuaguaa

SEQ ID NO: 606365 - RNA, 19 nt, Artificial Sequence
  Description of Artificial Sequence: Synthetic oligonucleotide
  Antisense strand to SEQ ID NO: 606364
uuacuaaagagccuuggau

SEQ ID NO: 606366 - RNA, 19 nt, Artificial Sequence
  Description of Artificial Sequence: Synthetic oligonucleotide
  Sense strand starting at position 352 of SEQ ID NO: 585010
gagagaacauguucucaca

SEQ ID NO: 606367 - RNA, 19 nt, Artificial Sequence
  Description of Artificial Sequence: Synthetic oligonucleotide
  Antisense strand to SEQ ID NO: 606366
ugugagaacauguucucuc

SEQ ID NO: 606368 - RNA, 19 nt, Artificial Sequence
  Description of Artificial Sequence: Synthetic oligonucleotide
  Sense strand starting at position 484 of SEQ ID NO: 585010
aguucuaaugcccaggaga

SEQ ID NO: 606369 - RNA, 19 nt, Artificial Sequence
  Description of Artificial Sequence: Synthetic oligonucleotide
  Antisense strand to SEQ ID NO: 606368
ucuccugggcauuagaacu

SEQ ID NO: 606370 - RNA, 19 nt, Artificial Sequence
  Description of Artificial Sequence: Synthetic oligonucleotide
  Sense strand starting at position 486 of SEQ ID NO: 585010
uucuaaugcccaggagaau

SEQ ID NO: 606371 - RNA, 19 nt, Artificial Sequence
  Description of Artificial Sequence: Synthetic oligonucleotide
  Antisense strand to SEQ ID NO: 606370
auucuccugggcauuagaa

SEQ ID NO: 606372 - RNA, 19 nt, Artificial Sequence
  Description of Artificial Sequence: Synthetic oligonucleotide
  Sense strand starting at position 497 of SEQ ID NO: 585010
aggagaauguucucuccuc

SEQ ID NO: 606373 - RNA, 19 nt, Artificial Sequence
  Description of Artificial Sequence: Synthetic oligonucleotide
  Antisense strand to SEQ ID NO: 606372
gaggagagaacauucuccu

SEQ ID NO: 606374 - RNA, 19 nt, Artificial Sequence
  Description of Artificial Sequence: Synthetic oligonucleotide
  Sense strand starting at position 498 of SEQ ID NO: 585010
ggagaauguucucuccucu

SEQ ID NO: 606375 - RNA, 19 nt, Artificial Sequence
  Description of Artificial Sequence: Synthetic oligonucleotide
  Antisense strand to SEQ ID NO: 606374
agaggagagaacauucucc

SEQ ID NO: 606376 - RNA, 19 nt, Artificial Sequence
  Description of Artificial Sequence: Synthetic oligonucleotide
  Sense strand starting at position 591 of SEQ ID NO: 585010
ggaguuaggagccagaguu

SEQ ID NO: 606377 - RNA, 19 nt, Artificial Sequence
  Description of Artificial Sequence: Synthetic oligonucleotide
  Antisense strand to SEQ ID NO: 606376
aacucuggcuccuaacucc

SEQ ID NO: 606378 - RNA, 19 nt, Artificial Sequence
  Description of Artificial Sequence: Synthetic oligonucleotide
  Sense strand starting at position 677 of SEQ ID NO: 585010
uggaguucccagcacagau

SEQ ID NO: 606379 - RNA, 19 nt, Artificial Sequence
  Description of Artificial Sequence: Synthetic oligonucleotide
  Antisense strand to SEQ ID NO: 606378
aucugugcugggaacucca

SEQ ID NO: 606380 - RNA, 19 nt, Artificial Sequence
  Description of Artificial Sequence: Synthetic oligonucleotide
  Sense strand starting at position 823 of SEQ ID NO: 585010
guuuacauugccuauggga

SEQ ID NO: 606381 - RNA, 19 nt, Artificial Sequence
  Description of Artificial Sequence: Synthetic oligonucleotide
  Antisense strand to SEQ ID NO: 606380
ucccauaggcaauguaaac

SEQ ID NO: 606382 - RNA, 19 nt, Artificial Sequence
  Description of Artificial Sequence: Synthetic oligonucleotide
  Sense strand starting at position 825 of SEQ ID NO: 585010
uuacauugccuaugggaug

SEQ ID NO: 606383 - RNA, 19 nt, Artificial Sequence
  Description of Artificial Sequence: Synthetic oligonucleotide
  Antisense strand to SEQ ID NO: 606382
caucccauaggcaauguaa

SEQ ID NO: 606384 - RNA, 19 nt, Artificial Sequence
  Description of Artificial Sequence: Synthetic oligonucleotide
  Sense strand starting at position 875 of SEQ ID NO: 585010
caacguacuccugaaguua

SEQ ID NO: 606385 - RNA, 19 nt, Artificial Sequence
  Description of Artificial Sequence: Synthetic oligonucleotide
  Antisense strand to SEQ ID NO: 606384
uaacuucaggaguacguug

SEQ ID NO: 606386 - RNA, 19 nt, Artificial Sequence
  Description of Artificial Sequence: Synthetic oligonucleotide
  Sense strand starting at position 887 of SEQ ID NO: 585010
gaaguuaaaugagucuguu

SEQ ID NO: 606387 - RNA, 19 nt, Artificial Sequence
  Description of Artificial Sequence: Synthetic oligonucleotide
  Antisense strand to SEQ ID NO: 606386
aacagacucauuuaacuuc

SEQ ID NO: 606388 - RNA, 19 nt, Artificial Sequence
  Description of Artificial Sequence: Synthetic oligonucleotide
  Sense strand starting at position 893 of SEQ ID NO: 585010
aaaugagucuguuucugac

SEQ ID NO: 606389 - RNA, 19 nt, Artificial Sequence
  Description of Artificial Sequence: Synthetic oligonucleotide
  Antisense strand to SEQ ID NO: 606388
gucagaaacagacucauuu

SEQ ID NO: 606390 - RNA, 19 nt, Artificial Sequence
  Description of Artificial Sequence: Synthetic oligonucleotide
  Sense strand starting at position 1062 of SEQ ID NO: 585010
gggagaguccaguaaucuu

SEQ ID NO: 606391 - RNA, 19 nt, Artificial Sequence
  Description of Artificial Sequence: Synthetic oligonucleotide
  Antisense strand to SEQ ID NO: 606390
aagauuacuggacucuccc

SEQ ID NO: 606392 - RNA, 19 nt, Artificial Sequence
  Description of Artificial Sequence: Synthetic oligonucleotide
  Sense strand starting at position 1219 of SEQ ID NO: 585010
gugcuacucagggaugaug

SEQ ID NO: 606393 - RNA, 19 nt, Artificial Sequence
  Description of Artificial Sequence: Synthetic oligonucleotide
  Antisense strand to SEQ ID NO: 606392
caucaucccugaguagcac

SEQ ID NO: 606394 - RNA, 19 nt, Artificial Sequence
  Description of Artificial Sequence: Synthetic oligonucleotide
  Sense strand starting at position 1486 of SEQ ID NO: 585010
ccucuaacccuccgagaaa

SEQ ID NO: 606395 - RNA, 19 nt, Artificial Sequence
  Description of Artificial Sequence: Synthetic oligonucleotide
  Antisense strand to SEQ ID NO: 606394
uuucucggaggguuagagg

SEQ ID NO: 606396 - RNA, 19 nt, Artificial Sequence
  Description of Artificial Sequence: Synthetic oligonucleotide
  Sense strand starting at position 2363 of SEQ ID NO: 585010
cugcaaacacuuuggagaa

SEQ ID NO: 606397 - RNA, 19 nt, Artificial Sequence
  Description of Artificial Sequence: Synthetic oligonucleotide
  Antisense strand to SEQ ID NO: 606396
uucuccaaaguguuugcag

SEQ ID NO: 606398 - RNA, 19 nt, Artificial Sequence
  Description of Artificial Sequence: Synthetic oligonucleotide
  Sense strand starting at position 2717 of SEQ ID NO: 585010
uggcaagguuacucugaau

SEQ ID NO: 606399 - RNA, 19 nt, Artificial Sequence
  Description of Artificial Sequence: Synthetic oligonucleotide
  Antisense strand to SEQ ID NO: 606398
auucagaguaaccuugcca

SEQ ID NO: 606400 - RNA, 19 nt, Artificial Sequence
  Description of Artificial Sequence: Synthetic oligonucleotide
  Sense strand starting at position 3299 of SEQ ID NO: 585010
guuugagcaguuuacaaua

SEQ ID NO: 606401 - RNA, 19 nt, Artificial Sequence
  Description of Artificial Sequence: Synthetic oligonucleotide
  Antisense strand to SEQ ID NO: 606400
uauuguaaacugcucaaac

SEQ ID NO: 606402 - RNA, 19 nt, Artificial Sequence
  Description of Artificial Sequence: Synthetic oligonucleotide
  Sense strand starting at position 3386 of SEQ ID NO: 585010
gucugucuccuugacugaa

SEQ ID NO: 606403 - RNA, 19 nt, Artificial Sequence
  Description of Artificial Sequence: Synthetic oligonucleotide
  Antisense strand to SEQ ID NO: 606402
uucagucaaggagacagac

SEQ ID NO: 606404 - RNA, 19 nt, Artificial Sequence
  Description of Artificial Sequence: Synthetic oligonucleotide
  Sense strand starting at position 3389 of SEQ ID NO: 585010
ugucuccuugacugaacua

SEQ ID NO: 606405 - RNA, 19 nt, Artificial Sequence
  Description of Artificial Sequence: Synthetic oligonucleotide
  Antisense strand to SEQ ID NO: 606404
uaguucagucaaggagaca

SEQ ID NO: 606406 - RNA, 19 nt, Artificial Sequence
  Description of Artificial Sequence: Synthetic oligonucleotide
  Sense strand starting at position 3406 of SEQ ID NO: 585010
uagagauugcuuuggucaa

SEQ ID NO: 606407 - RNA, 19 nt, Artificial Sequence
  Description of Artificial Sequence: Synthetic oligonucleotide
  Antisense strand to SEQ ID NO: 606406
uugaccaaagcaaucucua

SEQ ID NO: 606408 - RNA, 19 nt, Artificial Sequence
  Description of Artificial Sequence: Synthetic oligonucleotide
  Sense strand starting at position 3408 of SEQ ID NO: 585010
gagauugcuuuggucaaga

SEQ ID NO: 606409 - RNA, 19 nt, Artificial Sequence
  Description of Artificial Sequence: Synthetic oligonucleotide
  Antisense strand to SEQ ID NO: 606408
ucuugaccaaagcaaucuc

SEQ ID NO: 606410 - RNA, 19 nt, Artificial Sequence
  Description of Artificial Sequence: Synthetic oligonucleotide
  Sense strand starting at position 3413 of SEQ ID NO: 585010
ugcuuuggucaagagcaau

SEQ ID NO: 606411 - RNA, 19 nt, Artificial Sequence
  Description of Artificial Sequence: Synthetic oligonucleotide
  Antisense strand to SEQ ID NO: 606410
auugcucuugaccaaagca

SEQ ID NO: 606412 - RNA, 19 nt, Artificial Sequence
  Description of Artificial Sequence: Synthetic oligonucleotide
  Sense strand starting at position 3429 of SEQ ID NO: 585010
aauuguccucucugggauu

SEQ ID NO: 606413 - RNA, 19 nt, Artificial Sequence
  Description of Artificial Sequence: Synthetic oligonucleotide
  Antisense strand to SEQ ID NO: 606412
aaucccagagaggacaauu

SEQ ID NO: 606414 - RNA, 19 nt, Artificial Sequence
  Description of Artificial Sequence: Synthetic oligonucleotide
  Sense strand starting at position 3466 of SEQ ID NO: 585010
aguauuugaucuucucugu

SEQ ID NO: 606415 - RNA, 19 nt, Artificial Sequence
  Description of Artificial Sequence: Synthetic oligonucleotide
  Antisense strand to SEQ ID NO: 606414
acagagaagaucaaauacu

SEQ ID NO: 606416 - RNA, 19 nt, Artificial Sequence
  Description of Artificial Sequence: Synthetic oligonucleotide
  Sense strand starting at position 3532 of SEQ ID NO: 585010
ggugaugaccuguauacag

SEQ ID NO: 606417 - RNA, 19 nt, Artificial Sequence
  Description of Artificial Sequence: Synthetic oligonucleotide
  Antisense strand to SEQ ID NO: 606416
cuguauacaggucaucacc

SEQ ID NO: 606418 - RNA, 19 nt, Artificial Sequence
  Description of Artificial Sequence: Synthetic oligonucleotide
  Sense strand starting at position 3534 of SEQ ID NO: 585010
ugaugaccuguauacaguu

SEQ ID NO: 606419 - RNA, 19 nt, Artificial Sequence
  Description of Artificial Sequence: Synthetic oligonucleotide
  Antisense strand to SEQ ID NO: 606418
aacuguauacaggucauca

SEQ ID NO: 606420 - RNA, 19 nt, Artificial Sequence
  Description of Artificial Sequence: Synthetic oligonucleotide
  Sense strand starting at position 3577 of SEQ ID NO: 585010
guguuagugguugucuguu

SEQ ID NO: 606421 - RNA, 19 nt, Artificial Sequence
  Description of Artificial Sequence: Synthetic oligonucleotide
  Antisense strand to SEQ ID NO: 606420
aacagacaaccacuaacac

SEQ ID NO: 606422 - RNA, 19 nt, Artificial Sequence
  Description of Artificial Sequence: Synthetic oligonucleotide
  Sense strand starting at position 3619 of SEQ ID NO: 585010
agggaaauggcuugguuua

SEQ ID NO: 606423 - RNA, 19 nt, Artificial Sequence
  Description of Artificial Sequence: Synthetic oligonucleotide
  Antisense strand to SEQ ID NO: 606422
uaaaccaagccauuucccu

SEQ ID NO: 606424 - RNA, 19 nt, Artificial Sequence
  Description of Artificial Sequence: Synthetic oligonucleotide
  Sense strand starting at position 3620 of SEQ ID NO: 585010
gggaaauggcuugguuuaa

SEQ ID NO: 606425 - RNA, 19 nt, Artificial Sequence
  Description of Artificial Sequence: Synthetic oligonucleotide
  Antisense strand to SEQ ID NO: 606424
uuaaaccaagccauuuccc

SEQ ID NO: 606426 - RNA, 19 nt, Artificial Sequence
  Description of Artificial Sequence: Synthetic oligonucleotide
  Sense strand starting at position 3621 of SEQ ID NO: 585010
ggaaauggcuugguuuaag

SEQ ID NO: 606427 - RNA, 19 nt, Artificial Sequence
  Description of Artificial Sequence: Synthetic oligonucleotide
  Antisense strand to SEQ ID NO: 606426
cuuaaaccaagccauuucc

SEQ ID NO: 606428 - RNA, 19 nt, Artificial Sequence
  Description of Artificial Sequence: Synthetic oligonucleotide
  Sense strand starting at position 3665 of SEQ ID NO: 585010
gaauguaaugcaugaucuu

SEQ ID NO: 606429 - RNA, 19 nt, Artificial Sequence
  Description of Artificial Sequence: Synthetic oligonucleotide
  Antisense strand to SEQ ID NO: 606428
aagaucaugcauuacauuc

SEQ ID NO: 606430 - RNA, 19 nt, Artificial Sequence
  Description of Artificial Sequence: Synthetic oligonucleotide
  Sense strand starting at position 3788 of SEQ ID NO: 585010
auacuuauaugguuagaca

SEQ ID NO: 606431 - RNA, 19 nt, Artificial Sequence
  Description of Artificial Sequence: Synthetic oligonucleotide
  Antisense strand to SEQ ID NO: 606430
ugucuaaccauauaaguau

SEQ ID NO: 606432 - RNA, 19 nt, Artificial Sequence
  Description of Artificial Sequence: Synthetic oligonucleotide
  Sense strand starting at position 3805 of SEQ ID NO: 585010
caacauaaguguuuaggua

SEQ ID NO: 606433 - RNA, 19 nt, Artificial Sequence
  Description of Artificial Sequence: Synthetic oligonucleotide
  Antisense strand to SEQ ID NO: 606432
uaccuaaacacuuauguug

SEQ ID NO: 606434 - RNA, 19 nt, Artificial Sequence
  Description of Artificial Sequence: Synthetic oligonucleotide
  Sense strand starting at position 3806 of SEQ ID NO: 585010
aacauaaguguuuagguau

SEQ ID NO: 606435 - RNA, 19 nt, Artificial Sequence
  Description of Artificial Sequence: Synthetic oligonucleotide
  Antisense strand to SEQ ID NO: 606434
auaccuaaacacuuauguu

SEQ ID NO: 606436 - RNA, 19 nt, Artificial Sequence
  Description of Artificial Sequence: Synthetic oligonucleotide
  Sense strand starting at position 3964 of SEQ ID NO: 585010
ggacuuggaauguguuuac

SEQ ID NO: 606437 - RNA, 19 nt, Artificial Sequence
  Description of Artificial Sequence: Synthetic oligonucleotide
  Antisense strand to SEQ ID NO: 606436
guaaacacauuccaagucc

SEQ ID NO: 606438 - RNA, 19 nt, Artificial Sequence
  Description of Artificial Sequence: Synthetic oligonucleotide
  Sense strand starting at position 225 of SEQ ID NO: 585011
ccaucacauguguguaaca

SEQ ID NO: 606439 - RNA, 19 nt, Artificial Sequence
  Description of Artificial Sequence: Synthetic oligonucleotide
  Antisense strand to SEQ ID NO: 606438
uguuacacacaugugaugg

SEQ ID NO: 606440 - RNA, 19 nt, Artificial Sequence
  Description of Artificial Sequence: Synthetic oligonucleotide
  Sense strand starting at position 449 of SEQ ID NO: 585011
uuggucacugggugaguaa

SEQ ID NO: 606441 - RNA, 19 nt, Artificial Sequence
  Description of Artificial Sequence: Synthetic oligonucleotide
  Antisense strand to SEQ ID NO: 606440
uuacucacccagugaccaa

SEQ ID NO: 606442 - RNA, 19 nt, Artificial Sequence
  Description of Artificial Sequence: Synthetic oligonucleotide
  Sense strand starting at position 450 of SEQ ID NO: 585011
uggucacugggugaguaaa

SEQ ID NO: 606443 - RNA, 19 nt, Artificial Sequence
  Description of Artificial Sequence: Synthetic oligonucleotide
  Antisense strand to SEQ ID NO: 606442
uuuacucacccagugacca

SEQ ID NO: 606444 - RNA, 19 nt, Artificial Sequence
  Description of Artificial Sequence: Synthetic oligonucleotide
  Sense strand starting at position 610 of SEQ ID NO: 585011
uggacuuccugauucuuua

SEQ ID NO: 606445 - RNA, 19 nt, Artificial Sequence
  Description of Artificial Sequence: Synthetic oligonucleotide
  Antisense strand to SEQ ID NO: 606444
uaaagaaucaggaagucca

SEQ ID NO: 606446 - RNA, 19 nt, Artificial Sequence
  Description of Artificial Sequence: Synthetic oligonucleotide
  Sense strand starting at position 635 of SEQ ID NO: 585011
aaggguuugcuauguuaac

SEQ ID NO: 606447 - RNA, 19 nt, Artificial Sequence
  Description of Artificial Sequence: Synthetic oligonucleotide
  Antisense strand to SEQ ID NO: 606446
guuaacauagcaaacccuu

SEQ ID NO: 606448 - RNA, 19 nt, Artificial Sequence
  Description of Artificial Sequence: Synthetic oligonucleotide
  Sense strand starting at position 636 of SEQ ID NO: 585011
aggguuugcuauguuaaca

SEQ ID NO: 606449 - RNA, 19 nt, Artificial Sequence
  Description of Artificial Sequence: Synthetic oligonucleotide
  Antisense strand to SEQ ID NO: 606448
uguuaacauagcaaacccu

SEQ ID NO: 606450 - RNA, 19 nt, Artificial Sequence
  Description of Artificial Sequence: Synthetic oligonucleotide
  Sense strand starting at position 768 of SEQ ID NO: 585011
cuuaguguaacagagguaa

SEQ ID NO: 606451 - RNA, 19 nt, Artificial Sequence
  Description of Artificial Sequence: Synthetic oligonucleotide
  Antisense strand to SEQ ID NO: 606450
uuaccucuguuacacuaag

SEQ ID NO: 606452 - RNA, 19 nt, Artificial Sequence
  Description of Artificial Sequence: Synthetic oligonucleotide
  Sense strand starting at position 862 of SEQ ID NO: 585011
aguuguuuccaguaaguuu

SEQ ID NO: 606453 - RNA, 19 nt, Artificial Sequence
  Description of Artificial Sequence: Synthetic oligonucleotide
  Antisense strand to SEQ ID NO: 606452
aaacuuacuggaaacaacu

SEQ ID NO: 606454 - RNA, 19 nt, Artificial Sequence
  Description of Artificial Sequence: Synthetic oligonucleotide
  Sense strand starting at position 1006 of SEQ ID NO: 585011
cucucuccucuggaucaga

SEQ ID NO: 606455 - RNA, 19 nt, Artificial Sequence
  Description of Artificial Sequence: Synthetic oligonucleotide
  Antisense strand to SEQ ID NO: 606454
ucugauccagaggagagag

SEQ ID NO: 606456 - RNA, 19 nt, Artificial Sequence
  Description of Artificial Sequence: Synthetic oligonucleotide
  Sense strand starting at position 1065 of SEQ ID NO: 585011
ugaagaggccuuugucagu

SEQ ID NO: 606457 - RNA, 19 nt, Artificial Sequence
  Description of Artificial Sequence: Synthetic oligonucleotide
  Antisense strand to SEQ ID NO: 606456
acugacaaaggccucuuca

SEQ ID NO: 606458 - RNA, 19 nt, Artificial Sequence
  Description of Artificial Sequence: Synthetic oligonucleotide
  Sense strand starting at position 1293 of SEQ ID NO: 585011
agaucagugcuguaacccu

SEQ ID NO: 606459 - RNA, 19 nt, Artificial Sequence
  Description of Artificial Sequence: Synthetic oligonucleotide
  Antisense strand to SEQ ID NO: 606458
aggguuacagcacugaucu

SEQ ID NO: 606460 - RNA, 19 nt, Artificial Sequence
  Description of Artificial Sequence: Synthetic oligonucleotide
  Sense strand starting at position 1301 of SEQ ID NO: 585011
gcuguaacccuguaacgaa

SEQ ID NO: 606461 - RNA, 19 nt, Artificial Sequence
  Description of Artificial Sequence: Synthetic oligonucleotide
  Antisense strand to SEQ ID NO: 606460
uucguuacaggguuacagc

SEQ ID NO: 606462 - RNA, 19 nt, Artificial Sequence
  Description of Artificial Sequence: Synthetic oligonucleotide
  Sense strand starting at position 1320 of SEQ ID NO: 585011
cagggugucucucccaaau

SEQ ID NO: 606463 - RNA, 19 nt, Artificial Sequence
  Description of Artificial Sequence: Synthetic oligonucleotide
  Antisense strand to SEQ ID NO: 606462
auuugggagagacacccug

SEQ ID NO: 606464 - RNA, 19 nt, Artificial Sequence
  Description of Artificial Sequence: Synthetic oligonucleotide
  Sense strand starting at position 2245 of SEQ ID NO: 585011
cggagaaaggcuuguuaau

SEQ ID NO: 606465 - RNA, 19 nt, Artificial Sequence
  Description of Artificial Sequence: Synthetic oligonucleotide
  Antisense strand to SEQ ID NO: 606464
auuaacaagccuuucuccg

SEQ ID NO: 606466 - RNA, 19 nt, Artificial Sequence
  Description of Artificial Sequence: Synthetic oligonucleotide
  Sense strand starting at position 2247 of SEQ ID NO: 585011
gagaaaggcuuguuaaugu

SEQ ID NO: 606467 - RNA, 19 nt, Artificial Sequence
  Description of Artificial Sequence: Synthetic oligonucleotide
  Antisense strand to SEQ ID NO: 606466
acauuaacaagccuuucuc

SEQ ID NO: 606468 - RNA, 19 nt, Artificial Sequence
  Description of Artificial Sequence: Synthetic oligonucleotide
  Sense strand starting at position 2317 of SEQ ID NO: 585011
ccguguuaccauuacagac

SEQ ID NO: 606469 - RNA, 19 nt, Artificial Sequence
  Description of Artificial Sequence: Synthetic oligonucleotide
  Antisense strand to SEQ ID NO: 606468
gucuguaaugguaacacgg

SEQ ID NO: 606470 - RNA, 19 nt, Artificial Sequence
  Description of Artificial Sequence: Synthetic oligonucleotide
  Sense strand starting at position 2921 of SEQ ID NO: 585011
ugcgucugugcugcagauu

SEQ ID NO: 606471 - RNA, 19 nt, Artificial Sequence
  Description of Artificial Sequence: Synthetic oligonucleotide
  Antisense strand to SEQ ID NO: 606470
aaucugcagcacagacgca

SEQ ID NO: 606472 - RNA, 19 nt, Artificial Sequence
  Description of Artificial Sequence: Synthetic oligonucleotide
  Sense strand starting at position 2932 of SEQ ID NO: 585011
ugcagauugcgucagaacu

SEQ ID NO: 606473 - RNA, 19 nt, Artificial Sequence
  Description of Artificial Sequence: Synthetic oligonucleotide
  Antisense strand to SEQ ID NO: 606472
aguucugacgcaaucugca

SEQ ID NO: 606474 - RNA, 19 nt, Artificial Sequence
  Description of Artificial Sequence: Synthetic oligonucleotide
  Sense strand starting at position 3025 of SEQ ID NO: 585011
ugacaugugaguuguucca

SEQ ID NO: 606475 - RNA, 19 nt, Artificial Sequence
  Description of Artificial Sequence: Synthetic oligonucleotide
  Antisense strand to SEQ ID NO: 606474
uggaacaacucacauguca

SEQ ID NO: 606476 - RNA, 19 nt, Artificial Sequence
  Description of Artificial Sequence: Synthetic oligonucleotide
  Sense strand starting at position 3072 of SEQ ID NO: 585011
aggacauuccuguaugagu

SEQ ID NO: 606477 - RNA, 19 nt, Artificial Sequence
  Description of Artificial Sequence: Synthetic oligonucleotide
  Antisense strand to SEQ ID NO: 606476
acucauacaggaauguccu

SEQ ID NO: 606478 - RNA, 19 nt, Artificial Sequence
  Description of Artificial Sequence: Synthetic oligonucleotide
  Sense strand starting at position 3074 of SEQ ID NO: 585011
gacauuccuguaugaguuu

SEQ ID NO: 606479 - RNA, 19 nt, Artificial Sequence
  Description of Artificial Sequence: Synthetic oligonucleotide
  Antisense strand to SEQ ID NO: 606478
aaacucauacaggaauguc

SEQ ID NO: 606480 - RNA, 19 nt, Artificial Sequence
  Description of Artificial Sequence: Synthetic oligonucleotide
  Sense strand starting at position 3126 of SEQ ID NO: 585011
gaggaauggcuggaucgua

SEQ ID NO: 606481 - RNA, 19 nt, Artificial Sequence
  Description of Artificial Sequence: Synthetic oligonucleotide
  Antisense strand to SEQ ID NO: 606480
uacgauccagccauuccuc

SEQ ID NO: 606482 - RNA, 19 nt, Artificial Sequence
  Description of Artificial Sequence: Synthetic oligonucleotide
  Sense strand starting at position 3255 of SEQ ID NO: 585011
cugucuuuaguccagcaga

SEQ ID NO: 606483 - RNA, 19 nt, Artificial Sequence
  Description of Artificial Sequence: Synthetic oligonucleotide
  Antisense strand to SEQ ID NO: 606482
ucugcuggacuaaagacag

SEQ ID NO: 606484 - RNA, 19 nt, Artificial Sequence
  Description of Artificial Sequence: Synthetic oligonucleotide
  Sense strand starting at position 3258 of SEQ ID NO: 585011
ucuuuaguccagcagaugu

SEQ ID NO: 606485 - RNA, 19 nt, Artificial Sequence
  Description of Artificial Sequence: Synthetic oligonucleotide
  Antisense strand to SEQ ID NO: 606484
acaucugcuggacuaaaga

SEQ ID NO: 606486 - RNA, 19 nt, Artificial Sequence
  Description of Artificial Sequence: Synthetic oligonucleotide
  Sense strand starting at position 3340 of SEQ ID NO: 585011
uuccaugugcuuguuguau

SEQ ID NO: 606487 - RNA, 19 nt, Artificial Sequence
  Description of Artificial Sequence: Synthetic oligonucleotide
  Antisense strand to SEQ ID NO: 606486
auacaacaagcacauggaa

SEQ ID NO: 606488 - RNA, 19 nt, Artificial Sequence
  Description of Artificial Sequence: Synthetic oligonucleotide
  Sense strand starting at position 3352 of SEQ ID NO: 585011
guuguauacuuccuuugga

SEQ ID NO: 606489 - RNA, 19 nt, Artificial Sequence
  Description of Artificial Sequence: Synthetic oligonucleotide
  Antisense strand to SEQ ID NO: 606488
uccaaaggaaguauacaac

SEQ ID NO: 606490 - RNA, 19 nt, Artificial Sequence
  Description of Artificial Sequence: Synthetic oligonucleotide
  Sense strand starting at position 3355 of SEQ ID NO: 585011
guauacuuccuuuggagaa

SEQ ID NO: 606491 - RNA, 19 nt, Artificial Sequence
  Description of Artificial Sequence: Synthetic oligonucleotide
  Antisense strand to SEQ ID NO: 606490
uucuccaaaggaaguauac

SEQ ID NO: 606492 - RNA, 19 nt, Artificial Sequence
  Description of Artificial Sequence: Synthetic oligonucleotide
  Sense strand starting at position 3422 of SEQ ID NO: 585011
guuauugagaugugaguau

SEQ ID NO: 606493 - RNA, 19 nt, Artificial Sequence
  Description of Artificial Sequence: Synthetic oligonucleotide
  Antisense strand to SEQ ID NO: 606492
auacucacaucucaauaac

SEQ ID NO: 606494 - RNA, 19 nt, Artificial Sequence
  Description of Artificial Sequence: Synthetic oligonucleotide
  Sense strand starting at position 3578 of SEQ ID NO: 585011
ggugaauuccaguguaucu

SEQ ID NO: 606495 - RNA, 19 nt, Artificial Sequence
  Description of Artificial Sequence: Synthetic oligonucleotide
  Antisense strand to SEQ ID NO: 606494
agauacacuggaauucacc

SEQ ID NO: 606496 - RNA, 19 nt, Artificial Sequence
  Description of Artificial Sequence: Synthetic oligonucleotide
  Sense strand starting at position 3613 of SEQ ID NO: 585011
uuaugcuuugggugaucua

SEQ ID NO: 606497 - RNA, 19 nt, Artificial Sequence
  Description of Artificial Sequence: Synthetic oligonucleotide
  Antisense strand to SEQ ID NO: 606496
uagaucacccaaagcauaa

SEQ ID NO: 606498 - RNA, 19 nt, Artificial Sequence
  Description of Artificial Sequence: Synthetic oligonucleotide
  Sense strand starting at position 3614 of SEQ ID NO: 585011
uaugcuuugggugaucuaa

SEQ ID NO: 606499 - RNA, 19 nt, Artificial Sequence
  Description of Artificial Sequence: Synthetic oligonucleotide
  Antisense strand to SEQ ID NO: 606498
uuagaucacccaaagcaua

SEQ ID NO: 606500 - RNA, 19 nt, Artificial Sequence
  Description of Artificial Sequence: Synthetic oligonucleotide
  Sense strand starting at position 3616 of SEQ ID NO: 585011
ugcuuugggugaucuaaca

SEQ ID NO: 606501 - RNA, 19 nt, Artificial Sequence
  Description of Artificial Sequence: Synthetic oligonucleotide
  Antisense strand to SEQ ID NO: 606500
uguuagaucacccaaagca

SEQ ID NO: 606502 - RNA, 19 nt, Artificial Sequence
  Description of Artificial Sequence: Synthetic oligonucleotide
  Sense strand starting at position 3623 of SEQ ID NO: 585011
ggugaucuaacagagcauu

SEQ ID NO: 606503 - RNA, 19 nt, Artificial Sequence
  Description of Artificial Sequence: Synthetic oligonucleotide
  Antisense strand to SEQ ID NO: 606502
aaugcucuguuagaucacc

SEQ ID NO: 606504 - RNA, 19 nt, Artificial Sequence
  Description of Artificial Sequence: Synthetic oligonucleotide
  Sense strand starting at position 3629 of SEQ ID NO: 585011
cuaacagagcauugucuaa

SEQ ID NO: 606505 - RNA, 19 nt, Artificial Sequence
  Description of Artificial Sequence: Synthetic oligonucleotide
  Antisense strand to SEQ ID NO: 606504
uuagacaaugcucuguuag

SEQ ID NO: 606506 - RNA, 19 nt, Artificial Sequence
  Description of Artificial Sequence: Synthetic oligonucleotide
  Sense strand starting at position 3636 of SEQ ID NO: 585011
agcauugucuaauccaaag

SEQ ID NO: 606507 - RNA, 19 nt, Artificial Sequence
  Description of Artificial Sequence: Synthetic oligonucleotide
  Antisense strand to SEQ ID NO: 606506
cuuuggauuagacaaugcu

SEQ ID NO: 606508 - RNA, 19 nt, Artificial Sequence
  Description of Artificial Sequence: Synthetic oligonucleotide
  Sense strand starting at position 3666 of SEQ ID NO: 585011
agcuaugauuucuaagauu

SEQ ID NO: 606509 - RNA, 19 nt, Artificial Sequence
  Description of Artificial Sequence: Synthetic oligonucleotide
  Antisense strand to SEQ ID NO: 606508
aaucuuagaaaucauagcu

SEQ ID NO: 606510 - RNA, 19 nt, Artificial Sequence
  Description of Artificial Sequence: Synthetic oligonucleotide
  Sense strand starting at position 3864 of SEQ ID NO: 585011
agaaaucaguuucugguuu

SEQ ID NO: 606511 - RNA, 19 nt, Artificial Sequence
  Description of Artificial Sequence: Synthetic oligonucleotide
  Antisense strand to SEQ ID NO: 606510
aaaccagaaacugauuucu

SEQ ID NO: 606512 - RNA, 19 nt, Artificial Sequence
  Description of Artificial Sequence: Synthetic oligonucleotide
  Sense strand starting at position 3868 of SEQ ID NO: 585011
aucaguuucugguuucuca

SEQ ID NO: 606513 - RNA, 19 nt, Artificial Sequence
  Description of Artificial Sequence: Synthetic oligonucleotide
  Antisense strand to SEQ ID NO: 606512
ugagaaaccagaaacugau

SEQ ID NO: 606514 - RNA, 19 nt, Artificial Sequence
  Description of Artificial Sequence: Synthetic oligonucleotide
  Sense strand starting at position 3886 of SEQ ID NO: 585011
aguucuguugcguugcaau

SEQ ID NO: 606515 - RNA, 19 nt, Artificial Sequence
  Description of Artificial Sequence: Synthetic oligonucleotide
  Antisense strand to SEQ ID NO: 606514
auugcaacgcaacagaacu

SEQ ID NO: 606516 - RNA, 19 nt, Artificial Sequence
  Description of Artificial Sequence: Synthetic oligonucleotide
  Sense strand starting at position 3888 of SEQ ID NO: 585011
uucuguugcguugcaauau

SEQ ID NO: 606517 - RNA, 19 nt, Artificial Sequence
  Description of Artificial Sequence: Synthetic oligonucleotide
  Antisense strand to SEQ ID NO: 606516
auauugcaacgcaacagaa

SEQ ID NO: 606518 - RNA, 19 nt, Artificial Sequence
  Description of Artificial Sequence: Synthetic oligonucleotide
  Sense strand starting at position 98 of SEQ ID NO: 585012
cggagucugggucauccaa

SEQ ID NO: 606519 - RNA, 19 nt, Artificial Sequence
  Description of Artificial Sequence: Synthetic oligonucleotide
  Antisense strand to SEQ ID NO: 606518
uuggaugacccagacuccg

SEQ ID NO: 606520 - RNA, 19 nt, Artificial Sequence
  Description of Artificial Sequence: Synthetic oligonucleotide
  Sense strand starting at position 100 of SEQ ID NO: 585012
gagucugggucauccaauu

SEQ ID NO: 606521 - RNA, 19 nt, Artificial Sequence
  Description of Artificial Sequence: Synthetic oligonucleotide
  Antisense strand to SEQ ID NO: 606520
aauuggaugacccagacuc

SEQ ID NO: 606522 - RNA, 19 nt, Artificial Sequence
  Description of Artificial Sequence: Synthetic oligonucleotide
  Sense strand starting at position 109 of SEQ ID NO: 585012
ucauccaauucugagagau

SEQ ID NO: 606523 - RNA, 19 nt, Artificial Sequence
  Description of Artificial Sequence: Synthetic oligonucleotide
  Antisense strand to SEQ ID NO: 606522
aucucucagaauuggauga

SEQ ID NO: 606524 - RNA, 19 nt, Artificial Sequence
  Description of Artificial Sequence: Synthetic oligonucleotide
  Sense strand starting at position 269 of SEQ ID NO: 585012
ggugugugggaggguuauu

SEQ ID NO: 606525 - RNA, 19 nt, Artificial Sequence
  Description of Artificial Sequence: Synthetic oligonucleotide
  Antisense strand to SEQ ID NO: 606524
aauaacccucccacacacc

SEQ ID NO: 606526 - RNA, 19 nt, Artificial Sequence
  Description of Artificial Sequence: Synthetic oligonucleotide
  Sense strand starting at position 280 of SEQ ID NO: 585012
ggguuauucccagagggcu

SEQ ID NO: 606527 - RNA, 19 nt, Artificial Sequence
  Description of Artificial Sequence: Synthetic oligonucleotide
  Antisense strand to SEQ ID NO: 606526
agcccucugggaauaaccc

SEQ ID NO: 606528 - RNA, 19 nt, Artificial Sequence
  Description of Artificial Sequence: Synthetic oligonucleotide
  Sense strand starting at position 344 of SEQ ID NO: 585012
cugagugggccuugagaac

SEQ ID NO: 606529 - RNA, 19 nt, Artificial Sequence
  Description of Artificial Sequence: Synthetic oligonucleotide
  Antisense strand to SEQ ID NO: 606528
guucucaaggcccacucag

SEQ ID NO: 606530 - RNA, 19 nt, Artificial Sequence
  Description of Artificial Sequence: Synthetic oligonucleotide
  Sense strand starting at position 362 of SEQ ID NO: 585012
cagugcagagcucauugau

SEQ ID NO: 606531 - RNA, 19 nt, Artificial Sequence
  Description of Artificial Sequence: Synthetic oligonucleotide
  Antisense strand to SEQ ID NO: 606530
aucaaugagcucugcacug

SEQ ID NO: 606532 - RNA, 19 nt, Artificial Sequence
  Description of Artificial Sequence: Synthetic oligonucleotide
  Sense strand starting at position 365 of SEQ ID NO: 585012
ugcagagcucauugaugua

SEQ ID NO: 606533 - RNA, 19 nt, Artificial Sequence
  Description of Artificial Sequence: Synthetic oligonucleotide
  Antisense strand to SEQ ID NO: 606532
uacaucaaugagcucugca

SEQ ID NO: 606534 - RNA, 19 nt, Artificial Sequence
  Description of Artificial Sequence: Synthetic oligonucleotide
  Sense strand starting at position 478 of SEQ ID NO: 585012
cguugcugccgguuauaga

SEQ ID NO: 606535 - RNA, 19 nt, Artificial Sequence
  Description of Artificial Sequence: Synthetic oligonucleotide
  Antisense strand to SEQ ID NO: 606534
ucuauaaccggcagcaacg

SEQ ID NO: 606536 - RNA, 19 nt, Artificial Sequence
  Description of Artificial Sequence: Synthetic oligonucleotide
  Sense strand starting at position 515 of SEQ ID NO: 585012
gguggucugcugucugcau

SEQ ID NO: 606537 - RNA, 19 nt, Artificial Sequence
  Description of Artificial Sequence: Synthetic oligonucleotide
  Antisense strand to SEQ ID NO: 606536
augcagacagcagaccacc

SEQ ID NO: 606538 - RNA, 19 nt, Artificial Sequence
  Description of Artificial Sequence: Synthetic oligonucleotide
  Sense strand starting at position 1098 of SEQ ID NO: 585012
ccauuaguucuauaugcuu

SEQ ID NO: 606539 - RNA, 19 nt, Artificial Sequence
  Description of Artificial Sequence: Synthetic oligonucleotide
  Antisense strand to SEQ ID NO: 606538
aagcauauagaacuaaugg

SEQ ID NO: 606540 - RNA, 19 nt, Artificial Sequence
  Description of Artificial Sequence: Synthetic oligonucleotide
  Sense strand starting at position 1205 of SEQ ID NO: 585012
ccggucuuucuguugcauu

SEQ ID NO: 606541 - RNA, 19 nt, Artificial Sequence
  Description of Artificial Sequence: Synthetic oligonucleotide
  Antisense strand to SEQ ID NO: 606540
aaugcaacagaaagaccgg

SEQ ID NO: 606542 - RNA, 19 nt, Artificial Sequence
  Description of Artificial Sequence: Synthetic oligonucleotide
  Sense strand starting at position 1233 of SEQ ID NO: 585012
uuucuuagaguuggcaagu

SEQ ID NO: 606543 - RNA, 19 nt, Artificial Sequence
  Description of Artificial Sequence: Synthetic oligonucleotide
  Antisense strand to SEQ ID NO: 606542
acuugccaacucuaagaaa

SEQ ID NO: 606544 - RNA, 19 nt, Artificial Sequence
  Description of Artificial Sequence: Synthetic oligonucleotide
  Sense strand starting at position 1234 of SEQ ID NO: 585012
uucuuagaguuggcaaguu

SEQ ID NO: 606545 - RNA, 19 nt, Artificial Sequence
  Description of Artificial Sequence: Synthetic oligonucleotide
  Antisense strand to SEQ ID NO: 606544
aacuugccaacucuaagaa

SEQ ID NO: 606546 - RNA, 19 nt, Artificial Sequence
  Description of Artificial Sequence: Synthetic oligonucleotide
  Sense strand starting at position 1250 of SEQ ID NO: 585012
guugauucuuccucccaca

SEQ ID NO: 606547 - RNA, 19 nt, Artificial Sequence
  Description of Artificial Sequence: Synthetic oligonucleotide
  Antisense strand to SEQ ID NO: 606546
ugugggaggaagaaucaac

SEQ ID NO: 606548 - RNA, 19 nt, Artificial Sequence
  Description of Artificial Sequence: Synthetic oligonucleotide
  Sense strand starting at position 1420 of SEQ ID NO: 585012
gaaagagguucccucccaa

SEQ ID NO: 606549 - RNA, 19 nt, Artificial Sequence
  Description of Artificial Sequence: Synthetic oligonucleotide
  Antisense strand to SEQ ID NO: 606548
uugggagggaaccucuuuc

SEQ ID NO: 606550 - RNA, 19 nt, Artificial Sequence
  Description of Artificial Sequence: Synthetic oligonucleotide
  Sense strand starting at position 1486 of SEQ ID NO: 585012
uccgaugagucuccucaaa

SEQ ID NO: 606551 - RNA, 19 nt, Artificial Sequence
  Description of Artificial Sequence: Synthetic oligonucleotide
  Antisense strand to SEQ ID NO: 606550
uuugaggagacucaucgga

SEQ ID NO: 606552 - RNA, 19 nt, Artificial Sequence
  Description of Artificial Sequence: Synthetic oligonucleotide
  Sense strand starting at position 1488 of SEQ ID NO: 585012
cgaugagucuccucaaacu

SEQ ID NO: 606553 - RNA, 19 nt, Artificial Sequence
  Description of Artificial Sequence: Synthetic oligonucleotide
  Antisense strand to SEQ ID NO: 606552
aguuugaggagacucaucg

SEQ ID NO: 606554 - RNA, 19 nt, Artificial Sequence
  Description of Artificial Sequence: Synthetic oligonucleotide
  Sense strand starting at position 1508 of SEQ ID NO: 585012
gggcuuuagguugaagaua

SEQ ID NO: 606555 - RNA, 19 nt, Artificial Sequence
  Description of Artificial Sequence: Synthetic oligonucleotide
  Antisense strand to SEQ ID NO: 606554
uaucuucaaccuaaagccc

SEQ ID NO: 606556 - RNA, 19 nt, Artificial Sequence
  Description of Artificial Sequence: Synthetic oligonucleotide
  Sense strand starting at position 1623 of SEQ ID NO: 585012
ucucgcgauuccucuuaga

SEQ ID NO: 606557 - RNA, 19 nt, Artificial Sequence
  Description of Artificial Sequence: Synthetic oligonucleotide
  Antisense strand to SEQ ID NO: 606556
ucuaagaggaaucgcgaga

SEQ ID NO: 606558 - RNA, 19 nt, Artificial Sequence
  Description of Artificial Sequence: Synthetic oligonucleotide
  Sense strand starting at position 1977 of SEQ ID NO: 585012
aacuaagcgccgccauauu

SEQ ID NO: 606559 - RNA, 19 nt, Artificial Sequence
  Description of Artificial Sequence: Synthetic oligonucleotide
  Antisense strand to SEQ ID NO: 606558
aauauggcggcgcuuaguu

SEQ ID NO: 606560 - RNA, 19 nt, Artificial Sequence
  Description of Artificial Sequence: Synthetic oligonucleotide
  Sense strand starting at position 1987 of SEQ ID NO: 585012
cgccauauugucguacgga

SEQ ID NO: 606561 - RNA, 19 nt, Artificial Sequence
  Description of Artificial Sequence: Synthetic oligonucleotide
  Antisense strand to SEQ ID NO: 606560
uccguacgacaauauggcg

SEQ ID NO: 606562 - RNA, 19 nt, Artificial Sequence
  Description of Artificial Sequence: Synthetic oligonucleotide
  Sense strand starting at position 1990 of SEQ ID NO: 585012
cauauugucguacggaaca

SEQ ID NO: 606563 - RNA, 19 nt, Artificial Sequence
  Description of Artificial Sequence: Synthetic oligonucleotide
  Antisense strand to SEQ ID NO: 606562
uguuccguacgacaauaug

SEQ ID NO: 606564 - RNA, 19 nt, Artificial Sequence
  Description of Artificial Sequence: Synthetic oligonucleotide
  Sense strand starting at position 2475 of SEQ ID NO: 585012
ggcuuauucggcugaccca

SEQ ID NO: 606565 - RNA, 19 nt, Artificial Sequence
  Description of Artificial Sequence: Synthetic oligonucleotide
  Antisense strand to SEQ ID NO: 606564
ugggucagccgaauaagcc

SEQ ID NO: 606566 - RNA, 19 nt, Artificial Sequence
  Description of Artificial Sequence: Synthetic oligonucleotide
  Sense strand starting at position 2560 of SEQ ID NO: 585012
cugcgucccgcgaucguua

SEQ ID NO: 606567 - RNA, 19 nt, Artificial Sequence
  Description of Artificial Sequence: Synthetic oligonucleotide
  Antisense strand to SEQ ID NO: 606566
uaacgaucgcgggacgcag

SEQ ID NO: 606568 - RNA, 19 nt, Artificial Sequence
  Description of Artificial Sequence: Synthetic oligonucleotide
  Sense strand starting at position 2563 of SEQ ID NO: 585012
cgucccgcgaucguuauaa

SEQ ID NO: 606569 - RNA, 19 nt, Artificial Sequence
  Description of Artificial Sequence: Synthetic oligonucleotide
  Antisense strand to SEQ ID NO: 606568
uuauaacgaucgcgggacg

SEQ ID NO: 606570 - RNA, 19 nt, Artificial Sequence
  Description of Artificial Sequence: Synthetic oligonucleotide
  Sense strand starting at position 2565 of SEQ ID NO: 585012
ucccgcgaucguuauaaca

SEQ ID NO: 606571 - RNA, 19 nt, Artificial Sequence
  Description of Artificial Sequence: Synthetic oligonucleotide
  Antisense strand to SEQ ID NO: 606570
uguuauaacgaucgcggga

SEQ ID NO: 606572 - RNA, 19 nt, Artificial Sequence
  Description of Artificial Sequence: Synthetic oligonucleotide
  Sense strand starting at position 2578 of SEQ ID NO: 585012
auaacacaugcguacaaau

SEQ ID NO: 606573 - RNA, 19 nt, Artificial Sequence
  Description of Artificial Sequence: Synthetic oligonucleotide
  Antisense strand to SEQ ID NO: 606572
auuuguacgcauguguuau

SEQ ID NO: 606574 - RNA, 19 nt, Artificial Sequence
  Description of Artificial Sequence: Synthetic oligonucleotide
  Sense strand starting at position 2696 of SEQ ID NO: 585012
ccugaaugguucuucucca

SEQ ID NO: 606575 - RNA, 19 nt, Artificial Sequence
  Description of Artificial Sequence: Synthetic oligonucleotide
  Antisense strand to SEQ ID NO: 606574
uggagaagaaccauucagg

SEQ ID NO: 606576 - RNA, 19 nt, Artificial Sequence
  Description of Artificial Sequence: Synthetic oligonucleotide
  Sense strand starting at position 2812 of SEQ ID NO: 585012
ggaggagaguuugugcaaa

SEQ ID NO: 606577 - RNA, 19 nt, Artificial Sequence
  Description of Artificial Sequence: Synthetic oligonucleotide
  Antisense strand to SEQ ID NO: 606576
uuugcacaaacucuccucc

SEQ ID NO: 606578 - RNA, 19 nt, Artificial Sequence
  Description of Artificial Sequence: Synthetic oligonucleotide
  Sense strand starting at position 3043 of SEQ ID NO: 585012
ggucccaaucgcuaagauu

SEQ ID NO: 606579 - RNA, 19 nt, Artificial Sequence
  Description of Artificial Sequence: Synthetic oligonucleotide
  Antisense strand to SEQ ID NO: 606578
aaucuuagcgauugggacc

SEQ ID NO: 606580 - RNA, 19 nt, Artificial Sequence
  Description of Artificial Sequence: Synthetic oligonucleotide
  Sense strand starting at position 3078 of SEQ ID NO: 585012
gugggcaucuugccacuua

SEQ ID NO: 606581 - RNA, 19 nt, Artificial Sequence
  Description of Artificial Sequence: Synthetic oligonucleotide
  Antisense strand to SEQ ID NO: 606580
uaaguggcaagaugcccac

SEQ ID NO: 606582 - RNA, 19 nt, Artificial Sequence
  Description of Artificial Sequence: Synthetic oligonucleotide
  Sense strand starting at position 3102 of SEQ ID NO: 585012
ggucacagagcuuauuaga

SEQ ID NO: 606583 - RNA, 19 nt, Artificial Sequence
  Description of Artificial Sequence: Synthetic oligonucleotide
  Antisense strand to SEQ ID NO: 606582
ucuaauaagcucugugacc

SEQ ID NO: 606584 - RNA, 19 nt, Artificial Sequence
  Description of Artificial Sequence: Synthetic oligonucleotide
  Sense strand starting at position 3113 of SEQ ID NO: 585012
uuauuagaucccuaacgcu

SEQ ID NO: 606585 - RNA, 19 nt, Artificial Sequence
  Description of Artificial Sequence: Synthetic oligonucleotide
  Antisense strand to SEQ ID NO: 606584
agcguuagggaucuaauaa

SEQ ID NO: 606586 - RNA, 19 nt, Artificial Sequence
  Description of Artificial Sequence: Synthetic oligonucleotide
  Sense strand starting at position 3180 of SEQ ID NO: 585012
ucucuccagucgucaaagu

SEQ ID NO: 606587 - RNA, 19 nt, Artificial Sequence
  Description of Artificial Sequence: Synthetic oligonucleotide
  Antisense strand to SEQ ID NO: 606586
acuuugacgacuggagaga

SEQ ID NO: 606588 - RNA, 19 nt, Artificial Sequence
  Description of Artificial Sequence: Synthetic oligonucleotide
  Sense strand starting at position 3190 of SEQ ID NO: 585012
cgucaaagucuacagcuuu

SEQ ID NO: 606589 - RNA, 19 nt, Artificial Sequence
  Description of Artificial Sequence: Synthetic oligonucleotide
  Antisense strand to SEQ ID NO: 606588
aaagcuguagacuuugacg

SEQ ID NO: 606590 - RNA, 19 nt, Artificial Sequence
  Description of Artificial Sequence: Synthetic oligonucleotide
  Sense strand starting at position 3453 of SEQ ID NO: 585012
ggguaaucuuaccuguuua

SEQ ID NO: 606591 - RNA, 19 nt, Artificial Sequence
  Description of Artificial Sequence: Synthetic oligonucleotide
  Antisense strand to SEQ ID NO: 606590
uaaacagguaagauuaccc

SEQ ID NO: 606592 - RNA, 19 nt, Artificial Sequence
  Description of Artificial Sequence: Synthetic oligonucleotide
  Sense strand starting at position 3478 of SEQ ID NO: 585012
agggaaauguacccuguuu

SEQ ID NO: 606593 - RNA, 19 nt, Artificial Sequence
  Description of Artificial Sequence: Synthetic oligonucleotide
  Antisense strand to SEQ ID NO: 606592
aaacaggguacauuucccu

SEQ ID NO: 606594 - RNA, 19 nt, Artificial Sequence
  Description of Artificial Sequence: Synthetic oligonucleotide
  Sense strand starting at position 3480 of SEQ ID NO: 585012
ggaaauguacccuguuucu

SEQ ID NO: 606595 - RNA, 19 nt, Artificial Sequence
  Description of Artificial Sequence: Synthetic oligonucleotide
  Antisense strand to SEQ ID NO: 606594
agaaacaggguacauuucc

SEQ ID NO: 606596 - RNA, 19 nt, Artificial Sequence
  Description of Artificial Sequence: Synthetic oligonucleotide
  Sense strand starting at position 3846 of SEQ ID NO: 585012
gcgacagagcgagauuauc

SEQ ID NO: 606597 - RNA, 19 nt, Artificial Sequence
  Description of Artificial Sequence: Synthetic oligonucleotide
  Antisense strand to SEQ ID NO: 606596
gauaaucucgcucugucgc

SEQ ID NO: 606598 - RNA, 19 nt, Artificial Sequence
  Description of Artificial Sequence: Synthetic oligonucleotide
  Sense strand starting at position 6 of SEQ ID NO: 585013
guaagaaucuaagcaacca

SEQ ID NO: 606599 - RNA, 19 nt, Artificial Sequence
  Description of Artificial Sequence: Synthetic oligonucleotide
  Antisense strand to SEQ ID NO: 606598
ugguugcuuagauucuuac

SEQ ID NO: 606600 - RNA, 19 nt, Artificial Sequence
  Description of Artificial Sequence: Synthetic oligonucleotide
  Sense strand starting at position 338 of SEQ ID NO: 585013
ucacacuuguuccuagaga

SEQ ID NO: 606601 - RNA, 19 nt, Artificial Sequence
  Description of Artificial Sequence: Synthetic oligonucleotide
  Antisense strand to SEQ ID NO: 606600
ucucuaggaacaaguguga

SEQ ID NO: 606602 - RNA, 19 nt, Artificial Sequence
  Description of Artificial Sequence: Synthetic oligonucleotide
  Sense strand starting at position 376 of SEQ ID NO: 585013
caguuaacagccuggauga

SEQ ID NO: 606603 - RNA, 19 nt, Artificial Sequence
  Description of Artificial Sequence: Synthetic oligonucleotide
  Antisense strand to SEQ ID NO: 606602
ucauccaggcuguuaacug

SEQ ID NO: 606604 - RNA, 19 nt, Artificial Sequence
  Description of Artificial Sequence: Synthetic oligonucleotide
  Sense strand starting at position 432 of SEQ ID NO: 585013
gacagcuuuggccagauua

SEQ ID NO: 606605 - RNA, 19 nt, Artificial Sequence
  Description of Artificial Sequence: Synthetic oligonucleotide
  Antisense strand to SEQ ID NO: 606604
uaaucuggccaaagcuguc

SEQ ID NO: 606606 - RNA, 19 nt, Artificial Sequence
  Description of Artificial Sequence: Synthetic oligonucleotide
  Sense strand starting at position 457 of SEQ ID NO: 585013
gaacauacugcuggacuga

SEQ ID NO: 606607 - RNA, 19 nt, Artificial Sequence
  Description of Artificial Sequence: Synthetic oligonucleotide
  Antisense strand to SEQ ID NO: 606606
ucaguccagcaguauguuc

SEQ ID NO: 606608 - RNA, 19 nt, Artificial Sequence
  Description of Artificial Sequence: Synthetic oligonucleotide
  Sense strand starting at position 467 of SEQ ID NO: 585013
cuggacugauucucacaga

SEQ ID NO: 606609 - RNA, 19 nt, Artificial Sequence
  Description of Artificial Sequence: Synthetic oligonucleotide
  Antisense strand to SEQ ID NO: 606608
ucugugagaaucaguccag

SEQ ID NO: 606610 - RNA, 19 nt, Artificial Sequence
  Description of Artificial Sequence: Synthetic oligonucleotide
  Sense strand starting at position 478 of SEQ ID NO: 585013
cucacagacguauaguauu

SEQ ID NO: 606611 - RNA, 19 nt, Artificial Sequence
  Description of Artificial Sequence: Synthetic oligonucleotide
  Antisense strand to SEQ ID NO: 606610
aauacuauacgucugugag

SEQ ID NO: 606612 - RNA, 19 nt, Artificial Sequence
  Description of Artificial Sequence: Synthetic oligonucleotide
  Sense strand starting at position 677 of SEQ ID NO: 585013
acaaacugguauguaauau

SEQ ID NO: 606613 - RNA, 19 nt, Artificial Sequence
  Description of Artificial Sequence: Synthetic oligonucleotide
  Antisense strand to SEQ ID NO: 606612
auauuacauaccaguuugu

SEQ ID NO: 606614 - RNA, 19 nt, Artificial Sequence
  Description of Artificial Sequence: Synthetic oligonucleotide
  Sense strand starting at position 743 of SEQ ID NO: 585013
ggaggcauaguucagugaa

SEQ ID NO: 606615 - RNA, 19 nt, Artificial Sequence
  Description of Artificial Sequence: Synthetic oligonucleotide
  Antisense strand to SEQ ID NO: 606614
uucacugaacuaugccucc

SEQ ID NO: 606616 - RNA, 19 nt, Artificial Sequence
  Description of Artificial Sequence: Synthetic oligonucleotide
  Sense strand starting at position 801 of SEQ ID NO: 585013
accagaaagcauggugguu

SEQ ID NO: 606617 - RNA, 19 nt, Artificial Sequence
  Description of Artificial Sequence: Synthetic oligonucleotide
  Antisense strand to SEQ ID NO: 606616
aaccaccaugcuuucuggu

SEQ ID NO: 606618 - RNA, 19 nt, Artificial Sequence
  Description of Artificial Sequence: Synthetic oligonucleotide
  Sense strand starting at position 829 of SEQ ID NO: 585013
gucaaaguacuccggauag

SEQ ID NO: 606619 - RNA, 19 nt, Artificial Sequence
  Description of Artificial Sequence: Synthetic oligonucleotide
  Antisense strand to SEQ ID NO: 606618
cuauccggaguacuuugac

SEQ ID NO: 606620 - RNA, 19 nt, Artificial Sequence
  Description of Artificial Sequence: Synthetic oligonucleotide
  Sense strand starting at position 858 of SEQ ID NO: 585013
auuaaauaagcucaggcau

SEQ ID NO: 606621 - RNA, 19 nt, Artificial Sequence
  Description of Artificial Sequence: Synthetic oligonucleotide
  Antisense strand to SEQ ID NO: 606620
augccugagcuuauuuaau

SEQ ID NO: 606622 - RNA, 19 nt, Artificial Sequence
  Description of Artificial Sequence: Synthetic oligonucleotide
  Sense strand starting at position 910 of SEQ ID NO: 585013
ugaaacaacucggcagaaa

SEQ ID NO: 606623 - RNA, 19 nt, Artificial Sequence
  Description of Artificial Sequence: Synthetic oligonucleotide
  Antisense strand to SEQ ID NO: 606622
uuucugccgaguuguuuca

SEQ ID NO: 606624 - RNA, 19 nt, Artificial Sequence
  Description of Artificial Sequence: Synthetic oligonucleotide
  Sense strand starting at position 2392 of SEQ ID NO: 585013
caccgagggacucgaaaua

SEQ ID NO: 606625 - RNA, 19 nt, Artificial Sequence
  Description of Artificial Sequence: Synthetic oligonucleotide
  Antisense strand to SEQ ID NO: 606624
uauuucgagucccucggug

SEQ ID NO: 606626 - RNA, 19 nt, Artificial Sequence
  Description of Artificial Sequence: Synthetic oligonucleotide
  Sense strand starting at position 2577 of SEQ ID NO: 585013
aauugcaaucagugacaug

SEQ ID NO: 606627 - RNA, 19 nt, Artificial Sequence
  Description of Artificial Sequence: Synthetic oligonucleotide
  Antisense strand to SEQ ID NO: 606626
caugucacugauugcaauu

SEQ ID NO: 606628 - RNA, 19 nt, Artificial Sequence
  Description of Artificial Sequence: Synthetic oligonucleotide
  Sense strand starting at position 2616 of SEQ ID NO: 585013
uuuagagagcuguaauuag

SEQ ID NO: 606629 - RNA, 19 nt, Artificial Sequence
  Description of Artificial Sequence: Synthetic oligonucleotide
  Antisense strand to SEQ ID NO: 606628
cuaauuacagcucucuaaa

SEQ ID NO: 606630 - RNA, 19 nt, Artificial Sequence
  Description of Artificial Sequence: Synthetic oligonucleotide
  Sense strand starting at position 2657 of SEQ ID NO: 585013
gcgggaaucagcuaggaaa

SEQ ID NO: 606631 - RNA, 19 nt, Artificial Sequence
  Description of Artificial Sequence: Synthetic oligonucleotide
  Antisense strand to SEQ ID NO: 606630
uuuccuagcugauucccgc

SEQ ID NO: 606632 - RNA, 19 nt, Artificial Sequence
  Description of Artificial Sequence: Synthetic oligonucleotide
  Sense strand starting at position 2684 of SEQ ID NO: 585013
uggcaucaaagcugagauu

SEQ ID NO: 606633 - RNA, 19 nt, Artificial Sequence
  Description of Artificial Sequence: Synthetic oligonucleotide
  Antisense strand to SEQ ID NO: 606632
aaucucagcuuugaugcca

SEQ ID NO: 606634 - RNA, 19 nt, Artificial Sequence
  Description of Artificial Sequence: Synthetic oligonucleotide
  Sense strand starting at position 2685 of SEQ ID NO: 585013
ggcaucaaagcugagauua

SEQ ID NO: 606635 - RNA, 19 nt, Artificial Sequence
  Description of Artificial Sequence: Synthetic oligonucleotide
  Antisense strand to SEQ ID NO: 606634
uaaucucagcuuugaugcc

SEQ ID NO: 606636 - RNA, 19 nt, Artificial Sequence
  Description of Artificial Sequence: Synthetic oligonucleotide
  Sense strand starting at position 2719 of SEQ ID NO: 585013
cagacaaguugugcaaaga

SEQ ID NO: 606637 - RNA, 19 nt, Artificial Sequence
  Description of Artificial Sequence: Synthetic oligonucleotide
  Antisense strand to SEQ ID NO: 606636
ucuuugcacaacuugucug

SEQ ID NO: 606638 - RNA, 19 nt, Artificial Sequence
  Description of Artificial Sequence: Synthetic oligonucleotide
  Sense strand starting at position 2796 of SEQ ID NO: 585013
agauguagaagcuagugua

SEQ ID NO: 606639 - RNA, 19 nt, Artificial Sequence
  Description of Artificial Sequence: Synthetic oligonucleotide
  Antisense strand to SEQ ID NO: 606638
uacacuagcuucuacaucu

SEQ ID NO: 606640 - RNA, 19 nt, Artificial Sequence
  Description of Artificial Sequence: Synthetic oligonucleotide
  Sense strand starting at position 2803 of SEQ ID NO: 585013
gaagcuaguguacagagua

SEQ ID NO: 606641 - RNA, 19 nt, Artificial Sequence
  Description of Artificial Sequence: Synthetic oligonucleotide
  Antisense strand to SEQ ID NO: 606640
uacucuguacacuagcuuc

SEQ ID NO: 606642 - RNA, 19 nt, Artificial Sequence
  Description of Artificial Sequence: Synthetic oligonucleotide
  Sense strand starting at position 2847 of SEQ ID NO: 585013
ccuaaaggauguuuaacuu

SEQ ID NO: 606643 - RNA, 19 nt, Artificial Sequence
  Description of Artificial Sequence: Synthetic oligonucleotide
  Antisense strand to SEQ ID NO: 606642
aaguuaaacauccuuuagg

SEQ ID NO: 606644 - RNA, 19 nt, Artificial Sequence
  Description of Artificial Sequence: Synthetic oligonucleotide
  Sense strand starting at position 2987 of SEQ ID NO: 585013
aggguuaucaccgaguagu

SEQ ID NO: 606645 - RNA, 19 nt, Artificial Sequence
  Description of Artificial Sequence: Synthetic oligonucleotide
  Antisense strand to SEQ ID NO: 606644
acuacucggugauaacccu

SEQ ID NO: 606646 - RNA, 19 nt, Artificial Sequence
  Description of Artificial Sequence: Synthetic oligonucleotide
  Sense strand starting at position 2990 of SEQ ID NO: 585013
guuaucaccgaguaguuga

SEQ ID NO: 606647 - RNA, 19 nt, Artificial Sequence
  Description of Artificial Sequence: Synthetic oligonucleotide
  Antisense strand to SEQ ID NO: 606646
ucaacuacucggugauaac

SEQ ID NO: 606648 - RNA, 19 nt, Artificial Sequence
  Description of Artificial Sequence: Synthetic oligonucleotide
  Sense strand starting at position 2993 of SEQ ID NO: 585013
aucaccgaguaguugaaua

SEQ ID NO: 606649 - RNA, 19 nt, Artificial Sequence
  Description of Artificial Sequence: Synthetic oligonucleotide
  Antisense strand to SEQ ID NO: 606648
uauucaacuacucggugau

SEQ ID NO: 606650 - RNA, 19 nt, Artificial Sequence
  Description of Artificial Sequence: Synthetic oligonucleotide
  Sense strand starting at position 3330 of SEQ ID NO: 585013
cucaaaugagauugucuuu

SEQ ID NO: 606651 - RNA, 19 nt, Artificial Sequence
  Description of Artificial Sequence: Synthetic oligonucleotide
  Antisense strand to SEQ ID NO: 606650
aaagacaaucucauuugag

SEQ ID NO: 606652 - RNA, 19 nt, Artificial Sequence
  Description of Artificial Sequence: Synthetic oligonucleotide
  Sense strand starting at position 3366 of SEQ ID NO: 585013
gaggcagcauaucuuagau

SEQ ID NO: 606653 - RNA, 19 nt, Artificial Sequence
  Description of Artificial Sequence: Synthetic oligonucleotide
  Antisense strand to SEQ ID NO: 606652
aucuaagauaugcugccuc

SEQ ID NO: 606654 - RNA, 19 nt, Artificial Sequence
  Description of Artificial Sequence: Synthetic oligonucleotide
  Sense strand starting at position 3438 of SEQ ID NO: 585013
agcuuuguugaagagcuga

SEQ ID NO: 606655 - RNA, 19 nt, Artificial Sequence
  Description of Artificial Sequence: Synthetic oligonucleotide
  Antisense strand to SEQ ID NO: 606654
ucagcucuucaacaaagcu

SEQ ID NO: 606656 - RNA, 19 nt, Artificial Sequence
  Description of Artificial Sequence: Synthetic oligonucleotide
  Sense strand starting at position 3474 of SEQ ID NO: 585013
gguauauauguguauauuc

SEQ ID NO: 606657 - RNA, 19 nt, Artificial Sequence
  Description of Artificial Sequence: Synthetic oligonucleotide
  Antisense strand to SEQ ID NO: 606656
gaauauacacauauauacc

SEQ ID NO: 606658 - RNA, 19 nt, Artificial Sequence
  Description of Artificial Sequence: Synthetic oligonucleotide
  Sense strand starting at position 3541 of SEQ ID NO: 585013
cuaacugaauguguauauu

SEQ ID NO: 606659 - RNA, 19 nt, Artificial Sequence
  Description of Artificial Sequence: Synthetic oligonucleotide
  Antisense strand to SEQ ID NO: 606658
aauauacacauucaguuag

SEQ ID NO: 606660 - RNA, 19 nt, Artificial Sequence
  Description of Artificial Sequence: Synthetic oligonucleotide
  Sense strand starting at position 3561 of SEQ ID NO: 585013
gguucuagcauguagagaa

SEQ ID NO: 606661 - RNA, 19 nt, Artificial Sequence
  Description of Artificial Sequence: Synthetic oligonucleotide
  Antisense strand to SEQ ID NO: 606660
uucucuacaugcuagaacc

SEQ ID NO: 606662 - RNA, 19 nt, Artificial Sequence
  Description of Artificial Sequence: Synthetic oligonucleotide
  Sense strand starting at position 3565 of SEQ ID NO: 585013
cuagcauguagagaaagua

SEQ ID NO: 606663 - RNA, 19 nt, Artificial Sequence
  Description of Artificial Sequence: Synthetic oligonucleotide
  Antisense strand to SEQ ID NO: 606662
uacuuucucuacaugcuag

SEQ ID NO: 606664 - RNA, 19 nt, Artificial Sequence
  Description of Artificial Sequence: Synthetic oligonucleotide
  Sense strand starting at position 3584 of SEQ ID NO: 585013
ccuaauaaacgguagguuu

SEQ ID NO: 606665 - RNA, 19 nt, Artificial Sequence
  Description of Artificial Sequence: Synthetic oligonucleotide
  Antisense strand to SEQ ID NO: 606664
aaaccuaccguuuauuagg

SEQ ID NO: 606666 - RNA, 19 nt, Artificial Sequence
  Description of Artificial Sequence: Synthetic oligonucleotide
  Sense strand starting at position 3788 of SEQ ID NO: 585013
cacugugagcuaugaauga

SEQ ID NO: 606667 - RNA, 19 nt, Artificial Sequence
  Description of Artificial Sequence: Synthetic oligonucleotide
  Antisense strand to SEQ ID NO: 606666
ucauucauagcucacagug

SEQ ID NO: 606668 - RNA, 19 nt, Artificial Sequence
  Description of Artificial Sequence: Synthetic oligonucleotide
  Sense strand starting at position 3792 of SEQ ID NO: 585013
gugagcuaugaaugaagca

SEQ ID NO: 606669 - RNA, 19 nt, Artificial Sequence
  Description of Artificial Sequence: Synthetic oligonucleotide
  Antisense strand to SEQ ID NO: 606668
ugcuucauucauagcucac

SEQ ID NO: 606670 - RNA, 19 nt, Artificial Sequence
  Description of Artificial Sequence: Synthetic oligonucleotide
  Sense strand starting at position 3820 of SEQ ID NO: 585013
gggaguauuguuuaacagu

SEQ ID NO: 606671 - RNA, 19 nt, Artificial Sequence
  Description of Artificial Sequence: Synthetic oligonucleotide
  Antisense strand to SEQ ID NO: 606670
acuguuaaacaauacuccc

SEQ ID NO: 606672 - RNA, 19 nt, Artificial Sequence
  Description of Artificial Sequence: Synthetic oligonucleotide
  Sense strand starting at position 3826 of SEQ ID NO: 585013
auuguuuaacagugaggaa

SEQ ID NO: 606673 - RNA, 19 nt, Artificial Sequence
  Description of Artificial Sequence: Synthetic oligonucleotide
  Antisense strand to SEQ ID NO: 606672
uuccucacuguuaaacaau

SEQ ID NO: 606674 - RNA, 19 nt, Artificial Sequence
  Description of Artificial Sequence: Synthetic oligonucleotide
  Sense strand starting at position 3920 of SEQ ID NO: 585013
auggaauuaucugcuguac

SEQ ID NO: 606675 - RNA, 19 nt, Artificial Sequence
  Description of Artificial Sequence: Synthetic oligonucleotide
  Antisense strand to SEQ ID NO: 606674
guacagcagauaauuccau

SEQ ID NO: 606676 - RNA, 19 nt, Artificial Sequence
  Description of Artificial Sequence: Synthetic oligonucleotide
  Sense strand starting at position 3940 of SEQ ID NO: 585013
ccugaauccugagccagau

SEQ ID NO: 606677 - RNA, 19 nt, Artificial Sequence
  Description of Artificial Sequence: Synthetic oligonucleotide
  Antisense strand to SEQ ID NO: 606676
aucuggcucaggauucagg

SEQ ID NO: 606678 - RNA, 19 nt, Artificial Sequence
  Description of Artificial Sequence: Synthetic oligonucleotide
  Sense strand starting at position 73 of SEQ ID NO: 585014
cagacacagugagaucaau

SEQ ID NO: 606679 - RNA, 19 nt, Artificial Sequence
  Description of Artificial Sequence: Synthetic oligonucleotide
  Antisense strand to SEQ ID NO: 606678
auugaucucacugugucug

SEQ ID NO: 606680 - RNA, 19 nt, Artificial Sequence
  Description of Artificial Sequence: Synthetic oligonucleotide
  Sense strand starting at position 278 of SEQ ID NO: 585014
uucuaauugcggcacaauu

SEQ ID NO: 606681 - RNA, 19 nt, Artificial Sequence
  Description of Artificial Sequence: Synthetic oligonucleotide
  Antisense strand to SEQ ID NO: 606680
aauugugccgcaauuagaa

SEQ ID NO: 606682 - RNA, 19 nt, Artificial Sequence
  Description of Artificial Sequence: Synthetic oligonucleotide
  Sense strand starting at position 298 of SEQ ID NO: 585014
acucucuuaccaggaguuu

SEQ ID NO: 606683 - RNA, 19 nt, Artificial Sequence
  Description of Artificial Sequence: Synthetic oligonucleotide
  Antisense strand to SEQ ID NO: 606682
aaacuccugguaagagagu

SEQ ID NO: 606684 - RNA, 19 nt, Artificial Sequence
  Description of Artificial Sequence: Synthetic oligonucleotide
  Sense strand starting at position 316 of SEQ ID NO: 585014
uguugugauucuuuacaca

SEQ ID NO: 606685 - RNA, 19 nt, Artificial Sequence
  Description of Artificial Sequence: Synthetic oligonucleotide
  Antisense strand to SEQ ID NO: 606684
uguguaaagaaucacaaca

SEQ ID NO: 606686 - RNA, 19 nt, Artificial Sequence
  Description of Artificial Sequence: Synthetic oligonucleotide
  Sense strand starting at position 328 of SEQ ID NO: 585014
uuacacagauucuuagagu

SEQ ID NO: 606687 - RNA, 19 nt, Artificial Sequence
  Description of Artificial Sequence: Synthetic oligonucleotide
  Antisense strand to SEQ ID NO: 606686
acucuaagaaucuguguaa

SEQ ID NO: 606688 - RNA, 19 nt, Artificial Sequence
  Description of Artificial Sequence: Synthetic oligonucleotide
  Sense strand starting at position 337 of SEQ ID NO: 585014
uucuuagagucuuuacaca

SEQ ID NO: 606689 - RNA, 19 nt, Artificial Sequence
  Description of Artificial Sequence: Synthetic oligonucleotide
  Antisense strand to SEQ ID NO: 606688
uguguaaagacucuaagaa

SEQ ID NO: 606690 - RNA, 19 nt, Artificial Sequence
  Description of Artificial Sequence: Synthetic oligonucleotide
  Sense strand starting at position 905 of SEQ ID NO: 585014
cucuaagauuaggaguuaa

SEQ ID NO: 606691 - RNA, 19 nt, Artificial Sequence
  Description of Artificial Sequence: Synthetic oligonucleotide
  Antisense strand to SEQ ID NO: 606690
uuaacuccuaaucuuagag

SEQ ID NO: 606692 - RNA, 19 nt, Artificial Sequence
  Description of Artificial Sequence: Synthetic oligonucleotide
  Sense strand starting at position 966 of SEQ ID NO: 585014
cggcaaauaccucaggaau

SEQ ID NO: 606693 - RNA, 19 nt, Artificial Sequence
  Description of Artificial Sequence: Synthetic oligonucleotide
  Antisense strand to SEQ ID NO: 606692
auuccugagguauuugccg

SEQ ID NO: 606694 - RNA, 19 nt, Artificial Sequence
  Description of Artificial Sequence: Synthetic oligonucleotide
  Sense strand starting at position 1088 of SEQ ID NO: 585014
ucauguacauuagucagaa

SEQ ID NO: 606695 - RNA, 19 nt, Artificial Sequence
  Description of Artificial Sequence: Synthetic oligonucleotide
  Antisense strand to SEQ ID NO: 606694
uucugacuaauguacauga

SEQ ID NO: 606696 - RNA, 19 nt, Artificial Sequence
  Description of Artificial Sequence: Synthetic oligonucleotide
  Sense strand starting at position 1089 of SEQ ID NO: 585014
cauguacauuagucagaag

SEQ ID NO: 606697 - RNA, 19 nt, Artificial Sequence
  Description of Artificial Sequence: Synthetic oligonucleotide
  Antisense strand to SEQ ID NO: 606696
cuucugacuaauguacaug

SEQ ID NO: 606698 - RNA, 19 nt, Artificial Sequence
  Description of Artificial Sequence: Synthetic oligonucleotide
  Sense strand starting at position 1191 of SEQ ID NO: 585014
uggcuugcugcccauacaa

SEQ ID NO: 606699 - RNA, 19 nt, Artificial Sequence
  Description of Artificial Sequence: Synthetic oligonucleotide
  Antisense strand to SEQ ID NO: 606698
uuguaugggcagcaagcca

SEQ ID NO: 606700 - RNA, 19 nt, Artificial Sequence
  Description of Artificial Sequence: Synthetic oligonucleotide
  Sense strand starting at position 1193 of SEQ ID NO: 585014
gcuugcugcccauacaaau

SEQ ID NO: 606701 - RNA, 19 nt, Artificial Sequence
  Description of Artificial Sequence: Synthetic oligonucleotide
  Antisense strand to SEQ ID NO: 606700
auuuguaugggcagcaagc

SEQ ID NO: 606702 - RNA, 19 nt, Artificial Sequence
  Description of Artificial Sequence: Synthetic oligonucleotide
  Sense strand starting at position 1240 of SEQ ID NO: 585014
uuaaguaguguacaucuga

SEQ ID NO: 606703 - RNA, 19 nt, Artificial Sequence
  Description of Artificial Sequence: Synthetic oligonucleotide
  Antisense strand to SEQ ID NO: 606702
ucagauguacacuacuuaa

SEQ ID NO: 606704 - RNA, 19 nt, Artificial Sequence
  Description of Artificial Sequence: Synthetic oligonucleotide
  Sense strand starting at position 1283 of SEQ ID NO: 585014
uuugcuaaacugugcuaau

SEQ ID NO: 606705 - RNA, 19 nt, Artificial Sequence
  Description of Artificial Sequence: Synthetic oligonucleotide
  Antisense strand to SEQ ID NO: 606704
auuagcacaguuuagcaaa

SEQ ID NO: 606706 - RNA, 19 nt, Artificial Sequence
  Description of Artificial Sequence: Synthetic oligonucleotide
  Sense strand starting at position 1284 of SEQ ID NO: 585014
uugcuaaacugugcuaauc

SEQ ID NO: 606707 - RNA, 19 nt, Artificial Sequence
  Description of Artificial Sequence: Synthetic oligonucleotide
  Antisense strand to SEQ ID NO: 606706
gauuagcacaguuuagcaa

SEQ ID NO: 606708 - RNA, 19 nt, Artificial Sequence
  Description of Artificial Sequence: Synthetic oligonucleotide
  Sense strand starting at position 1292 of SEQ ID NO: 585014
cugugcuaauccuucugua

SEQ ID NO: 606709 - RNA, 19 nt, Artificial Sequence
  Description of Artificial Sequence: Synthetic oligonucleotide
  Antisense strand to SEQ ID NO: 606708
uacagaaggauuagcacag

SEQ ID NO: 606710 - RNA, 19 nt, Artificial Sequence
  Description of Artificial Sequence: Synthetic oligonucleotide
  Sense strand starting at position 1305 of SEQ ID NO: 585014
ucuguaauuuaagguuuga

SEQ ID NO: 606711 - RNA, 19 nt, Artificial Sequence
  Description of Artificial Sequence: Synthetic oligonucleotide
  Antisense strand to SEQ ID NO: 606710
ucaaaccuuaaauuacaga

SEQ ID NO: 606712 - RNA, 19 nt, Artificial Sequence
  Description of Artificial Sequence: Synthetic oligonucleotide
  Sense strand starting at position 1501 of SEQ ID NO: 585014
accaacaauuguguuuaga

SEQ ID NO: 606713 - RNA, 19 nt, Artificial Sequence
  Description of Artificial Sequence: Synthetic oligonucleotide
  Antisense strand to SEQ ID NO: 606712
ucuaaacacaauuguuggu

SEQ ID NO: 606714 - RNA, 19 nt, Artificial Sequence
  Description of Artificial Sequence: Synthetic oligonucleotide
  Sense strand starting at position 1512 of SEQ ID NO: 585014
uguuuagauggccaagugu

SEQ ID NO: 606715 - RNA, 19 nt, Artificial Sequence
  Description of Artificial Sequence: Synthetic oligonucleotide
  Antisense strand to SEQ ID NO: 606714
acacuuggccaucuaaaca

SEQ ID NO: 606716 - RNA, 19 nt, Artificial Sequence
  Description of Artificial Sequence: Synthetic oligonucleotide
  Sense strand starting at position 1697 of SEQ ID NO: 585014
ugucuuaagucaccgugaa

SEQ ID NO: 606717 - RNA, 19 nt, Artificial Sequence
  Description of Artificial Sequence: Synthetic oligonucleotide
  Antisense strand to SEQ ID NO: 606716
uucacggugacuuaagaca

SEQ ID NO: 606718 - RNA, 19 nt, Artificial Sequence
  Description of Artificial Sequence: Synthetic oligonucleotide
  Sense strand starting at position 1698 of SEQ ID NO: 585014
gucuuaagucaccgugaau

SEQ ID NO: 606719 - RNA, 19 nt, Artificial Sequence
  Description of Artificial Sequence: Synthetic oligonucleotide
  Antisense strand to SEQ ID NO: 606718
auucacggugacuuaagac

SEQ ID NO: 606720 - RNA, 19 nt, Artificial Sequence
  Description of Artificial Sequence: Synthetic oligonucleotide
  Sense strand starting at position 1701 of SEQ ID NO: 585014
uuaagucaccgugaauuau

SEQ ID NO: 606721 - RNA, 19 nt, Artificial Sequence
  Description of Artificial Sequence: Synthetic oligonucleotide
  Antisense strand to SEQ ID NO: 606720
auaauucacggugacuuaa

SEQ ID NO: 606722 - RNA, 19 nt, Artificial Sequence
  Description of Artificial Sequence: Synthetic oligonucleotide
  Sense strand starting at position 2108 of SEQ ID NO: 585014
guaacaauugugcaggaaa

SEQ ID NO: 606723 - RNA, 19 nt, Artificial Sequence
  Description of Artificial Sequence: Synthetic oligonucleotide
  Antisense strand to SEQ ID NO: 606722
uuuccugcacaauuguuac

SEQ ID NO: 606724 - RNA, 19 nt, Artificial Sequence
  Description of Artificial Sequence: Synthetic oligonucleotide
  Sense strand starting at position 2121 of SEQ ID NO: 585014
aggaaauuaugucacugau

SEQ ID NO: 606725 - RNA, 19 nt, Artificial Sequence
  Description of Artificial Sequence: Synthetic oligonucleotide
  Antisense strand to SEQ ID NO: 606724
aucagugacauaauuuccu

SEQ ID NO: 606726 - RNA, 19 nt, Artificial Sequence
  Description of Artificial Sequence: Synthetic oligonucleotide
  Sense strand starting at position 2142 of SEQ ID NO: 585014
agaaguuacugguuaacug

SEQ ID NO: 606727 - RNA, 19 nt, Artificial Sequence
  Description of Artificial Sequence: Synthetic oligonucleotide
  Antisense strand to SEQ ID NO: 606726
caguuaaccaguaacuucu

SEQ ID NO: 606728 - RNA, 19 nt, Artificial Sequence
  Description of Artificial Sequence: Synthetic oligonucleotide
  Sense strand starting at position 2201 of SEQ ID NO: 585014
gaacuaugauguucugaug

SEQ ID NO: 606729 - RNA, 19 nt, Artificial Sequence
  Description of Artificial Sequence: Synthetic oligonucleotide
  Antisense strand to SEQ ID NO: 606728
caucagaacaucauaguuc

SEQ ID NO: 606730 - RNA, 19 nt, Artificial Sequence
  Description of Artificial Sequence: Synthetic oligonucleotide
  Sense strand starting at position 2213 of SEQ ID NO: 585014
ucugaugucaaagguugaa

SEQ ID NO: 606731 - RNA, 19 nt, Artificial Sequence
  Description of Artificial Sequence: Synthetic oligonucleotide
  Antisense strand to SEQ ID NO: 606730
uucaaccuuugacaucaga

SEQ ID NO: 606732 - RNA, 19 nt, Artificial Sequence
  Description of Artificial Sequence: Synthetic oligonucleotide
  Sense strand starting at position 2249 of SEQ ID NO: 585014
uuuguaucaguugauaaga

SEQ ID NO: 606733 - RNA, 19 nt, Artificial Sequence
  Description of Artificial Sequence: Synthetic oligonucleotide
  Antisense strand to SEQ ID NO: 606732
ucuuaucaacugauacaaa

SEQ ID NO: 606734 - RNA, 19 nt, Artificial Sequence
  Description of Artificial Sequence: Synthetic oligonucleotide
  Sense strand starting at position 2334 of SEQ ID NO: 585014
uggguuccagcuuacucaa

SEQ ID NO: 606735 - RNA, 19 nt, Artificial Sequence
  Description of Artificial Sequence: Synthetic oligonucleotide
  Antisense strand to SEQ ID NO: 606734
uugaguaagcuggaaccca

SEQ ID NO: 606736 - RNA, 19 nt, Artificial Sequence
  Description of Artificial Sequence: Synthetic oligonucleotide
  Sense strand starting at position 2370 of SEQ ID NO: 585014
guaauugcccaauauagca

SEQ ID NO: 606737 - RNA, 19 nt, Artificial Sequence
  Description of Artificial Sequence: Synthetic oligonucleotide
  Antisense strand to SEQ ID NO: 606736
ugcuauauugggcaauuac

SEQ ID NO: 606738 - RNA, 19 nt, Artificial Sequence
  Description of Artificial Sequence: Synthetic oligonucleotide
  Sense strand starting at position 3793 of SEQ ID NO: 585014
ggcauaggugauugcauga

SEQ ID NO: 606739 - RNA, 19 nt, Artificial Sequence
  Description of Artificial Sequence: Synthetic oligonucleotide
  Antisense strand to SEQ ID NO: 606738
ucaugcaaucaccuaugcc

SEQ ID NO: 606740 - RNA, 19 nt, Artificial Sequence
  Description of Artificial Sequence: Synthetic oligonucleotide
  Sense strand starting at position 3798 of SEQ ID NO: 585014
aggugauugcaugagcaaa

SEQ ID NO: 606741 - RNA, 19 nt, Artificial Sequence
  Description of Artificial Sequence: Synthetic oligonucleotide
  Antisense strand to SEQ ID NO: 606740
uuugcucaugcaaucaccu

SEQ ID NO: 606742 - RNA, 19 nt, Artificial Sequence
  Description of Artificial Sequence: Synthetic oligonucleotide
  Sense strand starting at position 3800 of SEQ ID NO: 585014
gugauugcaugagcaaauc

SEQ ID NO: 606743 - RNA, 19 nt, Artificial Sequence
  Description of Artificial Sequence: Synthetic oligonucleotide
  Antisense strand to SEQ ID NO: 606742
gauuugcucaugcaaucac

SEQ ID NO: 606744 - RNA, 19 nt, Artificial Sequence
  Description of Artificial Sequence: Synthetic oligonucleotide
  Sense strand starting at position 3842 of SEQ ID NO: 585014
uugucaucacuuuagauga

SEQ ID NO: 606745 - RNA, 19 nt, Artificial Sequence
  Description of Artificial Sequence: Synthetic oligonucleotide
  Antisense strand to SEQ ID NO: 606744
ucaucuaaagugaugacaa

SEQ ID NO: 606746 - RNA, 19 nt, Artificial Sequence
  Description of Artificial Sequence: Synthetic oligonucleotide
  Sense strand starting at position 3853 of SEQ ID NO: 585014
uuagaugagaugugugcau

SEQ ID NO: 606747 - RNA, 19 nt, Artificial Sequence
  Description of Artificial Sequence: Synthetic oligonucleotide
  Antisense strand to SEQ ID NO: 606746
augcacacaucucaucuaa

SEQ ID NO: 606748 - RNA, 19 nt, Artificial Sequence
  Description of Artificial Sequence: Synthetic oligonucleotide
  Sense strand starting at position 3857 of SEQ ID NO: 585014
augagaugugugcaugguu

SEQ ID NO: 606749 - RNA, 19 nt, Artificial Sequence
  Description of Artificial Sequence: Synthetic oligonucleotide
  Antisense strand to SEQ ID NO: 606748
aaccaugcacacaucucau

SEQ ID NO: 606750 - RNA, 19 nt, Artificial Sequence
  Description of Artificial Sequence: Synthetic oligonucleotide
  Sense strand starting at position 3860 of SEQ ID NO: 585014
agaugugugcaugguuauu

SEQ ID NO: 606751 - RNA, 19 nt, Artificial Sequence
  Description of Artificial Sequence: Synthetic oligonucleotide
  Antisense strand to SEQ ID NO: 606750
aauaaccaugcacacaucu

SEQ ID NO: 606752 - RNA, 19 nt, Artificial Sequence
  Description of Artificial Sequence: Synthetic oligonucleotide
  Sense strand starting at position 3862 of SEQ ID NO: 585014
augugugcaugguuauuau

SEQ ID NO: 606753 - RNA, 19 nt, Artificial Sequence
  Description of Artificial Sequence: Synthetic oligonucleotide
  Antisense strand to SEQ ID NO: 606752
auaauaaccaugcacacau

SEQ ID NO: 606754 - RNA, 19 nt, Artificial Sequence
  Description of Artificial Sequence: Synthetic oligonucleotide
  Sense strand starting at position 3881 of SEQ ID NO: 585014
cucagauguuaaguuuaac

SEQ ID NO: 606755 - RNA, 19 nt, Artificial Sequence
  Description of Artificial Sequence: Synthetic oligonucleotide
  Antisense strand to SEQ ID NO: 606754
guuaaacuuaacaucugag

SEQ ID NO: 606756 - RNA, 19 nt, Artificial Sequence
  Description of Artificial Sequence: Synthetic oligonucleotide
  Sense strand starting at position 3887 of SEQ ID NO: 585014
uguuaaguuuaacugacuu

SEQ ID NO: 606757 - RNA, 19 nt, Artificial Sequence
  Description of Artificial Sequence: Synthetic oligonucleotide
  Antisense strand to SEQ ID NO: 606756
aagucaguuaaacuuaaca

SEQ ID NO: 606758 - RNA, 19 nt, Artificial Sequence
  Description of Artificial Sequence: Synthetic oligonucleotide
  Sense strand starting at position 188 of SEQ ID NO: 585015
aguauugauguaugauaca

SEQ ID NO: 606759 - RNA, 19 nt, Artificial Sequence
  Description of Artificial Sequence: Synthetic oligonucleotide
  Antisense strand to SEQ ID NO: 606758
uguaucauacaucaauacu

SEQ ID NO: 606760 - RNA, 19 nt, Artificial Sequence
  Description of Artificial Sequence: Synthetic oligonucleotide
  Sense strand starting at position 191 of SEQ ID NO: 585015
auugauguaugauacaaca

SEQ ID NO: 606761 - RNA, 19 nt, Artificial Sequence
  Description of Artificial Sequence: Synthetic oligonucleotide
  Antisense strand to SEQ ID NO: 606760
uguuguaucauacaucaau

SEQ ID NO: 606762 - RNA, 19 nt, Artificial Sequence
  Description of Artificial Sequence: Synthetic oligonucleotide
  Sense strand starting at position 226 of SEQ ID NO: 585015
auguuacaguaagugaaau

SEQ ID NO: 606763 - RNA, 19 nt, Artificial Sequence
  Description of Artificial Sequence: Synthetic oligonucleotide
  Antisense strand to SEQ ID NO: 606762
auuucacuuacuguaacau

SEQ ID NO: 606764 - RNA, 19 nt, Artificial Sequence
  Description of Artificial Sequence: Synthetic oligonucleotide
  Sense strand starting at position 259 of SEQ ID NO: 585015
gaccauauaccguaugauu

SEQ ID NO: 606765 - RNA, 19 nt, Artificial Sequence
  Description of Artificial Sequence: Synthetic oligonucleotide
  Antisense strand to SEQ ID NO: 606764
aaucauacgguauaugguc

SEQ ID NO: 606766 - RNA, 19 nt, Artificial Sequence
  Description of Artificial Sequence: Synthetic oligonucleotide
  Sense strand starting at position 329 of SEQ ID NO: 585015
auuagugguuuccagauga

SEQ ID NO: 606767 - RNA, 19 nt, Artificial Sequence
  Description of Artificial Sequence: Synthetic oligonucleotide
  Antisense strand to SEQ ID NO: 606766
ucaucuggaaaccacuaau

SEQ ID NO: 606768 - RNA, 19 nt, Artificial Sequence
  Description of Artificial Sequence: Synthetic oligonucleotide
  Sense strand starting at position 407 of SEQ ID NO: 585015
acaauuaguugguggugau

SEQ ID NO: 606769 - RNA, 19 nt, Artificial Sequence
  Description of Artificial Sequence: Synthetic oligonucleotide
  Antisense strand to SEQ ID NO: 606768
aucaccaccaacuaauugu

SEQ ID NO: 606770 - RNA, 19 nt, Artificial Sequence
  Description of Artificial Sequence: Synthetic oligonucleotide
  Sense strand starting at position 455 of SEQ ID NO: 585015
caaugaaaugguuggacuu

SEQ ID NO: 606771 - RNA, 19 nt, Artificial Sequence
  Description of Artificial Sequence: Synthetic oligonucleotide
  Antisense strand to SEQ ID NO: 606770
aaguccaaccauuucauug

SEQ ID NO: 606772 - RNA, 19 nt, Artificial Sequence
  Description of Artificial Sequence: Synthetic oligonucleotide
  Sense strand starting at position 599 of SEQ ID NO: 585015
augcacauaucccuuugua

SEQ ID NO: 606773 - RNA, 19 nt, Artificial Sequence
  Description of Artificial Sequence: Synthetic oligonucleotide
  Antisense strand to SEQ ID NO: 606772
uacaaagggauaugugcau

SEQ ID NO: 606774 - RNA, 19 nt, Artificial Sequence
  Description of Artificial Sequence: Synthetic oligonucleotide
  Sense strand starting at position 609 of SEQ ID NO: 585015
cccuuuguagcuugcauua

SEQ ID NO: 606775 - RNA, 19 nt, Artificial Sequence
  Description of Artificial Sequence: Synthetic oligonucleotide
  Antisense strand to SEQ ID NO: 606774
uaaugcaagcuacaaaggg

SEQ ID NO: 606776 - RNA, 19 nt, Artificial Sequence
  Description of Artificial Sequence: Synthetic oligonucleotide
  Sense strand starting at position 611 of SEQ ID NO: 585015
cuuuguagcuugcauuaaa

SEQ ID NO: 606777 - RNA, 19 nt, Artificial Sequence
  Description of Artificial Sequence: Synthetic oligonucleotide
  Antisense strand to SEQ ID NO: 606776
uuuaaugcaagcuacaaag

SEQ ID NO: 606778 - RNA, 19 nt, Artificial Sequence
  Description of Artificial Sequence: Synthetic oligonucleotide
  Sense strand starting at position 629 of SEQ ID NO: 585015
aauuguuagugugcaggua

SEQ ID NO: 606779 - RNA, 19 nt, Artificial Sequence
  Description of Artificial Sequence: Synthetic oligonucleotide
  Antisense strand to SEQ ID NO: 606778
uaccugcacacuaacaauu

SEQ ID NO: 606780 - RNA, 19 nt, Artificial Sequence
  Description of Artificial Sequence: Synthetic oligonucleotide
  Sense strand starting at position 658 of SEQ ID NO: 585015
acugaaagcuccuaaagac

SEQ ID NO: 606781 - RNA, 19 nt, Artificial Sequence
  Description of Artificial Sequence: Synthetic oligonucleotide
  Antisense strand to SEQ ID NO: 606780
gucuuuaggagcuuucagu

SEQ ID NO: 606782 - RNA, 19 nt, Artificial Sequence
  Description of Artificial Sequence: Synthetic oligonucleotide
  Sense strand starting at position 679 of SEQ ID NO: 585015
ggaaucaugccuugcucau

SEQ ID NO: 606783 - RNA, 19 nt, Artificial Sequence
  Description of Artificial Sequence: Synthetic oligonucleotide
  Antisense strand to SEQ ID NO: 606782
augagcaaggcaugauucc

SEQ ID NO: 606784 - RNA, 19 nt, Artificial Sequence
  Description of Artificial Sequence: Synthetic oligonucleotide
  Sense strand starting at position 696 of SEQ ID NO: 585015
aucuuuguucccugaacug

SEQ ID NO: 606785 - RNA, 19 nt, Artificial Sequence
  Description of Artificial Sequence: Synthetic oligonucleotide
  Antisense strand to SEQ ID NO: 606784
caguucagggaacaaagau

SEQ ID NO: 606786 - RNA, 19 nt, Artificial Sequence
  Description of Artificial Sequence: Synthetic oligonucleotide
  Sense strand starting at position 710 of SEQ ID NO: 585015
aacugacgguuucuuaauu

SEQ ID NO: 606787 - RNA, 19 nt, Artificial Sequence
  Description of Artificial Sequence: Synthetic oligonucleotide
  Antisense strand to SEQ ID NO: 606786
aauuaagaaaccgucaguu

SEQ ID NO: 606788 - RNA, 19 nt, Artificial Sequence
  Description of Artificial Sequence: Synthetic oligonucleotide
  Sense strand starting at position 733 of SEQ ID NO: 585015
gaacacucacuaugaguga

SEQ ID NO: 606789 - RNA, 19 nt, Artificial Sequence
  Description of Artificial Sequence: Synthetic oligonucleotide
  Antisense strand to SEQ ID NO: 606788
ucacucauagugaguguuc

SEQ ID NO: 606790 - RNA, 19 nt, Artificial Sequence
  Description of Artificial Sequence: Synthetic oligonucleotide
  Sense strand starting at position 750 of SEQ ID NO: 585015
gagcucaagagcugggaau

SEQ ID NO: 606791 - RNA, 19 nt, Artificial Sequence
  Description of Artificial Sequence: Synthetic oligonucleotide
  Antisense strand to SEQ ID NO: 606790
auucccagcucuugagcuc

SEQ ID NO: 606792 - RNA, 19 nt, Artificial Sequence
  Description of Artificial Sequence: Synthetic oligonucleotide
  Sense strand starting at position 751 of SEQ ID NO: 585015
agcucaagagcugggaaua

SEQ ID NO: 606793 - RNA, 19 nt, Artificial Sequence
  Description of Artificial Sequence: Synthetic oligonucleotide
  Antisense strand to SEQ ID NO: 606792
uauucccagcucuugagcu

SEQ ID NO: 606794 - RNA, 19 nt, Artificial Sequence
  Description of Artificial Sequence: Synthetic oligonucleotide
  Sense strand starting at position 752 of SEQ ID NO: 585015
gcucaagagcugggaauaa

SEQ ID NO: 606795 - RNA, 19 nt, Artificial Sequence
  Description of Artificial Sequence: Synthetic oligonucleotide
  Antisense strand to SEQ ID NO: 606794
uuauucccagcucuugagc

SEQ ID NO: 606796 - RNA, 19 nt, Artificial Sequence
  Description of Artificial Sequence: Synthetic oligonucleotide
  Sense strand starting at position 789 of SEQ ID NO: 585015
gucuaaucacguugcugga

SEQ ID NO: 606797 - RNA, 19 nt, Artificial Sequence
  Description of Artificial Sequence: Synthetic oligonucleotide
  Antisense strand to SEQ ID NO: 606796
uccagcaacgugauuagac

SEQ ID NO: 606798 - RNA, 19 nt, Artificial Sequence
  Description of Artificial Sequence: Synthetic oligonucleotide
  Sense strand starting at position 850 of SEQ ID NO: 585015
gcauuaugcuaacagcaua

SEQ ID NO: 606799 - RNA, 19 nt, Artificial Sequence
  Description of Artificial Sequence: Synthetic oligonucleotide
  Antisense strand to SEQ ID NO: 606798
uaugcuguuagcauaaugc

SEQ ID NO: 606800 - RNA, 19 nt, Artificial Sequence
  Description of Artificial Sequence: Synthetic oligonucleotide
  Sense strand starting at position 2217 of SEQ ID NO: 585015
gcaauuaaguuccuggaug

SEQ ID NO: 606801 - RNA, 19 nt, Artificial Sequence
  Description of Artificial Sequence: Synthetic oligonucleotide
  Antisense strand to SEQ ID NO: 606800
cauccaggaacuuaauugc

SEQ ID NO: 606802 - RNA, 19 nt, Artificial Sequence
  Description of Artificial Sequence: Synthetic oligonucleotide
  Sense strand starting at position 2218 of SEQ ID NO: 585015
caauuaaguuccuggaugu

SEQ ID NO: 606803 - RNA, 19 nt, Artificial Sequence
  Description of Artificial Sequence: Synthetic oligonucleotide
  Antisense strand to SEQ ID NO: 606802
acauccaggaacuuaauug

SEQ ID NO: 606804 - RNA, 19 nt, Artificial Sequence
  Description of Artificial Sequence: Synthetic oligonucleotide
  Sense strand starting at position 2219 of SEQ ID NO: 585015
aauuaaguuccuggaugua

SEQ ID NO: 606805 - RNA, 19 nt, Artificial Sequence
  Description of Artificial Sequence: Synthetic oligonucleotide
  Antisense strand to SEQ ID NO: 606804
uacauccaggaacuuaauu

SEQ ID NO: 606806 - RNA, 19 nt, Artificial Sequence
  Description of Artificial Sequence: Synthetic oligonucleotide
  Sense strand starting at position 2222 of SEQ ID NO: 585015
uaaguuccuggauguaguu

SEQ ID NO: 606807 - RNA, 19 nt, Artificial Sequence
  Description of Artificial Sequence: Synthetic oligonucleotide
  Antisense strand to SEQ ID NO: 606806
aacuacauccaggaacuua

SEQ ID NO: 606808 - RNA, 19 nt, Artificial Sequence
  Description of Artificial Sequence: Synthetic oligonucleotide
  Sense strand starting at position 2231 of SEQ ID NO: 585015
ggauguaguugcccagguu

SEQ ID NO: 606809 - RNA, 19 nt, Artificial Sequence
  Description of Artificial Sequence: Synthetic oligonucleotide
  Antisense strand to SEQ ID NO: 606808
aaccugggcaacuacaucc

SEQ ID NO: 606810 - RNA, 19 nt, Artificial Sequence
  Description of Artificial Sequence: Synthetic oligonucleotide
  Sense strand starting at position 2232 of SEQ ID NO: 585015
gauguaguugcccagguuu

SEQ ID NO: 606811 - RNA, 19 nt, Artificial Sequence
  Description of Artificial Sequence: Synthetic oligonucleotide
  Antisense strand to SEQ ID NO: 606810
aaaccugggcaacuacauc

SEQ ID NO: 606812 - RNA, 19 nt, Artificial Sequence
  Description of Artificial Sequence: Synthetic oligonucleotide
  Sense strand starting at position 2258 of SEQ ID NO: 585015
cuggaagauaaaugugcaa

SEQ ID NO: 606813 - RNA, 19 nt, Artificial Sequence
  Description of Artificial Sequence: Synthetic oligonucleotide
  Antisense strand to SEQ ID NO: 606812
uugcacauuuaucuuccag

SEQ ID NO: 606814 - RNA, 19 nt, Artificial Sequence
  Description of Artificial Sequence: Synthetic oligonucleotide
  Sense strand starting at position 2287 of SEQ ID NO: 585015
gguggcuuacgccugcaaa

SEQ ID NO: 606815 - RNA, 19 nt, Artificial Sequence
  Description of Artificial Sequence: Synthetic oligonucleotide
  Antisense strand to SEQ ID NO: 606814
uuugcaggcguaagccacc

SEQ ID NO: 606816 - RNA, 19 nt, Artificial Sequence
  Description of Artificial Sequence: Synthetic oligonucleotide
  Sense strand starting at position 2288 of SEQ ID NO: 585015
guggcuuacgccugcaaau

SEQ ID NO: 606817 - RNA, 19 nt, Artificial Sequence
  Description of Artificial Sequence: Synthetic oligonucleotide
  Antisense strand to SEQ ID NO: 606816
auuugcaggcguaagccac

SEQ ID NO: 606818 - RNA, 19 nt, Artificial Sequence
  Description of Artificial Sequence: Synthetic oligonucleotide
  Sense strand starting at position 2394 of SEQ ID NO: 585015
ucuauaacgcgccugugau

SEQ ID NO: 606819 - RNA, 19 nt, Artificial Sequence
  Description of Artificial Sequence: Synthetic oligonucleotide
  Antisense strand to SEQ ID NO: 606818
aucacaggcgcguuauaga

SEQ ID NO: 606820 - RNA, 19 nt, Artificial Sequence
  Description of Artificial Sequence: Synthetic oligonucleotide
  Sense strand starting at position 2395 of SEQ ID NO: 585015
cuauaacgcgccugugauc

SEQ ID NO: 606821 - RNA, 19 nt, Artificial Sequence
  Description of Artificial Sequence: Synthetic oligonucleotide
  Antisense strand to SEQ ID NO: 606820
gaucacaggcgcguuauag

SEQ ID NO: 606822 - RNA, 19 nt, Artificial Sequence
  Description of Artificial Sequence: Synthetic oligonucleotide
  Sense strand starting at position 2442 of SEQ ID NO: 585015
ugacccggucucuacaauu

SEQ ID NO: 606823 - RNA, 19 nt, Artificial Sequence
  Description of Artificial Sequence: Synthetic oligonucleotide
  Antisense strand to SEQ ID NO: 606822
aauuguagagaccggguca

SEQ ID NO: 606824 - RNA, 19 nt, Artificial Sequence
  Description of Artificial Sequence: Synthetic oligonucleotide
  Sense strand starting at position 2494 of SEQ ID NO: 585015
aggguauucgccuguggac

SEQ ID NO: 606825 - RNA, 19 nt, Artificial Sequence
  Description of Artificial Sequence: Synthetic oligonucleotide
  Antisense strand to SEQ ID NO: 606824
guccacaggcgaauacccu

SEQ ID NO: 606826 - RNA, 19 nt, Artificial Sequence
  Description of Artificial Sequence: Synthetic oligonucleotide
  Sense strand starting at position 3749 of SEQ ID NO: 585015
gcgaagacucgcgugucua

SEQ ID NO: 606827 - RNA, 19 nt, Artificial Sequence
  Description of Artificial Sequence: Synthetic oligonucleotide
  Antisense strand to SEQ ID NO: 606826
uagacacgcgagucuucgc

SEQ ID NO: 606828 - RNA, 19 nt, Artificial Sequence
  Description of Artificial Sequence: Synthetic oligonucleotide
  Sense strand starting at position 3750 of SEQ ID NO: 585015
cgaagacucgcgugucuag

SEQ ID NO: 606829 - RNA, 19 nt, Artificial Sequence
  Description of Artificial Sequence: Synthetic oligonucleotide
  Antisense strand to SEQ ID NO: 606828
cuagacacgcgagucuucg

SEQ ID NO: 606830 - RNA, 19 nt, Artificial Sequence
  Description of Artificial Sequence: Synthetic oligonucleotide
  Sense strand starting at position 188 of SEQ ID NO: 585016
ggaacguguccgccacgau

SEQ ID NO: 606831 - RNA, 19 nt, Artificial Sequence
  Description of Artificial Sequence: Synthetic oligonucleotide
  Antisense strand to SEQ ID NO: 606830
aucguggcggacacguucc

SEQ ID NO: 606832 - RNA, 19 nt, Artificial Sequence
  Description of Artificial Sequence: Synthetic oligonucleotide
  Sense strand starting at position 215 of SEQ ID NO: 585016
cucggugauugguccauuu

SEQ ID NO: 606833 - RNA, 19 nt, Artificial Sequence
  Description of Artificial Sequence: Synthetic oligonucleotide
  Antisense strand to SEQ ID NO: 606832
aaauggaccaaucaccgag

SEQ ID NO: 606834 - RNA, 19 nt, Artificial Sequence
  Description of Artificial Sequence: Synthetic oligonucleotide
  Sense strand starting at position 290 of SEQ ID NO: 585016
gcgggagugaguuagaaac

SEQ ID NO: 606835 - RNA, 19 nt, Artificial Sequence
  Description of Artificial Sequence: Synthetic oligonucleotide
  Antisense strand to SEQ ID NO: 606834
guuucuaacucacucccgc

SEQ ID NO: 606836 - RNA, 19 nt, Artificial Sequence
  Description of Artificial Sequence: Synthetic oligonucleotide
  Sense strand starting at position 292 of SEQ ID NO: 585016
gggagugaguuagaaacaa

SEQ ID NO: 606837 - RNA, 19 nt, Artificial Sequence
  Description of Artificial Sequence: Synthetic oligonucleotide
  Antisense strand to SEQ ID NO: 606836
uuguuucuaacucacuccc

SEQ ID NO: 606838 - RNA, 19 nt, Artificial Sequence
  Description of Artificial Sequence: Synthetic oligonucleotide
  Sense strand starting at position 412 of SEQ ID NO: 585016
cgcguucucgucuccuauu

SEQ ID NO: 606839 - RNA, 19 nt, Artificial Sequence
  Description of Artificial Sequence: Synthetic oligonucleotide
  Antisense strand to SEQ ID NO: 606838
aauaggagacgagaacgcg

SEQ ID NO: 606840 - RNA, 19 nt, Artificial Sequence
  Description of Artificial Sequence: Synthetic oligonucleotide
  Sense strand starting at position 413 of SEQ ID NO: 585016
gcguucucgucuccuauuu

SEQ ID NO: 606841 - RNA, 19 nt, Artificial Sequence
  Description of Artificial Sequence: Synthetic oligonucleotide
  Antisense strand to SEQ ID NO: 606840
aaauaggagacgagaacgc

SEQ ID NO: 606842 - RNA, 19 nt, Artificial Sequence
  Description of Artificial Sequence: Synthetic oligonucleotide
  Sense strand starting at position 471 of SEQ ID NO: 585016
cuccaucgaccuuaggaua

SEQ ID NO: 606843 - RNA, 19 nt, Artificial Sequence
  Description of Artificial Sequence: Synthetic oligonucleotide
  Antisense strand to SEQ ID NO: 606842
uauccuaaggucgauggag

SEQ ID NO: 606844 - RNA, 19 nt, Artificial Sequence
  Description of Artificial Sequence: Synthetic oligonucleotide
  Sense strand starting at position 728 of SEQ ID NO: 585016
ccagucguugccucaguuu

SEQ ID NO: 606845 - RNA, 19 nt, Artificial Sequence
  Description of Artificial Sequence: Synthetic oligonucleotide
  Antisense strand to SEQ ID NO: 606844
aaacugaggcaacgacugg

SEQ ID NO: 606846 - RNA, 19 nt, Artificial Sequence
  Description of Artificial Sequence: Synthetic oligonucleotide
  Sense strand starting at position 769 of SEQ ID NO: 585016
cuuugagcuuuggccagau

SEQ ID NO: 606847 - RNA, 19 nt, Artificial Sequence
  Description of Artificial Sequence: Synthetic oligonucleotide
  Antisense strand to SEQ ID NO: 606846
aucuggccaaagcucaaag

SEQ ID NO: 606848 - RNA, 19 nt, Artificial Sequence
  Description of Artificial Sequence: Synthetic oligonucleotide
  Sense strand starting at position 953 of SEQ ID NO: 585016
ucaccugucugggagaaga

SEQ ID NO: 606849 - RNA, 19 nt, Artificial Sequence
  Description of Artificial Sequence: Synthetic oligonucleotide
  Antisense strand to SEQ ID NO: 606848
ucuucucccagacagguga

SEQ ID NO: 606850 - RNA, 19 nt, Artificial Sequence
  Description of Artificial Sequence: Synthetic oligonucleotide
  Sense strand starting at position 1137 of SEQ ID NO: 585016
gggucagauucuuuaagag

SEQ ID NO: 606851 - RNA, 19 nt, Artificial Sequence
  Description of Artificial Sequence: Synthetic oligonucleotide
  Antisense strand to SEQ ID NO: 606850
cucuuaaagaaucugaccc

SEQ ID NO: 606852 - RNA, 19 nt, Artificial Sequence
  Description of Artificial Sequence: Synthetic oligonucleotide
  Sense strand starting at position 1461 of SEQ ID NO: 585016
agccuaaggaguuaagcau

SEQ ID NO: 606853 - RNA, 19 nt, Artificial Sequence
  Description of Artificial Sequence: Synthetic oligonucleotide
  Antisense strand to SEQ ID NO: 606852
augcuuaacuccuuaggcu

SEQ ID NO: 606854 - RNA, 19 nt, Artificial Sequence
  Description of Artificial Sequence: Synthetic oligonucleotide
  Sense strand starting at position 1510 of SEQ ID NO: 585016
ccuagcgcgaccuaguaua

SEQ ID NO: 606855 - RNA, 19 nt, Artificial Sequence
  Description of Artificial Sequence: Synthetic oligonucleotide
  Antisense strand to SEQ ID NO: 606854
uauacuaggucgcgcuagg

SEQ ID NO: 606856 - RNA, 19 nt, Artificial Sequence
  Description of Artificial Sequence: Synthetic oligonucleotide
  Sense strand starting at position 1981 of SEQ ID NO: 585016
gggcauugucuaagcggga

SEQ ID NO: 606857 - RNA, 19 nt, Artificial Sequence
  Description of Artificial Sequence: Synthetic oligonucleotide
  Antisense strand to SEQ ID NO: 606856
ucccgcuuagacaaugccc

SEQ ID NO: 606858 - RNA, 19 nt, Artificial Sequence
  Description of Artificial Sequence: Synthetic oligonucleotide
  Sense strand starting at position 2146 of SEQ ID NO: 585016
gcugcaaacgcuucguaga

SEQ ID NO: 606859 - RNA, 19 nt, Artificial Sequence
  Description of Artificial Sequence: Synthetic oligonucleotide
  Antisense strand to SEQ ID NO: 606858
ucuacgaagcguuugcagc

SEQ ID NO: 606860 - RNA, 19 nt, Artificial Sequence
  Description of Artificial Sequence: Synthetic oligonucleotide
  Sense strand starting at position 2156 of SEQ ID NO: 585016
cuucguagaccucagaaca

SEQ ID NO: 606861 - RNA, 19 nt, Artificial Sequence
  Description of Artificial Sequence: Synthetic oligonucleotide
  Antisense strand to SEQ ID NO: 606860
uguucugaggucuacgaag

SEQ ID NO: 606862 - RNA, 19 nt, Artificial Sequence
  Description of Artificial Sequence: Synthetic oligonucleotide
  Sense strand starting at position 2255 of SEQ ID NO: 585016
cccugagcucaagaucacu

SEQ ID NO: 606863 - RNA, 19 nt, Artificial Sequence
  Description of Artificial Sequence: Synthetic oligonucleotide
  Antisense strand to SEQ ID NO: 606862
agugaucuugagcucaggg

SEQ ID NO: 606864 - RNA, 19 nt, Artificial Sequence
  Description of Artificial Sequence: Synthetic oligonucleotide
  Sense strand starting at position 2356 of SEQ ID NO: 585016
ugaaauauguuguccuacu

SEQ ID NO: 606865 - RNA, 19 nt, Artificial Sequence
  Description of Artificial Sequence: Synthetic oligonucleotide
  Antisense strand to SEQ ID NO: 606864
aguaggacaacauauuuca

SEQ ID NO: 606866 - RNA, 19 nt, Artificial Sequence
  Description of Artificial Sequence: Synthetic oligonucleotide
  Sense strand starting at position 2452 of SEQ ID NO: 585016
gaacaagugcuccaggauu

SEQ ID NO: 606867 - RNA, 19 nt, Artificial Sequence
  Description of Artificial Sequence: Synthetic oligonucleotide
  Antisense strand to SEQ ID NO: 606866
aauccuggagcacuuguuc

SEQ ID NO: 606868 - RNA, 19 nt, Artificial Sequence
  Description of Artificial Sequence: Synthetic oligonucleotide
  Sense strand starting at position 2574 of SEQ ID NO: 585016
ggcuuauuugagggccuuu

SEQ ID NO: 606869 - RNA, 19 nt, Artificial Sequence
  Description of Artificial Sequence: Synthetic oligonucleotide
  Antisense strand to SEQ ID NO: 606868
aaaggcccucaaauaagcc

SEQ ID NO: 606870 - RNA, 19 nt, Artificial Sequence
  Description of Artificial Sequence: Synthetic oligonucleotide
  Sense strand starting at position 2612 of SEQ ID NO: 585016
gcucgaucuccucaucauc

SEQ ID NO: 606871 - RNA, 19 nt, Artificial Sequence
  Description of Artificial Sequence: Synthetic oligonucleotide
  Antisense strand to SEQ ID NO: 606870
gaugaugaggagaucgagc

SEQ ID NO: 606872 - RNA, 19 nt, Artificial Sequence
  Description of Artificial Sequence: Synthetic oligonucleotide
  Sense strand starting at position 2843 of SEQ ID NO: 585016
cugucuuguacugucguua

SEQ ID NO: 606873 - RNA, 19 nt, Artificial Sequence
  Description of Artificial Sequence: Synthetic oligonucleotide
  Antisense strand to SEQ ID NO: 606872
uaacgacaguacaagacag

SEQ ID NO: 606874 - RNA, 19 nt, Artificial Sequence
  Description of Artificial Sequence: Synthetic oligonucleotide
  Sense strand starting at position 3469 of SEQ ID NO: 585016
uacauaguuguguggcaga

SEQ ID NO: 606875 - RNA, 19 nt, Artificial Sequence
  Description of Artificial Sequence: Synthetic oligonucleotide
  Antisense strand to SEQ ID NO: 606874
ucugccacacaacuaugua

SEQ ID NO: 606876 - RNA, 19 nt, Artificial Sequence
  Description of Artificial Sequence: Synthetic oligonucleotide
  Sense strand starting at position 3474 of SEQ ID NO: 585016
aguuguguggcagacugau

SEQ ID NO: 606877 - RNA, 19 nt, Artificial Sequence
  Description of Artificial Sequence: Synthetic oligonucleotide
  Antisense strand to SEQ ID NO: 606876
aucagucugccacacaacu

SEQ ID NO: 606878 - RNA, 19 nt, Artificial Sequence
  Description of Artificial Sequence: Synthetic oligonucleotide
  Sense strand starting at position 3498 of SEQ ID NO: 585016
gcccauguugcacaaacua

SEQ ID NO: 606879 - RNA, 19 nt, Artificial Sequence
  Description of Artificial Sequence: Synthetic oligonucleotide
  Antisense strand to SEQ ID NO: 606878
uaguuugugcaacaugggc

SEQ ID NO: 606880 - RNA, 19 nt, Artificial Sequence
  Description of Artificial Sequence: Synthetic oligonucleotide
  Sense strand starting at position 3578 of SEQ ID NO: 585016
ggaagugaagacugaaguu

SEQ ID NO: 606881 - RNA, 19 nt, Artificial Sequence
  Description of Artificial Sequence: Synthetic oligonucleotide
  Antisense strand to SEQ ID NO: 606880
aacuucagucuucacuucc

SEQ ID NO: 606882 - RNA, 19 nt, Artificial Sequence
  Description of Artificial Sequence: Synthetic oligonucleotide
  Sense strand starting at position 3633 of SEQ ID NO: 585016
ugcucugucuaaucuggga

SEQ ID NO: 606883 - RNA, 19 nt, Artificial Sequence
  Description of Artificial Sequence: Synthetic oligonucleotide
  Antisense strand to SEQ ID NO: 606882
ucccagauuagacagagca

SEQ ID NO: 606884 - RNA, 19 nt, Artificial Sequence
  Description of Artificial Sequence: Synthetic oligonucleotide
  Sense strand starting at position 3638 of SEQ ID NO: 585016
ugucuaaucugggaauuug

SEQ ID NO: 606885 - RNA, 19 nt, Artificial Sequence
  Description of Artificial Sequence: Synthetic oligonucleotide
  Antisense strand to SEQ ID NO: 606884
caaauucccagauuagaca

SEQ ID NO: 606886 - RNA, 19 nt, Artificial Sequence
  Description of Artificial Sequence: Synthetic oligonucleotide
  Sense strand starting at position 3646 of SEQ ID NO: 585016
cugggaauuuggcagugau

SEQ ID NO: 606887 - RNA, 19 nt, Artificial Sequence
  Description of Artificial Sequence: Synthetic oligonucleotide
  Antisense strand to SEQ ID NO: 606886
aucacugccaaauucccag

SEQ ID NO: 606888 - RNA, 19 nt, Artificial Sequence
  Description of Artificial Sequence: Synthetic oligonucleotide
  Sense strand starting at position 3690 of SEQ ID NO: 585016
aaaguaauacugggaugua

SEQ ID NO: 606889 - RNA, 19 nt, Artificial Sequence
  Description of Artificial Sequence: Synthetic oligonucleotide
  Antisense strand to SEQ ID NO: 606888
uacaucccaguauuacuuu

SEQ ID NO: 606890 - RNA, 19 nt, Artificial Sequence
  Description of Artificial Sequence: Synthetic oligonucleotide
  Sense strand starting at position 3693 of SEQ ID NO: 585016
guaauacugggauguauuc

SEQ ID NO: 606891 - RNA, 19 nt, Artificial Sequence
  Description of Artificial Sequence: Synthetic oligonucleotide
  Antisense strand to SEQ ID NO: 606890
gaauacaucccaguauuac

SEQ ID NO: 606892 - RNA, 19 nt, Artificial Sequence
  Description of Artificial Sequence: Synthetic oligonucleotide
  Sense strand starting at position 3771 of SEQ ID NO: 585016
guggucuuguuagcaauga

SEQ ID NO: 606893 - RNA, 19 nt, Artificial Sequence
  Description of Artificial Sequence: Synthetic oligonucleotide
  Antisense strand to SEQ ID NO: 606892
ucauugcuaacaagaccac

SEQ ID NO: 606894 - RNA, 19 nt, Artificial Sequence
  Description of Artificial Sequence: Synthetic oligonucleotide
  Sense strand starting at position 3816 of SEQ ID NO: 585016
ugccauugguagcaauuua

SEQ ID NO: 606895 - RNA, 19 nt, Artificial Sequence
  Description of Artificial Sequence: Synthetic oligonucleotide
  Antisense strand to SEQ ID NO: 606894
uaaauugcuaccaauggca

SEQ ID NO: 606896 - RNA, 19 nt, Artificial Sequence
  Description of Artificial Sequence: Synthetic oligonucleotide
  Sense strand starting at position 3852 of SEQ ID NO: 585016
aagaaaucgucuuuagagu

SEQ ID NO: 606897 - RNA, 19 nt, Artificial Sequence
  Description of Artificial Sequence: Synthetic oligonucleotide
  Antisense strand to SEQ ID NO: 606896
acucuaaagacgauuucuu

SEQ ID NO: 606898 - RNA, 19 nt, Artificial Sequence
  Description of Artificial Sequence: Synthetic oligonucleotide
  Sense strand starting at position 3853 of SEQ ID NO: 585016
agaaaucgucuuuagagug

SEQ ID NO: 606899 - RNA, 19 nt, Artificial Sequence
  Description of Artificial Sequence: Synthetic oligonucleotide
  Antisense strand to SEQ ID NO: 606898
cacucuaaagacgauuucu

SEQ ID NO: 606900 - RNA, 19 nt, Artificial Sequence
  Description of Artificial Sequence: Synthetic oligonucleotide
  Sense strand starting at position 3861 of SEQ ID NO: 585016
ucuuuagagugguugucag

SEQ ID NO: 606901 - RNA, 19 nt, Artificial Sequence
  Description of Artificial Sequence: Synthetic oligonucleotide
  Antisense strand to SEQ ID NO: 606900
cugacaaccacucuaaaga

SEQ ID NO: 606902 - RNA, 19 nt, Artificial Sequence
  Description of Artificial Sequence: Synthetic oligonucleotide
  Sense strand starting at position 3907 of SEQ ID NO: 585016
gggccacuccaguggucau

SEQ ID NO: 606903 - RNA, 19 nt, Artificial Sequence
  Description of Artificial Sequence: Synthetic oligonucleotide
  Antisense strand to SEQ ID NO: 606902
augaccacuggaguggccc

SEQ ID NO: 606904 - RNA, 19 nt, Artificial Sequence
  Description of Artificial Sequence: Synthetic oligonucleotide
  Sense strand starting at position 3948 of SEQ ID NO: 585016
acaccuguacuauguguaa

SEQ ID NO: 606905 - RNA, 19 nt, Artificial Sequence
  Description of Artificial Sequence: Synthetic oligonucleotide
  Antisense strand to SEQ ID NO: 606904
uuacacauaguacaggugu

SEQ ID NO: 606906 - RNA, 19 nt, Artificial Sequence
  Description of Artificial Sequence: Synthetic oligonucleotide
  Sense strand starting at position 3951 of SEQ ID NO: 585016
ccuguacuauguguaacuu

SEQ ID NO: 606907 - RNA, 19 nt, Artificial Sequence
  Description of Artificial Sequence: Synthetic oligonucleotide
  Antisense strand to SEQ ID NO: 606906
aaguuacacauaguacagg

SEQ ID NO: 606908 - RNA, 19 nt, Artificial Sequence
  Description of Artificial Sequence: Synthetic oligonucleotide
  Sense strand starting at position 3952 of SEQ ID NO: 585016
cuguacuauguguaacuuu

SEQ ID NO: 606909 - RNA, 19 nt, Artificial Sequence
  Description of Artificial Sequence: Synthetic oligonucleotide
  Antisense strand to SEQ ID NO: 606908
aaaguuacacauaguacag

SEQ ID NO: 606910 - RNA, 19 nt, Artificial Sequence
  Description of Artificial Sequence: Synthetic oligonucleotide
  Sense strand starting at position 8 of SEQ ID NO: 585017
ggugcuugguguuggaguu

SEQ ID NO: 606911 - RNA, 19 nt, Artificial Sequence
  Description of Artificial Sequence: Synthetic oligonucleotide
  Antisense strand to SEQ ID NO: 606910
aacuccaacaccaagcacc

SEQ ID NO: 606912 - RNA, 19 nt, Artificial Sequence
  Description of Artificial Sequence: Synthetic oligonucleotide
  Sense strand starting at position 136 of SEQ ID NO: 585017
gcgucaucugggaggguca

SEQ ID NO: 606913 - RNA, 19 nt, Artificial Sequence
  Description of Artificial Sequence: Synthetic oligonucleotide
  Antisense strand to SEQ ID NO: 606912
ugacccucccagaugacgc

SEQ ID NO: 606914 - RNA, 19 nt, Artificial Sequence
  Description of Artificial Sequence: Synthetic oligonucleotide
  Sense strand starting at position 157 of SEQ ID NO: 585017
gaggcauaugggugaucug

SEQ ID NO: 606915 - RNA, 19 nt, Artificial Sequence
  Description of Artificial Sequence: Synthetic oligonucleotide
  Antisense strand to SEQ ID NO: 606914
cagaucacccauaugccuc

SEQ ID NO: 606916 - RNA, 19 nt, Artificial Sequence
  Description of Artificial Sequence: Synthetic oligonucleotide
  Sense strand starting at position 160 of SEQ ID NO: 585017
gcauaugggugaucuguca

SEQ ID NO: 606917 - RNA, 19 nt, Artificial Sequence
  Description of Artificial Sequence: Synthetic oligonucleotide
  Antisense strand to SEQ ID NO: 606916
ugacagaucacccauaugc

SEQ ID NO: 606918 - RNA, 19 nt, Artificial Sequence
  Description of Artificial Sequence: Synthetic oligonucleotide
  Sense strand starting at position 183 of SEQ ID NO: 585017
ugccauugccuagaggaaa

SEQ ID NO: 606919 - RNA, 19 nt, Artificial Sequence
  Description of Artificial Sequence: Synthetic oligonucleotide
  Antisense strand to SEQ ID NO: 606918
uuuccucuaggcaauggca

SEQ ID NO: 606920 - RNA, 19 nt, Artificial Sequence
  Description of Artificial Sequence: Synthetic oligonucleotide
  Sense strand starting at position 201 of SEQ ID NO: 585017
agaggaaguguucgagucu

SEQ ID NO: 606921 - RNA, 19 nt, Artificial Sequence
  Description of Artificial Sequence: Synthetic oligonucleotide
  Antisense strand to SEQ ID NO: 606920
agacucgaacacuuccucu

SEQ ID NO: 606922 - RNA, 19 nt, Artificial Sequence
  Description of Artificial Sequence: Synthetic oligonucleotide
  Sense strand starting at position 202 of SEQ ID NO: 585017
gaggaaguguucgagucuc

SEQ ID NO: 606923 - RNA, 19 nt, Artificial Sequence
  Description of Artificial Sequence: Synthetic oligonucleotide
  Antisense strand to SEQ ID NO: 606922
gagacucgaacacuuccuc

SEQ ID NO: 606924 - RNA, 19 nt, Artificial Sequence
  Description of Artificial Sequence: Synthetic oligonucleotide
  Sense strand starting at position 307 of SEQ ID NO: 585017
gcacauagagcuuacgaua

SEQ ID NO: 606925 - RNA, 19 nt, Artificial Sequence
  Description of Artificial Sequence: Synthetic oligonucleotide
  Antisense strand to SEQ ID NO: 606924
uaucguaagcucuaugugc

SEQ ID NO: 606926 - RNA, 19 nt, Artificial Sequence
  Description of Artificial Sequence: Synthetic oligonucleotide
  Sense strand starting at position 310 of SEQ ID NO: 585017
cauagagcuuacgauaugu

SEQ ID NO: 606927 - RNA, 19 nt, Artificial Sequence
  Description of Artificial Sequence: Synthetic oligonucleotide
  Antisense strand to SEQ ID NO: 606926
acauaucguaagcucuaug

SEQ ID NO: 606928 - RNA, 19 nt, Artificial Sequence
  Description of Artificial Sequence: Synthetic oligonucleotide
  Sense strand starting at position 312 of SEQ ID NO: 585017
uagagcuuacgauauguca

SEQ ID NO: 606929 - RNA, 19 nt, Artificial Sequence
  Description of Artificial Sequence: Synthetic oligonucleotide
  Antisense strand to SEQ ID NO: 606928
ugacauaucguaagcucua

SEQ ID NO: 606930 - RNA, 19 nt, Artificial Sequence
  Description of Artificial Sequence: Synthetic oligonucleotide
  Sense strand starting at position 319 of SEQ ID NO: 585017
uacgauaugucagacacua

SEQ ID NO: 606931 - RNA, 19 nt, Artificial Sequence
  Description of Artificial Sequence: Synthetic oligonucleotide
  Antisense strand to SEQ ID NO: 606930
uagugucugacauaucgua

SEQ ID NO: 606932 - RNA, 19 nt, Artificial Sequence
  Description of Artificial Sequence: Synthetic oligonucleotide
  Sense strand starting at position 434 of SEQ ID NO: 585017
uccuuagagucacaguuua

SEQ ID NO: 606933 - RNA, 19 nt, Artificial Sequence
  Description of Artificial Sequence: Synthetic oligonucleotide
  Antisense strand to SEQ ID NO: 606932
uaaacugugacucuaagga

SEQ ID NO: 606934 - RNA, 19 nt, Artificial Sequence
  Description of Artificial Sequence: Synthetic oligonucleotide
  Sense strand starting at position 589 of SEQ ID NO: 585017
gggcuaauuuccuaagccu

SEQ ID NO: 606935 - RNA, 19 nt, Artificial Sequence
  Description of Artificial Sequence: Synthetic oligonucleotide
  Antisense strand to SEQ ID NO: 606934
aggcuuaggaaauuagccc

SEQ ID NO: 606936 - RNA, 19 nt, Artificial Sequence
  Description of Artificial Sequence: Synthetic oligonucleotide
  Sense strand starting at position 952 of SEQ ID NO: 585017
ggaacguguccgccacgau

SEQ ID NO: 606937 - RNA, 19 nt, Artificial Sequence
  Description of Artificial Sequence: Synthetic oligonucleotide
  Antisense strand to SEQ ID NO: 606936
aucguggcggacacguucc

SEQ ID NO: 606938 - RNA, 19 nt, Artificial Sequence
  Description of Artificial Sequence: Synthetic oligonucleotide
  Sense strand starting at position 979 of SEQ ID NO: 585017
cucggugauugguccauuu

SEQ ID NO: 606939 - RNA, 19 nt, Artificial Sequence
  Description of Artificial Sequence: Synthetic oligonucleotide
  Antisense strand to SEQ ID NO: 606938
aaauggaccaaucaccgag

SEQ ID NO: 606940 - RNA, 19 nt, Artificial Sequence
  Description of Artificial Sequence: Synthetic oligonucleotide
  Sense strand starting at position 1054 of SEQ ID NO: 585017
gcgggagugaguuagaaac

SEQ ID NO: 606941 - RNA, 19 nt, Artificial Sequence
  Description of Artificial Sequence: Synthetic oligonucleotide
  Antisense strand to SEQ ID NO: 606940
guuucuaacucacucccgc

SEQ ID NO: 606942 - RNA, 19 nt, Artificial Sequence
  Description of Artificial Sequence: Synthetic oligonucleotide
  Sense strand starting at position 1056 of SEQ ID NO: 585017
gggagugaguuagaaacaa

SEQ ID NO: 606943 - RNA, 19 nt, Artificial Sequence
  Description of Artificial Sequence: Synthetic oligonucleotide
  Antisense strand to SEQ ID NO: 606942
uuguuucuaacucacuccc

SEQ ID NO: 606944 - RNA, 19 nt, Artificial Sequence
  Description of Artificial Sequence: Synthetic oligonucleotide
  Sense strand starting at position 1176 of SEQ ID NO: 585017
cgcguucucgucuccuauu

SEQ ID NO: 606945 - RNA, 19 nt, Artificial Sequence
  Description of Artificial Sequence: Synthetic oligonucleotide
  Antisense strand to SEQ ID NO: 606944
aauaggagacgagaacgcg

SEQ ID NO: 606946 - RNA, 19 nt, Artificial Sequence
  Description of Artificial Sequence: Synthetic oligonucleotide
  Sense strand starting at position 1177 of SEQ ID NO: 585017
gcguucucgucuccuauuu

SEQ ID NO: 606947 - RNA, 19 nt, Artificial Sequence
  Description of Artificial Sequence: Synthetic oligonucleotide
  Antisense strand to SEQ ID NO: 606946
aaauaggagacgagaacgc

SEQ ID NO: 606948 - RNA, 19 nt, Artificial Sequence
  Description of Artificial Sequence: Synthetic oligonucleotide
  Sense strand starting at position 1235 of SEQ ID NO: 585017
cuccaucgaccuuaggaua

SEQ ID NO: 606949 - RNA, 19 nt, Artificial Sequence
  Description of Artificial Sequence: Synthetic oligonucleotide
  Antisense strand to SEQ ID NO: 606948
uauccuaaggucgauggag

SEQ ID NO: 606950 - RNA, 19 nt, Artificial Sequence
  Description of Artificial Sequence: Synthetic oligonucleotide
  Sense strand starting at position 1492 of SEQ ID NO: 585017
ccagucguugccucaguuu

SEQ ID NO: 606951 - RNA, 19 nt, Artificial Sequence
  Description of Artificial Sequence: Synthetic oligonucleotide
  Antisense strand to SEQ ID NO: 606950
aaacugaggcaacgacugg

SEQ ID NO: 606952 - RNA, 19 nt, Artificial Sequence
  Description of Artificial Sequence: Synthetic oligonucleotide
  Sense strand starting at position 1533 of SEQ ID NO: 585017
cuuugagcuuuggccagau

SEQ ID NO: 606953 - RNA, 19 nt, Artificial Sequence
  Description of Artificial Sequence: Synthetic oligonucleotide
  Antisense strand to SEQ ID NO: 606952
aucuggccaaagcucaaag

SEQ ID NO: 606954 - RNA, 19 nt, Artificial Sequence
  Description of Artificial Sequence: Synthetic oligonucleotide
  Sense strand starting at position 1717 of SEQ ID NO: 585017
ucaccugucugggagaaga

SEQ ID NO: 606955 - RNA, 19 nt, Artificial Sequence
  Description of Artificial Sequence: Synthetic oligonucleotide
  Antisense strand to SEQ ID NO: 606954
ucuucucccagacagguga

SEQ ID NO: 606956 - RNA, 19 nt, Artificial Sequence
  Description of Artificial Sequence: Synthetic oligonucleotide
  Sense strand starting at position 1901 of SEQ ID NO: 585017
gggucagauucuuuaagag

SEQ ID NO: 606957 - RNA, 19 nt, Artificial Sequence
  Description of Artificial Sequence: Synthetic oligonucleotide
  Antisense strand to SEQ ID NO: 606956
cucuuaaagaaucugaccc

SEQ ID NO: 606958 - RNA, 19 nt, Artificial Sequence
  Description of Artificial Sequence: Synthetic oligonucleotide
  Sense strand starting at position 2220 of SEQ ID NO: 585017
guucgagccuaaggaguua

SEQ ID NO: 606959 - RNA, 19 nt, Artificial Sequence
  Description of Artificial Sequence: Synthetic oligonucleotide
  Antisense strand to SEQ ID NO: 606958
uaacuccuuaggcucgaac

SEQ ID NO: 606960 - RNA, 19 nt, Artificial Sequence
  Description of Artificial Sequence: Synthetic oligonucleotide
  Sense strand starting at position 2225 of SEQ ID NO: 585017
agccuaaggaguuaagcau

SEQ ID NO: 606961 - RNA, 19 nt, Artificial Sequence
  Description of Artificial Sequence: Synthetic oligonucleotide
  Antisense strand to SEQ ID NO: 606960
augcuuaacuccuuaggcu

SEQ ID NO: 606962 - RNA, 19 nt, Artificial Sequence
  Description of Artificial Sequence: Synthetic oligonucleotide
  Sense strand starting at position 2274 of SEQ ID NO: 585017
ccuagcgcgaccuaguaua

SEQ ID NO: 606963 - RNA, 19 nt, Artificial Sequence
  Description of Artificial Sequence: Synthetic oligonucleotide
  Antisense strand to SEQ ID NO: 606962
uauacuaggucgcgcuagg

SEQ ID NO: 606964 - RNA, 19 nt, Artificial Sequence
  Description of Artificial Sequence: Synthetic oligonucleotide
  Sense strand starting at position 2745 of SEQ ID NO: 585017
gggcauugucuaagcggga

SEQ ID NO: 606965 - RNA, 19 nt, Artificial Sequence
  Description of Artificial Sequence: Synthetic oligonucleotide
  Antisense strand to SEQ ID NO: 606964
ucccgcuuagacaaugccc

SEQ ID NO: 606966 - RNA, 19 nt, Artificial Sequence
  Description of Artificial Sequence: Synthetic oligonucleotide
  Sense strand starting at position 2910 of SEQ ID NO: 585017
gcugcaaacgcuucguaga

SEQ ID NO: 606967 - RNA, 19 nt, Artificial Sequence
  Description of Artificial Sequence: Synthetic oligonucleotide
  Antisense strand to SEQ ID NO: 606966
ucuacgaagcguuugcagc

SEQ ID NO: 606968 - RNA, 19 nt, Artificial Sequence
  Description of Artificial Sequence: Synthetic oligonucleotide
  Sense strand starting at position 2920 of SEQ ID NO: 585017
cuucguagaccucagaaca

SEQ ID NO: 606969 - RNA, 19 nt, Artificial Sequence
  Description of Artificial Sequence: Synthetic oligonucleotide
  Antisense strand to SEQ ID NO: 606968
uguucugaggucuacgaag

SEQ ID NO: 606970 - RNA, 19 nt, Artificial Sequence
  Description of Artificial Sequence: Synthetic oligonucleotide
  Sense strand starting at position 3019 of SEQ ID NO: 585017
cccugagcucaagaucacu

SEQ ID NO: 606971 - RNA, 19 nt, Artificial Sequence
  Description of Artificial Sequence: Synthetic oligonucleotide
  Antisense strand to SEQ ID NO: 606970
agugaucuugagcucaggg

SEQ ID NO: 606972 - RNA, 19 nt, Artificial Sequence
  Description of Artificial Sequence: Synthetic oligonucleotide
  Sense strand starting at position 3120 of SEQ ID NO: 585017
ugaaauauguuguccuacu

SEQ ID NO: 606973 - RNA, 19 nt, Artificial Sequence
  Description of Artificial Sequence: Synthetic oligonucleotide
  Antisense strand to SEQ ID NO: 606972
aguaggacaacauauuuca

SEQ ID NO: 606974 - RNA, 19 nt, Artificial Sequence
  Description of Artificial Sequence: Synthetic oligonucleotide
  Sense strand starting at position 3216 of SEQ ID NO: 585017
gaacaagugcuccaggauu

SEQ ID NO: 606975 - RNA, 19 nt, Artificial Sequence
  Description of Artificial Sequence: Synthetic oligonucleotide
  Antisense strand to SEQ ID NO: 606974
aauccuggagcacuuguuc

SEQ ID NO: 606976 - RNA, 19 nt, Artificial Sequence
  Description of Artificial Sequence: Synthetic oligonucleotide
  Sense strand starting at position 3338 of SEQ ID NO: 585017
ggcuuauuugagggccuuu

SEQ ID NO: 606977 - RNA, 19 nt, Artificial Sequence
  Description of Artificial Sequence: Synthetic oligonucleotide
  Antisense strand to SEQ ID NO: 606976
aaaggcccucaaauaagcc

SEQ ID NO: 606978 - RNA, 19 nt, Artificial Sequence
  Description of Artificial Sequence: Synthetic oligonucleotide
  Sense strand starting at position 3376 of SEQ ID NO: 585017
gcucgaucuccucaucauc

SEQ ID NO: 606979 - RNA, 19 nt, Artificial Sequence
  Description of Artificial Sequence: Synthetic oligonucleotide
  Antisense strand to SEQ ID NO: 606978
gaugaugaggagaucgagc

SEQ ID NO: 606980 - RNA, 19 nt, Artificial Sequence
  Description of Artificial Sequence: Synthetic oligonucleotide
  Sense strand starting at position 3408 of SEQ ID NO: 585017
gcgaauucuucccgggcgu

SEQ ID NO: 606981 - RNA, 19 nt, Artificial Sequence
  Description of Artificial Sequence: Synthetic oligonucleotide
  Antisense strand to SEQ ID NO: 606980
acgcccgggaagaauucgc

SEQ ID NO: 606982 - RNA, 19 nt, Artificial Sequence
  Description of Artificial Sequence: Synthetic oligonucleotide
  Sense strand starting at position 3409 of SEQ ID NO: 585017
cgaauucuucccgggcgua

SEQ ID NO: 606983 - RNA, 19 nt, Artificial Sequence
  Description of Artificial Sequence: Synthetic oligonucleotide
  Antisense strand to SEQ ID NO: 606982
uacgcccgggaagaauucg

SEQ ID NO: 606984 - RNA, 19 nt, Artificial Sequence
  Description of Artificial Sequence: Synthetic oligonucleotide
  Sense strand starting at position 3421 of SEQ ID NO: 585017
gggcguaggcauugcucaa

SEQ ID NO: 606985 - RNA, 19 nt, Artificial Sequence
  Description of Artificial Sequence: Synthetic oligonucleotide
  Antisense strand to SEQ ID NO: 606984
uugagcaaugccuacgccc

SEQ ID NO: 606986 - RNA, 19 nt, Artificial Sequence
  Description of Artificial Sequence: Synthetic oligonucleotide
  Sense strand starting at position 3607 of SEQ ID NO: 585017
cugucuuguacugucguua

SEQ ID NO: 606987 - RNA, 19 nt, Artificial Sequence
  Description of Artificial Sequence: Synthetic oligonucleotide
  Antisense strand to SEQ ID NO: 606986
uaacgacaguacaagacag

SEQ ID NO: 606988 - RNA, 19 nt, Artificial Sequence
  Description of Artificial Sequence: Synthetic oligonucleotide
  Sense strand starting at position 87 of SEQ ID NO: 585018
uaaauauugguguauaagc

SEQ ID NO: 606989 - RNA, 19 nt, Artificial Sequence
  Description of Artificial Sequence: Synthetic oligonucleotide
  Antisense strand to SEQ ID NO: 606988
gcuuauacaccaauauuua

SEQ ID NO: 606990 - RNA, 19 nt, Artificial Sequence
  Description of Artificial Sequence: Synthetic oligonucleotide
  Sense strand starting at position 89 of SEQ ID NO: 585018
aauauugguguauaagcaa

SEQ ID NO: 606991 - RNA, 19 nt, Artificial Sequence
  Description of Artificial Sequence: Synthetic oligonucleotide
  Antisense strand to SEQ ID NO: 606990
uugcuuauacaccaauauu

SEQ ID NO: 606992 - RNA, 19 nt, Artificial Sequence
  Description of Artificial Sequence: Synthetic oligonucleotide
  Sense strand starting at position 96 of SEQ ID NO: 585018
guguauaagcaacaagauc

SEQ ID NO: 606993 - RNA, 19 nt, Artificial Sequence
  Description of Artificial Sequence: Synthetic oligonucleotide
  Antisense strand to SEQ ID NO: 606992
gaucuuguugcuuauacac

SEQ ID NO: 606994 - RNA, 19 nt, Artificial Sequence
  Description of Artificial Sequence: Synthetic oligonucleotide
  Sense strand starting at position 107 of SEQ ID NO: 585018
acaagaucuccaugggcuu

SEQ ID NO: 606995 - RNA, 19 nt, Artificial Sequence
  Description of Artificial Sequence: Synthetic oligonucleotide
  Antisense strand to SEQ ID NO: 606994
aagcccauggagaucuugu

SEQ ID NO: 606996 - RNA, 19 nt, Artificial Sequence
  Description of Artificial Sequence: Synthetic oligonucleotide
  Sense strand starting at position 634 of SEQ ID NO: 585018
gggcaugacccaugagcaa

SEQ ID NO: 606997 - RNA, 19 nt, Artificial Sequence
  Description of Artificial Sequence: Synthetic oligonucleotide
  Antisense strand to SEQ ID NO: 606996
uugcucaugggucaugccc

SEQ ID NO: 606998 - RNA, 19 nt, Artificial Sequence
  Description of Artificial Sequence: Synthetic oligonucleotide
  Sense strand starting at position 670 of SEQ ID NO: 585018
ucuacaaaguuguuucuaa

SEQ ID NO: 606999 - RNA, 19 nt, Artificial Sequence
  Description of Artificial Sequence: Synthetic oligonucleotide
  Antisense strand to SEQ ID NO: 606998
uuagaaacaacuuuguaga

SEQ ID NO: 607000 - RNA, 19 nt, Artificial Sequence
  Description of Artificial Sequence: Synthetic oligonucleotide
  Sense strand starting at position 671 of SEQ ID NO: 585018
cuacaaaguuguuucuaau

SEQ ID NO: 607001 - RNA, 19 nt, Artificial Sequence
  Description of Artificial Sequence: Synthetic oligonucleotide
  Antisense strand to SEQ ID NO: 607000
auuagaaacaacuuuguag

SEQ ID NO: 607002 - RNA, 19 nt, Artificial Sequence
  Description of Artificial Sequence: Synthetic oligonucleotide
  Sense strand starting at position 1416 of SEQ ID NO: 585018
agauucucgcacuaugaga

SEQ ID NO: 607003 - RNA, 19 nt, Artificial Sequence
  Description of Artificial Sequence: Synthetic oligonucleotide
  Antisense strand to SEQ ID NO: 607002
ucucauagugcgagaaucu

SEQ ID NO: 607004 - RNA, 19 nt, Artificial Sequence
  Description of Artificial Sequence: Synthetic oligonucleotide
  Sense strand starting at position 1448 of SEQ ID NO: 585018
caaugaaguuuagugugau

SEQ ID NO: 607005 - RNA, 19 nt, Artificial Sequence
  Description of Artificial Sequence: Synthetic oligonucleotide
  Antisense strand to SEQ ID NO: 607004
aucacacuaaacuucauug

SEQ ID NO: 607006 - RNA, 19 nt, Artificial Sequence
  Description of Artificial Sequence: Synthetic oligonucleotide
  Sense strand starting at position 1463 of SEQ ID NO: 585018
ugauauuccuauuccucga

SEQ ID NO: 607007 - RNA, 19 nt, Artificial Sequence
  Description of Artificial Sequence: Synthetic oligonucleotide
  Antisense strand to SEQ ID NO: 607006
ucgaggaauaggaauauca

SEQ ID NO: 607008 - RNA, 19 nt, Artificial Sequence
  Description of Artificial Sequence: Synthetic oligonucleotide
  Sense strand starting at position 1478 of SEQ ID NO: 585018
ucgagcagucuaugcauuu

SEQ ID NO: 607009 - RNA, 19 nt, Artificial Sequence
  Description of Artificial Sequence: Synthetic oligonucleotide
  Antisense strand to SEQ ID NO: 607008
aaaugcauagacugcucga

SEQ ID NO: 607010 - RNA, 19 nt, Artificial Sequence
  Description of Artificial Sequence: Synthetic oligonucleotide
  Sense strand starting at position 1487 of SEQ ID NO: 585018
cuaugcauuucugugcuaa

SEQ ID NO: 607011 - RNA, 19 nt, Artificial Sequence
  Description of Artificial Sequence: Synthetic oligonucleotide
  Antisense strand to SEQ ID NO: 607010
uuagcacagaaaugcauag

SEQ ID NO: 607012 - RNA, 19 nt, Artificial Sequence
  Description of Artificial Sequence: Synthetic oligonucleotide
  Sense strand starting at position 1489 of SEQ ID NO: 585018
augcauuucugugcuaauu

SEQ ID NO: 607013 - RNA, 19 nt, Artificial Sequence
  Description of Artificial Sequence: Synthetic oligonucleotide
  Antisense strand to SEQ ID NO: 607012
aauuagcacagaaaugcau

SEQ ID NO: 607014 - RNA, 19 nt, Artificial Sequence
  Description of Artificial Sequence: Synthetic oligonucleotide
  Sense strand starting at position 1512 of SEQ ID NO: 585018
acguuaauuugauugcugu

SEQ ID NO: 607015 - RNA, 19 nt, Artificial Sequence
  Description of Artificial Sequence: Synthetic oligonucleotide
  Antisense strand to SEQ ID NO: 607014
acagcaaucaaauuaacgu

SEQ ID NO: 607016 - RNA, 19 nt, Artificial Sequence
  Description of Artificial Sequence: Synthetic oligonucleotide
  Sense strand starting at position 1513 of SEQ ID NO: 585018
cguuaauuugauugcugua

SEQ ID NO: 607017 - RNA, 19 nt, Artificial Sequence
  Description of Artificial Sequence: Synthetic oligonucleotide
  Antisense strand to SEQ ID NO: 607016
uacagcaaucaaauuaacg

SEQ ID NO: 607018 - RNA, 19 nt, Artificial Sequence
  Description of Artificial Sequence: Synthetic oligonucleotide
  Sense strand starting at position 1743 of SEQ ID NO: 585018
gcaaucuguggcuaagaau

SEQ ID NO: 607019 - RNA, 19 nt, Artificial Sequence
  Description of Artificial Sequence: Synthetic oligonucleotide
  Antisense strand to SEQ ID NO: 607018
auucuuagccacagauugc

SEQ ID NO: 607020 - RNA, 19 nt, Artificial Sequence
  Description of Artificial Sequence: Synthetic oligonucleotide
  Sense strand starting at position 1778 of SEQ ID NO: 585018
ggaggagugagcgagcaau

SEQ ID NO: 607021 - RNA, 19 nt, Artificial Sequence
  Description of Artificial Sequence: Synthetic oligonucleotide
  Antisense strand to SEQ ID NO: 607020
auugcucgcucacuccucc

SEQ ID NO: 607022 - RNA, 19 nt, Artificial Sequence
  Description of Artificial Sequence: Synthetic oligonucleotide
  Sense strand starting at position 1798 of SEQ ID NO: 585018
ugguguguccuggcacagu

SEQ ID NO: 607023 - RNA, 19 nt, Artificial Sequence
  Description of Artificial Sequence: Synthetic oligonucleotide
  Antisense strand to SEQ ID NO: 607022
acugugccaggacacacca

SEQ ID NO: 607024 - RNA, 19 nt, Artificial Sequence
  Description of Artificial Sequence: Synthetic oligonucleotide
  Sense strand starting at position 1990 of SEQ ID NO: 585018
gucucaugcccugagagac

SEQ ID NO: 607025 - RNA, 19 nt, Artificial Sequence
  Description of Artificial Sequence: Synthetic oligonucleotide
  Antisense strand to SEQ ID NO: 607024
gucucucagggcaugagac

SEQ ID NO: 607026 - RNA, 19 nt, Artificial Sequence
  Description of Artificial Sequence: Synthetic oligonucleotide
  Sense strand starting at position 2029 of SEQ ID NO: 585018
ucccauuggugacuugauu

SEQ ID NO: 607027 - RNA, 19 nt, Artificial Sequence
  Description of Artificial Sequence: Synthetic oligonucleotide
  Antisense strand to SEQ ID NO: 607026
aaucaagucaccaauggga

SEQ ID NO: 607028 - RNA, 19 nt, Artificial Sequence
  Description of Artificial Sequence: Synthetic oligonucleotide
  Sense strand starting at position 2226 of SEQ ID NO: 585018
gcugauuuguagguauggu

SEQ ID NO: 607029 - RNA, 19 nt, Artificial Sequence
  Description of Artificial Sequence: Synthetic oligonucleotide
  Antisense strand to SEQ ID NO: 607028
accauaccuacaaaucagc

SEQ ID NO: 607030 - RNA, 19 nt, Artificial Sequence
  Description of Artificial Sequence: Synthetic oligonucleotide
  Sense strand starting at position 2361 of SEQ ID NO: 585018
aguaauguuguugauugau

SEQ ID NO: 607031 - RNA, 19 nt, Artificial Sequence
  Description of Artificial Sequence: Synthetic oligonucleotide
  Antisense strand to SEQ ID NO: 607030
aucaaucaacaacauuacu

SEQ ID NO: 607032 - RNA, 19 nt, Artificial Sequence
  Description of Artificial Sequence: Synthetic oligonucleotide
  Sense strand starting at position 2374 of SEQ ID NO: 585018
auugauuggagcuggaaac

SEQ ID NO: 607033 - RNA, 19 nt, Artificial Sequence
  Description of Artificial Sequence: Synthetic oligonucleotide
  Antisense strand to SEQ ID NO: 607032
guuuccagcuccaaucaau

SEQ ID NO: 607034 - RNA, 19 nt, Artificial Sequence
  Description of Artificial Sequence: Synthetic oligonucleotide
  Sense strand starting at position 2375 of SEQ ID NO: 585018
uugauuggagcuggaaaca

SEQ ID NO: 607035 - RNA, 19 nt, Artificial Sequence
  Description of Artificial Sequence: Synthetic oligonucleotide
  Antisense strand to SEQ ID NO: 607034
uguuuccagcuccaaucaa

SEQ ID NO: 607036 - RNA, 19 nt, Artificial Sequence
  Description of Artificial Sequence: Synthetic oligonucleotide
  Sense strand starting at position 2402 of SEQ ID NO: 585018
gagauaaucuaggauagaa

SEQ ID NO: 607037 - RNA, 19 nt, Artificial Sequence
  Description of Artificial Sequence: Synthetic oligonucleotide
  Antisense strand to SEQ ID NO: 607036
uucuauccuagauuaucuc

SEQ ID NO: 607038 - RNA, 19 nt, Artificial Sequence
  Description of Artificial Sequence: Synthetic oligonucleotide
  Sense strand starting at position 2839 of SEQ ID NO: 585018
gggaguggguauaaaugaa

SEQ ID NO: 607039 - RNA, 19 nt, Artificial Sequence
  Description of Artificial Sequence: Synthetic oligonucleotide
  Antisense strand to SEQ ID NO: 607038
uucauuuauacccacuccc

SEQ ID NO: 607040 - RNA, 19 nt, Artificial Sequence
  Description of Artificial Sequence: Synthetic oligonucleotide
  Sense strand starting at position 2998 of SEQ ID NO: 585018
uuugaugagugucuacuga

SEQ ID NO: 607041 - RNA, 19 nt, Artificial Sequence
  Description of Artificial Sequence: Synthetic oligonucleotide
  Antisense strand to SEQ ID NO: 607040
ucaguagacacucaucaaa

SEQ ID NO: 607042 - RNA, 19 nt, Artificial Sequence
  Description of Artificial Sequence: Synthetic oligonucleotide
  Sense strand starting at position 3009 of SEQ ID NO: 585018
ucuacugagcucuaggcau

SEQ ID NO: 607043 - RNA, 19 nt, Artificial Sequence
  Description of Artificial Sequence: Synthetic oligonucleotide
  Antisense strand to SEQ ID NO: 607042
augccuagagcucaguaga

SEQ ID NO: 607044 - RNA, 19 nt, Artificial Sequence
  Description of Artificial Sequence: Synthetic oligonucleotide
  Sense strand starting at position 3022 of SEQ ID NO: 585018
aggcaugaggcacaguuaa

SEQ ID NO: 607045 - RNA, 19 nt, Artificial Sequence
  Description of Artificial Sequence: Synthetic oligonucleotide
  Antisense strand to SEQ ID NO: 607044
uuaacugugccucaugccu

SEQ ID NO: 607046 - RNA, 19 nt, Artificial Sequence
  Description of Artificial Sequence: Synthetic oligonucleotide
  Sense strand starting at position 3040 of SEQ ID NO: 585018
acaaguuuguuuccaggga

SEQ ID NO: 607047 - RNA, 19 nt, Artificial Sequence
  Description of Artificial Sequence: Synthetic oligonucleotide
  Antisense strand to SEQ ID NO: 607046
ucccuggaaacaaacuugu

SEQ ID NO: 607048 - RNA, 19 nt, Artificial Sequence
  Description of Artificial Sequence: Synthetic oligonucleotide
  Sense strand starting at position 3069 of SEQ ID NO: 585018
ugugucaaauuagugacaa

SEQ ID NO: 607049 - RNA, 19 nt, Artificial Sequence
  Description of Artificial Sequence: Synthetic oligonucleotide
  Antisense strand to SEQ ID NO: 607048
uugucacuaauuugacaca

SEQ ID NO: 607050 - RNA, 19 nt, Artificial Sequence
  Description of Artificial Sequence: Synthetic oligonucleotide
  Sense strand starting at position 3237 of SEQ ID NO: 585018
gguccagggucucuuaaau

SEQ ID NO: 607051 - RNA, 19 nt, Artificial Sequence
  Description of Artificial Sequence: Synthetic oligonucleotide
  Antisense strand to SEQ ID NO: 607050
auuuaagagacccuggacc

SEQ ID NO: 607052 - RNA, 19 nt, Artificial Sequence
  Description of Artificial Sequence: Synthetic oligonucleotide
  Sense strand starting at position 3243 of SEQ ID NO: 585018
gggucucuuaaaugguaaa

SEQ ID NO: 607053 - RNA, 19 nt, Artificial Sequence
  Description of Artificial Sequence: Synthetic oligonucleotide
  Antisense strand to SEQ ID NO: 607052
uuuaccauuuaagagaccc

SEQ ID NO: 607054 - RNA, 19 nt, Artificial Sequence
  Description of Artificial Sequence: Synthetic oligonucleotide
  Sense strand starting at position 3674 of SEQ ID NO: 585018
ccugacuucugaguuggau

SEQ ID NO: 607055 - RNA, 19 nt, Artificial Sequence
  Description of Artificial Sequence: Synthetic oligonucleotide
  Antisense strand to SEQ ID NO: 607054
auccaacucagaagucagg

SEQ ID NO: 607056 - RNA, 19 nt, Artificial Sequence
  Description of Artificial Sequence: Synthetic oligonucleotide
  Sense strand starting at position 3676 of SEQ ID NO: 585018
ugacuucugaguuggauug

SEQ ID NO: 607057 - RNA, 19 nt, Artificial Sequence
  Description of Artificial Sequence: Synthetic oligonucleotide
  Antisense strand to SEQ ID NO: 607056
caauccaacucagaaguca

SEQ ID NO: 607058 - RNA, 19 nt, Artificial Sequence
  Description of Artificial Sequence: Synthetic oligonucleotide
  Sense strand starting at position 3744 of SEQ ID NO: 585018
ggucucugauaaguugaga

SEQ ID NO: 607059 - RNA, 19 nt, Artificial Sequence
  Description of Artificial Sequence: Synthetic oligonucleotide
  Antisense strand to SEQ ID NO: 607058
ucucaacuuaucagagacc

SEQ ID NO: 607060 - RNA, 19 nt, Artificial Sequence
  Description of Artificial Sequence: Synthetic oligonucleotide
  Sense strand starting at position 3764 of SEQ ID NO: 585018
auguacaauucuuuguaag

SEQ ID NO: 607061 - RNA, 19 nt, Artificial Sequence
  Description of Artificial Sequence: Synthetic oligonucleotide
  Antisense strand to SEQ ID NO: 607060
cuuacaaagaauuguacau

SEQ ID NO: 607062 - RNA, 19 nt, Artificial Sequence
  Description of Artificial Sequence: Synthetic oligonucleotide
  Sense strand starting at position 3765 of SEQ ID NO: 585018
uguacaauucuuuguaagg

SEQ ID NO: 607063 - RNA, 19 nt, Artificial Sequence
  Description of Artificial Sequence: Synthetic oligonucleotide
  Antisense strand to SEQ ID NO: 607062
ccuuacaaagaauuguaca

SEQ ID NO: 607064 - RNA, 19 nt, Artificial Sequence
  Description of Artificial Sequence: Synthetic oligonucleotide
  Sense strand starting at position 3847 of SEQ ID NO: 585018
cugucacagucacugaaua

SEQ ID NO: 607065 - RNA, 19 nt, Artificial Sequence
  Description of Artificial Sequence: Synthetic oligonucleotide
  Antisense strand to SEQ ID NO: 607064
uauucagugacugugacag

SEQ ID NO: 607066 - RNA, 19 nt, Artificial Sequence
  Description of Artificial Sequence: Synthetic oligonucleotide
  Sense strand starting at position 3867 of SEQ ID NO: 585018
agaacacuuucugugacca

SEQ ID NO: 607067 - RNA, 19 nt, Artificial Sequence
  Description of Artificial Sequence: Synthetic oligonucleotide
  Antisense strand to SEQ ID NO: 607066
uggucacagaaaguguucu

SEQ ID NO: 607068 - RNA, 19 nt, Artificial Sequence
  Description of Artificial Sequence: Synthetic oligonucleotide
  Sense strand starting at position 211 of SEQ ID NO: 585019
gaaguauggacagagcagu

SEQ ID NO: 607069 - RNA, 19 nt, Artificial Sequence
  Description of Artificial Sequence: Synthetic oligonucleotide
  Antisense strand to SEQ ID NO: 607068
acugcucuguccauacuuc

SEQ ID NO: 607070 - RNA, 19 nt, Artificial Sequence
  Description of Artificial Sequence: Synthetic oligonucleotide
  Sense strand starting at position 526 of SEQ ID NO: 585019
cuaggugugacguaucuga

SEQ ID NO: 607071 - RNA, 19 nt, Artificial Sequence
  Description of Artificial Sequence: Synthetic oligonucleotide
  Antisense strand to SEQ ID NO: 607070
ucagauacgucacaccuag

SEQ ID NO: 607072 - RNA, 19 nt, Artificial Sequence
  Description of Artificial Sequence: Synthetic oligonucleotide
  Sense strand starting at position 530 of SEQ ID NO: 585019
gugugacguaucugauuua

SEQ ID NO: 607073 - RNA, 19 nt, Artificial Sequence
  Description of Artificial Sequence: Synthetic oligonucleotide
  Antisense strand to SEQ ID NO: 607072
uaaaucagauacgucacac

SEQ ID NO: 607074 - RNA, 19 nt, Artificial Sequence
  Description of Artificial Sequence: Synthetic oligonucleotide
  Sense strand starting at position 841 of SEQ ID NO: 585019
acuuccugagcuggagaau

SEQ ID NO: 607075 - RNA, 19 nt, Artificial Sequence
  Description of Artificial Sequence: Synthetic oligonucleotide
  Antisense strand to SEQ ID NO: 607074
auucuccagcucaggaagu

SEQ ID NO: 607076 - RNA, 19 nt, Artificial Sequence
  Description of Artificial Sequence: Synthetic oligonucleotide
  Sense strand starting at position 872 of SEQ ID NO: 585019
gcagguuuaggcugggaau

SEQ ID NO: 607077 - RNA, 19 nt, Artificial Sequence
  Description of Artificial Sequence: Synthetic oligonucleotide
  Antisense strand to SEQ ID NO: 607076
auucccagccuaaaccugc

SEQ ID NO: 607078 - RNA, 19 nt, Artificial Sequence
  Description of Artificial Sequence: Synthetic oligonucleotide
  Sense strand starting at position 910 of SEQ ID NO: 585019
ggaaguuaaacguacguuu

SEQ ID NO: 607079 - RNA, 19 nt, Artificial Sequence
  Description of Artificial Sequence: Synthetic oligonucleotide
  Antisense strand to SEQ ID NO: 607078
aaacguacguuuaacuucc

SEQ ID NO: 607080 - RNA, 19 nt, Artificial Sequence
  Description of Artificial Sequence: Synthetic oligonucleotide
  Sense strand starting at position 1103 of SEQ ID NO: 585019
gguggccagguuuacaaua

SEQ ID NO: 607081 - RNA, 19 nt, Artificial Sequence
  Description of Artificial Sequence: Synthetic oligonucleotide
  Antisense strand to SEQ ID NO: 607080
uauuguaaaccuggccacc

SEQ ID NO: 607082 - RNA, 19 nt, Artificial Sequence
  Description of Artificial Sequence: Synthetic oligonucleotide
  Sense strand starting at position 1108 of SEQ ID NO: 585019
ccagguuuacaauauuguu

SEQ ID NO: 607083 - RNA, 19 nt, Artificial Sequence
  Description of Artificial Sequence: Synthetic oligonucleotide
  Antisense strand to SEQ ID NO: 607082
aacaauauuguaaaccugg

SEQ ID NO: 607084 - RNA, 19 nt, Artificial Sequence
  Description of Artificial Sequence: Synthetic oligonucleotide
  Sense strand starting at position 1140 of SEQ ID NO: 585019
agaggcuuagucuggagau

SEQ ID NO: 607085 - RNA, 19 nt, Artificial Sequence
  Description of Artificial Sequence: Synthetic oligonucleotide
  Antisense strand to SEQ ID NO: 607084
aucuccagacuaagccucu

SEQ ID NO: 607086 - RNA, 19 nt, Artificial Sequence
  Description of Artificial Sequence: Synthetic oligonucleotide
  Sense strand starting at position 1142 of SEQ ID NO: 585019
aggcuuagucuggagauga

SEQ ID NO: 607087 - RNA, 19 nt, Artificial Sequence
  Description of Artificial Sequence: Synthetic oligonucleotide
  Antisense strand to SEQ ID NO: 607086
ucaucuccagacuaagccu

SEQ ID NO: 607088 - RNA, 19 nt, Artificial Sequence
  Description of Artificial Sequence: Synthetic oligonucleotide
  Sense strand starting at position 1146 of SEQ ID NO: 585019
uuagucuggagaugauaua

SEQ ID NO: 607089 - RNA, 19 nt, Artificial Sequence
  Description of Artificial Sequence: Synthetic oligonucleotide
  Antisense strand to SEQ ID NO: 607088
uauaucaucuccagacuaa

SEQ ID NO: 607090 - RNA, 19 nt, Artificial Sequence
  Description of Artificial Sequence: Synthetic oligonucleotide
  Sense strand starting at position 1168 of SEQ ID NO: 585019
uggagagucgucagcguau

SEQ ID NO: 607091 - RNA, 19 nt, Artificial Sequence
  Description of Artificial Sequence: Synthetic oligonucleotide
  Antisense strand to SEQ ID NO: 607090
auacgcugacgacucucca

SEQ ID NO: 607092 - RNA, 19 nt, Artificial Sequence
  Description of Artificial Sequence: Synthetic oligonucleotide
  Sense strand starting at position 1180 of SEQ ID NO: 585019
agcguauaggugguguuua

SEQ ID NO: 607093 - RNA, 19 nt, Artificial Sequence
  Description of Artificial Sequence: Synthetic oligonucleotide
  Antisense strand to SEQ ID NO: 607092
uaaacaccaccuauacgcu

SEQ ID NO: 607094 - RNA, 19 nt, Artificial Sequence
  Description of Artificial Sequence: Synthetic oligonucleotide
  Sense strand starting at position 1185 of SEQ ID NO: 585019
auaggugguguuuaaagua

SEQ ID NO: 607095 - RNA, 19 nt, Artificial Sequence
  Description of Artificial Sequence: Synthetic oligonucleotide
  Antisense strand to SEQ ID NO: 607094
uacuuuaaacaccaccuau

SEQ ID NO: 607096 - RNA, 19 nt, Artificial Sequence
  Description of Artificial Sequence: Synthetic oligonucleotide
  Sense strand starting at position 1772 of SEQ ID NO: 585019
cggcacuuggcugaguaaa

SEQ ID NO: 607097 - RNA, 19 nt, Artificial Sequence
  Description of Artificial Sequence: Synthetic oligonucleotide
  Antisense strand to SEQ ID NO: 607096
uuuacucagccaagugccg

SEQ ID NO: 607098 - RNA, 19 nt, Artificial Sequence
  Description of Artificial Sequence: Synthetic oligonucleotide
  Sense strand starting at position 2620 of SEQ ID NO: 585019
agugguagaaagugaugaa

SEQ ID NO: 607099 - RNA, 19 nt, Artificial Sequence
  Description of Artificial Sequence: Synthetic oligonucleotide
  Antisense strand to SEQ ID NO: 607098
uucaucacuuucuaccacu

SEQ ID NO: 607100 - RNA, 19 nt, Artificial Sequence
  Description of Artificial Sequence: Synthetic oligonucleotide
  Sense strand starting at position 2652 of SEQ ID NO: 585019
ugcucaauggcagaaauga

SEQ ID NO: 607101 - RNA, 19 nt, Artificial Sequence
  Description of Artificial Sequence: Synthetic oligonucleotide
  Antisense strand to SEQ ID NO: 607100
ucauuucugccauugagca

SEQ ID NO: 607102 - RNA, 19 nt, Artificial Sequence
  Description of Artificial Sequence: Synthetic oligonucleotide
  Sense strand starting at position 2660 of SEQ ID NO: 585019
ggcagaaaugaguguuauc

SEQ ID NO: 607103 - RNA, 19 nt, Artificial Sequence
  Description of Artificial Sequence: Synthetic oligonucleotide
  Antisense strand to SEQ ID NO: 607102
gauaacacucauuucugcc

SEQ ID NO: 607104 - RNA, 19 nt, Artificial Sequence
  Description of Artificial Sequence: Synthetic oligonucleotide
  Sense strand starting at position 2692 of SEQ ID NO: 585019
gcaaucuagcaaugucuau

SEQ ID NO: 607105 - RNA, 19 nt, Artificial Sequence
  Description of Artificial Sequence: Synthetic oligonucleotide
  Antisense strand to SEQ ID NO: 607104
auagacauugcuagauugc

SEQ ID NO: 607106 - RNA, 19 nt, Artificial Sequence
  Description of Artificial Sequence: Synthetic oligonucleotide
  Sense strand starting at position 2740 of SEQ ID NO: 585019
ccagcauucccucgagaga

SEQ ID NO: 607107 - RNA, 19 nt, Artificial Sequence
  Description of Artificial Sequence: Synthetic oligonucleotide
  Antisense strand to SEQ ID NO: 607106
ucucucgagggaaugcugg

SEQ ID NO: 607108 - RNA, 19 nt, Artificial Sequence
  Description of Artificial Sequence: Synthetic oligonucleotide
  Sense strand starting at position 2741 of SEQ ID NO: 585019
cagcauucccucgagagag

SEQ ID NO: 607109 - RNA, 19 nt, Artificial Sequence
  Description of Artificial Sequence: Synthetic oligonucleotide
  Antisense strand to SEQ ID NO: 607108
cucucucgagggaaugcug

SEQ ID NO: 607110 - RNA, 19 nt, Artificial Sequence
  Description of Artificial Sequence: Synthetic oligonucleotide
  Sense strand starting at position 2945 of SEQ ID NO: 585019
caaagauguuuauuauggu

SEQ ID NO: 607111 - RNA, 19 nt, Artificial Sequence
  Description of Artificial Sequence: Synthetic oligonucleotide
  Antisense strand to SEQ ID NO: 607110
accauaauaaacaucuuug

SEQ ID NO: 607112 - RNA, 19 nt, Artificial Sequence
  Description of Artificial Sequence: Synthetic oligonucleotide
  Sense strand starting at position 2983 of SEQ ID NO: 585019
ucuguaagauaugugaaug

SEQ ID NO: 607113 - RNA, 19 nt, Artificial Sequence
  Description of Artificial Sequence: Synthetic oligonucleotide
  Antisense strand to SEQ ID NO: 607112
cauucacauaucuuacaga

SEQ ID NO: 607114 - RNA, 19 nt, Artificial Sequence
  Description of Artificial Sequence: Synthetic oligonucleotide
  Sense strand starting at position 3084 of SEQ ID NO: 585019
auuccuaacuuugugugau

SEQ ID NO: 607115 - RNA, 19 nt, Artificial Sequence
  Description of Artificial Sequence: Synthetic oligonucleotide
  Antisense strand to SEQ ID NO: 607114
aucacacaaaguuaggaau

SEQ ID NO: 607116 - RNA, 19 nt, Artificial Sequence
  Description of Artificial Sequence: Synthetic oligonucleotide
  Sense strand starting at position 3086 of SEQ ID NO: 585019
uccuaacuuugugugauuu

SEQ ID NO: 607117 - RNA, 19 nt, Artificial Sequence
  Description of Artificial Sequence: Synthetic oligonucleotide
  Antisense strand to SEQ ID NO: 607116
aaaucacacaaaguuagga

SEQ ID NO: 607118 - RNA, 19 nt, Artificial Sequence
  Description of Artificial Sequence: Synthetic oligonucleotide
  Sense strand starting at position 3096 of SEQ ID NO: 585019
gugugauuuccauguauau

SEQ ID NO: 607119 - RNA, 19 nt, Artificial Sequence
  Description of Artificial Sequence: Synthetic oligonucleotide
  Antisense strand to SEQ ID NO: 607118
auauacauggaaaucacac

SEQ ID NO: 607120 - RNA, 19 nt, Artificial Sequence
  Description of Artificial Sequence: Synthetic oligonucleotide
  Sense strand starting at position 3105 of SEQ ID NO: 585019
ccauguauaucuguugaau

SEQ ID NO: 607121 - RNA, 19 nt, Artificial Sequence
  Description of Artificial Sequence: Synthetic oligonucleotide
  Antisense strand to SEQ ID NO: 607120
auucaacagauauacaugg

SEQ ID NO: 607122 - RNA, 19 nt, Artificial Sequence
  Description of Artificial Sequence: Synthetic oligonucleotide
  Sense strand starting at position 3108 of SEQ ID NO: 585019
uguauaucuguugaauaug

SEQ ID NO: 607123 - RNA, 19 nt, Artificial Sequence
  Description of Artificial Sequence: Synthetic oligonucleotide
  Antisense strand to SEQ ID NO: 607122
cauauucaacagauauaca

SEQ ID NO: 607124 - RNA, 19 nt, Artificial Sequence
  Description of Artificial Sequence: Synthetic oligonucleotide
  Sense strand starting at position 3184 of SEQ ID NO: 585019
gcacccauguuuguauaua

SEQ ID NO: 607125 - RNA, 19 nt, Artificial Sequence
  Description of Artificial Sequence: Synthetic oligonucleotide
  Antisense strand to SEQ ID NO: 607124
uauauacaaacaugggugc

SEQ ID NO: 607126 - RNA, 19 nt, Artificial Sequence
  Description of Artificial Sequence: Synthetic oligonucleotide
  Sense strand starting at position 3210 of SEQ ID NO: 585019
guguacgucuagaaggaga

SEQ ID NO: 607127 - RNA, 19 nt, Artificial Sequence
  Description of Artificial Sequence: Synthetic oligonucleotide
  Antisense strand to SEQ ID NO: 607126
ucuccuucuagacguacac

SEQ ID NO: 607128 - RNA, 19 nt, Artificial Sequence
  Description of Artificial Sequence: Synthetic oligonucleotide
  Sense strand starting at position 3426 of SEQ ID NO: 585019
ccaggaaagguugggcaau

SEQ ID NO: 607129 - RNA, 19 nt, Artificial Sequence
  Description of Artificial Sequence: Synthetic oligonucleotide
  Antisense strand to SEQ ID NO: 607128
auugcccaaccuuuccugg

SEQ ID NO: 607130 - RNA, 19 nt, Artificial Sequence
  Description of Artificial Sequence: Synthetic oligonucleotide
  Sense strand starting at position 3436 of SEQ ID NO: 585019
uugggcaauuccuuguuga

SEQ ID NO: 607131 - RNA, 19 nt, Artificial Sequence
  Description of Artificial Sequence: Synthetic oligonucleotide
  Antisense strand to SEQ ID NO: 607130
ucaacaaggaauugcccaa

SEQ ID NO: 607132 - RNA, 19 nt, Artificial Sequence
  Description of Artificial Sequence: Synthetic oligonucleotide
  Sense strand starting at position 3437 of SEQ ID NO: 585019
ugggcaauuccuuguugag

SEQ ID NO: 607133 - RNA, 19 nt, Artificial Sequence
  Description of Artificial Sequence: Synthetic oligonucleotide
  Antisense strand to SEQ ID NO: 607132
cucaacaaggaauugccca

SEQ ID NO: 607134 - RNA, 19 nt, Artificial Sequence
  Description of Artificial Sequence: Synthetic oligonucleotide
  Sense strand starting at position 3439 of SEQ ID NO: 585019
ggcaauuccuuguugagga

SEQ ID NO: 607135 - RNA, 19 nt, Artificial Sequence
  Description of Artificial Sequence: Synthetic oligonucleotide
  Antisense strand to SEQ ID NO: 607134
uccucaacaaggaauugcc

SEQ ID NO: 607136 - RNA, 19 nt, Artificial Sequence
  Description of Artificial Sequence: Synthetic oligonucleotide
  Sense strand starting at position 3523 of SEQ ID NO: 585019
ccagaauucuaagagaagg

SEQ ID NO: 607137 - RNA, 19 nt, Artificial Sequence
  Description of Artificial Sequence: Synthetic oligonucleotide
  Antisense strand to SEQ ID NO: 607136
ccuucucuuagaauucugg

SEQ ID NO: 607138 - RNA, 19 nt, Artificial Sequence
  Description of Artificial Sequence: Synthetic oligonucleotide
  Sense strand starting at position 3706 of SEQ ID NO: 585019
ggugaccugugcccauuaa

SEQ ID NO: 607139 - RNA, 19 nt, Artificial Sequence
  Description of Artificial Sequence: Synthetic oligonucleotide
  Antisense strand to SEQ ID NO: 607138
uuaaugggcacaggucacc

SEQ ID NO: 607140 - RNA, 19 nt, Artificial Sequence
  Description of Artificial Sequence: Synthetic oligonucleotide
  Sense strand starting at position 3707 of SEQ ID NO: 585019
gugaccugugcccauuaaa

SEQ ID NO: 607141 - RNA, 19 nt, Artificial Sequence
  Description of Artificial Sequence: Synthetic oligonucleotide
  Antisense strand to SEQ ID NO: 607140
uuuaaugggcacaggucac

SEQ ID NO: 607142 - RNA, 19 nt, Artificial Sequence
  Description of Artificial Sequence: Synthetic oligonucleotide
  Sense strand starting at position 3710 of SEQ ID NO: 585019
accugugcccauuaaaguu

SEQ ID NO: 607143 - RNA, 19 nt, Artificial Sequence
  Description of Artificial Sequence: Synthetic oligonucleotide
  Antisense strand to SEQ ID NO: 607142
aacuuuaaugggcacaggu

SEQ ID NO: 607144 - RNA, 19 nt, Artificial Sequence
  Description of Artificial Sequence: Synthetic oligonucleotide
  Sense strand starting at position 3866 of SEQ ID NO: 585019
cucagagcccuguacugaa

SEQ ID NO: 607145 - RNA, 19 nt, Artificial Sequence
  Description of Artificial Sequence: Synthetic oligonucleotide
  Antisense strand to SEQ ID NO: 607144
uucaguacagggcucugag

SEQ ID NO: 607146 - RNA, 19 nt, Artificial Sequence
  Description of Artificial Sequence: Synthetic oligonucleotide
  Sense strand starting at position 3941 of SEQ ID NO: 585019
gcaucuugggcccaguuau

SEQ ID NO: 607147 - RNA, 19 nt, Artificial Sequence
  Description of Artificial Sequence: Synthetic oligonucleotide
  Antisense strand to SEQ ID NO: 607146
auaacugggcccaagaugc

SEQ ID NO: 607148 - RNA, 19 nt, Artificial Sequence
  Description of Artificial Sequence: Synthetic oligonucleotide
  Sense strand starting at position 2 of SEQ ID NO: 585020
accugugcccauuaaaguu

SEQ ID NO: 607149 - RNA, 19 nt, Artificial Sequence
  Description of Artificial Sequence: Synthetic oligonucleotide
  Antisense strand to SEQ ID NO: 607148
aacuuuaaugggcacaggu

SEQ ID NO: 607150 - RNA, 19 nt, Artificial Sequence
  Description of Artificial Sequence: Synthetic oligonucleotide
  Sense strand starting at position 158 of SEQ ID NO: 585020
cucagagcccuguacugaa

SEQ ID NO: 607151 - RNA, 19 nt, Artificial Sequence
  Description of Artificial Sequence: Synthetic oligonucleotide
  Antisense strand to SEQ ID NO: 607150
uucaguacagggcucugag

SEQ ID NO: 607152 - RNA, 19 nt, Artificial Sequence
  Description of Artificial Sequence: Synthetic oligonucleotide
  Sense strand starting at position 233 of SEQ ID NO: 585020
gcaucuugggcccaguuau

SEQ ID NO: 607153 - RNA, 19 nt, Artificial Sequence
  Description of Artificial Sequence: Synthetic oligonucleotide
  Antisense strand to SEQ ID NO: 607152
auaacugggcccaagaugc

SEQ ID NO: 607154 - RNA, 19 nt, Artificial Sequence
  Description of Artificial Sequence: Synthetic oligonucleotide
  Sense strand starting at position 620 of SEQ ID NO: 585020
aggagacuggcuuggaauu

SEQ ID NO: 607155 - RNA, 19 nt, Artificial Sequence
  Description of Artificial Sequence: Synthetic oligonucleotide
  Antisense strand to SEQ ID NO: 607154
aauuccaagccagucuccu

SEQ ID NO: 607156 - RNA, 19 nt, Artificial Sequence
  Description of Artificial Sequence: Synthetic oligonucleotide
  Sense strand starting at position 708 of SEQ ID NO: 585020
augccuaucccagaugagu

SEQ ID NO: 607157 - RNA, 19 nt, Artificial Sequence
  Description of Artificial Sequence: Synthetic oligonucleotide
  Antisense strand to SEQ ID NO: 607156
acucaucugggauaggcau

SEQ ID NO: 607158 - RNA, 19 nt, Artificial Sequence
  Description of Artificial Sequence: Synthetic oligonucleotide
  Sense strand starting at position 814 of SEQ ID NO: 585020
gccacaaugcaagagguaa

SEQ ID NO: 607159 - RNA, 19 nt, Artificial Sequence
  Description of Artificial Sequence: Synthetic oligonucleotide
  Antisense strand to SEQ ID NO: 607158
uuaccucuugcauuguggc

SEQ ID NO: 607160 - RNA, 19 nt, Artificial Sequence
  Description of Artificial Sequence: Synthetic oligonucleotide
  Sense strand starting at position 902 of SEQ ID NO: 585020
ggcugucuguucuccaaca

SEQ ID NO: 607161 - RNA, 19 nt, Artificial Sequence
  Description of Artificial Sequence: Synthetic oligonucleotide
  Antisense strand to SEQ ID NO: 607160
uguuggagaacagacagcc

SEQ ID NO: 607162 - RNA, 19 nt, Artificial Sequence
  Description of Artificial Sequence: Synthetic oligonucleotide
  Sense strand starting at position 1218 of SEQ ID NO: 585020
cucucagugucccugacaa

SEQ ID NO: 607163 - RNA, 19 nt, Artificial Sequence
  Description of Artificial Sequence: Synthetic oligonucleotide
  Antisense strand to SEQ ID NO: 607162
uugucagggacacugagag

SEQ ID NO: 607164 - RNA, 19 nt, Artificial Sequence
  Description of Artificial Sequence: Synthetic oligonucleotide
  Sense strand starting at position 1231 of SEQ ID NO: 585020
ugacaacccucacagaguu

SEQ ID NO: 607165 - RNA, 19 nt, Artificial Sequence
  Description of Artificial Sequence: Synthetic oligonucleotide
  Antisense strand to SEQ ID NO: 607164
aacucugugaggguuguca

SEQ ID NO: 607166 - RNA, 19 nt, Artificial Sequence
  Description of Artificial Sequence: Synthetic oligonucleotide
  Sense strand starting at position 1243 of SEQ ID NO: 585020
cagaguuucugagacagag

SEQ ID NO: 607167 - RNA, 19 nt, Artificial Sequence
  Description of Artificial Sequence: Synthetic oligonucleotide
  Antisense strand to SEQ ID NO: 607166
cucugucucagaaacucug

SEQ ID NO: 607168 - RNA, 19 nt, Artificial Sequence
  Description of Artificial Sequence: Synthetic oligonucleotide
  Sense strand starting at position 1382 of SEQ ID NO: 585020
acaugcuccugugaccaaa

SEQ ID NO: 607169 - RNA, 19 nt, Artificial Sequence
  Description of Artificial Sequence: Synthetic oligonucleotide
  Antisense strand to SEQ ID NO: 607168
uuuggucacaggagcaugu

SEQ ID NO: 607170 - RNA, 19 nt, Artificial Sequence
  Description of Artificial Sequence: Synthetic oligonucleotide
  Sense strand starting at position 2039 of SEQ ID NO: 585020
aacucuuucugggagguca

SEQ ID NO: 607171 - RNA, 19 nt, Artificial Sequence
  Description of Artificial Sequence: Synthetic oligonucleotide
  Antisense strand to SEQ ID NO: 607170
ugaccucccagaaagaguu

SEQ ID NO: 607172 - RNA, 19 nt, Artificial Sequence
  Description of Artificial Sequence: Synthetic oligonucleotide
  Sense strand starting at position 2916 of SEQ ID NO: 585020
aucgguuccuggugggaga

SEQ ID NO: 607173 - RNA, 19 nt, Artificial Sequence
  Description of Artificial Sequence: Synthetic oligonucleotide
  Antisense strand to SEQ ID NO: 607172
ucucccaccaggaaccgau

SEQ ID NO: 607174 - RNA, 19 nt, Artificial Sequence
  Description of Artificial Sequence: Synthetic oligonucleotide
  Sense strand starting at position 3348 of SEQ ID NO: 585020
gccagagggucugaucacu

SEQ ID NO: 607175 - RNA, 19 nt, Artificial Sequence
  Description of Artificial Sequence: Synthetic oligonucleotide
  Antisense strand to SEQ ID NO: 607174
agugaucagacccucuggc

SEQ ID NO: 607176 - RNA, 19 nt, Artificial Sequence
  Description of Artificial Sequence: Synthetic oligonucleotide
  Sense strand starting at position 3660 of SEQ ID NO: 585020
agacaaugucacggucaca

SEQ ID NO: 607177 - RNA, 19 nt, Artificial Sequence
  Description of Artificial Sequence: Synthetic oligonucleotide
  Antisense strand to SEQ ID NO: 607176
ugugaccgugacauugucu

SEQ ID NO: 607178 - RNA, 19 nt, Artificial Sequence
  Description of Artificial Sequence: Synthetic oligonucleotide
  Sense strand starting at position 549 of SEQ ID NO: 585021
aucgguuccuggugggaga

SEQ ID NO: 607179 - RNA, 19 nt, Artificial Sequence
  Description of Artificial Sequence: Synthetic oligonucleotide
  Antisense strand to SEQ ID NO: 607178
ucucccaccaggaaccgau

SEQ ID NO: 607180 - RNA, 19 nt, Artificial Sequence
  Description of Artificial Sequence: Synthetic oligonucleotide
  Sense strand starting at position 981 of SEQ ID NO: 585021
gccagagggucugaucacu

SEQ ID NO: 607181 - RNA, 19 nt, Artificial Sequence
  Description of Artificial Sequence: Synthetic oligonucleotide
  Antisense strand to SEQ ID NO: 607180
agugaucagacccucuggc

SEQ ID NO: 607182 - RNA, 19 nt, Artificial Sequence
  Description of Artificial Sequence: Synthetic oligonucleotide
  Sense strand starting at position 1293 of SEQ ID NO: 585021
agacaaugucacggucaca

SEQ ID NO: 607183 - RNA, 19 nt, Artificial Sequence
  Description of Artificial Sequence: Synthetic oligonucleotide
  Antisense strand to SEQ ID NO: 607182
ugugaccgugacauugucu

SEQ ID NO: 607184 - RNA, 19 nt, Artificial Sequence
  Description of Artificial Sequence: Synthetic oligonucleotide
  Sense strand starting at position 2599 of SEQ ID NO: 585021
aggcuuugggugugaguca

SEQ ID NO: 607185 - RNA, 19 nt, Artificial Sequence
  Description of Artificial Sequence: Synthetic oligonucleotide
  Antisense strand to SEQ ID NO: 607184
ugacucacacccaaagccu

SEQ ID NO: 607186 - RNA, 19 nt, Artificial Sequence
  Description of Artificial Sequence: Synthetic oligonucleotide
  Sense strand starting at position 2606 of SEQ ID NO: 585021
gggugugagucagaccuga

SEQ ID NO: 607187 - RNA, 19 nt, Artificial Sequence
  Description of Artificial Sequence: Synthetic oligonucleotide
  Antisense strand to SEQ ID NO: 607186
ucaggucugacucacaccc

SEQ ID NO: 607188 - RNA, 19 nt, Artificial Sequence
  Description of Artificial Sequence: Synthetic oligonucleotide
  Sense strand starting at position 2619 of SEQ ID NO: 585021
accugaugccacugaauaa

SEQ ID NO: 607189 - RNA, 19 nt, Artificial Sequence
  Description of Artificial Sequence: Synthetic oligonucleotide
  Antisense strand to SEQ ID NO: 607188
uuauucaguggcaucaggu

SEQ ID NO: 607190 - RNA, 19 nt, Artificial Sequence
  Description of Artificial Sequence: Synthetic oligonucleotide
  Sense strand starting at position 2666 of SEQ ID NO: 585021
aggagauugagaugacgua

SEQ ID NO: 607191 - RNA, 19 nt, Artificial Sequence
  Description of Artificial Sequence: Synthetic oligonucleotide
  Antisense strand to SEQ ID NO: 607190
uacgucaucucaaucuccu

SEQ ID NO: 607192 - RNA, 19 nt, Artificial Sequence
  Description of Artificial Sequence: Synthetic oligonucleotide
  Sense strand starting at position 2679 of SEQ ID NO: 585021
gacguagcucugggagaga

SEQ ID NO: 607193 - RNA, 19 nt, Artificial Sequence
  Description of Artificial Sequence: Synthetic oligonucleotide
  Antisense strand to SEQ ID NO: 607192
ucucucccagagcuacguc

SEQ ID NO: 607194 - RNA, 19 nt, Artificial Sequence
  Description of Artificial Sequence: Synthetic oligonucleotide
  Sense strand starting at position 2776 of SEQ ID NO: 585021
ggacaauggugagagaauu

SEQ ID NO: 607195 - RNA, 19 nt, Artificial Sequence
  Description of Artificial Sequence: Synthetic oligonucleotide
  Antisense strand to SEQ ID NO: 607194
aauucucucaccauugucc

SEQ ID NO: 607196 - RNA, 19 nt, Artificial Sequence
  Description of Artificial Sequence: Synthetic oligonucleotide
  Sense strand starting at position 2916 of SEQ ID NO: 585021
gacugaaguuugggaagaa

SEQ ID NO: 607197 - RNA, 19 nt, Artificial Sequence
  Description of Artificial Sequence: Synthetic oligonucleotide
  Antisense strand to SEQ ID NO: 607196
uucuucccaaacuucaguc

SEQ ID NO: 607198 - RNA, 19 nt, Artificial Sequence
  Description of Artificial Sequence: Synthetic oligonucleotide
  Sense strand starting at position 2917 of SEQ ID NO: 585021
acugaaguuugggaagaaa

SEQ ID NO: 607199 - RNA, 19 nt, Artificial Sequence
  Description of Artificial Sequence: Synthetic oligonucleotide
  Antisense strand to SEQ ID NO: 607198
uuucuucccaaacuucagu

SEQ ID NO: 607200 - RNA, 19 nt, Artificial Sequence
  Description of Artificial Sequence: Synthetic oligonucleotide
  Sense strand starting at position 2977 of SEQ ID NO: 585021
gaaacaguguuggaaacaa

SEQ ID NO: 607201 - RNA, 19 nt, Artificial Sequence
  Description of Artificial Sequence: Synthetic oligonucleotide
  Antisense strand to SEQ ID NO: 607200
uuguuuccaacacuguuuc

SEQ ID NO: 607202 - RNA, 19 nt, Artificial Sequence
  Description of Artificial Sequence: Synthetic oligonucleotide
  Sense strand starting at position 3231 of SEQ ID NO: 585021
gagagaaucuaaccuguuu

SEQ ID NO: 607203 - RNA, 19 nt, Artificial Sequence
  Description of Artificial Sequence: Synthetic oligonucleotide
  Antisense strand to SEQ ID NO: 607202
aaacagguuagauucucuc

SEQ ID NO: 607204 - RNA, 19 nt, Artificial Sequence
  Description of Artificial Sequence: Synthetic oligonucleotide
  Sense strand starting at position 3239 of SEQ ID NO: 585021
cuaaccuguuucuggacaa

SEQ ID NO: 607205 - RNA, 19 nt, Artificial Sequence
  Description of Artificial Sequence: Synthetic oligonucleotide
  Antisense strand to SEQ ID NO: 607204
uuguccagaaacagguuag

SEQ ID NO: 607206 - RNA, 19 nt, Artificial Sequence
  Description of Artificial Sequence: Synthetic oligonucleotide
  Sense strand starting at position 3735 of SEQ ID NO: 585021
gaggcugagaacugugaaa

SEQ ID NO: 607207 - RNA, 19 nt, Artificial Sequence
  Description of Artificial Sequence: Synthetic oligonucleotide
  Antisense strand to SEQ ID NO: 607206
uuucacaguucucagccuc

SEQ ID NO: 607208 - RNA, 19 nt, Artificial Sequence
  Description of Artificial Sequence: Synthetic oligonucleotide
  Sense strand starting at position 3737 of SEQ ID NO: 585021
ggcugagaacugugaaaca

SEQ ID NO: 607209 - RNA, 19 nt, Artificial Sequence
  Description of Artificial Sequence: Synthetic oligonucleotide
  Antisense strand to SEQ ID NO: 607208
uguuucacaguucucagcc

SEQ ID NO: 607210 - RNA, 19 nt, Artificial Sequence
  Description of Artificial Sequence: Synthetic oligonucleotide
  Sense strand starting at position 3935 of SEQ ID NO: 585021
auuagaauugacuggcaga

SEQ ID NO: 607211 - RNA, 19 nt, Artificial Sequence
  Description of Artificial Sequence: Synthetic oligonucleotide
  Antisense strand to SEQ ID NO: 607210
ucugccagucaauucuaau

SEQ ID NO: 607212 - RNA, 19 nt, Artificial Sequence
  Description of Artificial Sequence: Synthetic oligonucleotide
  Sense strand starting at position 178 of SEQ ID NO: 585022
aggagacuggcuuggaauu

SEQ ID NO: 607213 - RNA, 19 nt, Artificial Sequence
  Description of Artificial Sequence: Synthetic oligonucleotide
  Antisense strand to SEQ ID NO: 607212
aauuccaagccagucuccu

SEQ ID NO: 607214 - RNA, 19 nt, Artificial Sequence
  Description of Artificial Sequence: Synthetic oligonucleotide
  Sense strand starting at position 266 of SEQ ID NO: 585022
augccuaucccagaugagu

SEQ ID NO: 607215 - RNA, 19 nt, Artificial Sequence
  Description of Artificial Sequence: Synthetic oligonucleotide
  Antisense strand to SEQ ID NO: 607214
acucaucugggauaggcau

SEQ ID NO: 607216 - RNA, 19 nt, Artificial Sequence
  Description of Artificial Sequence: Synthetic oligonucleotide
  Sense strand starting at position 372 of SEQ ID NO: 585022
gccacaaugcaagagguaa

SEQ ID NO: 607217 - RNA, 19 nt, Artificial Sequence
  Description of Artificial Sequence: Synthetic oligonucleotide
  Antisense strand to SEQ ID NO: 607216
uuaccucuugcauuguggc

SEQ ID NO: 607218 - RNA, 19 nt, Artificial Sequence
  Description of Artificial Sequence: Synthetic oligonucleotide
  Sense strand starting at position 460 of SEQ ID NO: 585022
ggcugucuguucuccaaca

SEQ ID NO: 607219 - RNA, 19 nt, Artificial Sequence
  Description of Artificial Sequence: Synthetic oligonucleotide
  Antisense strand to SEQ ID NO: 607218
uguuggagaacagacagcc

SEQ ID NO: 607220 - RNA, 19 nt, Artificial Sequence
  Description of Artificial Sequence: Synthetic oligonucleotide
  Sense strand starting at position 776 of SEQ ID NO: 585022
cucucagugucccugacaa

SEQ ID NO: 607221 - RNA, 19 nt, Artificial Sequence
  Description of Artificial Sequence: Synthetic oligonucleotide
  Antisense strand to SEQ ID NO: 607220
uugucagggacacugagag

SEQ ID NO: 607222 - RNA, 19 nt, Artificial Sequence
  Description of Artificial Sequence: Synthetic oligonucleotide
  Sense strand starting at position 789 of SEQ ID NO: 585022
ugacaacccucacagaguu

SEQ ID NO: 607223 - RNA, 19 nt, Artificial Sequence
  Description of Artificial Sequence: Synthetic oligonucleotide
  Antisense strand to SEQ ID NO: 607222
aacucugugaggguuguca

SEQ ID NO: 607224 - RNA, 19 nt, Artificial Sequence
  Description of Artificial Sequence: Synthetic oligonucleotide
  Sense strand starting at position 801 of SEQ ID NO: 585022
cagaguuucugagacagag

SEQ ID NO: 607225 - RNA, 19 nt, Artificial Sequence
  Description of Artificial Sequence: Synthetic oligonucleotide
  Antisense strand to SEQ ID NO: 607224
cucugucucagaaacucug

SEQ ID NO: 607226 - RNA, 19 nt, Artificial Sequence
  Description of Artificial Sequence: Synthetic oligonucleotide
  Sense strand starting at position 940 of SEQ ID NO: 585022
acaugcuccugugaccaaa

SEQ ID NO: 607227 - RNA, 19 nt, Artificial Sequence
  Description of Artificial Sequence: Synthetic oligonucleotide
  Antisense strand to SEQ ID NO: 607226
uuuggucacaggagcaugu

SEQ ID NO: 607228 - RNA, 19 nt, Artificial Sequence
  Description of Artificial Sequence: Synthetic oligonucleotide
  Sense strand starting at position 1597 of SEQ ID NO: 585022
aacucuuucugggagguca

SEQ ID NO: 607229 - RNA, 19 nt, Artificial Sequence
  Description of Artificial Sequence: Synthetic oligonucleotide
  Antisense strand to SEQ ID NO: 607228
ugaccucccagaaagaguu

SEQ ID NO: 607230 - RNA, 19 nt, Artificial Sequence
  Description of Artificial Sequence: Synthetic oligonucleotide
  Sense strand starting at position 2474 of SEQ ID NO: 585022
aucgguuccuggugggaga

SEQ ID NO: 607231 - RNA, 19 nt, Artificial Sequence
  Description of Artificial Sequence: Synthetic oligonucleotide
  Antisense strand to SEQ ID NO: 607230
ucucccaccaggaaccgau

SEQ ID NO: 607232 - RNA, 19 nt, Artificial Sequence
  Description of Artificial Sequence: Synthetic oligonucleotide
  Sense strand starting at position 2906 of SEQ ID NO: 585022
gccagagggucugaucacu

SEQ ID NO: 607233 - RNA, 19 nt, Artificial Sequence
  Description of Artificial Sequence: Synthetic oligonucleotide
  Antisense strand to SEQ ID NO: 607232
agugaucagacccucuggc

SEQ ID NO: 607234 - RNA, 19 nt, Artificial Sequence
  Description of Artificial Sequence: Synthetic oligonucleotide
  Sense strand starting at position 3218 of SEQ ID NO: 585022
agacaaugucacggucaca

SEQ ID NO: 607235 - RNA, 19 nt, Artificial Sequence
  Description of Artificial Sequence: Synthetic oligonucleotide
  Antisense strand to SEQ ID NO: 607234
ugugaccgugacauugucu

SEQ ID NO: 607236 - RNA, 19 nt, Artificial Sequence
  Description of Artificial Sequence: Synthetic oligonucleotide
  Sense strand starting at position 6 of SEQ ID NO: 585023
ggcugucuguucuccaaca

SEQ ID NO: 607237 - RNA, 19 nt, Artificial Sequence
  Description of Artificial Sequence: Synthetic oligonucleotide
  Antisense strand to SEQ ID NO: 607236
uguuggagaacagacagcc

SEQ ID NO: 607238 - RNA, 19 nt, Artificial Sequence
  Description of Artificial Sequence: Synthetic oligonucleotide
  Sense strand starting at position 322 of SEQ ID NO: 585023
cucucagugucccugacaa

SEQ ID NO: 607239 - RNA, 19 nt, Artificial Sequence
  Description of Artificial Sequence: Synthetic oligonucleotide
  Antisense strand to SEQ ID NO: 607238
uugucagggacacugagag

SEQ ID NO: 607240 - RNA, 19 nt, Artificial Sequence
  Description of Artificial Sequence: Synthetic oligonucleotide
  Sense strand starting at position 335 of SEQ ID NO: 585023
ugacaacccucacagaguu

SEQ ID NO: 607241 - RNA, 19 nt, Artificial Sequence
  Description of Artificial Sequence: Synthetic oligonucleotide
  Antisense strand to SEQ ID NO: 607240
aacucugugaggguuguca

SEQ ID NO: 607242 - RNA, 19 nt, Artificial Sequence
  Description of Artificial Sequence: Synthetic oligonucleotide
  Sense strand starting at position 347 of SEQ ID NO: 585023
cagaguuucugagacagag

SEQ ID NO: 607243 - RNA, 19 nt, Artificial Sequence
  Description of Artificial Sequence: Synthetic oligonucleotide
  Antisense strand to SEQ ID NO: 607242
cucugucucagaaacucug

SEQ ID NO: 607244 - RNA, 19 nt, Artificial Sequence
  Description of Artificial Sequence: Synthetic oligonucleotide
  Sense strand starting at position 486 of SEQ ID NO: 585023
acaugcuccugugaccaaa

SEQ ID NO: 607245 - RNA, 19 nt, Artificial Sequence
  Description of Artificial Sequence: Synthetic oligonucleotide
  Antisense strand to SEQ ID NO: 607244
uuuggucacaggagcaugu

SEQ ID NO: 607246 - RNA, 19 nt, Artificial Sequence
  Description of Artificial Sequence: Synthetic oligonucleotide
  Sense strand starting at position 1143 of SEQ ID NO: 585023
aacucuuucugggagguca

SEQ ID NO: 607247 - RNA, 19 nt, Artificial Sequence
  Description of Artificial Sequence: Synthetic oligonucleotide
  Antisense strand to SEQ ID NO: 607246
ugaccucccagaaagaguu

SEQ ID NO: 607248 - RNA, 19 nt, Artificial Sequence
  Description of Artificial Sequence: Synthetic oligonucleotide
  Sense strand starting at position 2020 of SEQ ID NO: 585023
aucgguuccuggugggaga

SEQ ID NO: 607249 - RNA, 19 nt, Artificial Sequence
  Description of Artificial Sequence: Synthetic oligonucleotide
  Antisense strand to SEQ ID NO: 607248
ucucccaccaggaaccgau

SEQ ID NO: 607250 - RNA, 19 nt, Artificial Sequence
  Description of Artificial Sequence: Synthetic oligonucleotide
  Sense strand starting at position 2452 of SEQ ID NO: 585023
gccagagggucugaucacu

SEQ ID NO: 607251 - RNA, 19 nt, Artificial Sequence
  Description of Artificial Sequence: Synthetic oligonucleotide
  Antisense strand to SEQ ID NO: 607250
agugaucagacccucuggc

SEQ ID NO: 607252 - RNA, 19 nt, Artificial Sequence
  Description of Artificial Sequence: Synthetic oligonucleotide
  Sense strand starting at position 2764 of SEQ ID NO: 585023
agacaaugucacggucaca

SEQ ID NO: 607253 - RNA, 19 nt, Artificial Sequence
  Description of Artificial Sequence: Synthetic oligonucleotide
  Antisense strand to SEQ ID NO: 607252
ugugaccgugacauugucu

SEQ ID NO: 607254 - RNA, 19 nt, Artificial Sequence
  Description of Artificial Sequence: Synthetic oligonucleotide
  Sense strand starting at position 190 of SEQ ID NO: 585024
aggagacuggcuuggaauu

SEQ ID NO: 607255 - RNA, 19 nt, Artificial Sequence
  Description of Artificial Sequence: Synthetic oligonucleotide
  Antisense strand to SEQ ID NO: 607254
aauuccaagccagucuccu

SEQ ID NO: 607256 - RNA, 19 nt, Artificial Sequence
  Description of Artificial Sequence: Synthetic oligonucleotide
  Sense strand starting at position 278 of SEQ ID NO: 585024
augccuaucccagaugagu

SEQ ID NO: 607257 - RNA, 19 nt, Artificial Sequence
  Description of Artificial Sequence: Synthetic oligonucleotide
  Antisense strand to SEQ ID NO: 607256
acucaucugggauaggcau

SEQ ID NO: 607258 - RNA, 19 nt, Artificial Sequence
  Description of Artificial Sequence: Synthetic oligonucleotide
  Sense strand starting at position 384 of SEQ ID NO: 585024
gccacaaugcaagagguaa

SEQ ID NO: 607259 - RNA, 19 nt, Artificial Sequence
  Description of Artificial Sequence: Synthetic oligonucleotide
  Antisense strand to SEQ ID NO: 607258
uuaccucuugcauuguggc

SEQ ID NO: 607260 - RNA, 19 nt, Artificial Sequence
  Description of Artificial Sequence: Synthetic oligonucleotide
  Sense strand starting at position 472 of SEQ ID NO: 585024
ggcugucuguucuccaaca

SEQ ID NO: 607261 - RNA, 19 nt, Artificial Sequence
  Description of Artificial Sequence: Synthetic oligonucleotide
  Antisense strand to SEQ ID NO: 607260
uguuggagaacagacagcc

SEQ ID NO: 607262 - RNA, 19 nt, Artificial Sequence
  Description of Artificial Sequence: Synthetic oligonucleotide
  Sense strand starting at position 788 of SEQ ID NO: 585024
cucucagugucccugacaa

SEQ ID NO: 607263 - RNA, 19 nt, Artificial Sequence
  Description of Artificial Sequence: Synthetic oligonucleotide
  Antisense strand to SEQ ID NO: 607262
uugucagggacacugagag

SEQ ID NO: 607264 - RNA, 19 nt, Artificial Sequence
  Description of Artificial Sequence: Synthetic oligonucleotide
  Sense strand starting at position 801 of SEQ ID NO: 585024
ugacaacccucacagaguu

SEQ ID NO: 607265 - RNA, 19 nt, Artificial Sequence
  Description of Artificial Sequence: Synthetic oligonucleotide
  Antisense strand to SEQ ID NO: 607264
aacucugugaggguuguca

SEQ ID NO: 607266 - RNA, 19 nt, Artificial Sequence
  Description of Artificial Sequence: Synthetic oligonucleotide
  Sense strand starting at position 813 of SEQ ID NO: 585024
cagaguuucugagacagag

SEQ ID NO: 607267 - RNA, 19 nt, Artificial Sequence
  Description of Artificial Sequence: Synthetic oligonucleotide
  Antisense strand to SEQ ID NO: 607266
cucugucucagaaacucug

SEQ ID NO: 607268 - RNA, 19 nt, Artificial Sequence
  Description of Artificial Sequence: Synthetic oligonucleotide
  Sense strand starting at position 952 of SEQ ID NO: 585024
acaugcuccugugaccaaa

SEQ ID NO: 607269 - RNA, 19 nt, Artificial Sequence
  Description of Artificial Sequence: Synthetic oligonucleotide
  Antisense strand to SEQ ID NO: 607268
uuuggucacaggagcaugu

SEQ ID NO: 607270 - RNA, 19 nt, Artificial Sequence
  Description of Artificial Sequence: Synthetic oligonucleotide
  Sense strand starting at position 1609 of SEQ ID NO: 585024
aacucuuucugggagguca

SEQ ID NO: 607271 - RNA, 19 nt, Artificial Sequence
  Description of Artificial Sequence: Synthetic oligonucleotide
  Antisense strand to SEQ ID NO: 607270
ugaccucccagaaagaguu

SEQ ID NO: 607272 - RNA, 19 nt, Artificial Sequence
  Description of Artificial Sequence: Synthetic oligonucleotide
  Sense strand starting at position 2486 of SEQ ID NO: 585024
aucgguuccuggugggaga

SEQ ID NO: 607273 - RNA, 19 nt, Artificial Sequence
  Description of Artificial Sequence: Synthetic oligonucleotide
  Antisense strand to SEQ ID NO: 607272
ucucccaccaggaaccgau

SEQ ID NO: 607274 - RNA, 19 nt, Artificial Sequence
  Description of Artificial Sequence: Synthetic oligonucleotide
  Sense strand starting at position 2918 of SEQ ID NO: 585024
gccagagggucugaucacu

SEQ ID NO: 607275 - RNA, 19 nt, Artificial Sequence
  Description of Artificial Sequence: Synthetic oligonucleotide
  Antisense strand to SEQ ID NO: 607274
agugaucagacccucuggc

SEQ ID NO: 607276 - RNA, 19 nt, Artificial Sequence
  Description of Artificial Sequence: Synthetic oligonucleotide
  Sense strand starting at position 3230 of SEQ ID NO: 585024
agacaaugucacggucaca

SEQ ID NO: 607277 - RNA, 19 nt, Artificial Sequence
  Description of Artificial Sequence: Synthetic oligonucleotide
  Antisense strand to SEQ ID NO: 607276
ugugaccgugacauugucu

SEQ ID NO: 607278 - RNA, 19 nt, Artificial Sequence
  Description of Artificial Sequence: Synthetic oligonucleotide
  Sense strand starting at position 92 of SEQ ID NO: 585025
cuggauggguucucgcaaa

SEQ ID NO: 607279 - RNA, 19 nt, Artificial Sequence
  Description of Artificial Sequence: Synthetic oligonucleotide
  Antisense strand to SEQ ID NO: 607278
uuugcgagaacccauccag

SEQ ID NO: 607280 - RNA, 19 nt, Artificial Sequence
  Description of Artificial Sequence: Synthetic oligonucleotide
  Sense strand starting at position 214 of SEQ ID NO: 585025
agacuuaaucacgagcaca

SEQ ID NO: 607281 - RNA, 19 nt, Artificial Sequence
  Description of Artificial Sequence: Synthetic oligonucleotide
  Antisense strand to SEQ ID NO: 607280
ugugcucgugauuaagucu

SEQ ID NO: 607282 - RNA, 19 nt, Artificial Sequence
  Description of Artificial Sequence: Synthetic oligonucleotide
  Sense strand starting at position 377 of SEQ ID NO: 585025
gacagagguucccaacaag

SEQ ID NO: 607283 - RNA, 19 nt, Artificial Sequence
  Description of Artificial Sequence: Synthetic oligonucleotide
  Antisense strand to SEQ ID NO: 607282
cuuguugggaaccucuguc

SEQ ID NO: 607284 - RNA, 19 nt, Artificial Sequence
  Description of Artificial Sequence: Synthetic oligonucleotide
  Sense strand starting at position 592 of SEQ ID NO: 585025
uuauaaucccaccguuaug

SEQ ID NO: 607285 - RNA, 19 nt, Artificial Sequence
  Description of Artificial Sequence: Synthetic oligonucleotide
  Antisense strand to SEQ ID NO: 607284
cauaacggugggauuauaa

SEQ ID NO: 607286 - RNA, 19 nt, Artificial Sequence
  Description of Artificial Sequence: Synthetic oligonucleotide
  Sense strand starting at position 601 of SEQ ID NO: 585025
caccguuauggaugccuaa

SEQ ID NO: 607287 - RNA, 19 nt, Artificial Sequence
  Description of Artificial Sequence: Synthetic oligonucleotide
  Antisense strand to SEQ ID NO: 607286
uuaggcauccauaacggug

SEQ ID NO: 607288 - RNA, 19 nt, Artificial Sequence
  Description of Artificial Sequence: Synthetic oligonucleotide
  Sense strand starting at position 627 of SEQ ID NO: 585025
gccaucagucaagggugau

SEQ ID NO: 607289 - RNA, 19 nt, Artificial Sequence
  Description of Artificial Sequence: Synthetic oligonucleotide
  Antisense strand to SEQ ID NO: 607288
aucacccuugacugauggc

SEQ ID NO: 607290 - RNA, 19 nt, Artificial Sequence
  Description of Artificial Sequence: Synthetic oligonucleotide
  Sense strand starting at position 628 of SEQ ID NO: 585025
ccaucagucaagggugaua

SEQ ID NO: 607291 - RNA, 19 nt, Artificial Sequence
  Description of Artificial Sequence: Synthetic oligonucleotide
  Antisense strand to SEQ ID NO: 607290
uaucacccuugacugaugg

SEQ ID NO: 607292 - RNA, 19 nt, Artificial Sequence
  Description of Artificial Sequence: Synthetic oligonucleotide
  Sense strand starting at position 630 of SEQ ID NO: 585025
aucagucaagggugauaga

SEQ ID NO: 607293 - RNA, 19 nt, Artificial Sequence
  Description of Artificial Sequence: Synthetic oligonucleotide
  Antisense strand to SEQ ID NO: 607292
ucuaucacccuugacugau

SEQ ID NO: 607294 - RNA, 19 nt, Artificial Sequence
  Description of Artificial Sequence: Synthetic oligonucleotide
  Sense strand starting at position 641 of SEQ ID NO: 585025
gugauagaugagggucauc

SEQ ID NO: 607295 - RNA, 19 nt, Artificial Sequence
  Description of Artificial Sequence: Synthetic oligonucleotide
  Antisense strand to SEQ ID NO: 607294
gaugacccucaucuaucac

SEQ ID NO: 607296 - RNA, 19 nt, Artificial Sequence
  Description of Artificial Sequence: Synthetic oligonucleotide
  Sense strand starting at position 809 of SEQ ID NO: 585025
gacaaauggcucggccaca

SEQ ID NO: 607297 - RNA, 19 nt, Artificial Sequence
  Description of Artificial Sequence: Synthetic oligonucleotide
  Antisense strand to SEQ ID NO: 607296
uguggccgagccauuuguc

SEQ ID NO: 607298 - RNA, 19 nt, Artificial Sequence
  Description of Artificial Sequence: Synthetic oligonucleotide
  Sense strand starting at position 900 of SEQ ID NO: 585025
aggcuuuaacaggaucuuu

SEQ ID NO: 607299 - RNA, 19 nt, Artificial Sequence
  Description of Artificial Sequence: Synthetic oligonucleotide
  Antisense strand to SEQ ID NO: 607298
aaagauccuguuaaagccu

SEQ ID NO: 607300 - RNA, 19 nt, Artificial Sequence
  Description of Artificial Sequence: Synthetic oligonucleotide
  Sense strand starting at position 1195 of SEQ ID NO: 585025
ugcugaggccuccaauaug

SEQ ID NO: 607301 - RNA, 19 nt, Artificial Sequence
  Description of Artificial Sequence: Synthetic oligonucleotide
  Antisense strand to SEQ ID NO: 607300
cauauuggaggccucagca

SEQ ID NO: 607302 - RNA, 19 nt, Artificial Sequence
  Description of Artificial Sequence: Synthetic oligonucleotide
  Sense strand starting at position 1376 of SEQ ID NO: 585025
cagaccaucgccugugaaa

SEQ ID NO: 607303 - RNA, 19 nt, Artificial Sequence
  Description of Artificial Sequence: Synthetic oligonucleotide
  Antisense strand to SEQ ID NO: 607302
uuucacaggcgauggucug

SEQ ID NO: 607304 - RNA, 19 nt, Artificial Sequence
  Description of Artificial Sequence: Synthetic oligonucleotide
  Sense strand starting at position 1616 of SEQ ID NO: 585025
ggccuuccgcgguuauaca

SEQ ID NO: 607305 - RNA, 19 nt, Artificial Sequence
  Description of Artificial Sequence: Synthetic oligonucleotide
  Antisense strand to SEQ ID NO: 607304
uguauaaccgcggaaggcc

SEQ ID NO: 607306 - RNA, 19 nt, Artificial Sequence
  Description of Artificial Sequence: Synthetic oligonucleotide
  Sense strand starting at position 2068 of SEQ ID NO: 585025
aaggaugcuguccgaggua

SEQ ID NO: 607307 - RNA, 19 nt, Artificial Sequence
  Description of Artificial Sequence: Synthetic oligonucleotide
  Antisense strand to SEQ ID NO: 607306
uaccucggacagcauccuu

SEQ ID NO: 607308 - RNA, 19 nt, Artificial Sequence
  Description of Artificial Sequence: Synthetic oligonucleotide
  Sense strand starting at position 2110 of SEQ ID NO: 585025
ucaggaagguguucugaau

SEQ ID NO: 607309 - RNA, 19 nt, Artificial Sequence
  Description of Artificial Sequence: Synthetic oligonucleotide
  Antisense strand to SEQ ID NO: 607308
auucagaacaccuuccuga

SEQ ID NO: 607310 - RNA, 19 nt, Artificial Sequence
  Description of Artificial Sequence: Synthetic oligonucleotide
  Sense strand starting at position 2176 of SEQ ID NO: 585025
gggcuugaggguuauacua

SEQ ID NO: 607311 - RNA, 19 nt, Artificial Sequence
  Description of Artificial Sequence: Synthetic oligonucleotide
  Antisense strand to SEQ ID NO: 607310
uaguauaacccucaagccc

SEQ ID NO: 607312 - RNA, 19 nt, Artificial Sequence
  Description of Artificial Sequence: Synthetic oligonucleotide
  Sense strand starting at position 2409 of SEQ ID NO: 585025
cauguaugaccucagguga

SEQ ID NO: 607313 - RNA, 19 nt, Artificial Sequence
  Description of Artificial Sequence: Synthetic oligonucleotide
  Antisense strand to SEQ ID NO: 607312
ucaccugaggucauacaug

SEQ ID NO: 607314 - RNA, 19 nt, Artificial Sequence
  Description of Artificial Sequence: Synthetic oligonucleotide
  Sense strand starting at position 2497 of SEQ ID NO: 585025
uguuaauucgagcagaaug

SEQ ID NO: 607315 - RNA, 19 nt, Artificial Sequence
  Description of Artificial Sequence: Synthetic oligonucleotide
  Antisense strand to SEQ ID NO: 607314
cauucugcucgaauuaaca

SEQ ID NO: 607316 - RNA, 19 nt, Artificial Sequence
  Description of Artificial Sequence: Synthetic oligonucleotide
  Sense strand starting at position 2499 of SEQ ID NO: 585025
uuaauucgagcagaauguu

SEQ ID NO: 607317 - RNA, 19 nt, Artificial Sequence
  Description of Artificial Sequence: Synthetic oligonucleotide
  Antisense strand to SEQ ID NO: 607316
aacauucugcucgaauuaa

SEQ ID NO: 607318 - RNA, 19 nt, Artificial Sequence
  Description of Artificial Sequence: Synthetic oligonucleotide
  Sense strand starting at position 2624 of SEQ ID NO: 585025
uguccugcuguguaauaaa

SEQ ID NO: 607319 - RNA, 19 nt, Artificial Sequence
  Description of Artificial Sequence: Synthetic oligonucleotide
  Antisense strand to SEQ ID NO: 607318
uuuauuacacagcaggaca

SEQ ID NO: 607320 - RNA, 19 nt, Artificial Sequence
  Description of Artificial Sequence: Synthetic oligonucleotide
  Sense strand starting at position 2706 of SEQ ID NO: 585025
ccguuauucucaucuuauu

SEQ ID NO: 607321 - RNA, 19 nt, Artificial Sequence
  Description of Artificial Sequence: Synthetic oligonucleotide
  Antisense strand to SEQ ID NO: 607320
aauaagaugagaauaacgg

SEQ ID NO: 607322 - RNA, 19 nt, Artificial Sequence
  Description of Artificial Sequence: Synthetic oligonucleotide
  Sense strand starting at position 2717 of SEQ ID NO: 585025
aucuuauugacagaagcga

SEQ ID NO: 607323 - RNA, 19 nt, Artificial Sequence
  Description of Artificial Sequence: Synthetic oligonucleotide
  Antisense strand to SEQ ID NO: 607322
ucgcuucugucaauaagau

SEQ ID NO: 607324 - RNA, 19 nt, Artificial Sequence
  Description of Artificial Sequence: Synthetic oligonucleotide
  Sense strand starting at position 2825 of SEQ ID NO: 585025
gcucaaagaaucugguuag

SEQ ID NO: 607325 - RNA, 19 nt, Artificial Sequence
  Description of Artificial Sequence: Synthetic oligonucleotide
  Antisense strand to SEQ ID NO: 607324
cuaaccagauucuuugagc

SEQ ID NO: 607326 - RNA, 19 nt, Artificial Sequence
  Description of Artificial Sequence: Synthetic oligonucleotide
  Sense strand starting at position 2828 of SEQ ID NO: 585025
caaagaaucugguuaguaa

SEQ ID NO: 607327 - RNA, 19 nt, Artificial Sequence
  Description of Artificial Sequence: Synthetic oligonucleotide
  Antisense strand to SEQ ID NO: 607326
uuacuaaccagauucuuug

SEQ ID NO: 607328 - RNA, 19 nt, Artificial Sequence
  Description of Artificial Sequence: Synthetic oligonucleotide
  Sense strand starting at position 2831 of SEQ ID NO: 585025
agaaucugguuaguaaaua

SEQ ID NO: 607329 - RNA, 19 nt, Artificial Sequence
  Description of Artificial Sequence: Synthetic oligonucleotide
  Antisense strand to SEQ ID NO: 607328
uauuuacuaaccagauucu

SEQ ID NO: 607330 - RNA, 19 nt, Artificial Sequence
  Description of Artificial Sequence: Synthetic oligonucleotide
  Sense strand starting at position 2929 of SEQ ID NO: 585025
aauggugucauagaaggua

SEQ ID NO: 607331 - RNA, 19 nt, Artificial Sequence
  Description of Artificial Sequence: Synthetic oligonucleotide
  Antisense strand to SEQ ID NO: 607330
uaccuucuaugacaccauu

SEQ ID NO: 607332 - RNA, 19 nt, Artificial Sequence
  Description of Artificial Sequence: Synthetic oligonucleotide
  Sense strand starting at position 3003 of SEQ ID NO: 585025
gccacauguuguccuagga

SEQ ID NO: 607333 - RNA, 19 nt, Artificial Sequence
  Description of Artificial Sequence: Synthetic oligonucleotide
  Antisense strand to SEQ ID NO: 607332
uccuaggacaacauguggc

SEQ ID NO: 607334 - RNA, 19 nt, Artificial Sequence
  Description of Artificial Sequence: Synthetic oligonucleotide
  Sense strand starting at position 3050 of SEQ ID NO: 585025
uucucacaguguuuacauu

SEQ ID NO: 607335 - RNA, 19 nt, Artificial Sequence
  Description of Artificial Sequence: Synthetic oligonucleotide
  Antisense strand to SEQ ID NO: 607334
aauguaaacacugugagaa

SEQ ID NO: 607336 - RNA, 19 nt, Artificial Sequence
  Description of Artificial Sequence: Synthetic oligonucleotide
  Sense strand starting at position 3051 of SEQ ID NO: 585025
ucucacaguguuuacauua

SEQ ID NO: 607337 - RNA, 19 nt, Artificial Sequence
  Description of Artificial Sequence: Synthetic oligonucleotide
  Antisense strand to SEQ ID NO: 607336
uaauguaaacacugugaga

SEQ ID NO: 607338 - RNA, 19 nt, Artificial Sequence
  Description of Artificial Sequence: Synthetic oligonucleotide
  Sense strand starting at position 3100 of SEQ ID NO: 585025
augucaaguaucgauaagu

SEQ ID NO: 607339 - RNA, 19 nt, Artificial Sequence
  Description of Artificial Sequence: Synthetic oligonucleotide
  Antisense strand to SEQ ID NO: 607338
acuuaucgauacuugacau

SEQ ID NO: 607340 - RNA, 19 nt, Artificial Sequence
  Description of Artificial Sequence: Synthetic oligonucleotide
  Sense strand starting at position 3109 of SEQ ID NO: 585025
aucgauaaguggucagggu

SEQ ID NO: 607341 - RNA, 19 nt, Artificial Sequence
  Description of Artificial Sequence: Synthetic oligonucleotide
  Antisense strand to SEQ ID NO: 607340
acccugaccacuuaucgau

SEQ ID NO: 607342 - RNA, 19 nt, Artificial Sequence
  Description of Artificial Sequence: Synthetic oligonucleotide
  Sense strand starting at position 3469 of SEQ ID NO: 585025
acaguugcgaucuauaguc

SEQ ID NO: 607343 - RNA, 19 nt, Artificial Sequence
  Description of Artificial Sequence: Synthetic oligonucleotide
  Antisense strand to SEQ ID NO: 607342
gacuauagaucgcaacugu

SEQ ID NO: 607344 - RNA, 19 nt, Artificial Sequence
  Description of Artificial Sequence: Synthetic oligonucleotide
  Sense strand starting at position 3478 of SEQ ID NO: 585025
aucuauaguccucagauuc

SEQ ID NO: 607345 - RNA, 19 nt, Artificial Sequence
  Description of Artificial Sequence: Synthetic oligonucleotide
  Antisense strand to SEQ ID NO: 607344
gaaucugaggacuauagau

SEQ ID NO: 607346 - RNA, 19 nt, Artificial Sequence
  Description of Artificial Sequence: Synthetic oligonucleotide
  Sense strand starting at position 3505 of SEQ ID NO: 585025
ggaaccauguuucucacuu

SEQ ID NO: 607347 - RNA, 19 nt, Artificial Sequence
  Description of Artificial Sequence: Synthetic oligonucleotide
  Antisense strand to SEQ ID NO: 607346
aagugagaaacaugguucc

SEQ ID NO: 607348 - RNA, 19 nt, Artificial Sequence
  Description of Artificial Sequence: Synthetic oligonucleotide
  Sense strand starting at position 3509 of SEQ ID NO: 585025
ccauguuucucacuuuaga

SEQ ID NO: 607349 - RNA, 19 nt, Artificial Sequence
  Description of Artificial Sequence: Synthetic oligonucleotide
  Antisense strand to SEQ ID NO: 607348
ucuaaagugagaaacaugg

SEQ ID NO: 607350 - RNA, 19 nt, Artificial Sequence
  Description of Artificial Sequence: Synthetic oligonucleotide
  Sense strand starting at position 3512 of SEQ ID NO: 585025
uguuucucacuuuagagaa

SEQ ID NO: 607351 - RNA, 19 nt, Artificial Sequence
  Description of Artificial Sequence: Synthetic oligonucleotide
  Antisense strand to SEQ ID NO: 607350
uucucuaaagugagaaaca

SEQ ID NO: 607352 - RNA, 19 nt, Artificial Sequence
  Description of Artificial Sequence: Synthetic oligonucleotide
  Sense strand starting at position 3547 of SEQ ID NO: 585025
uguucuuguuucuccaaga

SEQ ID NO: 607353 - RNA, 19 nt, Artificial Sequence
  Description of Artificial Sequence: Synthetic oligonucleotide
  Antisense strand to SEQ ID NO: 607352
ucuuggagaaacaagaaca

SEQ ID NO: 607354 - RNA, 19 nt, Artificial Sequence
  Description of Artificial Sequence: Synthetic oligonucleotide
  Sense strand starting at position 3548 of SEQ ID NO: 585025
guucuuguuucuccaagaa

SEQ ID NO: 607355 - RNA, 19 nt, Artificial Sequence
  Description of Artificial Sequence: Synthetic oligonucleotide
  Antisense strand to SEQ ID NO: 607354
uucuuggagaaacaagaac

SEQ ID NO: 607356 - RNA, 19 nt, Artificial Sequence
  Description of Artificial Sequence: Synthetic oligonucleotide
  Sense strand starting at position 3552 of SEQ ID NO: 585025
uuguuucuccaagaaguuu

SEQ ID NO: 607357 - RNA, 19 nt, Artificial Sequence
  Description of Artificial Sequence: Synthetic oligonucleotide
  Antisense strand to SEQ ID NO: 607356
aaacuucuuggagaaacaa

SEQ ID NO: 607358 - RNA, 19 nt, Artificial Sequence
  Description of Artificial Sequence: Synthetic oligonucleotide
  Sense strand starting at position 61 of SEQ ID NO: 585026
gcuuucuuucuuggagcau

SEQ ID NO: 607359 - RNA, 19 nt, Artificial Sequence
  Description of Artificial Sequence: Synthetic oligonucleotide
  Antisense strand to SEQ ID NO: 607358
augcuccaagaaagaaagc

SEQ ID NO: 607360 - RNA, 19 nt, Artificial Sequence
  Description of Artificial Sequence: Synthetic oligonucleotide
  Sense strand starting at position 65 of SEQ ID NO: 585026
ucuuucuuggagcaucauu

SEQ ID NO: 607361 - RNA, 19 nt, Artificial Sequence
  Description of Artificial Sequence: Synthetic oligonucleotide
  Antisense strand to SEQ ID NO: 607360
aaugaugcuccaagaaaga

SEQ ID NO: 607362 - RNA, 19 nt, Artificial Sequence
  Description of Artificial Sequence: Synthetic oligonucleotide
  Sense strand starting at position 114 of SEQ ID NO: 585026
gccaaugagucucugggua

SEQ ID NO: 607363 - RNA, 19 nt, Artificial Sequence
  Description of Artificial Sequence: Synthetic oligonucleotide
  Antisense strand to SEQ ID NO: 607362
uacccagagacucauuggc

SEQ ID NO: 607364 - RNA, 19 nt, Artificial Sequence
  Description of Artificial Sequence: Synthetic oligonucleotide
  Sense strand starting at position 119 of SEQ ID NO: 585026
ugagucucuggguaguaca

SEQ ID NO: 607365 - RNA, 19 nt, Artificial Sequence
  Description of Artificial Sequence: Synthetic oligonucleotide
  Antisense strand to SEQ ID NO: 607364
uguacuacccagagacuca

SEQ ID NO: 607366 - RNA, 19 nt, Artificial Sequence
  Description of Artificial Sequence: Synthetic oligonucleotide
  Sense strand starting at position 236 of SEQ ID NO: 585026
gcaauuuauacucgggcuu

SEQ ID NO: 607367 - RNA, 19 nt, Artificial Sequence
  Description of Artificial Sequence: Synthetic oligonucleotide
  Antisense strand to SEQ ID NO: 607366
aagcccgaguauaaauugc

SEQ ID NO: 607368 - RNA, 19 nt, Artificial Sequence
  Description of Artificial Sequence: Synthetic oligonucleotide
  Sense strand starting at position 269 of SEQ ID NO: 585026
ggguaaucauucuaaucau

SEQ ID NO: 607369 - RNA, 19 nt, Artificial Sequence
  Description of Artificial Sequence: Synthetic oligonucleotide
  Antisense strand to SEQ ID NO: 607368
augauuagaaugauuaccc

SEQ ID NO: 607370 - RNA, 19 nt, Artificial Sequence
  Description of Artificial Sequence: Synthetic oligonucleotide
  Sense strand starting at position 312 of SEQ ID NO: 585026
cagaaaugggccgggcuua

SEQ ID NO: 607371 - RNA, 19 nt, Artificial Sequence
  Description of Artificial Sequence: Synthetic oligonucleotide
  Antisense strand to SEQ ID NO: 607370
uaagcccggcccauuucug

SEQ ID NO: 607372 - RNA, 19 nt, Artificial Sequence
  Description of Artificial Sequence: Synthetic oligonucleotide
  Sense strand starting at position 620 of SEQ ID NO: 585026
agaauugaauguuaacacu

SEQ ID NO: 607373 - RNA, 19 nt, Artificial Sequence
  Description of Artificial Sequence: Synthetic oligonucleotide
  Antisense strand to SEQ ID NO: 607372
aguguuaacauucaauucu

SEQ ID NO: 607374 - RNA, 19 nt, Artificial Sequence
  Description of Artificial Sequence: Synthetic oligonucleotide
  Sense strand starting at position 753 of SEQ ID NO: 585026
ucuaaaugguacucauaga

SEQ ID NO: 607375 - RNA, 19 nt, Artificial Sequence
  Description of Artificial Sequence: Synthetic oligonucleotide
  Antisense strand to SEQ ID NO: 607374
ucuaugaguaccauuuaga

SEQ ID NO: 607376 - RNA, 19 nt, Artificial Sequence
  Description of Artificial Sequence: Synthetic oligonucleotide
  Sense strand starting at position 802 of SEQ ID NO: 585026
ggguuagcugucuguuaaa

SEQ ID NO: 607377 - RNA, 19 nt, Artificial Sequence
  Description of Artificial Sequence: Synthetic oligonucleotide
  Antisense strand to SEQ ID NO: 607376
uuuaacagacagcuaaccc

SEQ ID NO: 607378 - RNA, 19 nt, Artificial Sequence
  Description of Artificial Sequence: Synthetic oligonucleotide
  Sense strand starting at position 860 of SEQ ID NO: 585026
auaagucuucuaggaguug

SEQ ID NO: 607379 - RNA, 19 nt, Artificial Sequence
  Description of Artificial Sequence: Synthetic oligonucleotide
  Antisense strand to SEQ ID NO: 607378
caacuccuagaagacuuau

SEQ ID NO: 607380 - RNA, 19 nt, Artificial Sequence
  Description of Artificial Sequence: Synthetic oligonucleotide
  Sense strand starting at position 871 of SEQ ID NO: 585026
aggaguugcucucccaaau

SEQ ID NO: 607381 - RNA, 19 nt, Artificial Sequence
  Description of Artificial Sequence: Synthetic oligonucleotide
  Antisense strand to SEQ ID NO: 607380
auuugggagagcaacuccu

SEQ ID NO: 607382 - RNA, 19 nt, Artificial Sequence
  Description of Artificial Sequence: Synthetic oligonucleotide
  Sense strand starting at position 888 of SEQ ID NO: 585026
auacauugucuguauaaac

SEQ ID NO: 607383 - RNA, 19 nt, Artificial Sequence
  Description of Artificial Sequence: Synthetic oligonucleotide
  Antisense strand to SEQ ID NO: 607382
guuuauacagacaauguau

SEQ ID NO: 607384 - RNA, 19 nt, Artificial Sequence
  Description of Artificial Sequence: Synthetic oligonucleotide
  Sense strand starting at position 1270 of SEQ ID NO: 585026
uacaaauagcucugggaga

SEQ ID NO: 607385 - RNA, 19 nt, Artificial Sequence
  Description of Artificial Sequence: Synthetic oligonucleotide
  Antisense strand to SEQ ID NO: 607384
ucucccagagcuauuugua

SEQ ID NO: 607386 - RNA, 19 nt, Artificial Sequence
  Description of Artificial Sequence: Synthetic oligonucleotide
  Sense strand starting at position 2034 of SEQ ID NO: 585026
aucucagugccuuggaaac

SEQ ID NO: 607387 - RNA, 19 nt, Artificial Sequence
  Description of Artificial Sequence: Synthetic oligonucleotide
  Antisense strand to SEQ ID NO: 607386
guuuccaaggcacugagau

SEQ ID NO: 607388 - RNA, 19 nt, Artificial Sequence
  Description of Artificial Sequence: Synthetic oligonucleotide
  Sense strand starting at position 2201 of SEQ ID NO: 585026
aaccgugacccauaaaggu

SEQ ID NO: 607389 - RNA, 19 nt, Artificial Sequence
  Description of Artificial Sequence: Synthetic oligonucleotide
  Antisense strand to SEQ ID NO: 607388
accuuuaugggucacgguu

SEQ ID NO: 607390 - RNA, 19 nt, Artificial Sequence
  Description of Artificial Sequence: Synthetic oligonucleotide
  Sense strand starting at position 2215 of SEQ ID NO: 585026
aagguaagucacuguuaca

SEQ ID NO: 607391 - RNA, 19 nt, Artificial Sequence
  Description of Artificial Sequence: Synthetic oligonucleotide
  Antisense strand to SEQ ID NO: 607390
uguaacagugacuuaccuu

SEQ ID NO: 607392 - RNA, 19 nt, Artificial Sequence
  Description of Artificial Sequence: Synthetic oligonucleotide
  Sense strand starting at position 2284 of SEQ ID NO: 585026
agcauuuauccucgcuaug

SEQ ID NO: 607393 - RNA, 19 nt, Artificial Sequence
  Description of Artificial Sequence: Synthetic oligonucleotide
  Antisense strand to SEQ ID NO: 607392
cauagcgaggauaaaugcu

SEQ ID NO: 607394 - RNA, 19 nt, Artificial Sequence
  Description of Artificial Sequence: Synthetic oligonucleotide
  Sense strand starting at position 2391 of SEQ ID NO: 585026
gggaguucccaguauguug

SEQ ID NO: 607395 - RNA, 19 nt, Artificial Sequence
  Description of Artificial Sequence: Synthetic oligonucleotide
  Antisense strand to SEQ ID NO: 607394
caacauacugggaacuccc

SEQ ID NO: 607396 - RNA, 19 nt, Artificial Sequence
  Description of Artificial Sequence: Synthetic oligonucleotide
  Sense strand starting at position 2530 of SEQ ID NO: 585026
gcuuaaagaucacugacuu

SEQ ID NO: 607397 - RNA, 19 nt, Artificial Sequence
  Description of Artificial Sequence: Synthetic oligonucleotide
  Antisense strand to SEQ ID NO: 607396
aagucagugaucuuuaagc

SEQ ID NO: 607398 - RNA, 19 nt, Artificial Sequence
  Description of Artificial Sequence: Synthetic oligonucleotide
  Sense strand starting at position 2531 of SEQ ID NO: 585026
cuuaaagaucacugacuug

SEQ ID NO: 607399 - RNA, 19 nt, Artificial Sequence
  Description of Artificial Sequence: Synthetic oligonucleotide
  Antisense strand to SEQ ID NO: 607398
caagucagugaucuuuaag

SEQ ID NO: 607400 - RNA, 19 nt, Artificial Sequence
  Description of Artificial Sequence: Synthetic oligonucleotide
  Sense strand starting at position 2558 of SEQ ID NO: 585026
guaagucauaagugugauu

SEQ ID NO: 607401 - RNA, 19 nt, Artificial Sequence
  Description of Artificial Sequence: Synthetic oligonucleotide
  Antisense strand to SEQ ID NO: 607400
aaucacacuuaugacuuac

SEQ ID NO: 607402 - RNA, 19 nt, Artificial Sequence
  Description of Artificial Sequence: Synthetic oligonucleotide
  Sense strand starting at position 2583 of SEQ ID NO: 585026
ucaugcucuugugucaaau

SEQ ID NO: 607403 - RNA, 19 nt, Artificial Sequence
  Description of Artificial Sequence: Synthetic oligonucleotide
  Antisense strand to SEQ ID NO: 607402
auuugacacaagagcauga

SEQ ID NO: 607404 - RNA, 19 nt, Artificial Sequence
  Description of Artificial Sequence: Synthetic oligonucleotide
  Sense strand starting at position 2667 of SEQ ID NO: 585026
aaagaucacuggcuugaga

SEQ ID NO: 607405 - RNA, 19 nt, Artificial Sequence
  Description of Artificial Sequence: Synthetic oligonucleotide
  Antisense strand to SEQ ID NO: 607404
ucucaagccagugaucuuu

SEQ ID NO: 607406 - RNA, 19 nt, Artificial Sequence
  Description of Artificial Sequence: Synthetic oligonucleotide
  Sense strand starting at position 2669 of SEQ ID NO: 585026
agaucacuggcuugagaga

SEQ ID NO: 607407 - RNA, 19 nt, Artificial Sequence
  Description of Artificial Sequence: Synthetic oligonucleotide
  Antisense strand to SEQ ID NO: 607406
ucucucaagccagugaucu

SEQ ID NO: 607408 - RNA, 19 nt, Artificial Sequence
  Description of Artificial Sequence: Synthetic oligonucleotide
  Sense strand starting at position 2702 of SEQ ID NO: 585026
cacagucuucuggauguuu

SEQ ID NO: 607409 - RNA, 19 nt, Artificial Sequence
  Description of Artificial Sequence: Synthetic oligonucleotide
  Antisense strand to SEQ ID NO: 607408
aaacauccagaagacugug

SEQ ID NO: 607410 - RNA, 19 nt, Artificial Sequence
  Description of Artificial Sequence: Synthetic oligonucleotide
  Sense strand starting at position 2710 of SEQ ID NO: 585026
ucuggauguuugcuauguu

SEQ ID NO: 607411 - RNA, 19 nt, Artificial Sequence
  Description of Artificial Sequence: Synthetic oligonucleotide
  Antisense strand to SEQ ID NO: 607410
aacauagcaaacauccaga

SEQ ID NO: 607412 - RNA, 19 nt, Artificial Sequence
  Description of Artificial Sequence: Synthetic oligonucleotide
  Sense strand starting at position 2792 of SEQ ID NO: 585026
gcgaucacucacugcagau

SEQ ID NO: 607413 - RNA, 19 nt, Artificial Sequence
  Description of Artificial Sequence: Synthetic oligonucleotide
  Antisense strand to SEQ ID NO: 607412
aucugcagugagugaucgc

SEQ ID NO: 607414 - RNA, 19 nt, Artificial Sequence
  Description of Artificial Sequence: Synthetic oligonucleotide
  Sense strand starting at position 2805 of SEQ ID NO: 585026
gcagauucgaccuguugga

SEQ ID NO: 607415 - RNA, 19 nt, Artificial Sequence
  Description of Artificial Sequence: Synthetic oligonucleotide
  Antisense strand to SEQ ID NO: 607414
uccaacaggucgaaucugc

SEQ ID NO: 607416 - RNA, 19 nt, Artificial Sequence
  Description of Artificial Sequence: Synthetic oligonucleotide
  Sense strand starting at position 2814 of SEQ ID NO: 585026
accuguuggacucaaguga

SEQ ID NO: 607417 - RNA, 19 nt, Artificial Sequence
  Description of Artificial Sequence: Synthetic oligonucleotide
  Antisense strand to SEQ ID NO: 607416
ucacuugaguccaacaggu

SEQ ID NO: 607418 - RNA, 19 nt, Artificial Sequence
  Description of Artificial Sequence: Synthetic oligonucleotide
  Sense strand starting at position 2818 of SEQ ID NO: 585026
guuggacucaagugauacu

SEQ ID NO: 607419 - RNA, 19 nt, Artificial Sequence
  Description of Artificial Sequence: Synthetic oligonucleotide
  Antisense strand to SEQ ID NO: 607418
aguaucacuugaguccaac

SEQ ID NO: 607420 - RNA, 19 nt, Artificial Sequence
  Description of Artificial Sequence: Synthetic oligonucleotide
  Sense strand starting at position 2995 of SEQ ID NO: 585026
gugccuggccugccauaau

SEQ ID NO: 607421 - RNA, 19 nt, Artificial Sequence
  Description of Artificial Sequence: Synthetic oligonucleotide
  Antisense strand to SEQ ID NO: 607420
auuauggcaggccaggcac

SEQ ID NO: 607422 - RNA, 19 nt, Artificial Sequence
  Description of Artificial Sequence: Synthetic oligonucleotide
  Sense strand starting at position 3072 of SEQ ID NO: 585026
ggcucuguggcuggacaua

SEQ ID NO: 607423 - RNA, 19 nt, Artificial Sequence
  Description of Artificial Sequence: Synthetic oligonucleotide
  Antisense strand to SEQ ID NO: 607422
uauguccagccacagagcc

SEQ ID NO: 607424 - RNA, 19 nt, Artificial Sequence
  Description of Artificial Sequence: Synthetic oligonucleotide
  Sense strand starting at position 3121 of SEQ ID NO: 585026
agugcacuccuuugauuag

SEQ ID NO: 607425 - RNA, 19 nt, Artificial Sequence
  Description of Artificial Sequence: Synthetic oligonucleotide
  Antisense strand to SEQ ID NO: 607424
cuaaucaaaggagugcacu

SEQ ID NO: 607426 - RNA, 19 nt, Artificial Sequence
  Description of Artificial Sequence: Synthetic oligonucleotide
  Sense strand starting at position 3124 of SEQ ID NO: 585026
gcacuccuuugauuaggau

SEQ ID NO: 607427 - RNA, 19 nt, Artificial Sequence
  Description of Artificial Sequence: Synthetic oligonucleotide
  Antisense strand to SEQ ID NO: 607426
auccuaaucaaaggagugc

SEQ ID NO: 607428 - RNA, 19 nt, Artificial Sequence
  Description of Artificial Sequence: Synthetic oligonucleotide
  Sense strand starting at position 3133 of SEQ ID NO: 585026
ugauuaggaucuuugaauu

SEQ ID NO: 607429 - RNA, 19 nt, Artificial Sequence
  Description of Artificial Sequence: Synthetic oligonucleotide
  Antisense strand to SEQ ID NO: 607428
aauucaaagauccuaauca

SEQ ID NO: 607430 - RNA, 19 nt, Artificial Sequence
  Description of Artificial Sequence: Synthetic oligonucleotide
  Sense strand starting at position 3180 of SEQ ID NO: 585026
agggauaacucauaccugu

SEQ ID NO: 607431 - RNA, 19 nt, Artificial Sequence
  Description of Artificial Sequence: Synthetic oligonucleotide
  Antisense strand to SEQ ID NO: 607430
acagguaugaguuaucccu

SEQ ID NO: 607432 - RNA, 19 nt, Artificial Sequence
  Description of Artificial Sequence: Synthetic oligonucleotide
  Sense strand starting at position 3250 of SEQ ID NO: 585026
ucaacaucagucuggguaa

SEQ ID NO: 607433 - RNA, 19 nt, Artificial Sequence
  Description of Artificial Sequence: Synthetic oligonucleotide
  Antisense strand to SEQ ID NO: 607432
uuacccagacugauguuga

SEQ ID NO: 607434 - RNA, 19 nt, Artificial Sequence
  Description of Artificial Sequence: Synthetic oligonucleotide
  Sense strand starting at position 3252 of SEQ ID NO: 585026
aacaucagucuggguaaca

SEQ ID NO: 607435 - RNA, 19 nt, Artificial Sequence
  Description of Artificial Sequence: Synthetic oligonucleotide
  Antisense strand to SEQ ID NO: 607434
uguuacccagacugauguu

SEQ ID NO: 607436 - RNA, 19 nt, Artificial Sequence
  Description of Artificial Sequence: Synthetic oligonucleotide
  Sense strand starting at position 3253 of SEQ ID NO: 585026
acaucagucuggguaacau

SEQ ID NO: 607437 - RNA, 19 nt, Artificial Sequence
  Description of Artificial Sequence: Synthetic oligonucleotide
  Antisense strand to SEQ ID NO: 607436
auguuacccagacugaugu

SEQ ID NO: 607438 - RNA, 19 nt, Artificial Sequence
  Description of Artificial Sequence: Synthetic oligonucleotide
  Sense strand starting at position 106 of SEQ ID NO: 585027
aauugauccugugugacca

SEQ ID NO: 607439 - RNA, 19 nt, Artificial Sequence
  Description of Artificial Sequence: Synthetic oligonucleotide
  Antisense strand to SEQ ID NO: 607438
uggucacacaggaucaauu

SEQ ID NO: 607440 - RNA, 19 nt, Artificial Sequence
  Description of Artificial Sequence: Synthetic oligonucleotide
  Sense strand starting at position 110 of SEQ ID NO: 585027
gauccugugugaccagaga

SEQ ID NO: 607441 - RNA, 19 nt, Artificial Sequence
  Description of Artificial Sequence: Synthetic oligonucleotide
  Antisense strand to SEQ ID NO: 607440
ucucuggucacacaggauc

SEQ ID NO: 607442 - RNA, 19 nt, Artificial Sequence
  Description of Artificial Sequence: Synthetic oligonucleotide
  Sense strand starting at position 147 of SEQ ID NO: 585027
caauaugagcugugaugag

SEQ ID NO: 607443 - RNA, 19 nt, Artificial Sequence
  Description of Artificial Sequence: Synthetic oligonucleotide
  Antisense strand to SEQ ID NO: 607442
cucaucacagcucauauug

SEQ ID NO: 607444 - RNA, 19 nt, Artificial Sequence
  Description of Artificial Sequence: Synthetic oligonucleotide
  Sense strand starting at position 303 of SEQ ID NO: 585027
ggcugauggcaccaggaaa

SEQ ID NO: 607445 - RNA, 19 nt, Artificial Sequence
  Description of Artificial Sequence: Synthetic oligonucleotide
  Antisense strand to SEQ ID NO: 607444
uuuccuggugccaucagcc

SEQ ID NO: 607446 - RNA, 19 nt, Artificial Sequence
  Description of Artificial Sequence: Synthetic oligonucleotide
  Sense strand starting at position 411 of SEQ ID NO: 585027
aaauguuacccuggaagca

SEQ ID NO: 607447 - RNA, 19 nt, Artificial Sequence
  Description of Artificial Sequence: Synthetic oligonucleotide
  Antisense strand to SEQ ID NO: 607446
ugcuuccaggguaacauuu

SEQ ID NO: 607448 - RNA, 19 nt, Artificial Sequence
  Description of Artificial Sequence: Synthetic oligonucleotide
  Sense strand starting at position 449 of SEQ ID NO: 585027
auugucuggcaagauauua

SEQ ID NO: 607449 - RNA, 19 nt, Artificial Sequence
  Description of Artificial Sequence: Synthetic oligonucleotide
  Antisense strand to SEQ ID NO: 607448
uaauaucuugccagacaau

SEQ ID NO: 607450 - RNA, 19 nt, Artificial Sequence
  Description of Artificial Sequence: Synthetic oligonucleotide
  Sense strand starting at position 495 of SEQ ID NO: 585027
gacacagaguuugcagaaa

SEQ ID NO: 607451 - RNA, 19 nt, Artificial Sequence
  Description of Artificial Sequence: Synthetic oligonucleotide
  Antisense strand to SEQ ID NO: 607450
uuucugcaaacucuguguc

SEQ ID NO: 607452 - RNA, 19 nt, Artificial Sequence
  Description of Artificial Sequence: Synthetic oligonucleotide
  Sense strand starting at position 564 of SEQ ID NO: 585027
augacaugaucugcaauac

SEQ ID NO: 607453 - RNA, 19 nt, Artificial Sequence
  Description of Artificial Sequence: Synthetic oligonucleotide
  Antisense strand to SEQ ID NO: 607452
guauugcagaucaugucau

SEQ ID NO: 607454 - RNA, 19 nt, Artificial Sequence
  Description of Artificial Sequence: Synthetic oligonucleotide
  Sense strand starting at position 603 of SEQ ID NO: 585027
aaggaagaaucugccuguu

SEQ ID NO: 607455 - RNA, 19 nt, Artificial Sequence
  Description of Artificial Sequence: Synthetic oligonucleotide
  Antisense strand to SEQ ID NO: 607454
aacaggcagauucuuccuu

SEQ ID NO: 607456 - RNA, 19 nt, Artificial Sequence
  Description of Artificial Sequence: Synthetic oligonucleotide
  Sense strand starting at position 605 of SEQ ID NO: 585027
ggaagaaucugccuguuag

SEQ ID NO: 607457 - RNA, 19 nt, Artificial Sequence
  Description of Artificial Sequence: Synthetic oligonucleotide
  Antisense strand to SEQ ID NO: 607456
cuaacaggcagauucuucc

SEQ ID NO: 607458 - RNA, 19 nt, Artificial Sequence
  Description of Artificial Sequence: Synthetic oligonucleotide
  Sense strand starting at position 606 of SEQ ID NO: 585027
gaagaaucugccuguuagg

SEQ ID NO: 607459 - RNA, 19 nt, Artificial Sequence
  Description of Artificial Sequence: Synthetic oligonucleotide
  Antisense strand to SEQ ID NO: 607458
ccuaacaggcagauucuuc

SEQ ID NO: 607460 - RNA, 19 nt, Artificial Sequence
  Description of Artificial Sequence: Synthetic oligonucleotide
  Sense strand starting at position 623 of SEQ ID NO: 585027
ggagguucucccuagguga

SEQ ID NO: 607461 - RNA, 19 nt, Artificial Sequence
  Description of Artificial Sequence: Synthetic oligonucleotide
  Antisense strand to SEQ ID NO: 607460
ucaccuagggagaaccucc

SEQ ID NO: 607462 - RNA, 19 nt, Artificial Sequence
  Description of Artificial Sequence: Synthetic oligonucleotide
  Sense strand starting at position 625 of SEQ ID NO: 585027
agguucucccuaggugaca

SEQ ID NO: 607463 - RNA, 19 nt, Artificial Sequence
  Description of Artificial Sequence: Synthetic oligonucleotide
  Antisense strand to SEQ ID NO: 607462
ugucaccuagggagaaccu

SEQ ID NO: 607464 - RNA, 19 nt, Artificial Sequence
  Description of Artificial Sequence: Synthetic oligonucleotide
  Sense strand starting at position 626 of SEQ ID NO: 585027
gguucucccuaggugacaa

SEQ ID NO: 607465 - RNA, 19 nt, Artificial Sequence
  Description of Artificial Sequence: Synthetic oligonucleotide
  Antisense strand to SEQ ID NO: 607464
uugucaccuagggagaacc

SEQ ID NO: 607466 - RNA, 19 nt, Artificial Sequence
  Description of Artificial Sequence: Synthetic oligonucleotide
  Sense strand starting at position 844 of SEQ ID NO: 585027
cuaccucggucauuaagaa

SEQ ID NO: 607467 - RNA, 19 nt, Artificial Sequence
  Description of Artificial Sequence: Synthetic oligonucleotide
  Antisense strand to SEQ ID NO: 607466
uucuuaaugaccgagguag

SEQ ID NO: 607468 - RNA, 19 nt, Artificial Sequence
  Description of Artificial Sequence: Synthetic oligonucleotide
  Sense strand starting at position 845 of SEQ ID NO: 585027
uaccucggucauuaagaau

SEQ ID NO: 607469 - RNA, 19 nt, Artificial Sequence
  Description of Artificial Sequence: Synthetic oligonucleotide
  Antisense strand to SEQ ID NO: 607468
auucuuaaugaccgaggua

SEQ ID NO: 607470 - RNA, 19 nt, Artificial Sequence
  Description of Artificial Sequence: Synthetic oligonucleotide
  Sense strand starting at position 851 of SEQ ID NO: 585027
ggucauuaagaauggaggu

SEQ ID NO: 607471 - RNA, 19 nt, Artificial Sequence
  Description of Artificial Sequence: Synthetic oligonucleotide
  Antisense strand to SEQ ID NO: 607470
accuccauucuuaaugacc

SEQ ID NO: 607472 - RNA, 19 nt, Artificial Sequence
  Description of Artificial Sequence: Synthetic oligonucleotide
  Sense strand starting at position 852 of SEQ ID NO: 585027
gucauuaagaauggagguu

SEQ ID NO: 607473 - RNA, 19 nt, Artificial Sequence
  Description of Artificial Sequence: Synthetic oligonucleotide
  Antisense strand to SEQ ID NO: 607472
aaccuccauucuuaaugac

SEQ ID NO: 607474 - RNA, 19 nt, Artificial Sequence
  Description of Artificial Sequence: Synthetic oligonucleotide
  Sense strand starting at position 861 of SEQ ID NO: 585027
aauggagguuuccuugaga

SEQ ID NO: 607475 - RNA, 19 nt, Artificial Sequence
  Description of Artificial Sequence: Synthetic oligonucleotide
  Antisense strand to SEQ ID NO: 607474
ucucaaggaaaccuccauu

SEQ ID NO: 607476 - RNA, 19 nt, Artificial Sequence
  Description of Artificial Sequence: Synthetic oligonucleotide
  Sense strand starting at position 882 of SEQ ID NO: 585027
acacgucuccuuuggagga

SEQ ID NO: 607477 - RNA, 19 nt, Artificial Sequence
  Description of Artificial Sequence: Synthetic oligonucleotide
  Antisense strand to SEQ ID NO: 607476
uccuccaaaggagacgugu

SEQ ID NO: 607478 - RNA, 19 nt, Artificial Sequence
  Description of Artificial Sequence: Synthetic oligonucleotide
  Sense strand starting at position 967 of SEQ ID NO: 585027
caaguacuugcagagugaa

SEQ ID NO: 607479 - RNA, 19 nt, Artificial Sequence
  Description of Artificial Sequence: Synthetic oligonucleotide
  Antisense strand to SEQ ID NO: 607478
uucacucugcaaguacuug

SEQ ID NO: 607480 - RNA, 19 nt, Artificial Sequence
  Description of Artificial Sequence: Synthetic oligonucleotide
  Sense strand starting at position 1156 of SEQ ID NO: 585027
ccagaaauugucuaggcca

SEQ ID NO: 607481 - RNA, 19 nt, Artificial Sequence
  Description of Artificial Sequence: Synthetic oligonucleotide
  Antisense strand to SEQ ID NO: 607480
uggccuagacaauuucugg

SEQ ID NO: 607482 - RNA, 19 nt, Artificial Sequence
  Description of Artificial Sequence: Synthetic oligonucleotide
  Sense strand starting at position 1158 of SEQ ID NO: 585027
agaaauugucuaggccaga

SEQ ID NO: 607483 - RNA, 19 nt, Artificial Sequence
  Description of Artificial Sequence: Synthetic oligonucleotide
  Antisense strand to SEQ ID NO: 607482
ucuggccuagacaauuucu

SEQ ID NO: 607484 - RNA, 19 nt, Artificial Sequence
  Description of Artificial Sequence: Synthetic oligonucleotide
  Sense strand starting at position 1159 of SEQ ID NO: 585027
gaaauugucuaggccagau

SEQ ID NO: 607485 - RNA, 19 nt, Artificial Sequence
  Description of Artificial Sequence: Synthetic oligonucleotide
  Antisense strand to SEQ ID NO: 607484
aucuggccuagacaauuuc

SEQ ID NO: 607486 - RNA, 19 nt, Artificial Sequence
  Description of Artificial Sequence: Synthetic oligonucleotide
  Sense strand starting at position 1161 of SEQ ID NO: 585027
aauugucuaggccagauga

SEQ ID NO: 607487 - RNA, 19 nt, Artificial Sequence
  Description of Artificial Sequence: Synthetic oligonucleotide
  Antisense strand to SEQ ID NO: 607486
ucaucuggccuagacaauu

SEQ ID NO: 607488 - RNA, 19 nt, Artificial Sequence
  Description of Artificial Sequence: Synthetic oligonucleotide
  Sense strand starting at position 1163 of SEQ ID NO: 585027
uugucuaggccagaugauu

SEQ ID NO: 607489 - RNA, 19 nt, Artificial Sequence
  Description of Artificial Sequence: Synthetic oligonucleotide
  Antisense strand to SEQ ID NO: 607488
aaucaucuggccuagacaa

SEQ ID NO: 607490 - RNA, 19 nt, Artificial Sequence
  Description of Artificial Sequence: Synthetic oligonucleotide
  Sense strand starting at position 1302 of SEQ ID NO: 585027
agcugcguagcaguauaau

SEQ ID NO: 607491 - RNA, 19 nt, Artificial Sequence
  Description of Artificial Sequence: Synthetic oligonucleotide
  Antisense strand to SEQ ID NO: 607490
auuauacugcuacgcagcu

SEQ ID NO: 607492 - RNA, 19 nt, Artificial Sequence
  Description of Artificial Sequence: Synthetic oligonucleotide
  Sense strand starting at position 1461 of SEQ ID NO: 585027
acuguuucucuugaaaguc

SEQ ID NO: 607493 - RNA, 19 nt, Artificial Sequence
  Description of Artificial Sequence: Synthetic oligonucleotide
  Antisense strand to SEQ ID NO: 607492
gacuuucaagagaaacagu

SEQ ID NO: 607494 - RNA, 19 nt, Artificial Sequence
  Description of Artificial Sequence: Synthetic oligonucleotide
  Sense strand starting at position 2183 of SEQ ID NO: 585027
gcgggaacccucguucugu

SEQ ID NO: 607495 - RNA, 19 nt, Artificial Sequence
  Description of Artificial Sequence: Synthetic oligonucleotide
  Antisense strand to SEQ ID NO: 607494
acagaacgaggguucccgc

SEQ ID NO: 607496 - RNA, 19 nt, Artificial Sequence
  Description of Artificial Sequence: Synthetic oligonucleotide
  Sense strand starting at position 2397 of SEQ ID NO: 585027
ugagcaguuuccucauuug

SEQ ID NO: 607497 - RNA, 19 nt, Artificial Sequence
  Description of Artificial Sequence: Synthetic oligonucleotide
  Antisense strand to SEQ ID NO: 607496
caaaugaggaaacugcuca

SEQ ID NO: 607498 - RNA, 19 nt, Artificial Sequence
  Description of Artificial Sequence: Synthetic oligonucleotide
  Sense strand starting at position 2440 of SEQ ID NO: 585027
uuguaagaaugucugagaa

SEQ ID NO: 607499 - RNA, 19 nt, Artificial Sequence
  Description of Artificial Sequence: Synthetic oligonucleotide
  Antisense strand to SEQ ID NO: 607498
uucucagacauucuuacaa

SEQ ID NO: 607500 - RNA, 19 nt, Artificial Sequence
  Description of Artificial Sequence: Synthetic oligonucleotide
  Sense strand starting at position 2460 of SEQ ID NO: 585027
ggacguaaagcacauagua

SEQ ID NO: 607501 - RNA, 19 nt, Artificial Sequence
  Description of Artificial Sequence: Synthetic oligonucleotide
  Antisense strand to SEQ ID NO: 607500
uacuaugugcuuuacgucc

SEQ ID NO: 607502 - RNA, 19 nt, Artificial Sequence
  Description of Artificial Sequence: Synthetic oligonucleotide
  Sense strand starting at position 2687 of SEQ ID NO: 585027
cccaguagcccugaagaca

SEQ ID NO: 607503 - RNA, 19 nt, Artificial Sequence
  Description of Artificial Sequence: Synthetic oligonucleotide
  Antisense strand to SEQ ID NO: 607502
ugucuucagggcuacuggg

SEQ ID NO: 607504 - RNA, 19 nt, Artificial Sequence
  Description of Artificial Sequence: Synthetic oligonucleotide
  Sense strand starting at position 2858 of SEQ ID NO: 585027
caggaaugguggucacaga

SEQ ID NO: 607505 - RNA, 19 nt, Artificial Sequence
  Description of Artificial Sequence: Synthetic oligonucleotide
  Antisense strand to SEQ ID NO: 607504
ucugugaccaccauuccug

SEQ ID NO: 607506 - RNA, 19 nt, Artificial Sequence
  Description of Artificial Sequence: Synthetic oligonucleotide
  Sense strand starting at position 2865 of SEQ ID NO: 585027
gguggucacagauguugaa

SEQ ID NO: 607507 - RNA, 19 nt, Artificial Sequence
  Description of Artificial Sequence: Synthetic oligonucleotide
  Antisense strand to SEQ ID NO: 607506
uucaacaucugugaccacc

SEQ ID NO: 607508 - RNA, 19 nt, Artificial Sequence
  Description of Artificial Sequence: Synthetic oligonucleotide
  Sense strand starting at position 2949 of SEQ ID NO: 585027
aaguaaggugcugggaaua

SEQ ID NO: 607509 - RNA, 19 nt, Artificial Sequence
  Description of Artificial Sequence: Synthetic oligonucleotide
  Antisense strand to SEQ ID NO: 607508
uauucccagcaccuuacuu

SEQ ID NO: 607510 - RNA, 19 nt, Artificial Sequence
  Description of Artificial Sequence: Synthetic oligonucleotide
  Sense strand starting at position 3079 of SEQ ID NO: 585027
guuccaauccuaggaggca

SEQ ID NO: 607511 - RNA, 19 nt, Artificial Sequence
  Description of Artificial Sequence: Synthetic oligonucleotide
  Antisense strand to SEQ ID NO: 607510
ugccuccuaggauuggaac

SEQ ID NO: 607512 - RNA, 19 nt, Artificial Sequence
  Description of Artificial Sequence: Synthetic oligonucleotide
  Sense strand starting at position 3109 of SEQ ID NO: 585027
gggcauauccaucacagca

SEQ ID NO: 607513 - RNA, 19 nt, Artificial Sequence
  Description of Artificial Sequence: Synthetic oligonucleotide
  Antisense strand to SEQ ID NO: 607512
ugcugugauggauaugccc

SEQ ID NO: 607514 - RNA, 19 nt, Artificial Sequence
  Description of Artificial Sequence: Synthetic oligonucleotide
  Sense strand starting at position 3549 of SEQ ID NO: 585027
ucacaugaggccugagauu

SEQ ID NO: 607515 - RNA, 19 nt, Artificial Sequence
  Description of Artificial Sequence: Synthetic oligonucleotide
  Antisense strand to SEQ ID NO: 607514
aaucucaggccucauguga

SEQ ID NO: 607516 - RNA, 19 nt, Artificial Sequence
  Description of Artificial Sequence: Synthetic oligonucleotide
  Sense strand starting at position 3659 of SEQ ID NO: 585027
uccucagggcuuuaucuua

SEQ ID NO: 607517 - RNA, 19 nt, Artificial Sequence
  Description of Artificial Sequence: Synthetic oligonucleotide
  Antisense strand to SEQ ID NO: 607516
uaagauaaagcccugagga

SEQ ID NO: 607518 - RNA, 19 nt, Artificial Sequence
  Description of Artificial Sequence: Synthetic oligonucleotide
  Sense strand starting at position 14 of SEQ ID NO: 585028
uugguugucucacuuauuu

SEQ ID NO: 607519 - RNA, 19 nt, Artificial Sequence
  Description of Artificial Sequence: Synthetic oligonucleotide
  Antisense strand to SEQ ID NO: 607518
aaauaagugagacaaccaa

SEQ ID NO: 607520 - RNA, 19 nt, Artificial Sequence
  Description of Artificial Sequence: Synthetic oligonucleotide
  Sense strand starting at position 213 of SEQ ID NO: 585028
uagucaaagcuguaagaaa

SEQ ID NO: 607521 - RNA, 19 nt, Artificial Sequence
  Description of Artificial Sequence: Synthetic oligonucleotide
  Antisense strand to SEQ ID NO: 607520
uuucuuacagcuuugacua

SEQ ID NO: 607522 - RNA, 19 nt, Artificial Sequence
  Description of Artificial Sequence: Synthetic oligonucleotide
  Sense strand starting at position 310 of SEQ ID NO: 585028
ugaggacauugguuugauu

SEQ ID NO: 607523 - RNA, 19 nt, Artificial Sequence
  Description of Artificial Sequence: Synthetic oligonucleotide
  Antisense strand to SEQ ID NO: 607522
aaucaaaccaauguccuca

SEQ ID NO: 607524 - RNA, 19 nt, Artificial Sequence
  Description of Artificial Sequence: Synthetic oligonucleotide
  Sense strand starting at position 630 of SEQ ID NO: 585028
accugauggugaguaguaa

SEQ ID NO: 607525 - RNA, 19 nt, Artificial Sequence
  Description of Artificial Sequence: Synthetic oligonucleotide
  Antisense strand to SEQ ID NO: 607524
uuacuacucaccaucaggu

SEQ ID NO: 607526 - RNA, 19 nt, Artificial Sequence
  Description of Artificial Sequence: Synthetic oligonucleotide
  Sense strand starting at position 631 of SEQ ID NO: 585028
ccugauggugaguaguaau

SEQ ID NO: 607527 - RNA, 19 nt, Artificial Sequence
  Description of Artificial Sequence: Synthetic oligonucleotide
  Antisense strand to SEQ ID NO: 607526
auuacuacucaccaucagg

SEQ ID NO: 607528 - RNA, 19 nt, Artificial Sequence
  Description of Artificial Sequence: Synthetic oligonucleotide
  Sense strand starting at position 695 of SEQ ID NO: 585028
uugguauaauggcuauaaa

SEQ ID NO: 607529 - RNA, 19 nt, Artificial Sequence
  Description of Artificial Sequence: Synthetic oligonucleotide
  Antisense strand to SEQ ID NO: 607528
uuuauagccauuauaccaa

SEQ ID NO: 607530 - RNA, 19 nt, Artificial Sequence
  Description of Artificial Sequence: Synthetic oligonucleotide
  Sense strand starting at position 899 of SEQ ID NO: 585028
gugauuacccgugacagac

SEQ ID NO: 607531 - RNA, 19 nt, Artificial Sequence
  Description of Artificial Sequence: Synthetic oligonucleotide
  Antisense strand to SEQ ID NO: 607530
gucugucacggguaaucac

SEQ ID NO: 607532 - RNA, 19 nt, Artificial Sequence
  Description of Artificial Sequence: Synthetic oligonucleotide
  Sense strand starting at position 960 of SEQ ID NO: 585028
ggcacuguuguccaugaau

SEQ ID NO: 607533 - RNA, 19 nt, Artificial Sequence
  Description of Artificial Sequence: Synthetic oligonucleotide
  Antisense strand to SEQ ID NO: 607532
auucauggacaacagugcc

SEQ ID NO: 607534 - RNA, 19 nt, Artificial Sequence
  Description of Artificial Sequence: Synthetic oligonucleotide
  Sense strand starting at position 963 of SEQ ID NO: 585028
acuguuguccaugaaugca

SEQ ID NO: 607535 - RNA, 19 nt, Artificial Sequence
  Description of Artificial Sequence: Synthetic oligonucleotide
  Antisense strand to SEQ ID NO: 607534
ugcauucauggacaacagu

SEQ ID NO: 607536 - RNA, 19 nt, Artificial Sequence
  Description of Artificial Sequence: Synthetic oligonucleotide
  Sense strand starting at position 1079 of SEQ ID NO: 585028
uguguucuccaguuugugu

SEQ ID NO: 607537 - RNA, 19 nt, Artificial Sequence
  Description of Artificial Sequence: Synthetic oligonucleotide
  Antisense strand to SEQ ID NO: 607536
acacaaacuggagaacaca

SEQ ID NO: 607538 - RNA, 19 nt, Artificial Sequence
  Description of Artificial Sequence: Synthetic oligonucleotide
  Sense strand starting at position 1197 of SEQ ID NO: 585028
ggugucucacucuaagcaa

SEQ ID NO: 607539 - RNA, 19 nt, Artificial Sequence
  Description of Artificial Sequence: Synthetic oligonucleotide
  Antisense strand to SEQ ID NO: 607538
uugcuuagagugagacacc

SEQ ID NO: 607540 - RNA, 19 nt, Artificial Sequence
  Description of Artificial Sequence: Synthetic oligonucleotide
  Sense strand starting at position 1232 of SEQ ID NO: 585028
aggacaauucuuugcucua

SEQ ID NO: 607541 - RNA, 19 nt, Artificial Sequence
  Description of Artificial Sequence: Synthetic oligonucleotide
  Antisense strand to SEQ ID NO: 607540
uagagcaaagaauuguccu

SEQ ID NO: 607542 - RNA, 19 nt, Artificial Sequence
  Description of Artificial Sequence: Synthetic oligonucleotide
  Sense strand starting at position 1233 of SEQ ID NO: 585028
ggacaauucuuugcucuaa

SEQ ID NO: 607543 - RNA, 19 nt, Artificial Sequence
  Description of Artificial Sequence: Synthetic oligonucleotide
  Antisense strand to SEQ ID NO: 607542
uuagagcaaagaauugucc

SEQ ID NO: 607544 - RNA, 19 nt, Artificial Sequence
  Description of Artificial Sequence: Synthetic oligonucleotide
  Sense strand starting at position 1266 of SEQ ID NO: 585028
cauuguagguuauuuagca

SEQ ID NO: 607545 - RNA, 19 nt, Artificial Sequence
  Description of Artificial Sequence: Synthetic oligonucleotide
  Antisense strand to SEQ ID NO: 607544
ugcuaaauaaccuacaaug

SEQ ID NO: 607546 - RNA, 19 nt, Artificial Sequence
  Description of Artificial Sequence: Synthetic oligonucleotide
  Sense strand starting at position 1326 of SEQ ID NO: 585028
acaaguugugaugagcuaa

SEQ ID NO: 607547 - RNA, 19 nt, Artificial Sequence
  Description of Artificial Sequence: Synthetic oligonucleotide
  Antisense strand to SEQ ID NO: 607546
uuagcucaucacaacuugu

SEQ ID NO: 607548 - RNA, 19 nt, Artificial Sequence
  Description of Artificial Sequence: Synthetic oligonucleotide
  Sense strand starting at position 1364 of SEQ ID NO: 585028
ugauguucccuugagcaca

SEQ ID NO: 607549 - RNA, 19 nt, Artificial Sequence
  Description of Artificial Sequence: Synthetic oligonucleotide
  Antisense strand to SEQ ID NO: 607548
ugugcucaagggaacauca

SEQ ID NO: 607550 - RNA, 19 nt, Artificial Sequence
  Description of Artificial Sequence: Synthetic oligonucleotide
  Sense strand starting at position 1400 of SEQ ID NO: 585028
gaaccacuggucuagugau

SEQ ID NO: 607551 - RNA, 19 nt, Artificial Sequence
  Description of Artificial Sequence: Synthetic oligonucleotide
  Antisense strand to SEQ ID NO: 607550
aucacuagaccagugguuc

SEQ ID NO: 607552 - RNA, 19 nt, Artificial Sequence
  Description of Artificial Sequence: Synthetic oligonucleotide
  Sense strand starting at position 1481 of SEQ ID NO: 585028
ugaagucucugaucauuac

SEQ ID NO: 607553 - RNA, 19 nt, Artificial Sequence
  Description of Artificial Sequence: Synthetic oligonucleotide
  Antisense strand to SEQ ID NO: 607552
guaaugaucagagacuuca

SEQ ID NO: 607554 - RNA, 19 nt, Artificial Sequence
  Description of Artificial Sequence: Synthetic oligonucleotide
  Sense strand starting at position 1484 of SEQ ID NO: 585028
agucucugaucauuacuuu

SEQ ID NO: 607555 - RNA, 19 nt, Artificial Sequence
  Description of Artificial Sequence: Synthetic oligonucleotide
  Antisense strand to SEQ ID NO: 607554
aaaguaaugaucagagacu

SEQ ID NO: 607556 - RNA, 19 nt, Artificial Sequence
  Description of Artificial Sequence: Synthetic oligonucleotide
  Sense strand starting at position 1620 of SEQ ID NO: 585028
uugcauaaacuugguaaug

SEQ ID NO: 607557 - RNA, 19 nt, Artificial Sequence
  Description of Artificial Sequence: Synthetic oligonucleotide
  Antisense strand to SEQ ID NO: 607556
cauuaccaaguuuaugcaa

SEQ ID NO: 607558 - RNA, 19 nt, Artificial Sequence
  Description of Artificial Sequence: Synthetic oligonucleotide
  Sense strand starting at position 1653 of SEQ ID NO: 585028
cgaauuaauguugauguaa

SEQ ID NO: 607559 - RNA, 19 nt, Artificial Sequence
  Description of Artificial Sequence: Synthetic oligonucleotide
  Antisense strand to SEQ ID NO: 607558
uuacaucaacauuaauucg

SEQ ID NO: 607560 - RNA, 19 nt, Artificial Sequence
  Description of Artificial Sequence: Synthetic oligonucleotide
  Sense strand starting at position 1744 of SEQ ID NO: 585028
uuuauuaucuguucuggag

SEQ ID NO: 607561 - RNA, 19 nt, Artificial Sequence
  Description of Artificial Sequence: Synthetic oligonucleotide
  Antisense strand to SEQ ID NO: 607560
cuccagaacagauaauaaa

SEQ ID NO: 607562 - RNA, 19 nt, Artificial Sequence
  Description of Artificial Sequence: Synthetic oligonucleotide
  Sense strand starting at position 1753 of SEQ ID NO: 585028
uguucuggaguccaaucua

SEQ ID NO: 607563 - RNA, 19 nt, Artificial Sequence
  Description of Artificial Sequence: Synthetic oligonucleotide
  Antisense strand to SEQ ID NO: 607562
uagauuggacuccagaaca

SEQ ID NO: 607564 - RNA, 19 nt, Artificial Sequence
  Description of Artificial Sequence: Synthetic oligonucleotide
  Sense strand starting at position 2044 of SEQ ID NO: 585028
guggauucuccugggaagu

SEQ ID NO: 607565 - RNA, 19 nt, Artificial Sequence
  Description of Artificial Sequence: Synthetic oligonucleotide
  Antisense strand to SEQ ID NO: 607564
acuucccaggagaauccac

SEQ ID NO: 607566 - RNA, 19 nt, Artificial Sequence
  Description of Artificial Sequence: Synthetic oligonucleotide
  Sense strand starting at position 2045 of SEQ ID NO: 585028
uggauucuccugggaagua

SEQ ID NO: 607567 - RNA, 19 nt, Artificial Sequence
  Description of Artificial Sequence: Synthetic oligonucleotide
  Antisense strand to SEQ ID NO: 607566
uacuucccaggagaaucca

SEQ ID NO: 607568 - RNA, 19 nt, Artificial Sequence
  Description of Artificial Sequence: Synthetic oligonucleotide
  Sense strand starting at position 2072 of SEQ ID NO: 585028
cacugaggcuuaucaagag

SEQ ID NO: 607569 - RNA, 19 nt, Artificial Sequence
  Description of Artificial Sequence: Synthetic oligonucleotide
  Antisense strand to SEQ ID NO: 607568
cucuugauaagccucagug

SEQ ID NO: 607570 - RNA, 19 nt, Artificial Sequence
  Description of Artificial Sequence: Synthetic oligonucleotide
  Sense strand starting at position 2090 of SEQ ID NO: 585028
gcaagaacauuuguaugcu

SEQ ID NO: 607571 - RNA, 19 nt, Artificial Sequence
  Description of Artificial Sequence: Synthetic oligonucleotide
  Antisense strand to SEQ ID NO: 607570
agcauacaaauguucuugc

SEQ ID NO: 607572 - RNA, 19 nt, Artificial Sequence
  Description of Artificial Sequence: Synthetic oligonucleotide
  Sense strand starting at position 2098 of SEQ ID NO: 585028
auuuguaugcuugguugaa

SEQ ID NO: 607573 - RNA, 19 nt, Artificial Sequence
  Description of Artificial Sequence: Synthetic oligonucleotide
  Antisense strand to SEQ ID NO: 607572
uucaaccaagcauacaaau

SEQ ID NO: 607574 - RNA, 19 nt, Artificial Sequence
  Description of Artificial Sequence: Synthetic oligonucleotide
  Sense strand starting at position 2187 of SEQ ID NO: 585028
guguaaccuuaacuagacu

SEQ ID NO: 607575 - RNA, 19 nt, Artificial Sequence
  Description of Artificial Sequence: Synthetic oligonucleotide
  Antisense strand to SEQ ID NO: 607574
agucuaguuaagguuacac

SEQ ID NO: 607576 - RNA, 19 nt, Artificial Sequence
  Description of Artificial Sequence: Synthetic oligonucleotide
  Sense strand starting at position 2247 of SEQ ID NO: 585028
gggauauguguuuggauug

SEQ ID NO: 607577 - RNA, 19 nt, Artificial Sequence
  Description of Artificial Sequence: Synthetic oligonucleotide
  Antisense strand to SEQ ID NO: 607576
caauccaaacacauauccc

SEQ ID NO: 607578 - RNA, 19 nt, Artificial Sequence
  Description of Artificial Sequence: Synthetic oligonucleotide
  Sense strand starting at position 2342 of SEQ ID NO: 585028
uguugaaugccugaaucau

SEQ ID NO: 607579 - RNA, 19 nt, Artificial Sequence
  Description of Artificial Sequence: Synthetic oligonucleotide
  Antisense strand to SEQ ID NO: 607578
augauucaggcauucaaca

SEQ ID NO: 607580 - RNA, 19 nt, Artificial Sequence
  Description of Artificial Sequence: Synthetic oligonucleotide
  Sense strand starting at position 2852 of SEQ ID NO: 585028
uuucuauagucaucugauu

SEQ ID NO: 607581 - RNA, 19 nt, Artificial Sequence
  Description of Artificial Sequence: Synthetic oligonucleotide
  Antisense strand to SEQ ID NO: 607580
aaucagaugacuauagaaa

SEQ ID NO: 607582 - RNA, 19 nt, Artificial Sequence
  Description of Artificial Sequence: Synthetic oligonucleotide
  Sense strand starting at position 2969 of SEQ ID NO: 585028
gugagaaagagcuggaagu

SEQ ID NO: 607583 - RNA, 19 nt, Artificial Sequence
  Description of Artificial Sequence: Synthetic oligonucleotide
  Antisense strand to SEQ ID NO: 607582
acuuccagcucuuucucac

SEQ ID NO: 607584 - RNA, 19 nt, Artificial Sequence
  Description of Artificial Sequence: Synthetic oligonucleotide
  Sense strand starting at position 2970 of SEQ ID NO: 585028
ugagaaagagcuggaaguu

SEQ ID NO: 607585 - RNA, 19 nt, Artificial Sequence
  Description of Artificial Sequence: Synthetic oligonucleotide
  Antisense strand to SEQ ID NO: 607584
aacuuccagcucuuucuca

SEQ ID NO: 607586 - RNA, 19 nt, Artificial Sequence
  Description of Artificial Sequence: Synthetic oligonucleotide
  Sense strand starting at position 3392 of SEQ ID NO: 585028
uuaagacagugguuccuaa

SEQ ID NO: 607587 - RNA, 19 nt, Artificial Sequence
  Description of Artificial Sequence: Synthetic oligonucleotide
  Antisense strand to SEQ ID NO: 607586
uuaggaaccacugucuuaa

SEQ ID NO: 607588 - RNA, 19 nt, Artificial Sequence
  Description of Artificial Sequence: Synthetic oligonucleotide
  Sense strand starting at position 3420 of SEQ ID NO: 585028
gcaucagaaucccuuagaa

SEQ ID NO: 607589 - RNA, 19 nt, Artificial Sequence
  Description of Artificial Sequence: Synthetic oligonucleotide
  Antisense strand to SEQ ID NO: 607588
uucuaagggauucugaugc

SEQ ID NO: 607590 - RNA, 19 nt, Artificial Sequence
  Description of Artificial Sequence: Synthetic oligonucleotide
  Sense strand starting at position 3559 of SEQ ID NO: 585028
accacauauuagucuagga

SEQ ID NO: 607591 - RNA, 19 nt, Artificial Sequence
  Description of Artificial Sequence: Synthetic oligonucleotide
  Antisense strand to SEQ ID NO: 607590
uccuagacuaauauguggu

SEQ ID NO: 607592 - RNA, 19 nt, Artificial Sequence
  Description of Artificial Sequence: Synthetic oligonucleotide
  Sense strand starting at position 3592 of SEQ ID NO: 585028
auucuauaaugucuaggaa

SEQ ID NO: 607593 - RNA, 19 nt, Artificial Sequence
  Description of Artificial Sequence: Synthetic oligonucleotide
  Antisense strand to SEQ ID NO: 607592
uuccuagacauuauagaau

SEQ ID NO: 607594 - RNA, 19 nt, Artificial Sequence
  Description of Artificial Sequence: Synthetic oligonucleotide
  Sense strand starting at position 3864 of SEQ ID NO: 585028
uugagaaugcagcauuagu

SEQ ID NO: 607595 - RNA, 19 nt, Artificial Sequence
  Description of Artificial Sequence: Synthetic oligonucleotide
  Antisense strand to SEQ ID NO: 607594
acuaaugcugcauucucaa

SEQ ID NO: 607596 - RNA, 19 nt, Artificial Sequence
  Description of Artificial Sequence: Synthetic oligonucleotide
  Sense strand starting at position 3872 of SEQ ID NO: 585028
gcagcauuaguugauagga

SEQ ID NO: 607597 - RNA, 19 nt, Artificial Sequence
  Description of Artificial Sequence: Synthetic oligonucleotide
  Antisense strand to SEQ ID NO: 607596
uccuaucaacuaaugcugc

SEQ ID NO: 607598 - RNA, 19 nt, Artificial Sequence
  Description of Artificial Sequence: Synthetic oligonucleotide
  Sense strand starting at position 51 of SEQ ID NO: 585029
auuuaagcccuuugcuagu

SEQ ID NO: 607599 - RNA, 19 nt, Artificial Sequence
  Description of Artificial Sequence: Synthetic oligonucleotide
  Antisense strand to SEQ ID NO: 607598
acuagcaaagggcuuaaau

SEQ ID NO: 607600 - RNA, 19 nt, Artificial Sequence
  Description of Artificial Sequence: Synthetic oligonucleotide
  Sense strand starting at position 86 of SEQ ID NO: 585029
uuuguauucuacucuauga

SEQ ID NO: 607601 - RNA, 19 nt, Artificial Sequence
  Description of Artificial Sequence: Synthetic oligonucleotide
  Antisense strand to SEQ ID NO: 607600
ucauagaguagaauacaaa

SEQ ID NO: 607602 - RNA, 19 nt, Artificial Sequence
  Description of Artificial Sequence: Synthetic oligonucleotide
  Sense strand starting at position 88 of SEQ ID NO: 585029
uguauucuacucuaugacu

SEQ ID NO: 607603 - RNA, 19 nt, Artificial Sequence
  Description of Artificial Sequence: Synthetic oligonucleotide
  Antisense strand to SEQ ID NO: 607602
agucauagaguagaauaca

SEQ ID NO: 607604 - RNA, 19 nt, Artificial Sequence
  Description of Artificial Sequence: Synthetic oligonucleotide
  Sense strand starting at position 102 of SEQ ID NO: 585029
ugacucuacuaagcugaua

SEQ ID NO: 607605 - RNA, 19 nt, Artificial Sequence
  Description of Artificial Sequence: Synthetic oligonucleotide
  Antisense strand to SEQ ID NO: 607604
uaucagcuuaguagaguca

SEQ ID NO: 607606 - RNA, 19 nt, Artificial Sequence
  Description of Artificial Sequence: Synthetic oligonucleotide
  Sense strand starting at position 145 of SEQ ID NO: 585029
cauugaagugauugguaaa

SEQ ID NO: 607607 - RNA, 19 nt, Artificial Sequence
  Description of Artificial Sequence: Synthetic oligonucleotide
  Antisense strand to SEQ ID NO: 607606
uuuaccaaucacuucaaug

SEQ ID NO: 607608 - RNA, 19 nt, Artificial Sequence
  Description of Artificial Sequence: Synthetic oligonucleotide
  Sense strand starting at position 146 of SEQ ID NO: 585029
auugaagugauugguaaag

SEQ ID NO: 607609 - RNA, 19 nt, Artificial Sequence
  Description of Artificial Sequence: Synthetic oligonucleotide
  Antisense strand to SEQ ID NO: 607608
cuuuaccaaucacuucaau

SEQ ID NO: 607610 - RNA, 19 nt, Artificial Sequence
  Description of Artificial Sequence: Synthetic oligonucleotide
  Sense strand starting at position 158 of SEQ ID NO: 585029
gguaaagugguguaaugga

SEQ ID NO: 607611 - RNA, 19 nt, Artificial Sequence
  Description of Artificial Sequence: Synthetic oligonucleotide
  Antisense strand to SEQ ID NO: 607610
uccauuacaccacuuuacc

SEQ ID NO: 607612 - RNA, 19 nt, Artificial Sequence
  Description of Artificial Sequence: Synthetic oligonucleotide
  Sense strand starting at position 317 of SEQ ID NO: 585029
acagguccuucccugauga

SEQ ID NO: 607613 - RNA, 19 nt, Artificial Sequence
  Description of Artificial Sequence: Synthetic oligonucleotide
  Antisense strand to SEQ ID NO: 607612
ucaucagggaaggaccugu

SEQ ID NO: 607614 - RNA, 19 nt, Artificial Sequence
  Description of Artificial Sequence: Synthetic oligonucleotide
  Sense strand starting at position 319 of SEQ ID NO: 585029
agguccuucccugaugacu

SEQ ID NO: 607615 - RNA, 19 nt, Artificial Sequence
  Description of Artificial Sequence: Synthetic oligonucleotide
  Antisense strand to SEQ ID NO: 607614
agucaucagggaaggaccu

SEQ ID NO: 607616 - RNA, 19 nt, Artificial Sequence
  Description of Artificial Sequence: Synthetic oligonucleotide
  Sense strand starting at position 429 of SEQ ID NO: 585029
ccagccuagcucuagagaa

SEQ ID NO: 607617 - RNA, 19 nt, Artificial Sequence
  Description of Artificial Sequence: Synthetic oligonucleotide
  Antisense strand to SEQ ID NO: 607616
uucucuagagcuaggcugg

SEQ ID NO: 607618 - RNA, 19 nt, Artificial Sequence
  Description of Artificial Sequence: Synthetic oligonucleotide
  Sense strand starting at position 431 of SEQ ID NO: 585029
agccuagcucuagagaaac

SEQ ID NO: 607619 - RNA, 19 nt, Artificial Sequence
  Description of Artificial Sequence: Synthetic oligonucleotide
  Antisense strand to SEQ ID NO: 607618
guuucucuagagcuaggcu

SEQ ID NO: 607620 - RNA, 19 nt, Artificial Sequence
  Description of Artificial Sequence: Synthetic oligonucleotide
  Sense strand starting at position 453 of SEQ ID NO: 585029
ggaaaccgagugugauuau

SEQ ID NO: 607621 - RNA, 19 nt, Artificial Sequence
  Description of Artificial Sequence: Synthetic oligonucleotide
  Antisense strand to SEQ ID NO: 607620
auaaucacacucgguuucc

SEQ ID NO: 607622 - RNA, 19 nt, Artificial Sequence
  Description of Artificial Sequence: Synthetic oligonucleotide
  Sense strand starting at position 786 of SEQ ID NO: 585029
gagagagguccaugagcaa

SEQ ID NO: 607623 - RNA, 19 nt, Artificial Sequence
  Description of Artificial Sequence: Synthetic oligonucleotide
  Antisense strand to SEQ ID NO: 607622
uugcucauggaccucucuc

SEQ ID NO: 607624 - RNA, 19 nt, Artificial Sequence
  Description of Artificial Sequence: Synthetic oligonucleotide
  Sense strand starting at position 935 of SEQ ID NO: 585029
auuagugauucuguaaagg

SEQ ID NO: 607625 - RNA, 19 nt, Artificial Sequence
  Description of Artificial Sequence: Synthetic oligonucleotide
  Antisense strand to SEQ ID NO: 607624
ccuuuacagaaucacuaau

SEQ ID NO: 607626 - RNA, 19 nt, Artificial Sequence
  Description of Artificial Sequence: Synthetic oligonucleotide
  Sense strand starting at position 987 of SEQ ID NO: 585029
gcugacauccagugaaacu

SEQ ID NO: 607627 - RNA, 19 nt, Artificial Sequence
  Description of Artificial Sequence: Synthetic oligonucleotide
  Antisense strand to SEQ ID NO: 607626
aguuucacuggaugucagc

SEQ ID NO: 607628 - RNA, 19 nt, Artificial Sequence
  Description of Artificial Sequence: Synthetic oligonucleotide
  Sense strand starting at position 1180 of SEQ ID NO: 585029
aacaguagugauugauaaa

SEQ ID NO: 607629 - RNA, 19 nt, Artificial Sequence
  Description of Artificial Sequence: Synthetic oligonucleotide
  Antisense strand to SEQ ID NO: 607628
uuuaucaaucacuacuguu

SEQ ID NO: 607630 - RNA, 19 nt, Artificial Sequence
  Description of Artificial Sequence: Synthetic oligonucleotide
  Sense strand starting at position 1594 of SEQ ID NO: 585029
guaauaauguugcugagaa

SEQ ID NO: 607631 - RNA, 19 nt, Artificial Sequence
  Description of Artificial Sequence: Synthetic oligonucleotide
  Antisense strand to SEQ ID NO: 607630
uucucagcaacauuauuac

SEQ ID NO: 607632 - RNA, 19 nt, Artificial Sequence
  Description of Artificial Sequence: Synthetic oligonucleotide
  Sense strand starting at position 1653 of SEQ ID NO: 585029
acauuugucuagccagcau

SEQ ID NO: 607633 - RNA, 19 nt, Artificial Sequence
  Description of Artificial Sequence: Synthetic oligonucleotide
  Antisense strand to SEQ ID NO: 607632
augcuggcuagacaaaugu

SEQ ID NO: 607634 - RNA, 19 nt, Artificial Sequence
  Description of Artificial Sequence: Synthetic oligonucleotide
  Sense strand starting at position 1937 of SEQ ID NO: 585029
auguauuugucuuugagua

SEQ ID NO: 607635 - RNA, 19 nt, Artificial Sequence
  Description of Artificial Sequence: Synthetic oligonucleotide
  Antisense strand to SEQ ID NO: 607634
uacucaaagacaaauacau

SEQ ID NO: 607636 - RNA, 19 nt, Artificial Sequence
  Description of Artificial Sequence: Synthetic oligonucleotide
  Sense strand starting at position 2016 of SEQ ID NO: 585029
uuguuaagagcucacugua

SEQ ID NO: 607637 - RNA, 19 nt, Artificial Sequence
  Description of Artificial Sequence: Synthetic oligonucleotide
  Antisense strand to SEQ ID NO: 607636
uacagugagcucuuaacaa

SEQ ID NO: 607638 - RNA, 19 nt, Artificial Sequence
  Description of Artificial Sequence: Synthetic oligonucleotide
  Sense strand starting at position 2019 of SEQ ID NO: 585029
uuaagagcucacuguaaag

SEQ ID NO: 607639 - RNA, 19 nt, Artificial Sequence
  Description of Artificial Sequence: Synthetic oligonucleotide
  Antisense strand to SEQ ID NO: 607638
cuuuacagugagcucuuaa

SEQ ID NO: 607640 - RNA, 19 nt, Artificial Sequence
  Description of Artificial Sequence: Synthetic oligonucleotide
  Sense strand starting at position 2188 of SEQ ID NO: 585029
auaaaugacuuggcuauua

SEQ ID NO: 607641 - RNA, 19 nt, Artificial Sequence
  Description of Artificial Sequence: Synthetic oligonucleotide
  Antisense strand to SEQ ID NO: 607640
uaauagccaagucauuuau

SEQ ID NO: 607642 - RNA, 19 nt, Artificial Sequence
  Description of Artificial Sequence: Synthetic oligonucleotide
  Sense strand starting at position 2305 of SEQ ID NO: 585029
ccuaucaguguuuauugaa

SEQ ID NO: 607643 - RNA, 19 nt, Artificial Sequence
  Description of Artificial Sequence: Synthetic oligonucleotide
  Antisense strand to SEQ ID NO: 607642
uucaauaaacacugauagg

SEQ ID NO: 607644 - RNA, 19 nt, Artificial Sequence
  Description of Artificial Sequence: Synthetic oligonucleotide
  Sense strand starting at position 2443 of SEQ ID NO: 585029
guugguuuacauuauuaac

SEQ ID NO: 607645 - RNA, 19 nt, Artificial Sequence
  Description of Artificial Sequence: Synthetic oligonucleotide
  Antisense strand to SEQ ID NO: 607644
guuaauaauguaaaccaac

SEQ ID NO: 607646 - RNA, 19 nt, Artificial Sequence
  Description of Artificial Sequence: Synthetic oligonucleotide
  Sense strand starting at position 2883 of SEQ ID NO: 585029
gugaaaucaacguagcauu

SEQ ID NO: 607647 - RNA, 19 nt, Artificial Sequence
  Description of Artificial Sequence: Synthetic oligonucleotide
  Antisense strand to SEQ ID NO: 607646
aaugcuacguugauuucac

SEQ ID NO: 607648 - RNA, 19 nt, Artificial Sequence
  Description of Artificial Sequence: Synthetic oligonucleotide
  Sense strand starting at position 3045 of SEQ ID NO: 585029
uaacaugaugaugguauua

SEQ ID NO: 607649 - RNA, 19 nt, Artificial Sequence
  Description of Artificial Sequence: Synthetic oligonucleotide
  Antisense strand to SEQ ID NO: 607648
uaauaccaucaucauguua

SEQ ID NO: 607650 - RNA, 19 nt, Artificial Sequence
  Description of Artificial Sequence: Synthetic oligonucleotide
  Sense strand starting at position 3154 of SEQ ID NO: 585029
auauuaccugguggaauaa

SEQ ID NO: 607651 - RNA, 19 nt, Artificial Sequence
  Description of Artificial Sequence: Synthetic oligonucleotide
  Antisense strand to SEQ ID NO: 607650
uuauuccaccagguaauau

SEQ ID NO: 607652 - RNA, 19 nt, Artificial Sequence
  Description of Artificial Sequence: Synthetic oligonucleotide
  Sense strand starting at position 3251 of SEQ ID NO: 585029
agaucaucugucugacuca

SEQ ID NO: 607653 - RNA, 19 nt, Artificial Sequence
  Description of Artificial Sequence: Synthetic oligonucleotide
  Antisense strand to SEQ ID NO: 607652
ugagucagacagaugaucu

SEQ ID NO: 607654 - RNA, 19 nt, Artificial Sequence
  Description of Artificial Sequence: Synthetic oligonucleotide
  Sense strand starting at position 3267 of SEQ ID NO: 585029
ucagcuguuguugaaacaa

SEQ ID NO: 607655 - RNA, 19 nt, Artificial Sequence
  Description of Artificial Sequence: Synthetic oligonucleotide
  Antisense strand to SEQ ID NO: 607654
uuguuucaacaacagcuga

SEQ ID NO: 607656 - RNA, 19 nt, Artificial Sequence
  Description of Artificial Sequence: Synthetic oligonucleotide
  Sense strand starting at position 3340 of SEQ ID NO: 585029
gcuuauuaagagugagaac

SEQ ID NO: 607657 - RNA, 19 nt, Artificial Sequence
  Description of Artificial Sequence: Synthetic oligonucleotide
  Antisense strand to SEQ ID NO: 607656
guucucacucuuaauaagc

SEQ ID NO: 607658 - RNA, 19 nt, Artificial Sequence
  Description of Artificial Sequence: Synthetic oligonucleotide
  Sense strand starting at position 3482 of SEQ ID NO: 585029
guuacaagaauauggguau

SEQ ID NO: 607659 - RNA, 19 nt, Artificial Sequence
  Description of Artificial Sequence: Synthetic oligonucleotide
  Antisense strand to SEQ ID NO: 607658
auacccauauucuuguaac

SEQ ID NO: 607660 - RNA, 19 nt, Artificial Sequence
  Description of Artificial Sequence: Synthetic oligonucleotide
  Sense strand starting at position 3503 of SEQ ID NO: 585029
auugcuaagugaccaagau

SEQ ID NO: 607661 - RNA, 19 nt, Artificial Sequence
  Description of Artificial Sequence: Synthetic oligonucleotide
  Antisense strand to SEQ ID NO: 607660
aucuuggucacuuagcaau

SEQ ID NO: 607662 - RNA, 19 nt, Artificial Sequence
  Description of Artificial Sequence: Synthetic oligonucleotide
  Sense strand starting at position 3511 of SEQ ID NO: 585029
gugaccaagauccgaaaua

SEQ ID NO: 607663 - RNA, 19 nt, Artificial Sequence
  Description of Artificial Sequence: Synthetic oligonucleotide
  Antisense strand to SEQ ID NO: 607662
uauuucggaucuuggucac

SEQ ID NO: 607664 - RNA, 19 nt, Artificial Sequence
  Description of Artificial Sequence: Synthetic oligonucleotide
  Sense strand starting at position 3524 of SEQ ID NO: 585029
gaaauaguccugcagcaau

SEQ ID NO: 607665 - RNA, 19 nt, Artificial Sequence
  Description of Artificial Sequence: Synthetic oligonucleotide
  Antisense strand to SEQ ID NO: 607664
auugcugcaggacuauuuc

SEQ ID NO: 607666 - RNA, 19 nt, Artificial Sequence
  Description of Artificial Sequence: Synthetic oligonucleotide
  Sense strand starting at position 3779 of SEQ ID NO: 585029
uauucugguguuuauggau

SEQ ID NO: 607667 - RNA, 19 nt, Artificial Sequence
  Description of Artificial Sequence: Synthetic oligonucleotide
  Antisense strand to SEQ ID NO: 607666
auccauaaacaccagaaua

SEQ ID NO: 607668 - RNA, 19 nt, Artificial Sequence
  Description of Artificial Sequence: Synthetic oligonucleotide
  Sense strand starting at position 3785 of SEQ ID NO: 585029
gguguuuauggauauuauc

SEQ ID NO: 607669 - RNA, 19 nt, Artificial Sequence
  Description of Artificial Sequence: Synthetic oligonucleotide
  Antisense strand to SEQ ID NO: 607668
gauaauauccauaaacacc

SEQ ID NO: 607670 - RNA, 19 nt, Artificial Sequence
  Description of Artificial Sequence: Synthetic oligonucleotide
  Sense strand starting at position 3813 of SEQ ID NO: 585029
uuagcuguaccacaaagaa

SEQ ID NO: 607671 - RNA, 19 nt, Artificial Sequence
  Description of Artificial Sequence: Synthetic oligonucleotide
  Antisense strand to SEQ ID NO: 607670
uucuuugugguacagcuaa

SEQ ID NO: 607672 - RNA, 19 nt, Artificial Sequence
  Description of Artificial Sequence: Synthetic oligonucleotide
  Sense strand starting at position 3884 of SEQ ID NO: 585029
guuauaaaccuagaaugca

SEQ ID NO: 607673 - RNA, 19 nt, Artificial Sequence
  Description of Artificial Sequence: Synthetic oligonucleotide
  Antisense strand to SEQ ID NO: 607672
ugcauucuagguuuauaac

SEQ ID NO: 607674 - RNA, 19 nt, Artificial Sequence
  Description of Artificial Sequence: Synthetic oligonucleotide
  Sense strand starting at position 3898 of SEQ ID NO: 585029
augcauuucucuguuuguu

SEQ ID NO: 607675 - RNA, 19 nt, Artificial Sequence
  Description of Artificial Sequence: Synthetic oligonucleotide
  Antisense strand to SEQ ID NO: 607674
aacaaacagagaaaugcau

SEQ ID NO: 607676 - RNA, 19 nt, Artificial Sequence
  Description of Artificial Sequence: Synthetic oligonucleotide
  Sense strand starting at position 3926 of SEQ ID NO: 585029
uuucuauguagugagaagu

SEQ ID NO: 607677 - RNA, 19 nt, Artificial Sequence
  Description of Artificial Sequence: Synthetic oligonucleotide
  Antisense strand to SEQ ID NO: 607676
acuucucacuacauagaaa

SEQ ID NO: 607678 - RNA, 19 nt, Artificial Sequence
  Description of Artificial Sequence: Synthetic oligonucleotide
  Sense strand starting at position 17 of SEQ ID NO: 585030
uuugguggauacuuuaaau

SEQ ID NO: 607679 - RNA, 19 nt, Artificial Sequence
  Description of Artificial Sequence: Synthetic oligonucleotide
  Antisense strand to SEQ ID NO: 607678
auuuaaaguauccaccaaa

SEQ ID NO: 607680 - RNA, 19 nt, Artificial Sequence
  Description of Artificial Sequence: Synthetic oligonucleotide
  Sense strand starting at position 114 of SEQ ID NO: 585030
auuaauguggaauguggaa

SEQ ID NO: 607681 - RNA, 19 nt, Artificial Sequence
  Description of Artificial Sequence: Synthetic oligonucleotide
  Antisense strand to SEQ ID NO: 607680
uuccacauuccacauuaau

SEQ ID NO: 607682 - RNA, 19 nt, Artificial Sequence
  Description of Artificial Sequence: Synthetic oligonucleotide
  Sense strand starting at position 465 of SEQ ID NO: 585030
guaaauaaaucagccauga

SEQ ID NO: 607683 - RNA, 19 nt, Artificial Sequence
  Description of Artificial Sequence: Synthetic oligonucleotide
  Antisense strand to SEQ ID NO: 607682
ucauggcugauuuauuuac

SEQ ID NO: 607684 - RNA, 19 nt, Artificial Sequence
  Description of Artificial Sequence: Synthetic oligonucleotide
  Sense strand starting at position 646 of SEQ ID NO: 585030
uuauuaugugauuagcauc

SEQ ID NO: 607685 - RNA, 19 nt, Artificial Sequence
  Description of Artificial Sequence: Synthetic oligonucleotide
  Antisense strand to SEQ ID NO: 607684
gaugcuaaucacauaauaa

SEQ ID NO: 607686 - RNA, 19 nt, Artificial Sequence
  Description of Artificial Sequence: Synthetic oligonucleotide
  Sense strand starting at position 668 of SEQ ID NO: 585030
auaacuuuguguccaagaa

SEQ ID NO: 607687 - RNA, 19 nt, Artificial Sequence
  Description of Artificial Sequence: Synthetic oligonucleotide
  Antisense strand to SEQ ID NO: 607686
uucuuggacacaaaguuau

SEQ ID NO: 607688 - RNA, 19 nt, Artificial Sequence
  Description of Artificial Sequence: Synthetic oligonucleotide
  Sense strand starting at position 672 of SEQ ID NO: 585030
cuuuguguccaagaaacaa

SEQ ID NO: 607689 - RNA, 19 nt, Artificial Sequence
  Description of Artificial Sequence: Synthetic oligonucleotide
  Antisense strand to SEQ ID NO: 607688
uuguuucuuggacacaaag

SEQ ID NO: 607690 - RNA, 19 nt, Artificial Sequence
  Description of Artificial Sequence: Synthetic oligonucleotide
  Sense strand starting at position 783 of SEQ ID NO: 585030
ggcaaauaaauaggucaga

SEQ ID NO: 607691 - RNA, 19 nt, Artificial Sequence
  Description of Artificial Sequence: Synthetic oligonucleotide
  Antisense strand to SEQ ID NO: 607690
ucugaccuauuuauuugcc

SEQ ID NO: 607692 - RNA, 19 nt, Artificial Sequence
  Description of Artificial Sequence: Synthetic oligonucleotide
  Sense strand starting at position 832 of SEQ ID NO: 585030
gucucauggcuggagauaa

SEQ ID NO: 607693 - RNA, 19 nt, Artificial Sequence
  Description of Artificial Sequence: Synthetic oligonucleotide
  Antisense strand to SEQ ID NO: 607692
uuaucuccagccaugagac

SEQ ID NO: 607694 - RNA, 19 nt, Artificial Sequence
  Description of Artificial Sequence: Synthetic oligonucleotide
  Sense strand starting at position 907 of SEQ ID NO: 585030
guacuaagccaacauugaa

SEQ ID NO: 607695 - RNA, 19 nt, Artificial Sequence
  Description of Artificial Sequence: Synthetic oligonucleotide
  Antisense strand to SEQ ID NO: 607694
uucaauguuggcuuaguac

SEQ ID NO: 607696 - RNA, 19 nt, Artificial Sequence
  Description of Artificial Sequence: Synthetic oligonucleotide
  Sense strand starting at position 938 of SEQ ID NO: 585030
gguauaauuguguaaucca

SEQ ID NO: 607697 - RNA, 19 nt, Artificial Sequence
  Description of Artificial Sequence: Synthetic oligonucleotide
  Antisense strand to SEQ ID NO: 607696
uggauuacacaauuauacc

SEQ ID NO: 607698 - RNA, 19 nt, Artificial Sequence
  Description of Artificial Sequence: Synthetic oligonucleotide
  Sense strand starting at position 941 of SEQ ID NO: 585030
auaauuguguaauccagaa

SEQ ID NO: 607699 - RNA, 19 nt, Artificial Sequence
  Description of Artificial Sequence: Synthetic oligonucleotide
  Antisense strand to SEQ ID NO: 607698
uucuggauuacacaauuau

SEQ ID NO: 607700 - RNA, 19 nt, Artificial Sequence
  Description of Artificial Sequence: Synthetic oligonucleotide
  Sense strand starting at position 1160 of SEQ ID NO: 585030
guugcauuccggcuugcaa

SEQ ID NO: 607701 - RNA, 19 nt, Artificial Sequence
  Description of Artificial Sequence: Synthetic oligonucleotide
  Antisense strand to SEQ ID NO: 607700
uugcaagccggaaugcaac

SEQ ID NO: 607702 - RNA, 19 nt, Artificial Sequence
  Description of Artificial Sequence: Synthetic oligonucleotide
  Sense strand starting at position 1252 of SEQ ID NO: 585030
aguagcuaugaccauaagu

SEQ ID NO: 607703 - RNA, 19 nt, Artificial Sequence
  Description of Artificial Sequence: Synthetic oligonucleotide
  Antisense strand to SEQ ID NO: 607702
acuuauggucauagcuacu

SEQ ID NO: 607704 - RNA, 19 nt, Artificial Sequence
  Description of Artificial Sequence: Synthetic oligonucleotide
  Sense strand starting at position 1341 of SEQ ID NO: 585030
ugaaaucaugcccaagcaa

SEQ ID NO: 607705 - RNA, 19 nt, Artificial Sequence
  Description of Artificial Sequence: Synthetic oligonucleotide
  Antisense strand to SEQ ID NO: 607704
uugcuugggcaugauuuca

SEQ ID NO: 607706 - RNA, 19 nt, Artificial Sequence
  Description of Artificial Sequence: Synthetic oligonucleotide
  Sense strand starting at position 1487 of SEQ ID NO: 585030
gugcuuccucaagaguaaa

SEQ ID NO: 607707 - RNA, 19 nt, Artificial Sequence
  Description of Artificial Sequence: Synthetic oligonucleotide
  Antisense strand to SEQ ID NO: 607706
uuuacucuugaggaagcac

SEQ ID NO: 607708 - RNA, 19 nt, Artificial Sequence
  Description of Artificial Sequence: Synthetic oligonucleotide
  Sense strand starting at position 1671 of SEQ ID NO: 585030
ggcagugggaaguaucuaa

SEQ ID NO: 607709 - RNA, 19 nt, Artificial Sequence
  Description of Artificial Sequence: Synthetic oligonucleotide
  Antisense strand to SEQ ID NO: 607708
uuagauacuucccacugcc

SEQ ID NO: 607710 - RNA, 19 nt, Artificial Sequence
  Description of Artificial Sequence: Synthetic oligonucleotide
  Sense strand starting at position 1693 of SEQ ID NO: 585030
auuauagugucaucacaca

SEQ ID NO: 607711 - RNA, 19 nt, Artificial Sequence
  Description of Artificial Sequence: Synthetic oligonucleotide
  Antisense strand to SEQ ID NO: 607710
ugugugaugacacuauaau

SEQ ID NO: 607712 - RNA, 19 nt, Artificial Sequence
  Description of Artificial Sequence: Synthetic oligonucleotide
  Sense strand starting at position 1737 of SEQ ID NO: 585030
ucuacaucucaggaaguuu

SEQ ID NO: 607713 - RNA, 19 nt, Artificial Sequence
  Description of Artificial Sequence: Synthetic oligonucleotide
  Antisense strand to SEQ ID NO: 607712
aaacuuccugagauguaga

SEQ ID NO: 607714 - RNA, 19 nt, Artificial Sequence
  Description of Artificial Sequence: Synthetic oligonucleotide
  Sense strand starting at position 2008 of SEQ ID NO: 585030
gcaguuacacuugaguaaa

SEQ ID NO: 607715 - RNA, 19 nt, Artificial Sequence
  Description of Artificial Sequence: Synthetic oligonucleotide
  Antisense strand to SEQ ID NO: 607714
uuuacucaaguguaacugc

SEQ ID NO: 607716 - RNA, 19 nt, Artificial Sequence
  Description of Artificial Sequence: Synthetic oligonucleotide
  Sense strand starting at position 2011 of SEQ ID NO: 585030
guuacacuugaguaaagug

SEQ ID NO: 607717 - RNA, 19 nt, Artificial Sequence
  Description of Artificial Sequence: Synthetic oligonucleotide
  Antisense strand to SEQ ID NO: 607716
cacuuuacucaaguguaac

SEQ ID NO: 607718 - RNA, 19 nt, Artificial Sequence
  Description of Artificial Sequence: Synthetic oligonucleotide
  Sense strand starting at position 2155 of SEQ ID NO: 585030
gcugacuuuccagauugag

SEQ ID NO: 607719 - RNA, 19 nt, Artificial Sequence
  Description of Artificial Sequence: Synthetic oligonucleotide
  Antisense strand to SEQ ID NO: 607718
cucaaucuggaaagucagc

SEQ ID NO: 607720 - RNA, 19 nt, Artificial Sequence
  Description of Artificial Sequence: Synthetic oligonucleotide
  Sense strand starting at position 2242 of SEQ ID NO: 585030
cggugagccaaacaugaau

SEQ ID NO: 607721 - RNA, 19 nt, Artificial Sequence
  Description of Artificial Sequence: Synthetic oligonucleotide
  Antisense strand to SEQ ID NO: 607720
auucauguuuggcucaccg

SEQ ID NO: 607722 - RNA, 19 nt, Artificial Sequence
  Description of Artificial Sequence: Synthetic oligonucleotide
  Sense strand starting at position 2295 of SEQ ID NO: 585030
aguauucuuggucacuaau

SEQ ID NO: 607723 - RNA, 19 nt, Artificial Sequence
  Description of Artificial Sequence: Synthetic oligonucleotide
  Antisense strand to SEQ ID NO: 607722
auuagugaccaagaauacu

SEQ ID NO: 607724 - RNA, 19 nt, Artificial Sequence
  Description of Artificial Sequence: Synthetic oligonucleotide
  Sense strand starting at position 2470 of SEQ ID NO: 585030
cugugacgcagacagaaua

SEQ ID NO: 607725 - RNA, 19 nt, Artificial Sequence
  Description of Artificial Sequence: Synthetic oligonucleotide
  Antisense strand to SEQ ID NO: 607724
uauucugucugcgucacag

SEQ ID NO: 607726 - RNA, 19 nt, Artificial Sequence
  Description of Artificial Sequence: Synthetic oligonucleotide
  Sense strand starting at position 2530 of SEQ ID NO: 585030
agagauuaauuaucagguu

SEQ ID NO: 607727 - RNA, 19 nt, Artificial Sequence
  Description of Artificial Sequence: Synthetic oligonucleotide
  Antisense strand to SEQ ID NO: 607726
aaccugauaauuaaucucu

SEQ ID NO: 607728 - RNA, 19 nt, Artificial Sequence
  Description of Artificial Sequence: Synthetic oligonucleotide
  Sense strand starting at position 2626 of SEQ ID NO: 585030
gguuauucucuguacacau

SEQ ID NO: 607729 - RNA, 19 nt, Artificial Sequence
  Description of Artificial Sequence: Synthetic oligonucleotide
  Antisense strand to SEQ ID NO: 607728
auguguacagagaauaacc

SEQ ID NO: 607730 - RNA, 19 nt, Artificial Sequence
  Description of Artificial Sequence: Synthetic oligonucleotide
  Sense strand starting at position 2787 of SEQ ID NO: 585030
aaugaugacucagucauga

SEQ ID NO: 607731 - RNA, 19 nt, Artificial Sequence
  Description of Artificial Sequence: Synthetic oligonucleotide
  Antisense strand to SEQ ID NO: 607730
ucaugacugagucaucauu

SEQ ID NO: 607732 - RNA, 19 nt, Artificial Sequence
  Description of Artificial Sequence: Synthetic oligonucleotide
  Sense strand starting at position 2932 of SEQ ID NO: 585030
uuaucuaagccuuaggagu

SEQ ID NO: 607733 - RNA, 19 nt, Artificial Sequence
  Description of Artificial Sequence: Synthetic oligonucleotide
  Antisense strand to SEQ ID NO: 607732
acuccuaaggcuuagauaa

SEQ ID NO: 607734 - RNA, 19 nt, Artificial Sequence
  Description of Artificial Sequence: Synthetic oligonucleotide
  Sense strand starting at position 2943 of SEQ ID NO: 585030
uuaggagucucuucuugaa

SEQ ID NO: 607735 - RNA, 19 nt, Artificial Sequence
  Description of Artificial Sequence: Synthetic oligonucleotide
  Antisense strand to SEQ ID NO: 607734
uucaagaagagacuccuaa

SEQ ID NO: 607736 - RNA, 19 nt, Artificial Sequence
  Description of Artificial Sequence: Synthetic oligonucleotide
  Sense strand starting at position 2955 of SEQ ID NO: 585030
ucuugaaguccagauuggu

SEQ ID NO: 607737 - RNA, 19 nt, Artificial Sequence
  Description of Artificial Sequence: Synthetic oligonucleotide
  Antisense strand to SEQ ID NO: 607736
accaaucuggacuucaaga

SEQ ID NO: 607738 - RNA, 19 nt, Artificial Sequence
  Description of Artificial Sequence: Synthetic oligonucleotide
  Sense strand starting at position 2963 of SEQ ID NO: 585030
uccagauugguaggaccaa

SEQ ID NO: 607739 - RNA, 19 nt, Artificial Sequence
  Description of Artificial Sequence: Synthetic oligonucleotide
  Antisense strand to SEQ ID NO: 607738
uugguccuaccaaucugga

SEQ ID NO: 607740 - RNA, 19 nt, Artificial Sequence
  Description of Artificial Sequence: Synthetic oligonucleotide
  Sense strand starting at position 3146 of SEQ ID NO: 585030
auuagaugagaucguuauu

SEQ ID NO: 607741 - RNA, 19 nt, Artificial Sequence
  Description of Artificial Sequence: Synthetic oligonucleotide
  Antisense strand to SEQ ID NO: 607740
aauaacgaucucaucuaau

SEQ ID NO: 607742 - RNA, 19 nt, Artificial Sequence
  Description of Artificial Sequence: Synthetic oligonucleotide
  Sense strand starting at position 3386 of SEQ ID NO: 585030
cuuugaacuguuggagauu

SEQ ID NO: 607743 - RNA, 19 nt, Artificial Sequence
  Description of Artificial Sequence: Synthetic oligonucleotide
  Antisense strand to SEQ ID NO: 607742
aaucuccaacaguucaaag

SEQ ID NO: 607744 - RNA, 19 nt, Artificial Sequence
  Description of Artificial Sequence: Synthetic oligonucleotide
  Sense strand starting at position 3415 of SEQ ID NO: 585030
aauuguauguaagcagaga

SEQ ID NO: 607745 - RNA, 19 nt, Artificial Sequence
  Description of Artificial Sequence: Synthetic oligonucleotide
  Antisense strand to SEQ ID NO: 607744
ucucugcuuacauacaauu

SEQ ID NO: 607746 - RNA, 19 nt, Artificial Sequence
  Description of Artificial Sequence: Synthetic oligonucleotide
  Sense strand starting at position 3416 of SEQ ID NO: 585030
auuguauguaagcagagaa

SEQ ID NO: 607747 - RNA, 19 nt, Artificial Sequence
  Description of Artificial Sequence: Synthetic oligonucleotide
  Antisense strand to SEQ ID NO: 607746
uucucugcuuacauacaau

SEQ ID NO: 607748 - RNA, 19 nt, Artificial Sequence
  Description of Artificial Sequence: Synthetic oligonucleotide
  Sense strand starting at position 3432 of SEQ ID NO: 585030
gaaagauagcaauggcaaa

SEQ ID NO: 607749 - RNA, 19 nt, Artificial Sequence
  Description of Artificial Sequence: Synthetic oligonucleotide
  Antisense strand to SEQ ID NO: 607748
uuugccauugcuaucuuuc

SEQ ID NO: 607750 - RNA, 19 nt, Artificial Sequence
  Description of Artificial Sequence: Synthetic oligonucleotide
  Sense strand starting at position 3627 of SEQ ID NO: 585030
aaaggugaaguuggguaaa

SEQ ID NO: 607751 - RNA, 19 nt, Artificial Sequence
  Description of Artificial Sequence: Synthetic oligonucleotide
  Antisense strand to SEQ ID NO: 607750
uuuacccaacuucaccuuu

SEQ ID NO: 607752 - RNA, 19 nt, Artificial Sequence
  Description of Artificial Sequence: Synthetic oligonucleotide
  Sense strand starting at position 3903 of SEQ ID NO: 585030
ugauuaagggauugugauu

SEQ ID NO: 607753 - RNA, 19 nt, Artificial Sequence
  Description of Artificial Sequence: Synthetic oligonucleotide
  Antisense strand to SEQ ID NO: 607752
aaucacaaucccuuaauca

SEQ ID NO: 607754 - RNA, 19 nt, Artificial Sequence
  Description of Artificial Sequence: Synthetic oligonucleotide
  Sense strand starting at position 3960 of SEQ ID NO: 585030
ugagaaugagauugguguu

SEQ ID NO: 607755 - RNA, 19 nt, Artificial Sequence
  Description of Artificial Sequence: Synthetic oligonucleotide
  Antisense strand to SEQ ID NO: 607754
aacaccaaucucauucuca

SEQ ID NO: 607756 - RNA, 19 nt, Artificial Sequence
  Description of Artificial Sequence: Synthetic oligonucleotide
  Sense strand starting at position 3972 of SEQ ID NO: 585030
ugguguugugauuaaggga

SEQ ID NO: 607757 - RNA, 19 nt, Artificial Sequence
  Description of Artificial Sequence: Synthetic oligonucleotide
  Antisense strand to SEQ ID NO: 607756
ucccuuaaucacaacacca

SEQ ID NO: 607758 - RNA, 19 nt, Artificial Sequence
  Description of Artificial Sequence: Synthetic oligonucleotide
  Sense strand starting at position 19 of SEQ ID NO: 585031
augguaaggugucuacaua

SEQ ID NO: 607759 - RNA, 19 nt, Artificial Sequence
  Description of Artificial Sequence: Synthetic oligonucleotide
  Antisense strand to SEQ ID NO: 607758
uauguagacaccuuaccau

SEQ ID NO: 607760 - RNA, 19 nt, Artificial Sequence
  Description of Artificial Sequence: Synthetic oligonucleotide
  Sense strand starting at position 20 of SEQ ID NO: 585031
ugguaaggugucuacauag

SEQ ID NO: 607761 - RNA, 19 nt, Artificial Sequence
  Description of Artificial Sequence: Synthetic oligonucleotide
  Antisense strand to SEQ ID NO: 607760
cuauguagacaccuuacca

SEQ ID NO: 607762 - RNA, 19 nt, Artificial Sequence
  Description of Artificial Sequence: Synthetic oligonucleotide
  Sense strand starting at position 136 of SEQ ID NO: 585031
cuaagaaaugcuugauauu

SEQ ID NO: 607763 - RNA, 19 nt, Artificial Sequence
  Description of Artificial Sequence: Synthetic oligonucleotide
  Antisense strand to SEQ ID NO: 607762
aauaucaagcauuucuuag

SEQ ID NO: 607764 - RNA, 19 nt, Artificial Sequence
  Description of Artificial Sequence: Synthetic oligonucleotide
  Sense strand starting at position 168 of SEQ ID NO: 585031
uuaugaugugaauguagac

SEQ ID NO: 607765 - RNA, 19 nt, Artificial Sequence
  Description of Artificial Sequence: Synthetic oligonucleotide
  Antisense strand to SEQ ID NO: 607764
gucuacauucacaucauaa

SEQ ID NO: 607766 - RNA, 19 nt, Artificial Sequence
  Description of Artificial Sequence: Synthetic oligonucleotide
  Sense strand starting at position 299 of SEQ ID NO: 585031
uuuagaaagugauccaucu

SEQ ID NO: 607767 - RNA, 19 nt, Artificial Sequence
  Description of Artificial Sequence: Synthetic oligonucleotide
  Antisense strand to SEQ ID NO: 607766
agauggaucacuuucuaaa

SEQ ID NO: 607768 - RNA, 19 nt, Artificial Sequence
  Description of Artificial Sequence: Synthetic oligonucleotide
  Sense strand starting at position 638 of SEQ ID NO: 585031
ugugguaagaggcaauagu

SEQ ID NO: 607769 - RNA, 19 nt, Artificial Sequence
  Description of Artificial Sequence: Synthetic oligonucleotide
  Antisense strand to SEQ ID NO: 607768
acuauugccucuuaccaca

SEQ ID NO: 607770 - RNA, 19 nt, Artificial Sequence
  Description of Artificial Sequence: Synthetic oligonucleotide
  Sense strand starting at position 1538 of SEQ ID NO: 585031
cuuauagauucuguuauug

SEQ ID NO: 607771 - RNA, 19 nt, Artificial Sequence
  Description of Artificial Sequence: Synthetic oligonucleotide
  Antisense strand to SEQ ID NO: 607770
caauaacagaaucuauaag

SEQ ID NO: 607772 - RNA, 19 nt, Artificial Sequence
  Description of Artificial Sequence: Synthetic oligonucleotide
  Sense strand starting at position 1549 of SEQ ID NO: 585031
uguuauugauauuccaaga

SEQ ID NO: 607773 - RNA, 19 nt, Artificial Sequence
  Description of Artificial Sequence: Synthetic oligonucleotide
  Antisense strand to SEQ ID NO: 607772
ucuuggaauaucaauaaca

SEQ ID NO: 607774 - RNA, 19 nt, Artificial Sequence
  Description of Artificial Sequence: Synthetic oligonucleotide
  Sense strand starting at position 1565 of SEQ ID NO: 585031
agaaauauacacugcuguu

SEQ ID NO: 607775 - RNA, 19 nt, Artificial Sequence
  Description of Artificial Sequence: Synthetic oligonucleotide
  Antisense strand to SEQ ID NO: 607774
aacagcaguguauauuucu

SEQ ID NO: 607776 - RNA, 19 nt, Artificial Sequence
  Description of Artificial Sequence: Synthetic oligonucleotide
  Sense strand starting at position 1745 of SEQ ID NO: 585031
aucuacauauuuggagaau

SEQ ID NO: 607777 - RNA, 19 nt, Artificial Sequence
  Description of Artificial Sequence: Synthetic oligonucleotide
  Antisense strand to SEQ ID NO: 607776
auucuccaaauauguagau

SEQ ID NO: 607778 - RNA, 19 nt, Artificial Sequence
  Description of Artificial Sequence: Synthetic oligonucleotide
  Sense strand starting at position 1746 of SEQ ID NO: 585031
ucuacauauuuggagaaug

SEQ ID NO: 607779 - RNA, 19 nt, Artificial Sequence
  Description of Artificial Sequence: Synthetic oligonucleotide
  Antisense strand to SEQ ID NO: 607778
cauucuccaaauauguaga

SEQ ID NO: 607780 - RNA, 19 nt, Artificial Sequence
  Description of Artificial Sequence: Synthetic oligonucleotide
  Sense strand starting at position 1770 of SEQ ID NO: 585031
gguacaguacaccaguaua

SEQ ID NO: 607781 - RNA, 19 nt, Artificial Sequence
  Description of Artificial Sequence: Synthetic oligonucleotide
  Antisense strand to SEQ ID NO: 607780
uauacugguguacuguacc

SEQ ID NO: 607782 - RNA, 19 nt, Artificial Sequence
  Description of Artificial Sequence: Synthetic oligonucleotide
  Sense strand starting at position 1933 of SEQ ID NO: 585031
acaucuaucuuaccuggua

SEQ ID NO: 607783 - RNA, 19 nt, Artificial Sequence
  Description of Artificial Sequence: Synthetic oligonucleotide
  Antisense strand to SEQ ID NO: 607782
uaccagguaagauagaugu

SEQ ID NO: 607784 - RNA, 19 nt, Artificial Sequence
  Description of Artificial Sequence: Synthetic oligonucleotide
  Sense strand starting at position 1936 of SEQ ID NO: 585031
ucuaucuuaccugguagaa

SEQ ID NO: 607785 - RNA, 19 nt, Artificial Sequence
  Description of Artificial Sequence: Synthetic oligonucleotide
  Antisense strand to SEQ ID NO: 607784
uucuaccagguaagauaga

SEQ ID NO: 607786 - RNA, 19 nt, Artificial Sequence
  Description of Artificial Sequence: Synthetic oligonucleotide
  Sense strand starting at position 2004 of SEQ ID NO: 585031
guagaaagaaguuguugaa

SEQ ID NO: 607787 - RNA, 19 nt, Artificial Sequence
  Description of Artificial Sequence: Synthetic oligonucleotide
  Antisense strand to SEQ ID NO: 607786
uucaacaacuucuuucuac

SEQ ID NO: 607788 - RNA, 19 nt, Artificial Sequence
  Description of Artificial Sequence: Synthetic oligonucleotide
  Sense strand starting at position 2072 of SEQ ID NO: 585031
gacguuuacuauuuauagu

SEQ ID NO: 607789 - RNA, 19 nt, Artificial Sequence
  Description of Artificial Sequence: Synthetic oligonucleotide
  Antisense strand to SEQ ID NO: 607788
acuauaaauaguaaacguc

SEQ ID NO: 607790 - RNA, 19 nt, Artificial Sequence
  Description of Artificial Sequence: Synthetic oligonucleotide
  Sense strand starting at position 2103 of SEQ ID NO: 585031
gagaaacucucguuaucug

SEQ ID NO: 607791 - RNA, 19 nt, Artificial Sequence
  Description of Artificial Sequence: Synthetic oligonucleotide
  Antisense strand to SEQ ID NO: 607790
cagauaacgagaguuucuc

SEQ ID NO: 607792 - RNA, 19 nt, Artificial Sequence
  Description of Artificial Sequence: Synthetic oligonucleotide
  Sense strand starting at position 2106 of SEQ ID NO: 585031
aaacucucguuaucuggaa

SEQ ID NO: 607793 - RNA, 19 nt, Artificial Sequence
  Description of Artificial Sequence: Synthetic oligonucleotide
  Antisense strand to SEQ ID NO: 607792
uuccagauaacgagaguuu

SEQ ID NO: 607794 - RNA, 19 nt, Artificial Sequence
  Description of Artificial Sequence: Synthetic oligonucleotide
  Sense strand starting at position 2107 of SEQ ID NO: 585031
aacucucguuaucuggaaa

SEQ ID NO: 607795 - RNA, 19 nt, Artificial Sequence
  Description of Artificial Sequence: Synthetic oligonucleotide
  Antisense strand to SEQ ID NO: 607794
uuuccagauaacgagaguu

SEQ ID NO: 607796 - RNA, 19 nt, Artificial Sequence
  Description of Artificial Sequence: Synthetic oligonucleotide
  Sense strand starting at position 2110 of SEQ ID NO: 585031
ucucguuaucuggaaauug

SEQ ID NO: 607797 - RNA, 19 nt, Artificial Sequence
  Description of Artificial Sequence: Synthetic oligonucleotide
  Antisense strand to SEQ ID NO: 607796
caauuuccagauaacgaga

SEQ ID NO: 607798 - RNA, 19 nt, Artificial Sequence
  Description of Artificial Sequence: Synthetic oligonucleotide
  Sense strand starting at position 2164 of SEQ ID NO: 585031
uauggcugugggcagaauu

SEQ ID NO: 607799 - RNA, 19 nt, Artificial Sequence
  Description of Artificial Sequence: Synthetic oligonucleotide
  Antisense strand to SEQ ID NO: 607798
aauucugcccacagccaua

SEQ ID NO: 607800 - RNA, 19 nt, Artificial Sequence
  Description of Artificial Sequence: Synthetic oligonucleotide
  Sense strand starting at position 2172 of SEQ ID NO: 585031
ugggcagaauuacccaaau

SEQ ID NO: 607801 - RNA, 19 nt, Artificial Sequence
  Description of Artificial Sequence: Synthetic oligonucleotide
  Antisense strand to SEQ ID NO: 607800
auuuggguaauucugccca

SEQ ID NO: 607802 - RNA, 19 nt, Artificial Sequence
  Description of Artificial Sequence: Synthetic oligonucleotide
  Sense strand starting at position 2223 of SEQ ID NO: 585031
aggaaucccucugugaaug

SEQ ID NO: 607803 - RNA, 19 nt, Artificial Sequence
  Description of Artificial Sequence: Synthetic oligonucleotide
  Antisense strand to SEQ ID NO: 607802
cauucacagagggauuccu

SEQ ID NO: 607804 - RNA, 19 nt, Artificial Sequence
  Description of Artificial Sequence: Synthetic oligonucleotide
  Sense strand starting at position 2224 of SEQ ID NO: 585031
ggaaucccucugugaauga

SEQ ID NO: 607805 - RNA, 19 nt, Artificial Sequence
  Description of Artificial Sequence: Synthetic oligonucleotide
  Antisense strand to SEQ ID NO: 607804
ucauucacagagggauucc

SEQ ID NO: 607806 - RNA, 19 nt, Artificial Sequence
  Description of Artificial Sequence: Synthetic oligonucleotide
  Sense strand starting at position 2234 of SEQ ID NO: 585031
ugugaaugauagcuguaaa

SEQ ID NO: 607807 - RNA, 19 nt, Artificial Sequence
  Description of Artificial Sequence: Synthetic oligonucleotide
  Antisense strand to SEQ ID NO: 607806
uuuacagcuaucauucaca

SEQ ID NO: 607808 - RNA, 19 nt, Artificial Sequence
  Description of Artificial Sequence: Synthetic oligonucleotide
  Sense strand starting at position 2235 of SEQ ID NO: 585031
gugaaugauagcuguaaac

SEQ ID NO: 607809 - RNA, 19 nt, Artificial Sequence
  Description of Artificial Sequence: Synthetic oligonucleotide
  Antisense strand to SEQ ID NO: 607808
guuuacagcuaucauucac

SEQ ID NO: 607810 - RNA, 19 nt, Artificial Sequence
  Description of Artificial Sequence: Synthetic oligonucleotide
  Sense strand starting at position 2358 of SEQ ID NO: 585031
gcugaacauuguccauuaa

SEQ ID NO: 607811 - RNA, 19 nt, Artificial Sequence
  Description of Artificial Sequence: Synthetic oligonucleotide
  Antisense strand to SEQ ID NO: 607810
uuaauggacaauguucagc

SEQ ID NO: 607812 - RNA, 19 nt, Artificial Sequence
  Description of Artificial Sequence: Synthetic oligonucleotide
  Sense strand starting at position 3049 of SEQ ID NO: 585031
guaagauaauauguguacu

SEQ ID NO: 607813 - RNA, 19 nt, Artificial Sequence
  Description of Artificial Sequence: Synthetic oligonucleotide
  Antisense strand to SEQ ID NO: 607812
aguacacauauuaucuuac

SEQ ID NO: 607814 - RNA, 19 nt, Artificial Sequence
  Description of Artificial Sequence: Synthetic oligonucleotide
  Sense strand starting at position 3052 of SEQ ID NO: 585031
agauaauauguguacucua

SEQ ID NO: 607815 - RNA, 19 nt, Artificial Sequence
  Description of Artificial Sequence: Synthetic oligonucleotide
  Antisense strand to SEQ ID NO: 607814
uagaguacacauauuaucu

SEQ ID NO: 607816 - RNA, 19 nt, Artificial Sequence
  Description of Artificial Sequence: Synthetic oligonucleotide
  Sense strand starting at position 3108 of SEQ ID NO: 585031
acuguaguacaauaaguau

SEQ ID NO: 607817 - RNA, 19 nt, Artificial Sequence
  Description of Artificial Sequence: Synthetic oligonucleotide
  Antisense strand to SEQ ID NO: 607816
auacuuauuguacuacagu

SEQ ID NO: 607818 - RNA, 19 nt, Artificial Sequence
  Description of Artificial Sequence: Synthetic oligonucleotide
  Sense strand starting at position 3324 of SEQ ID NO: 585031
ugguuaugucauuauugaa

SEQ ID NO: 607819 - RNA, 19 nt, Artificial Sequence
  Description of Artificial Sequence: Synthetic oligonucleotide
  Antisense strand to SEQ ID NO: 607818
uucaauaaugacauaacca

SEQ ID NO: 607820 - RNA, 19 nt, Artificial Sequence
  Description of Artificial Sequence: Synthetic oligonucleotide
  Sense strand starting at position 3331 of SEQ ID NO: 585031
gucauuauugaagaguauu

SEQ ID NO: 607821 - RNA, 19 nt, Artificial Sequence
  Description of Artificial Sequence: Synthetic oligonucleotide
  Antisense strand to SEQ ID NO: 607820
aauacucuucaauaaugac

SEQ ID NO: 607822 - RNA, 19 nt, Artificial Sequence
  Description of Artificial Sequence: Synthetic oligonucleotide
  Sense strand starting at position 3343 of SEQ ID NO: 585031
gaguauuucuuccugcagu

SEQ ID NO: 607823 - RNA, 19 nt, Artificial Sequence
  Description of Artificial Sequence: Synthetic oligonucleotide
  Antisense strand to SEQ ID NO: 607822
acugcaggaagaaauacuc

SEQ ID NO: 607824 - RNA, 19 nt, Artificial Sequence
  Description of Artificial Sequence: Synthetic oligonucleotide
  Sense strand starting at position 3405 of SEQ ID NO: 585031
uaucgucaaguuuaucuga

SEQ ID NO: 607825 - RNA, 19 nt, Artificial Sequence
  Description of Artificial Sequence: Synthetic oligonucleotide
  Antisense strand to SEQ ID NO: 607824
ucagauaaacuugacgaua

SEQ ID NO: 607826 - RNA, 19 nt, Artificial Sequence
  Description of Artificial Sequence: Synthetic oligonucleotide
  Sense strand starting at position 3413 of SEQ ID NO: 585031
aguuuaucugaguagcaua

SEQ ID NO: 607827 - RNA, 19 nt, Artificial Sequence
  Description of Artificial Sequence: Synthetic oligonucleotide
  Antisense strand to SEQ ID NO: 607826
uaugcuacucagauaaacu

SEQ ID NO: 607828 - RNA, 19 nt, Artificial Sequence
  Description of Artificial Sequence: Synthetic oligonucleotide
  Sense strand starting at position 3633 of SEQ ID NO: 585031
ggauguuaaaucuagguuc

SEQ ID NO: 607829 - RNA, 19 nt, Artificial Sequence
  Description of Artificial Sequence: Synthetic oligonucleotide
  Antisense strand to SEQ ID NO: 607828
gaaccuagauuuaacaucc

SEQ ID NO: 607830 - RNA, 19 nt, Artificial Sequence
  Description of Artificial Sequence: Synthetic oligonucleotide
  Sense strand starting at position 3704 of SEQ ID NO: 585031
uccagucuuccugaugaaa

SEQ ID NO: 607831 - RNA, 19 nt, Artificial Sequence
  Description of Artificial Sequence: Synthetic oligonucleotide
  Antisense strand to SEQ ID NO: 607830
uuucaucaggaagacugga

SEQ ID NO: 607832 - RNA, 19 nt, Artificial Sequence
  Description of Artificial Sequence: Synthetic oligonucleotide
  Sense strand starting at position 3724 of SEQ ID NO: 585031
cucuaaugccuggauagcu

SEQ ID NO: 607833 - RNA, 19 nt, Artificial Sequence
  Description of Artificial Sequence: Synthetic oligonucleotide
  Antisense strand to SEQ ID NO: 607832
agcuauccaggcauuagag

SEQ ID NO: 607834 - RNA, 19 nt, Artificial Sequence
  Description of Artificial Sequence: Synthetic oligonucleotide
  Sense strand starting at position 3881 of SEQ ID NO: 585031
cuuauaucuuuccugggau

SEQ ID NO: 607835 - RNA, 19 nt, Artificial Sequence
  Description of Artificial Sequence: Synthetic oligonucleotide
  Antisense strand to SEQ ID NO: 607834
aucccaggaaagauauaag

SEQ ID NO: 607836 - RNA, 19 nt, Artificial Sequence
  Description of Artificial Sequence: Synthetic oligonucleotide
  Sense strand starting at position 3884 of SEQ ID NO: 585031
auaucuuuccugggaucug

SEQ ID NO: 607837 - RNA, 19 nt, Artificial Sequence
  Description of Artificial Sequence: Synthetic oligonucleotide
  Antisense strand to SEQ ID NO: 607836
cagaucccaggaaagauau

SEQ ID NO: 607838 - RNA, 19 nt, Artificial Sequence
  Description of Artificial Sequence: Synthetic oligonucleotide
  Sense strand starting at position 23 of SEQ ID NO: 585032
guauuaucuagagagaugc

SEQ ID NO: 607839 - RNA, 19 nt, Artificial Sequence
  Description of Artificial Sequence: Synthetic oligonucleotide
  Antisense strand to SEQ ID NO: 607838
gcaucucucuagauaauac

SEQ ID NO: 607840 - RNA, 19 nt, Artificial Sequence
  Description of Artificial Sequence: Synthetic oligonucleotide
  Sense strand starting at position 39 of SEQ ID NO: 585032
ugcuauuuauugccuuuga

SEQ ID NO: 607841 - RNA, 19 nt, Artificial Sequence
  Description of Artificial Sequence: Synthetic oligonucleotide
  Antisense strand to SEQ ID NO: 607840
ucaaaggcaauaaauagca

SEQ ID NO: 607842 - RNA, 19 nt, Artificial Sequence
  Description of Artificial Sequence: Synthetic oligonucleotide
  Sense strand starting at position 40 of SEQ ID NO: 585032
gcuauuuauugccuuugau

SEQ ID NO: 607843 - RNA, 19 nt, Artificial Sequence
  Description of Artificial Sequence: Synthetic oligonucleotide
  Antisense strand to SEQ ID NO: 607842
aucaaaggcaauaaauagc

SEQ ID NO: 607844 - RNA, 19 nt, Artificial Sequence
  Description of Artificial Sequence: Synthetic oligonucleotide
  Sense strand starting at position 105 of SEQ ID NO: 585032
agauuacacuguccuacau

SEQ ID NO: 607845 - RNA, 19 nt, Artificial Sequence
  Description of Artificial Sequence: Synthetic oligonucleotide
  Antisense strand to SEQ ID NO: 607844
auguaggacaguguaaucu

SEQ ID NO: 607846 - RNA, 19 nt, Artificial Sequence
  Description of Artificial Sequence: Synthetic oligonucleotide
  Sense strand starting at position 117 of SEQ ID NO: 585032
ccuacaugaugggugugaa

SEQ ID NO: 607847 - RNA, 19 nt, Artificial Sequence
  Description of Artificial Sequence: Synthetic oligonucleotide
  Antisense strand to SEQ ID NO: 607846
uucacacccaucauguagg

SEQ ID NO: 607848 - RNA, 19 nt, Artificial Sequence
  Description of Artificial Sequence: Synthetic oligonucleotide
  Sense strand starting at position 118 of SEQ ID NO: 585032
cuacaugaugggugugaag

SEQ ID NO: 607849 - RNA, 19 nt, Artificial Sequence
  Description of Artificial Sequence: Synthetic oligonucleotide
  Antisense strand to SEQ ID NO: 607848
cuucacacccaucauguag

SEQ ID NO: 607850 - RNA, 19 nt, Artificial Sequence
  Description of Artificial Sequence: Synthetic oligonucleotide
  Sense strand starting at position 221 of SEQ ID NO: 585032
uuaagugggaauuguaaau

SEQ ID NO: 607851 - RNA, 19 nt, Artificial Sequence
  Description of Artificial Sequence: Synthetic oligonucleotide
  Antisense strand to SEQ ID NO: 607850
auuuacaauucccacuuaa

SEQ ID NO: 607852 - RNA, 19 nt, Artificial Sequence
  Description of Artificial Sequence: Synthetic oligonucleotide
  Sense strand starting at position 285 of SEQ ID NO: 585032
agauaacagcuauguauaa

SEQ ID NO: 607853 - RNA, 19 nt, Artificial Sequence
  Description of Artificial Sequence: Synthetic oligonucleotide
  Antisense strand to SEQ ID NO: 607852
uuauacauagcuguuaucu

SEQ ID NO: 607854 - RNA, 19 nt, Artificial Sequence
  Description of Artificial Sequence: Synthetic oligonucleotide
  Sense strand starting at position 383 of SEQ ID NO: 585032
gucucuuggguuuauaaug

SEQ ID NO: 607855 - RNA, 19 nt, Artificial Sequence
  Description of Artificial Sequence: Synthetic oligonucleotide
  Antisense strand to SEQ ID NO: 607854
cauuauaaacccaagagac

SEQ ID NO: 607856 - RNA, 19 nt, Artificial Sequence
  Description of Artificial Sequence: Synthetic oligonucleotide
  Sense strand starting at position 592 of SEQ ID NO: 585032
uagucuugaguuuagaaug

SEQ ID NO: 607857 - RNA, 19 nt, Artificial Sequence
  Description of Artificial Sequence: Synthetic oligonucleotide
  Antisense strand to SEQ ID NO: 607856
cauucuaaacucaagacua

SEQ ID NO: 607858 - RNA, 19 nt, Artificial Sequence
  Description of Artificial Sequence: Synthetic oligonucleotide
  Sense strand starting at position 761 of SEQ ID NO: 585032
gucucaucugugcugcuaa

SEQ ID NO: 607859 - RNA, 19 nt, Artificial Sequence
  Description of Artificial Sequence: Synthetic oligonucleotide
  Antisense strand to SEQ ID NO: 607858
uuagcagcacagaugagac

SEQ ID NO: 607860 - RNA, 19 nt, Artificial Sequence
  Description of Artificial Sequence: Synthetic oligonucleotide
  Sense strand starting at position 834 of SEQ ID NO: 585032
aucagaaugcccuauaguu

SEQ ID NO: 607861 - RNA, 19 nt, Artificial Sequence
  Description of Artificial Sequence: Synthetic oligonucleotide
  Antisense strand to SEQ ID NO: 607860
aacuauagggcauucugau

SEQ ID NO: 607862 - RNA, 19 nt, Artificial Sequence
  Description of Artificial Sequence: Synthetic oligonucleotide
  Sense strand starting at position 876 of SEQ ID NO: 585032
uucuuaaggugaguggaau

SEQ ID NO: 607863 - RNA, 19 nt, Artificial Sequence
  Description of Artificial Sequence: Synthetic oligonucleotide
  Antisense strand to SEQ ID NO: 607862
auuccacucaccuuaagaa

SEQ ID NO: 607864 - RNA, 19 nt, Artificial Sequence
  Description of Artificial Sequence: Synthetic oligonucleotide
  Sense strand starting at position 877 of SEQ ID NO: 585032
ucuuaaggugaguggaauu

SEQ ID NO: 607865 - RNA, 19 nt, Artificial Sequence
  Description of Artificial Sequence: Synthetic oligonucleotide
  Antisense strand to SEQ ID NO: 607864
aauuccacucaccuuaaga

SEQ ID NO: 607866 - RNA, 19 nt, Artificial Sequence
  Description of Artificial Sequence: Synthetic oligonucleotide
  Sense strand starting at position 924 of SEQ ID NO: 585032
uuuacagggucuuuacaua

SEQ ID NO: 607867 - RNA, 19 nt, Artificial Sequence
  Description of Artificial Sequence: Synthetic oligonucleotide
  Antisense strand to SEQ ID NO: 607866
uauguaaagacccuguaaa

SEQ ID NO: 607868 - RNA, 19 nt, Artificial Sequence
  Description of Artificial Sequence: Synthetic oligonucleotide
  Sense strand starting at position 965 of SEQ ID NO: 585032
ucauaaguacccugaaaug

SEQ ID NO: 607869 - RNA, 19 nt, Artificial Sequence
  Description of Artificial Sequence: Synthetic oligonucleotide
  Antisense strand to SEQ ID NO: 607868
cauuucaggguacuuauga

SEQ ID NO: 607870 - RNA, 19 nt, Artificial Sequence
  Description of Artificial Sequence: Synthetic oligonucleotide
  Sense strand starting at position 1020 of SEQ ID NO: 585032
acuuccuuuggcuauugau

SEQ ID NO: 607871 - RNA, 19 nt, Artificial Sequence
  Description of Artificial Sequence: Synthetic oligonucleotide
  Antisense strand to SEQ ID NO: 607870
aucaauagccaaaggaagu

SEQ ID NO: 607872 - RNA, 19 nt, Artificial Sequence
  Description of Artificial Sequence: Synthetic oligonucleotide
  Sense strand starting at position 1046 of SEQ ID NO: 585032
aauaguaguguguacaaug

SEQ ID NO: 607873 - RNA, 19 nt, Artificial Sequence
  Description of Artificial Sequence: Synthetic oligonucleotide
  Antisense strand to SEQ ID NO: 607872
cauuguacacacuacuauu

SEQ ID NO: 607874 - RNA, 19 nt, Artificial Sequence
  Description of Artificial Sequence: Synthetic oligonucleotide
  Sense strand starting at position 1080 of SEQ ID NO: 585032
ggguacacaguuuaaguau

SEQ ID NO: 607875 - RNA, 19 nt, Artificial Sequence
  Description of Artificial Sequence: Synthetic oligonucleotide
  Antisense strand to SEQ ID NO: 607874
auacuuaaacuguguaccc

SEQ ID NO: 607876 - RNA, 19 nt, Artificial Sequence
  Description of Artificial Sequence: Synthetic oligonucleotide
  Sense strand starting at position 1151 of SEQ ID NO: 585032
aagaaagaguuucucgaug

SEQ ID NO: 607877 - RNA, 19 nt, Artificial Sequence
  Description of Artificial Sequence: Synthetic oligonucleotide
  Antisense strand to SEQ ID NO: 607876
caucgagaaacucuuucuu

SEQ ID NO: 607878 - RNA, 19 nt, Artificial Sequence
  Description of Artificial Sequence: Synthetic oligonucleotide
  Sense strand starting at position 1236 of SEQ ID NO: 585032
uuaagaugaaucugaugug

SEQ ID NO: 607879 - RNA, 19 nt, Artificial Sequence
  Description of Artificial Sequence: Synthetic oligonucleotide
  Antisense strand to SEQ ID NO: 607878
cacaucagauucaucuuaa

SEQ ID NO: 607880 - RNA, 19 nt, Artificial Sequence
  Description of Artificial Sequence: Synthetic oligonucleotide
  Sense strand starting at position 1243 of SEQ ID NO: 585032
gaaucugauguguauuaua

SEQ ID NO: 607881 - RNA, 19 nt, Artificial Sequence
  Description of Artificial Sequence: Synthetic oligonucleotide
  Antisense strand to SEQ ID NO: 607880
uauaauacacaucagauuc

SEQ ID NO: 607882 - RNA, 19 nt, Artificial Sequence
  Description of Artificial Sequence: Synthetic oligonucleotide
  Sense strand starting at position 1361 of SEQ ID NO: 585032
gcugaaugaguguaaauaa

SEQ ID NO: 607883 - RNA, 19 nt, Artificial Sequence
  Description of Artificial Sequence: Synthetic oligonucleotide
  Antisense strand to SEQ ID NO: 607882
uuauuuacacucauucagc

SEQ ID NO: 607884 - RNA, 19 nt, Artificial Sequence
  Description of Artificial Sequence: Synthetic oligonucleotide
  Sense strand starting at position 1368 of SEQ ID NO: 585032
gaguguaaauaaccugaua

SEQ ID NO: 607885 - RNA, 19 nt, Artificial Sequence
  Description of Artificial Sequence: Synthetic oligonucleotide
  Antisense strand to SEQ ID NO: 607884
uaucagguuauuuacacuc

SEQ ID NO: 607886 - RNA, 19 nt, Artificial Sequence
  Description of Artificial Sequence: Synthetic oligonucleotide
  Sense strand starting at position 1430 of SEQ ID NO: 585032
gguaucaauuauuccaaag

SEQ ID NO: 607887 - RNA, 19 nt, Artificial Sequence
  Description of Artificial Sequence: Synthetic oligonucleotide
  Antisense strand to SEQ ID NO: 607886
cuuuggaauaauugauacc

SEQ ID NO: 607888 - RNA, 19 nt, Artificial Sequence
  Description of Artificial Sequence: Synthetic oligonucleotide
  Sense strand starting at position 1488 of SEQ ID NO: 585032
uguaauuggaccugaggua

SEQ ID NO: 607889 - RNA, 19 nt, Artificial Sequence
  Description of Artificial Sequence: Synthetic oligonucleotide
  Antisense strand to SEQ ID NO: 607888
uaccucagguccaauuaca

SEQ ID NO: 607890 - RNA, 19 nt, Artificial Sequence
  Description of Artificial Sequence: Synthetic oligonucleotide
  Sense strand starting at position 1662 of SEQ ID NO: 585032
ggauccagaugguuauacu

SEQ ID NO: 607891 - RNA, 19 nt, Artificial Sequence
  Description of Artificial Sequence: Synthetic oligonucleotide
  Antisense strand to SEQ ID NO: 607890
aguauaaccaucuggaucc

SEQ ID NO: 607892 - RNA, 19 nt, Artificial Sequence
  Description of Artificial Sequence: Synthetic oligonucleotide
  Sense strand starting at position 1713 of SEQ ID NO: 585032
accagccuguagucauuua

SEQ ID NO: 607893 - RNA, 19 nt, Artificial Sequence
  Description of Artificial Sequence: Synthetic oligonucleotide
  Antisense strand to SEQ ID NO: 607892
uaaaugacuacaggcuggu

SEQ ID NO: 607894 - RNA, 19 nt, Artificial Sequence
  Description of Artificial Sequence: Synthetic oligonucleotide
  Sense strand starting at position 1803 of SEQ ID NO: 585032
uccuuuauuugugauuuac

SEQ ID NO: 607895 - RNA, 19 nt, Artificial Sequence
  Description of Artificial Sequence: Synthetic oligonucleotide
  Antisense strand to SEQ ID NO: 607894
guaaaucacaaauaaagga

SEQ ID NO: 607896 - RNA, 19 nt, Artificial Sequence
  Description of Artificial Sequence: Synthetic oligonucleotide
  Sense strand starting at position 2085 of SEQ ID NO: 585032
caugcaguuguacgaauuu

SEQ ID NO: 607897 - RNA, 19 nt, Artificial Sequence
  Description of Artificial Sequence: Synthetic oligonucleotide
  Antisense strand to SEQ ID NO: 607896
aaauucguacaacugcaug

SEQ ID NO: 607898 - RNA, 19 nt, Artificial Sequence
  Description of Artificial Sequence: Synthetic oligonucleotide
  Sense strand starting at position 2234 of SEQ ID NO: 585032
auaacugguugucuaggaa

SEQ ID NO: 607899 - RNA, 19 nt, Artificial Sequence
  Description of Artificial Sequence: Synthetic oligonucleotide
  Antisense strand to SEQ ID NO: 607898
uuccuagacaaccaguuau

SEQ ID NO: 607900 - RNA, 19 nt, Artificial Sequence
  Description of Artificial Sequence: Synthetic oligonucleotide
  Sense strand starting at position 3050 of SEQ ID NO: 585032
gcaugcaauguagauauua

SEQ ID NO: 607901 - RNA, 19 nt, Artificial Sequence
  Description of Artificial Sequence: Synthetic oligonucleotide
  Antisense strand to SEQ ID NO: 607900
uaauaucuacauugcaugc

SEQ ID NO: 607902 - RNA, 19 nt, Artificial Sequence
  Description of Artificial Sequence: Synthetic oligonucleotide
  Sense strand starting at position 3218 of SEQ ID NO: 585032
uuuggauguucuuuaagga

SEQ ID NO: 607903 - RNA, 19 nt, Artificial Sequence
  Description of Artificial Sequence: Synthetic oligonucleotide
  Antisense strand to SEQ ID NO: 607902
uccuuaaagaacauccaaa

SEQ ID NO: 607904 - RNA, 19 nt, Artificial Sequence
  Description of Artificial Sequence: Synthetic oligonucleotide
  Sense strand starting at position 3490 of SEQ ID NO: 585032
uguaauaaagcucauuaug

SEQ ID NO: 607905 - RNA, 19 nt, Artificial Sequence
  Description of Artificial Sequence: Synthetic oligonucleotide
  Antisense strand to SEQ ID NO: 607904
cauaaugagcuuuauuaca

SEQ ID NO: 607906 - RNA, 19 nt, Artificial Sequence
  Description of Artificial Sequence: Synthetic oligonucleotide
  Sense strand starting at position 3499 of SEQ ID NO: 585032
gcucauuauguuuaauuga

SEQ ID NO: 607907 - RNA, 19 nt, Artificial Sequence
  Description of Artificial Sequence: Synthetic oligonucleotide
  Antisense strand to SEQ ID NO: 607906
ucaauuaaacauaaugagc

SEQ ID NO: 607908 - RNA, 19 nt, Artificial Sequence
  Description of Artificial Sequence: Synthetic oligonucleotide
  Sense strand starting at position 3558 of SEQ ID NO: 585032
uguuuauguaaggaacugu

SEQ ID NO: 607909 - RNA, 19 nt, Artificial Sequence
  Description of Artificial Sequence: Synthetic oligonucleotide
  Antisense strand to SEQ ID NO: 607908
acaguuccuuacauaaaca

SEQ ID NO: 607910 - RNA, 19 nt, Artificial Sequence
  Description of Artificial Sequence: Synthetic oligonucleotide
  Sense strand starting at position 3575 of SEQ ID NO: 585032
guugaauuccuaggaccag

SEQ ID NO: 607911 - RNA, 19 nt, Artificial Sequence
  Description of Artificial Sequence: Synthetic oligonucleotide
  Antisense strand to SEQ ID NO: 607910
cugguccuaggaauucaac

SEQ ID NO: 607912 - RNA, 19 nt, Artificial Sequence
  Description of Artificial Sequence: Synthetic oligonucleotide
  Sense strand starting at position 3859 of SEQ ID NO: 585032
acaagcagaguuugaauaa

SEQ ID NO: 607913 - RNA, 19 nt, Artificial Sequence
  Description of Artificial Sequence: Synthetic oligonucleotide
  Antisense strand to SEQ ID NO: 607912
uuauucaaacucugcuugu

SEQ ID NO: 607914 - RNA, 19 nt, Artificial Sequence
  Description of Artificial Sequence: Synthetic oligonucleotide
  Sense strand starting at position 3919 of SEQ ID NO: 585032
auacacaaagauuguguaa

SEQ ID NO: 607915 - RNA, 19 nt, Artificial Sequence
  Description of Artificial Sequence: Synthetic oligonucleotide
  Antisense strand to SEQ ID NO: 607914
uuacacaaucuuuguguau

SEQ ID NO: 607916 - RNA, 19 nt, Artificial Sequence
  Description of Artificial Sequence: Synthetic oligonucleotide
  Sense strand starting at position 3971 of SEQ ID NO: 585032
guuaaacgaugguuauaaa

SEQ ID NO: 607917 - RNA, 19 nt, Artificial Sequence
  Description of Artificial Sequence: Synthetic oligonucleotide
  Antisense strand to SEQ ID NO: 607916
uuuauaaccaucguuuaac

SEQ ID NO: 607918 - RNA, 19 nt, Artificial Sequence
  Description of Artificial Sequence: Synthetic oligonucleotide
  Sense strand starting at position 15 of SEQ ID NO: 585033
acaguauauuuacaugacu

SEQ ID NO: 607919 - RNA, 19 nt, Artificial Sequence
  Description of Artificial Sequence: Synthetic oligonucleotide
  Antisense strand to SEQ ID NO: 607918
agucauguaaauauacugu

SEQ ID NO: 607920 - RNA, 19 nt, Artificial Sequence
  Description of Artificial Sequence: Synthetic oligonucleotide
  Sense strand starting at position 148 of SEQ ID NO: 585033
uuuggcuagcagcgagaua

SEQ ID NO: 607921 - RNA, 19 nt, Artificial Sequence
  Description of Artificial Sequence: Synthetic oligonucleotide
  Antisense strand to SEQ ID NO: 607920
uaucucgcugcuagccaaa

SEQ ID NO: 607922 - RNA, 19 nt, Artificial Sequence
  Description of Artificial Sequence: Synthetic oligonucleotide
  Sense strand starting at position 150 of SEQ ID NO: 585033
uggcuagcagcgagauagu

SEQ ID NO: 607923 - RNA, 19 nt, Artificial Sequence
  Description of Artificial Sequence: Synthetic oligonucleotide
  Antisense strand to SEQ ID NO: 607922
acuaucucgcugcuagcca

SEQ ID NO: 607924 - RNA, 19 nt, Artificial Sequence
  Description of Artificial Sequence: Synthetic oligonucleotide
  Sense strand starting at position 214 of SEQ ID NO: 585033
guuguuaagcaauaguuua

SEQ ID NO: 607925 - RNA, 19 nt, Artificial Sequence
  Description of Artificial Sequence: Synthetic oligonucleotide
  Antisense strand to SEQ ID NO: 607924
uaaacuauugcuuaacaac

SEQ ID NO: 607926 - RNA, 19 nt, Artificial Sequence
  Description of Artificial Sequence: Synthetic oligonucleotide
  Sense strand starting at position 219 of SEQ ID NO: 585033
uaagcaauaguuuauguga

SEQ ID NO: 607927 - RNA, 19 nt, Artificial Sequence
  Description of Artificial Sequence: Synthetic oligonucleotide
  Antisense strand to SEQ ID NO: 607926
ucacauaaacuauugcuua

SEQ ID NO: 607928 - RNA, 19 nt, Artificial Sequence
  Description of Artificial Sequence: Synthetic oligonucleotide
  Sense strand starting at position 419 of SEQ ID NO: 585033
gucguaaacauauacgaaa

SEQ ID NO: 607929 - RNA, 19 nt, Artificial Sequence
  Description of Artificial Sequence: Synthetic oligonucleotide
  Antisense strand to SEQ ID NO: 607928
uuucguauauguuuacgac

SEQ ID NO: 607930 - RNA, 19 nt, Artificial Sequence
  Description of Artificial Sequence: Synthetic oligonucleotide
  Sense strand starting at position 432 of SEQ ID NO: 585033
acgaaauaaccgcagacua

SEQ ID NO: 607931 - RNA, 19 nt, Artificial Sequence
  Description of Artificial Sequence: Synthetic oligonucleotide
  Antisense strand to SEQ ID NO: 607930
uagucugcgguuauuucgu

SEQ ID NO: 607932 - RNA, 19 nt, Artificial Sequence
  Description of Artificial Sequence: Synthetic oligonucleotide
  Sense strand starting at position 458 of SEQ ID NO: 585033
aucaaagaaugcuaagaga

SEQ ID NO: 607933 - RNA, 19 nt, Artificial Sequence
  Description of Artificial Sequence: Synthetic oligonucleotide
  Antisense strand to SEQ ID NO: 607932
ucucuuagcauucuuugau

SEQ ID NO: 607934 - RNA, 19 nt, Artificial Sequence
  Description of Artificial Sequence: Synthetic oligonucleotide
  Sense strand starting at position 499 of SEQ ID NO: 585033
uuggaaacaugucaagaag

SEQ ID NO: 607935 - RNA, 19 nt, Artificial Sequence
  Description of Artificial Sequence: Synthetic oligonucleotide
  Antisense strand to SEQ ID NO: 607934
cuucuugacauguuuccaa

SEQ ID NO: 607936 - RNA, 19 nt, Artificial Sequence
  Description of Artificial Sequence: Synthetic oligonucleotide
  Sense strand starting at position 541 of SEQ ID NO: 585033
gcaugcauccuggauaaac

SEQ ID NO: 607937 - RNA, 19 nt, Artificial Sequence
  Description of Artificial Sequence: Synthetic oligonucleotide
  Antisense strand to SEQ ID NO: 607936
guuuauccaggaugcaugc

SEQ ID NO: 607938 - RNA, 19 nt, Artificial Sequence
  Description of Artificial Sequence: Synthetic oligonucleotide
  Sense strand starting at position 607 of SEQ ID NO: 585033
cagucaaaucagggcucau

SEQ ID NO: 607939 - RNA, 19 nt, Artificial Sequence
  Description of Artificial Sequence: Synthetic oligonucleotide
  Antisense strand to SEQ ID NO: 607938
augagcccugauuugacug

SEQ ID NO: 607940 - RNA, 19 nt, Artificial Sequence
  Description of Artificial Sequence: Synthetic oligonucleotide
  Sense strand starting at position 750 of SEQ ID NO: 585033
gcuguuugccagggaggga

SEQ ID NO: 607941 - RNA, 19 nt, Artificial Sequence
  Description of Artificial Sequence: Synthetic oligonucleotide
  Antisense strand to SEQ ID NO: 607940
ucccucccuggcaaacagc

SEQ ID NO: 607942 - RNA, 19 nt, Artificial Sequence
  Description of Artificial Sequence: Synthetic oligonucleotide
  Sense strand starting at position 805 of SEQ ID NO: 585033
caaauacuuccgggucuag

SEQ ID NO: 607943 - RNA, 19 nt, Artificial Sequence
  Description of Artificial Sequence: Synthetic oligonucleotide
  Antisense strand to SEQ ID NO: 607942
cuagacccggaaguauuug

SEQ ID NO: 607944 - RNA, 19 nt, Artificial Sequence
  Description of Artificial Sequence: Synthetic oligonucleotide
  Sense strand starting at position 815 of SEQ ID NO: 585033
cgggucuagccuuauaacu

SEQ ID NO: 607945 - RNA, 19 nt, Artificial Sequence
  Description of Artificial Sequence: Synthetic oligonucleotide
  Antisense strand to SEQ ID NO: 607944
aguuauaaggcuagacccg

SEQ ID NO: 607946 - RNA, 19 nt, Artificial Sequence
  Description of Artificial Sequence: Synthetic oligonucleotide
  Sense strand starting at position 987 of SEQ ID NO: 585033
ccgucaaaugaugaaaugu

SEQ ID NO: 607947 - RNA, 19 nt, Artificial Sequence
  Description of Artificial Sequence: Synthetic oligonucleotide
  Antisense strand to SEQ ID NO: 607946
acauuucaucauuugacgg

SEQ ID NO: 607948 - RNA, 19 nt, Artificial Sequence
  Description of Artificial Sequence: Synthetic oligonucleotide
  Sense strand starting at position 998 of SEQ ID NO: 585033
ugaaauguuaacgaacguu

SEQ ID NO: 607949 - RNA, 19 nt, Artificial Sequence
  Description of Artificial Sequence: Synthetic oligonucleotide
  Antisense strand to SEQ ID NO: 607948
aacguucguuaacauuuca

SEQ ID NO: 607950 - RNA, 19 nt, Artificial Sequence
  Description of Artificial Sequence: Synthetic oligonucleotide
  Sense strand starting at position 1128 of SEQ ID NO: 585033
agauaaauugugcacacau

SEQ ID NO: 607951 - RNA, 19 nt, Artificial Sequence
  Description of Artificial Sequence: Synthetic oligonucleotide
  Antisense strand to SEQ ID NO: 607950
augugugcacaauuuaucu

SEQ ID NO: 607952 - RNA, 19 nt, Artificial Sequence
  Description of Artificial Sequence: Synthetic oligonucleotide
  Sense strand starting at position 1200 of SEQ ID NO: 585033
aacuguuuccugggugaaa

SEQ ID NO: 607953 - RNA, 19 nt, Artificial Sequence
  Description of Artificial Sequence: Synthetic oligonucleotide
  Antisense strand to SEQ ID NO: 607952
uuucacccaggaaacaguu

SEQ ID NO: 607954 - RNA, 19 nt, Artificial Sequence
  Description of Artificial Sequence: Synthetic oligonucleotide
  Sense strand starting at position 1520 of SEQ ID NO: 585033
ggacaccugcccugaaagu

SEQ ID NO: 607955 - RNA, 19 nt, Artificial Sequence
  Description of Artificial Sequence: Synthetic oligonucleotide
  Antisense strand to SEQ ID NO: 607954
acuuucagggcaggugucc

SEQ ID NO: 607956 - RNA, 19 nt, Artificial Sequence
  Description of Artificial Sequence: Synthetic oligonucleotide
  Sense strand starting at position 1521 of SEQ ID NO: 585033
gacaccugcccugaaaguu

SEQ ID NO: 607957 - RNA, 19 nt, Artificial Sequence
  Description of Artificial Sequence: Synthetic oligonucleotide
  Antisense strand to SEQ ID NO: 607956
aacuuucagggcagguguc

SEQ ID NO: 607958 - RNA, 19 nt, Artificial Sequence
  Description of Artificial Sequence: Synthetic oligonucleotide
  Sense strand starting at position 2366 of SEQ ID NO: 585033
uuuagagaucuccgaaguc

SEQ ID NO: 607959 - RNA, 19 nt, Artificial Sequence
  Description of Artificial Sequence: Synthetic oligonucleotide
  Antisense strand to SEQ ID NO: 607958
gacuucggagaucucuaaa

SEQ ID NO: 607960 - RNA, 19 nt, Artificial Sequence
  Description of Artificial Sequence: Synthetic oligonucleotide
  Sense strand starting at position 2381 of SEQ ID NO: 585033
agucgcuaucgacaguguu

SEQ ID NO: 607961 - RNA, 19 nt, Artificial Sequence
  Description of Artificial Sequence: Synthetic oligonucleotide
  Antisense strand to SEQ ID NO: 607960
aacacugucgauagcgacu

SEQ ID NO: 607962 - RNA, 19 nt, Artificial Sequence
  Description of Artificial Sequence: Synthetic oligonucleotide
  Sense strand starting at position 2382 of SEQ ID NO: 585033
gucgcuaucgacaguguua

SEQ ID NO: 607963 - RNA, 19 nt, Artificial Sequence
  Description of Artificial Sequence: Synthetic oligonucleotide
  Antisense strand to SEQ ID NO: 607962
uaacacugucgauagcgac

SEQ ID NO: 607964 - RNA, 19 nt, Artificial Sequence
  Description of Artificial Sequence: Synthetic oligonucleotide
  Sense strand starting at position 2412 of SEQ ID NO: 585033
aggagaauuaaucagcggu

SEQ ID NO: 607965 - RNA, 19 nt, Artificial Sequence
  Description of Artificial Sequence: Synthetic oligonucleotide
  Antisense strand to SEQ ID NO: 607964
accgcugauuaauucuccu

SEQ ID NO: 607966 - RNA, 19 nt, Artificial Sequence
  Description of Artificial Sequence: Synthetic oligonucleotide
  Sense strand starting at position 2414 of SEQ ID NO: 585033
gagaauuaaucagcggucu

SEQ ID NO: 607967 - RNA, 19 nt, Artificial Sequence
  Description of Artificial Sequence: Synthetic oligonucleotide
  Antisense strand to SEQ ID NO: 607966
agaccgcugauuaauucuc

SEQ ID NO: 607968 - RNA, 19 nt, Artificial Sequence
  Description of Artificial Sequence: Synthetic oligonucleotide
  Sense strand starting at position 2445 of SEQ ID NO: 585033
agaaaucaugcugggugau

SEQ ID NO: 607969 - RNA, 19 nt, Artificial Sequence
  Description of Artificial Sequence: Synthetic oligonucleotide
  Antisense strand to SEQ ID NO: 607968
aucacccagcaugauuucu

SEQ ID NO: 607970 - RNA, 19 nt, Artificial Sequence
  Description of Artificial Sequence: Synthetic oligonucleotide
  Sense strand starting at position 2446 of SEQ ID NO: 585033
gaaaucaugcugggugaua

SEQ ID NO: 607971 - RNA, 19 nt, Artificial Sequence
  Description of Artificial Sequence: Synthetic oligonucleotide
  Antisense strand to SEQ ID NO: 607970
uaucacccagcaugauuuc

SEQ ID NO: 607972 - RNA, 19 nt, Artificial Sequence
  Description of Artificial Sequence: Synthetic oligonucleotide
  Sense strand starting at position 2448 of SEQ ID NO: 585033
aaucaugcugggugauaga

SEQ ID NO: 607973 - RNA, 19 nt, Artificial Sequence
  Description of Artificial Sequence: Synthetic oligonucleotide
  Antisense strand to SEQ ID NO: 607972
ucuaucacccagcaugauu

SEQ ID NO: 607974 - RNA, 19 nt, Artificial Sequence
  Description of Artificial Sequence: Synthetic oligonucleotide
  Sense strand starting at position 2458 of SEQ ID NO: 585033
ggugauagauaacucccaa

SEQ ID NO: 607975 - RNA, 19 nt, Artificial Sequence
  Description of Artificial Sequence: Synthetic oligonucleotide
  Antisense strand to SEQ ID NO: 607974
uugggaguuaucuaucacc

SEQ ID NO: 607976 - RNA, 19 nt, Artificial Sequence
  Description of Artificial Sequence: Synthetic oligonucleotide
  Sense strand starting at position 2709 of SEQ ID NO: 585033
cuaggucaucuaugcagau

SEQ ID NO: 607977 - RNA, 19 nt, Artificial Sequence
  Description of Artificial Sequence: Synthetic oligonucleotide
  Antisense strand to SEQ ID NO: 607976
aucugcauagaugaccuag

SEQ ID NO: 607978 - RNA, 19 nt, Artificial Sequence
  Description of Artificial Sequence: Synthetic oligonucleotide
  Sense strand starting at position 2762 of SEQ ID NO: 585033
gcaguaucuucccugcuca

SEQ ID NO: 607979 - RNA, 19 nt, Artificial Sequence
  Description of Artificial Sequence: Synthetic oligonucleotide
  Antisense strand to SEQ ID NO: 607978
ugagcagggaagauacugc

SEQ ID NO: 607980 - RNA, 19 nt, Artificial Sequence
  Description of Artificial Sequence: Synthetic oligonucleotide
  Sense strand starting at position 2796 of SEQ ID NO: 585033
guaugugauuuccuuuauu

SEQ ID NO: 607981 - RNA, 19 nt, Artificial Sequence
  Description of Artificial Sequence: Synthetic oligonucleotide
  Antisense strand to SEQ ID NO: 607980
aauaaaggaaaucacauac

SEQ ID NO: 607982 - RNA, 19 nt, Artificial Sequence
  Description of Artificial Sequence: Synthetic oligonucleotide
  Sense strand starting at position 2843 of SEQ ID NO: 585033
ccugaaggauccuuguacu

SEQ ID NO: 607983 - RNA, 19 nt, Artificial Sequence
  Description of Artificial Sequence: Synthetic oligonucleotide
  Antisense strand to SEQ ID NO: 607982
aguacaaggauccuucagg

SEQ ID NO: 607984 - RNA, 19 nt, Artificial Sequence
  Description of Artificial Sequence: Synthetic oligonucleotide
  Sense strand starting at position 2846 of SEQ ID NO: 585033
gaaggauccuuguacucag

SEQ ID NO: 607985 - RNA, 19 nt, Artificial Sequence
  Description of Artificial Sequence: Synthetic oligonucleotide
  Antisense strand to SEQ ID NO: 607984
cugaguacaaggauccuuc

SEQ ID NO: 607986 - RNA, 19 nt, Artificial Sequence
  Description of Artificial Sequence: Synthetic oligonucleotide
  Sense strand starting at position 2853 of SEQ ID NO: 585033
ccuuguacucaguggacuu

SEQ ID NO: 607987 - RNA, 19 nt, Artificial Sequence
  Description of Artificial Sequence: Synthetic oligonucleotide
  Antisense strand to SEQ ID NO: 607986
aaguccacugaguacaagg

SEQ ID NO: 607988 - RNA, 19 nt, Artificial Sequence
  Description of Artificial Sequence: Synthetic oligonucleotide
  Sense strand starting at position 2873 of SEQ ID NO: 585033
auagaaaugugaucaguga

SEQ ID NO: 607989 - RNA, 19 nt, Artificial Sequence
  Description of Artificial Sequence: Synthetic oligonucleotide
  Antisense strand to SEQ ID NO: 607988
ucacugaucacauuucuau

SEQ ID NO: 607990 - RNA, 19 nt, Artificial Sequence
  Description of Artificial Sequence: Synthetic oligonucleotide
  Sense strand starting at position 2981 of SEQ ID NO: 585033
cgaauagugucauuucuac

SEQ ID NO: 607991 - RNA, 19 nt, Artificial Sequence
  Description of Artificial Sequence: Synthetic oligonucleotide
  Antisense strand to SEQ ID NO: 607990
guagaaaugacacuauucg

SEQ ID NO: 607992 - RNA, 19 nt, Artificial Sequence
  Description of Artificial Sequence: Synthetic oligonucleotide
  Sense strand starting at position 3176 of SEQ ID NO: 585033
uccuguguccaggaagagu

SEQ ID NO: 607993 - RNA, 19 nt, Artificial Sequence
  Description of Artificial Sequence: Synthetic oligonucleotide
  Antisense strand to SEQ ID NO: 607992
acucuuccuggacacagga

SEQ ID NO: 607994 - RNA, 19 nt, Artificial Sequence
  Description of Artificial Sequence: Synthetic oligonucleotide
  Sense strand starting at position 3366 of SEQ ID NO: 585033
gcaggugguccugacgagu

SEQ ID NO: 607995 - RNA, 19 nt, Artificial Sequence
  Description of Artificial Sequence: Synthetic oligonucleotide
  Antisense strand to SEQ ID NO: 607994
acucgucaggaccaccugc

SEQ ID NO: 607996 - RNA, 19 nt, Artificial Sequence
  Description of Artificial Sequence: Synthetic oligonucleotide
  Sense strand starting at position 3796 of SEQ ID NO: 585033
gugucagugcugcccugaa

SEQ ID NO: 607997 - RNA, 19 nt, Artificial Sequence
  Description of Artificial Sequence: Synthetic oligonucleotide
  Antisense strand to SEQ ID NO: 607996
uucagggcagcacugacac

SEQ ID NO: 607998 - RNA, 19 nt, Artificial Sequence
  Description of Artificial Sequence: Synthetic oligonucleotide
  Sense strand starting at position 120 of SEQ ID NO: 585034
acugucuuccaguaaccua

SEQ ID NO: 607999 - RNA, 19 nt, Artificial Sequence
  Description of Artificial Sequence: Synthetic oligonucleotide
  Antisense strand to SEQ ID NO: 607998
uagguuacuggaagacagu

SEQ ID NO: 608000 - RNA, 19 nt, Artificial Sequence
  Description of Artificial Sequence: Synthetic oligonucleotide
  Sense strand starting at position 135 of SEQ ID NO: 585034
ccuauaagaucgguucuuc

SEQ ID NO: 608001 - RNA, 19 nt, Artificial Sequence
  Description of Artificial Sequence: Synthetic oligonucleotide
  Antisense strand to SEQ ID NO: 608000
gaagaaccgaucuuauagg

SEQ ID NO: 608002 - RNA, 19 nt, Artificial Sequence
  Description of Artificial Sequence: Synthetic oligonucleotide
  Sense strand starting at position 276 of SEQ ID NO: 585034
ccacuuagcucuguuccua

SEQ ID NO: 608003 - RNA, 19 nt, Artificial Sequence
  Description of Artificial Sequence: Synthetic oligonucleotide
  Antisense strand to SEQ ID NO: 608002
uaggaacagagcuaagugg

SEQ ID NO: 608004 - RNA, 19 nt, Artificial Sequence
  Description of Artificial Sequence: Synthetic oligonucleotide
  Sense strand starting at position 588 of SEQ ID NO: 585034
gggcacaauuacuuaguuu

SEQ ID NO: 608005 - RNA, 19 nt, Artificial Sequence
  Description of Artificial Sequence: Synthetic oligonucleotide
  Antisense strand to SEQ ID NO: 608004
aaacuaaguaauugugccc

SEQ ID NO: 608006 - RNA, 19 nt, Artificial Sequence
  Description of Artificial Sequence: Synthetic oligonucleotide
  Sense strand starting at position 749 of SEQ ID NO: 585034
gcuccuaaguagcuagaaa

SEQ ID NO: 608007 - RNA, 19 nt, Artificial Sequence
  Description of Artificial Sequence: Synthetic oligonucleotide
  Antisense strand to SEQ ID NO: 608006
uuucuagcuacuuaggagc

SEQ ID NO: 608008 - RNA, 19 nt, Artificial Sequence
  Description of Artificial Sequence: Synthetic oligonucleotide
  Sense strand starting at position 1023 of SEQ ID NO: 585034
cugagagaggauugcuuga

SEQ ID NO: 608009 - RNA, 19 nt, Artificial Sequence
  Description of Artificial Sequence: Synthetic oligonucleotide
  Antisense strand to SEQ ID NO: 608008
ucaagcaauccucucucag

SEQ ID NO: 608010 - RNA, 19 nt, Artificial Sequence
  Description of Artificial Sequence: Synthetic oligonucleotide
  Sense strand starting at position 1340 of SEQ ID NO: 585034
acaagaaccuuggaugcau

SEQ ID NO: 608011 - RNA, 19 nt, Artificial Sequence
  Description of Artificial Sequence: Synthetic oligonucleotide
  Antisense strand to SEQ ID NO: 608010
augcauccaagguucuugu

SEQ ID NO: 608012 - RNA, 19 nt, Artificial Sequence
  Description of Artificial Sequence: Synthetic oligonucleotide
  Sense strand starting at position 1357 of SEQ ID NO: 585034
auguuaagaguucgagaaa

SEQ ID NO: 608013 - RNA, 19 nt, Artificial Sequence
  Description of Artificial Sequence: Synthetic oligonucleotide
  Antisense strand to SEQ ID NO: 608012
uuucucgaacucuuaacau

SEQ ID NO: 608014 - RNA, 19 nt, Artificial Sequence
  Description of Artificial Sequence: Synthetic oligonucleotide
  Sense strand starting at position 1358 of SEQ ID NO: 585034
uguuaagaguucgagaaac

SEQ ID NO: 608015 - RNA, 19 nt, Artificial Sequence
  Description of Artificial Sequence: Synthetic oligonucleotide
  Antisense strand to SEQ ID NO: 608014
guuucucgaacucuuaaca

SEQ ID NO: 608016 - RNA, 19 nt, Artificial Sequence
  Description of Artificial Sequence: Synthetic oligonucleotide
  Sense strand starting at position 1479 of SEQ ID NO: 585034
aagaauaagugcuugugaa

SEQ ID NO: 608017 - RNA, 19 nt, Artificial Sequence
  Description of Artificial Sequence: Synthetic oligonucleotide
  Antisense strand to SEQ ID NO: 608016
uucacaagcacuuauucuu

SEQ ID NO: 608018 - RNA, 19 nt, Artificial Sequence
  Description of Artificial Sequence: Synthetic oligonucleotide
  Sense strand starting at position 1480 of SEQ ID NO: 585034
agaauaagugcuugugaac

SEQ ID NO: 608019 - RNA, 19 nt, Artificial Sequence
  Description of Artificial Sequence: Synthetic oligonucleotide
  Antisense strand to SEQ ID NO: 608018
guucacaagcacuuauucu

SEQ ID NO: 608020 - RNA, 19 nt, Artificial Sequence
  Description of Artificial Sequence: Synthetic oligonucleotide
  Sense strand starting at position 1483 of SEQ ID NO: 585034
auaagugcuugugaacuga

SEQ ID NO: 608021 - RNA, 19 nt, Artificial Sequence
  Description of Artificial Sequence: Synthetic oligonucleotide
  Antisense strand to SEQ ID NO: 608020
ucaguucacaagcacuuau

SEQ ID NO: 608022 - RNA, 19 nt, Artificial Sequence
  Description of Artificial Sequence: Synthetic oligonucleotide
  Sense strand starting at position 1487 of SEQ ID NO: 585034
gugcuugugaacugagcuu

SEQ ID NO: 608023 - RNA, 19 nt, Artificial Sequence
  Description of Artificial Sequence: Synthetic oligonucleotide
  Antisense strand to SEQ ID NO: 608022
aagcucaguucacaagcac

SEQ ID NO: 608024 - RNA, 19 nt, Artificial Sequence
  Description of Artificial Sequence: Synthetic oligonucleotide
  Sense strand starting at position 1533 of SEQ ID NO: 585034
cagccucaccgggacaaau

SEQ ID NO: 608025 - RNA, 19 nt, Artificial Sequence
  Description of Artificial Sequence: Synthetic oligonucleotide
  Antisense strand to SEQ ID NO: 608024
auuugucccggugaggcug

SEQ ID NO: 608026 - RNA, 19 nt, Artificial Sequence
  Description of Artificial Sequence: Synthetic oligonucleotide
  Sense strand starting at position 1656 of SEQ ID NO: 585034
gcacgaacuccucggcaga

SEQ ID NO: 608027 - RNA, 19 nt, Artificial Sequence
  Description of Artificial Sequence: Synthetic oligonucleotide
  Antisense strand to SEQ ID NO: 608026
ucugccgaggaguucgugc

SEQ ID NO: 608028 - RNA, 19 nt, Artificial Sequence
  Description of Artificial Sequence: Synthetic oligonucleotide
  Sense strand starting at position 2111 of SEQ ID NO: 585034
gagugcuucgcucacgcau

SEQ ID NO: 608029 - RNA, 19 nt, Artificial Sequence
  Description of Artificial Sequence: Synthetic oligonucleotide
  Antisense strand to SEQ ID NO: 608028
augcgugagcgaagcacuc

SEQ ID NO: 608030 - RNA, 19 nt, Artificial Sequence
  Description of Artificial Sequence: Synthetic oligonucleotide
  Sense strand starting at position 2160 of SEQ ID NO: 585034
ugccuaaugugugcucauu

SEQ ID NO: 608031 - RNA, 19 nt, Artificial Sequence
  Description of Artificial Sequence: Synthetic oligonucleotide
  Antisense strand to SEQ ID NO: 608030
aaugagcacacauuaggca

SEQ ID NO: 608032 - RNA, 19 nt, Artificial Sequence
  Description of Artificial Sequence: Synthetic oligonucleotide
  Sense strand starting at position 2179 of SEQ ID NO: 585034
gcuuuccgucccugggaua

SEQ ID NO: 608033 - RNA, 19 nt, Artificial Sequence
  Description of Artificial Sequence: Synthetic oligonucleotide
  Antisense strand to SEQ ID NO: 608032
uaucccagggacggaaagc

SEQ ID NO: 608034 - RNA, 19 nt, Artificial Sequence
  Description of Artificial Sequence: Synthetic oligonucleotide
  Sense strand starting at position 2339 of SEQ ID NO: 585034
auuggaagaucggguccau

SEQ ID NO: 608035 - RNA, 19 nt, Artificial Sequence
  Description of Artificial Sequence: Synthetic oligonucleotide
  Antisense strand to SEQ ID NO: 608034
auggacccgaucuuccaau

SEQ ID NO: 608036 - RNA, 19 nt, Artificial Sequence
  Description of Artificial Sequence: Synthetic oligonucleotide
  Sense strand starting at position 2348 of SEQ ID NO: 585034
ucggguccaugcucauaaa

SEQ ID NO: 608037 - RNA, 19 nt, Artificial Sequence
  Description of Artificial Sequence: Synthetic oligonucleotide
  Antisense strand to SEQ ID NO: 608036
uuuaugagcauggacccga

SEQ ID NO: 608038 - RNA, 19 nt, Artificial Sequence
  Description of Artificial Sequence: Synthetic oligonucleotide
  Sense strand starting at position 2647 of SEQ ID NO: 585034
agaggaagucucugucuca

SEQ ID NO: 608039 - RNA, 19 nt, Artificial Sequence
  Description of Artificial Sequence: Synthetic oligonucleotide
  Antisense strand to SEQ ID NO: 608038
ugagacagagacuuccucu

SEQ ID NO: 608040 - RNA, 19 nt, Artificial Sequence
  Description of Artificial Sequence: Synthetic oligonucleotide
  Sense strand starting at position 2648 of SEQ ID NO: 585034
gaggaagucucugucucaa

SEQ ID NO: 608041 - RNA, 19 nt, Artificial Sequence
  Description of Artificial Sequence: Synthetic oligonucleotide
  Antisense strand to SEQ ID NO: 608040
uugagacagagacuuccuc

SEQ ID NO: 608042 - RNA, 19 nt, Artificial Sequence
  Description of Artificial Sequence: Synthetic oligonucleotide
  Sense strand starting at position 2650 of SEQ ID NO: 585034
ggaagucucugucucaaac

SEQ ID NO: 608043 - RNA, 19 nt, Artificial Sequence
  Description of Artificial Sequence: Synthetic oligonucleotide
  Antisense strand to SEQ ID NO: 608042
guuugagacagagacuucc

SEQ ID NO: 608044 - RNA, 19 nt, Artificial Sequence
  Description of Artificial Sequence: Synthetic oligonucleotide
  Sense strand starting at position 2717 of SEQ ID NO: 585034
gaagacaggucagguauaa

SEQ ID NO: 608045 - RNA, 19 nt, Artificial Sequence
  Description of Artificial Sequence: Synthetic oligonucleotide
  Antisense strand to SEQ ID NO: 608044
uuauaccugaccugucuuc

SEQ ID NO: 608046 - RNA, 19 nt, Artificial Sequence
  Description of Artificial Sequence: Synthetic oligonucleotide
  Sense strand starting at position 2812 of SEQ ID NO: 585034
ggcaaacuguguucugcau

SEQ ID NO: 608047 - RNA, 19 nt, Artificial Sequence
  Description of Artificial Sequence: Synthetic oligonucleotide
  Antisense strand to SEQ ID NO: 608046
augcagaacacaguuugcc

SEQ ID NO: 608048 - RNA, 19 nt, Artificial Sequence
  Description of Artificial Sequence: Synthetic oligonucleotide
  Sense strand starting at position 2834 of SEQ ID NO: 585034
ugcuuaacagcuugagaaa

SEQ ID NO: 608049 - RNA, 19 nt, Artificial Sequence
  Description of Artificial Sequence: Synthetic oligonucleotide
  Antisense strand to SEQ ID NO: 608048
uuucucaagcuguuaagca

SEQ ID NO: 608050 - RNA, 19 nt, Artificial Sequence
  Description of Artificial Sequence: Synthetic oligonucleotide
  Sense strand starting at position 2856 of SEQ ID NO: 585034
acugguggcugcuuauuua

SEQ ID NO: 608051 - RNA, 19 nt, Artificial Sequence
  Description of Artificial Sequence: Synthetic oligonucleotide
  Antisense strand to SEQ ID NO: 608050
uaaauaagcagccaccagu

SEQ ID NO: 608052 - RNA, 19 nt, Artificial Sequence
  Description of Artificial Sequence: Synthetic oligonucleotide
  Sense strand starting at position 3207 of SEQ ID NO: 585034
uggaauuacaagugugaca

SEQ ID NO: 608053 - RNA, 19 nt, Artificial Sequence
  Description of Artificial Sequence: Synthetic oligonucleotide
  Antisense strand to SEQ ID NO: 608052
ugucacacuuguaauucca

SEQ ID NO: 608054 - RNA, 19 nt, Artificial Sequence
  Description of Artificial Sequence: Synthetic oligonucleotide
  Sense strand starting at position 3209 of SEQ ID NO: 585034
gaauuacaagugugacaag

SEQ ID NO: 608055 - RNA, 19 nt, Artificial Sequence
  Description of Artificial Sequence: Synthetic oligonucleotide
  Antisense strand to SEQ ID NO: 608054
cuugucacacuuguaauuc

SEQ ID NO: 608056 - RNA, 19 nt, Artificial Sequence
  Description of Artificial Sequence: Synthetic oligonucleotide
  Sense strand starting at position 3501 of SEQ ID NO: 585034
agcugaauuuguuacucga

SEQ ID NO: 608057 - RNA, 19 nt, Artificial Sequence
  Description of Artificial Sequence: Synthetic oligonucleotide
  Antisense strand to SEQ ID NO: 608056
ucgaguaacaaauucagcu

SEQ ID NO: 608058 - RNA, 19 nt, Artificial Sequence
  Description of Artificial Sequence: Synthetic oligonucleotide
  Sense strand starting at position 3525 of SEQ ID NO: 585034
ugcugucugauuuguuuga

SEQ ID NO: 608059 - RNA, 19 nt, Artificial Sequence
  Description of Artificial Sequence: Synthetic oligonucleotide
  Antisense strand to SEQ ID NO: 608058
ucaaacaaaucagacagca

SEQ ID NO: 608060 - RNA, 19 nt, Artificial Sequence
  Description of Artificial Sequence: Synthetic oligonucleotide
  Sense strand starting at position 3526 of SEQ ID NO: 585034
gcugucugauuuguuugau

SEQ ID NO: 608061 - RNA, 19 nt, Artificial Sequence
  Description of Artificial Sequence: Synthetic oligonucleotide
  Antisense strand to SEQ ID NO: 608060
aucaaacaaaucagacagc

SEQ ID NO: 608062 - RNA, 19 nt, Artificial Sequence
  Description of Artificial Sequence: Synthetic oligonucleotide
  Sense strand starting at position 3527 of SEQ ID NO: 585034
cugucugauuuguuugauc

SEQ ID NO: 608063 - RNA, 19 nt, Artificial Sequence
  Description of Artificial Sequence: Synthetic oligonucleotide
  Antisense strand to SEQ ID NO: 608062
gaucaaacaaaucagacag

SEQ ID NO: 608064 - RNA, 19 nt, Artificial Sequence
  Description of Artificial Sequence: Synthetic oligonucleotide
  Sense strand starting at position 3529 of SEQ ID NO: 585034
gucugauuuguuugauccu

SEQ ID NO: 608065 - RNA, 19 nt, Artificial Sequence
  Description of Artificial Sequence: Synthetic oligonucleotide
  Antisense strand to SEQ ID NO: 608064
aggaucaaacaaaucagac

SEQ ID NO: 608066 - RNA, 19 nt, Artificial Sequence
  Description of Artificial Sequence: Synthetic oligonucleotide
  Sense strand starting at position 3532 of SEQ ID NO: 585034
ugauuuguuugauccugca

SEQ ID NO: 608067 - RNA, 19 nt, Artificial Sequence
  Description of Artificial Sequence: Synthetic oligonucleotide
  Antisense strand to SEQ ID NO: 608066
ugcaggaucaaacaaauca

SEQ ID NO: 608068 - RNA, 19 nt, Artificial Sequence
  Description of Artificial Sequence: Synthetic oligonucleotide
  Sense strand starting at position 3580 of SEQ ID NO: 585034
aggcacuacuguuaggaaa

SEQ ID NO: 608069 - RNA, 19 nt, Artificial Sequence
  Description of Artificial Sequence: Synthetic oligonucleotide
  Antisense strand to SEQ ID NO: 608068
uuuccuaacaguagugccu

SEQ ID NO: 608070 - RNA, 19 nt, Artificial Sequence
  Description of Artificial Sequence: Synthetic oligonucleotide
  Sense strand starting at position 3583 of SEQ ID NO: 585034
cacuacuguuaggaaauga

SEQ ID NO: 608071 - RNA, 19 nt, Artificial Sequence
  Description of Artificial Sequence: Synthetic oligonucleotide
  Antisense strand to SEQ ID NO: 608070
ucauuuccuaacaguagug

SEQ ID NO: 608072 - RNA, 19 nt, Artificial Sequence
  Description of Artificial Sequence: Synthetic oligonucleotide
  Sense strand starting at position 3630 of SEQ ID NO: 585034
ggaucuacaucacugacuu

SEQ ID NO: 608073 - RNA, 19 nt, Artificial Sequence
  Description of Artificial Sequence: Synthetic oligonucleotide
  Antisense strand to SEQ ID NO: 608072
aagucagugauguagaucc

SEQ ID NO: 608074 - RNA, 19 nt, Artificial Sequence
  Description of Artificial Sequence: Synthetic oligonucleotide
  Sense strand starting at position 3953 of SEQ ID NO: 585034
gccugaccucuugaaugca

SEQ ID NO: 608075 - RNA, 19 nt, Artificial Sequence
  Description of Artificial Sequence: Synthetic oligonucleotide
  Antisense strand to SEQ ID NO: 608074
ugcauucaagaggucaggc

SEQ ID NO: 608076 - RNA, 19 nt, Artificial Sequence
  Description of Artificial Sequence: Synthetic oligonucleotide
  Sense strand starting at position 3977 of SEQ ID NO: 585034
uucuguuucugagauggac

SEQ ID NO: 608077 - RNA, 19 nt, Artificial Sequence
  Description of Artificial Sequence: Synthetic oligonucleotide
  Antisense strand to SEQ ID NO: 608076
guccaucucagaaacagaa

SEQ ID NO: 608078 - RNA, 19 nt, Artificial Sequence
  Description of Artificial Sequence: Synthetic oligonucleotide
  Sense strand starting at position 1113 of SEQ ID NO: 585035
gaggaaaucuuaggagucu

SEQ ID NO: 608079 - RNA, 19 nt, Artificial Sequence
  Description of Artificial Sequence: Synthetic oligonucleotide
  Antisense strand to SEQ ID NO: 608078
agacuccuaagauuuccuc

SEQ ID NO: 608080 - RNA, 19 nt, Artificial Sequence
  Description of Artificial Sequence: Synthetic oligonucleotide
  Sense strand starting at position 1126 of SEQ ID NO: 585035
gagucucaaugggagcaaa

SEQ ID NO: 608081 - RNA, 19 nt, Artificial Sequence
  Description of Artificial Sequence: Synthetic oligonucleotide
  Antisense strand to SEQ ID NO: 608080
uuugcucccauugagacuc

SEQ ID NO: 608082 - RNA, 19 nt, Artificial Sequence
  Description of Artificial Sequence: Synthetic oligonucleotide
  Sense strand starting at position 1137 of SEQ ID NO: 585035
ggagcaaacuauuaagcca

SEQ ID NO: 608083 - RNA, 19 nt, Artificial Sequence
  Description of Artificial Sequence: Synthetic oligonucleotide
  Antisense strand to SEQ ID NO: 608082
uggcuuaauaguuugcucc

SEQ ID NO: 608084 - RNA, 19 nt, Artificial Sequence
  Description of Artificial Sequence: Synthetic oligonucleotide
  Sense strand starting at position 1257 of SEQ ID NO: 585035
ucacgcuucucauauagau

SEQ ID NO: 608085 - RNA, 19 nt, Artificial Sequence
  Description of Artificial Sequence: Synthetic oligonucleotide
  Antisense strand to SEQ ID NO: 608084
aucuauaugagaagcguga

SEQ ID NO: 608086 - RNA, 19 nt, Artificial Sequence
  Description of Artificial Sequence: Synthetic oligonucleotide
  Sense strand starting at position 1544 of SEQ ID NO: 585035
ugugacugccucugagaau

SEQ ID NO: 608087 - RNA, 19 nt, Artificial Sequence
  Description of Artificial Sequence: Synthetic oligonucleotide
  Antisense strand to SEQ ID NO: 608086
auucucagaggcagucaca

SEQ ID NO: 608088 - RNA, 19 nt, Artificial Sequence
  Description of Artificial Sequence: Synthetic oligonucleotide
  Sense strand starting at position 1545 of SEQ ID NO: 585035
gugacugccucugagaauc

SEQ ID NO: 608089 - RNA, 19 nt, Artificial Sequence
  Description of Artificial Sequence: Synthetic oligonucleotide
  Antisense strand to SEQ ID NO: 608088
gauucucagaggcagucac

SEQ ID NO: 608090 - RNA, 19 nt, Artificial Sequence
  Description of Artificial Sequence: Synthetic oligonucleotide
  Sense strand starting at position 1556 of SEQ ID NO: 585035
ugagaauccuuucuggacu

SEQ ID NO: 608091 - RNA, 19 nt, Artificial Sequence
  Description of Artificial Sequence: Synthetic oligonucleotide
  Antisense strand to SEQ ID NO: 608090
aguccagaaaggauucuca

SEQ ID NO: 608092 - RNA, 19 nt, Artificial Sequence
  Description of Artificial Sequence: Synthetic oligonucleotide
  Sense strand starting at position 1557 of SEQ ID NO: 585035
gagaauccuuucuggacug

SEQ ID NO: 608093 - RNA, 19 nt, Artificial Sequence
  Description of Artificial Sequence: Synthetic oligonucleotide
  Antisense strand to SEQ ID NO: 608092
caguccagaaaggauucuc

SEQ ID NO: 608094 - RNA, 19 nt, Artificial Sequence
  Description of Artificial Sequence: Synthetic oligonucleotide
  Sense strand starting at position 1562 of SEQ ID NO: 585035
uccuuucuggacugggaau

SEQ ID NO: 608095 - RNA, 19 nt, Artificial Sequence
  Description of Artificial Sequence: Synthetic oligonucleotide
  Antisense strand to SEQ ID NO: 608094
auucccaguccagaaagga

SEQ ID NO: 608096 - RNA, 19 nt, Artificial Sequence
  Description of Artificial Sequence: Synthetic oligonucleotide
  Sense strand starting at position 1590 of SEQ ID NO: 585035
ucuguaaaugugcacacaa

SEQ ID NO: 608097 - RNA, 19 nt, Artificial Sequence
  Description of Artificial Sequence: Synthetic oligonucleotide
  Antisense strand to SEQ ID NO: 608096
uugugugcacauuuacaga

SEQ ID NO: 608098 - RNA, 19 nt, Artificial Sequence
  Description of Artificial Sequence: Synthetic oligonucleotide
  Sense strand starting at position 1621 of SEQ ID NO: 585035
cgccaagucuucuccugua

SEQ ID NO: 608099 - RNA, 19 nt, Artificial Sequence
  Description of Artificial Sequence: Synthetic oligonucleotide
  Antisense strand to SEQ ID NO: 608098
uacaggagaagacuuggcg

SEQ ID NO: 608100 - RNA, 19 nt, Artificial Sequence
  Description of Artificial Sequence: Synthetic oligonucleotide
  Sense strand starting at position 1762 of SEQ ID NO: 585035
uggcuaauggcucagagac

SEQ ID NO: 608101 - RNA, 19 nt, Artificial Sequence
  Description of Artificial Sequence: Synthetic oligonucleotide
  Antisense strand to SEQ ID NO: 608100
gucucugagccauuagcca

SEQ ID NO: 608102 - RNA, 19 nt, Artificial Sequence
  Description of Artificial Sequence: Synthetic oligonucleotide
  Sense strand starting at position 1813 of SEQ ID NO: 585035
ugggcucacgccuauaauu

SEQ ID NO: 608103 - RNA, 19 nt, Artificial Sequence
  Description of Artificial Sequence: Synthetic oligonucleotide
  Antisense strand to SEQ ID NO: 608102
aauuauaggcgugagccca

SEQ ID NO: 608104 - RNA, 19 nt, Artificial Sequence
  Description of Artificial Sequence: Synthetic oligonucleotide
  Sense strand starting at position 2127 of SEQ ID NO: 585035
cuaguuugugcaggacaac

SEQ ID NO: 608105 - RNA, 19 nt, Artificial Sequence
  Description of Artificial Sequence: Synthetic oligonucleotide
  Antisense strand to SEQ ID NO: 608104
guuguccugcacaaacuag

SEQ ID NO: 608106 - RNA, 19 nt, Artificial Sequence
  Description of Artificial Sequence: Synthetic oligonucleotide
  Sense strand starting at position 2313 of SEQ ID NO: 585035
ugcagucuccauuggauau

SEQ ID NO: 608107 - RNA, 19 nt, Artificial Sequence
  Description of Artificial Sequence: Synthetic oligonucleotide
  Antisense strand to SEQ ID NO: 608106
auauccaauggagacugca

SEQ ID NO: 608108 - RNA, 19 nt, Artificial Sequence
  Description of Artificial Sequence: Synthetic oligonucleotide
  Sense strand starting at position 2399 of SEQ ID NO: 585035
cucucugaauuugaguaau

SEQ ID NO: 608109 - RNA, 19 nt, Artificial Sequence
  Description of Artificial Sequence: Synthetic oligonucleotide
  Antisense strand to SEQ ID NO: 608108
auuacucaaauucagagag

SEQ ID NO: 608110 - RNA, 19 nt, Artificial Sequence
  Description of Artificial Sequence: Synthetic oligonucleotide
  Sense strand starting at position 2405 of SEQ ID NO: 585035
gaauuugaguaaugacaug

SEQ ID NO: 608111 - RNA, 19 nt, Artificial Sequence
  Description of Artificial Sequence: Synthetic oligonucleotide
  Antisense strand to SEQ ID NO: 608110
caugucauuacucaaauuc

SEQ ID NO: 608112 - RNA, 19 nt, Artificial Sequence
  Description of Artificial Sequence: Synthetic oligonucleotide
  Sense strand starting at position 2410 of SEQ ID NO: 585035
ugaguaaugacauggcugu

SEQ ID NO: 608113 - RNA, 19 nt, Artificial Sequence
  Description of Artificial Sequence: Synthetic oligonucleotide
  Antisense strand to SEQ ID NO: 608112
acagccaugucauuacuca

SEQ ID NO: 608114 - RNA, 19 nt, Artificial Sequence
  Description of Artificial Sequence: Synthetic oligonucleotide
  Sense strand starting at position 2411 of SEQ ID NO: 585035
gaguaaugacauggcugua

SEQ ID NO: 608115 - RNA, 19 nt, Artificial Sequence
  Description of Artificial Sequence: Synthetic oligonucleotide
  Antisense strand to SEQ ID NO: 608114
uacagccaugucauuacuc

SEQ ID NO: 608116 - RNA, 19 nt, Artificial Sequence
  Description of Artificial Sequence: Synthetic oligonucleotide
  Sense strand starting at position 2416 of SEQ ID NO: 585035
augacauggcuguaccauu

SEQ ID NO: 608117 - RNA, 19 nt, Artificial Sequence
  Description of Artificial Sequence: Synthetic oligonucleotide
  Antisense strand to SEQ ID NO: 608116
aaugguacagccaugucau

SEQ ID NO: 608118 - RNA, 19 nt, Artificial Sequence
  Description of Artificial Sequence: Synthetic oligonucleotide
  Sense strand starting at position 2520 of SEQ ID NO: 585035
gcacaucaacacuauguga

SEQ ID NO: 608119 - RNA, 19 nt, Artificial Sequence
  Description of Artificial Sequence: Synthetic oligonucleotide
  Antisense strand to SEQ ID NO: 608118
ucacauaguguugaugugc

SEQ ID NO: 608120 - RNA, 19 nt, Artificial Sequence
  Description of Artificial Sequence: Synthetic oligonucleotide
  Sense strand starting at position 2528 of SEQ ID NO: 585035
acacuaugugacuguuaaa

SEQ ID NO: 608121 - RNA, 19 nt, Artificial Sequence
  Description of Artificial Sequence: Synthetic oligonucleotide
  Antisense strand to SEQ ID NO: 608120
uuuaacagucacauagugu

SEQ ID NO: 608122 - RNA, 19 nt, Artificial Sequence
  Description of Artificial Sequence: Synthetic oligonucleotide
  Sense strand starting at position 2588 of SEQ ID NO: 585035
agcuaagaauauguaaagu

SEQ ID NO: 608123 - RNA, 19 nt, Artificial Sequence
  Description of Artificial Sequence: Synthetic oligonucleotide
  Antisense strand to SEQ ID NO: 608122
acuuuacauauucuuagcu

SEQ ID NO: 608124 - RNA, 19 nt, Artificial Sequence
  Description of Artificial Sequence: Synthetic oligonucleotide
  Sense strand starting at position 2631 of SEQ ID NO: 585035
agaagaacguacuuugaca

SEQ ID NO: 608125 - RNA, 19 nt, Artificial Sequence
  Description of Artificial Sequence: Synthetic oligonucleotide
  Antisense strand to SEQ ID NO: 608124
ugucaaaguacguucuucu

SEQ ID NO: 608126 - RNA, 19 nt, Artificial Sequence
  Description of Artificial Sequence: Synthetic oligonucleotide
  Sense strand starting at position 2633 of SEQ ID NO: 585035
aagaacguacuuugacauu

SEQ ID NO: 608127 - RNA, 19 nt, Artificial Sequence
  Description of Artificial Sequence: Synthetic oligonucleotide
  Antisense strand to SEQ ID NO: 608126
aaugucaaaguacguucuu

SEQ ID NO: 608128 - RNA, 19 nt, Artificial Sequence
  Description of Artificial Sequence: Synthetic oligonucleotide
  Sense strand starting at position 2639 of SEQ ID NO: 585035
guacuuugacauuggcagu

SEQ ID NO: 608129 - RNA, 19 nt, Artificial Sequence
  Description of Artificial Sequence: Synthetic oligonucleotide
  Antisense strand to SEQ ID NO: 608128
acugccaaugucaaaguac

SEQ ID NO: 608130 - RNA, 19 nt, Artificial Sequence
  Description of Artificial Sequence: Synthetic oligonucleotide
  Sense strand starting at position 2662 of SEQ ID NO: 585035
uucucuggaugaucgaauu

SEQ ID NO: 608131 - RNA, 19 nt, Artificial Sequence
  Description of Artificial Sequence: Synthetic oligonucleotide
  Antisense strand to SEQ ID NO: 608130
aauucgaucauccagagaa

SEQ ID NO: 608132 - RNA, 19 nt, Artificial Sequence
  Description of Artificial Sequence: Synthetic oligonucleotide
  Sense strand starting at position 3171 of SEQ ID NO: 585035
cgucucagccuccaguaua

SEQ ID NO: 608133 - RNA, 19 nt, Artificial Sequence
  Description of Artificial Sequence: Synthetic oligonucleotide
  Antisense strand to SEQ ID NO: 608132
uauacuggaggcugagacg

SEQ ID NO: 608134 - RNA, 19 nt, Artificial Sequence
  Description of Artificial Sequence: Synthetic oligonucleotide
  Sense strand starting at position 3334 of SEQ ID NO: 585035
uccagaggucugggauguu

SEQ ID NO: 608135 - RNA, 19 nt, Artificial Sequence
  Description of Artificial Sequence: Synthetic oligonucleotide
  Antisense strand to SEQ ID NO: 608134
aacaucccagaccucugga

SEQ ID NO: 608136 - RNA, 19 nt, Artificial Sequence
  Description of Artificial Sequence: Synthetic oligonucleotide
  Sense strand starting at position 3746 of SEQ ID NO: 585035
ucggccugcccaguuaauu

SEQ ID NO: 608137 - RNA, 19 nt, Artificial Sequence
  Description of Artificial Sequence: Synthetic oligonucleotide
  Antisense strand to SEQ ID NO: 608136
aauuaacugggcaggccga

SEQ ID NO: 608138 - RNA, 19 nt, Artificial Sequence
  Description of Artificial Sequence: Synthetic oligonucleotide
  Sense strand starting at position 3804 of SEQ ID NO: 585035
ccggcuagucucgaaguga

SEQ ID NO: 608139 - RNA, 19 nt, Artificial Sequence
  Description of Artificial Sequence: Synthetic oligonucleotide
  Antisense strand to SEQ ID NO: 608138
ucacuucgagacuagccgg

SEQ ID NO: 608140 - RNA, 19 nt, Artificial Sequence
  Description of Artificial Sequence: Synthetic oligonucleotide
  Sense strand starting at position 3805 of SEQ ID NO: 585035
cggcuagucucgaagugac

SEQ ID NO: 608141 - RNA, 19 nt, Artificial Sequence
  Description of Artificial Sequence: Synthetic oligonucleotide
  Antisense strand to SEQ ID NO: 608140
gucacuucgagacuagccg

SEQ ID NO: 608142 - RNA, 19 nt, Artificial Sequence
  Description of Artificial Sequence: Synthetic oligonucleotide
  Sense strand starting at position 39 of SEQ ID NO: 585036
gugcaucuguaauccauua

SEQ ID NO: 608143 - RNA, 19 nt, Artificial Sequence
  Description of Artificial Sequence: Synthetic oligonucleotide
  Antisense strand to SEQ ID NO: 608142
uaauggauuacagaugcac

SEQ ID NO: 608144 - RNA, 19 nt, Artificial Sequence
  Description of Artificial Sequence: Synthetic oligonucleotide
  Sense strand starting at position 44 of SEQ ID NO: 585036
ucuguaauccauuauugag

SEQ ID NO: 608145 - RNA, 19 nt, Artificial Sequence
  Description of Artificial Sequence: Synthetic oligonucleotide
  Antisense strand to SEQ ID NO: 608144
cucaauaauggauuacaga

SEQ ID NO: 608146 - RNA, 19 nt, Artificial Sequence
  Description of Artificial Sequence: Synthetic oligonucleotide
  Sense strand starting at position 46 of SEQ ID NO: 585036
uguaauccauuauugagga

SEQ ID NO: 608147 - RNA, 19 nt, Artificial Sequence
  Description of Artificial Sequence: Synthetic oligonucleotide
  Antisense strand to SEQ ID NO: 608146
uccucaauaauggauuaca

SEQ ID NO: 608148 - RNA, 19 nt, Artificial Sequence
  Description of Artificial Sequence: Synthetic oligonucleotide
  Sense strand starting at position 218 of SEQ ID NO: 585036
ccaugauuccagggcaaac

SEQ ID NO: 608149 - RNA, 19 nt, Artificial Sequence
  Description of Artificial Sequence: Synthetic oligonucleotide
  Antisense strand to SEQ ID NO: 608148
guuugcccuggaaucaugg

SEQ ID NO: 608150 - RNA, 19 nt, Artificial Sequence
  Description of Artificial Sequence: Synthetic oligonucleotide
  Sense strand starting at position 267 of SEQ ID NO: 585036
ggugaagagucucaaagac

SEQ ID NO: 608151 - RNA, 19 nt, Artificial Sequence
  Description of Artificial Sequence: Synthetic oligonucleotide
  Antisense strand to SEQ ID NO: 608150
gucuuugagacucuucacc

SEQ ID NO: 608152 - RNA, 19 nt, Artificial Sequence
  Description of Artificial Sequence: Synthetic oligonucleotide
  Sense strand starting at position 359 of SEQ ID NO: 585036
ccaaucucccagugaguca

SEQ ID NO: 608153 - RNA, 19 nt, Artificial Sequence
  Description of Artificial Sequence: Synthetic oligonucleotide
  Antisense strand to SEQ ID NO: 608152
ugacucacugggagauugg

SEQ ID NO: 608154 - RNA, 19 nt, Artificial Sequence
  Description of Artificial Sequence: Synthetic oligonucleotide
  Sense strand starting at position 564 of SEQ ID NO: 585036
ucagacaaucccuggauca

SEQ ID NO: 608155 - RNA, 19 nt, Artificial Sequence
  Description of Artificial Sequence: Synthetic oligonucleotide
  Antisense strand to SEQ ID NO: 608154
ugauccagggauugucuga

SEQ ID NO: 608156 - RNA, 19 nt, Artificial Sequence
  Description of Artificial Sequence: Synthetic oligonucleotide
  Sense strand starting at position 577 of SEQ ID NO: 585036
ggaucagacuugggagauu

SEQ ID NO: 608157 - RNA, 19 nt, Artificial Sequence
  Description of Artificial Sequence: Synthetic oligonucleotide
  Antisense strand to SEQ ID NO: 608156
aaucucccaagucugaucc

SEQ ID NO: 608158 - RNA, 19 nt, Artificial Sequence
  Description of Artificial Sequence: Synthetic oligonucleotide
  Sense strand starting at position 661 of SEQ ID NO: 585036
gccagucagccauaggagu

SEQ ID NO: 608159 - RNA, 19 nt, Artificial Sequence
  Description of Artificial Sequence: Synthetic oligonucleotide
  Antisense strand to SEQ ID NO: 608158
acuccuauggcugacuggc

SEQ ID NO: 608160 - RNA, 19 nt, Artificial Sequence
  Description of Artificial Sequence: Synthetic oligonucleotide
  Sense strand starting at position 677 of SEQ ID NO: 585036
agugaugaggcaugaagag

SEQ ID NO: 608161 - RNA, 19 nt, Artificial Sequence
  Description of Artificial Sequence: Synthetic oligonucleotide
  Antisense strand to SEQ ID NO: 608160
cucuucaugccucaucacu

SEQ ID NO: 608162 - RNA, 19 nt, Artificial Sequence
  Description of Artificial Sequence: Synthetic oligonucleotide
  Sense strand starting at position 716 of SEQ ID NO: 585036
cacuguugugcacgugaag

SEQ ID NO: 608163 - RNA, 19 nt, Artificial Sequence
  Description of Artificial Sequence: Synthetic oligonucleotide
  Antisense strand to SEQ ID NO: 608162
cuucacgugcacaacagug

SEQ ID NO: 608164 - RNA, 19 nt, Artificial Sequence
  Description of Artificial Sequence: Synthetic oligonucleotide
  Sense strand starting at position 727 of SEQ ID NO: 585036
acgugaagggcuuagaaau

SEQ ID NO: 608165 - RNA, 19 nt, Artificial Sequence
  Description of Artificial Sequence: Synthetic oligonucleotide
  Antisense strand to SEQ ID NO: 608164
auuucuaagcccuucacgu

SEQ ID NO: 608166 - RNA, 19 nt, Artificial Sequence
  Description of Artificial Sequence: Synthetic oligonucleotide
  Sense strand starting at position 840 of SEQ ID NO: 585036
gcagucaucggcugcaaga

SEQ ID NO: 608167 - RNA, 19 nt, Artificial Sequence
  Description of Artificial Sequence: Synthetic oligonucleotide
  Antisense strand to SEQ ID NO: 608166
ucuugcagccgaugacugc

SEQ ID NO: 608168 - RNA, 19 nt, Artificial Sequence
  Description of Artificial Sequence: Synthetic oligonucleotide
  Sense strand starting at position 842 of SEQ ID NO: 585036
agucaucggcugcaagaga

SEQ ID NO: 608169 - RNA, 19 nt, Artificial Sequence
  Description of Artificial Sequence: Synthetic oligonucleotide
  Antisense strand to SEQ ID NO: 608168
ucucuugcagccgaugacu

SEQ ID NO: 608170 - RNA, 19 nt, Artificial Sequence
  Description of Artificial Sequence: Synthetic oligonucleotide
  Sense strand starting at position 853 of SEQ ID NO: 585036
gcaagagauugauguggga

SEQ ID NO: 608171 - RNA, 19 nt, Artificial Sequence
  Description of Artificial Sequence: Synthetic oligonucleotide
  Antisense strand to SEQ ID NO: 608170
ucccacaucaaucucuugc

SEQ ID NO: 608172 - RNA, 19 nt, Artificial Sequence
  Description of Artificial Sequence: Synthetic oligonucleotide
  Sense strand starting at position 2121 of SEQ ID NO: 585036
gaggaaaucuuaggagucu

SEQ ID NO: 608173 - RNA, 19 nt, Artificial Sequence
  Description of Artificial Sequence: Synthetic oligonucleotide
  Antisense strand to SEQ ID NO: 608172
agacuccuaagauuuccuc

SEQ ID NO: 608174 - RNA, 19 nt, Artificial Sequence
  Description of Artificial Sequence: Synthetic oligonucleotide
  Sense strand starting at position 2134 of SEQ ID NO: 585036
gagucucaaugggagcaaa

SEQ ID NO: 608175 - RNA, 19 nt, Artificial Sequence
  Description of Artificial Sequence: Synthetic oligonucleotide
  Antisense strand to SEQ ID NO: 608174
uuugcucccauugagacuc

SEQ ID NO: 608176 - RNA, 19 nt, Artificial Sequence
  Description of Artificial Sequence: Synthetic oligonucleotide
  Sense strand starting at position 2145 of SEQ ID NO: 585036
ggagcaaacuauuaagcca

SEQ ID NO: 608177 - RNA, 19 nt, Artificial Sequence
  Description of Artificial Sequence: Synthetic oligonucleotide
  Antisense strand to SEQ ID NO: 608176
uggcuuaauaguuugcucc

SEQ ID NO: 608178 - RNA, 19 nt, Artificial Sequence
  Description of Artificial Sequence: Synthetic oligonucleotide
  Sense strand starting at position 2552 of SEQ ID NO: 585036
ugugacugccucugagaau

SEQ ID NO: 608179 - RNA, 19 nt, Artificial Sequence
  Description of Artificial Sequence: Synthetic oligonucleotide
  Antisense strand to SEQ ID NO: 608178
auucucagaggcagucaca

SEQ ID NO: 608180 - RNA, 19 nt, Artificial Sequence
  Description of Artificial Sequence: Synthetic oligonucleotide
  Sense strand starting at position 2564 of SEQ ID NO: 585036
ugagaauccuuucuggacu

SEQ ID NO: 608181 - RNA, 19 nt, Artificial Sequence
  Description of Artificial Sequence: Synthetic oligonucleotide
  Antisense strand to SEQ ID NO: 608180
aguccagaaaggauucuca

SEQ ID NO: 608182 - RNA, 19 nt, Artificial Sequence
  Description of Artificial Sequence: Synthetic oligonucleotide
  Sense strand starting at position 2565 of SEQ ID NO: 585036
gagaauccuuucuggacug

SEQ ID NO: 608183 - RNA, 19 nt, Artificial Sequence
  Description of Artificial Sequence: Synthetic oligonucleotide
  Antisense strand to SEQ ID NO: 608182
caguccagaaaggauucuc

SEQ ID NO: 608184 - RNA, 19 nt, Artificial Sequence
  Description of Artificial Sequence: Synthetic oligonucleotide
  Sense strand starting at position 2570 of SEQ ID NO: 585036
uccuuucuggacugggaau

SEQ ID NO: 608185 - RNA, 19 nt, Artificial Sequence
  Description of Artificial Sequence: Synthetic oligonucleotide
  Antisense strand to SEQ ID NO: 608184
auucccaguccagaaagga

SEQ ID NO: 608186 - RNA, 19 nt, Artificial Sequence
  Description of Artificial Sequence: Synthetic oligonucleotide
  Sense strand starting at position 2598 of SEQ ID NO: 585036
ucuguaaaugugcacacaa

SEQ ID NO: 608187 - RNA, 19 nt, Artificial Sequence
  Description of Artificial Sequence: Synthetic oligonucleotide
  Antisense strand to SEQ ID NO: 608186
uugugugcacauuuacaga

SEQ ID NO: 608188 - RNA, 19 nt, Artificial Sequence
  Description of Artificial Sequence: Synthetic oligonucleotide
  Sense strand starting at position 2629 of SEQ ID NO: 585036
cgccaagucuucuccugua

SEQ ID NO: 608189 - RNA, 19 nt, Artificial Sequence
  Description of Artificial Sequence: Synthetic oligonucleotide
  Antisense strand to SEQ ID NO: 608188
uacaggagaagacuuggcg

SEQ ID NO: 608190 - RNA, 19 nt, Artificial Sequence
  Description of Artificial Sequence: Synthetic oligonucleotide
  Sense strand starting at position 2770 of SEQ ID NO: 585036
uggcuaauggcucagagac

SEQ ID NO: 608191 - RNA, 19 nt, Artificial Sequence
  Description of Artificial Sequence: Synthetic oligonucleotide
  Antisense strand to SEQ ID NO: 608190
gucucugagccauuagcca

SEQ ID NO: 608192 - RNA, 19 nt, Artificial Sequence
  Description of Artificial Sequence: Synthetic oligonucleotide
  Sense strand starting at position 2821 of SEQ ID NO: 585036
ugggcucacgccuauaauu

SEQ ID NO: 608193 - RNA, 19 nt, Artificial Sequence
  Description of Artificial Sequence: Synthetic oligonucleotide
  Antisense strand to SEQ ID NO: 608192
aauuauaggcgugagccca

SEQ ID NO: 608194 - RNA, 19 nt, Artificial Sequence
  Description of Artificial Sequence: Synthetic oligonucleotide
  Sense strand starting at position 3135 of SEQ ID NO: 585036
cuaguuugugcaggacaac

SEQ ID NO: 608195 - RNA, 19 nt, Artificial Sequence
  Description of Artificial Sequence: Synthetic oligonucleotide
  Antisense strand to SEQ ID NO: 608194
guuguccugcacaaacuag

SEQ ID NO: 608196 - RNA, 19 nt, Artificial Sequence
  Description of Artificial Sequence: Synthetic oligonucleotide
  Sense strand starting at position 3321 of SEQ ID NO: 585036
ugcagucuccauuggauau

SEQ ID NO: 608197 - RNA, 19 nt, Artificial Sequence
  Description of Artificial Sequence: Synthetic oligonucleotide
  Antisense strand to SEQ ID NO: 608196
auauccaauggagacugca

SEQ ID NO: 608198 - RNA, 19 nt, Artificial Sequence
  Description of Artificial Sequence: Synthetic oligonucleotide
  Sense strand starting at position 3407 of SEQ ID NO: 585036
cucucugaauuugaguaau

SEQ ID NO: 608199 - RNA, 19 nt, Artificial Sequence
  Description of Artificial Sequence: Synthetic oligonucleotide
  Antisense strand to SEQ ID NO: 608198
auuacucaaauucagagag

SEQ ID NO: 608200 - RNA, 19 nt, Artificial Sequence
  Description of Artificial Sequence: Synthetic oligonucleotide
  Sense strand starting at position 3413 of SEQ ID NO: 585036
gaauuugaguaaugacaug

SEQ ID NO: 608201 - RNA, 19 nt, Artificial Sequence
  Description of Artificial Sequence: Synthetic oligonucleotide
  Antisense strand to SEQ ID NO: 608200
caugucauuacucaaauuc

SEQ ID NO: 608202 - RNA, 19 nt, Artificial Sequence
  Description of Artificial Sequence: Synthetic oligonucleotide
  Sense strand starting at position 3418 of SEQ ID NO: 585036
ugaguaaugacauggcugu

SEQ ID NO: 608203 - RNA, 19 nt, Artificial Sequence
  Description of Artificial Sequence: Synthetic oligonucleotide
  Antisense strand to SEQ ID NO: 608202
acagccaugucauuacuca

SEQ ID NO: 608204 - RNA, 19 nt, Artificial Sequence
  Description of Artificial Sequence: Synthetic oligonucleotide
  Sense strand starting at position 3419 of SEQ ID NO: 585036
gaguaaugacauggcugua

SEQ ID NO: 608205 - RNA, 19 nt, Artificial Sequence
  Description of Artificial Sequence: Synthetic oligonucleotide
  Antisense strand to SEQ ID NO: 608204
uacagccaugucauuacuc

SEQ ID NO: 608206 - RNA, 19 nt, Artificial Sequence
  Description of Artificial Sequence: Synthetic oligonucleotide
  Sense strand starting at position 3424 of SEQ ID NO: 585036
augacauggcuguaccauu

SEQ ID NO: 608207 - RNA, 19 nt, Artificial Sequence
  Description of Artificial Sequence: Synthetic oligonucleotide
  Antisense strand to SEQ ID NO: 608206
aaugguacagccaugucau

SEQ ID NO: 608208 - RNA, 19 nt, Artificial Sequence
  Description of Artificial Sequence: Synthetic oligonucleotide
  Sense strand starting at position 3528 of SEQ ID NO: 585036
gcacaucaacacuauguga

SEQ ID NO: 608209 - RNA, 19 nt, Artificial Sequence
  Description of Artificial Sequence: Synthetic oligonucleotide
  Antisense strand to SEQ ID NO: 608208
ucacauaguguugaugugc

SEQ ID NO: 608210 - RNA, 19 nt, Artificial Sequence
  Description of Artificial Sequence: Synthetic oligonucleotide
  Sense strand starting at position 3536 of SEQ ID NO: 585036
acacuaugugacuguuaaa

SEQ ID NO: 608211 - RNA, 19 nt, Artificial Sequence
  Description of Artificial Sequence: Synthetic oligonucleotide
  Antisense strand to SEQ ID NO: 608210
uuuaacagucacauagugu

SEQ ID NO: 608212 - RNA, 19 nt, Artificial Sequence
  Description of Artificial Sequence: Synthetic oligonucleotide
  Sense strand starting at position 3596 of SEQ ID NO: 585036
agcuaagaauauguaaagu

SEQ ID NO: 608213 - RNA, 19 nt, Artificial Sequence
  Description of Artificial Sequence: Synthetic oligonucleotide
  Antisense strand to SEQ ID NO: 608212
acuuuacauauucuuagcu

SEQ ID NO: 608214 - RNA, 19 nt, Artificial Sequence
  Description of Artificial Sequence: Synthetic oligonucleotide
  Sense strand starting at position 3639 of SEQ ID NO: 585036
agaagaacguacuuugaca

SEQ ID NO: 608215 - RNA, 19 nt, Artificial Sequence
  Description of Artificial Sequence: Synthetic oligonucleotide
  Antisense strand to SEQ ID NO: 608214
ugucaaaguacguucuucu

SEQ ID NO: 608216 - RNA, 19 nt, Artificial Sequence
  Description of Artificial Sequence: Synthetic oligonucleotide
  Sense strand starting at position 3641 of SEQ ID NO: 585036
aagaacguacuuugacauu

SEQ ID NO: 608217 - RNA, 19 nt, Artificial Sequence
  Description of Artificial Sequence: Synthetic oligonucleotide
  Antisense strand to SEQ ID NO: 608216
aaugucaaaguacguucuu

SEQ ID NO: 608218 - RNA, 19 nt, Artificial Sequence
  Description of Artificial Sequence: Synthetic oligonucleotide
  Sense strand starting at position 3647 of SEQ ID NO: 585036
guacuuugacauuggcagu

SEQ ID NO: 608219 - RNA, 19 nt, Artificial Sequence
  Description of Artificial Sequence: Synthetic oligonucleotide
  Antisense strand to SEQ ID NO: 608218
acugccaaugucaaaguac

SEQ ID NO: 608220 - RNA, 19 nt, Artificial Sequence
  Description of Artificial Sequence: Synthetic oligonucleotide
  Sense strand starting at position 3670 of SEQ ID NO: 585036
uucucuggaugaucgaauu

SEQ ID NO: 608221 - RNA, 19 nt, Artificial Sequence
  Description of Artificial Sequence: Synthetic oligonucleotide
  Antisense strand to SEQ ID NO: 608220
aauucgaucauccagagaa

SEQ ID NO: 608222 - RNA, 19 nt, Artificial Sequence
  Description of Artificial Sequence: Synthetic oligonucleotide
  Sense strand starting at position 24 of SEQ ID NO: 585037
aaugaaagcuguccggguu

SEQ ID NO: 608223 - RNA, 19 nt, Artificial Sequence
  Description of Artificial Sequence: Synthetic oligonucleotide
  Antisense strand to SEQ ID NO: 608222
aacccggacagcuuucauu

SEQ ID NO: 608224 - RNA, 19 nt, Artificial Sequence
  Description of Artificial Sequence: Synthetic oligonucleotide
  Sense strand starting at position 25 of SEQ ID NO: 585037
augaaagcuguccggguuu

SEQ ID NO: 608225 - RNA, 19 nt, Artificial Sequence
  Description of Artificial Sequence: Synthetic oligonucleotide
  Antisense strand to SEQ ID NO: 608224
aaacccggacagcuuucau

SEQ ID NO: 608226 - RNA, 19 nt, Artificial Sequence
  Description of Artificial Sequence: Synthetic oligonucleotide
  Sense strand starting at position 60 of SEQ ID NO: 585037
ggcaaaguccaaugcuauu

SEQ ID NO: 608227 - RNA, 19 nt, Artificial Sequence
  Description of Artificial Sequence: Synthetic oligonucleotide
  Antisense strand to SEQ ID NO: 608226
aauagcauuggacuuugcc

SEQ ID NO: 608228 - RNA, 19 nt, Artificial Sequence
  Description of Artificial Sequence: Synthetic oligonucleotide
  Sense strand starting at position 136 of SEQ ID NO: 585037
aggagaaucuguguggaga

SEQ ID NO: 608229 - RNA, 19 nt, Artificial Sequence
  Description of Artificial Sequence: Synthetic oligonucleotide
  Antisense strand to SEQ ID NO: 608228
ucuccacacagauucuccu

SEQ ID NO: 608230 - RNA, 19 nt, Artificial Sequence
  Description of Artificial Sequence: Synthetic oligonucleotide
  Sense strand starting at position 137 of SEQ ID NO: 585037
ggagaaucuguguggagag

SEQ ID NO: 608231 - RNA, 19 nt, Artificial Sequence
  Description of Artificial Sequence: Synthetic oligonucleotide
  Antisense strand to SEQ ID NO: 608230
cucuccacacagauucucc

SEQ ID NO: 608232 - RNA, 19 nt, Artificial Sequence
  Description of Artificial Sequence: Synthetic oligonucleotide
  Sense strand starting at position 376 of SEQ ID NO: 585037
aagagugguuuccugacgu

SEQ ID NO: 608233 - RNA, 19 nt, Artificial Sequence
  Description of Artificial Sequence: Synthetic oligonucleotide
  Antisense strand to SEQ ID NO: 608232
acgucaggaaaccacucuu

SEQ ID NO: 608234 - RNA, 19 nt, Artificial Sequence
  Description of Artificial Sequence: Synthetic oligonucleotide
  Sense strand starting at position 380 of SEQ ID NO: 585037
gugguuuccugacguguuu

SEQ ID NO: 608235 - RNA, 19 nt, Artificial Sequence
  Description of Artificial Sequence: Synthetic oligonucleotide
  Antisense strand to SEQ ID NO: 608234
aaacacgucaggaaaccac

SEQ ID NO: 608236 - RNA, 19 nt, Artificial Sequence
  Description of Artificial Sequence: Synthetic oligonucleotide
  Sense strand starting at position 402 of SEQ ID NO: 585037
cagccuguacuacaggaua

SEQ ID NO: 608237 - RNA, 19 nt, Artificial Sequence
  Description of Artificial Sequence: Synthetic oligonucleotide
  Antisense strand to SEQ ID NO: 608236
uauccuguaguacaggcug

SEQ ID NO: 608238 - RNA, 19 nt, Artificial Sequence
  Description of Artificial Sequence: Synthetic oligonucleotide
  Sense strand starting at position 413 of SEQ ID NO: 585037
acaggauauuacguuguuu

SEQ ID NO: 608239 - RNA, 19 nt, Artificial Sequence
  Description of Artificial Sequence: Synthetic oligonucleotide
  Antisense strand to SEQ ID NO: 608238
aaacaacguaauauccugu

SEQ ID NO: 608240 - RNA, 19 nt, Artificial Sequence
  Description of Artificial Sequence: Synthetic oligonucleotide
  Sense strand starting at position 546 of SEQ ID NO: 585037
cggguaaucgcgccaccaa

SEQ ID NO: 608241 - RNA, 19 nt, Artificial Sequence
  Description of Artificial Sequence: Synthetic oligonucleotide
  Antisense strand to SEQ ID NO: 608240
uugguggcgcgauuacccg

SEQ ID NO: 608242 - RNA, 19 nt, Artificial Sequence
  Description of Artificial Sequence: Synthetic oligonucleotide
  Sense strand starting at position 566 of SEQ ID NO: 585037
gcgucuaggagucgggaaa

SEQ ID NO: 608243 - RNA, 19 nt, Artificial Sequence
  Description of Artificial Sequence: Synthetic oligonucleotide
  Antisense strand to SEQ ID NO: 608242
uuucccgacuccuagacgc

SEQ ID NO: 608244 - RNA, 19 nt, Artificial Sequence
  Description of Artificial Sequence: Synthetic oligonucleotide
  Sense strand starting at position 1049 of SEQ ID NO: 585037
ccugguagugcuugaggca

SEQ ID NO: 608245 - RNA, 19 nt, Artificial Sequence
  Description of Artificial Sequence: Synthetic oligonucleotide
  Antisense strand to SEQ ID NO: 608244
ugccucaagcacuaccagg

SEQ ID NO: 608246 - RNA, 19 nt, Artificial Sequence
  Description of Artificial Sequence: Synthetic oligonucleotide
  Sense strand starting at position 1870 of SEQ ID NO: 585037
ugagcuucuucgcaggaga

SEQ ID NO: 608247 - RNA, 19 nt, Artificial Sequence
  Description of Artificial Sequence: Synthetic oligonucleotide
  Antisense strand to SEQ ID NO: 608246
ucuccugcgaagaagcuca

SEQ ID NO: 608248 - RNA, 19 nt, Artificial Sequence
  Description of Artificial Sequence: Synthetic oligonucleotide
  Sense strand starting at position 1916 of SEQ ID NO: 585037
aguccagagauugagcuua

SEQ ID NO: 608249 - RNA, 19 nt, Artificial Sequence
  Description of Artificial Sequence: Synthetic oligonucleotide
  Antisense strand to SEQ ID NO: 608248
uaagcucaaucucuggacu

SEQ ID NO: 608250 - RNA, 19 nt, Artificial Sequence
  Description of Artificial Sequence: Synthetic oligonucleotide
  Sense strand starting at position 1918 of SEQ ID NO: 585037
uccagagauugagcuuaau

SEQ ID NO: 608251 - RNA, 19 nt, Artificial Sequence
  Description of Artificial Sequence: Synthetic oligonucleotide
  Antisense strand to SEQ ID NO: 608250
auuaagcucaaucucugga

SEQ ID NO: 608252 - RNA, 19 nt, Artificial Sequence
  Description of Artificial Sequence: Synthetic oligonucleotide
  Sense strand starting at position 1931 of SEQ ID NO: 585037
cuuaauucccaagagagcu

SEQ ID NO: 608253 - RNA, 19 nt, Artificial Sequence
  Description of Artificial Sequence: Synthetic oligonucleotide
  Antisense strand to SEQ ID NO: 608252
agcucucuugggaauuaag

SEQ ID NO: 608254 - RNA, 19 nt, Artificial Sequence
  Description of Artificial Sequence: Synthetic oligonucleotide
  Sense strand starting at position 2456 of SEQ ID NO: 585037
gccaaauggucagugagcu

SEQ ID NO: 608255 - RNA, 19 nt, Artificial Sequence
  Description of Artificial Sequence: Synthetic oligonucleotide
  Antisense strand to SEQ ID NO: 608254
agcucacugaccauuuggc

SEQ ID NO: 608256 - RNA, 19 nt, Artificial Sequence
  Description of Artificial Sequence: Synthetic oligonucleotide
  Sense strand starting at position 2998 of SEQ ID NO: 585037
gcggcaguuucgggaaguu

SEQ ID NO: 608257 - RNA, 19 nt, Artificial Sequence
  Description of Artificial Sequence: Synthetic oligonucleotide
  Antisense strand to SEQ ID NO: 608256
aacuucccgaaacugccgc

SEQ ID NO: 608258 - RNA, 19 nt, Artificial Sequence
  Description of Artificial Sequence: Synthetic oligonucleotide
  Sense strand starting at position 2999 of SEQ ID NO: 585037
cggcaguuucgggaaguuu

SEQ ID NO: 608259 - RNA, 19 nt, Artificial Sequence
  Description of Artificial Sequence: Synthetic oligonucleotide
  Antisense strand to SEQ ID NO: 608258
aaacuucccgaaacugccg

SEQ ID NO: 608260 - RNA, 19 nt, Artificial Sequence
  Description of Artificial Sequence: Synthetic oligonucleotide
  Sense strand starting at position 3331 of SEQ ID NO: 585037
ccugguaagaagugaguuu

SEQ ID NO: 608261 - RNA, 19 nt, Artificial Sequence
  Description of Artificial Sequence: Synthetic oligonucleotide
  Antisense strand to SEQ ID NO: 608260
aaacucacuucuuaccagg

SEQ ID NO: 608262 - RNA, 19 nt, Artificial Sequence
  Description of Artificial Sequence: Synthetic oligonucleotide
  Sense strand starting at position 3360 of SEQ ID NO: 585037
guucgcguggcugucauua

SEQ ID NO: 608263 - RNA, 19 nt, Artificial Sequence
  Description of Artificial Sequence: Synthetic oligonucleotide
  Antisense strand to SEQ ID NO: 608262
uaaugacagccacgcgaac

SEQ ID NO: 608264 - RNA, 19 nt, Artificial Sequence
  Description of Artificial Sequence: Synthetic oligonucleotide
  Sense strand starting at position 3385 of SEQ ID NO: 585037
ccuguuauugugcgaggcu

SEQ ID NO: 608265 - RNA, 19 nt, Artificial Sequence
  Description of Artificial Sequence: Synthetic oligonucleotide
  Antisense strand to SEQ ID NO: 608264
agccucgcacaauaacagg

SEQ ID NO: 608266 - RNA, 19 nt, Artificial Sequence
  Description of Artificial Sequence: Synthetic oligonucleotide
  Sense strand starting at position 3387 of SEQ ID NO: 585037
uguuauugugcgaggcuga

SEQ ID NO: 608267 - RNA, 19 nt, Artificial Sequence
  Description of Artificial Sequence: Synthetic oligonucleotide
  Antisense strand to SEQ ID NO: 608266
ucagccucgcacaauaaca

SEQ ID NO: 608268 - RNA, 19 nt, Artificial Sequence
  Description of Artificial Sequence: Synthetic oligonucleotide
  Sense strand starting at position 3388 of SEQ ID NO: 585037
guuauugugcgaggcugaa

SEQ ID NO: 608269 - RNA, 19 nt, Artificial Sequence
  Description of Artificial Sequence: Synthetic oligonucleotide
  Antisense strand to SEQ ID NO: 608268
uucagccucgcacaauaac

SEQ ID NO: 608270 - RNA, 19 nt, Artificial Sequence
  Description of Artificial Sequence: Synthetic oligonucleotide
  Sense strand starting at position 3400 of SEQ ID NO: 585037
ggcugaaucaguggcucuu

SEQ ID NO: 608271 - RNA, 19 nt, Artificial Sequence
  Description of Artificial Sequence: Synthetic oligonucleotide
  Antisense strand to SEQ ID NO: 608270
aagagccacugauucagcc

SEQ ID NO: 608272 - RNA, 19 nt, Artificial Sequence
  Description of Artificial Sequence: Synthetic oligonucleotide
  Sense strand starting at position 3421 of SEQ ID NO: 585037
ugcgcucagcuguauggua

SEQ ID NO: 608273 - RNA, 19 nt, Artificial Sequence
  Description of Artificial Sequence: Synthetic oligonucleotide
  Antisense strand to SEQ ID NO: 608272
uaccauacagcugagcgca

SEQ ID NO: 608274 - RNA, 19 nt, Artificial Sequence
  Description of Artificial Sequence: Synthetic oligonucleotide
  Sense strand starting at position 3423 of SEQ ID NO: 585037
cgcucagcuguaugguaau

SEQ ID NO: 608275 - RNA, 19 nt, Artificial Sequence
  Description of Artificial Sequence: Synthetic oligonucleotide
  Antisense strand to SEQ ID NO: 608274
auuaccauacagcugagcg

SEQ ID NO: 608276 - RNA, 19 nt, Artificial Sequence
  Description of Artificial Sequence: Synthetic oligonucleotide
  Sense strand starting at position 3666 of SEQ ID NO: 585037
cgagaacacacguaugaca

SEQ ID NO: 608277 - RNA, 19 nt, Artificial Sequence
  Description of Artificial Sequence: Synthetic oligonucleotide
  Antisense strand to SEQ ID NO: 608276
ugucauacguguguucucg

SEQ ID NO: 608278 - RNA, 19 nt, Artificial Sequence
  Description of Artificial Sequence: Synthetic oligonucleotide
  Sense strand starting at position 3910 of SEQ ID NO: 585037
ccucacuguagguguguua

SEQ ID NO: 608279 - RNA, 19 nt, Artificial Sequence
  Description of Artificial Sequence: Synthetic oligonucleotide
  Antisense strand to SEQ ID NO: 608278
uaacacaccuacagugagg

SEQ ID NO: 608280 - RNA, 19 nt, Artificial Sequence
  Description of Artificial Sequence: Synthetic oligonucleotide
  Sense strand starting at position 3921 of SEQ ID NO: 585037
guguguuagagcugccuua

SEQ ID NO: 608281 - RNA, 19 nt, Artificial Sequence
  Description of Artificial Sequence: Synthetic oligonucleotide
  Antisense strand to SEQ ID NO: 608280
uaaggcagcucuaacacac

SEQ ID NO: 608282 - RNA, 19 nt, Artificial Sequence
  Description of Artificial Sequence: Synthetic oligonucleotide
  Sense strand starting at position 3931 of SEQ ID NO: 585037
gcugccuuauuggugagaa

SEQ ID NO: 608283 - RNA, 19 nt, Artificial Sequence
  Description of Artificial Sequence: Synthetic oligonucleotide
  Antisense strand to SEQ ID NO: 608282
uucucaccaauaaggcagc

SEQ ID NO: 608284 - RNA, 19 nt, Artificial Sequence
  Description of Artificial Sequence: Synthetic oligonucleotide
  Sense strand starting at position 3932 of SEQ ID NO: 585037
cugccuuauuggugagaac

SEQ ID NO: 608285 - RNA, 19 nt, Artificial Sequence
  Description of Artificial Sequence: Synthetic oligonucleotide
  Antisense strand to SEQ ID NO: 608284
guucucaccaauaaggcag

SEQ ID NO: 608286 - RNA, 19 nt, Artificial Sequence
  Description of Artificial Sequence: Synthetic oligonucleotide
  Sense strand starting at position 3933 of SEQ ID NO: 585037
ugccuuauuggugagaaca

SEQ ID NO: 608287 - RNA, 19 nt, Artificial Sequence
  Description of Artificial Sequence: Synthetic oligonucleotide
  Antisense strand to SEQ ID NO: 608286
uguucucaccaauaaggca

SEQ ID NO: 608288 - RNA, 19 nt, Artificial Sequence
  Description of Artificial Sequence: Synthetic oligonucleotide
  Sense strand starting at position 19 of SEQ ID NO: 585038
accugaaauucccuacgaa

SEQ ID NO: 608289 - RNA, 19 nt, Artificial Sequence
  Description of Artificial Sequence: Synthetic oligonucleotide
  Antisense strand to SEQ ID NO: 608288
uucguagggaauuucaggu

SEQ ID NO: 608290 - RNA, 19 nt, Artificial Sequence
  Description of Artificial Sequence: Synthetic oligonucleotide
  Sense strand starting at position 22 of SEQ ID NO: 585038
ugaaauucccuacgaaucu

SEQ ID NO: 608291 - RNA, 19 nt, Artificial Sequence
  Description of Artificial Sequence: Synthetic oligonucleotide
  Antisense strand to SEQ ID NO: 608290
agauucguagggaauuuca

SEQ ID NO: 608292 - RNA, 19 nt, Artificial Sequence
  Description of Artificial Sequence: Synthetic oligonucleotide
  Sense strand starting at position 247 of SEQ ID NO: 585038
ggacuaaaggcguacacaa

SEQ ID NO: 608293 - RNA, 19 nt, Artificial Sequence
  Description of Artificial Sequence: Synthetic oligonucleotide
  Antisense strand to SEQ ID NO: 608292
uuguguacgccuuuagucc

SEQ ID NO: 608294 - RNA, 19 nt, Artificial Sequence
  Description of Artificial Sequence: Synthetic oligonucleotide
  Sense strand starting at position 445 of SEQ ID NO: 585038
ggagcauuuccagguguug

SEQ ID NO: 608295 - RNA, 19 nt, Artificial Sequence
  Description of Artificial Sequence: Synthetic oligonucleotide
  Antisense strand to SEQ ID NO: 608294
caacaccuggaaaugcucc

SEQ ID NO: 608296 - RNA, 19 nt, Artificial Sequence
  Description of Artificial Sequence: Synthetic oligonucleotide
  Sense strand starting at position 678 of SEQ ID NO: 585038
aucaaauuggugugacaga

SEQ ID NO: 608297 - RNA, 19 nt, Artificial Sequence
  Description of Artificial Sequence: Synthetic oligonucleotide
  Antisense strand to SEQ ID NO: 608296
ucugucacaccaauuugau

SEQ ID NO: 608298 - RNA, 19 nt, Artificial Sequence
  Description of Artificial Sequence: Synthetic oligonucleotide
  Sense strand starting at position 683 of SEQ ID NO: 585038
auuggugugacagacuauu

SEQ ID NO: 608299 - RNA, 19 nt, Artificial Sequence
  Description of Artificial Sequence: Synthetic oligonucleotide
  Antisense strand to SEQ ID NO: 608298
aauagucugucacaccaau

SEQ ID NO: 608300 - RNA, 19 nt, Artificial Sequence
  Description of Artificial Sequence: Synthetic oligonucleotide
  Sense strand starting at position 712 of SEQ ID NO: 585038
caagauggucaaugucaau

SEQ ID NO: 608301 - RNA, 19 nt, Artificial Sequence
  Description of Artificial Sequence: Synthetic oligonucleotide
  Antisense strand to SEQ ID NO: 608300
auugacauugaccaucuug

SEQ ID NO: 608302 - RNA, 19 nt, Artificial Sequence
  Description of Artificial Sequence: Synthetic oligonucleotide
  Sense strand starting at position 723 of SEQ ID NO: 585038
augucaaugacaggugaau

SEQ ID NO: 608303 - RNA, 19 nt, Artificial Sequence
  Description of Artificial Sequence: Synthetic oligonucleotide
  Antisense strand to SEQ ID NO: 608302
auucaccugucauugacau

SEQ ID NO: 608304 - RNA, 19 nt, Artificial Sequence
  Description of Artificial Sequence: Synthetic oligonucleotide
  Sense strand starting at position 725 of SEQ ID NO: 585038
gucaaugacaggugaauua

SEQ ID NO: 608305 - RNA, 19 nt, Artificial Sequence
  Description of Artificial Sequence: Synthetic oligonucleotide
  Antisense strand to SEQ ID NO: 608304
uaauucaccugucauugac

SEQ ID NO: 608306 - RNA, 19 nt, Artificial Sequence
  Description of Artificial Sequence: Synthetic oligonucleotide
  Sense strand starting at position 737 of SEQ ID NO: 585038
ugaauuaacgaagggcuaa

SEQ ID NO: 608307 - RNA, 19 nt, Artificial Sequence
  Description of Artificial Sequence: Synthetic oligonucleotide
  Antisense strand to SEQ ID NO: 608306
uuagcccuucguuaauuca

SEQ ID NO: 608308 - RNA, 19 nt, Artificial Sequence
  Description of Artificial Sequence: Synthetic oligonucleotide
  Sense strand starting at position 955 of SEQ ID NO: 585038
ugguaaauucagugaugag

SEQ ID NO: 608309 - RNA, 19 nt, Artificial Sequence
  Description of Artificial Sequence: Synthetic oligonucleotide
  Antisense strand to SEQ ID NO: 608308
cucaucacugaauuuacca

SEQ ID NO: 608310 - RNA, 19 nt, Artificial Sequence
  Description of Artificial Sequence: Synthetic oligonucleotide
  Sense strand starting at position 1642 of SEQ ID NO: 585038
uccuacucauaggugagaa

SEQ ID NO: 608311 - RNA, 19 nt, Artificial Sequence
  Description of Artificial Sequence: Synthetic oligonucleotide
  Antisense strand to SEQ ID NO: 608310
uucucaccuaugaguagga

SEQ ID NO: 608312 - RNA, 19 nt, Artificial Sequence
  Description of Artificial Sequence: Synthetic oligonucleotide
  Sense strand starting at position 1702 of SEQ ID NO: 585038
ugugaagucacuuagaugu

SEQ ID NO: 608313 - RNA, 19 nt, Artificial Sequence
  Description of Artificial Sequence: Synthetic oligonucleotide
  Antisense strand to SEQ ID NO: 608312
acaucuaagugacuucaca

SEQ ID NO: 608314 - RNA, 19 nt, Artificial Sequence
  Description of Artificial Sequence: Synthetic oligonucleotide
  Sense strand starting at position 1722 of SEQ ID NO: 585038
caguguagagacugacaaa

SEQ ID NO: 608315 - RNA, 19 nt, Artificial Sequence
  Description of Artificial Sequence: Synthetic oligonucleotide
  Antisense strand to SEQ ID NO: 608314
uuugucagucucuacacug

SEQ ID NO: 608316 - RNA, 19 nt, Artificial Sequence
  Description of Artificial Sequence: Synthetic oligonucleotide
  Sense strand starting at position 2265 of SEQ ID NO: 585038
cgcguauacgugguaauac

SEQ ID NO: 608317 - RNA, 19 nt, Artificial Sequence
  Description of Artificial Sequence: Synthetic oligonucleotide
  Antisense strand to SEQ ID NO: 608316
guauuaccacguauacgcg

SEQ ID NO: 608318 - RNA, 19 nt, Artificial Sequence
  Description of Artificial Sequence: Synthetic oligonucleotide
  Sense strand starting at position 2273 of SEQ ID NO: 585038
cgugguaauacggaaauau

SEQ ID NO: 608319 - RNA, 19 nt, Artificial Sequence
  Description of Artificial Sequence: Synthetic oligonucleotide
  Antisense strand to SEQ ID NO: 608318
auauuuccguauuaccacg

SEQ ID NO: 608320 - RNA, 19 nt, Artificial Sequence
  Description of Artificial Sequence: Synthetic oligonucleotide
  Sense strand starting at position 2305 of SEQ ID NO: 585038
uucuaugaccuuuacaguu

SEQ ID NO: 608321 - RNA, 19 nt, Artificial Sequence
  Description of Artificial Sequence: Synthetic oligonucleotide
  Antisense strand to SEQ ID NO: 608320
aacuguaaaggucauagaa

SEQ ID NO: 608322 - RNA, 19 nt, Artificial Sequence
  Description of Artificial Sequence: Synthetic oligonucleotide
  Sense strand starting at position 2484 of SEQ ID NO: 585038
cugugacugccugacauga

SEQ ID NO: 608323 - RNA, 19 nt, Artificial Sequence
  Description of Artificial Sequence: Synthetic oligonucleotide
  Antisense strand to SEQ ID NO: 608322
ucaugucaggcagucacag

SEQ ID NO: 608324 - RNA, 19 nt, Artificial Sequence
  Description of Artificial Sequence: Synthetic oligonucleotide
  Sense strand starting at position 2500 of SEQ ID NO: 585038
ugaugugagcgguccguuu

SEQ ID NO: 608325 - RNA, 19 nt, Artificial Sequence
  Description of Artificial Sequence: Synthetic oligonucleotide
  Antisense strand to SEQ ID NO: 608324
aaacggaccgcucacauca

SEQ ID NO: 608326 - RNA, 19 nt, Artificial Sequence
  Description of Artificial Sequence: Synthetic oligonucleotide
  Sense strand starting at position 2525 of SEQ ID NO: 585038
ggguguguuaaccaaagaa

SEQ ID NO: 608327 - RNA, 19 nt, Artificial Sequence
  Description of Artificial Sequence: Synthetic oligonucleotide
  Antisense strand to SEQ ID NO: 608326
uucuuugguuaacacaccc

SEQ ID NO: 608328 - RNA, 19 nt, Artificial Sequence
  Description of Artificial Sequence: Synthetic oligonucleotide
  Sense strand starting at position 2583 of SEQ ID NO: 585038
ucagaugucuuacuaagga

SEQ ID NO: 608329 - RNA, 19 nt, Artificial Sequence
  Description of Artificial Sequence: Synthetic oligonucleotide
  Antisense strand to SEQ ID NO: 608328
uccuuaguaagacaucuga

SEQ ID NO: 608330 - RNA, 19 nt, Artificial Sequence
  Description of Artificial Sequence: Synthetic oligonucleotide
  Sense strand starting at position 2622 of SEQ ID NO: 585038
cagagacuuucugugagac

SEQ ID NO: 608331 - RNA, 19 nt, Artificial Sequence
  Description of Artificial Sequence: Synthetic oligonucleotide
  Antisense strand to SEQ ID NO: 608330
gucucacagaaagucucug

SEQ ID NO: 608332 - RNA, 19 nt, Artificial Sequence
  Description of Artificial Sequence: Synthetic oligonucleotide
  Sense strand starting at position 2773 of SEQ ID NO: 585038
cugguuauagauuguagag

SEQ ID NO: 608333 - RNA, 19 nt, Artificial Sequence
  Description of Artificial Sequence: Synthetic oligonucleotide
  Antisense strand to SEQ ID NO: 608332
cucuacaaucuauaaccag

SEQ ID NO: 608334 - RNA, 19 nt, Artificial Sequence
  Description of Artificial Sequence: Synthetic oligonucleotide
  Sense strand starting at position 2779 of SEQ ID NO: 585038
auagauuguagaggcauaa

SEQ ID NO: 608335 - RNA, 19 nt, Artificial Sequence
  Description of Artificial Sequence: Synthetic oligonucleotide
  Antisense strand to SEQ ID NO: 608334
uuaugccucuacaaucuau

SEQ ID NO: 608336 - RNA, 19 nt, Artificial Sequence
  Description of Artificial Sequence: Synthetic oligonucleotide
  Sense strand starting at position 2783 of SEQ ID NO: 585038
auuguagaggcauaaucau

SEQ ID NO: 608337 - RNA, 19 nt, Artificial Sequence
  Description of Artificial Sequence: Synthetic oligonucleotide
  Antisense strand to SEQ ID NO: 608336
augauuaugccucuacaau

SEQ ID NO: 608338 - RNA, 19 nt, Artificial Sequence
  Description of Artificial Sequence: Synthetic oligonucleotide
  Sense strand starting at position 2832 of SEQ ID NO: 585038
caggaagaggcaugaguua

SEQ ID NO: 608339 - RNA, 19 nt, Artificial Sequence
  Description of Artificial Sequence: Synthetic oligonucleotide
  Antisense strand to SEQ ID NO: 608338
uaacucaugccucuuccug

SEQ ID NO: 608340 - RNA, 19 nt, Artificial Sequence
  Description of Artificial Sequence: Synthetic oligonucleotide
  Sense strand starting at position 2965 of SEQ ID NO: 585038
gccaaagaauucucugaca

SEQ ID NO: 608341 - RNA, 19 nt, Artificial Sequence
  Description of Artificial Sequence: Synthetic oligonucleotide
  Antisense strand to SEQ ID NO: 608340
ugucagagaauucuuuggc

SEQ ID NO: 608342 - RNA, 19 nt, Artificial Sequence
  Description of Artificial Sequence: Synthetic oligonucleotide
  Sense strand starting at position 3048 of SEQ ID NO: 585038
gaaagucagucuuugaaug

SEQ ID NO: 608343 - RNA, 19 nt, Artificial Sequence
  Description of Artificial Sequence: Synthetic oligonucleotide
  Antisense strand to SEQ ID NO: 608342
cauucaaagacugacuuuc

SEQ ID NO: 608344 - RNA, 19 nt, Artificial Sequence
  Description of Artificial Sequence: Synthetic oligonucleotide
  Sense strand starting at position 3055 of SEQ ID NO: 585038
agucuuugaauguagagca

SEQ ID NO: 608345 - RNA, 19 nt, Artificial Sequence
  Description of Artificial Sequence: Synthetic oligonucleotide
  Antisense strand to SEQ ID NO: 608344
ugcucuacauucaaagacu

SEQ ID NO: 608346 - RNA, 19 nt, Artificial Sequence
  Description of Artificial Sequence: Synthetic oligonucleotide
  Sense strand starting at position 3068 of SEQ ID NO: 585038
agagcagaucaauguggaa

SEQ ID NO: 608347 - RNA, 19 nt, Artificial Sequence
  Description of Artificial Sequence: Synthetic oligonucleotide
  Antisense strand to SEQ ID NO: 608346
uuccacauugaucugcucu

SEQ ID NO: 608348 - RNA, 19 nt, Artificial Sequence
  Description of Artificial Sequence: Synthetic oligonucleotide
  Sense strand starting at position 3070 of SEQ ID NO: 585038
agcagaucaauguggaaug

SEQ ID NO: 608349 - RNA, 19 nt, Artificial Sequence
  Description of Artificial Sequence: Synthetic oligonucleotide
  Antisense strand to SEQ ID NO: 608348
cauuccacauugaucugcu

SEQ ID NO: 608350 - RNA, 19 nt, Artificial Sequence
  Description of Artificial Sequence: Synthetic oligonucleotide
  Sense strand starting at position 3091 of SEQ ID NO: 585038
gacugaaaggucugucaac

SEQ ID NO: 608351 - RNA, 19 nt, Artificial Sequence
  Description of Artificial Sequence: Synthetic oligonucleotide
  Antisense strand to SEQ ID NO: 608350
guugacagaccuuucaguc

SEQ ID NO: 608352 - RNA, 19 nt, Artificial Sequence
  Description of Artificial Sequence: Synthetic oligonucleotide
  Sense strand starting at position 3178 of SEQ ID NO: 585038
agacauuacucagugauua

SEQ ID NO: 608353 - RNA, 19 nt, Artificial Sequence
  Description of Artificial Sequence: Synthetic oligonucleotide
  Antisense strand to SEQ ID NO: 608352
uaaucacugaguaaugucu

SEQ ID NO: 608354 - RNA, 19 nt, Artificial Sequence
  Description of Artificial Sequence: Synthetic oligonucleotide
  Sense strand starting at position 3182 of SEQ ID NO: 585038
auuacucagugauuauaca

SEQ ID NO: 608355 - RNA, 19 nt, Artificial Sequence
  Description of Artificial Sequence: Synthetic oligonucleotide
  Antisense strand to SEQ ID NO: 608354
uguauaaucacugaguaau

SEQ ID NO: 608356 - RNA, 19 nt, Artificial Sequence
  Description of Artificial Sequence: Synthetic oligonucleotide
  Sense strand starting at position 3222 of SEQ ID NO: 585038
ggaguuccugaauauccuu

SEQ ID NO: 608357 - RNA, 19 nt, Artificial Sequence
  Description of Artificial Sequence: Synthetic oligonucleotide
  Antisense strand to SEQ ID NO: 608356
aaggauauucaggaacucc

SEQ ID NO: 608358 - RNA, 19 nt, Artificial Sequence
  Description of Artificial Sequence: Synthetic oligonucleotide
  Sense strand starting at position 3380 of SEQ ID NO: 585038
gcuuguuuacugcucgaua

SEQ ID NO: 608359 - RNA, 19 nt, Artificial Sequence
  Description of Artificial Sequence: Synthetic oligonucleotide
  Antisense strand to SEQ ID NO: 608358
uaucgagcaguaaacaagc

SEQ ID NO: 608360 - RNA, 19 nt, Artificial Sequence
  Description of Artificial Sequence: Synthetic oligonucleotide
  Sense strand starting at position 3535 of SEQ ID NO: 585038
ugagguaguguugaggaca

SEQ ID NO: 608361 - RNA, 19 nt, Artificial Sequence
  Description of Artificial Sequence: Synthetic oligonucleotide
  Antisense strand to SEQ ID NO: 608360
uguccucaacacuaccuca

SEQ ID NO: 608362 - RNA, 19 nt, Artificial Sequence
  Description of Artificial Sequence: Synthetic oligonucleotide
  Sense strand starting at position 3538 of SEQ ID NO: 585038
gguaguguugaggacaagu

SEQ ID NO: 608363 - RNA, 19 nt, Artificial Sequence
  Description of Artificial Sequence: Synthetic oligonucleotide
  Antisense strand to SEQ ID NO: 608362
acuuguccucaacacuacc

SEQ ID NO: 608364 - RNA, 19 nt, Artificial Sequence
  Description of Artificial Sequence: Synthetic oligonucleotide
  Sense strand starting at position 3916 of SEQ ID NO: 585038
cccugagaaugccugagau

SEQ ID NO: 608365 - RNA, 19 nt, Artificial Sequence
  Description of Artificial Sequence: Synthetic oligonucleotide
  Antisense strand to SEQ ID NO: 608364
aucucaggcauucucaggg

SEQ ID NO: 608366 - RNA, 19 nt, Artificial Sequence
  Description of Artificial Sequence: Synthetic oligonucleotide
  Sense strand starting at position 3962 of SEQ ID NO: 585038
ucucuugaggcuuaacaga

SEQ ID NO: 608367 - RNA, 19 nt, Artificial Sequence
  Description of Artificial Sequence: Synthetic oligonucleotide
  Antisense strand to SEQ ID NO: 608366
ucuguuaagccucaagaga

SEQ ID NO: 608368 - RNA, 19 nt, Artificial Sequence
  Description of Artificial Sequence: Synthetic oligonucleotide
  Sense strand starting at position 68 of SEQ ID NO: 585039
acuaaugagcuguaagcuu

SEQ ID NO: 608369 - RNA, 19 nt, Artificial Sequence
  Description of Artificial Sequence: Synthetic oligonucleotide
  Antisense strand to SEQ ID NO: 608368
aagcuuacagcucauuagu

SEQ ID NO: 608370 - RNA, 19 nt, Artificial Sequence
  Description of Artificial Sequence: Synthetic oligonucleotide
  Sense strand starting at position 166 of SEQ ID NO: 585039
cccagaauugcaugagguc

SEQ ID NO: 608371 - RNA, 19 nt, Artificial Sequence
  Description of Artificial Sequence: Synthetic oligonucleotide
  Antisense strand to SEQ ID NO: 608370
gaccucaugcaauucuggg

SEQ ID NO: 608372 - RNA, 19 nt, Artificial Sequence
  Description of Artificial Sequence: Synthetic oligonucleotide
  Sense strand starting at position 198 of SEQ ID NO: 585039
gucugcucuuggguaggau

SEQ ID NO: 608373 - RNA, 19 nt, Artificial Sequence
  Description of Artificial Sequence: Synthetic oligonucleotide
  Antisense strand to SEQ ID NO: 608372
auccuacccaagagcagac

SEQ ID NO: 608374 - RNA, 19 nt, Artificial Sequence
  Description of Artificial Sequence: Synthetic oligonucleotide
  Sense strand starting at position 199 of SEQ ID NO: 585039
ucugcucuuggguaggaua

SEQ ID NO: 608375 - RNA, 19 nt, Artificial Sequence
  Description of Artificial Sequence: Synthetic oligonucleotide
  Antisense strand to SEQ ID NO: 608374
uauccuacccaagagcaga

SEQ ID NO: 608376 - RNA, 19 nt, Artificial Sequence
  Description of Artificial Sequence: Synthetic oligonucleotide
  Sense strand starting at position 202 of SEQ ID NO: 585039
gcucuuggguaggauaagu

SEQ ID NO: 608377 - RNA, 19 nt, Artificial Sequence
  Description of Artificial Sequence: Synthetic oligonucleotide
  Antisense strand to SEQ ID NO: 608376
acuuauccuacccaagagc

SEQ ID NO: 608378 - RNA, 19 nt, Artificial Sequence
  Description of Artificial Sequence: Synthetic oligonucleotide
  Sense strand starting at position 279 of SEQ ID NO: 585039
cuggaaggaucugcaagau

SEQ ID NO: 608379 - RNA, 19 nt, Artificial Sequence
  Description of Artificial Sequence: Synthetic oligonucleotide
  Antisense strand to SEQ ID NO: 608378
aucuugcagauccuuccag

SEQ ID NO: 608380 - RNA, 19 nt, Artificial Sequence
  Description of Artificial Sequence: Synthetic oligonucleotide
  Sense strand starting at position 587 of SEQ ID NO: 585039
cagcauggguaauagaaca

SEQ ID NO: 608381 - RNA, 19 nt, Artificial Sequence
  Description of Artificial Sequence: Synthetic oligonucleotide
  Antisense strand to SEQ ID NO: 608380
uguucuauuacccaugcug

SEQ ID NO: 608382 - RNA, 19 nt, Artificial Sequence
  Description of Artificial Sequence: Synthetic oligonucleotide
  Sense strand starting at position 855 of SEQ ID NO: 585039
cccugcaguccuugcuaau

SEQ ID NO: 608383 - RNA, 19 nt, Artificial Sequence
  Description of Artificial Sequence: Synthetic oligonucleotide
  Antisense strand to SEQ ID NO: 608382
auuagcaaggacugcaggg

SEQ ID NO: 608384 - RNA, 19 nt, Artificial Sequence
  Description of Artificial Sequence: Synthetic oligonucleotide
  Sense strand starting at position 885 of SEQ ID NO: 585039
gcuggaggaucaugaguuu

SEQ ID NO: 608385 - RNA, 19 nt, Artificial Sequence
  Description of Artificial Sequence: Synthetic oligonucleotide
  Antisense strand to SEQ ID NO: 608384
aaacucaugauccuccagc

SEQ ID NO: 608386 - RNA, 19 nt, Artificial Sequence
  Description of Artificial Sequence: Synthetic oligonucleotide
  Sense strand starting at position 960 of SEQ ID NO: 585039
cagagaggcccuuguauca

SEQ ID NO: 608387 - RNA, 19 nt, Artificial Sequence
  Description of Artificial Sequence: Synthetic oligonucleotide
  Antisense strand to SEQ ID NO: 608386
ugauacaagggccucucug

SEQ ID NO: 608388 - RNA, 19 nt, Artificial Sequence
  Description of Artificial Sequence: Synthetic oligonucleotide
  Sense strand starting at position 965 of SEQ ID NO: 585039
aggcccuuguaucaacaaa

SEQ ID NO: 608389 - RNA, 19 nt, Artificial Sequence
  Description of Artificial Sequence: Synthetic oligonucleotide
  Antisense strand to SEQ ID NO: 608388
uuuguugauacaagggccu

SEQ ID NO: 608390 - RNA, 19 nt, Artificial Sequence
  Description of Artificial Sequence: Synthetic oligonucleotide
  Sense strand starting at position 1892 of SEQ ID NO: 585039
ccgcgaaugcucccgcaga

SEQ ID NO: 608391 - RNA, 19 nt, Artificial Sequence
  Description of Artificial Sequence: Synthetic oligonucleotide
  Antisense strand to SEQ ID NO: 608390
ucugcgggagcauucgcgg

SEQ ID NO: 608392 - RNA, 19 nt, Artificial Sequence
  Description of Artificial Sequence: Synthetic oligonucleotide
  Sense strand starting at position 2183 of SEQ ID NO: 585039
ugaccuuguccaggcagaa

SEQ ID NO: 608393 - RNA, 19 nt, Artificial Sequence
  Description of Artificial Sequence: Synthetic oligonucleotide
  Antisense strand to SEQ ID NO: 608392
uucugccuggacaagguca

SEQ ID NO: 608394 - RNA, 19 nt, Artificial Sequence
  Description of Artificial Sequence: Synthetic oligonucleotide
  Sense strand starting at position 2295 of SEQ ID NO: 585039
cggagucaucuggaucguu

SEQ ID NO: 608395 - RNA, 19 nt, Artificial Sequence
  Description of Artificial Sequence: Synthetic oligonucleotide
  Antisense strand to SEQ ID NO: 608394
aacgauccagaugacuccg

SEQ ID NO: 608396 - RNA, 19 nt, Artificial Sequence
  Description of Artificial Sequence: Synthetic oligonucleotide
  Sense strand starting at position 2345 of SEQ ID NO: 585039
ugacaacucguguggauuc

SEQ ID NO: 608397 - RNA, 19 nt, Artificial Sequence
  Description of Artificial Sequence: Synthetic oligonucleotide
  Antisense strand to SEQ ID NO: 608396
gaauccacacgaguuguca

SEQ ID NO: 608398 - RNA, 19 nt, Artificial Sequence
  Description of Artificial Sequence: Synthetic oligonucleotide
  Sense strand starting at position 2356 of SEQ ID NO: 585039
guggauucguccuuccaaa

SEQ ID NO: 608399 - RNA, 19 nt, Artificial Sequence
  Description of Artificial Sequence: Synthetic oligonucleotide
  Antisense strand to SEQ ID NO: 608398
uuuggaaggacgaauccac

SEQ ID NO: 608400 - RNA, 19 nt, Artificial Sequence
  Description of Artificial Sequence: Synthetic oligonucleotide
  Sense strand starting at position 2507 of SEQ ID NO: 585039
ugugucuguccacaagauc

SEQ ID NO: 608401 - RNA, 19 nt, Artificial Sequence
  Description of Artificial Sequence: Synthetic oligonucleotide
  Antisense strand to SEQ ID NO: 608400
gaucuuguggacagacaca

SEQ ID NO: 608402 - RNA, 19 nt, Artificial Sequence
  Description of Artificial Sequence: Synthetic oligonucleotide
  Sense strand starting at position 2571 of SEQ ID NO: 585039
cggaguucccaagaaguca

SEQ ID NO: 608403 - RNA, 19 nt, Artificial Sequence
  Description of Artificial Sequence: Synthetic oligonucleotide
  Antisense strand to SEQ ID NO: 608402
ugacuucuugggaacuccg

SEQ ID NO: 608404 - RNA, 19 nt, Artificial Sequence
  Description of Artificial Sequence: Synthetic oligonucleotide
  Sense strand starting at position 2700 of SEQ ID NO: 585039
ggauauaaauguuacaggu

SEQ ID NO: 608405 - RNA, 19 nt, Artificial Sequence
  Description of Artificial Sequence: Synthetic oligonucleotide
  Antisense strand to SEQ ID NO: 608404
accuguaacauuuauaucc

SEQ ID NO: 608406 - RNA, 19 nt, Artificial Sequence
  Description of Artificial Sequence: Synthetic oligonucleotide
  Sense strand starting at position 2785 of SEQ ID NO: 585039
ggagagugcuguggacaga

SEQ ID NO: 608407 - RNA, 19 nt, Artificial Sequence
  Description of Artificial Sequence: Synthetic oligonucleotide
  Antisense strand to SEQ ID NO: 608406
ucuguccacagcacucucc

SEQ ID NO: 608408 - RNA, 19 nt, Artificial Sequence
  Description of Artificial Sequence: Synthetic oligonucleotide
  Sense strand starting at position 2831 of SEQ ID NO: 585039
agagcuugcaaggaagagu

SEQ ID NO: 608409 - RNA, 19 nt, Artificial Sequence
  Description of Artificial Sequence: Synthetic oligonucleotide
  Antisense strand to SEQ ID NO: 608408
acucuuccuugcaagcucu

SEQ ID NO: 608410 - RNA, 19 nt, Artificial Sequence
  Description of Artificial Sequence: Synthetic oligonucleotide
  Sense strand starting at position 2904 of SEQ ID NO: 585039
uagcaagacucggucuguu

SEQ ID NO: 608411 - RNA, 19 nt, Artificial Sequence
  Description of Artificial Sequence: Synthetic oligonucleotide
  Antisense strand to SEQ ID NO: 608410
aacagaccgagucuugcua

SEQ ID NO: 608412 - RNA, 19 nt, Artificial Sequence
  Description of Artificial Sequence: Synthetic oligonucleotide
  Sense strand starting at position 2907 of SEQ ID NO: 585039
caagacucggucuguuaag

SEQ ID NO: 608413 - RNA, 19 nt, Artificial Sequence
  Description of Artificial Sequence: Synthetic oligonucleotide
  Antisense strand to SEQ ID NO: 608412
cuuaacagaccgagucuug

SEQ ID NO: 608414 - RNA, 19 nt, Artificial Sequence
  Description of Artificial Sequence: Synthetic oligonucleotide
  Sense strand starting at position 2941 of SEQ ID NO: 585039
ugcugaaguccugaucauu

SEQ ID NO: 608415 - RNA, 19 nt, Artificial Sequence
  Description of Artificial Sequence: Synthetic oligonucleotide
  Antisense strand to SEQ ID NO: 608414
aaugaucaggacuucagca

SEQ ID NO: 608416 - RNA, 19 nt, Artificial Sequence
  Description of Artificial Sequence: Synthetic oligonucleotide
  Sense strand starting at position 2965 of SEQ ID NO: 585039
guccuugaguccucugaug

SEQ ID NO: 608417 - RNA, 19 nt, Artificial Sequence
  Description of Artificial Sequence: Synthetic oligonucleotide
  Antisense strand to SEQ ID NO: 608416
caucagaggacucaaggac

SEQ ID NO: 608418 - RNA, 19 nt, Artificial Sequence
  Description of Artificial Sequence: Synthetic oligonucleotide
  Sense strand starting at position 2967 of SEQ ID NO: 585039
ccuugaguccucugaugag

SEQ ID NO: 608419 - RNA, 19 nt, Artificial Sequence
  Description of Artificial Sequence: Synthetic oligonucleotide
  Antisense strand to SEQ ID NO: 608418
cucaucagaggacucaagg

SEQ ID NO: 608420 - RNA, 19 nt, Artificial Sequence
  Description of Artificial Sequence: Synthetic oligonucleotide
  Sense strand starting at position 2973 of SEQ ID NO: 585039
guccucugaugaggacuua

SEQ ID NO: 608421 - RNA, 19 nt, Artificial Sequence
  Description of Artificial Sequence: Synthetic oligonucleotide
  Antisense strand to SEQ ID NO: 608420
uaaguccucaucagaggac

SEQ ID NO: 608422 - RNA, 19 nt, Artificial Sequence
  Description of Artificial Sequence: Synthetic oligonucleotide
  Sense strand starting at position 3020 of SEQ ID NO: 585039
ggguguugucuccauuggu

SEQ ID NO: 608423 - RNA, 19 nt, Artificial Sequence
  Description of Artificial Sequence: Synthetic oligonucleotide
  Antisense strand to SEQ ID NO: 608422
accaauggagacaacaccc

SEQ ID NO: 608424 - RNA, 19 nt, Artificial Sequence
  Description of Artificial Sequence: Synthetic oligonucleotide
  Sense strand starting at position 3196 of SEQ ID NO: 585039
aaacucgugccucaaguuu

SEQ ID NO: 608425 - RNA, 19 nt, Artificial Sequence
  Description of Artificial Sequence: Synthetic oligonucleotide
  Antisense strand to SEQ ID NO: 608424
aaacuugaggcacgaguuu

SEQ ID NO: 608426 - RNA, 19 nt, Artificial Sequence
  Description of Artificial Sequence: Synthetic oligonucleotide
  Sense strand starting at position 3703 of SEQ ID NO: 585039
agcgaaugugcccagugau

SEQ ID NO: 608427 - RNA, 19 nt, Artificial Sequence
  Description of Artificial Sequence: Synthetic oligonucleotide
  Antisense strand to SEQ ID NO: 608426
aucacugggcacauucgcu

SEQ ID NO: 608428 - RNA, 19 nt, Artificial Sequence
  Description of Artificial Sequence: Synthetic oligonucleotide
  Sense strand starting at position 3704 of SEQ ID NO: 585039
gcgaaugugcccagugaug

SEQ ID NO: 608429 - RNA, 19 nt, Artificial Sequence
  Description of Artificial Sequence: Synthetic oligonucleotide
  Antisense strand to SEQ ID NO: 608428
caucacugggcacauucgc

SEQ ID NO: 608430 - RNA, 19 nt, Artificial Sequence
  Description of Artificial Sequence: Synthetic oligonucleotide
  Sense strand starting at position 3706 of SEQ ID NO: 585039
gaaugugcccagugaugga

SEQ ID NO: 608431 - RNA, 19 nt, Artificial Sequence
  Description of Artificial Sequence: Synthetic oligonucleotide
  Antisense strand to SEQ ID NO: 608430
uccaucacugggcacauuc

SEQ ID NO: 608432 - RNA, 19 nt, Artificial Sequence
  Description of Artificial Sequence: Synthetic oligonucleotide
  Sense strand starting at position 3723 of SEQ ID NO: 585039
gagucuuucuaagauggaa

SEQ ID NO: 608433 - RNA, 19 nt, Artificial Sequence
  Description of Artificial Sequence: Synthetic oligonucleotide
  Antisense strand to SEQ ID NO: 608432
uuccaucuuagaaagacuc

SEQ ID NO: 608434 - RNA, 19 nt, Artificial Sequence
  Description of Artificial Sequence: Synthetic oligonucleotide
  Sense strand starting at position 3726 of SEQ ID NO: 585039
ucuuucuaagauggaauua

SEQ ID NO: 608435 - RNA, 19 nt, Artificial Sequence
  Description of Artificial Sequence: Synthetic oligonucleotide
  Antisense strand to SEQ ID NO: 608434
uaauuccaucuuagaaaga

SEQ ID NO: 608436 - RNA, 19 nt, Artificial Sequence
  Description of Artificial Sequence: Synthetic oligonucleotide
  Sense strand starting at position 3737 of SEQ ID NO: 585039
uggaauuacuuaugucaag

SEQ ID NO: 608437 - RNA, 19 nt, Artificial Sequence
  Description of Artificial Sequence: Synthetic oligonucleotide
  Antisense strand to SEQ ID NO: 608436
cuugacauaaguaauucca

SEQ ID NO: 608438 - RNA, 19 nt, Artificial Sequence
  Description of Artificial Sequence: Synthetic oligonucleotide
  Sense strand starting at position 3743 of SEQ ID NO: 585039
uacuuaugucaaggguucu

SEQ ID NO: 608439 - RNA, 19 nt, Artificial Sequence
  Description of Artificial Sequence: Synthetic oligonucleotide
  Antisense strand to SEQ ID NO: 608438
agaacccuugacauaagua

SEQ ID NO: 608440 - RNA, 19 nt, Artificial Sequence
  Description of Artificial Sequence: Synthetic oligonucleotide
  Sense strand starting at position 3791 of SEQ ID NO: 585039
acaguuugcucuccacuca

SEQ ID NO: 608441 - RNA, 19 nt, Artificial Sequence
  Description of Artificial Sequence: Synthetic oligonucleotide
  Antisense strand to SEQ ID NO: 608440
ugaguggagagcaaacugu

SEQ ID NO: 608442 - RNA, 19 nt, Artificial Sequence
  Description of Artificial Sequence: Synthetic oligonucleotide
  Sense strand starting at position 3811 of SEQ ID NO: 585039
cagcuugagugaucuaggu

SEQ ID NO: 608443 - RNA, 19 nt, Artificial Sequence
  Description of Artificial Sequence: Synthetic oligonucleotide
  Antisense strand to SEQ ID NO: 608442
accuagaucacucaagcug

SEQ ID NO: 608444 - RNA, 19 nt, Artificial Sequence
  Description of Artificial Sequence: Synthetic oligonucleotide
  Sense strand starting at position 3813 of SEQ ID NO: 585039
gcuugagugaucuagguca

SEQ ID NO: 608445 - RNA, 19 nt, Artificial Sequence
  Description of Artificial Sequence: Synthetic oligonucleotide
  Antisense strand to SEQ ID NO: 608444
ugaccuagaucacucaagc

SEQ ID NO: 608446 - RNA, 19 nt, Artificial Sequence
  Description of Artificial Sequence: Synthetic oligonucleotide
  Sense strand starting at position 3815 of SEQ ID NO: 585039
uugagugaucuaggucaug

SEQ ID NO: 608447 - RNA, 19 nt, Artificial Sequence
  Description of Artificial Sequence: Synthetic oligonucleotide
  Antisense strand to SEQ ID NO: 608446
caugaccuagaucacucaa

SEQ ID NO: 608448 - RNA, 19 nt, Artificial Sequence
  Description of Artificial Sequence: Synthetic oligonucleotide
  Sense strand starting at position 1 of SEQ ID NO: 585040
ugggaacuuaaguguauca

SEQ ID NO: 608449 - RNA, 19 nt, Artificial Sequence
  Description of Artificial Sequence: Synthetic oligonucleotide
  Antisense strand to SEQ ID NO: 608448
ugauacacuuaaguuccca

SEQ ID NO: 608450 - RNA, 19 nt, Artificial Sequence
  Description of Artificial Sequence: Synthetic oligonucleotide
  Sense strand starting at position 3 of SEQ ID NO: 585040
ggaacuuaaguguaucauu

SEQ ID NO: 608451 - RNA, 19 nt, Artificial Sequence
  Description of Artificial Sequence: Synthetic oligonucleotide
  Antisense strand to SEQ ID NO: 608450
aaugauacacuuaaguucc

SEQ ID NO: 608452 - RNA, 19 nt, Artificial Sequence
  Description of Artificial Sequence: Synthetic oligonucleotide
  Sense strand starting at position 60 of SEQ ID NO: 585040
gugaguugccacuagaucu

SEQ ID NO: 608453 - RNA, 19 nt, Artificial Sequence
  Description of Artificial Sequence: Synthetic oligonucleotide
  Antisense strand to SEQ ID NO: 608452
agaucuaguggcaacucac

SEQ ID NO: 608454 - RNA, 19 nt, Artificial Sequence
  Description of Artificial Sequence: Synthetic oligonucleotide
  Sense strand starting at position 199 of SEQ ID NO: 585040
uucuaagaguuguuaacca

SEQ ID NO: 608455 - RNA, 19 nt, Artificial Sequence
  Description of Artificial Sequence: Synthetic oligonucleotide
  Antisense strand to SEQ ID NO: 608454
ugguuaacaacucuuagaa

SEQ ID NO: 608456 - RNA, 19 nt, Artificial Sequence
  Description of Artificial Sequence: Synthetic oligonucleotide
  Sense strand starting at position 240 of SEQ ID NO: 585040
agguaaauuugggaaugcu

SEQ ID NO: 608457 - RNA, 19 nt, Artificial Sequence
  Description of Artificial Sequence: Synthetic oligonucleotide
  Antisense strand to SEQ ID NO: 608456
agcauucccaaauuuaccu

SEQ ID NO: 608458 - RNA, 19 nt, Artificial Sequence
  Description of Artificial Sequence: Synthetic oligonucleotide
  Sense strand starting at position 248 of SEQ ID NO: 585040
uugggaaugcuaggauaac

SEQ ID NO: 608459 - RNA, 19 nt, Artificial Sequence
  Description of Artificial Sequence: Synthetic oligonucleotide
  Antisense strand to SEQ ID NO: 608458
guuauccuagcauucccaa

SEQ ID NO: 608460 - RNA, 19 nt, Artificial Sequence
  Description of Artificial Sequence: Synthetic oligonucleotide
  Sense strand starting at position 269 of SEQ ID NO: 585040
ucuggagauuuacauguau

SEQ ID NO: 608461 - RNA, 19 nt, Artificial Sequence
  Description of Artificial Sequence: Synthetic oligonucleotide
  Antisense strand to SEQ ID NO: 608460
auacauguaaaucuccaga

SEQ ID NO: 608462 - RNA, 19 nt, Artificial Sequence
  Description of Artificial Sequence: Synthetic oligonucleotide
  Sense strand starting at position 504 of SEQ ID NO: 585040
ggagaucacaccugguuag

SEQ ID NO: 608463 - RNA, 19 nt, Artificial Sequence
  Description of Artificial Sequence: Synthetic oligonucleotide
  Antisense strand to SEQ ID NO: 608462
cuaaccaggugugaucucc

SEQ ID NO: 608464 - RNA, 19 nt, Artificial Sequence
  Description of Artificial Sequence: Synthetic oligonucleotide
  Sense strand starting at position 505 of SEQ ID NO: 585040
gagaucacaccugguuagu

SEQ ID NO: 608465 - RNA, 19 nt, Artificial Sequence
  Description of Artificial Sequence: Synthetic oligonucleotide
  Antisense strand to SEQ ID NO: 608464
acuaaccaggugugaucuc

SEQ ID NO: 608466 - RNA, 19 nt, Artificial Sequence
  Description of Artificial Sequence: Synthetic oligonucleotide
  Sense strand starting at position 516 of SEQ ID NO: 585040
ugguuaguagcagauuaaa

SEQ ID NO: 608467 - RNA, 19 nt, Artificial Sequence
  Description of Artificial Sequence: Synthetic oligonucleotide
  Antisense strand to SEQ ID NO: 608466
uuuaaucugcuacuaacca

SEQ ID NO: 608468 - RNA, 19 nt, Artificial Sequence
  Description of Artificial Sequence: Synthetic oligonucleotide
  Sense strand starting at position 596 of SEQ ID NO: 585040
auaggacuucuuugaaugu

SEQ ID NO: 608469 - RNA, 19 nt, Artificial Sequence
  Description of Artificial Sequence: Synthetic oligonucleotide
  Antisense strand to SEQ ID NO: 608468
acauucaaagaaguccuau

SEQ ID NO: 608470 - RNA, 19 nt, Artificial Sequence
  Description of Artificial Sequence: Synthetic oligonucleotide
  Sense strand starting at position 647 of SEQ ID NO: 585040
cauuuaagauuuggguuau

SEQ ID NO: 608471 - RNA, 19 nt, Artificial Sequence
  Description of Artificial Sequence: Synthetic oligonucleotide
  Antisense strand to SEQ ID NO: 608470
auaacccaaaucuuaaaug

SEQ ID NO: 608472 - RNA, 19 nt, Artificial Sequence
  Description of Artificial Sequence: Synthetic oligonucleotide
  Sense strand starting at position 648 of SEQ ID NO: 585040
auuuaagauuuggguuaug

SEQ ID NO: 608473 - RNA, 19 nt, Artificial Sequence
  Description of Artificial Sequence: Synthetic oligonucleotide
  Antisense strand to SEQ ID NO: 608472
cauaacccaaaucuuaaau

SEQ ID NO: 608474 - RNA, 19 nt, Artificial Sequence
  Description of Artificial Sequence: Synthetic oligonucleotide
  Sense strand starting at position 685 of SEQ ID NO: 585040
uguguauuaaaucaggugu

SEQ ID NO: 608475 - RNA, 19 nt, Artificial Sequence
  Description of Artificial Sequence: Synthetic oligonucleotide
  Antisense strand to SEQ ID NO: 608474
acaccugauuuaauacaca

SEQ ID NO: 608476 - RNA, 19 nt, Artificial Sequence
  Description of Artificial Sequence: Synthetic oligonucleotide
  Sense strand starting at position 800 of SEQ ID NO: 585040
ggccgaaaguaaucacuaa

SEQ ID NO: 608477 - RNA, 19 nt, Artificial Sequence
  Description of Artificial Sequence: Synthetic oligonucleotide
  Antisense strand to SEQ ID NO: 608476
uuagugauuacuuucggcc

SEQ ID NO: 608478 - RNA, 19 nt, Artificial Sequence
  Description of Artificial Sequence: Synthetic oligonucleotide
  Sense strand starting at position 876 of SEQ ID NO: 585040
cuaaaucacuguguuaucu

SEQ ID NO: 608479 - RNA, 19 nt, Artificial Sequence
  Description of Artificial Sequence: Synthetic oligonucleotide
  Antisense strand to SEQ ID NO: 608478
agauaacacagugauuuag

SEQ ID NO: 608480 - RNA, 19 nt, Artificial Sequence
  Description of Artificial Sequence: Synthetic oligonucleotide
  Sense strand starting at position 880 of SEQ ID NO: 585040
aucacuguguuaucuauca

SEQ ID NO: 608481 - RNA, 19 nt, Artificial Sequence
  Description of Artificial Sequence: Synthetic oligonucleotide
  Antisense strand to SEQ ID NO: 608480
ugauagauaacacagugau

SEQ ID NO: 608482 - RNA, 19 nt, Artificial Sequence
  Description of Artificial Sequence: Synthetic oligonucleotide
  Sense strand starting at position 901 of SEQ ID NO: 585040
uggugaguuacuuagcaca

SEQ ID NO: 608483 - RNA, 19 nt, Artificial Sequence
  Description of Artificial Sequence: Synthetic oligonucleotide
  Antisense strand to SEQ ID NO: 608482
ugugcuaaguaacucacca

SEQ ID NO: 608484 - RNA, 19 nt, Artificial Sequence
  Description of Artificial Sequence: Synthetic oligonucleotide
  Sense strand starting at position 982 of SEQ ID NO: 585040
gagaacuuaugucugcaua

SEQ ID NO: 608485 - RNA, 19 nt, Artificial Sequence
  Description of Artificial Sequence: Synthetic oligonucleotide
  Antisense strand to SEQ ID NO: 608484
uaugcagacauaaguucuc

SEQ ID NO: 608486 - RNA, 19 nt, Artificial Sequence
  Description of Artificial Sequence: Synthetic oligonucleotide
  Sense strand starting at position 983 of SEQ ID NO: 585040
agaacuuaugucugcauag

SEQ ID NO: 608487 - RNA, 19 nt, Artificial Sequence
  Description of Artificial Sequence: Synthetic oligonucleotide
  Antisense strand to SEQ ID NO: 608486
cuaugcagacauaaguucu

SEQ ID NO: 608488 - RNA, 19 nt, Artificial Sequence
  Description of Artificial Sequence: Synthetic oligonucleotide
  Sense strand starting at position 984 of SEQ ID NO: 585040
gaacuuaugucugcauaga

SEQ ID NO: 608489 - RNA, 19 nt, Artificial Sequence
  Description of Artificial Sequence: Synthetic oligonucleotide
  Antisense strand to SEQ ID NO: 608488
ucuaugcagacauaaguuc

SEQ ID NO: 608490 - RNA, 19 nt, Artificial Sequence
  Description of Artificial Sequence: Synthetic oligonucleotide
  Sense strand starting at position 1150 of SEQ ID NO: 585040
ucucaaacgccauagaacu

SEQ ID NO: 608491 - RNA, 19 nt, Artificial Sequence
  Description of Artificial Sequence: Synthetic oligonucleotide
  Antisense strand to SEQ ID NO: 608490
aguucuauggcguuugaga

SEQ ID NO: 608492 - RNA, 19 nt, Artificial Sequence
  Description of Artificial Sequence: Synthetic oligonucleotide
  Sense strand starting at position 1267 of SEQ ID NO: 585040
gcccgaacaagugacuauu

SEQ ID NO: 608493 - RNA, 19 nt, Artificial Sequence
  Description of Artificial Sequence: Synthetic oligonucleotide
  Antisense strand to SEQ ID NO: 608492
aauagucacuuguucgggc

SEQ ID NO: 608494 - RNA, 19 nt, Artificial Sequence
  Description of Artificial Sequence: Synthetic oligonucleotide
  Sense strand starting at position 1270 of SEQ ID NO: 585040
cgaacaagugacuauuguu

SEQ ID NO: 608495 - RNA, 19 nt, Artificial Sequence
  Description of Artificial Sequence: Synthetic oligonucleotide
  Antisense strand to SEQ ID NO: 608494
aacaauagucacuuguucg

SEQ ID NO: 608496 - RNA, 19 nt, Artificial Sequence
  Description of Artificial Sequence: Synthetic oligonucleotide
  Sense strand starting at position 1320 of SEQ ID NO: 585040
aggugauaauuguuaacaa

SEQ ID NO: 608497 - RNA, 19 nt, Artificial Sequence
  Description of Artificial Sequence: Synthetic oligonucleotide
  Antisense strand to SEQ ID NO: 608496
uuguuaacaauuaucaccu

SEQ ID NO: 608498 - RNA, 19 nt, Artificial Sequence
  Description of Artificial Sequence: Synthetic oligonucleotide
  Sense strand starting at position 2173 of SEQ ID NO: 585040
aagagauaauaggaacuga

SEQ ID NO: 608499 - RNA, 19 nt, Artificial Sequence
  Description of Artificial Sequence: Synthetic oligonucleotide
  Antisense strand to SEQ ID NO: 608498
ucaguuccuauuaucucuu

SEQ ID NO: 608500 - RNA, 19 nt, Artificial Sequence
  Description of Artificial Sequence: Synthetic oligonucleotide
  Sense strand starting at position 2245 of SEQ ID NO: 585040
cugcaucccagagagguua

SEQ ID NO: 608501 - RNA, 19 nt, Artificial Sequence
  Description of Artificial Sequence: Synthetic oligonucleotide
  Antisense strand to SEQ ID NO: 608500
uaaccucucugggaugcag

SEQ ID NO: 608502 - RNA, 19 nt, Artificial Sequence
  Description of Artificial Sequence: Synthetic oligonucleotide
  Sense strand starting at position 2319 of SEQ ID NO: 585040
agucuagagcucuaucaau

SEQ ID NO: 608503 - RNA, 19 nt, Artificial Sequence
  Description of Artificial Sequence: Synthetic oligonucleotide
  Antisense strand to SEQ ID NO: 608502
auugauagagcucuagacu

SEQ ID NO: 608504 - RNA, 19 nt, Artificial Sequence
  Description of Artificial Sequence: Synthetic oligonucleotide
  Sense strand starting at position 2533 of SEQ ID NO: 585040
gguacuaaagguggaagau

SEQ ID NO: 608505 - RNA, 19 nt, Artificial Sequence
  Description of Artificial Sequence: Synthetic oligonucleotide
  Antisense strand to SEQ ID NO: 608504
aucuuccaccuuuaguacc

SEQ ID NO: 608506 - RNA, 19 nt, Artificial Sequence
  Description of Artificial Sequence: Synthetic oligonucleotide
  Sense strand starting at position 2585 of SEQ ID NO: 585040
ugaauuauuugagaccaaa

SEQ ID NO: 608507 - RNA, 19 nt, Artificial Sequence
  Description of Artificial Sequence: Synthetic oligonucleotide
  Antisense strand to SEQ ID NO: 608506
uuuggucucaaauaauuca

SEQ ID NO: 608508 - RNA, 19 nt, Artificial Sequence
  Description of Artificial Sequence: Synthetic oligonucleotide
  Sense strand starting at position 3173 of SEQ ID NO: 585040
guaguaaacuucuccaacu

SEQ ID NO: 608509 - RNA, 19 nt, Artificial Sequence
  Description of Artificial Sequence: Synthetic oligonucleotide
  Antisense strand to SEQ ID NO: 608508
aguuggagaaguuuacuac

SEQ ID NO: 608510 - RNA, 19 nt, Artificial Sequence
  Description of Artificial Sequence: Synthetic oligonucleotide
  Sense strand starting at position 3225 of SEQ ID NO: 585040
uggagcuguacauacguaa

SEQ ID NO: 608511 - RNA, 19 nt, Artificial Sequence
  Description of Artificial Sequence: Synthetic oligonucleotide
  Antisense strand to SEQ ID NO: 608510
uuacguauguacagcucca

SEQ ID NO: 608512 - RNA, 19 nt, Artificial Sequence
  Description of Artificial Sequence: Synthetic oligonucleotide
  Sense strand starting at position 3305 of SEQ ID NO: 585040
acucuucugcauuagguaa

SEQ ID NO: 608513 - RNA, 19 nt, Artificial Sequence
  Description of Artificial Sequence: Synthetic oligonucleotide
  Antisense strand to SEQ ID NO: 608512
uuaccuaaugcagaagagu

SEQ ID NO: 608514 - RNA, 19 nt, Artificial Sequence
  Description of Artificial Sequence: Synthetic oligonucleotide
  Sense strand starting at position 3368 of SEQ ID NO: 585040
uauccugucuaaguugaga

SEQ ID NO: 608515 - RNA, 19 nt, Artificial Sequence
  Description of Artificial Sequence: Synthetic oligonucleotide
  Antisense strand to SEQ ID NO: 608514
ucucaacuuagacaggaua

SEQ ID NO: 608516 - RNA, 19 nt, Artificial Sequence
  Description of Artificial Sequence: Synthetic oligonucleotide
  Sense strand starting at position 3370 of SEQ ID NO: 585040
uccugucuaaguugagaag

SEQ ID NO: 608517 - RNA, 19 nt, Artificial Sequence
  Description of Artificial Sequence: Synthetic oligonucleotide
  Antisense strand to SEQ ID NO: 608516
cuucucaacuuagacagga

SEQ ID NO: 608518 - RNA, 19 nt, Artificial Sequence
  Description of Artificial Sequence: Synthetic oligonucleotide
  Sense strand starting at position 3418 of SEQ ID NO: 585040
ucgcuuuagauagaggcua

SEQ ID NO: 608519 - RNA, 19 nt, Artificial Sequence
  Description of Artificial Sequence: Synthetic oligonucleotide
  Antisense strand to SEQ ID NO: 608518
uagccucuaucuaaagcga

SEQ ID NO: 608520 - RNA, 19 nt, Artificial Sequence
  Description of Artificial Sequence: Synthetic oligonucleotide
  Sense strand starting at position 3574 of SEQ ID NO: 585040
ugugaacccugggucugau

SEQ ID NO: 608521 - RNA, 19 nt, Artificial Sequence
  Description of Artificial Sequence: Synthetic oligonucleotide
  Antisense strand to SEQ ID NO: 608520
aucagacccaggguucaca

SEQ ID NO: 608522 - RNA, 19 nt, Artificial Sequence
  Description of Artificial Sequence: Synthetic oligonucleotide
  Sense strand starting at position 3596 of SEQ ID NO: 585040
uauggucauuuccagggau

SEQ ID NO: 608523 - RNA, 19 nt, Artificial Sequence
  Description of Artificial Sequence: Synthetic oligonucleotide
  Antisense strand to SEQ ID NO: 608522
aucccuggaaaugaccaua

SEQ ID NO: 608524 - RNA, 19 nt, Artificial Sequence
  Description of Artificial Sequence: Synthetic oligonucleotide
  Sense strand starting at position 3621 of SEQ ID NO: 585040
gcgccaagucacgcucaua

SEQ ID NO: 608525 - RNA, 19 nt, Artificial Sequence
  Description of Artificial Sequence: Synthetic oligonucleotide
  Antisense strand to SEQ ID NO: 608524
uaugagcgugacuuggcgc

SEQ ID NO: 608526 - RNA, 19 nt, Artificial Sequence
  Description of Artificial Sequence: Synthetic oligonucleotide
  Sense strand starting at position 3624 of SEQ ID NO: 585040
ccaagucacgcucauaaga

SEQ ID NO: 608527 - RNA, 19 nt, Artificial Sequence
  Description of Artificial Sequence: Synthetic oligonucleotide
  Antisense strand to SEQ ID NO: 608526
ucuuaugagcgugacuugg

SEQ ID NO: 608528 - RNA, 19 nt, Artificial Sequence
  Description of Artificial Sequence: Synthetic oligonucleotide
  Sense strand starting at position 507 of SEQ ID NO: 585041
ccugacugugcucagggaa

SEQ ID NO: 608529 - RNA, 19 nt, Artificial Sequence
  Description of Artificial Sequence: Synthetic oligonucleotide
  Antisense strand to SEQ ID NO: 608528
uucccugagcacagucagg

SEQ ID NO: 608530 - RNA, 19 nt, Artificial Sequence
  Description of Artificial Sequence: Synthetic oligonucleotide
  Sense strand starting at position 527 of SEQ ID NO: 585041
gggcacugccucuaauauc

SEQ ID NO: 608531 - RNA, 19 nt, Artificial Sequence
  Description of Artificial Sequence: Synthetic oligonucleotide
  Antisense strand to SEQ ID NO: 608530
gauauuagaggcagugccc

SEQ ID NO: 608532 - RNA, 19 nt, Artificial Sequence
  Description of Artificial Sequence: Synthetic oligonucleotide
  Sense strand starting at position 538 of SEQ ID NO: 585041
cuaauaucacccuguggau

SEQ ID NO: 608533 - RNA, 19 nt, Artificial Sequence
  Description of Artificial Sequence: Synthetic oligonucleotide
  Antisense strand to SEQ ID NO: 608532
auccacagggugauauuag

SEQ ID NO: 608534 - RNA, 19 nt, Artificial Sequence
  Description of Artificial Sequence: Synthetic oligonucleotide
  Sense strand starting at position 585 of SEQ ID NO: 585041
gguagauagugucucugaa

SEQ ID NO: 608535 - RNA, 19 nt, Artificial Sequence
  Description of Artificial Sequence: Synthetic oligonucleotide
  Antisense strand to SEQ ID NO: 608534
uucagagacacuaucuacc

SEQ ID NO: 608536 - RNA, 19 nt, Artificial Sequence
  Description of Artificial Sequence: Synthetic oligonucleotide
  Sense strand starting at position 587 of SEQ ID NO: 585041
uagauagugucucugaauc

SEQ ID NO: 608537 - RNA, 19 nt, Artificial Sequence
  Description of Artificial Sequence: Synthetic oligonucleotide
  Antisense strand to SEQ ID NO: 608536
gauucagagacacuaucua

SEQ ID NO: 608538 - RNA, 19 nt, Artificial Sequence
  Description of Artificial Sequence: Synthetic oligonucleotide
  Sense strand starting at position 627 of SEQ ID NO: 585041
uggagacccuccuccaaau

SEQ ID NO: 608539 - RNA, 19 nt, Artificial Sequence
  Description of Artificial Sequence: Synthetic oligonucleotide
  Antisense strand to SEQ ID NO: 608538
auuuggaggagggucucca

SEQ ID NO: 608540 - RNA, 19 nt, Artificial Sequence
  Description of Artificial Sequence: Synthetic oligonucleotide
  Sense strand starting at position 700 of SEQ ID NO: 585041
guagcaguccguuucuuga

SEQ ID NO: 608541 - RNA, 19 nt, Artificial Sequence
  Description of Artificial Sequence: Synthetic oligonucleotide
  Antisense strand to SEQ ID NO: 608540
ucaagaaacggacugcuac

SEQ ID NO: 608542 - RNA, 19 nt, Artificial Sequence
  Description of Artificial Sequence: Synthetic oligonucleotide
  Sense strand starting at position 708 of SEQ ID NO: 585041
ccguuucuugacuaaguga

SEQ ID NO: 608543 - RNA, 19 nt, Artificial Sequence
  Description of Artificial Sequence: Synthetic oligonucleotide
  Antisense strand to SEQ ID NO: 608542
ucacuuagucaagaaacgg

SEQ ID NO: 608544 - RNA, 19 nt, Artificial Sequence
  Description of Artificial Sequence: Synthetic oligonucleotide
  Sense strand starting at position 711 of SEQ ID NO: 585041
uuucuugacuaagugaacu

SEQ ID NO: 608545 - RNA, 19 nt, Artificial Sequence
  Description of Artificial Sequence: Synthetic oligonucleotide
  Antisense strand to SEQ ID NO: 608544
aguucacuuagucaagaaa

SEQ ID NO: 608546 - RNA, 19 nt, Artificial Sequence
  Description of Artificial Sequence: Synthetic oligonucleotide
  Sense strand starting at position 742 of SEQ ID NO: 585041
ucaucuuaucuuuagggua

SEQ ID NO: 608547 - RNA, 19 nt, Artificial Sequence
  Description of Artificial Sequence: Synthetic oligonucleotide
  Antisense strand to SEQ ID NO: 608546
uacccuaaagauaagauga

SEQ ID NO: 608548 - RNA, 19 nt, Artificial Sequence
  Description of Artificial Sequence: Synthetic oligonucleotide
  Sense strand starting at position 773 of SEQ ID NO: 585041
cgaacuuguccauagucau

SEQ ID NO: 608549 - RNA, 19 nt, Artificial Sequence
  Description of Artificial Sequence: Synthetic oligonucleotide
  Antisense strand to SEQ ID NO: 608548
augacuauggacaaguucg

SEQ ID NO: 608550 - RNA, 19 nt, Artificial Sequence
  Description of Artificial Sequence: Synthetic oligonucleotide
  Sense strand starting at position 797 of SEQ ID NO: 585041
caucaaaguccugagaugu

SEQ ID NO: 608551 - RNA, 19 nt, Artificial Sequence
  Description of Artificial Sequence: Synthetic oligonucleotide
  Antisense strand to SEQ ID NO: 608550
acaucucaggacuuugaug

SEQ ID NO: 608552 - RNA, 19 nt, Artificial Sequence
  Description of Artificial Sequence: Synthetic oligonucleotide
  Sense strand starting at position 807 of SEQ ID NO: 585041
cugagauguuucccaacug

SEQ ID NO: 608553 - RNA, 19 nt, Artificial Sequence
  Description of Artificial Sequence: Synthetic oligonucleotide
  Antisense strand to SEQ ID NO: 608552
caguugggaaacaucucag

SEQ ID NO: 608554 - RNA, 19 nt, Artificial Sequence
  Description of Artificial Sequence: Synthetic oligonucleotide
  Sense strand starting at position 861 of SEQ ID NO: 585041
ugagucuccauguggauua

SEQ ID NO: 608555 - RNA, 19 nt, Artificial Sequence
  Description of Artificial Sequence: Synthetic oligonucleotide
  Antisense strand to SEQ ID NO: 608554
uaauccacauggagacuca

SEQ ID NO: 608556 - RNA, 19 nt, Artificial Sequence
  Description of Artificial Sequence: Synthetic oligonucleotide
  Sense strand starting at position 863 of SEQ ID NO: 585041
agucuccauguggauuaaa

SEQ ID NO: 608557 - RNA, 19 nt, Artificial Sequence
  Description of Artificial Sequence: Synthetic oligonucleotide
  Antisense strand to SEQ ID NO: 608556
uuuaauccacauggagacu

SEQ ID NO: 608558 - RNA, 19 nt, Artificial Sequence
  Description of Artificial Sequence: Synthetic oligonucleotide
  Sense strand starting at position 1036 of SEQ ID NO: 585041
gaagcuaggucugcacaaa

SEQ ID NO: 608559 - RNA, 19 nt, Artificial Sequence
  Description of Artificial Sequence: Synthetic oligonucleotide
  Antisense strand to SEQ ID NO: 608558
uuugugcagaccuagcuuc

SEQ ID NO: 608560 - RNA, 19 nt, Artificial Sequence
  Description of Artificial Sequence: Synthetic oligonucleotide
  Sense strand starting at position 1134 of SEQ ID NO: 585041
cuagcugugagauauggga

SEQ ID NO: 608561 - RNA, 19 nt, Artificial Sequence
  Description of Artificial Sequence: Synthetic oligonucleotide
  Antisense strand to SEQ ID NO: 608560
ucccauaucucacagcuag

SEQ ID NO: 608562 - RNA, 19 nt, Artificial Sequence
  Description of Artificial Sequence: Synthetic oligonucleotide
  Sense strand starting at position 1136 of SEQ ID NO: 585041
agcugugagauaugggaca

SEQ ID NO: 608563 - RNA, 19 nt, Artificial Sequence
  Description of Artificial Sequence: Synthetic oligonucleotide
  Antisense strand to SEQ ID NO: 608562
ugucccauaucucacagcu

SEQ ID NO: 608564 - RNA, 19 nt, Artificial Sequence
  Description of Artificial Sequence: Synthetic oligonucleotide
  Sense strand starting at position 1150 of SEQ ID NO: 585041
ggacauaaucauugugaau

SEQ ID NO: 608565 - RNA, 19 nt, Artificial Sequence
  Description of Artificial Sequence: Synthetic oligonucleotide
  Antisense strand to SEQ ID NO: 608564
auucacaaugauuaugucc

SEQ ID NO: 608566 - RNA, 19 nt, Artificial Sequence
  Description of Artificial Sequence: Synthetic oligonucleotide
  Sense strand starting at position 1181 of SEQ ID NO: 585041
acuauaagaugggauauua

SEQ ID NO: 608567 - RNA, 19 nt, Artificial Sequence
  Description of Artificial Sequence: Synthetic oligonucleotide
  Antisense strand to SEQ ID NO: 608566
uaauaucccaucuuauagu

SEQ ID NO: 608568 - RNA, 19 nt, Artificial Sequence
  Description of Artificial Sequence: Synthetic oligonucleotide
  Sense strand starting at position 1587 of SEQ ID NO: 585041
ugugaauuccgugcacggu

SEQ ID NO: 608569 - RNA, 19 nt, Artificial Sequence
  Description of Artificial Sequence: Synthetic oligonucleotide
  Antisense strand to SEQ ID NO: 608568
accgugcacggaauucaca

SEQ ID NO: 608570 - RNA, 19 nt, Artificial Sequence
  Description of Artificial Sequence: Synthetic oligonucleotide
  Sense strand starting at position 1798 of SEQ ID NO: 585041
uagacaacugucuguagca

SEQ ID NO: 608571 - RNA, 19 nt, Artificial Sequence
  Description of Artificial Sequence: Synthetic oligonucleotide
  Antisense strand to SEQ ID NO: 608570
ugcuacagacaguugucua

SEQ ID NO: 608572 - RNA, 19 nt, Artificial Sequence
  Description of Artificial Sequence: Synthetic oligonucleotide
  Sense strand starting at position 1841 of SEQ ID NO: 585041
auuucuauuuguuguccaa

SEQ ID NO: 608573 - RNA, 19 nt, Artificial Sequence
  Description of Artificial Sequence: Synthetic oligonucleotide
  Antisense strand to SEQ ID NO: 608572
uuggacaacaaauagaaau

SEQ ID NO: 608574 - RNA, 19 nt, Artificial Sequence
  Description of Artificial Sequence: Synthetic oligonucleotide
  Sense strand starting at position 1882 of SEQ ID NO: 585041
gcuguuucugucuucugua

SEQ ID NO: 608575 - RNA, 19 nt, Artificial Sequence
  Description of Artificial Sequence: Synthetic oligonucleotide
  Antisense strand to SEQ ID NO: 608574
uacagaagacagaaacagc

SEQ ID NO: 608576 - RNA, 19 nt, Artificial Sequence
  Description of Artificial Sequence: Synthetic oligonucleotide
  Sense strand starting at position 2317 of SEQ ID NO: 585041
ggcucaguucuagaaggac

SEQ ID NO: 608577 - RNA, 19 nt, Artificial Sequence
  Description of Artificial Sequence: Synthetic oligonucleotide
  Antisense strand to SEQ ID NO: 608576
guccuucuagaacugagcc

SEQ ID NO: 608578 - RNA, 19 nt, Artificial Sequence
  Description of Artificial Sequence: Synthetic oligonucleotide
  Sense strand starting at position 2514 of SEQ ID NO: 585041
agagaaagcccucgaauga

SEQ ID NO: 608579 - RNA, 19 nt, Artificial Sequence
  Description of Artificial Sequence: Synthetic oligonucleotide
  Antisense strand to SEQ ID NO: 608578
ucauucgagggcuuucucu

SEQ ID NO: 608580 - RNA, 19 nt, Artificial Sequence
  Description of Artificial Sequence: Synthetic oligonucleotide
  Sense strand starting at position 2543 of SEQ ID NO: 585041
agagaaaggugcuucauga

SEQ ID NO: 608581 - RNA, 19 nt, Artificial Sequence
  Description of Artificial Sequence: Synthetic oligonucleotide
  Antisense strand to SEQ ID NO: 608580
ucaugaagcaccuuucucu

SEQ ID NO: 608582 - RNA, 19 nt, Artificial Sequence
  Description of Artificial Sequence: Synthetic oligonucleotide
  Sense strand starting at position 2692 of SEQ ID NO: 585041
ggccaagaucuuuggccaa

SEQ ID NO: 608583 - RNA, 19 nt, Artificial Sequence
  Description of Artificial Sequence: Synthetic oligonucleotide
  Antisense strand to SEQ ID NO: 608582
uuggccaaagaucuuggcc

SEQ ID NO: 608584 - RNA, 19 nt, Artificial Sequence
  Description of Artificial Sequence: Synthetic oligonucleotide
  Sense strand starting at position 2694 of SEQ ID NO: 585041
ccaagaucuuuggccaaga

SEQ ID NO: 608585 - RNA, 19 nt, Artificial Sequence
  Description of Artificial Sequence: Synthetic oligonucleotide
  Antisense strand to SEQ ID NO: 608584
ucuuggccaaagaucuugg

SEQ ID NO: 608586 - RNA, 19 nt, Artificial Sequence
  Description of Artificial Sequence: Synthetic oligonucleotide
  Sense strand starting at position 3004 of SEQ ID NO: 585041
gugggucuccauggaaagu

SEQ ID NO: 608587 - RNA, 19 nt, Artificial Sequence
  Description of Artificial Sequence: Synthetic oligonucleotide
  Antisense strand to SEQ ID NO: 608586
acuuuccauggagacccac

SEQ ID NO: 608588 - RNA, 19 nt, Artificial Sequence
  Description of Artificial Sequence: Synthetic oligonucleotide
  Sense strand starting at position 3005 of SEQ ID NO: 585041
ugggucuccauggaaagua

SEQ ID NO: 608589 - RNA, 19 nt, Artificial Sequence
  Description of Artificial Sequence: Synthetic oligonucleotide
  Antisense strand to SEQ ID NO: 608588
uacuuuccauggagaccca

SEQ ID NO: 608590 - RNA, 19 nt, Artificial Sequence
  Description of Artificial Sequence: Synthetic oligonucleotide
  Sense strand starting at position 3330 of SEQ ID NO: 585041
aggccaacugcuuauuaau

SEQ ID NO: 608591 - RNA, 19 nt, Artificial Sequence
  Description of Artificial Sequence: Synthetic oligonucleotide
  Antisense strand to SEQ ID NO: 608590
auuaauaagcaguuggccu

SEQ ID NO: 608592 - RNA, 19 nt, Artificial Sequence
  Description of Artificial Sequence: Synthetic oligonucleotide
  Sense strand starting at position 3610 of SEQ ID NO: 585041
cagggaacauuuggaaauu

SEQ ID NO: 608593 - RNA, 19 nt, Artificial Sequence
  Description of Artificial Sequence: Synthetic oligonucleotide
  Antisense strand to SEQ ID NO: 608592
aauuuccaaauguucccug

SEQ ID NO: 608594 - RNA, 19 nt, Artificial Sequence
  Description of Artificial Sequence: Synthetic oligonucleotide
  Sense strand starting at position 3710 of SEQ ID NO: 585041
cuauaaugcccagagcagu

SEQ ID NO: 608595 - RNA, 19 nt, Artificial Sequence
  Description of Artificial Sequence: Synthetic oligonucleotide
  Antisense strand to SEQ ID NO: 608594
acugcucugggcauuauag

SEQ ID NO: 608596 - RNA, 19 nt, Artificial Sequence
  Description of Artificial Sequence: Synthetic oligonucleotide
  Sense strand starting at position 3774 of SEQ ID NO: 585041
aguggaggaucucugcuuu

SEQ ID NO: 608597 - RNA, 19 nt, Artificial Sequence
  Description of Artificial Sequence: Synthetic oligonucleotide
  Antisense strand to SEQ ID NO: 608596
aaagcagagauccuccacu

SEQ ID NO: 608598 - RNA, 19 nt, Artificial Sequence
  Description of Artificial Sequence: Synthetic oligonucleotide
  Sense strand starting at position 3778 of SEQ ID NO: 585041
gaggaucucugcuuuagaa

SEQ ID NO: 608599 - RNA, 19 nt, Artificial Sequence
  Description of Artificial Sequence: Synthetic oligonucleotide
  Antisense strand to SEQ ID NO: 608598
uucuaaagcagagauccuc

SEQ ID NO: 608600 - RNA, 19 nt, Artificial Sequence
  Description of Artificial Sequence: Synthetic oligonucleotide
  Sense strand starting at position 3788 of SEQ ID NO: 585041
gcuuuagaauaagcacuaa

SEQ ID NO: 608601 - RNA, 19 nt, Artificial Sequence
  Description of Artificial Sequence: Synthetic oligonucleotide
  Antisense strand to SEQ ID NO: 608600
uuagugcuuauucuaaagc

SEQ ID NO: 608602 - RNA, 19 nt, Artificial Sequence
  Description of Artificial Sequence: Synthetic oligonucleotide
  Sense strand starting at position 3802 of SEQ ID NO: 585041
acuaaccaguguuugugaa

SEQ ID NO: 608603 - RNA, 19 nt, Artificial Sequence
  Description of Artificial Sequence: Synthetic oligonucleotide
  Antisense strand to SEQ ID NO: 608602
uucacaaacacugguuagu

SEQ ID NO: 608604 - RNA, 19 nt, Artificial Sequence
  Description of Artificial Sequence: Synthetic oligonucleotide
  Sense strand starting at position 3804 of SEQ ID NO: 585041
uaaccaguguuugugaaug

SEQ ID NO: 608605 - RNA, 19 nt, Artificial Sequence
  Description of Artificial Sequence: Synthetic oligonucleotide
  Antisense strand to SEQ ID NO: 608604
cauucacaaacacugguua

SEQ ID NO: 608606 - RNA, 19 nt, Artificial Sequence
  Description of Artificial Sequence: Synthetic oligonucleotide
  Sense strand starting at position 3809 of SEQ ID NO: 585041
aguguuugugaaugaacac

SEQ ID NO: 608607 - RNA, 19 nt, Artificial Sequence
  Description of Artificial Sequence: Synthetic oligonucleotide
  Antisense strand to SEQ ID NO: 608606
guguucauucacaaacacu

SEQ ID NO: 608608 - RNA, 19 nt, Artificial Sequence
  Description of Artificial Sequence: Synthetic oligonucleotide
  Sense strand starting at position 66 of SEQ ID NO: 585042
acacuaucggucgaguuua

SEQ ID NO: 608609 - RNA, 19 nt, Artificial Sequence
  Description of Artificial Sequence: Synthetic oligonucleotide
  Antisense strand to SEQ ID NO: 608608
uaaacucgaccgauagugu

SEQ ID NO: 608610 - RNA, 19 nt, Artificial Sequence
  Description of Artificial Sequence: Synthetic oligonucleotide
  Sense strand starting at position 71 of SEQ ID NO: 585042
aucggucgaguuuauaaau

SEQ ID NO: 608611 - RNA, 19 nt, Artificial Sequence
  Description of Artificial Sequence: Synthetic oligonucleotide
  Antisense strand to SEQ ID NO: 608610
auuuauaaacucgaccgau

SEQ ID NO: 608612 - RNA, 19 nt, Artificial Sequence
  Description of Artificial Sequence: Synthetic oligonucleotide
  Sense strand starting at position 109 of SEQ ID NO: 585042
gcagguuaagcagacugua

SEQ ID NO: 608613 - RNA, 19 nt, Artificial Sequence
  Description of Artificial Sequence: Synthetic oligonucleotide
  Antisense strand to SEQ ID NO: 608612
uacagucugcuuaaccugc

SEQ ID NO: 608614 - RNA, 19 nt, Artificial Sequence
  Description of Artificial Sequence: Synthetic oligonucleotide
  Sense strand starting at position 471 of SEQ ID NO: 585042
gguucugacuucccauauu

SEQ ID NO: 608615 - RNA, 19 nt, Artificial Sequence
  Description of Artificial Sequence: Synthetic oligonucleotide
  Antisense strand to SEQ ID NO: 608614
aauaugggaagucagaacc

SEQ ID NO: 608616 - RNA, 19 nt, Artificial Sequence
  Description of Artificial Sequence: Synthetic oligonucleotide
  Sense strand starting at position 558 of SEQ ID NO: 585042
gaguccaggucacuugaga

SEQ ID NO: 608617 - RNA, 19 nt, Artificial Sequence
  Description of Artificial Sequence: Synthetic oligonucleotide
  Antisense strand to SEQ ID NO: 608616
ucucaagugaccuggacuc

SEQ ID NO: 608618 - RNA, 19 nt, Artificial Sequence
  Description of Artificial Sequence: Synthetic oligonucleotide
  Sense strand starting at position 583 of SEQ ID NO: 585042
ucacaucucccauagguuu

SEQ ID NO: 608619 - RNA, 19 nt, Artificial Sequence
  Description of Artificial Sequence: Synthetic oligonucleotide
  Antisense strand to SEQ ID NO: 608618
aaaccuaugggagauguga

SEQ ID NO: 608620 - RNA, 19 nt, Artificial Sequence
  Description of Artificial Sequence: Synthetic oligonucleotide
  Sense strand starting at position 740 of SEQ ID NO: 585042
agagauauuuaagguagua

SEQ ID NO: 608621 - RNA, 19 nt, Artificial Sequence
  Description of Artificial Sequence: Synthetic oligonucleotide
  Antisense strand to SEQ ID NO: 608620
uacuaccuuaaauaucucu

SEQ ID NO: 608622 - RNA, 19 nt, Artificial Sequence
  Description of Artificial Sequence: Synthetic oligonucleotide
  Sense strand starting at position 1022 of SEQ ID NO: 585042
auugcauuggcuggaaacu

SEQ ID NO: 608623 - RNA, 19 nt, Artificial Sequence
  Description of Artificial Sequence: Synthetic oligonucleotide
  Antisense strand to SEQ ID NO: 608622
aguuuccagccaaugcaau

SEQ ID NO: 608624 - RNA, 19 nt, Artificial Sequence
  Description of Artificial Sequence: Synthetic oligonucleotide
  Sense strand starting at position 1097 of SEQ ID NO: 585042
gcaucccugcaccagaaau

SEQ ID NO: 608625 - RNA, 19 nt, Artificial Sequence
  Description of Artificial Sequence: Synthetic oligonucleotide
  Antisense strand to SEQ ID NO: 608624
auuucuggugcagggaugc

SEQ ID NO: 608626 - RNA, 19 nt, Artificial Sequence
  Description of Artificial Sequence: Synthetic oligonucleotide
  Sense strand starting at position 1158 of SEQ ID NO: 585042
gacuguucuccgccucuuu

SEQ ID NO: 608627 - RNA, 19 nt, Artificial Sequence
  Description of Artificial Sequence: Synthetic oligonucleotide
  Antisense strand to SEQ ID NO: 608626
aaagaggcggagaacaguc

SEQ ID NO: 608628 - RNA, 19 nt, Artificial Sequence
  Description of Artificial Sequence: Synthetic oligonucleotide
  Sense strand starting at position 1247 of SEQ ID NO: 585042
cgagacuacucggcccauu

SEQ ID NO: 608629 - RNA, 19 nt, Artificial Sequence
  Description of Artificial Sequence: Synthetic oligonucleotide
  Antisense strand to SEQ ID NO: 608628
aaugggccgaguagucucg

SEQ ID NO: 608630 - RNA, 19 nt, Artificial Sequence
  Description of Artificial Sequence: Synthetic oligonucleotide
  Sense strand starting at position 1263 of SEQ ID NO: 585042
auucgaacauucuccaaga

SEQ ID NO: 608631 - RNA, 19 nt, Artificial Sequence
  Description of Artificial Sequence: Synthetic oligonucleotide
  Antisense strand to SEQ ID NO: 608630
ucuuggagaauguucgaau

SEQ ID NO: 608632 - RNA, 19 nt, Artificial Sequence
  Description of Artificial Sequence: Synthetic oligonucleotide
  Sense strand starting at position 1264 of SEQ ID NO: 585042
uucgaacauucuccaagaa

SEQ ID NO: 608633 - RNA, 19 nt, Artificial Sequence
  Description of Artificial Sequence: Synthetic oligonucleotide
  Antisense strand to SEQ ID NO: 608632
uucuuggagaauguucgaa

SEQ ID NO: 608634 - RNA, 19 nt, Artificial Sequence
  Description of Artificial Sequence: Synthetic oligonucleotide
  Sense strand starting at position 1729 of SEQ ID NO: 585042
auguaagggauucgagauc

SEQ ID NO: 608635 - RNA, 19 nt, Artificial Sequence
  Description of Artificial Sequence: Synthetic oligonucleotide
  Antisense strand to SEQ ID NO: 608634
gaucucgaaucccuuacau

SEQ ID NO: 608636 - RNA, 19 nt, Artificial Sequence
  Description of Artificial Sequence: Synthetic oligonucleotide
  Sense strand starting at position 1934 of SEQ ID NO: 585042
ccgggagaguucccaucuu

SEQ ID NO: 608637 - RNA, 19 nt, Artificial Sequence
  Description of Artificial Sequence: Synthetic oligonucleotide
  Antisense strand to SEQ ID NO: 608636
aagaugggaacucucccgg

SEQ ID NO: 608638 - RNA, 19 nt, Artificial Sequence
  Description of Artificial Sequence: Synthetic oligonucleotide
  Sense strand starting at position 2175 of SEQ ID NO: 585042
cccagcugucuccaaguua

SEQ ID NO: 608639 - RNA, 19 nt, Artificial Sequence
  Description of Artificial Sequence: Synthetic oligonucleotide
  Antisense strand to SEQ ID NO: 608638
uaacuuggagacagcuggg

SEQ ID NO: 608640 - RNA, 19 nt, Artificial Sequence
  Description of Artificial Sequence: Synthetic oligonucleotide
  Sense strand starting at position 2231 of SEQ ID NO: 585042
accagaaucccaugggcuu

SEQ ID NO: 608641 - RNA, 19 nt, Artificial Sequence
  Description of Artificial Sequence: Synthetic oligonucleotide
  Antisense strand to SEQ ID NO: 608640
aagcccaugggauucuggu

SEQ ID NO: 608642 - RNA, 19 nt, Artificial Sequence
  Description of Artificial Sequence: Synthetic oligonucleotide
  Sense strand starting at position 2237 of SEQ ID NO: 585042
aucccaugggcuugggaau

SEQ ID NO: 608643 - RNA, 19 nt, Artificial Sequence
  Description of Artificial Sequence: Synthetic oligonucleotide
  Antisense strand to SEQ ID NO: 608642
auucccaagcccaugggau

SEQ ID NO: 608644 - RNA, 19 nt, Artificial Sequence
  Description of Artificial Sequence: Synthetic oligonucleotide
  Sense strand starting at position 2276 of SEQ ID NO: 585042
ugccucuuccucuagggaa

SEQ ID NO: 608645 - RNA, 19 nt, Artificial Sequence
  Description of Artificial Sequence: Synthetic oligonucleotide
  Antisense strand to SEQ ID NO: 608644
uucccuagaggaagaggca

SEQ ID NO: 608646 - RNA, 19 nt, Artificial Sequence
  Description of Artificial Sequence: Synthetic oligonucleotide
  Sense strand starting at position 2278 of SEQ ID NO: 585042
ccucuuccucuagggaaca

SEQ ID NO: 608647 - RNA, 19 nt, Artificial Sequence
  Description of Artificial Sequence: Synthetic oligonucleotide
  Antisense strand to SEQ ID NO: 608646
uguucccuagaggaagagg

SEQ ID NO: 608648 - RNA, 19 nt, Artificial Sequence
  Description of Artificial Sequence: Synthetic oligonucleotide
  Sense strand starting at position 2482 of SEQ ID NO: 585042
gaggaacucuugccauuga

SEQ ID NO: 608649 - RNA, 19 nt, Artificial Sequence
  Description of Artificial Sequence: Synthetic oligonucleotide
  Antisense strand to SEQ ID NO: 608648
ucaauggcaagaguuccuc

SEQ ID NO: 608650 - RNA, 19 nt, Artificial Sequence
  Description of Artificial Sequence: Synthetic oligonucleotide
  Sense strand starting at position 2520 of SEQ ID NO: 585042
uucggaaacugauuaucuu

SEQ ID NO: 608651 - RNA, 19 nt, Artificial Sequence
  Description of Artificial Sequence: Synthetic oligonucleotide
  Antisense strand to SEQ ID NO: 608650
aagauaaucaguuuccgaa

SEQ ID NO: 608652 - RNA, 19 nt, Artificial Sequence
  Description of Artificial Sequence: Synthetic oligonucleotide
  Sense strand starting at position 2572 of SEQ ID NO: 585042
gcucuagagucuuugaacc

SEQ ID NO: 608653 - RNA, 19 nt, Artificial Sequence
  Description of Artificial Sequence: Synthetic oligonucleotide
  Antisense strand to SEQ ID NO: 608652
gguucaaagacucuagagc

SEQ ID NO: 608654 - RNA, 19 nt, Artificial Sequence
  Description of Artificial Sequence: Synthetic oligonucleotide
  Sense strand starting at position 2654 of SEQ ID NO: 585042
ucuggcuccucuguaaaua

SEQ ID NO: 608655 - RNA, 19 nt, Artificial Sequence
  Description of Artificial Sequence: Synthetic oligonucleotide
  Antisense strand to SEQ ID NO: 608654
uauuuacagaggagccaga

SEQ ID NO: 608656 - RNA, 19 nt, Artificial Sequence
  Description of Artificial Sequence: Synthetic oligonucleotide
  Sense strand starting at position 2655 of SEQ ID NO: 585042
cuggcuccucuguaaauaa

SEQ ID NO: 608657 - RNA, 19 nt, Artificial Sequence
  Description of Artificial Sequence: Synthetic oligonucleotide
  Antisense strand to SEQ ID NO: 608656
uuauuuacagaggagccag

SEQ ID NO: 608658 - RNA, 19 nt, Artificial Sequence
  Description of Artificial Sequence: Synthetic oligonucleotide
  Sense strand starting at position 2708 of SEQ ID NO: 585042
gagcgaugcacuggaguca

SEQ ID NO: 608659 - RNA, 19 nt, Artificial Sequence
  Description of Artificial Sequence: Synthetic oligonucleotide
  Antisense strand to SEQ ID NO: 608658
ugacuccagugcaucgcuc

SEQ ID NO: 608660 - RNA, 19 nt, Artificial Sequence
  Description of Artificial Sequence: Synthetic oligonucleotide
  Sense strand starting at position 2720 of SEQ ID NO: 585042
ggagucacucgaugagagu

SEQ ID NO: 608661 - RNA, 19 nt, Artificial Sequence
  Description of Artificial Sequence: Synthetic oligonucleotide
  Antisense strand to SEQ ID NO: 608660
acucucaucgagugacucc

SEQ ID NO: 608662 - RNA, 19 nt, Artificial Sequence
  Description of Artificial Sequence: Synthetic oligonucleotide
  Sense strand starting at position 2726 of SEQ ID NO: 585042
acucgaugagagugugauu

SEQ ID NO: 608663 - RNA, 19 nt, Artificial Sequence
  Description of Artificial Sequence: Synthetic oligonucleotide
  Antisense strand to SEQ ID NO: 608662
aaucacacucucaucgagu

SEQ ID NO: 608664 - RNA, 19 nt, Artificial Sequence
  Description of Artificial Sequence: Synthetic oligonucleotide
  Sense strand starting at position 2729 of SEQ ID NO: 585042
cgaugagagugugauuuca

SEQ ID NO: 608665 - RNA, 19 nt, Artificial Sequence
  Description of Artificial Sequence: Synthetic oligonucleotide
  Antisense strand to SEQ ID NO: 608664
ugaaaucacacucucaucg

SEQ ID NO: 608666 - RNA, 19 nt, Artificial Sequence
  Description of Artificial Sequence: Synthetic oligonucleotide
  Sense strand starting at position 2757 of SEQ ID NO: 585042
ggcuuuacagauggugauu

SEQ ID NO: 608667 - RNA, 19 nt, Artificial Sequence
  Description of Artificial Sequence: Synthetic oligonucleotide
  Antisense strand to SEQ ID NO: 608666
aaucaccaucuguaaagcc

SEQ ID NO: 608668 - RNA, 19 nt, Artificial Sequence
  Description of Artificial Sequence: Synthetic oligonucleotide
  Sense strand starting at position 2762 of SEQ ID NO: 585042
uacagauggugauuaagcu

SEQ ID NO: 608669 - RNA, 19 nt, Artificial Sequence
  Description of Artificial Sequence: Synthetic oligonucleotide
  Antisense strand to SEQ ID NO: 608668
agcuuaaucaccaucugua

SEQ ID NO: 608670 - RNA, 19 nt, Artificial Sequence
  Description of Artificial Sequence: Synthetic oligonucleotide
  Sense strand starting at position 2768 of SEQ ID NO: 585042
uggugauuaagcuggcauu

SEQ ID NO: 608671 - RNA, 19 nt, Artificial Sequence
  Description of Artificial Sequence: Synthetic oligonucleotide
  Antisense strand to SEQ ID NO: 608670
aaugccagcuuaaucacca

SEQ ID NO: 608672 - RNA, 19 nt, Artificial Sequence
  Description of Artificial Sequence: Synthetic oligonucleotide
  Sense strand starting at position 2769 of SEQ ID NO: 585042
ggugauuaagcuggcauuu

SEQ ID NO: 608673 - RNA, 19 nt, Artificial Sequence
  Description of Artificial Sequence: Synthetic oligonucleotide
  Antisense strand to SEQ ID NO: 608672
aaaugccagcuuaaucacc

SEQ ID NO: 608674 - RNA, 19 nt, Artificial Sequence
  Description of Artificial Sequence: Synthetic oligonucleotide
  Sense strand starting at position 2822 of SEQ ID NO: 585042
uccauuauugaggguuucu

SEQ ID NO: 608675 - RNA, 19 nt, Artificial Sequence
  Description of Artificial Sequence: Synthetic oligonucleotide
  Antisense strand to SEQ ID NO: 608674
agaaacccucaauaaugga

SEQ ID NO: 608676 - RNA, 19 nt, Artificial Sequence
  Description of Artificial Sequence: Synthetic oligonucleotide
  Sense strand starting at position 3312 of SEQ ID NO: 585042
ucuagagugggauaagugu

SEQ ID NO: 608677 - RNA, 19 nt, Artificial Sequence
  Description of Artificial Sequence: Synthetic oligonucleotide
  Antisense strand to SEQ ID NO: 608676
acacuuaucccacucuaga

SEQ ID NO: 608678 - RNA, 19 nt, Artificial Sequence
  Description of Artificial Sequence: Synthetic oligonucleotide
  Sense strand starting at position 3318 of SEQ ID NO: 585042
gugggauaaguguacuaca

SEQ ID NO: 608679 - RNA, 19 nt, Artificial Sequence
  Description of Artificial Sequence: Synthetic oligonucleotide
  Antisense strand to SEQ ID NO: 608678
uguaguacacuuaucccac

SEQ ID NO: 608680 - RNA, 19 nt, Artificial Sequence
  Description of Artificial Sequence: Synthetic oligonucleotide
  Sense strand starting at position 3323 of SEQ ID NO: 585042
auaaguguacuacaguuau

SEQ ID NO: 608681 - RNA, 19 nt, Artificial Sequence
  Description of Artificial Sequence: Synthetic oligonucleotide
  Antisense strand to SEQ ID NO: 608680
auaacuguaguacacuuau

SEQ ID NO: 608682 - RNA, 19 nt, Artificial Sequence
  Description of Artificial Sequence: Synthetic oligonucleotide
  Sense strand starting at position 3327 of SEQ ID NO: 585042
guguacuacaguuauguaa

SEQ ID NO: 608683 - RNA, 19 nt, Artificial Sequence
  Description of Artificial Sequence: Synthetic oligonucleotide
  Antisense strand to SEQ ID NO: 608682
uuacauaacuguaguacac

SEQ ID NO: 608684 - RNA, 19 nt, Artificial Sequence
  Description of Artificial Sequence: Synthetic oligonucleotide
  Sense strand starting at position 3373 of SEQ ID NO: 585042
augcuaaaguauguagagu

SEQ ID NO: 608685 - RNA, 19 nt, Artificial Sequence
  Description of Artificial Sequence: Synthetic oligonucleotide
  Antisense strand to SEQ ID NO: 608684
acucuacauacuuuagcau

SEQ ID NO: 608686 - RNA, 19 nt, Artificial Sequence
  Description of Artificial Sequence: Synthetic oligonucleotide
  Sense strand starting at position 3384 of SEQ ID NO: 585042
uguagagugaauuggguuu

SEQ ID NO: 608687 - RNA, 19 nt, Artificial Sequence
  Description of Artificial Sequence: Synthetic oligonucleotide
  Antisense strand to SEQ ID NO: 608686
aaacccaauucacucuaca

SEQ ID NO: 608688 - RNA, 19 nt, Artificial Sequence
  Description of Artificial Sequence: Synthetic oligonucleotide
  Sense strand starting at position 37 of SEQ ID NO: 585043
gcugguaguccgaggcuuu

SEQ ID NO: 608689 - RNA, 19 nt, Artificial Sequence
  Description of Artificial Sequence: Synthetic oligonucleotide
  Antisense strand to SEQ ID NO: 608688
aaagccucggacuaccagc

SEQ ID NO: 608690 - RNA, 19 nt, Artificial Sequence
  Description of Artificial Sequence: Synthetic oligonucleotide
  Sense strand starting at position 49 of SEQ ID NO: 585043
aggcuuugauauguaaacu

SEQ ID NO: 608691 - RNA, 19 nt, Artificial Sequence
  Description of Artificial Sequence: Synthetic oligonucleotide
  Antisense strand to SEQ ID NO: 608690
aguuuacauaucaaagccu

SEQ ID NO: 608692 - RNA, 19 nt, Artificial Sequence
  Description of Artificial Sequence: Synthetic oligonucleotide
  Sense strand starting at position 204 of SEQ ID NO: 585043
ucauucuccugaguaggaa

SEQ ID NO: 608693 - RNA, 19 nt, Artificial Sequence
  Description of Artificial Sequence: Synthetic oligonucleotide
  Antisense strand to SEQ ID NO: 608692
uuccuacucaggagaauga

SEQ ID NO: 608694 - RNA, 19 nt, Artificial Sequence
  Description of Artificial Sequence: Synthetic oligonucleotide
  Sense strand starting at position 213 of SEQ ID NO: 585043
ugaguaggaaacuguuacu

SEQ ID NO: 608695 - RNA, 19 nt, Artificial Sequence
  Description of Artificial Sequence: Synthetic oligonucleotide
  Antisense strand to SEQ ID NO: 608694
aguaacaguuuccuacuca

SEQ ID NO: 608696 - RNA, 19 nt, Artificial Sequence
  Description of Artificial Sequence: Synthetic oligonucleotide
  Sense strand starting at position 326 of SEQ ID NO: 585043
gcaaguugcaagcaagaga

SEQ ID NO: 608697 - RNA, 19 nt, Artificial Sequence
  Description of Artificial Sequence: Synthetic oligonucleotide
  Antisense strand to SEQ ID NO: 608696
ucucuugcuugcaacuugc

SEQ ID NO: 608698 - RNA, 19 nt, Artificial Sequence
  Description of Artificial Sequence: Synthetic oligonucleotide
  Sense strand starting at position 392 of SEQ ID NO: 585043
augggauacuguguaaggu

SEQ ID NO: 608699 - RNA, 19 nt, Artificial Sequence
  Description of Artificial Sequence: Synthetic oligonucleotide
  Antisense strand to SEQ ID NO: 608698
accuuacacaguaucccau

SEQ ID NO: 608700 - RNA, 19 nt, Artificial Sequence
  Description of Artificial Sequence: Synthetic oligonucleotide
  Sense strand starting at position 393 of SEQ ID NO: 585043
ugggauacuguguaaggua

SEQ ID NO: 608701 - RNA, 19 nt, Artificial Sequence
  Description of Artificial Sequence: Synthetic oligonucleotide
  Antisense strand to SEQ ID NO: 608700
uaccuuacacaguauccca

SEQ ID NO: 608702 - RNA, 19 nt, Artificial Sequence
  Description of Artificial Sequence: Synthetic oligonucleotide
  Sense strand starting at position 468 of SEQ ID NO: 585043
aguuuacagucuccucaga

SEQ ID NO: 608703 - RNA, 19 nt, Artificial Sequence
  Description of Artificial Sequence: Synthetic oligonucleotide
  Antisense strand to SEQ ID NO: 608702
ucugaggagacuguaaacu

SEQ ID NO: 608704 - RNA, 19 nt, Artificial Sequence
  Description of Artificial Sequence: Synthetic oligonucleotide
  Sense strand starting at position 470 of SEQ ID NO: 585043
uuuacagucuccucagaua

SEQ ID NO: 608705 - RNA, 19 nt, Artificial Sequence
  Description of Artificial Sequence: Synthetic oligonucleotide
  Antisense strand to SEQ ID NO: 608704
uaucugaggagacuguaaa

SEQ ID NO: 608706 - RNA, 19 nt, Artificial Sequence
  Description of Artificial Sequence: Synthetic oligonucleotide
  Sense strand starting at position 525 of SEQ ID NO: 585043
cugugcauuugccuaagua

SEQ ID NO: 608707 - RNA, 19 nt, Artificial Sequence
  Description of Artificial Sequence: Synthetic oligonucleotide
  Antisense strand to SEQ ID NO: 608706
uacuuaggcaaaugcacag

SEQ ID NO: 608708 - RNA, 19 nt, Artificial Sequence
  Description of Artificial Sequence: Synthetic oligonucleotide
  Sense strand starting at position 526 of SEQ ID NO: 585043
ugugcauuugccuaaguau

SEQ ID NO: 608709 - RNA, 19 nt, Artificial Sequence
  Description of Artificial Sequence: Synthetic oligonucleotide
  Antisense strand to SEQ ID NO: 608708
auacuuaggcaaaugcaca

SEQ ID NO: 608710 - RNA, 19 nt, Artificial Sequence
  Description of Artificial Sequence: Synthetic oligonucleotide
  Sense strand starting at position 578 of SEQ ID NO: 585043
gcuguaauacaucacagcu

SEQ ID NO: 608711 - RNA, 19 nt, Artificial Sequence
  Description of Artificial Sequence: Synthetic oligonucleotide
  Antisense strand to SEQ ID NO: 608710
agcugugauguauuacagc

SEQ ID NO: 608712 - RNA, 19 nt, Artificial Sequence
  Description of Artificial Sequence: Synthetic oligonucleotide
  Sense strand starting at position 683 of SEQ ID NO: 585043
accuuaauccaagguguau

SEQ ID NO: 608713 - RNA, 19 nt, Artificial Sequence
  Description of Artificial Sequence: Synthetic oligonucleotide
  Antisense strand to SEQ ID NO: 608712
auacaccuuggauuaaggu

SEQ ID NO: 608714 - RNA, 19 nt, Artificial Sequence
  Description of Artificial Sequence: Synthetic oligonucleotide
  Sense strand starting at position 769 of SEQ ID NO: 585043
cuuauagugcuggaguuua

SEQ ID NO: 608715 - RNA, 19 nt, Artificial Sequence
  Description of Artificial Sequence: Synthetic oligonucleotide
  Antisense strand to SEQ ID NO: 608714
uaaacuccagcacuauaag

SEQ ID NO: 608716 - RNA, 19 nt, Artificial Sequence
  Description of Artificial Sequence: Synthetic oligonucleotide
  Sense strand starting at position 980 of SEQ ID NO: 585043
cugugcuuucguccucuua

SEQ ID NO: 608717 - RNA, 19 nt, Artificial Sequence
  Description of Artificial Sequence: Synthetic oligonucleotide
  Antisense strand to SEQ ID NO: 608716
uaagaggacgaaagcacag

SEQ ID NO: 608718 - RNA, 19 nt, Artificial Sequence
  Description of Artificial Sequence: Synthetic oligonucleotide
  Sense strand starting at position 981 of SEQ ID NO: 585043
ugugcuuucguccucuuau

SEQ ID NO: 608719 - RNA, 19 nt, Artificial Sequence
  Description of Artificial Sequence: Synthetic oligonucleotide
  Antisense strand to SEQ ID NO: 608718
auaagaggacgaaagcaca

SEQ ID NO: 608720 - RNA, 19 nt, Artificial Sequence
  Description of Artificial Sequence: Synthetic oligonucleotide
  Sense strand starting at position 984 of SEQ ID NO: 585043
gcuuucguccucuuaucuu

SEQ ID NO: 608721 - RNA, 19 nt, Artificial Sequence
  Description of Artificial Sequence: Synthetic oligonucleotide
  Antisense strand to SEQ ID NO: 608720
aagauaagaggacgaaagc

SEQ ID NO: 608722 - RNA, 19 nt, Artificial Sequence
  Description of Artificial Sequence: Synthetic oligonucleotide
  Sense strand starting at position 1101 of SEQ ID NO: 585043
acuuaaucauaucugcgaa

SEQ ID NO: 608723 - RNA, 19 nt, Artificial Sequence
  Description of Artificial Sequence: Synthetic oligonucleotide
  Antisense strand to SEQ ID NO: 608722
uucgcagauaugauuaagu

SEQ ID NO: 608724 - RNA, 19 nt, Artificial Sequence
  Description of Artificial Sequence: Synthetic oligonucleotide
  Sense strand starting at position 1277 of SEQ ID NO: 585043
ccaucuuaguuguccauuu

SEQ ID NO: 608725 - RNA, 19 nt, Artificial Sequence
  Description of Artificial Sequence: Synthetic oligonucleotide
  Antisense strand to SEQ ID NO: 608724
aaauggacaacuaagaugg

SEQ ID NO: 608726 - RNA, 19 nt, Artificial Sequence
  Description of Artificial Sequence: Synthetic oligonucleotide
  Sense strand starting at position 1358 of SEQ ID NO: 585043
cuuguagcucucuaagaca

SEQ ID NO: 608727 - RNA, 19 nt, Artificial Sequence
  Description of Artificial Sequence: Synthetic oligonucleotide
  Antisense strand to SEQ ID NO: 608726
ugucuuagagagcuacaag

SEQ ID NO: 608728 - RNA, 19 nt, Artificial Sequence
  Description of Artificial Sequence: Synthetic oligonucleotide
  Sense strand starting at position 1449 of SEQ ID NO: 585043
cucagcugauugcuaaaga

SEQ ID NO: 608729 - RNA, 19 nt, Artificial Sequence
  Description of Artificial Sequence: Synthetic oligonucleotide
  Antisense strand to SEQ ID NO: 608728
ucuuuagcaaucagcugag

SEQ ID NO: 608730 - RNA, 19 nt, Artificial Sequence
  Description of Artificial Sequence: Synthetic oligonucleotide
  Sense strand starting at position 1463 of SEQ ID NO: 585043
aaagacagaugcuucguua

SEQ ID NO: 608731 - RNA, 19 nt, Artificial Sequence
  Description of Artificial Sequence: Synthetic oligonucleotide
  Antisense strand to SEQ ID NO: 608730
uaacgaagcaucugucuuu

SEQ ID NO: 608732 - RNA, 19 nt, Artificial Sequence
  Description of Artificial Sequence: Synthetic oligonucleotide
  Sense strand starting at position 1466 of SEQ ID NO: 585043
gacagaugcuucguuagag

SEQ ID NO: 608733 - RNA, 19 nt, Artificial Sequence
  Description of Artificial Sequence: Synthetic oligonucleotide
  Antisense strand to SEQ ID NO: 608732
cucuaacgaagcaucuguc

SEQ ID NO: 608734 - RNA, 19 nt, Artificial Sequence
  Description of Artificial Sequence: Synthetic oligonucleotide
  Sense strand starting at position 1835 of SEQ ID NO: 585043
cguggaguaacagggaaua

SEQ ID NO: 608735 - RNA, 19 nt, Artificial Sequence
  Description of Artificial Sequence: Synthetic oligonucleotide
  Antisense strand to SEQ ID NO: 608734
uauucccuguuacuccacg

SEQ ID NO: 608736 - RNA, 19 nt, Artificial Sequence
  Description of Artificial Sequence: Synthetic oligonucleotide
  Sense strand starting at position 2023 of SEQ ID NO: 585043
gacauuuauuuacguaggu

SEQ ID NO: 608737 - RNA, 19 nt, Artificial Sequence
  Description of Artificial Sequence: Synthetic oligonucleotide
  Antisense strand to SEQ ID NO: 608736
accuacguaaauaaauguc

SEQ ID NO: 608738 - RNA, 19 nt, Artificial Sequence
  Description of Artificial Sequence: Synthetic oligonucleotide
  Sense strand starting at position 2048 of SEQ ID NO: 585043
acuguugcuauggguaaau

SEQ ID NO: 608739 - RNA, 19 nt, Artificial Sequence
  Description of Artificial Sequence: Synthetic oligonucleotide
  Antisense strand to SEQ ID NO: 608738
auuuacccauagcaacagu

SEQ ID NO: 608740 - RNA, 19 nt, Artificial Sequence
  Description of Artificial Sequence: Synthetic oligonucleotide
  Sense strand starting at position 2131 of SEQ ID NO: 585043
cagcaaguucucgcgauac

SEQ ID NO: 608741 - RNA, 19 nt, Artificial Sequence
  Description of Artificial Sequence: Synthetic oligonucleotide
  Antisense strand to SEQ ID NO: 608740
guaucgcgagaacuugcug

SEQ ID NO: 608742 - RNA, 19 nt, Artificial Sequence
  Description of Artificial Sequence: Synthetic oligonucleotide
  Sense strand starting at position 2149 of SEQ ID NO: 585043
ccgugagaucuccaguccu

SEQ ID NO: 608743 - RNA, 19 nt, Artificial Sequence
  Description of Artificial Sequence: Synthetic oligonucleotide
  Antisense strand to SEQ ID NO: 608742
aggacuggagaucucacgg

SEQ ID NO: 608744 - RNA, 19 nt, Artificial Sequence
  Description of Artificial Sequence: Synthetic oligonucleotide
  Sense strand starting at position 2180 of SEQ ID NO: 585043
gcugaaauguuagugagac

SEQ ID NO: 608745 - RNA, 19 nt, Artificial Sequence
  Description of Artificial Sequence: Synthetic oligonucleotide
  Antisense strand to SEQ ID NO: 608744
gucucacuaacauuucagc

SEQ ID NO: 608746 - RNA, 19 nt, Artificial Sequence
  Description of Artificial Sequence: Synthetic oligonucleotide
  Sense strand starting at position 3252 of SEQ ID NO: 585043
ucaaguucuucuuuagaag

SEQ ID NO: 608747 - RNA, 19 nt, Artificial Sequence
  Description of Artificial Sequence: Synthetic oligonucleotide
  Antisense strand to SEQ ID NO: 608746
cuucuaaagaagaacuuga

SEQ ID NO: 608748 - RNA, 19 nt, Artificial Sequence
  Description of Artificial Sequence: Synthetic oligonucleotide
  Sense strand starting at position 3292 of SEQ ID NO: 585043
gcugauugucaaggaauau

SEQ ID NO: 608749 - RNA, 19 nt, Artificial Sequence
  Description of Artificial Sequence: Synthetic oligonucleotide
  Antisense strand to SEQ ID NO: 608748
auauuccuugacaaucagc

SEQ ID NO: 608750 - RNA, 19 nt, Artificial Sequence
  Description of Artificial Sequence: Synthetic oligonucleotide
  Sense strand starting at position 3298 of SEQ ID NO: 585043
ugucaaggaauaugaggua

SEQ ID NO: 608751 - RNA, 19 nt, Artificial Sequence
  Description of Artificial Sequence: Synthetic oligonucleotide
  Antisense strand to SEQ ID NO: 608750
uaccucauauuccuugaca

SEQ ID NO: 608752 - RNA, 19 nt, Artificial Sequence
  Description of Artificial Sequence: Synthetic oligonucleotide
  Sense strand starting at position 3326 of SEQ ID NO: 585043
ggccgaguggugucucuuu

SEQ ID NO: 608753 - RNA, 19 nt, Artificial Sequence
  Description of Artificial Sequence: Synthetic oligonucleotide
  Antisense strand to SEQ ID NO: 608752
aaagagacaccacucggcc

SEQ ID NO: 608754 - RNA, 19 nt, Artificial Sequence
  Description of Artificial Sequence: Synthetic oligonucleotide
  Sense strand starting at position 3482 of SEQ ID NO: 585043
gaggaucuguggccaaauc

SEQ ID NO: 608755 - RNA, 19 nt, Artificial Sequence
  Description of Artificial Sequence: Synthetic oligonucleotide
  Antisense strand to SEQ ID NO: 608754
gauuuggccacagauccuc

SEQ ID NO: 608756 - RNA, 19 nt, Artificial Sequence
  Description of Artificial Sequence: Synthetic oligonucleotide
  Sense strand starting at position 3492 of SEQ ID NO: 585043
ggccaaauccacugcaaua

SEQ ID NO: 608757 - RNA, 19 nt, Artificial Sequence
  Description of Artificial Sequence: Synthetic oligonucleotide
  Antisense strand to SEQ ID NO: 608756
uauugcaguggauuuggcc

SEQ ID NO: 608758 - RNA, 19 nt, Artificial Sequence
  Description of Artificial Sequence: Synthetic oligonucleotide
  Sense strand starting at position 3667 of SEQ ID NO: 585043
gggcaucagcaaugaguau

SEQ ID NO: 608759 - RNA, 19 nt, Artificial Sequence
  Description of Artificial Sequence: Synthetic oligonucleotide
  Antisense strand to SEQ ID NO: 608758
auacucauugcugaugccc

SEQ ID NO: 608760 - RNA, 19 nt, Artificial Sequence
  Description of Artificial Sequence: Synthetic oligonucleotide
  Sense strand starting at position 3724 of SEQ ID NO: 585043
cccuguuuccuuuggauau

SEQ ID NO: 608761 - RNA, 19 nt, Artificial Sequence
  Description of Artificial Sequence: Synthetic oligonucleotide
  Antisense strand to SEQ ID NO: 608760
auauccaaaggaaacaggg

SEQ ID NO: 608762 - RNA, 19 nt, Artificial Sequence
  Description of Artificial Sequence: Synthetic oligonucleotide
  Sense strand starting at position 3807 of SEQ ID NO: 585043
caugcuguucuggaauauc

SEQ ID NO: 608763 - RNA, 19 nt, Artificial Sequence
  Description of Artificial Sequence: Synthetic oligonucleotide
  Antisense strand to SEQ ID NO: 608762
gauauuccagaacagcaug

SEQ ID NO: 608764 - RNA, 19 nt, Artificial Sequence
  Description of Artificial Sequence: Synthetic oligonucleotide
  Sense strand starting at position 3810 of SEQ ID NO: 585043
gcuguucuggaauaucaca

SEQ ID NO: 608765 - RNA, 19 nt, Artificial Sequence
  Description of Artificial Sequence: Synthetic oligonucleotide
  Antisense strand to SEQ ID NO: 608764
ugugauauuccagaacagc

SEQ ID NO: 608766 - RNA, 19 nt, Artificial Sequence
  Description of Artificial Sequence: Synthetic oligonucleotide
  Sense strand starting at position 3941 of SEQ ID NO: 585043
guugcugucacuuggauuu

SEQ ID NO: 608767 - RNA, 19 nt, Artificial Sequence
  Description of Artificial Sequence: Synthetic oligonucleotide
  Antisense strand to SEQ ID NO: 608766
aaauccaagugacagcaac

SEQ ID NO: 608768 - RNA, 19 nt, Artificial Sequence
  Description of Artificial Sequence: Synthetic oligonucleotide
  Sense strand starting at position 1 of SEQ ID NO: 585044
gucauauacuagucaauga

SEQ ID NO: 608769 - RNA, 19 nt, Artificial Sequence
  Description of Artificial Sequence: Synthetic oligonucleotide
  Antisense strand to SEQ ID NO: 608768
ucauugacuaguauaugac

SEQ ID NO: 608770 - RNA, 19 nt, Artificial Sequence
  Description of Artificial Sequence: Synthetic oligonucleotide
  Sense strand starting at position 48 of SEQ ID NO: 585044
ggaagugcugcuuauugau

SEQ ID NO: 608771 - RNA, 19 nt, Artificial Sequence
  Description of Artificial Sequence: Synthetic oligonucleotide
  Antisense strand to SEQ ID NO: 608770
aucaauaagcagcacuucc

SEQ ID NO: 608772 - RNA, 19 nt, Artificial Sequence
  Description of Artificial Sequence: Synthetic oligonucleotide
  Sense strand starting at position 60 of SEQ ID NO: 585044
uauugauguuucucagguu

SEQ ID NO: 608773 - RNA, 19 nt, Artificial Sequence
  Description of Artificial Sequence: Synthetic oligonucleotide
  Antisense strand to SEQ ID NO: 608772
aaccugagaaacaucaaua

SEQ ID NO: 608774 - RNA, 19 nt, Artificial Sequence
  Description of Artificial Sequence: Synthetic oligonucleotide
  Sense strand starting at position 100 of SEQ ID NO: 585044
agcuaaggcugaucucaua

SEQ ID NO: 608775 - RNA, 19 nt, Artificial Sequence
  Description of Artificial Sequence: Synthetic oligonucleotide
  Antisense strand to SEQ ID NO: 608774
uaugagaucagccuuagcu

SEQ ID NO: 608776 - RNA, 19 nt, Artificial Sequence
  Description of Artificial Sequence: Synthetic oligonucleotide
  Sense strand starting at position 113 of SEQ ID NO: 585044
cucauauaccuguguaugu

SEQ ID NO: 608777 - RNA, 19 nt, Artificial Sequence
  Description of Artificial Sequence: Synthetic oligonucleotide
  Antisense strand to SEQ ID NO: 608776
acauacacagguauaugag

SEQ ID NO: 608778 - RNA, 19 nt, Artificial Sequence
  Description of Artificial Sequence: Synthetic oligonucleotide
  Sense strand starting at position 114 of SEQ ID NO: 585044
ucauauaccuguguaugua

SEQ ID NO: 608779 - RNA, 19 nt, Artificial Sequence
  Description of Artificial Sequence: Synthetic oligonucleotide
  Antisense strand to SEQ ID NO: 608778
uacauacacagguauauga

SEQ ID NO: 608780 - RNA, 19 nt, Artificial Sequence
  Description of Artificial Sequence: Synthetic oligonucleotide
  Sense strand starting at position 124 of SEQ ID NO: 585044
guguauguaaccuagguaa

SEQ ID NO: 608781 - RNA, 19 nt, Artificial Sequence
  Description of Artificial Sequence: Synthetic oligonucleotide
  Antisense strand to SEQ ID NO: 608780
uuaccuagguuacauacac

SEQ ID NO: 608782 - RNA, 19 nt, Artificial Sequence
  Description of Artificial Sequence: Synthetic oligonucleotide
  Sense strand starting at position 269 of SEQ ID NO: 585044
gaacuuauaucuguaucgu

SEQ ID NO: 608783 - RNA, 19 nt, Artificial Sequence
  Description of Artificial Sequence: Synthetic oligonucleotide
  Antisense strand to SEQ ID NO: 608782
acgauacagauauaaguuc

SEQ ID NO: 608784 - RNA, 19 nt, Artificial Sequence
  Description of Artificial Sequence: Synthetic oligonucleotide
  Sense strand starting at position 270 of SEQ ID NO: 585044
aacuuauaucuguaucgug

SEQ ID NO: 608785 - RNA, 19 nt, Artificial Sequence
  Description of Artificial Sequence: Synthetic oligonucleotide
  Antisense strand to SEQ ID NO: 608784
cacgauacagauauaaguu

SEQ ID NO: 608786 - RNA, 19 nt, Artificial Sequence
  Description of Artificial Sequence: Synthetic oligonucleotide
  Sense strand starting at position 282 of SEQ ID NO: 585044
uaucgugaccgucaaagga

SEQ ID NO: 608787 - RNA, 19 nt, Artificial Sequence
  Description of Artificial Sequence: Synthetic oligonucleotide
  Antisense strand to SEQ ID NO: 608786
uccuuugacggucacgaua

SEQ ID NO: 608788 - RNA, 19 nt, Artificial Sequence
  Description of Artificial Sequence: Synthetic oligonucleotide
  Sense strand starting at position 398 of SEQ ID NO: 585044
cccauuuaguaauauaguu

SEQ ID NO: 608789 - RNA, 19 nt, Artificial Sequence
  Description of Artificial Sequence: Synthetic oligonucleotide
  Antisense strand to SEQ ID NO: 608788
aacuauauuacuaaauggg

SEQ ID NO: 608790 - RNA, 19 nt, Artificial Sequence
  Description of Artificial Sequence: Synthetic oligonucleotide
  Sense strand starting at position 453 of SEQ ID NO: 585044
cauagagauuaucauugag

SEQ ID NO: 608791 - RNA, 19 nt, Artificial Sequence
  Description of Artificial Sequence: Synthetic oligonucleotide
  Antisense strand to SEQ ID NO: 608790
cucaaugauaaucucuaug

SEQ ID NO: 608792 - RNA, 19 nt, Artificial Sequence
  Description of Artificial Sequence: Synthetic oligonucleotide
  Sense strand starting at position 751 of SEQ ID NO: 585044
ugcguccggccgagaaauu

SEQ ID NO: 608793 - RNA, 19 nt, Artificial Sequence
  Description of Artificial Sequence: Synthetic oligonucleotide
  Antisense strand to SEQ ID NO: 608792
aauuucucggccggacgca

SEQ ID NO: 608794 - RNA, 19 nt, Artificial Sequence
  Description of Artificial Sequence: Synthetic oligonucleotide
  Sense strand starting at position 752 of SEQ ID NO: 585044
gcguccggccgagaaauuu

SEQ ID NO: 608795 - RNA, 19 nt, Artificial Sequence
  Description of Artificial Sequence: Synthetic oligonucleotide
  Antisense strand to SEQ ID NO: 608794
aaauuucucggccggacgc

SEQ ID NO: 608796 - RNA, 19 nt, Artificial Sequence
  Description of Artificial Sequence: Synthetic oligonucleotide
  Sense strand starting at position 867 of SEQ ID NO: 585044
agugcuaaaccaugacuuu

SEQ ID NO: 608797 - RNA, 19 nt, Artificial Sequence
  Description of Artificial Sequence: Synthetic oligonucleotide
  Antisense strand to SEQ ID NO: 608796
aaagucaugguuuagcacu

SEQ ID NO: 608798 - RNA, 19 nt, Artificial Sequence
  Description of Artificial Sequence: Synthetic oligonucleotide
  Sense strand starting at position 955 of SEQ ID NO: 585044
gucauugccugaccuaaag

SEQ ID NO: 608799 - RNA, 19 nt, Artificial Sequence
  Description of Artificial Sequence: Synthetic oligonucleotide
  Antisense strand to SEQ ID NO: 608798
cuuuaggucaggcaaugac

SEQ ID NO: 608800 - RNA, 19 nt, Artificial Sequence
  Description of Artificial Sequence: Synthetic oligonucleotide
  Sense strand starting at position 1062 of SEQ ID NO: 585044
gcuuuaaaggagcgauaua

SEQ ID NO: 608801 - RNA, 19 nt, Artificial Sequence
  Description of Artificial Sequence: Synthetic oligonucleotide
  Antisense strand to SEQ ID NO: 608800
uauaucgcuccuuuaaagc

SEQ ID NO: 608802 - RNA, 19 nt, Artificial Sequence
  Description of Artificial Sequence: Synthetic oligonucleotide
  Sense strand starting at position 2387 of SEQ ID NO: 585044
aggagcugaugcuuccaua

SEQ ID NO: 608803 - RNA, 19 nt, Artificial Sequence
  Description of Artificial Sequence: Synthetic oligonucleotide
  Antisense strand to SEQ ID NO: 608802
uauggaagcaucagcuccu

SEQ ID NO: 608804 - RNA, 19 nt, Artificial Sequence
  Description of Artificial Sequence: Synthetic oligonucleotide
  Sense strand starting at position 2400 of SEQ ID NO: 585044
uccauacuacucugcgaga

SEQ ID NO: 608805 - RNA, 19 nt, Artificial Sequence
  Description of Artificial Sequence: Synthetic oligonucleotide
  Antisense strand to SEQ ID NO: 608804
ucucgcagaguaguaugga

SEQ ID NO: 608806 - RNA, 19 nt, Artificial Sequence
  Description of Artificial Sequence: Synthetic oligonucleotide
  Sense strand starting at position 2425 of SEQ ID NO: 585044
cgaggaagacguuaagacu

SEQ ID NO: 608807 - RNA, 19 nt, Artificial Sequence
  Description of Artificial Sequence: Synthetic oligonucleotide
  Antisense strand to SEQ ID NO: 608806
agucuuaacgucuuccucg

SEQ ID NO: 608808 - RNA, 19 nt, Artificial Sequence
  Description of Artificial Sequence: Synthetic oligonucleotide
  Sense strand starting at position 2474 of SEQ ID NO: 585044
cugccuccucccgaauagu

SEQ ID NO: 608809 - RNA, 19 nt, Artificial Sequence
  Description of Artificial Sequence: Synthetic oligonucleotide
  Antisense strand to SEQ ID NO: 608808
acuauucgggaggaggcag

SEQ ID NO: 608810 - RNA, 19 nt, Artificial Sequence
  Description of Artificial Sequence: Synthetic oligonucleotide
  Sense strand starting at position 2820 of SEQ ID NO: 585044
ggagaagaguccuccuguu

SEQ ID NO: 608811 - RNA, 19 nt, Artificial Sequence
  Description of Artificial Sequence: Synthetic oligonucleotide
  Antisense strand to SEQ ID NO: 608810
aacaggaggacucuucucc

SEQ ID NO: 608812 - RNA, 19 nt, Artificial Sequence
  Description of Artificial Sequence: Synthetic oligonucleotide
  Sense strand starting at position 2997 of SEQ ID NO: 585044
gugaaagauuuguaggaua

SEQ ID NO: 608813 - RNA, 19 nt, Artificial Sequence
  Description of Artificial Sequence: Synthetic oligonucleotide
  Antisense strand to SEQ ID NO: 608812
uauccuacaaaucuuucac

SEQ ID NO: 608814 - RNA, 19 nt, Artificial Sequence
  Description of Artificial Sequence: Synthetic oligonucleotide
  Sense strand starting at position 3008 of SEQ ID NO: 585044
guaggauacuuacccauuc

SEQ ID NO: 608815 - RNA, 19 nt, Artificial Sequence
  Description of Artificial Sequence: Synthetic oligonucleotide
  Antisense strand to SEQ ID NO: 608814
gaauggguaaguauccuac

SEQ ID NO: 608816 - RNA, 19 nt, Artificial Sequence
  Description of Artificial Sequence: Synthetic oligonucleotide
  Sense strand starting at position 3025 of SEQ ID NO: 585044
ucauuagaaugagagauau

SEQ ID NO: 608817 - RNA, 19 nt, Artificial Sequence
  Description of Artificial Sequence: Synthetic oligonucleotide
  Antisense strand to SEQ ID NO: 608816
auaucucucauucuaauga

SEQ ID NO: 608818 - RNA, 19 nt, Artificial Sequence
  Description of Artificial Sequence: Synthetic oligonucleotide
  Sense strand starting at position 3149 of SEQ ID NO: 585044
guggaugucucaguuuaug

SEQ ID NO: 608819 - RNA, 19 nt, Artificial Sequence
  Description of Artificial Sequence: Synthetic oligonucleotide
  Antisense strand to SEQ ID NO: 608818
cauaaacugagacauccac

SEQ ID NO: 608820 - RNA, 19 nt, Artificial Sequence
  Description of Artificial Sequence: Synthetic oligonucleotide
  Sense strand starting at position 3412 of SEQ ID NO: 585044
uuuccucaucuauagugua

SEQ ID NO: 608821 - RNA, 19 nt, Artificial Sequence
  Description of Artificial Sequence: Synthetic oligonucleotide
  Antisense strand to SEQ ID NO: 608820
uacacuauagaugaggaaa

SEQ ID NO: 608822 - RNA, 19 nt, Artificial Sequence
  Description of Artificial Sequence: Synthetic oligonucleotide
  Sense strand starting at position 3417 of SEQ ID NO: 585044
ucaucuauaguguaacaau

SEQ ID NO: 608823 - RNA, 19 nt, Artificial Sequence
  Description of Artificial Sequence: Synthetic oligonucleotide
  Antisense strand to SEQ ID NO: 608822
auuguuacacuauagauga

SEQ ID NO: 608824 - RNA, 19 nt, Artificial Sequence
  Description of Artificial Sequence: Synthetic oligonucleotide
  Sense strand starting at position 3516 of SEQ ID NO: 585044
gacggucacugugcuaaga

SEQ ID NO: 608825 - RNA, 19 nt, Artificial Sequence
  Description of Artificial Sequence: Synthetic oligonucleotide
  Antisense strand to SEQ ID NO: 608824
ucuuagcacagugaccguc

SEQ ID NO: 608826 - RNA, 19 nt, Artificial Sequence
  Description of Artificial Sequence: Synthetic oligonucleotide
  Sense strand starting at position 3570 of SEQ ID NO: 585044
ugugaaagugucuagcugu

SEQ ID NO: 608827 - RNA, 19 nt, Artificial Sequence
  Description of Artificial Sequence: Synthetic oligonucleotide
  Antisense strand to SEQ ID NO: 608826
acagcuagacacuuucaca

SEQ ID NO: 608828 - RNA, 19 nt, Artificial Sequence
  Description of Artificial Sequence: Synthetic oligonucleotide
  Sense strand starting at position 3573 of SEQ ID NO: 585044
gaaagugucuagcuguauu

SEQ ID NO: 608829 - RNA, 19 nt, Artificial Sequence
  Description of Artificial Sequence: Synthetic oligonucleotide
  Antisense strand to SEQ ID NO: 608828
aauacagcuagacacuuuc

SEQ ID NO: 608830 - RNA, 19 nt, Artificial Sequence
  Description of Artificial Sequence: Synthetic oligonucleotide
  Sense strand starting at position 3586 of SEQ ID NO: 585044
uguauuauguaauccguaa

SEQ ID NO: 608831 - RNA, 19 nt, Artificial Sequence
  Description of Artificial Sequence: Synthetic oligonucleotide
  Antisense strand to SEQ ID NO: 608830
uuacggauuacauaauaca

SEQ ID NO: 608832 - RNA, 19 nt, Artificial Sequence
  Description of Artificial Sequence: Synthetic oligonucleotide
  Sense strand starting at position 3590 of SEQ ID NO: 585044
uuauguaauccguaagugu

SEQ ID NO: 608833 - RNA, 19 nt, Artificial Sequence
  Description of Artificial Sequence: Synthetic oligonucleotide
  Antisense strand to SEQ ID NO: 608832
acacuuacggauuacauaa

SEQ ID NO: 608834 - RNA, 19 nt, Artificial Sequence
  Description of Artificial Sequence: Synthetic oligonucleotide
  Sense strand starting at position 3660 of SEQ ID NO: 585044
gguuuaauuuacguaaccu

SEQ ID NO: 608835 - RNA, 19 nt, Artificial Sequence
  Description of Artificial Sequence: Synthetic oligonucleotide
  Antisense strand to SEQ ID NO: 608834
agguuacguaaauuaaacc

SEQ ID NO: 608836 - RNA, 19 nt, Artificial Sequence
  Description of Artificial Sequence: Synthetic oligonucleotide
  Sense strand starting at position 3689 of SEQ ID NO: 585044
aguagucuaguucagugau

SEQ ID NO: 608837 - RNA, 19 nt, Artificial Sequence
  Description of Artificial Sequence: Synthetic oligonucleotide
  Antisense strand to SEQ ID NO: 608836
aucacugaacuagacuacu

SEQ ID NO: 608838 - RNA, 19 nt, Artificial Sequence
  Description of Artificial Sequence: Synthetic oligonucleotide
  Sense strand starting at position 3800 of SEQ ID NO: 585044
gagguuagggucuaagcau

SEQ ID NO: 608839 - RNA, 19 nt, Artificial Sequence
  Description of Artificial Sequence: Synthetic oligonucleotide
  Antisense strand to SEQ ID NO: 608838
augcuuagacccuaaccuc

SEQ ID NO: 608840 - RNA, 19 nt, Artificial Sequence
  Description of Artificial Sequence: Synthetic oligonucleotide
  Sense strand starting at position 3891 of SEQ ID NO: 585044
gguaguacugacugucauu

SEQ ID NO: 608841 - RNA, 19 nt, Artificial Sequence
  Description of Artificial Sequence: Synthetic oligonucleotide
  Antisense strand to SEQ ID NO: 608840
aaugacagucaguacuacc

SEQ ID NO: 608842 - RNA, 19 nt, Artificial Sequence
  Description of Artificial Sequence: Synthetic oligonucleotide
  Sense strand starting at position 3948 of SEQ ID NO: 585044
uugagugaccugcgaauug

SEQ ID NO: 608843 - RNA, 19 nt, Artificial Sequence
  Description of Artificial Sequence: Synthetic oligonucleotide
  Antisense strand to SEQ ID NO: 608842
caauucgcaggucacucaa

SEQ ID NO: 608844 - RNA, 19 nt, Artificial Sequence
  Description of Artificial Sequence: Synthetic oligonucleotide
  Sense strand starting at position 3960 of SEQ ID NO: 585044
cgaauuggccucuggauga

SEQ ID NO: 608845 - RNA, 19 nt, Artificial Sequence
  Description of Artificial Sequence: Synthetic oligonucleotide
  Antisense strand to SEQ ID NO: 608844
ucauccagaggccaauucg

SEQ ID NO: 608846 - RNA, 19 nt, Artificial Sequence
  Description of Artificial Sequence: Synthetic oligonucleotide
  Sense strand starting at position 3964 of SEQ ID NO: 585044
uuggccucuggaugacauu

SEQ ID NO: 608847 - RNA, 19 nt, Artificial Sequence
  Description of Artificial Sequence: Synthetic oligonucleotide
  Antisense strand to SEQ ID NO: 608846
aaugucauccagaggccaa

SEQ ID NO: 608848 - RNA, 19 nt, Artificial Sequence
  Description of Artificial Sequence: Synthetic oligonucleotide
  Sense strand starting at position 127 of SEQ ID NO: 585045
ccuucuauugcuuggcaca

SEQ ID NO: 608849 - RNA, 19 nt, Artificial Sequence
  Description of Artificial Sequence: Synthetic oligonucleotide
  Antisense strand to SEQ ID NO: 608848
ugugccaagcaauagaagg

SEQ ID NO: 608850 - RNA, 19 nt, Artificial Sequence
  Description of Artificial Sequence: Synthetic oligonucleotide
  Sense strand starting at position 128 of SEQ ID NO: 585045
cuucuauugcuuggcacau

SEQ ID NO: 608851 - RNA, 19 nt, Artificial Sequence
  Description of Artificial Sequence: Synthetic oligonucleotide
  Antisense strand to SEQ ID NO: 608850
augugccaagcaauagaag

SEQ ID NO: 608852 - RNA, 19 nt, Artificial Sequence
  Description of Artificial Sequence: Synthetic oligonucleotide
  Sense strand starting at position 129 of SEQ ID NO: 585045
uucuauugcuuggcacauu

SEQ ID NO: 608853 - RNA, 19 nt, Artificial Sequence
  Description of Artificial Sequence: Synthetic oligonucleotide
  Antisense strand to SEQ ID NO: 608852
aaugugccaagcaauagaa

SEQ ID NO: 608854 - RNA, 19 nt, Artificial Sequence
  Description of Artificial Sequence: Synthetic oligonucleotide
  Sense strand starting at position 200 of SEQ ID NO: 585045
uugagacaauucuuugcua

SEQ ID NO: 608855 - RNA, 19 nt, Artificial Sequence
  Description of Artificial Sequence: Synthetic oligonucleotide
  Antisense strand to SEQ ID NO: 608854
uagcaaagaauugucucaa

SEQ ID NO: 608856 - RNA, 19 nt, Artificial Sequence
  Description of Artificial Sequence: Synthetic oligonucleotide
  Sense strand starting at position 201 of SEQ ID NO: 585045
ugagacaauucuuugcuaa

SEQ ID NO: 608857 - RNA, 19 nt, Artificial Sequence
  Description of Artificial Sequence: Synthetic oligonucleotide
  Antisense strand to SEQ ID NO: 608856
uuagcaaagaauugucuca

SEQ ID NO: 608858 - RNA, 19 nt, Artificial Sequence
  Description of Artificial Sequence: Synthetic oligonucleotide
  Sense strand starting at position 392 of SEQ ID NO: 585045
gccacaacgccugguaaau

SEQ ID NO: 608859 - RNA, 19 nt, Artificial Sequence
  Description of Artificial Sequence: Synthetic oligonucleotide
  Antisense strand to SEQ ID NO: 608858
auuuaccaggcguuguggc

SEQ ID NO: 608860 - RNA, 19 nt, Artificial Sequence
  Description of Artificial Sequence: Synthetic oligonucleotide
  Sense strand starting at position 591 of SEQ ID NO: 585045
cggucuguuuccgcuggga

SEQ ID NO: 608861 - RNA, 19 nt, Artificial Sequence
  Description of Artificial Sequence: Synthetic oligonucleotide
  Antisense strand to SEQ ID NO: 608860
ucccagcggaaacagaccg

SEQ ID NO: 608862 - RNA, 19 nt, Artificial Sequence
  Description of Artificial Sequence: Synthetic oligonucleotide
  Sense strand starting at position 593 of SEQ ID NO: 585045
gucuguuuccgcugggauc

SEQ ID NO: 608863 - RNA, 19 nt, Artificial Sequence
  Description of Artificial Sequence: Synthetic oligonucleotide
  Antisense strand to SEQ ID NO: 608862
gaucccagcggaaacagac

SEQ ID NO: 608864 - RNA, 19 nt, Artificial Sequence
  Description of Artificial Sequence: Synthetic oligonucleotide
  Sense strand starting at position 992 of SEQ ID NO: 585045
acgcgcagccuugauacaa

SEQ ID NO: 608865 - RNA, 19 nt, Artificial Sequence
  Description of Artificial Sequence: Synthetic oligonucleotide
  Antisense strand to SEQ ID NO: 608864
uuguaucaaggcugcgcgu

SEQ ID NO: 608866 - RNA, 19 nt, Artificial Sequence
  Description of Artificial Sequence: Synthetic oligonucleotide
  Sense strand starting at position 1417 of SEQ ID NO: 585045
ccgggaaguucuuucggga

SEQ ID NO: 608867 - RNA, 19 nt, Artificial Sequence
  Description of Artificial Sequence: Synthetic oligonucleotide
  Antisense strand to SEQ ID NO: 608866
ucccgaaagaacuucccgg

SEQ ID NO: 608868 - RNA, 19 nt, Artificial Sequence
  Description of Artificial Sequence: Synthetic oligonucleotide
  Sense strand starting at position 2383 of SEQ ID NO: 585045
uggagacuuacuggucaaa

SEQ ID NO: 608869 - RNA, 19 nt, Artificial Sequence
  Description of Artificial Sequence: Synthetic oligonucleotide
  Antisense strand to SEQ ID NO: 608868
uuugaccaguaagucucca

SEQ ID NO: 608870 - RNA, 19 nt, Artificial Sequence
  Description of Artificial Sequence: Synthetic oligonucleotide
  Sense strand starting at position 2385 of SEQ ID NO: 585045
gagacuuacuggucaaaua

SEQ ID NO: 608871 - RNA, 19 nt, Artificial Sequence
  Description of Artificial Sequence: Synthetic oligonucleotide
  Antisense strand to SEQ ID NO: 608870
uauuugaccaguaagucuc

SEQ ID NO: 608872 - RNA, 19 nt, Artificial Sequence
  Description of Artificial Sequence: Synthetic oligonucleotide
  Sense strand starting at position 2410 of SEQ ID NO: 585045
uuuguugaucacuggaaac

SEQ ID NO: 608873 - RNA, 19 nt, Artificial Sequence
  Description of Artificial Sequence: Synthetic oligonucleotide
  Antisense strand to SEQ ID NO: 608872
guuuccagugaucaacaaa

SEQ ID NO: 608874 - RNA, 19 nt, Artificial Sequence
  Description of Artificial Sequence: Synthetic oligonucleotide
  Sense strand starting at position 2466 of SEQ ID NO: 585045
gggaacgcuuuagaugaua

SEQ ID NO: 608875 - RNA, 19 nt, Artificial Sequence
  Description of Artificial Sequence: Synthetic oligonucleotide
  Antisense strand to SEQ ID NO: 608874
uaucaucuaaagcguuccc

SEQ ID NO: 608876 - RNA, 19 nt, Artificial Sequence
  Description of Artificial Sequence: Synthetic oligonucleotide
  Sense strand starting at position 2471 of SEQ ID NO: 585045
cgcuuuagaugauagaguu

SEQ ID NO: 608877 - RNA, 19 nt, Artificial Sequence
  Description of Artificial Sequence: Synthetic oligonucleotide
  Antisense strand to SEQ ID NO: 608876
aacucuaucaucuaaagcg

SEQ ID NO: 608878 - RNA, 19 nt, Artificial Sequence
  Description of Artificial Sequence: Synthetic oligonucleotide
  Sense strand starting at position 2551 of SEQ ID NO: 585045
uccgauuucugauguguaa

SEQ ID NO: 608879 - RNA, 19 nt, Artificial Sequence
  Description of Artificial Sequence: Synthetic oligonucleotide
  Antisense strand to SEQ ID NO: 608878
uuacacaucagaaaucgga

SEQ ID NO: 608880 - RNA, 19 nt, Artificial Sequence
  Description of Artificial Sequence: Synthetic oligonucleotide
  Sense strand starting at position 2622 of SEQ ID NO: 585045
auuaaucucuuuggcauga

SEQ ID NO: 608881 - RNA, 19 nt, Artificial Sequence
  Description of Artificial Sequence: Synthetic oligonucleotide
  Antisense strand to SEQ ID NO: 608880
ucaugccaaagagauuaau

SEQ ID NO: 608882 - RNA, 19 nt, Artificial Sequence
  Description of Artificial Sequence: Synthetic oligonucleotide
  Sense strand starting at position 2623 of SEQ ID NO: 585045
uuaaucucuuuggcaugaa

SEQ ID NO: 608883 - RNA, 19 nt, Artificial Sequence
  Description of Artificial Sequence: Synthetic oligonucleotide
  Antisense strand to SEQ ID NO: 608882
uucaugccaaagagauuaa

SEQ ID NO: 608884 - RNA, 19 nt, Artificial Sequence
  Description of Artificial Sequence: Synthetic oligonucleotide
  Sense strand starting at position 2626 of SEQ ID NO: 585045
aucucuuuggcaugaagag

SEQ ID NO: 608885 - RNA, 19 nt, Artificial Sequence
  Description of Artificial Sequence: Synthetic oligonucleotide
  Antisense strand to SEQ ID NO: 608884
cucuucaugccaaagagau

SEQ ID NO: 608886 - RNA, 19 nt, Artificial Sequence
  Description of Artificial Sequence: Synthetic oligonucleotide
  Sense strand starting at position 2775 of SEQ ID NO: 585045
guaccagaaccuugaggau

SEQ ID NO: 608887 - RNA, 19 nt, Artificial Sequence
  Description of Artificial Sequence: Synthetic oligonucleotide
  Antisense strand to SEQ ID NO: 608886
auccucaagguucugguac

SEQ ID NO: 608888 - RNA, 19 nt, Artificial Sequence
  Description of Artificial Sequence: Synthetic oligonucleotide
  Sense strand starting at position 2923 of SEQ ID NO: 585045
caacuugguaccgaugagu

SEQ ID NO: 608889 - RNA, 19 nt, Artificial Sequence
  Description of Artificial Sequence: Synthetic oligonucleotide
  Antisense strand to SEQ ID NO: 608888
acucaucgguaccaaguug

SEQ ID NO: 608890 - RNA, 19 nt, Artificial Sequence
  Description of Artificial Sequence: Synthetic oligonucleotide
  Sense strand starting at position 2953 of SEQ ID NO: 585045
ugaacauuccagcgacuug

SEQ ID NO: 608891 - RNA, 19 nt, Artificial Sequence
  Description of Artificial Sequence: Synthetic oligonucleotide
  Antisense strand to SEQ ID NO: 608890
caagucgcuggaauguuca

SEQ ID NO: 608892 - RNA, 19 nt, Artificial Sequence
  Description of Artificial Sequence: Synthetic oligonucleotide
  Sense strand starting at position 2988 of SEQ ID NO: 585045
aguuaagaggcugaguguu

SEQ ID NO: 608893 - RNA, 19 nt, Artificial Sequence
  Description of Artificial Sequence: Synthetic oligonucleotide
  Antisense strand to SEQ ID NO: 608892
aacacucagccucuuaacu

SEQ ID NO: 608894 - RNA, 19 nt, Artificial Sequence
  Description of Artificial Sequence: Synthetic oligonucleotide
  Sense strand starting at position 2990 of SEQ ID NO: 585045
uuaagaggcugaguguuaa

SEQ ID NO: 608895 - RNA, 19 nt, Artificial Sequence
  Description of Artificial Sequence: Synthetic oligonucleotide
  Antisense strand to SEQ ID NO: 608894
uuaacacucagccucuuaa

SEQ ID NO: 608896 - RNA, 19 nt, Artificial Sequence
  Description of Artificial Sequence: Synthetic oligonucleotide
  Sense strand starting at position 2998 of SEQ ID NO: 585045
cugaguguuaacugcaaga

SEQ ID NO: 608897 - RNA, 19 nt, Artificial Sequence
  Description of Artificial Sequence: Synthetic oligonucleotide
  Antisense strand to SEQ ID NO: 608896
ucuugcaguuaacacucag

SEQ ID NO: 608898 - RNA, 19 nt, Artificial Sequence
  Description of Artificial Sequence: Synthetic oligonucleotide
  Sense strand starting at position 3021 of SEQ ID NO: 585045
gaguguuaacuacgccguu

SEQ ID NO: 608899 - RNA, 19 nt, Artificial Sequence
  Description of Artificial Sequence: Synthetic oligonucleotide
  Antisense strand to SEQ ID NO: 608898
aacggcguaguuaacacuc

SEQ ID NO: 608900 - RNA, 19 nt, Artificial Sequence
  Description of Artificial Sequence: Synthetic oligonucleotide
  Sense strand starting at position 3451 of SEQ ID NO: 585045
accaauaauuugcaucgua

SEQ ID NO: 608901 - RNA, 19 nt, Artificial Sequence
  Description of Artificial Sequence: Synthetic oligonucleotide
  Antisense strand to SEQ ID NO: 608900
uacgaugcaaauuauuggu

SEQ ID NO: 608902 - RNA, 19 nt, Artificial Sequence
  Description of Artificial Sequence: Synthetic oligonucleotide
  Sense strand starting at position 3459 of SEQ ID NO: 585045
uuugcaucguagucucaau

SEQ ID NO: 608903 - RNA, 19 nt, Artificial Sequence
  Description of Artificial Sequence: Synthetic oligonucleotide
  Antisense strand to SEQ ID NO: 608902
auugagacuacgaugcaaa

SEQ ID NO: 608904 - RNA, 19 nt, Artificial Sequence
  Description of Artificial Sequence: Synthetic oligonucleotide
  Sense strand starting at position 3505 of SEQ ID NO: 585045
uggucaaguguuuaaauga

SEQ ID NO: 608905 - RNA, 19 nt, Artificial Sequence
  Description of Artificial Sequence: Synthetic oligonucleotide
  Antisense strand to SEQ ID NO: 608904
ucauuuaaacacuugacca

SEQ ID NO: 608906 - RNA, 19 nt, Artificial Sequence
  Description of Artificial Sequence: Synthetic oligonucleotide
  Sense strand starting at position 3522 of SEQ ID NO: 585045
gauuauacagauugaguac

SEQ ID NO: 608907 - RNA, 19 nt, Artificial Sequence
  Description of Artificial Sequence: Synthetic oligonucleotide
  Antisense strand to SEQ ID NO: 608906
guacucaaucuguauaauc

SEQ ID NO: 608908 - RNA, 19 nt, Artificial Sequence
  Description of Artificial Sequence: Synthetic oligonucleotide
  Sense strand starting at position 3600 of SEQ ID NO: 585045
gcaauaguugcauagacgu

SEQ ID NO: 608909 - RNA, 19 nt, Artificial Sequence
  Description of Artificial Sequence: Synthetic oligonucleotide
  Antisense strand to SEQ ID NO: 608908
acgucuaugcaacuauugc

SEQ ID NO: 608910 - RNA, 19 nt, Artificial Sequence
  Description of Artificial Sequence: Synthetic oligonucleotide
  Sense strand starting at position 3614 of SEQ ID NO: 585045
gacguaacgagagaucuuu

SEQ ID NO: 608911 - RNA, 19 nt, Artificial Sequence
  Description of Artificial Sequence: Synthetic oligonucleotide
  Antisense strand to SEQ ID NO: 608910
aaagaucucucguuacguc

SEQ ID NO: 608912 - RNA, 19 nt, Artificial Sequence
  Description of Artificial Sequence: Synthetic oligonucleotide
  Sense strand starting at position 3757 of SEQ ID NO: 585045
gcacuuugacugcaaguca

SEQ ID NO: 608913 - RNA, 19 nt, Artificial Sequence
  Description of Artificial Sequence: Synthetic oligonucleotide
  Antisense strand to SEQ ID NO: 608912
ugacuugcagucaaagugc

SEQ ID NO: 608914 - RNA, 19 nt, Artificial Sequence
  Description of Artificial Sequence: Synthetic oligonucleotide
  Sense strand starting at position 3765 of SEQ ID NO: 585045
acugcaagucaucacauga

SEQ ID NO: 608915 - RNA, 19 nt, Artificial Sequence
  Description of Artificial Sequence: Synthetic oligonucleotide
  Antisense strand to SEQ ID NO: 608914
ucaugugaugacuugcagu

SEQ ID NO: 608916 - RNA, 19 nt, Artificial Sequence
  Description of Artificial Sequence: Synthetic oligonucleotide
  Sense strand starting at position 3791 of SEQ ID NO: 585045
uguggaauucgccacuugu

SEQ ID NO: 608917 - RNA, 19 nt, Artificial Sequence
  Description of Artificial Sequence: Synthetic oligonucleotide
  Antisense strand to SEQ ID NO: 608916
acaaguggcgaauuccaca

SEQ ID NO: 608918 - RNA, 19 nt, Artificial Sequence
  Description of Artificial Sequence: Synthetic oligonucleotide
  Sense strand starting at position 3800 of SEQ ID NO: 585045
cgccacuuguggucaucau

SEQ ID NO: 608919 - RNA, 19 nt, Artificial Sequence
  Description of Artificial Sequence: Synthetic oligonucleotide
  Antisense strand to SEQ ID NO: 608918
augaugaccacaaguggcg

SEQ ID NO: 608920 - RNA, 19 nt, Artificial Sequence
  Description of Artificial Sequence: Synthetic oligonucleotide
  Sense strand starting at position 3804 of SEQ ID NO: 585045
acuuguggucaucauguca

SEQ ID NO: 608921 - RNA, 19 nt, Artificial Sequence
  Description of Artificial Sequence: Synthetic oligonucleotide
  Antisense strand to SEQ ID NO: 608920
ugacaugaugaccacaagu

SEQ ID NO: 608922 - RNA, 19 nt, Artificial Sequence
  Description of Artificial Sequence: Synthetic oligonucleotide
  Sense strand starting at position 3811 of SEQ ID NO: 585045
gucaucaugucagugcuca

SEQ ID NO: 608923 - RNA, 19 nt, Artificial Sequence
  Description of Artificial Sequence: Synthetic oligonucleotide
  Antisense strand to SEQ ID NO: 608922
ugagcacugacaugaugac

SEQ ID NO: 608924 - RNA, 19 nt, Artificial Sequence
  Description of Artificial Sequence: Synthetic oligonucleotide
  Sense strand starting at position 3948 of SEQ ID NO: 585045
gaagucagccucugcacaa

SEQ ID NO: 608925 - RNA, 19 nt, Artificial Sequence
  Description of Artificial Sequence: Synthetic oligonucleotide
  Antisense strand to SEQ ID NO: 608924
uugugcagaggcugacuuc

SEQ ID NO: 608926 - RNA, 19 nt, Artificial Sequence
  Description of Artificial Sequence: Synthetic oligonucleotide
  Sense strand starting at position 3973 of SEQ ID NO: 585045
cauaauauccauuggugga

SEQ ID NO: 608927 - RNA, 19 nt, Artificial Sequence
  Description of Artificial Sequence: Synthetic oligonucleotide
  Antisense strand to SEQ ID NO: 608926
uccaccaauggauauuaug

SEQ ID NO: 608928 - RNA, 19 nt, Artificial Sequence
  Description of Artificial Sequence: Synthetic oligonucleotide
  Sense strand starting at position 8 of SEQ ID NO: 585046
uuaugaacuaagugggauu

SEQ ID NO: 608929 - RNA, 19 nt, Artificial Sequence
  Description of Artificial Sequence: Synthetic oligonucleotide
  Antisense strand to SEQ ID NO: 608928
aaucccacuuaguucauaa

SEQ ID NO: 608930 - RNA, 19 nt, Artificial Sequence
  Description of Artificial Sequence: Synthetic oligonucleotide
  Sense strand starting at position 63 of SEQ ID NO: 585046
cccauaacccugcaaggua

SEQ ID NO: 608931 - RNA, 19 nt, Artificial Sequence
  Description of Artificial Sequence: Synthetic oligonucleotide
  Antisense strand to SEQ ID NO: 608930
uaccuugcaggguuauggg

SEQ ID NO: 608932 - RNA, 19 nt, Artificial Sequence
  Description of Artificial Sequence: Synthetic oligonucleotide
  Sense strand starting at position 92 of SEQ ID NO: 585046
uaucuuacagauggguaaa

SEQ ID NO: 608933 - RNA, 19 nt, Artificial Sequence
  Description of Artificial Sequence: Synthetic oligonucleotide
  Antisense strand to SEQ ID NO: 608932
uuuacccaucuguaagaua

SEQ ID NO: 608934 - RNA, 19 nt, Artificial Sequence
  Description of Artificial Sequence: Synthetic oligonucleotide
  Sense strand starting at position 115 of SEQ ID NO: 585046
ggcaccgagauguaucaca

SEQ ID NO: 608935 - RNA, 19 nt, Artificial Sequence
  Description of Artificial Sequence: Synthetic oligonucleotide
  Antisense strand to SEQ ID NO: 608934
ugugauacaucucggugcc

SEQ ID NO: 608936 - RNA, 19 nt, Artificial Sequence
  Description of Artificial Sequence: Synthetic oligonucleotide
  Sense strand starting at position 203 of SEQ ID NO: 585046
ugaauagaguucucaccuu

SEQ ID NO: 608937 - RNA, 19 nt, Artificial Sequence
  Description of Artificial Sequence: Synthetic oligonucleotide
  Antisense strand to SEQ ID NO: 608936
aaggugagaacucuauuca

SEQ ID NO: 608938 - RNA, 19 nt, Artificial Sequence
  Description of Artificial Sequence: Synthetic oligonucleotide
  Sense strand starting at position 226 of SEQ ID NO: 585046
ggcuauauacaguagaauu

SEQ ID NO: 608939 - RNA, 19 nt, Artificial Sequence
  Description of Artificial Sequence: Synthetic oligonucleotide
  Antisense strand to SEQ ID NO: 608938
aauucuacuguauauagcc

SEQ ID NO: 608940 - RNA, 19 nt, Artificial Sequence
  Description of Artificial Sequence: Synthetic oligonucleotide
  Sense strand starting at position 239 of SEQ ID NO: 585046
agaauuacucuuugugcaa

SEQ ID NO: 608941 - RNA, 19 nt, Artificial Sequence
  Description of Artificial Sequence: Synthetic oligonucleotide
  Antisense strand to SEQ ID NO: 608940
uugcacaaagaguaauucu

SEQ ID NO: 608942 - RNA, 19 nt, Artificial Sequence
  Description of Artificial Sequence: Synthetic oligonucleotide
  Sense strand starting at position 385 of SEQ ID NO: 585046
gagggcguuuaacuaugaa

SEQ ID NO: 608943 - RNA, 19 nt, Artificial Sequence
  Description of Artificial Sequence: Synthetic oligonucleotide
  Antisense strand to SEQ ID NO: 608942
uucauaguuaaacgcccuc

SEQ ID NO: 608944 - RNA, 19 nt, Artificial Sequence
  Description of Artificial Sequence: Synthetic oligonucleotide
  Sense strand starting at position 403 of SEQ ID NO: 585046
agucuuugccaacaugagu

SEQ ID NO: 608945 - RNA, 19 nt, Artificial Sequence
  Description of Artificial Sequence: Synthetic oligonucleotide
  Antisense strand to SEQ ID NO: 608944
acucauguuggcaaagacu

SEQ ID NO: 608946 - RNA, 19 nt, Artificial Sequence
  Description of Artificial Sequence: Synthetic oligonucleotide
  Sense strand starting at position 454 of SEQ ID NO: 585046
cggcgugcaacuuuccuaa

SEQ ID NO: 608947 - RNA, 19 nt, Artificial Sequence
  Description of Artificial Sequence: Synthetic oligonucleotide
  Antisense strand to SEQ ID NO: 608946
uuaggaaaguugcacgccg

SEQ ID NO: 608948 - RNA, 19 nt, Artificial Sequence
  Description of Artificial Sequence: Synthetic oligonucleotide
  Sense strand starting at position 498 of SEQ ID NO: 585046
aguggagguuggccugaaa

SEQ ID NO: 608949 - RNA, 19 nt, Artificial Sequence
  Description of Artificial Sequence: Synthetic oligonucleotide
  Antisense strand to SEQ ID NO: 608948
uuucaggccaaccuccacu

SEQ ID NO: 608950 - RNA, 19 nt, Artificial Sequence
  Description of Artificial Sequence: Synthetic oligonucleotide
  Sense strand starting at position 576 of SEQ ID NO: 585046
gggugcagugauuaggagu

SEQ ID NO: 608951 - RNA, 19 nt, Artificial Sequence
  Description of Artificial Sequence: Synthetic oligonucleotide
  Antisense strand to SEQ ID NO: 608950
acuccuaaucacugcaccc

SEQ ID NO: 608952 - RNA, 19 nt, Artificial Sequence
  Description of Artificial Sequence: Synthetic oligonucleotide
  Sense strand starting at position 589 of SEQ ID NO: 585046
aggaguuacuugcccuaga

SEQ ID NO: 608953 - RNA, 19 nt, Artificial Sequence
  Description of Artificial Sequence: Synthetic oligonucleotide
  Antisense strand to SEQ ID NO: 608952
ucuagggcaaguaacuccu

SEQ ID NO: 608954 - RNA, 19 nt, Artificial Sequence
  Description of Artificial Sequence: Synthetic oligonucleotide
  Sense strand starting at position 590 of SEQ ID NO: 585046
ggaguuacuugcccuagag

SEQ ID NO: 608955 - RNA, 19 nt, Artificial Sequence
  Description of Artificial Sequence: Synthetic oligonucleotide
  Antisense strand to SEQ ID NO: 608954
cucuagggcaaguaacucc

SEQ ID NO: 608956 - RNA, 19 nt, Artificial Sequence
  Description of Artificial Sequence: Synthetic oligonucleotide
  Sense strand starting at position 594 of SEQ ID NO: 585046
uuacuugcccuagagggau

SEQ ID NO: 608957 - RNA, 19 nt, Artificial Sequence
  Description of Artificial Sequence: Synthetic oligonucleotide
  Antisense strand to SEQ ID NO: 608956
aucccucuagggcaaguaa

SEQ ID NO: 608958 - RNA, 19 nt, Artificial Sequence
  Description of Artificial Sequence: Synthetic oligonucleotide
  Sense strand starting at position 1094 of SEQ ID NO: 585046
uaauauugguacucaggaa

SEQ ID NO: 608959 - RNA, 19 nt, Artificial Sequence
  Description of Artificial Sequence: Synthetic oligonucleotide
  Antisense strand to SEQ ID NO: 608958
uuccugaguaccaauauua

SEQ ID NO: 608960 - RNA, 19 nt, Artificial Sequence
  Description of Artificial Sequence: Synthetic oligonucleotide
  Sense strand starting at position 1301 of SEQ ID NO: 585046
ccuggaauucggugggaca

SEQ ID NO: 608961 - RNA, 19 nt, Artificial Sequence
  Description of Artificial Sequence: Synthetic oligonucleotide
  Antisense strand to SEQ ID NO: 608960
ugucccaccgaauuccagg

SEQ ID NO: 608962 - RNA, 19 nt, Artificial Sequence
  Description of Artificial Sequence: Synthetic oligonucleotide
  Sense strand starting at position 1302 of SEQ ID NO: 585046
cuggaauucggugggacau

SEQ ID NO: 608963 - RNA, 19 nt, Artificial Sequence
  Description of Artificial Sequence: Synthetic oligonucleotide
  Antisense strand to SEQ ID NO: 608962
augucccaccgaauuccag

SEQ ID NO: 608964 - RNA, 19 nt, Artificial Sequence
  Description of Artificial Sequence: Synthetic oligonucleotide
  Sense strand starting at position 1351 of SEQ ID NO: 585046
aucggucucuacgugauuu

SEQ ID NO: 608965 - RNA, 19 nt, Artificial Sequence
  Description of Artificial Sequence: Synthetic oligonucleotide
  Antisense strand to SEQ ID NO: 608964
aaaucacguagagaccgau

SEQ ID NO: 608966 - RNA, 19 nt, Artificial Sequence
  Description of Artificial Sequence: Synthetic oligonucleotide
  Sense strand starting at position 1361 of SEQ ID NO: 585046
acgugauuucuccgcgaga

SEQ ID NO: 608967 - RNA, 19 nt, Artificial Sequence
  Description of Artificial Sequence: Synthetic oligonucleotide
  Antisense strand to SEQ ID NO: 608966
ucucgcggagaaaucacgu

SEQ ID NO: 608968 - RNA, 19 nt, Artificial Sequence
  Description of Artificial Sequence: Synthetic oligonucleotide
  Sense strand starting at position 1362 of SEQ ID NO: 585046
cgugauuucuccgcgagaa

SEQ ID NO: 608969 - RNA, 19 nt, Artificial Sequence
  Description of Artificial Sequence: Synthetic oligonucleotide
  Antisense strand to SEQ ID NO: 608968
uucucgcggagaaaucacg

SEQ ID NO: 608970 - RNA, 19 nt, Artificial Sequence
  Description of Artificial Sequence: Synthetic oligonucleotide
  Sense strand starting at position 1363 of SEQ ID NO: 585046
gugauuucuccgcgagaag

SEQ ID NO: 608971 - RNA, 19 nt, Artificial Sequence
  Description of Artificial Sequence: Synthetic oligonucleotide
  Antisense strand to SEQ ID NO: 608970
cuucucgcggagaaaucac

SEQ ID NO: 608972 - RNA, 19 nt, Artificial Sequence
  Description of Artificial Sequence: Synthetic oligonucleotide
  Sense strand starting at position 1364 of SEQ ID NO: 585046
ugauuucuccgcgagaagu

SEQ ID NO: 608973 - RNA, 19 nt, Artificial Sequence
  Description of Artificial Sequence: Synthetic oligonucleotide
  Antisense strand to SEQ ID NO: 608972
acuucucgcggagaaauca

SEQ ID NO: 608974 - RNA, 19 nt, Artificial Sequence
  Description of Artificial Sequence: Synthetic oligonucleotide
  Sense strand starting at position 1366 of SEQ ID NO: 585046
auuucuccgcgagaaguuu

SEQ ID NO: 608975 - RNA, 19 nt, Artificial Sequence
  Description of Artificial Sequence: Synthetic oligonucleotide
  Antisense strand to SEQ ID NO: 608974
aaacuucucgcggagaaau

SEQ ID NO: 608976 - RNA, 19 nt, Artificial Sequence
  Description of Artificial Sequence: Synthetic oligonucleotide
  Sense strand starting at position 1377 of SEQ ID NO: 585046
agaaguuugcaugaaaguu

SEQ ID NO: 608977 - RNA, 19 nt, Artificial Sequence
  Description of Artificial Sequence: Synthetic oligonucleotide
  Antisense strand to SEQ ID NO: 608976
aacuuucaugcaaacuucu

SEQ ID NO: 608978 - RNA, 19 nt, Artificial Sequence
  Description of Artificial Sequence: Synthetic oligonucleotide
  Sense strand starting at position 1489 of SEQ ID NO: 585046
ccggacuacgcucaaauua

SEQ ID NO: 608979 - RNA, 19 nt, Artificial Sequence
  Description of Artificial Sequence: Synthetic oligonucleotide
  Antisense strand to SEQ ID NO: 608978
uaauuugagcguaguccgg

SEQ ID NO: 608980 - RNA, 19 nt, Artificial Sequence
  Description of Artificial Sequence: Synthetic oligonucleotide
  Sense strand starting at position 1508 of SEQ ID NO: 585046
cccuuaaggcuuuagcaaa

SEQ ID NO: 608981 - RNA, 19 nt, Artificial Sequence
  Description of Artificial Sequence: Synthetic oligonucleotide
  Antisense strand to SEQ ID NO: 608980
uuugcuaaagccuuaaggg

SEQ ID NO: 608982 - RNA, 19 nt, Artificial Sequence
  Description of Artificial Sequence: Synthetic oligonucleotide
  Sense strand starting at position 2166 of SEQ ID NO: 585046
ugccaugacucagcagaca

SEQ ID NO: 608983 - RNA, 19 nt, Artificial Sequence
  Description of Artificial Sequence: Synthetic oligonucleotide
  Antisense strand to SEQ ID NO: 608982
ugucugcugagucauggca

SEQ ID NO: 608984 - RNA, 19 nt, Artificial Sequence
  Description of Artificial Sequence: Synthetic oligonucleotide
  Sense strand starting at position 2886 of SEQ ID NO: 585046
agggccuucccugggaauu

SEQ ID NO: 608985 - RNA, 19 nt, Artificial Sequence
  Description of Artificial Sequence: Synthetic oligonucleotide
  Antisense strand to SEQ ID NO: 608984
aauucccagggaaggcccu

SEQ ID NO: 608986 - RNA, 19 nt, Artificial Sequence
  Description of Artificial Sequence: Synthetic oligonucleotide
  Sense strand starting at position 3015 of SEQ ID NO: 585046
ggugcuuaucucgcagcua

SEQ ID NO: 608987 - RNA, 19 nt, Artificial Sequence
  Description of Artificial Sequence: Synthetic oligonucleotide
  Antisense strand to SEQ ID NO: 608986
uagcugcgagauaagcacc

SEQ ID NO: 608988 - RNA, 19 nt, Artificial Sequence
  Description of Artificial Sequence: Synthetic oligonucleotide
  Sense strand starting at position 3084 of SEQ ID NO: 585046
cugacucauuuagugcauu

SEQ ID NO: 608989 - RNA, 19 nt, Artificial Sequence
  Description of Artificial Sequence: Synthetic oligonucleotide
  Antisense strand to SEQ ID NO: 608988
aaugcacuaaaugagucag

SEQ ID NO: 608990 - RNA, 19 nt, Artificial Sequence
  Description of Artificial Sequence: Synthetic oligonucleotide
  Sense strand starting at position 3130 of SEQ ID NO: 585046
ggaccuggcagaugaagua

SEQ ID NO: 608991 - RNA, 19 nt, Artificial Sequence
  Description of Artificial Sequence: Synthetic oligonucleotide
  Antisense strand to SEQ ID NO: 608990
uacuucaucugccaggucc

SEQ ID NO: 608992 - RNA, 19 nt, Artificial Sequence
  Description of Artificial Sequence: Synthetic oligonucleotide
  Sense strand starting at position 3152 of SEQ ID NO: 585046
ugguacuuggcuuauaaac

SEQ ID NO: 608993 - RNA, 19 nt, Artificial Sequence
  Description of Artificial Sequence: Synthetic oligonucleotide
  Antisense strand to SEQ ID NO: 608992
guuuauaagccaaguacca

SEQ ID NO: 608994 - RNA, 19 nt, Artificial Sequence
  Description of Artificial Sequence: Synthetic oligonucleotide
  Sense strand starting at position 3192 of SEQ ID NO: 585046
gggagugugaggcaauagu

SEQ ID NO: 608995 - RNA, 19 nt, Artificial Sequence
  Description of Artificial Sequence: Synthetic oligonucleotide
  Antisense strand to SEQ ID NO: 608994
acuauugccucacacuccc

SEQ ID NO: 608996 - RNA, 19 nt, Artificial Sequence
  Description of Artificial Sequence: Synthetic oligonucleotide
  Sense strand starting at position 3201 of SEQ ID NO: 585046
aggcaauagugaucucuca

SEQ ID NO: 608997 - RNA, 19 nt, Artificial Sequence
  Description of Artificial Sequence: Synthetic oligonucleotide
  Antisense strand to SEQ ID NO: 608996
ugagagaucacuauugccu

SEQ ID NO: 608998 - RNA, 19 nt, Artificial Sequence
  Description of Artificial Sequence: Synthetic oligonucleotide
  Sense strand starting at position 3414 of SEQ ID NO: 585046
agucauucugcggcaucuu

SEQ ID NO: 608999 - RNA, 19 nt, Artificial Sequence
  Description of Artificial Sequence: Synthetic oligonucleotide
  Antisense strand to SEQ ID NO: 608998
aagaugccgcagaaugacu

SEQ ID NO: 609000 - RNA, 19 nt, Artificial Sequence
  Description of Artificial Sequence: Synthetic oligonucleotide
  Sense strand starting at position 3631 of SEQ ID NO: 585046
ugaagaaauugugucauaa

SEQ ID NO: 609001 - RNA, 19 nt, Artificial Sequence
  Description of Artificial Sequence: Synthetic oligonucleotide
  Antisense strand to SEQ ID NO: 609000
uuaugacacaauuucuuca

SEQ ID NO: 609002 - RNA, 19 nt, Artificial Sequence
  Description of Artificial Sequence: Synthetic oligonucleotide
  Sense strand starting at position 3767 of SEQ ID NO: 585046
augaaagcuuaaucauuga

SEQ ID NO: 609003 - RNA, 19 nt, Artificial Sequence
  Description of Artificial Sequence: Synthetic oligonucleotide
  Antisense strand to SEQ ID NO: 609002
ucaaugauuaagcuuucau

SEQ ID NO: 609004 - RNA, 19 nt, Artificial Sequence
  Description of Artificial Sequence: Synthetic oligonucleotide
  Sense strand starting at position 3931 of SEQ ID NO: 585046
acauucgaauuguugacau

SEQ ID NO: 609005 - RNA, 19 nt, Artificial Sequence
  Description of Artificial Sequence: Synthetic oligonucleotide
  Antisense strand to SEQ ID NO: 609004
augucaacaauucgaaugu

SEQ ID NO: 609006 - RNA, 19 nt, Artificial Sequence
  Description of Artificial Sequence: Synthetic oligonucleotide
  Sense strand starting at position 3933 of SEQ ID NO: 585046
auucgaauuguugacaugu

SEQ ID NO: 609007 - RNA, 19 nt, Artificial Sequence
  Description of Artificial Sequence: Synthetic oligonucleotide
  Antisense strand to SEQ ID NO: 609006
acaugucaacaauucgaau

SEQ ID NO: 609008 - RNA, 19 nt, Artificial Sequence
  Description of Artificial Sequence: Synthetic oligonucleotide
  Sense strand starting at position 23 of SEQ ID NO: 585047
ucccuuucugcugagucaa

SEQ ID NO: 609009 - RNA, 19 nt, Artificial Sequence
  Description of Artificial Sequence: Synthetic oligonucleotide
  Antisense strand to SEQ ID NO: 609008
uugacucagcagaaaggga

SEQ ID NO: 609010 - RNA, 19 nt, Artificial Sequence
  Description of Artificial Sequence: Synthetic oligonucleotide
  Sense strand starting at position 101 of SEQ ID NO: 585047
gcgggaaaguucucaacag

SEQ ID NO: 609011 - RNA, 19 nt, Artificial Sequence
  Description of Artificial Sequence: Synthetic oligonucleotide
  Antisense strand to SEQ ID NO: 609010
cuguugagaacuuucccgc

SEQ ID NO: 609012 - RNA, 19 nt, Artificial Sequence
  Description of Artificial Sequence: Synthetic oligonucleotide
  Sense strand starting at position 129 of SEQ ID NO: 585047
gcaggccucagugacuaaa

SEQ ID NO: 609013 - RNA, 19 nt, Artificial Sequence
  Description of Artificial Sequence: Synthetic oligonucleotide
  Antisense strand to SEQ ID NO: 609012
uuuagucacugaggccugc

SEQ ID NO: 609014 - RNA, 19 nt, Artificial Sequence
  Description of Artificial Sequence: Synthetic oligonucleotide
  Sense strand starting at position 132 of SEQ ID NO: 585047
ggccucagugacuaaacau

SEQ ID NO: 609015 - RNA, 19 nt, Artificial Sequence
  Description of Artificial Sequence: Synthetic oligonucleotide
  Antisense strand to SEQ ID NO: 609014
auguuuagucacugaggcc

SEQ ID NO: 609016 - RNA, 19 nt, Artificial Sequence
  Description of Artificial Sequence: Synthetic oligonucleotide
  Sense strand starting at position 1012 of SEQ ID NO: 585047
auccaaguugcuggaauau

SEQ ID NO: 609017 - RNA, 19 nt, Artificial Sequence
  Description of Artificial Sequence: Synthetic oligonucleotide
  Antisense strand to SEQ ID NO: 609016
auauuccagcaacuuggau

SEQ ID NO: 609018 - RNA, 19 nt, Artificial Sequence
  Description of Artificial Sequence: Synthetic oligonucleotide
  Sense strand starting at position 1034 of SEQ ID NO: 585047
uugcaauccuggguaccaa

SEQ ID NO: 609019 - RNA, 19 nt, Artificial Sequence
  Description of Artificial Sequence: Synthetic oligonucleotide
  Antisense strand to SEQ ID NO: 609018
uugguacccaggauugcaa

SEQ ID NO: 609020 - RNA, 19 nt, Artificial Sequence
  Description of Artificial Sequence: Synthetic oligonucleotide
  Sense strand starting at position 1035 of SEQ ID NO: 585047
ugcaauccuggguaccaaa

SEQ ID NO: 609021 - RNA, 19 nt, Artificial Sequence
  Description of Artificial Sequence: Synthetic oligonucleotide
  Antisense strand to SEQ ID NO: 609020
uuugguacccaggauugca

SEQ ID NO: 609022 - RNA, 19 nt, Artificial Sequence
  Description of Artificial Sequence: Synthetic oligonucleotide
  Sense strand starting at position 1198 of SEQ ID NO: 585047
uaggaaaguuuagugcaaa

SEQ ID NO: 609023 - RNA, 19 nt, Artificial Sequence
  Description of Artificial Sequence: Synthetic oligonucleotide
  Antisense strand to SEQ ID NO: 609022
uuugcacuaaacuuuccua

SEQ ID NO: 609024 - RNA, 19 nt, Artificial Sequence
  Description of Artificial Sequence: Synthetic oligonucleotide
  Sense strand starting at position 1201 of SEQ ID NO: 585047
gaaaguuuagugcaaaugu

SEQ ID NO: 609025 - RNA, 19 nt, Artificial Sequence
  Description of Artificial Sequence: Synthetic oligonucleotide
  Antisense strand to SEQ ID NO: 609024
acauuugcacuaaacuuuc

SEQ ID NO: 609026 - RNA, 19 nt, Artificial Sequence
  Description of Artificial Sequence: Synthetic oligonucleotide
  Sense strand starting at position 1211 of SEQ ID NO: 585047
ugcaaaugucuguaaauau

SEQ ID NO: 609027 - RNA, 19 nt, Artificial Sequence
  Description of Artificial Sequence: Synthetic oligonucleotide
  Antisense strand to SEQ ID NO: 609026
auauuuacagacauuugca

SEQ ID NO: 609028 - RNA, 19 nt, Artificial Sequence
  Description of Artificial Sequence: Synthetic oligonucleotide
  Sense strand starting at position 1424 of SEQ ID NO: 585047
gggcgaauuuccgcaacuc

SEQ ID NO: 609029 - RNA, 19 nt, Artificial Sequence
  Description of Artificial Sequence: Synthetic oligonucleotide
  Antisense strand to SEQ ID NO: 609028
gaguugcggaaauucgccc

SEQ ID NO: 609030 - RNA, 19 nt, Artificial Sequence
  Description of Artificial Sequence: Synthetic oligonucleotide
  Sense strand starting at position 1425 of SEQ ID NO: 585047
ggcgaauuuccgcaacucu

SEQ ID NO: 609031 - RNA, 19 nt, Artificial Sequence
  Description of Artificial Sequence: Synthetic oligonucleotide
  Antisense strand to SEQ ID NO: 609030
agaguugcggaaauucgcc

SEQ ID NO: 609032 - RNA, 19 nt, Artificial Sequence
  Description of Artificial Sequence: Synthetic oligonucleotide
  Sense strand starting at position 1928 of SEQ ID NO: 585047
caugaagauuugcacggaa

SEQ ID NO: 609033 - RNA, 19 nt, Artificial Sequence
  Description of Artificial Sequence: Synthetic oligonucleotide
  Antisense strand to SEQ ID NO: 609032
uuccgugcaaaucuucaug

SEQ ID NO: 609034 - RNA, 19 nt, Artificial Sequence
  Description of Artificial Sequence: Synthetic oligonucleotide
  Sense strand starting at position 2025 of SEQ ID NO: 585047
guuacaaaccuauaguauu

SEQ ID NO: 609035 - RNA, 19 nt, Artificial Sequence
  Description of Artificial Sequence: Synthetic oligonucleotide
  Antisense strand to SEQ ID NO: 609034
aauacuauagguuuguaac

SEQ ID NO: 609036 - RNA, 19 nt, Artificial Sequence
  Description of Artificial Sequence: Synthetic oligonucleotide
  Sense strand starting at position 2106 of SEQ ID NO: 585047
ugcaacuaacucgaaguuu

SEQ ID NO: 609037 - RNA, 19 nt, Artificial Sequence
  Description of Artificial Sequence: Synthetic oligonucleotide
  Antisense strand to SEQ ID NO: 609036
aaacuucgaguuaguugca

SEQ ID NO: 609038 - RNA, 19 nt, Artificial Sequence
  Description of Artificial Sequence: Synthetic oligonucleotide
  Sense strand starting at position 2143 of SEQ ID NO: 585047
gcaggauguugagucccaa

SEQ ID NO: 609039 - RNA, 19 nt, Artificial Sequence
  Description of Artificial Sequence: Synthetic oligonucleotide
  Antisense strand to SEQ ID NO: 609038
uugggacucaacauccugc

SEQ ID NO: 609040 - RNA, 19 nt, Artificial Sequence
  Description of Artificial Sequence: Synthetic oligonucleotide
  Sense strand starting at position 2381 of SEQ ID NO: 585047
cugaacucgguuuagaguu

SEQ ID NO: 609041 - RNA, 19 nt, Artificial Sequence
  Description of Artificial Sequence: Synthetic oligonucleotide
  Antisense strand to SEQ ID NO: 609040
aacucuaaaccgaguucag

SEQ ID NO: 609042 - RNA, 19 nt, Artificial Sequence
  Description of Artificial Sequence: Synthetic oligonucleotide
  Sense strand starting at position 2389 of SEQ ID NO: 585047
gguuuagaguucucaagau

SEQ ID NO: 609043 - RNA, 19 nt, Artificial Sequence
  Description of Artificial Sequence: Synthetic oligonucleotide
  Antisense strand to SEQ ID NO: 609042
aucuugagaacucuaaacc

SEQ ID NO: 609044 - RNA, 19 nt, Artificial Sequence
  Description of Artificial Sequence: Synthetic oligonucleotide
  Sense strand starting at position 2444 of SEQ ID NO: 585047
uguaaaugagaaugaugcu

SEQ ID NO: 609045 - RNA, 19 nt, Artificial Sequence
  Description of Artificial Sequence: Synthetic oligonucleotide
  Antisense strand to SEQ ID NO: 609044
agcaucauucucauuuaca

SEQ ID NO: 609046 - RNA, 19 nt, Artificial Sequence
  Description of Artificial Sequence: Synthetic oligonucleotide
  Sense strand starting at position 2500 of SEQ ID NO: 585047
gucauuacacagugaaaug

SEQ ID NO: 609047 - RNA, 19 nt, Artificial Sequence
  Description of Artificial Sequence: Synthetic oligonucleotide
  Antisense strand to SEQ ID NO: 609046
cauuucacuguguaaugac

SEQ ID NO: 609048 - RNA, 19 nt, Artificial Sequence
  Description of Artificial Sequence: Synthetic oligonucleotide
  Sense strand starting at position 2582 of SEQ ID NO: 585047
agcaaaucuguagggucau

SEQ ID NO: 609049 - RNA, 19 nt, Artificial Sequence
  Description of Artificial Sequence: Synthetic oligonucleotide
  Antisense strand to SEQ ID NO: 609048
augacccuacagauuugcu

SEQ ID NO: 609050 - RNA, 19 nt, Artificial Sequence
  Description of Artificial Sequence: Synthetic oligonucleotide
  Sense strand starting at position 2796 of SEQ ID NO: 585047
gaauucuacuucgcugaga

SEQ ID NO: 609051 - RNA, 19 nt, Artificial Sequence
  Description of Artificial Sequence: Synthetic oligonucleotide
  Antisense strand to SEQ ID NO: 609050
ucucagcgaaguagaauuc

SEQ ID NO: 609052 - RNA, 19 nt, Artificial Sequence
  Description of Artificial Sequence: Synthetic oligonucleotide
  Sense strand starting at position 2805 of SEQ ID NO: 585047
uucgcugagacucauggua

SEQ ID NO: 609053 - RNA, 19 nt, Artificial Sequence
  Description of Artificial Sequence: Synthetic oligonucleotide
  Antisense strand to SEQ ID NO: 609052
uaccaugagucucagcgaa

SEQ ID NO: 609054 - RNA, 19 nt, Artificial Sequence
  Description of Artificial Sequence: Synthetic oligonucleotide
  Sense strand starting at position 2843 of SEQ ID NO: 585047
acucgaauuccugaaaugu

SEQ ID NO: 609055 - RNA, 19 nt, Artificial Sequence
  Description of Artificial Sequence: Synthetic oligonucleotide
  Antisense strand to SEQ ID NO: 609054
acauuucaggaauucgagu

SEQ ID NO: 609056 - RNA, 19 nt, Artificial Sequence
  Description of Artificial Sequence: Synthetic oligonucleotide
  Sense strand starting at position 2860 of SEQ ID NO: 585047
guaacuugcagccauggau

SEQ ID NO: 609057 - RNA, 19 nt, Artificial Sequence
  Description of Artificial Sequence: Synthetic oligonucleotide
  Antisense strand to SEQ ID NO: 609056
auccauggcugcaaguuac

SEQ ID NO: 609058 - RNA, 19 nt, Artificial Sequence
  Description of Artificial Sequence: Synthetic oligonucleotide
  Sense strand starting at position 2869 of SEQ ID NO: 585047
agccauggauuccuaagaa

SEQ ID NO: 609059 - RNA, 19 nt, Artificial Sequence
  Description of Artificial Sequence: Synthetic oligonucleotide
  Antisense strand to SEQ ID NO: 609058
uucuuaggaauccauggcu

SEQ ID NO: 609060 - RNA, 19 nt, Artificial Sequence
  Description of Artificial Sequence: Synthetic oligonucleotide
  Sense strand starting at position 2888 of SEQ ID NO: 585047
gcaaguuacaggcagaaau

SEQ ID NO: 609061 - RNA, 19 nt, Artificial Sequence
  Description of Artificial Sequence: Synthetic oligonucleotide
  Antisense strand to SEQ ID NO: 609060
auuucugccuguaacuugc

SEQ ID NO: 609062 - RNA, 19 nt, Artificial Sequence
  Description of Artificial Sequence: Synthetic oligonucleotide
  Sense strand starting at position 2898 of SEQ ID NO: 585047
ggcagaaaucagugaggca

SEQ ID NO: 609063 - RNA, 19 nt, Artificial Sequence
  Description of Artificial Sequence: Synthetic oligonucleotide
  Antisense strand to SEQ ID NO: 609062
ugccucacugauuucugcc

SEQ ID NO: 609064 - RNA, 19 nt, Artificial Sequence
  Description of Artificial Sequence: Synthetic oligonucleotide
  Sense strand starting at position 2899 of SEQ ID NO: 585047
gcagaaaucagugaggcau

SEQ ID NO: 609065 - RNA, 19 nt, Artificial Sequence
  Description of Artificial Sequence: Synthetic oligonucleotide
  Antisense strand to SEQ ID NO: 609064
augccucacugauuucugc

SEQ ID NO: 609066 - RNA, 19 nt, Artificial Sequence
  Description of Artificial Sequence: Synthetic oligonucleotide
  Sense strand starting at position 3008 of SEQ ID NO: 585047
cacccuagguacgugaaau

SEQ ID NO: 609067 - RNA, 19 nt, Artificial Sequence
  Description of Artificial Sequence: Synthetic oligonucleotide
  Antisense strand to SEQ ID NO: 609066
auuucacguaccuagggug

SEQ ID NO: 609068 - RNA, 19 nt, Artificial Sequence
  Description of Artificial Sequence: Synthetic oligonucleotide
  Sense strand starting at position 3009 of SEQ ID NO: 585047
acccuagguacgugaaaua

SEQ ID NO: 609069 - RNA, 19 nt, Artificial Sequence
  Description of Artificial Sequence: Synthetic oligonucleotide
  Antisense strand to SEQ ID NO: 609068
uauuucacguaccuagggu

SEQ ID NO: 609070 - RNA, 19 nt, Artificial Sequence
  Description of Artificial Sequence: Synthetic oligonucleotide
  Sense strand starting at position 3133 of SEQ ID NO: 585047
ggcacauaguagguguaaa

SEQ ID NO: 609071 - RNA, 19 nt, Artificial Sequence
  Description of Artificial Sequence: Synthetic oligonucleotide
  Antisense strand to SEQ ID NO: 609070
uuuacaccuacuaugugcc

SEQ ID NO: 609072 - RNA, 19 nt, Artificial Sequence
  Description of Artificial Sequence: Synthetic oligonucleotide
  Sense strand starting at position 3187 of SEQ ID NO: 585047
caaagugagguauguaaga

SEQ ID NO: 609073 - RNA, 19 nt, Artificial Sequence
  Description of Artificial Sequence: Synthetic oligonucleotide
  Antisense strand to SEQ ID NO: 609072
ucuuacauaccucacuuug

SEQ ID NO: 609074 - RNA, 19 nt, Artificial Sequence
  Description of Artificial Sequence: Synthetic oligonucleotide
  Sense strand starting at position 3384 of SEQ ID NO: 585047
uccauagggaguugugagu

SEQ ID NO: 609075 - RNA, 19 nt, Artificial Sequence
  Description of Artificial Sequence: Synthetic oligonucleotide
  Antisense strand to SEQ ID NO: 609074
acucacaacucccuaugga

SEQ ID NO: 609076 - RNA, 19 nt, Artificial Sequence
  Description of Artificial Sequence: Synthetic oligonucleotide
  Sense strand starting at position 3612 of SEQ ID NO: 585047
auccuuuaucugugagauu

SEQ ID NO: 609077 - RNA, 19 nt, Artificial Sequence
  Description of Artificial Sequence: Synthetic oligonucleotide
  Antisense strand to SEQ ID NO: 609076
aaucucacagauaaaggau

SEQ ID NO: 609078 - RNA, 19 nt, Artificial Sequence
  Description of Artificial Sequence: Synthetic oligonucleotide
  Sense strand starting at position 3636 of SEQ ID NO: 585047
ucuuguuaccuguacuauu

SEQ ID NO: 609079 - RNA, 19 nt, Artificial Sequence
  Description of Artificial Sequence: Synthetic oligonucleotide
  Antisense strand to SEQ ID NO: 609078
aauaguacagguaacaaga

SEQ ID NO: 609080 - RNA, 19 nt, Artificial Sequence
  Description of Artificial Sequence: Synthetic oligonucleotide
  Sense strand starting at position 3697 of SEQ ID NO: 585047
cuuggagaauaacuguuaa

SEQ ID NO: 609081 - RNA, 19 nt, Artificial Sequence
  Description of Artificial Sequence: Synthetic oligonucleotide
  Antisense strand to SEQ ID NO: 609080
uuaacaguuauucuccaag

SEQ ID NO: 609082 - RNA, 19 nt, Artificial Sequence
  Description of Artificial Sequence: Synthetic oligonucleotide
  Sense strand starting at position 3782 of SEQ ID NO: 585047
agucucagcugauugaaca

SEQ ID NO: 609083 - RNA, 19 nt, Artificial Sequence
  Description of Artificial Sequence: Synthetic oligonucleotide
  Antisense strand to SEQ ID NO: 609082
uguucaaucagcugagacu

SEQ ID NO: 609084 - RNA, 19 nt, Artificial Sequence
  Description of Artificial Sequence: Synthetic oligonucleotide
  Sense strand starting at position 3783 of SEQ ID NO: 585047
gucucagcugauugaacaa

SEQ ID NO: 609085 - RNA, 19 nt, Artificial Sequence
  Description of Artificial Sequence: Synthetic oligonucleotide
  Antisense strand to SEQ ID NO: 609084
uuguucaaucagcugagac

SEQ ID NO: 609086 - RNA, 19 nt, Artificial Sequence
  Description of Artificial Sequence: Synthetic oligonucleotide
  Sense strand starting at position 3795 of SEQ ID NO: 585047
ugaacaacgaaaugugauu

SEQ ID NO: 609087 - RNA, 19 nt, Artificial Sequence
  Description of Artificial Sequence: Synthetic oligonucleotide
  Antisense strand to SEQ ID NO: 609086
aaucacauuucguuguuca

SEQ ID NO: 609088 - RNA, 19 nt, Artificial Sequence
  Description of Artificial Sequence: Synthetic oligonucleotide
  Sense strand starting at position 251 of SEQ ID NO: 585048
gagguuauagccugaaaua

SEQ ID NO: 609089 - RNA, 19 nt, Artificial Sequence
  Description of Artificial Sequence: Synthetic oligonucleotide
  Antisense strand to SEQ ID NO: 609088
uauuucaggcuauaaccuc

SEQ ID NO: 609090 - RNA, 19 nt, Artificial Sequence
  Description of Artificial Sequence: Synthetic oligonucleotide
  Sense strand starting at position 252 of SEQ ID NO: 585048
agguuauagccugaaauau

SEQ ID NO: 609091 - RNA, 19 nt, Artificial Sequence
  Description of Artificial Sequence: Synthetic oligonucleotide
  Antisense strand to SEQ ID NO: 609090
auauuucaggcuauaaccu

SEQ ID NO: 609092 - RNA, 19 nt, Artificial Sequence
  Description of Artificial Sequence: Synthetic oligonucleotide
  Sense strand starting at position 1225 of SEQ ID NO: 585048
aguauuaauucugugaaac

SEQ ID NO: 609093 - RNA, 19 nt, Artificial Sequence
  Description of Artificial Sequence: Synthetic oligonucleotide
  Antisense strand to SEQ ID NO: 609092
guuucacagaauuaauacu

SEQ ID NO: 609094 - RNA, 19 nt, Artificial Sequence
  Description of Artificial Sequence: Synthetic oligonucleotide
  Sense strand starting at position 1226 of SEQ ID NO: 585048
guauuaauucugugaaaca

SEQ ID NO: 609095 - RNA, 19 nt, Artificial Sequence
  Description of Artificial Sequence: Synthetic oligonucleotide
  Antisense strand to SEQ ID NO: 609094
uguuucacagaauuaauac

SEQ ID NO: 609096 - RNA, 19 nt, Artificial Sequence
  Description of Artificial Sequence: Synthetic oligonucleotide
  Sense strand starting at position 1398 of SEQ ID NO: 585048
aguuucaguggagaguauu

SEQ ID NO: 609097 - RNA, 19 nt, Artificial Sequence
  Description of Artificial Sequence: Synthetic oligonucleotide
  Antisense strand to SEQ ID NO: 609096
aauacucuccacugaaacu

SEQ ID NO: 609098 - RNA, 19 nt, Artificial Sequence
  Description of Artificial Sequence: Synthetic oligonucleotide
  Sense strand starting at position 1649 of SEQ ID NO: 585048
agucaaagagcucaccauu

SEQ ID NO: 609099 - RNA, 19 nt, Artificial Sequence
  Description of Artificial Sequence: Synthetic oligonucleotide
  Antisense strand to SEQ ID NO: 609098
aauggugagcucuuugacu

SEQ ID NO: 609100 - RNA, 19 nt, Artificial Sequence
  Description of Artificial Sequence: Synthetic oligonucleotide
  Sense strand starting at position 1753 of SEQ ID NO: 585048
aagcuaaugcaagaguuga

SEQ ID NO: 609101 - RNA, 19 nt, Artificial Sequence
  Description of Artificial Sequence: Synthetic oligonucleotide
  Antisense strand to SEQ ID NO: 609100
ucaacucuugcauuagcuu

SEQ ID NO: 609102 - RNA, 19 nt, Artificial Sequence
  Description of Artificial Sequence: Synthetic oligonucleotide
  Sense strand starting at position 1758 of SEQ ID NO: 585048
aaugcaagaguugaucagu

SEQ ID NO: 609103 - RNA, 19 nt, Artificial Sequence
  Description of Artificial Sequence: Synthetic oligonucleotide
  Antisense strand to SEQ ID NO: 609102
acugaucaacucuugcauu

SEQ ID NO: 609104 - RNA, 19 nt, Artificial Sequence
  Description of Artificial Sequence: Synthetic oligonucleotide
  Sense strand starting at position 1825 of SEQ ID NO: 585048
guucgagugcugguagugu

SEQ ID NO: 609105 - RNA, 19 nt, Artificial Sequence
  Description of Artificial Sequence: Synthetic oligonucleotide
  Antisense strand to SEQ ID NO: 609104
acacuaccagcacucgaac

SEQ ID NO: 609106 - RNA, 19 nt, Artificial Sequence
  Description of Artificial Sequence: Synthetic oligonucleotide
  Sense strand starting at position 1985 of SEQ ID NO: 585048
guggcagcugaauauuaca

SEQ ID NO: 609107 - RNA, 19 nt, Artificial Sequence
  Description of Artificial Sequence: Synthetic oligonucleotide
  Antisense strand to SEQ ID NO: 609106
uguaauauucagcugccac

SEQ ID NO: 609108 - RNA, 19 nt, Artificial Sequence
  Description of Artificial Sequence: Synthetic oligonucleotide
  Sense strand starting at position 2052 of SEQ ID NO: 585048
agcaaauaauaugcugaua

SEQ ID NO: 609109 - RNA, 19 nt, Artificial Sequence
  Description of Artificial Sequence: Synthetic oligonucleotide
  Antisense strand to SEQ ID NO: 609108
uaucagcauauuauuugcu

SEQ ID NO: 609110 - RNA, 19 nt, Artificial Sequence
  Description of Artificial Sequence: Synthetic oligonucleotide
  Sense strand starting at position 2256 of SEQ ID NO: 585048
cacagauguccaggacaac

SEQ ID NO: 609111 - RNA, 19 nt, Artificial Sequence
  Description of Artificial Sequence: Synthetic oligonucleotide
  Antisense strand to SEQ ID NO: 609110
guuguccuggacaucugug

SEQ ID NO: 609112 - RNA, 19 nt, Artificial Sequence
  Description of Artificial Sequence: Synthetic oligonucleotide
  Sense strand starting at position 2276 of SEQ ID NO: 585048
aguaaagauuauucuggca

SEQ ID NO: 609113 - RNA, 19 nt, Artificial Sequence
  Description of Artificial Sequence: Synthetic oligonucleotide
  Antisense strand to SEQ ID NO: 609112
ugccagaauaaucuuuacu

SEQ ID NO: 609114 - RNA, 19 nt, Artificial Sequence
  Description of Artificial Sequence: Synthetic oligonucleotide
  Sense strand starting at position 2356 of SEQ ID NO: 585048
caggucugugcugaauaau

SEQ ID NO: 609115 - RNA, 19 nt, Artificial Sequence
  Description of Artificial Sequence: Synthetic oligonucleotide
  Antisense strand to SEQ ID NO: 609114
auuauucagcacagaccug

SEQ ID NO: 609116 - RNA, 19 nt, Artificial Sequence
  Description of Artificial Sequence: Synthetic oligonucleotide
  Sense strand starting at position 2421 of SEQ ID NO: 585048
ugaauuugaugagaagcaa

SEQ ID NO: 609117 - RNA, 19 nt, Artificial Sequence
  Description of Artificial Sequence: Synthetic oligonucleotide
  Antisense strand to SEQ ID NO: 609116
uugcuucucaucaaauuca

SEQ ID NO: 609118 - RNA, 19 nt, Artificial Sequence
  Description of Artificial Sequence: Synthetic oligonucleotide
  Sense strand starting at position 2465 of SEQ ID NO: 585048
gucauuuguuuauuagguu

SEQ ID NO: 609119 - RNA, 19 nt, Artificial Sequence
  Description of Artificial Sequence: Synthetic oligonucleotide
  Antisense strand to SEQ ID NO: 609118
aaccuaauaaacaaaugac

SEQ ID NO: 609120 - RNA, 19 nt, Artificial Sequence
  Description of Artificial Sequence: Synthetic oligonucleotide
  Sense strand starting at position 2564 of SEQ ID NO: 585048
ugccaaguagaauacugau

SEQ ID NO: 609121 - RNA, 19 nt, Artificial Sequence
  Description of Artificial Sequence: Synthetic oligonucleotide
  Antisense strand to SEQ ID NO: 609120
aucaguauucuacuuggca

SEQ ID NO: 609122 - RNA, 19 nt, Artificial Sequence
  Description of Artificial Sequence: Synthetic oligonucleotide
  Sense strand starting at position 2630 of SEQ ID NO: 585048
aggauauuacauggcauaa

SEQ ID NO: 609123 - RNA, 19 nt, Artificial Sequence
  Description of Artificial Sequence: Synthetic oligonucleotide
  Antisense strand to SEQ ID NO: 609122
uuaugccauguaauauccu

SEQ ID NO: 609124 - RNA, 19 nt, Artificial Sequence
  Description of Artificial Sequence: Synthetic oligonucleotide
  Sense strand starting at position 2862 of SEQ ID NO: 585048
uugagagugccacaccaau

SEQ ID NO: 609125 - RNA, 19 nt, Artificial Sequence
  Description of Artificial Sequence: Synthetic oligonucleotide
  Antisense strand to SEQ ID NO: 609124
auugguguggcacucucaa

SEQ ID NO: 609126 - RNA, 19 nt, Artificial Sequence
  Description of Artificial Sequence: Synthetic oligonucleotide
  Sense strand starting at position 2900 of SEQ ID NO: 585048
uaagaucaagugugagagu

SEQ ID NO: 609127 - RNA, 19 nt, Artificial Sequence
  Description of Artificial Sequence: Synthetic oligonucleotide
  Antisense strand to SEQ ID NO: 609126
acucucacacuugaucuua

SEQ ID NO: 609128 - RNA, 19 nt, Artificial Sequence
  Description of Artificial Sequence: Synthetic oligonucleotide
  Sense strand starting at position 2911 of SEQ ID NO: 585048
gugagagugccacaucaaa

SEQ ID NO: 609129 - RNA, 19 nt, Artificial Sequence
  Description of Artificial Sequence: Synthetic oligonucleotide
  Antisense strand to SEQ ID NO: 609128
uuugauguggcacucucac

SEQ ID NO: 609130 - RNA, 19 nt, Artificial Sequence
  Description of Artificial Sequence: Synthetic oligonucleotide
  Sense strand starting at position 3055 of SEQ ID NO: 585048
uguaguaggcacuauuaca

SEQ ID NO: 609131 - RNA, 19 nt, Artificial Sequence
  Description of Artificial Sequence: Synthetic oligonucleotide
  Antisense strand to SEQ ID NO: 609130
uguaauagugccuacuaca

SEQ ID NO: 609132 - RNA, 19 nt, Artificial Sequence
  Description of Artificial Sequence: Synthetic oligonucleotide
  Sense strand starting at position 3099 of SEQ ID NO: 585048
ggcuuagacgguuaaagaa

SEQ ID NO: 609133 - RNA, 19 nt, Artificial Sequence
  Description of Artificial Sequence: Synthetic oligonucleotide
  Antisense strand to SEQ ID NO: 609132
uucuuuaaccgucuaagcc

SEQ ID NO: 609134 - RNA, 19 nt, Artificial Sequence
  Description of Artificial Sequence: Synthetic oligonucleotide
  Sense strand starting at position 3267 of SEQ ID NO: 585048
cucuguauccucuggaaua

SEQ ID NO: 609135 - RNA, 19 nt, Artificial Sequence
  Description of Artificial Sequence: Synthetic oligonucleotide
  Antisense strand to SEQ ID NO: 609134
uauuccagaggauacagag

SEQ ID NO: 609136 - RNA, 19 nt, Artificial Sequence
  Description of Artificial Sequence: Synthetic oligonucleotide
  Sense strand starting at position 3269 of SEQ ID NO: 585048
cuguauccucuggaauacu

SEQ ID NO: 609137 - RNA, 19 nt, Artificial Sequence
  Description of Artificial Sequence: Synthetic oligonucleotide
  Antisense strand to SEQ ID NO: 609136
aguauuccagaggauacag

SEQ ID NO: 609138 - RNA, 19 nt, Artificial Sequence
  Description of Artificial Sequence: Synthetic oligonucleotide
  Sense strand starting at position 3354 of SEQ ID NO: 585048
agcugcauccuguauauuu

SEQ ID NO: 609139 - RNA, 19 nt, Artificial Sequence
  Description of Artificial Sequence: Synthetic oligonucleotide
  Antisense strand to SEQ ID NO: 609138
aaauauacaggaugcagcu

SEQ ID NO: 609140 - RNA, 19 nt, Artificial Sequence
  Description of Artificial Sequence: Synthetic oligonucleotide
  Sense strand starting at position 3365 of SEQ ID NO: 585048
guauauuuauggcuuguuu

SEQ ID NO: 609141 - RNA, 19 nt, Artificial Sequence
  Description of Artificial Sequence: Synthetic oligonucleotide
  Antisense strand to SEQ ID NO: 609140
aaacaagccauaaauauac

SEQ ID NO: 609142 - RNA, 19 nt, Artificial Sequence
  Description of Artificial Sequence: Synthetic oligonucleotide
  Sense strand starting at position 3396 of SEQ ID NO: 585048
uccaguuauguacacauau

SEQ ID NO: 609143 - RNA, 19 nt, Artificial Sequence
  Description of Artificial Sequence: Synthetic oligonucleotide
  Antisense strand to SEQ ID NO: 609142
auauguguacauaacugga

SEQ ID NO: 609144 - RNA, 19 nt, Artificial Sequence
  Description of Artificial Sequence: Synthetic oligonucleotide
  Sense strand starting at position 3574 of SEQ ID NO: 585048
gugucaggcgcuguguaaa

SEQ ID NO: 609145 - RNA, 19 nt, Artificial Sequence
  Description of Artificial Sequence: Synthetic oligonucleotide
  Antisense strand to SEQ ID NO: 609144
uuuacacagcgccugacac

SEQ ID NO: 609146 - RNA, 19 nt, Artificial Sequence
  Description of Artificial Sequence: Synthetic oligonucleotide
  Sense strand starting at position 3627 of SEQ ID NO: 585048
gguuucucuccacauucuu

SEQ ID NO: 609147 - RNA, 19 nt, Artificial Sequence
  Description of Artificial Sequence: Synthetic oligonucleotide
  Antisense strand to SEQ ID NO: 609146
aagaauguggagagaaacc

SEQ ID NO: 609148 - RNA, 19 nt, Artificial Sequence
  Description of Artificial Sequence: Synthetic oligonucleotide
  Sense strand starting at position 3646 of SEQ ID NO: 585048
ggagcucauaucuguggaa

SEQ ID NO: 609149 - RNA, 19 nt, Artificial Sequence
  Description of Artificial Sequence: Synthetic oligonucleotide
  Antisense strand to SEQ ID NO: 609148
uuccacagauaugagcucc

SEQ ID NO: 609150 - RNA, 19 nt, Artificial Sequence
  Description of Artificial Sequence: Synthetic oligonucleotide
  Sense strand starting at position 3648 of SEQ ID NO: 585048
agcucauaucuguggaaua

SEQ ID NO: 609151 - RNA, 19 nt, Artificial Sequence
  Description of Artificial Sequence: Synthetic oligonucleotide
  Antisense strand to SEQ ID NO: 609150
uauuccacagauaugagcu

SEQ ID NO: 609152 - RNA, 19 nt, Artificial Sequence
  Description of Artificial Sequence: Synthetic oligonucleotide
  Sense strand starting at position 3675 of SEQ ID NO: 585048
uuaagcaaucaccgaaaua

SEQ ID NO: 609153 - RNA, 19 nt, Artificial Sequence
  Description of Artificial Sequence: Synthetic oligonucleotide
  Antisense strand to SEQ ID NO: 609152
uauuucggugauugcuuaa

SEQ ID NO: 609154 - RNA, 19 nt, Artificial Sequence
  Description of Artificial Sequence: Synthetic oligonucleotide
  Sense strand starting at position 3751 of SEQ ID NO: 585048
aguucuaagcaagauaucu

SEQ ID NO: 609155 - RNA, 19 nt, Artificial Sequence
  Description of Artificial Sequence: Synthetic oligonucleotide
  Antisense strand to SEQ ID NO: 609154
agauaucuugcuuagaacu

SEQ ID NO: 609156 - RNA, 19 nt, Artificial Sequence
  Description of Artificial Sequence: Synthetic oligonucleotide
  Sense strand starting at position 3787 of SEQ ID NO: 585048
cauggaaaguuucucgaga

SEQ ID NO: 609157 - RNA, 19 nt, Artificial Sequence
  Description of Artificial Sequence: Synthetic oligonucleotide
  Antisense strand to SEQ ID NO: 609156
ucucgagaaacuuuccaug

SEQ ID NO: 609158 - RNA, 19 nt, Artificial Sequence
  Description of Artificial Sequence: Synthetic oligonucleotide
  Sense strand starting at position 3788 of SEQ ID NO: 585048
auggaaaguuucucgagaa

SEQ ID NO: 609159 - RNA, 19 nt, Artificial Sequence
  Description of Artificial Sequence: Synthetic oligonucleotide
  Antisense strand to SEQ ID NO: 609158
uucucgagaaacuuuccau

SEQ ID NO: 609160 - RNA, 19 nt, Artificial Sequence
  Description of Artificial Sequence: Synthetic oligonucleotide
  Sense strand starting at position 3816 of SEQ ID NO: 585048
ggagcugagaucugagaau

SEQ ID NO: 609161 - RNA, 19 nt, Artificial Sequence
  Description of Artificial Sequence: Synthetic oligonucleotide
  Antisense strand to SEQ ID NO: 609160
auucucagaucucagcucc

SEQ ID NO: 609162 - RNA, 19 nt, Artificial Sequence
  Description of Artificial Sequence: Synthetic oligonucleotide
  Sense strand starting at position 3829 of SEQ ID NO: 585048
gagaauguuuagguguaag

SEQ ID NO: 609163 - RNA, 19 nt, Artificial Sequence
  Description of Artificial Sequence: Synthetic oligonucleotide
  Antisense strand to SEQ ID NO: 609162
cuuacaccuaaacauucuc

SEQ ID NO: 609164 - RNA, 19 nt, Artificial Sequence
  Description of Artificial Sequence: Synthetic oligonucleotide
  Sense strand starting at position 3832 of SEQ ID NO: 585048
aauguuuagguguaaggca

SEQ ID NO: 609165 - RNA, 19 nt, Artificial Sequence
  Description of Artificial Sequence: Synthetic oligonucleotide
  Antisense strand to SEQ ID NO: 609164
ugccuuacaccuaaacauu

SEQ ID NO: 609166 - RNA, 19 nt, Artificial Sequence
  Description of Artificial Sequence: Synthetic oligonucleotide
  Sense strand starting at position 3909 of SEQ ID NO: 585048
ggccuuacccuguaauaug

SEQ ID NO: 609167 - RNA, 19 nt, Artificial Sequence
  Description of Artificial Sequence: Synthetic oligonucleotide
  Antisense strand to SEQ ID NO: 609166
cauauuacaggguaaggcc

SEQ ID NO: 609168 - RNA, 19 nt, Artificial Sequence
  Description of Artificial Sequence: Synthetic oligonucleotide
  Sense strand starting at position 130 of SEQ ID NO: 585049
aauggagugaugcagguaa

SEQ ID NO: 609169 - RNA, 19 nt, Artificial Sequence
  Description of Artificial Sequence: Synthetic oligonucleotide
  Antisense strand to SEQ ID NO: 609168
uuaccugcaucacuccauu

SEQ ID NO: 609170 - RNA, 19 nt, Artificial Sequence
  Description of Artificial Sequence: Synthetic oligonucleotide
  Sense strand starting at position 134 of SEQ ID NO: 585049
gagugaugcagguaaacau

SEQ ID NO: 609171 - RNA, 19 nt, Artificial Sequence
  Description of Artificial Sequence: Synthetic oligonucleotide
  Antisense strand to SEQ ID NO: 609170
auguuuaccugcaucacuc

SEQ ID NO: 609172 - RNA, 19 nt, Artificial Sequence
  Description of Artificial Sequence: Synthetic oligonucleotide
  Sense strand starting at position 141 of SEQ ID NO: 585049
gcagguaaacaugaguaua

SEQ ID NO: 609173 - RNA, 19 nt, Artificial Sequence
  Description of Artificial Sequence: Synthetic oligonucleotide
  Antisense strand to SEQ ID NO: 609172
uauacucauguuuaccugc

SEQ ID NO: 609174 - RNA, 19 nt, Artificial Sequence
  Description of Artificial Sequence: Synthetic oligonucleotide
  Sense strand starting at position 143 of SEQ ID NO: 585049
agguaaacaugaguauauu

SEQ ID NO: 609175 - RNA, 19 nt, Artificial Sequence
  Description of Artificial Sequence: Synthetic oligonucleotide
  Antisense strand to SEQ ID NO: 609174
aauauacucauguuuaccu

SEQ ID NO: 609176 - RNA, 19 nt, Artificial Sequence
  Description of Artificial Sequence: Synthetic oligonucleotide
  Sense strand starting at position 261 of SEQ ID NO: 585049
auaagagucuuggcacaaa

SEQ ID NO: 609177 - RNA, 19 nt, Artificial Sequence
  Description of Artificial Sequence: Synthetic oligonucleotide
  Antisense strand to SEQ ID NO: 609176
uuugugccaagacucuuau

SEQ ID NO: 609178 - RNA, 19 nt, Artificial Sequence
  Description of Artificial Sequence: Synthetic oligonucleotide
  Sense strand starting at position 279 of SEQ ID NO: 585049
aggaauucucauuguacug

SEQ ID NO: 609179 - RNA, 19 nt, Artificial Sequence
  Description of Artificial Sequence: Synthetic oligonucleotide
  Antisense strand to SEQ ID NO: 609178
caguacaaugagaauuccu

SEQ ID NO: 609180 - RNA, 19 nt, Artificial Sequence
  Description of Artificial Sequence: Synthetic oligonucleotide
  Sense strand starting at position 915 of SEQ ID NO: 585049
guaaguauauagucacaaa

SEQ ID NO: 609181 - RNA, 19 nt, Artificial Sequence
  Description of Artificial Sequence: Synthetic oligonucleotide
  Antisense strand to SEQ ID NO: 609180
uuugugacuauauacuuac

SEQ ID NO: 609182 - RNA, 19 nt, Artificial Sequence
  Description of Artificial Sequence: Synthetic oligonucleotide
  Sense strand starting at position 1047 of SEQ ID NO: 585049
cauagagaauaaucgguau

SEQ ID NO: 609183 - RNA, 19 nt, Artificial Sequence
  Description of Artificial Sequence: Synthetic oligonucleotide
  Antisense strand to SEQ ID NO: 609182
auaccgauuauucucuaug

SEQ ID NO: 609184 - RNA, 19 nt, Artificial Sequence
  Description of Artificial Sequence: Synthetic oligonucleotide
  Sense strand starting at position 1050 of SEQ ID NO: 585049
agagaauaaucgguaucca

SEQ ID NO: 609185 - RNA, 19 nt, Artificial Sequence
  Description of Artificial Sequence: Synthetic oligonucleotide
  Antisense strand to SEQ ID NO: 609184
uggauaccgauuauucucu

SEQ ID NO: 609186 - RNA, 19 nt, Artificial Sequence
  Description of Artificial Sequence: Synthetic oligonucleotide
  Sense strand starting at position 1087 of SEQ ID NO: 585049
ugauuacgcguagugcuua

SEQ ID NO: 609187 - RNA, 19 nt, Artificial Sequence
  Description of Artificial Sequence: Synthetic oligonucleotide
  Antisense strand to SEQ ID NO: 609186
uaagcacuacgcguaauca

SEQ ID NO: 609188 - RNA, 19 nt, Artificial Sequence
  Description of Artificial Sequence: Synthetic oligonucleotide
  Sense strand starting at position 1309 of SEQ ID NO: 585049
gguggcucugauuaaggaa

SEQ ID NO: 609189 - RNA, 19 nt, Artificial Sequence
  Description of Artificial Sequence: Synthetic oligonucleotide
  Antisense strand to SEQ ID NO: 609188
uuccuuaaucagagccacc

SEQ ID NO: 609190 - RNA, 19 nt, Artificial Sequence
  Description of Artificial Sequence: Synthetic oligonucleotide
  Sense strand starting at position 1493 of SEQ ID NO: 585049
cuaagcgaugacugacaaa

SEQ ID NO: 609191 - RNA, 19 nt, Artificial Sequence
  Description of Artificial Sequence: Synthetic oligonucleotide
  Antisense strand to SEQ ID NO: 609190
uuugucagucaucgcuuag

SEQ ID NO: 609192 - RNA, 19 nt, Artificial Sequence
  Description of Artificial Sequence: Synthetic oligonucleotide
  Sense strand starting at position 2297 of SEQ ID NO: 585049
cgacguuucuauuugggau

SEQ ID NO: 609193 - RNA, 19 nt, Artificial Sequence
  Description of Artificial Sequence: Synthetic oligonucleotide
  Antisense strand to SEQ ID NO: 609192
aucccaaauagaaacgucg

SEQ ID NO: 609194 - RNA, 19 nt, Artificial Sequence
  Description of Artificial Sequence: Synthetic oligonucleotide
  Sense strand starting at position 2318 of SEQ ID NO: 585049
acaacaggugccugagaaa

SEQ ID NO: 609195 - RNA, 19 nt, Artificial Sequence
  Description of Artificial Sequence: Synthetic oligonucleotide
  Antisense strand to SEQ ID NO: 609194
uuucucaggcaccuguugu

SEQ ID NO: 609196 - RNA, 19 nt, Artificial Sequence
  Description of Artificial Sequence: Synthetic oligonucleotide
  Sense strand starting at position 2804 of SEQ ID NO: 585049
uggauacaguucccuuaaa

SEQ ID NO: 609197 - RNA, 19 nt, Artificial Sequence
  Description of Artificial Sequence: Synthetic oligonucleotide
  Antisense strand to SEQ ID NO: 609196
uuuaagggaacuguaucca

SEQ ID NO: 609198 - RNA, 19 nt, Artificial Sequence
  Description of Artificial Sequence: Synthetic oligonucleotide
  Sense strand starting at position 2805 of SEQ ID NO: 585049
ggauacaguucccuuaaau

SEQ ID NO: 609199 - RNA, 19 nt, Artificial Sequence
  Description of Artificial Sequence: Synthetic oligonucleotide
  Antisense strand to SEQ ID NO: 609198
auuuaagggaacuguaucc

SEQ ID NO: 609200 - RNA, 19 nt, Artificial Sequence
  Description of Artificial Sequence: Synthetic oligonucleotide
  Sense strand starting at position 2844 of SEQ ID NO: 585049
acuaaagugggugaguuua

SEQ ID NO: 609201 - RNA, 19 nt, Artificial Sequence
  Description of Artificial Sequence: Synthetic oligonucleotide
  Antisense strand to SEQ ID NO: 609200
uaaacucacccacuuuagu

SEQ ID NO: 609202 - RNA, 19 nt, Artificial Sequence
  Description of Artificial Sequence: Synthetic oligonucleotide
  Sense strand starting at position 2886 of SEQ ID NO: 585049
gauacccaggcauguaaau

SEQ ID NO: 609203 - RNA, 19 nt, Artificial Sequence
  Description of Artificial Sequence: Synthetic oligonucleotide
  Antisense strand to SEQ ID NO: 609202
auuuacaugccuggguauc

SEQ ID NO: 609204 - RNA, 19 nt, Artificial Sequence
  Description of Artificial Sequence: Synthetic oligonucleotide
  Sense strand starting at position 2902 of SEQ ID NO: 585049
aauggauguguuuaagagu

SEQ ID NO: 609205 - RNA, 19 nt, Artificial Sequence
  Description of Artificial Sequence: Synthetic oligonucleotide
  Antisense strand to SEQ ID NO: 609204
acucuuaaacacauccauu

SEQ ID NO: 609206 - RNA, 19 nt, Artificial Sequence
  Description of Artificial Sequence: Synthetic oligonucleotide
  Sense strand starting at position 2908 of SEQ ID NO: 585049
uguguuuaagaguaaugac

SEQ ID NO: 609207 - RNA, 19 nt, Artificial Sequence
  Description of Artificial Sequence: Synthetic oligonucleotide
  Antisense strand to SEQ ID NO: 609206
gucauuacucuuaaacaca

SEQ ID NO: 609208 - RNA, 19 nt, Artificial Sequence
  Description of Artificial Sequence: Synthetic oligonucleotide
  Sense strand starting at position 3374 of SEQ ID NO: 585049
ucugguguuauauaaggau

SEQ ID NO: 609209 - RNA, 19 nt, Artificial Sequence
  Description of Artificial Sequence: Synthetic oligonucleotide
  Antisense strand to SEQ ID NO: 609208
auccuuauauaacaccaga

SEQ ID NO: 609210 - RNA, 19 nt, Artificial Sequence
  Description of Artificial Sequence: Synthetic oligonucleotide
  Sense strand starting at position 3453 of SEQ ID NO: 585049
aguacagugacaggaugau

SEQ ID NO: 609211 - RNA, 19 nt, Artificial Sequence
  Description of Artificial Sequence: Synthetic oligonucleotide
  Antisense strand to SEQ ID NO: 609210
aucauccugucacuguacu

SEQ ID NO: 609212 - RNA, 19 nt, Artificial Sequence
  Description of Artificial Sequence: Synthetic oligonucleotide
  Sense strand starting at position 3493 of SEQ ID NO: 585049
uuagauaaaucagcugauu

SEQ ID NO: 609213 - RNA, 19 nt, Artificial Sequence
  Description of Artificial Sequence: Synthetic oligonucleotide
  Antisense strand to SEQ ID NO: 609212
aaucagcugauuuaucuaa

SEQ ID NO: 609214 - RNA, 19 nt, Artificial Sequence
  Description of Artificial Sequence: Synthetic oligonucleotide
  Sense strand starting at position 3496 of SEQ ID NO: 585049
gauaaaucagcugauuguu

SEQ ID NO: 609215 - RNA, 19 nt, Artificial Sequence
  Description of Artificial Sequence: Synthetic oligonucleotide
  Antisense strand to SEQ ID NO: 609214
aacaaucagcugauuuauc

SEQ ID NO: 609216 - RNA, 19 nt, Artificial Sequence
  Description of Artificial Sequence: Synthetic oligonucleotide
  Sense strand starting at position 3622 of SEQ ID NO: 585049
uagcguuggguguugugaa

SEQ ID NO: 609217 - RNA, 19 nt, Artificial Sequence
  Description of Artificial Sequence: Synthetic oligonucleotide
  Antisense strand to SEQ ID NO: 609216
uucacaacacccaacgcua

SEQ ID NO: 609218 - RNA, 19 nt, Artificial Sequence
  Description of Artificial Sequence: Synthetic oligonucleotide
  Sense strand starting at position 3630 of SEQ ID NO: 585049
gguguugugaacuauggac

SEQ ID NO: 609219 - RNA, 19 nt, Artificial Sequence
  Description of Artificial Sequence: Synthetic oligonucleotide
  Antisense strand to SEQ ID NO: 609218
guccauaguucacaacacc

SEQ ID NO: 609220 - RNA, 19 nt, Artificial Sequence
  Description of Artificial Sequence: Synthetic oligonucleotide
  Sense strand starting at position 3654 of SEQ ID NO: 585049
uccauuaaugcuuagauag

SEQ ID NO: 609221 - RNA, 19 nt, Artificial Sequence
  Description of Artificial Sequence: Synthetic oligonucleotide
  Antisense strand to SEQ ID NO: 609220
cuaucuaagcauuaaugga

SEQ ID NO: 609222 - RNA, 19 nt, Artificial Sequence
  Description of Artificial Sequence: Synthetic oligonucleotide
  Sense strand starting at position 3662 of SEQ ID NO: 585049
ugcuuagauagggaugagu

SEQ ID NO: 609223 - RNA, 19 nt, Artificial Sequence
  Description of Artificial Sequence: Synthetic oligonucleotide
  Antisense strand to SEQ ID NO: 609222
acucaucccuaucuaagca

SEQ ID NO: 609224 - RNA, 19 nt, Artificial Sequence
  Description of Artificial Sequence: Synthetic oligonucleotide
  Sense strand starting at position 3664 of SEQ ID NO: 585049
cuuagauagggaugaguuc

SEQ ID NO: 609225 - RNA, 19 nt, Artificial Sequence
  Description of Artificial Sequence: Synthetic oligonucleotide
  Antisense strand to SEQ ID NO: 609224
gaacucaucccuaucuaag

SEQ ID NO: 609226 - RNA, 19 nt, Artificial Sequence
  Description of Artificial Sequence: Synthetic oligonucleotide
  Sense strand starting at position 3671 of SEQ ID NO: 585049
agggaugaguuccucuuga

SEQ ID NO: 609227 - RNA, 19 nt, Artificial Sequence
  Description of Artificial Sequence: Synthetic oligonucleotide
  Antisense strand to SEQ ID NO: 609226
ucaagaggaacucaucccu

SEQ ID NO: 609228 - RNA, 19 nt, Artificial Sequence
  Description of Artificial Sequence: Synthetic oligonucleotide
  Sense strand starting at position 3740 of SEQ ID NO: 585049
uggagcacuccucagcaau

SEQ ID NO: 609229 - RNA, 19 nt, Artificial Sequence
  Description of Artificial Sequence: Synthetic oligonucleotide
  Antisense strand to SEQ ID NO: 609228
auugcugaggagugcucca

SEQ ID NO: 609230 - RNA, 19 nt, Artificial Sequence
  Description of Artificial Sequence: Synthetic oligonucleotide
  Sense strand starting at position 3811 of SEQ ID NO: 585049
ccugaccacugguuuauaa

SEQ ID NO: 609231 - RNA, 19 nt, Artificial Sequence
  Description of Artificial Sequence: Synthetic oligonucleotide
  Antisense strand to SEQ ID NO: 609230
uuauaaaccaguggucagg

SEQ ID NO: 609232 - RNA, 19 nt, Artificial Sequence
  Description of Artificial Sequence: Synthetic oligonucleotide
  Sense strand starting at position 3813 of SEQ ID NO: 585049
ugaccacugguuuauaauc

SEQ ID NO: 609233 - RNA, 19 nt, Artificial Sequence
  Description of Artificial Sequence: Synthetic oligonucleotide
  Antisense strand to SEQ ID NO: 609232
gauuauaaaccagugguca

SEQ ID NO: 609234 - RNA, 19 nt, Artificial Sequence
  Description of Artificial Sequence: Synthetic oligonucleotide
  Sense strand starting at position 3826 of SEQ ID NO: 585049
auaaucugaguuugaacca

SEQ ID NO: 609235 - RNA, 19 nt, Artificial Sequence
  Description of Artificial Sequence: Synthetic oligonucleotide
  Antisense strand to SEQ ID NO: 609234
ugguucaaacucagauuau

SEQ ID NO: 609236 - RNA, 19 nt, Artificial Sequence
  Description of Artificial Sequence: Synthetic oligonucleotide
  Sense strand starting at position 3856 of SEQ ID NO: 585049
agucuuuaagguuacuaga

SEQ ID NO: 609237 - RNA, 19 nt, Artificial Sequence
  Description of Artificial Sequence: Synthetic oligonucleotide
  Antisense strand to SEQ ID NO: 609236
ucuaguaaccuuaaagacu

SEQ ID NO: 609238 - RNA, 19 nt, Artificial Sequence
  Description of Artificial Sequence: Synthetic oligonucleotide
  Sense strand starting at position 3889 of SEQ ID NO: 585049
cgauaugcauuuguaugca

SEQ ID NO: 609239 - RNA, 19 nt, Artificial Sequence
  Description of Artificial Sequence: Synthetic oligonucleotide
  Antisense strand to SEQ ID NO: 609238
ugcauacaaaugcauaucg

SEQ ID NO: 609240 - RNA, 19 nt, Artificial Sequence
  Description of Artificial Sequence: Synthetic oligonucleotide
  Sense strand starting at position 3893 of SEQ ID NO: 585049
augcauuuguaugcacauu

SEQ ID NO: 609241 - RNA, 19 nt, Artificial Sequence
  Description of Artificial Sequence: Synthetic oligonucleotide
  Antisense strand to SEQ ID NO: 609240
aaugugcauacaaaugcau

SEQ ID NO: 609242 - RNA, 19 nt, Artificial Sequence
  Description of Artificial Sequence: Synthetic oligonucleotide
  Sense strand starting at position 3929 of SEQ ID NO: 585049
ccaggcaucauaugggaca

SEQ ID NO: 609243 - RNA, 19 nt, Artificial Sequence
  Description of Artificial Sequence: Synthetic oligonucleotide
  Antisense strand to SEQ ID NO: 609242
ugucccauaugaugccugg

SEQ ID NO: 609244 - RNA, 19 nt, Artificial Sequence
  Description of Artificial Sequence: Synthetic oligonucleotide
  Sense strand starting at position 3941 of SEQ ID NO: 585049
ugggacaccuucuugaaau

SEQ ID NO: 609245 - RNA, 19 nt, Artificial Sequence
  Description of Artificial Sequence: Synthetic oligonucleotide
  Antisense strand to SEQ ID NO: 609244
auuucaagaagguguccca

SEQ ID NO: 609246 - RNA, 19 nt, Artificial Sequence
  Description of Artificial Sequence: Synthetic oligonucleotide
  Sense strand starting at position 3970 of SEQ ID NO: 585049
gcaauuaagucccugaaag

SEQ ID NO: 609247 - RNA, 19 nt, Artificial Sequence
  Description of Artificial Sequence: Synthetic oligonucleotide
  Antisense strand to SEQ ID NO: 609246
cuuucagggacuuaauugc

SEQ ID NO: 609248 - RNA, 19 nt, Artificial Sequence
  Description of Artificial Sequence: Synthetic oligonucleotide
  Sense strand starting at position 15 of SEQ ID NO: 585050
augauugacgcaugguaag

SEQ ID NO: 609249 - RNA, 19 nt, Artificial Sequence
  Description of Artificial Sequence: Synthetic oligonucleotide
  Antisense strand to SEQ ID NO: 609248
cuuaccaugcgucaaucau

SEQ ID NO: 609250 - RNA, 19 nt, Artificial Sequence
  Description of Artificial Sequence: Synthetic oligonucleotide
  Sense strand starting at position 41 of SEQ ID NO: 585050
gcguuugacaguuuguuau

SEQ ID NO: 609251 - RNA, 19 nt, Artificial Sequence
  Description of Artificial Sequence: Synthetic oligonucleotide
  Antisense strand to SEQ ID NO: 609250
auaacaaacugucaaacgc

SEQ ID NO: 609252 - RNA, 19 nt, Artificial Sequence
  Description of Artificial Sequence: Synthetic oligonucleotide
  Sense strand starting at position 43 of SEQ ID NO: 585050
guuugacaguuuguuauuc

SEQ ID NO: 609253 - RNA, 19 nt, Artificial Sequence
  Description of Artificial Sequence: Synthetic oligonucleotide
  Antisense strand to SEQ ID NO: 609252
gaauaacaaacugucaaac

SEQ ID NO: 609254 - RNA, 19 nt, Artificial Sequence
  Description of Artificial Sequence: Synthetic oligonucleotide
  Sense strand starting at position 232 of SEQ ID NO: 585050
gcugcagcgagcuauaaua

SEQ ID NO: 609255 - RNA, 19 nt, Artificial Sequence
  Description of Artificial Sequence: Synthetic oligonucleotide
  Antisense strand to SEQ ID NO: 609254
uauuauagcucgcugcagc

SEQ ID NO: 609256 - RNA, 19 nt, Artificial Sequence
  Description of Artificial Sequence: Synthetic oligonucleotide
  Sense strand starting at position 621 of SEQ ID NO: 585050
acaguaugaguggaaaugu

SEQ ID NO: 609257 - RNA, 19 nt, Artificial Sequence
  Description of Artificial Sequence: Synthetic oligonucleotide
  Antisense strand to SEQ ID NO: 609256
acauuuccacucauacugu

SEQ ID NO: 609258 - RNA, 19 nt, Artificial Sequence
  Description of Artificial Sequence: Synthetic oligonucleotide
  Sense strand starting at position 630 of SEQ ID NO: 585050
guggaaauguucucacauu

SEQ ID NO: 609259 - RNA, 19 nt, Artificial Sequence
  Description of Artificial Sequence: Synthetic oligonucleotide
  Antisense strand to SEQ ID NO: 609258
aaugugagaacauuuccac

SEQ ID NO: 609260 - RNA, 19 nt, Artificial Sequence
  Description of Artificial Sequence: Synthetic oligonucleotide
  Sense strand starting at position 672 of SEQ ID NO: 585050
guaagcuaaaguugaaaga

SEQ ID NO: 609261 - RNA, 19 nt, Artificial Sequence
  Description of Artificial Sequence: Synthetic oligonucleotide
  Antisense strand to SEQ ID NO: 609260
ucuuucaacuuuagcuuac

SEQ ID NO: 609262 - RNA, 19 nt, Artificial Sequence
  Description of Artificial Sequence: Synthetic oligonucleotide
  Sense strand starting at position 881 of SEQ ID NO: 585050
cugaguaacuacguuugau

SEQ ID NO: 609263 - RNA, 19 nt, Artificial Sequence
  Description of Artificial Sequence: Synthetic oligonucleotide
  Antisense strand to SEQ ID NO: 609262
aucaaacguaguuacucag

SEQ ID NO: 609264 - RNA, 19 nt, Artificial Sequence
  Description of Artificial Sequence: Synthetic oligonucleotide
  Sense strand starting at position 893 of SEQ ID NO: 585050
guuugauuuaguggucgag

SEQ ID NO: 609265 - RNA, 19 nt, Artificial Sequence
  Description of Artificial Sequence: Synthetic oligonucleotide
  Antisense strand to SEQ ID NO: 609264
cucgaccacuaaaucaaac

SEQ ID NO: 609266 - RNA, 19 nt, Artificial Sequence
  Description of Artificial Sequence: Synthetic oligonucleotide
  Sense strand starting at position 896 of SEQ ID NO: 585050
ugauuuaguggucgagcca

SEQ ID NO: 609267 - RNA, 19 nt, Artificial Sequence
  Description of Artificial Sequence: Synthetic oligonucleotide
  Antisense strand to SEQ ID NO: 609266
uggcucgaccacuaaauca

SEQ ID NO: 609268 - RNA, 19 nt, Artificial Sequence
  Description of Artificial Sequence: Synthetic oligonucleotide
  Sense strand starting at position 1036 of SEQ ID NO: 585050
gugagaccugggcaucaga

SEQ ID NO: 609269 - RNA, 19 nt, Artificial Sequence
  Description of Artificial Sequence: Synthetic oligonucleotide
  Antisense strand to SEQ ID NO: 609268
ucugaugcccaggucucac

SEQ ID NO: 609270 - RNA, 19 nt, Artificial Sequence
  Description of Artificial Sequence: Synthetic oligonucleotide
  Sense strand starting at position 1071 of SEQ ID NO: 585050
aggugauucuaagcaaagu

SEQ ID NO: 609271 - RNA, 19 nt, Artificial Sequence
  Description of Artificial Sequence: Synthetic oligonucleotide
  Antisense strand to SEQ ID NO: 609270
acuuugcuuagaaucaccu

SEQ ID NO: 609272 - RNA, 19 nt, Artificial Sequence
  Description of Artificial Sequence: Synthetic oligonucleotide
  Sense strand starting at position 1072 of SEQ ID NO: 585050
ggugauucuaagcaaaguu

SEQ ID NO: 609273 - RNA, 19 nt, Artificial Sequence
  Description of Artificial Sequence: Synthetic oligonucleotide
  Antisense strand to SEQ ID NO: 609272
aacuuugcuuagaaucacc

SEQ ID NO: 609274 - RNA, 19 nt, Artificial Sequence
  Description of Artificial Sequence: Synthetic oligonucleotide
  Sense strand starting at position 1093 of SEQ ID NO: 585050
ggaaccgcuggguauuaaa

SEQ ID NO: 609275 - RNA, 19 nt, Artificial Sequence
  Description of Artificial Sequence: Synthetic oligonucleotide
  Antisense strand to SEQ ID NO: 609274
uuuaauacccagcgguucc

SEQ ID NO: 609276 - RNA, 19 nt, Artificial Sequence
  Description of Artificial Sequence: Synthetic oligonucleotide
  Sense strand starting at position 1601 of SEQ ID NO: 585050
cgggaaguucguuacuuuc

SEQ ID NO: 609277 - RNA, 19 nt, Artificial Sequence
  Description of Artificial Sequence: Synthetic oligonucleotide
  Antisense strand to SEQ ID NO: 609276
gaaaguaacgaacuucccg

SEQ ID NO: 609278 - RNA, 19 nt, Artificial Sequence
  Description of Artificial Sequence: Synthetic oligonucleotide
  Sense strand starting at position 2154 of SEQ ID NO: 585050
ggcaucgugaaaggaugau

SEQ ID NO: 609279 - RNA, 19 nt, Artificial Sequence
  Description of Artificial Sequence: Synthetic oligonucleotide
  Antisense strand to SEQ ID NO: 609278
aucauccuuucacgaugcc

SEQ ID NO: 609280 - RNA, 19 nt, Artificial Sequence
  Description of Artificial Sequence: Synthetic oligonucleotide
  Sense strand starting at position 2218 of SEQ ID NO: 585050
ggaagagaauuggaucucu

SEQ ID NO: 609281 - RNA, 19 nt, Artificial Sequence
  Description of Artificial Sequence: Synthetic oligonucleotide
  Antisense strand to SEQ ID NO: 609280
agagauccaauucucuucc

SEQ ID NO: 609282 - RNA, 19 nt, Artificial Sequence
  Description of Artificial Sequence: Synthetic oligonucleotide
  Sense strand starting at position 2246 of SEQ ID NO: 585050
aggcgaugugcacaaauca

SEQ ID NO: 609283 - RNA, 19 nt, Artificial Sequence
  Description of Artificial Sequence: Synthetic oligonucleotide
  Antisense strand to SEQ ID NO: 609282
ugauuugugcacaucgccu

SEQ ID NO: 609284 - RNA, 19 nt, Artificial Sequence
  Description of Artificial Sequence: Synthetic oligonucleotide
  Sense strand starting at position 2359 of SEQ ID NO: 585050
ggcaauaauagucgacugu

SEQ ID NO: 609285 - RNA, 19 nt, Artificial Sequence
  Description of Artificial Sequence: Synthetic oligonucleotide
  Antisense strand to SEQ ID NO: 609284
acagucgacuauuauugcc

SEQ ID NO: 609286 - RNA, 19 nt, Artificial Sequence
  Description of Artificial Sequence: Synthetic oligonucleotide
  Sense strand starting at position 2440 of SEQ ID NO: 585050
aggugaucgccuuucgcga

SEQ ID NO: 609287 - RNA, 19 nt, Artificial Sequence
  Description of Artificial Sequence: Synthetic oligonucleotide
  Antisense strand to SEQ ID NO: 609286
ucgcgaaaggcgaucaccu

SEQ ID NO: 609288 - RNA, 19 nt, Artificial Sequence
  Description of Artificial Sequence: Synthetic oligonucleotide
  Sense strand starting at position 2580 of SEQ ID NO: 585050
ugcuaagcacuccauaguu

SEQ ID NO: 609289 - RNA, 19 nt, Artificial Sequence
  Description of Artificial Sequence: Synthetic oligonucleotide
  Antisense strand to SEQ ID NO: 609288
aacuauggagugcuuagca

SEQ ID NO: 609290 - RNA, 19 nt, Artificial Sequence
  Description of Artificial Sequence: Synthetic oligonucleotide
  Sense strand starting at position 2677 of SEQ ID NO: 585050
cucucuucuccagaugugu

SEQ ID NO: 609291 - RNA, 19 nt, Artificial Sequence
  Description of Artificial Sequence: Synthetic oligonucleotide
  Antisense strand to SEQ ID NO: 609290
acacaucuggagaagagag

SEQ ID NO: 609292 - RNA, 19 nt, Artificial Sequence
  Description of Artificial Sequence: Synthetic oligonucleotide
  Sense strand starting at position 2686 of SEQ ID NO: 585050
ccagauguguuguuccaua

SEQ ID NO: 609293 - RNA, 19 nt, Artificial Sequence
  Description of Artificial Sequence: Synthetic oligonucleotide
  Antisense strand to SEQ ID NO: 609292
uauggaacaacacaucugg

SEQ ID NO: 609294 - RNA, 19 nt, Artificial Sequence
  Description of Artificial Sequence: Synthetic oligonucleotide
  Sense strand starting at position 2691 of SEQ ID NO: 585050
uguguuguuccauagaugg

SEQ ID NO: 609295 - RNA, 19 nt, Artificial Sequence
  Description of Artificial Sequence: Synthetic oligonucleotide
  Antisense strand to SEQ ID NO: 609294
ccaucuauggaacaacaca

SEQ ID NO: 609296 - RNA, 19 nt, Artificial Sequence
  Description of Artificial Sequence: Synthetic oligonucleotide
  Sense strand starting at position 2693 of SEQ ID NO: 585050
uguuguuccauagauggau

SEQ ID NO: 609297 - RNA, 19 nt, Artificial Sequence
  Description of Artificial Sequence: Synthetic oligonucleotide
  Antisense strand to SEQ ID NO: 609296
auccaucuauggaacaaca

SEQ ID NO: 609298 - RNA, 19 nt, Artificial Sequence
  Description of Artificial Sequence: Synthetic oligonucleotide
  Sense strand starting at position 2726 of SEQ ID NO: 585050
ccauuaccacgcuguaaau

SEQ ID NO: 609299 - RNA, 19 nt, Artificial Sequence
  Description of Artificial Sequence: Synthetic oligonucleotide
  Antisense strand to SEQ ID NO: 609298
auuuacagcgugguaaugg

SEQ ID NO: 609300 - RNA, 19 nt, Artificial Sequence
  Description of Artificial Sequence: Synthetic oligonucleotide
  Sense strand starting at position 2814 of SEQ ID NO: 585050
auaccaguugcuuacucau

SEQ ID NO: 609301 - RNA, 19 nt, Artificial Sequence
  Description of Artificial Sequence: Synthetic oligonucleotide
  Antisense strand to SEQ ID NO: 609300
augaguaagcaacugguau

SEQ ID NO: 609302 - RNA, 19 nt, Artificial Sequence
  Description of Artificial Sequence: Synthetic oligonucleotide
  Sense strand starting at position 2817 of SEQ ID NO: 585050
ccaguugcuuacucaugua

SEQ ID NO: 609303 - RNA, 19 nt, Artificial Sequence
  Description of Artificial Sequence: Synthetic oligonucleotide
  Antisense strand to SEQ ID NO: 609302
uacaugaguaagcaacugg

SEQ ID NO: 609304 - RNA, 19 nt, Artificial Sequence
  Description of Artificial Sequence: Synthetic oligonucleotide
  Sense strand starting at position 2837 of SEQ ID NO: 585050
gcauguauacaacauguau

SEQ ID NO: 609305 - RNA, 19 nt, Artificial Sequence
  Description of Artificial Sequence: Synthetic oligonucleotide
  Antisense strand to SEQ ID NO: 609304
auacauguuguauacaugc

SEQ ID NO: 609306 - RNA, 19 nt, Artificial Sequence
  Description of Artificial Sequence: Synthetic oligonucleotide
  Sense strand starting at position 3065 of SEQ ID NO: 585050
ugaaguauuucuggaaccu

SEQ ID NO: 609307 - RNA, 19 nt, Artificial Sequence
  Description of Artificial Sequence: Synthetic oligonucleotide
  Antisense strand to SEQ ID NO: 609306
agguuccagaaauacuuca

SEQ ID NO: 609308 - RNA, 19 nt, Artificial Sequence
  Description of Artificial Sequence: Synthetic oligonucleotide
  Sense strand starting at position 3150 of SEQ ID NO: 585050
acagacaguucuuccagau

SEQ ID NO: 609309 - RNA, 19 nt, Artificial Sequence
  Description of Artificial Sequence: Synthetic oligonucleotide
  Antisense strand to SEQ ID NO: 609308
aucuggaagaacugucugu

SEQ ID NO: 609310 - RNA, 19 nt, Artificial Sequence
  Description of Artificial Sequence: Synthetic oligonucleotide
  Sense strand starting at position 3154 of SEQ ID NO: 585050
acaguucuuccagauucua

SEQ ID NO: 609311 - RNA, 19 nt, Artificial Sequence
  Description of Artificial Sequence: Synthetic oligonucleotide
  Antisense strand to SEQ ID NO: 609310
uagaaucuggaagaacugu

SEQ ID NO: 609312 - RNA, 19 nt, Artificial Sequence
  Description of Artificial Sequence: Synthetic oligonucleotide
  Sense strand starting at position 3368 of SEQ ID NO: 585050
auugauuacuagucaccua

SEQ ID NO: 609313 - RNA, 19 nt, Artificial Sequence
  Description of Artificial Sequence: Synthetic oligonucleotide
  Antisense strand to SEQ ID NO: 609312
uaggugacuaguaaucaau

SEQ ID NO: 609314 - RNA, 19 nt, Artificial Sequence
  Description of Artificial Sequence: Synthetic oligonucleotide
  Sense strand starting at position 3435 of SEQ ID NO: 585050
uuugguguguucuuagaaa

SEQ ID NO: 609315 - RNA, 19 nt, Artificial Sequence
  Description of Artificial Sequence: Synthetic oligonucleotide
  Antisense strand to SEQ ID NO: 609314
uuucuaagaacacaccaaa

SEQ ID NO: 609316 - RNA, 19 nt, Artificial Sequence
  Description of Artificial Sequence: Synthetic oligonucleotide
  Sense strand starting at position 3862 of SEQ ID NO: 585050
aucuguuagggcugggauu

SEQ ID NO: 609317 - RNA, 19 nt, Artificial Sequence
  Description of Artificial Sequence: Synthetic oligonucleotide
  Antisense strand to SEQ ID NO: 609316
aaucccagcccuaacagau

SEQ ID NO: 609318 - RNA, 19 nt, Artificial Sequence
  Description of Artificial Sequence: Synthetic oligonucleotide
  Sense strand starting at position 3881 of SEQ ID NO: 585050
ggaugaggccagugaggua

SEQ ID NO: 609319 - RNA, 19 nt, Artificial Sequence
  Description of Artificial Sequence: Synthetic oligonucleotide
  Antisense strand to SEQ ID NO: 609318
uaccucacuggccucaucc

SEQ ID NO: 609320 - RNA, 19 nt, Artificial Sequence
  Description of Artificial Sequence: Synthetic oligonucleotide
  Sense strand starting at position 3909 of SEQ ID NO: 585050
aguacaggcccagauguaa

SEQ ID NO: 609321 - RNA, 19 nt, Artificial Sequence
  Description of Artificial Sequence: Synthetic oligonucleotide
  Antisense strand to SEQ ID NO: 609320
uuacaucugggccuguacu

SEQ ID NO: 609322 - RNA, 19 nt, Artificial Sequence
  Description of Artificial Sequence: Synthetic oligonucleotide
  Sense strand starting at position 3921 of SEQ ID NO: 585050
gauguaaacugcucugucu

SEQ ID NO: 609323 - RNA, 19 nt, Artificial Sequence
  Description of Artificial Sequence: Synthetic oligonucleotide
  Antisense strand to SEQ ID NO: 609322
agacagagcaguuuacauc

SEQ ID NO: 609324 - RNA, 19 nt, Artificial Sequence
  Description of Artificial Sequence: Synthetic oligonucleotide
  Sense strand starting at position 3923 of SEQ ID NO: 585050
uguaaacugcucugucuua

SEQ ID NO: 609325 - RNA, 19 nt, Artificial Sequence
  Description of Artificial Sequence: Synthetic oligonucleotide
  Antisense strand to SEQ ID NO: 609324
uaagacagagcaguuuaca

SEQ ID NO: 609326 - RNA, 19 nt, Artificial Sequence
  Description of Artificial Sequence: Synthetic oligonucleotide
  Sense strand starting at position 3924 of SEQ ID NO: 585050
guaaacugcucugucuuau

SEQ ID NO: 609327 - RNA, 19 nt, Artificial Sequence
  Description of Artificial Sequence: Synthetic oligonucleotide
  Antisense strand to SEQ ID NO: 609326
auaagacagagcaguuuac

SEQ ID NO: 609328 - RNA, 19 nt, Artificial Sequence
  Description of Artificial Sequence: Synthetic oligonucleotide
  Sense strand starting at position 101 of SEQ ID NO: 585051
ugaugaccaucuuuauugu

SEQ ID NO: 609329 - RNA, 19 nt, Artificial Sequence
  Description of Artificial Sequence: Synthetic oligonucleotide
  Antisense strand to SEQ ID NO: 609328
acaauaaagauggucauca

SEQ ID NO: 609330 - RNA, 19 nt, Artificial Sequence
  Description of Artificial Sequence: Synthetic oligonucleotide
  Sense strand starting at position 157 of SEQ ID NO: 585051
gauggauuccagugcucau

SEQ ID NO: 609331 - RNA, 19 nt, Artificial Sequence
  Description of Artificial Sequence: Synthetic oligonucleotide
  Antisense strand to SEQ ID NO: 609330
augagcacuggaauccauc

SEQ ID NO: 609332 - RNA, 19 nt, Artificial Sequence
  Description of Artificial Sequence: Synthetic oligonucleotide
  Sense strand starting at position 169 of SEQ ID NO: 585051
ugcucaucggaauauaaua

SEQ ID NO: 609333 - RNA, 19 nt, Artificial Sequence
  Description of Artificial Sequence: Synthetic oligonucleotide
  Antisense strand to SEQ ID NO: 609332
uauuauauuccgaugagca

SEQ ID NO: 609334 - RNA, 19 nt, Artificial Sequence
  Description of Artificial Sequence: Synthetic oligonucleotide
  Sense strand starting at position 205 of SEQ ID NO: 585051
gagagacagucuguuucca

SEQ ID NO: 609335 - RNA, 19 nt, Artificial Sequence
  Description of Artificial Sequence: Synthetic oligonucleotide
  Antisense strand to SEQ ID NO: 609334
uggaaacagacugucucuc

SEQ ID NO: 609336 - RNA, 19 nt, Artificial Sequence
  Description of Artificial Sequence: Synthetic oligonucleotide
  Sense strand starting at position 207 of SEQ ID NO: 585051
gagacagucuguuuccaaa

SEQ ID NO: 609337 - RNA, 19 nt, Artificial Sequence
  Description of Artificial Sequence: Synthetic oligonucleotide
  Antisense strand to SEQ ID NO: 609336
uuuggaaacagacugucuc

SEQ ID NO: 609338 - RNA, 19 nt, Artificial Sequence
  Description of Artificial Sequence: Synthetic oligonucleotide
  Sense strand starting at position 294 of SEQ ID NO: 585051
uauugauaugcagguccca

SEQ ID NO: 609339 - RNA, 19 nt, Artificial Sequence
  Description of Artificial Sequence: Synthetic oligonucleotide
  Antisense strand to SEQ ID NO: 609338
ugggaccugcauaucaaua

SEQ ID NO: 609340 - RNA, 19 nt, Artificial Sequence
  Description of Artificial Sequence: Synthetic oligonucleotide
  Sense strand starting at position 577 of SEQ ID NO: 585051
cgacucaucuaauccagga

SEQ ID NO: 609341 - RNA, 19 nt, Artificial Sequence
  Description of Artificial Sequence: Synthetic oligonucleotide
  Antisense strand to SEQ ID NO: 609340
uccuggauuagaugagucg

SEQ ID NO: 609342 - RNA, 19 nt, Artificial Sequence
  Description of Artificial Sequence: Synthetic oligonucleotide
  Sense strand starting at position 627 of SEQ ID NO: 585051
uuuguugcgggcuuuguaa

SEQ ID NO: 609343 - RNA, 19 nt, Artificial Sequence
  Description of Artificial Sequence: Synthetic oligonucleotide
  Antisense strand to SEQ ID NO: 609342
uuacaaagcccgcaacaaa

SEQ ID NO: 609344 - RNA, 19 nt, Artificial Sequence
  Description of Artificial Sequence: Synthetic oligonucleotide
  Sense strand starting at position 651 of SEQ ID NO: 585051
ugucaauccuuccucgaaa

SEQ ID NO: 609345 - RNA, 19 nt, Artificial Sequence
  Description of Artificial Sequence: Synthetic oligonucleotide
  Antisense strand to SEQ ID NO: 609344
uuucgaggaaggauugaca

SEQ ID NO: 609346 - RNA, 19 nt, Artificial Sequence
  Description of Artificial Sequence: Synthetic oligonucleotide
  Sense strand starting at position 652 of SEQ ID NO: 585051
gucaauccuuccucgaaac

SEQ ID NO: 609347 - RNA, 19 nt, Artificial Sequence
  Description of Artificial Sequence: Synthetic oligonucleotide
  Antisense strand to SEQ ID NO: 609346
guuucgaggaaggauugac

SEQ ID NO: 609348 - RNA, 19 nt, Artificial Sequence
  Description of Artificial Sequence: Synthetic oligonucleotide
  Sense strand starting at position 990 of SEQ ID NO: 585051
gacuuaggacucuguuaac

SEQ ID NO: 609349 - RNA, 19 nt, Artificial Sequence
  Description of Artificial Sequence: Synthetic oligonucleotide
  Antisense strand to SEQ ID NO: 609348
guuaacagaguccuaaguc

SEQ ID NO: 609350 - RNA, 19 nt, Artificial Sequence
  Description of Artificial Sequence: Synthetic oligonucleotide
  Sense strand starting at position 1085 of SEQ ID NO: 585051
aggacacccguuuacuaau

SEQ ID NO: 609351 - RNA, 19 nt, Artificial Sequence
  Description of Artificial Sequence: Synthetic oligonucleotide
  Antisense strand to SEQ ID NO: 609350
auuaguaaacggguguccu

SEQ ID NO: 609352 - RNA, 19 nt, Artificial Sequence
  Description of Artificial Sequence: Synthetic oligonucleotide
  Sense strand starting at position 1192 of SEQ ID NO: 585051
cugaccucucggcagaaca

SEQ ID NO: 609353 - RNA, 19 nt, Artificial Sequence
  Description of Artificial Sequence: Synthetic oligonucleotide
  Antisense strand to SEQ ID NO: 609352
uguucugccgagaggucag

SEQ ID NO: 609354 - RNA, 19 nt, Artificial Sequence
  Description of Artificial Sequence: Synthetic oligonucleotide
  Sense strand starting at position 2253 of SEQ ID NO: 585051
uucugagugcggcagauuu

SEQ ID NO: 609355 - RNA, 19 nt, Artificial Sequence
  Description of Artificial Sequence: Synthetic oligonucleotide
  Antisense strand to SEQ ID NO: 609354
aaaucugccgcacucagaa

SEQ ID NO: 609356 - RNA, 19 nt, Artificial Sequence
  Description of Artificial Sequence: Synthetic oligonucleotide
  Sense strand starting at position 2399 of SEQ ID NO: 585051
cuggaucucugaccucaga

SEQ ID NO: 609357 - RNA, 19 nt, Artificial Sequence
  Description of Artificial Sequence: Synthetic oligonucleotide
  Antisense strand to SEQ ID NO: 609356
ucugaggucagagauccag

SEQ ID NO: 609358 - RNA, 19 nt, Artificial Sequence
  Description of Artificial Sequence: Synthetic oligonucleotide
  Sense strand starting at position 2525 of SEQ ID NO: 585051
guuauuaaacucugaaguu

SEQ ID NO: 609359 - RNA, 19 nt, Artificial Sequence
  Description of Artificial Sequence: Synthetic oligonucleotide
  Antisense strand to SEQ ID NO: 609358
aacuucagaguuuaauaac

SEQ ID NO: 609360 - RNA, 19 nt, Artificial Sequence
  Description of Artificial Sequence: Synthetic oligonucleotide
  Sense strand starting at position 2907 of SEQ ID NO: 585051
cuaucauauuacuccguau

SEQ ID NO: 609361 - RNA, 19 nt, Artificial Sequence
  Description of Artificial Sequence: Synthetic oligonucleotide
  Antisense strand to SEQ ID NO: 609360
auacggaguaauaugauag

SEQ ID NO: 609362 - RNA, 19 nt, Artificial Sequence
  Description of Artificial Sequence: Synthetic oligonucleotide
  Sense strand starting at position 2909 of SEQ ID NO: 585051
aucauauuacuccguauua

SEQ ID NO: 609363 - RNA, 19 nt, Artificial Sequence
  Description of Artificial Sequence: Synthetic oligonucleotide
  Antisense strand to SEQ ID NO: 609362
uaauacggaguaauaugau

SEQ ID NO: 609364 - RNA, 19 nt, Artificial Sequence
  Description of Artificial Sequence: Synthetic oligonucleotide
  Sense strand starting at position 2910 of SEQ ID NO: 585051
ucauauuacuccguauuau

SEQ ID NO: 609365 - RNA, 19 nt, Artificial Sequence
  Description of Artificial Sequence: Synthetic oligonucleotide
  Antisense strand to SEQ ID NO: 609364
auaauacggaguaauauga

SEQ ID NO: 609366 - RNA, 19 nt, Artificial Sequence
  Description of Artificial Sequence: Synthetic oligonucleotide
  Sense strand starting at position 2918 of SEQ ID NO: 585051
cuccguauuauugaucgga

SEQ ID NO: 609367 - RNA, 19 nt, Artificial Sequence
  Description of Artificial Sequence: Synthetic oligonucleotide
  Antisense strand to SEQ ID NO: 609366
uccgaucaauaauacggag

SEQ ID NO: 609368 - RNA, 19 nt, Artificial Sequence
  Description of Artificial Sequence: Synthetic oligonucleotide
  Sense strand starting at position 2920 of SEQ ID NO: 585051
ccguauuauugaucggaaa

SEQ ID NO: 609369 - RNA, 19 nt, Artificial Sequence
  Description of Artificial Sequence: Synthetic oligonucleotide
  Antisense strand to SEQ ID NO: 609368
uuuccgaucaauaauacgg

SEQ ID NO: 609370 - RNA, 19 nt, Artificial Sequence
  Description of Artificial Sequence: Synthetic oligonucleotide
  Sense strand starting at position 2921 of SEQ ID NO: 585051
cguauuauugaucggaaau

SEQ ID NO: 609371 - RNA, 19 nt, Artificial Sequence
  Description of Artificial Sequence: Synthetic oligonucleotide
  Antisense strand to SEQ ID NO: 609370
auuuccgaucaauaauacg

SEQ ID NO: 609372 - RNA, 19 nt, Artificial Sequence
  Description of Artificial Sequence: Synthetic oligonucleotide
  Sense strand starting at position 2922 of SEQ ID NO: 585051
guauuauugaucggaaaua

SEQ ID NO: 609373 - RNA, 19 nt, Artificial Sequence
  Description of Artificial Sequence: Synthetic oligonucleotide
  Antisense strand to SEQ ID NO: 609372
uauuuccgaucaauaauac

SEQ ID NO: 609374 - RNA, 19 nt, Artificial Sequence
  Description of Artificial Sequence: Synthetic oligonucleotide
  Sense strand starting at position 2940 of SEQ ID NO: 585051
acauguauuugcuuucuuu

SEQ ID NO: 609375 - RNA, 19 nt, Artificial Sequence
  Description of Artificial Sequence: Synthetic oligonucleotide
  Antisense strand to SEQ ID NO: 609374
aaagaaagcaaauacaugu

SEQ ID NO: 609376 - RNA, 19 nt, Artificial Sequence
  Description of Artificial Sequence: Synthetic oligonucleotide
  Sense strand starting at position 3124 of SEQ ID NO: 585051
gguucugaggaaugugaac

SEQ ID NO: 609377 - RNA, 19 nt, Artificial Sequence
  Description of Artificial Sequence: Synthetic oligonucleotide
  Antisense strand to SEQ ID NO: 609376
guucacauuccucagaacc

SEQ ID NO: 609378 - RNA, 19 nt, Artificial Sequence
  Description of Artificial Sequence: Synthetic oligonucleotide
  Sense strand starting at position 3172 of SEQ ID NO: 585051
ucgccauuucuguacuugu

SEQ ID NO: 609379 - RNA, 19 nt, Artificial Sequence
  Description of Artificial Sequence: Synthetic oligonucleotide
  Antisense strand to SEQ ID NO: 609378
acaaguacagaaauggcga

SEQ ID NO: 609380 - RNA, 19 nt, Artificial Sequence
  Description of Artificial Sequence: Synthetic oligonucleotide
  Sense strand starting at position 3194 of SEQ ID NO: 585051
ccauaucuucugggcaaca

SEQ ID NO: 609381 - RNA, 19 nt, Artificial Sequence
  Description of Artificial Sequence: Synthetic oligonucleotide
  Antisense strand to SEQ ID NO: 609380
uguugcccagaagauaugg

SEQ ID NO: 609382 - RNA, 19 nt, Artificial Sequence
  Description of Artificial Sequence: Synthetic oligonucleotide
  Sense strand starting at position 3234 of SEQ ID NO: 585051
guagaaagcccucaaucaa

SEQ ID NO: 609383 - RNA, 19 nt, Artificial Sequence
  Description of Artificial Sequence: Synthetic oligonucleotide
  Antisense strand to SEQ ID NO: 609382
uugauugagggcuuucuac

SEQ ID NO: 609384 - RNA, 19 nt, Artificial Sequence
  Description of Artificial Sequence: Synthetic oligonucleotide
  Sense strand starting at position 3323 of SEQ ID NO: 585051
gggagaguguuccuucuuc

SEQ ID NO: 609385 - RNA, 19 nt, Artificial Sequence
  Description of Artificial Sequence: Synthetic oligonucleotide
  Antisense strand to SEQ ID NO: 609384
gaagaaggaacacucuccc

SEQ ID NO: 609386 - RNA, 19 nt, Artificial Sequence
  Description of Artificial Sequence: Synthetic oligonucleotide
  Sense strand starting at position 3439 of SEQ ID NO: 585051
ccaccuuccugcuuagaga

SEQ ID NO: 609387 - RNA, 19 nt, Artificial Sequence
  Description of Artificial Sequence: Synthetic oligonucleotide
  Antisense strand to SEQ ID NO: 609386
ucucuaagcaggaaggugg

SEQ ID NO: 609388 - RNA, 19 nt, Artificial Sequence
  Description of Artificial Sequence: Synthetic oligonucleotide
  Sense strand starting at position 3462 of SEQ ID NO: 585051
acagaaucguuaguggacu

SEQ ID NO: 609389 - RNA, 19 nt, Artificial Sequence
  Description of Artificial Sequence: Synthetic oligonucleotide
  Antisense strand to SEQ ID NO: 609388
aguccacuaacgauucugu

SEQ ID NO: 609390 - RNA, 19 nt, Artificial Sequence
  Description of Artificial Sequence: Synthetic oligonucleotide
  Sense strand starting at position 3527 of SEQ ID NO: 585051
ggucuugagcaagaugauc

SEQ ID NO: 609391 - RNA, 19 nt, Artificial Sequence
  Description of Artificial Sequence: Synthetic oligonucleotide
  Antisense strand to SEQ ID NO: 609390
gaucaucuugcucaagacc

SEQ ID NO: 609392 - RNA, 19 nt, Artificial Sequence
  Description of Artificial Sequence: Synthetic oligonucleotide
  Sense strand starting at position 3532 of SEQ ID NO: 585051
ugagcaagaugaucaacuu

SEQ ID NO: 609393 - RNA, 19 nt, Artificial Sequence
  Description of Artificial Sequence: Synthetic oligonucleotide
  Antisense strand to SEQ ID NO: 609392
aaguugaucaucuugcuca

SEQ ID NO: 609394 - RNA, 19 nt, Artificial Sequence
  Description of Artificial Sequence: Synthetic oligonucleotide
  Sense strand starting at position 3606 of SEQ ID NO: 585051
ugaagcuucuauccagcaa

SEQ ID NO: 609395 - RNA, 19 nt, Artificial Sequence
  Description of Artificial Sequence: Synthetic oligonucleotide
  Antisense strand to SEQ ID NO: 609394
uugcuggauagaagcuuca

SEQ ID NO: 609396 - RNA, 19 nt, Artificial Sequence
  Description of Artificial Sequence: Synthetic oligonucleotide
  Sense strand starting at position 3675 of SEQ ID NO: 585051
cagucagaugaacguuuaa

SEQ ID NO: 609397 - RNA, 19 nt, Artificial Sequence
  Description of Artificial Sequence: Synthetic oligonucleotide
  Antisense strand to SEQ ID NO: 609396
uuaaacguucaucugacug

SEQ ID NO: 609398 - RNA, 19 nt, Artificial Sequence
  Description of Artificial Sequence: Synthetic oligonucleotide
  Sense strand starting at position 3713 of SEQ ID NO: 585051
acugguacuugaccaugaa

SEQ ID NO: 609399 - RNA, 19 nt, Artificial Sequence
  Description of Artificial Sequence: Synthetic oligonucleotide
  Antisense strand to SEQ ID NO: 609398
uucauggucaaguaccagu

SEQ ID NO: 609400 - RNA, 19 nt, Artificial Sequence
  Description of Artificial Sequence: Synthetic oligonucleotide
  Sense strand starting at position 3716 of SEQ ID NO: 585051
gguacuugaccaugaauga

SEQ ID NO: 609401 - RNA, 19 nt, Artificial Sequence
  Description of Artificial Sequence: Synthetic oligonucleotide
  Antisense strand to SEQ ID NO: 609400
ucauucauggucaaguacc

SEQ ID NO: 609402 - RNA, 19 nt, Artificial Sequence
  Description of Artificial Sequence: Synthetic oligonucleotide
  Sense strand starting at position 3794 of SEQ ID NO: 585051
acucuucuuguagauauau

SEQ ID NO: 609403 - RNA, 19 nt, Artificial Sequence
  Description of Artificial Sequence: Synthetic oligonucleotide
  Antisense strand to SEQ ID NO: 609402
auauaucuacaagaagagu

SEQ ID NO: 609404 - RNA, 19 nt, Artificial Sequence
  Description of Artificial Sequence: Synthetic oligonucleotide
  Sense strand starting at position 3916 of SEQ ID NO: 585051
ugcccagaguuccuaucaa

SEQ ID NO: 609405 - RNA, 19 nt, Artificial Sequence
  Description of Artificial Sequence: Synthetic oligonucleotide
  Antisense strand to SEQ ID NO: 609404
uugauaggaacucugggca

SEQ ID NO: 609406 - RNA, 19 nt, Artificial Sequence
  Description of Artificial Sequence: Synthetic oligonucleotide
  Sense strand starting at position 3972 of SEQ ID NO: 585051
ggagacuauuaacaccaga

SEQ ID NO: 609407 - RNA, 19 nt, Artificial Sequence
  Description of Artificial Sequence: Synthetic oligonucleotide
  Antisense strand to SEQ ID NO: 609406
ucugguguuaauagucucc

SEQ ID NO: 609408 - RNA, 19 nt, Artificial Sequence
  Description of Artificial Sequence: Synthetic oligonucleotide
  Sense strand starting at position 340 of SEQ ID NO: 585052
cgauccugaaccuguagaa

SEQ ID NO: 609409 - RNA, 19 nt, Artificial Sequence
  Description of Artificial Sequence: Synthetic oligonucleotide
  Antisense strand to SEQ ID NO: 609408
uucuacagguucaggaucg

SEQ ID NO: 609410 - RNA, 19 nt, Artificial Sequence
  Description of Artificial Sequence: Synthetic oligonucleotide
  Sense strand starting at position 352 of SEQ ID NO: 585052
uguagaaacuccuccauug

SEQ ID NO: 609411 - RNA, 19 nt, Artificial Sequence
  Description of Artificial Sequence: Synthetic oligonucleotide
  Antisense strand to SEQ ID NO: 609410
caauggaggaguuucuaca

SEQ ID NO: 609412 - RNA, 19 nt, Artificial Sequence
  Description of Artificial Sequence: Synthetic oligonucleotide
  Sense strand starting at position 891 of SEQ ID NO: 585052
cccugagaggcaggaguua

SEQ ID NO: 609413 - RNA, 19 nt, Artificial Sequence
  Description of Artificial Sequence: Synthetic oligonucleotide
  Antisense strand to SEQ ID NO: 609412
uaacuccugccucucaggg

SEQ ID NO: 609414 - RNA, 19 nt, Artificial Sequence
  Description of Artificial Sequence: Synthetic oligonucleotide
  Sense strand starting at position 900 of SEQ ID NO: 585052
gcaggaguuacaggcugaa

SEQ ID NO: 609415 - RNA, 19 nt, Artificial Sequence
  Description of Artificial Sequence: Synthetic oligonucleotide
  Antisense strand to SEQ ID NO: 609414
uucagccuguaacuccugc

SEQ ID NO: 609416 - RNA, 19 nt, Artificial Sequence
  Description of Artificial Sequence: Synthetic oligonucleotide
  Sense strand starting at position 1022 of SEQ ID NO: 585052
agguacgggucuccagaua

SEQ ID NO: 609417 - RNA, 19 nt, Artificial Sequence
  Description of Artificial Sequence: Synthetic oligonucleotide
  Antisense strand to SEQ ID NO: 609416
uaucuggagacccguaccu

SEQ ID NO: 609418 - RNA, 19 nt, Artificial Sequence
  Description of Artificial Sequence: Synthetic oligonucleotide
  Sense strand starting at position 1441 of SEQ ID NO: 585052
gguacagaguuuccauucu

SEQ ID NO: 609419 - RNA, 19 nt, Artificial Sequence
  Description of Artificial Sequence: Synthetic oligonucleotide
  Antisense strand to SEQ ID NO: 609418
agaauggaaacucuguacc

SEQ ID NO: 609420 - RNA, 19 nt, Artificial Sequence
  Description of Artificial Sequence: Synthetic oligonucleotide
  Sense strand starting at position 1519 of SEQ ID NO: 585052
ggcucuggccuugaaacau

SEQ ID NO: 609421 - RNA, 19 nt, Artificial Sequence
  Description of Artificial Sequence: Synthetic oligonucleotide
  Antisense strand to SEQ ID NO: 609420
auguuucaaggccagagcc

SEQ ID NO: 609422 - RNA, 19 nt, Artificial Sequence
  Description of Artificial Sequence: Synthetic oligonucleotide
  Sense strand starting at position 2246 of SEQ ID NO: 585052
gggugagccagguaaccau

SEQ ID NO: 609423 - RNA, 19 nt, Artificial Sequence
  Description of Artificial Sequence: Synthetic oligonucleotide
  Antisense strand to SEQ ID NO: 609422
augguuaccuggcucaccc

SEQ ID NO: 609424 - RNA, 19 nt, Artificial Sequence
  Description of Artificial Sequence: Synthetic oligonucleotide
  Sense strand starting at position 2350 of SEQ ID NO: 585052
cgauuuaucugcccagggu

SEQ ID NO: 609425 - RNA, 19 nt, Artificial Sequence
  Description of Artificial Sequence: Synthetic oligonucleotide
  Antisense strand to SEQ ID NO: 609424
acccugggcagauaaaucg

SEQ ID NO: 609426 - RNA, 19 nt, Artificial Sequence
  Description of Artificial Sequence: Synthetic oligonucleotide
  Sense strand starting at position 2546 of SEQ ID NO: 585052
ccuggaauucccugucacu

SEQ ID NO: 609427 - RNA, 19 nt, Artificial Sequence
  Description of Artificial Sequence: Synthetic oligonucleotide
  Antisense strand to SEQ ID NO: 609426
agugacagggaauuccagg

SEQ ID NO: 609428 - RNA, 19 nt, Artificial Sequence
  Description of Artificial Sequence: Synthetic oligonucleotide
  Sense strand starting at position 2760 of SEQ ID NO: 585052
gcagucagacgucagauca

SEQ ID NO: 609429 - RNA, 19 nt, Artificial Sequence
  Description of Artificial Sequence: Synthetic oligonucleotide
  Antisense strand to SEQ ID NO: 609428
ugaucugacgucugacugc

SEQ ID NO: 609430 - RNA, 19 nt, Artificial Sequence
  Description of Artificial Sequence: Synthetic oligonucleotide
  Sense strand starting at position 2834 of SEQ ID NO: 585052
uagagaauaucauagagag

SEQ ID NO: 609431 - RNA, 19 nt, Artificial Sequence
  Description of Artificial Sequence: Synthetic oligonucleotide
  Antisense strand to SEQ ID NO: 609430
cucucuaugauauucucua

SEQ ID NO: 609432 - RNA, 19 nt, Artificial Sequence
  Description of Artificial Sequence: Synthetic oligonucleotide
  Sense strand starting at position 2861 of SEQ ID NO: 585052
guguauuggagauagugga

SEQ ID NO: 609433 - RNA, 19 nt, Artificial Sequence
  Description of Artificial Sequence: Synthetic oligonucleotide
  Antisense strand to SEQ ID NO: 609432
uccacuaucuccaauacac

SEQ ID NO: 609434 - RNA, 19 nt, Artificial Sequence
  Description of Artificial Sequence: Synthetic oligonucleotide
  Sense strand starting at position 2903 of SEQ ID NO: 585052
agauacugcaucugagaag

SEQ ID NO: 609435 - RNA, 19 nt, Artificial Sequence
  Description of Artificial Sequence: Synthetic oligonucleotide
  Antisense strand to SEQ ID NO: 609434
cuucucagaugcaguaucu

SEQ ID NO: 609436 - RNA, 19 nt, Artificial Sequence
  Description of Artificial Sequence: Synthetic oligonucleotide
  Sense strand starting at position 2910 of SEQ ID NO: 585052
gcaucugagaaguggugaa

SEQ ID NO: 609437 - RNA, 19 nt, Artificial Sequence
  Description of Artificial Sequence: Synthetic oligonucleotide
  Antisense strand to SEQ ID NO: 609436
uucaccacuucucagaugc

SEQ ID NO: 609438 - RNA, 19 nt, Artificial Sequence
  Description of Artificial Sequence: Synthetic oligonucleotide
  Sense strand starting at position 3123 of SEQ ID NO: 585052
guauuagacaguuggauau

SEQ ID NO: 609439 - RNA, 19 nt, Artificial Sequence
  Description of Artificial Sequence: Synthetic oligonucleotide
  Antisense strand to SEQ ID NO: 609438
auauccaacugucuaauac

SEQ ID NO: 609440 - RNA, 19 nt, Artificial Sequence
  Description of Artificial Sequence: Synthetic oligonucleotide
  Sense strand starting at position 3129 of SEQ ID NO: 585052
gacaguuggauaugagagu

SEQ ID NO: 609441 - RNA, 19 nt, Artificial Sequence
  Description of Artificial Sequence: Synthetic oligonucleotide
  Antisense strand to SEQ ID NO: 609440
acucucauauccaacuguc

SEQ ID NO: 609442 - RNA, 19 nt, Artificial Sequence
  Description of Artificial Sequence: Synthetic oligonucleotide
  Sense strand starting at position 3150 of SEQ ID NO: 585052
gagagaauucugggccagu

SEQ ID NO: 609443 - RNA, 19 nt, Artificial Sequence
  Description of Artificial Sequence: Synthetic oligonucleotide
  Antisense strand to SEQ ID NO: 609442
acuggcccagaauucucuc

SEQ ID NO: 609444 - RNA, 19 nt, Artificial Sequence
  Description of Artificial Sequence: Synthetic oligonucleotide
  Sense strand starting at position 3151 of SEQ ID NO: 585052
agagaauucugggccagug

SEQ ID NO: 609445 - RNA, 19 nt, Artificial Sequence
  Description of Artificial Sequence: Synthetic oligonucleotide
  Antisense strand to SEQ ID NO: 609444
cacuggcccagaauucucu

SEQ ID NO: 609446 - RNA, 19 nt, Artificial Sequence
  Description of Artificial Sequence: Synthetic oligonucleotide
  Sense strand starting at position 3153 of SEQ ID NO: 585052
agaauucugggccagugau

SEQ ID NO: 609447 - RNA, 19 nt, Artificial Sequence
  Description of Artificial Sequence: Synthetic oligonucleotide
  Antisense strand to SEQ ID NO: 609446
aucacuggcccagaauucu

SEQ ID NO: 609448 - RNA, 19 nt, Artificial Sequence
  Description of Artificial Sequence: Synthetic oligonucleotide
  Sense strand starting at position 3181 of SEQ ID NO: 585052
acaagucauggagguguga

SEQ ID NO: 609449 - RNA, 19 nt, Artificial Sequence
  Description of Artificial Sequence: Synthetic oligonucleotide
  Antisense strand to SEQ ID NO: 609448
ucacaccuccaugacuugu

SEQ ID NO: 609450 - RNA, 19 nt, Artificial Sequence
  Description of Artificial Sequence: Synthetic oligonucleotide
  Sense strand starting at position 3183 of SEQ ID NO: 585052
aagucauggaggugugaau

SEQ ID NO: 609451 - RNA, 19 nt, Artificial Sequence
  Description of Artificial Sequence: Synthetic oligonucleotide
  Antisense strand to SEQ ID NO: 609450
auucacaccuccaugacuu

SEQ ID NO: 609452 - RNA, 19 nt, Artificial Sequence
  Description of Artificial Sequence: Synthetic oligonucleotide
  Sense strand starting at position 3197 of SEQ ID NO: 585052
ugaauagcaagugguuaau

SEQ ID NO: 609453 - RNA, 19 nt, Artificial Sequence
  Description of Artificial Sequence: Synthetic oligonucleotide
  Antisense strand to SEQ ID NO: 609452
auuaaccacuugcuauuca

SEQ ID NO: 609454 - RNA, 19 nt, Artificial Sequence
  Description of Artificial Sequence: Synthetic oligonucleotide
  Sense strand starting at position 3254 of SEQ ID NO: 585052
aggagugauuucuaaccuu

SEQ ID NO: 609455 - RNA, 19 nt, Artificial Sequence
  Description of Artificial Sequence: Synthetic oligonucleotide
  Antisense strand to SEQ ID NO: 609454
aagguuagaaaucacuccu

SEQ ID NO: 609456 - RNA, 19 nt, Artificial Sequence
  Description of Artificial Sequence: Synthetic oligonucleotide
  Sense strand starting at position 3277 of SEQ ID NO: 585052
uaaucuuuagaaggugaua

SEQ ID NO: 609457 - RNA, 19 nt, Artificial Sequence
  Description of Artificial Sequence: Synthetic oligonucleotide
  Antisense strand to SEQ ID NO: 609456
uaucaccuucuaaagauua

SEQ ID NO: 609458 - RNA, 19 nt, Artificial Sequence
  Description of Artificial Sequence: Synthetic oligonucleotide
  Sense strand starting at position 3341 of SEQ ID NO: 585052
auacauaggguguauguau

SEQ ID NO: 609459 - RNA, 19 nt, Artificial Sequence
  Description of Artificial Sequence: Synthetic oligonucleotide
  Antisense strand to SEQ ID NO: 609458
auacauacacccuauguau

SEQ ID NO: 609460 - RNA, 19 nt, Artificial Sequence
  Description of Artificial Sequence: Synthetic oligonucleotide
  Sense strand starting at position 3400 of SEQ ID NO: 585052
gguuaaggacuccagguuu

SEQ ID NO: 609461 - RNA, 19 nt, Artificial Sequence
  Description of Artificial Sequence: Synthetic oligonucleotide
  Antisense strand to SEQ ID NO: 609460
aaaccuggaguccuuaacc

SEQ ID NO: 609462 - RNA, 19 nt, Artificial Sequence
  Description of Artificial Sequence: Synthetic oligonucleotide
  Sense strand starting at position 3411 of SEQ ID NO: 585052
ccagguuuagaguggaagu

SEQ ID NO: 609463 - RNA, 19 nt, Artificial Sequence
  Description of Artificial Sequence: Synthetic oligonucleotide
  Antisense strand to SEQ ID NO: 609462
acuuccacucuaaaccugg

SEQ ID NO: 609464 - RNA, 19 nt, Artificial Sequence
  Description of Artificial Sequence: Synthetic oligonucleotide
  Sense strand starting at position 3412 of SEQ ID NO: 585052
cagguuuagaguggaaguu

SEQ ID NO: 609465 - RNA, 19 nt, Artificial Sequence
  Description of Artificial Sequence: Synthetic oligonucleotide
  Antisense strand to SEQ ID NO: 609464
aacuuccacucuaaaccug

SEQ ID NO: 609466 - RNA, 19 nt, Artificial Sequence
  Description of Artificial Sequence: Synthetic oligonucleotide
  Sense strand starting at position 3413 of SEQ ID NO: 585052
agguuuagaguggaaguua

SEQ ID NO: 609467 - RNA, 19 nt, Artificial Sequence
  Description of Artificial Sequence: Synthetic oligonucleotide
  Antisense strand to SEQ ID NO: 609466
uaacuuccacucuaaaccu

SEQ ID NO: 609468 - RNA, 19 nt, Artificial Sequence
  Description of Artificial Sequence: Synthetic oligonucleotide
  Sense strand starting at position 3435 of SEQ ID NO: 585052
gggucaaauccacaaugcu

SEQ ID NO: 609469 - RNA, 19 nt, Artificial Sequence
  Description of Artificial Sequence: Synthetic oligonucleotide
  Antisense strand to SEQ ID NO: 609468
agcauuguggauuugaccc

SEQ ID NO: 609470 - RNA, 19 nt, Artificial Sequence
  Description of Artificial Sequence: Synthetic oligonucleotide
  Sense strand starting at position 3466 of SEQ ID NO: 585052
cauuuaaggcaguguuacu

SEQ ID NO: 609471 - RNA, 19 nt, Artificial Sequence
  Description of Artificial Sequence: Synthetic oligonucleotide
  Antisense strand to SEQ ID NO: 609470
aguaacacugccuuaaaug

SEQ ID NO: 609472 - RNA, 19 nt, Artificial Sequence
  Description of Artificial Sequence: Synthetic oligonucleotide
  Sense strand starting at position 3471 of SEQ ID NO: 585052
aaggcaguguuacugaaua

SEQ ID NO: 609473 - RNA, 19 nt, Artificial Sequence
  Description of Artificial Sequence: Synthetic oligonucleotide
  Antisense strand to SEQ ID NO: 609472
uauucaguaacacugccuu

SEQ ID NO: 609474 - RNA, 19 nt, Artificial Sequence
  Description of Artificial Sequence: Synthetic oligonucleotide
  Sense strand starting at position 3483 of SEQ ID NO: 585052
cugaauauaugagcugagu

SEQ ID NO: 609475 - RNA, 19 nt, Artificial Sequence
  Description of Artificial Sequence: Synthetic oligonucleotide
  Antisense strand to SEQ ID NO: 609474
acucagcucauauauucag

SEQ ID NO: 609476 - RNA, 19 nt, Artificial Sequence
  Description of Artificial Sequence: Synthetic oligonucleotide
  Sense strand starting at position 3486 of SEQ ID NO: 585052
aauauaugagcugaguuau

SEQ ID NO: 609477 - RNA, 19 nt, Artificial Sequence
  Description of Artificial Sequence: Synthetic oligonucleotide
  Antisense strand to SEQ ID NO: 609476
auaacucagcucauauauu

SEQ ID NO: 609478 - RNA, 19 nt, Artificial Sequence
  Description of Artificial Sequence: Synthetic oligonucleotide
  Sense strand starting at position 3559 of SEQ ID NO: 585052
ggacucauccaagguuaau

SEQ ID NO: 609479 - RNA, 19 nt, Artificial Sequence
  Description of Artificial Sequence: Synthetic oligonucleotide
  Antisense strand to SEQ ID NO: 609478
auuaaccuuggaugagucc

SEQ ID NO: 609480 - RNA, 19 nt, Artificial Sequence
  Description of Artificial Sequence: Synthetic oligonucleotide
  Sense strand starting at position 3716 of SEQ ID NO: 585052
gagggacuugccugaguua

SEQ ID NO: 609481 - RNA, 19 nt, Artificial Sequence
  Description of Artificial Sequence: Synthetic oligonucleotide
  Antisense strand to SEQ ID NO: 609480
uaacucaggcaagucccuc

SEQ ID NO: 609482 - RNA, 19 nt, Artificial Sequence
  Description of Artificial Sequence: Synthetic oligonucleotide
  Sense strand starting at position 3717 of SEQ ID NO: 585052
agggacuugccugaguuaa

SEQ ID NO: 609483 - RNA, 19 nt, Artificial Sequence
  Description of Artificial Sequence: Synthetic oligonucleotide
  Antisense strand to SEQ ID NO: 609482
uuaacucaggcaagucccu

SEQ ID NO: 609484 - RNA, 19 nt, Artificial Sequence
  Description of Artificial Sequence: Synthetic oligonucleotide
  Sense strand starting at position 3719 of SEQ ID NO: 585052
ggacuugccugaguuaaga

SEQ ID NO: 609485 - RNA, 19 nt, Artificial Sequence
  Description of Artificial Sequence: Synthetic oligonucleotide
  Antisense strand to SEQ ID NO: 609484
ucuuaacucaggcaagucc

SEQ ID NO: 609486 - RNA, 19 nt, Artificial Sequence
  Description of Artificial Sequence: Synthetic oligonucleotide
  Sense strand starting at position 3892 of SEQ ID NO: 585052
ggugguacgcgccuauaga

SEQ ID NO: 609487 - RNA, 19 nt, Artificial Sequence
  Description of Artificial Sequence: Synthetic oligonucleotide
  Antisense strand to SEQ ID NO: 609486
ucuauaggcgcguaccacc

SEQ ID NO: 609488 - RNA, 19 nt, Artificial Sequence
  Description of Artificial Sequence: Synthetic oligonucleotide
  Sense strand starting at position 48 of SEQ ID NO: 585053
uauugaauccaguggauag

SEQ ID NO: 609489 - RNA, 19 nt, Artificial Sequence
  Description of Artificial Sequence: Synthetic oligonucleotide
  Antisense strand to SEQ ID NO: 609488
cuauccacuggauucaaua

SEQ ID NO: 609490 - RNA, 19 nt, Artificial Sequence
  Description of Artificial Sequence: Synthetic oligonucleotide
  Sense strand starting at position 49 of SEQ ID NO: 585053
auugaauccaguggauagu

SEQ ID NO: 609491 - RNA, 19 nt, Artificial Sequence
  Description of Artificial Sequence: Synthetic oligonucleotide
  Antisense strand to SEQ ID NO: 609490
acuauccacuggauucaau

SEQ ID NO: 609492 - RNA, 19 nt, Artificial Sequence
  Description of Artificial Sequence: Synthetic oligonucleotide
  Sense strand starting at position 123 of SEQ ID NO: 585053
aggcaucuacacgaaguua

SEQ ID NO: 609493 - RNA, 19 nt, Artificial Sequence
  Description of Artificial Sequence: Synthetic oligonucleotide
  Antisense strand to SEQ ID NO: 609492
uaacuucguguagaugccu

SEQ ID NO: 609494 - RNA, 19 nt, Artificial Sequence
  Description of Artificial Sequence: Synthetic oligonucleotide
  Sense strand starting at position 254 of SEQ ID NO: 585053
gccuccaucccagguagaa

SEQ ID NO: 609495 - RNA, 19 nt, Artificial Sequence
  Description of Artificial Sequence: Synthetic oligonucleotide
  Antisense strand to SEQ ID NO: 609494
uucuaccugggauggaggc

SEQ ID NO: 609496 - RNA, 19 nt, Artificial Sequence
  Description of Artificial Sequence: Synthetic oligonucleotide
  Sense strand starting at position 305 of SEQ ID NO: 585053
cacauaugcgauugagauc

SEQ ID NO: 609497 - RNA, 19 nt, Artificial Sequence
  Description of Artificial Sequence: Synthetic oligonucleotide
  Antisense strand to SEQ ID NO: 609496
gaucucaaucgcauaugug

SEQ ID NO: 609498 - RNA, 19 nt, Artificial Sequence
  Description of Artificial Sequence: Synthetic oligonucleotide
  Sense strand starting at position 379 of SEQ ID NO: 585053
guauuaagcgcuuuccuuu

SEQ ID NO: 609499 - RNA, 19 nt, Artificial Sequence
  Description of Artificial Sequence: Synthetic oligonucleotide
  Antisense strand to SEQ ID NO: 609498
aaaggaaagcgcuuaauac

SEQ ID NO: 609500 - RNA, 19 nt, Artificial Sequence
  Description of Artificial Sequence: Synthetic oligonucleotide
  Sense strand starting at position 385 of SEQ ID NO: 585053
agcgcuuuccuuuacaaag

SEQ ID NO: 609501 - RNA, 19 nt, Artificial Sequence
  Description of Artificial Sequence: Synthetic oligonucleotide
  Antisense strand to SEQ ID NO: 609500
cuuuguaaaggaaagcgcu

SEQ ID NO: 609502 - RNA, 19 nt, Artificial Sequence
  Description of Artificial Sequence: Synthetic oligonucleotide
  Sense strand starting at position 428 of SEQ ID NO: 585053
ucgauauuacuguaauaca

SEQ ID NO: 609503 - RNA, 19 nt, Artificial Sequence
  Description of Artificial Sequence: Synthetic oligonucleotide
  Antisense strand to SEQ ID NO: 609502
uguauuacaguaauaucga

SEQ ID NO: 609504 - RNA, 19 nt, Artificial Sequence
  Description of Artificial Sequence: Synthetic oligonucleotide
  Sense strand starting at position 567 of SEQ ID NO: 585053
ugauuaugccacugucaca

SEQ ID NO: 609505 - RNA, 19 nt, Artificial Sequence
  Description of Artificial Sequence: Synthetic oligonucleotide
  Antisense strand to SEQ ID NO: 609504
ugugacaguggcauaauca

SEQ ID NO: 609506 - RNA, 19 nt, Artificial Sequence
  Description of Artificial Sequence: Synthetic oligonucleotide
  Sense strand starting at position 590 of SEQ ID NO: 585053
gugugugcuaguuaggaaa

SEQ ID NO: 609507 - RNA, 19 nt, Artificial Sequence
  Description of Artificial Sequence: Synthetic oligonucleotide
  Antisense strand to SEQ ID NO: 609506
uuuccuaacuagcacacac

SEQ ID NO: 609508 - RNA, 19 nt, Artificial Sequence
  Description of Artificial Sequence: Synthetic oligonucleotide
  Sense strand starting at position 630 of SEQ ID NO: 585053
agaaucaguccuuaaguuu

SEQ ID NO: 609509 - RNA, 19 nt, Artificial Sequence
  Description of Artificial Sequence: Synthetic oligonucleotide
  Antisense strand to SEQ ID NO: 609508
aaacuuaaggacugauucu

SEQ ID NO: 609510 - RNA, 19 nt, Artificial Sequence
  Description of Artificial Sequence: Synthetic oligonucleotide
  Sense strand starting at position 1054 of SEQ ID NO: 585053
uuugacaggcugcauaaua

SEQ ID NO: 609511 - RNA, 19 nt, Artificial Sequence
  Description of Artificial Sequence: Synthetic oligonucleotide
  Antisense strand to SEQ ID NO: 609510
uauuaugcagccugucaaa

SEQ ID NO: 609512 - RNA, 19 nt, Artificial Sequence
  Description of Artificial Sequence: Synthetic oligonucleotide
  Sense strand starting at position 1167 of SEQ ID NO: 585053
gaaugaccgugagcuugaa

SEQ ID NO: 609513 - RNA, 19 nt, Artificial Sequence
  Description of Artificial Sequence: Synthetic oligonucleotide
  Antisense strand to SEQ ID NO: 609512
uucaagcucacggucauuc

SEQ ID NO: 609514 - RNA, 19 nt, Artificial Sequence
  Description of Artificial Sequence: Synthetic oligonucleotide
  Sense strand starting at position 1171 of SEQ ID NO: 585053
gaccgugagcuugaaggaa

SEQ ID NO: 609515 - RNA, 19 nt, Artificial Sequence
  Description of Artificial Sequence: Synthetic oligonucleotide
  Antisense strand to SEQ ID NO: 609514
uuccuucaagcucacgguc

SEQ ID NO: 609516 - RNA, 19 nt, Artificial Sequence
  Description of Artificial Sequence: Synthetic oligonucleotide
  Sense strand starting at position 1236 of SEQ ID NO: 585053
caucgugggcuuuauccua

SEQ ID NO: 609517 - RNA, 19 nt, Artificial Sequence
  Description of Artificial Sequence: Synthetic oligonucleotide
  Antisense strand to SEQ ID NO: 609516
uaggauaaagcccacgaug

SEQ ID NO: 609518 - RNA, 19 nt, Artificial Sequence
  Description of Artificial Sequence: Synthetic oligonucleotide
  Sense strand starting at position 1322 of SEQ ID NO: 585053
acggaaaugaaaugugcua

SEQ ID NO: 609519 - RNA, 19 nt, Artificial Sequence
  Description of Artificial Sequence: Synthetic oligonucleotide
  Antisense strand to SEQ ID NO: 609518
uagcacauuucauuuccgu

SEQ ID NO: 609520 - RNA, 19 nt, Artificial Sequence
  Description of Artificial Sequence: Synthetic oligonucleotide
  Sense strand starting at position 2147 of SEQ ID NO: 585053
gguaguuuccaugggaauc

SEQ ID NO: 609521 - RNA, 19 nt, Artificial Sequence
  Description of Artificial Sequence: Synthetic oligonucleotide
  Antisense strand to SEQ ID NO: 609520
gauucccauggaaacuacc

SEQ ID NO: 609522 - RNA, 19 nt, Artificial Sequence
  Description of Artificial Sequence: Synthetic oligonucleotide
  Sense strand starting at position 2157 of SEQ ID NO: 585053
augggaauccgugagggua

SEQ ID NO: 609523 - RNA, 19 nt, Artificial Sequence
  Description of Artificial Sequence: Synthetic oligonucleotide
  Antisense strand to SEQ ID NO: 609522
uacccucacggauucccau

SEQ ID NO: 609524 - RNA, 19 nt, Artificial Sequence
  Description of Artificial Sequence: Synthetic oligonucleotide
  Sense strand starting at position 2326 of SEQ ID NO: 585053
cucgaaagugacugcugaa

SEQ ID NO: 609525 - RNA, 19 nt, Artificial Sequence
  Description of Artificial Sequence: Synthetic oligonucleotide
  Antisense strand to SEQ ID NO: 609524
uucagcagucacuuucgag

SEQ ID NO: 609526 - RNA, 19 nt, Artificial Sequence
  Description of Artificial Sequence: Synthetic oligonucleotide
  Sense strand starting at position 2387 of SEQ ID NO: 585053
cugggauuggcaugcuuua

SEQ ID NO: 609527 - RNA, 19 nt, Artificial Sequence
  Description of Artificial Sequence: Synthetic oligonucleotide
  Antisense strand to SEQ ID NO: 609526
uaaagcaugccaaucccag

SEQ ID NO: 609528 - RNA, 19 nt, Artificial Sequence
  Description of Artificial Sequence: Synthetic oligonucleotide
  Sense strand starting at position 2864 of SEQ ID NO: 585053
ccaguuaaagauugauauc

SEQ ID NO: 609529 - RNA, 19 nt, Artificial Sequence
  Description of Artificial Sequence: Synthetic oligonucleotide
  Antisense strand to SEQ ID NO: 609528
gauaucaaucuuuaacugg

SEQ ID NO: 609530 - RNA, 19 nt, Artificial Sequence
  Description of Artificial Sequence: Synthetic oligonucleotide
  Sense strand starting at position 2876 of SEQ ID NO: 585053
ugauaucucucaucuggau

SEQ ID NO: 609531 - RNA, 19 nt, Artificial Sequence
  Description of Artificial Sequence: Synthetic oligonucleotide
  Antisense strand to SEQ ID NO: 609530
auccagaugagagauauca

SEQ ID NO: 609532 - RNA, 19 nt, Artificial Sequence
  Description of Artificial Sequence: Synthetic oligonucleotide
  Sense strand starting at position 3000 of SEQ ID NO: 585053
gccauaagucaauaguuac

SEQ ID NO: 609533 - RNA, 19 nt, Artificial Sequence
  Description of Artificial Sequence: Synthetic oligonucleotide
  Antisense strand to SEQ ID NO: 609532
guaacuauugacuuauggc

SEQ ID NO: 609534 - RNA, 19 nt, Artificial Sequence
  Description of Artificial Sequence: Synthetic oligonucleotide
  Sense strand starting at position 3006 of SEQ ID NO: 585053
agucaauaguuacuaaguu

SEQ ID NO: 609535 - RNA, 19 nt, Artificial Sequence
  Description of Artificial Sequence: Synthetic oligonucleotide
  Antisense strand to SEQ ID NO: 609534
aacuuaguaacuauugacu

SEQ ID NO: 609536 - RNA, 19 nt, Artificial Sequence
  Description of Artificial Sequence: Synthetic oligonucleotide
  Sense strand starting at position 3014 of SEQ ID NO: 585053
guuacuaaguugucagacu

SEQ ID NO: 609537 - RNA, 19 nt, Artificial Sequence
  Description of Artificial Sequence: Synthetic oligonucleotide
  Antisense strand to SEQ ID NO: 609536
agucugacaacuuaguaac

SEQ ID NO: 609538 - RNA, 19 nt, Artificial Sequence
  Description of Artificial Sequence: Synthetic oligonucleotide
  Sense strand starting at position 3022 of SEQ ID NO: 585053
guugucagacuauagacua

SEQ ID NO: 609539 - RNA, 19 nt, Artificial Sequence
  Description of Artificial Sequence: Synthetic oligonucleotide
  Antisense strand to SEQ ID NO: 609538
uagucuauagucugacaac

SEQ ID NO: 609540 - RNA, 19 nt, Artificial Sequence
  Description of Artificial Sequence: Synthetic oligonucleotide
  Sense strand starting at position 3035 of SEQ ID NO: 585053
agacuaaucuuagugaucu

SEQ ID NO: 609541 - RNA, 19 nt, Artificial Sequence
  Description of Artificial Sequence: Synthetic oligonucleotide
  Antisense strand to SEQ ID NO: 609540
agaucacuaagauuagucu

SEQ ID NO: 609542 - RNA, 19 nt, Artificial Sequence
  Description of Artificial Sequence: Synthetic oligonucleotide
  Sense strand starting at position 3043 of SEQ ID NO: 585053
cuuagugaucuuuggauga

SEQ ID NO: 609543 - RNA, 19 nt, Artificial Sequence
  Description of Artificial Sequence: Synthetic oligonucleotide
  Antisense strand to SEQ ID NO: 609542
ucauccaaagaucacuaag

SEQ ID NO: 609544 - RNA, 19 nt, Artificial Sequence
  Description of Artificial Sequence: Synthetic oligonucleotide
  Sense strand starting at position 3047 of SEQ ID NO: 585053
gugaucuuuggaugacuaa

SEQ ID NO: 609545 - RNA, 19 nt, Artificial Sequence
  Description of Artificial Sequence: Synthetic oligonucleotide
  Antisense strand to SEQ ID NO: 609544
uuagucauccaaagaucac

SEQ ID NO: 609546 - RNA, 19 nt, Artificial Sequence
  Description of Artificial Sequence: Synthetic oligonucleotide
  Sense strand starting at position 3189 of SEQ ID NO: 585053
cucaguuugcaagaacgua

SEQ ID NO: 609547 - RNA, 19 nt, Artificial Sequence
  Description of Artificial Sequence: Synthetic oligonucleotide
  Antisense strand to SEQ ID NO: 609546
uacguucuugcaaacugag

SEQ ID NO: 609548 - RNA, 19 nt, Artificial Sequence
  Description of Artificial Sequence: Synthetic oligonucleotide
  Sense strand starting at position 3197 of SEQ ID NO: 585053
gcaagaacguauuuauggu

SEQ ID NO: 609549 - RNA, 19 nt, Artificial Sequence
  Description of Artificial Sequence: Synthetic oligonucleotide
  Antisense strand to SEQ ID NO: 609548
accauaaauacguucuugc

SEQ ID NO: 609550 - RNA, 19 nt, Artificial Sequence
  Description of Artificial Sequence: Synthetic oligonucleotide
  Sense strand starting at position 3224 of SEQ ID NO: 585053
gauggugugucuccauuua

SEQ ID NO: 609551 - RNA, 19 nt, Artificial Sequence
  Description of Artificial Sequence: Synthetic oligonucleotide
  Antisense strand to SEQ ID NO: 609550
uaaauggagacacaccauc

SEQ ID NO: 609552 - RNA, 19 nt, Artificial Sequence
  Description of Artificial Sequence: Synthetic oligonucleotide
  Sense strand starting at position 3396 of SEQ ID NO: 585053
aguggugugaucggagauu

SEQ ID NO: 609553 - RNA, 19 nt, Artificial Sequence
  Description of Artificial Sequence: Synthetic oligonucleotide
  Antisense strand to SEQ ID NO: 609552
aaucuccgaucacaccacu

SEQ ID NO: 609554 - RNA, 19 nt, Artificial Sequence
  Description of Artificial Sequence: Synthetic oligonucleotide
  Sense strand starting at position 3416 of SEQ ID NO: 585053
ugagcuaagauguguugaa

SEQ ID NO: 609555 - RNA, 19 nt, Artificial Sequence
  Description of Artificial Sequence: Synthetic oligonucleotide
  Antisense strand to SEQ ID NO: 609554
uucaacacaucuuagcuca

SEQ ID NO: 609556 - RNA, 19 nt, Artificial Sequence
  Description of Artificial Sequence: Synthetic oligonucleotide
  Sense strand starting at position 3417 of SEQ ID NO: 585053
gagcuaagauguguugaag

SEQ ID NO: 609557 - RNA, 19 nt, Artificial Sequence
  Description of Artificial Sequence: Synthetic oligonucleotide
  Antisense strand to SEQ ID NO: 609556
cuucaacacaucuuagcuc

SEQ ID NO: 609558 - RNA, 19 nt, Artificial Sequence
  Description of Artificial Sequence: Synthetic oligonucleotide
  Sense strand starting at position 3420 of SEQ ID NO: 585053
cuaagauguguugaaguuu

SEQ ID NO: 609559 - RNA, 19 nt, Artificial Sequence
  Description of Artificial Sequence: Synthetic oligonucleotide
  Antisense strand to SEQ ID NO: 609558
aaacuucaacacaucuuag

SEQ ID NO: 609560 - RNA, 19 nt, Artificial Sequence
  Description of Artificial Sequence: Synthetic oligonucleotide
  Sense strand starting at position 3426 of SEQ ID NO: 585053
uguguugaaguuuagucau

SEQ ID NO: 609561 - RNA, 19 nt, Artificial Sequence
  Description of Artificial Sequence: Synthetic oligonucleotide
  Antisense strand to SEQ ID NO: 609560
augacuaaacuucaacaca

SEQ ID NO: 609562 - RNA, 19 nt, Artificial Sequence
  Description of Artificial Sequence: Synthetic oligonucleotide
  Sense strand starting at position 3429 of SEQ ID NO: 585053
guugaaguuuagucaucca

SEQ ID NO: 609563 - RNA, 19 nt, Artificial Sequence
  Description of Artificial Sequence: Synthetic oligonucleotide
  Antisense strand to SEQ ID NO: 609562
uggaugacuaaacuucaac

SEQ ID NO: 609564 - RNA, 19 nt, Artificial Sequence
  Description of Artificial Sequence: Synthetic oligonucleotide
  Sense strand starting at position 3432 of SEQ ID NO: 585053
gaaguuuagucauccaaag

SEQ ID NO: 609565 - RNA, 19 nt, Artificial Sequence
  Description of Artificial Sequence: Synthetic oligonucleotide
  Antisense strand to SEQ ID NO: 609564
cuuuggaugacuaaacuuc

SEQ ID NO: 609566 - RNA, 19 nt, Artificial Sequence
  Description of Artificial Sequence: Synthetic oligonucleotide
  Sense strand starting at position 3452 of SEQ ID NO: 585053
ccacuaagagcuugaacuc

SEQ ID NO: 609567 - RNA, 19 nt, Artificial Sequence
  Description of Artificial Sequence: Synthetic oligonucleotide
  Antisense strand to SEQ ID NO: 609566
gaguucaagcucuuagugg

SEQ ID NO: 609568 - RNA, 19 nt, Artificial Sequence
  Description of Artificial Sequence: Synthetic oligonucleotide
  Sense strand starting at position 385 of SEQ ID NO: 585054
ucugaauauguauaugagu

SEQ ID NO: 609569 - RNA, 19 nt, Artificial Sequence
  Description of Artificial Sequence: Synthetic oligonucleotide
  Antisense strand to SEQ ID NO: 609568
acucauauacauauucaga

SEQ ID NO: 609570 - RNA, 19 nt, Artificial Sequence
  Description of Artificial Sequence: Synthetic oligonucleotide
  Sense strand starting at position 388 of SEQ ID NO: 585054
gaauauguauaugaguaac

SEQ ID NO: 609571 - RNA, 19 nt, Artificial Sequence
  Description of Artificial Sequence: Synthetic oligonucleotide
  Antisense strand to SEQ ID NO: 609570
guuacucauauacauauuc

SEQ ID NO: 609572 - RNA, 19 nt, Artificial Sequence
  Description of Artificial Sequence: Synthetic oligonucleotide
  Sense strand starting at position 456 of SEQ ID NO: 585054
ggauauuauuauuccugga

SEQ ID NO: 609573 - RNA, 19 nt, Artificial Sequence
  Description of Artificial Sequence: Synthetic oligonucleotide
  Antisense strand to SEQ ID NO: 609572
uccaggaauaauaauaucc

SEQ ID NO: 609574 - RNA, 19 nt, Artificial Sequence
  Description of Artificial Sequence: Synthetic oligonucleotide
  Sense strand starting at position 507 of SEQ ID NO: 585054
ugaaauaacuuggaagaug

SEQ ID NO: 609575 - RNA, 19 nt, Artificial Sequence
  Description of Artificial Sequence: Synthetic oligonucleotide
  Antisense strand to SEQ ID NO: 609574
caucuuccaaguuauuuca

SEQ ID NO: 609576 - RNA, 19 nt, Artificial Sequence
  Description of Artificial Sequence: Synthetic oligonucleotide
  Sense strand starting at position 519 of SEQ ID NO: 585054
gaagauggugaggguaauu

SEQ ID NO: 609577 - RNA, 19 nt, Artificial Sequence
  Description of Artificial Sequence: Synthetic oligonucleotide
  Antisense strand to SEQ ID NO: 609576
aauuacccucaccaucuuc

SEQ ID NO: 609578 - RNA, 19 nt, Artificial Sequence
  Description of Artificial Sequence: Synthetic oligonucleotide
  Sense strand starting at position 529 of SEQ ID NO: 585054
aggguaauuuaguauacuu

SEQ ID NO: 609579 - RNA, 19 nt, Artificial Sequence
  Description of Artificial Sequence: Synthetic oligonucleotide
  Antisense strand to SEQ ID NO: 609578
aaguauacuaaauuacccu

SEQ ID NO: 609580 - RNA, 19 nt, Artificial Sequence
  Description of Artificial Sequence: Synthetic oligonucleotide
  Sense strand starting at position 578 of SEQ ID NO: 585054
auaaaccuggcuugaaaga

SEQ ID NO: 609581 - RNA, 19 nt, Artificial Sequence
  Description of Artificial Sequence: Synthetic oligonucleotide
  Antisense strand to SEQ ID NO: 609580
ucuuucaagccagguuuau

SEQ ID NO: 609582 - RNA, 19 nt, Artificial Sequence
  Description of Artificial Sequence: Synthetic oligonucleotide
  Sense strand starting at position 591 of SEQ ID NO: 585054
gaaagauagucuuagggac

SEQ ID NO: 609583 - RNA, 19 nt, Artificial Sequence
  Description of Artificial Sequence: Synthetic oligonucleotide
  Antisense strand to SEQ ID NO: 609582
gucccuaagacuaucuuuc

SEQ ID NO: 609584 - RNA, 19 nt, Artificial Sequence
  Description of Artificial Sequence: Synthetic oligonucleotide
  Sense strand starting at position 687 of SEQ ID NO: 585054
ccugcaaaucugugaaucu

SEQ ID NO: 609585 - RNA, 19 nt, Artificial Sequence
  Description of Artificial Sequence: Synthetic oligonucleotide
  Antisense strand to SEQ ID NO: 609584
agauucacagauuugcagg

SEQ ID NO: 609586 - RNA, 19 nt, Artificial Sequence
  Description of Artificial Sequence: Synthetic oligonucleotide
  Sense strand starting at position 696 of SEQ ID NO: 585054
cugugaaucuaauccaaga

SEQ ID NO: 609587 - RNA, 19 nt, Artificial Sequence
  Description of Artificial Sequence: Synthetic oligonucleotide
  Antisense strand to SEQ ID NO: 609586
ucuuggauuagauucacag

SEQ ID NO: 609588 - RNA, 19 nt, Artificial Sequence
  Description of Artificial Sequence: Synthetic oligonucleotide
  Sense strand starting at position 707 of SEQ ID NO: 585054
auccaagaaguaugucaau

SEQ ID NO: 609589 - RNA, 19 nt, Artificial Sequence
  Description of Artificial Sequence: Synthetic oligonucleotide
  Antisense strand to SEQ ID NO: 609588
auugacauacuucuuggau

SEQ ID NO: 609590 - RNA, 19 nt, Artificial Sequence
  Description of Artificial Sequence: Synthetic oligonucleotide
  Sense strand starting at position 720 of SEQ ID NO: 585054
gucaauagcugguuguuua

SEQ ID NO: 609591 - RNA, 19 nt, Artificial Sequence
  Description of Artificial Sequence: Synthetic oligonucleotide
  Antisense strand to SEQ ID NO: 609590
uaaacaaccagcuauugac

SEQ ID NO: 609592 - RNA, 19 nt, Artificial Sequence
  Description of Artificial Sequence: Synthetic oligonucleotide
  Sense strand starting at position 721 of SEQ ID NO: 585054
ucaauagcugguuguuuaa

SEQ ID NO: 609593 - RNA, 19 nt, Artificial Sequence
  Description of Artificial Sequence: Synthetic oligonucleotide
  Antisense strand to SEQ ID NO: 609592
uuaaacaaccagcuauuga

SEQ ID NO: 609594 - RNA, 19 nt, Artificial Sequence
  Description of Artificial Sequence: Synthetic oligonucleotide
  Sense strand starting at position 733 of SEQ ID NO: 585054
uguuuaagguuagguuuau

SEQ ID NO: 609595 - RNA, 19 nt, Artificial Sequence
  Description of Artificial Sequence: Synthetic oligonucleotide
  Antisense strand to SEQ ID NO: 609594
auaaaccuaaccuuaaaca

SEQ ID NO: 609596 - RNA, 19 nt, Artificial Sequence
  Description of Artificial Sequence: Synthetic oligonucleotide
  Sense strand starting at position 739 of SEQ ID NO: 585054
agguuagguuuaugaaaua

SEQ ID NO: 609597 - RNA, 19 nt, Artificial Sequence
  Description of Artificial Sequence: Synthetic oligonucleotide
  Antisense strand to SEQ ID NO: 609596
uauuucauaaaccuaaccu

SEQ ID NO: 609598 - RNA, 19 nt, Artificial Sequence
  Description of Artificial Sequence: Synthetic oligonucleotide
  Sense strand starting at position 750 of SEQ ID NO: 585054
augaaauaguaacagaacu

SEQ ID NO: 609599 - RNA, 19 nt, Artificial Sequence
  Description of Artificial Sequence: Synthetic oligonucleotide
  Antisense strand to SEQ ID NO: 609598
aguucuguuacuauuucau

SEQ ID NO: 609600 - RNA, 19 nt, Artificial Sequence
  Description of Artificial Sequence: Synthetic oligonucleotide
  Sense strand starting at position 811 of SEQ ID NO: 585054
aggucaagucaguaagagu

SEQ ID NO: 609601 - RNA, 19 nt, Artificial Sequence
  Description of Artificial Sequence: Synthetic oligonucleotide
  Antisense strand to SEQ ID NO: 609600
acucuuacugacuugaccu

SEQ ID NO: 609602 - RNA, 19 nt, Artificial Sequence
  Description of Artificial Sequence: Synthetic oligonucleotide
  Sense strand starting at position 822 of SEQ ID NO: 585054
guaagaguaucugaagcua

SEQ ID NO: 609603 - RNA, 19 nt, Artificial Sequence
  Description of Artificial Sequence: Synthetic oligonucleotide
  Antisense strand to SEQ ID NO: 609602
uagcuucagauacucuuac

SEQ ID NO: 609604 - RNA, 19 nt, Artificial Sequence
  Description of Artificial Sequence: Synthetic oligonucleotide
  Sense strand starting at position 849 of SEQ ID NO: 585054
auggaauauucuugcgacu

SEQ ID NO: 609605 - RNA, 19 nt, Artificial Sequence
  Description of Artificial Sequence: Synthetic oligonucleotide
  Antisense strand to SEQ ID NO: 609604
agucgcaagaauauuccau

SEQ ID NO: 609606 - RNA, 19 nt, Artificial Sequence
  Description of Artificial Sequence: Synthetic oligonucleotide
  Sense strand starting at position 851 of SEQ ID NO: 585054
ggaauauucuugcgacuga

SEQ ID NO: 609607 - RNA, 19 nt, Artificial Sequence
  Description of Artificial Sequence: Synthetic oligonucleotide
  Antisense strand to SEQ ID NO: 609606
ucagucgcaagaauauucc

SEQ ID NO: 609608 - RNA, 19 nt, Artificial Sequence
  Description of Artificial Sequence: Synthetic oligonucleotide
  Sense strand starting at position 852 of SEQ ID NO: 585054
gaauauucuugcgacugaa

SEQ ID NO: 609609 - RNA, 19 nt, Artificial Sequence
  Description of Artificial Sequence: Synthetic oligonucleotide
  Antisense strand to SEQ ID NO: 609608
uucagucgcaagaauauuc

SEQ ID NO: 609610 - RNA, 19 nt, Artificial Sequence
  Description of Artificial Sequence: Synthetic oligonucleotide
  Sense strand starting at position 883 of SEQ ID NO: 585054
cggauacugcuaugucuaa

SEQ ID NO: 609611 - RNA, 19 nt, Artificial Sequence
  Description of Artificial Sequence: Synthetic oligonucleotide
  Antisense strand to SEQ ID NO: 609610
uuagacauagcaguauccg

SEQ ID NO: 609612 - RNA, 19 nt, Artificial Sequence
  Description of Artificial Sequence: Synthetic oligonucleotide
  Sense strand starting at position 890 of SEQ ID NO: 585054
ugcuaugucuaagcaggua

SEQ ID NO: 609613 - RNA, 19 nt, Artificial Sequence
  Description of Artificial Sequence: Synthetic oligonucleotide
  Antisense strand to SEQ ID NO: 609612
uaccugcuuagacauagca

SEQ ID NO: 609614 - RNA, 19 nt, Artificial Sequence
  Description of Artificial Sequence: Synthetic oligonucleotide
  Sense strand starting at position 932 of SEQ ID NO: 585054
ggcagacccuagucacuaa

SEQ ID NO: 609615 - RNA, 19 nt, Artificial Sequence
  Description of Artificial Sequence: Synthetic oligonucleotide
  Antisense strand to SEQ ID NO: 609614
uuagugacuagggucugcc

SEQ ID NO: 609616 - RNA, 19 nt, Artificial Sequence
  Description of Artificial Sequence: Synthetic oligonucleotide
  Sense strand starting at position 955 of SEQ ID NO: 585054
cgaugagcuucuuugacua

SEQ ID NO: 609617 - RNA, 19 nt, Artificial Sequence
  Description of Artificial Sequence: Synthetic oligonucleotide
  Antisense strand to SEQ ID NO: 609616
uagucaaagaagcucaucg

SEQ ID NO: 609618 - RNA, 19 nt, Artificial Sequence
  Description of Artificial Sequence: Synthetic oligonucleotide
  Sense strand starting at position 960 of SEQ ID NO: 585054
agcuucuuugacuaagacu

SEQ ID NO: 609619 - RNA, 19 nt, Artificial Sequence
  Description of Artificial Sequence: Synthetic oligonucleotide
  Antisense strand to SEQ ID NO: 609618
agucuuagucaaagaagcu

SEQ ID NO: 609620 - RNA, 19 nt, Artificial Sequence
  Description of Artificial Sequence: Synthetic oligonucleotide
  Sense strand starting at position 1116 of SEQ ID NO: 585054
ugugcugacuuucuuaaag

SEQ ID NO: 609621 - RNA, 19 nt, Artificial Sequence
  Description of Artificial Sequence: Synthetic oligonucleotide
  Antisense strand to SEQ ID NO: 609620
cuuuaagaaagucagcaca

SEQ ID NO: 609622 - RNA, 19 nt, Artificial Sequence
  Description of Artificial Sequence: Synthetic oligonucleotide
  Sense strand starting at position 1118 of SEQ ID NO: 585054
ugcugacuuucuuaaagac

SEQ ID NO: 609623 - RNA, 19 nt, Artificial Sequence
  Description of Artificial Sequence: Synthetic oligonucleotide
  Antisense strand to SEQ ID NO: 609622
gucuuuaagaaagucagca

SEQ ID NO: 609624 - RNA, 19 nt, Artificial Sequence
  Description of Artificial Sequence: Synthetic oligonucleotide
  Sense strand starting at position 1192 of SEQ ID NO: 585054
gagguccacgccugguaua

SEQ ID NO: 609625 - RNA, 19 nt, Artificial Sequence
  Description of Artificial Sequence: Synthetic oligonucleotide
  Antisense strand to SEQ ID NO: 609624
uauaccaggcguggaccuc

SEQ ID NO: 609626 - RNA, 19 nt, Artificial Sequence
  Description of Artificial Sequence: Synthetic oligonucleotide
  Sense strand starting at position 1193 of SEQ ID NO: 585054
agguccacgccugguauaa

SEQ ID NO: 609627 - RNA, 19 nt, Artificial Sequence
  Description of Artificial Sequence: Synthetic oligonucleotide
  Antisense strand to SEQ ID NO: 609626
uuauaccaggcguggaccu

SEQ ID NO: 609628 - RNA, 19 nt, Artificial Sequence
  Description of Artificial Sequence: Synthetic oligonucleotide
  Sense strand starting at position 1206 of SEQ ID NO: 585054
guauaaucaggcuaccaug

SEQ ID NO: 609629 - RNA, 19 nt, Artificial Sequence
  Description of Artificial Sequence: Synthetic oligonucleotide
  Antisense strand to SEQ ID NO: 609628
caugguagccugauuauac

SEQ ID NO: 609630 - RNA, 19 nt, Artificial Sequence
  Description of Artificial Sequence: Synthetic oligonucleotide
  Sense strand starting at position 1230 of SEQ ID NO: 585054
aacugagucugguucgguu

SEQ ID NO: 609631 - RNA, 19 nt, Artificial Sequence
  Description of Artificial Sequence: Synthetic oligonucleotide
  Antisense strand to SEQ ID NO: 609630
aaccgaaccagacucaguu

SEQ ID NO: 609632 - RNA, 19 nt, Artificial Sequence
  Description of Artificial Sequence: Synthetic oligonucleotide
  Sense strand starting at position 1381 of SEQ ID NO: 585054
gccgcauacugaccuaaau

SEQ ID NO: 609633 - RNA, 19 nt, Artificial Sequence
  Description of Artificial Sequence: Synthetic oligonucleotide
  Antisense strand to SEQ ID NO: 609632
auuuaggucaguaugcggc

SEQ ID NO: 609634 - RNA, 19 nt, Artificial Sequence
  Description of Artificial Sequence: Synthetic oligonucleotide
  Sense strand starting at position 2483 of SEQ ID NO: 585054
cccuuuguugccgggaguu

SEQ ID NO: 609635 - RNA, 19 nt, Artificial Sequence
  Description of Artificial Sequence: Synthetic oligonucleotide
  Antisense strand to SEQ ID NO: 609634
aacucccggcaacaaaggg

SEQ ID NO: 609636 - RNA, 19 nt, Artificial Sequence
  Description of Artificial Sequence: Synthetic oligonucleotide
  Sense strand starting at position 2493 of SEQ ID NO: 585054
ccgggaguuacagauccua

SEQ ID NO: 609637 - RNA, 19 nt, Artificial Sequence
  Description of Artificial Sequence: Synthetic oligonucleotide
  Antisense strand to SEQ ID NO: 609636
uaggaucuguaacucccgg

SEQ ID NO: 609638 - RNA, 19 nt, Artificial Sequence
  Description of Artificial Sequence: Synthetic oligonucleotide
  Sense strand starting at position 2704 of SEQ ID NO: 585054
ccuuccuacgcccgagaaa

SEQ ID NO: 609639 - RNA, 19 nt, Artificial Sequence
  Description of Artificial Sequence: Synthetic oligonucleotide
  Antisense strand to SEQ ID NO: 609638
uuucucgggcguaggaagg

SEQ ID NO: 609640 - RNA, 19 nt, Artificial Sequence
  Description of Artificial Sequence: Synthetic oligonucleotide
  Sense strand starting at position 2891 of SEQ ID NO: 585054
agcacucaggucuaacaau

SEQ ID NO: 609641 - RNA, 19 nt, Artificial Sequence
  Description of Artificial Sequence: Synthetic oligonucleotide
  Antisense strand to SEQ ID NO: 609640
auuguuagaccugagugcu

SEQ ID NO: 609642 - RNA, 19 nt, Artificial Sequence
  Description of Artificial Sequence: Synthetic oligonucleotide
  Sense strand starting at position 3779 of SEQ ID NO: 585054
ggaagcugcugcugacaau

SEQ ID NO: 609643 - RNA, 19 nt, Artificial Sequence
  Description of Artificial Sequence: Synthetic oligonucleotide
  Antisense strand to SEQ ID NO: 609642
auugucagcagcagcuucc

SEQ ID NO: 609644 - RNA, 19 nt, Artificial Sequence
  Description of Artificial Sequence: Synthetic oligonucleotide
  Sense strand starting at position 3785 of SEQ ID NO: 585054
ugcugcugacaaugaauga

SEQ ID NO: 609645 - RNA, 19 nt, Artificial Sequence
  Description of Artificial Sequence: Synthetic oligonucleotide
  Antisense strand to SEQ ID NO: 609644
ucauucauugucagcagca

SEQ ID NO: 609646 - RNA, 19 nt, Artificial Sequence
  Description of Artificial Sequence: Synthetic oligonucleotide
  Sense strand starting at position 3967 of SEQ ID NO: 585054
gcgacuugcugguuuccau

SEQ ID NO: 609647 - RNA, 19 nt, Artificial Sequence
  Description of Artificial Sequence: Synthetic oligonucleotide
  Antisense strand to SEQ ID NO: 609646
auggaaaccagcaagucgc

SEQ ID NO: 609648 - RNA, 19 nt, Artificial Sequence
  Description of Artificial Sequence: Synthetic oligonucleotide
  Sense strand starting at position 720 of SEQ ID NO: 585055
ccgggaguuacagauccua

SEQ ID NO: 609649 - RNA, 19 nt, Artificial Sequence
  Description of Artificial Sequence: Synthetic oligonucleotide
  Antisense strand to SEQ ID NO: 609648
uaggaucuguaacucccgg

SEQ ID NO: 609650 - RNA, 19 nt, Artificial Sequence
  Description of Artificial Sequence: Synthetic oligonucleotide
  Sense strand starting at position 931 of SEQ ID NO: 585055
ccuuccuacgcccgagaaa

SEQ ID NO: 609651 - RNA, 19 nt, Artificial Sequence
  Description of Artificial Sequence: Synthetic oligonucleotide
  Antisense strand to SEQ ID NO: 609650
uuucucgggcguaggaagg

SEQ ID NO: 609652 - RNA, 19 nt, Artificial Sequence
  Description of Artificial Sequence: Synthetic oligonucleotide
  Sense strand starting at position 1118 of SEQ ID NO: 585055
agcacucaggucuaacaau

SEQ ID NO: 609653 - RNA, 19 nt, Artificial Sequence
  Description of Artificial Sequence: Synthetic oligonucleotide
  Antisense strand to SEQ ID NO: 609652
auuguuagaccugagugcu

SEQ ID NO: 609654 - RNA, 19 nt, Artificial Sequence
  Description of Artificial Sequence: Synthetic oligonucleotide
  Sense strand starting at position 2012 of SEQ ID NO: 585055
ugcugcugacaaugaauga

SEQ ID NO: 609655 - RNA, 19 nt, Artificial Sequence
  Description of Artificial Sequence: Synthetic oligonucleotide
  Antisense strand to SEQ ID NO: 609654
ucauucauugucagcagca

SEQ ID NO: 609656 - RNA, 19 nt, Artificial Sequence
  Description of Artificial Sequence: Synthetic oligonucleotide
  Sense strand starting at position 2268 of SEQ ID NO: 585055
ccuugauuggcuggcagaa

SEQ ID NO: 609657 - RNA, 19 nt, Artificial Sequence
  Description of Artificial Sequence: Synthetic oligonucleotide
  Antisense strand to SEQ ID NO: 609656
uucugccagccaaucaagg

SEQ ID NO: 609658 - RNA, 19 nt, Artificial Sequence
  Description of Artificial Sequence: Synthetic oligonucleotide
  Sense strand starting at position 2464 of SEQ ID NO: 585055
ggaaauugucaaggugacu

SEQ ID NO: 609659 - RNA, 19 nt, Artificial Sequence
  Description of Artificial Sequence: Synthetic oligonucleotide
  Antisense strand to SEQ ID NO: 609658
agucaccuugacaauuucc

SEQ ID NO: 609660 - RNA, 19 nt, Artificial Sequence
  Description of Artificial Sequence: Synthetic oligonucleotide
  Sense strand starting at position 2486 of SEQ ID NO: 585055
ggaacacucuuuccuuuga

SEQ ID NO: 609661 - RNA, 19 nt, Artificial Sequence
  Description of Artificial Sequence: Synthetic oligonucleotide
  Antisense strand to SEQ ID NO: 609660
ucaaaggaaagaguguucc

SEQ ID NO: 609662 - RNA, 19 nt, Artificial Sequence
  Description of Artificial Sequence: Synthetic oligonucleotide
  Sense strand starting at position 2606 of SEQ ID NO: 585055
cuuuaaaucgugggcuucu

SEQ ID NO: 609663 - RNA, 19 nt, Artificial Sequence
  Description of Artificial Sequence: Synthetic oligonucleotide
  Antisense strand to SEQ ID NO: 609662
agaagcccacgauuuaaag

SEQ ID NO: 609664 - RNA, 19 nt, Artificial Sequence
  Description of Artificial Sequence: Synthetic oligonucleotide
  Sense strand starting at position 2741 of SEQ ID NO: 585055
gcgggcaccaguuaacauu

SEQ ID NO: 609665 - RNA, 19 nt, Artificial Sequence
  Description of Artificial Sequence: Synthetic oligonucleotide
  Antisense strand to SEQ ID NO: 609664
aauguuaacuggugcccgc

SEQ ID NO: 609666 - RNA, 19 nt, Artificial Sequence
  Description of Artificial Sequence: Synthetic oligonucleotide
  Sense strand starting at position 2780 of SEQ ID NO: 585055
ucauuauuagccuggauag

SEQ ID NO: 609667 - RNA, 19 nt, Artificial Sequence
  Description of Artificial Sequence: Synthetic oligonucleotide
  Antisense strand to SEQ ID NO: 609666
cuauccaggcuaauaauga

SEQ ID NO: 609668 - RNA, 19 nt, Artificial Sequence
  Description of Artificial Sequence: Synthetic oligonucleotide
  Sense strand starting at position 2821 of SEQ ID NO: 585055
uuugucuuacaacggauau

SEQ ID NO: 609669 - RNA, 19 nt, Artificial Sequence
  Description of Artificial Sequence: Synthetic oligonucleotide
  Antisense strand to SEQ ID NO: 609668
auauccguuguaagacaaa

SEQ ID NO: 609670 - RNA, 19 nt, Artificial Sequence
  Description of Artificial Sequence: Synthetic oligonucleotide
  Sense strand starting at position 2831 of SEQ ID NO: 585055
aacggauauugguuugaau

SEQ ID NO: 609671 - RNA, 19 nt, Artificial Sequence
  Description of Artificial Sequence: Synthetic oligonucleotide
  Antisense strand to SEQ ID NO: 609670
auucaaaccaauauccguu

SEQ ID NO: 609672 - RNA, 19 nt, Artificial Sequence
  Description of Artificial Sequence: Synthetic oligonucleotide
  Sense strand starting at position 2834 of SEQ ID NO: 585055
ggauauugguuugaaucca

SEQ ID NO: 609673 - RNA, 19 nt, Artificial Sequence
  Description of Artificial Sequence: Synthetic oligonucleotide
  Antisense strand to SEQ ID NO: 609672
uggauucaaaccaauaucc

SEQ ID NO: 609674 - RNA, 19 nt, Artificial Sequence
  Description of Artificial Sequence: Synthetic oligonucleotide
  Sense strand starting at position 2839 of SEQ ID NO: 585055
uugguuugaauccagcaga

SEQ ID NO: 609675 - RNA, 19 nt, Artificial Sequence
  Description of Artificial Sequence: Synthetic oligonucleotide
  Antisense strand to SEQ ID NO: 609674
ucugcuggauucaaaccaa

SEQ ID NO: 609676 - RNA, 19 nt, Artificial Sequence
  Description of Artificial Sequence: Synthetic oligonucleotide
  Sense strand starting at position 2842 of SEQ ID NO: 585055
guuugaauccagcagacau

SEQ ID NO: 609677 - RNA, 19 nt, Artificial Sequence
  Description of Artificial Sequence: Synthetic oligonucleotide
  Antisense strand to SEQ ID NO: 609676
augucugcuggauucaaac

SEQ ID NO: 609678 - RNA, 19 nt, Artificial Sequence
  Description of Artificial Sequence: Synthetic oligonucleotide
  Sense strand starting at position 2886 of SEQ ID NO: 585055
gcaguuaaucagggcuaac

SEQ ID NO: 609679 - RNA, 19 nt, Artificial Sequence
  Description of Artificial Sequence: Synthetic oligonucleotide
  Antisense strand to SEQ ID NO: 609678
guuagcccugauuaacugc

SEQ ID NO: 609680 - RNA, 19 nt, Artificial Sequence
  Description of Artificial Sequence: Synthetic oligonucleotide
  Sense strand starting at position 2889 of SEQ ID NO: 585055
guuaaucagggcuaaccua

SEQ ID NO: 609681 - RNA, 19 nt, Artificial Sequence
  Description of Artificial Sequence: Synthetic oligonucleotide
  Antisense strand to SEQ ID NO: 609680
uagguuagcccugauuaac

SEQ ID NO: 609682 - RNA, 19 nt, Artificial Sequence
  Description of Artificial Sequence: Synthetic oligonucleotide
  Sense strand starting at position 2907 of SEQ ID NO: 585055
agaacugaucuacggguuu

SEQ ID NO: 609683 - RNA, 19 nt, Artificial Sequence
  Description of Artificial Sequence: Synthetic oligonucleotide
  Antisense strand to SEQ ID NO: 609682
aaacccguagaucaguucu

SEQ ID NO: 609684 - RNA, 19 nt, Artificial Sequence
  Description of Artificial Sequence: Synthetic oligonucleotide
  Sense strand starting at position 3034 of SEQ ID NO: 585055
guaggaaguucucugacug

SEQ ID NO: 609685 - RNA, 19 nt, Artificial Sequence
  Description of Artificial Sequence: Synthetic oligonucleotide
  Antisense strand to SEQ ID NO: 609684
cagucagagaacuuccuac

SEQ ID NO: 609686 - RNA, 19 nt, Artificial Sequence
  Description of Artificial Sequence: Synthetic oligonucleotide
  Sense strand starting at position 3038 of SEQ ID NO: 585055
gaaguucucugacuggaag

SEQ ID NO: 609687 - RNA, 19 nt, Artificial Sequence
  Description of Artificial Sequence: Synthetic oligonucleotide
  Antisense strand to SEQ ID NO: 609686
cuuccagucagagaacuuc

SEQ ID NO: 609688 - RNA, 19 nt, Artificial Sequence
  Description of Artificial Sequence: Synthetic oligonucleotide
  Sense strand starting at position 3041 of SEQ ID NO: 585055
guucucugacuggaagcaa

SEQ ID NO: 609689 - RNA, 19 nt, Artificial Sequence
  Description of Artificial Sequence: Synthetic oligonucleotide
  Antisense strand to SEQ ID NO: 609688
uugcuuccagucagagaac

SEQ ID NO: 609690 - RNA, 19 nt, Artificial Sequence
  Description of Artificial Sequence: Synthetic oligonucleotide
  Sense strand starting at position 3121 of SEQ ID NO: 585055
acuagaaauugucaucaga

SEQ ID NO: 609691 - RNA, 19 nt, Artificial Sequence
  Description of Artificial Sequence: Synthetic oligonucleotide
  Antisense strand to SEQ ID NO: 609690
ucugaugacaauuucuagu

SEQ ID NO: 609692 - RNA, 19 nt, Artificial Sequence
  Description of Artificial Sequence: Synthetic oligonucleotide
  Sense strand starting at position 3206 of SEQ ID NO: 585055
aagcuugcuccugagauug

SEQ ID NO: 609693 - RNA, 19 nt, Artificial Sequence
  Description of Artificial Sequence: Synthetic oligonucleotide
  Antisense strand to SEQ ID NO: 609692
caaucucaggagcaagcuu

SEQ ID NO: 609694 - RNA, 19 nt, Artificial Sequence
  Description of Artificial Sequence: Synthetic oligonucleotide
  Sense strand starting at position 3214 of SEQ ID NO: 585055
uccugagauugagcaggaa

SEQ ID NO: 609695 - RNA, 19 nt, Artificial Sequence
  Description of Artificial Sequence: Synthetic oligonucleotide
  Antisense strand to SEQ ID NO: 609694
uuccugcucaaucucagga

SEQ ID NO: 609696 - RNA, 19 nt, Artificial Sequence
  Description of Artificial Sequence: Synthetic oligonucleotide
  Sense strand starting at position 3257 of SEQ ID NO: 585055
ggaaguuauguauguagag

SEQ ID NO: 609697 - RNA, 19 nt, Artificial Sequence
  Description of Artificial Sequence: Synthetic oligonucleotide
  Antisense strand to SEQ ID NO: 609696
cucuacauacauaacuucc

SEQ ID NO: 609698 - RNA, 19 nt, Artificial Sequence
  Description of Artificial Sequence: Synthetic oligonucleotide
  Sense strand starting at position 3258 of SEQ ID NO: 585055
gaaguuauguauguagaga

SEQ ID NO: 609699 - RNA, 19 nt, Artificial Sequence
  Description of Artificial Sequence: Synthetic oligonucleotide
  Antisense strand to SEQ ID NO: 609698
ucucuacauacauaacuuc

SEQ ID NO: 609700 - RNA, 19 nt, Artificial Sequence
  Description of Artificial Sequence: Synthetic oligonucleotide
  Sense strand starting at position 3287 of SEQ ID NO: 585055
auuuauaguuacgugcaaa

SEQ ID NO: 609701 - RNA, 19 nt, Artificial Sequence
  Description of Artificial Sequence: Synthetic oligonucleotide
  Antisense strand to SEQ ID NO: 609700
uuugcacguaacuauaaau

SEQ ID NO: 609702 - RNA, 19 nt, Artificial Sequence
  Description of Artificial Sequence: Synthetic oligonucleotide
  Sense strand starting at position 3314 of SEQ ID NO: 585055
agaauuggugcucauaggu

SEQ ID NO: 609703 - RNA, 19 nt, Artificial Sequence
  Description of Artificial Sequence: Synthetic oligonucleotide
  Antisense strand to SEQ ID NO: 609702
accuaugagcaccaauucu

SEQ ID NO: 609704 - RNA, 19 nt, Artificial Sequence
  Description of Artificial Sequence: Synthetic oligonucleotide
  Sense strand starting at position 3330 of SEQ ID NO: 585055
ggugaugaggauugcaaca

SEQ ID NO: 609705 - RNA, 19 nt, Artificial Sequence
  Description of Artificial Sequence: Synthetic oligonucleotide
  Antisense strand to SEQ ID NO: 609704
uguugcaauccucaucacc

SEQ ID NO: 609706 - RNA, 19 nt, Artificial Sequence
  Description of Artificial Sequence: Synthetic oligonucleotide
  Sense strand starting at position 3404 of SEQ ID NO: 585055
cucagagugcuaugaaaca

SEQ ID NO: 609707 - RNA, 19 nt, Artificial Sequence
  Description of Artificial Sequence: Synthetic oligonucleotide
  Antisense strand to SEQ ID NO: 609706
uguuucauagcacucugag

SEQ ID NO: 609708 - RNA, 19 nt, Artificial Sequence
  Description of Artificial Sequence: Synthetic oligonucleotide
  Sense strand starting at position 3423 of SEQ ID NO: 585055
ccugacaagaugugucaga

SEQ ID NO: 609709 - RNA, 19 nt, Artificial Sequence
  Description of Artificial Sequence: Synthetic oligonucleotide
  Antisense strand to SEQ ID NO: 609708
ucugacacaucuugucagg

SEQ ID NO: 609710 - RNA, 19 nt, Artificial Sequence
  Description of Artificial Sequence: Synthetic oligonucleotide
  Sense strand starting at position 3424 of SEQ ID NO: 585055
cugacaagaugugucagau

SEQ ID NO: 609711 - RNA, 19 nt, Artificial Sequence
  Description of Artificial Sequence: Synthetic oligonucleotide
  Antisense strand to SEQ ID NO: 609710
aucugacacaucuugucag

SEQ ID NO: 609712 - RNA, 19 nt, Artificial Sequence
  Description of Artificial Sequence: Synthetic oligonucleotide
  Sense strand starting at position 3436 of SEQ ID NO: 585055
gucagaucaggcuaggacu

SEQ ID NO: 609713 - RNA, 19 nt, Artificial Sequence
  Description of Artificial Sequence: Synthetic oligonucleotide
  Antisense strand to SEQ ID NO: 609712
aguccuagccugaucugac

SEQ ID NO: 609714 - RNA, 19 nt, Artificial Sequence
  Description of Artificial Sequence: Synthetic oligonucleotide
  Sense strand starting at position 3552 of SEQ ID NO: 585055
aggcuaguugaggauccau

SEQ ID NO: 609715 - RNA, 19 nt, Artificial Sequence
  Description of Artificial Sequence: Synthetic oligonucleotide
  Antisense strand to SEQ ID NO: 609714
auggauccucaacuagccu

SEQ ID NO: 609716 - RNA, 19 nt, Artificial Sequence
  Description of Artificial Sequence: Synthetic oligonucleotide
  Sense strand starting at position 3575 of SEQ ID NO: 585055
cuaaacauuugucgacacu

SEQ ID NO: 609717 - RNA, 19 nt, Artificial Sequence
  Description of Artificial Sequence: Synthetic oligonucleotide
  Antisense strand to SEQ ID NO: 609716
agugucgacaaauguuuag

SEQ ID NO: 609718 - RNA, 19 nt, Artificial Sequence
  Description of Artificial Sequence: Synthetic oligonucleotide
  Sense strand starting at position 3915 of SEQ ID NO: 585055
cuaucuuuagggcagauua

SEQ ID NO: 609719 - RNA, 19 nt, Artificial Sequence
  Description of Artificial Sequence: Synthetic oligonucleotide
  Antisense strand to SEQ ID NO: 609718
uaaucugcccuaaagauag

SEQ ID NO: 609720 - RNA, 19 nt, Artificial Sequence
  Description of Artificial Sequence: Synthetic oligonucleotide
  Sense strand starting at position 3927 of SEQ ID NO: 585055
cagauuaagugguacucaa

SEQ ID NO: 609721 - RNA, 19 nt, Artificial Sequence
  Description of Artificial Sequence: Synthetic oligonucleotide
  Antisense strand to SEQ ID NO: 609720
uugaguaccacuuaaucug

SEQ ID NO: 609722 - RNA, 19 nt, Artificial Sequence
  Description of Artificial Sequence: Synthetic oligonucleotide
  Sense strand starting at position 3951 of SEQ ID NO: 585055
augagcuagaaguguaaua

SEQ ID NO: 609723 - RNA, 19 nt, Artificial Sequence
  Description of Artificial Sequence: Synthetic oligonucleotide
  Antisense strand to SEQ ID NO: 609722
uauuacacuucuagcucau

SEQ ID NO: 609724 - RNA, 19 nt, Artificial Sequence
  Description of Artificial Sequence: Synthetic oligonucleotide
  Sense strand starting at position 3953 of SEQ ID NO: 585055
gagcuagaaguguaauaua

SEQ ID NO: 609725 - RNA, 19 nt, Artificial Sequence
  Description of Artificial Sequence: Synthetic oligonucleotide
  Antisense strand to SEQ ID NO: 609724
uauauuacacuucuagcuc

SEQ ID NO: 609726 - RNA, 19 nt, Artificial Sequence
  Description of Artificial Sequence: Synthetic oligonucleotide
  Sense strand starting at position 3956 of SEQ ID NO: 585055
cuagaaguguaauauacca

SEQ ID NO: 609727 - RNA, 19 nt, Artificial Sequence
  Description of Artificial Sequence: Synthetic oligonucleotide
  Antisense strand to SEQ ID NO: 609726
ugguauauuacacuucuag

SEQ ID NO: 609728 - RNA, 19 nt, Artificial Sequence
  Description of Artificial Sequence: Synthetic oligonucleotide
  Sense strand starting at position 111 of SEQ ID NO: 585056
cccuuuagugcacaggaaa

SEQ ID NO: 609729 - RNA, 19 nt, Artificial Sequence
  Description of Artificial Sequence: Synthetic oligonucleotide
  Antisense strand to SEQ ID NO: 609728
uuuccugugcacuaaaggg

SEQ ID NO: 609730 - RNA, 19 nt, Artificial Sequence
  Description of Artificial Sequence: Synthetic oligonucleotide
  Sense strand starting at position 279 of SEQ ID NO: 585056
uguauaucgccuguuugua

SEQ ID NO: 609731 - RNA, 19 nt, Artificial Sequence
  Description of Artificial Sequence: Synthetic oligonucleotide
  Antisense strand to SEQ ID NO: 609730
uacaaacaggcgauauaca

SEQ ID NO: 609732 - RNA, 19 nt, Artificial Sequence
  Description of Artificial Sequence: Synthetic oligonucleotide
  Sense strand starting at position 280 of SEQ ID NO: 585056
guauaucgccuguuuguaa

SEQ ID NO: 609733 - RNA, 19 nt, Artificial Sequence
  Description of Artificial Sequence: Synthetic oligonucleotide
  Antisense strand to SEQ ID NO: 609732
uuacaaacaggcgauauac

SEQ ID NO: 609734 - RNA, 19 nt, Artificial Sequence
  Description of Artificial Sequence: Synthetic oligonucleotide
  Sense strand starting at position 610 of SEQ ID NO: 585056
aguucuucccauuagucuu

SEQ ID NO: 609735 - RNA, 19 nt, Artificial Sequence
  Description of Artificial Sequence: Synthetic oligonucleotide
  Antisense strand to SEQ ID NO: 609734
aagacuaaugggaagaacu

SEQ ID NO: 609736 - RNA, 19 nt, Artificial Sequence
  Description of Artificial Sequence: Synthetic oligonucleotide
  Sense strand starting at position 639 of SEQ ID NO: 585056
gggcauuugcagugccuaa

SEQ ID NO: 609737 - RNA, 19 nt, Artificial Sequence
  Description of Artificial Sequence: Synthetic oligonucleotide
  Antisense strand to SEQ ID NO: 609736
uuaggcacugcaaaugccc

SEQ ID NO: 609738 - RNA, 19 nt, Artificial Sequence
  Description of Artificial Sequence: Synthetic oligonucleotide
  Sense strand starting at position 687 of SEQ ID NO: 585056
uuaagaaucuggccacaaa

SEQ ID NO: 609739 - RNA, 19 nt, Artificial Sequence
  Description of Artificial Sequence: Synthetic oligonucleotide
  Antisense strand to SEQ ID NO: 609738
uuuguggccagauucuuaa

SEQ ID NO: 609740 - RNA, 19 nt, Artificial Sequence
  Description of Artificial Sequence: Synthetic oligonucleotide
  Sense strand starting at position 793 of SEQ ID NO: 585056
aauguuaaucauugcagga

SEQ ID NO: 609741 - RNA, 19 nt, Artificial Sequence
  Description of Artificial Sequence: Synthetic oligonucleotide
  Antisense strand to SEQ ID NO: 609740
uccugcaaugauuaacauu

SEQ ID NO: 609742 - RNA, 19 nt, Artificial Sequence
  Description of Artificial Sequence: Synthetic oligonucleotide
  Sense strand starting at position 1074 of SEQ ID NO: 585056
caaagaacugaguguugau

SEQ ID NO: 609743 - RNA, 19 nt, Artificial Sequence
  Description of Artificial Sequence: Synthetic oligonucleotide
  Antisense strand to SEQ ID NO: 609742
aucaacacucaguucuuug

SEQ ID NO: 609744 - RNA, 19 nt, Artificial Sequence
  Description of Artificial Sequence: Synthetic oligonucleotide
  Sense strand starting at position 1091 of SEQ ID NO: 585056
auuuaauguugccugaagu

SEQ ID NO: 609745 - RNA, 19 nt, Artificial Sequence
  Description of Artificial Sequence: Synthetic oligonucleotide
  Antisense strand to SEQ ID NO: 609744
acuucaggcaacauuaaau

SEQ ID NO: 609746 - RNA, 19 nt, Artificial Sequence
  Description of Artificial Sequence: Synthetic oligonucleotide
  Sense strand starting at position 1236 of SEQ ID NO: 585056
ccagaaaggaguugcucau

SEQ ID NO: 609747 - RNA, 19 nt, Artificial Sequence
  Description of Artificial Sequence: Synthetic oligonucleotide
  Antisense strand to SEQ ID NO: 609746
augagcaacuccuuucugg

SEQ ID NO: 609748 - RNA, 19 nt, Artificial Sequence
  Description of Artificial Sequence: Synthetic oligonucleotide
  Sense strand starting at position 1240 of SEQ ID NO: 585056
aaaggaguugcucaucuuu

SEQ ID NO: 609749 - RNA, 19 nt, Artificial Sequence
  Description of Artificial Sequence: Synthetic oligonucleotide
  Antisense strand to SEQ ID NO: 609748
aaagaugagcaacuccuuu

SEQ ID NO: 609750 - RNA, 19 nt, Artificial Sequence
  Description of Artificial Sequence: Synthetic oligonucleotide
  Sense strand starting at position 1386 of SEQ ID NO: 585056
auuaaaucagcauguagaa

SEQ ID NO: 609751 - RNA, 19 nt, Artificial Sequence
  Description of Artificial Sequence: Synthetic oligonucleotide
  Antisense strand to SEQ ID NO: 609750
uucuacaugcugauuuaau

SEQ ID NO: 609752 - RNA, 19 nt, Artificial Sequence
  Description of Artificial Sequence: Synthetic oligonucleotide
  Sense strand starting at position 1613 of SEQ ID NO: 585056
cugggacacguuuggagaa

SEQ ID NO: 609753 - RNA, 19 nt, Artificial Sequence
  Description of Artificial Sequence: Synthetic oligonucleotide
  Antisense strand to SEQ ID NO: 609752
uucuccaaacgugucccag

SEQ ID NO: 609754 - RNA, 19 nt, Artificial Sequence
  Description of Artificial Sequence: Synthetic oligonucleotide
  Sense strand starting at position 1667 of SEQ ID NO: 585056
ggauucucccacugacaac

SEQ ID NO: 609755 - RNA, 19 nt, Artificial Sequence
  Description of Artificial Sequence: Synthetic oligonucleotide
  Antisense strand to SEQ ID NO: 609754
guugucagugggagaaucc

SEQ ID NO: 609756 - RNA, 19 nt, Artificial Sequence
  Description of Artificial Sequence: Synthetic oligonucleotide
  Sense strand starting at position 1897 of SEQ ID NO: 585056
uccuuucuccgggaacuuu

SEQ ID NO: 609757 - RNA, 19 nt, Artificial Sequence
  Description of Artificial Sequence: Synthetic oligonucleotide
  Antisense strand to SEQ ID NO: 609756
aaaguucccggagaaagga

SEQ ID NO: 609758 - RNA, 19 nt, Artificial Sequence
  Description of Artificial Sequence: Synthetic oligonucleotide
  Sense strand starting at position 2205 of SEQ ID NO: 585056
uuagguaucuuauccaagu

SEQ ID NO: 609759 - RNA, 19 nt, Artificial Sequence
  Description of Artificial Sequence: Synthetic oligonucleotide
  Antisense strand to SEQ ID NO: 609758
acuuggauaagauaccuaa

SEQ ID NO: 609760 - RNA, 19 nt, Artificial Sequence
  Description of Artificial Sequence: Synthetic oligonucleotide
  Sense strand starting at position 2235 of SEQ ID NO: 585056
auggguauuuagccaguuu

SEQ ID NO: 609761 - RNA, 19 nt, Artificial Sequence
  Description of Artificial Sequence: Synthetic oligonucleotide
  Antisense strand to SEQ ID NO: 609760
aaacuggcuaaauacccau

SEQ ID NO: 609762 - RNA, 19 nt, Artificial Sequence
  Description of Artificial Sequence: Synthetic oligonucleotide
  Sense strand starting at position 2305 of SEQ ID NO: 585056
augugacguguuuauaaag

SEQ ID NO: 609763 - RNA, 19 nt, Artificial Sequence
  Description of Artificial Sequence: Synthetic oligonucleotide
  Antisense strand to SEQ ID NO: 609762
cuuuauaaacacgucacau

SEQ ID NO: 609764 - RNA, 19 nt, Artificial Sequence
  Description of Artificial Sequence: Synthetic oligonucleotide
  Sense strand starting at position 2314 of SEQ ID NO: 585056
guuuauaaagcucaguaag

SEQ ID NO: 609765 - RNA, 19 nt, Artificial Sequence
  Description of Artificial Sequence: Synthetic oligonucleotide
  Antisense strand to SEQ ID NO: 609764
cuuacugagcuuuauaaac

SEQ ID NO: 609766 - RNA, 19 nt, Artificial Sequence
  Description of Artificial Sequence: Synthetic oligonucleotide
  Sense strand starting at position 2371 of SEQ ID NO: 585056
caggaagugcuuuggaaga

SEQ ID NO: 609767 - RNA, 19 nt, Artificial Sequence
  Description of Artificial Sequence: Synthetic oligonucleotide
  Antisense strand to SEQ ID NO: 609766
ucuuccaaagcacuuccug

SEQ ID NO: 609768 - RNA, 19 nt, Artificial Sequence
  Description of Artificial Sequence: Synthetic oligonucleotide
  Sense strand starting at position 2550 of SEQ ID NO: 585056
cuauuucgauucgugcaga

SEQ ID NO: 609769 - RNA, 19 nt, Artificial Sequence
  Description of Artificial Sequence: Synthetic oligonucleotide
  Antisense strand to SEQ ID NO: 609768
ucugcacgaaucgaaauag

SEQ ID NO: 609770 - RNA, 19 nt, Artificial Sequence
  Description of Artificial Sequence: Synthetic oligonucleotide
  Sense strand starting at position 2709 of SEQ ID NO: 585056
caguuaccgcaggauucua

SEQ ID NO: 609771 - RNA, 19 nt, Artificial Sequence
  Description of Artificial Sequence: Synthetic oligonucleotide
  Antisense strand to SEQ ID NO: 609770
uagaauccugcgguaacug

SEQ ID NO: 609772 - RNA, 19 nt, Artificial Sequence
  Description of Artificial Sequence: Synthetic oligonucleotide
  Sense strand starting at position 2717 of SEQ ID NO: 585056
gcaggauucuauccuccua

SEQ ID NO: 609773 - RNA, 19 nt, Artificial Sequence
  Description of Artificial Sequence: Synthetic oligonucleotide
  Antisense strand to SEQ ID NO: 609772
uaggaggauagaauccugc

SEQ ID NO: 609774 - RNA, 19 nt, Artificial Sequence
  Description of Artificial Sequence: Synthetic oligonucleotide
  Sense strand starting at position 2777 of SEQ ID NO: 585056
cucucugguccuugagaga

SEQ ID NO: 609775 - RNA, 19 nt, Artificial Sequence
  Description of Artificial Sequence: Synthetic oligonucleotide
  Antisense strand to SEQ ID NO: 609774
ucucucaaggaccagagag

SEQ ID NO: 609776 - RNA, 19 nt, Artificial Sequence
  Description of Artificial Sequence: Synthetic oligonucleotide
  Sense strand starting at position 2794 of SEQ ID NO: 585056
gagaacuucugaguggcaa

SEQ ID NO: 609777 - RNA, 19 nt, Artificial Sequence
  Description of Artificial Sequence: Synthetic oligonucleotide
  Antisense strand to SEQ ID NO: 609776
uugccacucagaaguucuc

SEQ ID NO: 609778 - RNA, 19 nt, Artificial Sequence
  Description of Artificial Sequence: Synthetic oligonucleotide
  Sense strand starting at position 2830 of SEQ ID NO: 585056
uugcaagcccuuuaguaaa

SEQ ID NO: 609779 - RNA, 19 nt, Artificial Sequence
  Description of Artificial Sequence: Synthetic oligonucleotide
  Antisense strand to SEQ ID NO: 609778
uuuacuaaagggcuugcaa

SEQ ID NO: 609780 - RNA, 19 nt, Artificial Sequence
  Description of Artificial Sequence: Synthetic oligonucleotide
  Sense strand starting at position 2894 of SEQ ID NO: 585056
gguuacaucacguaguuaa

SEQ ID NO: 609781 - RNA, 19 nt, Artificial Sequence
  Description of Artificial Sequence: Synthetic oligonucleotide
  Antisense strand to SEQ ID NO: 609780
uuaacuacgugauguaacc

SEQ ID NO: 609782 - RNA, 19 nt, Artificial Sequence
  Description of Artificial Sequence: Synthetic oligonucleotide
  Sense strand starting at position 3030 of SEQ ID NO: 585056
aguggucauagguaugauu

SEQ ID NO: 609783 - RNA, 19 nt, Artificial Sequence
  Description of Artificial Sequence: Synthetic oligonucleotide
  Antisense strand to SEQ ID NO: 609782
aaucauaccuaugaccacu

SEQ ID NO: 609784 - RNA, 19 nt, Artificial Sequence
  Description of Artificial Sequence: Synthetic oligonucleotide
  Sense strand starting at position 3033 of SEQ ID NO: 585056
ggucauagguaugauuuga

SEQ ID NO: 609785 - RNA, 19 nt, Artificial Sequence
  Description of Artificial Sequence: Synthetic oligonucleotide
  Antisense strand to SEQ ID NO: 609784
ucaaaucauaccuaugacc

SEQ ID NO: 609786 - RNA, 19 nt, Artificial Sequence
  Description of Artificial Sequence: Synthetic oligonucleotide
  Sense strand starting at position 3038 of SEQ ID NO: 585056
uagguaugauuugaauaag

SEQ ID NO: 609787 - RNA, 19 nt, Artificial Sequence
  Description of Artificial Sequence: Synthetic oligonucleotide
  Antisense strand to SEQ ID NO: 609786
cuuauucaaaucauaccua

SEQ ID NO: 609788 - RNA, 19 nt, Artificial Sequence
  Description of Artificial Sequence: Synthetic oligonucleotide
  Sense strand starting at position 3062 of SEQ ID NO: 585056
ggaauauucuagucggagg

SEQ ID NO: 609789 - RNA, 19 nt, Artificial Sequence
  Description of Artificial Sequence: Synthetic oligonucleotide
  Antisense strand to SEQ ID NO: 609788
ccuccgacuagaauauucc

SEQ ID NO: 609790 - RNA, 19 nt, Artificial Sequence
  Description of Artificial Sequence: Synthetic oligonucleotide
  Sense strand starting at position 3063 of SEQ ID NO: 585056
gaauauucuagucggagga

SEQ ID NO: 609791 - RNA, 19 nt, Artificial Sequence
  Description of Artificial Sequence: Synthetic oligonucleotide
  Antisense strand to SEQ ID NO: 609790
uccuccgacuagaauauuc

SEQ ID NO: 609792 - RNA, 19 nt, Artificial Sequence
  Description of Artificial Sequence: Synthetic oligonucleotide
  Sense strand starting at position 3064 of SEQ ID NO: 585056
aauauucuagucggaggaa

SEQ ID NO: 609793 - RNA, 19 nt, Artificial Sequence
  Description of Artificial Sequence: Synthetic oligonucleotide
  Antisense strand to SEQ ID NO: 609792
uuccuccgacuagaauauu

SEQ ID NO: 609794 - RNA, 19 nt, Artificial Sequence
  Description of Artificial Sequence: Synthetic oligonucleotide
  Sense strand starting at position 3125 of SEQ ID NO: 585056
uacggagauguguaugaua

SEQ ID NO: 609795 - RNA, 19 nt, Artificial Sequence
  Description of Artificial Sequence: Synthetic oligonucleotide
  Antisense strand to SEQ ID NO: 609794
uaucauacacaucuccgua

SEQ ID NO: 609796 - RNA, 19 nt, Artificial Sequence
  Description of Artificial Sequence: Synthetic oligonucleotide
  Sense strand starting at position 3127 of SEQ ID NO: 585056
cggagauguguaugauagg

SEQ ID NO: 609797 - RNA, 19 nt, Artificial Sequence
  Description of Artificial Sequence: Synthetic oligonucleotide
  Antisense strand to SEQ ID NO: 609796
ccuaucauacacaucuccg

SEQ ID NO: 609798 - RNA, 19 nt, Artificial Sequence
  Description of Artificial Sequence: Synthetic oligonucleotide
  Sense strand starting at position 3132 of SEQ ID NO: 585056
auguguaugauagggaaua

SEQ ID NO: 609799 - RNA, 19 nt, Artificial Sequence
  Description of Artificial Sequence: Synthetic oligonucleotide
  Antisense strand to SEQ ID NO: 609798
uauucccuaucauacacau

SEQ ID NO: 609800 - RNA, 19 nt, Artificial Sequence
  Description of Artificial Sequence: Synthetic oligonucleotide
  Sense strand starting at position 3740 of SEQ ID NO: 585056
cucagugauaacuguagua

SEQ ID NO: 609801 - RNA, 19 nt, Artificial Sequence
  Description of Artificial Sequence: Synthetic oligonucleotide
  Antisense strand to SEQ ID NO: 609800
uacuacaguuaucacugag

SEQ ID NO: 609802 - RNA, 19 nt, Artificial Sequence
  Description of Artificial Sequence: Synthetic oligonucleotide
  Sense strand starting at position 3742 of SEQ ID NO: 585056
cagugauaacuguaguacu

SEQ ID NO: 609803 - RNA, 19 nt, Artificial Sequence
  Description of Artificial Sequence: Synthetic oligonucleotide
  Antisense strand to SEQ ID NO: 609802
aguacuacaguuaucacug

SEQ ID NO: 609804 - RNA, 19 nt, Artificial Sequence
  Description of Artificial Sequence: Synthetic oligonucleotide
  Sense strand starting at position 3827 of SEQ ID NO: 585056
aguuaaacucuauauagug

SEQ ID NO: 609805 - RNA, 19 nt, Artificial Sequence
  Description of Artificial Sequence: Synthetic oligonucleotide
  Antisense strand to SEQ ID NO: 609804
cacuauauagaguuuaacu

SEQ ID NO: 609806 - RNA, 19 nt, Artificial Sequence
  Description of Artificial Sequence: Synthetic oligonucleotide
  Sense strand starting at position 3884 of SEQ ID NO: 585056
uguauaaucaacggaguga

SEQ ID NO: 609807 - RNA, 19 nt, Artificial Sequence
  Description of Artificial Sequence: Synthetic oligonucleotide
  Antisense strand to SEQ ID NO: 609806
ucacuccguugauuauaca

SEQ ID NO: 609808 - RNA, 19 nt, Artificial Sequence
  Description of Artificial Sequence: Synthetic oligonucleotide
  Sense strand starting at position 77 of SEQ ID NO: 585057
augcuucuagucuagggaa

SEQ ID NO: 609809 - RNA, 19 nt, Artificial Sequence
  Description of Artificial Sequence: Synthetic oligonucleotide
  Antisense strand to SEQ ID NO: 609808
uucccuagacuagaagcau

SEQ ID NO: 609810 - RNA, 19 nt, Artificial Sequence
  Description of Artificial Sequence: Synthetic oligonucleotide
  Sense strand starting at position 194 of SEQ ID NO: 585057
agaauaugccguuaaucag

SEQ ID NO: 609811 - RNA, 19 nt, Artificial Sequence
  Description of Artificial Sequence: Synthetic oligonucleotide
  Antisense strand to SEQ ID NO: 609810
cugauuaacggcauauucu

SEQ ID NO: 609812 - RNA, 19 nt, Artificial Sequence
  Description of Artificial Sequence: Synthetic oligonucleotide
  Sense strand starting at position 202 of SEQ ID NO: 585057
ccguuaaucagguaugaag

SEQ ID NO: 609813 - RNA, 19 nt, Artificial Sequence
  Description of Artificial Sequence: Synthetic oligonucleotide
  Antisense strand to SEQ ID NO: 609812
cuucauaccugauuaacgg

SEQ ID NO: 609814 - RNA, 19 nt, Artificial Sequence
  Description of Artificial Sequence: Synthetic oligonucleotide
  Sense strand starting at position 204 of SEQ ID NO: 585057
guuaaucagguaugaagau

SEQ ID NO: 609815 - RNA, 19 nt, Artificial Sequence
  Description of Artificial Sequence: Synthetic oligonucleotide
  Antisense strand to SEQ ID NO: 609814
aucuucauaccugauuaac

SEQ ID NO: 609816 - RNA, 19 nt, Artificial Sequence
  Description of Artificial Sequence: Synthetic oligonucleotide
  Sense strand starting at position 294 of SEQ ID NO: 585057
gcuaaagaaacuugguaag

SEQ ID NO: 609817 - RNA, 19 nt, Artificial Sequence
  Description of Artificial Sequence: Synthetic oligonucleotide
  Antisense strand to SEQ ID NO: 609816
cuuaccaaguuucuuuagc

SEQ ID NO: 609818 - RNA, 19 nt, Artificial Sequence
  Description of Artificial Sequence: Synthetic oligonucleotide
  Sense strand starting at position 315 of SEQ ID NO: 585057
cuuagauaguugcuuuaaa

SEQ ID NO: 609819 - RNA, 19 nt, Artificial Sequence
  Description of Artificial Sequence: Synthetic oligonucleotide
  Antisense strand to SEQ ID NO: 609818
uuuaaagcaacuaucuaag

SEQ ID NO: 609820 - RNA, 19 nt, Artificial Sequence
  Description of Artificial Sequence: Synthetic oligonucleotide
  Sense strand starting at position 498 of SEQ ID NO: 585057
cugcucugucuugauacau

SEQ ID NO: 609821 - RNA, 19 nt, Artificial Sequence
  Description of Artificial Sequence: Synthetic oligonucleotide
  Antisense strand to SEQ ID NO: 609820
auguaucaagacagagcag

SEQ ID NO: 609822 - RNA, 19 nt, Artificial Sequence
  Description of Artificial Sequence: Synthetic oligonucleotide
  Sense strand starting at position 550 of SEQ ID NO: 585057
uaguaugaacgccaucaga

SEQ ID NO: 609823 - RNA, 19 nt, Artificial Sequence
  Description of Artificial Sequence: Synthetic oligonucleotide
  Antisense strand to SEQ ID NO: 609822
ucugauggcguucauacua

SEQ ID NO: 609824 - RNA, 19 nt, Artificial Sequence
  Description of Artificial Sequence: Synthetic oligonucleotide
  Sense strand starting at position 646 of SEQ ID NO: 585057
uugauccaucacugaaaug

SEQ ID NO: 609825 - RNA, 19 nt, Artificial Sequence
  Description of Artificial Sequence: Synthetic oligonucleotide
  Antisense strand to SEQ ID NO: 609824
cauuucagugauggaucaa

SEQ ID NO: 609826 - RNA, 19 nt, Artificial Sequence
  Description of Artificial Sequence: Synthetic oligonucleotide
  Sense strand starting at position 810 of SEQ ID NO: 585057
accugagaacacugcuuaa

SEQ ID NO: 609827 - RNA, 19 nt, Artificial Sequence
  Description of Artificial Sequence: Synthetic oligonucleotide
  Antisense strand to SEQ ID NO: 609826
uuaagcaguguucucaggu

SEQ ID NO: 609828 - RNA, 19 nt, Artificial Sequence
  Description of Artificial Sequence: Synthetic oligonucleotide
  Sense strand starting at position 950 of SEQ ID NO: 585057
augagaugacaagguguua

SEQ ID NO: 609829 - RNA, 19 nt, Artificial Sequence
  Description of Artificial Sequence: Synthetic oligonucleotide
  Antisense strand to SEQ ID NO: 609828
uaacaccuugucaucucau

SEQ ID NO: 609830 - RNA, 19 nt, Artificial Sequence
  Description of Artificial Sequence: Synthetic oligonucleotide
  Sense strand starting at position 961 of SEQ ID NO: 585057
agguguuagucauuauuaa

SEQ ID NO: 609831 - RNA, 19 nt, Artificial Sequence
  Description of Artificial Sequence: Synthetic oligonucleotide
  Antisense strand to SEQ ID NO: 609830
uuaauaaugacuaacaccu

SEQ ID NO: 609832 - RNA, 19 nt, Artificial Sequence
  Description of Artificial Sequence: Synthetic oligonucleotide
  Sense strand starting at position 962 of SEQ ID NO: 585057
gguguuagucauuauuaac

SEQ ID NO: 609833 - RNA, 19 nt, Artificial Sequence
  Description of Artificial Sequence: Synthetic oligonucleotide
  Antisense strand to SEQ ID NO: 609832
guuaauaaugacuaacacc

SEQ ID NO: 609834 - RNA, 19 nt, Artificial Sequence
  Description of Artificial Sequence: Synthetic oligonucleotide
  Sense strand starting at position 1024 of SEQ ID NO: 585057
ucagguucuguagaaguau

SEQ ID NO: 609835 - RNA, 19 nt, Artificial Sequence
  Description of Artificial Sequence: Synthetic oligonucleotide
  Antisense strand to SEQ ID NO: 609834
auacuucuacagaaccuga

SEQ ID NO: 609836 - RNA, 19 nt, Artificial Sequence
  Description of Artificial Sequence: Synthetic oligonucleotide
  Sense strand starting at position 1036 of SEQ ID NO: 585057
gaaguauguaguuaaacga

SEQ ID NO: 609837 - RNA, 19 nt, Artificial Sequence
  Description of Artificial Sequence: Synthetic oligonucleotide
  Antisense strand to SEQ ID NO: 609836
ucguuuaacuacauacuuc

SEQ ID NO: 609838 - RNA, 19 nt, Artificial Sequence
  Description of Artificial Sequence: Synthetic oligonucleotide
  Sense strand starting at position 1065 of SEQ ID NO: 585057
uuggauuucuuccagaauc

SEQ ID NO: 609839 - RNA, 19 nt, Artificial Sequence
  Description of Artificial Sequence: Synthetic oligonucleotide
  Antisense strand to SEQ ID NO: 609838
gauucuggaagaaauccaa

SEQ ID NO: 609840 - RNA, 19 nt, Artificial Sequence
  Description of Artificial Sequence: Synthetic oligonucleotide
  Sense strand starting at position 1313 of SEQ ID NO: 585057
cccuuuagugcacaggaaa

SEQ ID NO: 609841 - RNA, 19 nt, Artificial Sequence
  Description of Artificial Sequence: Synthetic oligonucleotide
  Antisense strand to SEQ ID NO: 609840
uuuccugugcacuaaaggg

SEQ ID NO: 609842 - RNA, 19 nt, Artificial Sequence
  Description of Artificial Sequence: Synthetic oligonucleotide
  Sense strand starting at position 1481 of SEQ ID NO: 585057
uguauaucgccuguuugua

SEQ ID NO: 609843 - RNA, 19 nt, Artificial Sequence
  Description of Artificial Sequence: Synthetic oligonucleotide
  Antisense strand to SEQ ID NO: 609842
uacaaacaggcgauauaca

SEQ ID NO: 609844 - RNA, 19 nt, Artificial Sequence
  Description of Artificial Sequence: Synthetic oligonucleotide
  Sense strand starting at position 1482 of SEQ ID NO: 585057
guauaucgccuguuuguaa

SEQ ID NO: 609845 - RNA, 19 nt, Artificial Sequence
  Description of Artificial Sequence: Synthetic oligonucleotide
  Antisense strand to SEQ ID NO: 609844
uuacaaacaggcgauauac

SEQ ID NO: 609846 - RNA, 19 nt, Artificial Sequence
  Description of Artificial Sequence: Synthetic oligonucleotide
  Sense strand starting at position 1812 of SEQ ID NO: 585057
aguucuucccauuagucuu

SEQ ID NO: 609847 - RNA, 19 nt, Artificial Sequence
  Description of Artificial Sequence: Synthetic oligonucleotide
  Antisense strand to SEQ ID NO: 609846
aagacuaaugggaagaacu

SEQ ID NO: 609848 - RNA, 19 nt, Artificial Sequence
  Description of Artificial Sequence: Synthetic oligonucleotide
  Sense strand starting at position 1841 of SEQ ID NO: 585057
gggcauuugcagugccuaa

SEQ ID NO: 609849 - RNA, 19 nt, Artificial Sequence
  Description of Artificial Sequence: Synthetic oligonucleotide
  Antisense strand to SEQ ID NO: 609848
uuaggcacugcaaaugccc

SEQ ID NO: 609850 - RNA, 19 nt, Artificial Sequence
  Description of Artificial Sequence: Synthetic oligonucleotide
  Sense strand starting at position 1889 of SEQ ID NO: 585057
uuaagaaucuggccacaaa

SEQ ID NO: 609851 - RNA, 19 nt, Artificial Sequence
  Description of Artificial Sequence: Synthetic oligonucleotide
  Antisense strand to SEQ ID NO: 609850
uuuguggccagauucuuaa

SEQ ID NO: 609852 - RNA, 19 nt, Artificial Sequence
  Description of Artificial Sequence: Synthetic oligonucleotide
  Sense strand starting at position 1995 of SEQ ID NO: 585057
aauguuaaucauugcagga

SEQ ID NO: 609853 - RNA, 19 nt, Artificial Sequence
  Description of Artificial Sequence: Synthetic oligonucleotide
  Antisense strand to SEQ ID NO: 609852
uccugcaaugauuaacauu

SEQ ID NO: 609854 - RNA, 19 nt, Artificial Sequence
  Description of Artificial Sequence: Synthetic oligonucleotide
  Sense strand starting at position 2276 of SEQ ID NO: 585057
caaagaacugaguguugau

SEQ ID NO: 609855 - RNA, 19 nt, Artificial Sequence
  Description of Artificial Sequence: Synthetic oligonucleotide
  Antisense strand to SEQ ID NO: 609854
aucaacacucaguucuuug

SEQ ID NO: 609856 - RNA, 19 nt, Artificial Sequence
  Description of Artificial Sequence: Synthetic oligonucleotide
  Sense strand starting at position 2293 of SEQ ID NO: 585057
auuuaauguugccugaagu

SEQ ID NO: 609857 - RNA, 19 nt, Artificial Sequence
  Description of Artificial Sequence: Synthetic oligonucleotide
  Antisense strand to SEQ ID NO: 609856
acuucaggcaacauuaaau

SEQ ID NO: 609858 - RNA, 19 nt, Artificial Sequence
  Description of Artificial Sequence: Synthetic oligonucleotide
  Sense strand starting at position 2438 of SEQ ID NO: 585057
ccagaaaggaguugcucau

SEQ ID NO: 609859 - RNA, 19 nt, Artificial Sequence
  Description of Artificial Sequence: Synthetic oligonucleotide
  Antisense strand to SEQ ID NO: 609858
augagcaacuccuuucugg

SEQ ID NO: 609860 - RNA, 19 nt, Artificial Sequence
  Description of Artificial Sequence: Synthetic oligonucleotide
  Sense strand starting at position 2442 of SEQ ID NO: 585057
aaaggaguugcucaucuuu

SEQ ID NO: 609861 - RNA, 19 nt, Artificial Sequence
  Description of Artificial Sequence: Synthetic oligonucleotide
  Antisense strand to SEQ ID NO: 609860
aaagaugagcaacuccuuu

SEQ ID NO: 609862 - RNA, 19 nt, Artificial Sequence
  Description of Artificial Sequence: Synthetic oligonucleotide
  Sense strand starting at position 2588 of SEQ ID NO: 585057
auuaaaucagcauguagaa

SEQ ID NO: 609863 - RNA, 19 nt, Artificial Sequence
  Description of Artificial Sequence: Synthetic oligonucleotide
  Antisense strand to SEQ ID NO: 609862
uucuacaugcugauuuaau

SEQ ID NO: 609864 - RNA, 19 nt, Artificial Sequence
  Description of Artificial Sequence: Synthetic oligonucleotide
  Sense strand starting at position 2815 of SEQ ID NO: 585057
cugggacacguuuggagaa

SEQ ID NO: 609865 - RNA, 19 nt, Artificial Sequence
  Description of Artificial Sequence: Synthetic oligonucleotide
  Antisense strand to SEQ ID NO: 609864
uucuccaaacgugucccag

SEQ ID NO: 609866 - RNA, 19 nt, Artificial Sequence
  Description of Artificial Sequence: Synthetic oligonucleotide
  Sense strand starting at position 2869 of SEQ ID NO: 585057
ggauucucccacugacaac

SEQ ID NO: 609867 - RNA, 19 nt, Artificial Sequence
  Description of Artificial Sequence: Synthetic oligonucleotide
  Antisense strand to SEQ ID NO: 609866
guugucagugggagaaucc

SEQ ID NO: 609868 - RNA, 19 nt, Artificial Sequence
  Description of Artificial Sequence: Synthetic oligonucleotide
  Sense strand starting at position 3099 of SEQ ID NO: 585057
uccuuucuccgggaacuuu

SEQ ID NO: 609869 - RNA, 19 nt, Artificial Sequence
  Description of Artificial Sequence: Synthetic oligonucleotide
  Antisense strand to SEQ ID NO: 609868
aaaguucccggagaaagga

SEQ ID NO: 609870 - RNA, 19 nt, Artificial Sequence
  Description of Artificial Sequence: Synthetic oligonucleotide
  Sense strand starting at position 3407 of SEQ ID NO: 585057
uuagguaucuuauccaagu

SEQ ID NO: 609871 - RNA, 19 nt, Artificial Sequence
  Description of Artificial Sequence: Synthetic oligonucleotide
  Antisense strand to SEQ ID NO: 609870
acuuggauaagauaccuaa

SEQ ID NO: 609872 - RNA, 19 nt, Artificial Sequence
  Description of Artificial Sequence: Synthetic oligonucleotide
  Sense strand starting at position 3437 of SEQ ID NO: 585057
auggguauuuagccaguuu

SEQ ID NO: 609873 - RNA, 19 nt, Artificial Sequence
  Description of Artificial Sequence: Synthetic oligonucleotide
  Antisense strand to SEQ ID NO: 609872
aaacuggcuaaauacccau

SEQ ID NO: 609874 - RNA, 19 nt, Artificial Sequence
  Description of Artificial Sequence: Synthetic oligonucleotide
  Sense strand starting at position 3507 of SEQ ID NO: 585057
augugacguguuuauaaag

SEQ ID NO: 609875 - RNA, 19 nt, Artificial Sequence
  Description of Artificial Sequence: Synthetic oligonucleotide
  Antisense strand to SEQ ID NO: 609874
cuuuauaaacacgucacau

SEQ ID NO: 609876 - RNA, 19 nt, Artificial Sequence
  Description of Artificial Sequence: Synthetic oligonucleotide
  Sense strand starting at position 3516 of SEQ ID NO: 585057
guuuauaaagcucaguaag

SEQ ID NO: 609877 - RNA, 19 nt, Artificial Sequence
  Description of Artificial Sequence: Synthetic oligonucleotide
  Antisense strand to SEQ ID NO: 609876
cuuacugagcuuuauaaac

SEQ ID NO: 609878 - RNA, 19 nt, Artificial Sequence
  Description of Artificial Sequence: Synthetic oligonucleotide
  Sense strand starting at position 3573 of SEQ ID NO: 585057
caggaagugcuuuggaaga

SEQ ID NO: 609879 - RNA, 19 nt, Artificial Sequence
  Description of Artificial Sequence: Synthetic oligonucleotide
  Antisense strand to SEQ ID NO: 609878
ucuuccaaagcacuuccug

SEQ ID NO: 609880 - RNA, 19 nt, Artificial Sequence
  Description of Artificial Sequence: Synthetic oligonucleotide
  Sense strand starting at position 3752 of SEQ ID NO: 585057
cuauuucgauucgugcaga

SEQ ID NO: 609881 - RNA, 19 nt, Artificial Sequence
  Description of Artificial Sequence: Synthetic oligonucleotide
  Antisense strand to SEQ ID NO: 609880
ucugcacgaaucgaaauag

SEQ ID NO: 609882 - RNA, 19 nt, Artificial Sequence
  Description of Artificial Sequence: Synthetic oligonucleotide
  Sense strand starting at position 3911 of SEQ ID NO: 585057
caguuaccgcaggauucua

SEQ ID NO: 609883 - RNA, 19 nt, Artificial Sequence
  Description of Artificial Sequence: Synthetic oligonucleotide
  Antisense strand to SEQ ID NO: 609882
uagaauccugcgguaacug

SEQ ID NO: 609884 - RNA, 19 nt, Artificial Sequence
  Description of Artificial Sequence: Synthetic oligonucleotide
  Sense strand starting at position 3919 of SEQ ID NO: 585057
gcaggauucuauccuccua

SEQ ID NO: 609885 - RNA, 19 nt, Artificial Sequence
  Description of Artificial Sequence: Synthetic oligonucleotide
  Antisense strand to SEQ ID NO: 609884
uaggaggauagaauccugc

SEQ ID NO: 609886 - RNA, 19 nt, Artificial Sequence
  Description of Artificial Sequence: Synthetic oligonucleotide
  Sense strand starting at position 3979 of SEQ ID NO: 585057
cucucugguccuugagaga

SEQ ID NO: 609887 - RNA, 19 nt, Artificial Sequence
  Description of Artificial Sequence: Synthetic oligonucleotide
  Antisense strand to SEQ ID NO: 609886
ucucucaaggaccagagag

SEQ ID NO: 609888 - RNA, 19 nt, Artificial Sequence
  Description of Artificial Sequence: Synthetic oligonucleotide
  Sense strand starting at position 69 of SEQ ID NO: 585058
guaggcauuuaccugcuua

SEQ ID NO: 609889 - RNA, 19 nt, Artificial Sequence
  Description of Artificial Sequence: Synthetic oligonucleotide
  Antisense strand to SEQ ID NO: 609888
uaagcagguaaaugccuac

SEQ ID NO: 609890 - RNA, 19 nt, Artificial Sequence
  Description of Artificial Sequence: Synthetic oligonucleotide
  Sense strand starting at position 82 of SEQ ID NO: 585058
ugcuuauauagcgcguaga

SEQ ID NO: 609891 - RNA, 19 nt, Artificial Sequence
  Description of Artificial Sequence: Synthetic oligonucleotide
  Antisense strand to SEQ ID NO: 609890
ucuacgcgcuauauaagca

SEQ ID NO: 609892 - RNA, 19 nt, Artificial Sequence
  Description of Artificial Sequence: Synthetic oligonucleotide
  Sense strand starting at position 84 of SEQ ID NO: 585058
cuuauauagcgcguagagu

SEQ ID NO: 609893 - RNA, 19 nt, Artificial Sequence
  Description of Artificial Sequence: Synthetic oligonucleotide
  Antisense strand to SEQ ID NO: 609892
acucuacgcgcuauauaag

SEQ ID NO: 609894 - RNA, 19 nt, Artificial Sequence
  Description of Artificial Sequence: Synthetic oligonucleotide
  Sense strand starting at position 290 of SEQ ID NO: 585058
ucugcagccugauuucuaa

SEQ ID NO: 609895 - RNA, 19 nt, Artificial Sequence
  Description of Artificial Sequence: Synthetic oligonucleotide
  Antisense strand to SEQ ID NO: 609894
uuagaaaucaggcugcaga

SEQ ID NO: 609896 - RNA, 19 nt, Artificial Sequence
  Description of Artificial Sequence: Synthetic oligonucleotide
  Sense strand starting at position 386 of SEQ ID NO: 585058
ugcaaauaauuggcuguaa

SEQ ID NO: 609897 - RNA, 19 nt, Artificial Sequence
  Description of Artificial Sequence: Synthetic oligonucleotide
  Antisense strand to SEQ ID NO: 609896
uuacagccaauuauuugca

SEQ ID NO: 609898 - RNA, 19 nt, Artificial Sequence
  Description of Artificial Sequence: Synthetic oligonucleotide
  Sense strand starting at position 387 of SEQ ID NO: 585058
gcaaauaauuggcuguaag

SEQ ID NO: 609899 - RNA, 19 nt, Artificial Sequence
  Description of Artificial Sequence: Synthetic oligonucleotide
  Antisense strand to SEQ ID NO: 609898
cuuacagccaauuauuugc

SEQ ID NO: 609900 - RNA, 19 nt, Artificial Sequence
  Description of Artificial Sequence: Synthetic oligonucleotide
  Sense strand starting at position 466 of SEQ ID NO: 585058
guaaccauccagggaggua

SEQ ID NO: 609901 - RNA, 19 nt, Artificial Sequence
  Description of Artificial Sequence: Synthetic oligonucleotide
  Antisense strand to SEQ ID NO: 609900
uaccucccuggaugguuac

SEQ ID NO: 609902 - RNA, 19 nt, Artificial Sequence
  Description of Artificial Sequence: Synthetic oligonucleotide
  Sense strand starting at position 480 of SEQ ID NO: 585058
agguaucuguaagcaacua

SEQ ID NO: 609903 - RNA, 19 nt, Artificial Sequence
  Description of Artificial Sequence: Synthetic oligonucleotide
  Antisense strand to SEQ ID NO: 609902
uaguugcuuacagauaccu

SEQ ID NO: 609904 - RNA, 19 nt, Artificial Sequence
  Description of Artificial Sequence: Synthetic oligonucleotide
  Sense strand starting at position 552 of SEQ ID NO: 585058
aagugaagugcaugcaaga

SEQ ID NO: 609905 - RNA, 19 nt, Artificial Sequence
  Description of Artificial Sequence: Synthetic oligonucleotide
  Antisense strand to SEQ ID NO: 609904
ucuugcaugcacuucacuu

SEQ ID NO: 609906 - RNA, 19 nt, Artificial Sequence
  Description of Artificial Sequence: Synthetic oligonucleotide
  Sense strand starting at position 594 of SEQ ID NO: 585058
ggcuaaagugcacagaauu

SEQ ID NO: 609907 - RNA, 19 nt, Artificial Sequence
  Description of Artificial Sequence: Synthetic oligonucleotide
  Antisense strand to SEQ ID NO: 609906
aauucugugcacuuuagcc

SEQ ID NO: 609908 - RNA, 19 nt, Artificial Sequence
  Description of Artificial Sequence: Synthetic oligonucleotide
  Sense strand starting at position 833 of SEQ ID NO: 585058
gagggaaucuaccugcagu

SEQ ID NO: 609909 - RNA, 19 nt, Artificial Sequence
  Description of Artificial Sequence: Synthetic oligonucleotide
  Antisense strand to SEQ ID NO: 609908
acugcagguagauucccuc

SEQ ID NO: 609910 - RNA, 19 nt, Artificial Sequence
  Description of Artificial Sequence: Synthetic oligonucleotide
  Sense strand starting at position 891 of SEQ ID NO: 585058
uuucuauggguauguuuaa

SEQ ID NO: 609911 - RNA, 19 nt, Artificial Sequence
  Description of Artificial Sequence: Synthetic oligonucleotide
  Antisense strand to SEQ ID NO: 609910
uuaaacauacccauagaaa

SEQ ID NO: 609912 - RNA, 19 nt, Artificial Sequence
  Description of Artificial Sequence: Synthetic oligonucleotide
  Sense strand starting at position 1040 of SEQ ID NO: 585058
ggaguucacgacgaugaca

SEQ ID NO: 609913 - RNA, 19 nt, Artificial Sequence
  Description of Artificial Sequence: Synthetic oligonucleotide
  Antisense strand to SEQ ID NO: 609912
ugucaucgucgugaacucc

SEQ ID NO: 609914 - RNA, 19 nt, Artificial Sequence
  Description of Artificial Sequence: Synthetic oligonucleotide
  Sense strand starting at position 1048 of SEQ ID NO: 585058
cgacgaugacacugaauaa

SEQ ID NO: 609915 - RNA, 19 nt, Artificial Sequence
  Description of Artificial Sequence: Synthetic oligonucleotide
  Antisense strand to SEQ ID NO: 609914
uuauucagugucaucgucg

SEQ ID NO: 609916 - RNA, 19 nt, Artificial Sequence
  Description of Artificial Sequence: Synthetic oligonucleotide
  Sense strand starting at position 1134 of SEQ ID NO: 585058
acaauuauguaacucgaaa

SEQ ID NO: 609917 - RNA, 19 nt, Artificial Sequence
  Description of Artificial Sequence: Synthetic oligonucleotide
  Antisense strand to SEQ ID NO: 609916
uuucgaguuacauaauugu

SEQ ID NO: 609918 - RNA, 19 nt, Artificial Sequence
  Description of Artificial Sequence: Synthetic oligonucleotide
  Sense strand starting at position 1201 of SEQ ID NO: 585058
ucaguaagaucagccuaga

SEQ ID NO: 609919 - RNA, 19 nt, Artificial Sequence
  Description of Artificial Sequence: Synthetic oligonucleotide
  Antisense strand to SEQ ID NO: 609918
ucuaggcugaucuuacuga

SEQ ID NO: 609920 - RNA, 19 nt, Artificial Sequence
  Description of Artificial Sequence: Synthetic oligonucleotide
  Sense strand starting at position 1204 of SEQ ID NO: 585058
guaagaucagccuagagua

SEQ ID NO: 609921 - RNA, 19 nt, Artificial Sequence
  Description of Artificial Sequence: Synthetic oligonucleotide
  Antisense strand to SEQ ID NO: 609920
uacucuaggcugaucuuac

SEQ ID NO: 609922 - RNA, 19 nt, Artificial Sequence
  Description of Artificial Sequence: Synthetic oligonucleotide
  Sense strand starting at position 1272 of SEQ ID NO: 585058
uggcaaauuccacguagaa

SEQ ID NO: 609923 - RNA, 19 nt, Artificial Sequence
  Description of Artificial Sequence: Synthetic oligonucleotide
  Antisense strand to SEQ ID NO: 609922
uucuacguggaauuugcca

SEQ ID NO: 609924 - RNA, 19 nt, Artificial Sequence
  Description of Artificial Sequence: Synthetic oligonucleotide
  Sense strand starting at position 1322 of SEQ ID NO: 585058
agccgaaauguacaaguuu

SEQ ID NO: 609925 - RNA, 19 nt, Artificial Sequence
  Description of Artificial Sequence: Synthetic oligonucleotide
  Antisense strand to SEQ ID NO: 609924
aaacuuguacauuucggcu

SEQ ID NO: 609926 - RNA, 19 nt, Artificial Sequence
  Description of Artificial Sequence: Synthetic oligonucleotide
  Sense strand starting at position 1329 of SEQ ID NO: 585058
auguacaaguuuccacaaa

SEQ ID NO: 609927 - RNA, 19 nt, Artificial Sequence
  Description of Artificial Sequence: Synthetic oligonucleotide
  Antisense strand to SEQ ID NO: 609926
uuuguggaaacuuguacau

SEQ ID NO: 609928 - RNA, 19 nt, Artificial Sequence
  Description of Artificial Sequence: Synthetic oligonucleotide
  Sense strand starting at position 1497 of SEQ ID NO: 585058
gcacagauucgugcggguu

SEQ ID NO: 609929 - RNA, 19 nt, Artificial Sequence
  Description of Artificial Sequence: Synthetic oligonucleotide
  Antisense strand to SEQ ID NO: 609928
aacccgcacgaaucugugc

SEQ ID NO: 609930 - RNA, 19 nt, Artificial Sequence
  Description of Artificial Sequence: Synthetic oligonucleotide
  Sense strand starting at position 1542 of SEQ ID NO: 585058
gcuucuuagccguuacucu

SEQ ID NO: 609931 - RNA, 19 nt, Artificial Sequence
  Description of Artificial Sequence: Synthetic oligonucleotide
  Antisense strand to SEQ ID NO: 609930
agaguaacggcuaagaagc

SEQ ID NO: 609932 - RNA, 19 nt, Artificial Sequence
  Description of Artificial Sequence: Synthetic oligonucleotide
  Sense strand starting at position 1586 of SEQ ID NO: 585058
auacguguucuccaagaag

SEQ ID NO: 609933 - RNA, 19 nt, Artificial Sequence
  Description of Artificial Sequence: Synthetic oligonucleotide
  Antisense strand to SEQ ID NO: 609932
cuucuuggagaacacguau

SEQ ID NO: 609934 - RNA, 19 nt, Artificial Sequence
  Description of Artificial Sequence: Synthetic oligonucleotide
  Sense strand starting at position 1598 of SEQ ID NO: 585058
caagaagcagaguguuaag

SEQ ID NO: 609935 - RNA, 19 nt, Artificial Sequence
  Description of Artificial Sequence: Synthetic oligonucleotide
  Antisense strand to SEQ ID NO: 609934
cuuaacacucugcuucuug

SEQ ID NO: 609936 - RNA, 19 nt, Artificial Sequence
  Description of Artificial Sequence: Synthetic oligonucleotide
  Sense strand starting at position 1607 of SEQ ID NO: 585058
gaguguuaaguccacacga

SEQ ID NO: 609937 - RNA, 19 nt, Artificial Sequence
  Description of Artificial Sequence: Synthetic oligonucleotide
  Antisense strand to SEQ ID NO: 609936
ucguguggacuuaacacuc

SEQ ID NO: 609938 - RNA, 19 nt, Artificial Sequence
  Description of Artificial Sequence: Synthetic oligonucleotide
  Sense strand starting at position 1612 of SEQ ID NO: 585058
uuaaguccacacgagugau

SEQ ID NO: 609939 - RNA, 19 nt, Artificial Sequence
  Description of Artificial Sequence: Synthetic oligonucleotide
  Antisense strand to SEQ ID NO: 609938
aucacucguguggacuuaa

SEQ ID NO: 609940 - RNA, 19 nt, Artificial Sequence
  Description of Artificial Sequence: Synthetic oligonucleotide
  Sense strand starting at position 1615 of SEQ ID NO: 585058
aguccacacgagugauaac

SEQ ID NO: 609941 - RNA, 19 nt, Artificial Sequence
  Description of Artificial Sequence: Synthetic oligonucleotide
  Antisense strand to SEQ ID NO: 609940
guuaucacucguguggacu

SEQ ID NO: 609942 - RNA, 19 nt, Artificial Sequence
  Description of Artificial Sequence: Synthetic oligonucleotide
  Sense strand starting at position 1624 of SEQ ID NO: 585058
gagugauaacggcuugcgu

SEQ ID NO: 609943 - RNA, 19 nt, Artificial Sequence
  Description of Artificial Sequence: Synthetic oligonucleotide
  Antisense strand to SEQ ID NO: 609942
acgcaagccguuaucacuc

SEQ ID NO: 609944 - RNA, 19 nt, Artificial Sequence
  Description of Artificial Sequence: Synthetic oligonucleotide
  Sense strand starting at position 1625 of SEQ ID NO: 585058
agugauaacggcuugcguu

SEQ ID NO: 609945 - RNA, 19 nt, Artificial Sequence
  Description of Artificial Sequence: Synthetic oligonucleotide
  Antisense strand to SEQ ID NO: 609944
aacgcaagccguuaucacu

SEQ ID NO: 609946 - RNA, 19 nt, Artificial Sequence
  Description of Artificial Sequence: Synthetic oligonucleotide
  Sense strand starting at position 2561 of SEQ ID NO: 585058
gggugaucccgggaggacu

SEQ ID NO: 609947 - RNA, 19 nt, Artificial Sequence
  Description of Artificial Sequence: Synthetic oligonucleotide
  Antisense strand to SEQ ID NO: 609946
aguccucccgggaucaccc

SEQ ID NO: 609948 - RNA, 19 nt, Artificial Sequence
  Description of Artificial Sequence: Synthetic oligonucleotide
  Sense strand starting at position 2901 of SEQ ID NO: 585058
uuuagugucagugaagagu

SEQ ID NO: 609949 - RNA, 19 nt, Artificial Sequence
  Description of Artificial Sequence: Synthetic oligonucleotide
  Antisense strand to SEQ ID NO: 609948
acucuucacugacacuaaa

SEQ ID NO: 609950 - RNA, 19 nt, Artificial Sequence
  Description of Artificial Sequence: Synthetic oligonucleotide
  Sense strand starting at position 2909 of SEQ ID NO: 585058
cagugaagaguuuguggau

SEQ ID NO: 609951 - RNA, 19 nt, Artificial Sequence
  Description of Artificial Sequence: Synthetic oligonucleotide
  Antisense strand to SEQ ID NO: 609950
auccacaaacucuucacug

SEQ ID NO: 609952 - RNA, 19 nt, Artificial Sequence
  Description of Artificial Sequence: Synthetic oligonucleotide
  Sense strand starting at position 2910 of SEQ ID NO: 585058
agugaagaguuuguggaua

SEQ ID NO: 609953 - RNA, 19 nt, Artificial Sequence
  Description of Artificial Sequence: Synthetic oligonucleotide
  Antisense strand to SEQ ID NO: 609952
uauccacaaacucuucacu

SEQ ID NO: 609954 - RNA, 19 nt, Artificial Sequence
  Description of Artificial Sequence: Synthetic oligonucleotide
  Sense strand starting at position 2932 of SEQ ID NO: 585058
uugaguucugcugaggcau

SEQ ID NO: 609955 - RNA, 19 nt, Artificial Sequence
  Description of Artificial Sequence: Synthetic oligonucleotide
  Antisense strand to SEQ ID NO: 609954
augccucagcagaacucaa

SEQ ID NO: 609956 - RNA, 19 nt, Artificial Sequence
  Description of Artificial Sequence: Synthetic oligonucleotide
  Sense strand starting at position 3168 of SEQ ID NO: 585058
aauuguaagucuuuggaca

SEQ ID NO: 609957 - RNA, 19 nt, Artificial Sequence
  Description of Artificial Sequence: Synthetic oligonucleotide
  Antisense strand to SEQ ID NO: 609956
uguccaaagacuuacaauu

SEQ ID NO: 609958 - RNA, 19 nt, Artificial Sequence
  Description of Artificial Sequence: Synthetic oligonucleotide
  Sense strand starting at position 3201 of SEQ ID NO: 585058
augauauugcccuguugag

SEQ ID NO: 609959 - RNA, 19 nt, Artificial Sequence
  Description of Artificial Sequence: Synthetic oligonucleotide
  Antisense strand to SEQ ID NO: 609958
cucaacagggcaauaucau

SEQ ID NO: 609960 - RNA, 19 nt, Artificial Sequence
  Description of Artificial Sequence: Synthetic oligonucleotide
  Sense strand starting at position 3226 of SEQ ID NO: 585058
uggaaauugcccuguugag

SEQ ID NO: 609961 - RNA, 19 nt, Artificial Sequence
  Description of Artificial Sequence: Synthetic oligonucleotide
  Antisense strand to SEQ ID NO: 609960
cucaacagggcaauuucca

SEQ ID NO: 609962 - RNA, 19 nt, Artificial Sequence
  Description of Artificial Sequence: Synthetic oligonucleotide
  Sense strand starting at position 3373 of SEQ ID NO: 585058
cagguagaucuggguaaua

SEQ ID NO: 609963 - RNA, 19 nt, Artificial Sequence
  Description of Artificial Sequence: Synthetic oligonucleotide
  Antisense strand to SEQ ID NO: 609962
uauuacccagaucuaccug

SEQ ID NO: 609964 - RNA, 19 nt, Artificial Sequence
  Description of Artificial Sequence: Synthetic oligonucleotide
  Sense strand starting at position 3375 of SEQ ID NO: 585058
gguagaucuggguaauagu

SEQ ID NO: 609965 - RNA, 19 nt, Artificial Sequence
  Description of Artificial Sequence: Synthetic oligonucleotide
  Antisense strand to SEQ ID NO: 609964
acuauuacccagaucuacc

SEQ ID NO: 609966 - RNA, 19 nt, Artificial Sequence
  Description of Artificial Sequence: Synthetic oligonucleotide
  Sense strand starting at position 3813 of SEQ ID NO: 585058
gcuguuagauaaccucaga

SEQ ID NO: 609967 - RNA, 19 nt, Artificial Sequence
  Description of Artificial Sequence: Synthetic oligonucleotide
  Antisense strand to SEQ ID NO: 609966
ucugagguuaucuaacagc

SEQ ID NO: 609968 - RNA, 19 nt, Artificial Sequence
  Description of Artificial Sequence: Synthetic oligonucleotide
  Sense strand starting at position 161 of SEQ ID NO: 585059
ucugcagccugauuucuaa

SEQ ID NO: 609969 - RNA, 19 nt, Artificial Sequence
  Description of Artificial Sequence: Synthetic oligonucleotide
  Antisense strand to SEQ ID NO: 609968
uuagaaaucaggcugcaga

SEQ ID NO: 609970 - RNA, 19 nt, Artificial Sequence
  Description of Artificial Sequence: Synthetic oligonucleotide
  Sense strand starting at position 257 of SEQ ID NO: 585059
ugcaaauaauuggcuguaa

SEQ ID NO: 609971 - RNA, 19 nt, Artificial Sequence
  Description of Artificial Sequence: Synthetic oligonucleotide
  Antisense strand to SEQ ID NO: 609970
uuacagccaauuauuugca

SEQ ID NO: 609972 - RNA, 19 nt, Artificial Sequence
  Description of Artificial Sequence: Synthetic oligonucleotide
  Sense strand starting at position 258 of SEQ ID NO: 585059
gcaaauaauuggcuguaag

SEQ ID NO: 609973 - RNA, 19 nt, Artificial Sequence
  Description of Artificial Sequence: Synthetic oligonucleotide
  Antisense strand to SEQ ID NO: 609972
cuuacagccaauuauuugc

SEQ ID NO: 609974 - RNA, 19 nt, Artificial Sequence
  Description of Artificial Sequence: Synthetic oligonucleotide
  Sense strand starting at position 337 of SEQ ID NO: 585059
guaaccauccagggaggua

SEQ ID NO: 609975 - RNA, 19 nt, Artificial Sequence
  Description of Artificial Sequence: Synthetic oligonucleotide
  Antisense strand to SEQ ID NO: 609974
uaccucccuggaugguuac

SEQ ID NO: 609976 - RNA, 19 nt, Artificial Sequence
  Description of Artificial Sequence: Synthetic oligonucleotide
  Sense strand starting at position 351 of SEQ ID NO: 585059
agguaucuguaagcaacua

SEQ ID NO: 609977 - RNA, 19 nt, Artificial Sequence
  Description of Artificial Sequence: Synthetic oligonucleotide
  Antisense strand to SEQ ID NO: 609976
uaguugcuuacagauaccu

SEQ ID NO: 609978 - RNA, 19 nt, Artificial Sequence
  Description of Artificial Sequence: Synthetic oligonucleotide
  Sense strand starting at position 423 of SEQ ID NO: 585059
aagugaagugcaugcaaga

SEQ ID NO: 609979 - RNA, 19 nt, Artificial Sequence
  Description of Artificial Sequence: Synthetic oligonucleotide
  Antisense strand to SEQ ID NO: 609978
ucuugcaugcacuucacuu

SEQ ID NO: 609980 - RNA, 19 nt, Artificial Sequence
  Description of Artificial Sequence: Synthetic oligonucleotide
  Sense strand starting at position 465 of SEQ ID NO: 585059
ggcuaaagugcacagaauu

SEQ ID NO: 609981 - RNA, 19 nt, Artificial Sequence
  Description of Artificial Sequence: Synthetic oligonucleotide
  Antisense strand to SEQ ID NO: 609980
aauucugugcacuuuagcc

SEQ ID NO: 609982 - RNA, 19 nt, Artificial Sequence
  Description of Artificial Sequence: Synthetic oligonucleotide
  Sense strand starting at position 704 of SEQ ID NO: 585059
gagggaaucuaccugcagu

SEQ ID NO: 609983 - RNA, 19 nt, Artificial Sequence
  Description of Artificial Sequence: Synthetic oligonucleotide
  Antisense strand to SEQ ID NO: 609982
acugcagguagauucccuc

SEQ ID NO: 609984 - RNA, 19 nt, Artificial Sequence
  Description of Artificial Sequence: Synthetic oligonucleotide
  Sense strand starting at position 762 of SEQ ID NO: 585059
uuucuauggguauguuuaa

SEQ ID NO: 609985 - RNA, 19 nt, Artificial Sequence
  Description of Artificial Sequence: Synthetic oligonucleotide
  Antisense strand to SEQ ID NO: 609984
uuaaacauacccauagaaa

SEQ ID NO: 609986 - RNA, 19 nt, Artificial Sequence
  Description of Artificial Sequence: Synthetic oligonucleotide
  Sense strand starting at position 769 of SEQ ID NO: 585059
ggguauguuuaaccagcca

SEQ ID NO: 609987 - RNA, 19 nt, Artificial Sequence
  Description of Artificial Sequence: Synthetic oligonucleotide
  Antisense strand to SEQ ID NO: 609986
uggcugguuaaacauaccc

SEQ ID NO: 609988 - RNA, 19 nt, Artificial Sequence
  Description of Artificial Sequence: Synthetic oligonucleotide
  Sense strand starting at position 911 of SEQ ID NO: 585059
ggaguucacgacgaugaca

SEQ ID NO: 609989 - RNA, 19 nt, Artificial Sequence
  Description of Artificial Sequence: Synthetic oligonucleotide
  Antisense strand to SEQ ID NO: 609988
ugucaucgucgugaacucc

SEQ ID NO: 609990 - RNA, 19 nt, Artificial Sequence
  Description of Artificial Sequence: Synthetic oligonucleotide
  Sense strand starting at position 919 of SEQ ID NO: 585059
cgacgaugacacugaauaa

SEQ ID NO: 609991 - RNA, 19 nt, Artificial Sequence
  Description of Artificial Sequence: Synthetic oligonucleotide
  Antisense strand to SEQ ID NO: 609990
uuauucagugucaucgucg

SEQ ID NO: 609992 - RNA, 19 nt, Artificial Sequence
  Description of Artificial Sequence: Synthetic oligonucleotide
  Sense strand starting at position 1005 of SEQ ID NO: 585059
acaauuauguaacucgaaa

SEQ ID NO: 609993 - RNA, 19 nt, Artificial Sequence
  Description of Artificial Sequence: Synthetic oligonucleotide
  Antisense strand to SEQ ID NO: 609992
uuucgaguuacauaauugu

SEQ ID NO: 609994 - RNA, 19 nt, Artificial Sequence
  Description of Artificial Sequence: Synthetic oligonucleotide
  Sense strand starting at position 1072 of SEQ ID NO: 585059
ucaguaagaucagccuaga

SEQ ID NO: 609995 - RNA, 19 nt, Artificial Sequence
  Description of Artificial Sequence: Synthetic oligonucleotide
  Antisense strand to SEQ ID NO: 609994
ucuaggcugaucuuacuga

SEQ ID NO: 609996 - RNA, 19 nt, Artificial Sequence
  Description of Artificial Sequence: Synthetic oligonucleotide
  Sense strand starting at position 1075 of SEQ ID NO: 585059
guaagaucagccuagagua

SEQ ID NO: 609997 - RNA, 19 nt, Artificial Sequence
  Description of Artificial Sequence: Synthetic oligonucleotide
  Antisense strand to SEQ ID NO: 609996
uacucuaggcugaucuuac

SEQ ID NO: 609998 - RNA, 19 nt, Artificial Sequence
  Description of Artificial Sequence: Synthetic oligonucleotide
  Sense strand starting at position 1143 of SEQ ID NO: 585059
uggcaaauuccacguagaa

SEQ ID NO: 609999 - RNA, 19 nt, Artificial Sequence
  Description of Artificial Sequence: Synthetic oligonucleotide
  Antisense strand to SEQ ID NO: 609998
uucuacguggaauuugcca

SEQ ID NO: 610000 - RNA, 19 nt, Artificial Sequence
  Description of Artificial Sequence: Synthetic oligonucleotide
  Sense strand starting at position 1193 of SEQ ID NO: 585059
agccgaaauguacaaguuu

SEQ ID NO: 610001 - RNA, 19 nt, Artificial Sequence
  Description of Artificial Sequence: Synthetic oligonucleotide
  Antisense strand to SEQ ID NO: 610000
aaacuuguacauuucggcu

SEQ ID NO: 610002 - RNA, 19 nt, Artificial Sequence
  Description of Artificial Sequence: Synthetic oligonucleotide
  Sense strand starting at position 1200 of SEQ ID NO: 585059
auguacaaguuuccacaaa

SEQ ID NO: 610003 - RNA, 19 nt, Artificial Sequence
  Description of Artificial Sequence: Synthetic oligonucleotide
  Antisense strand to SEQ ID NO: 610002
uuuguggaaacuuguacau

SEQ ID NO: 610004 - RNA, 19 nt, Artificial Sequence
  Description of Artificial Sequence: Synthetic oligonucleotide
  Sense strand starting at position 1368 of SEQ ID NO: 585059
gcacagauucgugcggguu

SEQ ID NO: 610005 - RNA, 19 nt, Artificial Sequence
  Description of Artificial Sequence: Synthetic oligonucleotide
  Antisense strand to SEQ ID NO: 610004
aacccgcacgaaucugugc

SEQ ID NO: 610006 - RNA, 19 nt, Artificial Sequence
  Description of Artificial Sequence: Synthetic oligonucleotide
  Sense strand starting at position 1413 of SEQ ID NO: 585059
gcuucuuagccguuacucu

SEQ ID NO: 610007 - RNA, 19 nt, Artificial Sequence
  Description of Artificial Sequence: Synthetic oligonucleotide
  Antisense strand to SEQ ID NO: 610006
agaguaacggcuaagaagc

SEQ ID NO: 610008 - RNA, 19 nt, Artificial Sequence
  Description of Artificial Sequence: Synthetic oligonucleotide
  Sense strand starting at position 1457 of SEQ ID NO: 585059
auacguguucuccaagaag

SEQ ID NO: 610009 - RNA, 19 nt, Artificial Sequence
  Description of Artificial Sequence: Synthetic oligonucleotide
  Antisense strand to SEQ ID NO: 610008
cuucuuggagaacacguau

SEQ ID NO: 610010 - RNA, 19 nt, Artificial Sequence
  Description of Artificial Sequence: Synthetic oligonucleotide
  Sense strand starting at position 1469 of SEQ ID NO: 585059
caagaagcagaguguuaag

SEQ ID NO: 610011 - RNA, 19 nt, Artificial Sequence
  Description of Artificial Sequence: Synthetic oligonucleotide
  Antisense strand to SEQ ID NO: 610010
cuuaacacucugcuucuug

SEQ ID NO: 610012 - RNA, 19 nt, Artificial Sequence
  Description of Artificial Sequence: Synthetic oligonucleotide
  Sense strand starting at position 1478 of SEQ ID NO: 585059
gaguguuaaguccacacga

SEQ ID NO: 610013 - RNA, 19 nt, Artificial Sequence
  Description of Artificial Sequence: Synthetic oligonucleotide
  Antisense strand to SEQ ID NO: 610012
ucguguggacuuaacacuc

SEQ ID NO: 610014 - RNA, 19 nt, Artificial Sequence
  Description of Artificial Sequence: Synthetic oligonucleotide
  Sense strand starting at position 1483 of SEQ ID NO: 585059
uuaaguccacacgagugau

SEQ ID NO: 610015 - RNA, 19 nt, Artificial Sequence
  Description of Artificial Sequence: Synthetic oligonucleotide
  Antisense strand to SEQ ID NO: 610014
aucacucguguggacuuaa

SEQ ID NO: 610016 - RNA, 19 nt, Artificial Sequence
  Description of Artificial Sequence: Synthetic oligonucleotide
  Sense strand starting at position 1486 of SEQ ID NO: 585059
aguccacacgagugauaac

SEQ ID NO: 610017 - RNA, 19 nt, Artificial Sequence
  Description of Artificial Sequence: Synthetic oligonucleotide
  Antisense strand to SEQ ID NO: 610016
guuaucacucguguggacu

SEQ ID NO: 610018 - RNA, 19 nt, Artificial Sequence
  Description of Artificial Sequence: Synthetic oligonucleotide
  Sense strand starting at position 1495 of SEQ ID NO: 585059
gagugauaacggcuugcgu

SEQ ID NO: 610019 - RNA, 19 nt, Artificial Sequence
  Description of Artificial Sequence: Synthetic oligonucleotide
  Antisense strand to SEQ ID NO: 610018
acgcaagccguuaucacuc

SEQ ID NO: 610020 - RNA, 19 nt, Artificial Sequence
  Description of Artificial Sequence: Synthetic oligonucleotide
  Sense strand starting at position 1496 of SEQ ID NO: 585059
agugauaacggcuugcguu

SEQ ID NO: 610021 - RNA, 19 nt, Artificial Sequence
  Description of Artificial Sequence: Synthetic oligonucleotide
  Antisense strand to SEQ ID NO: 610020
aacgcaagccguuaucacu

SEQ ID NO: 610022 - RNA, 19 nt, Artificial Sequence
  Description of Artificial Sequence: Synthetic oligonucleotide
  Sense strand starting at position 2432 of SEQ ID NO: 585059
gggugaucccgggaggacu

SEQ ID NO: 610023 - RNA, 19 nt, Artificial Sequence
  Description of Artificial Sequence: Synthetic oligonucleotide
  Antisense strand to SEQ ID NO: 610022
aguccucccgggaucaccc

SEQ ID NO: 610024 - RNA, 19 nt, Artificial Sequence
  Description of Artificial Sequence: Synthetic oligonucleotide
  Sense strand starting at position 2772 of SEQ ID NO: 585059
uuuagugucagugaagagu

SEQ ID NO: 610025 - RNA, 19 nt, Artificial Sequence
  Description of Artificial Sequence: Synthetic oligonucleotide
  Antisense strand to SEQ ID NO: 610024
acucuucacugacacuaaa

SEQ ID NO: 610026 - RNA, 19 nt, Artificial Sequence
  Description of Artificial Sequence: Synthetic oligonucleotide
  Sense strand starting at position 2780 of SEQ ID NO: 585059
cagugaagaguuuguggau

SEQ ID NO: 610027 - RNA, 19 nt, Artificial Sequence
  Description of Artificial Sequence: Synthetic oligonucleotide
  Antisense strand to SEQ ID NO: 610026
auccacaaacucuucacug

SEQ ID NO: 610028 - RNA, 19 nt, Artificial Sequence
  Description of Artificial Sequence: Synthetic oligonucleotide
  Sense strand starting at position 2781 of SEQ ID NO: 585059
agugaagaguuuguggaua

SEQ ID NO: 610029 - RNA, 19 nt, Artificial Sequence
  Description of Artificial Sequence: Synthetic oligonucleotide
  Antisense strand to SEQ ID NO: 610028
uauccacaaacucuucacu

SEQ ID NO: 610030 - RNA, 19 nt, Artificial Sequence
  Description of Artificial Sequence: Synthetic oligonucleotide
  Sense strand starting at position 2803 of SEQ ID NO: 585059
uugaguucugcugaggcau

SEQ ID NO: 610031 - RNA, 19 nt, Artificial Sequence
  Description of Artificial Sequence: Synthetic oligonucleotide
  Antisense strand to SEQ ID NO: 610030
augccucagcagaacucaa

SEQ ID NO: 610032 - RNA, 19 nt, Artificial Sequence
  Description of Artificial Sequence: Synthetic oligonucleotide
  Sense strand starting at position 3039 of SEQ ID NO: 585059
aauuguaagucuuuggaca

SEQ ID NO: 610033 - RNA, 19 nt, Artificial Sequence
  Description of Artificial Sequence: Synthetic oligonucleotide
  Antisense strand to SEQ ID NO: 610032
uguccaaagacuuacaauu

SEQ ID NO: 610034 - RNA, 19 nt, Artificial Sequence
  Description of Artificial Sequence: Synthetic oligonucleotide
  Sense strand starting at position 3072 of SEQ ID NO: 585059
augauauugcccuguugag

SEQ ID NO: 610035 - RNA, 19 nt, Artificial Sequence
  Description of Artificial Sequence: Synthetic oligonucleotide
  Antisense strand to SEQ ID NO: 610034
cucaacagggcaauaucau

SEQ ID NO: 610036 - RNA, 19 nt, Artificial Sequence
  Description of Artificial Sequence: Synthetic oligonucleotide
  Sense strand starting at position 3097 of SEQ ID NO: 585059
uggaaauugcccuguugag

SEQ ID NO: 610037 - RNA, 19 nt, Artificial Sequence
  Description of Artificial Sequence: Synthetic oligonucleotide
  Antisense strand to SEQ ID NO: 610036
cucaacagggcaauuucca

SEQ ID NO: 610038 - RNA, 19 nt, Artificial Sequence
  Description of Artificial Sequence: Synthetic oligonucleotide
  Sense strand starting at position 3244 of SEQ ID NO: 585059
cagguagaucuggguaaua

SEQ ID NO: 610039 - RNA, 19 nt, Artificial Sequence
  Description of Artificial Sequence: Synthetic oligonucleotide
  Antisense strand to SEQ ID NO: 610038
uauuacccagaucuaccug

SEQ ID NO: 610040 - RNA, 19 nt, Artificial Sequence
  Description of Artificial Sequence: Synthetic oligonucleotide
  Sense strand starting at position 3246 of SEQ ID NO: 585059
gguagaucuggguaauagu

SEQ ID NO: 610041 - RNA, 19 nt, Artificial Sequence
  Description of Artificial Sequence: Synthetic oligonucleotide
  Antisense strand to SEQ ID NO: 610040
acuauuacccagaucuacc

SEQ ID NO: 610042 - RNA, 19 nt, Artificial Sequence
  Description of Artificial Sequence: Synthetic oligonucleotide
  Sense strand starting at position 3684 of SEQ ID NO: 585059
gcuguuagauaaccucaga

SEQ ID NO: 610043 - RNA, 19 nt, Artificial Sequence
  Description of Artificial Sequence: Synthetic oligonucleotide
  Antisense strand to SEQ ID NO: 610042
ucugagguuaucuaacagc

SEQ ID NO: 610044 - RNA, 19 nt, Artificial Sequence
  Description of Artificial Sequence: Synthetic oligonucleotide
  Sense strand starting at position 3889 of SEQ ID NO: 585059
gugggaaauuagcuuaucu

SEQ ID NO: 610045 - RNA, 19 nt, Artificial Sequence
  Description of Artificial Sequence: Synthetic oligonucleotide
  Antisense strand to SEQ ID NO: 610044
agauaagcuaauuucccac

SEQ ID NO: 610046 - RNA, 19 nt, Artificial Sequence
  Description of Artificial Sequence: Synthetic oligonucleotide
  Sense strand starting at position 3935 of SEQ ID NO: 585059
gaaagagcaugugucaaag

SEQ ID NO: 610047 - RNA, 19 nt, Artificial Sequence
  Description of Artificial Sequence: Synthetic oligonucleotide
  Antisense strand to SEQ ID NO: 610046
cuuugacacaugcucuuuc

SEQ ID NO: 610048 - RNA, 19 nt, Artificial Sequence
  Description of Artificial Sequence: Synthetic oligonucleotide
  Sense strand starting at position 277 of SEQ ID NO: 585060
acguaugggaucugacacu

SEQ ID NO: 610049 - RNA, 19 nt, Artificial Sequence
  Description of Artificial Sequence: Synthetic oligonucleotide
  Antisense strand to SEQ ID NO: 610048
agugucagaucccauacgu

SEQ ID NO: 610050 - RNA, 19 nt, Artificial Sequence
  Description of Artificial Sequence: Synthetic oligonucleotide
  Sense strand starting at position 310 of SEQ ID NO: 585060
agugucagaacuggguuaa

SEQ ID NO: 610051 - RNA, 19 nt, Artificial Sequence
  Description of Artificial Sequence: Synthetic oligonucleotide
  Antisense strand to SEQ ID NO: 610050
uuaacccaguucugacacu

SEQ ID NO: 610052 - RNA, 19 nt, Artificial Sequence
  Description of Artificial Sequence: Synthetic oligonucleotide
  Sense strand starting at position 323 of SEQ ID NO: 585060
gguuaaauuauaggacgua

SEQ ID NO: 610053 - RNA, 19 nt, Artificial Sequence
  Description of Artificial Sequence: Synthetic oligonucleotide
  Antisense strand to SEQ ID NO: 610052
uacguccuauaauuuaacc

SEQ ID NO: 610054 - RNA, 19 nt, Artificial Sequence
  Description of Artificial Sequence: Synthetic oligonucleotide
  Sense strand starting at position 328 of SEQ ID NO: 585060
aauuauaggacguagaguu

SEQ ID NO: 610055 - RNA, 19 nt, Artificial Sequence
  Description of Artificial Sequence: Synthetic oligonucleotide
  Antisense strand to SEQ ID NO: 610054
aacucuacguccuauaauu

SEQ ID NO: 610056 - RNA, 19 nt, Artificial Sequence
  Description of Artificial Sequence: Synthetic oligonucleotide
  Sense strand starting at position 535 of SEQ ID NO: 585060
gcuaaauccucacugggau

SEQ ID NO: 610057 - RNA, 19 nt, Artificial Sequence
  Description of Artificial Sequence: Synthetic oligonucleotide
  Antisense strand to SEQ ID NO: 610056
aucccagugaggauuuagc

SEQ ID NO: 610058 - RNA, 19 nt, Artificial Sequence
  Description of Artificial Sequence: Synthetic oligonucleotide
  Sense strand starting at position 601 of SEQ ID NO: 585060
cuguuauacagcuggagaa

SEQ ID NO: 610059 - RNA, 19 nt, Artificial Sequence
  Description of Artificial Sequence: Synthetic oligonucleotide
  Antisense strand to SEQ ID NO: 610058
uucuccagcuguauaacag

SEQ ID NO: 610060 - RNA, 19 nt, Artificial Sequence
  Description of Artificial Sequence: Synthetic oligonucleotide
  Sense strand starting at position 602 of SEQ ID NO: 585060
uguuauacagcuggagaaa

SEQ ID NO: 610061 - RNA, 19 nt, Artificial Sequence
  Description of Artificial Sequence: Synthetic oligonucleotide
  Antisense strand to SEQ ID NO: 610060
uuucuccagcuguauaaca

SEQ ID NO: 610062 - RNA, 19 nt, Artificial Sequence
  Description of Artificial Sequence: Synthetic oligonucleotide
  Sense strand starting at position 611 of SEQ ID NO: 585060
gcuggagaaaugcaaguua

SEQ ID NO: 610063 - RNA, 19 nt, Artificial Sequence
  Description of Artificial Sequence: Synthetic oligonucleotide
  Antisense strand to SEQ ID NO: 610062
uaacuugcauuucuccagc

SEQ ID NO: 610064 - RNA, 19 nt, Artificial Sequence
  Description of Artificial Sequence: Synthetic oligonucleotide
  Sense strand starting at position 692 of SEQ ID NO: 585060
agagguauguaccuacaug

SEQ ID NO: 610065 - RNA, 19 nt, Artificial Sequence
  Description of Artificial Sequence: Synthetic oligonucleotide
  Antisense strand to SEQ ID NO: 610064
cauguagguacauaccucu

SEQ ID NO: 610066 - RNA, 19 nt, Artificial Sequence
  Description of Artificial Sequence: Synthetic oligonucleotide
  Sense strand starting at position 733 of SEQ ID NO: 585060
augcaaauugugcaaugau

SEQ ID NO: 610067 - RNA, 19 nt, Artificial Sequence
  Description of Artificial Sequence: Synthetic oligonucleotide
  Antisense strand to SEQ ID NO: 610066
aucauugcacaauuugcau

SEQ ID NO: 610068 - RNA, 19 nt, Artificial Sequence
  Description of Artificial Sequence: Synthetic oligonucleotide
  Sense strand starting at position 795 of SEQ ID NO: 585060
aaagguaucugguucuaaa

SEQ ID NO: 610069 - RNA, 19 nt, Artificial Sequence
  Description of Artificial Sequence: Synthetic oligonucleotide
  Antisense strand to SEQ ID NO: 610068
uuuagaaccagauaccuuu

SEQ ID NO: 610070 - RNA, 19 nt, Artificial Sequence
  Description of Artificial Sequence: Synthetic oligonucleotide
  Sense strand starting at position 879 of SEQ ID NO: 585060
acaauuccaguugaguuaa

SEQ ID NO: 610071 - RNA, 19 nt, Artificial Sequence
  Description of Artificial Sequence: Synthetic oligonucleotide
  Antisense strand to SEQ ID NO: 610070
uuaacucaacuggaauugu

SEQ ID NO: 610072 - RNA, 19 nt, Artificial Sequence
  Description of Artificial Sequence: Synthetic oligonucleotide
  Sense strand starting at position 890 of SEQ ID NO: 585060
ugaguuaaaugucccacau

SEQ ID NO: 610073 - RNA, 19 nt, Artificial Sequence
  Description of Artificial Sequence: Synthetic oligonucleotide
  Antisense strand to SEQ ID NO: 610072
augugggacauuuaacuca

SEQ ID NO: 610074 - RNA, 19 nt, Artificial Sequence
  Description of Artificial Sequence: Synthetic oligonucleotide
  Sense strand starting at position 993 of SEQ ID NO: 585060
ugaggaaaccugggcuauu

SEQ ID NO: 610075 - RNA, 19 nt, Artificial Sequence
  Description of Artificial Sequence: Synthetic oligonucleotide
  Antisense strand to SEQ ID NO: 610074
aauagcccagguuuccuca

SEQ ID NO: 610076 - RNA, 19 nt, Artificial Sequence
  Description of Artificial Sequence: Synthetic oligonucleotide
  Sense strand starting at position 994 of SEQ ID NO: 585060
gaggaaaccugggcuauug

SEQ ID NO: 610077 - RNA, 19 nt, Artificial Sequence
  Description of Artificial Sequence: Synthetic oligonucleotide
  Antisense strand to SEQ ID NO: 610076
caauagcccagguuuccuc

SEQ ID NO: 610078 - RNA, 19 nt, Artificial Sequence
  Description of Artificial Sequence: Synthetic oligonucleotide
  Sense strand starting at position 1176 of SEQ ID NO: 585060
ugaaauaaguguuuguaga

SEQ ID NO: 610079 - RNA, 19 nt, Artificial Sequence
  Description of Artificial Sequence: Synthetic oligonucleotide
  Antisense strand to SEQ ID NO: 610078
ucuacaaacacuuauuuca

SEQ ID NO: 610080 - RNA, 19 nt, Artificial Sequence
  Description of Artificial Sequence: Synthetic oligonucleotide
  Sense strand starting at position 1177 of SEQ ID NO: 585060
gaaauaaguguuuguagag

SEQ ID NO: 610081 - RNA, 19 nt, Artificial Sequence
  Description of Artificial Sequence: Synthetic oligonucleotide
  Antisense strand to SEQ ID NO: 610080
cucuacaaacacuuauuuc

SEQ ID NO: 610082 - RNA, 19 nt, Artificial Sequence
  Description of Artificial Sequence: Synthetic oligonucleotide
  Sense strand starting at position 1206 of SEQ ID NO: 585060
gagguuucuguggagcaca

SEQ ID NO: 610083 - RNA, 19 nt, Artificial Sequence
  Description of Artificial Sequence: Synthetic oligonucleotide
  Antisense strand to SEQ ID NO: 610082
ugugcuccacagaaaccuc

SEQ ID NO: 610084 - RNA, 19 nt, Artificial Sequence
  Description of Artificial Sequence: Synthetic oligonucleotide
  Sense strand starting at position 1209 of SEQ ID NO: 585060
guuucuguggagcacaaau

SEQ ID NO: 610085 - RNA, 19 nt, Artificial Sequence
  Description of Artificial Sequence: Synthetic oligonucleotide
  Antisense strand to SEQ ID NO: 610084
auuugugcuccacagaaac

SEQ ID NO: 610086 - RNA, 19 nt, Artificial Sequence
  Description of Artificial Sequence: Synthetic oligonucleotide
  Sense strand starting at position 1307 of SEQ ID NO: 585060
aggauauuguguucugaua

SEQ ID NO: 610087 - RNA, 19 nt, Artificial Sequence
  Description of Artificial Sequence: Synthetic oligonucleotide
  Antisense strand to SEQ ID NO: 610086
uaucagaacacaauauccu

SEQ ID NO: 610088 - RNA, 19 nt, Artificial Sequence
  Description of Artificial Sequence: Synthetic oligonucleotide
  Sense strand starting at position 1319 of SEQ ID NO: 585060
ucugauacauaugcaaagu

SEQ ID NO: 610089 - RNA, 19 nt, Artificial Sequence
  Description of Artificial Sequence: Synthetic oligonucleotide
  Antisense strand to SEQ ID NO: 610088
acuuugcauauguaucaga

SEQ ID NO: 610090 - RNA, 19 nt, Artificial Sequence
  Description of Artificial Sequence: Synthetic oligonucleotide
  Sense strand starting at position 1621 of SEQ ID NO: 585060
ucaagaacuuuacuucgau

SEQ ID NO: 610091 - RNA, 19 nt, Artificial Sequence
  Description of Artificial Sequence: Synthetic oligonucleotide
  Antisense strand to SEQ ID NO: 610090
aucgaaguaaaguucuuga

SEQ ID NO: 610092 - RNA, 19 nt, Artificial Sequence
  Description of Artificial Sequence: Synthetic oligonucleotide
  Sense strand starting at position 1643 of SEQ ID NO: 585060
aaaucaguucucuggagga

SEQ ID NO: 610093 - RNA, 19 nt, Artificial Sequence
  Description of Artificial Sequence: Synthetic oligonucleotide
  Antisense strand to SEQ ID NO: 610092
uccuccagagaacugauuu

SEQ ID NO: 610094 - RNA, 19 nt, Artificial Sequence
  Description of Artificial Sequence: Synthetic oligonucleotide
  Sense strand starting at position 1647 of SEQ ID NO: 585060
caguucucuggaggaggua

SEQ ID NO: 610095 - RNA, 19 nt, Artificial Sequence
  Description of Artificial Sequence: Synthetic oligonucleotide
  Antisense strand to SEQ ID NO: 610094
uaccuccuccagagaacug

SEQ ID NO: 610096 - RNA, 19 nt, Artificial Sequence
  Description of Artificial Sequence: Synthetic oligonucleotide
  Sense strand starting at position 1736 of SEQ ID NO: 585060
ucagaaucuugguuaauuc

SEQ ID NO: 610097 - RNA, 19 nt, Artificial Sequence
  Description of Artificial Sequence: Synthetic oligonucleotide
  Antisense strand to SEQ ID NO: 610096
gaauuaaccaagauucuga

SEQ ID NO: 610098 - RNA, 19 nt, Artificial Sequence
  Description of Artificial Sequence: Synthetic oligonucleotide
  Sense strand starting at position 1911 of SEQ ID NO: 585060
gggcuuuaccucuaggaag

SEQ ID NO: 610099 - RNA, 19 nt, Artificial Sequence
  Description of Artificial Sequence: Synthetic oligonucleotide
  Antisense strand to SEQ ID NO: 610098
cuuccuagagguaaagccc

SEQ ID NO: 610100 - RNA, 19 nt, Artificial Sequence
  Description of Artificial Sequence: Synthetic oligonucleotide
  Sense strand starting at position 2032 of SEQ ID NO: 585060
gggacagggucaucuccau

SEQ ID NO: 610101 - RNA, 19 nt, Artificial Sequence
  Description of Artificial Sequence: Synthetic oligonucleotide
  Antisense strand to SEQ ID NO: 610100
auggagaugacccuguccc

SEQ ID NO: 610102 - RNA, 19 nt, Artificial Sequence
  Description of Artificial Sequence: Synthetic oligonucleotide
  Sense strand starting at position 2642 of SEQ ID NO: 585060
agaugcucacaguacauua

SEQ ID NO: 610103 - RNA, 19 nt, Artificial Sequence
  Description of Artificial Sequence: Synthetic oligonucleotide
  Antisense strand to SEQ ID NO: 610102
uaauguacugugagcaucu

SEQ ID NO: 610104 - RNA, 19 nt, Artificial Sequence
  Description of Artificial Sequence: Synthetic oligonucleotide
  Sense strand starting at position 2720 of SEQ ID NO: 585060
guguaagaaaucugggagu

SEQ ID NO: 610105 - RNA, 19 nt, Artificial Sequence
  Description of Artificial Sequence: Synthetic oligonucleotide
  Antisense strand to SEQ ID NO: 610104
acucccagauuucuuacac

SEQ ID NO: 610106 - RNA, 19 nt, Artificial Sequence
  Description of Artificial Sequence: Synthetic oligonucleotide
  Sense strand starting at position 2722 of SEQ ID NO: 585060
guaagaaaucugggaguau

SEQ ID NO: 610107 - RNA, 19 nt, Artificial Sequence
  Description of Artificial Sequence: Synthetic oligonucleotide
  Antisense strand to SEQ ID NO: 610106
auacucccagauuucuuac

SEQ ID NO: 610108 - RNA, 19 nt, Artificial Sequence
  Description of Artificial Sequence: Synthetic oligonucleotide
  Sense strand starting at position 2741 of SEQ ID NO: 585060
guacacaaauagguuaaau

SEQ ID NO: 610109 - RNA, 19 nt, Artificial Sequence
  Description of Artificial Sequence: Synthetic oligonucleotide
  Antisense strand to SEQ ID NO: 610108
auuuaaccuauuuguguac

SEQ ID NO: 610110 - RNA, 19 nt, Artificial Sequence
  Description of Artificial Sequence: Synthetic oligonucleotide
  Sense strand starting at position 3133 of SEQ ID NO: 585060
uccuguuuccuugaacaug

SEQ ID NO: 610111 - RNA, 19 nt, Artificial Sequence
  Description of Artificial Sequence: Synthetic oligonucleotide
  Antisense strand to SEQ ID NO: 610110
cauguucaaggaaacagga

SEQ ID NO: 610112 - RNA, 19 nt, Artificial Sequence
  Description of Artificial Sequence: Synthetic oligonucleotide
  Sense strand starting at position 3143 of SEQ ID NO: 585060
uugaacauguguuuaagga

SEQ ID NO: 610113 - RNA, 19 nt, Artificial Sequence
  Description of Artificial Sequence: Synthetic oligonucleotide
  Antisense strand to SEQ ID NO: 610112
uccuuaaacacauguucaa

SEQ ID NO: 610114 - RNA, 19 nt, Artificial Sequence
  Description of Artificial Sequence: Synthetic oligonucleotide
  Sense strand starting at position 3249 of SEQ ID NO: 585060
gugaauaaacaaggucaau

SEQ ID NO: 610115 - RNA, 19 nt, Artificial Sequence
  Description of Artificial Sequence: Synthetic oligonucleotide
  Antisense strand to SEQ ID NO: 610114
auugaccuuguuuauucac

SEQ ID NO: 610116 - RNA, 19 nt, Artificial Sequence
  Description of Artificial Sequence: Synthetic oligonucleotide
  Sense strand starting at position 3426 of SEQ ID NO: 585060
ugaaguuuccuccaugaug

SEQ ID NO: 610117 - RNA, 19 nt, Artificial Sequence
  Description of Artificial Sequence: Synthetic oligonucleotide
  Antisense strand to SEQ ID NO: 610116
caucauggaggaaacuuca

SEQ ID NO: 610118 - RNA, 19 nt, Artificial Sequence
  Description of Artificial Sequence: Synthetic oligonucleotide
  Sense strand starting at position 3587 of SEQ ID NO: 585060
uucuguggccuggaaacaa

SEQ ID NO: 610119 - RNA, 19 nt, Artificial Sequence
  Description of Artificial Sequence: Synthetic oligonucleotide
  Antisense strand to SEQ ID NO: 610118
uuguuuccaggccacagaa

SEQ ID NO: 610120 - RNA, 19 nt, Artificial Sequence
  Description of Artificial Sequence: Synthetic oligonucleotide
  Sense strand starting at position 3668 of SEQ ID NO: 585060
guguucuauccauaccaug

SEQ ID NO: 610121 - RNA, 19 nt, Artificial Sequence
  Description of Artificial Sequence: Synthetic oligonucleotide
  Antisense strand to SEQ ID NO: 610120
caugguauggauagaacac

SEQ ID NO: 610122 - RNA, 19 nt, Artificial Sequence
  Description of Artificial Sequence: Synthetic oligonucleotide
  Sense strand starting at position 3943 of SEQ ID NO: 585060
gaauuagaucacggugaug

SEQ ID NO: 610123 - RNA, 19 nt, Artificial Sequence
  Description of Artificial Sequence: Synthetic oligonucleotide
  Antisense strand to SEQ ID NO: 610122
caucaccgugaucuaauuc

SEQ ID NO: 610124 - RNA, 19 nt, Artificial Sequence
  Description of Artificial Sequence: Synthetic oligonucleotide
  Sense strand starting at position 3952 of SEQ ID NO: 585060
cacggugauggguauauaa

SEQ ID NO: 610125 - RNA, 19 nt, Artificial Sequence
  Description of Artificial Sequence: Synthetic oligonucleotide
  Antisense strand to SEQ ID NO: 610124
uuauauacccaucaccgug

SEQ ID NO: 610126 - RNA, 19 nt, Artificial Sequence
  Description of Artificial Sequence: Synthetic oligonucleotide
  Sense strand starting at position 3954 of SEQ ID NO: 585060
cggugauggguauauaacu

SEQ ID NO: 610127 - RNA, 19 nt, Artificial Sequence
  Description of Artificial Sequence: Synthetic oligonucleotide
  Antisense strand to SEQ ID NO: 610126
aguuauauacccaucaccg

SEQ ID NO: 610128 - RNA, 19 nt, Artificial Sequence
  Description of Artificial Sequence: Synthetic oligonucleotide
  Sense strand starting at position 70 of SEQ ID NO: 585061
gccugccaucagcaagaaa

SEQ ID NO: 610129 - RNA, 19 nt, Artificial Sequence
  Description of Artificial Sequence: Synthetic oligonucleotide
  Antisense strand to SEQ ID NO: 610128
uuucuugcugauggcaggc

SEQ ID NO: 610130 - RNA, 19 nt, Artificial Sequence
  Description of Artificial Sequence: Synthetic oligonucleotide
  Sense strand starting at position 261 of SEQ ID NO: 585061
guggaaugcugccuguuga

SEQ ID NO: 610131 - RNA, 19 nt, Artificial Sequence
  Description of Artificial Sequence: Synthetic oligonucleotide
  Antisense strand to SEQ ID NO: 610130
ucaacaggcagcauuccac

SEQ ID NO: 610132 - RNA, 19 nt, Artificial Sequence
  Description of Artificial Sequence: Synthetic oligonucleotide
  Sense strand starting at position 262 of SEQ ID NO: 585061
uggaaugcugccuguugaa

SEQ ID NO: 610133 - RNA, 19 nt, Artificial Sequence
  Description of Artificial Sequence: Synthetic oligonucleotide
  Antisense strand to SEQ ID NO: 610132
uucaacaggcagcauucca

SEQ ID NO: 610134 - RNA, 19 nt, Artificial Sequence
  Description of Artificial Sequence: Synthetic oligonucleotide
  Sense strand starting at position 338 of SEQ ID NO: 585061
uuaacauuggcacaugacu

SEQ ID NO: 610135 - RNA, 19 nt, Artificial Sequence
  Description of Artificial Sequence: Synthetic oligonucleotide
  Antisense strand to SEQ ID NO: 610134
agucaugugccaauguuaa

SEQ ID NO: 610136 - RNA, 19 nt, Artificial Sequence
  Description of Artificial Sequence: Synthetic oligonucleotide
  Sense strand starting at position 470 of SEQ ID NO: 585061
ccagaugauguauaucuuu

SEQ ID NO: 610137 - RNA, 19 nt, Artificial Sequence
  Description of Artificial Sequence: Synthetic oligonucleotide
  Antisense strand to SEQ ID NO: 610136
aaagauauacaucaucugg

SEQ ID NO: 610138 - RNA, 19 nt, Artificial Sequence
  Description of Artificial Sequence: Synthetic oligonucleotide
  Sense strand starting at position 761 of SEQ ID NO: 585061
ucagacacauuccaggauu

SEQ ID NO: 610139 - RNA, 19 nt, Artificial Sequence
  Description of Artificial Sequence: Synthetic oligonucleotide
  Antisense strand to SEQ ID NO: 610138
aauccuggaaugugucuga

SEQ ID NO: 610140 - RNA, 19 nt, Artificial Sequence
  Description of Artificial Sequence: Synthetic oligonucleotide
  Sense strand starting at position 804 of SEQ ID NO: 585061
uuuagucagggucacgaaa

SEQ ID NO: 610141 - RNA, 19 nt, Artificial Sequence
  Description of Artificial Sequence: Synthetic oligonucleotide
  Antisense strand to SEQ ID NO: 610140
uuucgugacccugacuaaa

SEQ ID NO: 610142 - RNA, 19 nt, Artificial Sequence
  Description of Artificial Sequence: Synthetic oligonucleotide
  Sense strand starting at position 1000 of SEQ ID NO: 585061
agucaaugaugacaaauuu

SEQ ID NO: 610143 - RNA, 19 nt, Artificial Sequence
  Description of Artificial Sequence: Synthetic oligonucleotide
  Antisense strand to SEQ ID NO: 610142
aaauuugucaucauugacu

SEQ ID NO: 610144 - RNA, 19 nt, Artificial Sequence
  Description of Artificial Sequence: Synthetic oligonucleotide
  Sense strand starting at position 1082 of SEQ ID NO: 585061
gcgguaguuagucaacaga

SEQ ID NO: 610145 - RNA, 19 nt, Artificial Sequence
  Description of Artificial Sequence: Synthetic oligonucleotide
  Antisense strand to SEQ ID NO: 610144
ucuguugacuaacuaccgc

SEQ ID NO: 610146 - RNA, 19 nt, Artificial Sequence
  Description of Artificial Sequence: Synthetic oligonucleotide
  Sense strand starting at position 1085 of SEQ ID NO: 585061
guaguuagucaacagacuu

SEQ ID NO: 610147 - RNA, 19 nt, Artificial Sequence
  Description of Artificial Sequence: Synthetic oligonucleotide
  Antisense strand to SEQ ID NO: 610146
aagucuguugacuaacuac

SEQ ID NO: 610148 - RNA, 19 nt, Artificial Sequence
  Description of Artificial Sequence: Synthetic oligonucleotide
  Sense strand starting at position 1128 of SEQ ID NO: 585061
acauacauugcuugaacga

SEQ ID NO: 610149 - RNA, 19 nt, Artificial Sequence
  Description of Artificial Sequence: Synthetic oligonucleotide
  Antisense strand to SEQ ID NO: 610148
ucguucaagcaauguaugu

SEQ ID NO: 610150 - RNA, 19 nt, Artificial Sequence
  Description of Artificial Sequence: Synthetic oligonucleotide
  Sense strand starting at position 1137 of SEQ ID NO: 585061
gcuugaacgacuggauaca

SEQ ID NO: 610151 - RNA, 19 nt, Artificial Sequence
  Description of Artificial Sequence: Synthetic oligonucleotide
  Antisense strand to SEQ ID NO: 610150
uguauccagucguucaagc

SEQ ID NO: 610152 - RNA, 19 nt, Artificial Sequence
  Description of Artificial Sequence: Synthetic oligonucleotide
  Sense strand starting at position 1149 of SEQ ID NO: 585061
ggauacaauuccuuggcuu

SEQ ID NO: 610153 - RNA, 19 nt, Artificial Sequence
  Description of Artificial Sequence: Synthetic oligonucleotide
  Antisense strand to SEQ ID NO: 610152
aagccaaggaauuguaucc

SEQ ID NO: 610154 - RNA, 19 nt, Artificial Sequence
  Description of Artificial Sequence: Synthetic oligonucleotide
  Sense strand starting at position 1228 of SEQ ID NO: 585061
gauuuaaguuccuauaugg

SEQ ID NO: 610155 - RNA, 19 nt, Artificial Sequence
  Description of Artificial Sequence: Synthetic oligonucleotide
  Antisense strand to SEQ ID NO: 610154
ccauauaggaacuuaaauc

SEQ ID NO: 610156 - RNA, 19 nt, Artificial Sequence
  Description of Artificial Sequence: Synthetic oligonucleotide
  Sense strand starting at position 1297 of SEQ ID NO: 585061
uguauauguccauacucuu

SEQ ID NO: 610157 - RNA, 19 nt, Artificial Sequence
  Description of Artificial Sequence: Synthetic oligonucleotide
  Antisense strand to SEQ ID NO: 610156
aagaguauggacauauaca

SEQ ID NO: 610158 - RNA, 19 nt, Artificial Sequence
  Description of Artificial Sequence: Synthetic oligonucleotide
  Sense strand starting at position 1565 of SEQ ID NO: 585061
uuguaauuccgagacuuac

SEQ ID NO: 610159 - RNA, 19 nt, Artificial Sequence
  Description of Artificial Sequence: Synthetic oligonucleotide
  Antisense strand to SEQ ID NO: 610158
guaagucucggaauuacaa

SEQ ID NO: 610160 - RNA, 19 nt, Artificial Sequence
  Description of Artificial Sequence: Synthetic oligonucleotide
  Sense strand starting at position 1989 of SEQ ID NO: 585061
gguaaacagcuccgacuuu

SEQ ID NO: 610161 - RNA, 19 nt, Artificial Sequence
  Description of Artificial Sequence: Synthetic oligonucleotide
  Antisense strand to SEQ ID NO: 610160
aaagucggagcuguuuacc

SEQ ID NO: 610162 - RNA, 19 nt, Artificial Sequence
  Description of Artificial Sequence: Synthetic oligonucleotide
  Sense strand starting at position 2018 of SEQ ID NO: 585061
cagacaauguuauuguguu

SEQ ID NO: 610163 - RNA, 19 nt, Artificial Sequence
  Description of Artificial Sequence: Synthetic oligonucleotide
  Antisense strand to SEQ ID NO: 610162
aacacaauaacauugucug

SEQ ID NO: 610164 - RNA, 19 nt, Artificial Sequence
  Description of Artificial Sequence: Synthetic oligonucleotide
  Sense strand starting at position 2030 of SEQ ID NO: 585061
uuguguuauuagucaccaa

SEQ ID NO: 610165 - RNA, 19 nt, Artificial Sequence
  Description of Artificial Sequence: Synthetic oligonucleotide
  Antisense strand to SEQ ID NO: 610164
uuggugacuaauaacacaa

SEQ ID NO: 610166 - RNA, 19 nt, Artificial Sequence
  Description of Artificial Sequence: Synthetic oligonucleotide
  Sense strand starting at position 2033 of SEQ ID NO: 585061
uguuauuagucaccaacag

SEQ ID NO: 610167 - RNA, 19 nt, Artificial Sequence
  Description of Artificial Sequence: Synthetic oligonucleotide
  Antisense strand to SEQ ID NO: 610166
cuguuggugacuaauaaca

SEQ ID NO: 610168 - RNA, 19 nt, Artificial Sequence
  Description of Artificial Sequence: Synthetic oligonucleotide
  Sense strand starting at position 2165 of SEQ ID NO: 585061
auuagagaccuuugcuaaa

SEQ ID NO: 610169 - RNA, 19 nt, Artificial Sequence
  Description of Artificial Sequence: Synthetic oligonucleotide
  Antisense strand to SEQ ID NO: 610168
uuuagcaaaggucucuaau

SEQ ID NO: 610170 - RNA, 19 nt, Artificial Sequence
  Description of Artificial Sequence: Synthetic oligonucleotide
  Sense strand starting at position 2271 of SEQ ID NO: 585061
aagucauaccauugguaug

SEQ ID NO: 610171 - RNA, 19 nt, Artificial Sequence
  Description of Artificial Sequence: Synthetic oligonucleotide
  Antisense strand to SEQ ID NO: 610170
cauaccaaugguaugacuu

SEQ ID NO: 610172 - RNA, 19 nt, Artificial Sequence
  Description of Artificial Sequence: Synthetic oligonucleotide
  Sense strand starting at position 2273 of SEQ ID NO: 585061
gucauaccauugguaugaa

SEQ ID NO: 610173 - RNA, 19 nt, Artificial Sequence
  Description of Artificial Sequence: Synthetic oligonucleotide
  Antisense strand to SEQ ID NO: 610172
uucauaccaaugguaugac

SEQ ID NO: 610174 - RNA, 19 nt, Artificial Sequence
  Description of Artificial Sequence: Synthetic oligonucleotide
  Sense strand starting at position 2292 of SEQ ID NO: 585061
aaguaugagccacaguuua

SEQ ID NO: 610175 - RNA, 19 nt, Artificial Sequence
  Description of Artificial Sequence: Synthetic oligonucleotide
  Antisense strand to SEQ ID NO: 610174
uaaacuguggcucauacuu

SEQ ID NO: 610176 - RNA, 19 nt, Artificial Sequence
  Description of Artificial Sequence: Synthetic oligonucleotide
  Sense strand starting at position 2380 of SEQ ID NO: 585061
cuccgauucuagucucagu

SEQ ID NO: 610177 - RNA, 19 nt, Artificial Sequence
  Description of Artificial Sequence: Synthetic oligonucleotide
  Antisense strand to SEQ ID NO: 610176
acugagacuagaaucggag

SEQ ID NO: 610178 - RNA, 19 nt, Artificial Sequence
  Description of Artificial Sequence: Synthetic oligonucleotide
  Sense strand starting at position 2385 of SEQ ID NO: 585061
auucuagucucagucaaac

SEQ ID NO: 610179 - RNA, 19 nt, Artificial Sequence
  Description of Artificial Sequence: Synthetic oligonucleotide
  Antisense strand to SEQ ID NO: 610178
guuugacugagacuagaau

SEQ ID NO: 610180 - RNA, 19 nt, Artificial Sequence
  Description of Artificial Sequence: Synthetic oligonucleotide
  Sense strand starting at position 2505 of SEQ ID NO: 585061
ugcugaaguucuuugcauc

SEQ ID NO: 610181 - RNA, 19 nt, Artificial Sequence
  Description of Artificial Sequence: Synthetic oligonucleotide
  Antisense strand to SEQ ID NO: 610180
gaugcaaagaacuucagca

SEQ ID NO: 610182 - RNA, 19 nt, Artificial Sequence
  Description of Artificial Sequence: Synthetic oligonucleotide
  Sense strand starting at position 2512 of SEQ ID NO: 585061
guucuuugcaucuaucgga

SEQ ID NO: 610183 - RNA, 19 nt, Artificial Sequence
  Description of Artificial Sequence: Synthetic oligonucleotide
  Antisense strand to SEQ ID NO: 610182
uccgauagaugcaaagaac

SEQ ID NO: 610184 - RNA, 19 nt, Artificial Sequence
  Description of Artificial Sequence: Synthetic oligonucleotide
  Sense strand starting at position 2516 of SEQ ID NO: 585061
uuugcaucuaucggagaaa

SEQ ID NO: 610185 - RNA, 19 nt, Artificial Sequence
  Description of Artificial Sequence: Synthetic oligonucleotide
  Antisense strand to SEQ ID NO: 610184
uuucuccgauagaugcaaa

SEQ ID NO: 610186 - RNA, 19 nt, Artificial Sequence
  Description of Artificial Sequence: Synthetic oligonucleotide
  Sense strand starting at position 2725 of SEQ ID NO: 585061
uuaagauuggucggugcca

SEQ ID NO: 610187 - RNA, 19 nt, Artificial Sequence
  Description of Artificial Sequence: Synthetic oligonucleotide
  Antisense strand to SEQ ID NO: 610186
uggcaccgaccaaucuuaa

SEQ ID NO: 610188 - RNA, 19 nt, Artificial Sequence
  Description of Artificial Sequence: Synthetic oligonucleotide
  Sense strand starting at position 2884 of SEQ ID NO: 585061
aggaauguugccuaacaua

SEQ ID NO: 610189 - RNA, 19 nt, Artificial Sequence
  Description of Artificial Sequence: Synthetic oligonucleotide
  Antisense strand to SEQ ID NO: 610188
uauguuaggcaacauuccu

SEQ ID NO: 610190 - RNA, 19 nt, Artificial Sequence
  Description of Artificial Sequence: Synthetic oligonucleotide
  Sense strand starting at position 3009 of SEQ ID NO: 585061
gguguucuuguacaagguu

SEQ ID NO: 610191 - RNA, 19 nt, Artificial Sequence
  Description of Artificial Sequence: Synthetic oligonucleotide
  Antisense strand to SEQ ID NO: 610190
aaccuuguacaagaacacc

SEQ ID NO: 610192 - RNA, 19 nt, Artificial Sequence
  Description of Artificial Sequence: Synthetic oligonucleotide
  Sense strand starting at position 3018 of SEQ ID NO: 585061
guacaagguuaagugaaua

SEQ ID NO: 610193 - RNA, 19 nt, Artificial Sequence
  Description of Artificial Sequence: Synthetic oligonucleotide
  Antisense strand to SEQ ID NO: 610192
uauucacuuaaccuuguac

SEQ ID NO: 610194 - RNA, 19 nt, Artificial Sequence
  Description of Artificial Sequence: Synthetic oligonucleotide
  Sense strand starting at position 3030 of SEQ ID NO: 585061
gugaauaugcaaggaaggu

SEQ ID NO: 610195 - RNA, 19 nt, Artificial Sequence
  Description of Artificial Sequence: Synthetic oligonucleotide
  Antisense strand to SEQ ID NO: 610194
accuuccuugcauauucac

SEQ ID NO: 610196 - RNA, 19 nt, Artificial Sequence
  Description of Artificial Sequence: Synthetic oligonucleotide
  Sense strand starting at position 3192 of SEQ ID NO: 585061
gugacaucaugccuuaaua

SEQ ID NO: 610197 - RNA, 19 nt, Artificial Sequence
  Description of Artificial Sequence: Synthetic oligonucleotide
  Antisense strand to SEQ ID NO: 610196
uauuaaggcaugaugucac

SEQ ID NO: 610198 - RNA, 19 nt, Artificial Sequence
  Description of Artificial Sequence: Synthetic oligonucleotide
  Sense strand starting at position 3293 of SEQ ID NO: 585061
uuuguuuguucuccaccaa

SEQ ID NO: 610199 - RNA, 19 nt, Artificial Sequence
  Description of Artificial Sequence: Synthetic oligonucleotide
  Antisense strand to SEQ ID NO: 610198
uugguggagaacaaacaaa

SEQ ID NO: 610200 - RNA, 19 nt, Artificial Sequence
  Description of Artificial Sequence: Synthetic oligonucleotide
  Sense strand starting at position 3294 of SEQ ID NO: 585061
uuguuuguucuccaccaaa

SEQ ID NO: 610201 - RNA, 19 nt, Artificial Sequence
  Description of Artificial Sequence: Synthetic oligonucleotide
  Antisense strand to SEQ ID NO: 610200
uuugguggagaacaaacaa

SEQ ID NO: 610202 - RNA, 19 nt, Artificial Sequence
  Description of Artificial Sequence: Synthetic oligonucleotide
  Sense strand starting at position 3440 of SEQ ID NO: 585061
ggaauucaagcacggauga

SEQ ID NO: 610203 - RNA, 19 nt, Artificial Sequence
  Description of Artificial Sequence: Synthetic oligonucleotide
  Antisense strand to SEQ ID NO: 610202
ucauccgugcuugaauucc

SEQ ID NO: 610204 - RNA, 19 nt, Artificial Sequence
  Description of Artificial Sequence: Synthetic oligonucleotide
  Sense strand starting at position 3623 of SEQ ID NO: 585061
gcgacagguccauaaugac

SEQ ID NO: 610205 - RNA, 19 nt, Artificial Sequence
  Description of Artificial Sequence: Synthetic oligonucleotide
  Antisense strand to SEQ ID NO: 610204
gucauuauggaccugucgc

SEQ ID NO: 610206 - RNA, 19 nt, Artificial Sequence
  Description of Artificial Sequence: Synthetic oligonucleotide
  Sense strand starting at position 3664 of SEQ ID NO: 585061
ugaagcaagaguuggagau

SEQ ID NO: 610207 - RNA, 19 nt, Artificial Sequence
  Description of Artificial Sequence: Synthetic oligonucleotide
  Antisense strand to SEQ ID NO: 610206
aucuccaacucuugcuuca

SEQ ID NO: 610208 - RNA, 19 nt, Artificial Sequence
  Description of Artificial Sequence: Synthetic oligonucleotide
  Sense strand starting at position 188 of SEQ ID NO: 585062
acagucagccuuuaaagaa

SEQ ID NO: 610209 - RNA, 19 nt, Artificial Sequence
  Description of Artificial Sequence: Synthetic oligonucleotide
  Antisense strand to SEQ ID NO: 610208
uucuuuaaaggcugacugu

SEQ ID NO: 610210 - RNA, 19 nt, Artificial Sequence
  Description of Artificial Sequence: Synthetic oligonucleotide
  Sense strand starting at position 332 of SEQ ID NO: 585062
gauaaagucucuguguccu

SEQ ID NO: 610211 - RNA, 19 nt, Artificial Sequence
  Description of Artificial Sequence: Synthetic oligonucleotide
  Antisense strand to SEQ ID NO: 610210
aggacacagagacuuuauc

SEQ ID NO: 610212 - RNA, 19 nt, Artificial Sequence
  Description of Artificial Sequence: Synthetic oligonucleotide
  Sense strand starting at position 476 of SEQ ID NO: 585062
cuuucccaucuguaaggau

SEQ ID NO: 610213 - RNA, 19 nt, Artificial Sequence
  Description of Artificial Sequence: Synthetic oligonucleotide
  Antisense strand to SEQ ID NO: 610212
auccuuacagaugggaaag

SEQ ID NO: 610214 - RNA, 19 nt, Artificial Sequence
  Description of Artificial Sequence: Synthetic oligonucleotide
  Sense strand starting at position 490 of SEQ ID NO: 585062
aggauuaagagucguuacu

SEQ ID NO: 610215 - RNA, 19 nt, Artificial Sequence
  Description of Artificial Sequence: Synthetic oligonucleotide
  Antisense strand to SEQ ID NO: 610214
aguaacgacucuuaauccu

SEQ ID NO: 610216 - RNA, 19 nt, Artificial Sequence
  Description of Artificial Sequence: Synthetic oligonucleotide
  Sense strand starting at position 492 of SEQ ID NO: 585062
gauuaagagucguuacuug

SEQ ID NO: 610217 - RNA, 19 nt, Artificial Sequence
  Description of Artificial Sequence: Synthetic oligonucleotide
  Antisense strand to SEQ ID NO: 610216
caaguaacgacucuuaauc

SEQ ID NO: 610218 - RNA, 19 nt, Artificial Sequence
  Description of Artificial Sequence: Synthetic oligonucleotide
  Sense strand starting at position 496 of SEQ ID NO: 585062
aagagucguuacuugguua

SEQ ID NO: 610219 - RNA, 19 nt, Artificial Sequence
  Description of Artificial Sequence: Synthetic oligonucleotide
  Antisense strand to SEQ ID NO: 610218
uaaccaaguaacgacucuu

SEQ ID NO: 610220 - RNA, 19 nt, Artificial Sequence
  Description of Artificial Sequence: Synthetic oligonucleotide
  Sense strand starting at position 499 of SEQ ID NO: 585062
agucguuacuugguuacua

SEQ ID NO: 610221 - RNA, 19 nt, Artificial Sequence
  Description of Artificial Sequence: Synthetic oligonucleotide
  Antisense strand to SEQ ID NO: 610220
uaguaaccaaguaacgacu

SEQ ID NO: 610222 - RNA, 19 nt, Artificial Sequence
  Description of Artificial Sequence: Synthetic oligonucleotide
  Sense strand starting at position 500 of SEQ ID NO: 585062
gucguuacuugguuacuaa

SEQ ID NO: 610223 - RNA, 19 nt, Artificial Sequence
  Description of Artificial Sequence: Synthetic oligonucleotide
  Antisense strand to SEQ ID NO: 610222
uuaguaaccaaguaacgac

SEQ ID NO: 610224 - RNA, 19 nt, Artificial Sequence
  Description of Artificial Sequence: Synthetic oligonucleotide
  Sense strand starting at position 501 of SEQ ID NO: 585062
ucguuacuugguuacuaaa

SEQ ID NO: 610225 - RNA, 19 nt, Artificial Sequence
  Description of Artificial Sequence: Synthetic oligonucleotide
  Antisense strand to SEQ ID NO: 610224
uuuaguaaccaaguaacga

SEQ ID NO: 610226 - RNA, 19 nt, Artificial Sequence
  Description of Artificial Sequence: Synthetic oligonucleotide
  Sense strand starting at position 604 of SEQ ID NO: 585062
gucacuuuggguuacagaa

SEQ ID NO: 610227 - RNA, 19 nt, Artificial Sequence
  Description of Artificial Sequence: Synthetic oligonucleotide
  Antisense strand to SEQ ID NO: 610226
uucuguaacccaaagugac

SEQ ID NO: 610228 - RNA, 19 nt, Artificial Sequence
  Description of Artificial Sequence: Synthetic oligonucleotide
  Sense strand starting at position 648 of SEQ ID NO: 585062
gucggaucuuaacuauuaa

SEQ ID NO: 610229 - RNA, 19 nt, Artificial Sequence
  Description of Artificial Sequence: Synthetic oligonucleotide
  Antisense strand to SEQ ID NO: 610228
uuaauaguuaagauccgac

SEQ ID NO: 610230 - RNA, 19 nt, Artificial Sequence
  Description of Artificial Sequence: Synthetic oligonucleotide
  Sense strand starting at position 678 of SEQ ID NO: 585062
acucacuagcaauacgauu

SEQ ID NO: 610231 - RNA, 19 nt, Artificial Sequence
  Description of Artificial Sequence: Synthetic oligonucleotide
  Antisense strand to SEQ ID NO: 610230
aaucguauugcuagugagu

SEQ ID NO: 610232 - RNA, 19 nt, Artificial Sequence
  Description of Artificial Sequence: Synthetic oligonucleotide
  Sense strand starting at position 788 of SEQ ID NO: 585062
ccuaaugauucugcuggua

SEQ ID NO: 610233 - RNA, 19 nt, Artificial Sequence
  Description of Artificial Sequence: Synthetic oligonucleotide
  Antisense strand to SEQ ID NO: 610232
uaccagcagaaucauuagg

SEQ ID NO: 610234 - RNA, 19 nt, Artificial Sequence
  Description of Artificial Sequence: Synthetic oligonucleotide
  Sense strand starting at position 1054 of SEQ ID NO: 585062
cugucugaggcuugagaau

SEQ ID NO: 610235 - RNA, 19 nt, Artificial Sequence
  Description of Artificial Sequence: Synthetic oligonucleotide
  Antisense strand to SEQ ID NO: 610234
auucucaagccucagacag

SEQ ID NO: 610236 - RNA, 19 nt, Artificial Sequence
  Description of Artificial Sequence: Synthetic oligonucleotide
  Sense strand starting at position 1166 of SEQ ID NO: 585062
gggaaacuccaucgcauaa

SEQ ID NO: 610237 - RNA, 19 nt, Artificial Sequence
  Description of Artificial Sequence: Synthetic oligonucleotide
  Antisense strand to SEQ ID NO: 610236
uuaugcgauggaguuuccc

SEQ ID NO: 610238 - RNA, 19 nt, Artificial Sequence
  Description of Artificial Sequence: Synthetic oligonucleotide
  Sense strand starting at position 1608 of SEQ ID NO: 585062
gaaauaccagugugcagau

SEQ ID NO: 610239 - RNA, 19 nt, Artificial Sequence
  Description of Artificial Sequence: Synthetic oligonucleotide
  Antisense strand to SEQ ID NO: 610238
aucugcacacugguauuuc

SEQ ID NO: 610240 - RNA, 19 nt, Artificial Sequence
  Description of Artificial Sequence: Synthetic oligonucleotide
  Sense strand starting at position 1621 of SEQ ID NO: 585062
gcagaucuuggcccgcauu

SEQ ID NO: 610241 - RNA, 19 nt, Artificial Sequence
  Description of Artificial Sequence: Synthetic oligonucleotide
  Antisense strand to SEQ ID NO: 610240
aaugcgggccaagaucugc

SEQ ID NO: 610242 - RNA, 19 nt, Artificial Sequence
  Description of Artificial Sequence: Synthetic oligonucleotide
  Sense strand starting at position 1696 of SEQ ID NO: 585062
uggcuagagacuuaucgaa

SEQ ID NO: 610243 - RNA, 19 nt, Artificial Sequence
  Description of Artificial Sequence: Synthetic oligonucleotide
  Antisense strand to SEQ ID NO: 610242
uucgauaagucucuagcca

SEQ ID NO: 610244 - RNA, 19 nt, Artificial Sequence
  Description of Artificial Sequence: Synthetic oligonucleotide
  Sense strand starting at position 1698 of SEQ ID NO: 585062
gcuagagacuuaucgaaag

SEQ ID NO: 610245 - RNA, 19 nt, Artificial Sequence
  Description of Artificial Sequence: Synthetic oligonucleotide
  Antisense strand to SEQ ID NO: 610244
cuuucgauaagucucuagc

SEQ ID NO: 610246 - RNA, 19 nt, Artificial Sequence
  Description of Artificial Sequence: Synthetic oligonucleotide
  Sense strand starting at position 1916 of SEQ ID NO: 585062
ggccauaacccguaaagag

SEQ ID NO: 610247 - RNA, 19 nt, Artificial Sequence
  Description of Artificial Sequence: Synthetic oligonucleotide
  Antisense strand to SEQ ID NO: 610246
cucuuuacggguuauggcc

SEQ ID NO: 610248 - RNA, 19 nt, Artificial Sequence
  Description of Artificial Sequence: Synthetic oligonucleotide
  Sense strand starting at position 2260 of SEQ ID NO: 585062
cagcgaucucuggguucua

SEQ ID NO: 610249 - RNA, 19 nt, Artificial Sequence
  Description of Artificial Sequence: Synthetic oligonucleotide
  Antisense strand to SEQ ID NO: 610248
uagaacccagagaucgcug

SEQ ID NO: 610250 - RNA, 19 nt, Artificial Sequence
  Description of Artificial Sequence: Synthetic oligonucleotide
  Sense strand starting at position 2515 of SEQ ID NO: 585062
cucgcuaguccgggacaaa

SEQ ID NO: 610251 - RNA, 19 nt, Artificial Sequence
  Description of Artificial Sequence: Synthetic oligonucleotide
  Antisense strand to SEQ ID NO: 610250
uuugucccggacuagcgag

SEQ ID NO: 610252 - RNA, 19 nt, Artificial Sequence
  Description of Artificial Sequence: Synthetic oligonucleotide
  Sense strand starting at position 2516 of SEQ ID NO: 585062
ucgcuaguccgggacaaau

SEQ ID NO: 610253 - RNA, 19 nt, Artificial Sequence
  Description of Artificial Sequence: Synthetic oligonucleotide
  Antisense strand to SEQ ID NO: 610252
auuugucccggacuagcga

SEQ ID NO: 610254 - RNA, 19 nt, Artificial Sequence
  Description of Artificial Sequence: Synthetic oligonucleotide
  Sense strand starting at position 2966 of SEQ ID NO: 585062
guuauuugauugcaaacau

SEQ ID NO: 610255 - RNA, 19 nt, Artificial Sequence
  Description of Artificial Sequence: Synthetic oligonucleotide
  Antisense strand to SEQ ID NO: 610254
auguuugcaaucaaauaac

SEQ ID NO: 610256 - RNA, 19 nt, Artificial Sequence
  Description of Artificial Sequence: Synthetic oligonucleotide
  Sense strand starting at position 3031 of SEQ ID NO: 585062
ggcuaagaucuacagcauc

SEQ ID NO: 610257 - RNA, 19 nt, Artificial Sequence
  Description of Artificial Sequence: Synthetic oligonucleotide
  Antisense strand to SEQ ID NO: 610256
gaugcuguagaucuuagcc

SEQ ID NO: 610258 - RNA, 19 nt, Artificial Sequence
  Description of Artificial Sequence: Synthetic oligonucleotide
  Sense strand starting at position 3096 of SEQ ID NO: 585062
gucacagcuucuccuauuu

SEQ ID NO: 610259 - RNA, 19 nt, Artificial Sequence
  Description of Artificial Sequence: Synthetic oligonucleotide
  Antisense strand to SEQ ID NO: 610258
aaauaggagaagcugugac

SEQ ID NO: 610260 - RNA, 19 nt, Artificial Sequence
  Description of Artificial Sequence: Synthetic oligonucleotide
  Sense strand starting at position 3164 of SEQ ID NO: 585062
uaucgauuguaacugcauu

SEQ ID NO: 610261 - RNA, 19 nt, Artificial Sequence
  Description of Artificial Sequence: Synthetic oligonucleotide
  Antisense strand to SEQ ID NO: 610260
aaugcaguuacaaucgaua

SEQ ID NO: 610262 - RNA, 19 nt, Artificial Sequence
  Description of Artificial Sequence: Synthetic oligonucleotide
  Sense strand starting at position 3237 of SEQ ID NO: 585062
aaggcaggccuugggaaau

SEQ ID NO: 610263 - RNA, 19 nt, Artificial Sequence
  Description of Artificial Sequence: Synthetic oligonucleotide
  Antisense strand to SEQ ID NO: 610262
auuucccaaggccugccuu

SEQ ID NO: 610264 - RNA, 19 nt, Artificial Sequence
  Description of Artificial Sequence: Synthetic oligonucleotide
  Sense strand starting at position 3249 of SEQ ID NO: 585062
gggaaaugcuccucugagg

SEQ ID NO: 610265 - RNA, 19 nt, Artificial Sequence
  Description of Artificial Sequence: Synthetic oligonucleotide
  Antisense strand to SEQ ID NO: 610264
ccucagaggagcauuuccc

SEQ ID NO: 610266 - RNA, 19 nt, Artificial Sequence
  Description of Artificial Sequence: Synthetic oligonucleotide
  Sense strand starting at position 3290 of SEQ ID NO: 585062
ugagcuaauuacuagauca

SEQ ID NO: 610267 - RNA, 19 nt, Artificial Sequence
  Description of Artificial Sequence: Synthetic oligonucleotide
  Antisense strand to SEQ ID NO: 610266
ugaucuaguaauuagcuca

SEQ ID NO: 610268 - RNA, 19 nt, Artificial Sequence
  Description of Artificial Sequence: Synthetic oligonucleotide
  Sense strand starting at position 3318 of SEQ ID NO: 585062
uucuuccagcuguagaaua

SEQ ID NO: 610269 - RNA, 19 nt, Artificial Sequence
  Description of Artificial Sequence: Synthetic oligonucleotide
  Antisense strand to SEQ ID NO: 610268
uauucuacagcuggaagaa

SEQ ID NO: 610270 - RNA, 19 nt, Artificial Sequence
  Description of Artificial Sequence: Synthetic oligonucleotide
  Sense strand starting at position 3323 of SEQ ID NO: 585062
ccagcuguagaauaucauu

SEQ ID NO: 610271 - RNA, 19 nt, Artificial Sequence
  Description of Artificial Sequence: Synthetic oligonucleotide
  Antisense strand to SEQ ID NO: 610270
aaugauauucuacagcugg

SEQ ID NO: 610272 - RNA, 19 nt, Artificial Sequence
  Description of Artificial Sequence: Synthetic oligonucleotide
  Sense strand starting at position 3328 of SEQ ID NO: 585062
uguagaauaucauugccca

SEQ ID NO: 610273 - RNA, 19 nt, Artificial Sequence
  Description of Artificial Sequence: Synthetic oligonucleotide
  Antisense strand to SEQ ID NO: 610272
ugggcaaugauauucuaca

SEQ ID NO: 610274 - RNA, 19 nt, Artificial Sequence
  Description of Artificial Sequence: Synthetic oligonucleotide
  Sense strand starting at position 3329 of SEQ ID NO: 585062
guagaauaucauugcccag

SEQ ID NO: 610275 - RNA, 19 nt, Artificial Sequence
  Description of Artificial Sequence: Synthetic oligonucleotide
  Antisense strand to SEQ ID NO: 610274
cugggcaaugauauucuac

SEQ ID NO: 610276 - RNA, 19 nt, Artificial Sequence
  Description of Artificial Sequence: Synthetic oligonucleotide
  Sense strand starting at position 3372 of SEQ ID NO: 585062
acaaguauuugagaaccua

SEQ ID NO: 610277 - RNA, 19 nt, Artificial Sequence
  Description of Artificial Sequence: Synthetic oligonucleotide
  Antisense strand to SEQ ID NO: 610276
uagguucucaaauacuugu

SEQ ID NO: 610278 - RNA, 19 nt, Artificial Sequence
  Description of Artificial Sequence: Synthetic oligonucleotide
  Sense strand starting at position 3403 of SEQ ID NO: 585062
cgcuaaguacuguggaguu

SEQ ID NO: 610279 - RNA, 19 nt, Artificial Sequence
  Description of Artificial Sequence: Synthetic oligonucleotide
  Antisense strand to SEQ ID NO: 610278
aacuccacaguacuuagcg

SEQ ID NO: 610280 - RNA, 19 nt, Artificial Sequence
  Description of Artificial Sequence: Synthetic oligonucleotide
  Sense strand starting at position 3505 of SEQ ID NO: 585062
ugguuucuguaucuuugua

SEQ ID NO: 610281 - RNA, 19 nt, Artificial Sequence
  Description of Artificial Sequence: Synthetic oligonucleotide
  Antisense strand to SEQ ID NO: 610280
uacaaagauacagaaacca

SEQ ID NO: 610282 - RNA, 19 nt, Artificial Sequence
  Description of Artificial Sequence: Synthetic oligonucleotide
  Sense strand starting at position 3507 of SEQ ID NO: 585062
guuucuguaucuuuguagu

SEQ ID NO: 610283 - RNA, 19 nt, Artificial Sequence
  Description of Artificial Sequence: Synthetic oligonucleotide
  Antisense strand to SEQ ID NO: 610282
acuacaaagauacagaaac

SEQ ID NO: 610284 - RNA, 19 nt, Artificial Sequence
  Description of Artificial Sequence: Synthetic oligonucleotide
  Sense strand starting at position 3509 of SEQ ID NO: 585062
uucuguaucuuuguagugu

SEQ ID NO: 610285 - RNA, 19 nt, Artificial Sequence
  Description of Artificial Sequence: Synthetic oligonucleotide
  Antisense strand to SEQ ID NO: 610284
acacuacaaagauacagaa

SEQ ID NO: 610286 - RNA, 19 nt, Artificial Sequence
  Description of Artificial Sequence: Synthetic oligonucleotide
  Sense strand starting at position 3897 of SEQ ID NO: 585062
ugugauugcggauaauagu

SEQ ID NO: 610287 - RNA, 19 nt, Artificial Sequence
  Description of Artificial Sequence: Synthetic oligonucleotide
  Antisense strand to SEQ ID NO: 610286
acuauuauccgcaaucaca

SEQ ID NO: 610288 - RNA, 19 nt, Artificial Sequence
  Description of Artificial Sequence: Synthetic oligonucleotide
  Sense strand starting at position 244 of SEQ ID NO: 585063
ccaugaagugcuuacuaug

SEQ ID NO: 610289 - RNA, 19 nt, Artificial Sequence
  Description of Artificial Sequence: Synthetic oligonucleotide
  Antisense strand to SEQ ID NO: 610288
cauaguaagcacuucaugg

SEQ ID NO: 610290 - RNA, 19 nt, Artificial Sequence
  Description of Artificial Sequence: Synthetic oligonucleotide
  Sense strand starting at position 283 of SEQ ID NO: 585063
ugaugauuguuucucauac

SEQ ID NO: 610291 - RNA, 19 nt, Artificial Sequence
  Description of Artificial Sequence: Synthetic oligonucleotide
  Antisense strand to SEQ ID NO: 610290
guaugagaaacaaucauca

SEQ ID NO: 610292 - RNA, 19 nt, Artificial Sequence
  Description of Artificial Sequence: Synthetic oligonucleotide
  Sense strand starting at position 797 of SEQ ID NO: 585063
gccgaagggacggaauuau

SEQ ID NO: 610293 - RNA, 19 nt, Artificial Sequence
  Description of Artificial Sequence: Synthetic oligonucleotide
  Antisense strand to SEQ ID NO: 610292
auaauuccgucccuucggc

SEQ ID NO: 610294 - RNA, 19 nt, Artificial Sequence
  Description of Artificial Sequence: Synthetic oligonucleotide
  Sense strand starting at position 885 of SEQ ID NO: 585063
ggcugaucuuaggcugaac

SEQ ID NO: 610295 - RNA, 19 nt, Artificial Sequence
  Description of Artificial Sequence: Synthetic oligonucleotide
  Antisense strand to SEQ ID NO: 610294
guucagccuaagaucagcc

SEQ ID NO: 610296 - RNA, 19 nt, Artificial Sequence
  Description of Artificial Sequence: Synthetic oligonucleotide
  Sense strand starting at position 1067 of SEQ ID NO: 585063
guagucuuccuacaaccaa

SEQ ID NO: 610297 - RNA, 19 nt, Artificial Sequence
  Description of Artificial Sequence: Synthetic oligonucleotide
  Antisense strand to SEQ ID NO: 610296
uugguuguaggaagacuac

SEQ ID NO: 610298 - RNA, 19 nt, Artificial Sequence
  Description of Artificial Sequence: Synthetic oligonucleotide
  Sense strand starting at position 1158 of SEQ ID NO: 585063
gcaaucucauaccuuguga

SEQ ID NO: 610299 - RNA, 19 nt, Artificial Sequence
  Description of Artificial Sequence: Synthetic oligonucleotide
  Antisense strand to SEQ ID NO: 610298
ucacaagguaugagauugc

SEQ ID NO: 610300 - RNA, 19 nt, Artificial Sequence
  Description of Artificial Sequence: Synthetic oligonucleotide
  Sense strand starting at position 1197 of SEQ ID NO: 585063
ggucguaacacuuaaacug

SEQ ID NO: 610301 - RNA, 19 nt, Artificial Sequence
  Description of Artificial Sequence: Synthetic oligonucleotide
  Antisense strand to SEQ ID NO: 610300
caguuuaaguguuacgacc

SEQ ID NO: 610302 - RNA, 19 nt, Artificial Sequence
  Description of Artificial Sequence: Synthetic oligonucleotide
  Sense strand starting at position 1213 of SEQ ID NO: 585063
cugauaauccaaggcuuua

SEQ ID NO: 610303 - RNA, 19 nt, Artificial Sequence
  Description of Artificial Sequence: Synthetic oligonucleotide
  Antisense strand to SEQ ID NO: 610302
uaaagccuuggauuaucag

SEQ ID NO: 610304 - RNA, 19 nt, Artificial Sequence
  Description of Artificial Sequence: Synthetic oligonucleotide
  Sense strand starting at position 1261 of SEQ ID NO: 585063
ggccaagacuccuuaggug

SEQ ID NO: 610305 - RNA, 19 nt, Artificial Sequence
  Description of Artificial Sequence: Synthetic oligonucleotide
  Antisense strand to SEQ ID NO: 610304
caccuaaggagucuuggcc

SEQ ID NO: 610306 - RNA, 19 nt, Artificial Sequence
  Description of Artificial Sequence: Synthetic oligonucleotide
  Sense strand starting at position 1436 of SEQ ID NO: 585063
cccuguuagcuauaacgga

SEQ ID NO: 610307 - RNA, 19 nt, Artificial Sequence
  Description of Artificial Sequence: Synthetic oligonucleotide
  Antisense strand to SEQ ID NO: 610306
uccguuauagcuaacaggg

SEQ ID NO: 610308 - RNA, 19 nt, Artificial Sequence
  Description of Artificial Sequence: Synthetic oligonucleotide
  Sense strand starting at position 1470 of SEQ ID NO: 585063
cugaaugaaaggugcgauu

SEQ ID NO: 610309 - RNA, 19 nt, Artificial Sequence
  Description of Artificial Sequence: Synthetic oligonucleotide
  Antisense strand to SEQ ID NO: 610308
aaucgcaccuuucauucag

SEQ ID NO: 610310 - RNA, 19 nt, Artificial Sequence
  Description of Artificial Sequence: Synthetic oligonucleotide
  Sense strand starting at position 1472 of SEQ ID NO: 585063
gaaugaaaggugcgauuac

SEQ ID NO: 610311 - RNA, 19 nt, Artificial Sequence
  Description of Artificial Sequence: Synthetic oligonucleotide
  Antisense strand to SEQ ID NO: 610310
guaaucgcaccuuucauuc

SEQ ID NO: 610312 - RNA, 19 nt, Artificial Sequence
  Description of Artificial Sequence: Synthetic oligonucleotide
  Sense strand starting at position 1516 of SEQ ID NO: 585063
gaauacauuccagguuggu

SEQ ID NO: 610313 - RNA, 19 nt, Artificial Sequence
  Description of Artificial Sequence: Synthetic oligonucleotide
  Antisense strand to SEQ ID NO: 610312
accaaccuggaauguauuc

SEQ ID NO: 610314 - RNA, 19 nt, Artificial Sequence
  Description of Artificial Sequence: Synthetic oligonucleotide
  Sense strand starting at position 1848 of SEQ ID NO: 585063
cgcccugagcacuguauuu

SEQ ID NO: 610315 - RNA, 19 nt, Artificial Sequence
  Description of Artificial Sequence: Synthetic oligonucleotide
  Antisense strand to SEQ ID NO: 610314
aaauacagugcucagggcg

SEQ ID NO: 610316 - RNA, 19 nt, Artificial Sequence
  Description of Artificial Sequence: Synthetic oligonucleotide
  Sense strand starting at position 1888 of SEQ ID NO: 585063
ggacuucuccaguagcgac

SEQ ID NO: 610317 - RNA, 19 nt, Artificial Sequence
  Description of Artificial Sequence: Synthetic oligonucleotide
  Antisense strand to SEQ ID NO: 610316
gucgcuacuggagaagucc

SEQ ID NO: 610318 - RNA, 19 nt, Artificial Sequence
  Description of Artificial Sequence: Synthetic oligonucleotide
  Sense strand starting at position 2119 of SEQ ID NO: 585063
uggagaagugaugguaaau

SEQ ID NO: 610319 - RNA, 19 nt, Artificial Sequence
  Description of Artificial Sequence: Synthetic oligonucleotide
  Antisense strand to SEQ ID NO: 610318
auuuaccaucacuucucca

SEQ ID NO: 610320 - RNA, 19 nt, Artificial Sequence
  Description of Artificial Sequence: Synthetic oligonucleotide
  Sense strand starting at position 2157 of SEQ ID NO: 585063
gagcuaguuacugguagaa

SEQ ID NO: 610321 - RNA, 19 nt, Artificial Sequence
  Description of Artificial Sequence: Synthetic oligonucleotide
  Antisense strand to SEQ ID NO: 610320
uucuaccaguaacuagcuc

SEQ ID NO: 610322 - RNA, 19 nt, Artificial Sequence
  Description of Artificial Sequence: Synthetic oligonucleotide
  Sense strand starting at position 2258 of SEQ ID NO: 585063
guaacucguuaacucauuu

SEQ ID NO: 610323 - RNA, 19 nt, Artificial Sequence
  Description of Artificial Sequence: Synthetic oligonucleotide
  Antisense strand to SEQ ID NO: 610322
aaaugaguuaacgaguuac

SEQ ID NO: 610324 - RNA, 19 nt, Artificial Sequence
  Description of Artificial Sequence: Synthetic oligonucleotide
  Sense strand starting at position 2262 of SEQ ID NO: 585063
cucguuaacucauuugcua

SEQ ID NO: 610325 - RNA, 19 nt, Artificial Sequence
  Description of Artificial Sequence: Synthetic oligonucleotide
  Antisense strand to SEQ ID NO: 610324
uagcaaaugaguuaacgag

SEQ ID NO: 610326 - RNA, 19 nt, Artificial Sequence
  Description of Artificial Sequence: Synthetic oligonucleotide
  Sense strand starting at position 2291 of SEQ ID NO: 585063
auuuauauaugaugggaac

SEQ ID NO: 610327 - RNA, 19 nt, Artificial Sequence
  Description of Artificial Sequence: Synthetic oligonucleotide
  Antisense strand to SEQ ID NO: 610326
guucccaucauauauaaau

SEQ ID NO: 610328 - RNA, 19 nt, Artificial Sequence
  Description of Artificial Sequence: Synthetic oligonucleotide
  Sense strand starting at position 2485 of SEQ ID NO: 585063
acacuagcaguagaauuau

SEQ ID NO: 610329 - RNA, 19 nt, Artificial Sequence
  Description of Artificial Sequence: Synthetic oligonucleotide
  Antisense strand to SEQ ID NO: 610328
auaauucuacugcuagugu

SEQ ID NO: 610330 - RNA, 19 nt, Artificial Sequence
  Description of Artificial Sequence: Synthetic oligonucleotide
  Sense strand starting at position 2611 of SEQ ID NO: 585063
ccagaaggcugguuacaua

SEQ ID NO: 610331 - RNA, 19 nt, Artificial Sequence
  Description of Artificial Sequence: Synthetic oligonucleotide
  Antisense strand to SEQ ID NO: 610330
uauguaaccagccuucugg

SEQ ID NO: 610332 - RNA, 19 nt, Artificial Sequence
  Description of Artificial Sequence: Synthetic oligonucleotide
  Sense strand starting at position 2809 of SEQ ID NO: 585063
aaacaaaguguguauuagu

SEQ ID NO: 610333 - RNA, 19 nt, Artificial Sequence
  Description of Artificial Sequence: Synthetic oligonucleotide
  Antisense strand to SEQ ID NO: 610332
acuaauacacacuuuguuu

SEQ ID NO: 610334 - RNA, 19 nt, Artificial Sequence
  Description of Artificial Sequence: Synthetic oligonucleotide
  Sense strand starting at position 2817 of SEQ ID NO: 585063
uguguauuagucugagaga

SEQ ID NO: 610335 - RNA, 19 nt, Artificial Sequence
  Description of Artificial Sequence: Synthetic oligonucleotide
  Antisense strand to SEQ ID NO: 610334
ucucucagacuaauacaca

SEQ ID NO: 610336 - RNA, 19 nt, Artificial Sequence
  Description of Artificial Sequence: Synthetic oligonucleotide
  Sense strand starting at position 2854 of SEQ ID NO: 585063
gguaacucaucauugaauc

SEQ ID NO: 610337 - RNA, 19 nt, Artificial Sequence
  Description of Artificial Sequence: Synthetic oligonucleotide
  Antisense strand to SEQ ID NO: 610336
gauucaaugaugaguuacc

SEQ ID NO: 610338 - RNA, 19 nt, Artificial Sequence
  Description of Artificial Sequence: Synthetic oligonucleotide
  Sense strand starting at position 2945 of SEQ ID NO: 585063
uuacucugucagcagaagu

SEQ ID NO: 610339 - RNA, 19 nt, Artificial Sequence
  Description of Artificial Sequence: Synthetic oligonucleotide
  Antisense strand to SEQ ID NO: 610338
acuucugcugacagaguaa

SEQ ID NO: 610340 - RNA, 19 nt, Artificial Sequence
  Description of Artificial Sequence: Synthetic oligonucleotide
  Sense strand starting at position 3020 of SEQ ID NO: 585063
ucaguauaaguggauuguu

SEQ ID NO: 610341 - RNA, 19 nt, Artificial Sequence
  Description of Artificial Sequence: Synthetic oligonucleotide
  Antisense strand to SEQ ID NO: 610340
aacaauccacuuauacuga

SEQ ID NO: 610342 - RNA, 19 nt, Artificial Sequence
  Description of Artificial Sequence: Synthetic oligonucleotide
  Sense strand starting at position 3029 of SEQ ID NO: 585063
guggauuguuaggcacuaa

SEQ ID NO: 610343 - RNA, 19 nt, Artificial Sequence
  Description of Artificial Sequence: Synthetic oligonucleotide
  Antisense strand to SEQ ID NO: 610342
uuagugccuaacaauccac

SEQ ID NO: 610344 - RNA, 19 nt, Artificial Sequence
  Description of Artificial Sequence: Synthetic oligonucleotide
  Sense strand starting at position 3030 of SEQ ID NO: 585063
uggauuguuaggcacuaaa

SEQ ID NO: 610345 - RNA, 19 nt, Artificial Sequence
  Description of Artificial Sequence: Synthetic oligonucleotide
  Antisense strand to SEQ ID NO: 610344
uuuagugccuaacaaucca

SEQ ID NO: 610346 - RNA, 19 nt, Artificial Sequence
  Description of Artificial Sequence: Synthetic oligonucleotide
  Sense strand starting at position 3033 of SEQ ID NO: 585063
auuguuaggcacuaaauua

SEQ ID NO: 610347 - RNA, 19 nt, Artificial Sequence
  Description of Artificial Sequence: Synthetic oligonucleotide
  Antisense strand to SEQ ID NO: 610346
uaauuuagugccuaacaau

SEQ ID NO: 610348 - RNA, 19 nt, Artificial Sequence
  Description of Artificial Sequence: Synthetic oligonucleotide
  Sense strand starting at position 3040 of SEQ ID NO: 585063
ggcacuaaauuaucuguuu

SEQ ID NO: 610349 - RNA, 19 nt, Artificial Sequence
  Description of Artificial Sequence: Synthetic oligonucleotide
  Antisense strand to SEQ ID NO: 610348
aaacagauaauuuagugcc

SEQ ID NO: 610350 - RNA, 19 nt, Artificial Sequence
  Description of Artificial Sequence: Synthetic oligonucleotide
  Sense strand starting at position 3240 of SEQ ID NO: 585063
gccuuugcauaauuauaga

SEQ ID NO: 610351 - RNA, 19 nt, Artificial Sequence
  Description of Artificial Sequence: Synthetic oligonucleotide
  Antisense strand to SEQ ID NO: 610350
ucuauaauuaugcaaaggc

SEQ ID NO: 610352 - RNA, 19 nt, Artificial Sequence
  Description of Artificial Sequence: Synthetic oligonucleotide
  Sense strand starting at position 3386 of SEQ ID NO: 585063
uguauacucuuaguaagau

SEQ ID NO: 610353 - RNA, 19 nt, Artificial Sequence
  Description of Artificial Sequence: Synthetic oligonucleotide
  Antisense strand to SEQ ID NO: 610352
aucuuacuaagaguauaca

SEQ ID NO: 610354 - RNA, 19 nt, Artificial Sequence
  Description of Artificial Sequence: Synthetic oligonucleotide
  Sense strand starting at position 3501 of SEQ ID NO: 585063
guauauguacuguggaaua

SEQ ID NO: 610355 - RNA, 19 nt, Artificial Sequence
  Description of Artificial Sequence: Synthetic oligonucleotide
  Antisense strand to SEQ ID NO: 610354
uauuccacaguacauauac

SEQ ID NO: 610356 - RNA, 19 nt, Artificial Sequence
  Description of Artificial Sequence: Synthetic oligonucleotide
  Sense strand starting at position 3840 of SEQ ID NO: 585063
gggagaucagucuggacca

SEQ ID NO: 610357 - RNA, 19 nt, Artificial Sequence
  Description of Artificial Sequence: Synthetic oligonucleotide
  Antisense strand to SEQ ID NO: 610356
ugguccagacugaucuccc

SEQ ID NO: 610358 - RNA, 19 nt, Artificial Sequence
  Description of Artificial Sequence: Synthetic oligonucleotide
  Sense strand starting at position 3852 of SEQ ID NO: 585063
uggaccaucuaguuauagu

SEQ ID NO: 610359 - RNA, 19 nt, Artificial Sequence
  Description of Artificial Sequence: Synthetic oligonucleotide
  Antisense strand to SEQ ID NO: 610358
acuauaacuagauggucca

SEQ ID NO: 610360 - RNA, 19 nt, Artificial Sequence
  Description of Artificial Sequence: Synthetic oligonucleotide
  Sense strand starting at position 3923 of SEQ ID NO: 585063
agaucacuugagggucaau

SEQ ID NO: 610361 - RNA, 19 nt, Artificial Sequence
  Description of Artificial Sequence: Synthetic oligonucleotide
  Antisense strand to SEQ ID NO: 610360
auugacccucaagugaucu

SEQ ID NO: 610362 - RNA, 19 nt, Artificial Sequence
  Description of Artificial Sequence: Synthetic oligonucleotide
  Sense strand starting at position 3935 of SEQ ID NO: 585063
ggucaauaauagucauuac

SEQ ID NO: 610363 - RNA, 19 nt, Artificial Sequence
  Description of Artificial Sequence: Synthetic oligonucleotide
  Antisense strand to SEQ ID NO: 610362
guaaugacuauuauugacc

SEQ ID NO: 610364 - RNA, 19 nt, Artificial Sequence
  Description of Artificial Sequence: Synthetic oligonucleotide
  Sense strand starting at position 3946 of SEQ ID NO: 585063
gucauuacaagcugagagu

SEQ ID NO: 610365 - RNA, 19 nt, Artificial Sequence
  Description of Artificial Sequence: Synthetic oligonucleotide
  Antisense strand to SEQ ID NO: 610364
acucucagcuuguaaugac

SEQ ID NO: 610366 - RNA, 19 nt, Artificial Sequence
  Description of Artificial Sequence: Synthetic oligonucleotide
  Sense strand starting at position 3965 of SEQ ID NO: 585063
cgauaagaauaauugcaau

SEQ ID NO: 610367 - RNA, 19 nt, Artificial Sequence
  Description of Artificial Sequence: Synthetic oligonucleotide
  Antisense strand to SEQ ID NO: 610366
auugcaauuauucuuaucg

SEQ ID NO: 610368 - RNA, 19 nt, Artificial Sequence
  Description of Artificial Sequence: Synthetic oligonucleotide
  Sense strand starting at position 143 of SEQ ID NO: 585064
auauguguacugcaauuau

SEQ ID NO: 610369 - RNA, 19 nt, Artificial Sequence
  Description of Artificial Sequence: Synthetic oligonucleotide
  Antisense strand to SEQ ID NO: 610368
auaauugcaguacacauau

SEQ ID NO: 610370 - RNA, 19 nt, Artificial Sequence
  Description of Artificial Sequence: Synthetic oligonucleotide
  Sense strand starting at position 166 of SEQ ID NO: 585064
auggaaauaugugcaugaa

SEQ ID NO: 610371 - RNA, 19 nt, Artificial Sequence
  Description of Artificial Sequence: Synthetic oligonucleotide
  Antisense strand to SEQ ID NO: 610370
uucaugcacauauuuccau

SEQ ID NO: 610372 - RNA, 19 nt, Artificial Sequence
  Description of Artificial Sequence: Synthetic oligonucleotide
  Sense strand starting at position 169 of SEQ ID NO: 585064
gaaauaugugcaugaagag

SEQ ID NO: 610373 - RNA, 19 nt, Artificial Sequence
  Description of Artificial Sequence: Synthetic oligonucleotide
  Antisense strand to SEQ ID NO: 610372
cucuucaugcacauauuuc

SEQ ID NO: 610374 - RNA, 19 nt, Artificial Sequence
  Description of Artificial Sequence: Synthetic oligonucleotide
  Sense strand starting at position 193 of SEQ ID NO: 585064
uuugguccucuguauuaua

SEQ ID NO: 610375 - RNA, 19 nt, Artificial Sequence
  Description of Artificial Sequence: Synthetic oligonucleotide
  Antisense strand to SEQ ID NO: 610374
uauaauacagaggaccaaa

SEQ ID NO: 610376 - RNA, 19 nt, Artificial Sequence
  Description of Artificial Sequence: Synthetic oligonucleotide
  Sense strand starting at position 284 of SEQ ID NO: 585064
aggcaaauuagagguuaug

SEQ ID NO: 610377 - RNA, 19 nt, Artificial Sequence
  Description of Artificial Sequence: Synthetic oligonucleotide
  Antisense strand to SEQ ID NO: 610376
cauaaccucuaauuugccu

SEQ ID NO: 610378 - RNA, 19 nt, Artificial Sequence
  Description of Artificial Sequence: Synthetic oligonucleotide
  Sense strand starting at position 290 of SEQ ID NO: 585064
auuagagguuauguuaaug

SEQ ID NO: 610379 - RNA, 19 nt, Artificial Sequence
  Description of Artificial Sequence: Synthetic oligonucleotide
  Antisense strand to SEQ ID NO: 610378
cauuaacauaaccucuaau

SEQ ID NO: 610380 - RNA, 19 nt, Artificial Sequence
  Description of Artificial Sequence: Synthetic oligonucleotide
  Sense strand starting at position 318 of SEQ ID NO: 585064
uucuguugugaggauacuu

SEQ ID NO: 610381 - RNA, 19 nt, Artificial Sequence
  Description of Artificial Sequence: Synthetic oligonucleotide
  Antisense strand to SEQ ID NO: 610380
aaguauccucacaacagaa

SEQ ID NO: 610382 - RNA, 19 nt, Artificial Sequence
  Description of Artificial Sequence: Synthetic oligonucleotide
  Sense strand starting at position 585 of SEQ ID NO: 585064
agucacaagucaguugaca

SEQ ID NO: 610383 - RNA, 19 nt, Artificial Sequence
  Description of Artificial Sequence: Synthetic oligonucleotide
  Antisense strand to SEQ ID NO: 610382
ugucaacugacuugugacu

SEQ ID NO: 610384 - RNA, 19 nt, Artificial Sequence
  Description of Artificial Sequence: Synthetic oligonucleotide
  Sense strand starting at position 602 of SEQ ID NO: 585064
cagggacugcuccagguau

SEQ ID NO: 610385 - RNA, 19 nt, Artificial Sequence
  Description of Artificial Sequence: Synthetic oligonucleotide
  Antisense strand to SEQ ID NO: 610384
auaccuggagcagucccug

SEQ ID NO: 610386 - RNA, 19 nt, Artificial Sequence
  Description of Artificial Sequence: Synthetic oligonucleotide
  Sense strand starting at position 604 of SEQ ID NO: 585064
gggacugcuccagguauau

SEQ ID NO: 610387 - RNA, 19 nt, Artificial Sequence
  Description of Artificial Sequence: Synthetic oligonucleotide
  Antisense strand to SEQ ID NO: 610386
auauaccuggagcaguccc

SEQ ID NO: 610388 - RNA, 19 nt, Artificial Sequence
  Description of Artificial Sequence: Synthetic oligonucleotide
  Sense strand starting at position 655 of SEQ ID NO: 585064
uugacauccucauugggua

SEQ ID NO: 610389 - RNA, 19 nt, Artificial Sequence
  Description of Artificial Sequence: Synthetic oligonucleotide
  Antisense strand to SEQ ID NO: 610388
uacccaaugaggaugucaa

SEQ ID NO: 610390 - RNA, 19 nt, Artificial Sequence
  Description of Artificial Sequence: Synthetic oligonucleotide
  Sense strand starting at position 656 of SEQ ID NO: 585064
ugacauccucauuggguaa

SEQ ID NO: 610391 - RNA, 19 nt, Artificial Sequence
  Description of Artificial Sequence: Synthetic oligonucleotide
  Antisense strand to SEQ ID NO: 610390
uuacccaaugaggauguca

SEQ ID NO: 610392 - RNA, 19 nt, Artificial Sequence
  Description of Artificial Sequence: Synthetic oligonucleotide
  Sense strand starting at position 714 of SEQ ID NO: 585064
gaagcaacaucagugacuu

SEQ ID NO: 610393 - RNA, 19 nt, Artificial Sequence
  Description of Artificial Sequence: Synthetic oligonucleotide
  Antisense strand to SEQ ID NO: 610392
aagucacugauguugcuuc

SEQ ID NO: 610394 - RNA, 19 nt, Artificial Sequence
  Description of Artificial Sequence: Synthetic oligonucleotide
  Sense strand starting at position 911 of SEQ ID NO: 585064
ucugcaugucuuuagaauu

SEQ ID NO: 610395 - RNA, 19 nt, Artificial Sequence
  Description of Artificial Sequence: Synthetic oligonucleotide
  Antisense strand to SEQ ID NO: 610394
aauucuaaagacaugcaga

SEQ ID NO: 610396 - RNA, 19 nt, Artificial Sequence
  Description of Artificial Sequence: Synthetic oligonucleotide
  Sense strand starting at position 996 of SEQ ID NO: 585064
gggcaaauugguugacacu

SEQ ID NO: 610397 - RNA, 19 nt, Artificial Sequence
  Description of Artificial Sequence: Synthetic oligonucleotide
  Antisense strand to SEQ ID NO: 610396
agugucaaccaauuugccc

SEQ ID NO: 610398 - RNA, 19 nt, Artificial Sequence
  Description of Artificial Sequence: Synthetic oligonucleotide
  Sense strand starting at position 997 of SEQ ID NO: 585064
ggcaaauugguugacacuu

SEQ ID NO: 610399 - RNA, 19 nt, Artificial Sequence
  Description of Artificial Sequence: Synthetic oligonucleotide
  Antisense strand to SEQ ID NO: 610398
aagugucaaccaauuugcc

SEQ ID NO: 610400 - RNA, 19 nt, Artificial Sequence
  Description of Artificial Sequence: Synthetic oligonucleotide
  Sense strand starting at position 1010 of SEQ ID NO: 585064
acacuuggccaguguauuu

SEQ ID NO: 610401 - RNA, 19 nt, Artificial Sequence
  Description of Artificial Sequence: Synthetic oligonucleotide
  Antisense strand to SEQ ID NO: 610400
aaauacacuggccaagugu

SEQ ID NO: 610402 - RNA, 19 nt, Artificial Sequence
  Description of Artificial Sequence: Synthetic oligonucleotide
  Sense strand starting at position 1034 of SEQ ID NO: 585064
cugaaauauguccaaugca

SEQ ID NO: 610403 - RNA, 19 nt, Artificial Sequence
  Description of Artificial Sequence: Synthetic oligonucleotide
  Antisense strand to SEQ ID NO: 610402
ugcauuggacauauuucag

SEQ ID NO: 610404 - RNA, 19 nt, Artificial Sequence
  Description of Artificial Sequence: Synthetic oligonucleotide
  Sense strand starting at position 1065 of SEQ ID NO: 585064
cuuguaauacagcaauaug

SEQ ID NO: 610405 - RNA, 19 nt, Artificial Sequence
  Description of Artificial Sequence: Synthetic oligonucleotide
  Antisense strand to SEQ ID NO: 610404
cauauugcuguauuacaag

SEQ ID NO: 610406 - RNA, 19 nt, Artificial Sequence
  Description of Artificial Sequence: Synthetic oligonucleotide
  Sense strand starting at position 1068 of SEQ ID NO: 585064
guaauacagcaauauguuu

SEQ ID NO: 610407 - RNA, 19 nt, Artificial Sequence
  Description of Artificial Sequence: Synthetic oligonucleotide
  Antisense strand to SEQ ID NO: 610406
aaacauauugcuguauuac

SEQ ID NO: 610408 - RNA, 19 nt, Artificial Sequence
  Description of Artificial Sequence: Synthetic oligonucleotide
  Sense strand starting at position 1116 of SEQ ID NO: 585064
uguaauucccuguaucaac

SEQ ID NO: 610409 - RNA, 19 nt, Artificial Sequence
  Description of Artificial Sequence: Synthetic oligonucleotide
  Antisense strand to SEQ ID NO: 610408
guugauacagggaauuaca

SEQ ID NO: 610410 - RNA, 19 nt, Artificial Sequence
  Description of Artificial Sequence: Synthetic oligonucleotide
  Sense strand starting at position 1262 of SEQ ID NO: 585064
ugugucuuaaugcagggau

SEQ ID NO: 610411 - RNA, 19 nt, Artificial Sequence
  Description of Artificial Sequence: Synthetic oligonucleotide
  Antisense strand to SEQ ID NO: 610410
aucccugcauuaagacaca

SEQ ID NO: 610412 - RNA, 19 nt, Artificial Sequence
  Description of Artificial Sequence: Synthetic oligonucleotide
  Sense strand starting at position 1264 of SEQ ID NO: 585064
ugucuuaaugcagggauaa

SEQ ID NO: 610413 - RNA, 19 nt, Artificial Sequence
  Description of Artificial Sequence: Synthetic oligonucleotide
  Antisense strand to SEQ ID NO: 610412
uuaucccugcauuaagaca

SEQ ID NO: 610414 - RNA, 19 nt, Artificial Sequence
  Description of Artificial Sequence: Synthetic oligonucleotide
  Sense strand starting at position 1265 of SEQ ID NO: 585064
gucuuaaugcagggauaau

SEQ ID NO: 610415 - RNA, 19 nt, Artificial Sequence
  Description of Artificial Sequence: Synthetic oligonucleotide
  Antisense strand to SEQ ID NO: 610414
auuaucccugcauuaagac

SEQ ID NO: 610416 - RNA, 19 nt, Artificial Sequence
  Description of Artificial Sequence: Synthetic oligonucleotide
  Sense strand starting at position 1441 of SEQ ID NO: 585064
uuagcucaucuaugaugau

SEQ ID NO: 610417 - RNA, 19 nt, Artificial Sequence
  Description of Artificial Sequence: Synthetic oligonucleotide
  Antisense strand to SEQ ID NO: 610416
aucaucauagaugagcuaa

SEQ ID NO: 610418 - RNA, 19 nt, Artificial Sequence
  Description of Artificial Sequence: Synthetic oligonucleotide
  Sense strand starting at position 1450 of SEQ ID NO: 585064
cuaugaugaucagucuacu

SEQ ID NO: 610419 - RNA, 19 nt, Artificial Sequence
  Description of Artificial Sequence: Synthetic oligonucleotide
  Antisense strand to SEQ ID NO: 610418
aguagacugaucaucauag

SEQ ID NO: 610420 - RNA, 19 nt, Artificial Sequence
  Description of Artificial Sequence: Synthetic oligonucleotide
  Sense strand starting at position 2002 of SEQ ID NO: 585064
ggagauacuaccggguaca

SEQ ID NO: 610421 - RNA, 19 nt, Artificial Sequence
  Description of Artificial Sequence: Synthetic oligonucleotide
  Antisense strand to SEQ ID NO: 610420
uguacccgguaguaucucc

SEQ ID NO: 610422 - RNA, 19 nt, Artificial Sequence
  Description of Artificial Sequence: Synthetic oligonucleotide
  Sense strand starting at position 2123 of SEQ ID NO: 585064
cagguuaugaugugagaga

SEQ ID NO: 610423 - RNA, 19 nt, Artificial Sequence
  Description of Artificial Sequence: Synthetic oligonucleotide
  Antisense strand to SEQ ID NO: 610422
ucucucacaucauaaccug

SEQ ID NO: 610424 - RNA, 19 nt, Artificial Sequence
  Description of Artificial Sequence: Synthetic oligonucleotide
  Sense strand starting at position 2227 of SEQ ID NO: 585064
ggagcagggccguaagaaa

SEQ ID NO: 610425 - RNA, 19 nt, Artificial Sequence
  Description of Artificial Sequence: Synthetic oligonucleotide
  Antisense strand to SEQ ID NO: 610424
uuucuuacggcccugcucc

SEQ ID NO: 610426 - RNA, 19 nt, Artificial Sequence
  Description of Artificial Sequence: Synthetic oligonucleotide
  Sense strand starting at position 2251 of SEQ ID NO: 585064
cggcuaacgggaugagaau

SEQ ID NO: 610427 - RNA, 19 nt, Artificial Sequence
  Description of Artificial Sequence: Synthetic oligonucleotide
  Antisense strand to SEQ ID NO: 610426
auucucaucccguuagccg

SEQ ID NO: 610428 - RNA, 19 nt, Artificial Sequence
  Description of Artificial Sequence: Synthetic oligonucleotide
  Sense strand starting at position 2377 of SEQ ID NO: 585064
agaaguucggcccagaaua

SEQ ID NO: 610429 - RNA, 19 nt, Artificial Sequence
  Description of Artificial Sequence: Synthetic oligonucleotide
  Antisense strand to SEQ ID NO: 610428
uauucugggccgaacuucu

SEQ ID NO: 610430 - RNA, 19 nt, Artificial Sequence
  Description of Artificial Sequence: Synthetic oligonucleotide
  Sense strand starting at position 2379 of SEQ ID NO: 585064
aaguucggcccagaauaaa

SEQ ID NO: 610431 - RNA, 19 nt, Artificial Sequence
  Description of Artificial Sequence: Synthetic oligonucleotide
  Antisense strand to SEQ ID NO: 610430
uuuauucugggccgaacuu

SEQ ID NO: 610432 - RNA, 19 nt, Artificial Sequence
  Description of Artificial Sequence: Synthetic oligonucleotide
  Sense strand starting at position 2419 of SEQ ID NO: 585064
cguguuuggagagaagaca

SEQ ID NO: 610433 - RNA, 19 nt, Artificial Sequence
  Description of Artificial Sequence: Synthetic oligonucleotide
  Antisense strand to SEQ ID NO: 610432
ugucuucucuccaaacacg

SEQ ID NO: 610434 - RNA, 19 nt, Artificial Sequence
  Description of Artificial Sequence: Synthetic oligonucleotide
  Sense strand starting at position 2510 of SEQ ID NO: 585064
gggagucuggcagauaacu

SEQ ID NO: 610435 - RNA, 19 nt, Artificial Sequence
  Description of Artificial Sequence: Synthetic oligonucleotide
  Antisense strand to SEQ ID NO: 610434
aguuaucugccagacuccc

SEQ ID NO: 610436 - RNA, 19 nt, Artificial Sequence
  Description of Artificial Sequence: Synthetic oligonucleotide
  Sense strand starting at position 2520 of SEQ ID NO: 585064
cagauaacugcucaccgua

SEQ ID NO: 610437 - RNA, 19 nt, Artificial Sequence
  Description of Artificial Sequence: Synthetic oligonucleotide
  Antisense strand to SEQ ID NO: 610436
uacggugagcaguuaucug

SEQ ID NO: 610438 - RNA, 19 nt, Artificial Sequence
  Description of Artificial Sequence: Synthetic oligonucleotide
  Sense strand starting at position 2533 of SEQ ID NO: 585064
accguagaguccuuaaagg

SEQ ID NO: 610439 - RNA, 19 nt, Artificial Sequence
  Description of Artificial Sequence: Synthetic oligonucleotide
  Antisense strand to SEQ ID NO: 610438
ccuuuaaggacucuacggu

SEQ ID NO: 610440 - RNA, 19 nt, Artificial Sequence
  Description of Artificial Sequence: Synthetic oligonucleotide
  Sense strand starting at position 2939 of SEQ ID NO: 585064
gcgguaguucucgcuguga

SEQ ID NO: 610441 - RNA, 19 nt, Artificial Sequence
  Description of Artificial Sequence: Synthetic oligonucleotide
  Antisense strand to SEQ ID NO: 610440
ucacagcgagaacuaccgc

SEQ ID NO: 610442 - RNA, 19 nt, Artificial Sequence
  Description of Artificial Sequence: Synthetic oligonucleotide
  Sense strand starting at position 3174 of SEQ ID NO: 585064
gaggauuacccaugauugu

SEQ ID NO: 610443 - RNA, 19 nt, Artificial Sequence
  Description of Artificial Sequence: Synthetic oligonucleotide
  Antisense strand to SEQ ID NO: 610442
acaaucauggguaauccuc

SEQ ID NO: 610444 - RNA, 19 nt, Artificial Sequence
  Description of Artificial Sequence: Synthetic oligonucleotide
  Sense strand starting at position 3414 of SEQ ID NO: 585064
ucccuccuuccguagagau

SEQ ID NO: 610445 - RNA, 19 nt, Artificial Sequence
  Description of Artificial Sequence: Synthetic oligonucleotide
  Antisense strand to SEQ ID NO: 610444
aucucuacggaaggaggga

SEQ ID NO: 610446 - RNA, 19 nt, Artificial Sequence
  Description of Artificial Sequence: Synthetic oligonucleotide
  Sense strand starting at position 3918 of SEQ ID NO: 585064
ggagaaagcuauccaucau

SEQ ID NO: 610447 - RNA, 19 nt, Artificial Sequence
  Description of Artificial Sequence: Synthetic oligonucleotide
  Antisense strand to SEQ ID NO: 610446
augauggauagcuuucucc

SEQ ID NO: 610448 - RNA, 19 nt, Artificial Sequence
  Description of Artificial Sequence: Synthetic oligonucleotide
  Sense strand starting at position 100 of SEQ ID NO: 585065
ucugcaugucuuuagaauu

SEQ ID NO: 610449 - RNA, 19 nt, Artificial Sequence
  Description of Artificial Sequence: Synthetic oligonucleotide
  Antisense strand to SEQ ID NO: 610448
aauucuaaagacaugcaga

SEQ ID NO: 610450 - RNA, 19 nt, Artificial Sequence
  Description of Artificial Sequence: Synthetic oligonucleotide
  Sense strand starting at position 185 of SEQ ID NO: 585065
gggcaaauugguugacacu

SEQ ID NO: 610451 - RNA, 19 nt, Artificial Sequence
  Description of Artificial Sequence: Synthetic oligonucleotide
  Antisense strand to SEQ ID NO: 610450
agugucaaccaauuugccc

SEQ ID NO: 610452 - RNA, 19 nt, Artificial Sequence
  Description of Artificial Sequence: Synthetic oligonucleotide
  Sense strand starting at position 186 of SEQ ID NO: 585065
ggcaaauugguugacacuu

SEQ ID NO: 610453 - RNA, 19 nt, Artificial Sequence
  Description of Artificial Sequence: Synthetic oligonucleotide
  Antisense strand to SEQ ID NO: 610452
aagugucaaccaauuugcc

SEQ ID NO: 610454 - RNA, 19 nt, Artificial Sequence
  Description of Artificial Sequence: Synthetic oligonucleotide
  Sense strand starting at position 199 of SEQ ID NO: 585065
acacuuggccaguguauuu

SEQ ID NO: 610455 - RNA, 19 nt, Artificial Sequence
  Description of Artificial Sequence: Synthetic oligonucleotide
  Antisense strand to SEQ ID NO: 610454
aaauacacuggccaagugu

SEQ ID NO: 610456 - RNA, 19 nt, Artificial Sequence
  Description of Artificial Sequence: Synthetic oligonucleotide
  Sense strand starting at position 223 of SEQ ID NO: 585065
cugaaauauguccaaugca

SEQ ID NO: 610457 - RNA, 19 nt, Artificial Sequence
  Description of Artificial Sequence: Synthetic oligonucleotide
  Antisense strand to SEQ ID NO: 610456
ugcauuggacauauuucag

SEQ ID NO: 610458 - RNA, 19 nt, Artificial Sequence
  Description of Artificial Sequence: Synthetic oligonucleotide
  Sense strand starting at position 254 of SEQ ID NO: 585065
cuuguaauacagcaauaug

SEQ ID NO: 610459 - RNA, 19 nt, Artificial Sequence
  Description of Artificial Sequence: Synthetic oligonucleotide
  Antisense strand to SEQ ID NO: 610458
cauauugcuguauuacaag

SEQ ID NO: 610460 - RNA, 19 nt, Artificial Sequence
  Description of Artificial Sequence: Synthetic oligonucleotide
  Sense strand starting at position 257 of SEQ ID NO: 585065
guaauacagcaauauguuu

SEQ ID NO: 610461 - RNA, 19 nt, Artificial Sequence
  Description of Artificial Sequence: Synthetic oligonucleotide
  Antisense strand to SEQ ID NO: 610460
aaacauauugcuguauuac

SEQ ID NO: 610462 - RNA, 19 nt, Artificial Sequence
  Description of Artificial Sequence: Synthetic oligonucleotide
  Sense strand starting at position 305 of SEQ ID NO: 585065
uguaauucccuguaucaac

SEQ ID NO: 610463 - RNA, 19 nt, Artificial Sequence
  Description of Artificial Sequence: Synthetic oligonucleotide
  Antisense strand to SEQ ID NO: 610462
guugauacagggaauuaca

SEQ ID NO: 610464 - RNA, 19 nt, Artificial Sequence
  Description of Artificial Sequence: Synthetic oligonucleotide
  Sense strand starting at position 451 of SEQ ID NO: 585065
ugugucuuaaugcagggau

SEQ ID NO: 610465 - RNA, 19 nt, Artificial Sequence
  Description of Artificial Sequence: Synthetic oligonucleotide
  Antisense strand to SEQ ID NO: 610464
aucccugcauuaagacaca

SEQ ID NO: 610466 - RNA, 19 nt, Artificial Sequence
  Description of Artificial Sequence: Synthetic oligonucleotide
  Sense strand starting at position 453 of SEQ ID NO: 585065
ugucuuaaugcagggauaa

SEQ ID NO: 610467 - RNA, 19 nt, Artificial Sequence
  Description of Artificial Sequence: Synthetic oligonucleotide
  Antisense strand to SEQ ID NO: 610466
uuaucccugcauuaagaca

SEQ ID NO: 610468 - RNA, 19 nt, Artificial Sequence
  Description of Artificial Sequence: Synthetic oligonucleotide
  Sense strand starting at position 454 of SEQ ID NO: 585065
gucuuaaugcagggauaau

SEQ ID NO: 610469 - RNA, 19 nt, Artificial Sequence
  Description of Artificial Sequence: Synthetic oligonucleotide
  Antisense strand to SEQ ID NO: 610468
auuaucccugcauuaagac

SEQ ID NO: 610470 - RNA, 19 nt, Artificial Sequence
  Description of Artificial Sequence: Synthetic oligonucleotide
  Sense strand starting at position 630 of SEQ ID NO: 585065
uuagcucaucuaugaugau

SEQ ID NO: 610471 - RNA, 19 nt, Artificial Sequence
  Description of Artificial Sequence: Synthetic oligonucleotide
  Antisense strand to SEQ ID NO: 610470
aucaucauagaugagcuaa

SEQ ID NO: 610472 - RNA, 19 nt, Artificial Sequence
  Description of Artificial Sequence: Synthetic oligonucleotide
  Sense strand starting at position 639 of SEQ ID NO: 585065
cuaugaugaucagucuacu

SEQ ID NO: 610473 - RNA, 19 nt, Artificial Sequence
  Description of Artificial Sequence: Synthetic oligonucleotide
  Antisense strand to SEQ ID NO: 610472
aguagacugaucaucauag

SEQ ID NO: 610474 - RNA, 19 nt, Artificial Sequence
  Description of Artificial Sequence: Synthetic oligonucleotide
  Sense strand starting at position 1191 of SEQ ID NO: 585065
ggagauacuaccggguaca

SEQ ID NO: 610475 - RNA, 19 nt, Artificial Sequence
  Description of Artificial Sequence: Synthetic oligonucleotide
  Antisense strand to SEQ ID NO: 610474
uguacccgguaguaucucc

SEQ ID NO: 610476 - RNA, 19 nt, Artificial Sequence
  Description of Artificial Sequence: Synthetic oligonucleotide
  Sense strand starting at position 1312 of SEQ ID NO: 585065
cagguuaugaugugagaga

SEQ ID NO: 610477 - RNA, 19 nt, Artificial Sequence
  Description of Artificial Sequence: Synthetic oligonucleotide
  Antisense strand to SEQ ID NO: 610476
ucucucacaucauaaccug

SEQ ID NO: 610478 - RNA, 19 nt, Artificial Sequence
  Description of Artificial Sequence: Synthetic oligonucleotide
  Sense strand starting at position 1416 of SEQ ID NO: 585065
ggagcagggccguaagaaa

SEQ ID NO: 610479 - RNA, 19 nt, Artificial Sequence
  Description of Artificial Sequence: Synthetic oligonucleotide
  Antisense strand to SEQ ID NO: 610478
uuucuuacggcccugcucc

SEQ ID NO: 610480 - RNA, 19 nt, Artificial Sequence
  Description of Artificial Sequence: Synthetic oligonucleotide
  Sense strand starting at position 1440 of SEQ ID NO: 585065
cggcuaacgggaugagaau

SEQ ID NO: 610481 - RNA, 19 nt, Artificial Sequence
  Description of Artificial Sequence: Synthetic oligonucleotide
  Antisense strand to SEQ ID NO: 610480
auucucaucccguuagccg

SEQ ID NO: 610482 - RNA, 19 nt, Artificial Sequence
  Description of Artificial Sequence: Synthetic oligonucleotide
  Sense strand starting at position 1566 of SEQ ID NO: 585065
agaaguucggcccagaaua

SEQ ID NO: 610483 - RNA, 19 nt, Artificial Sequence
  Description of Artificial Sequence: Synthetic oligonucleotide
  Antisense strand to SEQ ID NO: 610482
uauucugggccgaacuucu

SEQ ID NO: 610484 - RNA, 19 nt, Artificial Sequence
  Description of Artificial Sequence: Synthetic oligonucleotide
  Sense strand starting at position 1568 of SEQ ID NO: 585065
aaguucggcccagaauaaa

SEQ ID NO: 610485 - RNA, 19 nt, Artificial Sequence
  Description of Artificial Sequence: Synthetic oligonucleotide
  Antisense strand to SEQ ID NO: 610484
uuuauucugggccgaacuu

SEQ ID NO: 610486 - RNA, 19 nt, Artificial Sequence
  Description of Artificial Sequence: Synthetic oligonucleotide
  Sense strand starting at position 1608 of SEQ ID NO: 585065
cguguuuggagagaagaca

SEQ ID NO: 610487 - RNA, 19 nt, Artificial Sequence
  Description of Artificial Sequence: Synthetic oligonucleotide
  Antisense strand to SEQ ID NO: 610486
ugucuucucuccaaacacg

SEQ ID NO: 610488 - RNA, 19 nt, Artificial Sequence
  Description of Artificial Sequence: Synthetic oligonucleotide
  Sense strand starting at position 1699 of SEQ ID NO: 585065
gggagucuggcagauaacu

SEQ ID NO: 610489 - RNA, 19 nt, Artificial Sequence
  Description of Artificial Sequence: Synthetic oligonucleotide
  Antisense strand to SEQ ID NO: 610488
aguuaucugccagacuccc

SEQ ID NO: 610490 - RNA, 19 nt, Artificial Sequence
  Description of Artificial Sequence: Synthetic oligonucleotide
  Sense strand starting at position 1709 of SEQ ID NO: 585065
cagauaacugcucaccgua

SEQ ID NO: 610491 - RNA, 19 nt, Artificial Sequence
  Description of Artificial Sequence: Synthetic oligonucleotide
  Antisense strand to SEQ ID NO: 610490
uacggugagcaguuaucug

SEQ ID NO: 610492 - RNA, 19 nt, Artificial Sequence
  Description of Artificial Sequence: Synthetic oligonucleotide
  Sense strand starting at position 1722 of SEQ ID NO: 585065
accguagaguccuuaaagg

SEQ ID NO: 610493 - RNA, 19 nt, Artificial Sequence
  Description of Artificial Sequence: Synthetic oligonucleotide
  Antisense strand to SEQ ID NO: 610492
ccuuuaaggacucuacggu

SEQ ID NO: 610494 - RNA, 19 nt, Artificial Sequence
  Description of Artificial Sequence: Synthetic oligonucleotide
  Sense strand starting at position 2128 of SEQ ID NO: 585065
gcgguaguucucgcuguga

SEQ ID NO: 610495 - RNA, 19 nt, Artificial Sequence
  Description of Artificial Sequence: Synthetic oligonucleotide
  Antisense strand to SEQ ID NO: 610494
ucacagcgagaacuaccgc

SEQ ID NO: 610496 - RNA, 19 nt, Artificial Sequence
  Description of Artificial Sequence: Synthetic oligonucleotide
  Sense strand starting at position 2363 of SEQ ID NO: 585065
gaggauuacccaugauugu

SEQ ID NO: 610497 - RNA, 19 nt, Artificial Sequence
  Description of Artificial Sequence: Synthetic oligonucleotide
  Antisense strand to SEQ ID NO: 610496
acaaucauggguaauccuc

SEQ ID NO: 610498 - RNA, 19 nt, Artificial Sequence
  Description of Artificial Sequence: Synthetic oligonucleotide
  Sense strand starting at position 2603 of SEQ ID NO: 585065
ucccuccuuccguagagau

SEQ ID NO: 610499 - RNA, 19 nt, Artificial Sequence
  Description of Artificial Sequence: Synthetic oligonucleotide
  Antisense strand to SEQ ID NO: 610498
aucucuacggaaggaggga

SEQ ID NO: 610500 - RNA, 19 nt, Artificial Sequence
  Description of Artificial Sequence: Synthetic oligonucleotide
  Sense strand starting at position 2987 of SEQ ID NO: 585065
ggugaaauauugucagcau

SEQ ID NO: 610501 - RNA, 19 nt, Artificial Sequence
  Description of Artificial Sequence: Synthetic oligonucleotide
  Antisense strand to SEQ ID NO: 610500
augcugacaauauuucacc

SEQ ID NO: 610502 - RNA, 19 nt, Artificial Sequence
  Description of Artificial Sequence: Synthetic oligonucleotide
  Sense strand starting at position 3107 of SEQ ID NO: 585065
ggagaaagcuauccaucau

SEQ ID NO: 610503 - RNA, 19 nt, Artificial Sequence
  Description of Artificial Sequence: Synthetic oligonucleotide
  Antisense strand to SEQ ID NO: 610502
augauggauagcuuucucc

SEQ ID NO: 610504 - RNA, 19 nt, Artificial Sequence
  Description of Artificial Sequence: Synthetic oligonucleotide
  Sense strand starting at position 3377 of SEQ ID NO: 585065
cacuaauuugugugacgcu

SEQ ID NO: 610505 - RNA, 19 nt, Artificial Sequence
  Description of Artificial Sequence: Synthetic oligonucleotide
  Antisense strand to SEQ ID NO: 610504
agcgucacacaaauuagug

SEQ ID NO: 610506 - RNA, 19 nt, Artificial Sequence
  Description of Artificial Sequence: Synthetic oligonucleotide
  Sense strand starting at position 3404 of SEQ ID NO: 585065
ccaggacaugaaugcauua

SEQ ID NO: 610507 - RNA, 19 nt, Artificial Sequence
  Description of Artificial Sequence: Synthetic oligonucleotide
  Antisense strand to SEQ ID NO: 610506
uaaugcauucauguccugg

SEQ ID NO: 610508 - RNA, 19 nt, Artificial Sequence
  Description of Artificial Sequence: Synthetic oligonucleotide
  Sense strand starting at position 3429 of SEQ ID NO: 585065
accugaggcaguuauugau

SEQ ID NO: 610509 - RNA, 19 nt, Artificial Sequence
  Description of Artificial Sequence: Synthetic oligonucleotide
  Antisense strand to SEQ ID NO: 610508
aucaauaacugccucaggu

SEQ ID NO: 610510 - RNA, 19 nt, Artificial Sequence
  Description of Artificial Sequence: Synthetic oligonucleotide
  Sense strand starting at position 3467 of SEQ ID NO: 585065
cccagagaguuuccuuucu

SEQ ID NO: 610511 - RNA, 19 nt, Artificial Sequence
  Description of Artificial Sequence: Synthetic oligonucleotide
  Antisense strand to SEQ ID NO: 610510
agaaaggaaacucucuggg

SEQ ID NO: 610512 - RNA, 19 nt, Artificial Sequence
  Description of Artificial Sequence: Synthetic oligonucleotide
  Sense strand starting at position 3553 of SEQ ID NO: 585065
guaaguacauuaccuuaau

SEQ ID NO: 610513 - RNA, 19 nt, Artificial Sequence
  Description of Artificial Sequence: Synthetic oligonucleotide
  Antisense strand to SEQ ID NO: 610512
auuaagguaauguacuuac

SEQ ID NO: 610514 - RNA, 19 nt, Artificial Sequence
  Description of Artificial Sequence: Synthetic oligonucleotide
  Sense strand starting at position 3564 of SEQ ID NO: 585065
accuuaaugcagcaguuua

SEQ ID NO: 610515 - RNA, 19 nt, Artificial Sequence
  Description of Artificial Sequence: Synthetic oligonucleotide
  Antisense strand to SEQ ID NO: 610514
uaaacugcugcauuaaggu

SEQ ID NO: 610516 - RNA, 19 nt, Artificial Sequence
  Description of Artificial Sequence: Synthetic oligonucleotide
  Sense strand starting at position 3677 of SEQ ID NO: 585065
cucaaacauugguuagcau

SEQ ID NO: 610517 - RNA, 19 nt, Artificial Sequence
  Description of Artificial Sequence: Synthetic oligonucleotide
  Antisense strand to SEQ ID NO: 610516
augcuaaccaauguuugag

SEQ ID NO: 610518 - RNA, 19 nt, Artificial Sequence
  Description of Artificial Sequence: Synthetic oligonucleotide
  Sense strand starting at position 3678 of SEQ ID NO: 585065
ucaaacauugguuagcauu

SEQ ID NO: 610519 - RNA, 19 nt, Artificial Sequence
  Description of Artificial Sequence: Synthetic oligonucleotide
  Antisense strand to SEQ ID NO: 610518
aaugcuaaccaauguuuga

SEQ ID NO: 610520 - RNA, 19 nt, Artificial Sequence
  Description of Artificial Sequence: Synthetic oligonucleotide
  Sense strand starting at position 3688 of SEQ ID NO: 585065
guuagcauuguggaaguua

SEQ ID NO: 610521 - RNA, 19 nt, Artificial Sequence
  Description of Artificial Sequence: Synthetic oligonucleotide
  Antisense strand to SEQ ID NO: 610520
uaacuuccacaaugcuaac

SEQ ID NO: 610522 - RNA, 19 nt, Artificial Sequence
  Description of Artificial Sequence: Synthetic oligonucleotide
  Sense strand starting at position 3721 of SEQ ID NO: 585065
aguaccuguccguuguauu

SEQ ID NO: 610523 - RNA, 19 nt, Artificial Sequence
  Description of Artificial Sequence: Synthetic oligonucleotide
  Antisense strand to SEQ ID NO: 610522
aauacaacggacagguacu

SEQ ID NO: 610524 - RNA, 19 nt, Artificial Sequence
  Description of Artificial Sequence: Synthetic oligonucleotide
  Sense strand starting at position 3732 of SEQ ID NO: 585065
guuguauuauaccuuagac

SEQ ID NO: 610525 - RNA, 19 nt, Artificial Sequence
  Description of Artificial Sequence: Synthetic oligonucleotide
  Antisense strand to SEQ ID NO: 610524
gucuaagguauaauacaac

SEQ ID NO: 610526 - RNA, 19 nt, Artificial Sequence
  Description of Artificial Sequence: Synthetic oligonucleotide
  Sense strand starting at position 3769 of SEQ ID NO: 585065
ccagucacuggaggaauau

SEQ ID NO: 610527 - RNA, 19 nt, Artificial Sequence
  Description of Artificial Sequence: Synthetic oligonucleotide
  Antisense strand to SEQ ID NO: 610526
auauuccuccagugacugg

SEQ ID NO: 610528 - RNA, 19 nt, Artificial Sequence
  Description of Artificial Sequence: Synthetic oligonucleotide
  Sense strand starting at position 549 of SEQ ID NO: 585066
gcagguacccucuaaggga

SEQ ID NO: 610529 - RNA, 19 nt, Artificial Sequence
  Description of Artificial Sequence: Synthetic oligonucleotide
  Antisense strand to SEQ ID NO: 610528
ucccuuagaggguaccugc

SEQ ID NO: 610530 - RNA, 19 nt, Artificial Sequence
  Description of Artificial Sequence: Synthetic oligonucleotide
  Sense strand starting at position 633 of SEQ ID NO: 585066
cuauccuguccuuagcaua

SEQ ID NO: 610531 - RNA, 19 nt, Artificial Sequence
  Description of Artificial Sequence: Synthetic oligonucleotide
  Antisense strand to SEQ ID NO: 610530
uaugcuaaggacaggauag

SEQ ID NO: 610532 - RNA, 19 nt, Artificial Sequence
  Description of Artificial Sequence: Synthetic oligonucleotide
  Sense strand starting at position 1001 of SEQ ID NO: 585066
aggguauauagcuaggguu

SEQ ID NO: 610533 - RNA, 19 nt, Artificial Sequence
  Description of Artificial Sequence: Synthetic oligonucleotide
  Antisense strand to SEQ ID NO: 610532
aacccuagcuauauacccu

SEQ ID NO: 610534 - RNA, 19 nt, Artificial Sequence
  Description of Artificial Sequence: Synthetic oligonucleotide
  Sense strand starting at position 1866 of SEQ ID NO: 585066
acccuaaggcucugaguaa

SEQ ID NO: 610535 - RNA, 19 nt, Artificial Sequence
  Description of Artificial Sequence: Synthetic oligonucleotide
  Antisense strand to SEQ ID NO: 610534
uuacucagagccuuagggu

SEQ ID NO: 610536 - RNA, 19 nt, Artificial Sequence
  Description of Artificial Sequence: Synthetic oligonucleotide
  Sense strand starting at position 1867 of SEQ ID NO: 585066
cccuaaggcucugaguaaa

SEQ ID NO: 610537 - RNA, 19 nt, Artificial Sequence
  Description of Artificial Sequence: Synthetic oligonucleotide
  Antisense strand to SEQ ID NO: 610536
uuuacucagagccuuaggg

SEQ ID NO: 610538 - RNA, 19 nt, Artificial Sequence
  Description of Artificial Sequence: Synthetic oligonucleotide
  Sense strand starting at position 2051 of SEQ ID NO: 585066
gccagagaguccucccauu

SEQ ID NO: 610539 - RNA, 19 nt, Artificial Sequence
  Description of Artificial Sequence: Synthetic oligonucleotide
  Antisense strand to SEQ ID NO: 610538
aaugggaggacucucuggc

SEQ ID NO: 610540 - RNA, 19 nt, Artificial Sequence
  Description of Artificial Sequence: Synthetic oligonucleotide
  Sense strand starting at position 2158 of SEQ ID NO: 585066
aagggcucccuagaaguau

SEQ ID NO: 610541 - RNA, 19 nt, Artificial Sequence
  Description of Artificial Sequence: Synthetic oligonucleotide
  Antisense strand to SEQ ID NO: 610540
auacuucuagggagcccuu

SEQ ID NO: 610542 - RNA, 19 nt, Artificial Sequence
  Description of Artificial Sequence: Synthetic oligonucleotide
  Sense strand starting at position 2223 of SEQ ID NO: 585066
agcuaugagcucuguaaca

SEQ ID NO: 610543 - RNA, 19 nt, Artificial Sequence
  Description of Artificial Sequence: Synthetic oligonucleotide
  Antisense strand to SEQ ID NO: 610542
uguuacagagcucauagcu

SEQ ID NO: 610544 - RNA, 19 nt, Artificial Sequence
  Description of Artificial Sequence: Synthetic oligonucleotide
  Sense strand starting at position 2368 of SEQ ID NO: 585066
aagggcaagucgucacaaa

SEQ ID NO: 610545 - RNA, 19 nt, Artificial Sequence
  Description of Artificial Sequence: Synthetic oligonucleotide
  Antisense strand to SEQ ID NO: 610544
uuugugacgacuugcccuu

SEQ ID NO: 610546 - RNA, 19 nt, Artificial Sequence
  Description of Artificial Sequence: Synthetic oligonucleotide
  Sense strand starting at position 2440 of SEQ ID NO: 585066
ugacauuuguuagggcuua

SEQ ID NO: 610547 - RNA, 19 nt, Artificial Sequence
  Description of Artificial Sequence: Synthetic oligonucleotide
  Antisense strand to SEQ ID NO: 610546
uaagcccuaacaaauguca

SEQ ID NO: 610548 - RNA, 19 nt, Artificial Sequence
  Description of Artificial Sequence: Synthetic oligonucleotide
  Sense strand starting at position 2509 of SEQ ID NO: 585066
gcccuauugucucagccaa

SEQ ID NO: 610549 - RNA, 19 nt, Artificial Sequence
  Description of Artificial Sequence: Synthetic oligonucleotide
  Antisense strand to SEQ ID NO: 610548
uuggcugagacaauagggc

SEQ ID NO: 610550 - RNA, 19 nt, Artificial Sequence
  Description of Artificial Sequence: Synthetic oligonucleotide
  Sense strand starting at position 3857 of SEQ ID NO: 585066
gugaguuacugcugggauc

SEQ ID NO: 610551 - RNA, 19 nt, Artificial Sequence
  Description of Artificial Sequence: Synthetic oligonucleotide
  Antisense strand to SEQ ID NO: 610550
gaucccagcaguaacucac

SEQ ID NO: 610552 - RNA, 19 nt, Artificial Sequence
  Description of Artificial Sequence: Synthetic oligonucleotide
  Sense strand starting at position 41 of SEQ ID NO: 585067
gugccuaauaucugugaga

SEQ ID NO: 610553 - RNA, 19 nt, Artificial Sequence
  Description of Artificial Sequence: Synthetic oligonucleotide
  Antisense strand to SEQ ID NO: 610552
ucucacagauauuaggcac

SEQ ID NO: 610554 - RNA, 19 nt, Artificial Sequence
  Description of Artificial Sequence: Synthetic oligonucleotide
  Sense strand starting at position 42 of SEQ ID NO: 585067
ugccuaauaucugugagac

SEQ ID NO: 610555 - RNA, 19 nt, Artificial Sequence
  Description of Artificial Sequence: Synthetic oligonucleotide
  Antisense strand to SEQ ID NO: 610554
gucucacagauauuaggca

SEQ ID NO: 610556 - RNA, 19 nt, Artificial Sequence
  Description of Artificial Sequence: Synthetic oligonucleotide
  Sense strand starting at position 43 of SEQ ID NO: 585067
gccuaauaucugugagaca

SEQ ID NO: 610557 - RNA, 19 nt, Artificial Sequence
  Description of Artificial Sequence: Synthetic oligonucleotide
  Antisense strand to SEQ ID NO: 610556
ugucucacagauauuaggc

SEQ ID NO: 610558 - RNA, 19 nt, Artificial Sequence
  Description of Artificial Sequence: Synthetic oligonucleotide
  Sense strand starting at position 76 of SEQ ID NO: 585067
gcagaucaauagcuuguua

SEQ ID NO: 610559 - RNA, 19 nt, Artificial Sequence
  Description of Artificial Sequence: Synthetic oligonucleotide
  Antisense strand to SEQ ID NO: 610558
uaacaagcuauugaucugc

SEQ ID NO: 610560 - RNA, 19 nt, Artificial Sequence
  Description of Artificial Sequence: Synthetic oligonucleotide
  Sense strand starting at position 78 of SEQ ID NO: 585067
agaucaauagcuuguuauu

SEQ ID NO: 610561 - RNA, 19 nt, Artificial Sequence
  Description of Artificial Sequence: Synthetic oligonucleotide
  Antisense strand to SEQ ID NO: 610560
aauaacaagcuauugaucu

SEQ ID NO: 610562 - RNA, 19 nt, Artificial Sequence
  Description of Artificial Sequence: Synthetic oligonucleotide
  Sense strand starting at position 84 of SEQ ID NO: 585067
auagcuuguuauucuaaug

SEQ ID NO: 610563 - RNA, 19 nt, Artificial Sequence
  Description of Artificial Sequence: Synthetic oligonucleotide
  Antisense strand to SEQ ID NO: 610562
cauuagaauaacaagcuau

SEQ ID NO: 610564 - RNA, 19 nt, Artificial Sequence
  Description of Artificial Sequence: Synthetic oligonucleotide
  Sense strand starting at position 509 of SEQ ID NO: 585067
ccuaaaggcuguccucaaa

SEQ ID NO: 610565 - RNA, 19 nt, Artificial Sequence
  Description of Artificial Sequence: Synthetic oligonucleotide
  Antisense strand to SEQ ID NO: 610564
uuugaggacagccuuuagg

SEQ ID NO: 610566 - RNA, 19 nt, Artificial Sequence
  Description of Artificial Sequence: Synthetic oligonucleotide
  Sense strand starting at position 607 of SEQ ID NO: 585067
acccuagaacuuggucaua

SEQ ID NO: 610567 - RNA, 19 nt, Artificial Sequence
  Description of Artificial Sequence: Synthetic oligonucleotide
  Antisense strand to SEQ ID NO: 610566
uaugaccaaguucuagggu

SEQ ID NO: 610568 - RNA, 19 nt, Artificial Sequence
  Description of Artificial Sequence: Synthetic oligonucleotide
  Sense strand starting at position 609 of SEQ ID NO: 585067
ccuagaacuuggucauaaa

SEQ ID NO: 610569 - RNA, 19 nt, Artificial Sequence
  Description of Artificial Sequence: Synthetic oligonucleotide
  Antisense strand to SEQ ID NO: 610568
uuuaugaccaaguucuagg

SEQ ID NO: 610570 - RNA, 19 nt, Artificial Sequence
  Description of Artificial Sequence: Synthetic oligonucleotide
  Sense strand starting at position 679 of SEQ ID NO: 585067
cuccuuucccacugggauu

SEQ ID NO: 610571 - RNA, 19 nt, Artificial Sequence
  Description of Artificial Sequence: Synthetic oligonucleotide
  Antisense strand to SEQ ID NO: 610570
aaucccagugggaaaggag

SEQ ID NO: 610572 - RNA, 19 nt, Artificial Sequence
  Description of Artificial Sequence: Synthetic oligonucleotide
  Sense strand starting at position 714 of SEQ ID NO: 585067
caaauagagcagugacaga

SEQ ID NO: 610573 - RNA, 19 nt, Artificial Sequence
  Description of Artificial Sequence: Synthetic oligonucleotide
  Antisense strand to SEQ ID NO: 610572
ucugucacugcucuauuug

SEQ ID NO: 610574 - RNA, 19 nt, Artificial Sequence
  Description of Artificial Sequence: Synthetic oligonucleotide
  Sense strand starting at position 748 of SEQ ID NO: 585067
cuugcuuugagguagaaag

SEQ ID NO: 610575 - RNA, 19 nt, Artificial Sequence
  Description of Artificial Sequence: Synthetic oligonucleotide
  Antisense strand to SEQ ID NO: 610574
cuuucuaccucaaagcaag

SEQ ID NO: 610576 - RNA, 19 nt, Artificial Sequence
  Description of Artificial Sequence: Synthetic oligonucleotide
  Sense strand starting at position 766 of SEQ ID NO: 585067
ggaagagugguuugaaauu

SEQ ID NO: 610577 - RNA, 19 nt, Artificial Sequence
  Description of Artificial Sequence: Synthetic oligonucleotide
  Antisense strand to SEQ ID NO: 610576
aauuucaaaccacucuucc

SEQ ID NO: 610578 - RNA, 19 nt, Artificial Sequence
  Description of Artificial Sequence: Synthetic oligonucleotide
  Sense strand starting at position 957 of SEQ ID NO: 585067
auaugugaaugaguaaaug

SEQ ID NO: 610579 - RNA, 19 nt, Artificial Sequence
  Description of Artificial Sequence: Synthetic oligonucleotide
  Antisense strand to SEQ ID NO: 610578
cauuuacucauucacauau

SEQ ID NO: 610580 - RNA, 19 nt, Artificial Sequence
  Description of Artificial Sequence: Synthetic oligonucleotide
  Sense strand starting at position 1014 of SEQ ID NO: 585067
aaagguuuaugguugauua

SEQ ID NO: 610581 - RNA, 19 nt, Artificial Sequence
  Description of Artificial Sequence: Synthetic oligonucleotide
  Antisense strand to SEQ ID NO: 610580
uaaucaaccauaaaccuuu

SEQ ID NO: 610582 - RNA, 19 nt, Artificial Sequence
  Description of Artificial Sequence: Synthetic oligonucleotide
  Sense strand starting at position 1015 of SEQ ID NO: 585067
aagguuuaugguugauuau

SEQ ID NO: 610583 - RNA, 19 nt, Artificial Sequence
  Description of Artificial Sequence: Synthetic oligonucleotide
  Antisense strand to SEQ ID NO: 610582
auaaucaaccauaaaccuu

SEQ ID NO: 610584 - RNA, 19 nt, Artificial Sequence
  Description of Artificial Sequence: Synthetic oligonucleotide
  Sense strand starting at position 1016 of SEQ ID NO: 585067
agguuuaugguugauuauc

SEQ ID NO: 610585 - RNA, 19 nt, Artificial Sequence
  Description of Artificial Sequence: Synthetic oligonucleotide
  Antisense strand to SEQ ID NO: 610584
gauaaucaaccauaaaccu

SEQ ID NO: 610586 - RNA, 19 nt, Artificial Sequence
  Description of Artificial Sequence: Synthetic oligonucleotide
  Sense strand starting at position 1289 of SEQ ID NO: 585067
gggaaugacuuuguggcau

SEQ ID NO: 610587 - RNA, 19 nt, Artificial Sequence
  Description of Artificial Sequence: Synthetic oligonucleotide
  Antisense strand to SEQ ID NO: 610586
augccacaaagucauuccc

SEQ ID NO: 610588 - RNA, 19 nt, Artificial Sequence
  Description of Artificial Sequence: Synthetic oligonucleotide
  Sense strand starting at position 1659 of SEQ ID NO: 585067
agauccuguguuuagggaa

SEQ ID NO: 610589 - RNA, 19 nt, Artificial Sequence
  Description of Artificial Sequence: Synthetic oligonucleotide
  Antisense strand to SEQ ID NO: 610588
uucccuaaacacaggaucu

SEQ ID NO: 610590 - RNA, 19 nt, Artificial Sequence
  Description of Artificial Sequence: Synthetic oligonucleotide
  Sense strand starting at position 3016 of SEQ ID NO: 585067
gucucuucuguuuauauca

SEQ ID NO: 610591 - RNA, 19 nt, Artificial Sequence
  Description of Artificial Sequence: Synthetic oligonucleotide
  Antisense strand to SEQ ID NO: 610590
ugauauaaacagaagagac

SEQ ID NO: 610592 - RNA, 19 nt, Artificial Sequence
  Description of Artificial Sequence: Synthetic oligonucleotide
  Sense strand starting at position 3024 of SEQ ID NO: 585067
uguuuauaucaggcguguu

SEQ ID NO: 610593 - RNA, 19 nt, Artificial Sequence
  Description of Artificial Sequence: Synthetic oligonucleotide
  Antisense strand to SEQ ID NO: 610592
aacacgccugauauaaaca

SEQ ID NO: 610594 - RNA, 19 nt, Artificial Sequence
  Description of Artificial Sequence: Synthetic oligonucleotide
  Sense strand starting at position 3089 of SEQ ID NO: 585067
cgucauuacugacugguga

SEQ ID NO: 610595 - RNA, 19 nt, Artificial Sequence
  Description of Artificial Sequence: Synthetic oligonucleotide
  Antisense strand to SEQ ID NO: 610594
ucaccagucaguaaugacg

SEQ ID NO: 610596 - RNA, 19 nt, Artificial Sequence
  Description of Artificial Sequence: Synthetic oligonucleotide
  Sense strand starting at position 3104 of SEQ ID NO: 585067
gugacacugcaguaaguaa

SEQ ID NO: 610597 - RNA, 19 nt, Artificial Sequence
  Description of Artificial Sequence: Synthetic oligonucleotide
  Antisense strand to SEQ ID NO: 610596
uuacuuacugcagugucac

SEQ ID NO: 610598 - RNA, 19 nt, Artificial Sequence
  Description of Artificial Sequence: Synthetic oligonucleotide
  Sense strand starting at position 3216 of SEQ ID NO: 585067
agacaaucucgauagcugu

SEQ ID NO: 610599 - RNA, 19 nt, Artificial Sequence
  Description of Artificial Sequence: Synthetic oligonucleotide
  Antisense strand to SEQ ID NO: 610598
acagcuaucgagauugucu

SEQ ID NO: 610600 - RNA, 19 nt, Artificial Sequence
  Description of Artificial Sequence: Synthetic oligonucleotide
  Sense strand starting at position 3242 of SEQ ID NO: 585067
guaccaucccuuuagguau

SEQ ID NO: 610601 - RNA, 19 nt, Artificial Sequence
  Description of Artificial Sequence: Synthetic oligonucleotide
  Antisense strand to SEQ ID NO: 610600
auaccuaaagggaugguac

SEQ ID NO: 610602 - RNA, 19 nt, Artificial Sequence
  Description of Artificial Sequence: Synthetic oligonucleotide
  Sense strand starting at position 3365 of SEQ ID NO: 585067
aguucucuuugguuaacua

SEQ ID NO: 610603 - RNA, 19 nt, Artificial Sequence
  Description of Artificial Sequence: Synthetic oligonucleotide
  Antisense strand to SEQ ID NO: 610602
uaguuaaccaaagagaacu

SEQ ID NO: 610604 - RNA, 19 nt, Artificial Sequence
  Description of Artificial Sequence: Synthetic oligonucleotide
  Sense strand starting at position 3366 of SEQ ID NO: 585067
guucucuuugguuaacuau

SEQ ID NO: 610605 - RNA, 19 nt, Artificial Sequence
  Description of Artificial Sequence: Synthetic oligonucleotide
  Antisense strand to SEQ ID NO: 610604
auaguuaaccaaagagaac

SEQ ID NO: 610606 - RNA, 19 nt, Artificial Sequence
  Description of Artificial Sequence: Synthetic oligonucleotide
  Sense strand starting at position 3373 of SEQ ID NO: 585067
uugguuaacuauuccagag

SEQ ID NO: 610607 - RNA, 19 nt, Artificial Sequence
  Description of Artificial Sequence: Synthetic oligonucleotide
  Antisense strand to SEQ ID NO: 610606
cucuggaauaguuaaccaa

SEQ ID NO: 610608 - RNA, 19 nt, Artificial Sequence
  Description of Artificial Sequence: Synthetic oligonucleotide
  Sense strand starting at position 3387 of SEQ ID NO: 585067
cagagcuuucugggaauug

SEQ ID NO: 610609 - RNA, 19 nt, Artificial Sequence
  Description of Artificial Sequence: Synthetic oligonucleotide
  Antisense strand to SEQ ID NO: 610608
caauucccagaaagcucug

SEQ ID NO: 610610 - RNA, 19 nt, Artificial Sequence
  Description of Artificial Sequence: Synthetic oligonucleotide
  Sense strand starting at position 3452 of SEQ ID NO: 585067
uuuagcuuuccugaagaca

SEQ ID NO: 610611 - RNA, 19 nt, Artificial Sequence
  Description of Artificial Sequence: Synthetic oligonucleotide
  Antisense strand to SEQ ID NO: 610610
ugucuucaggaaagcuaaa

SEQ ID NO: 610612 - RNA, 19 nt, Artificial Sequence
  Description of Artificial Sequence: Synthetic oligonucleotide
  Sense strand starting at position 3613 of SEQ ID NO: 585067
ucacuuguacugugaggua

SEQ ID NO: 610613 - RNA, 19 nt, Artificial Sequence
  Description of Artificial Sequence: Synthetic oligonucleotide
  Antisense strand to SEQ ID NO: 610612
uaccucacaguacaaguga

SEQ ID NO: 610614 - RNA, 19 nt, Artificial Sequence
  Description of Artificial Sequence: Synthetic oligonucleotide
  Sense strand starting at position 3634 of SEQ ID NO: 585067
uggcuaaguguugagauug

SEQ ID NO: 610615 - RNA, 19 nt, Artificial Sequence
  Description of Artificial Sequence: Synthetic oligonucleotide
  Antisense strand to SEQ ID NO: 610614
caaucucaacacuuagcca

SEQ ID NO: 610616 - RNA, 19 nt, Artificial Sequence
  Description of Artificial Sequence: Synthetic oligonucleotide
  Sense strand starting at position 3704 of SEQ ID NO: 585067
ggagcucacuugucacacu

SEQ ID NO: 610617 - RNA, 19 nt, Artificial Sequence
  Description of Artificial Sequence: Synthetic oligonucleotide
  Antisense strand to SEQ ID NO: 610616
agugugacaagugagcucc

SEQ ID NO: 610618 - RNA, 19 nt, Artificial Sequence
  Description of Artificial Sequence: Synthetic oligonucleotide
  Sense strand starting at position 3757 of SEQ ID NO: 585067
aagggauaugcagaguugu

SEQ ID NO: 610619 - RNA, 19 nt, Artificial Sequence
  Description of Artificial Sequence: Synthetic oligonucleotide
  Antisense strand to SEQ ID NO: 610618
acaacucugcauaucccuu

SEQ ID NO: 610620 - RNA, 19 nt, Artificial Sequence
  Description of Artificial Sequence: Synthetic oligonucleotide
  Sense strand starting at position 3770 of SEQ ID NO: 585067
aguugugaccucuagguau

SEQ ID NO: 610621 - RNA, 19 nt, Artificial Sequence
  Description of Artificial Sequence: Synthetic oligonucleotide
  Antisense strand to SEQ ID NO: 610620
auaccuagaggucacaacu

SEQ ID NO: 610622 - RNA, 19 nt, Artificial Sequence
  Description of Artificial Sequence: Synthetic oligonucleotide
  Sense strand starting at position 3772 of SEQ ID NO: 585067
uugugaccucuagguauua

SEQ ID NO: 610623 - RNA, 19 nt, Artificial Sequence
  Description of Artificial Sequence: Synthetic oligonucleotide
  Antisense strand to SEQ ID NO: 610622
uaauaccuagaggucacaa

SEQ ID NO: 610624 - RNA, 19 nt, Artificial Sequence
  Description of Artificial Sequence: Synthetic oligonucleotide
  Sense strand starting at position 3773 of SEQ ID NO: 585067
ugugaccucuagguauuaa

SEQ ID NO: 610625 - RNA, 19 nt, Artificial Sequence
  Description of Artificial Sequence: Synthetic oligonucleotide
  Antisense strand to SEQ ID NO: 610624
uuaauaccuagaggucaca

SEQ ID NO: 610626 - RNA, 19 nt, Artificial Sequence
  Description of Artificial Sequence: Synthetic oligonucleotide
  Sense strand starting at position 3774 of SEQ ID NO: 585067
gugaccucuagguauuaag

SEQ ID NO: 610627 - RNA, 19 nt, Artificial Sequence
  Description of Artificial Sequence: Synthetic oligonucleotide
  Antisense strand to SEQ ID NO: 610626
cuuaauaccuagaggucac

SEQ ID NO: 610628 - RNA, 19 nt, Artificial Sequence
  Description of Artificial Sequence: Synthetic oligonucleotide
  Sense strand starting at position 3813 of SEQ ID NO: 585067
ggcugucuagggcaggaua

SEQ ID NO: 610629 - RNA, 19 nt, Artificial Sequence
  Description of Artificial Sequence: Synthetic oligonucleotide
  Antisense strand to SEQ ID NO: 610628
uauccugcccuagacagcc

SEQ ID NO: 610630 - RNA, 19 nt, Artificial Sequence
  Description of Artificial Sequence: Synthetic oligonucleotide
  Sense strand starting at position 3821 of SEQ ID NO: 585067
agggcaggauagucaugua

SEQ ID NO: 610631 - RNA, 19 nt, Artificial Sequence
  Description of Artificial Sequence: Synthetic oligonucleotide
  Antisense strand to SEQ ID NO: 610630
uacaugacuauccugcccu

SEQ ID NO: 610632 - RNA, 19 nt, Artificial Sequence
  Description of Artificial Sequence: Synthetic oligonucleotide
  Sense strand starting at position 8 of SEQ ID NO: 585068
ccuaaaggcuguccucaaa

SEQ ID NO: 610633 - RNA, 19 nt, Artificial Sequence
  Description of Artificial Sequence: Synthetic oligonucleotide
  Antisense strand to SEQ ID NO: 610632
uuugaggacagccuuuagg

SEQ ID NO: 610634 - RNA, 19 nt, Artificial Sequence
  Description of Artificial Sequence: Synthetic oligonucleotide
  Sense strand starting at position 106 of SEQ ID NO: 585068
acccuagaacuuggucaua

SEQ ID NO: 610635 - RNA, 19 nt, Artificial Sequence
  Description of Artificial Sequence: Synthetic oligonucleotide
  Antisense strand to SEQ ID NO: 610634
uaugaccaaguucuagggu

SEQ ID NO: 610636 - RNA, 19 nt, Artificial Sequence
  Description of Artificial Sequence: Synthetic oligonucleotide
  Sense strand starting at position 108 of SEQ ID NO: 585068
ccuagaacuuggucauaaa

SEQ ID NO: 610637 - RNA, 19 nt, Artificial Sequence
  Description of Artificial Sequence: Synthetic oligonucleotide
  Antisense strand to SEQ ID NO: 610636
uuuaugaccaaguucuagg

SEQ ID NO: 610638 - RNA, 19 nt, Artificial Sequence
  Description of Artificial Sequence: Synthetic oligonucleotide
  Sense strand starting at position 178 of SEQ ID NO: 585068
cuccuuucccacugggauu

SEQ ID NO: 610639 - RNA, 19 nt, Artificial Sequence
  Description of Artificial Sequence: Synthetic oligonucleotide
  Antisense strand to SEQ ID NO: 610638
aaucccagugggaaaggag

SEQ ID NO: 610640 - RNA, 19 nt, Artificial Sequence
  Description of Artificial Sequence: Synthetic oligonucleotide
  Sense strand starting at position 213 of SEQ ID NO: 585068
caaauagagcagugacaga

SEQ ID NO: 610641 - RNA, 19 nt, Artificial Sequence
  Description of Artificial Sequence: Synthetic oligonucleotide
  Antisense strand to SEQ ID NO: 610640
ucugucacugcucuauuug

SEQ ID NO: 610642 - RNA, 19 nt, Artificial Sequence
  Description of Artificial Sequence: Synthetic oligonucleotide
  Sense strand starting at position 242 of SEQ ID NO: 585068
aagggcuugcuuugaggua

SEQ ID NO: 610643 - RNA, 19 nt, Artificial Sequence
  Description of Artificial Sequence: Synthetic oligonucleotide
  Antisense strand to SEQ ID NO: 610642
uaccucaaagcaagcccuu

SEQ ID NO: 610644 - RNA, 19 nt, Artificial Sequence
  Description of Artificial Sequence: Synthetic oligonucleotide
  Sense strand starting at position 247 of SEQ ID NO: 585068
cuugcuuugagguagaaag

SEQ ID NO: 610645 - RNA, 19 nt, Artificial Sequence
  Description of Artificial Sequence: Synthetic oligonucleotide
  Antisense strand to SEQ ID NO: 610644
cuuucuaccucaaagcaag

SEQ ID NO: 610646 - RNA, 19 nt, Artificial Sequence
  Description of Artificial Sequence: Synthetic oligonucleotide
  Sense strand starting at position 265 of SEQ ID NO: 585068
ggaagagugguuugaaauu

SEQ ID NO: 610647 - RNA, 19 nt, Artificial Sequence
  Description of Artificial Sequence: Synthetic oligonucleotide
  Antisense strand to SEQ ID NO: 610646
aauuucaaaccacucuucc

SEQ ID NO: 610648 - RNA, 19 nt, Artificial Sequence
  Description of Artificial Sequence: Synthetic oligonucleotide
  Sense strand starting at position 456 of SEQ ID NO: 585068
auaugugaaugaguaaaug

SEQ ID NO: 610649 - RNA, 19 nt, Artificial Sequence
  Description of Artificial Sequence: Synthetic oligonucleotide
  Antisense strand to SEQ ID NO: 610648
cauuuacucauucacauau

SEQ ID NO: 610650 - RNA, 19 nt, Artificial Sequence
  Description of Artificial Sequence: Synthetic oligonucleotide
  Sense strand starting at position 513 of SEQ ID NO: 585068
aaagguuuaugguugauua

SEQ ID NO: 610651 - RNA, 19 nt, Artificial Sequence
  Description of Artificial Sequence: Synthetic oligonucleotide
  Antisense strand to SEQ ID NO: 610650
uaaucaaccauaaaccuuu

SEQ ID NO: 610652 - RNA, 19 nt, Artificial Sequence
  Description of Artificial Sequence: Synthetic oligonucleotide
  Sense strand starting at position 514 of SEQ ID NO: 585068
aagguuuaugguugauuau

SEQ ID NO: 610653 - RNA, 19 nt, Artificial Sequence
  Description of Artificial Sequence: Synthetic oligonucleotide
  Antisense strand to SEQ ID NO: 610652
auaaucaaccauaaaccuu

SEQ ID NO: 610654 - RNA, 19 nt, Artificial Sequence
  Description of Artificial Sequence: Synthetic oligonucleotide
  Sense strand starting at position 515 of SEQ ID NO: 585068
agguuuaugguugauuauc

SEQ ID NO: 610655 - RNA, 19 nt, Artificial Sequence
  Description of Artificial Sequence: Synthetic oligonucleotide
  Antisense strand to SEQ ID NO: 610654
gauaaucaaccauaaaccu

SEQ ID NO: 610656 - RNA, 19 nt, Artificial Sequence
  Description of Artificial Sequence: Synthetic oligonucleotide
  Sense strand starting at position 788 of SEQ ID NO: 585068
gggaaugacuuuguggcau

SEQ ID NO: 610657 - RNA, 19 nt, Artificial Sequence
  Description of Artificial Sequence: Synthetic oligonucleotide
  Antisense strand to SEQ ID NO: 610656
augccacaaagucauuccc

SEQ ID NO: 610658 - RNA, 19 nt, Artificial Sequence
  Description of Artificial Sequence: Synthetic oligonucleotide
  Sense strand starting at position 1158 of SEQ ID NO: 585068
agauccuguguuuagggaa

SEQ ID NO: 610659 - RNA, 19 nt, Artificial Sequence
  Description of Artificial Sequence: Synthetic oligonucleotide
  Antisense strand to SEQ ID NO: 610658
uucccuaaacacaggaucu

SEQ ID NO: 610660 - RNA, 19 nt, Artificial Sequence
  Description of Artificial Sequence: Synthetic oligonucleotide
  Sense strand starting at position 2509 of SEQ ID NO: 585068
cuaaaugucucuucuguuu

SEQ ID NO: 610661 - RNA, 19 nt, Artificial Sequence
  Description of Artificial Sequence: Synthetic oligonucleotide
  Antisense strand to SEQ ID NO: 610660
aaacagaagagacauuuag

SEQ ID NO: 610662 - RNA, 19 nt, Artificial Sequence
  Description of Artificial Sequence: Synthetic oligonucleotide
  Sense strand starting at position 2515 of SEQ ID NO: 585068
gucucuucuguuuauauca

SEQ ID NO: 610663 - RNA, 19 nt, Artificial Sequence
  Description of Artificial Sequence: Synthetic oligonucleotide
  Antisense strand to SEQ ID NO: 610662
ugauauaaacagaagagac

SEQ ID NO: 610664 - RNA, 19 nt, Artificial Sequence
  Description of Artificial Sequence: Synthetic oligonucleotide
  Sense strand starting at position 2523 of SEQ ID NO: 585068
uguuuauaucaggcguguu

SEQ ID NO: 610665 - RNA, 19 nt, Artificial Sequence
  Description of Artificial Sequence: Synthetic oligonucleotide
  Antisense strand to SEQ ID NO: 610664
aacacgccugauauaaaca

SEQ ID NO: 610666 - RNA, 19 nt, Artificial Sequence
  Description of Artificial Sequence: Synthetic oligonucleotide
  Sense strand starting at position 2588 of SEQ ID NO: 585068
cgucauuacugacugguga

SEQ ID NO: 610667 - RNA, 19 nt, Artificial Sequence
  Description of Artificial Sequence: Synthetic oligonucleotide
  Antisense strand to SEQ ID NO: 610666
ucaccagucaguaaugacg

SEQ ID NO: 610668 - RNA, 19 nt, Artificial Sequence
  Description of Artificial Sequence: Synthetic oligonucleotide
  Sense strand starting at position 2603 of SEQ ID NO: 585068
gugacacugcaguaaguaa

SEQ ID NO: 610669 - RNA, 19 nt, Artificial Sequence
  Description of Artificial Sequence: Synthetic oligonucleotide
  Antisense strand to SEQ ID NO: 610668
uuacuuacugcagugucac

SEQ ID NO: 610670 - RNA, 19 nt, Artificial Sequence
  Description of Artificial Sequence: Synthetic oligonucleotide
  Sense strand starting at position 2655 of SEQ ID NO: 585068
agguacuccgugggucaua

SEQ ID NO: 610671 - RNA, 19 nt, Artificial Sequence
  Description of Artificial Sequence: Synthetic oligonucleotide
  Antisense strand to SEQ ID NO: 610670
uaugacccacggaguaccu

SEQ ID NO: 610672 - RNA, 19 nt, Artificial Sequence
  Description of Artificial Sequence: Synthetic oligonucleotide
  Sense strand starting at position 2715 of SEQ ID NO: 585068
agacaaucucgauagcugu

SEQ ID NO: 610673 - RNA, 19 nt, Artificial Sequence
  Description of Artificial Sequence: Synthetic oligonucleotide
  Antisense strand to SEQ ID NO: 610672
acagcuaucgagauugucu

SEQ ID NO: 610674 - RNA, 19 nt, Artificial Sequence
  Description of Artificial Sequence: Synthetic oligonucleotide
  Sense strand starting at position 2718 of SEQ ID NO: 585068
caaucucgauagcuguauu

SEQ ID NO: 610675 - RNA, 19 nt, Artificial Sequence
  Description of Artificial Sequence: Synthetic oligonucleotide
  Antisense strand to SEQ ID NO: 610674
aauacagcuaucgagauug

SEQ ID NO: 610676 - RNA, 19 nt, Artificial Sequence
  Description of Artificial Sequence: Synthetic oligonucleotide
  Sense strand starting at position 2741 of SEQ ID NO: 585068
guaccaucccuuuagguau

SEQ ID NO: 610677 - RNA, 19 nt, Artificial Sequence
  Description of Artificial Sequence: Synthetic oligonucleotide
  Antisense strand to SEQ ID NO: 610676
auaccuaaagggaugguac

SEQ ID NO: 610678 - RNA, 19 nt, Artificial Sequence
  Description of Artificial Sequence: Synthetic oligonucleotide
  Sense strand starting at position 2864 of SEQ ID NO: 585068
aguucucuuugguuaacua

SEQ ID NO: 610679 - RNA, 19 nt, Artificial Sequence
  Description of Artificial Sequence: Synthetic oligonucleotide
  Antisense strand to SEQ ID NO: 610678
uaguuaaccaaagagaacu

SEQ ID NO: 610680 - RNA, 19 nt, Artificial Sequence
  Description of Artificial Sequence: Synthetic oligonucleotide
  Sense strand starting at position 2865 of SEQ ID NO: 585068
guucucuuugguuaacuau

SEQ ID NO: 610681 - RNA, 19 nt, Artificial Sequence
  Description of Artificial Sequence: Synthetic oligonucleotide
  Antisense strand to SEQ ID NO: 610680
auaguuaaccaaagagaac

SEQ ID NO: 610682 - RNA, 19 nt, Artificial Sequence
  Description of Artificial Sequence: Synthetic oligonucleotide
  Sense strand starting at position 2872 of SEQ ID NO: 585068
uugguuaacuauuccagag

SEQ ID NO: 610683 - RNA, 19 nt, Artificial Sequence
  Description of Artificial Sequence: Synthetic oligonucleotide
  Antisense strand to SEQ ID NO: 610682
cucuggaauaguuaaccaa

SEQ ID NO: 610684 - RNA, 19 nt, Artificial Sequence
  Description of Artificial Sequence: Synthetic oligonucleotide
  Sense strand starting at position 2886 of SEQ ID NO: 585068
cagagcuuucugggaauug

SEQ ID NO: 610685 - RNA, 19 nt, Artificial Sequence
  Description of Artificial Sequence: Synthetic oligonucleotide
  Antisense strand to SEQ ID NO: 610684
caauucccagaaagcucug

SEQ ID NO: 610686 - RNA, 19 nt, Artificial Sequence
  Description of Artificial Sequence: Synthetic oligonucleotide
  Sense strand starting at position 2951 of SEQ ID NO: 585068
uuuagcuuuccugaagaca

SEQ ID NO: 610687 - RNA, 19 nt, Artificial Sequence
  Description of Artificial Sequence: Synthetic oligonucleotide
  Antisense strand to SEQ ID NO: 610686
ugucuucaggaaagcuaaa

SEQ ID NO: 610688 - RNA, 19 nt, Artificial Sequence
  Description of Artificial Sequence: Synthetic oligonucleotide
  Sense strand starting at position 3112 of SEQ ID NO: 585068
ucacuuguacugugaggua

SEQ ID NO: 610689 - RNA, 19 nt, Artificial Sequence
  Description of Artificial Sequence: Synthetic oligonucleotide
  Antisense strand to SEQ ID NO: 610688
uaccucacaguacaaguga

SEQ ID NO: 610690 - RNA, 19 nt, Artificial Sequence
  Description of Artificial Sequence: Synthetic oligonucleotide
  Sense strand starting at position 3121 of SEQ ID NO: 585068
cugugagguaccuggcuaa

SEQ ID NO: 610691 - RNA, 19 nt, Artificial Sequence
  Description of Artificial Sequence: Synthetic oligonucleotide
  Antisense strand to SEQ ID NO: 610690
uuagccagguaccucacag

SEQ ID NO: 610692 - RNA, 19 nt, Artificial Sequence
  Description of Artificial Sequence: Synthetic oligonucleotide
  Sense strand starting at position 3133 of SEQ ID NO: 585068
uggcuaaguguugagauug

SEQ ID NO: 610693 - RNA, 19 nt, Artificial Sequence
  Description of Artificial Sequence: Synthetic oligonucleotide
  Antisense strand to SEQ ID NO: 610692
caaucucaacacuuagcca

SEQ ID NO: 610694 - RNA, 19 nt, Artificial Sequence
  Description of Artificial Sequence: Synthetic oligonucleotide
  Sense strand starting at position 3203 of SEQ ID NO: 585068
ggagcucacuugucacacu

SEQ ID NO: 610695 - RNA, 19 nt, Artificial Sequence
  Description of Artificial Sequence: Synthetic oligonucleotide
  Antisense strand to SEQ ID NO: 610694
agugugacaagugagcucc

SEQ ID NO: 610696 - RNA, 19 nt, Artificial Sequence
  Description of Artificial Sequence: Synthetic oligonucleotide
  Sense strand starting at position 3256 of SEQ ID NO: 585068
aagggauaugcagaguugu

SEQ ID NO: 610697 - RNA, 19 nt, Artificial Sequence
  Description of Artificial Sequence: Synthetic oligonucleotide
  Antisense strand to SEQ ID NO: 610696
acaacucugcauaucccuu

SEQ ID NO: 610698 - RNA, 19 nt, Artificial Sequence
  Description of Artificial Sequence: Synthetic oligonucleotide
  Sense strand starting at position 3269 of SEQ ID NO: 585068
aguugugaccucuagguau

SEQ ID NO: 610699 - RNA, 19 nt, Artificial Sequence
  Description of Artificial Sequence: Synthetic oligonucleotide
  Antisense strand to SEQ ID NO: 610698
auaccuagaggucacaacu

SEQ ID NO: 610700 - RNA, 19 nt, Artificial Sequence
  Description of Artificial Sequence: Synthetic oligonucleotide
  Sense strand starting at position 3271 of SEQ ID NO: 585068
uugugaccucuagguauua

SEQ ID NO: 610701 - RNA, 19 nt, Artificial Sequence
  Description of Artificial Sequence: Synthetic oligonucleotide
  Antisense strand to SEQ ID NO: 610700
uaauaccuagaggucacaa

SEQ ID NO: 610702 - RNA, 19 nt, Artificial Sequence
  Description of Artificial Sequence: Synthetic oligonucleotide
  Sense strand starting at position 3272 of SEQ ID NO: 585068
ugugaccucuagguauuaa

SEQ ID NO: 610703 - RNA, 19 nt, Artificial Sequence
  Description of Artificial Sequence: Synthetic oligonucleotide
  Antisense strand to SEQ ID NO: 610702
uuaauaccuagaggucaca

SEQ ID NO: 610704 - RNA, 19 nt, Artificial Sequence
  Description of Artificial Sequence: Synthetic oligonucleotide
  Sense strand starting at position 3273 of SEQ ID NO: 585068
gugaccucuagguauuaag

SEQ ID NO: 610705 - RNA, 19 nt, Artificial Sequence
  Description of Artificial Sequence: Synthetic oligonucleotide
  Antisense strand to SEQ ID NO: 610704
cuuaauaccuagaggucac

SEQ ID NO: 610706 - RNA, 19 nt, Artificial Sequence
  Description of Artificial Sequence: Synthetic oligonucleotide
  Sense strand starting at position 3312 of SEQ ID NO: 585068
ggcugucuagggcaggaua

SEQ ID NO: 610707 - RNA, 19 nt, Artificial Sequence
  Description of Artificial Sequence: Synthetic oligonucleotide
  Antisense strand to SEQ ID NO: 610706
uauccugcccuagacagcc

SEQ ID NO: 610708 - RNA, 19 nt, Artificial Sequence
  Description of Artificial Sequence: Synthetic oligonucleotide
  Sense strand starting at position 3320 of SEQ ID NO: 585068
agggcaggauagucaugua

SEQ ID NO: 610709 - RNA, 19 nt, Artificial Sequence
  Description of Artificial Sequence: Synthetic oligonucleotide
  Antisense strand to SEQ ID NO: 610708
uacaugacuauccugcccu

SEQ ID NO: 610710 - RNA, 19 nt, Artificial Sequence
  Description of Artificial Sequence: Synthetic oligonucleotide
  Sense strand starting at position 3773 of SEQ ID NO: 585068
ggucuauucuaagcaggag

SEQ ID NO: 610711 - RNA, 19 nt, Artificial Sequence
  Description of Artificial Sequence: Synthetic oligonucleotide
  Antisense strand to SEQ ID NO: 610710
cuccugcuuagaauagacc

SEQ ID NO: 610712 - RNA, 19 nt, Artificial Sequence
  Description of Artificial Sequence: Synthetic oligonucleotide
  Sense strand starting at position 52 of SEQ ID NO: 585069
ucaagagcuugcccuugau

SEQ ID NO: 610713 - RNA, 19 nt, Artificial Sequence
  Description of Artificial Sequence: Synthetic oligonucleotide
  Antisense strand to SEQ ID NO: 610712
aucaagggcaagcucuuga

SEQ ID NO: 610714 - RNA, 19 nt, Artificial Sequence
  Description of Artificial Sequence: Synthetic oligonucleotide
  Sense strand starting at position 119 of SEQ ID NO: 585069
gagauuuccuuggacuuau

SEQ ID NO: 610715 - RNA, 19 nt, Artificial Sequence
  Description of Artificial Sequence: Synthetic oligonucleotide
  Antisense strand to SEQ ID NO: 610714
auaaguccaaggaaaucuc

SEQ ID NO: 610716 - RNA, 19 nt, Artificial Sequence
  Description of Artificial Sequence: Synthetic oligonucleotide
  Sense strand starting at position 197 of SEQ ID NO: 585069
agagccaguugguccuaaa

SEQ ID NO: 610717 - RNA, 19 nt, Artificial Sequence
  Description of Artificial Sequence: Synthetic oligonucleotide
  Antisense strand to SEQ ID NO: 610716
uuuaggaccaacuggcucu

SEQ ID NO: 610718 - RNA, 19 nt, Artificial Sequence
  Description of Artificial Sequence: Synthetic oligonucleotide
  Sense strand starting at position 295 of SEQ ID NO: 585069
gucauugaaggcugccaaa

SEQ ID NO: 610719 - RNA, 19 nt, Artificial Sequence
  Description of Artificial Sequence: Synthetic oligonucleotide
  Antisense strand to SEQ ID NO: 610718
uuuggcagccuucaaugac

SEQ ID NO: 610720 - RNA, 19 nt, Artificial Sequence
  Description of Artificial Sequence: Synthetic oligonucleotide
  Sense strand starting at position 387 of SEQ ID NO: 585069
acugcauaaucuuugcagu

SEQ ID NO: 610721 - RNA, 19 nt, Artificial Sequence
  Description of Artificial Sequence: Synthetic oligonucleotide
  Antisense strand to SEQ ID NO: 610720
acugcaaagauuaugcagu

SEQ ID NO: 610722 - RNA, 19 nt, Artificial Sequence
  Description of Artificial Sequence: Synthetic oligonucleotide
  Sense strand starting at position 389 of SEQ ID NO: 585069
ugcauaaucuuugcaguua

SEQ ID NO: 610723 - RNA, 19 nt, Artificial Sequence
  Description of Artificial Sequence: Synthetic oligonucleotide
  Antisense strand to SEQ ID NO: 610722
uaacugcaaagauuaugca

SEQ ID NO: 610724 - RNA, 19 nt, Artificial Sequence
  Description of Artificial Sequence: Synthetic oligonucleotide
  Sense strand starting at position 438 of SEQ ID NO: 585069
uugcuuuauuggguuaauu

SEQ ID NO: 610725 - RNA, 19 nt, Artificial Sequence
  Description of Artificial Sequence: Synthetic oligonucleotide
  Antisense strand to SEQ ID NO: 610724
aauuaacccaauaaagcaa

SEQ ID NO: 610726 - RNA, 19 nt, Artificial Sequence
  Description of Artificial Sequence: Synthetic oligonucleotide
  Sense strand starting at position 541 of SEQ ID NO: 585069
aucugugucuuccugaaac

SEQ ID NO: 610727 - RNA, 19 nt, Artificial Sequence
  Description of Artificial Sequence: Synthetic oligonucleotide
  Antisense strand to SEQ ID NO: 610726
guuucaggaagacacagau

SEQ ID NO: 610728 - RNA, 19 nt, Artificial Sequence
  Description of Artificial Sequence: Synthetic oligonucleotide
  Sense strand starting at position 543 of SEQ ID NO: 585069
cugugucuuccugaaaccu

SEQ ID NO: 610729 - RNA, 19 nt, Artificial Sequence
  Description of Artificial Sequence: Synthetic oligonucleotide
  Antisense strand to SEQ ID NO: 610728
agguuucaggaagacacag

SEQ ID NO: 610730 - RNA, 19 nt, Artificial Sequence
  Description of Artificial Sequence: Synthetic oligonucleotide
  Sense strand starting at position 708 of SEQ ID NO: 585069
aagauuaaguggucacaca

SEQ ID NO: 610731 - RNA, 19 nt, Artificial Sequence
  Description of Artificial Sequence: Synthetic oligonucleotide
  Antisense strand to SEQ ID NO: 610730
ugugugaccacuuaaucuu

SEQ ID NO: 610732 - RNA, 19 nt, Artificial Sequence
  Description of Artificial Sequence: Synthetic oligonucleotide
  Sense strand starting at position 1096 of SEQ ID NO: 585069
cagcuuacugccgaggaga

SEQ ID NO: 610733 - RNA, 19 nt, Artificial Sequence
  Description of Artificial Sequence: Synthetic oligonucleotide
  Antisense strand to SEQ ID NO: 610732
ucuccucggcaguaagcug

SEQ ID NO: 610734 - RNA, 19 nt, Artificial Sequence
  Description of Artificial Sequence: Synthetic oligonucleotide
  Sense strand starting at position 1120 of SEQ ID NO: 585069
gcguuacuaauccagagug

SEQ ID NO: 610735 - RNA, 19 nt, Artificial Sequence
  Description of Artificial Sequence: Synthetic oligonucleotide
  Antisense strand to SEQ ID NO: 610734
cacucuggauuaguaacgc

SEQ ID NO: 610736 - RNA, 19 nt, Artificial Sequence
  Description of Artificial Sequence: Synthetic oligonucleotide
  Sense strand starting at position 1165 of SEQ ID NO: 585069
agagaggaguugucggaaa

SEQ ID NO: 610737 - RNA, 19 nt, Artificial Sequence
  Description of Artificial Sequence: Synthetic oligonucleotide
  Antisense strand to SEQ ID NO: 610736
uuuccgacaacuccucucu

SEQ ID NO: 610738 - RNA, 19 nt, Artificial Sequence
  Description of Artificial Sequence: Synthetic oligonucleotide
  Sense strand starting at position 1167 of SEQ ID NO: 585069
agaggaguugucggaaaga

SEQ ID NO: 610739 - RNA, 19 nt, Artificial Sequence
  Description of Artificial Sequence: Synthetic oligonucleotide
  Antisense strand to SEQ ID NO: 610738
ucuuuccgacaacuccucu

SEQ ID NO: 610740 - RNA, 19 nt, Artificial Sequence
  Description of Artificial Sequence: Synthetic oligonucleotide
  Sense strand starting at position 2619 of SEQ ID NO: 585069
gagccugcgcuucuaguua

SEQ ID NO: 610741 - RNA, 19 nt, Artificial Sequence
  Description of Artificial Sequence: Synthetic oligonucleotide
  Antisense strand to SEQ ID NO: 610740
uaacuagaagcgcaggcuc

SEQ ID NO: 610742 - RNA, 19 nt, Artificial Sequence
  Description of Artificial Sequence: Synthetic oligonucleotide
  Sense strand starting at position 2679 of SEQ ID NO: 585069
auuggacuugccugaguau

SEQ ID NO: 610743 - RNA, 19 nt, Artificial Sequence
  Description of Artificial Sequence: Synthetic oligonucleotide
  Antisense strand to SEQ ID NO: 610742
auacucaggcaaguccaau

SEQ ID NO: 610744 - RNA, 19 nt, Artificial Sequence
  Description of Artificial Sequence: Synthetic oligonucleotide
  Sense strand starting at position 2680 of SEQ ID NO: 585069
uuggacuugccugaguauu

SEQ ID NO: 610745 - RNA, 19 nt, Artificial Sequence
  Description of Artificial Sequence: Synthetic oligonucleotide
  Antisense strand to SEQ ID NO: 610744
aauacucaggcaaguccaa

SEQ ID NO: 610746 - RNA, 19 nt, Artificial Sequence
  Description of Artificial Sequence: Synthetic oligonucleotide
  Sense strand starting at position 2682 of SEQ ID NO: 585069
ggacuugccugaguauuac

SEQ ID NO: 610747 - RNA, 19 nt, Artificial Sequence
  Description of Artificial Sequence: Synthetic oligonucleotide
  Antisense strand to SEQ ID NO: 610746
guaauacucaggcaagucc

SEQ ID NO: 610748 - RNA, 19 nt, Artificial Sequence
  Description of Artificial Sequence: Synthetic oligonucleotide
  Sense strand starting at position 3188 of SEQ ID NO: 585069
gcaguagcagagugaguaa

SEQ ID NO: 610749 - RNA, 19 nt, Artificial Sequence
  Description of Artificial Sequence: Synthetic oligonucleotide
  Antisense strand to SEQ ID NO: 610748
uuacucacucugcuacugc

SEQ ID NO: 610750 - RNA, 19 nt, Artificial Sequence
  Description of Artificial Sequence: Synthetic oligonucleotide
  Sense strand starting at position 3255 of SEQ ID NO: 585069
auaguuuccuaauagagag

SEQ ID NO: 610751 - RNA, 19 nt, Artificial Sequence
  Description of Artificial Sequence: Synthetic oligonucleotide
  Antisense strand to SEQ ID NO: 610750
cucucuauuaggaaacuau

SEQ ID NO: 610752 - RNA, 19 nt, Artificial Sequence
  Description of Artificial Sequence: Synthetic oligonucleotide
  Sense strand starting at position 3298 of SEQ ID NO: 585069
uguagcugaagugguaaau

SEQ ID NO: 610753 - RNA, 19 nt, Artificial Sequence
  Description of Artificial Sequence: Synthetic oligonucleotide
  Antisense strand to SEQ ID NO: 610752
auuuaccacuucagcuaca

SEQ ID NO: 610754 - RNA, 19 nt, Artificial Sequence
  Description of Artificial Sequence: Synthetic oligonucleotide
  Sense strand starting at position 3310 of SEQ ID NO: 585069
gguaaauauuaggcauaua

SEQ ID NO: 610755 - RNA, 19 nt, Artificial Sequence
  Description of Artificial Sequence: Synthetic oligonucleotide
  Antisense strand to SEQ ID NO: 610754
uauaugccuaauauuuacc

SEQ ID NO: 610756 - RNA, 19 nt, Artificial Sequence
  Description of Artificial Sequence: Synthetic oligonucleotide
  Sense strand starting at position 3367 of SEQ ID NO: 585069
agguuaaccuagucugaua

SEQ ID NO: 610757 - RNA, 19 nt, Artificial Sequence
  Description of Artificial Sequence: Synthetic oligonucleotide
  Antisense strand to SEQ ID NO: 610756
uaucagacuagguuaaccu

SEQ ID NO: 610758 - RNA, 19 nt, Artificial Sequence
  Description of Artificial Sequence: Synthetic oligonucleotide
  Sense strand starting at position 3369 of SEQ ID NO: 585069
guuaaccuagucugauaaa

SEQ ID NO: 610759 - RNA, 19 nt, Artificial Sequence
  Description of Artificial Sequence: Synthetic oligonucleotide
  Antisense strand to SEQ ID NO: 610758
uuuaucagacuagguuaac

SEQ ID NO: 610760 - RNA, 19 nt, Artificial Sequence
  Description of Artificial Sequence: Synthetic oligonucleotide
  Sense strand starting at position 3394 of SEQ ID NO: 585069
aggagucagcucugccaca

SEQ ID NO: 610761 - RNA, 19 nt, Artificial Sequence
  Description of Artificial Sequence: Synthetic oligonucleotide
  Antisense strand to SEQ ID NO: 610760
uguggcagagcugacuccu

SEQ ID NO: 610762 - RNA, 19 nt, Artificial Sequence
  Description of Artificial Sequence: Synthetic oligonucleotide
  Sense strand starting at position 3395 of SEQ ID NO: 585069
ggagucagcucugccacau

SEQ ID NO: 610763 - RNA, 19 nt, Artificial Sequence
  Description of Artificial Sequence: Synthetic oligonucleotide
  Antisense strand to SEQ ID NO: 610762
auguggcagagcugacucc

SEQ ID NO: 610764 - RNA, 19 nt, Artificial Sequence
  Description of Artificial Sequence: Synthetic oligonucleotide
  Sense strand starting at position 3430 of SEQ ID NO: 585069
uggguugguuaccuaaacu

SEQ ID NO: 610765 - RNA, 19 nt, Artificial Sequence
  Description of Artificial Sequence: Synthetic oligonucleotide
  Antisense strand to SEQ ID NO: 610764
aguuuagguaaccaaccca

SEQ ID NO: 610766 - RNA, 19 nt, Artificial Sequence
  Description of Artificial Sequence: Synthetic oligonucleotide
  Sense strand starting at position 3462 of SEQ ID NO: 585069
uuuccugauuuacgaauuu

SEQ ID NO: 610767 - RNA, 19 nt, Artificial Sequence
  Description of Artificial Sequence: Synthetic oligonucleotide
  Antisense strand to SEQ ID NO: 610766
aaauucguaaaucaggaaa

SEQ ID NO: 610768 - RNA, 19 nt, Artificial Sequence
  Description of Artificial Sequence: Synthetic oligonucleotide
  Sense strand starting at position 3510 of SEQ ID NO: 585069
agcuguuaggguuaaauua

SEQ ID NO: 610769 - RNA, 19 nt, Artificial Sequence
  Description of Artificial Sequence: Synthetic oligonucleotide
  Antisense strand to SEQ ID NO: 610768
uaauuuaacccuaacagcu

SEQ ID NO: 610770 - RNA, 19 nt, Artificial Sequence
  Description of Artificial Sequence: Synthetic oligonucleotide
  Sense strand starting at position 3582 of SEQ ID NO: 585069
uguuaucaauuugaugcau

SEQ ID NO: 610771 - RNA, 19 nt, Artificial Sequence
  Description of Artificial Sequence: Synthetic oligonucleotide
  Antisense strand to SEQ ID NO: 610770
augcaucaaauugauaaca

SEQ ID NO: 610772 - RNA, 19 nt, Artificial Sequence
  Description of Artificial Sequence: Synthetic oligonucleotide
  Sense strand starting at position 3591 of SEQ ID NO: 585069
uuugaugcauuugagaauc

SEQ ID NO: 610773 - RNA, 19 nt, Artificial Sequence
  Description of Artificial Sequence: Synthetic oligonucleotide
  Antisense strand to SEQ ID NO: 610772
gauucucaaaugcaucaaa

SEQ ID NO: 610774 - RNA, 19 nt, Artificial Sequence
  Description of Artificial Sequence: Synthetic oligonucleotide
  Sense strand starting at position 3607 of SEQ ID NO: 585069
aucagaaagugauauucua

SEQ ID NO: 610775 - RNA, 19 nt, Artificial Sequence
  Description of Artificial Sequence: Synthetic oligonucleotide
  Antisense strand to SEQ ID NO: 610774
uagaauaucacuuucugau

SEQ ID NO: 610776 - RNA, 19 nt, Artificial Sequence
  Description of Artificial Sequence: Synthetic oligonucleotide
  Sense strand starting at position 3623 of SEQ ID NO: 585069
cuauuuaaugcuggcauau

SEQ ID NO: 610777 - RNA, 19 nt, Artificial Sequence
  Description of Artificial Sequence: Synthetic oligonucleotide
  Antisense strand to SEQ ID NO: 610776
auaugccagcauuaaauag

SEQ ID NO: 610778 - RNA, 19 nt, Artificial Sequence
  Description of Artificial Sequence: Synthetic oligonucleotide
  Sense strand starting at position 3625 of SEQ ID NO: 585069
auuuaaugcuggcauauuu

SEQ ID NO: 610779 - RNA, 19 nt, Artificial Sequence
  Description of Artificial Sequence: Synthetic oligonucleotide
  Antisense strand to SEQ ID NO: 610778
aaauaugccagcauuaaau

SEQ ID NO: 610780 - RNA, 19 nt, Artificial Sequence
  Description of Artificial Sequence: Synthetic oligonucleotide
  Sense strand starting at position 3827 of SEQ ID NO: 585069
uuaugauauugagagacuu

SEQ ID NO: 610781 - RNA, 19 nt, Artificial Sequence
  Description of Artificial Sequence: Synthetic oligonucleotide
  Antisense strand to SEQ ID NO: 610780
aagucucucaauaucauaa

SEQ ID NO: 610782 - RNA, 19 nt, Artificial Sequence
  Description of Artificial Sequence: Synthetic oligonucleotide
  Sense strand starting at position 3917 of SEQ ID NO: 585069
uguguucuuucuucuauuu

SEQ ID NO: 610783 - RNA, 19 nt, Artificial Sequence
  Description of Artificial Sequence: Synthetic oligonucleotide
  Antisense strand to SEQ ID NO: 610782
aaauagaagaaagaacaca

SEQ ID NO: 610784 - RNA, 19 nt, Artificial Sequence
  Description of Artificial Sequence: Synthetic oligonucleotide
  Sense strand starting at position 3919 of SEQ ID NO: 585069
uguucuuucuucuauuuga

SEQ ID NO: 610785 - RNA, 19 nt, Artificial Sequence
  Description of Artificial Sequence: Synthetic oligonucleotide
  Antisense strand to SEQ ID NO: 610784
ucaaauagaagaaagaaca

SEQ ID NO: 610786 - RNA, 19 nt, Artificial Sequence
  Description of Artificial Sequence: Synthetic oligonucleotide
  Sense strand starting at position 3929 of SEQ ID NO: 585069
ucuauuugauacguguuau

SEQ ID NO: 610787 - RNA, 19 nt, Artificial Sequence
  Description of Artificial Sequence: Synthetic oligonucleotide
  Antisense strand to SEQ ID NO: 610786
auaacacguaucaaauaga

SEQ ID NO: 610788 - RNA, 19 nt, Artificial Sequence
  Description of Artificial Sequence: Synthetic oligonucleotide
  Sense strand starting at position 3935 of SEQ ID NO: 585069
ugauacguguuauauuuga

SEQ ID NO: 610789 - RNA, 19 nt, Artificial Sequence
  Description of Artificial Sequence: Synthetic oligonucleotide
  Antisense strand to SEQ ID NO: 610788
ucaaauauaacacguauca

SEQ ID NO: 610790 - RNA, 19 nt, Artificial Sequence
  Description of Artificial Sequence: Synthetic oligonucleotide
  Sense strand starting at position 3939 of SEQ ID NO: 585069
acguguuauauuugaaagc

SEQ ID NO: 610791 - RNA, 19 nt, Artificial Sequence
  Description of Artificial Sequence: Synthetic oligonucleotide
  Antisense strand to SEQ ID NO: 610790
gcuuucaaauauaacacgu

SEQ ID NO: 610792 - RNA, 19 nt, Artificial Sequence
  Description of Artificial Sequence: Synthetic oligonucleotide
  Sense strand starting at position 44 of SEQ ID NO: 585070
uaaagaacuugucugaugu

SEQ ID NO: 610793 - RNA, 19 nt, Artificial Sequence
  Description of Artificial Sequence: Synthetic oligonucleotide
  Antisense strand to SEQ ID NO: 610792
acaucagacaaguucuuua

SEQ ID NO: 610794 - RNA, 19 nt, Artificial Sequence
  Description of Artificial Sequence: Synthetic oligonucleotide
  Sense strand starting at position 45 of SEQ ID NO: 585070
aaagaacuugucugauguu

SEQ ID NO: 610795 - RNA, 19 nt, Artificial Sequence
  Description of Artificial Sequence: Synthetic oligonucleotide
  Antisense strand to SEQ ID NO: 610794
aacaucagacaaguucuuu

SEQ ID NO: 610796 - RNA, 19 nt, Artificial Sequence
  Description of Artificial Sequence: Synthetic oligonucleotide
  Sense strand starting at position 84 of SEQ ID NO: 585070
augggaagcccugaugcaa

SEQ ID NO: 610797 - RNA, 19 nt, Artificial Sequence
  Description of Artificial Sequence: Synthetic oligonucleotide
  Antisense strand to SEQ ID NO: 610796
uugcaucagggcuucccau

SEQ ID NO: 610798 - RNA, 19 nt, Artificial Sequence
  Description of Artificial Sequence: Synthetic oligonucleotide
  Sense strand starting at position 95 of SEQ ID NO: 585070
ugaugcaacguuuaaagaa

SEQ ID NO: 610799 - RNA, 19 nt, Artificial Sequence
  Description of Artificial Sequence: Synthetic oligonucleotide
  Antisense strand to SEQ ID NO: 610798
uucuuuaaacguugcauca

SEQ ID NO: 610800 - RNA, 19 nt, Artificial Sequence
  Description of Artificial Sequence: Synthetic oligonucleotide
  Sense strand starting at position 103 of SEQ ID NO: 585070
cguuuaaagaaccgaaauc

SEQ ID NO: 610801 - RNA, 19 nt, Artificial Sequence
  Description of Artificial Sequence: Synthetic oligonucleotide
  Antisense strand to SEQ ID NO: 610800
gauuucgguucuuuaaacg

SEQ ID NO: 610802 - RNA, 19 nt, Artificial Sequence
  Description of Artificial Sequence: Synthetic oligonucleotide
  Sense strand starting at position 113 of SEQ ID NO: 585070
accgaaaucacagacguga

SEQ ID NO: 610803 - RNA, 19 nt, Artificial Sequence
  Description of Artificial Sequence: Synthetic oligonucleotide
  Antisense strand to SEQ ID NO: 610802
ucacgucugugauuucggu

SEQ ID NO: 610804 - RNA, 19 nt, Artificial Sequence
  Description of Artificial Sequence: Synthetic oligonucleotide
  Sense strand starting at position 171 of SEQ ID NO: 585070
guaacaucaguguaauagc

SEQ ID NO: 610805 - RNA, 19 nt, Artificial Sequence
  Description of Artificial Sequence: Synthetic oligonucleotide
  Antisense strand to SEQ ID NO: 610804
gcuauuacacugauguuac

SEQ ID NO: 610806 - RNA, 19 nt, Artificial Sequence
  Description of Artificial Sequence: Synthetic oligonucleotide
  Sense strand starting at position 181 of SEQ ID NO: 585070
uguaauagcgcauagaaac

SEQ ID NO: 610807 - RNA, 19 nt, Artificial Sequence
  Description of Artificial Sequence: Synthetic oligonucleotide
  Antisense strand to SEQ ID NO: 610806
guuucuaugcgcuauuaca

SEQ ID NO: 610808 - RNA, 19 nt, Artificial Sequence
  Description of Artificial Sequence: Synthetic oligonucleotide
  Sense strand starting at position 327 of SEQ ID NO: 585070
uaaagaagugaaugcagua

SEQ ID NO: 610809 - RNA, 19 nt, Artificial Sequence
  Description of Artificial Sequence: Synthetic oligonucleotide
  Antisense strand to SEQ ID NO: 610808
uacugcauucacuucuuua

SEQ ID NO: 610810 - RNA, 19 nt, Artificial Sequence
  Description of Artificial Sequence: Synthetic oligonucleotide
  Sense strand starting at position 332 of SEQ ID NO: 585070
aagugaaugcaguauuaau

SEQ ID NO: 610811 - RNA, 19 nt, Artificial Sequence
  Description of Artificial Sequence: Synthetic oligonucleotide
  Antisense strand to SEQ ID NO: 610810
auuaauacugcauucacuu

SEQ ID NO: 610812 - RNA, 19 nt, Artificial Sequence
  Description of Artificial Sequence: Synthetic oligonucleotide
  Sense strand starting at position 522 of SEQ ID NO: 585070
gagucauaagauggaacgu

SEQ ID NO: 610813 - RNA, 19 nt, Artificial Sequence
  Description of Artificial Sequence: Synthetic oligonucleotide
  Antisense strand to SEQ ID NO: 610812
acguuccaucuuaugacuc

SEQ ID NO: 610814 - RNA, 19 nt, Artificial Sequence
  Description of Artificial Sequence: Synthetic oligonucleotide
  Sense strand starting at position 724 of SEQ ID NO: 585070
acaguuggacgcuaggaaa

SEQ ID NO: 610815 - RNA, 19 nt, Artificial Sequence
  Description of Artificial Sequence: Synthetic oligonucleotide
  Antisense strand to SEQ ID NO: 610814
uuuccuagcguccaacugu

SEQ ID NO: 610816 - RNA, 19 nt, Artificial Sequence
  Description of Artificial Sequence: Synthetic oligonucleotide
  Sense strand starting at position 735 of SEQ ID NO: 585070
cuaggaaagcugcauaaau

SEQ ID NO: 610817 - RNA, 19 nt, Artificial Sequence
  Description of Artificial Sequence: Synthetic oligonucleotide
  Antisense strand to SEQ ID NO: 610816
auuuaugcagcuuuccuag

SEQ ID NO: 610818 - RNA, 19 nt, Artificial Sequence
  Description of Artificial Sequence: Synthetic oligonucleotide
  Sense strand starting at position 1393 of SEQ ID NO: 585070
ggccuuaacauucggauca

SEQ ID NO: 610819 - RNA, 19 nt, Artificial Sequence
  Description of Artificial Sequence: Synthetic oligonucleotide
  Antisense strand to SEQ ID NO: 610818
ugauccgaauguuaaggcc

SEQ ID NO: 610820 - RNA, 19 nt, Artificial Sequence
  Description of Artificial Sequence: Synthetic oligonucleotide
  Sense strand starting at position 2173 of SEQ ID NO: 585070
cgcacaagucgccucauua

SEQ ID NO: 610821 - RNA, 19 nt, Artificial Sequence
  Description of Artificial Sequence: Synthetic oligonucleotide
  Antisense strand to SEQ ID NO: 610820
uaaugaggcgacuugugcg

SEQ ID NO: 610822 - RNA, 19 nt, Artificial Sequence
  Description of Artificial Sequence: Synthetic oligonucleotide
  Sense strand starting at position 2271 of SEQ ID NO: 585070
cggauacguccugggaaac

SEQ ID NO: 610823 - RNA, 19 nt, Artificial Sequence
  Description of Artificial Sequence: Synthetic oligonucleotide
  Antisense strand to SEQ ID NO: 610822
guuucccaggacguauccg

SEQ ID NO: 610824 - RNA, 19 nt, Artificial Sequence
  Description of Artificial Sequence: Synthetic oligonucleotide
  Sense strand starting at position 2272 of SEQ ID NO: 585070
ggauacguccugggaaaca

SEQ ID NO: 610825 - RNA, 19 nt, Artificial Sequence
  Description of Artificial Sequence: Synthetic oligonucleotide
  Antisense strand to SEQ ID NO: 610824
uguuucccaggacguaucc

SEQ ID NO: 610826 - RNA, 19 nt, Artificial Sequence
  Description of Artificial Sequence: Synthetic oligonucleotide
  Sense strand starting at position 2412 of SEQ ID NO: 585070
gccugucaccaugacaaga

SEQ ID NO: 610827 - RNA, 19 nt, Artificial Sequence
  Description of Artificial Sequence: Synthetic oligonucleotide
  Antisense strand to SEQ ID NO: 610826
ucuugucauggugacaggc

SEQ ID NO: 610828 - RNA, 19 nt, Artificial Sequence
  Description of Artificial Sequence: Synthetic oligonucleotide
  Sense strand starting at position 2452 of SEQ ID NO: 585070
ugaagaagugaaggguauu

SEQ ID NO: 610829 - RNA, 19 nt, Artificial Sequence
  Description of Artificial Sequence: Synthetic oligonucleotide
  Antisense strand to SEQ ID NO: 610828
aauacccuucacuucuuca

SEQ ID NO: 610830 - RNA, 19 nt, Artificial Sequence
  Description of Artificial Sequence: Synthetic oligonucleotide
  Sense strand starting at position 2531 of SEQ ID NO: 585070
auauaauugcaugaaugcu

SEQ ID NO: 610831 - RNA, 19 nt, Artificial Sequence
  Description of Artificial Sequence: Synthetic oligonucleotide
  Antisense strand to SEQ ID NO: 610830
agcauucaugcaauuauau

SEQ ID NO: 610832 - RNA, 19 nt, Artificial Sequence
  Description of Artificial Sequence: Synthetic oligonucleotide
  Sense strand starting at position 2608 of SEQ ID NO: 585070
gcuaaauuaggccauuagu

SEQ ID NO: 610833 - RNA, 19 nt, Artificial Sequence
  Description of Artificial Sequence: Synthetic oligonucleotide
  Antisense strand to SEQ ID NO: 610832
acuaauggccuaauuuagc

SEQ ID NO: 610834 - RNA, 19 nt, Artificial Sequence
  Description of Artificial Sequence: Synthetic oligonucleotide
  Sense strand starting at position 2611 of SEQ ID NO: 585070
aaauuaggccauuaguagu

SEQ ID NO: 610835 - RNA, 19 nt, Artificial Sequence
  Description of Artificial Sequence: Synthetic oligonucleotide
  Antisense strand to SEQ ID NO: 610834
acuacuaauggccuaauuu

SEQ ID NO: 610836 - RNA, 19 nt, Artificial Sequence
  Description of Artificial Sequence: Synthetic oligonucleotide
  Sense strand starting at position 2851 of SEQ ID NO: 585070
uuugaugguuucucacaua

SEQ ID NO: 610837 - RNA, 19 nt, Artificial Sequence
  Description of Artificial Sequence: Synthetic oligonucleotide
  Antisense strand to SEQ ID NO: 610836
uaugugagaaaccaucaaa

SEQ ID NO: 610838 - RNA, 19 nt, Artificial Sequence
  Description of Artificial Sequence: Synthetic oligonucleotide
  Sense strand starting at position 2970 of SEQ ID NO: 585070
uuuaaagaccagugaguca

SEQ ID NO: 610839 - RNA, 19 nt, Artificial Sequence
  Description of Artificial Sequence: Synthetic oligonucleotide
  Antisense strand to SEQ ID NO: 610838
ugacucacuggucuuuaaa

SEQ ID NO: 610840 - RNA, 19 nt, Artificial Sequence
  Description of Artificial Sequence: Synthetic oligonucleotide
  Sense strand starting at position 3018 of SEQ ID NO: 585070
uguuaaugugaauacuauc

SEQ ID NO: 610841 - RNA, 19 nt, Artificial Sequence
  Description of Artificial Sequence: Synthetic oligonucleotide
  Antisense strand to SEQ ID NO: 610840
gauaguauucacauuaaca

SEQ ID NO: 610842 - RNA, 19 nt, Artificial Sequence
  Description of Artificial Sequence: Synthetic oligonucleotide
  Sense strand starting at position 3063 of SEQ ID NO: 585070
cccaauugaccugguuaua

SEQ ID NO: 610843 - RNA, 19 nt, Artificial Sequence
  Description of Artificial Sequence: Synthetic oligonucleotide
  Antisense strand to SEQ ID NO: 610842
uauaaccaggucaauuggg

SEQ ID NO: 610844 - RNA, 19 nt, Artificial Sequence
  Description of Artificial Sequence: Synthetic oligonucleotide
  Sense strand starting at position 3135 of SEQ ID NO: 585070
uugcuugaugaguaccuaa

SEQ ID NO: 610845 - RNA, 19 nt, Artificial Sequence
  Description of Artificial Sequence: Synthetic oligonucleotide
  Antisense strand to SEQ ID NO: 610844
uuagguacucaucaagcaa

SEQ ID NO: 610846 - RNA, 19 nt, Artificial Sequence
  Description of Artificial Sequence: Synthetic oligonucleotide
  Sense strand starting at position 3227 of SEQ ID NO: 585070
ggauuauugugaguggcag

SEQ ID NO: 610847 - RNA, 19 nt, Artificial Sequence
  Description of Artificial Sequence: Synthetic oligonucleotide
  Antisense strand to SEQ ID NO: 610846
cugccacucacaauaaucc

SEQ ID NO: 610848 - RNA, 19 nt, Artificial Sequence
  Description of Artificial Sequence: Synthetic oligonucleotide
  Sense strand starting at position 3245 of SEQ ID NO: 585070
ggaacuuuauugccgaacu

SEQ ID NO: 610849 - RNA, 19 nt, Artificial Sequence
  Description of Artificial Sequence: Synthetic oligonucleotide
  Antisense strand to SEQ ID NO: 610848
aguucggcaauaaaguucc

SEQ ID NO: 610850 - RNA, 19 nt, Artificial Sequence
  Description of Artificial Sequence: Synthetic oligonucleotide
  Sense strand starting at position 3397 of SEQ ID NO: 585070
ccuaaauuauguguaacag

SEQ ID NO: 610851 - RNA, 19 nt, Artificial Sequence
  Description of Artificial Sequence: Synthetic oligonucleotide
  Antisense strand to SEQ ID NO: 610850
cuguuacacauaauuuagg

SEQ ID NO: 610852 - RNA, 19 nt, Artificial Sequence
  Description of Artificial Sequence: Synthetic oligonucleotide
  Sense strand starting at position 3414 of SEQ ID NO: 585070
agauucuaguagcuauaua

SEQ ID NO: 610853 - RNA, 19 nt, Artificial Sequence
  Description of Artificial Sequence: Synthetic oligonucleotide
  Antisense strand to SEQ ID NO: 610852
uauauagcuacuagaaucu

SEQ ID NO: 610854 - RNA, 19 nt, Artificial Sequence
  Description of Artificial Sequence: Synthetic oligonucleotide
  Sense strand starting at position 3502 of SEQ ID NO: 585070
ucuaacaaaguucggauua

SEQ ID NO: 610855 - RNA, 19 nt, Artificial Sequence
  Description of Artificial Sequence: Synthetic oligonucleotide
  Antisense strand to SEQ ID NO: 610854
uaauccgaacuuuguuaga

SEQ ID NO: 610856 - RNA, 19 nt, Artificial Sequence
  Description of Artificial Sequence: Synthetic oligonucleotide
  Sense strand starting at position 3735 of SEQ ID NO: 585070
gccagucacguauaagaaa

SEQ ID NO: 610857 - RNA, 19 nt, Artificial Sequence
  Description of Artificial Sequence: Synthetic oligonucleotide
  Antisense strand to SEQ ID NO: 610856
uuucuuauacgugacuggc

SEQ ID NO: 610858 - RNA, 19 nt, Artificial Sequence
  Description of Artificial Sequence: Synthetic oligonucleotide
  Sense strand starting at position 3812 of SEQ ID NO: 585070
acacuccaccuguaagagu

SEQ ID NO: 610859 - RNA, 19 nt, Artificial Sequence
  Description of Artificial Sequence: Synthetic oligonucleotide
  Antisense strand to SEQ ID NO: 610858
acucuuacagguggagugu

SEQ ID NO: 610860 - RNA, 19 nt, Artificial Sequence
  Description of Artificial Sequence: Synthetic oligonucleotide
  Sense strand starting at position 3820 of SEQ ID NO: 585070
ccuguaagaguagaauguu

SEQ ID NO: 610861 - RNA, 19 nt, Artificial Sequence
  Description of Artificial Sequence: Synthetic oligonucleotide
  Antisense strand to SEQ ID NO: 610860
aacauucuacucuuacagg

SEQ ID NO: 610862 - RNA, 19 nt, Artificial Sequence
  Description of Artificial Sequence: Synthetic oligonucleotide
  Sense strand starting at position 3823 of SEQ ID NO: 585070
guaagaguagaauguuuau

SEQ ID NO: 610863 - RNA, 19 nt, Artificial Sequence
  Description of Artificial Sequence: Synthetic oligonucleotide
  Antisense strand to SEQ ID NO: 610862
auaaacauucuacucuuac

SEQ ID NO: 610864 - RNA, 19 nt, Artificial Sequence
  Description of Artificial Sequence: Synthetic oligonucleotide
  Sense strand starting at position 3905 of SEQ ID NO: 585070
acccuauuaccuggcauga

SEQ ID NO: 610865 - RNA, 19 nt, Artificial Sequence
  Description of Artificial Sequence: Synthetic oligonucleotide
  Antisense strand to SEQ ID NO: 610864
ucaugccagguaauagggu

SEQ ID NO: 610866 - RNA, 19 nt, Artificial Sequence
  Description of Artificial Sequence: Synthetic oligonucleotide
  Sense strand starting at position 3920 of SEQ ID NO: 585070
augaauaagugguuuguaa

SEQ ID NO: 610867 - RNA, 19 nt, Artificial Sequence
  Description of Artificial Sequence: Synthetic oligonucleotide
  Antisense strand to SEQ ID NO: 610866
uuacaaaccacuuauucau

SEQ ID NO: 610868 - RNA, 19 nt, Artificial Sequence
  Description of Artificial Sequence: Synthetic oligonucleotide
  Sense strand starting at position 3922 of SEQ ID NO: 585070
gaauaagugguuuguaaau

SEQ ID NO: 610869 - RNA, 19 nt, Artificial Sequence
  Description of Artificial Sequence: Synthetic oligonucleotide
  Antisense strand to SEQ ID NO: 610868
auuuacaaaccacuuauuc

SEQ ID NO: 610870 - RNA, 19 nt, Artificial Sequence
  Description of Artificial Sequence: Synthetic oligonucleotide
  Sense strand starting at position 3928 of SEQ ID NO: 585070
gugguuuguaaauaccagu

SEQ ID NO: 610871 - RNA, 19 nt, Artificial Sequence
  Description of Artificial Sequence: Synthetic oligonucleotide
  Antisense strand to SEQ ID NO: 610870
acugguauuuacaaaccac

SEQ ID NO: 610872 - RNA, 19 nt, Artificial Sequence
  Description of Artificial Sequence: Synthetic oligonucleotide
  Sense strand starting at position 141 of SEQ ID NO: 585071
ugcagagcuuuccuggaga

SEQ ID NO: 610873 - RNA, 19 nt, Artificial Sequence
  Description of Artificial Sequence: Synthetic oligonucleotide
  Antisense strand to SEQ ID NO: 610872
ucuccaggaaagcucugca

SEQ ID NO: 610874 - RNA, 19 nt, Artificial Sequence
  Description of Artificial Sequence: Synthetic oligonucleotide
  Sense strand starting at position 143 of SEQ ID NO: 585071
cagagcuuuccuggagaau

SEQ ID NO: 610875 - RNA, 19 nt, Artificial Sequence
  Description of Artificial Sequence: Synthetic oligonucleotide
  Antisense strand to SEQ ID NO: 610874
auucuccaggaaagcucug

SEQ ID NO: 610876 - RNA, 19 nt, Artificial Sequence
  Description of Artificial Sequence: Synthetic oligonucleotide
  Sense strand starting at position 262 of SEQ ID NO: 585071
uguuucuaucuguagauuc

SEQ ID NO: 610877 - RNA, 19 nt, Artificial Sequence
  Description of Artificial Sequence: Synthetic oligonucleotide
  Antisense strand to SEQ ID NO: 610876
gaaucuacagauagaaaca

SEQ ID NO: 610878 - RNA, 19 nt, Artificial Sequence
  Description of Artificial Sequence: Synthetic oligonucleotide
  Sense strand starting at position 273 of SEQ ID NO: 585071
guagauucugcacgaaaug

SEQ ID NO: 610879 - RNA, 19 nt, Artificial Sequence
  Description of Artificial Sequence: Synthetic oligonucleotide
  Antisense strand to SEQ ID NO: 610878
cauuucgugcagaaucuac

SEQ ID NO: 610880 - RNA, 19 nt, Artificial Sequence
  Description of Artificial Sequence: Synthetic oligonucleotide
  Sense strand starting at position 335 of SEQ ID NO: 585071
guuaucugccaagcgguua

SEQ ID NO: 610881 - RNA, 19 nt, Artificial Sequence
  Description of Artificial Sequence: Synthetic oligonucleotide
  Antisense strand to SEQ ID NO: 610880
uaaccgcuuggcagauaac

SEQ ID NO: 610882 - RNA, 19 nt, Artificial Sequence
  Description of Artificial Sequence: Synthetic oligonucleotide
  Sense strand starting at position 348 of SEQ ID NO: 585071
cgguuaggagaaugaguua

SEQ ID NO: 610883 - RNA, 19 nt, Artificial Sequence
  Description of Artificial Sequence: Synthetic oligonucleotide
  Antisense strand to SEQ ID NO: 610882
uaacucauucuccuaaccg

SEQ ID NO: 610884 - RNA, 19 nt, Artificial Sequence
  Description of Artificial Sequence: Synthetic oligonucleotide
  Sense strand starting at position 396 of SEQ ID NO: 585071
cguacaauucuaugaagca

SEQ ID NO: 610885 - RNA, 19 nt, Artificial Sequence
  Description of Artificial Sequence: Synthetic oligonucleotide
  Antisense strand to SEQ ID NO: 610884
ugcuucauagaauuguacg

SEQ ID NO: 610886 - RNA, 19 nt, Artificial Sequence
  Description of Artificial Sequence: Synthetic oligonucleotide
  Sense strand starting at position 489 of SEQ ID NO: 585071
gguuccucagucuagcuaa

SEQ ID NO: 610887 - RNA, 19 nt, Artificial Sequence
  Description of Artificial Sequence: Synthetic oligonucleotide
  Antisense strand to SEQ ID NO: 610886
uuagcuagacugaggaacc

SEQ ID NO: 610888 - RNA, 19 nt, Artificial Sequence
  Description of Artificial Sequence: Synthetic oligonucleotide
  Sense strand starting at position 960 of SEQ ID NO: 585071
ccucaucccucccugagua

SEQ ID NO: 610889 - RNA, 19 nt, Artificial Sequence
  Description of Artificial Sequence: Synthetic oligonucleotide
  Antisense strand to SEQ ID NO: 610888
uacucagggagggaugagg

SEQ ID NO: 610890 - RNA, 19 nt, Artificial Sequence
  Description of Artificial Sequence: Synthetic oligonucleotide
  Sense strand starting at position 987 of SEQ ID NO: 585071
ugccguugucugguuucaa

SEQ ID NO: 610891 - RNA, 19 nt, Artificial Sequence
  Description of Artificial Sequence: Synthetic oligonucleotide
  Antisense strand to SEQ ID NO: 610890
uugaaaccagacaacggca

SEQ ID NO: 610892 - RNA, 19 nt, Artificial Sequence
  Description of Artificial Sequence: Synthetic oligonucleotide
  Sense strand starting at position 1610 of SEQ ID NO: 585071
cgaaguuucccggagcuga

SEQ ID NO: 610893 - RNA, 19 nt, Artificial Sequence
  Description of Artificial Sequence: Synthetic oligonucleotide
  Antisense strand to SEQ ID NO: 610892
ucagcuccgggaaacuucg

SEQ ID NO: 610894 - RNA, 19 nt, Artificial Sequence
  Description of Artificial Sequence: Synthetic oligonucleotide
  Sense strand starting at position 1851 of SEQ ID NO: 585071
ggaugaaucaagcgcuaug

SEQ ID NO: 610895 - RNA, 19 nt, Artificial Sequence
  Description of Artificial Sequence: Synthetic oligonucleotide
  Antisense strand to SEQ ID NO: 610894
cauagcgcuugauucaucc

SEQ ID NO: 610896 - RNA, 19 nt, Artificial Sequence
  Description of Artificial Sequence: Synthetic oligonucleotide
  Sense strand starting at position 1887 of SEQ ID NO: 585071
agccaaucgcgggacaaua

SEQ ID NO: 610897 - RNA, 19 nt, Artificial Sequence
  Description of Artificial Sequence: Synthetic oligonucleotide
  Antisense strand to SEQ ID NO: 610896
uauugucccgcgauuggcu

SEQ ID NO: 610898 - RNA, 19 nt, Artificial Sequence
  Description of Artificial Sequence: Synthetic oligonucleotide
  Sense strand starting at position 1904 of SEQ ID NO: 585071
uagaacuuucgugaucgua

SEQ ID NO: 610899 - RNA, 19 nt, Artificial Sequence
  Description of Artificial Sequence: Synthetic oligonucleotide
  Antisense strand to SEQ ID NO: 610898
uacgaucacgaaaguucua

SEQ ID NO: 610900 - RNA, 19 nt, Artificial Sequence
  Description of Artificial Sequence: Synthetic oligonucleotide
  Sense strand starting at position 2116 of SEQ ID NO: 585071
gccgcauuuggguggcaga

SEQ ID NO: 610901 - RNA, 19 nt, Artificial Sequence
  Description of Artificial Sequence: Synthetic oligonucleotide
  Antisense strand to SEQ ID NO: 610900
ucugccacccaaaugcggc

SEQ ID NO: 610902 - RNA, 19 nt, Artificial Sequence
  Description of Artificial Sequence: Synthetic oligonucleotide
  Sense strand starting at position 2117 of SEQ ID NO: 585071
ccgcauuuggguggcagaa

SEQ ID NO: 610903 - RNA, 19 nt, Artificial Sequence
  Description of Artificial Sequence: Synthetic oligonucleotide
  Antisense strand to SEQ ID NO: 610902
uucugccacccaaaugcgg

SEQ ID NO: 610904 - RNA, 19 nt, Artificial Sequence
  Description of Artificial Sequence: Synthetic oligonucleotide
  Sense strand starting at position 2148 of SEQ ID NO: 585071
uacggucuccucuaugagu

SEQ ID NO: 610905 - RNA, 19 nt, Artificial Sequence
  Description of Artificial Sequence: Synthetic oligonucleotide
  Antisense strand to SEQ ID NO: 610904
acucauagaggagaccgua

SEQ ID NO: 610906 - RNA, 19 nt, Artificial Sequence
  Description of Artificial Sequence: Synthetic oligonucleotide
  Sense strand starting at position 2245 of SEQ ID NO: 585071
ucugcaguugaacaagaua

SEQ ID NO: 610907 - RNA, 19 nt, Artificial Sequence
  Description of Artificial Sequence: Synthetic oligonucleotide
  Antisense strand to SEQ ID NO: 610906
uaucuuguucaacugcaga

SEQ ID NO: 610908 - RNA, 19 nt, Artificial Sequence
  Description of Artificial Sequence: Synthetic oligonucleotide
  Sense strand starting at position 2399 of SEQ ID NO: 585071
ucuaaaggauuguuaaaug

SEQ ID NO: 610909 - RNA, 19 nt, Artificial Sequence
  Description of Artificial Sequence: Synthetic oligonucleotide
  Antisense strand to SEQ ID NO: 610908
cauuuaacaauccuuuaga

SEQ ID NO: 610910 - RNA, 19 nt, Artificial Sequence
  Description of Artificial Sequence: Synthetic oligonucleotide
  Sense strand starting at position 2641 of SEQ ID NO: 585071
accuaacagucggcuauuu

SEQ ID NO: 610911 - RNA, 19 nt, Artificial Sequence
  Description of Artificial Sequence: Synthetic oligonucleotide
  Antisense strand to SEQ ID NO: 610910
aaauagccgacuguuaggu

SEQ ID NO: 610912 - RNA, 19 nt, Artificial Sequence
  Description of Artificial Sequence: Synthetic oligonucleotide
  Sense strand starting at position 2976 of SEQ ID NO: 585071
gagccuggccggcaaauuu

SEQ ID NO: 610913 - RNA, 19 nt, Artificial Sequence
  Description of Artificial Sequence: Synthetic oligonucleotide
  Antisense strand to SEQ ID NO: 610912
aaauuugccggccaggcuc

SEQ ID NO: 610914 - RNA, 19 nt, Artificial Sequence
  Description of Artificial Sequence: Synthetic oligonucleotide
  Sense strand starting at position 3053 of SEQ ID NO: 585071
gggccauugcaauaggaau

SEQ ID NO: 610915 - RNA, 19 nt, Artificial Sequence
  Description of Artificial Sequence: Synthetic oligonucleotide
  Antisense strand to SEQ ID NO: 610914
auuccuauugcaauggccc

SEQ ID NO: 610916 - RNA, 19 nt, Artificial Sequence
  Description of Artificial Sequence: Synthetic oligonucleotide
  Sense strand starting at position 3061 of SEQ ID NO: 585071
gcaauaggaaugcaaguau

SEQ ID NO: 610917 - RNA, 19 nt, Artificial Sequence
  Description of Artificial Sequence: Synthetic oligonucleotide
  Antisense strand to SEQ ID NO: 610916
auacuugcauuccuauugc

SEQ ID NO: 610918 - RNA, 19 nt, Artificial Sequence
  Description of Artificial Sequence: Synthetic oligonucleotide
  Sense strand starting at position 3076 of SEQ ID NO: 585071
guauacaaaccauguacaa

SEQ ID NO: 610919 - RNA, 19 nt, Artificial Sequence
  Description of Artificial Sequence: Synthetic oligonucleotide
  Antisense strand to SEQ ID NO: 610918
uuguacaugguuuguauac

SEQ ID NO: 610920 - RNA, 19 nt, Artificial Sequence
  Description of Artificial Sequence: Synthetic oligonucleotide
  Sense strand starting at position 3118 of SEQ ID NO: 585071
aagaaucgagauugucagu

SEQ ID NO: 610921 - RNA, 19 nt, Artificial Sequence
  Description of Artificial Sequence: Synthetic oligonucleotide
  Antisense strand to SEQ ID NO: 610920
acugacaaucucgauucuu

SEQ ID NO: 610922 - RNA, 19 nt, Artificial Sequence
  Description of Artificial Sequence: Synthetic oligonucleotide
  Sense strand starting at position 3175 of SEQ ID NO: 585071
gcuagauacuauguuaggu

SEQ ID NO: 610923 - RNA, 19 nt, Artificial Sequence
  Description of Artificial Sequence: Synthetic oligonucleotide
  Antisense strand to SEQ ID NO: 610922
accuaacauaguaucuagc

SEQ ID NO: 610924 - RNA, 19 nt, Artificial Sequence
  Description of Artificial Sequence: Synthetic oligonucleotide
  Sense strand starting at position 3257 of SEQ ID NO: 585071
uacaaugcagagugguaaa

SEQ ID NO: 610925 - RNA, 19 nt, Artificial Sequence
  Description of Artificial Sequence: Synthetic oligonucleotide
  Antisense strand to SEQ ID NO: 610924
uuuaccacucugcauugua

SEQ ID NO: 610926 - RNA, 19 nt, Artificial Sequence
  Description of Artificial Sequence: Synthetic oligonucleotide
  Sense strand starting at position 3314 of SEQ ID NO: 585071
gcugguggcauagacuauu

SEQ ID NO: 610927 - RNA, 19 nt, Artificial Sequence
  Description of Artificial Sequence: Synthetic oligonucleotide
  Antisense strand to SEQ ID NO: 610926
aauagucuaugccaccagc

SEQ ID NO: 610928 - RNA, 19 nt, Artificial Sequence
  Description of Artificial Sequence: Synthetic oligonucleotide
  Sense strand starting at position 3488 of SEQ ID NO: 585071
uugaauugugcuuaccuau

SEQ ID NO: 610929 - RNA, 19 nt, Artificial Sequence
  Description of Artificial Sequence: Synthetic oligonucleotide
  Antisense strand to SEQ ID NO: 610928
auagguaagcacaauucaa

SEQ ID NO: 610930 - RNA, 19 nt, Artificial Sequence
  Description of Artificial Sequence: Synthetic oligonucleotide
  Sense strand starting at position 3552 of SEQ ID NO: 585071
aggcuuauauaacugucaa

SEQ ID NO: 610931 - RNA, 19 nt, Artificial Sequence
  Description of Artificial Sequence: Synthetic oligonucleotide
  Antisense strand to SEQ ID NO: 610930
uugacaguuauauaagccu

SEQ ID NO: 610932 - RNA, 19 nt, Artificial Sequence
  Description of Artificial Sequence: Synthetic oligonucleotide
  Sense strand starting at position 3606 of SEQ ID NO: 585071
uaugauuaaguaugacguu

SEQ ID NO: 610933 - RNA, 19 nt, Artificial Sequence
  Description of Artificial Sequence: Synthetic oligonucleotide
  Antisense strand to SEQ ID NO: 610932
aacgucauacuuaaucaua

SEQ ID NO: 610934 - RNA, 19 nt, Artificial Sequence
  Description of Artificial Sequence: Synthetic oligonucleotide
  Sense strand starting at position 3688 of SEQ ID NO: 585071
cuugguuuccauuauagca

SEQ ID NO: 610935 - RNA, 19 nt, Artificial Sequence
  Description of Artificial Sequence: Synthetic oligonucleotide
  Antisense strand to SEQ ID NO: 610934
ugcuauaauggaaaccaag

SEQ ID NO: 610936 - RNA, 19 nt, Artificial Sequence
  Description of Artificial Sequence: Synthetic oligonucleotide
  Sense strand starting at position 3797 of SEQ ID NO: 585071
gguaguaaacuccguugaa

SEQ ID NO: 610937 - RNA, 19 nt, Artificial Sequence
  Description of Artificial Sequence: Synthetic oligonucleotide
  Antisense strand to SEQ ID NO: 610936
uucaacggaguuuacuacc

SEQ ID NO: 610938 - RNA, 19 nt, Artificial Sequence
  Description of Artificial Sequence: Synthetic oligonucleotide
  Sense strand starting at position 3798 of SEQ ID NO: 585071
guaguaaacuccguugaag

SEQ ID NO: 610939 - RNA, 19 nt, Artificial Sequence
  Description of Artificial Sequence: Synthetic oligonucleotide
  Antisense strand to SEQ ID NO: 610938
cuucaacggaguuuacuac

SEQ ID NO: 610940 - RNA, 19 nt, Artificial Sequence
  Description of Artificial Sequence: Synthetic oligonucleotide
  Sense strand starting at position 3840 of SEQ ID NO: 585071
ccuuauugaucuguagauc

SEQ ID NO: 610941 - RNA, 19 nt, Artificial Sequence
  Description of Artificial Sequence: Synthetic oligonucleotide
  Antisense strand to SEQ ID NO: 610940
gaucuacagaucaauaagg

SEQ ID NO: 610942 - RNA, 19 nt, Artificial Sequence
  Description of Artificial Sequence: Synthetic oligonucleotide
  Sense strand starting at position 3841 of SEQ ID NO: 585071
cuuauugaucuguagaucu

SEQ ID NO: 610943 - RNA, 19 nt, Artificial Sequence
  Description of Artificial Sequence: Synthetic oligonucleotide
  Antisense strand to SEQ ID NO: 610942
agaucuacagaucaauaag

SEQ ID NO: 610944 - RNA, 19 nt, Artificial Sequence
  Description of Artificial Sequence: Synthetic oligonucleotide
  Sense strand starting at position 3861 of SEQ ID NO: 585071
aguacaaucccuggcauau

SEQ ID NO: 610945 - RNA, 19 nt, Artificial Sequence
  Description of Artificial Sequence: Synthetic oligonucleotide
  Antisense strand to SEQ ID NO: 610944
auaugccagggauuguacu

SEQ ID NO: 610946 - RNA, 19 nt, Artificial Sequence
  Description of Artificial Sequence: Synthetic oligonucleotide
  Sense strand starting at position 3893 of SEQ ID NO: 585071
auacguguuagaugaguga

SEQ ID NO: 610947 - RNA, 19 nt, Artificial Sequence
  Description of Artificial Sequence: Synthetic oligonucleotide
  Antisense strand to SEQ ID NO: 610946
ucacucaucuaacacguau

SEQ ID NO: 610948 - RNA, 19 nt, Artificial Sequence
  Description of Artificial Sequence: Synthetic oligonucleotide
  Sense strand starting at position 3904 of SEQ ID NO: 585071
augagugaaucugugaaca

SEQ ID NO: 610949 - RNA, 19 nt, Artificial Sequence
  Description of Artificial Sequence: Synthetic oligonucleotide
  Antisense strand to SEQ ID NO: 610948
uguucacagauucacucau

SEQ ID NO: 610950 - RNA, 19 nt, Artificial Sequence
  Description of Artificial Sequence: Synthetic oligonucleotide
  Sense strand starting at position 3964 of SEQ ID NO: 585071
guuccaauccucugucaga

SEQ ID NO: 610951 - RNA, 19 nt, Artificial Sequence
  Description of Artificial Sequence: Synthetic oligonucleotide
  Antisense strand to SEQ ID NO: 610950
ucugacagaggauuggaac

SEQ ID NO: 610952 - RNA, 19 nt, Artificial Sequence
  Description of Artificial Sequence: Synthetic oligonucleotide
  Sense strand starting at position 16 of SEQ ID NO: 585072
gggcucucauuugcauuau

SEQ ID NO: 610953 - RNA, 19 nt, Artificial Sequence
  Description of Artificial Sequence: Synthetic oligonucleotide
  Antisense strand to SEQ ID NO: 610952
auaaugcaaaugagagccc

SEQ ID NO: 610954 - RNA, 19 nt, Artificial Sequence
  Description of Artificial Sequence: Synthetic oligonucleotide
  Sense strand starting at position 105 of SEQ ID NO: 585072
ugaggucaauaucugaagu

SEQ ID NO: 610955 - RNA, 19 nt, Artificial Sequence
  Description of Artificial Sequence: Synthetic oligonucleotide
  Antisense strand to SEQ ID NO: 610954
acuucagauauugaccuca

SEQ ID NO: 610956 - RNA, 19 nt, Artificial Sequence
  Description of Artificial Sequence: Synthetic oligonucleotide
  Sense strand starting at position 183 of SEQ ID NO: 585072
agcaaaguucuguacuaca

SEQ ID NO: 610957 - RNA, 19 nt, Artificial Sequence
  Description of Artificial Sequence: Synthetic oligonucleotide
  Antisense strand to SEQ ID NO: 610956
uguaguacagaacuuugcu

SEQ ID NO: 610958 - RNA, 19 nt, Artificial Sequence
  Description of Artificial Sequence: Synthetic oligonucleotide
  Sense strand starting at position 194 of SEQ ID NO: 585072
guacuacauucuguaacau

SEQ ID NO: 610959 - RNA, 19 nt, Artificial Sequence
  Description of Artificial Sequence: Synthetic oligonucleotide
  Antisense strand to SEQ ID NO: 610958
auguuacagaauguaguac

SEQ ID NO: 610960 - RNA, 19 nt, Artificial Sequence
  Description of Artificial Sequence: Synthetic oligonucleotide
  Sense strand starting at position 375 of SEQ ID NO: 585072
ugcagagcuuuccuggaga

SEQ ID NO: 610961 - RNA, 19 nt, Artificial Sequence
  Description of Artificial Sequence: Synthetic oligonucleotide
  Antisense strand to SEQ ID NO: 610960
ucuccaggaaagcucugca

SEQ ID NO: 610962 - RNA, 19 nt, Artificial Sequence
  Description of Artificial Sequence: Synthetic oligonucleotide
  Sense strand starting at position 377 of SEQ ID NO: 585072
cagagcuuuccuggagaau

SEQ ID NO: 610963 - RNA, 19 nt, Artificial Sequence
  Description of Artificial Sequence: Synthetic oligonucleotide
  Antisense strand to SEQ ID NO: 610962
auucuccaggaaagcucug

SEQ ID NO: 610964 - RNA, 19 nt, Artificial Sequence
  Description of Artificial Sequence: Synthetic oligonucleotide
  Sense strand starting at position 495 of SEQ ID NO: 585072
cuguuucuaucuguagauu

SEQ ID NO: 610965 - RNA, 19 nt, Artificial Sequence
  Description of Artificial Sequence: Synthetic oligonucleotide
  Antisense strand to SEQ ID NO: 610964
aaucuacagauagaaacag

SEQ ID NO: 610966 - RNA, 19 nt, Artificial Sequence
  Description of Artificial Sequence: Synthetic oligonucleotide
  Sense strand starting at position 496 of SEQ ID NO: 585072
uguuucuaucuguagauuc

SEQ ID NO: 610967 - RNA, 19 nt, Artificial Sequence
  Description of Artificial Sequence: Synthetic oligonucleotide
  Antisense strand to SEQ ID NO: 610966
gaaucuacagauagaaaca

SEQ ID NO: 610968 - RNA, 19 nt, Artificial Sequence
  Description of Artificial Sequence: Synthetic oligonucleotide
  Sense strand starting at position 507 of SEQ ID NO: 585072
guagauucugcacgaaaug

SEQ ID NO: 610969 - RNA, 19 nt, Artificial Sequence
  Description of Artificial Sequence: Synthetic oligonucleotide
  Antisense strand to SEQ ID NO: 610968
cauuucgugcagaaucuac

SEQ ID NO: 610970 - RNA, 19 nt, Artificial Sequence
  Description of Artificial Sequence: Synthetic oligonucleotide
  Sense strand starting at position 569 of SEQ ID NO: 585072
guuaucugccaagcgguua

SEQ ID NO: 610971 - RNA, 19 nt, Artificial Sequence
  Description of Artificial Sequence: Synthetic oligonucleotide
  Antisense strand to SEQ ID NO: 610970
uaaccgcuuggcagauaac

SEQ ID NO: 610972 - RNA, 19 nt, Artificial Sequence
  Description of Artificial Sequence: Synthetic oligonucleotide
  Sense strand starting at position 582 of SEQ ID NO: 585072
cgguuaggagaaugaguua

SEQ ID NO: 610973 - RNA, 19 nt, Artificial Sequence
  Description of Artificial Sequence: Synthetic oligonucleotide
  Antisense strand to SEQ ID NO: 610972
uaacucauucuccuaaccg

SEQ ID NO: 610974 - RNA, 19 nt, Artificial Sequence
  Description of Artificial Sequence: Synthetic oligonucleotide
  Sense strand starting at position 620 of SEQ ID NO: 585072
ucagcucuuccguacaauu

SEQ ID NO: 610975 - RNA, 19 nt, Artificial Sequence
  Description of Artificial Sequence: Synthetic oligonucleotide
  Antisense strand to SEQ ID NO: 610974
aauuguacggaagagcuga

SEQ ID NO: 610976 - RNA, 19 nt, Artificial Sequence
  Description of Artificial Sequence: Synthetic oligonucleotide
  Sense strand starting at position 630 of SEQ ID NO: 585072
cguacaauucuaugaagca

SEQ ID NO: 610977 - RNA, 19 nt, Artificial Sequence
  Description of Artificial Sequence: Synthetic oligonucleotide
  Antisense strand to SEQ ID NO: 610976
ugcuucauagaauuguacg

SEQ ID NO: 610978 - RNA, 19 nt, Artificial Sequence
  Description of Artificial Sequence: Synthetic oligonucleotide
  Sense strand starting at position 723 of SEQ ID NO: 585072
gguuccucagucuagcuaa

SEQ ID NO: 610979 - RNA, 19 nt, Artificial Sequence
  Description of Artificial Sequence: Synthetic oligonucleotide
  Antisense strand to SEQ ID NO: 610978
uuagcuagacugaggaacc

SEQ ID NO: 610980 - RNA, 19 nt, Artificial Sequence
  Description of Artificial Sequence: Synthetic oligonucleotide
  Sense strand starting at position 1194 of SEQ ID NO: 585072
ccucaucccucccugagua

SEQ ID NO: 610981 - RNA, 19 nt, Artificial Sequence
  Description of Artificial Sequence: Synthetic oligonucleotide
  Antisense strand to SEQ ID NO: 610980
uacucagggagggaugagg

SEQ ID NO: 610982 - RNA, 19 nt, Artificial Sequence
  Description of Artificial Sequence: Synthetic oligonucleotide
  Sense strand starting at position 1221 of SEQ ID NO: 585072
ugccguugucugguuucaa

SEQ ID NO: 610983 - RNA, 19 nt, Artificial Sequence
  Description of Artificial Sequence: Synthetic oligonucleotide
  Antisense strand to SEQ ID NO: 610982
uugaaaccagacaacggca

SEQ ID NO: 610984 - RNA, 19 nt, Artificial Sequence
  Description of Artificial Sequence: Synthetic oligonucleotide
  Sense strand starting at position 1844 of SEQ ID NO: 585072
cgaaguuucccggagcuga

SEQ ID NO: 610985 - RNA, 19 nt, Artificial Sequence
  Description of Artificial Sequence: Synthetic oligonucleotide
  Antisense strand to SEQ ID NO: 610984
ucagcuccgggaaacuucg

SEQ ID NO: 610986 - RNA, 19 nt, Artificial Sequence
  Description of Artificial Sequence: Synthetic oligonucleotide
  Sense strand starting at position 2085 of SEQ ID NO: 585072
ggaugaaucaagcgcuaug

SEQ ID NO: 610987 - RNA, 19 nt, Artificial Sequence
  Description of Artificial Sequence: Synthetic oligonucleotide
  Antisense strand to SEQ ID NO: 610986
cauagcgcuugauucaucc

SEQ ID NO: 610988 - RNA, 19 nt, Artificial Sequence
  Description of Artificial Sequence: Synthetic oligonucleotide
  Sense strand starting at position 2121 of SEQ ID NO: 585072
agccaaucgcgggacaaua

SEQ ID NO: 610989 - RNA, 19 nt, Artificial Sequence
  Description of Artificial Sequence: Synthetic oligonucleotide
  Antisense strand to SEQ ID NO: 610988
uauugucccgcgauuggcu

SEQ ID NO: 610990 - RNA, 19 nt, Artificial Sequence
  Description of Artificial Sequence: Synthetic oligonucleotide
  Sense strand starting at position 2138 of SEQ ID NO: 585072
uagaacuuucgugaucgua

SEQ ID NO: 610991 - RNA, 19 nt, Artificial Sequence
  Description of Artificial Sequence: Synthetic oligonucleotide
  Antisense strand to SEQ ID NO: 610990
uacgaucacgaaaguucua

SEQ ID NO: 610992 - RNA, 19 nt, Artificial Sequence
  Description of Artificial Sequence: Synthetic oligonucleotide
  Sense strand starting at position 2350 of SEQ ID NO: 585072
gccgcauuuggguggcaga

SEQ ID NO: 610993 - RNA, 19 nt, Artificial Sequence
  Description of Artificial Sequence: Synthetic oligonucleotide
  Antisense strand to SEQ ID NO: 610992
ucugccacccaaaugcggc

SEQ ID NO: 610994 - RNA, 19 nt, Artificial Sequence
  Description of Artificial Sequence: Synthetic oligonucleotide
  Sense strand starting at position 2351 of SEQ ID NO: 585072
ccgcauuuggguggcagaa

SEQ ID NO: 610995 - RNA, 19 nt, Artificial Sequence
  Description of Artificial Sequence: Synthetic oligonucleotide
  Antisense strand to SEQ ID NO: 610994
uucugccacccaaaugcgg

SEQ ID NO: 610996 - RNA, 19 nt, Artificial Sequence
  Description of Artificial Sequence: Synthetic oligonucleotide
  Sense strand starting at position 2382 of SEQ ID NO: 585072
uacggucuccucuaugagu

SEQ ID NO: 610997 - RNA, 19 nt, Artificial Sequence
  Description of Artificial Sequence: Synthetic oligonucleotide
  Antisense strand to SEQ ID NO: 610996
acucauagaggagaccgua

SEQ ID NO: 610998 - RNA, 19 nt, Artificial Sequence
  Description of Artificial Sequence: Synthetic oligonucleotide
  Sense strand starting at position 2479 of SEQ ID NO: 585072
ucugcaguugaacaagaua

SEQ ID NO: 610999 - RNA, 19 nt, Artificial Sequence
  Description of Artificial Sequence: Synthetic oligonucleotide
  Antisense strand to SEQ ID NO: 610998
uaucuuguucaacugcaga

SEQ ID NO: 611000 - RNA, 19 nt, Artificial Sequence
  Description of Artificial Sequence: Synthetic oligonucleotide
  Sense strand starting at position 2633 of SEQ ID NO: 585072
ucuaaaggauuguuaaaug

SEQ ID NO: 611001 - RNA, 19 nt, Artificial Sequence
  Description of Artificial Sequence: Synthetic oligonucleotide
  Antisense strand to SEQ ID NO: 611000
cauuuaacaauccuuuaga

SEQ ID NO: 611002 - RNA, 19 nt, Artificial Sequence
  Description of Artificial Sequence: Synthetic oligonucleotide
  Sense strand starting at position 2875 of SEQ ID NO: 585072
accuaacagucggcuauuu

SEQ ID NO: 611003 - RNA, 19 nt, Artificial Sequence
  Description of Artificial Sequence: Synthetic oligonucleotide
  Antisense strand to SEQ ID NO: 611002
aaauagccgacuguuaggu

SEQ ID NO: 611004 - RNA, 19 nt, Artificial Sequence
  Description of Artificial Sequence: Synthetic oligonucleotide
  Sense strand starting at position 3210 of SEQ ID NO: 585072
gagccuggccggcaaauuu

SEQ ID NO: 611005 - RNA, 19 nt, Artificial Sequence
  Description of Artificial Sequence: Synthetic oligonucleotide
  Antisense strand to SEQ ID NO: 611004
aaauuugccggccaggcuc

SEQ ID NO: 611006 - RNA, 19 nt, Artificial Sequence
  Description of Artificial Sequence: Synthetic oligonucleotide
  Sense strand starting at position 3287 of SEQ ID NO: 585072
gggccauugcaauaggaau

SEQ ID NO: 611007 - RNA, 19 nt, Artificial Sequence
  Description of Artificial Sequence: Synthetic oligonucleotide
  Antisense strand to SEQ ID NO: 611006
auuccuauugcaauggccc

SEQ ID NO: 611008 - RNA, 19 nt, Artificial Sequence
  Description of Artificial Sequence: Synthetic oligonucleotide
  Sense strand starting at position 3295 of SEQ ID NO: 585072
gcaauaggaaugcaaguau

SEQ ID NO: 611009 - RNA, 19 nt, Artificial Sequence
  Description of Artificial Sequence: Synthetic oligonucleotide
  Antisense strand to SEQ ID NO: 611008
auacuugcauuccuauugc

SEQ ID NO: 611010 - RNA, 19 nt, Artificial Sequence
  Description of Artificial Sequence: Synthetic oligonucleotide
  Sense strand starting at position 3310 of SEQ ID NO: 585072
guauacaaaccauguacaa

SEQ ID NO: 611011 - RNA, 19 nt, Artificial Sequence
  Description of Artificial Sequence: Synthetic oligonucleotide
  Antisense strand to SEQ ID NO: 611010
uuguacaugguuuguauac

SEQ ID NO: 611012 - RNA, 19 nt, Artificial Sequence
  Description of Artificial Sequence: Synthetic oligonucleotide
  Sense strand starting at position 3352 of SEQ ID NO: 585072
aagaaucgagauugucagu

SEQ ID NO: 611013 - RNA, 19 nt, Artificial Sequence
  Description of Artificial Sequence: Synthetic oligonucleotide
  Antisense strand to SEQ ID NO: 611012
acugacaaucucgauucuu

SEQ ID NO: 611014 - RNA, 19 nt, Artificial Sequence
  Description of Artificial Sequence: Synthetic oligonucleotide
  Sense strand starting at position 3409 of SEQ ID NO: 585072
gcuagauacuauguuaggu

SEQ ID NO: 611015 - RNA, 19 nt, Artificial Sequence
  Description of Artificial Sequence: Synthetic oligonucleotide
  Antisense strand to SEQ ID NO: 611014
accuaacauaguaucuagc

SEQ ID NO: 611016 - RNA, 19 nt, Artificial Sequence
  Description of Artificial Sequence: Synthetic oligonucleotide
  Sense strand starting at position 3491 of SEQ ID NO: 585072
uacaaugcagagugguaaa

SEQ ID NO: 611017 - RNA, 19 nt, Artificial Sequence
  Description of Artificial Sequence: Synthetic oligonucleotide
  Antisense strand to SEQ ID NO: 611016
uuuaccacucugcauugua

SEQ ID NO: 611018 - RNA, 19 nt, Artificial Sequence
  Description of Artificial Sequence: Synthetic oligonucleotide
  Sense strand starting at position 3548 of SEQ ID NO: 585072
gcugguggcauagacuauu

SEQ ID NO: 611019 - RNA, 19 nt, Artificial Sequence
  Description of Artificial Sequence: Synthetic oligonucleotide
  Antisense strand to SEQ ID NO: 611018
aauagucuaugccaccagc

SEQ ID NO: 611020 - RNA, 19 nt, Artificial Sequence
  Description of Artificial Sequence: Synthetic oligonucleotide
  Sense strand starting at position 3721 of SEQ ID NO: 585072
uuugaauugugcuuaccua

SEQ ID NO: 611021 - RNA, 19 nt, Artificial Sequence
  Description of Artificial Sequence: Synthetic oligonucleotide
  Antisense strand to SEQ ID NO: 611020
uagguaagcacaauucaaa

SEQ ID NO: 611022 - RNA, 19 nt, Artificial Sequence
  Description of Artificial Sequence: Synthetic oligonucleotide
  Sense strand starting at position 3722 of SEQ ID NO: 585072
uugaauugugcuuaccuau

SEQ ID NO: 611023 - RNA, 19 nt, Artificial Sequence
  Description of Artificial Sequence: Synthetic oligonucleotide
  Antisense strand to SEQ ID NO: 611022
auagguaagcacaauucaa

SEQ ID NO: 611024 - RNA, 19 nt, Artificial Sequence
  Description of Artificial Sequence: Synthetic oligonucleotide
  Sense strand starting at position 3786 of SEQ ID NO: 585072
aggcuuauauaacugucaa

SEQ ID NO: 611025 - RNA, 19 nt, Artificial Sequence
  Description of Artificial Sequence: Synthetic oligonucleotide
  Antisense strand to SEQ ID NO: 611024
uugacaguuauauaagccu

SEQ ID NO: 611026 - RNA, 19 nt, Artificial Sequence
  Description of Artificial Sequence: Synthetic oligonucleotide
  Sense strand starting at position 3840 of SEQ ID NO: 585072
uaugauuaaguaugacguu

SEQ ID NO: 611027 - RNA, 19 nt, Artificial Sequence
  Description of Artificial Sequence: Synthetic oligonucleotide
  Antisense strand to SEQ ID NO: 611026
aacgucauacuuaaucaua

SEQ ID NO: 611028 - RNA, 19 nt, Artificial Sequence
  Description of Artificial Sequence: Synthetic oligonucleotide
  Sense strand starting at position 3918 of SEQ ID NO: 585072
guaucuugguuuccauuau

SEQ ID NO: 611029 - RNA, 19 nt, Artificial Sequence
  Description of Artificial Sequence: Synthetic oligonucleotide
  Antisense strand to SEQ ID NO: 611028
auaauggaaaccaagauac

SEQ ID NO: 611030 - RNA, 19 nt, Artificial Sequence
  Description of Artificial Sequence: Synthetic oligonucleotide
  Sense strand starting at position 3922 of SEQ ID NO: 585072
cuugguuuccauuauagca

SEQ ID NO: 611031 - RNA, 19 nt, Artificial Sequence
  Description of Artificial Sequence: Synthetic oligonucleotide
  Antisense strand to SEQ ID NO: 611030
ugcuauaauggaaaccaag

SEQ ID NO: 611032 - RNA, 19 nt, Artificial Sequence
  Description of Artificial Sequence: Synthetic oligonucleotide
  Sense strand starting at position 52 of SEQ ID NO: 585073
gguccauaauaguccuacu

SEQ ID NO: 611033 - RNA, 19 nt, Artificial Sequence
  Description of Artificial Sequence: Synthetic oligonucleotide
  Antisense strand to SEQ ID NO: 611032
aguaggacuauuauggacc

SEQ ID NO: 611034 - RNA, 19 nt, Artificial Sequence
  Description of Artificial Sequence: Synthetic oligonucleotide
  Sense strand starting at position 63 of SEQ ID NO: 585073
guccuacuuguggaaguaa

SEQ ID NO: 611035 - RNA, 19 nt, Artificial Sequence
  Description of Artificial Sequence: Synthetic oligonucleotide
  Antisense strand to SEQ ID NO: 611034
uuacuuccacaaguaggac

SEQ ID NO: 611036 - RNA, 19 nt, Artificial Sequence
  Description of Artificial Sequence: Synthetic oligonucleotide
  Sense strand starting at position 76 of SEQ ID NO: 585073
aaguaaguccuaggacacu

SEQ ID NO: 611037 - RNA, 19 nt, Artificial Sequence
  Description of Artificial Sequence: Synthetic oligonucleotide
  Antisense strand to SEQ ID NO: 611036
aguguccuaggacuuacuu

SEQ ID NO: 611038 - RNA, 19 nt, Artificial Sequence
  Description of Artificial Sequence: Synthetic oligonucleotide
  Sense strand starting at position 87 of SEQ ID NO: 585073
aggacacuuccaugucaaa

SEQ ID NO: 611039 - RNA, 19 nt, Artificial Sequence
  Description of Artificial Sequence: Synthetic oligonucleotide
  Antisense strand to SEQ ID NO: 611038
uuugacauggaaguguccu

SEQ ID NO: 611040 - RNA, 19 nt, Artificial Sequence
  Description of Artificial Sequence: Synthetic oligonucleotide
  Sense strand starting at position 98 of SEQ ID NO: 585073
augucaaaugcccagagua

SEQ ID NO: 611041 - RNA, 19 nt, Artificial Sequence
  Description of Artificial Sequence: Synthetic oligonucleotide
  Antisense strand to SEQ ID NO: 611040
uacucugggcauuugacau

SEQ ID NO: 611042 - RNA, 19 nt, Artificial Sequence
  Description of Artificial Sequence: Synthetic oligonucleotide
  Sense strand starting at position 111 of SEQ ID NO: 585073
agaguagcaucaucacaca

SEQ ID NO: 611043 - RNA, 19 nt, Artificial Sequence
  Description of Artificial Sequence: Synthetic oligonucleotide
  Antisense strand to SEQ ID NO: 611042
ugugugaugaugcuacucu

SEQ ID NO: 611044 - RNA, 19 nt, Artificial Sequence
  Description of Artificial Sequence: Synthetic oligonucleotide
  Sense strand starting at position 127 of SEQ ID NO: 585073
acagaaugcuguuugacca

SEQ ID NO: 611045 - RNA, 19 nt, Artificial Sequence
  Description of Artificial Sequence: Synthetic oligonucleotide
  Antisense strand to SEQ ID NO: 611044
uggucaaacagcauucugu

SEQ ID NO: 611046 - RNA, 19 nt, Artificial Sequence
  Description of Artificial Sequence: Synthetic oligonucleotide
  Sense strand starting at position 167 of SEQ ID NO: 585073
cuggacagcuuauuccaaa

SEQ ID NO: 611047 - RNA, 19 nt, Artificial Sequence
  Description of Artificial Sequence: Synthetic oligonucleotide
  Antisense strand to SEQ ID NO: 611046
uuuggaauaagcuguccag

SEQ ID NO: 611048 - RNA, 19 nt, Artificial Sequence
  Description of Artificial Sequence: Synthetic oligonucleotide
  Sense strand starting at position 186 of SEQ ID NO: 585073
acuagaccuuugcugauau

SEQ ID NO: 611049 - RNA, 19 nt, Artificial Sequence
  Description of Artificial Sequence: Synthetic oligonucleotide
  Antisense strand to SEQ ID NO: 611048
auaucagcaaaggucuagu

SEQ ID NO: 611050 - RNA, 19 nt, Artificial Sequence
  Description of Artificial Sequence: Synthetic oligonucleotide
  Sense strand starting at position 201 of SEQ ID NO: 585073
auaucuguuguggauguau

SEQ ID NO: 611051 - RNA, 19 nt, Artificial Sequence
  Description of Artificial Sequence: Synthetic oligonucleotide
  Antisense strand to SEQ ID NO: 611050
auacauccacaacagauau

SEQ ID NO: 611052 - RNA, 19 nt, Artificial Sequence
  Description of Artificial Sequence: Synthetic oligonucleotide
  Sense strand starting at position 203 of SEQ ID NO: 585073
aucuguuguggauguauaa

SEQ ID NO: 611053 - RNA, 19 nt, Artificial Sequence
  Description of Artificial Sequence: Synthetic oligonucleotide
  Antisense strand to SEQ ID NO: 611052
uuauacauccacaacagau

SEQ ID NO: 611054 - RNA, 19 nt, Artificial Sequence
  Description of Artificial Sequence: Synthetic oligonucleotide
  Sense strand starting at position 274 of SEQ ID NO: 585073
aaagguuuauaggcaugua

SEQ ID NO: 611055 - RNA, 19 nt, Artificial Sequence
  Description of Artificial Sequence: Synthetic oligonucleotide
  Antisense strand to SEQ ID NO: 611054
uacaugccuauaaaccuuu

SEQ ID NO: 611056 - RNA, 19 nt, Artificial Sequence
  Description of Artificial Sequence: Synthetic oligonucleotide
  Sense strand starting at position 277 of SEQ ID NO: 585073
gguuuauaggcauguagaa

SEQ ID NO: 611057 - RNA, 19 nt, Artificial Sequence
  Description of Artificial Sequence: Synthetic oligonucleotide
  Antisense strand to SEQ ID NO: 611056
uucuacaugccuauaaacc

SEQ ID NO: 611058 - RNA, 19 nt, Artificial Sequence
  Description of Artificial Sequence: Synthetic oligonucleotide
  Sense strand starting at position 312 of SEQ ID NO: 585073
guuacacacugauuccaua

SEQ ID NO: 611059 - RNA, 19 nt, Artificial Sequence
  Description of Artificial Sequence: Synthetic oligonucleotide
  Antisense strand to SEQ ID NO: 611058
uauggaaucaguguguaac

SEQ ID NO: 611060 - RNA, 19 nt, Artificial Sequence
  Description of Artificial Sequence: Synthetic oligonucleotide
  Sense strand starting at position 449 of SEQ ID NO: 585073
ucaagagacuaaguucuca

SEQ ID NO: 611061 - RNA, 19 nt, Artificial Sequence
  Description of Artificial Sequence: Synthetic oligonucleotide
  Antisense strand to SEQ ID NO: 611060
ugagaacuuagucucuuga

SEQ ID NO: 611062 - RNA, 19 nt, Artificial Sequence
  Description of Artificial Sequence: Synthetic oligonucleotide
  Sense strand starting at position 550 of SEQ ID NO: 585073
gguacuuauucugugaaac

SEQ ID NO: 611063 - RNA, 19 nt, Artificial Sequence
  Description of Artificial Sequence: Synthetic oligonucleotide
  Antisense strand to SEQ ID NO: 611062
guuucacagaauaaguacc

SEQ ID NO: 611064 - RNA, 19 nt, Artificial Sequence
  Description of Artificial Sequence: Synthetic oligonucleotide
  Sense strand starting at position 551 of SEQ ID NO: 585073
guacuuauucugugaaacu

SEQ ID NO: 611065 - RNA, 19 nt, Artificial Sequence
  Description of Artificial Sequence: Synthetic oligonucleotide
  Antisense strand to SEQ ID NO: 611064
aguuucacagaauaaguac

SEQ ID NO: 611066 - RNA, 19 nt, Artificial Sequence
  Description of Artificial Sequence: Synthetic oligonucleotide
  Sense strand starting at position 818 of SEQ ID NO: 585073
auucuauuuccuugcuguu

SEQ ID NO: 611067 - RNA, 19 nt, Artificial Sequence
  Description of Artificial Sequence: Synthetic oligonucleotide
  Antisense strand to SEQ ID NO: 611066
aacagcaaggaaauagaau

SEQ ID NO: 611068 - RNA, 19 nt, Artificial Sequence
  Description of Artificial Sequence: Synthetic oligonucleotide
  Sense strand starting at position 905 of SEQ ID NO: 585073
aguugauguugucccauuu

SEQ ID NO: 611069 - RNA, 19 nt, Artificial Sequence
  Description of Artificial Sequence: Synthetic oligonucleotide
  Antisense strand to SEQ ID NO: 611068
aaaugggacaacaucaacu

SEQ ID NO: 611070 - RNA, 19 nt, Artificial Sequence
  Description of Artificial Sequence: Synthetic oligonucleotide
  Sense strand starting at position 1102 of SEQ ID NO: 585073
aggaguaauagguagcuuu

SEQ ID NO: 611071 - RNA, 19 nt, Artificial Sequence
  Description of Artificial Sequence: Synthetic oligonucleotide
  Antisense strand to SEQ ID NO: 611070
aaagcuaccuauuacuccu

SEQ ID NO: 611072 - RNA, 19 nt, Artificial Sequence
  Description of Artificial Sequence: Synthetic oligonucleotide
  Sense strand starting at position 1140 of SEQ ID NO: 585073
guagccucugguuagaaga

SEQ ID NO: 611073 - RNA, 19 nt, Artificial Sequence
  Description of Artificial Sequence: Synthetic oligonucleotide
  Antisense strand to SEQ ID NO: 611072
ucuucuaaccagaggcuac

SEQ ID NO: 611074 - RNA, 19 nt, Artificial Sequence
  Description of Artificial Sequence: Synthetic oligonucleotide
  Sense strand starting at position 1331 of SEQ ID NO: 585073
agugaagucauguauacug

SEQ ID NO: 611075 - RNA, 19 nt, Artificial Sequence
  Description of Artificial Sequence: Synthetic oligonucleotide
  Antisense strand to SEQ ID NO: 611074
caguauacaugacuucacu

SEQ ID NO: 611076 - RNA, 19 nt, Artificial Sequence
  Description of Artificial Sequence: Synthetic oligonucleotide
  Sense strand starting at position 1464 of SEQ ID NO: 585073
gaguauuucuaaggaugac

SEQ ID NO: 611077 - RNA, 19 nt, Artificial Sequence
  Description of Artificial Sequence: Synthetic oligonucleotide
  Antisense strand to SEQ ID NO: 611076
gucauccuuagaaauacuc

SEQ ID NO: 611078 - RNA, 19 nt, Artificial Sequence
  Description of Artificial Sequence: Synthetic oligonucleotide
  Sense strand starting at position 1734 of SEQ ID NO: 585073
ggaccuaccagcgagagua

SEQ ID NO: 611079 - RNA, 19 nt, Artificial Sequence
  Description of Artificial Sequence: Synthetic oligonucleotide
  Antisense strand to SEQ ID NO: 611078
uacucucgcugguaggucc

SEQ ID NO: 611080 - RNA, 19 nt, Artificial Sequence
  Description of Artificial Sequence: Synthetic oligonucleotide
  Sense strand starting at position 2156 of SEQ ID NO: 585073
uuggcuuccugucugauuu

SEQ ID NO: 611081 - RNA, 19 nt, Artificial Sequence
  Description of Artificial Sequence: Synthetic oligonucleotide
  Antisense strand to SEQ ID NO: 611080
aaaucagacaggaagccaa

SEQ ID NO: 611082 - RNA, 19 nt, Artificial Sequence
  Description of Artificial Sequence: Synthetic oligonucleotide
  Sense strand starting at position 2178 of SEQ ID NO: 585073
gcacucugugugucgguua

SEQ ID NO: 611083 - RNA, 19 nt, Artificial Sequence
  Description of Artificial Sequence: Synthetic oligonucleotide
  Antisense strand to SEQ ID NO: 611082
uaaccgacacacagagugc

SEQ ID NO: 611084 - RNA, 19 nt, Artificial Sequence
  Description of Artificial Sequence: Synthetic oligonucleotide
  Sense strand starting at position 2208 of SEQ ID NO: 585073
uuacgugggcgugucuuaa

SEQ ID NO: 611085 - RNA, 19 nt, Artificial Sequence
  Description of Artificial Sequence: Synthetic oligonucleotide
  Antisense strand to SEQ ID NO: 611084
uuaagacacgcccacguaa

SEQ ID NO: 611086 - RNA, 19 nt, Artificial Sequence
  Description of Artificial Sequence: Synthetic oligonucleotide
  Sense strand starting at position 2459 of SEQ ID NO: 585073
ugaguuucuggauggaaau

SEQ ID NO: 611087 - RNA, 19 nt, Artificial Sequence
  Description of Artificial Sequence: Synthetic oligonucleotide
  Antisense strand to SEQ ID NO: 611086
auuuccauccagaaacuca

SEQ ID NO: 611088 - RNA, 19 nt, Artificial Sequence
  Description of Artificial Sequence: Synthetic oligonucleotide
  Sense strand starting at position 2460 of SEQ ID NO: 585073
gaguuucuggauggaaaug

SEQ ID NO: 611089 - RNA, 19 nt, Artificial Sequence
  Description of Artificial Sequence: Synthetic oligonucleotide
  Antisense strand to SEQ ID NO: 611088
cauuuccauccagaaacuc

SEQ ID NO: 611090 - RNA, 19 nt, Artificial Sequence
  Description of Artificial Sequence: Synthetic oligonucleotide
  Sense strand starting at position 2686 of SEQ ID NO: 585073
uuucuagacuuucuguauu

SEQ ID NO: 611091 - RNA, 19 nt, Artificial Sequence
  Description of Artificial Sequence: Synthetic oligonucleotide
  Antisense strand to SEQ ID NO: 611090
aauacagaaagucuagaaa

SEQ ID NO: 611092 - RNA, 19 nt, Artificial Sequence
  Description of Artificial Sequence: Synthetic oligonucleotide
  Sense strand starting at position 2688 of SEQ ID NO: 585073
ucuagacuuucuguauuga

SEQ ID NO: 611093 - RNA, 19 nt, Artificial Sequence
  Description of Artificial Sequence: Synthetic oligonucleotide
  Antisense strand to SEQ ID NO: 611092
ucaauacagaaagucuaga

SEQ ID NO: 611094 - RNA, 19 nt, Artificial Sequence
  Description of Artificial Sequence: Synthetic oligonucleotide
  Sense strand starting at position 2689 of SEQ ID NO: 585073
cuagacuuucuguauugaa

SEQ ID NO: 611095 - RNA, 19 nt, Artificial Sequence
  Description of Artificial Sequence: Synthetic oligonucleotide
  Antisense strand to SEQ ID NO: 611094
uucaauacagaaagucuag

SEQ ID NO: 611096 - RNA, 19 nt, Artificial Sequence
  Description of Artificial Sequence: Synthetic oligonucleotide
  Sense strand starting at position 2912 of SEQ ID NO: 585073
uguguagugaagugagaca

SEQ ID NO: 611097 - RNA, 19 nt, Artificial Sequence
  Description of Artificial Sequence: Synthetic oligonucleotide
  Antisense strand to SEQ ID NO: 611096
ugucucacuucacuacaca

SEQ ID NO: 611098 - RNA, 19 nt, Artificial Sequence
  Description of Artificial Sequence: Synthetic oligonucleotide
  Sense strand starting at position 2947 of SEQ ID NO: 585073
uucgaacuacuuugcaaua

SEQ ID NO: 611099 - RNA, 19 nt, Artificial Sequence
  Description of Artificial Sequence: Synthetic oligonucleotide
  Antisense strand to SEQ ID NO: 611098
uauugcaaaguaguucgaa

SEQ ID NO: 611100 - RNA, 19 nt, Artificial Sequence
  Description of Artificial Sequence: Synthetic oligonucleotide
  Sense strand starting at position 3332 of SEQ ID NO: 585073
auaggauauugauacagga

SEQ ID NO: 611101 - RNA, 19 nt, Artificial Sequence
  Description of Artificial Sequence: Synthetic oligonucleotide
  Antisense strand to SEQ ID NO: 611100
uccuguaucaauauccuau

SEQ ID NO: 611102 - RNA, 19 nt, Artificial Sequence
  Description of Artificial Sequence: Synthetic oligonucleotide
  Sense strand starting at position 3394 of SEQ ID NO: 585073
ggcagaacuuaccuucuaa

SEQ ID NO: 611103 - RNA, 19 nt, Artificial Sequence
  Description of Artificial Sequence: Synthetic oligonucleotide
  Antisense strand to SEQ ID NO: 611102
uuagaagguaaguucugcc

SEQ ID NO: 611104 - RNA, 19 nt, Artificial Sequence
  Description of Artificial Sequence: Synthetic oligonucleotide
  Sense strand starting at position 3494 of SEQ ID NO: 585073
ggaagcuugcacgggagau

SEQ ID NO: 611105 - RNA, 19 nt, Artificial Sequence
  Description of Artificial Sequence: Synthetic oligonucleotide
  Antisense strand to SEQ ID NO: 611104
aucucccgugcaagcuucc

SEQ ID NO: 611106 - RNA, 19 nt, Artificial Sequence
  Description of Artificial Sequence: Synthetic oligonucleotide
  Sense strand starting at position 3637 of SEQ ID NO: 585073
gccuauauaguagaagauu

SEQ ID NO: 611107 - RNA, 19 nt, Artificial Sequence
  Description of Artificial Sequence: Synthetic oligonucleotide
  Antisense strand to SEQ ID NO: 611106
aaucuucuacuauauaggc

SEQ ID NO: 611108 - RNA, 19 nt, Artificial Sequence
  Description of Artificial Sequence: Synthetic oligonucleotide
  Sense strand starting at position 3675 of SEQ ID NO: 585073
acuuaagcccuaugcagau

SEQ ID NO: 611109 - RNA, 19 nt, Artificial Sequence
  Description of Artificial Sequence: Synthetic oligonucleotide
  Antisense strand to SEQ ID NO: 611108
aucugcauagggcuuaagu

SEQ ID NO: 611110 - RNA, 19 nt, Artificial Sequence
  Description of Artificial Sequence: Synthetic oligonucleotide
  Sense strand starting at position 3748 of SEQ ID NO: 585073
ccuccuuauguagaucaga

SEQ ID NO: 611111 - RNA, 19 nt, Artificial Sequence
  Description of Artificial Sequence: Synthetic oligonucleotide
  Antisense strand to SEQ ID NO: 611110
ucugaucuacauaaggagg

SEQ ID NO: 611112 - RNA, 19 nt, Artificial Sequence
  Description of Artificial Sequence: Synthetic oligonucleotide
  Sense strand starting at position 118 of SEQ ID NO: 585074
ggaauauauugaggauuua

SEQ ID NO: 611113 - RNA, 19 nt, Artificial Sequence
  Description of Artificial Sequence: Synthetic oligonucleotide
  Antisense strand to SEQ ID NO: 611112
uaaauccucaauauauucc

SEQ ID NO: 611114 - RNA, 19 nt, Artificial Sequence
  Description of Artificial Sequence: Synthetic oligonucleotide
  Sense strand starting at position 140 of SEQ ID NO: 585074
uguuacuaggcuuaauacu

SEQ ID NO: 611115 - RNA, 19 nt, Artificial Sequence
  Description of Artificial Sequence: Synthetic oligonucleotide
  Antisense strand to SEQ ID NO: 611114
aguauuaagccuaguaaca

SEQ ID NO: 611116 - RNA, 19 nt, Artificial Sequence
  Description of Artificial Sequence: Synthetic oligonucleotide
  Sense strand starting at position 214 of SEQ ID NO: 585074
agagaauagcggugaccuu

SEQ ID NO: 611117 - RNA, 19 nt, Artificial Sequence
  Description of Artificial Sequence: Synthetic oligonucleotide
  Antisense strand to SEQ ID NO: 611116
aaggucaccgcuauucucu

SEQ ID NO: 611118 - RNA, 19 nt, Artificial Sequence
  Description of Artificial Sequence: Synthetic oligonucleotide
  Sense strand starting at position 215 of SEQ ID NO: 585074
gagaauagcggugaccuua

SEQ ID NO: 611119 - RNA, 19 nt, Artificial Sequence
  Description of Artificial Sequence: Synthetic oligonucleotide
  Antisense strand to SEQ ID NO: 611118
uaaggucaccgcuauucuc

SEQ ID NO: 611120 - RNA, 19 nt, Artificial Sequence
  Description of Artificial Sequence: Synthetic oligonucleotide
  Sense strand starting at position 539 of SEQ ID NO: 585074
gguggauuacuuggaauuc

SEQ ID NO: 611121 - RNA, 19 nt, Artificial Sequence
  Description of Artificial Sequence: Synthetic oligonucleotide
  Antisense strand to SEQ ID NO: 611120
gaauuccaaguaauccacc

SEQ ID NO: 611122 - RNA, 19 nt, Artificial Sequence
  Description of Artificial Sequence: Synthetic oligonucleotide
  Sense strand starting at position 550 of SEQ ID NO: 585074
uggaauucuuggcugagga

SEQ ID NO: 611123 - RNA, 19 nt, Artificial Sequence
  Description of Artificial Sequence: Synthetic oligonucleotide
  Antisense strand to SEQ ID NO: 611122
uccucagccaagaauucca

SEQ ID NO: 611124 - RNA, 19 nt, Artificial Sequence
  Description of Artificial Sequence: Synthetic oligonucleotide
  Sense strand starting at position 551 of SEQ ID NO: 585074
ggaauucuuggcugaggaa

SEQ ID NO: 611125 - RNA, 19 nt, Artificial Sequence
  Description of Artificial Sequence: Synthetic oligonucleotide
  Antisense strand to SEQ ID NO: 611124
uuccucagccaagaauucc

SEQ ID NO: 611126 - RNA, 19 nt, Artificial Sequence
  Description of Artificial Sequence: Synthetic oligonucleotide
  Sense strand starting at position 912 of SEQ ID NO: 585074
agaucuuagauaggguuua

SEQ ID NO: 611127 - RNA, 19 nt, Artificial Sequence
  Description of Artificial Sequence: Synthetic oligonucleotide
  Antisense strand to SEQ ID NO: 611126
uaaacccuaucuaagaucu

SEQ ID NO: 611128 - RNA, 19 nt, Artificial Sequence
  Description of Artificial Sequence: Synthetic oligonucleotide
  Sense strand starting at position 962 of SEQ ID NO: 585074
aaagauaaauuguuggcua

SEQ ID NO: 611129 - RNA, 19 nt, Artificial Sequence
  Description of Artificial Sequence: Synthetic oligonucleotide
  Antisense strand to SEQ ID NO: 611128
uagccaacaauuuaucuuu

SEQ ID NO: 611130 - RNA, 19 nt, Artificial Sequence
  Description of Artificial Sequence: Synthetic oligonucleotide
  Sense strand starting at position 964 of SEQ ID NO: 585074
agauaaauuguuggcuaag

SEQ ID NO: 611131 - RNA, 19 nt, Artificial Sequence
  Description of Artificial Sequence: Synthetic oligonucleotide
  Antisense strand to SEQ ID NO: 611130
cuuagccaacaauuuaucu

SEQ ID NO: 611132 - RNA, 19 nt, Artificial Sequence
  Description of Artificial Sequence: Synthetic oligonucleotide
  Sense strand starting at position 965 of SEQ ID NO: 585074
gauaaauuguuggcuaaga

SEQ ID NO: 611133 - RNA, 19 nt, Artificial Sequence
  Description of Artificial Sequence: Synthetic oligonucleotide
  Antisense strand to SEQ ID NO: 611132
ucuuagccaacaauuuauc

SEQ ID NO: 611134 - RNA, 19 nt, Artificial Sequence
  Description of Artificial Sequence: Synthetic oligonucleotide
  Sense strand starting at position 966 of SEQ ID NO: 585074
auaaauuguuggcuaagaa

SEQ ID NO: 611135 - RNA, 19 nt, Artificial Sequence
  Description of Artificial Sequence: Synthetic oligonucleotide
  Antisense strand to SEQ ID NO: 611134
uucuuagccaacaauuuau

SEQ ID NO: 611136 - RNA, 19 nt, Artificial Sequence
  Description of Artificial Sequence: Synthetic oligonucleotide
  Sense strand starting at position 1017 of SEQ ID NO: 585074
ugucaaugucaugguagaa

SEQ ID NO: 611137 - RNA, 19 nt, Artificial Sequence
  Description of Artificial Sequence: Synthetic oligonucleotide
  Antisense strand to SEQ ID NO: 611136
uucuaccaugacauugaca

SEQ ID NO: 611138 - RNA, 19 nt, Artificial Sequence
  Description of Artificial Sequence: Synthetic oligonucleotide
  Sense strand starting at position 1067 of SEQ ID NO: 585074
guaccaggaaguuauuguu

SEQ ID NO: 611139 - RNA, 19 nt, Artificial Sequence
  Description of Artificial Sequence: Synthetic oligonucleotide
  Antisense strand to SEQ ID NO: 611138
aacaauaacuuccugguac

SEQ ID NO: 611140 - RNA, 19 nt, Artificial Sequence
  Description of Artificial Sequence: Synthetic oligonucleotide
  Sense strand starting at position 1082 of SEQ ID NO: 585074
uguuguuaugaacacucaa

SEQ ID NO: 611141 - RNA, 19 nt, Artificial Sequence
  Description of Artificial Sequence: Synthetic oligonucleotide
  Antisense strand to SEQ ID NO: 611140
uugaguguucauaacaaca

SEQ ID NO: 611142 - RNA, 19 nt, Artificial Sequence
  Description of Artificial Sequence: Synthetic oligonucleotide
  Sense strand starting at position 1271 of SEQ ID NO: 585074
ggaaauggauaagcguauu

SEQ ID NO: 611143 - RNA, 19 nt, Artificial Sequence
  Description of Artificial Sequence: Synthetic oligonucleotide
  Antisense strand to SEQ ID NO: 611142
aauacgcuuauccauuucc

SEQ ID NO: 611144 - RNA, 19 nt, Artificial Sequence
  Description of Artificial Sequence: Synthetic oligonucleotide
  Sense strand starting at position 1433 of SEQ ID NO: 585074
agacuaucucuaggaguga

SEQ ID NO: 611145 - RNA, 19 nt, Artificial Sequence
  Description of Artificial Sequence: Synthetic oligonucleotide
  Antisense strand to SEQ ID NO: 611144
ucacuccuagagauagucu

SEQ ID NO: 611146 - RNA, 19 nt, Artificial Sequence
  Description of Artificial Sequence: Synthetic oligonucleotide
  Sense strand starting at position 1437 of SEQ ID NO: 585074
uaucucuaggagugaagua

SEQ ID NO: 611147 - RNA, 19 nt, Artificial Sequence
  Description of Artificial Sequence: Synthetic oligonucleotide
  Antisense strand to SEQ ID NO: 611146
uacuucacuccuagagaua

SEQ ID NO: 611148 - RNA, 19 nt, Artificial Sequence
  Description of Artificial Sequence: Synthetic oligonucleotide
  Sense strand starting at position 1546 of SEQ ID NO: 585074
aagugauugagagguaguu

SEQ ID NO: 611149 - RNA, 19 nt, Artificial Sequence
  Description of Artificial Sequence: Synthetic oligonucleotide
  Antisense strand to SEQ ID NO: 611148
aacuaccucucaaucacuu

SEQ ID NO: 611150 - RNA, 19 nt, Artificial Sequence
  Description of Artificial Sequence: Synthetic oligonucleotide
  Sense strand starting at position 1548 of SEQ ID NO: 585074
gugauugagagguaguuau

SEQ ID NO: 611151 - RNA, 19 nt, Artificial Sequence
  Description of Artificial Sequence: Synthetic oligonucleotide
  Antisense strand to SEQ ID NO: 611150
auaacuaccucucaaucac

SEQ ID NO: 611152 - RNA, 19 nt, Artificial Sequence
  Description of Artificial Sequence: Synthetic oligonucleotide
  Sense strand starting at position 1586 of SEQ ID NO: 585074
gccacaaagcguucuguca

SEQ ID NO: 611153 - RNA, 19 nt, Artificial Sequence
  Description of Artificial Sequence: Synthetic oligonucleotide
  Antisense strand to SEQ ID NO: 611152
ugacagaacgcuuuguggc

SEQ ID NO: 611154 - RNA, 19 nt, Artificial Sequence
  Description of Artificial Sequence: Synthetic oligonucleotide
  Sense strand starting at position 1595 of SEQ ID NO: 585074
cguucugucauggauucca

SEQ ID NO: 611155 - RNA, 19 nt, Artificial Sequence
  Description of Artificial Sequence: Synthetic oligonucleotide
  Antisense strand to SEQ ID NO: 611154
uggaauccaugacagaacg

SEQ ID NO: 611156 - RNA, 19 nt, Artificial Sequence
  Description of Artificial Sequence: Synthetic oligonucleotide
  Sense strand starting at position 1618 of SEQ ID NO: 585074
uugaguuuaacguaauguu

SEQ ID NO: 611157 - RNA, 19 nt, Artificial Sequence
  Description of Artificial Sequence: Synthetic oligonucleotide
  Antisense strand to SEQ ID NO: 611156
aacauuacguuaaacucaa

SEQ ID NO: 611158 - RNA, 19 nt, Artificial Sequence
  Description of Artificial Sequence: Synthetic oligonucleotide
  Sense strand starting at position 1638 of SEQ ID NO: 585074
acuuguuguuacucaaauu

SEQ ID NO: 611159 - RNA, 19 nt, Artificial Sequence
  Description of Artificial Sequence: Synthetic oligonucleotide
  Antisense strand to SEQ ID NO: 611158
aauuugaguaacaacaagu

SEQ ID NO: 611160 - RNA, 19 nt, Artificial Sequence
  Description of Artificial Sequence: Synthetic oligonucleotide
  Sense strand starting at position 1989 of SEQ ID NO: 585074
agagaaacuguaugaguua

SEQ ID NO: 611161 - RNA, 19 nt, Artificial Sequence
  Description of Artificial Sequence: Synthetic oligonucleotide
  Antisense strand to SEQ ID NO: 611160
uaacucauacaguuucucu

SEQ ID NO: 611162 - RNA, 19 nt, Artificial Sequence
  Description of Artificial Sequence: Synthetic oligonucleotide
  Sense strand starting at position 1992 of SEQ ID NO: 585074
gaaacuguaugaguuacau

SEQ ID NO: 611163 - RNA, 19 nt, Artificial Sequence
  Description of Artificial Sequence: Synthetic oligonucleotide
  Antisense strand to SEQ ID NO: 611162
auguaacucauacaguuuc

SEQ ID NO: 611164 - RNA, 19 nt, Artificial Sequence
  Description of Artificial Sequence: Synthetic oligonucleotide
  Sense strand starting at position 1998 of SEQ ID NO: 585074
guaugaguuacauagcugu

SEQ ID NO: 611165 - RNA, 19 nt, Artificial Sequence
  Description of Artificial Sequence: Synthetic oligonucleotide
  Antisense strand to SEQ ID NO: 611164
acagcuauguaacucauac

SEQ ID NO: 611166 - RNA, 19 nt, Artificial Sequence
  Description of Artificial Sequence: Synthetic oligonucleotide
  Sense strand starting at position 2089 of SEQ ID NO: 585074
uguaauaagaaucguguga

SEQ ID NO: 611167 - RNA, 19 nt, Artificial Sequence
  Description of Artificial Sequence: Synthetic oligonucleotide
  Antisense strand to SEQ ID NO: 611166
ucacacgauucuuauuaca

SEQ ID NO: 611168 - RNA, 19 nt, Artificial Sequence
  Description of Artificial Sequence: Synthetic oligonucleotide
  Sense strand starting at position 2347 of SEQ ID NO: 585074
gugcuuugacaacaguaga

SEQ ID NO: 611169 - RNA, 19 nt, Artificial Sequence
  Description of Artificial Sequence: Synthetic oligonucleotide
  Antisense strand to SEQ ID NO: 611168
ucuacuguugucaaagcac

SEQ ID NO: 611170 - RNA, 19 nt, Artificial Sequence
  Description of Artificial Sequence: Synthetic oligonucleotide
  Sense strand starting at position 2730 of SEQ ID NO: 585074
gguuacaguuuggugauga

SEQ ID NO: 611171 - RNA, 19 nt, Artificial Sequence
  Description of Artificial Sequence: Synthetic oligonucleotide
  Antisense strand to SEQ ID NO: 611170
ucaucaccaaacuguaacc

SEQ ID NO: 611172 - RNA, 19 nt, Artificial Sequence
  Description of Artificial Sequence: Synthetic oligonucleotide
  Sense strand starting at position 2762 of SEQ ID NO: 585074
aauaauaguguuggucaaa

SEQ ID NO: 611173 - RNA, 19 nt, Artificial Sequence
  Description of Artificial Sequence: Synthetic oligonucleotide
  Antisense strand to SEQ ID NO: 611172
uuugaccaacacuauuauu

SEQ ID NO: 611174 - RNA, 19 nt, Artificial Sequence
  Description of Artificial Sequence: Synthetic oligonucleotide
  Sense strand starting at position 2763 of SEQ ID NO: 585074
auaauaguguuggucaaag

SEQ ID NO: 611175 - RNA, 19 nt, Artificial Sequence
  Description of Artificial Sequence: Synthetic oligonucleotide
  Antisense strand to SEQ ID NO: 611174
cuuugaccaacacuauuau

SEQ ID NO: 611176 - RNA, 19 nt, Artificial Sequence
  Description of Artificial Sequence: Synthetic oligonucleotide
  Sense strand starting at position 2765 of SEQ ID NO: 585074
aauaguguuggucaaagag

SEQ ID NO: 611177 - RNA, 19 nt, Artificial Sequence
  Description of Artificial Sequence: Synthetic oligonucleotide
  Antisense strand to SEQ ID NO: 611176
cucuuugaccaacacuauu

SEQ ID NO: 611178 - RNA, 19 nt, Artificial Sequence
  Description of Artificial Sequence: Synthetic oligonucleotide
  Sense strand starting at position 2791 of SEQ ID NO: 585074
gcaaauaguggaugcuaaa

SEQ ID NO: 611179 - RNA, 19 nt, Artificial Sequence
  Description of Artificial Sequence: Synthetic oligonucleotide
  Antisense strand to SEQ ID NO: 611178
uuuagcauccacuauuugc

SEQ ID NO: 611180 - RNA, 19 nt, Artificial Sequence
  Description of Artificial Sequence: Synthetic oligonucleotide
  Sense strand starting at position 2843 of SEQ ID NO: 585074
ucucaaaguuugguuccau

SEQ ID NO: 611181 - RNA, 19 nt, Artificial Sequence
  Description of Artificial Sequence: Synthetic oligonucleotide
  Antisense strand to SEQ ID NO: 611180
auggaaccaaacuuugaga

SEQ ID NO: 611182 - RNA, 19 nt, Artificial Sequence
  Description of Artificial Sequence: Synthetic oligonucleotide
  Sense strand starting at position 2859 of SEQ ID NO: 585074
cauggaacaugaguucuau

SEQ ID NO: 611183 - RNA, 19 nt, Artificial Sequence
  Description of Artificial Sequence: Synthetic oligonucleotide
  Antisense strand to SEQ ID NO: 611182
auagaacucauguuccaug

SEQ ID NO: 611184 - RNA, 19 nt, Artificial Sequence
  Description of Artificial Sequence: Synthetic oligonucleotide
  Sense strand starting at position 2865 of SEQ ID NO: 585074
acaugaguucuaugacaac

SEQ ID NO: 611185 - RNA, 19 nt, Artificial Sequence
  Description of Artificial Sequence: Synthetic oligonucleotide
  Antisense strand to SEQ ID NO: 611184
guugucauagaacucaugu

SEQ ID NO: 611186 - RNA, 19 nt, Artificial Sequence
  Description of Artificial Sequence: Synthetic oligonucleotide
  Sense strand starting at position 3652 of SEQ ID NO: 585074
aagacugucuugucacaag

SEQ ID NO: 611187 - RNA, 19 nt, Artificial Sequence
  Description of Artificial Sequence: Synthetic oligonucleotide
  Antisense strand to SEQ ID NO: 611186
cuugugacaagacagucuu

SEQ ID NO: 611188 - RNA, 19 nt, Artificial Sequence
  Description of Artificial Sequence: Synthetic oligonucleotide
  Sense strand starting at position 3664 of SEQ ID NO: 585074
ucacaaggagugugaguau

SEQ ID NO: 611189 - RNA, 19 nt, Artificial Sequence
  Description of Artificial Sequence: Synthetic oligonucleotide
  Antisense strand to SEQ ID NO: 611188
auacucacacuccuuguga

SEQ ID NO: 611190 - RNA, 19 nt, Artificial Sequence
  Description of Artificial Sequence: Synthetic oligonucleotide
  Sense strand starting at position 3966 of SEQ ID NO: 585074
auaaaucugcagcaugaga

SEQ ID NO: 611191 - RNA, 19 nt, Artificial Sequence
  Description of Artificial Sequence: Synthetic oligonucleotide
  Antisense strand to SEQ ID NO: 611190
ucucaugcugcagauuuau

SEQ ID NO: 611192 - RNA, 19 nt, Artificial Sequence
  Description of Artificial Sequence: Synthetic oligonucleotide
  Sense strand starting at position 512 of SEQ ID NO: 585075
ggaaauccauucucaguaa

SEQ ID NO: 611193 - RNA, 19 nt, Artificial Sequence
  Description of Artificial Sequence: Synthetic oligonucleotide
  Antisense strand to SEQ ID NO: 611192
uuacugagaauggauuucc

SEQ ID NO: 611194 - RNA, 19 nt, Artificial Sequence
  Description of Artificial Sequence: Synthetic oligonucleotide
  Sense strand starting at position 1040 of SEQ ID NO: 585075
uccacaagauugccugauu

SEQ ID NO: 611195 - RNA, 19 nt, Artificial Sequence
  Description of Artificial Sequence: Synthetic oligonucleotide
  Antisense strand to SEQ ID NO: 611194
aaucaggcaaucuugugga

SEQ ID NO: 611196 - RNA, 19 nt, Artificial Sequence
  Description of Artificial Sequence: Synthetic oligonucleotide
  Sense strand starting at position 1041 of SEQ ID NO: 585075
ccacaagauugccugauua

SEQ ID NO: 611197 - RNA, 19 nt, Artificial Sequence
  Description of Artificial Sequence: Synthetic oligonucleotide
  Antisense strand to SEQ ID NO: 611196
uaaucaggcaaucuugugg

SEQ ID NO: 611198 - RNA, 19 nt, Artificial Sequence
  Description of Artificial Sequence: Synthetic oligonucleotide
  Sense strand starting at position 1073 of SEQ ID NO: 585075
uggagucagaucuggugua

SEQ ID NO: 611199 - RNA, 19 nt, Artificial Sequence
  Description of Artificial Sequence: Synthetic oligonucleotide
  Antisense strand to SEQ ID NO: 611198
uacaccagaucugacucca

SEQ ID NO: 611200 - RNA, 19 nt, Artificial Sequence
  Description of Artificial Sequence: Synthetic oligonucleotide
  Sense strand starting at position 1078 of SEQ ID NO: 585075
ucagaucugguguaaaccu

SEQ ID NO: 611201 - RNA, 19 nt, Artificial Sequence
  Description of Artificial Sequence: Synthetic oligonucleotide
  Antisense strand to SEQ ID NO: 611200
agguuuacaccagaucuga

SEQ ID NO: 611202 - RNA, 19 nt, Artificial Sequence
  Description of Artificial Sequence: Synthetic oligonucleotide
  Sense strand starting at position 1108 of SEQ ID NO: 585075
ucacuaguuguacaaucuu

SEQ ID NO: 611203 - RNA, 19 nt, Artificial Sequence
  Description of Artificial Sequence: Synthetic oligonucleotide
  Antisense strand to SEQ ID NO: 611202
aagauuguacaacuaguga

SEQ ID NO: 611204 - RNA, 19 nt, Artificial Sequence
  Description of Artificial Sequence: Synthetic oligonucleotide
  Sense strand starting at position 1178 of SEQ ID NO: 585075
augggaaugcuaugaucuc

SEQ ID NO: 611205 - RNA, 19 nt, Artificial Sequence
  Description of Artificial Sequence: Synthetic oligonucleotide
  Antisense strand to SEQ ID NO: 611204
gagaucauagcauucccau

SEQ ID NO: 611206 - RNA, 19 nt, Artificial Sequence
  Description of Artificial Sequence: Synthetic oligonucleotide
  Sense strand starting at position 1312 of SEQ ID NO: 585075
ccaggaaauuaguucuuaa

SEQ ID NO: 611207 - RNA, 19 nt, Artificial Sequence
  Description of Artificial Sequence: Synthetic oligonucleotide
  Antisense strand to SEQ ID NO: 611206
uuaagaacuaauuuccugg

SEQ ID NO: 611208 - RNA, 19 nt, Artificial Sequence
  Description of Artificial Sequence: Synthetic oligonucleotide
  Sense strand starting at position 2044 of SEQ ID NO: 585075
ugaaacacguccuuggauu

SEQ ID NO: 611209 - RNA, 19 nt, Artificial Sequence
  Description of Artificial Sequence: Synthetic oligonucleotide
  Antisense strand to SEQ ID NO: 611208
aauccaaggacguguuuca

SEQ ID NO: 611210 - RNA, 19 nt, Artificial Sequence
  Description of Artificial Sequence: Synthetic oligonucleotide
  Sense strand starting at position 2094 of SEQ ID NO: 585075
cuuuccgauugguuagaca

SEQ ID NO: 611211 - RNA, 19 nt, Artificial Sequence
  Description of Artificial Sequence: Synthetic oligonucleotide
  Antisense strand to SEQ ID NO: 611210
ugucuaaccaaucggaaag

SEQ ID NO: 611212 - RNA, 19 nt, Artificial Sequence
  Description of Artificial Sequence: Synthetic oligonucleotide
  Sense strand starting at position 2127 of SEQ ID NO: 585075
uuguaucggaccuaagagu

SEQ ID NO: 611213 - RNA, 19 nt, Artificial Sequence
  Description of Artificial Sequence: Synthetic oligonucleotide
  Antisense strand to SEQ ID NO: 611212
acucuuagguccgauacaa

SEQ ID NO: 611214 - RNA, 19 nt, Artificial Sequence
  Description of Artificial Sequence: Synthetic oligonucleotide
  Sense strand starting at position 2143 of SEQ ID NO: 585075
aguagagguugauuccacu

SEQ ID NO: 611215 - RNA, 19 nt, Artificial Sequence
  Description of Artificial Sequence: Synthetic oligonucleotide
  Antisense strand to SEQ ID NO: 611214
aguggaaucaaccucuacu

SEQ ID NO: 611216 - RNA, 19 nt, Artificial Sequence
  Description of Artificial Sequence: Synthetic oligonucleotide
  Sense strand starting at position 2370 of SEQ ID NO: 585075
guuccagugaguugggaua

SEQ ID NO: 611217 - RNA, 19 nt, Artificial Sequence
  Description of Artificial Sequence: Synthetic oligonucleotide
  Antisense strand to SEQ ID NO: 611216
uaucccaacucacuggaac

SEQ ID NO: 611218 - RNA, 19 nt, Artificial Sequence
  Description of Artificial Sequence: Synthetic oligonucleotide
  Sense strand starting at position 2397 of SEQ ID NO: 585075
guggaucuaccauagacgu

SEQ ID NO: 611219 - RNA, 19 nt, Artificial Sequence
  Description of Artificial Sequence: Synthetic oligonucleotide
  Antisense strand to SEQ ID NO: 611218
acgucuaugguagauccac

SEQ ID NO: 611220 - RNA, 19 nt, Artificial Sequence
  Description of Artificial Sequence: Synthetic oligonucleotide
  Sense strand starting at position 2411 of SEQ ID NO: 585075
gacgucuguccgucuuacu

SEQ ID NO: 611221 - RNA, 19 nt, Artificial Sequence
  Description of Artificial Sequence: Synthetic oligonucleotide
  Antisense strand to SEQ ID NO: 611220
aguaagacggacagacguc

SEQ ID NO: 611222 - RNA, 19 nt, Artificial Sequence
  Description of Artificial Sequence: Synthetic oligonucleotide
  Sense strand starting at position 2459 of SEQ ID NO: 585075
uagguaauaguuuacaagu

SEQ ID NO: 611223 - RNA, 19 nt, Artificial Sequence
  Description of Artificial Sequence: Synthetic oligonucleotide
  Antisense strand to SEQ ID NO: 611222
acuuguaaacuauuaccua

SEQ ID NO: 611224 - RNA, 19 nt, Artificial Sequence
  Description of Artificial Sequence: Synthetic oligonucleotide
  Sense strand starting at position 2519 of SEQ ID NO: 585075
augaguuacagcugagaaa

SEQ ID NO: 611225 - RNA, 19 nt, Artificial Sequence
  Description of Artificial Sequence: Synthetic oligonucleotide
  Antisense strand to SEQ ID NO: 611224
uuucucagcuguaacucau

SEQ ID NO: 611226 - RNA, 19 nt, Artificial Sequence
  Description of Artificial Sequence: Synthetic oligonucleotide
  Sense strand starting at position 2530 of SEQ ID NO: 585075
cugagaaaugggugcuuac

SEQ ID NO: 611227 - RNA, 19 nt, Artificial Sequence
  Description of Artificial Sequence: Synthetic oligonucleotide
  Antisense strand to SEQ ID NO: 611226
guaagcacccauuucucag

SEQ ID NO: 611228 - RNA, 19 nt, Artificial Sequence
  Description of Artificial Sequence: Synthetic oligonucleotide
  Sense strand starting at position 2533 of SEQ ID NO: 585075
agaaaugggugcuuacuuu

SEQ ID NO: 611229 - RNA, 19 nt, Artificial Sequence
  Description of Artificial Sequence: Synthetic oligonucleotide
  Antisense strand to SEQ ID NO: 611228
aaaguaagcacccauuucu

SEQ ID NO: 611230 - RNA, 19 nt, Artificial Sequence
  Description of Artificial Sequence: Synthetic oligonucleotide
  Sense strand starting at position 2537 of SEQ ID NO: 585075
augggugcuuacuuugaca

SEQ ID NO: 611231 - RNA, 19 nt, Artificial Sequence
  Description of Artificial Sequence: Synthetic oligonucleotide
  Antisense strand to SEQ ID NO: 611230
ugucaaaguaagcacccau

SEQ ID NO: 611232 - RNA, 19 nt, Artificial Sequence
  Description of Artificial Sequence: Synthetic oligonucleotide
  Sense strand starting at position 2539 of SEQ ID NO: 585075
gggugcuuacuuugacaga

SEQ ID NO: 611233 - RNA, 19 nt, Artificial Sequence
  Description of Artificial Sequence: Synthetic oligonucleotide
  Antisense strand to SEQ ID NO: 611232
ucugucaaaguaagcaccc

SEQ ID NO: 611234 - RNA, 19 nt, Artificial Sequence
  Description of Artificial Sequence: Synthetic oligonucleotide
  Sense strand starting at position 2653 of SEQ ID NO: 585075
gaaguagaauuauucgcua

SEQ ID NO: 611235 - RNA, 19 nt, Artificial Sequence
  Description of Artificial Sequence: Synthetic oligonucleotide
  Antisense strand to SEQ ID NO: 611234
uagcgaauaauucuacuuc

SEQ ID NO: 611236 - RNA, 19 nt, Artificial Sequence
  Description of Artificial Sequence: Synthetic oligonucleotide
  Sense strand starting at position 2658 of SEQ ID NO: 585075
agaauuauucgcuaacagu

SEQ ID NO: 611237 - RNA, 19 nt, Artificial Sequence
  Description of Artificial Sequence: Synthetic oligonucleotide
  Antisense strand to SEQ ID NO: 611236
acuguuagcgaauaauucu

SEQ ID NO: 611238 - RNA, 19 nt, Artificial Sequence
  Description of Artificial Sequence: Synthetic oligonucleotide
  Sense strand starting at position 2781 of SEQ ID NO: 585075
gaauuuaauugucccgcuu

SEQ ID NO: 611239 - RNA, 19 nt, Artificial Sequence
  Description of Artificial Sequence: Synthetic oligonucleotide
  Antisense strand to SEQ ID NO: 611238
aagcgggacaauuaaauuc

SEQ ID NO: 611240 - RNA, 19 nt, Artificial Sequence
  Description of Artificial Sequence: Synthetic oligonucleotide
  Sense strand starting at position 2784 of SEQ ID NO: 585075
uuuaauugucccgcuuguu

SEQ ID NO: 611241 - RNA, 19 nt, Artificial Sequence
  Description of Artificial Sequence: Synthetic oligonucleotide
  Antisense strand to SEQ ID NO: 611240
aacaagcgggacaauuaaa

SEQ ID NO: 611242 - RNA, 19 nt, Artificial Sequence
  Description of Artificial Sequence: Synthetic oligonucleotide
  Sense strand starting at position 2896 of SEQ ID NO: 585075
augugauauccucaagugu

SEQ ID NO: 611243 - RNA, 19 nt, Artificial Sequence
  Description of Artificial Sequence: Synthetic oligonucleotide
  Antisense strand to SEQ ID NO: 611242
acacuugaggauaucacau

SEQ ID NO: 611244 - RNA, 19 nt, Artificial Sequence
  Description of Artificial Sequence: Synthetic oligonucleotide
  Sense strand starting at position 2940 of SEQ ID NO: 585075
guaccuggauuaguaaacu

SEQ ID NO: 611245 - RNA, 19 nt, Artificial Sequence
  Description of Artificial Sequence: Synthetic oligonucleotide
  Antisense strand to SEQ ID NO: 611244
aguuuacuaauccagguac

SEQ ID NO: 611246 - RNA, 19 nt, Artificial Sequence
  Description of Artificial Sequence: Synthetic oligonucleotide
  Sense strand starting at position 2946 of SEQ ID NO: 585075
ggauuaguaaacugcagua

SEQ ID NO: 611247 - RNA, 19 nt, Artificial Sequence
  Description of Artificial Sequence: Synthetic oligonucleotide
  Antisense strand to SEQ ID NO: 611246
uacugcaguuuacuaaucc

SEQ ID NO: 611248 - RNA, 19 nt, Artificial Sequence
  Description of Artificial Sequence: Synthetic oligonucleotide
  Sense strand starting at position 3002 of SEQ ID NO: 585075
uggucugaaccuuacagua

SEQ ID NO: 611249 - RNA, 19 nt, Artificial Sequence
  Description of Artificial Sequence: Synthetic oligonucleotide
  Antisense strand to SEQ ID NO: 611248
uacuguaagguucagacca

SEQ ID NO: 611250 - RNA, 19 nt, Artificial Sequence
  Description of Artificial Sequence: Synthetic oligonucleotide
  Sense strand starting at position 3146 of SEQ ID NO: 585075
ggugaauaugggcaucuua

SEQ ID NO: 611251 - RNA, 19 nt, Artificial Sequence
  Description of Artificial Sequence: Synthetic oligonucleotide
  Antisense strand to SEQ ID NO: 611250
uaagaugcccauauucacc

SEQ ID NO: 611252 - RNA, 19 nt, Artificial Sequence
  Description of Artificial Sequence: Synthetic oligonucleotide
  Sense strand starting at position 3159 of SEQ ID NO: 585075
aucuuagauccaugggcuu

SEQ ID NO: 611253 - RNA, 19 nt, Artificial Sequence
  Description of Artificial Sequence: Synthetic oligonucleotide
  Antisense strand to SEQ ID NO: 611252
aagcccauggaucuaagau

SEQ ID NO: 611254 - RNA, 19 nt, Artificial Sequence
  Description of Artificial Sequence: Synthetic oligonucleotide
  Sense strand starting at position 3234 of SEQ ID NO: 585075
ccuagaaccugguuugaau

SEQ ID NO: 611255 - RNA, 19 nt, Artificial Sequence
  Description of Artificial Sequence: Synthetic oligonucleotide
  Antisense strand to SEQ ID NO: 611254
auucaaaccagguucuagg

SEQ ID NO: 611256 - RNA, 19 nt, Artificial Sequence
  Description of Artificial Sequence: Synthetic oligonucleotide
  Sense strand starting at position 3375 of SEQ ID NO: 585075
gaggaaagcgaguagagua

SEQ ID NO: 611257 - RNA, 19 nt, Artificial Sequence
  Description of Artificial Sequence: Synthetic oligonucleotide
  Antisense strand to SEQ ID NO: 611256
uacucuacucgcuuuccuc

SEQ ID NO: 611258 - RNA, 19 nt, Artificial Sequence
  Description of Artificial Sequence: Synthetic oligonucleotide
  Sense strand starting at position 3504 of SEQ ID NO: 585075
gguaauguccaaugacaua

SEQ ID NO: 611259 - RNA, 19 nt, Artificial Sequence
  Description of Artificial Sequence: Synthetic oligonucleotide
  Antisense strand to SEQ ID NO: 611258
uaugucauuggacauuacc

SEQ ID NO: 611260 - RNA, 19 nt, Artificial Sequence
  Description of Artificial Sequence: Synthetic oligonucleotide
  Sense strand starting at position 3525 of SEQ ID NO: 585075
auuuaagauuagcagaacu

SEQ ID NO: 611261 - RNA, 19 nt, Artificial Sequence
  Description of Artificial Sequence: Synthetic oligonucleotide
  Antisense strand to SEQ ID NO: 611260
aguucugcuaaucuuaaau

SEQ ID NO: 611262 - RNA, 19 nt, Artificial Sequence
  Description of Artificial Sequence: Synthetic oligonucleotide
  Sense strand starting at position 3569 of SEQ ID NO: 585075
ugugcauauccuguuuguu

SEQ ID NO: 611263 - RNA, 19 nt, Artificial Sequence
  Description of Artificial Sequence: Synthetic oligonucleotide
  Antisense strand to SEQ ID NO: 611262
aacaaacaggauaugcaca

SEQ ID NO: 611264 - RNA, 19 nt, Artificial Sequence
  Description of Artificial Sequence: Synthetic oligonucleotide
  Sense strand starting at position 3631 of SEQ ID NO: 585075
gaaugccaucuaggucaga

SEQ ID NO: 611265 - RNA, 19 nt, Artificial Sequence
  Description of Artificial Sequence: Synthetic oligonucleotide
  Antisense strand to SEQ ID NO: 611264
ucugaccuagauggcauuc

SEQ ID NO: 611266 - RNA, 19 nt, Artificial Sequence
  Description of Artificial Sequence: Synthetic oligonucleotide
  Sense strand starting at position 3632 of SEQ ID NO: 585075
aaugccaucuaggucagau

SEQ ID NO: 611267 - RNA, 19 nt, Artificial Sequence
  Description of Artificial Sequence: Synthetic oligonucleotide
  Antisense strand to SEQ ID NO: 611266
aucugaccuagauggcauu

SEQ ID NO: 611268 - RNA, 19 nt, Artificial Sequence
  Description of Artificial Sequence: Synthetic oligonucleotide
  Sense strand starting at position 3685 of SEQ ID NO: 585075
agaggacucucuuuaucca

SEQ ID NO: 611269 - RNA, 19 nt, Artificial Sequence
  Description of Artificial Sequence: Synthetic oligonucleotide
  Antisense strand to SEQ ID NO: 611268
uggauaaagagaguccucu

SEQ ID NO: 611270 - RNA, 19 nt, Artificial Sequence
  Description of Artificial Sequence: Synthetic oligonucleotide
  Sense strand starting at position 3886 of SEQ ID NO: 585075
ggauauuuaucgucuugug

SEQ ID NO: 611271 - RNA, 19 nt, Artificial Sequence
  Description of Artificial Sequence: Synthetic oligonucleotide
  Antisense strand to SEQ ID NO: 611270
cacaagacgauaaauaucc

SEQ ID NO: 611272 - RNA, 19 nt, Artificial Sequence
  Description of Artificial Sequence: Synthetic oligonucleotide
  Sense strand starting at position 52 of SEQ ID NO: 585076
uuaucauugauagguguag

SEQ ID NO: 611273 - RNA, 19 nt, Artificial Sequence
  Description of Artificial Sequence: Synthetic oligonucleotide
  Antisense strand to SEQ ID NO: 611272
cuacaccuaucaaugauaa

SEQ ID NO: 611274 - RNA, 19 nt, Artificial Sequence
  Description of Artificial Sequence: Synthetic oligonucleotide
  Sense strand starting at position 54 of SEQ ID NO: 585076
aucauugauagguguagua

SEQ ID NO: 611275 - RNA, 19 nt, Artificial Sequence
  Description of Artificial Sequence: Synthetic oligonucleotide
  Antisense strand to SEQ ID NO: 611274
uacuacaccuaucaaugau

SEQ ID NO: 611276 - RNA, 19 nt, Artificial Sequence
  Description of Artificial Sequence: Synthetic oligonucleotide
  Sense strand starting at position 56 of SEQ ID NO: 585076
cauugauagguguaguaaa

SEQ ID NO: 611277 - RNA, 19 nt, Artificial Sequence
  Description of Artificial Sequence: Synthetic oligonucleotide
  Antisense strand to SEQ ID NO: 611276
uuuacuacaccuaucaaug

SEQ ID NO: 611278 - RNA, 19 nt, Artificial Sequence
  Description of Artificial Sequence: Synthetic oligonucleotide
  Sense strand starting at position 88 of SEQ ID NO: 585076
uuuaaagcucugugaauca

SEQ ID NO: 611279 - RNA, 19 nt, Artificial Sequence
  Description of Artificial Sequence: Synthetic oligonucleotide
  Antisense strand to SEQ ID NO: 611278
ugauucacagagcuuuaaa

SEQ ID NO: 611280 - RNA, 19 nt, Artificial Sequence
  Description of Artificial Sequence: Synthetic oligonucleotide
  Sense strand starting at position 93 of SEQ ID NO: 585076
agcucugugaaucaagguu

SEQ ID NO: 611281 - RNA, 19 nt, Artificial Sequence
  Description of Artificial Sequence: Synthetic oligonucleotide
  Antisense strand to SEQ ID NO: 611280
aaccuugauucacagagcu

SEQ ID NO: 611282 - RNA, 19 nt, Artificial Sequence
  Description of Artificial Sequence: Synthetic oligonucleotide
  Sense strand starting at position 728 of SEQ ID NO: 585076
cuguauuauagguacaggu

SEQ ID NO: 611283 - RNA, 19 nt, Artificial Sequence
  Description of Artificial Sequence: Synthetic oligonucleotide
  Antisense strand to SEQ ID NO: 611282
accuguaccuauaauacag

SEQ ID NO: 611284 - RNA, 19 nt, Artificial Sequence
  Description of Artificial Sequence: Synthetic oligonucleotide
  Sense strand starting at position 730 of SEQ ID NO: 585076
guauuauagguacagguaa

SEQ ID NO: 611285 - RNA, 19 nt, Artificial Sequence
  Description of Artificial Sequence: Synthetic oligonucleotide
  Antisense strand to SEQ ID NO: 611284
uuaccuguaccuauaauac

SEQ ID NO: 611286 - RNA, 19 nt, Artificial Sequence
  Description of Artificial Sequence: Synthetic oligonucleotide
  Sense strand starting at position 808 of SEQ ID NO: 585076
ggguauucgcugagggcaa

SEQ ID NO: 611287 - RNA, 19 nt, Artificial Sequence
  Description of Artificial Sequence: Synthetic oligonucleotide
  Antisense strand to SEQ ID NO: 611286
uugcccucagcgaauaccc

SEQ ID NO: 611288 - RNA, 19 nt, Artificial Sequence
  Description of Artificial Sequence: Synthetic oligonucleotide
  Sense strand starting at position 909 of SEQ ID NO: 585076
ucaagaugauagcucaaau

SEQ ID NO: 611289 - RNA, 19 nt, Artificial Sequence
  Description of Artificial Sequence: Synthetic oligonucleotide
  Antisense strand to SEQ ID NO: 611288
auuugagcuaucaucuuga

SEQ ID NO: 611290 - RNA, 19 nt, Artificial Sequence
  Description of Artificial Sequence: Synthetic oligonucleotide
  Sense strand starting at position 1011 of SEQ ID NO: 585076
gcaaauagguuacugcaaa

SEQ ID NO: 611291 - RNA, 19 nt, Artificial Sequence
  Description of Artificial Sequence: Synthetic oligonucleotide
  Antisense strand to SEQ ID NO: 611290
uuugcaguaaccuauuugc

SEQ ID NO: 611292 - RNA, 19 nt, Artificial Sequence
  Description of Artificial Sequence: Synthetic oligonucleotide
  Sense strand starting at position 1039 of SEQ ID NO: 585076
ucaccuaucuggcuaugga

SEQ ID NO: 611293 - RNA, 19 nt, Artificial Sequence
  Description of Artificial Sequence: Synthetic oligonucleotide
  Antisense strand to SEQ ID NO: 611292
uccauagccagauagguga

SEQ ID NO: 611294 - RNA, 19 nt, Artificial Sequence
  Description of Artificial Sequence: Synthetic oligonucleotide
  Sense strand starting at position 1040 of SEQ ID NO: 585076
caccuaucuggcuauggau

SEQ ID NO: 611295 - RNA, 19 nt, Artificial Sequence
  Description of Artificial Sequence: Synthetic oligonucleotide
  Antisense strand to SEQ ID NO: 611294
auccauagccagauaggug

SEQ ID NO: 611296 - RNA, 19 nt, Artificial Sequence
  Description of Artificial Sequence: Synthetic oligonucleotide
  Sense strand starting at position 1205 of SEQ ID NO: 585076
aaauuaauucggcacaugu

SEQ ID NO: 611297 - RNA, 19 nt, Artificial Sequence
  Description of Artificial Sequence: Synthetic oligonucleotide
  Antisense strand to SEQ ID NO: 611296
acaugugccgaauuaauuu

SEQ ID NO: 611298 - RNA, 19 nt, Artificial Sequence
  Description of Artificial Sequence: Synthetic oligonucleotide
  Sense strand starting at position 1271 of SEQ ID NO: 585076
gauuaaguguugucuaaag

SEQ ID NO: 611299 - RNA, 19 nt, Artificial Sequence
  Description of Artificial Sequence: Synthetic oligonucleotide
  Antisense strand to SEQ ID NO: 611298
cuuuagacaacacuuaauc

SEQ ID NO: 611300 - RNA, 19 nt, Artificial Sequence
  Description of Artificial Sequence: Synthetic oligonucleotide
  Sense strand starting at position 1280 of SEQ ID NO: 585076
uugucuaaagcuuaggaau

SEQ ID NO: 611301 - RNA, 19 nt, Artificial Sequence
  Description of Artificial Sequence: Synthetic oligonucleotide
  Antisense strand to SEQ ID NO: 611300
auuccuaagcuuuagacaa

SEQ ID NO: 611302 - RNA, 19 nt, Artificial Sequence
  Description of Artificial Sequence: Synthetic oligonucleotide
  Sense strand starting at position 1292 of SEQ ID NO: 585076
uaggaauguuuggcaagaa

SEQ ID NO: 611303 - RNA, 19 nt, Artificial Sequence
  Description of Artificial Sequence: Synthetic oligonucleotide
  Antisense strand to SEQ ID NO: 611302
uucuugccaaacauuccua

SEQ ID NO: 611304 - RNA, 19 nt, Artificial Sequence
  Description of Artificial Sequence: Synthetic oligonucleotide
  Sense strand starting at position 2248 of SEQ ID NO: 585076
gucagugaugcugagagau

SEQ ID NO: 611305 - RNA, 19 nt, Artificial Sequence
  Description of Artificial Sequence: Synthetic oligonucleotide
  Antisense strand to SEQ ID NO: 611304
aucucucagcaucacugac

SEQ ID NO: 611306 - RNA, 19 nt, Artificial Sequence
  Description of Artificial Sequence: Synthetic oligonucleotide
  Sense strand starting at position 2502 of SEQ ID NO: 585076
ucugcuuuaccucagaaag

SEQ ID NO: 611307 - RNA, 19 nt, Artificial Sequence
  Description of Artificial Sequence: Synthetic oligonucleotide
  Antisense strand to SEQ ID NO: 611306
cuuucugagguaaagcaga

SEQ ID NO: 611308 - RNA, 19 nt, Artificial Sequence
  Description of Artificial Sequence: Synthetic oligonucleotide
  Sense strand starting at position 2576 of SEQ ID NO: 585076
aauugaggucccugaggua

SEQ ID NO: 611309 - RNA, 19 nt, Artificial Sequence
  Description of Artificial Sequence: Synthetic oligonucleotide
  Antisense strand to SEQ ID NO: 611308
uaccucagggaccucaauu

SEQ ID NO: 611310 - RNA, 19 nt, Artificial Sequence
  Description of Artificial Sequence: Synthetic oligonucleotide
  Sense strand starting at position 2876 of SEQ ID NO: 585076
ugggauaaucaauggcauu

SEQ ID NO: 611311 - RNA, 19 nt, Artificial Sequence
  Description of Artificial Sequence: Synthetic oligonucleotide
  Antisense strand to SEQ ID NO: 611310
aaugccauugauuauccca

SEQ ID NO: 611312 - RNA, 19 nt, Artificial Sequence
  Description of Artificial Sequence: Synthetic oligonucleotide
  Sense strand starting at position 3066 of SEQ ID NO: 585076
auaauaucagguugauugu

SEQ ID NO: 611313 - RNA, 19 nt, Artificial Sequence
  Description of Artificial Sequence: Synthetic oligonucleotide
  Antisense strand to SEQ ID NO: 611312
acaaucaaccugauauuau

SEQ ID NO: 611314 - RNA, 19 nt, Artificial Sequence
  Description of Artificial Sequence: Synthetic oligonucleotide
  Sense strand starting at position 3072 of SEQ ID NO: 585076
ucagguugauuguuacaau

SEQ ID NO: 611315 - RNA, 19 nt, Artificial Sequence
  Description of Artificial Sequence: Synthetic oligonucleotide
  Antisense strand to SEQ ID NO: 611314
auuguaacaaucaaccuga

SEQ ID NO: 611316 - RNA, 19 nt, Artificial Sequence
  Description of Artificial Sequence: Synthetic oligonucleotide
  Sense strand starting at position 3100 of SEQ ID NO: 585076
acaucuaauuagcugguaa

SEQ ID NO: 611317 - RNA, 19 nt, Artificial Sequence
  Description of Artificial Sequence: Synthetic oligonucleotide
  Antisense strand to SEQ ID NO: 611316
uuaccagcuaauuagaugu

SEQ ID NO: 611318 - RNA, 19 nt, Artificial Sequence
  Description of Artificial Sequence: Synthetic oligonucleotide
  Sense strand starting at position 3121 of SEQ ID NO: 585076
cugggagcauaucugcaau

SEQ ID NO: 611319 - RNA, 19 nt, Artificial Sequence
  Description of Artificial Sequence: Synthetic oligonucleotide
  Antisense strand to SEQ ID NO: 611318
auugcagauaugcucccag

SEQ ID NO: 611320 - RNA, 19 nt, Artificial Sequence
  Description of Artificial Sequence: Synthetic oligonucleotide
  Sense strand starting at position 3124 of SEQ ID NO: 585076
ggagcauaucugcaauggu

SEQ ID NO: 611321 - RNA, 19 nt, Artificial Sequence
  Description of Artificial Sequence: Synthetic oligonucleotide
  Antisense strand to SEQ ID NO: 611320
accauugcagauaugcucc

SEQ ID NO: 611322 - RNA, 19 nt, Artificial Sequence
  Description of Artificial Sequence: Synthetic oligonucleotide
  Sense strand starting at position 3188 of SEQ ID NO: 585076
ggagcuuuaaagugaauag

SEQ ID NO: 611323 - RNA, 19 nt, Artificial Sequence
  Description of Artificial Sequence: Synthetic oligonucleotide
  Antisense strand to SEQ ID NO: 611322
cuauucacuuuaaagcucc

SEQ ID NO: 611324 - RNA, 19 nt, Artificial Sequence
  Description of Artificial Sequence: Synthetic oligonucleotide
  Sense strand starting at position 3374 of SEQ ID NO: 585076
guaacuugaguuuaugguu

SEQ ID NO: 611325 - RNA, 19 nt, Artificial Sequence
  Description of Artificial Sequence: Synthetic oligonucleotide
  Antisense strand to SEQ ID NO: 611324
aaccauaaacucaaguuac

SEQ ID NO: 611326 - RNA, 19 nt, Artificial Sequence
  Description of Artificial Sequence: Synthetic oligonucleotide
  Sense strand starting at position 3417 of SEQ ID NO: 585076
gagggaggcugguuucuau

SEQ ID NO: 611327 - RNA, 19 nt, Artificial Sequence
  Description of Artificial Sequence: Synthetic oligonucleotide
  Antisense strand to SEQ ID NO: 611326
auagaaaccagccucccuc

SEQ ID NO: 611328 - RNA, 19 nt, Artificial Sequence
  Description of Artificial Sequence: Synthetic oligonucleotide
  Sense strand starting at position 3463 of SEQ ID NO: 585076
uugaacaaguuguuccaau

SEQ ID NO: 611329 - RNA, 19 nt, Artificial Sequence
  Description of Artificial Sequence: Synthetic oligonucleotide
  Antisense strand to SEQ ID NO: 611328
auuggaacaacuuguucaa

SEQ ID NO: 611330 - RNA, 19 nt, Artificial Sequence
  Description of Artificial Sequence: Synthetic oligonucleotide
  Sense strand starting at position 3464 of SEQ ID NO: 585076
ugaacaaguuguuccaauu

SEQ ID NO: 611331 - RNA, 19 nt, Artificial Sequence
  Description of Artificial Sequence: Synthetic oligonucleotide
  Antisense strand to SEQ ID NO: 611330
aauuggaacaacuuguuca

SEQ ID NO: 611332 - RNA, 19 nt, Artificial Sequence
  Description of Artificial Sequence: Synthetic oligonucleotide
  Sense strand starting at position 3518 of SEQ ID NO: 585076
ggaacagagugguccaauc

SEQ ID NO: 611333 - RNA, 19 nt, Artificial Sequence
  Description of Artificial Sequence: Synthetic oligonucleotide
  Antisense strand to SEQ ID NO: 611332
gauuggaccacucuguucc

SEQ ID NO: 611334 - RNA, 19 nt, Artificial Sequence
  Description of Artificial Sequence: Synthetic oligonucleotide
  Sense strand starting at position 3520 of SEQ ID NO: 585076
aacagagugguccaaucuu

SEQ ID NO: 611335 - RNA, 19 nt, Artificial Sequence
  Description of Artificial Sequence: Synthetic oligonucleotide
  Antisense strand to SEQ ID NO: 611334
aagauuggaccacucuguu

SEQ ID NO: 611336 - RNA, 19 nt, Artificial Sequence
  Description of Artificial Sequence: Synthetic oligonucleotide
  Sense strand starting at position 3598 of SEQ ID NO: 585076
aauguacgcuuaucagaga

SEQ ID NO: 611337 - RNA, 19 nt, Artificial Sequence
  Description of Artificial Sequence: Synthetic oligonucleotide
  Antisense strand to SEQ ID NO: 611336
ucucugauaagcguacauu

SEQ ID NO: 611338 - RNA, 19 nt, Artificial Sequence
  Description of Artificial Sequence: Synthetic oligonucleotide
  Sense strand starting at position 3691 of SEQ ID NO: 585076
ugcuuugcucugcaaauuu

SEQ ID NO: 611339 - RNA, 19 nt, Artificial Sequence
  Description of Artificial Sequence: Synthetic oligonucleotide
  Antisense strand to SEQ ID NO: 611338
aaauuugcagagcaaagca

SEQ ID NO: 611340 - RNA, 19 nt, Artificial Sequence
  Description of Artificial Sequence: Synthetic oligonucleotide
  Sense strand starting at position 3743 of SEQ ID NO: 585076
cugugaaauaggcauggua

SEQ ID NO: 611341 - RNA, 19 nt, Artificial Sequence
  Description of Artificial Sequence: Synthetic oligonucleotide
  Antisense strand to SEQ ID NO: 611340
uaccaugccuauuucacag

SEQ ID NO: 611342 - RNA, 19 nt, Artificial Sequence
  Description of Artificial Sequence: Synthetic oligonucleotide
  Sense strand starting at position 3745 of SEQ ID NO: 585076
gugaaauaggcaugguaca

SEQ ID NO: 611343 - RNA, 19 nt, Artificial Sequence
  Description of Artificial Sequence: Synthetic oligonucleotide
  Antisense strand to SEQ ID NO: 611342
uguaccaugccuauuucac

SEQ ID NO: 611344 - RNA, 19 nt, Artificial Sequence
  Description of Artificial Sequence: Synthetic oligonucleotide
  Sense strand starting at position 3795 of SEQ ID NO: 585076
ugcucauaagacugccaga

SEQ ID NO: 611345 - RNA, 19 nt, Artificial Sequence
  Description of Artificial Sequence: Synthetic oligonucleotide
  Antisense strand to SEQ ID NO: 611344
ucuggcagucuuaugagca

SEQ ID NO: 611346 - RNA, 19 nt, Artificial Sequence
  Description of Artificial Sequence: Synthetic oligonucleotide
  Sense strand starting at position 3806 of SEQ ID NO: 585076
cugccagauuccucccaga

SEQ ID NO: 611347 - RNA, 19 nt, Artificial Sequence
  Description of Artificial Sequence: Synthetic oligonucleotide
  Antisense strand to SEQ ID NO: 611346
ucugggaggaaucuggcag

SEQ ID NO: 611348 - RNA, 19 nt, Artificial Sequence
  Description of Artificial Sequence: Synthetic oligonucleotide
  Sense strand starting at position 3889 of SEQ ID NO: 585076
gagaaagucugguuuacau

SEQ ID NO: 611349 - RNA, 19 nt, Artificial Sequence
  Description of Artificial Sequence: Synthetic oligonucleotide
  Antisense strand to SEQ ID NO: 611348
auguaaaccagacuuucuc

SEQ ID NO: 611350 - RNA, 19 nt, Artificial Sequence
  Description of Artificial Sequence: Synthetic oligonucleotide
  Sense strand starting at position 3933 of SEQ ID NO: 585076
ugagauuccugcucccaca

SEQ ID NO: 611351 - RNA, 19 nt, Artificial Sequence
  Description of Artificial Sequence: Synthetic oligonucleotide
  Antisense strand to SEQ ID NO: 611350
ugugggagcaggaaucuca

SEQ ID NO: 611352 - RNA, 19 nt, Artificial Sequence
  Description of Artificial Sequence: Synthetic oligonucleotide
  Sense strand starting at position 20 of SEQ ID NO: 585077
cuuguacaguucuccaaua

SEQ ID NO: 611353 - RNA, 19 nt, Artificial Sequence
  Description of Artificial Sequence: Synthetic oligonucleotide
  Antisense strand to SEQ ID NO: 611352
uauuggagaacuguacaag

SEQ ID NO: 611354 - RNA, 19 nt, Artificial Sequence
  Description of Artificial Sequence: Synthetic oligonucleotide
  Sense strand starting at position 21 of SEQ ID NO: 585077
uuguacaguucuccaauaa

SEQ ID NO: 611355 - RNA, 19 nt, Artificial Sequence
  Description of Artificial Sequence: Synthetic oligonucleotide
  Antisense strand to SEQ ID NO: 611354
uuauuggagaacuguacaa

SEQ ID NO: 611356 - RNA, 19 nt, Artificial Sequence
  Description of Artificial Sequence: Synthetic oligonucleotide
  Sense strand starting at position 22 of SEQ ID NO: 585077
uguacaguucuccaauaac

SEQ ID NO: 611357 - RNA, 19 nt, Artificial Sequence
  Description of Artificial Sequence: Synthetic oligonucleotide
  Antisense strand to SEQ ID NO: 611356
guuauuggagaacuguaca

SEQ ID NO: 611358 - RNA, 19 nt, Artificial Sequence
  Description of Artificial Sequence: Synthetic oligonucleotide
  Sense strand starting at position 63 of SEQ ID NO: 585077
guuugauggugguucuuaa

SEQ ID NO: 611359 - RNA, 19 nt, Artificial Sequence
  Description of Artificial Sequence: Synthetic oligonucleotide
  Antisense strand to SEQ ID NO: 611358
uuaagaaccaccaucaaac

SEQ ID NO: 611360 - RNA, 19 nt, Artificial Sequence
  Description of Artificial Sequence: Synthetic oligonucleotide
  Sense strand starting at position 174 of SEQ ID NO: 585077
ccaguuggcccuuaucaca

SEQ ID NO: 611361 - RNA, 19 nt, Artificial Sequence
  Description of Artificial Sequence: Synthetic oligonucleotide
  Antisense strand to SEQ ID NO: 611360
ugugauaagggccaacugg

SEQ ID NO: 611362 - RNA, 19 nt, Artificial Sequence
  Description of Artificial Sequence: Synthetic oligonucleotide
  Sense strand starting at position 195 of SEQ ID NO: 585077
ucaagauugcauugcaaug

SEQ ID NO: 611363 - RNA, 19 nt, Artificial Sequence
  Description of Artificial Sequence: Synthetic oligonucleotide
  Antisense strand to SEQ ID NO: 611362
cauugcaaugcaaucuuga

SEQ ID NO: 611364 - RNA, 19 nt, Artificial Sequence
  Description of Artificial Sequence: Synthetic oligonucleotide
  Sense strand starting at position 245 of SEQ ID NO: 585077
agugauuucucacagcaau

SEQ ID NO: 611365 - RNA, 19 nt, Artificial Sequence
  Description of Artificial Sequence: Synthetic oligonucleotide
  Antisense strand to SEQ ID NO: 611364
auugcugugagaaaucacu

SEQ ID NO: 611366 - RNA, 19 nt, Artificial Sequence
  Description of Artificial Sequence: Synthetic oligonucleotide
  Sense strand starting at position 287 of SEQ ID NO: 585077
aggauuaagcacuauucgu

SEQ ID NO: 611367 - RNA, 19 nt, Artificial Sequence
  Description of Artificial Sequence: Synthetic oligonucleotide
  Antisense strand to SEQ ID NO: 611366
acgaauagugcuuaauccu

SEQ ID NO: 611368 - RNA, 19 nt, Artificial Sequence
  Description of Artificial Sequence: Synthetic oligonucleotide
  Sense strand starting at position 388 of SEQ ID NO: 585077
ugcuaaguccaaggugaaa

SEQ ID NO: 611369 - RNA, 19 nt, Artificial Sequence
  Description of Artificial Sequence: Synthetic oligonucleotide
  Antisense strand to SEQ ID NO: 611368
uuucaccuuggacuuagca

SEQ ID NO: 611370 - RNA, 19 nt, Artificial Sequence
  Description of Artificial Sequence: Synthetic oligonucleotide
  Sense strand starting at position 400 of SEQ ID NO: 585077
ggugaaaucugacagaaca

SEQ ID NO: 611371 - RNA, 19 nt, Artificial Sequence
  Description of Artificial Sequence: Synthetic oligonucleotide
  Antisense strand to SEQ ID NO: 611370
uguucugucagauuucacc

SEQ ID NO: 611372 - RNA, 19 nt, Artificial Sequence
  Description of Artificial Sequence: Synthetic oligonucleotide
  Sense strand starting at position 430 of SEQ ID NO: 585077
gcuaauucucaacagcguu

SEQ ID NO: 611373 - RNA, 19 nt, Artificial Sequence
  Description of Artificial Sequence: Synthetic oligonucleotide
  Antisense strand to SEQ ID NO: 611372
aacgcuguugagaauuagc

SEQ ID NO: 611374 - RNA, 19 nt, Artificial Sequence
  Description of Artificial Sequence: Synthetic oligonucleotide
  Sense strand starting at position 436 of SEQ ID NO: 585077
ucucaacagcguuauaaag

SEQ ID NO: 611375 - RNA, 19 nt, Artificial Sequence
  Description of Artificial Sequence: Synthetic oligonucleotide
  Antisense strand to SEQ ID NO: 611374
cuuuauaacgcuguugaga

SEQ ID NO: 611376 - RNA, 19 nt, Artificial Sequence
  Description of Artificial Sequence: Synthetic oligonucleotide
  Sense strand starting at position 444 of SEQ ID NO: 585077
gcguuauaaagagaccaga

SEQ ID NO: 611377 - RNA, 19 nt, Artificial Sequence
  Description of Artificial Sequence: Synthetic oligonucleotide
  Antisense strand to SEQ ID NO: 611376
ucuggucucuuuauaacgc

SEQ ID NO: 611378 - RNA, 19 nt, Artificial Sequence
  Description of Artificial Sequence: Synthetic oligonucleotide
  Sense strand starting at position 907 of SEQ ID NO: 585077
aggugagcgaucuagagaa

SEQ ID NO: 611379 - RNA, 19 nt, Artificial Sequence
  Description of Artificial Sequence: Synthetic oligonucleotide
  Antisense strand to SEQ ID NO: 611378
uucucuagaucgcucaccu

SEQ ID NO: 611380 - RNA, 19 nt, Artificial Sequence
  Description of Artificial Sequence: Synthetic oligonucleotide
  Sense strand starting at position 911 of SEQ ID NO: 585077
gagcgaucuagagaagcau

SEQ ID NO: 611381 - RNA, 19 nt, Artificial Sequence
  Description of Artificial Sequence: Synthetic oligonucleotide
  Antisense strand to SEQ ID NO: 611380
augcuucucuagaucgcuc

SEQ ID NO: 611382 - RNA, 19 nt, Artificial Sequence
  Description of Artificial Sequence: Synthetic oligonucleotide
  Sense strand starting at position 2187 of SEQ ID NO: 585077
aggcguucucaacugcgau

SEQ ID NO: 611383 - RNA, 19 nt, Artificial Sequence
  Description of Artificial Sequence: Synthetic oligonucleotide
  Antisense strand to SEQ ID NO: 611382
aucgcaguugagaacgccu

SEQ ID NO: 611384 - RNA, 19 nt, Artificial Sequence
  Description of Artificial Sequence: Synthetic oligonucleotide
  Sense strand starting at position 2199 of SEQ ID NO: 585077
cugcgauucccggccuuaa

SEQ ID NO: 611385 - RNA, 19 nt, Artificial Sequence
  Description of Artificial Sequence: Synthetic oligonucleotide
  Antisense strand to SEQ ID NO: 611384
uuaaggccgggaaucgcag

SEQ ID NO: 611386 - RNA, 19 nt, Artificial Sequence
  Description of Artificial Sequence: Synthetic oligonucleotide
  Sense strand starting at position 2210 of SEQ ID NO: 585077
ggccuuaaauguccucuca

SEQ ID NO: 611387 - RNA, 19 nt, Artificial Sequence
  Description of Artificial Sequence: Synthetic oligonucleotide
  Antisense strand to SEQ ID NO: 611386
ugagaggacauuuaaggcc

SEQ ID NO: 611388 - RNA, 19 nt, Artificial Sequence
  Description of Artificial Sequence: Synthetic oligonucleotide
  Sense strand starting at position 2280 of SEQ ID NO: 585077
agcgccuuccuagagguaa

SEQ ID NO: 611389 - RNA, 19 nt, Artificial Sequence
  Description of Artificial Sequence: Synthetic oligonucleotide
  Antisense strand to SEQ ID NO: 611388
uuaccucuaggaaggcgcu

SEQ ID NO: 611390 - RNA, 19 nt, Artificial Sequence
  Description of Artificial Sequence: Synthetic oligonucleotide
  Sense strand starting at position 2282 of SEQ ID NO: 585077
cgccuuccuagagguaaac

SEQ ID NO: 611391 - RNA, 19 nt, Artificial Sequence
  Description of Artificial Sequence: Synthetic oligonucleotide
  Antisense strand to SEQ ID NO: 611390
guuuaccucuaggaaggcg

SEQ ID NO: 611392 - RNA, 19 nt, Artificial Sequence
  Description of Artificial Sequence: Synthetic oligonucleotide
  Sense strand starting at position 2339 of SEQ ID NO: 585077
gggucucccucagucuaga

SEQ ID NO: 611393 - RNA, 19 nt, Artificial Sequence
  Description of Artificial Sequence: Synthetic oligonucleotide
  Antisense strand to SEQ ID NO: 611392
ucuagacugagggagaccc

SEQ ID NO: 611394 - RNA, 19 nt, Artificial Sequence
  Description of Artificial Sequence: Synthetic oligonucleotide
  Sense strand starting at position 2472 of SEQ ID NO: 585077
uaggauuucucugggcaga

SEQ ID NO: 611395 - RNA, 19 nt, Artificial Sequence
  Description of Artificial Sequence: Synthetic oligonucleotide
  Antisense strand to SEQ ID NO: 611394
ucugcccagagaaauccua

SEQ ID NO: 611396 - RNA, 19 nt, Artificial Sequence
  Description of Artificial Sequence: Synthetic oligonucleotide
  Sense strand starting at position 2619 of SEQ ID NO: 585077
caaugaggucaauauguuu

SEQ ID NO: 611397 - RNA, 19 nt, Artificial Sequence
  Description of Artificial Sequence: Synthetic oligonucleotide
  Antisense strand to SEQ ID NO: 611396
aaacauauugaccucauug

SEQ ID NO: 611398 - RNA, 19 nt, Artificial Sequence
  Description of Artificial Sequence: Synthetic oligonucleotide
  Sense strand starting at position 2763 of SEQ ID NO: 585077
uauugaggucuuuagugau

SEQ ID NO: 611399 - RNA, 19 nt, Artificial Sequence
  Description of Artificial Sequence: Synthetic oligonucleotide
  Antisense strand to SEQ ID NO: 611398
aucacuaaagaccucaaua

SEQ ID NO: 611400 - RNA, 19 nt, Artificial Sequence
  Description of Artificial Sequence: Synthetic oligonucleotide
  Sense strand starting at position 2946 of SEQ ID NO: 585077
acguuugagcuccauuaca

SEQ ID NO: 611401 - RNA, 19 nt, Artificial Sequence
  Description of Artificial Sequence: Synthetic oligonucleotide
  Antisense strand to SEQ ID NO: 611400
uguaauggagcucaaacgu

SEQ ID NO: 611402 - RNA, 19 nt, Artificial Sequence
  Description of Artificial Sequence: Synthetic oligonucleotide
  Sense strand starting at position 3046 of SEQ ID NO: 585077
gugcuuuaugugcuaggca

SEQ ID NO: 611403 - RNA, 19 nt, Artificial Sequence
  Description of Artificial Sequence: Synthetic oligonucleotide
  Antisense strand to SEQ ID NO: 611402
ugccuagcacauaaagcac

SEQ ID NO: 611404 - RNA, 19 nt, Artificial Sequence
  Description of Artificial Sequence: Synthetic oligonucleotide
  Sense strand starting at position 3066 of SEQ ID NO: 585077
uguucuaagucccuuacau

SEQ ID NO: 611405 - RNA, 19 nt, Artificial Sequence
  Description of Artificial Sequence: Synthetic oligonucleotide
  Antisense strand to SEQ ID NO: 611404
auguaagggacuuagaaca

SEQ ID NO: 611406 - RNA, 19 nt, Artificial Sequence
  Description of Artificial Sequence: Synthetic oligonucleotide
  Sense strand starting at position 3068 of SEQ ID NO: 585077
uucuaagucccuuacaugu

SEQ ID NO: 611407 - RNA, 19 nt, Artificial Sequence
  Description of Artificial Sequence: Synthetic oligonucleotide
  Antisense strand to SEQ ID NO: 611406
acauguaagggacuuagaa

SEQ ID NO: 611408 - RNA, 19 nt, Artificial Sequence
  Description of Artificial Sequence: Synthetic oligonucleotide
  Sense strand starting at position 3193 of SEQ ID NO: 585077
cugggaauuuaaugagaaa

SEQ ID NO: 611409 - RNA, 19 nt, Artificial Sequence
  Description of Artificial Sequence: Synthetic oligonucleotide
  Antisense strand to SEQ ID NO: 611408
uuucucauuaaauucccag

SEQ ID NO: 611410 - RNA, 19 nt, Artificial Sequence
  Description of Artificial Sequence: Synthetic oligonucleotide
  Sense strand starting at position 3242 of SEQ ID NO: 585077
gcagcagauuuacaacgaa

SEQ ID NO: 611411 - RNA, 19 nt, Artificial Sequence
  Description of Artificial Sequence: Synthetic oligonucleotide
  Antisense strand to SEQ ID NO: 611410
uucguuguaaaucugcugc

SEQ ID NO: 611412 - RNA, 19 nt, Artificial Sequence
  Description of Artificial Sequence: Synthetic oligonucleotide
  Sense strand starting at position 3342 of SEQ ID NO: 585077
uuuaaagagucccuaaagu

SEQ ID NO: 611413 - RNA, 19 nt, Artificial Sequence
  Description of Artificial Sequence: Synthetic oligonucleotide
  Antisense strand to SEQ ID NO: 611412
acuuuagggacucuuuaaa

SEQ ID NO: 611414 - RNA, 19 nt, Artificial Sequence
  Description of Artificial Sequence: Synthetic oligonucleotide
  Sense strand starting at position 3483 of SEQ ID NO: 585077
aggauaugcuuacuauacu

SEQ ID NO: 611415 - RNA, 19 nt, Artificial Sequence
  Description of Artificial Sequence: Synthetic oligonucleotide
  Antisense strand to SEQ ID NO: 611414
aguauaguaagcauauccu

SEQ ID NO: 611416 - RNA, 19 nt, Artificial Sequence
  Description of Artificial Sequence: Synthetic oligonucleotide
  Sense strand starting at position 3493 of SEQ ID NO: 585077
uacuauacucugcguugaa

SEQ ID NO: 611417 - RNA, 19 nt, Artificial Sequence
  Description of Artificial Sequence: Synthetic oligonucleotide
  Antisense strand to SEQ ID NO: 611416
uucaacgcagaguauagua

SEQ ID NO: 611418 - RNA, 19 nt, Artificial Sequence
  Description of Artificial Sequence: Synthetic oligonucleotide
  Sense strand starting at position 3494 of SEQ ID NO: 585077
acuauacucugcguugaag

SEQ ID NO: 611419 - RNA, 19 nt, Artificial Sequence
  Description of Artificial Sequence: Synthetic oligonucleotide
  Antisense strand to SEQ ID NO: 611418
cuucaacgcagaguauagu

SEQ ID NO: 611420 - RNA, 19 nt, Artificial Sequence
  Description of Artificial Sequence: Synthetic oligonucleotide
  Sense strand starting at position 3503 of SEQ ID NO: 585077
ugcguugaaguacaugaau

SEQ ID NO: 611421 - RNA, 19 nt, Artificial Sequence
  Description of Artificial Sequence: Synthetic oligonucleotide
  Antisense strand to SEQ ID NO: 611420
auucauguacuucaacgca

SEQ ID NO: 611422 - RNA, 19 nt, Artificial Sequence
  Description of Artificial Sequence: Synthetic oligonucleotide
  Sense strand starting at position 3505 of SEQ ID NO: 585077
cguugaaguacaugaauca

SEQ ID NO: 611423 - RNA, 19 nt, Artificial Sequence
  Description of Artificial Sequence: Synthetic oligonucleotide
  Antisense strand to SEQ ID NO: 611422
ugauucauguacuucaacg

SEQ ID NO: 611424 - RNA, 19 nt, Artificial Sequence
  Description of Artificial Sequence: Synthetic oligonucleotide
  Sense strand starting at position 3592 of SEQ ID NO: 585077
accauaaaugggugaccuu

SEQ ID NO: 611425 - RNA, 19 nt, Artificial Sequence
  Description of Artificial Sequence: Synthetic oligonucleotide
  Antisense strand to SEQ ID NO: 611424
aaggucacccauuuauggu

SEQ ID NO: 611426 - RNA, 19 nt, Artificial Sequence
  Description of Artificial Sequence: Synthetic oligonucleotide
  Sense strand starting at position 3667 of SEQ ID NO: 585077
gguugucaaauguauaaag

SEQ ID NO: 611427 - RNA, 19 nt, Artificial Sequence
  Description of Artificial Sequence: Synthetic oligonucleotide
  Antisense strand to SEQ ID NO: 611426
cuuuauacauuugacaacc

SEQ ID NO: 611428 - RNA, 19 nt, Artificial Sequence
  Description of Artificial Sequence: Synthetic oligonucleotide
  Sense strand starting at position 3683 of SEQ ID NO: 585077
aaggcuauugugugaaaga

SEQ ID NO: 611429 - RNA, 19 nt, Artificial Sequence
  Description of Artificial Sequence: Synthetic oligonucleotide
  Antisense strand to SEQ ID NO: 611428
ucuuucacacaauagccuu

SEQ ID NO: 611430 - RNA, 19 nt, Artificial Sequence
  Description of Artificial Sequence: Synthetic oligonucleotide
  Sense strand starting at position 3730 of SEQ ID NO: 585077
cuuacauagcccuggcauu

SEQ ID NO: 611431 - RNA, 19 nt, Artificial Sequence
  Description of Artificial Sequence: Synthetic oligonucleotide
  Antisense strand to SEQ ID NO: 611430
aaugccagggcuauguaag

SEQ ID NO: 611432 - RNA, 19 nt, Artificial Sequence
  Description of Artificial Sequence: Synthetic oligonucleotide
  Sense strand starting at position 18 of SEQ ID NO: 585078
cuuugaaucccaggacacu

SEQ ID NO: 611433 - RNA, 19 nt, Artificial Sequence
  Description of Artificial Sequence: Synthetic oligonucleotide
  Antisense strand to SEQ ID NO: 611432
aguguccugggauucaaag

SEQ ID NO: 611434 - RNA, 19 nt, Artificial Sequence
  Description of Artificial Sequence: Synthetic oligonucleotide
  Sense strand starting at position 61 of SEQ ID NO: 585078
uccaguucugaucauauca

SEQ ID NO: 611435 - RNA, 19 nt, Artificial Sequence
  Description of Artificial Sequence: Synthetic oligonucleotide
  Antisense strand to SEQ ID NO: 611434
ugauaugaucagaacugga

SEQ ID NO: 611436 - RNA, 19 nt, Artificial Sequence
  Description of Artificial Sequence: Synthetic oligonucleotide
  Sense strand starting at position 100 of SEQ ID NO: 585078
cagugacuccacugagaga

SEQ ID NO: 611437 - RNA, 19 nt, Artificial Sequence
  Description of Artificial Sequence: Synthetic oligonucleotide
  Antisense strand to SEQ ID NO: 611436
ucucucaguggagucacug

SEQ ID NO: 611438 - RNA, 19 nt, Artificial Sequence
  Description of Artificial Sequence: Synthetic oligonucleotide
  Sense strand starting at position 141 of SEQ ID NO: 585078
uucuucuaccucgaauaga

SEQ ID NO: 611439 - RNA, 19 nt, Artificial Sequence
  Description of Artificial Sequence: Synthetic oligonucleotide
  Antisense strand to SEQ ID NO: 611438
ucuauucgagguagaagaa

SEQ ID NO: 611440 - RNA, 19 nt, Artificial Sequence
  Description of Artificial Sequence: Synthetic oligonucleotide
  Sense strand starting at position 206 of SEQ ID NO: 585078
aguucugcccaggaugaaa

SEQ ID NO: 611441 - RNA, 19 nt, Artificial Sequence
  Description of Artificial Sequence: Synthetic oligonucleotide
  Antisense strand to SEQ ID NO: 611440
uuucauccugggcagaacu

SEQ ID NO: 611442 - RNA, 19 nt, Artificial Sequence
  Description of Artificial Sequence: Synthetic oligonucleotide
  Sense strand starting at position 225 of SEQ ID NO: 585078
gcuaucauucuggagguaa

SEQ ID NO: 611443 - RNA, 19 nt, Artificial Sequence
  Description of Artificial Sequence: Synthetic oligonucleotide
  Antisense strand to SEQ ID NO: 611442
uuaccuccagaaugauagc

SEQ ID NO: 611444 - RNA, 19 nt, Artificial Sequence
  Description of Artificial Sequence: Synthetic oligonucleotide
  Sense strand starting at position 227 of SEQ ID NO: 585078
uaucauucuggagguaaga

SEQ ID NO: 611445 - RNA, 19 nt, Artificial Sequence
  Description of Artificial Sequence: Synthetic oligonucleotide
  Antisense strand to SEQ ID NO: 611444
ucuuaccuccagaaugaua

SEQ ID NO: 611446 - RNA, 19 nt, Artificial Sequence
  Description of Artificial Sequence: Synthetic oligonucleotide
  Sense strand starting at position 300 of SEQ ID NO: 585078
guagaaugcccauaaugac

SEQ ID NO: 611447 - RNA, 19 nt, Artificial Sequence
  Description of Artificial Sequence: Synthetic oligonucleotide
  Antisense strand to SEQ ID NO: 611446
gucauuaugggcauucuac

SEQ ID NO: 611448 - RNA, 19 nt, Artificial Sequence
  Description of Artificial Sequence: Synthetic oligonucleotide
  Sense strand starting at position 506 of SEQ ID NO: 585078
uuacuuauuucuguaugca

SEQ ID NO: 611449 - RNA, 19 nt, Artificial Sequence
  Description of Artificial Sequence: Synthetic oligonucleotide
  Antisense strand to SEQ ID NO: 611448
ugcauacagaaauaaguaa

SEQ ID NO: 611450 - RNA, 19 nt, Artificial Sequence
  Description of Artificial Sequence: Synthetic oligonucleotide
  Sense strand starting at position 564 of SEQ ID NO: 585078
uuaauauauguugggcaga

SEQ ID NO: 611451 - RNA, 19 nt, Artificial Sequence
  Description of Artificial Sequence: Synthetic oligonucleotide
  Antisense strand to SEQ ID NO: 611450
ucugcccaacauauauuaa

SEQ ID NO: 611452 - RNA, 19 nt, Artificial Sequence
  Description of Artificial Sequence: Synthetic oligonucleotide
  Sense strand starting at position 566 of SEQ ID NO: 585078
aauauauguugggcagaaa

SEQ ID NO: 611453 - RNA, 19 nt, Artificial Sequence
  Description of Artificial Sequence: Synthetic oligonucleotide
  Antisense strand to SEQ ID NO: 611452
uuucugcccaacauauauu

SEQ ID NO: 611454 - RNA, 19 nt, Artificial Sequence
  Description of Artificial Sequence: Synthetic oligonucleotide
  Sense strand starting at position 843 of SEQ ID NO: 585078
auggauuaagauuggccua

SEQ ID NO: 611455 - RNA, 19 nt, Artificial Sequence
  Description of Artificial Sequence: Synthetic oligonucleotide
  Antisense strand to SEQ ID NO: 611454
uaggccaaucuuaauccau

SEQ ID NO: 611456 - RNA, 19 nt, Artificial Sequence
  Description of Artificial Sequence: Synthetic oligonucleotide
  Sense strand starting at position 845 of SEQ ID NO: 585078
ggauuaagauuggccuacu

SEQ ID NO: 611457 - RNA, 19 nt, Artificial Sequence
  Description of Artificial Sequence: Synthetic oligonucleotide
  Antisense strand to SEQ ID NO: 611456
aguaggccaaucuuaaucc

SEQ ID NO: 611458 - RNA, 19 nt, Artificial Sequence
  Description of Artificial Sequence: Synthetic oligonucleotide
  Sense strand starting at position 957 of SEQ ID NO: 585078
gguauacaauccuccugaa

SEQ ID NO: 611459 - RNA, 19 nt, Artificial Sequence
  Description of Artificial Sequence: Synthetic oligonucleotide
  Antisense strand to SEQ ID NO: 611458
uucaggaggauuguauacc

SEQ ID NO: 611460 - RNA, 19 nt, Artificial Sequence
  Description of Artificial Sequence: Synthetic oligonucleotide
  Sense strand starting at position 1351 of SEQ ID NO: 585078
auguaaauaccguauaaag

SEQ ID NO: 611461 - RNA, 19 nt, Artificial Sequence
  Description of Artificial Sequence: Synthetic oligonucleotide
  Antisense strand to SEQ ID NO: 611460
cuuuauacgguauuuacau

SEQ ID NO: 611462 - RNA, 19 nt, Artificial Sequence
  Description of Artificial Sequence: Synthetic oligonucleotide
  Sense strand starting at position 1353 of SEQ ID NO: 585078
guaaauaccguauaaagau

SEQ ID NO: 611463 - RNA, 19 nt, Artificial Sequence
  Description of Artificial Sequence: Synthetic oligonucleotide
  Antisense strand to SEQ ID NO: 611462
aucuuuauacgguauuuac

SEQ ID NO: 611464 - RNA, 19 nt, Artificial Sequence
  Description of Artificial Sequence: Synthetic oligonucleotide
  Sense strand starting at position 1359 of SEQ ID NO: 585078
accguauaaagauguggaa

SEQ ID NO: 611465 - RNA, 19 nt, Artificial Sequence
  Description of Artificial Sequence: Synthetic oligonucleotide
  Antisense strand to SEQ ID NO: 611464
uuccacaucuuuauacggu

SEQ ID NO: 611466 - RNA, 19 nt, Artificial Sequence
  Description of Artificial Sequence: Synthetic oligonucleotide
  Sense strand starting at position 1361 of SEQ ID NO: 585078
cguauaaagauguggaaua

SEQ ID NO: 611467 - RNA, 19 nt, Artificial Sequence
  Description of Artificial Sequence: Synthetic oligonucleotide
  Antisense strand to SEQ ID NO: 611466
uauuccacaucuuuauacg

SEQ ID NO: 611468 - RNA, 19 nt, Artificial Sequence
  Description of Artificial Sequence: Synthetic oligonucleotide
  Sense strand starting at position 1429 of SEQ ID NO: 585078
guguauaaccuuuacuaga

SEQ ID NO: 611469 - RNA, 19 nt, Artificial Sequence
  Description of Artificial Sequence: Synthetic oligonucleotide
  Antisense strand to SEQ ID NO: 611468
ucuaguaaagguuauacac

SEQ ID NO: 611470 - RNA, 19 nt, Artificial Sequence
  Description of Artificial Sequence: Synthetic oligonucleotide
  Sense strand starting at position 1665 of SEQ ID NO: 585078
gcugucucccaggaaaucu

SEQ ID NO: 611471 - RNA, 19 nt, Artificial Sequence
  Description of Artificial Sequence: Synthetic oligonucleotide
  Antisense strand to SEQ ID NO: 611470
agauuuccugggagacagc

SEQ ID NO: 611472 - RNA, 19 nt, Artificial Sequence
  Description of Artificial Sequence: Synthetic oligonucleotide
  Sense strand starting at position 1716 of SEQ ID NO: 585078
accauacaucaacggguua

SEQ ID NO: 611473 - RNA, 19 nt, Artificial Sequence
  Description of Artificial Sequence: Synthetic oligonucleotide
  Antisense strand to SEQ ID NO: 611472
uaacccguugauguauggu

SEQ ID NO: 611474 - RNA, 19 nt, Artificial Sequence
  Description of Artificial Sequence: Synthetic oligonucleotide
  Sense strand starting at position 1979 of SEQ ID NO: 585078
ggauaaacgccuuaaguac

SEQ ID NO: 611475 - RNA, 19 nt, Artificial Sequence
  Description of Artificial Sequence: Synthetic oligonucleotide
  Antisense strand to SEQ ID NO: 611474
guacuuaaggcguuuaucc

SEQ ID NO: 611476 - RNA, 19 nt, Artificial Sequence
  Description of Artificial Sequence: Synthetic oligonucleotide
  Sense strand starting at position 2199 of SEQ ID NO: 585078
ccaaaugaucuggagugca

SEQ ID NO: 611477 - RNA, 19 nt, Artificial Sequence
  Description of Artificial Sequence: Synthetic oligonucleotide
  Antisense strand to SEQ ID NO: 611476
ugcacuccagaucauuugg

SEQ ID NO: 611478 - RNA, 19 nt, Artificial Sequence
  Description of Artificial Sequence: Synthetic oligonucleotide
  Sense strand starting at position 2360 of SEQ ID NO: 585078
gcguaaaugagugcguaca

SEQ ID NO: 611479 - RNA, 19 nt, Artificial Sequence
  Description of Artificial Sequence: Synthetic oligonucleotide
  Antisense strand to SEQ ID NO: 611478
uguacgcacucauuuacgc

SEQ ID NO: 611480 - RNA, 19 nt, Artificial Sequence
  Description of Artificial Sequence: Synthetic oligonucleotide
  Sense strand starting at position 2392 of SEQ ID NO: 585078
gugugcuuagacuauaaag

SEQ ID NO: 611481 - RNA, 19 nt, Artificial Sequence
  Description of Artificial Sequence: Synthetic oligonucleotide
  Antisense strand to SEQ ID NO: 611480
cuuuauagucuaagcacac

SEQ ID NO: 611482 - RNA, 19 nt, Artificial Sequence
  Description of Artificial Sequence: Synthetic oligonucleotide
  Sense strand starting at position 2394 of SEQ ID NO: 585078
gugcuuagacuauaaagug

SEQ ID NO: 611483 - RNA, 19 nt, Artificial Sequence
  Description of Artificial Sequence: Synthetic oligonucleotide
  Antisense strand to SEQ ID NO: 611482
cacuuuauagucuaagcac

SEQ ID NO: 611484 - RNA, 19 nt, Artificial Sequence
  Description of Artificial Sequence: Synthetic oligonucleotide
  Sense strand starting at position 2461 of SEQ ID NO: 585078
cugacacuuccauggugaa

SEQ ID NO: 611485 - RNA, 19 nt, Artificial Sequence
  Description of Artificial Sequence: Synthetic oligonucleotide
  Antisense strand to SEQ ID NO: 611484
uucaccauggaagugucag

SEQ ID NO: 611486 - RNA, 19 nt, Artificial Sequence
  Description of Artificial Sequence: Synthetic oligonucleotide
  Sense strand starting at position 2462 of SEQ ID NO: 585078
ugacacuuccauggugaac

SEQ ID NO: 611487 - RNA, 19 nt, Artificial Sequence
  Description of Artificial Sequence: Synthetic oligonucleotide
  Antisense strand to SEQ ID NO: 611486
guucaccauggaaguguca

SEQ ID NO: 611488 - RNA, 19 nt, Artificial Sequence
  Description of Artificial Sequence: Synthetic oligonucleotide
  Sense strand starting at position 2670 of SEQ ID NO: 585078
aguuaaguacagcauuaua

SEQ ID NO: 611489 - RNA, 19 nt, Artificial Sequence
  Description of Artificial Sequence: Synthetic oligonucleotide
  Antisense strand to SEQ ID NO: 611488
uauaaugcuguacuuaacu

SEQ ID NO: 611490 - RNA, 19 nt, Artificial Sequence
  Description of Artificial Sequence: Synthetic oligonucleotide
  Sense strand starting at position 2909 of SEQ ID NO: 585078
cccuaauauuuggcuguuu

SEQ ID NO: 611491 - RNA, 19 nt, Artificial Sequence
  Description of Artificial Sequence: Synthetic oligonucleotide
  Antisense strand to SEQ ID NO: 611490
aaacagccaaauauuaggg

SEQ ID NO: 611492 - RNA, 19 nt, Artificial Sequence
  Description of Artificial Sequence: Synthetic oligonucleotide
  Sense strand starting at position 2910 of SEQ ID NO: 585078
ccuaauauuuggcuguuua

SEQ ID NO: 611493 - RNA, 19 nt, Artificial Sequence
  Description of Artificial Sequence: Synthetic oligonucleotide
  Antisense strand to SEQ ID NO: 611492
uaaacagccaaauauuagg

SEQ ID NO: 611494 - RNA, 19 nt, Artificial Sequence
  Description of Artificial Sequence: Synthetic oligonucleotide
  Sense strand starting at position 3131 of SEQ ID NO: 585078
aagucuuuaggaugccaaa

SEQ ID NO: 611495 - RNA, 19 nt, Artificial Sequence
  Description of Artificial Sequence: Synthetic oligonucleotide
  Antisense strand to SEQ ID NO: 611494
uuuggcauccuaaagacuu

SEQ ID NO: 611496 - RNA, 19 nt, Artificial Sequence
  Description of Artificial Sequence: Synthetic oligonucleotide
  Sense strand starting at position 3259 of SEQ ID NO: 585078
ugagccgucacauauagau

SEQ ID NO: 611497 - RNA, 19 nt, Artificial Sequence
  Description of Artificial Sequence: Synthetic oligonucleotide
  Antisense strand to SEQ ID NO: 611496
aucuauaugugacggcuca

SEQ ID NO: 611498 - RNA, 19 nt, Artificial Sequence
  Description of Artificial Sequence: Synthetic oligonucleotide
  Sense strand starting at position 3279 of SEQ ID NO: 585078
ugucuagauuuagacuaaa

SEQ ID NO: 611499 - RNA, 19 nt, Artificial Sequence
  Description of Artificial Sequence: Synthetic oligonucleotide
  Antisense strand to SEQ ID NO: 611498
uuuagucuaaaucuagaca

SEQ ID NO: 611500 - RNA, 19 nt, Artificial Sequence
  Description of Artificial Sequence: Synthetic oligonucleotide
  Sense strand starting at position 3316 of SEQ ID NO: 585078
ugagucugaagccaugauu

SEQ ID NO: 611501 - RNA, 19 nt, Artificial Sequence
  Description of Artificial Sequence: Synthetic oligonucleotide
  Antisense strand to SEQ ID NO: 611500
aaucauggcuucagacuca

SEQ ID NO: 611502 - RNA, 19 nt, Artificial Sequence
  Description of Artificial Sequence: Synthetic oligonucleotide
  Sense strand starting at position 3319 of SEQ ID NO: 585078
gucugaagccaugauuacu

SEQ ID NO: 611503 - RNA, 19 nt, Artificial Sequence
  Description of Artificial Sequence: Synthetic oligonucleotide
  Antisense strand to SEQ ID NO: 611502
aguaaucauggcuucagac

SEQ ID NO: 611504 - RNA, 19 nt, Artificial Sequence
  Description of Artificial Sequence: Synthetic oligonucleotide
  Sense strand starting at position 3557 of SEQ ID NO: 585078
uauggagucgagggaaagu

SEQ ID NO: 611505 - RNA, 19 nt, Artificial Sequence
  Description of Artificial Sequence: Synthetic oligonucleotide
  Antisense strand to SEQ ID NO: 611504
acuuucccucgacuccaua

SEQ ID NO: 611506 - RNA, 19 nt, Artificial Sequence
  Description of Artificial Sequence: Synthetic oligonucleotide
  Sense strand starting at position 3819 of SEQ ID NO: 585078
aggaaucuggcaugugaga

SEQ ID NO: 611507 - RNA, 19 nt, Artificial Sequence
  Description of Artificial Sequence: Synthetic oligonucleotide
  Antisense strand to SEQ ID NO: 611506
ucucacaugccagauuccu

SEQ ID NO: 611508 - RNA, 19 nt, Artificial Sequence
  Description of Artificial Sequence: Synthetic oligonucleotide
  Sense strand starting at position 3821 of SEQ ID NO: 585078
gaaucuggcaugugagaug

SEQ ID NO: 611509 - RNA, 19 nt, Artificial Sequence
  Description of Artificial Sequence: Synthetic oligonucleotide
  Antisense strand to SEQ ID NO: 611508
caucucacaugccagauuc

SEQ ID NO: 611510 - RNA, 19 nt, Artificial Sequence
  Description of Artificial Sequence: Synthetic oligonucleotide
  Sense strand starting at position 3832 of SEQ ID NO: 585078
gugagaugauaguuacuuu

SEQ ID NO: 611511 - RNA, 19 nt, Artificial Sequence
  Description of Artificial Sequence: Synthetic oligonucleotide
  Antisense strand to SEQ ID NO: 611510
aaaguaacuaucaucucac

SEQ ID NO: 611512 - RNA, 19 nt, Artificial Sequence
  Description of Artificial Sequence: Synthetic oligonucleotide
  Sense strand starting at position 78 of SEQ ID NO: 585079
uccgcuauuccagaggaau

SEQ ID NO: 611513 - RNA, 19 nt, Artificial Sequence
  Description of Artificial Sequence: Synthetic oligonucleotide
  Antisense strand to SEQ ID NO: 611512
auuccucuggaauagcgga

SEQ ID NO: 611514 - RNA, 19 nt, Artificial Sequence
  Description of Artificial Sequence: Synthetic oligonucleotide
  Sense strand starting at position 80 of SEQ ID NO: 585079
cgcuauuccagaggaauca

SEQ ID NO: 611515 - RNA, 19 nt, Artificial Sequence
  Description of Artificial Sequence: Synthetic oligonucleotide
  Antisense strand to SEQ ID NO: 611514
ugauuccucuggaauagcg

SEQ ID NO: 611516 - RNA, 19 nt, Artificial Sequence
  Description of Artificial Sequence: Synthetic oligonucleotide
  Sense strand starting at position 98 of SEQ ID NO: 585079
acaguaugccagggcugaa

SEQ ID NO: 611517 - RNA, 19 nt, Artificial Sequence
  Description of Artificial Sequence: Synthetic oligonucleotide
  Antisense strand to SEQ ID NO: 611516
uucagcccuggcauacugu

SEQ ID NO: 611518 - RNA, 19 nt, Artificial Sequence
  Description of Artificial Sequence: Synthetic oligonucleotide
  Sense strand starting at position 114 of SEQ ID NO: 585079
gaagguuucugaucgcuaa

SEQ ID NO: 611519 - RNA, 19 nt, Artificial Sequence
  Description of Artificial Sequence: Synthetic oligonucleotide
  Antisense strand to SEQ ID NO: 611518
uuagcgaucagaaaccuuc

SEQ ID NO: 611520 - RNA, 19 nt, Artificial Sequence
  Description of Artificial Sequence: Synthetic oligonucleotide
  Sense strand starting at position 115 of SEQ ID NO: 585079
aagguuucugaucgcuaac

SEQ ID NO: 611521 - RNA, 19 nt, Artificial Sequence
  Description of Artificial Sequence: Synthetic oligonucleotide
  Antisense strand to SEQ ID NO: 611520
guuagcgaucagaaaccuu

SEQ ID NO: 611522 - RNA, 19 nt, Artificial Sequence
  Description of Artificial Sequence: Synthetic oligonucleotide
  Sense strand starting at position 260 of SEQ ID NO: 585079
acagguugcagauguggaa

SEQ ID NO: 611523 - RNA, 19 nt, Artificial Sequence
  Description of Artificial Sequence: Synthetic oligonucleotide
  Antisense strand to SEQ ID NO: 611522
uuccacaucugcaaccugu

SEQ ID NO: 611524 - RNA, 19 nt, Artificial Sequence
  Description of Artificial Sequence: Synthetic oligonucleotide
  Sense strand starting at position 355 of SEQ ID NO: 585079
aggagugcacgaugagaau

SEQ ID NO: 611525 - RNA, 19 nt, Artificial Sequence
  Description of Artificial Sequence: Synthetic oligonucleotide
  Antisense strand to SEQ ID NO: 611524
auucucaucgugcacuccu

SEQ ID NO: 611526 - RNA, 19 nt, Artificial Sequence
  Description of Artificial Sequence: Synthetic oligonucleotide
  Sense strand starting at position 638 of SEQ ID NO: 585079
uuccauugacaggguuuau

SEQ ID NO: 611527 - RNA, 19 nt, Artificial Sequence
  Description of Artificial Sequence: Synthetic oligonucleotide
  Antisense strand to SEQ ID NO: 611526
auaaacccugucaauggaa

SEQ ID NO: 611528 - RNA, 19 nt, Artificial Sequence
  Description of Artificial Sequence: Synthetic oligonucleotide
  Sense strand starting at position 748 of SEQ ID NO: 585079
uguaacagcuugccaaaua

SEQ ID NO: 611529 - RNA, 19 nt, Artificial Sequence
  Description of Artificial Sequence: Synthetic oligonucleotide
  Antisense strand to SEQ ID NO: 611528
uauuuggcaagcuguuaca

SEQ ID NO: 611530 - RNA, 19 nt, Artificial Sequence
  Description of Artificial Sequence: Synthetic oligonucleotide
  Sense strand starting at position 800 of SEQ ID NO: 585079
ggguucaggucuuuggcaa

SEQ ID NO: 611531 - RNA, 19 nt, Artificial Sequence
  Description of Artificial Sequence: Synthetic oligonucleotide
  Antisense strand to SEQ ID NO: 611530
uugccaaagaccugaaccc

SEQ ID NO: 611532 - RNA, 19 nt, Artificial Sequence
  Description of Artificial Sequence: Synthetic oligonucleotide
  Sense strand starting at position 826 of SEQ ID NO: 585079
gcacucggauuccucaauu

SEQ ID NO: 611533 - RNA, 19 nt, Artificial Sequence
  Description of Artificial Sequence: Synthetic oligonucleotide
  Antisense strand to SEQ ID NO: 611532
aauugaggaauccgagugc

SEQ ID NO: 611534 - RNA, 19 nt, Artificial Sequence
  Description of Artificial Sequence: Synthetic oligonucleotide
  Sense strand starting at position 1146 of SEQ ID NO: 585079
cgagcuuuccgagcucauc

SEQ ID NO: 611535 - RNA, 19 nt, Artificial Sequence
  Description of Artificial Sequence: Synthetic oligonucleotide
  Antisense strand to SEQ ID NO: 611534
gaugagcucggaaagcucg

SEQ ID NO: 611536 - RNA, 19 nt, Artificial Sequence
  Description of Artificial Sequence: Synthetic oligonucleotide
  Sense strand starting at position 1821 of SEQ ID NO: 585079
guuuguuccgaaguagcuu

SEQ ID NO: 611537 - RNA, 19 nt, Artificial Sequence
  Description of Artificial Sequence: Synthetic oligonucleotide
  Antisense strand to SEQ ID NO: 611536
aagcuacuucggaacaaac

SEQ ID NO: 611538 - RNA, 19 nt, Artificial Sequence
  Description of Artificial Sequence: Synthetic oligonucleotide
  Sense strand starting at position 1942 of SEQ ID NO: 585079
ccguguuugcugccugcaa

SEQ ID NO: 611539 - RNA, 19 nt, Artificial Sequence
  Description of Artificial Sequence: Synthetic oligonucleotide
  Antisense strand to SEQ ID NO: 611538
uugcaggcagcaaacacgg

SEQ ID NO: 611540 - RNA, 19 nt, Artificial Sequence
  Description of Artificial Sequence: Synthetic oligonucleotide
  Sense strand starting at position 2089 of SEQ ID NO: 585079
aggcgauucccagggccaa

SEQ ID NO: 611541 - RNA, 19 nt, Artificial Sequence
  Description of Artificial Sequence: Synthetic oligonucleotide
  Antisense strand to SEQ ID NO: 611540
uuggcccugggaaucgccu

SEQ ID NO: 611542 - RNA, 19 nt, Artificial Sequence
  Description of Artificial Sequence: Synthetic oligonucleotide
  Sense strand starting at position 2303 of SEQ ID NO: 585079
agcuuucgcguagcagaau

SEQ ID NO: 611543 - RNA, 19 nt, Artificial Sequence
  Description of Artificial Sequence: Synthetic oligonucleotide
  Antisense strand to SEQ ID NO: 611542
auucugcuacgcgaaagcu

SEQ ID NO: 611544 - RNA, 19 nt, Artificial Sequence
  Description of Artificial Sequence: Synthetic oligonucleotide
  Sense strand starting at position 2306 of SEQ ID NO: 585079
uuucgcguagcagaauaaa

SEQ ID NO: 611545 - RNA, 19 nt, Artificial Sequence
  Description of Artificial Sequence: Synthetic oligonucleotide
  Antisense strand to SEQ ID NO: 611544
uuuauucugcuacgcgaaa

SEQ ID NO: 611546 - RNA, 19 nt, Artificial Sequence
  Description of Artificial Sequence: Synthetic oligonucleotide
  Sense strand starting at position 2638 of SEQ ID NO: 585079
caauguuuccaagaguuug

SEQ ID NO: 611547 - RNA, 19 nt, Artificial Sequence
  Description of Artificial Sequence: Synthetic oligonucleotide
  Antisense strand to SEQ ID NO: 611546
caaacucuuggaaacauug

SEQ ID NO: 611548 - RNA, 19 nt, Artificial Sequence
  Description of Artificial Sequence: Synthetic oligonucleotide
  Sense strand starting at position 2643 of SEQ ID NO: 585079
uuuccaagaguuugcaaca

SEQ ID NO: 611549 - RNA, 19 nt, Artificial Sequence
  Description of Artificial Sequence: Synthetic oligonucleotide
  Antisense strand to SEQ ID NO: 611548
uguugcaaacucuuggaaa

SEQ ID NO: 611550 - RNA, 19 nt, Artificial Sequence
  Description of Artificial Sequence: Synthetic oligonucleotide
  Sense strand starting at position 2644 of SEQ ID NO: 585079
uuccaagaguuugcaacaa

SEQ ID NO: 611551 - RNA, 19 nt, Artificial Sequence
  Description of Artificial Sequence: Synthetic oligonucleotide
  Antisense strand to SEQ ID NO: 611550
uuguugcaaacucuuggaa

SEQ ID NO: 611552 - RNA, 19 nt, Artificial Sequence
  Description of Artificial Sequence: Synthetic oligonucleotide
  Sense strand starting at position 2768 of SEQ ID NO: 585079
gugagacauuaggagagaa

SEQ ID NO: 611553 - RNA, 19 nt, Artificial Sequence
  Description of Artificial Sequence: Synthetic oligonucleotide
  Antisense strand to SEQ ID NO: 611552
uucucuccuaaugucucac

SEQ ID NO: 611554 - RNA, 19 nt, Artificial Sequence
  Description of Artificial Sequence: Synthetic oligonucleotide
  Sense strand starting at position 2867 of SEQ ID NO: 585079
uuuccauuucgcugcauaa

SEQ ID NO: 611555 - RNA, 19 nt, Artificial Sequence
  Description of Artificial Sequence: Synthetic oligonucleotide
  Antisense strand to SEQ ID NO: 611554
uuaugcagcgaaauggaaa

SEQ ID NO: 611556 - RNA, 19 nt, Artificial Sequence
  Description of Artificial Sequence: Synthetic oligonucleotide
  Sense strand starting at position 2869 of SEQ ID NO: 585079
uccauuucgcugcauaaau

SEQ ID NO: 611557 - RNA, 19 nt, Artificial Sequence
  Description of Artificial Sequence: Synthetic oligonucleotide
  Antisense strand to SEQ ID NO: 611556
auuuaugcagcgaaaugga

SEQ ID NO: 611558 - RNA, 19 nt, Artificial Sequence
  Description of Artificial Sequence: Synthetic oligonucleotide
  Sense strand starting at position 2901 of SEQ ID NO: 585079
aaagaaugccacuacguau

SEQ ID NO: 611559 - RNA, 19 nt, Artificial Sequence
  Description of Artificial Sequence: Synthetic oligonucleotide
  Antisense strand to SEQ ID NO: 611558
auacguaguggcauucuuu

SEQ ID NO: 611560 - RNA, 19 nt, Artificial Sequence
  Description of Artificial Sequence: Synthetic oligonucleotide
  Sense strand starting at position 2904 of SEQ ID NO: 585079
gaaugccacuacguauuaa

SEQ ID NO: 611561 - RNA, 19 nt, Artificial Sequence
  Description of Artificial Sequence: Synthetic oligonucleotide
  Antisense strand to SEQ ID NO: 611560
uuaauacguaguggcauuc

SEQ ID NO: 611562 - RNA, 19 nt, Artificial Sequence
  Description of Artificial Sequence: Synthetic oligonucleotide
  Sense strand starting at position 2935 of SEQ ID NO: 585079
agaccuuucucuucgcaag

SEQ ID NO: 611563 - RNA, 19 nt, Artificial Sequence
  Description of Artificial Sequence: Synthetic oligonucleotide
  Antisense strand to SEQ ID NO: 611562
cuugcgaagagaaaggucu

SEQ ID NO: 611564 - RNA, 19 nt, Artificial Sequence
  Description of Artificial Sequence: Synthetic oligonucleotide
  Sense strand starting at position 3064 of SEQ ID NO: 585079
gaaggcugcguagagaaau

SEQ ID NO: 611565 - RNA, 19 nt, Artificial Sequence
  Description of Artificial Sequence: Synthetic oligonucleotide
  Antisense strand to SEQ ID NO: 611564
auuucucuacgcagccuuc

SEQ ID NO: 611566 - RNA, 19 nt, Artificial Sequence
  Description of Artificial Sequence: Synthetic oligonucleotide
  Sense strand starting at position 3189 of SEQ ID NO: 585079
agaguaacuugaucacaug

SEQ ID NO: 611567 - RNA, 19 nt, Artificial Sequence
  Description of Artificial Sequence: Synthetic oligonucleotide
  Antisense strand to SEQ ID NO: 611566
caugugaucaaguuacucu

SEQ ID NO: 611568 - RNA, 19 nt, Artificial Sequence
  Description of Artificial Sequence: Synthetic oligonucleotide
  Sense strand starting at position 3190 of SEQ ID NO: 585079
gaguaacuugaucacaugu

SEQ ID NO: 611569 - RNA, 19 nt, Artificial Sequence
  Description of Artificial Sequence: Synthetic oligonucleotide
  Antisense strand to SEQ ID NO: 611568
acaugugaucaaguuacuc

SEQ ID NO: 611570 - RNA, 19 nt, Artificial Sequence
  Description of Artificial Sequence: Synthetic oligonucleotide
  Sense strand starting at position 3197 of SEQ ID NO: 585079
uugaucacauguuuaagau

SEQ ID NO: 611571 - RNA, 19 nt, Artificial Sequence
  Description of Artificial Sequence: Synthetic oligonucleotide
  Antisense strand to SEQ ID NO: 611570
aucuuaaacaugugaucaa

SEQ ID NO: 611572 - RNA, 19 nt, Artificial Sequence
  Description of Artificial Sequence: Synthetic oligonucleotide
  Sense strand starting at position 3358 of SEQ ID NO: 585079
aguaaauugaguuguuucu

SEQ ID NO: 611573 - RNA, 19 nt, Artificial Sequence
  Description of Artificial Sequence: Synthetic oligonucleotide
  Antisense strand to SEQ ID NO: 611572
agaaacaacucaauuuacu

SEQ ID NO: 611574 - RNA, 19 nt, Artificial Sequence
  Description of Artificial Sequence: Synthetic oligonucleotide
  Sense strand starting at position 3437 of SEQ ID NO: 585079
guuaaauugucuccuguag

SEQ ID NO: 611575 - RNA, 19 nt, Artificial Sequence
  Description of Artificial Sequence: Synthetic oligonucleotide
  Antisense strand to SEQ ID NO: 611574
cuacaggagacaauuuaac

SEQ ID NO: 611576 - RNA, 19 nt, Artificial Sequence
  Description of Artificial Sequence: Synthetic oligonucleotide
  Sense strand starting at position 3517 of SEQ ID NO: 585079
uugauucuguaguuucuga

SEQ ID NO: 611577 - RNA, 19 nt, Artificial Sequence
  Description of Artificial Sequence: Synthetic oligonucleotide
  Antisense strand to SEQ ID NO: 611576
ucagaaacuacagaaucaa

SEQ ID NO: 611578 - RNA, 19 nt, Artificial Sequence
  Description of Artificial Sequence: Synthetic oligonucleotide
  Sense strand starting at position 3637 of SEQ ID NO: 585079
aaauguaaaugcguaauag

SEQ ID NO: 611579 - RNA, 19 nt, Artificial Sequence
  Description of Artificial Sequence: Synthetic oligonucleotide
  Antisense strand to SEQ ID NO: 611578
cuauuacgcauuuacauuu

SEQ ID NO: 611580 - RNA, 19 nt, Artificial Sequence
  Description of Artificial Sequence: Synthetic oligonucleotide
  Sense strand starting at position 3638 of SEQ ID NO: 585079
aauguaaaugcguaauaga

SEQ ID NO: 611581 - RNA, 19 nt, Artificial Sequence
  Description of Artificial Sequence: Synthetic oligonucleotide
  Antisense strand to SEQ ID NO: 611580
ucuauuacgcauuuacauu

SEQ ID NO: 611582 - RNA, 19 nt, Artificial Sequence
  Description of Artificial Sequence: Synthetic oligonucleotide
  Sense strand starting at position 3646 of SEQ ID NO: 585079
ugcguaauagauuaaccuu

SEQ ID NO: 611583 - RNA, 19 nt, Artificial Sequence
  Description of Artificial Sequence: Synthetic oligonucleotide
  Antisense strand to SEQ ID NO: 611582
aagguuaaucuauuacgca

SEQ ID NO: 611584 - RNA, 19 nt, Artificial Sequence
  Description of Artificial Sequence: Synthetic oligonucleotide
  Sense strand starting at position 3654 of SEQ ID NO: 585079
agauuaaccuuagaaagag

SEQ ID NO: 611585 - RNA, 19 nt, Artificial Sequence
  Description of Artificial Sequence: Synthetic oligonucleotide
  Antisense strand to SEQ ID NO: 611584
cucuuucuaagguuaaucu

SEQ ID NO: 611586 - RNA, 19 nt, Artificial Sequence
  Description of Artificial Sequence: Synthetic oligonucleotide
  Sense strand starting at position 3794 of SEQ ID NO: 585079
ugcacuuagucuuuagaac

SEQ ID NO: 611587 - RNA, 19 nt, Artificial Sequence
  Description of Artificial Sequence: Synthetic oligonucleotide
  Antisense strand to SEQ ID NO: 611586
guucuaaagacuaagugca

SEQ ID NO: 611588 - RNA, 19 nt, Artificial Sequence
  Description of Artificial Sequence: Synthetic oligonucleotide
  Sense strand starting at position 3795 of SEQ ID NO: 585079
gcacuuagucuuuagaacu

SEQ ID NO: 611589 - RNA, 19 nt, Artificial Sequence
  Description of Artificial Sequence: Synthetic oligonucleotide
  Antisense strand to SEQ ID NO: 611588
aguucuaaagacuaagugc

SEQ ID NO: 611590 - RNA, 19 nt, Artificial Sequence
  Description of Artificial Sequence: Synthetic oligonucleotide
  Sense strand starting at position 3923 of SEQ ID NO: 585079
caagguggccuuuaaaguu

SEQ ID NO: 611591 - RNA, 19 nt, Artificial Sequence
  Description of Artificial Sequence: Synthetic oligonucleotide
  Antisense strand to SEQ ID NO: 611590
aacuuuaaaggccaccuug

SEQ ID NO: 611592 - RNA, 19 nt, Artificial Sequence
  Description of Artificial Sequence: Synthetic oligonucleotide
  Sense strand starting at position 180 of SEQ ID NO: 585080
gcagucuuuaaugaagugu

SEQ ID NO: 611593 - RNA, 19 nt, Artificial Sequence
  Description of Artificial Sequence: Synthetic oligonucleotide
  Antisense strand to SEQ ID NO: 611592
acacuucauuaaagacugc

SEQ ID NO: 611594 - RNA, 19 nt, Artificial Sequence
  Description of Artificial Sequence: Synthetic oligonucleotide
  Sense strand starting at position 240 of SEQ ID NO: 585080
uugaauccacucugcagaa

SEQ ID NO: 611595 - RNA, 19 nt, Artificial Sequence
  Description of Artificial Sequence: Synthetic oligonucleotide
  Antisense strand to SEQ ID NO: 611594
uucugcagaguggauucaa

SEQ ID NO: 611596 - RNA, 19 nt, Artificial Sequence
  Description of Artificial Sequence: Synthetic oligonucleotide
  Sense strand starting at position 241 of SEQ ID NO: 585080
ugaauccacucugcagaaa

SEQ ID NO: 611597 - RNA, 19 nt, Artificial Sequence
  Description of Artificial Sequence: Synthetic oligonucleotide
  Antisense strand to SEQ ID NO: 611596
uuucugcagaguggauuca

SEQ ID NO: 611598 - RNA, 19 nt, Artificial Sequence
  Description of Artificial Sequence: Synthetic oligonucleotide
  Sense strand starting at position 255 of SEQ ID NO: 585080
agaaacacucccgaauguu

SEQ ID NO: 611599 - RNA, 19 nt, Artificial Sequence
  Description of Artificial Sequence: Synthetic oligonucleotide
  Antisense strand to SEQ ID NO: 611598
aacauucgggaguguuucu

SEQ ID NO: 611600 - RNA, 19 nt, Artificial Sequence
  Description of Artificial Sequence: Synthetic oligonucleotide
  Sense strand starting at position 305 of SEQ ID NO: 585080
gccacuacuguuuacgaca

SEQ ID NO: 611601 - RNA, 19 nt, Artificial Sequence
  Description of Artificial Sequence: Synthetic oligonucleotide
  Antisense strand to SEQ ID NO: 611600
ugucguaaacaguaguggc

SEQ ID NO: 611602 - RNA, 19 nt, Artificial Sequence
  Description of Artificial Sequence: Synthetic oligonucleotide
  Sense strand starting at position 343 of SEQ ID NO: 585080
cuaaaugcacauugguaga

SEQ ID NO: 611603 - RNA, 19 nt, Artificial Sequence
  Description of Artificial Sequence: Synthetic oligonucleotide
  Antisense strand to SEQ ID NO: 611602
ucuaccaaugugcauuuag

SEQ ID NO: 611604 - RNA, 19 nt, Artificial Sequence
  Description of Artificial Sequence: Synthetic oligonucleotide
  Sense strand starting at position 363 of SEQ ID NO: 585080
gcagaauaauuuguugcca

SEQ ID NO: 611605 - RNA, 19 nt, Artificial Sequence
  Description of Artificial Sequence: Synthetic oligonucleotide
  Antisense strand to SEQ ID NO: 611604
uggcaacaaauuauucugc

SEQ ID NO: 611606 - RNA, 19 nt, Artificial Sequence
  Description of Artificial Sequence: Synthetic oligonucleotide
  Sense strand starting at position 420 of SEQ ID NO: 585080
uguagugacagugaaagau

SEQ ID NO: 611607 - RNA, 19 nt, Artificial Sequence
  Description of Artificial Sequence: Synthetic oligonucleotide
  Antisense strand to SEQ ID NO: 611606
aucuuucacugucacuaca

SEQ ID NO: 611608 - RNA, 19 nt, Artificial Sequence
  Description of Artificial Sequence: Synthetic oligonucleotide
  Sense strand starting at position 429 of SEQ ID NO: 585080
agugaaagaugucccuaac

SEQ ID NO: 611609 - RNA, 19 nt, Artificial Sequence
  Description of Artificial Sequence: Synthetic oligonucleotide
  Antisense strand to SEQ ID NO: 611608
guuagggacaucuuucacu

SEQ ID NO: 611610 - RNA, 19 nt, Artificial Sequence
  Description of Artificial Sequence: Synthetic oligonucleotide
  Sense strand starting at position 446 of SEQ ID NO: 585080
acauauuguuaggcaagaa

SEQ ID NO: 611611 - RNA, 19 nt, Artificial Sequence
  Description of Artificial Sequence: Synthetic oligonucleotide
  Antisense strand to SEQ ID NO: 611610
uucuugccuaacaauaugu

SEQ ID NO: 611612 - RNA, 19 nt, Artificial Sequence
  Description of Artificial Sequence: Synthetic oligonucleotide
  Sense strand starting at position 552 of SEQ ID NO: 585080
gcuuaagauguguggagga

SEQ ID NO: 611613 - RNA, 19 nt, Artificial Sequence
  Description of Artificial Sequence: Synthetic oligonucleotide
  Antisense strand to SEQ ID NO: 611612
uccuccacacaucuuaagc

SEQ ID NO: 611614 - RNA, 19 nt, Artificial Sequence
  Description of Artificial Sequence: Synthetic oligonucleotide
  Sense strand starting at position 657 of SEQ ID NO: 585080
augucucaauugucauaua

SEQ ID NO: 611615 - RNA, 19 nt, Artificial Sequence
  Description of Artificial Sequence: Synthetic oligonucleotide
  Antisense strand to SEQ ID NO: 611614
uauaugacaauugagacau

SEQ ID NO: 611616 - RNA, 19 nt, Artificial Sequence
  Description of Artificial Sequence: Synthetic oligonucleotide
  Sense strand starting at position 668 of SEQ ID NO: 585080
gucauauaucugggauuaa

SEQ ID NO: 611617 - RNA, 19 nt, Artificial Sequence
  Description of Artificial Sequence: Synthetic oligonucleotide
  Antisense strand to SEQ ID NO: 611616
uuaaucccagauauaugac

SEQ ID NO: 611618 - RNA, 19 nt, Artificial Sequence
  Description of Artificial Sequence: Synthetic oligonucleotide
  Sense strand starting at position 771 of SEQ ID NO: 585080
cacauugcugucuaggauu

SEQ ID NO: 611619 - RNA, 19 nt, Artificial Sequence
  Description of Artificial Sequence: Synthetic oligonucleotide
  Antisense strand to SEQ ID NO: 611618
aauccuagacagcaaugug

SEQ ID NO: 611620 - RNA, 19 nt, Artificial Sequence
  Description of Artificial Sequence: Synthetic oligonucleotide
  Sense strand starting at position 777 of SEQ ID NO: 585080
gcugucuaggauuagcgaa

SEQ ID NO: 611621 - RNA, 19 nt, Artificial Sequence
  Description of Artificial Sequence: Synthetic oligonucleotide
  Antisense strand to SEQ ID NO: 611620
uucgcuaauccuagacagc

SEQ ID NO: 611622 - RNA, 19 nt, Artificial Sequence
  Description of Artificial Sequence: Synthetic oligonucleotide
  Sense strand starting at position 1781 of SEQ ID NO: 585080
ccuucuuugggaugcauca

SEQ ID NO: 611623 - RNA, 19 nt, Artificial Sequence
  Description of Artificial Sequence: Synthetic oligonucleotide
  Antisense strand to SEQ ID NO: 611622
ugaugcaucccaaagaagg

SEQ ID NO: 611624 - RNA, 19 nt, Artificial Sequence
  Description of Artificial Sequence: Synthetic oligonucleotide
  Sense strand starting at position 2025 of SEQ ID NO: 585080
uuaugaggaucauaaggaa

SEQ ID NO: 611625 - RNA, 19 nt, Artificial Sequence
  Description of Artificial Sequence: Synthetic oligonucleotide
  Antisense strand to SEQ ID NO: 611624
uuccuuaugauccucauaa

SEQ ID NO: 611626 - RNA, 19 nt, Artificial Sequence
  Description of Artificial Sequence: Synthetic oligonucleotide
  Sense strand starting at position 2219 of SEQ ID NO: 585080
gaucucugauugguggaga

SEQ ID NO: 611627 - RNA, 19 nt, Artificial Sequence
  Description of Artificial Sequence: Synthetic oligonucleotide
  Antisense strand to SEQ ID NO: 611626
ucuccaccaaucagagauc

SEQ ID NO: 611628 - RNA, 19 nt, Artificial Sequence
  Description of Artificial Sequence: Synthetic oligonucleotide
  Sense strand starting at position 2332 of SEQ ID NO: 585080
guauguguaaaguaaguuu

SEQ ID NO: 611629 - RNA, 19 nt, Artificial Sequence
  Description of Artificial Sequence: Synthetic oligonucleotide
  Antisense strand to SEQ ID NO: 611628
aaacuuacuuuacacauac

SEQ ID NO: 611630 - RNA, 19 nt, Artificial Sequence
  Description of Artificial Sequence: Synthetic oligonucleotide
  Sense strand starting at position 2343 of SEQ ID NO: 585080
guaaguuuggaguaaauac

SEQ ID NO: 611631 - RNA, 19 nt, Artificial Sequence
  Description of Artificial Sequence: Synthetic oligonucleotide
  Antisense strand to SEQ ID NO: 611630
guauuuacuccaaacuuac

SEQ ID NO: 611632 - RNA, 19 nt, Artificial Sequence
  Description of Artificial Sequence: Synthetic oligonucleotide
  Sense strand starting at position 2452 of SEQ ID NO: 585080
uguccaaauguaugcauuu

SEQ ID NO: 611633 - RNA, 19 nt, Artificial Sequence
  Description of Artificial Sequence: Synthetic oligonucleotide
  Antisense strand to SEQ ID NO: 611632
aaaugcauacauuuggaca

SEQ ID NO: 611634 - RNA, 19 nt, Artificial Sequence
  Description of Artificial Sequence: Synthetic oligonucleotide
  Sense strand starting at position 2636 of SEQ ID NO: 585080
uugucucugccauaagaca

SEQ ID NO: 611635 - RNA, 19 nt, Artificial Sequence
  Description of Artificial Sequence: Synthetic oligonucleotide
  Antisense strand to SEQ ID NO: 611634
ugucuuauggcagagacaa

SEQ ID NO: 611636 - RNA, 19 nt, Artificial Sequence
  Description of Artificial Sequence: Synthetic oligonucleotide
  Sense strand starting at position 2652 of SEQ ID NO: 585080
acaaacgaauguccugaua

SEQ ID NO: 611637 - RNA, 19 nt, Artificial Sequence
  Description of Artificial Sequence: Synthetic oligonucleotide
  Antisense strand to SEQ ID NO: 611636
uaucaggacauucguuugu

SEQ ID NO: 611638 - RNA, 19 nt, Artificial Sequence
  Description of Artificial Sequence: Synthetic oligonucleotide
  Sense strand starting at position 2655 of SEQ ID NO: 585080
aacgaauguccugauacuu

SEQ ID NO: 611639 - RNA, 19 nt, Artificial Sequence
  Description of Artificial Sequence: Synthetic oligonucleotide
  Antisense strand to SEQ ID NO: 611638
aaguaucaggacauucguu

SEQ ID NO: 611640 - RNA, 19 nt, Artificial Sequence
  Description of Artificial Sequence: Synthetic oligonucleotide
  Sense strand starting at position 2741 of SEQ ID NO: 585080
caaaucuguuacgugaauu

SEQ ID NO: 611641 - RNA, 19 nt, Artificial Sequence
  Description of Artificial Sequence: Synthetic oligonucleotide
  Antisense strand to SEQ ID NO: 611640
aauucacguaacagauuug

SEQ ID NO: 611642 - RNA, 19 nt, Artificial Sequence
  Description of Artificial Sequence: Synthetic oligonucleotide
  Sense strand starting at position 2830 of SEQ ID NO: 585080
ucaugcguugaggauauaa

SEQ ID NO: 611643 - RNA, 19 nt, Artificial Sequence
  Description of Artificial Sequence: Synthetic oligonucleotide
  Antisense strand to SEQ ID NO: 611642
uuauauccucaacgcauga

SEQ ID NO: 611644 - RNA, 19 nt, Artificial Sequence
  Description of Artificial Sequence: Synthetic oligonucleotide
  Sense strand starting at position 2832 of SEQ ID NO: 585080
augcguugaggauauaagu

SEQ ID NO: 611645 - RNA, 19 nt, Artificial Sequence
  Description of Artificial Sequence: Synthetic oligonucleotide
  Antisense strand to SEQ ID NO: 611644
acuuauauccucaacgcau

SEQ ID NO: 611646 - RNA, 19 nt, Artificial Sequence
  Description of Artificial Sequence: Synthetic oligonucleotide
  Sense strand starting at position 2925 of SEQ ID NO: 585080
uuuacucuugaauguugau

SEQ ID NO: 611647 - RNA, 19 nt, Artificial Sequence
  Description of Artificial Sequence: Synthetic oligonucleotide
  Antisense strand to SEQ ID NO: 611646
aucaacauucaagaguaaa

SEQ ID NO: 611648 - RNA, 19 nt, Artificial Sequence
  Description of Artificial Sequence: Synthetic oligonucleotide
  Sense strand starting at position 2941 of SEQ ID NO: 585080
gauauuccacucgaaguuu

SEQ ID NO: 611649 - RNA, 19 nt, Artificial Sequence
  Description of Artificial Sequence: Synthetic oligonucleotide
  Antisense strand to SEQ ID NO: 611648
aaacuucgaguggaauauc

SEQ ID NO: 611650 - RNA, 19 nt, Artificial Sequence
  Description of Artificial Sequence: Synthetic oligonucleotide
  Sense strand starting at position 2964 of SEQ ID NO: 585080
gguugcuaagcuuaaggau

SEQ ID NO: 611651 - RNA, 19 nt, Artificial Sequence
  Description of Artificial Sequence: Synthetic oligonucleotide
  Antisense strand to SEQ ID NO: 611650
auccuuaagcuuagcaacc

SEQ ID NO: 611652 - RNA, 19 nt, Artificial Sequence
  Description of Artificial Sequence: Synthetic oligonucleotide
  Sense strand starting at position 3061 of SEQ ID NO: 585080
guggcaugugagucgguuu

SEQ ID NO: 611653 - RNA, 19 nt, Artificial Sequence
  Description of Artificial Sequence: Synthetic oligonucleotide
  Antisense strand to SEQ ID NO: 611652
aaaccgacucacaugccac

SEQ ID NO: 611654 - RNA, 19 nt, Artificial Sequence
  Description of Artificial Sequence: Synthetic oligonucleotide
  Sense strand starting at position 3131 of SEQ ID NO: 585080
gucauuuggcgaugcagag

SEQ ID NO: 611655 - RNA, 19 nt, Artificial Sequence
  Description of Artificial Sequence: Synthetic oligonucleotide
  Antisense strand to SEQ ID NO: 611654
cucugcaucgccaaaugac

SEQ ID NO: 611656 - RNA, 19 nt, Artificial Sequence
  Description of Artificial Sequence: Synthetic oligonucleotide
  Sense strand starting at position 3137 of SEQ ID NO: 585080
uggcgaugcagagaggauu

SEQ ID NO: 611657 - RNA, 19 nt, Artificial Sequence
  Description of Artificial Sequence: Synthetic oligonucleotide
  Antisense strand to SEQ ID NO: 611656
aauccucucugcaucgcca

SEQ ID NO: 611658 - RNA, 19 nt, Artificial Sequence
  Description of Artificial Sequence: Synthetic oligonucleotide
  Sense strand starting at position 3171 of SEQ ID NO: 585080
uccagacuccggugaaagu

SEQ ID NO: 611659 - RNA, 19 nt, Artificial Sequence
  Description of Artificial Sequence: Synthetic oligonucleotide
  Antisense strand to SEQ ID NO: 611658
acuuucaccggagucugga

SEQ ID NO: 611660 - RNA, 19 nt, Artificial Sequence
  Description of Artificial Sequence: Synthetic oligonucleotide
  Sense strand starting at position 3172 of SEQ ID NO: 585080
ccagacuccggugaaaguu

SEQ ID NO: 611661 - RNA, 19 nt, Artificial Sequence
  Description of Artificial Sequence: Synthetic oligonucleotide
  Antisense strand to SEQ ID NO: 611660
aacuuucaccggagucugg

SEQ ID NO: 611662 - RNA, 19 nt, Artificial Sequence
  Description of Artificial Sequence: Synthetic oligonucleotide
  Sense strand starting at position 3308 of SEQ ID NO: 585080
cugcccauucuguagaaga

SEQ ID NO: 611663 - RNA, 19 nt, Artificial Sequence
  Description of Artificial Sequence: Synthetic oligonucleotide
  Antisense strand to SEQ ID NO: 611662
ucuucuacagaaugggcag

SEQ ID NO: 611664 - RNA, 19 nt, Artificial Sequence
  Description of Artificial Sequence: Synthetic oligonucleotide
  Sense strand starting at position 3310 of SEQ ID NO: 585080
gcccauucuguagaagaaa

SEQ ID NO: 611665 - RNA, 19 nt, Artificial Sequence
  Description of Artificial Sequence: Synthetic oligonucleotide
  Antisense strand to SEQ ID NO: 611664
uuucuucuacagaaugggc

SEQ ID NO: 611666 - RNA, 19 nt, Artificial Sequence
  Description of Artificial Sequence: Synthetic oligonucleotide
  Sense strand starting at position 3365 of SEQ ID NO: 585080
ggacauuguuuccuuuacu

SEQ ID NO: 611667 - RNA, 19 nt, Artificial Sequence
  Description of Artificial Sequence: Synthetic oligonucleotide
  Antisense strand to SEQ ID NO: 611666
aguaaaggaaacaaugucc

SEQ ID NO: 611668 - RNA, 19 nt, Artificial Sequence
  Description of Artificial Sequence: Synthetic oligonucleotide
  Sense strand starting at position 3579 of SEQ ID NO: 585080
auaucaaggccuugaucau

SEQ ID NO: 611669 - RNA, 19 nt, Artificial Sequence
  Description of Artificial Sequence: Synthetic oligonucleotide
  Antisense strand to SEQ ID NO: 611668
augaucaaggccuugauau

SEQ ID NO: 611670 - RNA, 19 nt, Artificial Sequence
  Description of Artificial Sequence: Synthetic oligonucleotide
  Sense strand starting at position 3605 of SEQ ID NO: 585080
cggucagucauuuggaugu

SEQ ID NO: 611671 - RNA, 19 nt, Artificial Sequence
  Description of Artificial Sequence: Synthetic oligonucleotide
  Antisense strand to SEQ ID NO: 611670
acauccaaaugacugaccg

SEQ ID NO: 611672 - RNA, 19 nt, Artificial Sequence
  Description of Artificial Sequence: Synthetic oligonucleotide
  Sense strand starting at position 116 of SEQ ID NO: 585081
uuacgaccagagcauuauu

SEQ ID NO: 611673 - RNA, 19 nt, Artificial Sequence
  Description of Artificial Sequence: Synthetic oligonucleotide
  Antisense strand to SEQ ID NO: 611672
aauaaugcucuggucguaa

SEQ ID NO: 611674 - RNA, 19 nt, Artificial Sequence
  Description of Artificial Sequence: Synthetic oligonucleotide
  Sense strand starting at position 489 of SEQ ID NO: 585081
uuaguuuccgaauauguau

SEQ ID NO: 611675 - RNA, 19 nt, Artificial Sequence
  Description of Artificial Sequence: Synthetic oligonucleotide
  Antisense strand to SEQ ID NO: 611674
auacauauucggaaacuaa

SEQ ID NO: 611676 - RNA, 19 nt, Artificial Sequence
  Description of Artificial Sequence: Synthetic oligonucleotide
  Sense strand starting at position 579 of SEQ ID NO: 585081
uacaguucuuuguugaaga

SEQ ID NO: 611677 - RNA, 19 nt, Artificial Sequence
  Description of Artificial Sequence: Synthetic oligonucleotide
  Antisense strand to SEQ ID NO: 611676
ucuucaacaaagaacugua

SEQ ID NO: 611678 - RNA, 19 nt, Artificial Sequence
  Description of Artificial Sequence: Synthetic oligonucleotide
  Sense strand starting at position 581 of SEQ ID NO: 585081
caguucuuuguugaagaug

SEQ ID NO: 611679 - RNA, 19 nt, Artificial Sequence
  Description of Artificial Sequence: Synthetic oligonucleotide
  Antisense strand to SEQ ID NO: 611678
caucuucaacaaagaacug

SEQ ID NO: 611680 - RNA, 19 nt, Artificial Sequence
  Description of Artificial Sequence: Synthetic oligonucleotide
  Sense strand starting at position 584 of SEQ ID NO: 585081
uucuuuguugaagauggua

SEQ ID NO: 611681 - RNA, 19 nt, Artificial Sequence
  Description of Artificial Sequence: Synthetic oligonucleotide
  Antisense strand to SEQ ID NO: 611680
uaccaucuucaacaaagaa

SEQ ID NO: 611682 - RNA, 19 nt, Artificial Sequence
  Description of Artificial Sequence: Synthetic oligonucleotide
  Sense strand starting at position 586 of SEQ ID NO: 585081
cuuuguugaagaugguaua

SEQ ID NO: 611683 - RNA, 19 nt, Artificial Sequence
  Description of Artificial Sequence: Synthetic oligonucleotide
  Antisense strand to SEQ ID NO: 611682
uauaccaucuucaacaaag

SEQ ID NO: 611684 - RNA, 19 nt, Artificial Sequence
  Description of Artificial Sequence: Synthetic oligonucleotide
  Sense strand starting at position 597 of SEQ ID NO: 585081
augguauacaaauguaguu

SEQ ID NO: 611685 - RNA, 19 nt, Artificial Sequence
  Description of Artificial Sequence: Synthetic oligonucleotide
  Antisense strand to SEQ ID NO: 611684
aacuacauuuguauaccau

SEQ ID NO: 611686 - RNA, 19 nt, Artificial Sequence
  Description of Artificial Sequence: Synthetic oligonucleotide
  Sense strand starting at position 633 of SEQ ID NO: 585081
guuacuucucauuaagguu

SEQ ID NO: 611687 - RNA, 19 nt, Artificial Sequence
  Description of Artificial Sequence: Synthetic oligonucleotide
  Antisense strand to SEQ ID NO: 611686
aaccuuaaugagaaguaac

SEQ ID NO: 611688 - RNA, 19 nt, Artificial Sequence
  Description of Artificial Sequence: Synthetic oligonucleotide
  Sense strand starting at position 665 of SEQ ID NO: 585081
guguacucuguccaagaau

SEQ ID NO: 611689 - RNA, 19 nt, Artificial Sequence
  Description of Artificial Sequence: Synthetic oligonucleotide
  Antisense strand to SEQ ID NO: 611688
auucuuggacagaguacac

SEQ ID NO: 611690 - RNA, 19 nt, Artificial Sequence
  Description of Artificial Sequence: Synthetic oligonucleotide
  Sense strand starting at position 859 of SEQ ID NO: 585081
cguauaaaccugcaaagaa

SEQ ID NO: 611691 - RNA, 19 nt, Artificial Sequence
  Description of Artificial Sequence: Synthetic oligonucleotide
  Antisense strand to SEQ ID NO: 611690
uucuuugcagguuuauacg

SEQ ID NO: 611692 - RNA, 19 nt, Artificial Sequence
  Description of Artificial Sequence: Synthetic oligonucleotide
  Sense strand starting at position 1118 of SEQ ID NO: 585081
cuauuuguugauuggcgau

SEQ ID NO: 611693 - RNA, 19 nt, Artificial Sequence
  Description of Artificial Sequence: Synthetic oligonucleotide
  Antisense strand to SEQ ID NO: 611692
aucgccaaucaacaaauag

SEQ ID NO: 611694 - RNA, 19 nt, Artificial Sequence
  Description of Artificial Sequence: Synthetic oligonucleotide
  Sense strand starting at position 1131 of SEQ ID NO: 585081
ggcgauugucacucgcauc

SEQ ID NO: 611695 - RNA, 19 nt, Artificial Sequence
  Description of Artificial Sequence: Synthetic oligonucleotide
  Antisense strand to SEQ ID NO: 611694
gaugcgagugacaaucgcc

SEQ ID NO: 611696 - RNA, 19 nt, Artificial Sequence
  Description of Artificial Sequence: Synthetic oligonucleotide
  Sense strand starting at position 1169 of SEQ ID NO: 585081
gcuggaacucugcagacua

SEQ ID NO: 611697 - RNA, 19 nt, Artificial Sequence
  Description of Artificial Sequence: Synthetic oligonucleotide
  Antisense strand to SEQ ID NO: 611696
uagucugcagaguuccagc

SEQ ID NO: 611698 - RNA, 19 nt, Artificial Sequence
  Description of Artificial Sequence: Synthetic oligonucleotide
  Sense strand starting at position 1211 of SEQ ID NO: 585081
ggacuuaaauuugaaucau

SEQ ID NO: 611699 - RNA, 19 nt, Artificial Sequence
  Description of Artificial Sequence: Synthetic oligonucleotide
  Antisense strand to SEQ ID NO: 611698
augauucaaauuuaagucc

SEQ ID NO: 611700 - RNA, 19 nt, Artificial Sequence
  Description of Artificial Sequence: Synthetic oligonucleotide
  Sense strand starting at position 1261 of SEQ ID NO: 585081
aaaguuacuuuaucggaau

SEQ ID NO: 611701 - RNA, 19 nt, Artificial Sequence
  Description of Artificial Sequence: Synthetic oligonucleotide
  Antisense strand to SEQ ID NO: 611700
auuccgauaaaguaacuuu

SEQ ID NO: 611702 - RNA, 19 nt, Artificial Sequence
  Description of Artificial Sequence: Synthetic oligonucleotide
  Sense strand starting at position 1272 of SEQ ID NO: 585081
aucggaaucucaguucuaa

SEQ ID NO: 611703 - RNA, 19 nt, Artificial Sequence
  Description of Artificial Sequence: Synthetic oligonucleotide
  Antisense strand to SEQ ID NO: 611702
uuagaacugagauuccgau

SEQ ID NO: 611704 - RNA, 19 nt, Artificial Sequence
  Description of Artificial Sequence: Synthetic oligonucleotide
  Sense strand starting at position 1318 of SEQ ID NO: 585081
cugguagggcuacaguaau

SEQ ID NO: 611705 - RNA, 19 nt, Artificial Sequence
  Description of Artificial Sequence: Synthetic oligonucleotide
  Antisense strand to SEQ ID NO: 611704
auuacuguagcccuaccag

SEQ ID NO: 611706 - RNA, 19 nt, Artificial Sequence
  Description of Artificial Sequence: Synthetic oligonucleotide
  Sense strand starting at position 1324 of SEQ ID NO: 585081
gggcuacaguaaucagaua

SEQ ID NO: 611707 - RNA, 19 nt, Artificial Sequence
  Description of Artificial Sequence: Synthetic oligonucleotide
  Antisense strand to SEQ ID NO: 611706
uaucugauuacuguagccc

SEQ ID NO: 611708 - RNA, 19 nt, Artificial Sequence
  Description of Artificial Sequence: Synthetic oligonucleotide
  Sense strand starting at position 1554 of SEQ ID NO: 585081
aaauuuacuguccgagugu

SEQ ID NO: 611709 - RNA, 19 nt, Artificial Sequence
  Description of Artificial Sequence: Synthetic oligonucleotide
  Antisense strand to SEQ ID NO: 611708
acacucggacaguaaauuu

SEQ ID NO: 611710 - RNA, 19 nt, Artificial Sequence
  Description of Artificial Sequence: Synthetic oligonucleotide
  Sense strand starting at position 2141 of SEQ ID NO: 585081
gggcgucuuggagaacaga

SEQ ID NO: 611711 - RNA, 19 nt, Artificial Sequence
  Description of Artificial Sequence: Synthetic oligonucleotide
  Antisense strand to SEQ ID NO: 611710
ucuguucuccaagacgccc

SEQ ID NO: 611712 - RNA, 19 nt, Artificial Sequence
  Description of Artificial Sequence: Synthetic oligonucleotide
  Sense strand starting at position 2316 of SEQ ID NO: 585081
ggcuauguccgaccguuua

SEQ ID NO: 611713 - RNA, 19 nt, Artificial Sequence
  Description of Artificial Sequence: Synthetic oligonucleotide
  Antisense strand to SEQ ID NO: 611712
uaaacggucggacauagcc

SEQ ID NO: 611714 - RNA, 19 nt, Artificial Sequence
  Description of Artificial Sequence: Synthetic oligonucleotide
  Sense strand starting at position 2430 of SEQ ID NO: 585081
gaaauugaagccugagacu

SEQ ID NO: 611715 - RNA, 19 nt, Artificial Sequence
  Description of Artificial Sequence: Synthetic oligonucleotide
  Antisense strand to SEQ ID NO: 611714
agucucaggcuucaauuuc

SEQ ID NO: 611716 - RNA, 19 nt, Artificial Sequence
  Description of Artificial Sequence: Synthetic oligonucleotide
  Sense strand starting at position 2571 of SEQ ID NO: 585081
gcuugcggauuuccugaga

SEQ ID NO: 611717 - RNA, 19 nt, Artificial Sequence
  Description of Artificial Sequence: Synthetic oligonucleotide
  Antisense strand to SEQ ID NO: 611716
ucucaggaaauccgcaagc

SEQ ID NO: 611718 - RNA, 19 nt, Artificial Sequence
  Description of Artificial Sequence: Synthetic oligonucleotide
  Sense strand starting at position 2582 of SEQ ID NO: 585081
uccugagaguacucugagu

SEQ ID NO: 611719 - RNA, 19 nt, Artificial Sequence
  Description of Artificial Sequence: Synthetic oligonucleotide
  Antisense strand to SEQ ID NO: 611718
acucagaguacucucagga

SEQ ID NO: 611720 - RNA, 19 nt, Artificial Sequence
  Description of Artificial Sequence: Synthetic oligonucleotide
  Sense strand starting at position 2584 of SEQ ID NO: 585081
cugagaguacucugaguau

SEQ ID NO: 611721 - RNA, 19 nt, Artificial Sequence
  Description of Artificial Sequence: Synthetic oligonucleotide
  Antisense strand to SEQ ID NO: 611720
auacucagaguacucucag

SEQ ID NO: 611722 - RNA, 19 nt, Artificial Sequence
  Description of Artificial Sequence: Synthetic oligonucleotide
  Sense strand starting at position 2587 of SEQ ID NO: 585081
agaguacucugaguauuau

SEQ ID NO: 611723 - RNA, 19 nt, Artificial Sequence
  Description of Artificial Sequence: Synthetic oligonucleotide
  Antisense strand to SEQ ID NO: 611722
auaauacucagaguacucu

SEQ ID NO: 611724 - RNA, 19 nt, Artificial Sequence
  Description of Artificial Sequence: Synthetic oligonucleotide
  Sense strand starting at position 2588 of SEQ ID NO: 585081
gaguacucugaguauuauu

SEQ ID NO: 611725 - RNA, 19 nt, Artificial Sequence
  Description of Artificial Sequence: Synthetic oligonucleotide
  Antisense strand to SEQ ID NO: 611724
aauaauacucagaguacuc

SEQ ID NO: 611726 - RNA, 19 nt, Artificial Sequence
  Description of Artificial Sequence: Synthetic oligonucleotide
  Sense strand starting at position 2699 of SEQ ID NO: 585081
uuugauaaaccaggcagaa

SEQ ID NO: 611727 - RNA, 19 nt, Artificial Sequence
  Description of Artificial Sequence: Synthetic oligonucleotide
  Antisense strand to SEQ ID NO: 611726
uucugccugguuuaucaaa

SEQ ID NO: 611728 - RNA, 19 nt, Artificial Sequence
  Description of Artificial Sequence: Synthetic oligonucleotide
  Sense strand starting at position 2743 of SEQ ID NO: 585081
acaucagcagucuggauau

SEQ ID NO: 611729 - RNA, 19 nt, Artificial Sequence
  Description of Artificial Sequence: Synthetic oligonucleotide
  Antisense strand to SEQ ID NO: 611728
auauccagacugcugaugu

SEQ ID NO: 611730 - RNA, 19 nt, Artificial Sequence
  Description of Artificial Sequence: Synthetic oligonucleotide
  Sense strand starting at position 2871 of SEQ ID NO: 585081
uuucuauaugauuaggcuu

SEQ ID NO: 611731 - RNA, 19 nt, Artificial Sequence
  Description of Artificial Sequence: Synthetic oligonucleotide
  Antisense strand to SEQ ID NO: 611730
aagccuaaucauauagaaa

SEQ ID NO: 611732 - RNA, 19 nt, Artificial Sequence
  Description of Artificial Sequence: Synthetic oligonucleotide
  Sense strand starting at position 2874 of SEQ ID NO: 585081
cuauaugauuaggcuuuga

SEQ ID NO: 611733 - RNA, 19 nt, Artificial Sequence
  Description of Artificial Sequence: Synthetic oligonucleotide
  Antisense strand to SEQ ID NO: 611732
ucaaagccuaaucauauag

SEQ ID NO: 611734 - RNA, 19 nt, Artificial Sequence
  Description of Artificial Sequence: Synthetic oligonucleotide
  Sense strand starting at position 2942 of SEQ ID NO: 585081
aaauuaguuugcccaagga

SEQ ID NO: 611735 - RNA, 19 nt, Artificial Sequence
  Description of Artificial Sequence: Synthetic oligonucleotide
  Antisense strand to SEQ ID NO: 611734
uccuugggcaaacuaauuu

SEQ ID NO: 611736 - RNA, 19 nt, Artificial Sequence
  Description of Artificial Sequence: Synthetic oligonucleotide
  Sense strand starting at position 2946 of SEQ ID NO: 585081
uaguuugcccaaggauaca

SEQ ID NO: 611737 - RNA, 19 nt, Artificial Sequence
  Description of Artificial Sequence: Synthetic oligonucleotide
  Antisense strand to SEQ ID NO: 611736
uguauccuugggcaaacua

SEQ ID NO: 611738 - RNA, 19 nt, Artificial Sequence
  Description of Artificial Sequence: Synthetic oligonucleotide
  Sense strand starting at position 3285 of SEQ ID NO: 585081
ccuaaaucaguuggacuua

SEQ ID NO: 611739 - RNA, 19 nt, Artificial Sequence
  Description of Artificial Sequence: Synthetic oligonucleotide
  Antisense strand to SEQ ID NO: 611738
uaaguccaacugauuuagg

SEQ ID NO: 611740 - RNA, 19 nt, Artificial Sequence
  Description of Artificial Sequence: Synthetic oligonucleotide
  Sense strand starting at position 3328 of SEQ ID NO: 585081
gcuguauuucuuggcaaug

SEQ ID NO: 611741 - RNA, 19 nt, Artificial Sequence
  Description of Artificial Sequence: Synthetic oligonucleotide
  Antisense strand to SEQ ID NO: 611740
cauugccaagaaauacagc

SEQ ID NO: 611742 - RNA, 19 nt, Artificial Sequence
  Description of Artificial Sequence: Synthetic oligonucleotide
  Sense strand starting at position 3342 of SEQ ID NO: 585081
caaugagucugaguaacag

SEQ ID NO: 611743 - RNA, 19 nt, Artificial Sequence
  Description of Artificial Sequence: Synthetic oligonucleotide
  Antisense strand to SEQ ID NO: 611742
cuguuacucagacucauug

SEQ ID NO: 611744 - RNA, 19 nt, Artificial Sequence
  Description of Artificial Sequence: Synthetic oligonucleotide
  Sense strand starting at position 3497 of SEQ ID NO: 585081
gcaccugguauauagguua

SEQ ID NO: 611745 - RNA, 19 nt, Artificial Sequence
  Description of Artificial Sequence: Synthetic oligonucleotide
  Antisense strand to SEQ ID NO: 611744
uaaccuauauaccaggugc

SEQ ID NO: 611746 - RNA, 19 nt, Artificial Sequence
  Description of Artificial Sequence: Synthetic oligonucleotide
  Sense strand starting at position 3560 of SEQ ID NO: 585081
uugauauggaugugaucaa

SEQ ID NO: 611747 - RNA, 19 nt, Artificial Sequence
  Description of Artificial Sequence: Synthetic oligonucleotide
  Antisense strand to SEQ ID NO: 611746
uugaucacauccauaucaa

SEQ ID NO: 611748 - RNA, 19 nt, Artificial Sequence
  Description of Artificial Sequence: Synthetic oligonucleotide
  Sense strand starting at position 3640 of SEQ ID NO: 585081
ggaagaaauugagaaagga

SEQ ID NO: 611749 - RNA, 19 nt, Artificial Sequence
  Description of Artificial Sequence: Synthetic oligonucleotide
  Antisense strand to SEQ ID NO: 611748
uccuuucucaauuucuucc

SEQ ID NO: 611750 - RNA, 19 nt, Artificial Sequence
  Description of Artificial Sequence: Synthetic oligonucleotide
  Sense strand starting at position 3879 of SEQ ID NO: 585081
uauagagcuuuggugagau

SEQ ID NO: 611751 - RNA, 19 nt, Artificial Sequence
  Description of Artificial Sequence: Synthetic oligonucleotide
  Antisense strand to SEQ ID NO: 611750
aucucaccaaagcucuaua

SEQ ID NO: 611752 - RNA, 19 nt, Artificial Sequence
  Description of Artificial Sequence: Synthetic oligonucleotide
  Sense strand starting at position 234 of SEQ ID NO: 585082
cccguuuguaaagaaagaa

SEQ ID NO: 611753 - RNA, 19 nt, Artificial Sequence
  Description of Artificial Sequence: Synthetic oligonucleotide
  Antisense strand to SEQ ID NO: 611752
uucuuucuuuacaaacggg

SEQ ID NO: 611754 - RNA, 19 nt, Artificial Sequence
  Description of Artificial Sequence: Synthetic oligonucleotide
  Sense strand starting at position 349 of SEQ ID NO: 585082
cuggaaugaacccaguguu

SEQ ID NO: 611755 - RNA, 19 nt, Artificial Sequence
  Description of Artificial Sequence: Synthetic oligonucleotide
  Antisense strand to SEQ ID NO: 611754
aacacuggguucauuccag

SEQ ID NO: 611756 - RNA, 19 nt, Artificial Sequence
  Description of Artificial Sequence: Synthetic oligonucleotide
  Sense strand starting at position 352 of SEQ ID NO: 585082
gaaugaacccaguguuuac

SEQ ID NO: 611757 - RNA, 19 nt, Artificial Sequence
  Description of Artificial Sequence: Synthetic oligonucleotide
  Antisense strand to SEQ ID NO: 611756
guaaacacuggguucauuc

SEQ ID NO: 611758 - RNA, 19 nt, Artificial Sequence
  Description of Artificial Sequence: Synthetic oligonucleotide
  Sense strand starting at position 564 of SEQ ID NO: 585082
gcauucuagcaacagaaug

SEQ ID NO: 611759 - RNA, 19 nt, Artificial Sequence
  Description of Artificial Sequence: Synthetic oligonucleotide
  Antisense strand to SEQ ID NO: 611758
cauucuguugcuagaaugc

SEQ ID NO: 611760 - RNA, 19 nt, Artificial Sequence
  Description of Artificial Sequence: Synthetic oligonucleotide
  Sense strand starting at position 569 of SEQ ID NO: 585082
cuagcaacagaaugauuau

SEQ ID NO: 611761 - RNA, 19 nt, Artificial Sequence
  Description of Artificial Sequence: Synthetic oligonucleotide
  Antisense strand to SEQ ID NO: 611760
auaaucauucuguugcuag

SEQ ID NO: 611762 - RNA, 19 nt, Artificial Sequence
  Description of Artificial Sequence: Synthetic oligonucleotide
  Sense strand starting at position 607 of SEQ ID NO: 585082
ucccauguucuuuaagaag

SEQ ID NO: 611763 - RNA, 19 nt, Artificial Sequence
  Description of Artificial Sequence: Synthetic oligonucleotide
  Antisense strand to SEQ ID NO: 611762
cuucuuaaagaacauggga

SEQ ID NO: 611764 - RNA, 19 nt, Artificial Sequence
  Description of Artificial Sequence: Synthetic oligonucleotide
  Sense strand starting at position 724 of SEQ ID NO: 585082
ggaggugauuagaggaaug

SEQ ID NO: 611765 - RNA, 19 nt, Artificial Sequence
  Description of Artificial Sequence: Synthetic oligonucleotide
  Antisense strand to SEQ ID NO: 611764
cauuccucuaaucaccucc

SEQ ID NO: 611766 - RNA, 19 nt, Artificial Sequence
  Description of Artificial Sequence: Synthetic oligonucleotide
  Sense strand starting at position 796 of SEQ ID NO: 585082
aaugcuuaacgagguagaa

SEQ ID NO: 611767 - RNA, 19 nt, Artificial Sequence
  Description of Artificial Sequence: Synthetic oligonucleotide
  Antisense strand to SEQ ID NO: 611766
uucuaccucguuaagcauu

SEQ ID NO: 611768 - RNA, 19 nt, Artificial Sequence
  Description of Artificial Sequence: Synthetic oligonucleotide
  Sense strand starting at position 798 of SEQ ID NO: 585082
ugcuuaacgagguagaaca

SEQ ID NO: 611769 - RNA, 19 nt, Artificial Sequence
  Description of Artificial Sequence: Synthetic oligonucleotide
  Antisense strand to SEQ ID NO: 611768
uguucuaccucguuaagca

SEQ ID NO: 611770 - RNA, 19 nt, Artificial Sequence
  Description of Artificial Sequence: Synthetic oligonucleotide
  Sense strand starting at position 957 of SEQ ID NO: 585082
aggacuugguguuugggau

SEQ ID NO: 611771 - RNA, 19 nt, Artificial Sequence
  Description of Artificial Sequence: Synthetic oligonucleotide
  Antisense strand to SEQ ID NO: 611770
aucccaaacaccaaguccu

SEQ ID NO: 611772 - RNA, 19 nt, Artificial Sequence
  Description of Artificial Sequence: Synthetic oligonucleotide
  Sense strand starting at position 958 of SEQ ID NO: 585082
ggacuugguguuugggaua

SEQ ID NO: 611773 - RNA, 19 nt, Artificial Sequence
  Description of Artificial Sequence: Synthetic oligonucleotide
  Antisense strand to SEQ ID NO: 611772
uaucccaaacaccaagucc

SEQ ID NO: 611774 - RNA, 19 nt, Artificial Sequence
  Description of Artificial Sequence: Synthetic oligonucleotide
  Sense strand starting at position 971 of SEQ ID NO: 585082
gggauaagacccugcaaac

SEQ ID NO: 611775 - RNA, 19 nt, Artificial Sequence
  Description of Artificial Sequence: Synthetic oligonucleotide
  Antisense strand to SEQ ID NO: 611774
guuugcagggucuuauccc

SEQ ID NO: 611776 - RNA, 19 nt, Artificial Sequence
  Description of Artificial Sequence: Synthetic oligonucleotide
  Sense strand starting at position 982 of SEQ ID NO: 585082
cugcaaacggcagagaauu

SEQ ID NO: 611777 - RNA, 19 nt, Artificial Sequence
  Description of Artificial Sequence: Synthetic oligonucleotide
  Antisense strand to SEQ ID NO: 611776
aauucucugccguuugcag

SEQ ID NO: 611778 - RNA, 19 nt, Artificial Sequence
  Description of Artificial Sequence: Synthetic oligonucleotide
  Sense strand starting at position 1153 of SEQ ID NO: 585082
guaagucauaaggagcuga

SEQ ID NO: 611779 - RNA, 19 nt, Artificial Sequence
  Description of Artificial Sequence: Synthetic oligonucleotide
  Antisense strand to SEQ ID NO: 611778
ucagcuccuuaugacuuac

SEQ ID NO: 611780 - RNA, 19 nt, Artificial Sequence
  Description of Artificial Sequence: Synthetic oligonucleotide
  Sense strand starting at position 1157 of SEQ ID NO: 585082
gucauaaggagcugacaga

SEQ ID NO: 611781 - RNA, 19 nt, Artificial Sequence
  Description of Artificial Sequence: Synthetic oligonucleotide
  Antisense strand to SEQ ID NO: 611780
ucugucagcuccuuaugac

SEQ ID NO: 611782 - RNA, 19 nt, Artificial Sequence
  Description of Artificial Sequence: Synthetic oligonucleotide
  Sense strand starting at position 1350 of SEQ ID NO: 585082
uagggaauguguguuuaag

SEQ ID NO: 611783 - RNA, 19 nt, Artificial Sequence
  Description of Artificial Sequence: Synthetic oligonucleotide
  Antisense strand to SEQ ID NO: 611782
cuuaaacacacauucccua

SEQ ID NO: 611784 - RNA, 19 nt, Artificial Sequence
  Description of Artificial Sequence: Synthetic oligonucleotide
  Sense strand starting at position 1548 of SEQ ID NO: 585082
cagauacuacaugguugua

SEQ ID NO: 611785 - RNA, 19 nt, Artificial Sequence
  Description of Artificial Sequence: Synthetic oligonucleotide
  Antisense strand to SEQ ID NO: 611784
uacaaccauguaguaucug

SEQ ID NO: 611786 - RNA, 19 nt, Artificial Sequence
  Description of Artificial Sequence: Synthetic oligonucleotide
  Sense strand starting at position 1843 of SEQ ID NO: 585082
agggaagguauccgaguca

SEQ ID NO: 611787 - RNA, 19 nt, Artificial Sequence
  Description of Artificial Sequence: Synthetic oligonucleotide
  Antisense strand to SEQ ID NO: 611786
ugacucggauaccuucccu

SEQ ID NO: 611788 - RNA, 19 nt, Artificial Sequence
  Description of Artificial Sequence: Synthetic oligonucleotide
  Sense strand starting at position 1861 of SEQ ID NO: 585082
acugcaccauuugagagau

SEQ ID NO: 611789 - RNA, 19 nt, Artificial Sequence
  Description of Artificial Sequence: Synthetic oligonucleotide
  Antisense strand to SEQ ID NO: 611788
aucucucaaauggugcagu

SEQ ID NO: 611790 - RNA, 19 nt, Artificial Sequence
  Description of Artificial Sequence: Synthetic oligonucleotide
  Sense strand starting at position 1912 of SEQ ID NO: 585082
uuuauacaucggcaugguu

SEQ ID NO: 611791 - RNA, 19 nt, Artificial Sequence
  Description of Artificial Sequence: Synthetic oligonucleotide
  Antisense strand to SEQ ID NO: 611790
aaccaugccgauguauaaa

SEQ ID NO: 611792 - RNA, 19 nt, Artificial Sequence
  Description of Artificial Sequence: Synthetic oligonucleotide
  Sense strand starting at position 2020 of SEQ ID NO: 585082
augugcauuuguuuacuga

SEQ ID NO: 611793 - RNA, 19 nt, Artificial Sequence
  Description of Artificial Sequence: Synthetic oligonucleotide
  Antisense strand to SEQ ID NO: 611792
ucaguaaacaaaugcacau

SEQ ID NO: 611794 - RNA, 19 nt, Artificial Sequence
  Description of Artificial Sequence: Synthetic oligonucleotide
  Sense strand starting at position 2023 of SEQ ID NO: 585082
ugcauuuguuuacugaagu

SEQ ID NO: 611795 - RNA, 19 nt, Artificial Sequence
  Description of Artificial Sequence: Synthetic oligonucleotide
  Antisense strand to SEQ ID NO: 611794
acuucaguaaacaaaugca

SEQ ID NO: 611796 - RNA, 19 nt, Artificial Sequence
  Description of Artificial Sequence: Synthetic oligonucleotide
  Sense strand starting at position 2047 of SEQ ID NO: 585082
gcaugcuuucuugagacau

SEQ ID NO: 611797 - RNA, 19 nt, Artificial Sequence
  Description of Artificial Sequence: Synthetic oligonucleotide
  Antisense strand to SEQ ID NO: 611796
augucucaagaaagcaugc

SEQ ID NO: 611798 - RNA, 19 nt, Artificial Sequence
  Description of Artificial Sequence: Synthetic oligonucleotide
  Sense strand starting at position 2100 of SEQ ID NO: 585082
gucacauacugguuaaacu

SEQ ID NO: 611799 - RNA, 19 nt, Artificial Sequence
  Description of Artificial Sequence: Synthetic oligonucleotide
  Antisense strand to SEQ ID NO: 611798
aguuuaaccaguaugugac

SEQ ID NO: 611800 - RNA, 19 nt, Artificial Sequence
  Description of Artificial Sequence: Synthetic oligonucleotide
  Sense strand starting at position 2158 of SEQ ID NO: 585082
cccagcuucggagaucuua

SEQ ID NO: 611801 - RNA, 19 nt, Artificial Sequence
  Description of Artificial Sequence: Synthetic oligonucleotide
  Antisense strand to SEQ ID NO: 611800
uaagaucuccgaagcuggg

SEQ ID NO: 611802 - RNA, 19 nt, Artificial Sequence
  Description of Artificial Sequence: Synthetic oligonucleotide
  Sense strand starting at position 2547 of SEQ ID NO: 585082
ggaauuaacaggugugcac

SEQ ID NO: 611803 - RNA, 19 nt, Artificial Sequence
  Description of Artificial Sequence: Synthetic oligonucleotide
  Antisense strand to SEQ ID NO: 611802
gugcacaccuguuaauucc

SEQ ID NO: 611804 - RNA, 19 nt, Artificial Sequence
  Description of Artificial Sequence: Synthetic oligonucleotide
  Sense strand starting at position 2862 of SEQ ID NO: 585082
cugaaagaguauuccauug

SEQ ID NO: 611805 - RNA, 19 nt, Artificial Sequence
  Description of Artificial Sequence: Synthetic oligonucleotide
  Antisense strand to SEQ ID NO: 611804
caauggaauacucuuucag

SEQ ID NO: 611806 - RNA, 19 nt, Artificial Sequence
  Description of Artificial Sequence: Synthetic oligonucleotide
  Sense strand starting at position 3326 of SEQ ID NO: 585082
caaaucuugguguagacau

SEQ ID NO: 611807 - RNA, 19 nt, Artificial Sequence
  Description of Artificial Sequence: Synthetic oligonucleotide
  Antisense strand to SEQ ID NO: 611806
augucuacaccaagauuug

SEQ ID NO: 611808 - RNA, 19 nt, Artificial Sequence
  Description of Artificial Sequence: Synthetic oligonucleotide
  Sense strand starting at position 3328 of SEQ ID NO: 585082
aaucuugguguagacauau

SEQ ID NO: 611809 - RNA, 19 nt, Artificial Sequence
  Description of Artificial Sequence: Synthetic oligonucleotide
  Antisense strand to SEQ ID NO: 611808
auaugucuacaccaagauu

SEQ ID NO: 611810 - RNA, 19 nt, Artificial Sequence
  Description of Artificial Sequence: Synthetic oligonucleotide
  Sense strand starting at position 3408 of SEQ ID NO: 585082
agcagucaugagugagaau

SEQ ID NO: 611811 - RNA, 19 nt, Artificial Sequence
  Description of Artificial Sequence: Synthetic oligonucleotide
  Antisense strand to SEQ ID NO: 611810
auucucacucaugacugcu

SEQ ID NO: 611812 - RNA, 19 nt, Artificial Sequence
  Description of Artificial Sequence: Synthetic oligonucleotide
  Sense strand starting at position 3409 of SEQ ID NO: 585082
gcagucaugagugagaauu

SEQ ID NO: 611813 - RNA, 19 nt, Artificial Sequence
  Description of Artificial Sequence: Synthetic oligonucleotide
  Antisense strand to SEQ ID NO: 611812
aauucucacucaugacugc

SEQ ID NO: 611814 - RNA, 19 nt, Artificial Sequence
  Description of Artificial Sequence: Synthetic oligonucleotide
  Sense strand starting at position 3421 of SEQ ID NO: 585082
gagaauuuguuacuccgca

SEQ ID NO: 611815 - RNA, 19 nt, Artificial Sequence
  Description of Artificial Sequence: Synthetic oligonucleotide
  Antisense strand to SEQ ID NO: 611814
ugcggaguaacaaauucuc

SEQ ID NO: 611816 - RNA, 19 nt, Artificial Sequence
  Description of Artificial Sequence: Synthetic oligonucleotide
  Sense strand starting at position 3422 of SEQ ID NO: 585082
agaauuuguuacuccgcau

SEQ ID NO: 611817 - RNA, 19 nt, Artificial Sequence
  Description of Artificial Sequence: Synthetic oligonucleotide
  Antisense strand to SEQ ID NO: 611816
augcggaguaacaaauucu

SEQ ID NO: 611818 - RNA, 19 nt, Artificial Sequence
  Description of Artificial Sequence: Synthetic oligonucleotide
  Sense strand starting at position 3425 of SEQ ID NO: 585082
auuuguuacuccgcaucca

SEQ ID NO: 611819 - RNA, 19 nt, Artificial Sequence
  Description of Artificial Sequence: Synthetic oligonucleotide
  Antisense strand to SEQ ID NO: 611818
uggaugcggaguaacaaau

SEQ ID NO: 611820 - RNA, 19 nt, Artificial Sequence
  Description of Artificial Sequence: Synthetic oligonucleotide
  Sense strand starting at position 3484 of SEQ ID NO: 585082
auucuagaggauggguauu

SEQ ID NO: 611821 - RNA, 19 nt, Artificial Sequence
  Description of Artificial Sequence: Synthetic oligonucleotide
  Antisense strand to SEQ ID NO: 611820
aauacccauccucuagaau

SEQ ID NO: 611822 - RNA, 19 nt, Artificial Sequence
  Description of Artificial Sequence: Synthetic oligonucleotide
  Sense strand starting at position 3486 of SEQ ID NO: 585082
ucuagaggauggguauuau

SEQ ID NO: 611823 - RNA, 19 nt, Artificial Sequence
  Description of Artificial Sequence: Synthetic oligonucleotide
  Antisense strand to SEQ ID NO: 611822
auaauacccauccucuaga

SEQ ID NO: 611824 - RNA, 19 nt, Artificial Sequence
  Description of Artificial Sequence: Synthetic oligonucleotide
  Sense strand starting at position 3553 of SEQ ID NO: 585082
auguguuauuugccauucu

SEQ ID NO: 611825 - RNA, 19 nt, Artificial Sequence
  Description of Artificial Sequence: Synthetic oligonucleotide
  Antisense strand to SEQ ID NO: 611824
agaauggcaaauaacacau

SEQ ID NO: 611826 - RNA, 19 nt, Artificial Sequence
  Description of Artificial Sequence: Synthetic oligonucleotide
  Sense strand starting at position 3574 of SEQ ID NO: 585082
cuaccuucuguguaaauca

SEQ ID NO: 611827 - RNA, 19 nt, Artificial Sequence
  Description of Artificial Sequence: Synthetic oligonucleotide
  Antisense strand to SEQ ID NO: 611826
ugauuuacacagaagguag

SEQ ID NO: 611828 - RNA, 19 nt, Artificial Sequence
  Description of Artificial Sequence: Synthetic oligonucleotide
  Sense strand starting at position 3581 of SEQ ID NO: 585082
cuguguaaaucaucuuuac

SEQ ID NO: 611829 - RNA, 19 nt, Artificial Sequence
  Description of Artificial Sequence: Synthetic oligonucleotide
  Antisense strand to SEQ ID NO: 611828
guaaagaugauuuacacag

SEQ ID NO: 611830 - RNA, 19 nt, Artificial Sequence
  Description of Artificial Sequence: Synthetic oligonucleotide
  Sense strand starting at position 3585 of SEQ ID NO: 585082
guaaaucaucuuuacaagu

SEQ ID NO: 611831 - RNA, 19 nt, Artificial Sequence
  Description of Artificial Sequence: Synthetic oligonucleotide
  Antisense strand to SEQ ID NO: 611830
acuuguaaagaugauuuac

SEQ ID NO: 611832 - RNA, 19 nt, Artificial Sequence
  Description of Artificial Sequence: Synthetic oligonucleotide
  Sense strand starting at position 147 of SEQ ID NO: 585083
caguguacaguugggaaau

SEQ ID NO: 611833 - RNA, 19 nt, Artificial Sequence
  Description of Artificial Sequence: Synthetic oligonucleotide
  Antisense strand to SEQ ID NO: 611832
auuucccaacuguacacug

SEQ ID NO: 611834 - RNA, 19 nt, Artificial Sequence
  Description of Artificial Sequence: Synthetic oligonucleotide
  Sense strand starting at position 365 of SEQ ID NO: 585083
gaacaauucuuguagggaa

SEQ ID NO: 611835 - RNA, 19 nt, Artificial Sequence
  Description of Artificial Sequence: Synthetic oligonucleotide
  Antisense strand to SEQ ID NO: 611834
uucccuacaagaauuguuc

SEQ ID NO: 611836 - RNA, 19 nt, Artificial Sequence
  Description of Artificial Sequence: Synthetic oligonucleotide
  Sense strand starting at position 529 of SEQ ID NO: 585083
gugggacaggcuugucacu

SEQ ID NO: 611837 - RNA, 19 nt, Artificial Sequence
  Description of Artificial Sequence: Synthetic oligonucleotide
  Antisense strand to SEQ ID NO: 611836
agugacaagccugucccac

SEQ ID NO: 611838 - RNA, 19 nt, Artificial Sequence
  Description of Artificial Sequence: Synthetic oligonucleotide
  Sense strand starting at position 618 of SEQ ID NO: 585083
caaauuuccggcugucaga

SEQ ID NO: 611839 - RNA, 19 nt, Artificial Sequence
  Description of Artificial Sequence: Synthetic oligonucleotide
  Antisense strand to SEQ ID NO: 611838
ucugacagccggaaauuug

SEQ ID NO: 611840 - RNA, 19 nt, Artificial Sequence
  Description of Artificial Sequence: Synthetic oligonucleotide
  Sense strand starting at position 764 of SEQ ID NO: 585083
aggaaucgcuucccagaaa

SEQ ID NO: 611841 - RNA, 19 nt, Artificial Sequence
  Description of Artificial Sequence: Synthetic oligonucleotide
  Antisense strand to SEQ ID NO: 611840
uuucugggaagcgauuccu

SEQ ID NO: 611842 - RNA, 19 nt, Artificial Sequence
  Description of Artificial Sequence: Synthetic oligonucleotide
  Sense strand starting at position 962 of SEQ ID NO: 585083
uguuuauuugccuggaggu

SEQ ID NO: 611843 - RNA, 19 nt, Artificial Sequence
  Description of Artificial Sequence: Synthetic oligonucleotide
  Antisense strand to SEQ ID NO: 611842
accuccaggcaaauaaaca

SEQ ID NO: 611844 - RNA, 19 nt, Artificial Sequence
  Description of Artificial Sequence: Synthetic oligonucleotide
  Sense strand starting at position 963 of SEQ ID NO: 585083
guuuauuugccuggaggug

SEQ ID NO: 611845 - RNA, 19 nt, Artificial Sequence
  Description of Artificial Sequence: Synthetic oligonucleotide
  Antisense strand to SEQ ID NO: 611844
caccuccaggcaaauaaac

SEQ ID NO: 611846 - RNA, 19 nt, Artificial Sequence
  Description of Artificial Sequence: Synthetic oligonucleotide
  Sense strand starting at position 1306 of SEQ ID NO: 585083
gcgcggguaccuguagaau

SEQ ID NO: 611847 - RNA, 19 nt, Artificial Sequence
  Description of Artificial Sequence: Synthetic oligonucleotide
  Antisense strand to SEQ ID NO: 611846
auucuacagguacccgcgc

SEQ ID NO: 611848 - RNA, 19 nt, Artificial Sequence
  Description of Artificial Sequence: Synthetic oligonucleotide
  Sense strand starting at position 2041 of SEQ ID NO: 585083
gcucauaugcauuacaaag

SEQ ID NO: 611849 - RNA, 19 nt, Artificial Sequence
  Description of Artificial Sequence: Synthetic oligonucleotide
  Antisense strand to SEQ ID NO: 611848
cuuuguaaugcauaugagc

SEQ ID NO: 611850 - RNA, 19 nt, Artificial Sequence
  Description of Artificial Sequence: Synthetic oligonucleotide
  Sense strand starting at position 2094 of SEQ ID NO: 585083
cugacauuggcuuaaacau

SEQ ID NO: 611851 - RNA, 19 nt, Artificial Sequence
  Description of Artificial Sequence: Synthetic oligonucleotide
  Antisense strand to SEQ ID NO: 611850
auguuuaagccaaugucag

SEQ ID NO: 611852 - RNA, 19 nt, Artificial Sequence
  Description of Artificial Sequence: Synthetic oligonucleotide
  Sense strand starting at position 2150 of SEQ ID NO: 585083
agcagcuucccugaacuuu

SEQ ID NO: 611853 - RNA, 19 nt, Artificial Sequence
  Description of Artificial Sequence: Synthetic oligonucleotide
  Antisense strand to SEQ ID NO: 611852
aaaguucagggaagcugcu

SEQ ID NO: 611854 - RNA, 19 nt, Artificial Sequence
  Description of Artificial Sequence: Synthetic oligonucleotide
  Sense strand starting at position 2359 of SEQ ID NO: 585083
gucucucuuucuguuugau

SEQ ID NO: 611855 - RNA, 19 nt, Artificial Sequence
  Description of Artificial Sequence: Synthetic oligonucleotide
  Antisense strand to SEQ ID NO: 611854
aucaaacagaaagagagac

SEQ ID NO: 611856 - RNA, 19 nt, Artificial Sequence
  Description of Artificial Sequence: Synthetic oligonucleotide
  Sense strand starting at position 2382 of SEQ ID NO: 585083
ccuccucguuggcuagaaa

SEQ ID NO: 611857 - RNA, 19 nt, Artificial Sequence
  Description of Artificial Sequence: Synthetic oligonucleotide
  Antisense strand to SEQ ID NO: 611856
uuucuagccaacgaggagg

SEQ ID NO: 611858 - RNA, 19 nt, Artificial Sequence
  Description of Artificial Sequence: Synthetic oligonucleotide
  Sense strand starting at position 2383 of SEQ ID NO: 585083
cuccucguuggcuagaaau

SEQ ID NO: 611859 - RNA, 19 nt, Artificial Sequence
  Description of Artificial Sequence: Synthetic oligonucleotide
  Antisense strand to SEQ ID NO: 611858
auuucuagccaacgaggag

SEQ ID NO: 611860 - RNA, 19 nt, Artificial Sequence
  Description of Artificial Sequence: Synthetic oligonucleotide
  Sense strand starting at position 2385 of SEQ ID NO: 585083
ccucguuggcuagaaauac

SEQ ID NO: 611861 - RNA, 19 nt, Artificial Sequence
  Description of Artificial Sequence: Synthetic oligonucleotide
  Antisense strand to SEQ ID NO: 611860
guauuucuagccaacgagg

SEQ ID NO: 611862 - RNA, 19 nt, Artificial Sequence
  Description of Artificial Sequence: Synthetic oligonucleotide
  Sense strand starting at position 2393 of SEQ ID NO: 585083
gcuagaaauacguagugug

SEQ ID NO: 611863 - RNA, 19 nt, Artificial Sequence
  Description of Artificial Sequence: Synthetic oligonucleotide
  Antisense strand to SEQ ID NO: 611862
cacacuacguauuucuagc

SEQ ID NO: 611864 - RNA, 19 nt, Artificial Sequence
  Description of Artificial Sequence: Synthetic oligonucleotide
  Sense strand starting at position 2403 of SEQ ID NO: 585083
cguaguguguacauaggau

SEQ ID NO: 611865 - RNA, 19 nt, Artificial Sequence
  Description of Artificial Sequence: Synthetic oligonucleotide
  Antisense strand to SEQ ID NO: 611864
auccuauguacacacuacg

SEQ ID NO: 611866 - RNA, 19 nt, Artificial Sequence
  Description of Artificial Sequence: Synthetic oligonucleotide
  Sense strand starting at position 2697 of SEQ ID NO: 585083
ugacuuguguguuuauguu

SEQ ID NO: 611867 - RNA, 19 nt, Artificial Sequence
  Description of Artificial Sequence: Synthetic oligonucleotide
  Antisense strand to SEQ ID NO: 611866
aacauaaacacacaaguca

SEQ ID NO: 611868 - RNA, 19 nt, Artificial Sequence
  Description of Artificial Sequence: Synthetic oligonucleotide
  Sense strand starting at position 2746 of SEQ ID NO: 585083
gaauucucaugugaaggau

SEQ ID NO: 611869 - RNA, 19 nt, Artificial Sequence
  Description of Artificial Sequence: Synthetic oligonucleotide
  Antisense strand to SEQ ID NO: 611868
auccuucacaugagaauuc

SEQ ID NO: 611870 - RNA, 19 nt, Artificial Sequence
  Description of Artificial Sequence: Synthetic oligonucleotide
  Sense strand starting at position 2749 of SEQ ID NO: 585083
uucucaugugaaggaugau

SEQ ID NO: 611871 - RNA, 19 nt, Artificial Sequence
  Description of Artificial Sequence: Synthetic oligonucleotide
  Antisense strand to SEQ ID NO: 611870
aucauccuucacaugagaa

SEQ ID NO: 611872 - RNA, 19 nt, Artificial Sequence
  Description of Artificial Sequence: Synthetic oligonucleotide
  Sense strand starting at position 2897 of SEQ ID NO: 585083
accaaagcuuuggcaauua

SEQ ID NO: 611873 - RNA, 19 nt, Artificial Sequence
  Description of Artificial Sequence: Synthetic oligonucleotide
  Antisense strand to SEQ ID NO: 611872
uaauugccaaagcuuuggu

SEQ ID NO: 611874 - RNA, 19 nt, Artificial Sequence
  Description of Artificial Sequence: Synthetic oligonucleotide
  Sense strand starting at position 2925 of SEQ ID NO: 585083
gucggucugguccagcuaa

SEQ ID NO: 611875 - RNA, 19 nt, Artificial Sequence
  Description of Artificial Sequence: Synthetic oligonucleotide
  Antisense strand to SEQ ID NO: 611874
uuagcuggaccagaccgac

SEQ ID NO: 611876 - RNA, 19 nt, Artificial Sequence
  Description of Artificial Sequence: Synthetic oligonucleotide
  Sense strand starting at position 2957 of SEQ ID NO: 585083
ugcauuucugcaugucuau

SEQ ID NO: 611877 - RNA, 19 nt, Artificial Sequence
  Description of Artificial Sequence: Synthetic oligonucleotide
  Antisense strand to SEQ ID NO: 611876
auagacaugcagaaaugca

SEQ ID NO: 611878 - RNA, 19 nt, Artificial Sequence
  Description of Artificial Sequence: Synthetic oligonucleotide
  Sense strand starting at position 2966 of SEQ ID NO: 585083
gcaugucuauccuuuaguc

SEQ ID NO: 611879 - RNA, 19 nt, Artificial Sequence
  Description of Artificial Sequence: Synthetic oligonucleotide
  Antisense strand to SEQ ID NO: 611878
gacuaaaggauagacaugc

SEQ ID NO: 611880 - RNA, 19 nt, Artificial Sequence
  Description of Artificial Sequence: Synthetic oligonucleotide
  Sense strand starting at position 3012 of SEQ ID NO: 585083
gggcuaggauaugcagaau

SEQ ID NO: 611881 - RNA, 19 nt, Artificial Sequence
  Description of Artificial Sequence: Synthetic oligonucleotide
  Antisense strand to SEQ ID NO: 611880
auucugcauauccuagccc

SEQ ID NO: 611882 - RNA, 19 nt, Artificial Sequence
  Description of Artificial Sequence: Synthetic oligonucleotide
  Sense strand starting at position 3177 of SEQ ID NO: 585083
aguauaucaugcgucuaua

SEQ ID NO: 611883 - RNA, 19 nt, Artificial Sequence
  Description of Artificial Sequence: Synthetic oligonucleotide
  Antisense strand to SEQ ID NO: 611882
uauagacgcaugauauacu

SEQ ID NO: 611884 - RNA, 19 nt, Artificial Sequence
  Description of Artificial Sequence: Synthetic oligonucleotide
  Sense strand starting at position 3180 of SEQ ID NO: 585083
auaucaugcgucuauaauc

SEQ ID NO: 611885 - RNA, 19 nt, Artificial Sequence
  Description of Artificial Sequence: Synthetic oligonucleotide
  Antisense strand to SEQ ID NO: 611884
gauuauagacgcaugauau

SEQ ID NO: 611886 - RNA, 19 nt, Artificial Sequence
  Description of Artificial Sequence: Synthetic oligonucleotide
  Sense strand starting at position 3189 of SEQ ID NO: 585083
gucuauaaucuuggauagu

SEQ ID NO: 611887 - RNA, 19 nt, Artificial Sequence
  Description of Artificial Sequence: Synthetic oligonucleotide
  Antisense strand to SEQ ID NO: 611886
acuauccaagauuauagac

SEQ ID NO: 611888 - RNA, 19 nt, Artificial Sequence
  Description of Artificial Sequence: Synthetic oligonucleotide
  Sense strand starting at position 3230 of SEQ ID NO: 585083
uuugcugcagccuaauaga

SEQ ID NO: 611889 - RNA, 19 nt, Artificial Sequence
  Description of Artificial Sequence: Synthetic oligonucleotide
  Antisense strand to SEQ ID NO: 611888
ucuauuaggcugcagcaaa

SEQ ID NO: 611890 - RNA, 19 nt, Artificial Sequence
  Description of Artificial Sequence: Synthetic oligonucleotide
  Sense strand starting at position 3301 of SEQ ID NO: 585083
agaguaucugacgaagugu

SEQ ID NO: 611891 - RNA, 19 nt, Artificial Sequence
  Description of Artificial Sequence: Synthetic oligonucleotide
  Antisense strand to SEQ ID NO: 611890
acacuucgucagauacucu

SEQ ID NO: 611892 - RNA, 19 nt, Artificial Sequence
  Description of Artificial Sequence: Synthetic oligonucleotide
  Sense strand starting at position 3312 of SEQ ID NO: 585083
cgaaguguucauggucuau

SEQ ID NO: 611893 - RNA, 19 nt, Artificial Sequence
  Description of Artificial Sequence: Synthetic oligonucleotide
  Antisense strand to SEQ ID NO: 611892
auagaccaugaacacuucg

SEQ ID NO: 611894 - RNA, 19 nt, Artificial Sequence
  Description of Artificial Sequence: Synthetic oligonucleotide
  Sense strand starting at position 3415 of SEQ ID NO: 585083
uagaccauuguuggacaau

SEQ ID NO: 611895 - RNA, 19 nt, Artificial Sequence
  Description of Artificial Sequence: Synthetic oligonucleotide
  Antisense strand to SEQ ID NO: 611894
auuguccaacaauggucua

SEQ ID NO: 611896 - RNA, 19 nt, Artificial Sequence
  Description of Artificial Sequence: Synthetic oligonucleotide
  Sense strand starting at position 3416 of SEQ ID NO: 585083
agaccauuguuggacaaua

SEQ ID NO: 611897 - RNA, 19 nt, Artificial Sequence
  Description of Artificial Sequence: Synthetic oligonucleotide
  Antisense strand to SEQ ID NO: 611896
uauuguccaacaauggucu

SEQ ID NO: 611898 - RNA, 19 nt, Artificial Sequence
  Description of Artificial Sequence: Synthetic oligonucleotide
  Sense strand starting at position 3459 of SEQ ID NO: 585083
cgaguuuagcauuaaugac

SEQ ID NO: 611899 - RNA, 19 nt, Artificial Sequence
  Description of Artificial Sequence: Synthetic oligonucleotide
  Antisense strand to SEQ ID NO: 611898
gucauuaaugcuaaacucg

SEQ ID NO: 611900 - RNA, 19 nt, Artificial Sequence
  Description of Artificial Sequence: Synthetic oligonucleotide
  Sense strand starting at position 3475 of SEQ ID NO: 585083
gacuauagauugucagcaa

SEQ ID NO: 611901 - RNA, 19 nt, Artificial Sequence
  Description of Artificial Sequence: Synthetic oligonucleotide
  Antisense strand to SEQ ID NO: 611900
uugcugacaaucuauaguc

SEQ ID NO: 611902 - RNA, 19 nt, Artificial Sequence
  Description of Artificial Sequence: Synthetic oligonucleotide
  Sense strand starting at position 3523 of SEQ ID NO: 585083
cgcagauauuucccuuuau

SEQ ID NO: 611903 - RNA, 19 nt, Artificial Sequence
  Description of Artificial Sequence: Synthetic oligonucleotide
  Antisense strand to SEQ ID NO: 611902
auaaagggaaauaucugcg

SEQ ID NO: 611904 - RNA, 19 nt, Artificial Sequence
  Description of Artificial Sequence: Synthetic oligonucleotide
  Sense strand starting at position 3533 of SEQ ID NO: 585083
ucccuuuauggccagcaau

SEQ ID NO: 611905 - RNA, 19 nt, Artificial Sequence
  Description of Artificial Sequence: Synthetic oligonucleotide
  Antisense strand to SEQ ID NO: 611904
auugcuggccauaaaggga

SEQ ID NO: 611906 - RNA, 19 nt, Artificial Sequence
  Description of Artificial Sequence: Synthetic oligonucleotide
  Sense strand starting at position 3536 of SEQ ID NO: 585083
cuuuauggccagcaaucau

SEQ ID NO: 611907 - RNA, 19 nt, Artificial Sequence
  Description of Artificial Sequence: Synthetic oligonucleotide
  Antisense strand to SEQ ID NO: 611906
augauugcuggccauaaag

SEQ ID NO: 611908 - RNA, 19 nt, Artificial Sequence
  Description of Artificial Sequence: Synthetic oligonucleotide
  Sense strand starting at position 3677 of SEQ ID NO: 585083
gccaaauuauaugcaaaug

SEQ ID NO: 611909 - RNA, 19 nt, Artificial Sequence
  Description of Artificial Sequence: Synthetic oligonucleotide
  Antisense strand to SEQ ID NO: 611908
cauuugcauauaauuuggc

SEQ ID NO: 611910 - RNA, 19 nt, Artificial Sequence
  Description of Artificial Sequence: Synthetic oligonucleotide
  Sense strand starting at position 3800 of SEQ ID NO: 585083
aagguaaguugcuuucuca

SEQ ID NO: 611911 - RNA, 19 nt, Artificial Sequence
  Description of Artificial Sequence: Synthetic oligonucleotide
  Antisense strand to SEQ ID NO: 611910
ugagaaagcaacuuaccuu

SEQ ID NO: 611912 - RNA, 19 nt, Artificial Sequence
  Description of Artificial Sequence: Synthetic oligonucleotide
  Sense strand starting at position 5 of SEQ ID NO: 585084
gaacaauucuuguagggaa

SEQ ID NO: 611913 - RNA, 19 nt, Artificial Sequence
  Description of Artificial Sequence: Synthetic oligonucleotide
  Antisense strand to SEQ ID NO: 611912
uucccuacaagaauuguuc

SEQ ID NO: 611914 - RNA, 19 nt, Artificial Sequence
  Description of Artificial Sequence: Synthetic oligonucleotide
  Sense strand starting at position 169 of SEQ ID NO: 585084
gugggacaggcuugucacu

SEQ ID NO: 611915 - RNA, 19 nt, Artificial Sequence
  Description of Artificial Sequence: Synthetic oligonucleotide
  Antisense strand to SEQ ID NO: 611914
agugacaagccugucccac

SEQ ID NO: 611916 - RNA, 19 nt, Artificial Sequence
  Description of Artificial Sequence: Synthetic oligonucleotide
  Sense strand starting at position 258 of SEQ ID NO: 585084
caaauuuccggcugucaga

SEQ ID NO: 611917 - RNA, 19 nt, Artificial Sequence
  Description of Artificial Sequence: Synthetic oligonucleotide
  Antisense strand to SEQ ID NO: 611916
ucugacagccggaaauuug

SEQ ID NO: 611918 - RNA, 19 nt, Artificial Sequence
  Description of Artificial Sequence: Synthetic oligonucleotide
  Sense strand starting at position 404 of SEQ ID NO: 585084
aggaaucgcuucccagaaa

SEQ ID NO: 611919 - RNA, 19 nt, Artificial Sequence
  Description of Artificial Sequence: Synthetic oligonucleotide
  Antisense strand to SEQ ID NO: 611918
uuucugggaagcgauuccu

SEQ ID NO: 611920 - RNA, 19 nt, Artificial Sequence
  Description of Artificial Sequence: Synthetic oligonucleotide
  Sense strand starting at position 602 of SEQ ID NO: 585084
uguuuauuugccuggaggu

SEQ ID NO: 611921 - RNA, 19 nt, Artificial Sequence
  Description of Artificial Sequence: Synthetic oligonucleotide
  Antisense strand to SEQ ID NO: 611920
accuccaggcaaauaaaca

SEQ ID NO: 611922 - RNA, 19 nt, Artificial Sequence
  Description of Artificial Sequence: Synthetic oligonucleotide
  Sense strand starting at position 603 of SEQ ID NO: 585084
guuuauuugccuggaggug

SEQ ID NO: 611923 - RNA, 19 nt, Artificial Sequence
  Description of Artificial Sequence: Synthetic oligonucleotide
  Antisense strand to SEQ ID NO: 611922
caccuccaggcaaauaaac

SEQ ID NO: 611924 - RNA, 19 nt, Artificial Sequence
  Description of Artificial Sequence: Synthetic oligonucleotide
  Sense strand starting at position 946 of SEQ ID NO: 585084
gcgcggguaccuguagaau

SEQ ID NO: 611925 - RNA, 19 nt, Artificial Sequence
  Description of Artificial Sequence: Synthetic oligonucleotide
  Antisense strand to SEQ ID NO: 611924
auucuacagguacccgcgc

SEQ ID NO: 611926 - RNA, 19 nt, Artificial Sequence
  Description of Artificial Sequence: Synthetic oligonucleotide
  Sense strand starting at position 1681 of SEQ ID NO: 585084
gcucauaugcauuacaaag

SEQ ID NO: 611927 - RNA, 19 nt, Artificial Sequence
  Description of Artificial Sequence: Synthetic oligonucleotide
  Antisense strand to SEQ ID NO: 611926
cuuuguaaugcauaugagc

SEQ ID NO: 611928 - RNA, 19 nt, Artificial Sequence
  Description of Artificial Sequence: Synthetic oligonucleotide
  Sense strand starting at position 1734 of SEQ ID NO: 585084
cugacauuggcuuaaacau

SEQ ID NO: 611929 - RNA, 19 nt, Artificial Sequence
  Description of Artificial Sequence: Synthetic oligonucleotide
  Antisense strand to SEQ ID NO: 611928
auguuuaagccaaugucag

SEQ ID NO: 611930 - RNA, 19 nt, Artificial Sequence
  Description of Artificial Sequence: Synthetic oligonucleotide
  Sense strand starting at position 1790 of SEQ ID NO: 585084
agcagcuucccugaacuuu

SEQ ID NO: 611931 - RNA, 19 nt, Artificial Sequence
  Description of Artificial Sequence: Synthetic oligonucleotide
  Antisense strand to SEQ ID NO: 611930
aaaguucagggaagcugcu

SEQ ID NO: 611932 - RNA, 19 nt, Artificial Sequence
  Description of Artificial Sequence: Synthetic oligonucleotide
  Sense strand starting at position 1999 of SEQ ID NO: 585084
gucucucuuucuguuugau

SEQ ID NO: 611933 - RNA, 19 nt, Artificial Sequence
  Description of Artificial Sequence: Synthetic oligonucleotide
  Antisense strand to SEQ ID NO: 611932
aucaaacagaaagagagac

SEQ ID NO: 611934 - RNA, 19 nt, Artificial Sequence
  Description of Artificial Sequence: Synthetic oligonucleotide
  Sense strand starting at position 2022 of SEQ ID NO: 585084
ccuccucguuggcuagaaa

SEQ ID NO: 611935 - RNA, 19 nt, Artificial Sequence
  Description of Artificial Sequence: Synthetic oligonucleotide
  Antisense strand to SEQ ID NO: 611934
uuucuagccaacgaggagg

SEQ ID NO: 611936 - RNA, 19 nt, Artificial Sequence
  Description of Artificial Sequence: Synthetic oligonucleotide
  Sense strand starting at position 2023 of SEQ ID NO: 585084
cuccucguuggcuagaaau

SEQ ID NO: 611937 - RNA, 19 nt, Artificial Sequence
  Description of Artificial Sequence: Synthetic oligonucleotide
  Antisense strand to SEQ ID NO: 611936
auuucuagccaacgaggag

SEQ ID NO: 611938 - RNA, 19 nt, Artificial Sequence
  Description of Artificial Sequence: Synthetic oligonucleotide
  Sense strand starting at position 2025 of SEQ ID NO: 585084
ccucguuggcuagaaauac

SEQ ID NO: 611939 - RNA, 19 nt, Artificial Sequence
  Description of Artificial Sequence: Synthetic oligonucleotide
  Antisense strand to SEQ ID NO: 611938
guauuucuagccaacgagg

SEQ ID NO: 611940 - RNA, 19 nt, Artificial Sequence
  Description of Artificial Sequence: Synthetic oligonucleotide
  Sense strand starting at position 2033 of SEQ ID NO: 585084
gcuagaaauacguagugug

SEQ ID NO: 611941 - RNA, 19 nt, Artificial Sequence
  Description of Artificial Sequence: Synthetic oligonucleotide
  Antisense strand to SEQ ID NO: 611940
cacacuacguauuucuagc

SEQ ID NO: 611942 - RNA, 19 nt, Artificial Sequence
  Description of Artificial Sequence: Synthetic oligonucleotide
  Sense strand starting at position 2043 of SEQ ID NO: 585084
cguaguguguacauaggau

SEQ ID NO: 611943 - RNA, 19 nt, Artificial Sequence
  Description of Artificial Sequence: Synthetic oligonucleotide
  Antisense strand to SEQ ID NO: 611942
auccuauguacacacuacg

SEQ ID NO: 611944 - RNA, 19 nt, Artificial Sequence
  Description of Artificial Sequence: Synthetic oligonucleotide
  Sense strand starting at position 2386 of SEQ ID NO: 585084
gaauucucaugugaaggau

SEQ ID NO: 611945 - RNA, 19 nt, Artificial Sequence
  Description of Artificial Sequence: Synthetic oligonucleotide
  Antisense strand to SEQ ID NO: 611944
auccuucacaugagaauuc

SEQ ID NO: 611946 - RNA, 19 nt, Artificial Sequence
  Description of Artificial Sequence: Synthetic oligonucleotide
  Sense strand starting at position 2389 of SEQ ID NO: 585084
uucucaugugaaggaugau

SEQ ID NO: 611947 - RNA, 19 nt, Artificial Sequence
  Description of Artificial Sequence: Synthetic oligonucleotide
  Antisense strand to SEQ ID NO: 611946
aucauccuucacaugagaa

SEQ ID NO: 611948 - RNA, 19 nt, Artificial Sequence
  Description of Artificial Sequence: Synthetic oligonucleotide
  Sense strand starting at position 2537 of SEQ ID NO: 585084
accaaagcuuuggcaauua

SEQ ID NO: 611949 - RNA, 19 nt, Artificial Sequence
  Description of Artificial Sequence: Synthetic oligonucleotide
  Antisense strand to SEQ ID NO: 611948
uaauugccaaagcuuuggu

SEQ ID NO: 611950 - RNA, 19 nt, Artificial Sequence
  Description of Artificial Sequence: Synthetic oligonucleotide
  Sense strand starting at position 2565 of SEQ ID NO: 585084
gucggucugguccagcuaa

SEQ ID NO: 611951 - RNA, 19 nt, Artificial Sequence
  Description of Artificial Sequence: Synthetic oligonucleotide
  Antisense strand to SEQ ID NO: 611950
uuagcuggaccagaccgac

SEQ ID NO: 611952 - RNA, 19 nt, Artificial Sequence
  Description of Artificial Sequence: Synthetic oligonucleotide
  Sense strand starting at position 2597 of SEQ ID NO: 585084
ugcauuucugcaugucuau

SEQ ID NO: 611953 - RNA, 19 nt, Artificial Sequence
  Description of Artificial Sequence: Synthetic oligonucleotide
  Antisense strand to SEQ ID NO: 611952
auagacaugcagaaaugca

SEQ ID NO: 611954 - RNA, 19 nt, Artificial Sequence
  Description of Artificial Sequence: Synthetic oligonucleotide
  Sense strand starting at position 2652 of SEQ ID NO: 585084
gggcuaggauaugcagaau

SEQ ID NO: 611955 - RNA, 19 nt, Artificial Sequence
  Description of Artificial Sequence: Synthetic oligonucleotide
  Antisense strand to SEQ ID NO: 611954
auucugcauauccuagccc

SEQ ID NO: 611956 - RNA, 19 nt, Artificial Sequence
  Description of Artificial Sequence: Synthetic oligonucleotide
  Sense strand starting at position 2817 of SEQ ID NO: 585084
aguauaucaugcgucuaua

SEQ ID NO: 611957 - RNA, 19 nt, Artificial Sequence
  Description of Artificial Sequence: Synthetic oligonucleotide
  Antisense strand to SEQ ID NO: 611956
uauagacgcaugauauacu

SEQ ID NO: 611958 - RNA, 19 nt, Artificial Sequence
  Description of Artificial Sequence: Synthetic oligonucleotide
  Sense strand starting at position 2820 of SEQ ID NO: 585084
auaucaugcgucuauaauc

SEQ ID NO: 611959 - RNA, 19 nt, Artificial Sequence
  Description of Artificial Sequence: Synthetic oligonucleotide
  Antisense strand to SEQ ID NO: 611958
gauuauagacgcaugauau

SEQ ID NO: 611960 - RNA, 19 nt, Artificial Sequence
  Description of Artificial Sequence: Synthetic oligonucleotide
  Sense strand starting at position 2829 of SEQ ID NO: 585084
gucuauaaucuuggauagu

SEQ ID NO: 611961 - RNA, 19 nt, Artificial Sequence
  Description of Artificial Sequence: Synthetic oligonucleotide
  Antisense strand to SEQ ID NO: 611960
acuauccaagauuauagac

SEQ ID NO: 611962 - RNA, 19 nt, Artificial Sequence
  Description of Artificial Sequence: Synthetic oligonucleotide
  Sense strand starting at position 2870 of SEQ ID NO: 585084
uuugcugcagccuaauaga

SEQ ID NO: 611963 - RNA, 19 nt, Artificial Sequence
  Description of Artificial Sequence: Synthetic oligonucleotide
  Antisense strand to SEQ ID NO: 611962
ucuauuaggcugcagcaaa

SEQ ID NO: 611964 - RNA, 19 nt, Artificial Sequence
  Description of Artificial Sequence: Synthetic oligonucleotide
  Sense strand starting at position 2941 of SEQ ID NO: 585084
agaguaucugacgaagugu

SEQ ID NO: 611965 - RNA, 19 nt, Artificial Sequence
  Description of Artificial Sequence: Synthetic oligonucleotide
  Antisense strand to SEQ ID NO: 611964
acacuucgucagauacucu

SEQ ID NO: 611966 - RNA, 19 nt, Artificial Sequence
  Description of Artificial Sequence: Synthetic oligonucleotide
  Sense strand starting at position 2952 of SEQ ID NO: 585084
cgaaguguucauggucuau

SEQ ID NO: 611967 - RNA, 19 nt, Artificial Sequence
  Description of Artificial Sequence: Synthetic oligonucleotide
  Antisense strand to SEQ ID NO: 611966
auagaccaugaacacuucg

SEQ ID NO: 611968 - RNA, 19 nt, Artificial Sequence
  Description of Artificial Sequence: Synthetic oligonucleotide
  Sense strand starting at position 3055 of SEQ ID NO: 585084
uagaccauuguuggacaau

SEQ ID NO: 611969 - RNA, 19 nt, Artificial Sequence
  Description of Artificial Sequence: Synthetic oligonucleotide
  Antisense strand to SEQ ID NO: 611968
auuguccaacaauggucua

SEQ ID NO: 611970 - RNA, 19 nt, Artificial Sequence
  Description of Artificial Sequence: Synthetic oligonucleotide
  Sense strand starting at position 3056 of SEQ ID NO: 585084
agaccauuguuggacaaua

SEQ ID NO: 611971 - RNA, 19 nt, Artificial Sequence
  Description of Artificial Sequence: Synthetic oligonucleotide
  Antisense strand to SEQ ID NO: 611970
uauuguccaacaauggucu

SEQ ID NO: 611972 - RNA, 19 nt, Artificial Sequence
  Description of Artificial Sequence: Synthetic oligonucleotide
  Sense strand starting at position 3099 of SEQ ID NO: 585084
cgaguuuagcauuaaugac

SEQ ID NO: 611973 - RNA, 19 nt, Artificial Sequence
  Description of Artificial Sequence: Synthetic oligonucleotide
  Antisense strand to SEQ ID NO: 611972
gucauuaaugcuaaacucg

SEQ ID NO: 611974 - RNA, 19 nt, Artificial Sequence
  Description of Artificial Sequence: Synthetic oligonucleotide
  Sense strand starting at position 3115 of SEQ ID NO: 585084
gacuauagauugucagcaa

SEQ ID NO: 611975 - RNA, 19 nt, Artificial Sequence
  Description of Artificial Sequence: Synthetic oligonucleotide
  Antisense strand to SEQ ID NO: 611974
uugcugacaaucuauaguc

SEQ ID NO: 611976 - RNA, 19 nt, Artificial Sequence
  Description of Artificial Sequence: Synthetic oligonucleotide
  Sense strand starting at position 3163 of SEQ ID NO: 585084
cgcagauauuucccuuuau

SEQ ID NO: 611977 - RNA, 19 nt, Artificial Sequence
  Description of Artificial Sequence: Synthetic oligonucleotide
  Antisense strand to SEQ ID NO: 611976
auaaagggaaauaucugcg

SEQ ID NO: 611978 - RNA, 19 nt, Artificial Sequence
  Description of Artificial Sequence: Synthetic oligonucleotide
  Sense strand starting at position 3173 of SEQ ID NO: 585084
ucccuuuauggccagcaau

SEQ ID NO: 611979 - RNA, 19 nt, Artificial Sequence
  Description of Artificial Sequence: Synthetic oligonucleotide
  Antisense strand to SEQ ID NO: 611978
auugcuggccauaaaggga

SEQ ID NO: 611980 - RNA, 19 nt, Artificial Sequence
  Description of Artificial Sequence: Synthetic oligonucleotide
  Sense strand starting at position 3176 of SEQ ID NO: 585084
cuuuauggccagcaaucau

SEQ ID NO: 611981 - RNA, 19 nt, Artificial Sequence
  Description of Artificial Sequence: Synthetic oligonucleotide
  Antisense strand to SEQ ID NO: 611980
augauugcuggccauaaag

SEQ ID NO: 611982 - RNA, 19 nt, Artificial Sequence
  Description of Artificial Sequence: Synthetic oligonucleotide
  Sense strand starting at position 3317 of SEQ ID NO: 585084
gccaaauuauaugcaaaug

SEQ ID NO: 611983 - RNA, 19 nt, Artificial Sequence
  Description of Artificial Sequence: Synthetic oligonucleotide
  Antisense strand to SEQ ID NO: 611982
cauuugcauauaauuuggc

SEQ ID NO: 611984 - RNA, 19 nt, Artificial Sequence
  Description of Artificial Sequence: Synthetic oligonucleotide
  Sense strand starting at position 3440 of SEQ ID NO: 585084
aagguaaguugcuuucuca

SEQ ID NO: 611985 - RNA, 19 nt, Artificial Sequence
  Description of Artificial Sequence: Synthetic oligonucleotide
  Antisense strand to SEQ ID NO: 611984
ugagaaagcaacuuaccuu

SEQ ID NO: 611986 - RNA, 19 nt, Artificial Sequence
  Description of Artificial Sequence: Synthetic oligonucleotide
  Sense strand starting at position 3769 of SEQ ID NO: 585084
gagacuugcugucugcuca

SEQ ID NO: 611987 - RNA, 19 nt, Artificial Sequence
  Description of Artificial Sequence: Synthetic oligonucleotide
  Antisense strand to SEQ ID NO: 611986
ugagcagacagcaagucuc

SEQ ID NO: 611988 - RNA, 19 nt, Artificial Sequence
  Description of Artificial Sequence: Synthetic oligonucleotide
  Sense strand starting at position 3868 of SEQ ID NO: 585084
uggaaaguacccuaugcuu

SEQ ID NO: 611989 - RNA, 19 nt, Artificial Sequence
  Description of Artificial Sequence: Synthetic oligonucleotide
  Antisense strand to SEQ ID NO: 611988
aagcauaggguacuuucca

SEQ ID NO: 611990 - RNA, 19 nt, Artificial Sequence
  Description of Artificial Sequence: Synthetic oligonucleotide
  Sense strand starting at position 3915 of SEQ ID NO: 585084
acaggcuugcugugaauca

SEQ ID NO: 611991 - RNA, 19 nt, Artificial Sequence
  Description of Artificial Sequence: Synthetic oligonucleotide
  Antisense strand to SEQ ID NO: 611990
ugauucacagcaagccugu

SEQ ID NO: 611992 - RNA, 19 nt, Artificial Sequence
  Description of Artificial Sequence: Synthetic oligonucleotide
  Sense strand starting at position 35 of SEQ ID NO: 585085
gcucauaugcauuacaaag

SEQ ID NO: 611993 - RNA, 19 nt, Artificial Sequence
  Description of Artificial Sequence: Synthetic oligonucleotide
  Antisense strand to SEQ ID NO: 611992
cuuuguaaugcauaugagc

SEQ ID NO: 611994 - RNA, 19 nt, Artificial Sequence
  Description of Artificial Sequence: Synthetic oligonucleotide
  Sense strand starting at position 88 of SEQ ID NO: 585085
cugacauuggcuuaaacau

SEQ ID NO: 611995 - RNA, 19 nt, Artificial Sequence
  Description of Artificial Sequence: Synthetic oligonucleotide
  Antisense strand to SEQ ID NO: 611994
auguuuaagccaaugucag

SEQ ID NO: 611996 - RNA, 19 nt, Artificial Sequence
  Description of Artificial Sequence: Synthetic oligonucleotide
  Sense strand starting at position 144 of SEQ ID NO: 585085
agcagcuucccugaacuuu

SEQ ID NO: 611997 - RNA, 19 nt, Artificial Sequence
  Description of Artificial Sequence: Synthetic oligonucleotide
  Antisense strand to SEQ ID NO: 611996
aaaguucagggaagcugcu

SEQ ID NO: 611998 - RNA, 19 nt, Artificial Sequence
  Description of Artificial Sequence: Synthetic oligonucleotide
  Sense strand starting at position 377 of SEQ ID NO: 585085
cuccucguuggcuagaaau

SEQ ID NO: 611999 - RNA, 19 nt, Artificial Sequence
  Description of Artificial Sequence: Synthetic oligonucleotide
  Antisense strand to SEQ ID NO: 611998
auuucuagccaacgaggag

SEQ ID NO: 612000 - RNA, 19 nt, Artificial Sequence
  Description of Artificial Sequence: Synthetic oligonucleotide
  Sense strand starting at position 379 of SEQ ID NO: 585085
ccucguuggcuagaaauac

SEQ ID NO: 612001 - RNA, 19 nt, Artificial Sequence
  Description of Artificial Sequence: Synthetic oligonucleotide
  Antisense strand to SEQ ID NO: 612000
guauuucuagccaacgagg

SEQ ID NO: 612002 - RNA, 19 nt, Artificial Sequence
  Description of Artificial Sequence: Synthetic oligonucleotide
  Sense strand starting at position 387 of SEQ ID NO: 585085
gcuagaaauacguagugug

SEQ ID NO: 612003 - RNA, 19 nt, Artificial Sequence
  Description of Artificial Sequence: Synthetic oligonucleotide
  Antisense strand to SEQ ID NO: 612002
cacacuacguauuucuagc

SEQ ID NO: 612004 - RNA, 19 nt, Artificial Sequence
  Description of Artificial Sequence: Synthetic oligonucleotide
  Sense strand starting at position 397 of SEQ ID NO: 585085
cguaguguguacauaggau

SEQ ID NO: 612005 - RNA, 19 nt, Artificial Sequence
  Description of Artificial Sequence: Synthetic oligonucleotide
  Antisense strand to SEQ ID NO: 612004
auccuauguacacacuacg

SEQ ID NO: 612006 - RNA, 19 nt, Artificial Sequence
  Description of Artificial Sequence: Synthetic oligonucleotide
  Sense strand starting at position 743 of SEQ ID NO: 585085
uucucaugugaaggaugau

SEQ ID NO: 612007 - RNA, 19 nt, Artificial Sequence
  Description of Artificial Sequence: Synthetic oligonucleotide
  Antisense strand to SEQ ID NO: 612006
aucauccuucacaugagaa

SEQ ID NO: 612008 - RNA, 19 nt, Artificial Sequence
  Description of Artificial Sequence: Synthetic oligonucleotide
  Sense strand starting at position 891 of SEQ ID NO: 585085
accaaagcuuuggcaauua

SEQ ID NO: 612009 - RNA, 19 nt, Artificial Sequence
  Description of Artificial Sequence: Synthetic oligonucleotide
  Antisense strand to SEQ ID NO: 612008
uaauugccaaagcuuuggu

SEQ ID NO: 612010 - RNA, 19 nt, Artificial Sequence
  Description of Artificial Sequence: Synthetic oligonucleotide
  Sense strand starting at position 951 of SEQ ID NO: 585085
ugcauuucugcaugucuau

SEQ ID NO: 612011 - RNA, 19 nt, Artificial Sequence
  Description of Artificial Sequence: Synthetic oligonucleotide
  Antisense strand to SEQ ID NO: 612010
auagacaugcagaaaugca

SEQ ID NO: 612012 - RNA, 19 nt, Artificial Sequence
  Description of Artificial Sequence: Synthetic oligonucleotide
  Sense strand starting at position 1006 of SEQ ID NO: 585085
gggcuaggauaugcagaau

SEQ ID NO: 612013 - RNA, 19 nt, Artificial Sequence
  Description of Artificial Sequence: Synthetic oligonucleotide
  Antisense strand to SEQ ID NO: 612012
auucugcauauccuagccc

SEQ ID NO: 612014 - RNA, 19 nt, Artificial Sequence
  Description of Artificial Sequence: Synthetic oligonucleotide
  Sense strand starting at position 1174 of SEQ ID NO: 585085
auaucaugcgucuauaauc

SEQ ID NO: 612015 - RNA, 19 nt, Artificial Sequence
  Description of Artificial Sequence: Synthetic oligonucleotide
  Antisense strand to SEQ ID NO: 612014
gauuauagacgcaugauau

SEQ ID NO: 612016 - RNA, 19 nt, Artificial Sequence
  Description of Artificial Sequence: Synthetic oligonucleotide
  Sense strand starting at position 1183 of SEQ ID NO: 585085
gucuauaaucuuggauagu

SEQ ID NO: 612017 - RNA, 19 nt, Artificial Sequence
  Description of Artificial Sequence: Synthetic oligonucleotide
  Antisense strand to SEQ ID NO: 612016
acuauccaagauuauagac

SEQ ID NO: 612018 - RNA, 19 nt, Artificial Sequence
  Description of Artificial Sequence: Synthetic oligonucleotide
  Sense strand starting at position 1224 of SEQ ID NO: 585085
uuugcugcagccuaauaga

SEQ ID NO: 612019 - RNA, 19 nt, Artificial Sequence
  Description of Artificial Sequence: Synthetic oligonucleotide
  Antisense strand to SEQ ID NO: 612018
ucuauuaggcugcagcaaa

SEQ ID NO: 612020 - RNA, 19 nt, Artificial Sequence
  Description of Artificial Sequence: Synthetic oligonucleotide
  Sense strand starting at position 1295 of SEQ ID NO: 585085
agaguaucugacgaagugu

SEQ ID NO: 612021 - RNA, 19 nt, Artificial Sequence
  Description of Artificial Sequence: Synthetic oligonucleotide
  Antisense strand to SEQ ID NO: 612020
acacuucgucagauacucu

SEQ ID NO: 612022 - RNA, 19 nt, Artificial Sequence
  Description of Artificial Sequence: Synthetic oligonucleotide
  Sense strand starting at position 1409 of SEQ ID NO: 585085
uagaccauuguuggacaau

SEQ ID NO: 612023 - RNA, 19 nt, Artificial Sequence
  Description of Artificial Sequence: Synthetic oligonucleotide
  Antisense strand to SEQ ID NO: 612022
auuguccaacaauggucua

SEQ ID NO: 612024 - RNA, 19 nt, Artificial Sequence
  Description of Artificial Sequence: Synthetic oligonucleotide
  Sense strand starting at position 1453 of SEQ ID NO: 585085
cgaguuuagcauuaaugac

SEQ ID NO: 612025 - RNA, 19 nt, Artificial Sequence
  Description of Artificial Sequence: Synthetic oligonucleotide
  Antisense strand to SEQ ID NO: 612024
gucauuaaugcuaaacucg

SEQ ID NO: 612026 - RNA, 19 nt, Artificial Sequence
  Description of Artificial Sequence: Synthetic oligonucleotide
  Sense strand starting at position 1469 of SEQ ID NO: 585085
gacuauagauugucagcaa

SEQ ID NO: 612027 - RNA, 19 nt, Artificial Sequence
  Description of Artificial Sequence: Synthetic oligonucleotide
  Antisense strand to SEQ ID NO: 612026
uugcugacaaucuauaguc

SEQ ID NO: 612028 - RNA, 19 nt, Artificial Sequence
  Description of Artificial Sequence: Synthetic oligonucleotide
  Sense strand starting at position 1517 of SEQ ID NO: 585085
cgcagauauuucccuuuau

SEQ ID NO: 612029 - RNA, 19 nt, Artificial Sequence
  Description of Artificial Sequence: Synthetic oligonucleotide
  Antisense strand to SEQ ID NO: 612028
auaaagggaaauaucugcg

SEQ ID NO: 612030 - RNA, 19 nt, Artificial Sequence
  Description of Artificial Sequence: Synthetic oligonucleotide
  Sense strand starting at position 1527 of SEQ ID NO: 585085
ucccuuuauggccagcaau

SEQ ID NO: 612031 - RNA, 19 nt, Artificial Sequence
  Description of Artificial Sequence: Synthetic oligonucleotide
  Antisense strand to SEQ ID NO: 612030
auugcuggccauaaaggga

SEQ ID NO: 612032 - RNA, 19 nt, Artificial Sequence
  Description of Artificial Sequence: Synthetic oligonucleotide
  Sense strand starting at position 1530 of SEQ ID NO: 585085
cuuuauggccagcaaucau

SEQ ID NO: 612033 - RNA, 19 nt, Artificial Sequence
  Description of Artificial Sequence: Synthetic oligonucleotide
  Antisense strand to SEQ ID NO: 612032
augauugcuggccauaaag

SEQ ID NO: 612034 - RNA, 19 nt, Artificial Sequence
  Description of Artificial Sequence: Synthetic oligonucleotide
  Sense strand starting at position 1671 of SEQ ID NO: 585085
gccaaauuauaugcaaaug

SEQ ID NO: 612035 - RNA, 19 nt, Artificial Sequence
  Description of Artificial Sequence: Synthetic oligonucleotide
  Antisense strand to SEQ ID NO: 612034
cauuugcauauaauuuggc

SEQ ID NO: 612036 - RNA, 19 nt, Artificial Sequence
  Description of Artificial Sequence: Synthetic oligonucleotide
  Sense strand starting at position 2222 of SEQ ID NO: 585085
uggaaaguacccuaugcuu

SEQ ID NO: 612037 - RNA, 19 nt, Artificial Sequence
  Description of Artificial Sequence: Synthetic oligonucleotide
  Antisense strand to SEQ ID NO: 612036
aagcauaggguacuuucca

SEQ ID NO: 612038 - RNA, 19 nt, Artificial Sequence
  Description of Artificial Sequence: Synthetic oligonucleotide
  Sense strand starting at position 2392 of SEQ ID NO: 585085
agccuucugggauacaugu

SEQ ID NO: 612039 - RNA, 19 nt, Artificial Sequence
  Description of Artificial Sequence: Synthetic oligonucleotide
  Antisense strand to SEQ ID NO: 612038
acauguaucccagaaggcu

SEQ ID NO: 612040 - RNA, 19 nt, Artificial Sequence
  Description of Artificial Sequence: Synthetic oligonucleotide
  Sense strand starting at position 2398 of SEQ ID NO: 585085
cugggauacauguggauca

SEQ ID NO: 612041 - RNA, 19 nt, Artificial Sequence
  Description of Artificial Sequence: Synthetic oligonucleotide
  Antisense strand to SEQ ID NO: 612040
ugauccacauguaucccag

SEQ ID NO: 612042 - RNA, 19 nt, Artificial Sequence
  Description of Artificial Sequence: Synthetic oligonucleotide
  Sense strand starting at position 2468 of SEQ ID NO: 585085
cuccgauugcaccaggaaa

SEQ ID NO: 612043 - RNA, 19 nt, Artificial Sequence
  Description of Artificial Sequence: Synthetic oligonucleotide
  Antisense strand to SEQ ID NO: 612042
uuuccuggugcaaucggag

SEQ ID NO: 612044 - RNA, 19 nt, Artificial Sequence
  Description of Artificial Sequence: Synthetic oligonucleotide
  Sense strand starting at position 2509 of SEQ ID NO: 585085
uggcauucuagggaugugu

SEQ ID NO: 612045 - RNA, 19 nt, Artificial Sequence
  Description of Artificial Sequence: Synthetic oligonucleotide
  Antisense strand to SEQ ID NO: 612044
acacaucccuagaaugcca

SEQ ID NO: 612046 - RNA, 19 nt, Artificial Sequence
  Description of Artificial Sequence: Synthetic oligonucleotide
  Sense strand starting at position 2582 of SEQ ID NO: 585085
ccaugaauagcucaguuga

SEQ ID NO: 612047 - RNA, 19 nt, Artificial Sequence
  Description of Artificial Sequence: Synthetic oligonucleotide
  Antisense strand to SEQ ID NO: 612046
ucaacugagcuauucaugg

SEQ ID NO: 612048 - RNA, 19 nt, Artificial Sequence
  Description of Artificial Sequence: Synthetic oligonucleotide
  Sense strand starting at position 2584 of SEQ ID NO: 585085
augaauagcucaguugacu

SEQ ID NO: 612049 - RNA, 19 nt, Artificial Sequence
  Description of Artificial Sequence: Synthetic oligonucleotide
  Antisense strand to SEQ ID NO: 612048
agucaacugagcuauucau

SEQ ID NO: 612050 - RNA, 19 nt, Artificial Sequence
  Description of Artificial Sequence: Synthetic oligonucleotide
  Sense strand starting at position 2728 of SEQ ID NO: 585085
cgaggucucucauuuccca

SEQ ID NO: 612051 - RNA, 19 nt, Artificial Sequence
  Description of Artificial Sequence: Synthetic oligonucleotide
  Antisense strand to SEQ ID NO: 612050
ugggaaaugagagaccucg

SEQ ID NO: 612052 - RNA, 19 nt, Artificial Sequence
  Description of Artificial Sequence: Synthetic oligonucleotide
  Sense strand starting at position 2890 of SEQ ID NO: 585085
agacauuagucaccaccuu

SEQ ID NO: 612053 - RNA, 19 nt, Artificial Sequence
  Description of Artificial Sequence: Synthetic oligonucleotide
  Antisense strand to SEQ ID NO: 612052
aagguggugacuaaugucu

SEQ ID NO: 612054 - RNA, 19 nt, Artificial Sequence
  Description of Artificial Sequence: Synthetic oligonucleotide
  Sense strand starting at position 2995 of SEQ ID NO: 585085
ggcucuugagaccaguaca

SEQ ID NO: 612055 - RNA, 19 nt, Artificial Sequence
  Description of Artificial Sequence: Synthetic oligonucleotide
  Antisense strand to SEQ ID NO: 612054
uguacuggucucaagagcc

SEQ ID NO: 612056 - RNA, 19 nt, Artificial Sequence
  Description of Artificial Sequence: Synthetic oligonucleotide
  Sense strand starting at position 3099 of SEQ ID NO: 585085
aguguuugagcacaggaga

SEQ ID NO: 612057 - RNA, 19 nt, Artificial Sequence
  Description of Artificial Sequence: Synthetic oligonucleotide
  Antisense strand to SEQ ID NO: 612056
ucuccugugcucaaacacu

SEQ ID NO: 612058 - RNA, 19 nt, Artificial Sequence
  Description of Artificial Sequence: Synthetic oligonucleotide
  Sense strand starting at position 3122 of SEQ ID NO: 585085
ucuccauagucaguauuga

SEQ ID NO: 612059 - RNA, 19 nt, Artificial Sequence
  Description of Artificial Sequence: Synthetic oligonucleotide
  Antisense strand to SEQ ID NO: 612058
ucaauacugacuauggaga

SEQ ID NO: 612060 - RNA, 19 nt, Artificial Sequence
  Description of Artificial Sequence: Synthetic oligonucleotide
  Sense strand starting at position 3123 of SEQ ID NO: 585085
cuccauagucaguauugaa

SEQ ID NO: 612061 - RNA, 19 nt, Artificial Sequence
  Description of Artificial Sequence: Synthetic oligonucleotide
  Antisense strand to SEQ ID NO: 612060
uucaauacugacuauggag

SEQ ID NO: 612062 - RNA, 19 nt, Artificial Sequence
  Description of Artificial Sequence: Synthetic oligonucleotide
  Sense strand starting at position 3208 of SEQ ID NO: 585085
ccuccuguaggucaacaau

SEQ ID NO: 612063 - RNA, 19 nt, Artificial Sequence
  Description of Artificial Sequence: Synthetic oligonucleotide
  Antisense strand to SEQ ID NO: 612062
auuguugaccuacaggagg

SEQ ID NO: 612064 - RNA, 19 nt, Artificial Sequence
  Description of Artificial Sequence: Synthetic oligonucleotide
  Sense strand starting at position 3379 of SEQ ID NO: 585085
aggcuuugauuguucagag

SEQ ID NO: 612065 - RNA, 19 nt, Artificial Sequence
  Description of Artificial Sequence: Synthetic oligonucleotide
  Antisense strand to SEQ ID NO: 612064
cucugaacaaucaaagccu

SEQ ID NO: 612066 - RNA, 19 nt, Artificial Sequence
  Description of Artificial Sequence: Synthetic oligonucleotide
  Sense strand starting at position 3380 of SEQ ID NO: 585085
ggcuuugauuguucagaga

SEQ ID NO: 612067 - RNA, 19 nt, Artificial Sequence
  Description of Artificial Sequence: Synthetic oligonucleotide
  Antisense strand to SEQ ID NO: 612066
ucucugaacaaucaaagcc

SEQ ID NO: 612068 - RNA, 19 nt, Artificial Sequence
  Description of Artificial Sequence: Synthetic oligonucleotide
  Sense strand starting at position 3651 of SEQ ID NO: 585085
ggcucucucaggugaagaa

SEQ ID NO: 612069 - RNA, 19 nt, Artificial Sequence
  Description of Artificial Sequence: Synthetic oligonucleotide
  Antisense strand to SEQ ID NO: 612068
uucuucaccugagagagcc

SEQ ID NO: 612070 - RNA, 19 nt, Artificial Sequence
  Description of Artificial Sequence: Synthetic oligonucleotide
  Sense strand starting at position 3671 of SEQ ID NO: 585085
gguaaagauugaucuggcu

SEQ ID NO: 612071 - RNA, 19 nt, Artificial Sequence
  Description of Artificial Sequence: Synthetic oligonucleotide
  Antisense strand to SEQ ID NO: 612070
agccagaucaaucuuuacc

SEQ ID NO: 612072 - RNA, 19 nt, Artificial Sequence
  Description of Artificial Sequence: Synthetic oligonucleotide
  Sense strand starting at position 119 of SEQ ID NO: 585086
gauuguucugagcaacuag

SEQ ID NO: 612073 - RNA, 19 nt, Artificial Sequence
  Description of Artificial Sequence: Synthetic oligonucleotide
  Antisense strand to SEQ ID NO: 612072
cuaguugcucagaacaauc

SEQ ID NO: 612074 - RNA, 19 nt, Artificial Sequence
  Description of Artificial Sequence: Synthetic oligonucleotide
  Sense strand starting at position 171 of SEQ ID NO: 585086
ugcagauaaccaugugaaa

SEQ ID NO: 612075 - RNA, 19 nt, Artificial Sequence
  Description of Artificial Sequence: Synthetic oligonucleotide
  Antisense strand to SEQ ID NO: 612074
uuucacaugguuaucugca

SEQ ID NO: 612076 - RNA, 19 nt, Artificial Sequence
  Description of Artificial Sequence: Synthetic oligonucleotide
  Sense strand starting at position 242 of SEQ ID NO: 585086
gaguguuugaagggaaggu

SEQ ID NO: 612077 - RNA, 19 nt, Artificial Sequence
  Description of Artificial Sequence: Synthetic oligonucleotide
  Antisense strand to SEQ ID NO: 612076
accuucccuucaaacacuc

SEQ ID NO: 612078 - RNA, 19 nt, Artificial Sequence
  Description of Artificial Sequence: Synthetic oligonucleotide
  Sense strand starting at position 317 of SEQ ID NO: 585086
acgaaagauaguuggacuu

SEQ ID NO: 612079 - RNA, 19 nt, Artificial Sequence
  Description of Artificial Sequence: Synthetic oligonucleotide
  Antisense strand to SEQ ID NO: 612078
aaguccaacuaucuuucgu

SEQ ID NO: 612080 - RNA, 19 nt, Artificial Sequence
  Description of Artificial Sequence: Synthetic oligonucleotide
  Sense strand starting at position 402 of SEQ ID NO: 585086
ugaaacacguaucuccaaa

SEQ ID NO: 612081 - RNA, 19 nt, Artificial Sequence
  Description of Artificial Sequence: Synthetic oligonucleotide
  Antisense strand to SEQ ID NO: 612080
uuuggagauacguguuuca

SEQ ID NO: 612082 - RNA, 19 nt, Artificial Sequence
  Description of Artificial Sequence: Synthetic oligonucleotide
  Sense strand starting at position 443 of SEQ ID NO: 585086
cguaaauacgacgcuugua

SEQ ID NO: 612083 - RNA, 19 nt, Artificial Sequence
  Description of Artificial Sequence: Synthetic oligonucleotide
  Antisense strand to SEQ ID NO: 612082
uacaagcgucguauuuacg

SEQ ID NO: 612084 - RNA, 19 nt, Artificial Sequence
  Description of Artificial Sequence: Synthetic oligonucleotide
  Sense strand starting at position 541 of SEQ ID NO: 585086
ucugacauucuagaguauu

SEQ ID NO: 612085 - RNA, 19 nt, Artificial Sequence
  Description of Artificial Sequence: Synthetic oligonucleotide
  Antisense strand to SEQ ID NO: 612084
aauacucuagaaugucaga

SEQ ID NO: 612086 - RNA, 19 nt, Artificial Sequence
  Description of Artificial Sequence: Synthetic oligonucleotide
  Sense strand starting at position 965 of SEQ ID NO: 585086
ccuucuaucgaguaaauug

SEQ ID NO: 612087 - RNA, 19 nt, Artificial Sequence
  Description of Artificial Sequence: Synthetic oligonucleotide
  Antisense strand to SEQ ID NO: 612086
caauuuacucgauagaagg

SEQ ID NO: 612088 - RNA, 19 nt, Artificial Sequence
  Description of Artificial Sequence: Synthetic oligonucleotide
  Sense strand starting at position 1027 of SEQ ID NO: 585086
agagaauacugguuaucuu

SEQ ID NO: 612089 - RNA, 19 nt, Artificial Sequence
  Description of Artificial Sequence: Synthetic oligonucleotide
  Antisense strand to SEQ ID NO: 612088
aagauaaccaguauucucu

SEQ ID NO: 612090 - RNA, 19 nt, Artificial Sequence
  Description of Artificial Sequence: Synthetic oligonucleotide
  Sense strand starting at position 1072 of SEQ ID NO: 585086
cagcgagcauuuccuaaga

SEQ ID NO: 612091 - RNA, 19 nt, Artificial Sequence
  Description of Artificial Sequence: Synthetic oligonucleotide
  Antisense strand to SEQ ID NO: 612090
ucuuaggaaaugcucgcug

SEQ ID NO: 612092 - RNA, 19 nt, Artificial Sequence
  Description of Artificial Sequence: Synthetic oligonucleotide
  Sense strand starting at position 1330 of SEQ ID NO: 585086
cuugacugccuuuaggaaa

SEQ ID NO: 612093 - RNA, 19 nt, Artificial Sequence
  Description of Artificial Sequence: Synthetic oligonucleotide
  Antisense strand to SEQ ID NO: 612092
uuuccuaaaggcagucaag

SEQ ID NO: 612094 - RNA, 19 nt, Artificial Sequence
  Description of Artificial Sequence: Synthetic oligonucleotide
  Sense strand starting at position 1390 of SEQ ID NO: 585086
aaguuauggcuccaaagau

SEQ ID NO: 612095 - RNA, 19 nt, Artificial Sequence
  Description of Artificial Sequence: Synthetic oligonucleotide
  Antisense strand to SEQ ID NO: 612094
aucuuuggagccauaacuu

SEQ ID NO: 612096 - RNA, 19 nt, Artificial Sequence
  Description of Artificial Sequence: Synthetic oligonucleotide
  Sense strand starting at position 1987 of SEQ ID NO: 585086
ggcuguuaugaccaugaaa

SEQ ID NO: 612097 - RNA, 19 nt, Artificial Sequence
  Description of Artificial Sequence: Synthetic oligonucleotide
  Antisense strand to SEQ ID NO: 612096
uuucauggucauaacagcc

SEQ ID NO: 612098 - RNA, 19 nt, Artificial Sequence
  Description of Artificial Sequence: Synthetic oligonucleotide
  Sense strand starting at position 1989 of SEQ ID NO: 585086
cuguuaugaccaugaaauu

SEQ ID NO: 612099 - RNA, 19 nt, Artificial Sequence
  Description of Artificial Sequence: Synthetic oligonucleotide
  Antisense strand to SEQ ID NO: 612098
aauuucauggucauaacag

SEQ ID NO: 612100 - RNA, 19 nt, Artificial Sequence
  Description of Artificial Sequence: Synthetic oligonucleotide
  Sense strand starting at position 2046 of SEQ ID NO: 585086
ccauuugacuaggauugga

SEQ ID NO: 612101 - RNA, 19 nt, Artificial Sequence
  Description of Artificial Sequence: Synthetic oligonucleotide
  Antisense strand to SEQ ID NO: 612100
uccaauccuagucaaaugg

SEQ ID NO: 612102 - RNA, 19 nt, Artificial Sequence
  Description of Artificial Sequence: Synthetic oligonucleotide
  Sense strand starting at position 2141 of SEQ ID NO: 585086
uuccauuaagauggauguu

SEQ ID NO: 612103 - RNA, 19 nt, Artificial Sequence
  Description of Artificial Sequence: Synthetic oligonucleotide
  Antisense strand to SEQ ID NO: 612102
aacauccaucuuaauggaa

SEQ ID NO: 612104 - RNA, 19 nt, Artificial Sequence
  Description of Artificial Sequence: Synthetic oligonucleotide
  Sense strand starting at position 2180 of SEQ ID NO: 585086
guuaaucugccugaaauau

SEQ ID NO: 612105 - RNA, 19 nt, Artificial Sequence
  Description of Artificial Sequence: Synthetic oligonucleotide
  Antisense strand to SEQ ID NO: 612104
auauuucaggcagauuaac

SEQ ID NO: 612106 - RNA, 19 nt, Artificial Sequence
  Description of Artificial Sequence: Synthetic oligonucleotide
  Sense strand starting at position 2233 of SEQ ID NO: 585086
guaauaaagcuugaagucu

SEQ ID NO: 612107 - RNA, 19 nt, Artificial Sequence
  Description of Artificial Sequence: Synthetic oligonucleotide
  Antisense strand to SEQ ID NO: 612106
agacuucaagcuuuauuac

SEQ ID NO: 612108 - RNA, 19 nt, Artificial Sequence
  Description of Artificial Sequence: Synthetic oligonucleotide
  Sense strand starting at position 2349 of SEQ ID NO: 585086
aaggaaauaucuucuguga

SEQ ID NO: 612109 - RNA, 19 nt, Artificial Sequence
  Description of Artificial Sequence: Synthetic oligonucleotide
  Antisense strand to SEQ ID NO: 612108
ucacagaagauauuuccuu

SEQ ID NO: 612110 - RNA, 19 nt, Artificial Sequence
  Description of Artificial Sequence: Synthetic oligonucleotide
  Sense strand starting at position 2423 of SEQ ID NO: 585086
cuuguuaccgauuaaugag

SEQ ID NO: 612111 - RNA, 19 nt, Artificial Sequence
  Description of Artificial Sequence: Synthetic oligonucleotide
  Antisense strand to SEQ ID NO: 612110
cucauuaaucgguaacaag

SEQ ID NO: 612112 - RNA, 19 nt, Artificial Sequence
  Description of Artificial Sequence: Synthetic oligonucleotide
  Sense strand starting at position 2528 of SEQ ID NO: 585086
cgguauuuccugcagcaau

SEQ ID NO: 612113 - RNA, 19 nt, Artificial Sequence
  Description of Artificial Sequence: Synthetic oligonucleotide
  Antisense strand to SEQ ID NO: 612112
auugcugcaggaaauaccg

SEQ ID NO: 612114 - RNA, 19 nt, Artificial Sequence
  Description of Artificial Sequence: Synthetic oligonucleotide
  Sense strand starting at position 2552 of SEQ ID NO: 585086
aguuuaugagguuauugau

SEQ ID NO: 612115 - RNA, 19 nt, Artificial Sequence
  Description of Artificial Sequence: Synthetic oligonucleotide
  Antisense strand to SEQ ID NO: 612114
aucaauaaccucauaaacu

SEQ ID NO: 612116 - RNA, 19 nt, Artificial Sequence
  Description of Artificial Sequence: Synthetic oligonucleotide
  Sense strand starting at position 2766 of SEQ ID NO: 585086
ggcagugagaaugguagaa

SEQ ID NO: 612117 - RNA, 19 nt, Artificial Sequence
  Description of Artificial Sequence: Synthetic oligonucleotide
  Antisense strand to SEQ ID NO: 612116
uucuaccauucucacugcc

SEQ ID NO: 612118 - RNA, 19 nt, Artificial Sequence
  Description of Artificial Sequence: Synthetic oligonucleotide
  Sense strand starting at position 2816 of SEQ ID NO: 585086
uguauuucucucuguccca

SEQ ID NO: 612119 - RNA, 19 nt, Artificial Sequence
  Description of Artificial Sequence: Synthetic oligonucleotide
  Antisense strand to SEQ ID NO: 612118
ugggacagagagaaauaca

SEQ ID NO: 612120 - RNA, 19 nt, Artificial Sequence
  Description of Artificial Sequence: Synthetic oligonucleotide
  Sense strand starting at position 3021 of SEQ ID NO: 585086
gagaguaacuucuccagaa

SEQ ID NO: 612121 - RNA, 19 nt, Artificial Sequence
  Description of Artificial Sequence: Synthetic oligonucleotide
  Antisense strand to SEQ ID NO: 612120
uucuggagaaguuacucuc

SEQ ID NO: 612122 - RNA, 19 nt, Artificial Sequence
  Description of Artificial Sequence: Synthetic oligonucleotide
  Sense strand starting at position 3022 of SEQ ID NO: 585086
agaguaacuucuccagaau

SEQ ID NO: 612123 - RNA, 19 nt, Artificial Sequence
  Description of Artificial Sequence: Synthetic oligonucleotide
  Antisense strand to SEQ ID NO: 612122
auucuggagaaguuacucu

SEQ ID NO: 612124 - RNA, 19 nt, Artificial Sequence
  Description of Artificial Sequence: Synthetic oligonucleotide
  Sense strand starting at position 3083 of SEQ ID NO: 585086
auugcaauugacugaacau

SEQ ID NO: 612125 - RNA, 19 nt, Artificial Sequence
  Description of Artificial Sequence: Synthetic oligonucleotide
  Antisense strand to SEQ ID NO: 612124
auguucagucaauugcaau

SEQ ID NO: 612126 - RNA, 19 nt, Artificial Sequence
  Description of Artificial Sequence: Synthetic oligonucleotide
  Sense strand starting at position 3217 of SEQ ID NO: 585086
ugaauaacaugcucugaac

SEQ ID NO: 612127 - RNA, 19 nt, Artificial Sequence
  Description of Artificial Sequence: Synthetic oligonucleotide
  Antisense strand to SEQ ID NO: 612126
guucagagcauguuauuca

SEQ ID NO: 612128 - RNA, 19 nt, Artificial Sequence
  Description of Artificial Sequence: Synthetic oligonucleotide
  Sense strand starting at position 3301 of SEQ ID NO: 585086
gccagaaugggugaaguau

SEQ ID NO: 612129 - RNA, 19 nt, Artificial Sequence
  Description of Artificial Sequence: Synthetic oligonucleotide
  Antisense strand to SEQ ID NO: 612128
auacuucacccauucuggc

SEQ ID NO: 612130 - RNA, 19 nt, Artificial Sequence
  Description of Artificial Sequence: Synthetic oligonucleotide
  Sense strand starting at position 3332 of SEQ ID NO: 585086
gcauuuagcuaccuguuaa

SEQ ID NO: 612131 - RNA, 19 nt, Artificial Sequence
  Description of Artificial Sequence: Synthetic oligonucleotide
  Antisense strand to SEQ ID NO: 612130
uuaacagguagcuaaaugc

SEQ ID NO: 612132 - RNA, 19 nt, Artificial Sequence
  Description of Artificial Sequence: Synthetic oligonucleotide
  Sense strand starting at position 3421 of SEQ ID NO: 585086
ugaauucugaacugaaggu

SEQ ID NO: 612133 - RNA, 19 nt, Artificial Sequence
  Description of Artificial Sequence: Synthetic oligonucleotide
  Antisense strand to SEQ ID NO: 612132
accuucaguucagaauuca

SEQ ID NO: 612134 - RNA, 19 nt, Artificial Sequence
  Description of Artificial Sequence: Synthetic oligonucleotide
  Sense strand starting at position 3425 of SEQ ID NO: 585086
uucugaacugaagguuaua

SEQ ID NO: 612135 - RNA, 19 nt, Artificial Sequence
  Description of Artificial Sequence: Synthetic oligonucleotide
  Antisense strand to SEQ ID NO: 612134
uauaaccuucaguucagaa

SEQ ID NO: 612136 - RNA, 19 nt, Artificial Sequence
  Description of Artificial Sequence: Synthetic oligonucleotide
  Sense strand starting at position 3563 of SEQ ID NO: 585086
cuuucuugagugcaagaga

SEQ ID NO: 612137 - RNA, 19 nt, Artificial Sequence
  Description of Artificial Sequence: Synthetic oligonucleotide
  Antisense strand to SEQ ID NO: 612136
ucucuugcacucaagaaag

SEQ ID NO: 612138 - RNA, 19 nt, Artificial Sequence
  Description of Artificial Sequence: Synthetic oligonucleotide
  Sense strand starting at position 3600 of SEQ ID NO: 585086
gucuucugagcauauauag

SEQ ID NO: 612139 - RNA, 19 nt, Artificial Sequence
  Description of Artificial Sequence: Synthetic oligonucleotide
  Antisense strand to SEQ ID NO: 612138
cuauauaugcucagaagac

SEQ ID NO: 612140 - RNA, 19 nt, Artificial Sequence
  Description of Artificial Sequence: Synthetic oligonucleotide
  Sense strand starting at position 3627 of SEQ ID NO: 585086
uaguauuaggguugggaua

SEQ ID NO: 612141 - RNA, 19 nt, Artificial Sequence
  Description of Artificial Sequence: Synthetic oligonucleotide
  Antisense strand to SEQ ID NO: 612140
uaucccaacccuaauacua

SEQ ID NO: 612142 - RNA, 19 nt, Artificial Sequence
  Description of Artificial Sequence: Synthetic oligonucleotide
  Sense strand starting at position 3628 of SEQ ID NO: 585086
aguauuaggguugggauau

SEQ ID NO: 612143 - RNA, 19 nt, Artificial Sequence
  Description of Artificial Sequence: Synthetic oligonucleotide
  Antisense strand to SEQ ID NO: 612142
auaucccaacccuaauacu

SEQ ID NO: 612144 - RNA, 19 nt, Artificial Sequence
  Description of Artificial Sequence: Synthetic oligonucleotide
  Sense strand starting at position 3653 of SEQ ID NO: 585086
caggacaagucccugauau

SEQ ID NO: 612145 - RNA, 19 nt, Artificial Sequence
  Description of Artificial Sequence: Synthetic oligonucleotide
  Antisense strand to SEQ ID NO: 612144
auaucagggacuuguccug

SEQ ID NO: 612146 - RNA, 19 nt, Artificial Sequence
  Description of Artificial Sequence: Synthetic oligonucleotide
  Sense strand starting at position 3654 of SEQ ID NO: 585086
aggacaagucccugauaua

SEQ ID NO: 612147 - RNA, 19 nt, Artificial Sequence
  Description of Artificial Sequence: Synthetic oligonucleotide
  Antisense strand to SEQ ID NO: 612146
uauaucagggacuuguccu

SEQ ID NO: 612148 - RNA, 19 nt, Artificial Sequence
  Description of Artificial Sequence: Synthetic oligonucleotide
  Sense strand starting at position 3764 of SEQ ID NO: 585086
augugaaguaaauaugugu

SEQ ID NO: 612149 - RNA, 19 nt, Artificial Sequence
  Description of Artificial Sequence: Synthetic oligonucleotide
  Antisense strand to SEQ ID NO: 612148
acacauauuuacuucacau

SEQ ID NO: 612150 - RNA, 19 nt, Artificial Sequence
  Description of Artificial Sequence: Synthetic oligonucleotide
  Sense strand starting at position 3912 of SEQ ID NO: 585086
accagagguugauugaauc

SEQ ID NO: 612151 - RNA, 19 nt, Artificial Sequence
  Description of Artificial Sequence: Synthetic oligonucleotide
  Antisense strand to SEQ ID NO: 612150
gauucaaucaaccucuggu

SEQ ID NO: 612152 - RNA, 19 nt, Artificial Sequence
  Description of Artificial Sequence: Synthetic oligonucleotide
  Sense strand starting at position 126 of SEQ ID NO: 585087
ccaagacuuguaugauuga

SEQ ID NO: 612153 - RNA, 19 nt, Artificial Sequence
  Description of Artificial Sequence: Synthetic oligonucleotide
  Antisense strand to SEQ ID NO: 612152
ucaaucauacaagucuugg

SEQ ID NO: 612154 - RNA, 19 nt, Artificial Sequence
  Description of Artificial Sequence: Synthetic oligonucleotide
  Sense strand starting at position 129 of SEQ ID NO: 585087
agacuuguaugauugaaau

SEQ ID NO: 612155 - RNA, 19 nt, Artificial Sequence
  Description of Artificial Sequence: Synthetic oligonucleotide
  Antisense strand to SEQ ID NO: 612154
auuucaaucauacaagucu

SEQ ID NO: 612156 - RNA, 19 nt, Artificial Sequence
  Description of Artificial Sequence: Synthetic oligonucleotide
  Sense strand starting at position 572 of SEQ ID NO: 585087
ggauacauuucugaauccu

SEQ ID NO: 612157 - RNA, 19 nt, Artificial Sequence
  Description of Artificial Sequence: Synthetic oligonucleotide
  Antisense strand to SEQ ID NO: 612156
aggauucagaaauguaucc

SEQ ID NO: 612158 - RNA, 19 nt, Artificial Sequence
  Description of Artificial Sequence: Synthetic oligonucleotide
  Sense strand starting at position 602 of SEQ ID NO: 585087
acgggaagccuguaucuuu

SEQ ID NO: 612159 - RNA, 19 nt, Artificial Sequence
  Description of Artificial Sequence: Synthetic oligonucleotide
  Antisense strand to SEQ ID NO: 612158
aaagauacaggcuucccgu

SEQ ID NO: 612160 - RNA, 19 nt, Artificial Sequence
  Description of Artificial Sequence: Synthetic oligonucleotide
  Sense strand starting at position 605 of SEQ ID NO: 585087
ggaagccuguaucuuuaca

SEQ ID NO: 612161 - RNA, 19 nt, Artificial Sequence
  Description of Artificial Sequence: Synthetic oligonucleotide
  Antisense strand to SEQ ID NO: 612160
uguaaagauacaggcuucc

SEQ ID NO: 612162 - RNA, 19 nt, Artificial Sequence
  Description of Artificial Sequence: Synthetic oligonucleotide
  Sense strand starting at position 795 of SEQ ID NO: 585087
ucacucuaggauugucaaa

SEQ ID NO: 612163 - RNA, 19 nt, Artificial Sequence
  Description of Artificial Sequence: Synthetic oligonucleotide
  Antisense strand to SEQ ID NO: 612162
uuugacaauccuagaguga

SEQ ID NO: 612164 - RNA, 19 nt, Artificial Sequence
  Description of Artificial Sequence: Synthetic oligonucleotide
  Sense strand starting at position 1093 of SEQ ID NO: 585087
gcaggaggcucuuugucua

SEQ ID NO: 612165 - RNA, 19 nt, Artificial Sequence
  Description of Artificial Sequence: Synthetic oligonucleotide
  Antisense strand to SEQ ID NO: 612164
uagacaaagagccuccugc

SEQ ID NO: 612166 - RNA, 19 nt, Artificial Sequence
  Description of Artificial Sequence: Synthetic oligonucleotide
  Sense strand starting at position 1154 of SEQ ID NO: 585087
ggcuguaacugccugggaa

SEQ ID NO: 612167 - RNA, 19 nt, Artificial Sequence
  Description of Artificial Sequence: Synthetic oligonucleotide
  Antisense strand to SEQ ID NO: 612166
uucccaggcaguuacagcc

SEQ ID NO: 612168 - RNA, 19 nt, Artificial Sequence
  Description of Artificial Sequence: Synthetic oligonucleotide
  Sense strand starting at position 1155 of SEQ ID NO: 585087
gcuguaacugccugggaaa

SEQ ID NO: 612169 - RNA, 19 nt, Artificial Sequence
  Description of Artificial Sequence: Synthetic oligonucleotide
  Antisense strand to SEQ ID NO: 612168
uuucccaggcaguuacagc

SEQ ID NO: 612170 - RNA, 19 nt, Artificial Sequence
  Description of Artificial Sequence: Synthetic oligonucleotide
  Sense strand starting at position 1227 of SEQ ID NO: 585087
agggaagggucugauaaug

SEQ ID NO: 612171 - RNA, 19 nt, Artificial Sequence
  Description of Artificial Sequence: Synthetic oligonucleotide
  Antisense strand to SEQ ID NO: 612170
cauuaucagacccuucccu

SEQ ID NO: 612172 - RNA, 19 nt, Artificial Sequence
  Description of Artificial Sequence: Synthetic oligonucleotide
  Sense strand starting at position 1246 of SEQ ID NO: 585087
gguauggguccuggcgaga

SEQ ID NO: 612173 - RNA, 19 nt, Artificial Sequence
  Description of Artificial Sequence: Synthetic oligonucleotide
  Antisense strand to SEQ ID NO: 612172
ucucgccaggacccauacc

SEQ ID NO: 612174 - RNA, 19 nt, Artificial Sequence
  Description of Artificial Sequence: Synthetic oligonucleotide
  Sense strand starting at position 1380 of SEQ ID NO: 585087
augcguucaccagcuguga

SEQ ID NO: 612175 - RNA, 19 nt, Artificial Sequence
  Description of Artificial Sequence: Synthetic oligonucleotide
  Antisense strand to SEQ ID NO: 612174
ucacagcuggugaacgcau

SEQ ID NO: 612176 - RNA, 19 nt, Artificial Sequence
  Description of Artificial Sequence: Synthetic oligonucleotide
  Sense strand starting at position 1430 of SEQ ID NO: 585087
cucacaucugguuggugua

SEQ ID NO: 612177 - RNA, 19 nt, Artificial Sequence
  Description of Artificial Sequence: Synthetic oligonucleotide
  Antisense strand to SEQ ID NO: 612176
uacaccaaccagaugugag

SEQ ID NO: 612178 - RNA, 19 nt, Artificial Sequence
  Description of Artificial Sequence: Synthetic oligonucleotide
  Sense strand starting at position 1515 of SEQ ID NO: 585087
uguguaugacaccgagaga

SEQ ID NO: 612179 - RNA, 19 nt, Artificial Sequence
  Description of Artificial Sequence: Synthetic oligonucleotide
  Antisense strand to SEQ ID NO: 612178
ucucucggugucauacaca

SEQ ID NO: 612180 - RNA, 19 nt, Artificial Sequence
  Description of Artificial Sequence: Synthetic oligonucleotide
  Sense strand starting at position 1579 of SEQ ID NO: 585087
gagggauggaugugagguu

SEQ ID NO: 612181 - RNA, 19 nt, Artificial Sequence
  Description of Artificial Sequence: Synthetic oligonucleotide
  Antisense strand to SEQ ID NO: 612180
aaccucacauccaucccuc

SEQ ID NO: 612182 - RNA, 19 nt, Artificial Sequence
  Description of Artificial Sequence: Synthetic oligonucleotide
  Sense strand starting at position 1594 of SEQ ID NO: 585087
gguuuaggaauguguugga

SEQ ID NO: 612183 - RNA, 19 nt, Artificial Sequence
  Description of Artificial Sequence: Synthetic oligonucleotide
  Antisense strand to SEQ ID NO: 612182
uccaacacauuccuaaacc

SEQ ID NO: 612184 - RNA, 19 nt, Artificial Sequence
  Description of Artificial Sequence: Synthetic oligonucleotide
  Sense strand starting at position 1598 of SEQ ID NO: 585087
uaggaauguguuggaaaga

SEQ ID NO: 612185 - RNA, 19 nt, Artificial Sequence
  Description of Artificial Sequence: Synthetic oligonucleotide
  Antisense strand to SEQ ID NO: 612184
ucuuuccaacacauuccua

SEQ ID NO: 612186 - RNA, 19 nt, Artificial Sequence
  Description of Artificial Sequence: Synthetic oligonucleotide
  Sense strand starting at position 1599 of SEQ ID NO: 585087
aggaauguguuggaaagag

SEQ ID NO: 612187 - RNA, 19 nt, Artificial Sequence
  Description of Artificial Sequence: Synthetic oligonucleotide
  Antisense strand to SEQ ID NO: 612186
cucuuuccaacacauuccu

SEQ ID NO: 612188 - RNA, 19 nt, Artificial Sequence
  Description of Artificial Sequence: Synthetic oligonucleotide
  Sense strand starting at position 1616 of SEQ ID NO: 585087
agagauucccgccagguaa

SEQ ID NO: 612189 - RNA, 19 nt, Artificial Sequence
  Description of Artificial Sequence: Synthetic oligonucleotide
  Antisense strand to SEQ ID NO: 612188
uuaccuggcgggaaucucu

SEQ ID NO: 612190 - RNA, 19 nt, Artificial Sequence
  Description of Artificial Sequence: Synthetic oligonucleotide
  Sense strand starting at position 1654 of SEQ ID NO: 585087
uuggaaaucuaggugguga

SEQ ID NO: 612191 - RNA, 19 nt, Artificial Sequence
  Description of Artificial Sequence: Synthetic oligonucleotide
  Antisense strand to SEQ ID NO: 612190
ucaccaccuagauuuccaa

SEQ ID NO: 612192 - RNA, 19 nt, Artificial Sequence
  Description of Artificial Sequence: Synthetic oligonucleotide
  Sense strand starting at position 1727 of SEQ ID NO: 585087
ggcucuuaccugcauuaca

SEQ ID NO: 612193 - RNA, 19 nt, Artificial Sequence
  Description of Artificial Sequence: Synthetic oligonucleotide
  Antisense strand to SEQ ID NO: 612192
uguaaugcagguaagagcc

SEQ ID NO: 612194 - RNA, 19 nt, Artificial Sequence
  Description of Artificial Sequence: Synthetic oligonucleotide
  Sense strand starting at position 1882 of SEQ ID NO: 585087
gaggaaaucucuuucgaga

SEQ ID NO: 612195 - RNA, 19 nt, Artificial Sequence
  Description of Artificial Sequence: Synthetic oligonucleotide
  Antisense strand to SEQ ID NO: 612194
ucucgaaagagauuuccuc

SEQ ID NO: 612196 - RNA, 19 nt, Artificial Sequence
  Description of Artificial Sequence: Synthetic oligonucleotide
  Sense strand starting at position 1967 of SEQ ID NO: 585087
cuauccuuccgggaaacga

SEQ ID NO: 612197 - RNA, 19 nt, Artificial Sequence
  Description of Artificial Sequence: Synthetic oligonucleotide
  Antisense strand to SEQ ID NO: 612196
ucguuucccggaaggauag

SEQ ID NO: 612198 - RNA, 19 nt, Artificial Sequence
  Description of Artificial Sequence: Synthetic oligonucleotide
  Sense strand starting at position 2460 of SEQ ID NO: 585087
gccagacuacucggagauc

SEQ ID NO: 612199 - RNA, 19 nt, Artificial Sequence
  Description of Artificial Sequence: Synthetic oligonucleotide
  Antisense strand to SEQ ID NO: 612198
gaucuccgaguagucuggc

SEQ ID NO: 612200 - RNA, 19 nt, Artificial Sequence
  Description of Artificial Sequence: Synthetic oligonucleotide
  Sense strand starting at position 2572 of SEQ ID NO: 585087
aagagagguugugcgcaua

SEQ ID NO: 612201 - RNA, 19 nt, Artificial Sequence
  Description of Artificial Sequence: Synthetic oligonucleotide
  Antisense strand to SEQ ID NO: 612200
uaugcgcacaaccucucuu

SEQ ID NO: 612202 - RNA, 19 nt, Artificial Sequence
  Description of Artificial Sequence: Synthetic oligonucleotide
  Sense strand starting at position 2680 of SEQ ID NO: 585087
uaggcuuagcacugguaua

SEQ ID NO: 612203 - RNA, 19 nt, Artificial Sequence
  Description of Artificial Sequence: Synthetic oligonucleotide
  Antisense strand to SEQ ID NO: 612202
uauaccagugcuaagccua

SEQ ID NO: 612204 - RNA, 19 nt, Artificial Sequence
  Description of Artificial Sequence: Synthetic oligonucleotide
  Sense strand starting at position 2681 of SEQ ID NO: 585087
aggcuuagcacugguauau

SEQ ID NO: 612205 - RNA, 19 nt, Artificial Sequence
  Description of Artificial Sequence: Synthetic oligonucleotide
  Antisense strand to SEQ ID NO: 612204
auauaccagugcuaagccu

SEQ ID NO: 612206 - RNA, 19 nt, Artificial Sequence
  Description of Artificial Sequence: Synthetic oligonucleotide
  Sense strand starting at position 2690 of SEQ ID NO: 585087
acugguauaucaucacaag

SEQ ID NO: 612207 - RNA, 19 nt, Artificial Sequence
  Description of Artificial Sequence: Synthetic oligonucleotide
  Antisense strand to SEQ ID NO: 612206
cuugugaugauauaccagu

SEQ ID NO: 612208 - RNA, 19 nt, Artificial Sequence
  Description of Artificial Sequence: Synthetic oligonucleotide
  Sense strand starting at position 2772 of SEQ ID NO: 585087
agcaaaggauaugaauaaa

SEQ ID NO: 612209 - RNA, 19 nt, Artificial Sequence
  Description of Artificial Sequence: Synthetic oligonucleotide
  Antisense strand to SEQ ID NO: 612208
uuuauucauauccuuugcu

SEQ ID NO: 612210 - RNA, 19 nt, Artificial Sequence
  Description of Artificial Sequence: Synthetic oligonucleotide
  Sense strand starting at position 2945 of SEQ ID NO: 585087
gagauccugucuuuacuga

SEQ ID NO: 612211 - RNA, 19 nt, Artificial Sequence
  Description of Artificial Sequence: Synthetic oligonucleotide
  Antisense strand to SEQ ID NO: 612210
ucaguaaagacaggaucuc

SEQ ID NO: 612212 - RNA, 19 nt, Artificial Sequence
  Description of Artificial Sequence: Synthetic oligonucleotide
  Sense strand starting at position 2946 of SEQ ID NO: 585087
agauccugucuuuacugaa

SEQ ID NO: 612213 - RNA, 19 nt, Artificial Sequence
  Description of Artificial Sequence: Synthetic oligonucleotide
  Antisense strand to SEQ ID NO: 612212
uucaguaaagacaggaucu

SEQ ID NO: 612214 - RNA, 19 nt, Artificial Sequence
  Description of Artificial Sequence: Synthetic oligonucleotide
  Sense strand starting at position 3160 of SEQ ID NO: 585087
aaguuauucugagauagaa

SEQ ID NO: 612215 - RNA, 19 nt, Artificial Sequence
  Description of Artificial Sequence: Synthetic oligonucleotide
  Antisense strand to SEQ ID NO: 612214
uucuaucucagaauaacuu

SEQ ID NO: 612216 - RNA, 19 nt, Artificial Sequence
  Description of Artificial Sequence: Synthetic oligonucleotide
  Sense strand starting at position 3217 of SEQ ID NO: 585087
cuaacauaaucugcuggaa

SEQ ID NO: 612217 - RNA, 19 nt, Artificial Sequence
  Description of Artificial Sequence: Synthetic oligonucleotide
  Antisense strand to SEQ ID NO: 612216
uuccagcagauuauguuag

SEQ ID NO: 612218 - RNA, 19 nt, Artificial Sequence
  Description of Artificial Sequence: Synthetic oligonucleotide
  Sense strand starting at position 3383 of SEQ ID NO: 585087
agcaaaguaugagaaauaa

SEQ ID NO: 612219 - RNA, 19 nt, Artificial Sequence
  Description of Artificial Sequence: Synthetic oligonucleotide
  Antisense strand to SEQ ID NO: 612218
uuauuucucauacuuugcu

SEQ ID NO: 612220 - RNA, 19 nt, Artificial Sequence
  Description of Artificial Sequence: Synthetic oligonucleotide
  Sense strand starting at position 3673 of SEQ ID NO: 585087
uauggaguucucuguggau

SEQ ID NO: 612221 - RNA, 19 nt, Artificial Sequence
  Description of Artificial Sequence: Synthetic oligonucleotide
  Antisense strand to SEQ ID NO: 612220
auccacagagaacuccaua

SEQ ID NO: 612222 - RNA, 19 nt, Artificial Sequence
  Description of Artificial Sequence: Synthetic oligonucleotide
  Sense strand starting at position 3677 of SEQ ID NO: 585087
gaguucucuguggaucaug

SEQ ID NO: 612223 - RNA, 19 nt, Artificial Sequence
  Description of Artificial Sequence: Synthetic oligonucleotide
  Antisense strand to SEQ ID NO: 612222
caugauccacagagaacuc

SEQ ID NO: 612224 - RNA, 19 nt, Artificial Sequence
  Description of Artificial Sequence: Synthetic oligonucleotide
  Sense strand starting at position 3711 of SEQ ID NO: 585087
ggcaguauggcauagugga

SEQ ID NO: 612225 - RNA, 19 nt, Artificial Sequence
  Description of Artificial Sequence: Synthetic oligonucleotide
  Antisense strand to SEQ ID NO: 612224
uccacuaugccauacugcc

SEQ ID NO: 612226 - RNA, 19 nt, Artificial Sequence
  Description of Artificial Sequence: Synthetic oligonucleotide
  Sense strand starting at position 3800 of SEQ ID NO: 585087
uugagcaaguuuguguuaa

SEQ ID NO: 612227 - RNA, 19 nt, Artificial Sequence
  Description of Artificial Sequence: Synthetic oligonucleotide
  Antisense strand to SEQ ID NO: 612226
uuaacacaaacuugcucaa

SEQ ID NO: 612228 - RNA, 19 nt, Artificial Sequence
  Description of Artificial Sequence: Synthetic oligonucleotide
  Sense strand starting at position 3894 of SEQ ID NO: 585087
cccauaagguuguuaugaa

SEQ ID NO: 612229 - RNA, 19 nt, Artificial Sequence
  Description of Artificial Sequence: Synthetic oligonucleotide
  Antisense strand to SEQ ID NO: 612228
uucauaacaaccuuauggg

SEQ ID NO: 612230 - RNA, 19 nt, Artificial Sequence
  Description of Artificial Sequence: Synthetic oligonucleotide
  Sense strand starting at position 3901 of SEQ ID NO: 585087
gguuguuaugaauaaguaa

SEQ ID NO: 612231 - RNA, 19 nt, Artificial Sequence
  Description of Artificial Sequence: Synthetic oligonucleotide
  Antisense strand to SEQ ID NO: 612230
uuacuuauucauaacaacc

SEQ ID NO: 612232 - RNA, 19 nt, Artificial Sequence
  Description of Artificial Sequence: Synthetic oligonucleotide
  Sense strand starting at position 135 of SEQ ID NO: 585088
ccaagacuuguaugauuga

SEQ ID NO: 612233 - RNA, 19 nt, Artificial Sequence
  Description of Artificial Sequence: Synthetic oligonucleotide
  Antisense strand to SEQ ID NO: 612232
ucaaucauacaagucuugg

SEQ ID NO: 612234 - RNA, 19 nt, Artificial Sequence
  Description of Artificial Sequence: Synthetic oligonucleotide
  Sense strand starting at position 138 of SEQ ID NO: 585088
agacuuguaugauugaaau

SEQ ID NO: 612235 - RNA, 19 nt, Artificial Sequence
  Description of Artificial Sequence: Synthetic oligonucleotide
  Antisense strand to SEQ ID NO: 612234
auuucaaucauacaagucu

SEQ ID NO: 612236 - RNA, 19 nt, Artificial Sequence
  Description of Artificial Sequence: Synthetic oligonucleotide
  Sense strand starting at position 581 of SEQ ID NO: 585088
ggauacauuucugaauccu

SEQ ID NO: 612237 - RNA, 19 nt, Artificial Sequence
  Description of Artificial Sequence: Synthetic oligonucleotide
  Antisense strand to SEQ ID NO: 612236
aggauucagaaauguaucc

SEQ ID NO: 612238 - RNA, 19 nt, Artificial Sequence
  Description of Artificial Sequence: Synthetic oligonucleotide
  Sense strand starting at position 611 of SEQ ID NO: 585088
acgggaagccuguaucuuu

SEQ ID NO: 612239 - RNA, 19 nt, Artificial Sequence
  Description of Artificial Sequence: Synthetic oligonucleotide
  Antisense strand to SEQ ID NO: 612238
aaagauacaggcuucccgu

SEQ ID NO: 612240 - RNA, 19 nt, Artificial Sequence
  Description of Artificial Sequence: Synthetic oligonucleotide
  Sense strand starting at position 614 of SEQ ID NO: 585088
ggaagccuguaucuuuaca

SEQ ID NO: 612241 - RNA, 19 nt, Artificial Sequence
  Description of Artificial Sequence: Synthetic oligonucleotide
  Antisense strand to SEQ ID NO: 612240
uguaaagauacaggcuucc

SEQ ID NO: 612242 - RNA, 19 nt, Artificial Sequence
  Description of Artificial Sequence: Synthetic oligonucleotide
  Sense strand starting at position 804 of SEQ ID NO: 585088
ucacucuaggauugucaaa

SEQ ID NO: 612243 - RNA, 19 nt, Artificial Sequence
  Description of Artificial Sequence: Synthetic oligonucleotide
  Antisense strand to SEQ ID NO: 612242
uuugacaauccuagaguga

SEQ ID NO: 612244 - RNA, 19 nt, Artificial Sequence
  Description of Artificial Sequence: Synthetic oligonucleotide
  Sense strand starting at position 1102 of SEQ ID NO: 585088
gcaggaggcucuuugucua

SEQ ID NO: 612245 - RNA, 19 nt, Artificial Sequence
  Description of Artificial Sequence: Synthetic oligonucleotide
  Antisense strand to SEQ ID NO: 612244
uagacaaagagccuccugc

SEQ ID NO: 612246 - RNA, 19 nt, Artificial Sequence
  Description of Artificial Sequence: Synthetic oligonucleotide
  Sense strand starting at position 1163 of SEQ ID NO: 585088
ggcuguaacugccugggaa

SEQ ID NO: 612247 - RNA, 19 nt, Artificial Sequence
  Description of Artificial Sequence: Synthetic oligonucleotide
  Antisense strand to SEQ ID NO: 612246
uucccaggcaguuacagcc

SEQ ID NO: 612248 - RNA, 19 nt, Artificial Sequence
  Description of Artificial Sequence: Synthetic oligonucleotide
  Sense strand starting at position 1164 of SEQ ID NO: 585088
gcuguaacugccugggaaa

SEQ ID NO: 612249 - RNA, 19 nt, Artificial Sequence
  Description of Artificial Sequence: Synthetic oligonucleotide
  Antisense strand to SEQ ID NO: 612248
uuucccaggcaguuacagc

SEQ ID NO: 612250 - RNA, 19 nt, Artificial Sequence
  Description of Artificial Sequence: Synthetic oligonucleotide
  Sense strand starting at position 1236 of SEQ ID NO: 585088
agggaagggucugauaaug

SEQ ID NO: 612251 - RNA, 19 nt, Artificial Sequence
  Description of Artificial Sequence: Synthetic oligonucleotide
  Antisense strand to SEQ ID NO: 612250
cauuaucagacccuucccu

SEQ ID NO: 612252 - RNA, 19 nt, Artificial Sequence
  Description of Artificial Sequence: Synthetic oligonucleotide
  Sense strand starting at position 1255 of SEQ ID NO: 585088
gguauggguccuggcgaga

SEQ ID NO: 612253 - RNA, 19 nt, Artificial Sequence
  Description of Artificial Sequence: Synthetic oligonucleotide
  Antisense strand to SEQ ID NO: 612252
ucucgccaggacccauacc

SEQ ID NO: 612254 - RNA, 19 nt, Artificial Sequence
  Description of Artificial Sequence: Synthetic oligonucleotide
  Sense strand starting at position 1389 of SEQ ID NO: 585088
augcguucaccagcuguga

SEQ ID NO: 612255 - RNA, 19 nt, Artificial Sequence
  Description of Artificial Sequence: Synthetic oligonucleotide
  Antisense strand to SEQ ID NO: 612254
ucacagcuggugaacgcau

SEQ ID NO: 612256 - RNA, 19 nt, Artificial Sequence
  Description of Artificial Sequence: Synthetic oligonucleotide
  Sense strand starting at position 1439 of SEQ ID NO: 585088
cucacaucugguuggugua

SEQ ID NO: 612257 - RNA, 19 nt, Artificial Sequence
  Description of Artificial Sequence: Synthetic oligonucleotide
  Antisense strand to SEQ ID NO: 612256
uacaccaaccagaugugag

SEQ ID NO: 612258 - RNA, 19 nt, Artificial Sequence
  Description of Artificial Sequence: Synthetic oligonucleotide
  Sense strand starting at position 1524 of SEQ ID NO: 585088
uguguaugacaccgagaga

SEQ ID NO: 612259 - RNA, 19 nt, Artificial Sequence
  Description of Artificial Sequence: Synthetic oligonucleotide
  Antisense strand to SEQ ID NO: 612258
ucucucggugucauacaca

SEQ ID NO: 612260 - RNA, 19 nt, Artificial Sequence
  Description of Artificial Sequence: Synthetic oligonucleotide
  Sense strand starting at position 1588 of SEQ ID NO: 585088
gagggauggaugugagguu

SEQ ID NO: 612261 - RNA, 19 nt, Artificial Sequence
  Description of Artificial Sequence: Synthetic oligonucleotide
  Antisense strand to SEQ ID NO: 612260
aaccucacauccaucccuc

SEQ ID NO: 612262 - RNA, 19 nt, Artificial Sequence
  Description of Artificial Sequence: Synthetic oligonucleotide
  Sense strand starting at position 1603 of SEQ ID NO: 585088
gguuuaggaauguguugga

SEQ ID NO: 612263 - RNA, 19 nt, Artificial Sequence
  Description of Artificial Sequence: Synthetic oligonucleotide
  Antisense strand to SEQ ID NO: 612262
uccaacacauuccuaaacc

SEQ ID NO: 612264 - RNA, 19 nt, Artificial Sequence
  Description of Artificial Sequence: Synthetic oligonucleotide
  Sense strand starting at position 1607 of SEQ ID NO: 585088
uaggaauguguuggaaaga

SEQ ID NO: 612265 - RNA, 19 nt, Artificial Sequence
  Description of Artificial Sequence: Synthetic oligonucleotide
  Antisense strand to SEQ ID NO: 612264
ucuuuccaacacauuccua

SEQ ID NO: 612266 - RNA, 19 nt, Artificial Sequence
  Description of Artificial Sequence: Synthetic oligonucleotide
  Sense strand starting at position 1608 of SEQ ID NO: 585088
aggaauguguuggaaagag

SEQ ID NO: 612267 - RNA, 19 nt, Artificial Sequence
  Description of Artificial Sequence: Synthetic oligonucleotide
  Antisense strand to SEQ ID NO: 612266
cucuuuccaacacauuccu

SEQ ID NO: 612268 - RNA, 19 nt, Artificial Sequence
  Description of Artificial Sequence: Synthetic oligonucleotide
  Sense strand starting at position 1625 of SEQ ID NO: 585088
agagauucccgccagguaa

SEQ ID NO: 612269 - RNA, 19 nt, Artificial Sequence
  Description of Artificial Sequence: Synthetic oligonucleotide
  Antisense strand to SEQ ID NO: 612268
uuaccuggcgggaaucucu

SEQ ID NO: 612270 - RNA, 19 nt, Artificial Sequence
  Description of Artificial Sequence: Synthetic oligonucleotide
  Sense strand starting at position 1663 of SEQ ID NO: 585088
uuggaaaucuaggugguga

SEQ ID NO: 612271 - RNA, 19 nt, Artificial Sequence
  Description of Artificial Sequence: Synthetic oligonucleotide
  Antisense strand to SEQ ID NO: 612270
ucaccaccuagauuuccaa

SEQ ID NO: 612272 - RNA, 19 nt, Artificial Sequence
  Description of Artificial Sequence: Synthetic oligonucleotide
  Sense strand starting at position 1736 of SEQ ID NO: 585088
ggcucuuaccugcauuaca

SEQ ID NO: 612273 - RNA, 19 nt, Artificial Sequence
  Description of Artificial Sequence: Synthetic oligonucleotide
  Antisense strand to SEQ ID NO: 612272
uguaaugcagguaagagcc

SEQ ID NO: 612274 - RNA, 19 nt, Artificial Sequence
  Description of Artificial Sequence: Synthetic oligonucleotide
  Sense strand starting at position 1891 of SEQ ID NO: 585088
gaggaaaucucuuucgaga

SEQ ID NO: 612275 - RNA, 19 nt, Artificial Sequence
  Description of Artificial Sequence: Synthetic oligonucleotide
  Antisense strand to SEQ ID NO: 612274
ucucgaaagagauuuccuc

SEQ ID NO: 612276 - RNA, 19 nt, Artificial Sequence
  Description of Artificial Sequence: Synthetic oligonucleotide
  Sense strand starting at position 1976 of SEQ ID NO: 585088
cuauccuuccgggaaacga

SEQ ID NO: 612277 - RNA, 19 nt, Artificial Sequence
  Description of Artificial Sequence: Synthetic oligonucleotide
  Antisense strand to SEQ ID NO: 612276
ucguuucccggaaggauag

SEQ ID NO: 612278 - RNA, 19 nt, Artificial Sequence
  Description of Artificial Sequence: Synthetic oligonucleotide
  Sense strand starting at position 2469 of SEQ ID NO: 585088
gccagacuacucggagauc

SEQ ID NO: 612279 - RNA, 19 nt, Artificial Sequence
  Description of Artificial Sequence: Synthetic oligonucleotide
  Antisense strand to SEQ ID NO: 612278
gaucuccgaguagucuggc

SEQ ID NO: 612280 - RNA, 19 nt, Artificial Sequence
  Description of Artificial Sequence: Synthetic oligonucleotide
  Sense strand starting at position 2581 of SEQ ID NO: 585088
aagagagguugugcgcaua

SEQ ID NO: 612281 - RNA, 19 nt, Artificial Sequence
  Description of Artificial Sequence: Synthetic oligonucleotide
  Antisense strand to SEQ ID NO: 612280
uaugcgcacaaccucucuu

SEQ ID NO: 612282 - RNA, 19 nt, Artificial Sequence
  Description of Artificial Sequence: Synthetic oligonucleotide
  Sense strand starting at position 2689 of SEQ ID NO: 585088
uaggcuuagcacugguaua

SEQ ID NO: 612283 - RNA, 19 nt, Artificial Sequence
  Description of Artificial Sequence: Synthetic oligonucleotide
  Antisense strand to SEQ ID NO: 612282
uauaccagugcuaagccua

SEQ ID NO: 612284 - RNA, 19 nt, Artificial Sequence
  Description of Artificial Sequence: Synthetic oligonucleotide
  Sense strand starting at position 2690 of SEQ ID NO: 585088
aggcuuagcacugguauau

SEQ ID NO: 612285 - RNA, 19 nt, Artificial Sequence
  Description of Artificial Sequence: Synthetic oligonucleotide
  Antisense strand to SEQ ID NO: 612284
auauaccagugcuaagccu

SEQ ID NO: 612286 - RNA, 19 nt, Artificial Sequence
  Description of Artificial Sequence: Synthetic oligonucleotide
  Sense strand starting at position 2699 of SEQ ID NO: 585088
acugguauaucaucacaag

SEQ ID NO: 612287 - RNA, 19 nt, Artificial Sequence
  Description of Artificial Sequence: Synthetic oligonucleotide
  Antisense strand to SEQ ID NO: 612286
cuugugaugauauaccagu

SEQ ID NO: 612288 - RNA, 19 nt, Artificial Sequence
  Description of Artificial Sequence: Synthetic oligonucleotide
  Sense strand starting at position 2781 of SEQ ID NO: 585088
agcaaaggauaugaauaaa

SEQ ID NO: 612289 - RNA, 19 nt, Artificial Sequence
  Description of Artificial Sequence: Synthetic oligonucleotide
  Antisense strand to SEQ ID NO: 612288
uuuauucauauccuuugcu

SEQ ID NO: 612290 - RNA, 19 nt, Artificial Sequence
  Description of Artificial Sequence: Synthetic oligonucleotide
  Sense strand starting at position 2954 of SEQ ID NO: 585088
gagauccugucuuuacuga

SEQ ID NO: 612291 - RNA, 19 nt, Artificial Sequence
  Description of Artificial Sequence: Synthetic oligonucleotide
  Antisense strand to SEQ ID NO: 612290
ucaguaaagacaggaucuc

SEQ ID NO: 612292 - RNA, 19 nt, Artificial Sequence
  Description of Artificial Sequence: Synthetic oligonucleotide
  Sense strand starting at position 2955 of SEQ ID NO: 585088
agauccugucuuuacugaa

SEQ ID NO: 612293 - RNA, 19 nt, Artificial Sequence
  Description of Artificial Sequence: Synthetic oligonucleotide
  Antisense strand to SEQ ID NO: 612292
uucaguaaagacaggaucu

SEQ ID NO: 612294 - RNA, 19 nt, Artificial Sequence
  Description of Artificial Sequence: Synthetic oligonucleotide
  Sense strand starting at position 3169 of SEQ ID NO: 585088
aaguuauucugagauagaa

SEQ ID NO: 612295 - RNA, 19 nt, Artificial Sequence
  Description of Artificial Sequence: Synthetic oligonucleotide
  Antisense strand to SEQ ID NO: 612294
uucuaucucagaauaacuu

SEQ ID NO: 612296 - RNA, 19 nt, Artificial Sequence
  Description of Artificial Sequence: Synthetic oligonucleotide
  Sense strand starting at position 3226 of SEQ ID NO: 585088
cuaacauaaucugcuggaa

SEQ ID NO: 612297 - RNA, 19 nt, Artificial Sequence
  Description of Artificial Sequence: Synthetic oligonucleotide
  Antisense strand to SEQ ID NO: 612296
uuccagcagauuauguuag

SEQ ID NO: 612298 - RNA, 19 nt, Artificial Sequence
  Description of Artificial Sequence: Synthetic oligonucleotide
  Sense strand starting at position 3392 of SEQ ID NO: 585088
agcaaaguaugagaaauaa

SEQ ID NO: 612299 - RNA, 19 nt, Artificial Sequence
  Description of Artificial Sequence: Synthetic oligonucleotide
  Antisense strand to SEQ ID NO: 612298
uuauuucucauacuuugcu

SEQ ID NO: 612300 - RNA, 19 nt, Artificial Sequence
  Description of Artificial Sequence: Synthetic oligonucleotide
  Sense strand starting at position 3682 of SEQ ID NO: 585088
uauggaguucucuguggau

SEQ ID NO: 612301 - RNA, 19 nt, Artificial Sequence
  Description of Artificial Sequence: Synthetic oligonucleotide
  Antisense strand to SEQ ID NO: 612300
auccacagagaacuccaua

SEQ ID NO: 612302 - RNA, 19 nt, Artificial Sequence
  Description of Artificial Sequence: Synthetic oligonucleotide
  Sense strand starting at position 3686 of SEQ ID NO: 585088
gaguucucuguggaucaug

SEQ ID NO: 612303 - RNA, 19 nt, Artificial Sequence
  Description of Artificial Sequence: Synthetic oligonucleotide
  Antisense strand to SEQ ID NO: 612302
caugauccacagagaacuc

SEQ ID NO: 612304 - RNA, 19 nt, Artificial Sequence
  Description of Artificial Sequence: Synthetic oligonucleotide
  Sense strand starting at position 3720 of SEQ ID NO: 585088
ggcaguauggcauagugga

SEQ ID NO: 612305 - RNA, 19 nt, Artificial Sequence
  Description of Artificial Sequence: Synthetic oligonucleotide
  Antisense strand to SEQ ID NO: 612304
uccacuaugccauacugcc

SEQ ID NO: 612306 - RNA, 19 nt, Artificial Sequence
  Description of Artificial Sequence: Synthetic oligonucleotide
  Sense strand starting at position 3809 of SEQ ID NO: 585088
uugagcaaguuuguguuaa

SEQ ID NO: 612307 - RNA, 19 nt, Artificial Sequence
  Description of Artificial Sequence: Synthetic oligonucleotide
  Antisense strand to SEQ ID NO: 612306
uuaacacaaacuugcucaa

SEQ ID NO: 612308 - RNA, 19 nt, Artificial Sequence
  Description of Artificial Sequence: Synthetic oligonucleotide
  Sense strand starting at position 3903 of SEQ ID NO: 585088
cccauaagguuguuaugaa

SEQ ID NO: 612309 - RNA, 19 nt, Artificial Sequence
  Description of Artificial Sequence: Synthetic oligonucleotide
  Antisense strand to SEQ ID NO: 612308
uucauaacaaccuuauggg

SEQ ID NO: 612310 - RNA, 19 nt, Artificial Sequence
  Description of Artificial Sequence: Synthetic oligonucleotide
  Sense strand starting at position 3910 of SEQ ID NO: 585088
gguuguuaugaauaaguaa

SEQ ID NO: 612311 - RNA, 19 nt, Artificial Sequence
  Description of Artificial Sequence: Synthetic oligonucleotide
  Antisense strand to SEQ ID NO: 612310
uuacuuauucauaacaacc

SEQ ID NO: 612312 - RNA, 19 nt, Artificial Sequence
  Description of Artificial Sequence: Synthetic oligonucleotide
  Sense strand starting at position 11 of SEQ ID NO: 585089
aaaguucuuugcuagaaga

SEQ ID NO: 612313 - RNA, 19 nt, Artificial Sequence
  Description of Artificial Sequence: Synthetic oligonucleotide
  Antisense strand to SEQ ID NO: 612312
ucuucuagcaaagaacuuu

SEQ ID NO: 612314 - RNA, 19 nt, Artificial Sequence
  Description of Artificial Sequence: Synthetic oligonucleotide
  Sense strand starting at position 13 of SEQ ID NO: 585089
aguucuuugcuagaagacu

SEQ ID NO: 612315 - RNA, 19 nt, Artificial Sequence
  Description of Artificial Sequence: Synthetic oligonucleotide
  Antisense strand to SEQ ID NO: 612314
agucuucuagcaaagaacu

SEQ ID NO: 612316 - RNA, 19 nt, Artificial Sequence
  Description of Artificial Sequence: Synthetic oligonucleotide
  Sense strand starting at position 83 of SEQ ID NO: 585089
ccaagaacuuagcaaguua

SEQ ID NO: 612317 - RNA, 19 nt, Artificial Sequence
  Description of Artificial Sequence: Synthetic oligonucleotide
  Antisense strand to SEQ ID NO: 612316
uaacuugcuaaguucuugg

SEQ ID NO: 612318 - RNA, 19 nt, Artificial Sequence
  Description of Artificial Sequence: Synthetic oligonucleotide
  Sense strand starting at position 141 of SEQ ID NO: 585089
gcaacauggguuugaauga

SEQ ID NO: 612319 - RNA, 19 nt, Artificial Sequence
  Description of Artificial Sequence: Synthetic oligonucleotide
  Antisense strand to SEQ ID NO: 612318
ucauucaaacccauguugc

SEQ ID NO: 612320 - RNA, 19 nt, Artificial Sequence
  Description of Artificial Sequence: Synthetic oligonucleotide
  Sense strand starting at position 501 of SEQ ID NO: 585089
uuaguaaaguccugggaaa

SEQ ID NO: 612321 - RNA, 19 nt, Artificial Sequence
  Description of Artificial Sequence: Synthetic oligonucleotide
  Antisense strand to SEQ ID NO: 612320
uuucccaggacuuuacuaa

SEQ ID NO: 612322 - RNA, 19 nt, Artificial Sequence
  Description of Artificial Sequence: Synthetic oligonucleotide
  Sense strand starting at position 502 of SEQ ID NO: 585089
uaguaaaguccugggaaag

SEQ ID NO: 612323 - RNA, 19 nt, Artificial Sequence
  Description of Artificial Sequence: Synthetic oligonucleotide
  Antisense strand to SEQ ID NO: 612322
cuuucccaggacuuuacua

SEQ ID NO: 612324 - RNA, 19 nt, Artificial Sequence
  Description of Artificial Sequence: Synthetic oligonucleotide
  Sense strand starting at position 503 of SEQ ID NO: 585089
aguaaaguccugggaaagu

SEQ ID NO: 612325 - RNA, 19 nt, Artificial Sequence
  Description of Artificial Sequence: Synthetic oligonucleotide
  Antisense strand to SEQ ID NO: 612324
acuuucccaggacuuuacu

SEQ ID NO: 612326 - RNA, 19 nt, Artificial Sequence
  Description of Artificial Sequence: Synthetic oligonucleotide
  Sense strand starting at position 657 of SEQ ID NO: 585089
cuuccaagaguugguccaa

SEQ ID NO: 612327 - RNA, 19 nt, Artificial Sequence
  Description of Artificial Sequence: Synthetic oligonucleotide
  Antisense strand to SEQ ID NO: 612326
uuggaccaacucuuggaag

SEQ ID NO: 612328 - RNA, 19 nt, Artificial Sequence
  Description of Artificial Sequence: Synthetic oligonucleotide
  Sense strand starting at position 738 of SEQ ID NO: 585089
gugaacauguaaguacuaa

SEQ ID NO: 612329 - RNA, 19 nt, Artificial Sequence
  Description of Artificial Sequence: Synthetic oligonucleotide
  Antisense strand to SEQ ID NO: 612328
uuaguacuuacauguucac

SEQ ID NO: 612330 - RNA, 19 nt, Artificial Sequence
  Description of Artificial Sequence: Synthetic oligonucleotide
  Sense strand starting at position 775 of SEQ ID NO: 585089
cuauuacuacucugggaau

SEQ ID NO: 612331 - RNA, 19 nt, Artificial Sequence
  Description of Artificial Sequence: Synthetic oligonucleotide
  Antisense strand to SEQ ID NO: 612330
auucccagaguaguaauag

SEQ ID NO: 612332 - RNA, 19 nt, Artificial Sequence
  Description of Artificial Sequence: Synthetic oligonucleotide
  Sense strand starting at position 938 of SEQ ID NO: 585089
uccacauaagcucagaagu

SEQ ID NO: 612333 - RNA, 19 nt, Artificial Sequence
  Description of Artificial Sequence: Synthetic oligonucleotide
  Antisense strand to SEQ ID NO: 612332
acuucugagcuuaugugga

SEQ ID NO: 612334 - RNA, 19 nt, Artificial Sequence
  Description of Artificial Sequence: Synthetic oligonucleotide
  Sense strand starting at position 992 of SEQ ID NO: 585089
uuaauuaaaguguggcuaa

SEQ ID NO: 612335 - RNA, 19 nt, Artificial Sequence
  Description of Artificial Sequence: Synthetic oligonucleotide
  Antisense strand to SEQ ID NO: 612334
uuagccacacuuuaauuaa

SEQ ID NO: 612336 - RNA, 19 nt, Artificial Sequence
  Description of Artificial Sequence: Synthetic oligonucleotide
  Sense strand starting at position 995 of SEQ ID NO: 585089
auuaaaguguggcuaacuu

SEQ ID NO: 612337 - RNA, 19 nt, Artificial Sequence
  Description of Artificial Sequence: Synthetic oligonucleotide
  Antisense strand to SEQ ID NO: 612336
aaguuagccacacuuuaau

SEQ ID NO: 612338 - RNA, 19 nt, Artificial Sequence
  Description of Artificial Sequence: Synthetic oligonucleotide
  Sense strand starting at position 999 of SEQ ID NO: 585089
aaguguggcuaacuuagaa

SEQ ID NO: 612339 - RNA, 19 nt, Artificial Sequence
  Description of Artificial Sequence: Synthetic oligonucleotide
  Antisense strand to SEQ ID NO: 612338
uucuaaguuagccacacuu

SEQ ID NO: 612340 - RNA, 19 nt, Artificial Sequence
  Description of Artificial Sequence: Synthetic oligonucleotide
  Sense strand starting at position 1028 of SEQ ID NO: 585089
uuaaguguuccuuguaagu

SEQ ID NO: 612341 - RNA, 19 nt, Artificial Sequence
  Description of Artificial Sequence: Synthetic oligonucleotide
  Antisense strand to SEQ ID NO: 612340
acuuacaaggaacacuuaa

SEQ ID NO: 612342 - RNA, 19 nt, Artificial Sequence
  Description of Artificial Sequence: Synthetic oligonucleotide
  Sense strand starting at position 1039 of SEQ ID NO: 585089
uuguaaguuuacucacaga

SEQ ID NO: 612343 - RNA, 19 nt, Artificial Sequence
  Description of Artificial Sequence: Synthetic oligonucleotide
  Antisense strand to SEQ ID NO: 612342
ucugugaguaaacuuacaa

SEQ ID NO: 612344 - RNA, 19 nt, Artificial Sequence
  Description of Artificial Sequence: Synthetic oligonucleotide
  Sense strand starting at position 1083 of SEQ ID NO: 585089
uucucagacuuauuaguau

SEQ ID NO: 612345 - RNA, 19 nt, Artificial Sequence
  Description of Artificial Sequence: Synthetic oligonucleotide
  Antisense strand to SEQ ID NO: 612344
auacuaauaagucugagaa

SEQ ID NO: 612346 - RNA, 19 nt, Artificial Sequence
  Description of Artificial Sequence: Synthetic oligonucleotide
  Sense strand starting at position 1086 of SEQ ID NO: 585089
ucagacuuauuaguauguu

SEQ ID NO: 612347 - RNA, 19 nt, Artificial Sequence
  Description of Artificial Sequence: Synthetic oligonucleotide
  Antisense strand to SEQ ID NO: 612346
aacauacuaauaagucuga

SEQ ID NO: 612348 - RNA, 19 nt, Artificial Sequence
  Description of Artificial Sequence: Synthetic oligonucleotide
  Sense strand starting at position 1089 of SEQ ID NO: 585089
gacuuauuaguauguugac

SEQ ID NO: 612349 - RNA, 19 nt, Artificial Sequence
  Description of Artificial Sequence: Synthetic oligonucleotide
  Antisense strand to SEQ ID NO: 612348
gucaacauacuaauaaguc

SEQ ID NO: 612350 - RNA, 19 nt, Artificial Sequence
  Description of Artificial Sequence: Synthetic oligonucleotide
  Sense strand starting at position 1099 of SEQ ID NO: 585089
uauguugaccuuuggcaga

SEQ ID NO: 612351 - RNA, 19 nt, Artificial Sequence
  Description of Artificial Sequence: Synthetic oligonucleotide
  Antisense strand to SEQ ID NO: 612350
ucugccaaaggucaacaua

SEQ ID NO: 612352 - RNA, 19 nt, Artificial Sequence
  Description of Artificial Sequence: Synthetic oligonucleotide
  Sense strand starting at position 1101 of SEQ ID NO: 585089
uguugaccuuuggcagauu

SEQ ID NO: 612353 - RNA, 19 nt, Artificial Sequence
  Description of Artificial Sequence: Synthetic oligonucleotide
  Antisense strand to SEQ ID NO: 612352
aaucugccaaaggucaaca

SEQ ID NO: 612354 - RNA, 19 nt, Artificial Sequence
  Description of Artificial Sequence: Synthetic oligonucleotide
  Sense strand starting at position 1158 of SEQ ID NO: 585089
agaacuauuucucggaauu

SEQ ID NO: 612355 - RNA, 19 nt, Artificial Sequence
  Description of Artificial Sequence: Synthetic oligonucleotide
  Antisense strand to SEQ ID NO: 612354
aauuccgagaaauaguucu

SEQ ID NO: 612356 - RNA, 19 nt, Artificial Sequence
  Description of Artificial Sequence: Synthetic oligonucleotide
  Sense strand starting at position 1189 of SEQ ID NO: 585089
ucuuaacaaucuugggaua

SEQ ID NO: 612357 - RNA, 19 nt, Artificial Sequence
  Description of Artificial Sequence: Synthetic oligonucleotide
  Antisense strand to SEQ ID NO: 612356
uaucccaagauuguuaaga

SEQ ID NO: 612358 - RNA, 19 nt, Artificial Sequence
  Description of Artificial Sequence: Synthetic oligonucleotide
  Sense strand starting at position 1191 of SEQ ID NO: 585089
uuaacaaucuugggauaca

SEQ ID NO: 612359 - RNA, 19 nt, Artificial Sequence
  Description of Artificial Sequence: Synthetic oligonucleotide
  Antisense strand to SEQ ID NO: 612358
uguaucccaagauuguuaa

SEQ ID NO: 612360 - RNA, 19 nt, Artificial Sequence
  Description of Artificial Sequence: Synthetic oligonucleotide
  Sense strand starting at position 1501 of SEQ ID NO: 585089
cggagaaauucucaaaucu

SEQ ID NO: 612361 - RNA, 19 nt, Artificial Sequence
  Description of Artificial Sequence: Synthetic oligonucleotide
  Antisense strand to SEQ ID NO: 612360
agauuugagaauuucuccg

SEQ ID NO: 612362 - RNA, 19 nt, Artificial Sequence
  Description of Artificial Sequence: Synthetic oligonucleotide
  Sense strand starting at position 1922 of SEQ ID NO: 585089
cgguaggucucgccgaaga

SEQ ID NO: 612363 - RNA, 19 nt, Artificial Sequence
  Description of Artificial Sequence: Synthetic oligonucleotide
  Antisense strand to SEQ ID NO: 612362
ucuucggcgagaccuaccg

SEQ ID NO: 612364 - RNA, 19 nt, Artificial Sequence
  Description of Artificial Sequence: Synthetic oligonucleotide
  Sense strand starting at position 1924 of SEQ ID NO: 585089
guaggucucgccgaagacu

SEQ ID NO: 612365 - RNA, 19 nt, Artificial Sequence
  Description of Artificial Sequence: Synthetic oligonucleotide
  Antisense strand to SEQ ID NO: 612364
agucuucggcgagaccuac

SEQ ID NO: 612366 - RNA, 19 nt, Artificial Sequence
  Description of Artificial Sequence: Synthetic oligonucleotide
  Sense strand starting at position 2276 of SEQ ID NO: 585089
gggucaucucagggagacu

SEQ ID NO: 612367 - RNA, 19 nt, Artificial Sequence
  Description of Artificial Sequence: Synthetic oligonucleotide
  Antisense strand to SEQ ID NO: 612366
agucucccugagaugaccc

SEQ ID NO: 612368 - RNA, 19 nt, Artificial Sequence
  Description of Artificial Sequence: Synthetic oligonucleotide
  Sense strand starting at position 2287 of SEQ ID NO: 585089
gggagacugugggaugaua

SEQ ID NO: 612369 - RNA, 19 nt, Artificial Sequence
  Description of Artificial Sequence: Synthetic oligonucleotide
  Antisense strand to SEQ ID NO: 612368
uaucaucccacagucuccc

SEQ ID NO: 612370 - RNA, 19 nt, Artificial Sequence
  Description of Artificial Sequence: Synthetic oligonucleotide
  Sense strand starting at position 2289 of SEQ ID NO: 585089
gagacugugggaugauagu

SEQ ID NO: 612371 - RNA, 19 nt, Artificial Sequence
  Description of Artificial Sequence: Synthetic oligonucleotide
  Antisense strand to SEQ ID NO: 612370
acuaucaucccacagucuc

SEQ ID NO: 612372 - RNA, 19 nt, Artificial Sequence
  Description of Artificial Sequence: Synthetic oligonucleotide
  Sense strand starting at position 2978 of SEQ ID NO: 585089
ggaauugauagccaauguu

SEQ ID NO: 612373 - RNA, 19 nt, Artificial Sequence
  Description of Artificial Sequence: Synthetic oligonucleotide
  Antisense strand to SEQ ID NO: 612372
aacauuggcuaucaauucc

SEQ ID NO: 612374 - RNA, 19 nt, Artificial Sequence
  Description of Artificial Sequence: Synthetic oligonucleotide
  Sense strand starting at position 3026 of SEQ ID NO: 585089
gacaauugaguuuggcaua

SEQ ID NO: 612375 - RNA, 19 nt, Artificial Sequence
  Description of Artificial Sequence: Synthetic oligonucleotide
  Antisense strand to SEQ ID NO: 612374
uaugccaaacucaauuguc

SEQ ID NO: 612376 - RNA, 19 nt, Artificial Sequence
  Description of Artificial Sequence: Synthetic oligonucleotide
  Sense strand starting at position 3031 of SEQ ID NO: 585089
uugaguuuggcauaugcca

SEQ ID NO: 612377 - RNA, 19 nt, Artificial Sequence
  Description of Artificial Sequence: Synthetic oligonucleotide
  Antisense strand to SEQ ID NO: 612376
uggcauaugccaaacucaa

SEQ ID NO: 612378 - RNA, 19 nt, Artificial Sequence
  Description of Artificial Sequence: Synthetic oligonucleotide
  Sense strand starting at position 3095 of SEQ ID NO: 585089
agcuacaucucgucagagu

SEQ ID NO: 612379 - RNA, 19 nt, Artificial Sequence
  Description of Artificial Sequence: Synthetic oligonucleotide
  Antisense strand to SEQ ID NO: 612378
acucugacgagauguagcu

SEQ ID NO: 612380 - RNA, 19 nt, Artificial Sequence
  Description of Artificial Sequence: Synthetic oligonucleotide
  Sense strand starting at position 3096 of SEQ ID NO: 585089
gcuacaucucgucagagug

SEQ ID NO: 612381 - RNA, 19 nt, Artificial Sequence
  Description of Artificial Sequence: Synthetic oligonucleotide
  Antisense strand to SEQ ID NO: 612380
cacucugacgagauguagc

SEQ ID NO: 612382 - RNA, 19 nt, Artificial Sequence
  Description of Artificial Sequence: Synthetic oligonucleotide
  Sense strand starting at position 3106 of SEQ ID NO: 585089
gucagaguggacugugaaa

SEQ ID NO: 612383 - RNA, 19 nt, Artificial Sequence
  Description of Artificial Sequence: Synthetic oligonucleotide
  Antisense strand to SEQ ID NO: 612382
uuucacaguccacucugac

SEQ ID NO: 612384 - RNA, 19 nt, Artificial Sequence
  Description of Artificial Sequence: Synthetic oligonucleotide
  Sense strand starting at position 3262 of SEQ ID NO: 585089
aaacuaauguugcauggga

SEQ ID NO: 612385 - RNA, 19 nt, Artificial Sequence
  Description of Artificial Sequence: Synthetic oligonucleotide
  Antisense strand to SEQ ID NO: 612384
ucccaugcaacauuaguuu

SEQ ID NO: 612386 - RNA, 19 nt, Artificial Sequence
  Description of Artificial Sequence: Synthetic oligonucleotide
  Sense strand starting at position 3264 of SEQ ID NO: 585089
acuaauguugcaugggaua

SEQ ID NO: 612387 - RNA, 19 nt, Artificial Sequence
  Description of Artificial Sequence: Synthetic oligonucleotide
  Antisense strand to SEQ ID NO: 612386
uaucccaugcaacauuagu

SEQ ID NO: 612388 - RNA, 19 nt, Artificial Sequence
  Description of Artificial Sequence: Synthetic oligonucleotide
  Sense strand starting at position 3933 of SEQ ID NO: 585089
augucuagcccagggauua

SEQ ID NO: 612389 - RNA, 19 nt, Artificial Sequence
  Description of Artificial Sequence: Synthetic oligonucleotide
  Antisense strand to SEQ ID NO: 612388
uaaucccugggcuagacau

SEQ ID NO: 612390 - RNA, 19 nt, Artificial Sequence
  Description of Artificial Sequence: Synthetic oligonucleotide
  Sense strand starting at position 3934 of SEQ ID NO: 585089
ugucuagcccagggauuau

SEQ ID NO: 612391 - RNA, 19 nt, Artificial Sequence
  Description of Artificial Sequence: Synthetic oligonucleotide
  Antisense strand to SEQ ID NO: 612390
auaaucccugggcuagaca

SEQ ID NO: 612392 - RNA, 19 nt, Artificial Sequence
  Description of Artificial Sequence: Synthetic oligonucleotide
  Sense strand starting at position 136 of SEQ ID NO: 585090
cauauuccaggagguguau

SEQ ID NO: 612393 - RNA, 19 nt, Artificial Sequence
  Description of Artificial Sequence: Synthetic oligonucleotide
  Antisense strand to SEQ ID NO: 612392
auacaccuccuggaauaug

SEQ ID NO: 612394 - RNA, 19 nt, Artificial Sequence
  Description of Artificial Sequence: Synthetic oligonucleotide
  Sense strand starting at position 147 of SEQ ID NO: 585090
agguguauuucgcuccaac

SEQ ID NO: 612395 - RNA, 19 nt, Artificial Sequence
  Description of Artificial Sequence: Synthetic oligonucleotide
  Antisense strand to SEQ ID NO: 612394
guuggagcgaaauacaccu

SEQ ID NO: 612396 - RNA, 19 nt, Artificial Sequence
  Description of Artificial Sequence: Synthetic oligonucleotide
  Sense strand starting at position 257 of SEQ ID NO: 585090
gguucucuuagguaucaga

SEQ ID NO: 612397 - RNA, 19 nt, Artificial Sequence
  Description of Artificial Sequence: Synthetic oligonucleotide
  Antisense strand to SEQ ID NO: 612396
ucugauaccuaagagaacc

SEQ ID NO: 612398 - RNA, 19 nt, Artificial Sequence
  Description of Artificial Sequence: Synthetic oligonucleotide
  Sense strand starting at position 277 of SEQ ID NO: 585090
uuuggaagugucuguaaug

SEQ ID NO: 612399 - RNA, 19 nt, Artificial Sequence
  Description of Artificial Sequence: Synthetic oligonucleotide
  Antisense strand to SEQ ID NO: 612398
cauuacagacacuuccaaa

SEQ ID NO: 612400 - RNA, 19 nt, Artificial Sequence
  Description of Artificial Sequence: Synthetic oligonucleotide
  Sense strand starting at position 278 of SEQ ID NO: 585090
uuggaagugucuguaauga

SEQ ID NO: 612401 - RNA, 19 nt, Artificial Sequence
  Description of Artificial Sequence: Synthetic oligonucleotide
  Antisense strand to SEQ ID NO: 612400
ucauuacagacacuuccaa

SEQ ID NO: 612402 - RNA, 19 nt, Artificial Sequence
  Description of Artificial Sequence: Synthetic oligonucleotide
  Sense strand starting at position 351 of SEQ ID NO: 585090
ccuguuaccuccucacaga

SEQ ID NO: 612403 - RNA, 19 nt, Artificial Sequence
  Description of Artificial Sequence: Synthetic oligonucleotide
  Antisense strand to SEQ ID NO: 612402
ucugugaggagguaacagg

SEQ ID NO: 612404 - RNA, 19 nt, Artificial Sequence
  Description of Artificial Sequence: Synthetic oligonucleotide
  Sense strand starting at position 352 of SEQ ID NO: 585090
cuguuaccuccucacagau

SEQ ID NO: 612405 - RNA, 19 nt, Artificial Sequence
  Description of Artificial Sequence: Synthetic oligonucleotide
  Antisense strand to SEQ ID NO: 612404
aucugugaggagguaacag

SEQ ID NO: 612406 - RNA, 19 nt, Artificial Sequence
  Description of Artificial Sequence: Synthetic oligonucleotide
  Sense strand starting at position 510 of SEQ ID NO: 585090
cugcccucagguuaagauu

SEQ ID NO: 612407 - RNA, 19 nt, Artificial Sequence
  Description of Artificial Sequence: Synthetic oligonucleotide
  Antisense strand to SEQ ID NO: 612406
aaucuuaaccugagggcag

SEQ ID NO: 612408 - RNA, 19 nt, Artificial Sequence
  Description of Artificial Sequence: Synthetic oligonucleotide
  Sense strand starting at position 634 of SEQ ID NO: 585090
ggcgcaaauccguugucuu

SEQ ID NO: 612409 - RNA, 19 nt, Artificial Sequence
  Description of Artificial Sequence: Synthetic oligonucleotide
  Antisense strand to SEQ ID NO: 612408
aagacaacggauuugcgcc

SEQ ID NO: 612410 - RNA, 19 nt, Artificial Sequence
  Description of Artificial Sequence: Synthetic oligonucleotide
  Sense strand starting at position 789 of SEQ ID NO: 585090
cgcuccgagcuguucagaa

SEQ ID NO: 612411 - RNA, 19 nt, Artificial Sequence
  Description of Artificial Sequence: Synthetic oligonucleotide
  Antisense strand to SEQ ID NO: 612410
uucugaacagcucggagcg

SEQ ID NO: 612412 - RNA, 19 nt, Artificial Sequence
  Description of Artificial Sequence: Synthetic oligonucleotide
  Sense strand starting at position 850 of SEQ ID NO: 585090
cgaaaguucggguugcugu

SEQ ID NO: 612413 - RNA, 19 nt, Artificial Sequence
  Description of Artificial Sequence: Synthetic oligonucleotide
  Antisense strand to SEQ ID NO: 612412
acagcaacccgaacuuucg

SEQ ID NO: 612414 - RNA, 19 nt, Artificial Sequence
  Description of Artificial Sequence: Synthetic oligonucleotide
  Sense strand starting at position 1011 of SEQ ID NO: 585090
ggucccuuccuuuggagaa

SEQ ID NO: 612415 - RNA, 19 nt, Artificial Sequence
  Description of Artificial Sequence: Synthetic oligonucleotide
  Antisense strand to SEQ ID NO: 612414
uucuccaaaggaagggacc

SEQ ID NO: 612416 - RNA, 19 nt, Artificial Sequence
  Description of Artificial Sequence: Synthetic oligonucleotide
  Sense strand starting at position 1015 of SEQ ID NO: 585090
ccuuccuuuggagaaguua

SEQ ID NO: 612417 - RNA, 19 nt, Artificial Sequence
  Description of Artificial Sequence: Synthetic oligonucleotide
  Antisense strand to SEQ ID NO: 612416
uaacuucuccaaaggaagg

SEQ ID NO: 612418 - RNA, 19 nt, Artificial Sequence
  Description of Artificial Sequence: Synthetic oligonucleotide
  Sense strand starting at position 1161 of SEQ ID NO: 585090
ugggaucgccgcaguugaa

SEQ ID NO: 612419 - RNA, 19 nt, Artificial Sequence
  Description of Artificial Sequence: Synthetic oligonucleotide
  Antisense strand to SEQ ID NO: 612418
uucaacugcggcgauccca

SEQ ID NO: 612420 - RNA, 19 nt, Artificial Sequence
  Description of Artificial Sequence: Synthetic oligonucleotide
  Sense strand starting at position 1324 of SEQ ID NO: 585090
aguaauacacgucauaaga

SEQ ID NO: 612421 - RNA, 19 nt, Artificial Sequence
  Description of Artificial Sequence: Synthetic oligonucleotide
  Antisense strand to SEQ ID NO: 612420
ucuuaugacguguauuacu

SEQ ID NO: 612422 - RNA, 19 nt, Artificial Sequence
  Description of Artificial Sequence: Synthetic oligonucleotide
  Sense strand starting at position 2579 of SEQ ID NO: 585090
cccggaauugccuggaacu

SEQ ID NO: 612423 - RNA, 19 nt, Artificial Sequence
  Description of Artificial Sequence: Synthetic oligonucleotide
  Antisense strand to SEQ ID NO: 612422
aguuccaggcaauuccggg

SEQ ID NO: 612424 - RNA, 19 nt, Artificial Sequence
  Description of Artificial Sequence: Synthetic oligonucleotide
  Sense strand starting at position 2696 of SEQ ID NO: 585090
uugcaacaacgugaaauaa

SEQ ID NO: 612425 - RNA, 19 nt, Artificial Sequence
  Description of Artificial Sequence: Synthetic oligonucleotide
  Antisense strand to SEQ ID NO: 612424
uuauuucacguuguugcaa

SEQ ID NO: 612426 - RNA, 19 nt, Artificial Sequence
  Description of Artificial Sequence: Synthetic oligonucleotide
  Sense strand starting at position 2771 of SEQ ID NO: 585090
cguggagauauauguuaug

SEQ ID NO: 612427 - RNA, 19 nt, Artificial Sequence
  Description of Artificial Sequence: Synthetic oligonucleotide
  Antisense strand to SEQ ID NO: 612426
cauaacauauaucuccacg

SEQ ID NO: 612428 - RNA, 19 nt, Artificial Sequence
  Description of Artificial Sequence: Synthetic oligonucleotide
  Sense strand starting at position 2918 of SEQ ID NO: 585090
cggcgucagagcuucucua

SEQ ID NO: 612429 - RNA, 19 nt, Artificial Sequence
  Description of Artificial Sequence: Synthetic oligonucleotide
  Antisense strand to SEQ ID NO: 612428
uagagaagcucugacgccg

SEQ ID NO: 612430 - RNA, 19 nt, Artificial Sequence
  Description of Artificial Sequence: Synthetic oligonucleotide
  Sense strand starting at position 2925 of SEQ ID NO: 585090
agagcuucucuaggcacau

SEQ ID NO: 612431 - RNA, 19 nt, Artificial Sequence
  Description of Artificial Sequence: Synthetic oligonucleotide
  Antisense strand to SEQ ID NO: 612430
augugccuagagaagcucu

SEQ ID NO: 612432 - RNA, 19 nt, Artificial Sequence
  Description of Artificial Sequence: Synthetic oligonucleotide
  Sense strand starting at position 2934 of SEQ ID NO: 585090
cuaggcacauugcugaaau

SEQ ID NO: 612433 - RNA, 19 nt, Artificial Sequence
  Description of Artificial Sequence: Synthetic oligonucleotide
  Antisense strand to SEQ ID NO: 612432
auuucagcaaugugccuag

SEQ ID NO: 612434 - RNA, 19 nt, Artificial Sequence
  Description of Artificial Sequence: Synthetic oligonucleotide
  Sense strand starting at position 2936 of SEQ ID NO: 585090
aggcacauugcugaaauga

SEQ ID NO: 612435 - RNA, 19 nt, Artificial Sequence
  Description of Artificial Sequence: Synthetic oligonucleotide
  Antisense strand to SEQ ID NO: 612434
ucauuucagcaaugugccu

SEQ ID NO: 612436 - RNA, 19 nt, Artificial Sequence
  Description of Artificial Sequence: Synthetic oligonucleotide
  Sense strand starting at position 3173 of SEQ ID NO: 585090
uugauaaaucacugagugu

SEQ ID NO: 612437 - RNA, 19 nt, Artificial Sequence
  Description of Artificial Sequence: Synthetic oligonucleotide
  Antisense strand to SEQ ID NO: 612436
acacucagugauuuaucaa

SEQ ID NO: 612438 - RNA, 19 nt, Artificial Sequence
  Description of Artificial Sequence: Synthetic oligonucleotide
  Sense strand starting at position 3176 of SEQ ID NO: 585090
auaaaucacugagugucaa

SEQ ID NO: 612439 - RNA, 19 nt, Artificial Sequence
  Description of Artificial Sequence: Synthetic oligonucleotide
  Antisense strand to SEQ ID NO: 612438
uugacacucagugauuuau

SEQ ID NO: 612440 - RNA, 19 nt, Artificial Sequence
  Description of Artificial Sequence: Synthetic oligonucleotide
  Sense strand starting at position 3184 of SEQ ID NO: 585090
cugagugucaaucauugua

SEQ ID NO: 612441 - RNA, 19 nt, Artificial Sequence
  Description of Artificial Sequence: Synthetic oligonucleotide
  Antisense strand to SEQ ID NO: 612440
uacaaugauugacacucag

SEQ ID NO: 612442 - RNA, 19 nt, Artificial Sequence
  Description of Artificial Sequence: Synthetic oligonucleotide
  Sense strand starting at position 3207 of SEQ ID NO: 585090
ucacuuaugguacaugagu

SEQ ID NO: 612443 - RNA, 19 nt, Artificial Sequence
  Description of Artificial Sequence: Synthetic oligonucleotide
  Antisense strand to SEQ ID NO: 612442
acucauguaccauaaguga

SEQ ID NO: 612444 - RNA, 19 nt, Artificial Sequence
  Description of Artificial Sequence: Synthetic oligonucleotide
  Sense strand starting at position 3249 of SEQ ID NO: 585090
uacgguggucauuauuaag

SEQ ID NO: 612445 - RNA, 19 nt, Artificial Sequence
  Description of Artificial Sequence: Synthetic oligonucleotide
  Antisense strand to SEQ ID NO: 612444
cuuaauaaugaccaccgua

SEQ ID NO: 612446 - RNA, 19 nt, Artificial Sequence
  Description of Artificial Sequence: Synthetic oligonucleotide
  Sense strand starting at position 3258 of SEQ ID NO: 585090
cauuauuaagccgguauaa

SEQ ID NO: 612447 - RNA, 19 nt, Artificial Sequence
  Description of Artificial Sequence: Synthetic oligonucleotide
  Antisense strand to SEQ ID NO: 612446
uuauaccggcuuaauaaug

SEQ ID NO: 612448 - RNA, 19 nt, Artificial Sequence
  Description of Artificial Sequence: Synthetic oligonucleotide
  Sense strand starting at position 3299 of SEQ ID NO: 585090
aagaaucaugagugacuuu

SEQ ID NO: 612449 - RNA, 19 nt, Artificial Sequence
  Description of Artificial Sequence: Synthetic oligonucleotide
  Antisense strand to SEQ ID NO: 612448
aaagucacucaugauucuu

SEQ ID NO: 612450 - RNA, 19 nt, Artificial Sequence
  Description of Artificial Sequence: Synthetic oligonucleotide
  Sense strand starting at position 3323 of SEQ ID NO: 585090
agacaaauccaguggucuc

SEQ ID NO: 612451 - RNA, 19 nt, Artificial Sequence
  Description of Artificial Sequence: Synthetic oligonucleotide
  Antisense strand to SEQ ID NO: 612450
gagaccacuggauuugucu

SEQ ID NO: 612452 - RNA, 19 nt, Artificial Sequence
  Description of Artificial Sequence: Synthetic oligonucleotide
  Sense strand starting at position 3330 of SEQ ID NO: 585090
uccaguggucucuaaucac

SEQ ID NO: 612453 - RNA, 19 nt, Artificial Sequence
  Description of Artificial Sequence: Synthetic oligonucleotide
  Antisense strand to SEQ ID NO: 612452
gugauuagagaccacugga

SEQ ID NO: 612454 - RNA, 19 nt, Artificial Sequence
  Description of Artificial Sequence: Synthetic oligonucleotide
  Sense strand starting at position 3333 of SEQ ID NO: 585090
aguggucucuaaucacaaa

SEQ ID NO: 612455 - RNA, 19 nt, Artificial Sequence
  Description of Artificial Sequence: Synthetic oligonucleotide
  Antisense strand to SEQ ID NO: 612454
uuugugauuagagaccacu

SEQ ID NO: 612456 - RNA, 19 nt, Artificial Sequence
  Description of Artificial Sequence: Synthetic oligonucleotide
  Sense strand starting at position 3381 of SEQ ID NO: 585090
uuagguguggucuaagaga

SEQ ID NO: 612457 - RNA, 19 nt, Artificial Sequence
  Description of Artificial Sequence: Synthetic oligonucleotide
  Antisense strand to SEQ ID NO: 612456
ucucuuagaccacaccuaa

SEQ ID NO: 612458 - RNA, 19 nt, Artificial Sequence
  Description of Artificial Sequence: Synthetic oligonucleotide
  Sense strand starting at position 3402 of SEQ ID NO: 585090
acagauuaauccguagaaa

SEQ ID NO: 612459 - RNA, 19 nt, Artificial Sequence
  Description of Artificial Sequence: Synthetic oligonucleotide
  Antisense strand to SEQ ID NO: 612458
uuucuacggauuaaucugu

SEQ ID NO: 612460 - RNA, 19 nt, Artificial Sequence
  Description of Artificial Sequence: Synthetic oligonucleotide
  Sense strand starting at position 3506 of SEQ ID NO: 585090
acuuuagguuggucuuaug

SEQ ID NO: 612461 - RNA, 19 nt, Artificial Sequence
  Description of Artificial Sequence: Synthetic oligonucleotide
  Antisense strand to SEQ ID NO: 612460
cauaagaccaaccuaaagu

SEQ ID NO: 612462 - RNA, 19 nt, Artificial Sequence
  Description of Artificial Sequence: Synthetic oligonucleotide
  Sense strand starting at position 3513 of SEQ ID NO: 585090
guuggucuuaugcaacuga

SEQ ID NO: 612463 - RNA, 19 nt, Artificial Sequence
  Description of Artificial Sequence: Synthetic oligonucleotide
  Antisense strand to SEQ ID NO: 612462
ucaguugcauaagaccaac

SEQ ID NO: 612464 - RNA, 19 nt, Artificial Sequence
  Description of Artificial Sequence: Synthetic oligonucleotide
  Sense strand starting at position 3529 of SEQ ID NO: 585090
ugauaugagcacugucuaa

SEQ ID NO: 612465 - RNA, 19 nt, Artificial Sequence
  Description of Artificial Sequence: Synthetic oligonucleotide
  Antisense strand to SEQ ID NO: 612464
uuagacagugcucauauca

SEQ ID NO: 612466 - RNA, 19 nt, Artificial Sequence
  Description of Artificial Sequence: Synthetic oligonucleotide
  Sense strand starting at position 3735 of SEQ ID NO: 585090
ggcauugccaggcauaaug

SEQ ID NO: 612467 - RNA, 19 nt, Artificial Sequence
  Description of Artificial Sequence: Synthetic oligonucleotide
  Antisense strand to SEQ ID NO: 612466
cauuaugccuggcaaugcc

SEQ ID NO: 612468 - RNA, 19 nt, Artificial Sequence
  Description of Artificial Sequence: Synthetic oligonucleotide
  Sense strand starting at position 3762 of SEQ ID NO: 585090
ucugguucucaagguagaa

SEQ ID NO: 612469 - RNA, 19 nt, Artificial Sequence
  Description of Artificial Sequence: Synthetic oligonucleotide
  Antisense strand to SEQ ID NO: 612468
uucuaccuugagaaccaga

SEQ ID NO: 612470 - RNA, 19 nt, Artificial Sequence
  Description of Artificial Sequence: Synthetic oligonucleotide
  Sense strand starting at position 3962 of SEQ ID NO: 585090
uuuagaagcuugcuaauaa

SEQ ID NO: 612471 - RNA, 19 nt, Artificial Sequence
  Description of Artificial Sequence: Synthetic oligonucleotide
  Antisense strand to SEQ ID NO: 612470
uuauuagcaagcuucuaaa

SEQ ID NO: 612472 - RNA, 19 nt, Artificial Sequence
  Description of Artificial Sequence: Synthetic oligonucleotide
  Sense strand starting at position 5 of SEQ ID NO: 585091
agguguauuucgcuccaac

SEQ ID NO: 612473 - RNA, 19 nt, Artificial Sequence
  Description of Artificial Sequence: Synthetic oligonucleotide
  Antisense strand to SEQ ID NO: 612472
guuggagcgaaauacaccu

SEQ ID NO: 612474 - RNA, 19 nt, Artificial Sequence
  Description of Artificial Sequence: Synthetic oligonucleotide
  Sense strand starting at position 115 of SEQ ID NO: 585091
gguucucuuagguaucaga

SEQ ID NO: 612475 - RNA, 19 nt, Artificial Sequence
  Description of Artificial Sequence: Synthetic oligonucleotide
  Antisense strand to SEQ ID NO: 612474
ucugauaccuaagagaacc

SEQ ID NO: 612476 - RNA, 19 nt, Artificial Sequence
  Description of Artificial Sequence: Synthetic oligonucleotide
  Sense strand starting at position 135 of SEQ ID NO: 585091
uuuggaagugucuguaaug

SEQ ID NO: 612477 - RNA, 19 nt, Artificial Sequence
  Description of Artificial Sequence: Synthetic oligonucleotide
  Antisense strand to SEQ ID NO: 612476
cauuacagacacuuccaaa

SEQ ID NO: 612478 - RNA, 19 nt, Artificial Sequence
  Description of Artificial Sequence: Synthetic oligonucleotide
  Sense strand starting at position 136 of SEQ ID NO: 585091
uuggaagugucuguaauga

SEQ ID NO: 612479 - RNA, 19 nt, Artificial Sequence
  Description of Artificial Sequence: Synthetic oligonucleotide
  Antisense strand to SEQ ID NO: 612478
ucauuacagacacuuccaa

SEQ ID NO: 612480 - RNA, 19 nt, Artificial Sequence
  Description of Artificial Sequence: Synthetic oligonucleotide
  Sense strand starting at position 209 of SEQ ID NO: 585091
ccuguuaccuccucacaga

SEQ ID NO: 612481 - RNA, 19 nt, Artificial Sequence
  Description of Artificial Sequence: Synthetic oligonucleotide
  Antisense strand to SEQ ID NO: 612480
ucugugaggagguaacagg

SEQ ID NO: 612482 - RNA, 19 nt, Artificial Sequence
  Description of Artificial Sequence: Synthetic oligonucleotide
  Sense strand starting at position 210 of SEQ ID NO: 585091
cuguuaccuccucacagau

SEQ ID NO: 612483 - RNA, 19 nt, Artificial Sequence
  Description of Artificial Sequence: Synthetic oligonucleotide
  Antisense strand to SEQ ID NO: 612482
aucugugaggagguaacag

SEQ ID NO: 612484 - RNA, 19 nt, Artificial Sequence
  Description of Artificial Sequence: Synthetic oligonucleotide
  Sense strand starting at position 368 of SEQ ID NO: 585091
cugcccucagguuaagauu

SEQ ID NO: 612485 - RNA, 19 nt, Artificial Sequence
  Description of Artificial Sequence: Synthetic oligonucleotide
  Antisense strand to SEQ ID NO: 612484
aaucuuaaccugagggcag

SEQ ID NO: 612486 - RNA, 19 nt, Artificial Sequence
  Description of Artificial Sequence: Synthetic oligonucleotide
  Sense strand starting at position 492 of SEQ ID NO: 585091
ggcgcaaauccguugucuu

SEQ ID NO: 612487 - RNA, 19 nt, Artificial Sequence
  Description of Artificial Sequence: Synthetic oligonucleotide
  Antisense strand to SEQ ID NO: 612486
aagacaacggauuugcgcc

SEQ ID NO: 612488 - RNA, 19 nt, Artificial Sequence
  Description of Artificial Sequence: Synthetic oligonucleotide
  Sense strand starting at position 647 of SEQ ID NO: 585091
cgcuccgagcuguucagaa

SEQ ID NO: 612489 - RNA, 19 nt, Artificial Sequence
  Description of Artificial Sequence: Synthetic oligonucleotide
  Antisense strand to SEQ ID NO: 612488
uucugaacagcucggagcg

SEQ ID NO: 612490 - RNA, 19 nt, Artificial Sequence
  Description of Artificial Sequence: Synthetic oligonucleotide
  Sense strand starting at position 708 of SEQ ID NO: 585091
cgaaaguucggguugcugu

SEQ ID NO: 612491 - RNA, 19 nt, Artificial Sequence
  Description of Artificial Sequence: Synthetic oligonucleotide
  Antisense strand to SEQ ID NO: 612490
acagcaacccgaacuuucg

SEQ ID NO: 612492 - RNA, 19 nt, Artificial Sequence
  Description of Artificial Sequence: Synthetic oligonucleotide
  Sense strand starting at position 869 of SEQ ID NO: 585091
ggucccuuccuuuggagaa

SEQ ID NO: 612493 - RNA, 19 nt, Artificial Sequence
  Description of Artificial Sequence: Synthetic oligonucleotide
  Antisense strand to SEQ ID NO: 612492
uucuccaaaggaagggacc

SEQ ID NO: 612494 - RNA, 19 nt, Artificial Sequence
  Description of Artificial Sequence: Synthetic oligonucleotide
  Sense strand starting at position 873 of SEQ ID NO: 585091
ccuuccuuuggagaaguua

SEQ ID NO: 612495 - RNA, 19 nt, Artificial Sequence
  Description of Artificial Sequence: Synthetic oligonucleotide
  Antisense strand to SEQ ID NO: 612494
uaacuucuccaaaggaagg

SEQ ID NO: 612496 - RNA, 19 nt, Artificial Sequence
  Description of Artificial Sequence: Synthetic oligonucleotide
  Sense strand starting at position 1019 of SEQ ID NO: 585091
ugggaucgccgcaguugaa

SEQ ID NO: 612497 - RNA, 19 nt, Artificial Sequence
  Description of Artificial Sequence: Synthetic oligonucleotide
  Antisense strand to SEQ ID NO: 612496
uucaacugcggcgauccca

SEQ ID NO: 612498 - RNA, 19 nt, Artificial Sequence
  Description of Artificial Sequence: Synthetic oligonucleotide
  Sense strand starting at position 1182 of SEQ ID NO: 585091
aguaauacacgucauaaga

SEQ ID NO: 612499 - RNA, 19 nt, Artificial Sequence
  Description of Artificial Sequence: Synthetic oligonucleotide
  Antisense strand to SEQ ID NO: 612498
ucuuaugacguguauuacu

SEQ ID NO: 612500 - RNA, 19 nt, Artificial Sequence
  Description of Artificial Sequence: Synthetic oligonucleotide
  Sense strand starting at position 2437 of SEQ ID NO: 585091
cccggaauugccuggaacu

SEQ ID NO: 612501 - RNA, 19 nt, Artificial Sequence
  Description of Artificial Sequence: Synthetic oligonucleotide
  Antisense strand to SEQ ID NO: 612500
aguuccaggcaauuccggg

SEQ ID NO: 612502 - RNA, 19 nt, Artificial Sequence
  Description of Artificial Sequence: Synthetic oligonucleotide
  Sense strand starting at position 2554 of SEQ ID NO: 585091
uugcaacaacgugaaauaa

SEQ ID NO: 612503 - RNA, 19 nt, Artificial Sequence
  Description of Artificial Sequence: Synthetic oligonucleotide
  Antisense strand to SEQ ID NO: 612502
uuauuucacguuguugcaa

SEQ ID NO: 612504 - RNA, 19 nt, Artificial Sequence
  Description of Artificial Sequence: Synthetic oligonucleotide
  Sense strand starting at position 2629 of SEQ ID NO: 585091
cguggagauauauguuaug

SEQ ID NO: 612505 - RNA, 19 nt, Artificial Sequence
  Description of Artificial Sequence: Synthetic oligonucleotide
  Antisense strand to SEQ ID NO: 612504
cauaacauauaucuccacg

SEQ ID NO: 612506 - RNA, 19 nt, Artificial Sequence
  Description of Artificial Sequence: Synthetic oligonucleotide
  Sense strand starting at position 2776 of SEQ ID NO: 585091
cggcgucagagcuucucua

SEQ ID NO: 612507 - RNA, 19 nt, Artificial Sequence
  Description of Artificial Sequence: Synthetic oligonucleotide
  Antisense strand to SEQ ID NO: 612506
uagagaagcucugacgccg

SEQ ID NO: 612508 - RNA, 19 nt, Artificial Sequence
  Description of Artificial Sequence: Synthetic oligonucleotide
  Sense strand starting at position 2783 of SEQ ID NO: 585091
agagcuucucuaggcacau

SEQ ID NO: 612509 - RNA, 19 nt, Artificial Sequence
  Description of Artificial Sequence: Synthetic oligonucleotide
  Antisense strand to SEQ ID NO: 612508
augugccuagagaagcucu

SEQ ID NO: 612510 - RNA, 19 nt, Artificial Sequence
  Description of Artificial Sequence: Synthetic oligonucleotide
  Sense strand starting at position 2792 of SEQ ID NO: 585091
cuaggcacauugcugaaau

SEQ ID NO: 612511 - RNA, 19 nt, Artificial Sequence
  Description of Artificial Sequence: Synthetic oligonucleotide
  Antisense strand to SEQ ID NO: 612510
auuucagcaaugugccuag

SEQ ID NO: 612512 - RNA, 19 nt, Artificial Sequence
  Description of Artificial Sequence: Synthetic oligonucleotide
  Sense strand starting at position 2794 of SEQ ID NO: 585091
aggcacauugcugaaauga

SEQ ID NO: 612513 - RNA, 19 nt, Artificial Sequence
  Description of Artificial Sequence: Synthetic oligonucleotide
  Antisense strand to SEQ ID NO: 612512
ucauuucagcaaugugccu

SEQ ID NO: 612514 - RNA, 19 nt, Artificial Sequence
  Description of Artificial Sequence: Synthetic oligonucleotide
  Sense strand starting at position 3031 of SEQ ID NO: 585091
uugauaaaucacugagugu

SEQ ID NO: 612515 - RNA, 19 nt, Artificial Sequence
  Description of Artificial Sequence: Synthetic oligonucleotide
  Antisense strand to SEQ ID NO: 612514
acacucagugauuuaucaa

SEQ ID NO: 612516 - RNA, 19 nt, Artificial Sequence
  Description of Artificial Sequence: Synthetic oligonucleotide
  Sense strand starting at position 3034 of SEQ ID NO: 585091
auaaaucacugagugucaa

SEQ ID NO: 612517 - RNA, 19 nt, Artificial Sequence
  Description of Artificial Sequence: Synthetic oligonucleotide
  Antisense strand to SEQ ID NO: 612516
uugacacucagugauuuau

SEQ ID NO: 612518 - RNA, 19 nt, Artificial Sequence
  Description of Artificial Sequence: Synthetic oligonucleotide
  Sense strand starting at position 3042 of SEQ ID NO: 585091
cugagugucaaucauugua

SEQ ID NO: 612519 - RNA, 19 nt, Artificial Sequence
  Description of Artificial Sequence: Synthetic oligonucleotide
  Antisense strand to SEQ ID NO: 612518
uacaaugauugacacucag

SEQ ID NO: 612520 - RNA, 19 nt, Artificial Sequence
  Description of Artificial Sequence: Synthetic oligonucleotide
  Sense strand starting at position 3065 of SEQ ID NO: 585091
ucacuuaugguacaugagu

SEQ ID NO: 612521 - RNA, 19 nt, Artificial Sequence
  Description of Artificial Sequence: Synthetic oligonucleotide
  Antisense strand to SEQ ID NO: 612520
acucauguaccauaaguga

SEQ ID NO: 612522 - RNA, 19 nt, Artificial Sequence
  Description of Artificial Sequence: Synthetic oligonucleotide
  Sense strand starting at position 3107 of SEQ ID NO: 585091
uacgguggucauuauuaag

SEQ ID NO: 612523 - RNA, 19 nt, Artificial Sequence
  Description of Artificial Sequence: Synthetic oligonucleotide
  Antisense strand to SEQ ID NO: 612522
cuuaauaaugaccaccgua

SEQ ID NO: 612524 - RNA, 19 nt, Artificial Sequence
  Description of Artificial Sequence: Synthetic oligonucleotide
  Sense strand starting at position 3116 of SEQ ID NO: 585091
cauuauuaagccgguauaa

SEQ ID NO: 612525 - RNA, 19 nt, Artificial Sequence
  Description of Artificial Sequence: Synthetic oligonucleotide
  Antisense strand to SEQ ID NO: 612524
uuauaccggcuuaauaaug

SEQ ID NO: 612526 - RNA, 19 nt, Artificial Sequence
  Description of Artificial Sequence: Synthetic oligonucleotide
  Sense strand starting at position 3157 of SEQ ID NO: 585091
aagaaucaugagugacuuu

SEQ ID NO: 612527 - RNA, 19 nt, Artificial Sequence
  Description of Artificial Sequence: Synthetic oligonucleotide
  Antisense strand to SEQ ID NO: 612526
aaagucacucaugauucuu

SEQ ID NO: 612528 - RNA, 19 nt, Artificial Sequence
  Description of Artificial Sequence: Synthetic oligonucleotide
  Sense strand starting at position 3181 of SEQ ID NO: 585091
agacaaauccaguggucuc

SEQ ID NO: 612529 - RNA, 19 nt, Artificial Sequence
  Description of Artificial Sequence: Synthetic oligonucleotide
  Antisense strand to SEQ ID NO: 612528
gagaccacuggauuugucu

SEQ ID NO: 612530 - RNA, 19 nt, Artificial Sequence
  Description of Artificial Sequence: Synthetic oligonucleotide
  Sense strand starting at position 3188 of SEQ ID NO: 585091
uccaguggucucuaaucac

SEQ ID NO: 612531 - RNA, 19 nt, Artificial Sequence
  Description of Artificial Sequence: Synthetic oligonucleotide
  Antisense strand to SEQ ID NO: 612530
gugauuagagaccacugga

SEQ ID NO: 612532 - RNA, 19 nt, Artificial Sequence
  Description of Artificial Sequence: Synthetic oligonucleotide
  Sense strand starting at position 3191 of SEQ ID NO: 585091
aguggucucuaaucacaaa

SEQ ID NO: 612533 - RNA, 19 nt, Artificial Sequence
  Description of Artificial Sequence: Synthetic oligonucleotide
  Antisense strand to SEQ ID NO: 612532
uuugugauuagagaccacu

SEQ ID NO: 612534 - RNA, 19 nt, Artificial Sequence
  Description of Artificial Sequence: Synthetic oligonucleotide
  Sense strand starting at position 3239 of SEQ ID NO: 585091
uuagguguggucuaagaga

SEQ ID NO: 612535 - RNA, 19 nt, Artificial Sequence
  Description of Artificial Sequence: Synthetic oligonucleotide
  Antisense strand to SEQ ID NO: 612534
ucucuuagaccacaccuaa

SEQ ID NO: 612536 - RNA, 19 nt, Artificial Sequence
  Description of Artificial Sequence: Synthetic oligonucleotide
  Sense strand starting at position 3260 of SEQ ID NO: 585091
acagauuaauccguagaaa

SEQ ID NO: 612537 - RNA, 19 nt, Artificial Sequence
  Description of Artificial Sequence: Synthetic oligonucleotide
  Antisense strand to SEQ ID NO: 612536
uuucuacggauuaaucugu

SEQ ID NO: 612538 - RNA, 19 nt, Artificial Sequence
  Description of Artificial Sequence: Synthetic oligonucleotide
  Sense strand starting at position 3364 of SEQ ID NO: 585091
acuuuagguuggucuuaug

SEQ ID NO: 612539 - RNA, 19 nt, Artificial Sequence
  Description of Artificial Sequence: Synthetic oligonucleotide
  Antisense strand to SEQ ID NO: 612538
cauaagaccaaccuaaagu

SEQ ID NO: 612540 - RNA, 19 nt, Artificial Sequence
  Description of Artificial Sequence: Synthetic oligonucleotide
  Sense strand starting at position 3371 of SEQ ID NO: 585091
guuggucuuaugcaacuga

SEQ ID NO: 612541 - RNA, 19 nt, Artificial Sequence
  Description of Artificial Sequence: Synthetic oligonucleotide
  Antisense strand to SEQ ID NO: 612540
ucaguugcauaagaccaac

SEQ ID NO: 612542 - RNA, 19 nt, Artificial Sequence
  Description of Artificial Sequence: Synthetic oligonucleotide
  Sense strand starting at position 3387 of SEQ ID NO: 585091
ugauaugagcacugucuaa

SEQ ID NO: 612543 - RNA, 19 nt, Artificial Sequence
  Description of Artificial Sequence: Synthetic oligonucleotide
  Antisense strand to SEQ ID NO: 612542
uuagacagugcucauauca

SEQ ID NO: 612544 - RNA, 19 nt, Artificial Sequence
  Description of Artificial Sequence: Synthetic oligonucleotide
  Sense strand starting at position 3593 of SEQ ID NO: 585091
ggcauugccaggcauaaug

SEQ ID NO: 612545 - RNA, 19 nt, Artificial Sequence
  Description of Artificial Sequence: Synthetic oligonucleotide
  Antisense strand to SEQ ID NO: 612544
cauuaugccuggcaaugcc

SEQ ID NO: 612546 - RNA, 19 nt, Artificial Sequence
  Description of Artificial Sequence: Synthetic oligonucleotide
  Sense strand starting at position 3620 of SEQ ID NO: 585091
ucugguucucaagguagaa

SEQ ID NO: 612547 - RNA, 19 nt, Artificial Sequence
  Description of Artificial Sequence: Synthetic oligonucleotide
  Antisense strand to SEQ ID NO: 612546
uucuaccuugagaaccaga

SEQ ID NO: 612548 - RNA, 19 nt, Artificial Sequence
  Description of Artificial Sequence: Synthetic oligonucleotide
  Sense strand starting at position 3820 of SEQ ID NO: 585091
uuuagaagcuugcuaauaa

SEQ ID NO: 612549 - RNA, 19 nt, Artificial Sequence
  Description of Artificial Sequence: Synthetic oligonucleotide
  Antisense strand to SEQ ID NO: 612548
uuauuagcaagcuucuaaa

SEQ ID NO: 612550 - RNA, 19 nt, Artificial Sequence
  Description of Artificial Sequence: Synthetic oligonucleotide
  Sense strand starting at position 3879 of SEQ ID NO: 585091
acucuuagucacugugaug

SEQ ID NO: 612551 - RNA, 19 nt, Artificial Sequence
  Description of Artificial Sequence: Synthetic oligonucleotide
  Antisense strand to SEQ ID NO: 612550
caucacagugacuaagagu

SEQ ID NO: 612552 - RNA, 19 nt, Artificial Sequence
  Description of Artificial Sequence: Synthetic oligonucleotide
  Sense strand starting at position 33 of SEQ ID NO: 585092
ggagcuuggccagagucaa

SEQ ID NO: 612553 - RNA, 19 nt, Artificial Sequence
  Description of Artificial Sequence: Synthetic oligonucleotide
  Antisense strand to SEQ ID NO: 612552
uugacucuggccaagcucc

SEQ ID NO: 612554 - RNA, 19 nt, Artificial Sequence
  Description of Artificial Sequence: Synthetic oligonucleotide
  Sense strand starting at position 49 of SEQ ID NO: 585092
caaagaaucugggcugcau

SEQ ID NO: 612555 - RNA, 19 nt, Artificial Sequence
  Description of Artificial Sequence: Synthetic oligonucleotide
  Antisense strand to SEQ ID NO: 612554
augcagcccagauucuuug

SEQ ID NO: 612556 - RNA, 19 nt, Artificial Sequence
  Description of Artificial Sequence: Synthetic oligonucleotide
  Sense strand starting at position 285 of SEQ ID NO: 585092
uuuguugaaugccuccaaa

SEQ ID NO: 612557 - RNA, 19 nt, Artificial Sequence
  Description of Artificial Sequence: Synthetic oligonucleotide
  Antisense strand to SEQ ID NO: 612556
uuuggaggcauucaacaaa

SEQ ID NO: 612558 - RNA, 19 nt, Artificial Sequence
  Description of Artificial Sequence: Synthetic oligonucleotide
  Sense strand starting at position 288 of SEQ ID NO: 585092
guugaaugccuccaaauca

SEQ ID NO: 612559 - RNA, 19 nt, Artificial Sequence
  Description of Artificial Sequence: Synthetic oligonucleotide
  Antisense strand to SEQ ID NO: 612558
ugauuuggaggcauucaac

SEQ ID NO: 612560 - RNA, 19 nt, Artificial Sequence
  Description of Artificial Sequence: Synthetic oligonucleotide
  Sense strand starting at position 300 of SEQ ID NO: 585092
caaaucaaggcuugguauu

SEQ ID NO: 612561 - RNA, 19 nt, Artificial Sequence
  Description of Artificial Sequence: Synthetic oligonucleotide
  Antisense strand to SEQ ID NO: 612560
aauaccaagccuugauuug

SEQ ID NO: 612562 - RNA, 19 nt, Artificial Sequence
  Description of Artificial Sequence: Synthetic oligonucleotide
  Sense strand starting at position 301 of SEQ ID NO: 585092
aaaucaaggcuugguauua

SEQ ID NO: 612563 - RNA, 19 nt, Artificial Sequence
  Description of Artificial Sequence: Synthetic oligonucleotide
  Antisense strand to SEQ ID NO: 612562
uaauaccaagccuugauuu

SEQ ID NO: 612564 - RNA, 19 nt, Artificial Sequence
  Description of Artificial Sequence: Synthetic oligonucleotide
  Sense strand starting at position 371 of SEQ ID NO: 585092
acaaguuauucucuaguug

SEQ ID NO: 612565 - RNA, 19 nt, Artificial Sequence
  Description of Artificial Sequence: Synthetic oligonucleotide
  Antisense strand to SEQ ID NO: 612564
caacuagagaauaacuugu

SEQ ID NO: 612566 - RNA, 19 nt, Artificial Sequence
  Description of Artificial Sequence: Synthetic oligonucleotide
  Sense strand starting at position 423 of SEQ ID NO: 585092
gucauuuauuuauggcaac

SEQ ID NO: 612567 - RNA, 19 nt, Artificial Sequence
  Description of Artificial Sequence: Synthetic oligonucleotide
  Antisense strand to SEQ ID NO: 612566
guugccauaaauaaaugac

SEQ ID NO: 612568 - RNA, 19 nt, Artificial Sequence
  Description of Artificial Sequence: Synthetic oligonucleotide
  Sense strand starting at position 482 of SEQ ID NO: 585092
cuugaauauugaguauagu

SEQ ID NO: 612569 - RNA, 19 nt, Artificial Sequence
  Description of Artificial Sequence: Synthetic oligonucleotide
  Antisense strand to SEQ ID NO: 612568
acuauacucaauauucaag

SEQ ID NO: 612570 - RNA, 19 nt, Artificial Sequence
  Description of Artificial Sequence: Synthetic oligonucleotide
  Sense strand starting at position 483 of SEQ ID NO: 585092
uugaauauugaguauaguc

SEQ ID NO: 612571 - RNA, 19 nt, Artificial Sequence
  Description of Artificial Sequence: Synthetic oligonucleotide
  Antisense strand to SEQ ID NO: 612570
gacuauacucaauauucaa

SEQ ID NO: 612572 - RNA, 19 nt, Artificial Sequence
  Description of Artificial Sequence: Synthetic oligonucleotide
  Sense strand starting at position 488 of SEQ ID NO: 585092
uauugaguauagucaggau

SEQ ID NO: 612573 - RNA, 19 nt, Artificial Sequence
  Description of Artificial Sequence: Synthetic oligonucleotide
  Antisense strand to SEQ ID NO: 612572
auccugacuauacucaaua

SEQ ID NO: 612574 - RNA, 19 nt, Artificial Sequence
  Description of Artificial Sequence: Synthetic oligonucleotide
  Sense strand starting at position 1213 of SEQ ID NO: 585092
aaauaauaagacugguagu

SEQ ID NO: 612575 - RNA, 19 nt, Artificial Sequence
  Description of Artificial Sequence: Synthetic oligonucleotide
  Antisense strand to SEQ ID NO: 612574
acuaccagucuuauuauuu

SEQ ID NO: 612576 - RNA, 19 nt, Artificial Sequence
  Description of Artificial Sequence: Synthetic oligonucleotide
  Sense strand starting at position 1247 of SEQ ID NO: 585092
gaguguuggaccugugaaa

SEQ ID NO: 612577 - RNA, 19 nt, Artificial Sequence
  Description of Artificial Sequence: Synthetic oligonucleotide
  Antisense strand to SEQ ID NO: 612576
uuucacagguccaacacuc

SEQ ID NO: 612578 - RNA, 19 nt, Artificial Sequence
  Description of Artificial Sequence: Synthetic oligonucleotide
  Sense strand starting at position 1260 of SEQ ID NO: 585092
gugaaacaccuuuacguuu

SEQ ID NO: 612579 - RNA, 19 nt, Artificial Sequence
  Description of Artificial Sequence: Synthetic oligonucleotide
  Antisense strand to SEQ ID NO: 612578
aaacguaaagguguuucac

SEQ ID NO: 612580 - RNA, 19 nt, Artificial Sequence
  Description of Artificial Sequence: Synthetic oligonucleotide
  Sense strand starting at position 1451 of SEQ ID NO: 585092
uaguaugaguaucucuaga

SEQ ID NO: 612581 - RNA, 19 nt, Artificial Sequence
  Description of Artificial Sequence: Synthetic oligonucleotide
  Antisense strand to SEQ ID NO: 612580
ucuagagauacucauacua

SEQ ID NO: 612582 - RNA, 19 nt, Artificial Sequence
  Description of Artificial Sequence: Synthetic oligonucleotide
  Sense strand starting at position 1453 of SEQ ID NO: 585092
guaugaguaucucuagauu

SEQ ID NO: 612583 - RNA, 19 nt, Artificial Sequence
  Description of Artificial Sequence: Synthetic oligonucleotide
  Antisense strand to SEQ ID NO: 612582
aaucuagagauacucauac

SEQ ID NO: 612584 - RNA, 19 nt, Artificial Sequence
  Description of Artificial Sequence: Synthetic oligonucleotide
  Sense strand starting at position 1675 of SEQ ID NO: 585092
uuguauauccaaggaauau

SEQ ID NO: 612585 - RNA, 19 nt, Artificial Sequence
  Description of Artificial Sequence: Synthetic oligonucleotide
  Antisense strand to SEQ ID NO: 612584
auauuccuuggauauacaa

SEQ ID NO: 612586 - RNA, 19 nt, Artificial Sequence
  Description of Artificial Sequence: Synthetic oligonucleotide
  Sense strand starting at position 1820 of SEQ ID NO: 585092
auuagagaucuuuguaguu

SEQ ID NO: 612587 - RNA, 19 nt, Artificial Sequence
  Description of Artificial Sequence: Synthetic oligonucleotide
  Antisense strand to SEQ ID NO: 612586
aacuacaaagaucucuaau

SEQ ID NO: 612588 - RNA, 19 nt, Artificial Sequence
  Description of Artificial Sequence: Synthetic oligonucleotide
  Sense strand starting at position 1944 of SEQ ID NO: 585092
gaggcuucugauuacgguu

SEQ ID NO: 612589 - RNA, 19 nt, Artificial Sequence
  Description of Artificial Sequence: Synthetic oligonucleotide
  Antisense strand to SEQ ID NO: 612588
aaccguaaucagaagccuc

SEQ ID NO: 612590 - RNA, 19 nt, Artificial Sequence
  Description of Artificial Sequence: Synthetic oligonucleotide
  Sense strand starting at position 1956 of SEQ ID NO: 585092
uacgguuaaugucuggaca

SEQ ID NO: 612591 - RNA, 19 nt, Artificial Sequence
  Description of Artificial Sequence: Synthetic oligonucleotide
  Antisense strand to SEQ ID NO: 612590
uguccagacauuaaccgua

SEQ ID NO: 612592 - RNA, 19 nt, Artificial Sequence
  Description of Artificial Sequence: Synthetic oligonucleotide
  Sense strand starting at position 1957 of SEQ ID NO: 585092
acgguuaaugucuggacau

SEQ ID NO: 612593 - RNA, 19 nt, Artificial Sequence
  Description of Artificial Sequence: Synthetic oligonucleotide
  Antisense strand to SEQ ID NO: 612592
auguccagacauuaaccgu

SEQ ID NO: 612594 - RNA, 19 nt, Artificial Sequence
  Description of Artificial Sequence: Synthetic oligonucleotide
  Sense strand starting at position 1981 of SEQ ID NO: 585092
gcguguaucacuuuguuuc

SEQ ID NO: 612595 - RNA, 19 nt, Artificial Sequence
  Description of Artificial Sequence: Synthetic oligonucleotide
  Antisense strand to SEQ ID NO: 612594
gaaacaaagugauacacgc

SEQ ID NO: 612596 - RNA, 19 nt, Artificial Sequence
  Description of Artificial Sequence: Synthetic oligonucleotide
  Sense strand starting at position 1988 of SEQ ID NO: 585092
ucacuuuguuucucagaag

SEQ ID NO: 612597 - RNA, 19 nt, Artificial Sequence
  Description of Artificial Sequence: Synthetic oligonucleotide
  Antisense strand to SEQ ID NO: 612596
cuucugagaaacaaaguga

SEQ ID NO: 612598 - RNA, 19 nt, Artificial Sequence
  Description of Artificial Sequence: Synthetic oligonucleotide
  Sense strand starting at position 2081 of SEQ ID NO: 585092
aagguaaagucauuaaagc

SEQ ID NO: 612599 - RNA, 19 nt, Artificial Sequence
  Description of Artificial Sequence: Synthetic oligonucleotide
  Antisense strand to SEQ ID NO: 612598
gcuuuaaugacuuuaccuu

SEQ ID NO: 612600 - RNA, 19 nt, Artificial Sequence
  Description of Artificial Sequence: Synthetic oligonucleotide
  Sense strand starting at position 2178 of SEQ ID NO: 585092
uguguaaauccauaagcaa

SEQ ID NO: 612601 - RNA, 19 nt, Artificial Sequence
  Description of Artificial Sequence: Synthetic oligonucleotide
  Antisense strand to SEQ ID NO: 612600
uugcuuauggauuuacaca

SEQ ID NO: 612602 - RNA, 19 nt, Artificial Sequence
  Description of Artificial Sequence: Synthetic oligonucleotide
  Sense strand starting at position 2392 of SEQ ID NO: 585092
gcugaagguuuaguaacaa

SEQ ID NO: 612603 - RNA, 19 nt, Artificial Sequence
  Description of Artificial Sequence: Synthetic oligonucleotide
  Antisense strand to SEQ ID NO: 612602
uuguuacuaaaccuucagc

SEQ ID NO: 612604 - RNA, 19 nt, Artificial Sequence
  Description of Artificial Sequence: Synthetic oligonucleotide
  Sense strand starting at position 2416 of SEQ ID NO: 585092
gaugguguuguauagcaaa

SEQ ID NO: 612605 - RNA, 19 nt, Artificial Sequence
  Description of Artificial Sequence: Synthetic oligonucleotide
  Antisense strand to SEQ ID NO: 612604
uuugcuauacaacaccauc

SEQ ID NO: 612606 - RNA, 19 nt, Artificial Sequence
  Description of Artificial Sequence: Synthetic oligonucleotide
  Sense strand starting at position 2432 of SEQ ID NO: 585092
aaaggcugucagcauaaga

SEQ ID NO: 612607 - RNA, 19 nt, Artificial Sequence
  Description of Artificial Sequence: Synthetic oligonucleotide
  Antisense strand to SEQ ID NO: 612606
ucuuaugcugacagccuuu

SEQ ID NO: 612608 - RNA, 19 nt, Artificial Sequence
  Description of Artificial Sequence: Synthetic oligonucleotide
  Sense strand starting at position 2467 of SEQ ID NO: 585092
ugcugaugcgaagaacgau

SEQ ID NO: 612609 - RNA, 19 nt, Artificial Sequence
  Description of Artificial Sequence: Synthetic oligonucleotide
  Antisense strand to SEQ ID NO: 612608
aucguucuucgcaucagca

SEQ ID NO: 612610 - RNA, 19 nt, Artificial Sequence
  Description of Artificial Sequence: Synthetic oligonucleotide
  Sense strand starting at position 2490 of SEQ ID NO: 585092
guauguuacuuauugauuc

SEQ ID NO: 612611 - RNA, 19 nt, Artificial Sequence
  Description of Artificial Sequence: Synthetic oligonucleotide
  Antisense strand to SEQ ID NO: 612610
gaaucaauaaguaacauac

SEQ ID NO: 612612 - RNA, 19 nt, Artificial Sequence
  Description of Artificial Sequence: Synthetic oligonucleotide
  Sense strand starting at position 2494 of SEQ ID NO: 585092
guuacuuauugauucuaug

SEQ ID NO: 612613 - RNA, 19 nt, Artificial Sequence
  Description of Artificial Sequence: Synthetic oligonucleotide
  Antisense strand to SEQ ID NO: 612612
cauagaaucaauaaguaac

SEQ ID NO: 612614 - RNA, 19 nt, Artificial Sequence
  Description of Artificial Sequence: Synthetic oligonucleotide
  Sense strand starting at position 2558 of SEQ ID NO: 585092
gaagaauuaugggacuaua

SEQ ID NO: 612615 - RNA, 19 nt, Artificial Sequence
  Description of Artificial Sequence: Synthetic oligonucleotide
  Antisense strand to SEQ ID NO: 612614
uauagucccauaauucuuc

SEQ ID NO: 612616 - RNA, 19 nt, Artificial Sequence
  Description of Artificial Sequence: Synthetic oligonucleotide
  Sense strand starting at position 2566 of SEQ ID NO: 585092
augggacuauaauaaagaa

SEQ ID NO: 612617 - RNA, 19 nt, Artificial Sequence
  Description of Artificial Sequence: Synthetic oligonucleotide
  Antisense strand to SEQ ID NO: 612616
uucuuuauuauagucccau

SEQ ID NO: 612618 - RNA, 19 nt, Artificial Sequence
  Description of Artificial Sequence: Synthetic oligonucleotide
  Sense strand starting at position 2630 of SEQ ID NO: 585092
ucaccucuaucugugagau

SEQ ID NO: 612619 - RNA, 19 nt, Artificial Sequence
  Description of Artificial Sequence: Synthetic oligonucleotide
  Antisense strand to SEQ ID NO: 612618
aucucacagauagagguga

SEQ ID NO: 612620 - RNA, 19 nt, Artificial Sequence
  Description of Artificial Sequence: Synthetic oligonucleotide
  Sense strand starting at position 2661 of SEQ ID NO: 585092
aguuacugagugcauuaga

SEQ ID NO: 612621 - RNA, 19 nt, Artificial Sequence
  Description of Artificial Sequence: Synthetic oligonucleotide
  Antisense strand to SEQ ID NO: 612620
ucuaaugcacucaguaacu

SEQ ID NO: 612622 - RNA, 19 nt, Artificial Sequence
  Description of Artificial Sequence: Synthetic oligonucleotide
  Sense strand starting at position 2664 of SEQ ID NO: 585092
uacugagugcauuagaauu

SEQ ID NO: 612623 - RNA, 19 nt, Artificial Sequence
  Description of Artificial Sequence: Synthetic oligonucleotide
  Antisense strand to SEQ ID NO: 612622
aauucuaaugcacucagua

SEQ ID NO: 612624 - RNA, 19 nt, Artificial Sequence
  Description of Artificial Sequence: Synthetic oligonucleotide
  Sense strand starting at position 2729 of SEQ ID NO: 585092
guuggacacuggcuuuaau

SEQ ID NO: 612625 - RNA, 19 nt, Artificial Sequence
  Description of Artificial Sequence: Synthetic oligonucleotide
  Antisense strand to SEQ ID NO: 612624
auuaaagccaguguccaac

SEQ ID NO: 612626 - RNA, 19 nt, Artificial Sequence
  Description of Artificial Sequence: Synthetic oligonucleotide
  Sense strand starting at position 2732 of SEQ ID NO: 585092
ggacacuggcuuuaauacu

SEQ ID NO: 612627 - RNA, 19 nt, Artificial Sequence
  Description of Artificial Sequence: Synthetic oligonucleotide
  Antisense strand to SEQ ID NO: 612626
aguauuaaagccagugucc

SEQ ID NO: 612628 - RNA, 19 nt, Artificial Sequence
  Description of Artificial Sequence: Synthetic oligonucleotide
  Sense strand starting at position 2991 of SEQ ID NO: 585092
augaaucaaugugcuacua

SEQ ID NO: 612629 - RNA, 19 nt, Artificial Sequence
  Description of Artificial Sequence: Synthetic oligonucleotide
  Antisense strand to SEQ ID NO: 612628
uaguagcacauugauucau

SEQ ID NO: 612630 - RNA, 19 nt, Artificial Sequence
  Description of Artificial Sequence: Synthetic oligonucleotide
  Sense strand starting at position 3082 of SEQ ID NO: 585092
guggccucccaagacaauu

SEQ ID NO: 612631 - RNA, 19 nt, Artificial Sequence
  Description of Artificial Sequence: Synthetic oligonucleotide
  Antisense strand to SEQ ID NO: 612630
aauugucuugggaggccac

SEQ ID NO: 612632 - RNA, 19 nt, Artificial Sequence
  Description of Artificial Sequence: Synthetic oligonucleotide
  Sense strand starting at position 308 of SEQ ID NO: 585093
gagauaugucuacacugca

SEQ ID NO: 612633 - RNA, 19 nt, Artificial Sequence
  Description of Artificial Sequence: Synthetic oligonucleotide
  Antisense strand to SEQ ID NO: 612632
ugcaguguagacauaucuc

SEQ ID NO: 612634 - RNA, 19 nt, Artificial Sequence
  Description of Artificial Sequence: Synthetic oligonucleotide
  Sense strand starting at position 348 of SEQ ID NO: 585093
auagucaagguauggauua

SEQ ID NO: 612635 - RNA, 19 nt, Artificial Sequence
  Description of Artificial Sequence: Synthetic oligonucleotide
  Antisense strand to SEQ ID NO: 612634
uaauccauaccuugacuau

SEQ ID NO: 612636 - RNA, 19 nt, Artificial Sequence
  Description of Artificial Sequence: Synthetic oligonucleotide
  Sense strand starting at position 476 of SEQ ID NO: 585093
cguggaugaaccuagagua

SEQ ID NO: 612637 - RNA, 19 nt, Artificial Sequence
  Description of Artificial Sequence: Synthetic oligonucleotide
  Antisense strand to SEQ ID NO: 612636
uacucuagguucauccacg

SEQ ID NO: 612638 - RNA, 19 nt, Artificial Sequence
  Description of Artificial Sequence: Synthetic oligonucleotide
  Sense strand starting at position 486 of SEQ ID NO: 585093
ccuagaguacauuauguua

SEQ ID NO: 612639 - RNA, 19 nt, Artificial Sequence
  Description of Artificial Sequence: Synthetic oligonucleotide
  Antisense strand to SEQ ID NO: 612638
uaacauaauguacucuagg

SEQ ID NO: 612640 - RNA, 19 nt, Artificial Sequence
  Description of Artificial Sequence: Synthetic oligonucleotide
  Sense strand starting at position 539 of SEQ ID NO: 585093
gcaugauccuacuuacaug

SEQ ID NO: 612641 - RNA, 19 nt, Artificial Sequence
  Description of Artificial Sequence: Synthetic oligonucleotide
  Antisense strand to SEQ ID NO: 612640
cauguaaguaggaucaugc

SEQ ID NO: 612642 - RNA, 19 nt, Artificial Sequence
  Description of Artificial Sequence: Synthetic oligonucleotide
  Sense strand starting at position 569 of SEQ ID NO: 585093
aaagucaaauucguagaaa

SEQ ID NO: 612643 - RNA, 19 nt, Artificial Sequence
  Description of Artificial Sequence: Synthetic oligonucleotide
  Antisense strand to SEQ ID NO: 612642
uuucuacgaauuugacuuu

SEQ ID NO: 612644 - RNA, 19 nt, Artificial Sequence
  Description of Artificial Sequence: Synthetic oligonucleotide
  Sense strand starting at position 649 of SEQ ID NO: 585093
gaauucuugggaggauguu

SEQ ID NO: 612645 - RNA, 19 nt, Artificial Sequence
  Description of Artificial Sequence: Synthetic oligonucleotide
  Antisense strand to SEQ ID NO: 612644
aacauccucccaagaauuc

SEQ ID NO: 612646 - RNA, 19 nt, Artificial Sequence
  Description of Artificial Sequence: Synthetic oligonucleotide
  Sense strand starting at position 823 of SEQ ID NO: 585093
ugagguaaugcauagguaa

SEQ ID NO: 612647 - RNA, 19 nt, Artificial Sequence
  Description of Artificial Sequence: Synthetic oligonucleotide
  Antisense strand to SEQ ID NO: 612646
uuaccuaugcauuaccuca

SEQ ID NO: 612648 - RNA, 19 nt, Artificial Sequence
  Description of Artificial Sequence: Synthetic oligonucleotide
  Sense strand starting at position 1061 of SEQ ID NO: 585093
ugcauauugacugaggcau

SEQ ID NO: 612649 - RNA, 19 nt, Artificial Sequence
  Description of Artificial Sequence: Synthetic oligonucleotide
  Antisense strand to SEQ ID NO: 612648
augccucagucaauaugca

SEQ ID NO: 612650 - RNA, 19 nt, Artificial Sequence
  Description of Artificial Sequence: Synthetic oligonucleotide
  Sense strand starting at position 1110 of SEQ ID NO: 585093
auucucuuauggucacaca

SEQ ID NO: 612651 - RNA, 19 nt, Artificial Sequence
  Description of Artificial Sequence: Synthetic oligonucleotide
  Antisense strand to SEQ ID NO: 612650
ugugugaccauaagagaau

SEQ ID NO: 612652 - RNA, 19 nt, Artificial Sequence
  Description of Artificial Sequence: Synthetic oligonucleotide
  Sense strand starting at position 1182 of SEQ ID NO: 585093
uccaaagcuguguaagaau

SEQ ID NO: 612653 - RNA, 19 nt, Artificial Sequence
  Description of Artificial Sequence: Synthetic oligonucleotide
  Antisense strand to SEQ ID NO: 612652
auucuuacacagcuuugga

SEQ ID NO: 612654 - RNA, 19 nt, Artificial Sequence
  Description of Artificial Sequence: Synthetic oligonucleotide
  Sense strand starting at position 1246 of SEQ ID NO: 585093
cucugacuggauuaaguuu

SEQ ID NO: 612655 - RNA, 19 nt, Artificial Sequence
  Description of Artificial Sequence: Synthetic oligonucleotide
  Antisense strand to SEQ ID NO: 612654
aaacuuaauccagucagag

SEQ ID NO: 612656 - RNA, 19 nt, Artificial Sequence
  Description of Artificial Sequence: Synthetic oligonucleotide
  Sense strand starting at position 1269 of SEQ ID NO: 585093
caaauauggcagugaccua

SEQ ID NO: 612657 - RNA, 19 nt, Artificial Sequence
  Description of Artificial Sequence: Synthetic oligonucleotide
  Antisense strand to SEQ ID NO: 612656
uaggucacugccauauuug

SEQ ID NO: 612658 - RNA, 19 nt, Artificial Sequence
  Description of Artificial Sequence: Synthetic oligonucleotide
  Sense strand starting at position 1550 of SEQ ID NO: 585093
guaugcugauauuuguaca

SEQ ID NO: 612659 - RNA, 19 nt, Artificial Sequence
  Description of Artificial Sequence: Synthetic oligonucleotide
  Antisense strand to SEQ ID NO: 612658
uguacaaauaucagcauac

SEQ ID NO: 612660 - RNA, 19 nt, Artificial Sequence
  Description of Artificial Sequence: Synthetic oligonucleotide
  Sense strand starting at position 1604 of SEQ ID NO: 585093
auauaucagagacggcaaa

SEQ ID NO: 612661 - RNA, 19 nt, Artificial Sequence
  Description of Artificial Sequence: Synthetic oligonucleotide
  Antisense strand to SEQ ID NO: 612660
uuugccgucucugauauau

SEQ ID NO: 612662 - RNA, 19 nt, Artificial Sequence
  Description of Artificial Sequence: Synthetic oligonucleotide
  Sense strand starting at position 1895 of SEQ ID NO: 585093
guuagaaacccacaguuau

SEQ ID NO: 612663 - RNA, 19 nt, Artificial Sequence
  Description of Artificial Sequence: Synthetic oligonucleotide
  Antisense strand to SEQ ID NO: 612662
auaacuguggguuucuaac

SEQ ID NO: 612664 - RNA, 19 nt, Artificial Sequence
  Description of Artificial Sequence: Synthetic oligonucleotide
  Sense strand starting at position 2026 of SEQ ID NO: 585093
ccuugucuccagggagaua

SEQ ID NO: 612665 - RNA, 19 nt, Artificial Sequence
  Description of Artificial Sequence: Synthetic oligonucleotide
  Antisense strand to SEQ ID NO: 612664
uaucucccuggagacaagg

SEQ ID NO: 612666 - RNA, 19 nt, Artificial Sequence
  Description of Artificial Sequence: Synthetic oligonucleotide
  Sense strand starting at position 2047 of SEQ ID NO: 585093
uugcauugccaggagacaa

SEQ ID NO: 612667 - RNA, 19 nt, Artificial Sequence
  Description of Artificial Sequence: Synthetic oligonucleotide
  Antisense strand to SEQ ID NO: 612666
uugucuccuggcaaugcaa

SEQ ID NO: 612668 - RNA, 19 nt, Artificial Sequence
  Description of Artificial Sequence: Synthetic oligonucleotide
  Sense strand starting at position 2129 of SEQ ID NO: 585093
gaaauuuacucagaaaggu

SEQ ID NO: 612669 - RNA, 19 nt, Artificial Sequence
  Description of Artificial Sequence: Synthetic oligonucleotide
  Antisense strand to SEQ ID NO: 612668
accuuucugaguaaauuuc

SEQ ID NO: 612670 - RNA, 19 nt, Artificial Sequence
  Description of Artificial Sequence: Synthetic oligonucleotide
  Sense strand starting at position 2138 of SEQ ID NO: 585093
ucagaaagguaaguuacau

SEQ ID NO: 612671 - RNA, 19 nt, Artificial Sequence
  Description of Artificial Sequence: Synthetic oligonucleotide
  Antisense strand to SEQ ID NO: 612670
auguaacuuaccuuucuga

SEQ ID NO: 612672 - RNA, 19 nt, Artificial Sequence
  Description of Artificial Sequence: Synthetic oligonucleotide
  Sense strand starting at position 2334 of SEQ ID NO: 585093
auaucuguauccucaggaa

SEQ ID NO: 612673 - RNA, 19 nt, Artificial Sequence
  Description of Artificial Sequence: Synthetic oligonucleotide
  Antisense strand to SEQ ID NO: 612672
uuccugaggauacagauau

SEQ ID NO: 612674 - RNA, 19 nt, Artificial Sequence
  Description of Artificial Sequence: Synthetic oligonucleotide
  Sense strand starting at position 2577 of SEQ ID NO: 585093
aacagaacucauugggucu

SEQ ID NO: 612675 - RNA, 19 nt, Artificial Sequence
  Description of Artificial Sequence: Synthetic oligonucleotide
  Antisense strand to SEQ ID NO: 612674
agacccaaugaguucuguu

SEQ ID NO: 612676 - RNA, 19 nt, Artificial Sequence
  Description of Artificial Sequence: Synthetic oligonucleotide
  Sense strand starting at position 2583 of SEQ ID NO: 585093
acucauugggucuaguaac

SEQ ID NO: 612677 - RNA, 19 nt, Artificial Sequence
  Description of Artificial Sequence: Synthetic oligonucleotide
  Antisense strand to SEQ ID NO: 612676
guuacuagacccaaugagu

SEQ ID NO: 612678 - RNA, 19 nt, Artificial Sequence
  Description of Artificial Sequence: Synthetic oligonucleotide
  Sense strand starting at position 2596 of SEQ ID NO: 585093
aguaacuacuagccugaaa

SEQ ID NO: 612679 - RNA, 19 nt, Artificial Sequence
  Description of Artificial Sequence: Synthetic oligonucleotide
  Antisense strand to SEQ ID NO: 612678
uuucaggcuaguaguuacu

SEQ ID NO: 612680 - RNA, 19 nt, Artificial Sequence
  Description of Artificial Sequence: Synthetic oligonucleotide
  Sense strand starting at position 2616 of SEQ ID NO: 585093
uaggaagauuuguagacaa

SEQ ID NO: 612681 - RNA, 19 nt, Artificial Sequence
  Description of Artificial Sequence: Synthetic oligonucleotide
  Antisense strand to SEQ ID NO: 612680
uugucuacaaaucuuccua

SEQ ID NO: 612682 - RNA, 19 nt, Artificial Sequence
  Description of Artificial Sequence: Synthetic oligonucleotide
  Sense strand starting at position 2763 of SEQ ID NO: 585093
uuguaaguacucuacacau

SEQ ID NO: 612683 - RNA, 19 nt, Artificial Sequence
  Description of Artificial Sequence: Synthetic oligonucleotide
  Antisense strand to SEQ ID NO: 612682
auguguagaguacuuacaa

SEQ ID NO: 612684 - RNA, 19 nt, Artificial Sequence
  Description of Artificial Sequence: Synthetic oligonucleotide
  Sense strand starting at position 2765 of SEQ ID NO: 585093
guaaguacucuacacauug

SEQ ID NO: 612685 - RNA, 19 nt, Artificial Sequence
  Description of Artificial Sequence: Synthetic oligonucleotide
  Antisense strand to SEQ ID NO: 612684
caauguguagaguacuuac

SEQ ID NO: 612686 - RNA, 19 nt, Artificial Sequence
  Description of Artificial Sequence: Synthetic oligonucleotide
  Sense strand starting at position 2823 of SEQ ID NO: 585093
ugugcuguuauuugaaugu

SEQ ID NO: 612687 - RNA, 19 nt, Artificial Sequence
  Description of Artificial Sequence: Synthetic oligonucleotide
  Antisense strand to SEQ ID NO: 612686
acauucaaauaacagcaca

SEQ ID NO: 612688 - RNA, 19 nt, Artificial Sequence
  Description of Artificial Sequence: Synthetic oligonucleotide
  Sense strand starting at position 2832 of SEQ ID NO: 585093
auuugaaugucauagaucu

SEQ ID NO: 612689 - RNA, 19 nt, Artificial Sequence
  Description of Artificial Sequence: Synthetic oligonucleotide
  Antisense strand to SEQ ID NO: 612688
agaucuaugacauucaaau

SEQ ID NO: 612690 - RNA, 19 nt, Artificial Sequence
  Description of Artificial Sequence: Synthetic oligonucleotide
  Sense strand starting at position 2839 of SEQ ID NO: 585093
ugucauagaucuguauaaa

SEQ ID NO: 612691 - RNA, 19 nt, Artificial Sequence
  Description of Artificial Sequence: Synthetic oligonucleotide
  Antisense strand to SEQ ID NO: 612690
uuuauacagaucuaugaca

SEQ ID NO: 612692 - RNA, 19 nt, Artificial Sequence
  Description of Artificial Sequence: Synthetic oligonucleotide
  Sense strand starting at position 3045 of SEQ ID NO: 585093
agggauauuaaaggccauu

SEQ ID NO: 612693 - RNA, 19 nt, Artificial Sequence
  Description of Artificial Sequence: Synthetic oligonucleotide
  Antisense strand to SEQ ID NO: 612692
aauggccuuuaauaucccu

SEQ ID NO: 612694 - RNA, 19 nt, Artificial Sequence
  Description of Artificial Sequence: Synthetic oligonucleotide
  Sense strand starting at position 3236 of SEQ ID NO: 585093
gugaauuucucauaaugga

SEQ ID NO: 612695 - RNA, 19 nt, Artificial Sequence
  Description of Artificial Sequence: Synthetic oligonucleotide
  Antisense strand to SEQ ID NO: 612694
uccauuaugagaaauucac

SEQ ID NO: 612696 - RNA, 19 nt, Artificial Sequence
  Description of Artificial Sequence: Synthetic oligonucleotide
  Sense strand starting at position 3325 of SEQ ID NO: 585093
uguaaauugaugugggacu

SEQ ID NO: 612697 - RNA, 19 nt, Artificial Sequence
  Description of Artificial Sequence: Synthetic oligonucleotide
  Antisense strand to SEQ ID NO: 612696
agucccacaucaauuuaca

SEQ ID NO: 612698 - RNA, 19 nt, Artificial Sequence
  Description of Artificial Sequence: Synthetic oligonucleotide
  Sense strand starting at position 3361 of SEQ ID NO: 585093
ugggucuaaucaguaauau

SEQ ID NO: 612699 - RNA, 19 nt, Artificial Sequence
  Description of Artificial Sequence: Synthetic oligonucleotide
  Antisense strand to SEQ ID NO: 612698
auauuacugauuagaccca

SEQ ID NO: 612700 - RNA, 19 nt, Artificial Sequence
  Description of Artificial Sequence: Synthetic oligonucleotide
  Sense strand starting at position 3362 of SEQ ID NO: 585093
gggucuaaucaguaauauu

SEQ ID NO: 612701 - RNA, 19 nt, Artificial Sequence
  Description of Artificial Sequence: Synthetic oligonucleotide
  Antisense strand to SEQ ID NO: 612700
aauauuacugauuagaccc

SEQ ID NO: 612702 - RNA, 19 nt, Artificial Sequence
  Description of Artificial Sequence: Synthetic oligonucleotide
  Sense strand starting at position 3638 of SEQ ID NO: 585093
ccagaauuauucuuaguag

SEQ ID NO: 612703 - RNA, 19 nt, Artificial Sequence
  Description of Artificial Sequence: Synthetic oligonucleotide
  Antisense strand to SEQ ID NO: 612702
cuacuaagaauaauucugg

SEQ ID NO: 612704 - RNA, 19 nt, Artificial Sequence
  Description of Artificial Sequence: Synthetic oligonucleotide
  Sense strand starting at position 3649 of SEQ ID NO: 585093
cuuaguaggccucaggaau

SEQ ID NO: 612705 - RNA, 19 nt, Artificial Sequence
  Description of Artificial Sequence: Synthetic oligonucleotide
  Antisense strand to SEQ ID NO: 612704
auuccugaggccuacuaag

SEQ ID NO: 612706 - RNA, 19 nt, Artificial Sequence
  Description of Artificial Sequence: Synthetic oligonucleotide
  Sense strand starting at position 3656 of SEQ ID NO: 585093
ggccucaggaauggucaaa

SEQ ID NO: 612707 - RNA, 19 nt, Artificial Sequence
  Description of Artificial Sequence: Synthetic oligonucleotide
  Antisense strand to SEQ ID NO: 612706
uuugaccauuccugaggcc

SEQ ID NO: 612708 - RNA, 19 nt, Artificial Sequence
  Description of Artificial Sequence: Synthetic oligonucleotide
  Sense strand starting at position 3818 of SEQ ID NO: 585093
aucuuaguuccuuagugau

SEQ ID NO: 612709 - RNA, 19 nt, Artificial Sequence
  Description of Artificial Sequence: Synthetic oligonucleotide
  Antisense strand to SEQ ID NO: 612708
aucacuaaggaacuaagau

SEQ ID NO: 612710 - RNA, 19 nt, Artificial Sequence
  Description of Artificial Sequence: Synthetic oligonucleotide
  Sense strand starting at position 3922 of SEQ ID NO: 585093
uuagucccauuaguaaaua

SEQ ID NO: 612711 - RNA, 19 nt, Artificial Sequence
  Description of Artificial Sequence: Synthetic oligonucleotide
  Antisense strand to SEQ ID NO: 612710
uauuuacuaaugggacuaa

SEQ ID NO: 612712 - RNA, 19 nt, Artificial Sequence
  Description of Artificial Sequence: Synthetic oligonucleotide
  Sense strand starting at position 74 of SEQ ID NO: 585094
ggcuaaccuucuguuagag

SEQ ID NO: 612713 - RNA, 19 nt, Artificial Sequence
  Description of Artificial Sequence: Synthetic oligonucleotide
  Antisense strand to SEQ ID NO: 612712
cucuaacagaagguuagcc

SEQ ID NO: 612714 - RNA, 19 nt, Artificial Sequence
  Description of Artificial Sequence: Synthetic oligonucleotide
  Sense strand starting at position 279 of SEQ ID NO: 585094
guguguggucggaagccau

SEQ ID NO: 612715 - RNA, 19 nt, Artificial Sequence
  Description of Artificial Sequence: Synthetic oligonucleotide
  Antisense strand to SEQ ID NO: 612714
auggcuuccgaccacacac

SEQ ID NO: 612716 - RNA, 19 nt, Artificial Sequence
  Description of Artificial Sequence: Synthetic oligonucleotide
  Sense strand starting at position 296 of SEQ ID NO: 585094
aucugagucucccugugau

SEQ ID NO: 612717 - RNA, 19 nt, Artificial Sequence
  Description of Artificial Sequence: Synthetic oligonucleotide
  Antisense strand to SEQ ID NO: 612716
aucacagggagacucagau

SEQ ID NO: 612718 - RNA, 19 nt, Artificial Sequence
  Description of Artificial Sequence: Synthetic oligonucleotide
  Sense strand starting at position 299 of SEQ ID NO: 585094
ugagucucccugugauuug

SEQ ID NO: 612719 - RNA, 19 nt, Artificial Sequence
  Description of Artificial Sequence: Synthetic oligonucleotide
  Antisense strand to SEQ ID NO: 612718
caaaucacagggagacuca

SEQ ID NO: 612720 - RNA, 19 nt, Artificial Sequence
  Description of Artificial Sequence: Synthetic oligonucleotide
  Sense strand starting at position 327 of SEQ ID NO: 585094
agaaacuucuaaguuguau

SEQ ID NO: 612721 - RNA, 19 nt, Artificial Sequence
  Description of Artificial Sequence: Synthetic oligonucleotide
  Antisense strand to SEQ ID NO: 612720
auacaacuuagaaguuucu

SEQ ID NO: 612722 - RNA, 19 nt, Artificial Sequence
  Description of Artificial Sequence: Synthetic oligonucleotide
  Sense strand starting at position 339 of SEQ ID NO: 585094
guuguauuacuauacccuu

SEQ ID NO: 612723 - RNA, 19 nt, Artificial Sequence
  Description of Artificial Sequence: Synthetic oligonucleotide
  Antisense strand to SEQ ID NO: 612722
aaggguauaguaauacaac

SEQ ID NO: 612724 - RNA, 19 nt, Artificial Sequence
  Description of Artificial Sequence: Synthetic oligonucleotide
  Sense strand starting at position 538 of SEQ ID NO: 585094
cgucuucugcgugugagaa

SEQ ID NO: 612725 - RNA, 19 nt, Artificial Sequence
  Description of Artificial Sequence: Synthetic oligonucleotide
  Antisense strand to SEQ ID NO: 612724
uucucacacgcagaagacg

SEQ ID NO: 612726 - RNA, 19 nt, Artificial Sequence
  Description of Artificial Sequence: Synthetic oligonucleotide
  Sense strand starting at position 672 of SEQ ID NO: 585094
ucgguuucuggugaguauc

SEQ ID NO: 612727 - RNA, 19 nt, Artificial Sequence
  Description of Artificial Sequence: Synthetic oligonucleotide
  Antisense strand to SEQ ID NO: 612726
gauacucaccagaaaccga

SEQ ID NO: 612728 - RNA, 19 nt, Artificial Sequence
  Description of Artificial Sequence: Synthetic oligonucleotide
  Sense strand starting at position 678 of SEQ ID NO: 585094
ucuggugaguauccucgau

SEQ ID NO: 612729 - RNA, 19 nt, Artificial Sequence
  Description of Artificial Sequence: Synthetic oligonucleotide
  Antisense strand to SEQ ID NO: 612728
aucgaggauacucaccaga

SEQ ID NO: 612730 - RNA, 19 nt, Artificial Sequence
  Description of Artificial Sequence: Synthetic oligonucleotide
  Sense strand starting at position 822 of SEQ ID NO: 585094
gcgcgcugccgcuuaagaa

SEQ ID NO: 612731 - RNA, 19 nt, Artificial Sequence
  Description of Artificial Sequence: Synthetic oligonucleotide
  Antisense strand to SEQ ID NO: 612730
uucuuaagcggcagcgcgc

SEQ ID NO: 612732 - RNA, 19 nt, Artificial Sequence
  Description of Artificial Sequence: Synthetic oligonucleotide
  Sense strand starting at position 1583 of SEQ ID NO: 585094
ccgucaagccuuugagaaa

SEQ ID NO: 612733 - RNA, 19 nt, Artificial Sequence
  Description of Artificial Sequence: Synthetic oligonucleotide
  Antisense strand to SEQ ID NO: 612732
uuucucaaaggcuugacgg

SEQ ID NO: 612734 - RNA, 19 nt, Artificial Sequence
  Description of Artificial Sequence: Synthetic oligonucleotide
  Sense strand starting at position 2379 of SEQ ID NO: 585094
ugggauuucucugaaauuc

SEQ ID NO: 612735 - RNA, 19 nt, Artificial Sequence
  Description of Artificial Sequence: Synthetic oligonucleotide
  Antisense strand to SEQ ID NO: 612734
gaauuucagagaaauccca

SEQ ID NO: 612736 - RNA, 19 nt, Artificial Sequence
  Description of Artificial Sequence: Synthetic oligonucleotide
  Sense strand starting at position 2389 of SEQ ID NO: 585094
cugaaauucuaggaauuaa

SEQ ID NO: 612737 - RNA, 19 nt, Artificial Sequence
  Description of Artificial Sequence: Synthetic oligonucleotide
  Antisense strand to SEQ ID NO: 612736
uuaauuccuagaauuucag

SEQ ID NO: 612738 - RNA, 19 nt, Artificial Sequence
  Description of Artificial Sequence: Synthetic oligonucleotide
  Sense strand starting at position 2427 of SEQ ID NO: 585094
ugcuaaugguucucaacaa

SEQ ID NO: 612739 - RNA, 19 nt, Artificial Sequence
  Description of Artificial Sequence: Synthetic oligonucleotide
  Antisense strand to SEQ ID NO: 612738
uuguugagaaccauuagca

SEQ ID NO: 612740 - RNA, 19 nt, Artificial Sequence
  Description of Artificial Sequence: Synthetic oligonucleotide
  Sense strand starting at position 2565 of SEQ ID NO: 585094
gaacuugcauaaguggaaa

SEQ ID NO: 612741 - RNA, 19 nt, Artificial Sequence
  Description of Artificial Sequence: Synthetic oligonucleotide
  Antisense strand to SEQ ID NO: 612740
uuuccacuuaugcaaguuc

SEQ ID NO: 612742 - RNA, 19 nt, Artificial Sequence
  Description of Artificial Sequence: Synthetic oligonucleotide
  Sense strand starting at position 2568 of SEQ ID NO: 585094
cuugcauaaguggaaauua

SEQ ID NO: 612743 - RNA, 19 nt, Artificial Sequence
  Description of Artificial Sequence: Synthetic oligonucleotide
  Antisense strand to SEQ ID NO: 612742
uaauuuccacuuaugcaag

SEQ ID NO: 612744 - RNA, 19 nt, Artificial Sequence
  Description of Artificial Sequence: Synthetic oligonucleotide
  Sense strand starting at position 2577 of SEQ ID NO: 585094
guggaaauuagguguugcu

SEQ ID NO: 612745 - RNA, 19 nt, Artificial Sequence
  Description of Artificial Sequence: Synthetic oligonucleotide
  Antisense strand to SEQ ID NO: 612744
agcaacaccuaauuuccac

SEQ ID NO: 612746 - RNA, 19 nt, Artificial Sequence
  Description of Artificial Sequence: Synthetic oligonucleotide
  Sense strand starting at position 2590 of SEQ ID NO: 585094
guugcucagccuuaggauu

SEQ ID NO: 612747 - RNA, 19 nt, Artificial Sequence
  Description of Artificial Sequence: Synthetic oligonucleotide
  Antisense strand to SEQ ID NO: 612746
aauccuaaggcugagcaac

SEQ ID NO: 612748 - RNA, 19 nt, Artificial Sequence
  Description of Artificial Sequence: Synthetic oligonucleotide
  Sense strand starting at position 2630 of SEQ ID NO: 585094
cagcaaucaguguguuaca

SEQ ID NO: 612749 - RNA, 19 nt, Artificial Sequence
  Description of Artificial Sequence: Synthetic oligonucleotide
  Antisense strand to SEQ ID NO: 612748
uguaacacacugauugcug

SEQ ID NO: 612750 - RNA, 19 nt, Artificial Sequence
  Description of Artificial Sequence: Synthetic oligonucleotide
  Sense strand starting at position 2631 of SEQ ID NO: 585094
agcaaucaguguguuacaa

SEQ ID NO: 612751 - RNA, 19 nt, Artificial Sequence
  Description of Artificial Sequence: Synthetic oligonucleotide
  Antisense strand to SEQ ID NO: 612750
uuguaacacacugauugcu

SEQ ID NO: 612752 - RNA, 19 nt, Artificial Sequence
  Description of Artificial Sequence: Synthetic oligonucleotide
  Sense strand starting at position 2661 of SEQ ID NO: 585094
gauugugauguuggcuaaa

SEQ ID NO: 612753 - RNA, 19 nt, Artificial Sequence
  Description of Artificial Sequence: Synthetic oligonucleotide
  Antisense strand to SEQ ID NO: 612752
uuuagccaacaucacaauc

SEQ ID NO: 612754 - RNA, 19 nt, Artificial Sequence
  Description of Artificial Sequence: Synthetic oligonucleotide
  Sense strand starting at position 2664 of SEQ ID NO: 585094
ugugauguuggcuaaaggu

SEQ ID NO: 612755 - RNA, 19 nt, Artificial Sequence
  Description of Artificial Sequence: Synthetic oligonucleotide
  Antisense strand to SEQ ID NO: 612754
accuuuagccaacaucaca

SEQ ID NO: 612756 - RNA, 19 nt, Artificial Sequence
  Description of Artificial Sequence: Synthetic oligonucleotide
  Sense strand starting at position 2687 of SEQ ID NO: 585094
accagagcuucuccugaau

SEQ ID NO: 612757 - RNA, 19 nt, Artificial Sequence
  Description of Artificial Sequence: Synthetic oligonucleotide
  Antisense strand to SEQ ID NO: 612756
auucaggagaagcucuggu

SEQ ID NO: 612758 - RNA, 19 nt, Artificial Sequence
  Description of Artificial Sequence: Synthetic oligonucleotide
  Sense strand starting at position 2751 of SEQ ID NO: 585094
uuuguaaagcggcauaauu

SEQ ID NO: 612759 - RNA, 19 nt, Artificial Sequence
  Description of Artificial Sequence: Synthetic oligonucleotide
  Antisense strand to SEQ ID NO: 612758
aauuaugccgcuuuacaaa

SEQ ID NO: 612760 - RNA, 19 nt, Artificial Sequence
  Description of Artificial Sequence: Synthetic oligonucleotide
  Sense strand starting at position 2753 of SEQ ID NO: 585094
uguaaagcggcauaauuau

SEQ ID NO: 612761 - RNA, 19 nt, Artificial Sequence
  Description of Artificial Sequence: Synthetic oligonucleotide
  Antisense strand to SEQ ID NO: 612760
auaauuaugccgcuuuaca

SEQ ID NO: 612762 - RNA, 19 nt, Artificial Sequence
  Description of Artificial Sequence: Synthetic oligonucleotide
  Sense strand starting at position 2776 of SEQ ID NO: 585094
ccuguaucagaggguucua

SEQ ID NO: 612763 - RNA, 19 nt, Artificial Sequence
  Description of Artificial Sequence: Synthetic oligonucleotide
  Antisense strand to SEQ ID NO: 612762
uagaacccucugauacagg

SEQ ID NO: 612764 - RNA, 19 nt, Artificial Sequence
  Description of Artificial Sequence: Synthetic oligonucleotide
  Sense strand starting at position 2781 of SEQ ID NO: 585094
aucagaggguucuaaugag

SEQ ID NO: 612765 - RNA, 19 nt, Artificial Sequence
  Description of Artificial Sequence: Synthetic oligonucleotide
  Antisense strand to SEQ ID NO: 612764
cucauuagaacccucugau

SEQ ID NO: 612766 - RNA, 19 nt, Artificial Sequence
  Description of Artificial Sequence: Synthetic oligonucleotide
  Sense strand starting at position 2796 of SEQ ID NO: 585094
ugaggauaaugaguuagua

SEQ ID NO: 612767 - RNA, 19 nt, Artificial Sequence
  Description of Artificial Sequence: Synthetic oligonucleotide
  Antisense strand to SEQ ID NO: 612766
uacuaacucauuauccuca

SEQ ID NO: 612768 - RNA, 19 nt, Artificial Sequence
  Description of Artificial Sequence: Synthetic oligonucleotide
  Sense strand starting at position 2800 of SEQ ID NO: 585094
gauaaugaguuaguacaug

SEQ ID NO: 612769 - RNA, 19 nt, Artificial Sequence
  Description of Artificial Sequence: Synthetic oligonucleotide
  Antisense strand to SEQ ID NO: 612768
cauguacuaacucauuauc

SEQ ID NO: 612770 - RNA, 19 nt, Artificial Sequence
  Description of Artificial Sequence: Synthetic oligonucleotide
  Sense strand starting at position 2805 of SEQ ID NO: 585094
ugaguuaguacauguacga

SEQ ID NO: 612771 - RNA, 19 nt, Artificial Sequence
  Description of Artificial Sequence: Synthetic oligonucleotide
  Antisense strand to SEQ ID NO: 612770
ucguacauguacuaacuca

SEQ ID NO: 612772 - RNA, 19 nt, Artificial Sequence
  Description of Artificial Sequence: Synthetic oligonucleotide
  Sense strand starting at position 2885 of SEQ ID NO: 585094
caaugacuuugggcgaagu

SEQ ID NO: 612773 - RNA, 19 nt, Artificial Sequence
  Description of Artificial Sequence: Synthetic oligonucleotide
  Antisense strand to SEQ ID NO: 612772
acuucgcccaaagucauug

SEQ ID NO: 612774 - RNA, 19 nt, Artificial Sequence
  Description of Artificial Sequence: Synthetic oligonucleotide
  Sense strand starting at position 2886 of SEQ ID NO: 585094
aaugacuuugggcgaaguu

SEQ ID NO: 612775 - RNA, 19 nt, Artificial Sequence
  Description of Artificial Sequence: Synthetic oligonucleotide
  Antisense strand to SEQ ID NO: 612774
aacuucgcccaaagucauu

SEQ ID NO: 612776 - RNA, 19 nt, Artificial Sequence
  Description of Artificial Sequence: Synthetic oligonucleotide
  Sense strand starting at position 2971 of SEQ ID NO: 585094
auuaaaugagaucgugcau

SEQ ID NO: 612777 - RNA, 19 nt, Artificial Sequence
  Description of Artificial Sequence: Synthetic oligonucleotide
  Antisense strand to SEQ ID NO: 612776
augcacgaucucauuuaau

SEQ ID NO: 612778 - RNA, 19 nt, Artificial Sequence
  Description of Artificial Sequence: Synthetic oligonucleotide
  Sense strand starting at position 2977 of SEQ ID NO: 585094
ugagaucgugcauguggaa

SEQ ID NO: 612779 - RNA, 19 nt, Artificial Sequence
  Description of Artificial Sequence: Synthetic oligonucleotide
  Antisense strand to SEQ ID NO: 612778
uuccacaugcacgaucuca

SEQ ID NO: 612780 - RNA, 19 nt, Artificial Sequence
  Description of Artificial Sequence: Synthetic oligonucleotide
  Sense strand starting at position 2984 of SEQ ID NO: 585094
gugcauguggaaugcuuaa

SEQ ID NO: 612781 - RNA, 19 nt, Artificial Sequence
  Description of Artificial Sequence: Synthetic oligonucleotide
  Antisense strand to SEQ ID NO: 612780
uuaagcauuccacaugcac

SEQ ID NO: 612782 - RNA, 19 nt, Artificial Sequence
  Description of Artificial Sequence: Synthetic oligonucleotide
  Sense strand starting at position 3019 of SEQ ID NO: 585094
aguaauugaugcuuaaccu

SEQ ID NO: 612783 - RNA, 19 nt, Artificial Sequence
  Description of Artificial Sequence: Synthetic oligonucleotide
  Antisense strand to SEQ ID NO: 612782
agguuaagcaucaauuacu

SEQ ID NO: 612784 - RNA, 19 nt, Artificial Sequence
  Description of Artificial Sequence: Synthetic oligonucleotide
  Sense strand starting at position 3032 of SEQ ID NO: 585094
uaaccugucuuccuaggga

SEQ ID NO: 612785 - RNA, 19 nt, Artificial Sequence
  Description of Artificial Sequence: Synthetic oligonucleotide
  Antisense strand to SEQ ID NO: 612784
ucccuaggaagacagguua

SEQ ID NO: 612786 - RNA, 19 nt, Artificial Sequence
  Description of Artificial Sequence: Synthetic oligonucleotide
  Sense strand starting at position 3170 of SEQ ID NO: 585094
guaaguguauucccucuga

SEQ ID NO: 612787 - RNA, 19 nt, Artificial Sequence
  Description of Artificial Sequence: Synthetic oligonucleotide
  Antisense strand to SEQ ID NO: 612786
ucagagggaauacacuuac

SEQ ID NO: 612788 - RNA, 19 nt, Artificial Sequence
  Description of Artificial Sequence: Synthetic oligonucleotide
  Sense strand starting at position 3174 of SEQ ID NO: 585094
guguauucccucugaaaga

SEQ ID NO: 612789 - RNA, 19 nt, Artificial Sequence
  Description of Artificial Sequence: Synthetic oligonucleotide
  Antisense strand to SEQ ID NO: 612788
ucuuucagagggaauacac

SEQ ID NO: 612790 - RNA, 19 nt, Artificial Sequence
  Description of Artificial Sequence: Synthetic oligonucleotide
  Sense strand starting at position 3903 of SEQ ID NO: 585094
cugauaauguuuccaacug

SEQ ID NO: 612791 - RNA, 19 nt, Artificial Sequence
  Description of Artificial Sequence: Synthetic oligonucleotide
  Antisense strand to SEQ ID NO: 612790
caguuggaaacauuaucag

SEQ ID NO: 612792 - RNA, 19 nt, Artificial Sequence
  Description of Artificial Sequence: Synthetic oligonucleotide
  Sense strand starting at position 174 of SEQ ID NO: 585095
ccagaaggguaaucuucuu

SEQ ID NO: 612793 - RNA, 19 nt, Artificial Sequence
  Description of Artificial Sequence: Synthetic oligonucleotide
  Antisense strand to SEQ ID NO: 612792
aagaagauuacccuucugg

SEQ ID NO: 612794 - RNA, 19 nt, Artificial Sequence
  Description of Artificial Sequence: Synthetic oligonucleotide
  Sense strand starting at position 179 of SEQ ID NO: 585095
aggguaaucuucuugacca

SEQ ID NO: 612795 - RNA, 19 nt, Artificial Sequence
  Description of Artificial Sequence: Synthetic oligonucleotide
  Antisense strand to SEQ ID NO: 612794
uggucaagaagauuacccu

SEQ ID NO: 612796 - RNA, 19 nt, Artificial Sequence
  Description of Artificial Sequence: Synthetic oligonucleotide
  Sense strand starting at position 181 of SEQ ID NO: 585095
gguaaucuucuugaccacu

SEQ ID NO: 612797 - RNA, 19 nt, Artificial Sequence
  Description of Artificial Sequence: Synthetic oligonucleotide
  Antisense strand to SEQ ID NO: 612796
aguggucaagaagauuacc

SEQ ID NO: 612798 - RNA, 19 nt, Artificial Sequence
  Description of Artificial Sequence: Synthetic oligonucleotide
  Sense strand starting at position 218 of SEQ ID NO: 585095
cucagcucugccugaguaa

SEQ ID NO: 612799 - RNA, 19 nt, Artificial Sequence
  Description of Artificial Sequence: Synthetic oligonucleotide
  Antisense strand to SEQ ID NO: 612798
uuacucaggcagagcugag

SEQ ID NO: 612800 - RNA, 19 nt, Artificial Sequence
  Description of Artificial Sequence: Synthetic oligonucleotide
  Sense strand starting at position 219 of SEQ ID NO: 585095
ucagcucugccugaguaag

SEQ ID NO: 612801 - RNA, 19 nt, Artificial Sequence
  Description of Artificial Sequence: Synthetic oligonucleotide
  Antisense strand to SEQ ID NO: 612800
cuuacucaggcagagcuga

SEQ ID NO: 612802 - RNA, 19 nt, Artificial Sequence
  Description of Artificial Sequence: Synthetic oligonucleotide
  Sense strand starting at position 239 of SEQ ID NO: 585095
gguuguacuuaggucaguu

SEQ ID NO: 612803 - RNA, 19 nt, Artificial Sequence
  Description of Artificial Sequence: Synthetic oligonucleotide
  Antisense strand to SEQ ID NO: 612802
aacugaccuaaguacaacc

SEQ ID NO: 612804 - RNA, 19 nt, Artificial Sequence
  Description of Artificial Sequence: Synthetic oligonucleotide
  Sense strand starting at position 272 of SEQ ID NO: 585095
cugucaagccucgauguca

SEQ ID NO: 612805 - RNA, 19 nt, Artificial Sequence
  Description of Artificial Sequence: Synthetic oligonucleotide
  Antisense strand to SEQ ID NO: 612804
ugacaucgaggcuugacag

SEQ ID NO: 612806 - RNA, 19 nt, Artificial Sequence
  Description of Artificial Sequence: Synthetic oligonucleotide
  Sense strand starting at position 283 of SEQ ID NO: 585095
cgaugucacgugucacuuu

SEQ ID NO: 612807 - RNA, 19 nt, Artificial Sequence
  Description of Artificial Sequence: Synthetic oligonucleotide
  Antisense strand to SEQ ID NO: 612806
aaagugacacgugacaucg

SEQ ID NO: 612808 - RNA, 19 nt, Artificial Sequence
  Description of Artificial Sequence: Synthetic oligonucleotide
  Sense strand starting at position 851 of SEQ ID NO: 585095
auguaucuguaaucccaau

SEQ ID NO: 612809 - RNA, 19 nt, Artificial Sequence
  Description of Artificial Sequence: Synthetic oligonucleotide
  Antisense strand to SEQ ID NO: 612808
auugggauuacagauacau

SEQ ID NO: 612810 - RNA, 19 nt, Artificial Sequence
  Description of Artificial Sequence: Synthetic oligonucleotide
  Sense strand starting at position 1190 of SEQ ID NO: 585095
ggcuaaccuucuguuagag

SEQ ID NO: 612811 - RNA, 19 nt, Artificial Sequence
  Description of Artificial Sequence: Synthetic oligonucleotide
  Antisense strand to SEQ ID NO: 612810
cucuaacagaagguuagcc

SEQ ID NO: 612812 - RNA, 19 nt, Artificial Sequence
  Description of Artificial Sequence: Synthetic oligonucleotide
  Sense strand starting at position 1395 of SEQ ID NO: 585095
guguguggucggaagccau

SEQ ID NO: 612813 - RNA, 19 nt, Artificial Sequence
  Description of Artificial Sequence: Synthetic oligonucleotide
  Antisense strand to SEQ ID NO: 612812
auggcuuccgaccacacac

SEQ ID NO: 612814 - RNA, 19 nt, Artificial Sequence
  Description of Artificial Sequence: Synthetic oligonucleotide
  Sense strand starting at position 1412 of SEQ ID NO: 585095
aucugagucucccugugau

SEQ ID NO: 612815 - RNA, 19 nt, Artificial Sequence
  Description of Artificial Sequence: Synthetic oligonucleotide
  Antisense strand to SEQ ID NO: 612814
aucacagggagacucagau

SEQ ID NO: 612816 - RNA, 19 nt, Artificial Sequence
  Description of Artificial Sequence: Synthetic oligonucleotide
  Sense strand starting at position 1415 of SEQ ID NO: 585095
ugagucucccugugauuug

SEQ ID NO: 612817 - RNA, 19 nt, Artificial Sequence
  Description of Artificial Sequence: Synthetic oligonucleotide
  Antisense strand to SEQ ID NO: 612816
caaaucacagggagacuca

SEQ ID NO: 612818 - RNA, 19 nt, Artificial Sequence
  Description of Artificial Sequence: Synthetic oligonucleotide
  Sense strand starting at position 1443 of SEQ ID NO: 585095
agaaacuucuaaguuguau

SEQ ID NO: 612819 - RNA, 19 nt, Artificial Sequence
  Description of Artificial Sequence: Synthetic oligonucleotide
  Antisense strand to SEQ ID NO: 612818
auacaacuuagaaguuucu

SEQ ID NO: 612820 - RNA, 19 nt, Artificial Sequence
  Description of Artificial Sequence: Synthetic oligonucleotide
  Sense strand starting at position 1455 of SEQ ID NO: 585095
guuguauuacuauacccuu

SEQ ID NO: 612821 - RNA, 19 nt, Artificial Sequence
  Description of Artificial Sequence: Synthetic oligonucleotide
  Antisense strand to SEQ ID NO: 612820
aaggguauaguaauacaac

SEQ ID NO: 612822 - RNA, 19 nt, Artificial Sequence
  Description of Artificial Sequence: Synthetic oligonucleotide
  Sense strand starting at position 1654 of SEQ ID NO: 585095
cgucuucugcgugugagaa

SEQ ID NO: 612823 - RNA, 19 nt, Artificial Sequence
  Description of Artificial Sequence: Synthetic oligonucleotide
  Antisense strand to SEQ ID NO: 612822
uucucacacgcagaagacg

SEQ ID NO: 612824 - RNA, 19 nt, Artificial Sequence
  Description of Artificial Sequence: Synthetic oligonucleotide
  Sense strand starting at position 1788 of SEQ ID NO: 585095
ucgguuucuggugaguauc

SEQ ID NO: 612825 - RNA, 19 nt, Artificial Sequence
  Description of Artificial Sequence: Synthetic oligonucleotide
  Antisense strand to SEQ ID NO: 612824
gauacucaccagaaaccga

SEQ ID NO: 612826 - RNA, 19 nt, Artificial Sequence
  Description of Artificial Sequence: Synthetic oligonucleotide
  Sense strand starting at position 1794 of SEQ ID NO: 585095
ucuggugaguauccucgau

SEQ ID NO: 612827 - RNA, 19 nt, Artificial Sequence
  Description of Artificial Sequence: Synthetic oligonucleotide
  Antisense strand to SEQ ID NO: 612826
aucgaggauacucaccaga

SEQ ID NO: 612828 - RNA, 19 nt, Artificial Sequence
  Description of Artificial Sequence: Synthetic oligonucleotide
  Sense strand starting at position 1938 of SEQ ID NO: 585095
gcgcgcugccgcuuaagaa

SEQ ID NO: 612829 - RNA, 19 nt, Artificial Sequence
  Description of Artificial Sequence: Synthetic oligonucleotide
  Antisense strand to SEQ ID NO: 612828
uucuuaagcggcagcgcgc

SEQ ID NO: 612830 - RNA, 19 nt, Artificial Sequence
  Description of Artificial Sequence: Synthetic oligonucleotide
  Sense strand starting at position 2699 of SEQ ID NO: 585095
ccgucaagccuuugagaaa

SEQ ID NO: 612831 - RNA, 19 nt, Artificial Sequence
  Description of Artificial Sequence: Synthetic oligonucleotide
  Antisense strand to SEQ ID NO: 612830
uuucucaaaggcuugacgg

SEQ ID NO: 612832 - RNA, 19 nt, Artificial Sequence
  Description of Artificial Sequence: Synthetic oligonucleotide
  Sense strand starting at position 3495 of SEQ ID NO: 585095
ugggauuucucugaaauuc

SEQ ID NO: 612833 - RNA, 19 nt, Artificial Sequence
  Description of Artificial Sequence: Synthetic oligonucleotide
  Antisense strand to SEQ ID NO: 612832
gaauuucagagaaauccca

SEQ ID NO: 612834 - RNA, 19 nt, Artificial Sequence
  Description of Artificial Sequence: Synthetic oligonucleotide
  Sense strand starting at position 3505 of SEQ ID NO: 585095
cugaaauucuaggaauuaa

SEQ ID NO: 612835 - RNA, 19 nt, Artificial Sequence
  Description of Artificial Sequence: Synthetic oligonucleotide
  Antisense strand to SEQ ID NO: 612834
uuaauuccuagaauuucag

SEQ ID NO: 612836 - RNA, 19 nt, Artificial Sequence
  Description of Artificial Sequence: Synthetic oligonucleotide
  Sense strand starting at position 3543 of SEQ ID NO: 585095
ugcuaaugguucucaacaa

SEQ ID NO: 612837 - RNA, 19 nt, Artificial Sequence
  Description of Artificial Sequence: Synthetic oligonucleotide
  Antisense strand to SEQ ID NO: 612836
uuguugagaaccauuagca

SEQ ID NO: 612838 - RNA, 19 nt, Artificial Sequence
  Description of Artificial Sequence: Synthetic oligonucleotide
  Sense strand starting at position 3681 of SEQ ID NO: 585095
gaacuugcauaaguggaaa

SEQ ID NO: 612839 - RNA, 19 nt, Artificial Sequence
  Description of Artificial Sequence: Synthetic oligonucleotide
  Antisense strand to SEQ ID NO: 612838
uuuccacuuaugcaaguuc

SEQ ID NO: 612840 - RNA, 19 nt, Artificial Sequence
  Description of Artificial Sequence: Synthetic oligonucleotide
  Sense strand starting at position 3684 of SEQ ID NO: 585095
cuugcauaaguggaaauua

SEQ ID NO: 612841 - RNA, 19 nt, Artificial Sequence
  Description of Artificial Sequence: Synthetic oligonucleotide
  Antisense strand to SEQ ID NO: 612840
uaauuuccacuuaugcaag

SEQ ID NO: 612842 - RNA, 19 nt, Artificial Sequence
  Description of Artificial Sequence: Synthetic oligonucleotide
  Sense strand starting at position 3693 of SEQ ID NO: 585095
guggaaauuagguguugcu

SEQ ID NO: 612843 - RNA, 19 nt, Artificial Sequence
  Description of Artificial Sequence: Synthetic oligonucleotide
  Antisense strand to SEQ ID NO: 612842
agcaacaccuaauuuccac

SEQ ID NO: 612844 - RNA, 19 nt, Artificial Sequence
  Description of Artificial Sequence: Synthetic oligonucleotide
  Sense strand starting at position 3706 of SEQ ID NO: 585095
guugcucagccuuaggauu

SEQ ID NO: 612845 - RNA, 19 nt, Artificial Sequence
  Description of Artificial Sequence: Synthetic oligonucleotide
  Antisense strand to SEQ ID NO: 612844
aauccuaaggcugagcaac

SEQ ID NO: 612846 - RNA, 19 nt, Artificial Sequence
  Description of Artificial Sequence: Synthetic oligonucleotide
  Sense strand starting at position 3744 of SEQ ID NO: 585095
cccagcaaucaguguguua

SEQ ID NO: 612847 - RNA, 19 nt, Artificial Sequence
  Description of Artificial Sequence: Synthetic oligonucleotide
  Antisense strand to SEQ ID NO: 612846
uaacacacugauugcuggg

SEQ ID NO: 612848 - RNA, 19 nt, Artificial Sequence
  Description of Artificial Sequence: Synthetic oligonucleotide
  Sense strand starting at position 3746 of SEQ ID NO: 585095
cagcaaucaguguguuaca

SEQ ID NO: 612849 - RNA, 19 nt, Artificial Sequence
  Description of Artificial Sequence: Synthetic oligonucleotide
  Antisense strand to SEQ ID NO: 612848
uguaacacacugauugcug

SEQ ID NO: 612850 - RNA, 19 nt, Artificial Sequence
  Description of Artificial Sequence: Synthetic oligonucleotide
  Sense strand starting at position 3747 of SEQ ID NO: 585095
agcaaucaguguguuacaa

SEQ ID NO: 612851 - RNA, 19 nt, Artificial Sequence
  Description of Artificial Sequence: Synthetic oligonucleotide
  Antisense strand to SEQ ID NO: 612850
uuguaacacacugauugcu

SEQ ID NO: 612852 - RNA, 19 nt, Artificial Sequence
  Description of Artificial Sequence: Synthetic oligonucleotide
  Sense strand starting at position 3777 of SEQ ID NO: 585095
gauugugauguuggcuaaa

SEQ ID NO: 612853 - RNA, 19 nt, Artificial Sequence
  Description of Artificial Sequence: Synthetic oligonucleotide
  Antisense strand to SEQ ID NO: 612852
uuuagccaacaucacaauc

SEQ ID NO: 612854 - RNA, 19 nt, Artificial Sequence
  Description of Artificial Sequence: Synthetic oligonucleotide
  Sense strand starting at position 3780 of SEQ ID NO: 585095
ugugauguuggcuaaaggu

SEQ ID NO: 612855 - RNA, 19 nt, Artificial Sequence
  Description of Artificial Sequence: Synthetic oligonucleotide
  Antisense strand to SEQ ID NO: 612854
accuuuagccaacaucaca

SEQ ID NO: 612856 - RNA, 19 nt, Artificial Sequence
  Description of Artificial Sequence: Synthetic oligonucleotide
  Sense strand starting at position 3803 of SEQ ID NO: 585095
accagagcuucuccugaau

SEQ ID NO: 612857 - RNA, 19 nt, Artificial Sequence
  Description of Artificial Sequence: Synthetic oligonucleotide
  Antisense strand to SEQ ID NO: 612856
auucaggagaagcucuggu

SEQ ID NO: 612858 - RNA, 19 nt, Artificial Sequence
  Description of Artificial Sequence: Synthetic oligonucleotide
  Sense strand starting at position 3867 of SEQ ID NO: 585095
uuuguaaagcggcauaauu

SEQ ID NO: 612859 - RNA, 19 nt, Artificial Sequence
  Description of Artificial Sequence: Synthetic oligonucleotide
  Antisense strand to SEQ ID NO: 612858
aauuaugccgcuuuacaaa

SEQ ID NO: 612860 - RNA, 19 nt, Artificial Sequence
  Description of Artificial Sequence: Synthetic oligonucleotide
  Sense strand starting at position 3869 of SEQ ID NO: 585095
uguaaagcggcauaauuau

SEQ ID NO: 612861 - RNA, 19 nt, Artificial Sequence
  Description of Artificial Sequence: Synthetic oligonucleotide
  Antisense strand to SEQ ID NO: 612860
auaauuaugccgcuuuaca

SEQ ID NO: 612862 - RNA, 19 nt, Artificial Sequence
  Description of Artificial Sequence: Synthetic oligonucleotide
  Sense strand starting at position 3892 of SEQ ID NO: 585095
ccuguaucagaggguucua

SEQ ID NO: 612863 - RNA, 19 nt, Artificial Sequence
  Description of Artificial Sequence: Synthetic oligonucleotide
  Antisense strand to SEQ ID NO: 612862
uagaacccucugauacagg

SEQ ID NO: 612864 - RNA, 19 nt, Artificial Sequence
  Description of Artificial Sequence: Synthetic oligonucleotide
  Sense strand starting at position 3897 of SEQ ID NO: 585095
aucagaggguucuaaugag

SEQ ID NO: 612865 - RNA, 19 nt, Artificial Sequence
  Description of Artificial Sequence: Synthetic oligonucleotide
  Antisense strand to SEQ ID NO: 612864
cucauuagaacccucugau

SEQ ID NO: 612866 - RNA, 19 nt, Artificial Sequence
  Description of Artificial Sequence: Synthetic oligonucleotide
  Sense strand starting at position 3912 of SEQ ID NO: 585095
ugaggauaaugaguuagua

SEQ ID NO: 612867 - RNA, 19 nt, Artificial Sequence
  Description of Artificial Sequence: Synthetic oligonucleotide
  Antisense strand to SEQ ID NO: 612866
uacuaacucauuauccuca

SEQ ID NO: 612868 - RNA, 19 nt, Artificial Sequence
  Description of Artificial Sequence: Synthetic oligonucleotide
  Sense strand starting at position 3916 of SEQ ID NO: 585095
gauaaugaguuaguacaug

SEQ ID NO: 612869 - RNA, 19 nt, Artificial Sequence
  Description of Artificial Sequence: Synthetic oligonucleotide
  Antisense strand to SEQ ID NO: 612868
cauguacuaacucauuauc

SEQ ID NO: 612870 - RNA, 19 nt, Artificial Sequence
  Description of Artificial Sequence: Synthetic oligonucleotide
  Sense strand starting at position 3921 of SEQ ID NO: 585095
ugaguuaguacauguacga

SEQ ID NO: 612871 - RNA, 19 nt, Artificial Sequence
  Description of Artificial Sequence: Synthetic oligonucleotide
  Antisense strand to SEQ ID NO: 612870
ucguacauguacuaacuca

SEQ ID NO: 612872 - RNA, 19 nt, Artificial Sequence
  Description of Artificial Sequence: Synthetic oligonucleotide
  Sense strand starting at position 29 of SEQ ID NO: 585096
cauguaaagugaguaacau

SEQ ID NO: 612873 - RNA, 19 nt, Artificial Sequence
  Description of Artificial Sequence: Synthetic oligonucleotide
  Antisense strand to SEQ ID NO: 612872
auguuacucacuuuacaug

SEQ ID NO: 612874 - RNA, 19 nt, Artificial Sequence
  Description of Artificial Sequence: Synthetic oligonucleotide
  Sense strand starting at position 30 of SEQ ID NO: 585096
auguaaagugaguaacauu

SEQ ID NO: 612875 - RNA, 19 nt, Artificial Sequence
  Description of Artificial Sequence: Synthetic oligonucleotide
  Antisense strand to SEQ ID NO: 612874
aauguuacucacuuuacau

SEQ ID NO: 612876 - RNA, 19 nt, Artificial Sequence
  Description of Artificial Sequence: Synthetic oligonucleotide
  Sense strand starting at position 33 of SEQ ID NO: 585096
uaaagugaguaacauuuga

SEQ ID NO: 612877 - RNA, 19 nt, Artificial Sequence
  Description of Artificial Sequence: Synthetic oligonucleotide
  Antisense strand to SEQ ID NO: 612876
ucaaauguuacucacuuua

SEQ ID NO: 612878 - RNA, 19 nt, Artificial Sequence
  Description of Artificial Sequence: Synthetic oligonucleotide
  Sense strand starting at position 38 of SEQ ID NO: 585096
ugaguaacauuugagacaa

SEQ ID NO: 612879 - RNA, 19 nt, Artificial Sequence
  Description of Artificial Sequence: Synthetic oligonucleotide
  Antisense strand to SEQ ID NO: 612878
uugucucaaauguuacuca

SEQ ID NO: 612880 - RNA, 19 nt, Artificial Sequence
  Description of Artificial Sequence: Synthetic oligonucleotide
  Sense strand starting at position 148 of SEQ ID NO: 585096
cagcaaggauuagucuaau

SEQ ID NO: 612881 - RNA, 19 nt, Artificial Sequence
  Description of Artificial Sequence: Synthetic oligonucleotide
  Antisense strand to SEQ ID NO: 612880
auuagacuaauccuugcug

SEQ ID NO: 612882 - RNA, 19 nt, Artificial Sequence
  Description of Artificial Sequence: Synthetic oligonucleotide
  Sense strand starting at position 349 of SEQ ID NO: 585096
gcaugugcuguaucuaugu

SEQ ID NO: 612883 - RNA, 19 nt, Artificial Sequence
  Description of Artificial Sequence: Synthetic oligonucleotide
  Antisense strand to SEQ ID NO: 612882
acauagauacagcacaugc

SEQ ID NO: 612884 - RNA, 19 nt, Artificial Sequence
  Description of Artificial Sequence: Synthetic oligonucleotide
  Sense strand starting at position 385 of SEQ ID NO: 585096
augagauuauaagucacuu

SEQ ID NO: 612885 - RNA, 19 nt, Artificial Sequence
  Description of Artificial Sequence: Synthetic oligonucleotide
  Antisense strand to SEQ ID NO: 612884
aagugacuuauaaucucau

SEQ ID NO: 612886 - RNA, 19 nt, Artificial Sequence
  Description of Artificial Sequence: Synthetic oligonucleotide
  Sense strand starting at position 432 of SEQ ID NO: 585096
agacaaauguugucuucua

SEQ ID NO: 612887 - RNA, 19 nt, Artificial Sequence
  Description of Artificial Sequence: Synthetic oligonucleotide
  Antisense strand to SEQ ID NO: 612886
uagaagacaacauuugucu

SEQ ID NO: 612888 - RNA, 19 nt, Artificial Sequence
  Description of Artificial Sequence: Synthetic oligonucleotide
  Sense strand starting at position 454 of SEQ ID NO: 585096
cguuuacauuugcaauuua

SEQ ID NO: 612889 - RNA, 19 nt, Artificial Sequence
  Description of Artificial Sequence: Synthetic oligonucleotide
  Antisense strand to SEQ ID NO: 612888
uaaauugcaaauguaaacg

SEQ ID NO: 612890 - RNA, 19 nt, Artificial Sequence
  Description of Artificial Sequence: Synthetic oligonucleotide
  Sense strand starting at position 548 of SEQ ID NO: 585096
aacagaauguuugcucuga

SEQ ID NO: 612891 - RNA, 19 nt, Artificial Sequence
  Description of Artificial Sequence: Synthetic oligonucleotide
  Antisense strand to SEQ ID NO: 612890
ucagagcaaacauucuguu

SEQ ID NO: 612892 - RNA, 19 nt, Artificial Sequence
  Description of Artificial Sequence: Synthetic oligonucleotide
  Sense strand starting at position 552 of SEQ ID NO: 585096
gaauguuugcucugauaga

SEQ ID NO: 612893 - RNA, 19 nt, Artificial Sequence
  Description of Artificial Sequence: Synthetic oligonucleotide
  Antisense strand to SEQ ID NO: 612892
ucuaucagagcaaacauuc

SEQ ID NO: 612894 - RNA, 19 nt, Artificial Sequence
  Description of Artificial Sequence: Synthetic oligonucleotide
  Sense strand starting at position 565 of SEQ ID NO: 585096
gauagauuauagucugaua

SEQ ID NO: 612895 - RNA, 19 nt, Artificial Sequence
  Description of Artificial Sequence: Synthetic oligonucleotide
  Antisense strand to SEQ ID NO: 612894
uaucagacuauaaucuauc

SEQ ID NO: 612896 - RNA, 19 nt, Artificial Sequence
  Description of Artificial Sequence: Synthetic oligonucleotide
  Sense strand starting at position 640 of SEQ ID NO: 585096
uaggaacugcuuuggaaau

SEQ ID NO: 612897 - RNA, 19 nt, Artificial Sequence
  Description of Artificial Sequence: Synthetic oligonucleotide
  Antisense strand to SEQ ID NO: 612896
auuuccaaagcaguuccua

SEQ ID NO: 612898 - RNA, 19 nt, Artificial Sequence
  Description of Artificial Sequence: Synthetic oligonucleotide
  Sense strand starting at position 849 of SEQ ID NO: 585096
guacuuguugaccaaauga

SEQ ID NO: 612899 - RNA, 19 nt, Artificial Sequence
  Description of Artificial Sequence: Synthetic oligonucleotide
  Antisense strand to SEQ ID NO: 612898
ucauuuggucaacaaguac

SEQ ID NO: 612900 - RNA, 19 nt, Artificial Sequence
  Description of Artificial Sequence: Synthetic oligonucleotide
  Sense strand starting at position 1026 of SEQ ID NO: 585096
gaugguuccagagacaugu

SEQ ID NO: 612901 - RNA, 19 nt, Artificial Sequence
  Description of Artificial Sequence: Synthetic oligonucleotide
  Antisense strand to SEQ ID NO: 612900
acaugucucuggaaccauc

SEQ ID NO: 612902 - RNA, 19 nt, Artificial Sequence
  Description of Artificial Sequence: Synthetic oligonucleotide
  Sense strand starting at position 1086 of SEQ ID NO: 585096
aggugucuggucugagaag

SEQ ID NO: 612903 - RNA, 19 nt, Artificial Sequence
  Description of Artificial Sequence: Synthetic oligonucleotide
  Antisense strand to SEQ ID NO: 612902
cuucucagaccagacaccu

SEQ ID NO: 612904 - RNA, 19 nt, Artificial Sequence
  Description of Artificial Sequence: Synthetic oligonucleotide
  Sense strand starting at position 1120 of SEQ ID NO: 585096
ggaugcauaaggugugaau

SEQ ID NO: 612905 - RNA, 19 nt, Artificial Sequence
  Description of Artificial Sequence: Synthetic oligonucleotide
  Antisense strand to SEQ ID NO: 612904
auucacaccuuaugcaucc

SEQ ID NO: 612906 - RNA, 19 nt, Artificial Sequence
  Description of Artificial Sequence: Synthetic oligonucleotide
  Sense strand starting at position 1133 of SEQ ID NO: 585096
gugaauggguauccauaag

SEQ ID NO: 612907 - RNA, 19 nt, Artificial Sequence
  Description of Artificial Sequence: Synthetic oligonucleotide
  Antisense strand to SEQ ID NO: 612906
cuuauggauacccauucac

SEQ ID NO: 612908 - RNA, 19 nt, Artificial Sequence
  Description of Artificial Sequence: Synthetic oligonucleotide
  Sense strand starting at position 1139 of SEQ ID NO: 585096
ggguauccauaaguauaga

SEQ ID NO: 612909 - RNA, 19 nt, Artificial Sequence
  Description of Artificial Sequence: Synthetic oligonucleotide
  Antisense strand to SEQ ID NO: 612908
ucuauacuuauggauaccc

SEQ ID NO: 612910 - RNA, 19 nt, Artificial Sequence
  Description of Artificial Sequence: Synthetic oligonucleotide
  Sense strand starting at position 1979 of SEQ ID NO: 585096
acaagacaguuggcucuua

SEQ ID NO: 612911 - RNA, 19 nt, Artificial Sequence
  Description of Artificial Sequence: Synthetic oligonucleotide
  Antisense strand to SEQ ID NO: 612910
uaagagccaacugucuugu

SEQ ID NO: 612912 - RNA, 19 nt, Artificial Sequence
  Description of Artificial Sequence: Synthetic oligonucleotide
  Sense strand starting at position 1980 of SEQ ID NO: 585096
caagacaguuggcucuuaa

SEQ ID NO: 612913 - RNA, 19 nt, Artificial Sequence
  Description of Artificial Sequence: Synthetic oligonucleotide
  Antisense strand to SEQ ID NO: 612912
uuaagagccaacugucuug

SEQ ID NO: 612914 - RNA, 19 nt, Artificial Sequence
  Description of Artificial Sequence: Synthetic oligonucleotide
  Sense strand starting at position 2408 of SEQ ID NO: 585096
gacaguugugaccaugcau

SEQ ID NO: 612915 - RNA, 19 nt, Artificial Sequence
  Description of Artificial Sequence: Synthetic oligonucleotide
  Antisense strand to SEQ ID NO: 612914
augcauggucacaacuguc

SEQ ID NO: 612916 - RNA, 19 nt, Artificial Sequence
  Description of Artificial Sequence: Synthetic oligonucleotide
  Sense strand starting at position 2468 of SEQ ID NO: 585096
gucugcauuccugaaucau

SEQ ID NO: 612917 - RNA, 19 nt, Artificial Sequence
  Description of Artificial Sequence: Synthetic oligonucleotide
  Antisense strand to SEQ ID NO: 612916
augauucaggaaugcagac

SEQ ID NO: 612918 - RNA, 19 nt, Artificial Sequence
  Description of Artificial Sequence: Synthetic oligonucleotide
  Sense strand starting at position 3064 of SEQ ID NO: 585096
agaugccauugguuagaaa

SEQ ID NO: 612919 - RNA, 19 nt, Artificial Sequence
  Description of Artificial Sequence: Synthetic oligonucleotide
  Antisense strand to SEQ ID NO: 612918
uuucuaaccaauggcaucu

SEQ ID NO: 612920 - RNA, 19 nt, Artificial Sequence
  Description of Artificial Sequence: Synthetic oligonucleotide
  Sense strand starting at position 3065 of SEQ ID NO: 585096
gaugccauugguuagaaau

SEQ ID NO: 612921 - RNA, 19 nt, Artificial Sequence
  Description of Artificial Sequence: Synthetic oligonucleotide
  Antisense strand to SEQ ID NO: 612920
auuucuaaccaauggcauc

SEQ ID NO: 612922 - RNA, 19 nt, Artificial Sequence
  Description of Artificial Sequence: Synthetic oligonucleotide
  Sense strand starting at position 3523 of SEQ ID NO: 585096
auugaacucugucuuugaa

SEQ ID NO: 612923 - RNA, 19 nt, Artificial Sequence
  Description of Artificial Sequence: Synthetic oligonucleotide
  Antisense strand to SEQ ID NO: 612922
uucaaagacagaguucaau

SEQ ID NO: 612924 - RNA, 19 nt, Artificial Sequence
  Description of Artificial Sequence: Synthetic oligonucleotide
  Sense strand starting at position 3599 of SEQ ID NO: 585096
gcaauauuccuugauuguc

SEQ ID NO: 612925 - RNA, 19 nt, Artificial Sequence
  Description of Artificial Sequence: Synthetic oligonucleotide
  Antisense strand to SEQ ID NO: 612924
gacaaucaaggaauauugc

SEQ ID NO: 612926 - RNA, 19 nt, Artificial Sequence
  Description of Artificial Sequence: Synthetic oligonucleotide
  Sense strand starting at position 3605 of SEQ ID NO: 585096
uuccuugauugucugagga

SEQ ID NO: 612927 - RNA, 19 nt, Artificial Sequence
  Description of Artificial Sequence: Synthetic oligonucleotide
  Antisense strand to SEQ ID NO: 612926
uccucagacaaucaaggaa

SEQ ID NO: 612928 - RNA, 19 nt, Artificial Sequence
  Description of Artificial Sequence: Synthetic oligonucleotide
  Sense strand starting at position 3663 of SEQ ID NO: 585096
ucccaaaucugggucuuua

SEQ ID NO: 612929 - RNA, 19 nt, Artificial Sequence
  Description of Artificial Sequence: Synthetic oligonucleotide
  Antisense strand to SEQ ID NO: 612928
uaaagacccagauuuggga

SEQ ID NO: 612930 - RNA, 19 nt, Artificial Sequence
  Description of Artificial Sequence: Synthetic oligonucleotide
  Sense strand starting at position 3675 of SEQ ID NO: 585096
gucuuuagccaagaucuuu

SEQ ID NO: 612931 - RNA, 19 nt, Artificial Sequence
  Description of Artificial Sequence: Synthetic oligonucleotide
  Antisense strand to SEQ ID NO: 612930
aaagaucuuggcuaaagac

SEQ ID NO: 612932 - RNA, 19 nt, Artificial Sequence
  Description of Artificial Sequence: Synthetic oligonucleotide
  Sense strand starting at position 3729 of SEQ ID NO: 585096
uggcuauccucauuuguca

SEQ ID NO: 612933 - RNA, 19 nt, Artificial Sequence
  Description of Artificial Sequence: Synthetic oligonucleotide
  Antisense strand to SEQ ID NO: 612932
ugacaaaugaggauagcca

SEQ ID NO: 612934 - RNA, 19 nt, Artificial Sequence
  Description of Artificial Sequence: Synthetic oligonucleotide
  Sense strand starting at position 3744 of SEQ ID NO: 585096
gucacaucccagugacaac

SEQ ID NO: 612935 - RNA, 19 nt, Artificial Sequence
  Description of Artificial Sequence: Synthetic oligonucleotide
  Antisense strand to SEQ ID NO: 612934
guugucacugggaugugac

SEQ ID NO: 612936 - RNA, 19 nt, Artificial Sequence
  Description of Artificial Sequence: Synthetic oligonucleotide
  Sense strand starting at position 3767 of SEQ ID NO: 585096
gcucaucaugucuaacaug

SEQ ID NO: 612937 - RNA, 19 nt, Artificial Sequence
  Description of Artificial Sequence: Synthetic oligonucleotide
  Antisense strand to SEQ ID NO: 612936
cauguuagacaugaugagc

SEQ ID NO: 612938 - RNA, 19 nt, Artificial Sequence
  Description of Artificial Sequence: Synthetic oligonucleotide
  Sense strand starting at position 3784 of SEQ ID NO: 585096
ugagauguaucacuuuccu

SEQ ID NO: 612939 - RNA, 19 nt, Artificial Sequence
  Description of Artificial Sequence: Synthetic oligonucleotide
  Antisense strand to SEQ ID NO: 612938
aggaaagugauacaucuca

SEQ ID NO: 612940 - RNA, 19 nt, Artificial Sequence
  Description of Artificial Sequence: Synthetic oligonucleotide
  Sense strand starting at position 3788 of SEQ ID NO: 585096
auguaucacuuuccuggaa

SEQ ID NO: 612941 - RNA, 19 nt, Artificial Sequence
  Description of Artificial Sequence: Synthetic oligonucleotide
  Antisense strand to SEQ ID NO: 612940
uuccaggaaagugauacau

SEQ ID NO: 612942 - RNA, 19 nt, Artificial Sequence
  Description of Artificial Sequence: Synthetic oligonucleotide
  Sense strand starting at position 3789 of SEQ ID NO: 585096
uguaucacuuuccuggaaa

SEQ ID NO: 612943 - RNA, 19 nt, Artificial Sequence
  Description of Artificial Sequence: Synthetic oligonucleotide
  Antisense strand to SEQ ID NO: 612942
uuuccaggaaagugauaca

SEQ ID NO: 612944 - RNA, 19 nt, Artificial Sequence
  Description of Artificial Sequence: Synthetic oligonucleotide
  Sense strand starting at position 3820 of SEQ ID NO: 585096
ucaggaguucccuaccuca

SEQ ID NO: 612945 - RNA, 19 nt, Artificial Sequence
  Description of Artificial Sequence: Synthetic oligonucleotide
  Antisense strand to SEQ ID NO: 612944
ugagguagggaacuccuga

SEQ ID NO: 612946 - RNA, 19 nt, Artificial Sequence
  Description of Artificial Sequence: Synthetic oligonucleotide
  Sense strand starting at position 3883 of SEQ ID NO: 585096
ggcaucauucuugaggcuu

SEQ ID NO: 612947 - RNA, 19 nt, Artificial Sequence
  Description of Artificial Sequence: Synthetic oligonucleotide
  Antisense strand to SEQ ID NO: 612946
aagccucaagaaugaugcc

SEQ ID NO: 612948 - RNA, 19 nt, Artificial Sequence
  Description of Artificial Sequence: Synthetic oligonucleotide
  Sense strand starting at position 3929 of SEQ ID NO: 585096
uccgauccuugagcaaaua

SEQ ID NO: 612949 - RNA, 19 nt, Artificial Sequence
  Description of Artificial Sequence: Synthetic oligonucleotide
  Antisense strand to SEQ ID NO: 612948
uauuugcucaaggaucgga

SEQ ID NO: 612950 - RNA, 19 nt, Artificial Sequence
  Description of Artificial Sequence: Synthetic oligonucleotide
  Sense strand starting at position 3930 of SEQ ID NO: 585096
ccgauccuugagcaaauau

SEQ ID NO: 612951 - RNA, 19 nt, Artificial Sequence
  Description of Artificial Sequence: Synthetic oligonucleotide
  Antisense strand to SEQ ID NO: 612950
auauuugcucaaggaucgg

SEQ ID NO: 612952 - RNA, 19 nt, Artificial Sequence
  Description of Artificial Sequence: Synthetic oligonucleotide
  Sense strand starting at position 166 of SEQ ID NO: 585097
uaaagaaccuugccaguga

SEQ ID NO: 612953 - RNA, 19 nt, Artificial Sequence
  Description of Artificial Sequence: Synthetic oligonucleotide
  Antisense strand to SEQ ID NO: 612952
ucacuggcaagguucuuua

SEQ ID NO: 612954 - RNA, 19 nt, Artificial Sequence
  Description of Artificial Sequence: Synthetic oligonucleotide
  Sense strand starting at position 285 of SEQ ID NO: 585097
aauggagaauugucauuac

SEQ ID NO: 612955 - RNA, 19 nt, Artificial Sequence
  Description of Artificial Sequence: Synthetic oligonucleotide
  Antisense strand to SEQ ID NO: 612954
guaaugacaauucuccauu

SEQ ID NO: 612956 - RNA, 19 nt, Artificial Sequence
  Description of Artificial Sequence: Synthetic oligonucleotide
  Sense strand starting at position 288 of SEQ ID NO: 585097
ggagaauugucauuacuua

SEQ ID NO: 612957 - RNA, 19 nt, Artificial Sequence
  Description of Artificial Sequence: Synthetic oligonucleotide
  Antisense strand to SEQ ID NO: 612956
uaaguaaugacaauucucc

SEQ ID NO: 612958 - RNA, 19 nt, Artificial Sequence
  Description of Artificial Sequence: Synthetic oligonucleotide
  Sense strand starting at position 453 of SEQ ID NO: 585097
ucagauuucugauacggaa

SEQ ID NO: 612959 - RNA, 19 nt, Artificial Sequence
  Description of Artificial Sequence: Synthetic oligonucleotide
  Antisense strand to SEQ ID NO: 612958
uuccguaucagaaaucuga

SEQ ID NO: 612960 - RNA, 19 nt, Artificial Sequence
  Description of Artificial Sequence: Synthetic oligonucleotide
  Sense strand starting at position 465 of SEQ ID NO: 585097
uacggaagacgaugugauu

SEQ ID NO: 612961 - RNA, 19 nt, Artificial Sequence
  Description of Artificial Sequence: Synthetic oligonucleotide
  Antisense strand to SEQ ID NO: 612960
aaucacaucgucuuccgua

SEQ ID NO: 612962 - RNA, 19 nt, Artificial Sequence
  Description of Artificial Sequence: Synthetic oligonucleotide
  Sense strand starting at position 806 of SEQ ID NO: 585097
augugaacaguauauggua

SEQ ID NO: 612963 - RNA, 19 nt, Artificial Sequence
  Description of Artificial Sequence: Synthetic oligonucleotide
  Antisense strand to SEQ ID NO: 612962
uaccauauacuguucacau

SEQ ID NO: 612964 - RNA, 19 nt, Artificial Sequence
  Description of Artificial Sequence: Synthetic oligonucleotide
  Sense strand starting at position 906 of SEQ ID NO: 585097
guguauuucuccuuggauu

SEQ ID NO: 612965 - RNA, 19 nt, Artificial Sequence
  Description of Artificial Sequence: Synthetic oligonucleotide
  Antisense strand to SEQ ID NO: 612964
aauccaaggagaaauacac

SEQ ID NO: 612966 - RNA, 19 nt, Artificial Sequence
  Description of Artificial Sequence: Synthetic oligonucleotide
  Sense strand starting at position 912 of SEQ ID NO: 585097
uucuccuuggauugaaaua

SEQ ID NO: 612967 - RNA, 19 nt, Artificial Sequence
  Description of Artificial Sequence: Synthetic oligonucleotide
  Antisense strand to SEQ ID NO: 612966
uauuucaauccaaggagaa

SEQ ID NO: 612968 - RNA, 19 nt, Artificial Sequence
  Description of Artificial Sequence: Synthetic oligonucleotide
  Sense strand starting at position 1360 of SEQ ID NO: 585097
gugauaauaaguggaugca

SEQ ID NO: 612969 - RNA, 19 nt, Artificial Sequence
  Description of Artificial Sequence: Synthetic oligonucleotide
  Antisense strand to SEQ ID NO: 612968
ugcauccacuuauuaucac

SEQ ID NO: 612970 - RNA, 19 nt, Artificial Sequence
  Description of Artificial Sequence: Synthetic oligonucleotide
  Sense strand starting at position 1363 of SEQ ID NO: 585097
auaauaaguggaugcagaa

SEQ ID NO: 612971 - RNA, 19 nt, Artificial Sequence
  Description of Artificial Sequence: Synthetic oligonucleotide
  Antisense strand to SEQ ID NO: 612970
uucugcauccacuuauuau

SEQ ID NO: 612972 - RNA, 19 nt, Artificial Sequence
  Description of Artificial Sequence: Synthetic oligonucleotide
  Sense strand starting at position 1407 of SEQ ID NO: 585097
ucauauucuccacggaaua

SEQ ID NO: 612973 - RNA, 19 nt, Artificial Sequence
  Description of Artificial Sequence: Synthetic oligonucleotide
  Antisense strand to SEQ ID NO: 612972
uauuccguggagaauauga

SEQ ID NO: 612974 - RNA, 19 nt, Artificial Sequence
  Description of Artificial Sequence: Synthetic oligonucleotide
  Sense strand starting at position 1546 of SEQ ID NO: 585097
ucuugcugaccugaugagu

SEQ ID NO: 612975 - RNA, 19 nt, Artificial Sequence
  Description of Artificial Sequence: Synthetic oligonucleotide
  Antisense strand to SEQ ID NO: 612974
acucaucaggucagcaaga

SEQ ID NO: 612976 - RNA, 19 nt, Artificial Sequence
  Description of Artificial Sequence: Synthetic oligonucleotide
  Sense strand starting at position 1549 of SEQ ID NO: 585097
ugcugaccugaugagugaa

SEQ ID NO: 612977 - RNA, 19 nt, Artificial Sequence
  Description of Artificial Sequence: Synthetic oligonucleotide
  Antisense strand to SEQ ID NO: 612976
uucacucaucaggucagca

SEQ ID NO: 612978 - RNA, 19 nt, Artificial Sequence
  Description of Artificial Sequence: Synthetic oligonucleotide
  Sense strand starting at position 1605 of SEQ ID NO: 585097
aagagaacagccggucuua

SEQ ID NO: 612979 - RNA, 19 nt, Artificial Sequence
  Description of Artificial Sequence: Synthetic oligonucleotide
  Antisense strand to SEQ ID NO: 612978
uaagaccggcuguucucuu

SEQ ID NO: 612980 - RNA, 19 nt, Artificial Sequence
  Description of Artificial Sequence: Synthetic oligonucleotide
  Sense strand starting at position 2009 of SEQ ID NO: 585097
agcccuuaugccugagaaa

SEQ ID NO: 612981 - RNA, 19 nt, Artificial Sequence
  Description of Artificial Sequence: Synthetic oligonucleotide
  Antisense strand to SEQ ID NO: 612980
uuucucaggcauaagggcu

SEQ ID NO: 612982 - RNA, 19 nt, Artificial Sequence
  Description of Artificial Sequence: Synthetic oligonucleotide
  Sense strand starting at position 2010 of SEQ ID NO: 585097
gcccuuaugccugagaaag

SEQ ID NO: 612983 - RNA, 19 nt, Artificial Sequence
  Description of Artificial Sequence: Synthetic oligonucleotide
  Antisense strand to SEQ ID NO: 612982
cuuucucaggcauaagggc

SEQ ID NO: 612984 - RNA, 19 nt, Artificial Sequence
  Description of Artificial Sequence: Synthetic oligonucleotide
  Sense strand starting at position 2022 of SEQ ID NO: 585097
gagaaagcucggcagggau

SEQ ID NO: 612985 - RNA, 19 nt, Artificial Sequence
  Description of Artificial Sequence: Synthetic oligonucleotide
  Antisense strand to SEQ ID NO: 612984
aucccugccgagcuuucuc

SEQ ID NO: 612986 - RNA, 19 nt, Artificial Sequence
  Description of Artificial Sequence: Synthetic oligonucleotide
  Sense strand starting at position 2181 of SEQ ID NO: 585097
ugacaaagcuggucacaaa

SEQ ID NO: 612987 - RNA, 19 nt, Artificial Sequence
  Description of Artificial Sequence: Synthetic oligonucleotide
  Antisense strand to SEQ ID NO: 612986
uuugugaccagcuuuguca

SEQ ID NO: 612988 - RNA, 19 nt, Artificial Sequence
  Description of Artificial Sequence: Synthetic oligonucleotide
  Sense strand starting at position 2298 of SEQ ID NO: 585097
cgaaaugcaggcuagagua

SEQ ID NO: 612989 - RNA, 19 nt, Artificial Sequence
  Description of Artificial Sequence: Synthetic oligonucleotide
  Antisense strand to SEQ ID NO: 612988
uacucuagccugcauuucg

SEQ ID NO: 612990 - RNA, 19 nt, Artificial Sequence
  Description of Artificial Sequence: Synthetic oligonucleotide
  Sense strand starting at position 2379 of SEQ ID NO: 585097
aggcuacucugacugucaa

SEQ ID NO: 612991 - RNA, 19 nt, Artificial Sequence
  Description of Artificial Sequence: Synthetic oligonucleotide
  Antisense strand to SEQ ID NO: 612990
uugacagucagaguagccu

SEQ ID NO: 612992 - RNA, 19 nt, Artificial Sequence
  Description of Artificial Sequence: Synthetic oligonucleotide
  Sense strand starting at position 2386 of SEQ ID NO: 585097
ucugacugucaaugaggaa

SEQ ID NO: 612993 - RNA, 19 nt, Artificial Sequence
  Description of Artificial Sequence: Synthetic oligonucleotide
  Antisense strand to SEQ ID NO: 612992
uuccucauugacagucaga

SEQ ID NO: 612994 - RNA, 19 nt, Artificial Sequence
  Description of Artificial Sequence: Synthetic oligonucleotide
  Sense strand starting at position 2510 of SEQ ID NO: 585097
ggaagaguaugguuaggac

SEQ ID NO: 612995 - RNA, 19 nt, Artificial Sequence
  Description of Artificial Sequence: Synthetic oligonucleotide
  Antisense strand to SEQ ID NO: 612994
guccuaaccauacucuucc

SEQ ID NO: 612996 - RNA, 19 nt, Artificial Sequence
  Description of Artificial Sequence: Synthetic oligonucleotide
  Sense strand starting at position 2571 of SEQ ID NO: 585097
cccgaucuccuugaauaga

SEQ ID NO: 612997 - RNA, 19 nt, Artificial Sequence
  Description of Artificial Sequence: Synthetic oligonucleotide
  Antisense strand to SEQ ID NO: 612996
ucuauucaaggagaucggg

SEQ ID NO: 612998 - RNA, 19 nt, Artificial Sequence
  Description of Artificial Sequence: Synthetic oligonucleotide
  Sense strand starting at position 2703 of SEQ ID NO: 585097
uguacauuuguugggaguu

SEQ ID NO: 612999 - RNA, 19 nt, Artificial Sequence
  Description of Artificial Sequence: Synthetic oligonucleotide
  Antisense strand to SEQ ID NO: 612998
aacucccaacaaauguaca

SEQ ID NO: 613000 - RNA, 19 nt, Artificial Sequence
  Description of Artificial Sequence: Synthetic oligonucleotide
  Sense strand starting at position 2709 of SEQ ID NO: 585097
uuuguugggaguuagugau

SEQ ID NO: 613001 - RNA, 19 nt, Artificial Sequence
  Description of Artificial Sequence: Synthetic oligonucleotide
  Antisense strand to SEQ ID NO: 613000
aucacuaacucccaacaaa

SEQ ID NO: 613002 - RNA, 19 nt, Artificial Sequence
  Description of Artificial Sequence: Synthetic oligonucleotide
  Sense strand starting at position 2810 of SEQ ID NO: 585097
uggcaaauaccuugagggu

SEQ ID NO: 613003 - RNA, 19 nt, Artificial Sequence
  Description of Artificial Sequence: Synthetic oligonucleotide
  Antisense strand to SEQ ID NO: 613002
acccucaagguauuugcca

SEQ ID NO: 613004 - RNA, 19 nt, Artificial Sequence
  Description of Artificial Sequence: Synthetic oligonucleotide
  Sense strand starting at position 2811 of SEQ ID NO: 585097
ggcaaauaccuugaggguu

SEQ ID NO: 613005 - RNA, 19 nt, Artificial Sequence
  Description of Artificial Sequence: Synthetic oligonucleotide
  Antisense strand to SEQ ID NO: 613004
aacccucaagguauuugcc

SEQ ID NO: 613006 - RNA, 19 nt, Artificial Sequence
  Description of Artificial Sequence: Synthetic oligonucleotide
  Sense strand starting at position 2823 of SEQ ID NO: 585097
gaggguucuaaguagagua

SEQ ID NO: 613007 - RNA, 19 nt, Artificial Sequence
  Description of Artificial Sequence: Synthetic oligonucleotide
  Antisense strand to SEQ ID NO: 613006
uacucuacuuagaacccuc

SEQ ID NO: 613008 - RNA, 19 nt, Artificial Sequence
  Description of Artificial Sequence: Synthetic oligonucleotide
  Sense strand starting at position 2825 of SEQ ID NO: 585097
ggguucuaaguagaguauu

SEQ ID NO: 613009 - RNA, 19 nt, Artificial Sequence
  Description of Artificial Sequence: Synthetic oligonucleotide
  Antisense strand to SEQ ID NO: 613008
aauacucuacuuagaaccc

SEQ ID NO: 613010 - RNA, 19 nt, Artificial Sequence
  Description of Artificial Sequence: Synthetic oligonucleotide
  Sense strand starting at position 2896 of SEQ ID NO: 585097
acuagugcugaccagcaau

SEQ ID NO: 613011 - RNA, 19 nt, Artificial Sequence
  Description of Artificial Sequence: Synthetic oligonucleotide
  Antisense strand to SEQ ID NO: 613010
auugcuggucagcacuagu

SEQ ID NO: 613012 - RNA, 19 nt, Artificial Sequence
  Description of Artificial Sequence: Synthetic oligonucleotide
  Sense strand starting at position 2899 of SEQ ID NO: 585097
agugcugaccagcaaugaa

SEQ ID NO: 613013 - RNA, 19 nt, Artificial Sequence
  Description of Artificial Sequence: Synthetic oligonucleotide
  Antisense strand to SEQ ID NO: 613012
uucauugcuggucagcacu

SEQ ID NO: 613014 - RNA, 19 nt, Artificial Sequence
  Description of Artificial Sequence: Synthetic oligonucleotide
  Sense strand starting at position 3103 of SEQ ID NO: 585097
ucucaagugcgcuuguuua

SEQ ID NO: 613015 - RNA, 19 nt, Artificial Sequence
  Description of Artificial Sequence: Synthetic oligonucleotide
  Antisense strand to SEQ ID NO: 613014
uaaacaagcgcacuugaga

SEQ ID NO: 613016 - RNA, 19 nt, Artificial Sequence
  Description of Artificial Sequence: Synthetic oligonucleotide
  Sense strand starting at position 3210 of SEQ ID NO: 585097
gccagaaaccucugaauca

SEQ ID NO: 613017 - RNA, 19 nt, Artificial Sequence
  Description of Artificial Sequence: Synthetic oligonucleotide
  Antisense strand to SEQ ID NO: 613016
ugauucagagguuucuggc

SEQ ID NO: 613018 - RNA, 19 nt, Artificial Sequence
  Description of Artificial Sequence: Synthetic oligonucleotide
  Sense strand starting at position 3256 of SEQ ID NO: 585097
acuuaaugucaaggccuau

SEQ ID NO: 613019 - RNA, 19 nt, Artificial Sequence
  Description of Artificial Sequence: Synthetic oligonucleotide
  Antisense strand to SEQ ID NO: 613018
auaggccuugacauuaagu

SEQ ID NO: 613020 - RNA, 19 nt, Artificial Sequence
  Description of Artificial Sequence: Synthetic oligonucleotide
  Sense strand starting at position 3321 of SEQ ID NO: 585097
acagaaguuuacucugaac

SEQ ID NO: 613021 - RNA, 19 nt, Artificial Sequence
  Description of Artificial Sequence: Synthetic oligonucleotide
  Antisense strand to SEQ ID NO: 613020
guucagaguaaacuucugu

SEQ ID NO: 613022 - RNA, 19 nt, Artificial Sequence
  Description of Artificial Sequence: Synthetic oligonucleotide
  Sense strand starting at position 3323 of SEQ ID NO: 585097
agaaguuuacucugaacca

SEQ ID NO: 613023 - RNA, 19 nt, Artificial Sequence
  Description of Artificial Sequence: Synthetic oligonucleotide
  Antisense strand to SEQ ID NO: 613022
ugguucagaguaaacuucu

SEQ ID NO: 613024 - RNA, 19 nt, Artificial Sequence
  Description of Artificial Sequence: Synthetic oligonucleotide
  Sense strand starting at position 3398 of SEQ ID NO: 585097
ucccaagguggucagauua

SEQ ID NO: 613025 - RNA, 19 nt, Artificial Sequence
  Description of Artificial Sequence: Synthetic oligonucleotide
  Antisense strand to SEQ ID NO: 613024
uaaucugaccaccuuggga

SEQ ID NO: 613026 - RNA, 19 nt, Artificial Sequence
  Description of Artificial Sequence: Synthetic oligonucleotide
  Sense strand starting at position 3509 of SEQ ID NO: 585097
cugggauaucuugaagcug

SEQ ID NO: 613027 - RNA, 19 nt, Artificial Sequence
  Description of Artificial Sequence: Synthetic oligonucleotide
  Antisense strand to SEQ ID NO: 613026
cagcuucaagauaucccag

SEQ ID NO: 613028 - RNA, 19 nt, Artificial Sequence
  Description of Artificial Sequence: Synthetic oligonucleotide
  Sense strand starting at position 3529 of SEQ ID NO: 585097
gggcuuacagcuuauagau

SEQ ID NO: 613029 - RNA, 19 nt, Artificial Sequence
  Description of Artificial Sequence: Synthetic oligonucleotide
  Antisense strand to SEQ ID NO: 613028
aucuauaagcuguaagccc

SEQ ID NO: 613030 - RNA, 19 nt, Artificial Sequence
  Description of Artificial Sequence: Synthetic oligonucleotide
  Sense strand starting at position 3757 of SEQ ID NO: 585097
cucugaguaguugggacaa

SEQ ID NO: 613031 - RNA, 19 nt, Artificial Sequence
  Description of Artificial Sequence: Synthetic oligonucleotide
  Antisense strand to SEQ ID NO: 613030
uugucccaacuacucagag

SEQ ID NO: 613032 - RNA, 19 nt, Artificial Sequence
  Description of Artificial Sequence: Synthetic oligonucleotide
  Sense strand starting at position 30 of SEQ ID NO: 585098
ucagauuucuggcugcagu

SEQ ID NO: 613033 - RNA, 19 nt, Artificial Sequence
  Description of Artificial Sequence: Synthetic oligonucleotide
  Antisense strand to SEQ ID NO: 613032
acugcagccagaaaucuga

SEQ ID NO: 613034 - RNA, 19 nt, Artificial Sequence
  Description of Artificial Sequence: Synthetic oligonucleotide
  Sense strand starting at position 46 of SEQ ID NO: 585098
agugguuguccuugguguu

SEQ ID NO: 613035 - RNA, 19 nt, Artificial Sequence
  Description of Artificial Sequence: Synthetic oligonucleotide
  Antisense strand to SEQ ID NO: 613034
aacaccaaggacaaccacu

SEQ ID NO: 613036 - RNA, 19 nt, Artificial Sequence
  Description of Artificial Sequence: Synthetic oligonucleotide
  Sense strand starting at position 47 of SEQ ID NO: 585098
gugguuguccuugguguuu

SEQ ID NO: 613037 - RNA, 19 nt, Artificial Sequence
  Description of Artificial Sequence: Synthetic oligonucleotide
  Antisense strand to SEQ ID NO: 613036
aaacaccaaggacaaccac

SEQ ID NO: 613038 - RNA, 19 nt, Artificial Sequence
  Description of Artificial Sequence: Synthetic oligonucleotide
  Sense strand starting at position 52 of SEQ ID NO: 585098
uguccuugguguuugaaga

SEQ ID NO: 613039 - RNA, 19 nt, Artificial Sequence
  Description of Artificial Sequence: Synthetic oligonucleotide
  Antisense strand to SEQ ID NO: 613038
ucuucaaacaccaaggaca

SEQ ID NO: 613040 - RNA, 19 nt, Artificial Sequence
  Description of Artificial Sequence: Synthetic oligonucleotide
  Sense strand starting at position 53 of SEQ ID NO: 585098
guccuugguguuugaagac

SEQ ID NO: 613041 - RNA, 19 nt, Artificial Sequence
  Description of Artificial Sequence: Synthetic oligonucleotide
  Antisense strand to SEQ ID NO: 613040
gucuucaaacaccaaggac

SEQ ID NO: 613042 - RNA, 19 nt, Artificial Sequence
  Description of Artificial Sequence: Synthetic oligonucleotide
  Sense strand starting at position 82 of SEQ ID NO: 585098
cuuagacacuuugaucaag

SEQ ID NO: 613043 - RNA, 19 nt, Artificial Sequence
  Description of Artificial Sequence: Synthetic oligonucleotide
  Antisense strand to SEQ ID NO: 613042
cuugaucaaagugucuaag

SEQ ID NO: 613044 - RNA, 19 nt, Artificial Sequence
  Description of Artificial Sequence: Synthetic oligonucleotide
  Sense strand starting at position 111 of SEQ ID NO: 585098
ggaugaaagucucguucua

SEQ ID NO: 613045 - RNA, 19 nt, Artificial Sequence
  Description of Artificial Sequence: Synthetic oligonucleotide
  Antisense strand to SEQ ID NO: 613044
uagaacgagacuuucaucc

SEQ ID NO: 613046 - RNA, 19 nt, Artificial Sequence
  Description of Artificial Sequence: Synthetic oligonucleotide
  Sense strand starting at position 387 of SEQ ID NO: 585098
gagggcaauuuagauaauu

SEQ ID NO: 613047 - RNA, 19 nt, Artificial Sequence
  Description of Artificial Sequence: Synthetic oligonucleotide
  Antisense strand to SEQ ID NO: 613046
aauuaucuaaauugcccuc

SEQ ID NO: 613048 - RNA, 19 nt, Artificial Sequence
  Description of Artificial Sequence: Synthetic oligonucleotide
  Sense strand starting at position 406 of SEQ ID NO: 585098
cauugugucauacgugugu

SEQ ID NO: 613049 - RNA, 19 nt, Artificial Sequence
  Description of Artificial Sequence: Synthetic oligonucleotide
  Antisense strand to SEQ ID NO: 613048
acacacguaugacacaaug

SEQ ID NO: 613050 - RNA, 19 nt, Artificial Sequence
  Description of Artificial Sequence: Synthetic oligonucleotide
  Sense strand starting at position 410 of SEQ ID NO: 585098
gugucauacguguguucuc

SEQ ID NO: 613051 - RNA, 19 nt, Artificial Sequence
  Description of Artificial Sequence: Synthetic oligonucleotide
  Antisense strand to SEQ ID NO: 613050
gagaacacacguaugacac

SEQ ID NO: 613052 - RNA, 19 nt, Artificial Sequence
  Description of Artificial Sequence: Synthetic oligonucleotide
  Sense strand starting at position 474 of SEQ ID NO: 585098
guucuagugucugauggac

SEQ ID NO: 613053 - RNA, 19 nt, Artificial Sequence
  Description of Artificial Sequence: Synthetic oligonucleotide
  Antisense strand to SEQ ID NO: 613052
guccaucagacacuagaac

SEQ ID NO: 613054 - RNA, 19 nt, Artificial Sequence
  Description of Artificial Sequence: Synthetic oligonucleotide
  Sense strand starting at position 480 of SEQ ID NO: 585098
gugucugauggacguguaa

SEQ ID NO: 613055 - RNA, 19 nt, Artificial Sequence
  Description of Artificial Sequence: Synthetic oligonucleotide
  Antisense strand to SEQ ID NO: 613054
uuacacguccaucagacac

SEQ ID NO: 613056 - RNA, 19 nt, Artificial Sequence
  Description of Artificial Sequence: Synthetic oligonucleotide
  Sense strand starting at position 507 of SEQ ID NO: 585098
uaaggugacgguuguguaa

SEQ ID NO: 613057 - RNA, 19 nt, Artificial Sequence
  Description of Artificial Sequence: Synthetic oligonucleotide
  Antisense strand to SEQ ID NO: 613056
uuacacaaccgucaccuua

SEQ ID NO: 613058 - RNA, 19 nt, Artificial Sequence
  Description of Artificial Sequence: Synthetic oligonucleotide
  Sense strand starting at position 511 of SEQ ID NO: 585098
gugacgguuguguaaaggu

SEQ ID NO: 613059 - RNA, 19 nt, Artificial Sequence
  Description of Artificial Sequence: Synthetic oligonucleotide
  Antisense strand to SEQ ID NO: 613058
accuuuacacaaccgucac

SEQ ID NO: 613060 - RNA, 19 nt, Artificial Sequence
  Description of Artificial Sequence: Synthetic oligonucleotide
  Sense strand starting at position 562 of SEQ ID NO: 585098
agaacaugcgccggacauu

SEQ ID NO: 613061 - RNA, 19 nt, Artificial Sequence
  Description of Artificial Sequence: Synthetic oligonucleotide
  Antisense strand to SEQ ID NO: 613060
aauguccggcgcauguucu

SEQ ID NO: 613062 - RNA, 19 nt, Artificial Sequence
  Description of Artificial Sequence: Synthetic oligonucleotide
  Sense strand starting at position 639 of SEQ ID NO: 585098
gcaggugcugucugcauua

SEQ ID NO: 613063 - RNA, 19 nt, Artificial Sequence
  Description of Artificial Sequence: Synthetic oligonucleotide
  Antisense strand to SEQ ID NO: 613062
uaaugcagacagcaccugc

SEQ ID NO: 613064 - RNA, 19 nt, Artificial Sequence
  Description of Artificial Sequence: Synthetic oligonucleotide
  Sense strand starting at position 644 of SEQ ID NO: 585098
ugcugucugcauuaccaua

SEQ ID NO: 613065 - RNA, 19 nt, Artificial Sequence
  Description of Artificial Sequence: Synthetic oligonucleotide
  Antisense strand to SEQ ID NO: 613064
uaugguaaugcagacagca

SEQ ID NO: 613066 - RNA, 19 nt, Artificial Sequence
  Description of Artificial Sequence: Synthetic oligonucleotide
  Sense strand starting at position 1180 of SEQ ID NO: 585098
ccaagagacuccuccuuag

SEQ ID NO: 613067 - RNA, 19 nt, Artificial Sequence
  Description of Artificial Sequence: Synthetic oligonucleotide
  Antisense strand to SEQ ID NO: 613066
cuaaggaggagucucuugg

SEQ ID NO: 613068 - RNA, 19 nt, Artificial Sequence
  Description of Artificial Sequence: Synthetic oligonucleotide
  Sense strand starting at position 1477 of SEQ ID NO: 585098
ggauucuugcggugaacau

SEQ ID NO: 613069 - RNA, 19 nt, Artificial Sequence
  Description of Artificial Sequence: Synthetic oligonucleotide
  Antisense strand to SEQ ID NO: 613068
auguucaccgcaagaaucc

SEQ ID NO: 613070 - RNA, 19 nt, Artificial Sequence
  Description of Artificial Sequence: Synthetic oligonucleotide
  Sense strand starting at position 1478 of SEQ ID NO: 585098
gauucuugcggugaacauu

SEQ ID NO: 613071 - RNA, 19 nt, Artificial Sequence
  Description of Artificial Sequence: Synthetic oligonucleotide
  Antisense strand to SEQ ID NO: 613070
aauguucaccgcaagaauc

SEQ ID NO: 613072 - RNA, 19 nt, Artificial Sequence
  Description of Artificial Sequence: Synthetic oligonucleotide
  Sense strand starting at position 1504 of SEQ ID NO: 585098
aauguaaaugagugcguuu

SEQ ID NO: 613073 - RNA, 19 nt, Artificial Sequence
  Description of Artificial Sequence: Synthetic oligonucleotide
  Antisense strand to SEQ ID NO: 613072
aaacgcacucauuuacauu

SEQ ID NO: 613074 - RNA, 19 nt, Artificial Sequence
  Description of Artificial Sequence: Synthetic oligonucleotide
  Sense strand starting at position 1599 of SEQ ID NO: 585098
ggaggaggguugcacauuu

SEQ ID NO: 613075 - RNA, 19 nt, Artificial Sequence
  Description of Artificial Sequence: Synthetic oligonucleotide
  Antisense strand to SEQ ID NO: 613074
aaaugugcaacccuccucc

SEQ ID NO: 613076 - RNA, 19 nt, Artificial Sequence
  Description of Artificial Sequence: Synthetic oligonucleotide
  Sense strand starting at position 2085 of SEQ ID NO: 585098
ucgccuugcccgugggauu

SEQ ID NO: 613077 - RNA, 19 nt, Artificial Sequence
  Description of Artificial Sequence: Synthetic oligonucleotide
  Antisense strand to SEQ ID NO: 613076
aaucccacgggcaaggcga

SEQ ID NO: 613078 - RNA, 19 nt, Artificial Sequence
  Description of Artificial Sequence: Synthetic oligonucleotide
  Sense strand starting at position 2143 of SEQ ID NO: 585098
ugcagcucucuugggaauu

SEQ ID NO: 613079 - RNA, 19 nt, Artificial Sequence
  Description of Artificial Sequence: Synthetic oligonucleotide
  Antisense strand to SEQ ID NO: 613078
aauucccaagagagcugca

SEQ ID NO: 613080 - RNA, 19 nt, Artificial Sequence
  Description of Artificial Sequence: Synthetic oligonucleotide
  Sense strand starting at position 2144 of SEQ ID NO: 585098
gcagcucucuugggaauua

SEQ ID NO: 613081 - RNA, 19 nt, Artificial Sequence
  Description of Artificial Sequence: Synthetic oligonucleotide
  Antisense strand to SEQ ID NO: 613080
uaauucccaagagagcugc

SEQ ID NO: 613082 - RNA, 19 nt, Artificial Sequence
  Description of Artificial Sequence: Synthetic oligonucleotide
  Sense strand starting at position 2202 of SEQ ID NO: 585098
cucccucuccugcgaagaa

SEQ ID NO: 613083 - RNA, 19 nt, Artificial Sequence
  Description of Artificial Sequence: Synthetic oligonucleotide
  Antisense strand to SEQ ID NO: 613082
uucuucgcaggagagggag

SEQ ID NO: 613084 - RNA, 19 nt, Artificial Sequence
  Description of Artificial Sequence: Synthetic oligonucleotide
  Sense strand starting at position 2417 of SEQ ID NO: 585098
gaaagaaguccuggguccu

SEQ ID NO: 613085 - RNA, 19 nt, Artificial Sequence
  Description of Artificial Sequence: Synthetic oligonucleotide
  Antisense strand to SEQ ID NO: 613084
aggacccaggacuucuuuc

SEQ ID NO: 613086 - RNA, 19 nt, Artificial Sequence
  Description of Artificial Sequence: Synthetic oligonucleotide
  Sense strand starting at position 2505 of SEQ ID NO: 585098
cgccgcuguucuaaggaga

SEQ ID NO: 613087 - RNA, 19 nt, Artificial Sequence
  Description of Artificial Sequence: Synthetic oligonucleotide
  Antisense strand to SEQ ID NO: 613086
ucuccuuagaacagcggcg

SEQ ID NO: 613088 - RNA, 19 nt, Artificial Sequence
  Description of Artificial Sequence: Synthetic oligonucleotide
  Sense strand starting at position 2508 of SEQ ID NO: 585098
cgcuguucuaaggagagaa

SEQ ID NO: 613089 - RNA, 19 nt, Artificial Sequence
  Description of Artificial Sequence: Synthetic oligonucleotide
  Antisense strand to SEQ ID NO: 613088
uucucuccuuagaacagcg

SEQ ID NO: 613090 - RNA, 19 nt, Artificial Sequence
  Description of Artificial Sequence: Synthetic oligonucleotide
  Sense strand starting at position 2603 of SEQ ID NO: 585098
ggccuugcugugucaggua

SEQ ID NO: 613091 - RNA, 19 nt, Artificial Sequence
  Description of Artificial Sequence: Synthetic oligonucleotide
  Antisense strand to SEQ ID NO: 613090
uaccugacacagcaaggcc

SEQ ID NO: 613092 - RNA, 19 nt, Artificial Sequence
  Description of Artificial Sequence: Synthetic oligonucleotide
  Sense strand starting at position 2909 of SEQ ID NO: 585098
ggguguucgaacugaagcu

SEQ ID NO: 613093 - RNA, 19 nt, Artificial Sequence
  Description of Artificial Sequence: Synthetic oligonucleotide
  Antisense strand to SEQ ID NO: 613092
agcuucaguucgaacaccc

SEQ ID NO: 613094 - RNA, 19 nt, Artificial Sequence
  Description of Artificial Sequence: Synthetic oligonucleotide
  Sense strand starting at position 2928 of SEQ ID NO: 585098
gcaggaguucgucaacaag

SEQ ID NO: 613095 - RNA, 19 nt, Artificial Sequence
  Description of Artificial Sequence: Synthetic oligonucleotide
  Antisense strand to SEQ ID NO: 613094
cuuguugacgaacuccugc

SEQ ID NO: 613096 - RNA, 19 nt, Artificial Sequence
  Description of Artificial Sequence: Synthetic oligonucleotide
  Sense strand starting at position 2931 of SEQ ID NO: 585098
ggaguucgucaacaagaag

SEQ ID NO: 613097 - RNA, 19 nt, Artificial Sequence
  Description of Artificial Sequence: Synthetic oligonucleotide
  Antisense strand to SEQ ID NO: 613096
cuucuuguugacgaacucc

SEQ ID NO: 613098 - RNA, 19 nt, Artificial Sequence
  Description of Artificial Sequence: Synthetic oligonucleotide
  Sense strand starting at position 3668 of SEQ ID NO: 585098
aacguaauauccuguagua

SEQ ID NO: 613099 - RNA, 19 nt, Artificial Sequence
  Description of Artificial Sequence: Synthetic oligonucleotide
  Antisense strand to SEQ ID NO: 613098
uacuacaggauauuacguu

SEQ ID NO: 613100 - RNA, 19 nt, Artificial Sequence
  Description of Artificial Sequence: Synthetic oligonucleotide
  Sense strand starting at position 3670 of SEQ ID NO: 585098
cguaauauccuguaguaca

SEQ ID NO: 613101 - RNA, 19 nt, Artificial Sequence
  Description of Artificial Sequence: Synthetic oligonucleotide
  Antisense strand to SEQ ID NO: 613100
uguacuacaggauauuacg

SEQ ID NO: 613102 - RNA, 19 nt, Artificial Sequence
  Description of Artificial Sequence: Synthetic oligonucleotide
  Sense strand starting at position 3827 of SEQ ID NO: 585098
ugaccuggcuguuaggaau

SEQ ID NO: 613103 - RNA, 19 nt, Artificial Sequence
  Description of Artificial Sequence: Synthetic oligonucleotide
  Antisense strand to SEQ ID NO: 613102
auuccuaacagccagguca

SEQ ID NO: 613104 - RNA, 19 nt, Artificial Sequence
  Description of Artificial Sequence: Synthetic oligonucleotide
  Sense strand starting at position 3874 of SEQ ID NO: 585098
accuuucuggguugucuaa

SEQ ID NO: 613105 - RNA, 19 nt, Artificial Sequence
  Description of Artificial Sequence: Synthetic oligonucleotide
  Antisense strand to SEQ ID NO: 613104
uuagacaacccagaaaggu

SEQ ID NO: 613106 - RNA, 19 nt, Artificial Sequence
  Description of Artificial Sequence: Synthetic oligonucleotide
  Sense strand starting at position 3915 of SEQ ID NO: 585098
ggcaccuucucucugauua

SEQ ID NO: 613107 - RNA, 19 nt, Artificial Sequence
  Description of Artificial Sequence: Synthetic oligonucleotide
  Antisense strand to SEQ ID NO: 613106
uaaucagagagaaggugcc

SEQ ID NO: 613108 - RNA, 19 nt, Artificial Sequence
  Description of Artificial Sequence: Synthetic oligonucleotide
  Sense strand starting at position 3935 of SEQ ID NO: 585098
ugaagcucuccacacagau

SEQ ID NO: 613109 - RNA, 19 nt, Artificial Sequence
  Description of Artificial Sequence: Synthetic oligonucleotide
  Antisense strand to SEQ ID NO: 613108
aucuguguggagagcuuca

SEQ ID NO: 613110 - RNA, 19 nt, Artificial Sequence
  Description of Artificial Sequence: Synthetic oligonucleotide
  Sense strand starting at position 3956 of SEQ ID NO: 585098
uccugaugaccucgcaaca

SEQ ID NO: 613111 - RNA, 19 nt, Artificial Sequence
  Description of Artificial Sequence: Synthetic oligonucleotide
  Antisense strand to SEQ ID NO: 613110
uguugcgaggucaucagga

SEQ ID NO: 613112 - RNA, 19 nt, Artificial Sequence
  Description of Artificial Sequence: Synthetic oligonucleotide
  Sense strand starting at position 216 of SEQ ID NO: 585099
ccacguuucugaguuuauu

SEQ ID NO: 613113 - RNA, 19 nt, Artificial Sequence
  Description of Artificial Sequence: Synthetic oligonucleotide
  Antisense strand to SEQ ID NO: 613112
aauaaacucagaaacgugg

SEQ ID NO: 613114 - RNA, 19 nt, Artificial Sequence
  Description of Artificial Sequence: Synthetic oligonucleotide
  Sense strand starting at position 219 of SEQ ID NO: 585099
cguuucugaguuuauuguu

SEQ ID NO: 613115 - RNA, 19 nt, Artificial Sequence
  Description of Artificial Sequence: Synthetic oligonucleotide
  Antisense strand to SEQ ID NO: 613114
aacaauaaacucagaaacg

SEQ ID NO: 613116 - RNA, 19 nt, Artificial Sequence
  Description of Artificial Sequence: Synthetic oligonucleotide
  Sense strand starting at position 441 of SEQ ID NO: 585099
cugcgauuuccaggugcga

SEQ ID NO: 613117 - RNA, 19 nt, Artificial Sequence
  Description of Artificial Sequence: Synthetic oligonucleotide
  Antisense strand to SEQ ID NO: 613116
ucgcaccuggaaaucgcag

SEQ ID NO: 613118 - RNA, 19 nt, Artificial Sequence
  Description of Artificial Sequence: Synthetic oligonucleotide
  Sense strand starting at position 636 of SEQ ID NO: 585099
gcgcgguuuccgcuaagag

SEQ ID NO: 613119 - RNA, 19 nt, Artificial Sequence
  Description of Artificial Sequence: Synthetic oligonucleotide
  Antisense strand to SEQ ID NO: 613118
cucuuagcggaaaccgcgc

SEQ ID NO: 613120 - RNA, 19 nt, Artificial Sequence
  Description of Artificial Sequence: Synthetic oligonucleotide
  Sense strand starting at position 1200 of SEQ ID NO: 585099
uaaucugaucccgggacaa

SEQ ID NO: 613121 - RNA, 19 nt, Artificial Sequence
  Description of Artificial Sequence: Synthetic oligonucleotide
  Antisense strand to SEQ ID NO: 613120
uugucccgggaucagauua

SEQ ID NO: 613122 - RNA, 19 nt, Artificial Sequence
  Description of Artificial Sequence: Synthetic oligonucleotide
  Sense strand starting at position 2077 of SEQ ID NO: 585099
ggguaaggucuauguucac

SEQ ID NO: 613123 - RNA, 19 nt, Artificial Sequence
  Description of Artificial Sequence: Synthetic oligonucleotide
  Antisense strand to SEQ ID NO: 613122
gugaacauagaccuuaccc

SEQ ID NO: 613124 - RNA, 19 nt, Artificial Sequence
  Description of Artificial Sequence: Synthetic oligonucleotide
  Sense strand starting at position 2140 of SEQ ID NO: 585099
augauagcuccaggacaca

SEQ ID NO: 613125 - RNA, 19 nt, Artificial Sequence
  Description of Artificial Sequence: Synthetic oligonucleotide
  Antisense strand to SEQ ID NO: 613124
uguguccuggagcuaucau

SEQ ID NO: 613126 - RNA, 19 nt, Artificial Sequence
  Description of Artificial Sequence: Synthetic oligonucleotide
  Sense strand starting at position 2182 of SEQ ID NO: 585099
gagaacuucccguguggca

SEQ ID NO: 613127 - RNA, 19 nt, Artificial Sequence
  Description of Artificial Sequence: Synthetic oligonucleotide
  Antisense strand to SEQ ID NO: 613126
ugccacacgggaaguucuc

SEQ ID NO: 613128 - RNA, 19 nt, Artificial Sequence
  Description of Artificial Sequence: Synthetic oligonucleotide
  Sense strand starting at position 2275 of SEQ ID NO: 585099
gugguuggugcagauguga

SEQ ID NO: 613129 - RNA, 19 nt, Artificial Sequence
  Description of Artificial Sequence: Synthetic oligonucleotide
  Antisense strand to SEQ ID NO: 613128
ucacaucugcaccaaccac

SEQ ID NO: 613130 - RNA, 19 nt, Artificial Sequence
  Description of Artificial Sequence: Synthetic oligonucleotide
  Sense strand starting at position 2358 of SEQ ID NO: 585099
uggcauguuugaucaacac

SEQ ID NO: 613131 - RNA, 19 nt, Artificial Sequence
  Description of Artificial Sequence: Synthetic oligonucleotide
  Antisense strand to SEQ ID NO: 613130
guguugaucaaacaugcca

SEQ ID NO: 613132 - RNA, 19 nt, Artificial Sequence
  Description of Artificial Sequence: Synthetic oligonucleotide
  Sense strand starting at position 2378 of SEQ ID NO: 585099
agauuugcugccuggaagu

SEQ ID NO: 613133 - RNA, 19 nt, Artificial Sequence
  Description of Artificial Sequence: Synthetic oligonucleotide
  Antisense strand to SEQ ID NO: 613132
acuuccaggcagcaaaucu

SEQ ID NO: 613134 - RNA, 19 nt, Artificial Sequence
  Description of Artificial Sequence: Synthetic oligonucleotide
  Sense strand starting at position 2449 of SEQ ID NO: 585099
aaccucucuguuggguaua

SEQ ID NO: 613135 - RNA, 19 nt, Artificial Sequence
  Description of Artificial Sequence: Synthetic oligonucleotide
  Antisense strand to SEQ ID NO: 613134
uauacccaacagagagguu

SEQ ID NO: 613136 - RNA, 19 nt, Artificial Sequence
  Description of Artificial Sequence: Synthetic oligonucleotide
  Sense strand starting at position 2470 of SEQ ID NO: 585099
guauucaguuggucugaga

SEQ ID NO: 613137 - RNA, 19 nt, Artificial Sequence
  Description of Artificial Sequence: Synthetic oligonucleotide
  Antisense strand to SEQ ID NO: 613136
ucucagaccaacugaauac

SEQ ID NO: 613138 - RNA, 19 nt, Artificial Sequence
  Description of Artificial Sequence: Synthetic oligonucleotide
  Sense strand starting at position 2550 of SEQ ID NO: 585099
ccuagagucugagccuauu

SEQ ID NO: 613139 - RNA, 19 nt, Artificial Sequence
  Description of Artificial Sequence: Synthetic oligonucleotide
  Antisense strand to SEQ ID NO: 613138
aauaggcucagacucuagg

SEQ ID NO: 613140 - RNA, 19 nt, Artificial Sequence
  Description of Artificial Sequence: Synthetic oligonucleotide
  Sense strand starting at position 2571 of SEQ ID NO: 585099
gggcauuguuuauugcaau

SEQ ID NO: 613141 - RNA, 19 nt, Artificial Sequence
  Description of Artificial Sequence: Synthetic oligonucleotide
  Antisense strand to SEQ ID NO: 613140
auugcaauaaacaaugccc

SEQ ID NO: 613142 - RNA, 19 nt, Artificial Sequence
  Description of Artificial Sequence: Synthetic oligonucleotide
  Sense strand starting at position 2681 of SEQ ID NO: 585099
uugagugaccaugguauua

SEQ ID NO: 613143 - RNA, 19 nt, Artificial Sequence
  Description of Artificial Sequence: Synthetic oligonucleotide
  Antisense strand to SEQ ID NO: 613142
uaauaccauggucacucaa

SEQ ID NO: 613144 - RNA, 19 nt, Artificial Sequence
  Description of Artificial Sequence: Synthetic oligonucleotide
  Sense strand starting at position 2739 of SEQ ID NO: 585099
ugauaagaugauggccaua

SEQ ID NO: 613145 - RNA, 19 nt, Artificial Sequence
  Description of Artificial Sequence: Synthetic oligonucleotide
  Antisense strand to SEQ ID NO: 613144
uauggccaucaucuuauca

SEQ ID NO: 613146 - RNA, 19 nt, Artificial Sequence
  Description of Artificial Sequence: Synthetic oligonucleotide
  Sense strand starting at position 2744 of SEQ ID NO: 585099
agaugauggccauaagcuu

SEQ ID NO: 613147 - RNA, 19 nt, Artificial Sequence
  Description of Artificial Sequence: Synthetic oligonucleotide
  Antisense strand to SEQ ID NO: 613146
aagcuuauggccaucaucu

SEQ ID NO: 613148 - RNA, 19 nt, Artificial Sequence
  Description of Artificial Sequence: Synthetic oligonucleotide
  Sense strand starting at position 2847 of SEQ ID NO: 585099
ugcagcucugaucauuaua

SEQ ID NO: 613149 - RNA, 19 nt, Artificial Sequence
  Description of Artificial Sequence: Synthetic oligonucleotide
  Antisense strand to SEQ ID NO: 613148
uauaaugaucagagcugca

SEQ ID NO: 613150 - RNA, 19 nt, Artificial Sequence
  Description of Artificial Sequence: Synthetic oligonucleotide
  Sense strand starting at position 2850 of SEQ ID NO: 585099
agcucugaucauuauacag

SEQ ID NO: 613151 - RNA, 19 nt, Artificial Sequence
  Description of Artificial Sequence: Synthetic oligonucleotide
  Antisense strand to SEQ ID NO: 613150
cuguauaaugaucagagcu

SEQ ID NO: 613152 - RNA, 19 nt, Artificial Sequence
  Description of Artificial Sequence: Synthetic oligonucleotide
  Sense strand starting at position 2860 of SEQ ID NO: 585099
auuauacagccugagcuua

SEQ ID NO: 613153 - RNA, 19 nt, Artificial Sequence
  Description of Artificial Sequence: Synthetic oligonucleotide
  Antisense strand to SEQ ID NO: 613152
uaagcucaggcuguauaau

SEQ ID NO: 613154 - RNA, 19 nt, Artificial Sequence
  Description of Artificial Sequence: Synthetic oligonucleotide
  Sense strand starting at position 2975 of SEQ ID NO: 585099
cacuucugugucugaugua

SEQ ID NO: 613155 - RNA, 19 nt, Artificial Sequence
  Description of Artificial Sequence: Synthetic oligonucleotide
  Antisense strand to SEQ ID NO: 613154
uacaucagacacagaagug

SEQ ID NO: 613156 - RNA, 19 nt, Artificial Sequence
  Description of Artificial Sequence: Synthetic oligonucleotide
  Sense strand starting at position 2990 of SEQ ID NO: 585099
uguauugggugccuucuaa

SEQ ID NO: 613157 - RNA, 19 nt, Artificial Sequence
  Description of Artificial Sequence: Synthetic oligonucleotide
  Antisense strand to SEQ ID NO: 613156
uuagaaggcacccaauaca

SEQ ID NO: 613158 - RNA, 19 nt, Artificial Sequence
  Description of Artificial Sequence: Synthetic oligonucleotide
  Sense strand starting at position 3020 of SEQ ID NO: 585099
ccucacuuuguacaguaaa

SEQ ID NO: 613159 - RNA, 19 nt, Artificial Sequence
  Description of Artificial Sequence: Synthetic oligonucleotide
  Antisense strand to SEQ ID NO: 613158
uuuacuguacaaagugagg

SEQ ID NO: 613160 - RNA, 19 nt, Artificial Sequence
  Description of Artificial Sequence: Synthetic oligonucleotide
  Sense strand starting at position 3091 of SEQ ID NO: 585099
ugagcaaggugaggauuua

SEQ ID NO: 613161 - RNA, 19 nt, Artificial Sequence
  Description of Artificial Sequence: Synthetic oligonucleotide
  Antisense strand to SEQ ID NO: 613160
uaaauccucaccuugcuca

SEQ ID NO: 613162 - RNA, 19 nt, Artificial Sequence
  Description of Artificial Sequence: Synthetic oligonucleotide
  Sense strand starting at position 3203 of SEQ ID NO: 585099
gguucagagugcuuaguug

SEQ ID NO: 613163 - RNA, 19 nt, Artificial Sequence
  Description of Artificial Sequence: Synthetic oligonucleotide
  Antisense strand to SEQ ID NO: 613162
caacuaagcacucugaacc

SEQ ID NO: 613164 - RNA, 19 nt, Artificial Sequence
  Description of Artificial Sequence: Synthetic oligonucleotide
  Sense strand starting at position 3212 of SEQ ID NO: 585099
ugcuuaguugugggaguau

SEQ ID NO: 613165 - RNA, 19 nt, Artificial Sequence
  Description of Artificial Sequence: Synthetic oligonucleotide
  Antisense strand to SEQ ID NO: 613164
auacucccacaacuaagca

SEQ ID NO: 613166 - RNA, 19 nt, Artificial Sequence
  Description of Artificial Sequence: Synthetic oligonucleotide
  Sense strand starting at position 3226 of SEQ ID NO: 585099
aguauagagacaugcaguu

SEQ ID NO: 613167 - RNA, 19 nt, Artificial Sequence
  Description of Artificial Sequence: Synthetic oligonucleotide
  Antisense strand to SEQ ID NO: 613166
aacugcaugucucuauacu

SEQ ID NO: 613168 - RNA, 19 nt, Artificial Sequence
  Description of Artificial Sequence: Synthetic oligonucleotide
  Sense strand starting at position 3261 of SEQ ID NO: 585099
ccauuugguucggagcaga

SEQ ID NO: 613169 - RNA, 19 nt, Artificial Sequence
  Description of Artificial Sequence: Synthetic oligonucleotide
  Antisense strand to SEQ ID NO: 613168
ucugcuccgaaccaaaugg

SEQ ID NO: 613170 - RNA, 19 nt, Artificial Sequence
  Description of Artificial Sequence: Synthetic oligonucleotide
  Sense strand starting at position 3438 of SEQ ID NO: 585099
gugcgcaggaguuaaacua

SEQ ID NO: 613171 - RNA, 19 nt, Artificial Sequence
  Description of Artificial Sequence: Synthetic oligonucleotide
  Antisense strand to SEQ ID NO: 613170
uaguuuaacuccugcgcac

SEQ ID NO: 613172 - RNA, 19 nt, Artificial Sequence
  Description of Artificial Sequence: Synthetic oligonucleotide
  Sense strand starting at position 3468 of SEQ ID NO: 585099
uauagaaacgcugaaguua

SEQ ID NO: 613173 - RNA, 19 nt, Artificial Sequence
  Description of Artificial Sequence: Synthetic oligonucleotide
  Antisense strand to SEQ ID NO: 613172
uaacuucagcguuucuaua

SEQ ID NO: 613174 - RNA, 19 nt, Artificial Sequence
  Description of Artificial Sequence: Synthetic oligonucleotide
  Sense strand starting at position 3694 of SEQ ID NO: 585099
agggcuuucugcuugauuu

SEQ ID NO: 613175 - RNA, 19 nt, Artificial Sequence
  Description of Artificial Sequence: Synthetic oligonucleotide
  Antisense strand to SEQ ID NO: 613174
aaaucaagcagaaagcccu

SEQ ID NO: 613176 - RNA, 19 nt, Artificial Sequence
  Description of Artificial Sequence: Synthetic oligonucleotide
  Sense strand starting at position 3695 of SEQ ID NO: 585099
gggcuuucugcuugauuuc

SEQ ID NO: 613177 - RNA, 19 nt, Artificial Sequence
  Description of Artificial Sequence: Synthetic oligonucleotide
  Antisense strand to SEQ ID NO: 613176
gaaaucaagcagaaagccc

SEQ ID NO: 613178 - RNA, 19 nt, Artificial Sequence
  Description of Artificial Sequence: Synthetic oligonucleotide
  Sense strand starting at position 3724 of SEQ ID NO: 585099
aaucgcguggcauaaauua

SEQ ID NO: 613179 - RNA, 19 nt, Artificial Sequence
  Description of Artificial Sequence: Synthetic oligonucleotide
  Antisense strand to SEQ ID NO: 613178
uaauuuaugccacgcgauu

SEQ ID NO: 613180 - RNA, 19 nt, Artificial Sequence
  Description of Artificial Sequence: Synthetic oligonucleotide
  Sense strand starting at position 3732 of SEQ ID NO: 585099
ggcauaaauuaaguuggaa

SEQ ID NO: 613181 - RNA, 19 nt, Artificial Sequence
  Description of Artificial Sequence: Synthetic oligonucleotide
  Antisense strand to SEQ ID NO: 613180
uuccaacuuaauuuaugcc

SEQ ID NO: 613182 - RNA, 19 nt, Artificial Sequence
  Description of Artificial Sequence: Synthetic oligonucleotide
  Sense strand starting at position 3757 of SEQ ID NO: 585099
gaacgcuuugggcaggauu

SEQ ID NO: 613183 - RNA, 19 nt, Artificial Sequence
  Description of Artificial Sequence: Synthetic oligonucleotide
  Antisense strand to SEQ ID NO: 613182
aauccugcccaaagcguuc

SEQ ID NO: 613184 - RNA, 19 nt, Artificial Sequence
  Description of Artificial Sequence: Synthetic oligonucleotide
  Sense strand starting at position 3768 of SEQ ID NO: 585099
gcaggauucugauggauuu

SEQ ID NO: 613185 - RNA, 19 nt, Artificial Sequence
  Description of Artificial Sequence: Synthetic oligonucleotide
  Antisense strand to SEQ ID NO: 613184
aaauccaucagaauccugc

SEQ ID NO: 613186 - RNA, 19 nt, Artificial Sequence
  Description of Artificial Sequence: Synthetic oligonucleotide
  Sense strand starting at position 3803 of SEQ ID NO: 585099
uccgcuuugccgccguaau

SEQ ID NO: 613187 - RNA, 19 nt, Artificial Sequence
  Description of Artificial Sequence: Synthetic oligonucleotide
  Antisense strand to SEQ ID NO: 613186
auuacggcggcaaagcgga

SEQ ID NO: 613188 - RNA, 19 nt, Artificial Sequence
  Description of Artificial Sequence: Synthetic oligonucleotide
  Sense strand starting at position 3813 of SEQ ID NO: 585099
cgccguaaucgagaaaucu

SEQ ID NO: 613189 - RNA, 19 nt, Artificial Sequence
  Description of Artificial Sequence: Synthetic oligonucleotide
  Antisense strand to SEQ ID NO: 613188
agauuucucgauuacggcg

SEQ ID NO: 613190 - RNA, 19 nt, Artificial Sequence
  Description of Artificial Sequence: Synthetic oligonucleotide
  Sense strand starting at position 3821 of SEQ ID NO: 585099
ucgagaaaucugugccaug

SEQ ID NO: 613191 - RNA, 19 nt, Artificial Sequence
  Description of Artificial Sequence: Synthetic oligonucleotide
  Antisense strand to SEQ ID NO: 613190
cauggcacagauuucucga

SEQ ID NO: 613192 - RNA, 19 nt, Artificial Sequence
  Description of Artificial Sequence: Synthetic oligonucleotide
  Sense strand starting at position 13 of SEQ ID NO: 585100
agggaucuaagcugugaaa

SEQ ID NO: 613193 - RNA, 19 nt, Artificial Sequence
  Description of Artificial Sequence: Synthetic oligonucleotide
  Antisense strand to SEQ ID NO: 613192
uuucacagcuuagaucccu

SEQ ID NO: 613194 - RNA, 19 nt, Artificial Sequence
  Description of Artificial Sequence: Synthetic oligonucleotide
  Sense strand starting at position 15 of SEQ ID NO: 585100
ggaucuaagcugugaaaga

SEQ ID NO: 613195 - RNA, 19 nt, Artificial Sequence
  Description of Artificial Sequence: Synthetic oligonucleotide
  Antisense strand to SEQ ID NO: 613194
ucuuucacagcuuagaucc

SEQ ID NO: 613196 - RNA, 19 nt, Artificial Sequence
  Description of Artificial Sequence: Synthetic oligonucleotide
  Sense strand starting at position 303 of SEQ ID NO: 585100
ucaguaugucuggaagauu

SEQ ID NO: 613197 - RNA, 19 nt, Artificial Sequence
  Description of Artificial Sequence: Synthetic oligonucleotide
  Antisense strand to SEQ ID NO: 613196
aaucuuccagacauacuga

SEQ ID NO: 613198 - RNA, 19 nt, Artificial Sequence
  Description of Artificial Sequence: Synthetic oligonucleotide
  Sense strand starting at position 312 of SEQ ID NO: 585100
cuggaagauuaggugguua

SEQ ID NO: 613199 - RNA, 19 nt, Artificial Sequence
  Description of Artificial Sequence: Synthetic oligonucleotide
  Antisense strand to SEQ ID NO: 613198
uaaccaccuaaucuuccag

SEQ ID NO: 613200 - RNA, 19 nt, Artificial Sequence
  Description of Artificial Sequence: Synthetic oligonucleotide
  Sense strand starting at position 314 of SEQ ID NO: 585100
ggaagauuaggugguuaga

SEQ ID NO: 613201 - RNA, 19 nt, Artificial Sequence
  Description of Artificial Sequence: Synthetic oligonucleotide
  Antisense strand to SEQ ID NO: 613200
ucuaaccaccuaaucuucc

SEQ ID NO: 613202 - RNA, 19 nt, Artificial Sequence
  Description of Artificial Sequence: Synthetic oligonucleotide
  Sense strand starting at position 454 of SEQ ID NO: 585100
gaauacaacugguaagaag

SEQ ID NO: 613203 - RNA, 19 nt, Artificial Sequence
  Description of Artificial Sequence: Synthetic oligonucleotide
  Antisense strand to SEQ ID NO: 613202
cuucuuaccaguuguauuc

SEQ ID NO: 613204 - RNA, 19 nt, Artificial Sequence
  Description of Artificial Sequence: Synthetic oligonucleotide
  Sense strand starting at position 560 of SEQ ID NO: 585100
ugaagaagguaucagaaca

SEQ ID NO: 613205 - RNA, 19 nt, Artificial Sequence
  Description of Artificial Sequence: Synthetic oligonucleotide
  Antisense strand to SEQ ID NO: 613204
uguucugauaccuucuuca

SEQ ID NO: 613206 - RNA, 19 nt, Artificial Sequence
  Description of Artificial Sequence: Synthetic oligonucleotide
  Sense strand starting at position 631 of SEQ ID NO: 585100
caaagaugggcaggucaaa

SEQ ID NO: 613207 - RNA, 19 nt, Artificial Sequence
  Description of Artificial Sequence: Synthetic oligonucleotide
  Antisense strand to SEQ ID NO: 613206
uuugaccugcccaucuuug

SEQ ID NO: 613208 - RNA, 19 nt, Artificial Sequence
  Description of Artificial Sequence: Synthetic oligonucleotide
  Sense strand starting at position 643 of SEQ ID NO: 585100
ggucaaagagccuauguga

SEQ ID NO: 613209 - RNA, 19 nt, Artificial Sequence
  Description of Artificial Sequence: Synthetic oligonucleotide
  Antisense strand to SEQ ID NO: 613208
ucacauaggcucuuugacc

SEQ ID NO: 613210 - RNA, 19 nt, Artificial Sequence
  Description of Artificial Sequence: Synthetic oligonucleotide
  Sense strand starting at position 732 of SEQ ID NO: 585100
cggauaagaugcucucaca

SEQ ID NO: 613211 - RNA, 19 nt, Artificial Sequence
  Description of Artificial Sequence: Synthetic oligonucleotide
  Antisense strand to SEQ ID NO: 613210
ugugagagcaucuuauccg

SEQ ID NO: 613212 - RNA, 19 nt, Artificial Sequence
  Description of Artificial Sequence: Synthetic oligonucleotide
  Sense strand starting at position 882 of SEQ ID NO: 585100
gguucucuccacuaccauu

SEQ ID NO: 613213 - RNA, 19 nt, Artificial Sequence
  Description of Artificial Sequence: Synthetic oligonucleotide
  Antisense strand to SEQ ID NO: 613212
aaugguaguggagagaacc

SEQ ID NO: 613214 - RNA, 19 nt, Artificial Sequence
  Description of Artificial Sequence: Synthetic oligonucleotide
  Sense strand starting at position 971 of SEQ ID NO: 585100
cuauaucugccagacugaa

SEQ ID NO: 613215 - RNA, 19 nt, Artificial Sequence
  Description of Artificial Sequence: Synthetic oligonucleotide
  Antisense strand to SEQ ID NO: 613214
uucagucuggcagauauag

SEQ ID NO: 613216 - RNA, 19 nt, Artificial Sequence
  Description of Artificial Sequence: Synthetic oligonucleotide
  Sense strand starting at position 984 of SEQ ID NO: 585100
acugaaucucuuuaacgcu

SEQ ID NO: 613217 - RNA, 19 nt, Artificial Sequence
  Description of Artificial Sequence: Synthetic oligonucleotide
  Antisense strand to SEQ ID NO: 613216
agcguuaaagagauucagu

SEQ ID NO: 613218 - RNA, 19 nt, Artificial Sequence
  Description of Artificial Sequence: Synthetic oligonucleotide
  Sense strand starting at position 990 of SEQ ID NO: 585100
ucucuuuaacgcuaagauc

SEQ ID NO: 613219 - RNA, 19 nt, Artificial Sequence
  Description of Artificial Sequence: Synthetic oligonucleotide
  Antisense strand to SEQ ID NO: 613218
gaucuuagcguuaaagaga

SEQ ID NO: 613220 - RNA, 19 nt, Artificial Sequence
  Description of Artificial Sequence: Synthetic oligonucleotide
  Sense strand starting at position 1159 of SEQ ID NO: 585100
uucuuacugccaggaauag

SEQ ID NO: 613221 - RNA, 19 nt, Artificial Sequence
  Description of Artificial Sequence: Synthetic oligonucleotide
  Antisense strand to SEQ ID NO: 613220
cuauuccuggcaguaagaa

SEQ ID NO: 613222 - RNA, 19 nt, Artificial Sequence
  Description of Artificial Sequence: Synthetic oligonucleotide
  Sense strand starting at position 1320 of SEQ ID NO: 585100
aguguuaucccacgggucu

SEQ ID NO: 613223 - RNA, 19 nt, Artificial Sequence
  Description of Artificial Sequence: Synthetic oligonucleotide
  Antisense strand to SEQ ID NO: 613222
agacccgugggauaacacu

SEQ ID NO: 613224 - RNA, 19 nt, Artificial Sequence
  Description of Artificial Sequence: Synthetic oligonucleotide
  Sense strand starting at position 2559 of SEQ ID NO: 585100
uguucugaccgucaccauu

SEQ ID NO: 613225 - RNA, 19 nt, Artificial Sequence
  Description of Artificial Sequence: Synthetic oligonucleotide
  Antisense strand to SEQ ID NO: 613224
aauggugacggucagaaca

SEQ ID NO: 613226 - RNA, 19 nt, Artificial Sequence
  Description of Artificial Sequence: Synthetic oligonucleotide
  Sense strand starting at position 2617 of SEQ ID NO: 585100
cagguuugcuaguccggaa

SEQ ID NO: 613227 - RNA, 19 nt, Artificial Sequence
  Description of Artificial Sequence: Synthetic oligonucleotide
  Antisense strand to SEQ ID NO: 613226
uuccggacuagcaaaccug

SEQ ID NO: 613228 - RNA, 19 nt, Artificial Sequence
  Description of Artificial Sequence: Synthetic oligonucleotide
  Sense strand starting at position 2629 of SEQ ID NO: 585100
uccggaauugggugggaga

SEQ ID NO: 613229 - RNA, 19 nt, Artificial Sequence
  Description of Artificial Sequence: Synthetic oligonucleotide
  Antisense strand to SEQ ID NO: 613228
ucucccacccaauuccgga

SEQ ID NO: 613230 - RNA, 19 nt, Artificial Sequence
  Description of Artificial Sequence: Synthetic oligonucleotide
  Sense strand starting at position 2632 of SEQ ID NO: 585100
ggaauugggugggagagaa

SEQ ID NO: 613231 - RNA, 19 nt, Artificial Sequence
  Description of Artificial Sequence: Synthetic oligonucleotide
  Antisense strand to SEQ ID NO: 613230
uucucucccacccaauucc

SEQ ID NO: 613232 - RNA, 19 nt, Artificial Sequence
  Description of Artificial Sequence: Synthetic oligonucleotide
  Sense strand starting at position 2787 of SEQ ID NO: 585100
cgucauauucaggaguuug

SEQ ID NO: 613233 - RNA, 19 nt, Artificial Sequence
  Description of Artificial Sequence: Synthetic oligonucleotide
  Antisense strand to SEQ ID NO: 613232
caaacuccugaauaugacg

SEQ ID NO: 613234 - RNA, 19 nt, Artificial Sequence
  Description of Artificial Sequence: Synthetic oligonucleotide
  Sense strand starting at position 3064 of SEQ ID NO: 585100
ucaacuuauuuaggaugua

SEQ ID NO: 613235 - RNA, 19 nt, Artificial Sequence
  Description of Artificial Sequence: Synthetic oligonucleotide
  Antisense strand to SEQ ID NO: 613234
uacauccuaaauaaguuga

SEQ ID NO: 613236 - RNA, 19 nt, Artificial Sequence
  Description of Artificial Sequence: Synthetic oligonucleotide
  Sense strand starting at position 3136 of SEQ ID NO: 585100
uggugagcuaaugagucuu

SEQ ID NO: 613237 - RNA, 19 nt, Artificial Sequence
  Description of Artificial Sequence: Synthetic oligonucleotide
  Antisense strand to SEQ ID NO: 613236
aagacucauuagcucacca

SEQ ID NO: 613238 - RNA, 19 nt, Artificial Sequence
  Description of Artificial Sequence: Synthetic oligonucleotide
  Sense strand starting at position 3142 of SEQ ID NO: 585100
gcuaaugagucuuccauca

SEQ ID NO: 613239 - RNA, 19 nt, Artificial Sequence
  Description of Artificial Sequence: Synthetic oligonucleotide
  Antisense strand to SEQ ID NO: 613238
ugauggaagacucauuagc

SEQ ID NO: 613240 - RNA, 19 nt, Artificial Sequence
  Description of Artificial Sequence: Synthetic oligonucleotide
  Sense strand starting at position 3150 of SEQ ID NO: 585100
gucuuccaucaggaaagua

SEQ ID NO: 613241 - RNA, 19 nt, Artificial Sequence
  Description of Artificial Sequence: Synthetic oligonucleotide
  Antisense strand to SEQ ID NO: 613240
uacuuuccugauggaagac

SEQ ID NO: 613242 - RNA, 19 nt, Artificial Sequence
  Description of Artificial Sequence: Synthetic oligonucleotide
  Sense strand starting at position 3174 of SEQ ID NO: 585100
gucaaauauuguucuagga

SEQ ID NO: 613243 - RNA, 19 nt, Artificial Sequence
  Description of Artificial Sequence: Synthetic oligonucleotide
  Antisense strand to SEQ ID NO: 613242
uccuagaacaauauuugac

SEQ ID NO: 613244 - RNA, 19 nt, Artificial Sequence
  Description of Artificial Sequence: Synthetic oligonucleotide
  Sense strand starting at position 3227 of SEQ ID NO: 585100
caaagcacuugaucaggua

SEQ ID NO: 613245 - RNA, 19 nt, Artificial Sequence
  Description of Artificial Sequence: Synthetic oligonucleotide
  Antisense strand to SEQ ID NO: 613244
uaccugaucaagugcuuug

SEQ ID NO: 613246 - RNA, 19 nt, Artificial Sequence
  Description of Artificial Sequence: Synthetic oligonucleotide
  Sense strand starting at position 3235 of SEQ ID NO: 585100
uugaucagguacucagaaa

SEQ ID NO: 613247 - RNA, 19 nt, Artificial Sequence
  Description of Artificial Sequence: Synthetic oligonucleotide
  Antisense strand to SEQ ID NO: 613246
uuucugaguaccugaucaa

SEQ ID NO: 613248 - RNA, 19 nt, Artificial Sequence
  Description of Artificial Sequence: Synthetic oligonucleotide
  Sense strand starting at position 3276 of SEQ ID NO: 585100
ccacguaugcauuaaagga

SEQ ID NO: 613249 - RNA, 19 nt, Artificial Sequence
  Description of Artificial Sequence: Synthetic oligonucleotide
  Antisense strand to SEQ ID NO: 613248
uccuuuaaugcauacgugg

SEQ ID NO: 613250 - RNA, 19 nt, Artificial Sequence
  Description of Artificial Sequence: Synthetic oligonucleotide
  Sense strand starting at position 3379 of SEQ ID NO: 585100
gcaccuauugcugauuagu

SEQ ID NO: 613251 - RNA, 19 nt, Artificial Sequence
  Description of Artificial Sequence: Synthetic oligonucleotide
  Antisense strand to SEQ ID NO: 613250
acuaaucagcaauaggugc

SEQ ID NO: 613252 - RNA, 19 nt, Artificial Sequence
  Description of Artificial Sequence: Synthetic oligonucleotide
  Sense strand starting at position 3410 of SEQ ID NO: 585100
caccaagcaguaugugaaa

SEQ ID NO: 613253 - RNA, 19 nt, Artificial Sequence
  Description of Artificial Sequence: Synthetic oligonucleotide
  Antisense strand to SEQ ID NO: 613252
uuucacauacugcuuggug

SEQ ID NO: 613254 - RNA, 19 nt, Artificial Sequence
  Description of Artificial Sequence: Synthetic oligonucleotide
  Sense strand starting at position 3424 of SEQ ID NO: 585100
ugaaaugaccucuagucuu

SEQ ID NO: 613255 - RNA, 19 nt, Artificial Sequence
  Description of Artificial Sequence: Synthetic oligonucleotide
  Antisense strand to SEQ ID NO: 613254
aagacuagaggucauuuca

SEQ ID NO: 613256 - RNA, 19 nt, Artificial Sequence
  Description of Artificial Sequence: Synthetic oligonucleotide
  Sense strand starting at position 3437 of SEQ ID NO: 585100
agucuuaaggagugcucau

SEQ ID NO: 613257 - RNA, 19 nt, Artificial Sequence
  Description of Artificial Sequence: Synthetic oligonucleotide
  Antisense strand to SEQ ID NO: 613256
augagcacuccuuaagacu

SEQ ID NO: 613258 - RNA, 19 nt, Artificial Sequence
  Description of Artificial Sequence: Synthetic oligonucleotide
  Sense strand starting at position 3517 of SEQ ID NO: 585100
aggaguaaggguuguaaug

SEQ ID NO: 613259 - RNA, 19 nt, Artificial Sequence
  Description of Artificial Sequence: Synthetic oligonucleotide
  Antisense strand to SEQ ID NO: 613258
cauuacaacccuuacuccu

SEQ ID NO: 613260 - RNA, 19 nt, Artificial Sequence
  Description of Artificial Sequence: Synthetic oligonucleotide
  Sense strand starting at position 3572 of SEQ ID NO: 585100
aauuaaucccagcgugaug

SEQ ID NO: 613261 - RNA, 19 nt, Artificial Sequence
  Description of Artificial Sequence: Synthetic oligonucleotide
  Antisense strand to SEQ ID NO: 613260
caucacgcugggauuaauu

SEQ ID NO: 613262 - RNA, 19 nt, Artificial Sequence
  Description of Artificial Sequence: Synthetic oligonucleotide
  Sense strand starting at position 3583 of SEQ ID NO: 585100
gcgugauggucuuuggagg

SEQ ID NO: 613263 - RNA, 19 nt, Artificial Sequence
  Description of Artificial Sequence: Synthetic oligonucleotide
  Antisense strand to SEQ ID NO: 613262
ccuccaaagaccaucacgc

SEQ ID NO: 613264 - RNA, 19 nt, Artificial Sequence
  Description of Artificial Sequence: Synthetic oligonucleotide
  Sense strand starting at position 3606 of SEQ ID NO: 585100
gccuuugggaagugaauaa

SEQ ID NO: 613265 - RNA, 19 nt, Artificial Sequence
  Description of Artificial Sequence: Synthetic oligonucleotide
  Antisense strand to SEQ ID NO: 613264
uuauucacuucccaaaggc

SEQ ID NO: 613266 - RNA, 19 nt, Artificial Sequence
  Description of Artificial Sequence: Synthetic oligonucleotide
  Sense strand starting at position 3637 of SEQ ID NO: 585100
gagccucaugaaugggaau

SEQ ID NO: 613267 - RNA, 19 nt, Artificial Sequence
  Description of Artificial Sequence: Synthetic oligonucleotide
  Antisense strand to SEQ ID NO: 613266
auucccauucaugaggcuc

SEQ ID NO: 613268 - RNA, 19 nt, Artificial Sequence
  Description of Artificial Sequence: Synthetic oligonucleotide
  Sense strand starting at position 3651 of SEQ ID NO: 585100
ggaauagugccauaacgag

SEQ ID NO: 613269 - RNA, 19 nt, Artificial Sequence
  Description of Artificial Sequence: Synthetic oligonucleotide
  Antisense strand to SEQ ID NO: 613268
cucguuauggcacuauucc

SEQ ID NO: 613270 - RNA, 19 nt, Artificial Sequence
  Description of Artificial Sequence: Synthetic oligonucleotide
  Sense strand starting at position 3918 of SEQ ID NO: 585100
ggaguaggaucugacaaag

SEQ ID NO: 613271 - RNA, 19 nt, Artificial Sequence
  Description of Artificial Sequence: Synthetic oligonucleotide
  Antisense strand to SEQ ID NO: 613270
cuuugucagauccuacucc

SEQ ID NO: 613272 - RNA, 19 nt, Artificial Sequence
  Description of Artificial Sequence: Synthetic oligonucleotide
  Sense strand starting at position 181 of SEQ ID NO: 585101
accauuauuuauggaaaga

SEQ ID NO: 613273 - RNA, 19 nt, Artificial Sequence
  Description of Artificial Sequence: Synthetic oligonucleotide
  Antisense strand to SEQ ID NO: 613272
ucuuuccauaaauaauggu

SEQ ID NO: 613274 - RNA, 19 nt, Artificial Sequence
  Description of Artificial Sequence: Synthetic oligonucleotide
  Sense strand starting at position 220 of SEQ ID NO: 585101
ucuugaucacaaugcaaug

SEQ ID NO: 613275 - RNA, 19 nt, Artificial Sequence
  Description of Artificial Sequence: Synthetic oligonucleotide
  Antisense strand to SEQ ID NO: 613274
cauugcauugugaucaaga

SEQ ID NO: 613276 - RNA, 19 nt, Artificial Sequence
  Description of Artificial Sequence: Synthetic oligonucleotide
  Sense strand starting at position 306 of SEQ ID NO: 585101
guaugucuccuauaagcac

SEQ ID NO: 613277 - RNA, 19 nt, Artificial Sequence
  Description of Artificial Sequence: Synthetic oligonucleotide
  Antisense strand to SEQ ID NO: 613276
gugcuuauaggagacauac

SEQ ID NO: 613278 - RNA, 19 nt, Artificial Sequence
  Description of Artificial Sequence: Synthetic oligonucleotide
  Sense strand starting at position 341 of SEQ ID NO: 585101
gcagaaauuguaugcauuu

SEQ ID NO: 613279 - RNA, 19 nt, Artificial Sequence
  Description of Artificial Sequence: Synthetic oligonucleotide
  Antisense strand to SEQ ID NO: 613278
aaaugcauacaauuucugc

SEQ ID NO: 613280 - RNA, 19 nt, Artificial Sequence
  Description of Artificial Sequence: Synthetic oligonucleotide
  Sense strand starting at position 350 of SEQ ID NO: 585101
guaugcauuuauuagagaa

SEQ ID NO: 613281 - RNA, 19 nt, Artificial Sequence
  Description of Artificial Sequence: Synthetic oligonucleotide
  Antisense strand to SEQ ID NO: 613280
uucucuaauaaaugcauac

SEQ ID NO: 613282 - RNA, 19 nt, Artificial Sequence
  Description of Artificial Sequence: Synthetic oligonucleotide
  Sense strand starting at position 352 of SEQ ID NO: 585101
augcauuuauuagagaaca

SEQ ID NO: 613283 - RNA, 19 nt, Artificial Sequence
  Description of Artificial Sequence: Synthetic oligonucleotide
  Antisense strand to SEQ ID NO: 613282
uguucucuaauaaaugcau

SEQ ID NO: 613284 - RNA, 19 nt, Artificial Sequence
  Description of Artificial Sequence: Synthetic oligonucleotide
  Sense strand starting at position 467 of SEQ ID NO: 585101
uaagauuaguucuuggaca

SEQ ID NO: 613285 - RNA, 19 nt, Artificial Sequence
  Description of Artificial Sequence: Synthetic oligonucleotide
  Antisense strand to SEQ ID NO: 613284
uguccaagaacuaaucuua

SEQ ID NO: 613286 - RNA, 19 nt, Artificial Sequence
  Description of Artificial Sequence: Synthetic oligonucleotide
  Sense strand starting at position 555 of SEQ ID NO: 585101
gucuuaacccauuauaguu

SEQ ID NO: 613287 - RNA, 19 nt, Artificial Sequence
  Description of Artificial Sequence: Synthetic oligonucleotide
  Antisense strand to SEQ ID NO: 613286
aacuauaauggguuaagac

SEQ ID NO: 613288 - RNA, 19 nt, Artificial Sequence
  Description of Artificial Sequence: Synthetic oligonucleotide
  Sense strand starting at position 604 of SEQ ID NO: 585101
aggcaugccagguaaacau

SEQ ID NO: 613289 - RNA, 19 nt, Artificial Sequence
  Description of Artificial Sequence: Synthetic oligonucleotide
  Antisense strand to SEQ ID NO: 613288
auguuuaccuggcaugccu

SEQ ID NO: 613290 - RNA, 19 nt, Artificial Sequence
  Description of Artificial Sequence: Synthetic oligonucleotide
  Sense strand starting at position 638 of SEQ ID NO: 585101
aagcuuuaaucaguaagug

SEQ ID NO: 613291 - RNA, 19 nt, Artificial Sequence
  Description of Artificial Sequence: Synthetic oligonucleotide
  Antisense strand to SEQ ID NO: 613290
cacuuacugauuaaagcuu

SEQ ID NO: 613292 - RNA, 19 nt, Artificial Sequence
  Description of Artificial Sequence: Synthetic oligonucleotide
  Sense strand starting at position 639 of SEQ ID NO: 585101
agcuuuaaucaguaagugu

SEQ ID NO: 613293 - RNA, 19 nt, Artificial Sequence
  Description of Artificial Sequence: Synthetic oligonucleotide
  Antisense strand to SEQ ID NO: 613292
acacuuacugauuaaagcu

SEQ ID NO: 613294 - RNA, 19 nt, Artificial Sequence
  Description of Artificial Sequence: Synthetic oligonucleotide
  Sense strand starting at position 648 of SEQ ID NO: 585101
caguaaguguaaccgauuu

SEQ ID NO: 613295 - RNA, 19 nt, Artificial Sequence
  Description of Artificial Sequence: Synthetic oligonucleotide
  Antisense strand to SEQ ID NO: 613294
aaaucgguuacacuuacug

SEQ ID NO: 613296 - RNA, 19 nt, Artificial Sequence
  Description of Artificial Sequence: Synthetic oligonucleotide
  Sense strand starting at position 650 of SEQ ID NO: 585101
guaaguguaaccgauuugu

SEQ ID NO: 613297 - RNA, 19 nt, Artificial Sequence
  Description of Artificial Sequence: Synthetic oligonucleotide
  Antisense strand to SEQ ID NO: 613296
acaaaucgguuacacuuac

SEQ ID NO: 613298 - RNA, 19 nt, Artificial Sequence
  Description of Artificial Sequence: Synthetic oligonucleotide
  Sense strand starting at position 791 of SEQ ID NO: 585101
acuagaaggguaugucaca

SEQ ID NO: 613299 - RNA, 19 nt, Artificial Sequence
  Description of Artificial Sequence: Synthetic oligonucleotide
  Antisense strand to SEQ ID NO: 613298
ugugacauacccuucuagu

SEQ ID NO: 613300 - RNA, 19 nt, Artificial Sequence
  Description of Artificial Sequence: Synthetic oligonucleotide
  Sense strand starting at position 792 of SEQ ID NO: 585101
cuagaaggguaugucacaa

SEQ ID NO: 613301 - RNA, 19 nt, Artificial Sequence
  Description of Artificial Sequence: Synthetic oligonucleotide
  Antisense strand to SEQ ID NO: 613300
uugugacauacccuucuag

SEQ ID NO: 613302 - RNA, 19 nt, Artificial Sequence
  Description of Artificial Sequence: Synthetic oligonucleotide
  Sense strand starting at position 2107 of SEQ ID NO: 585101
aacugagauuucgagagau

SEQ ID NO: 613303 - RNA, 19 nt, Artificial Sequence
  Description of Artificial Sequence: Synthetic oligonucleotide
  Antisense strand to SEQ ID NO: 613302
aucucucgaaaucucaguu

SEQ ID NO: 613304 - RNA, 19 nt, Artificial Sequence
  Description of Artificial Sequence: Synthetic oligonucleotide
  Sense strand starting at position 2171 of SEQ ID NO: 585101
ggagguuugcgucaauaaa

SEQ ID NO: 613305 - RNA, 19 nt, Artificial Sequence
  Description of Artificial Sequence: Synthetic oligonucleotide
  Antisense strand to SEQ ID NO: 613304
uuuauugacgcaaaccucc

SEQ ID NO: 613306 - RNA, 19 nt, Artificial Sequence
  Description of Artificial Sequence: Synthetic oligonucleotide
  Sense strand starting at position 2222 of SEQ ID NO: 585101
gguuuaagggauggaacuu

SEQ ID NO: 613307 - RNA, 19 nt, Artificial Sequence
  Description of Artificial Sequence: Synthetic oligonucleotide
  Antisense strand to SEQ ID NO: 613306
aaguuccaucccuuaaacc

SEQ ID NO: 613308 - RNA, 19 nt, Artificial Sequence
  Description of Artificial Sequence: Synthetic oligonucleotide
  Sense strand starting at position 2245 of SEQ ID NO: 585101
gugguugaagaguagugaa

SEQ ID NO: 613309 - RNA, 19 nt, Artificial Sequence
  Description of Artificial Sequence: Synthetic oligonucleotide
  Antisense strand to SEQ ID NO: 613308
uucacuacucuucaaccac

SEQ ID NO: 613310 - RNA, 19 nt, Artificial Sequence
  Description of Artificial Sequence: Synthetic oligonucleotide
  Sense strand starting at position 2281 of SEQ ID NO: 585101
cacggaguucgagaacuuu

SEQ ID NO: 613311 - RNA, 19 nt, Artificial Sequence
  Description of Artificial Sequence: Synthetic oligonucleotide
  Antisense strand to SEQ ID NO: 613310
aaaguucucgaacuccgug

SEQ ID NO: 613312 - RNA, 19 nt, Artificial Sequence
  Description of Artificial Sequence: Synthetic oligonucleotide
  Sense strand starting at position 2472 of SEQ ID NO: 585101
gggagaugugggugcugau

SEQ ID NO: 613313 - RNA, 19 nt, Artificial Sequence
  Description of Artificial Sequence: Synthetic oligonucleotide
  Antisense strand to SEQ ID NO: 613312
aucagcacccacaucuccc

SEQ ID NO: 613314 - RNA, 19 nt, Artificial Sequence
  Description of Artificial Sequence: Synthetic oligonucleotide
  Sense strand starting at position 2666 of SEQ ID NO: 585101
guugcuaaagcugaguuaa

SEQ ID NO: 613315 - RNA, 19 nt, Artificial Sequence
  Description of Artificial Sequence: Synthetic oligonucleotide
  Antisense strand to SEQ ID NO: 613314
uuaacucagcuuuagcaac

SEQ ID NO: 613316 - RNA, 19 nt, Artificial Sequence
  Description of Artificial Sequence: Synthetic oligonucleotide
  Sense strand starting at position 2720 of SEQ ID NO: 585101
aaaugaaucuaggauggau

SEQ ID NO: 613317 - RNA, 19 nt, Artificial Sequence
  Description of Artificial Sequence: Synthetic oligonucleotide
  Antisense strand to SEQ ID NO: 613316
auccauccuagauucauuu

SEQ ID NO: 613318 - RNA, 19 nt, Artificial Sequence
  Description of Artificial Sequence: Synthetic oligonucleotide
  Sense strand starting at position 2882 of SEQ ID NO: 585101
gaaaguaauggugaggucu

SEQ ID NO: 613319 - RNA, 19 nt, Artificial Sequence
  Description of Artificial Sequence: Synthetic oligonucleotide
  Antisense strand to SEQ ID NO: 613318
agaccucaccauuacuuuc

SEQ ID NO: 613320 - RNA, 19 nt, Artificial Sequence
  Description of Artificial Sequence: Synthetic oligonucleotide
  Sense strand starting at position 3148 of SEQ ID NO: 585101
guggucucaccauauuggu

SEQ ID NO: 613321 - RNA, 19 nt, Artificial Sequence
  Description of Artificial Sequence: Synthetic oligonucleotide
  Antisense strand to SEQ ID NO: 613320
accaauauggugagaccac

SEQ ID NO: 613322 - RNA, 19 nt, Artificial Sequence
  Description of Artificial Sequence: Synthetic oligonucleotide
  Sense strand starting at position 3274 of SEQ ID NO: 585101
augauuggguguccucuua

SEQ ID NO: 613323 - RNA, 19 nt, Artificial Sequence
  Description of Artificial Sequence: Synthetic oligonucleotide
  Antisense strand to SEQ ID NO: 613322
uaagaggacacccaaucau

SEQ ID NO: 613324 - RNA, 19 nt, Artificial Sequence
  Description of Artificial Sequence: Synthetic oligonucleotide
  Sense strand starting at position 3328 of SEQ ID NO: 585101
gccugcuuuccugauuucu

SEQ ID NO: 613325 - RNA, 19 nt, Artificial Sequence
  Description of Artificial Sequence: Synthetic oligonucleotide
  Antisense strand to SEQ ID NO: 613324
agaaaucaggaaagcaggc

SEQ ID NO: 613326 - RNA, 19 nt, Artificial Sequence
  Description of Artificial Sequence: Synthetic oligonucleotide
  Sense strand starting at position 3558 of SEQ ID NO: 585101
agauucuuucccuguucca

SEQ ID NO: 613327 - RNA, 19 nt, Artificial Sequence
  Description of Artificial Sequence: Synthetic oligonucleotide
  Antisense strand to SEQ ID NO: 613326
uggaacagggaaagaaucu

SEQ ID NO: 613328 - RNA, 19 nt, Artificial Sequence
  Description of Artificial Sequence: Synthetic oligonucleotide
  Sense strand starting at position 3629 of SEQ ID NO: 585101
ugugcuaaucuuggaagau

SEQ ID NO: 613329 - RNA, 19 nt, Artificial Sequence
  Description of Artificial Sequence: Synthetic oligonucleotide
  Antisense strand to SEQ ID NO: 613328
aucuuccaagauuagcaca

SEQ ID NO: 613330 - RNA, 19 nt, Artificial Sequence
  Description of Artificial Sequence: Synthetic oligonucleotide
  Sense strand starting at position 3677 of SEQ ID NO: 585101
gaguguuugcauuauuacc

SEQ ID NO: 613331 - RNA, 19 nt, Artificial Sequence
  Description of Artificial Sequence: Synthetic oligonucleotide
  Antisense strand to SEQ ID NO: 613330
gguaauaaugcaaacacuc

SEQ ID NO: 613332 - RNA, 19 nt, Artificial Sequence
  Description of Artificial Sequence: Synthetic oligonucleotide
  Sense strand starting at position 3685 of SEQ ID NO: 585101
gcauuauuacccuaugaug

SEQ ID NO: 613333 - RNA, 19 nt, Artificial Sequence
  Description of Artificial Sequence: Synthetic oligonucleotide
  Antisense strand to SEQ ID NO: 613332
caucauaggguaauaaugc

SEQ ID NO: 613334 - RNA, 19 nt, Artificial Sequence
  Description of Artificial Sequence: Synthetic oligonucleotide
  Sense strand starting at position 3687 of SEQ ID NO: 585101
auuauuacccuaugaugua

SEQ ID NO: 613335 - RNA, 19 nt, Artificial Sequence
  Description of Artificial Sequence: Synthetic oligonucleotide
  Antisense strand to SEQ ID NO: 613334
uacaucauaggguaauaau

SEQ ID NO: 613336 - RNA, 19 nt, Artificial Sequence
  Description of Artificial Sequence: Synthetic oligonucleotide
  Sense strand starting at position 3699 of SEQ ID NO: 585101
ugauguaauguguauagug

SEQ ID NO: 613337 - RNA, 19 nt, Artificial Sequence
  Description of Artificial Sequence: Synthetic oligonucleotide
  Antisense strand to SEQ ID NO: 613336
cacuauacacauuacauca

SEQ ID NO: 613338 - RNA, 19 nt, Artificial Sequence
  Description of Artificial Sequence: Synthetic oligonucleotide
  Sense strand starting at position 3706 of SEQ ID NO: 585101
auguguauagugcagagau

SEQ ID NO: 613339 - RNA, 19 nt, Artificial Sequence
  Description of Artificial Sequence: Synthetic oligonucleotide
  Antisense strand to SEQ ID NO: 613338
aucucugcacuauacacau

SEQ ID NO: 613340 - RNA, 19 nt, Artificial Sequence
  Description of Artificial Sequence: Synthetic oligonucleotide
  Sense strand starting at position 3708 of SEQ ID NO: 585101
guguauagugcagagauaa

SEQ ID NO: 613341 - RNA, 19 nt, Artificial Sequence
  Description of Artificial Sequence: Synthetic oligonucleotide
  Antisense strand to SEQ ID NO: 613340
uuaucucugcacuauacac

SEQ ID NO: 613342 - RNA, 19 nt, Artificial Sequence
  Description of Artificial Sequence: Synthetic oligonucleotide
  Sense strand starting at position 3728 of SEQ ID NO: 585101
ugcacagagagcuauugaa

SEQ ID NO: 613343 - RNA, 19 nt, Artificial Sequence
  Description of Artificial Sequence: Synthetic oligonucleotide
  Antisense strand to SEQ ID NO: 613342
uucaauagcucucugugca

SEQ ID NO: 613344 - RNA, 19 nt, Artificial Sequence
  Description of Artificial Sequence: Synthetic oligonucleotide
  Sense strand starting at position 3738 of SEQ ID NO: 585101
gcuauugaagcucagaaga

SEQ ID NO: 613345 - RNA, 19 nt, Artificial Sequence
  Description of Artificial Sequence: Synthetic oligonucleotide
  Antisense strand to SEQ ID NO: 613344
ucuucugagcuucaauagc

SEQ ID NO: 613346 - RNA, 19 nt, Artificial Sequence
  Description of Artificial Sequence: Synthetic oligonucleotide
  Sense strand starting at position 3849 of SEQ ID NO: 585101
ggcgguugggaggaguaaa

SEQ ID NO: 613347 - RNA, 19 nt, Artificial Sequence
  Description of Artificial Sequence: Synthetic oligonucleotide
  Antisense strand to SEQ ID NO: 613346
uuuacuccucccaaccgcc

SEQ ID NO: 613348 - RNA, 19 nt, Artificial Sequence
  Description of Artificial Sequence: Synthetic oligonucleotide
  Sense strand starting at position 3900 of SEQ ID NO: 585101
guaagaaacuggucuuugu

SEQ ID NO: 613349 - RNA, 19 nt, Artificial Sequence
  Description of Artificial Sequence: Synthetic oligonucleotide
  Antisense strand to SEQ ID NO: 613348
acaaagaccaguuucuuac

SEQ ID NO: 613350 - RNA, 19 nt, Artificial Sequence
  Description of Artificial Sequence: Synthetic oligonucleotide
  Sense strand starting at position 3910 of SEQ ID NO: 585101
ggucuuugugcugaacuaa

SEQ ID NO: 613351 - RNA, 19 nt, Artificial Sequence
  Description of Artificial Sequence: Synthetic oligonucleotide
  Antisense strand to SEQ ID NO: 613350
uuaguucagcacaaagacc

SEQ ID NO: 613352 - RNA, 19 nt, Artificial Sequence
  Description of Artificial Sequence: Synthetic oligonucleotide
  Sense strand starting at position 160 of SEQ ID NO: 585102
ucaugagaagcguaacaaa

SEQ ID NO: 613353 - RNA, 19 nt, Artificial Sequence
  Description of Artificial Sequence: Synthetic oligonucleotide
  Antisense strand to SEQ ID NO: 613352
uuuguuacgcuucucauga

SEQ ID NO: 613354 - RNA, 19 nt, Artificial Sequence
  Description of Artificial Sequence: Synthetic oligonucleotide
  Sense strand starting at position 368 of SEQ ID NO: 585102
uuuguuacccuugaugaca

SEQ ID NO: 613355 - RNA, 19 nt, Artificial Sequence
  Description of Artificial Sequence: Synthetic oligonucleotide
  Antisense strand to SEQ ID NO: 613354
ugucaucaaggguaacaaa

SEQ ID NO: 613356 - RNA, 19 nt, Artificial Sequence
  Description of Artificial Sequence: Synthetic oligonucleotide
  Sense strand starting at position 493 of SEQ ID NO: 585102
ugcuacauugcacauguaa

SEQ ID NO: 613357 - RNA, 19 nt, Artificial Sequence
  Description of Artificial Sequence: Synthetic oligonucleotide
  Antisense strand to SEQ ID NO: 613356
uuacaugugcaauguagca

SEQ ID NO: 613358 - RNA, 19 nt, Artificial Sequence
  Description of Artificial Sequence: Synthetic oligonucleotide
  Sense strand starting at position 551 of SEQ ID NO: 585102
cccaguuaagcugaugaaa

SEQ ID NO: 613359 - RNA, 19 nt, Artificial Sequence
  Description of Artificial Sequence: Synthetic oligonucleotide
  Antisense strand to SEQ ID NO: 613358
uuucaucagcuuaacuggg

SEQ ID NO: 613360 - RNA, 19 nt, Artificial Sequence
  Description of Artificial Sequence: Synthetic oligonucleotide
  Sense strand starting at position 738 of SEQ ID NO: 585102
ugaaauacauacuuuggua

SEQ ID NO: 613361 - RNA, 19 nt, Artificial Sequence
  Description of Artificial Sequence: Synthetic oligonucleotide
  Antisense strand to SEQ ID NO: 613360
uaccaaaguauguauuuca

SEQ ID NO: 613362 - RNA, 19 nt, Artificial Sequence
  Description of Artificial Sequence: Synthetic oligonucleotide
  Sense strand starting at position 850 of SEQ ID NO: 585102
gugaacauauaugucaaua

SEQ ID NO: 613363 - RNA, 19 nt, Artificial Sequence
  Description of Artificial Sequence: Synthetic oligonucleotide
  Antisense strand to SEQ ID NO: 613362
uauugacauauauguucac

SEQ ID NO: 613364 - RNA, 19 nt, Artificial Sequence
  Description of Artificial Sequence: Synthetic oligonucleotide
  Sense strand starting at position 1187 of SEQ ID NO: 585102
ggccauuaauuguuaacua

SEQ ID NO: 613365 - RNA, 19 nt, Artificial Sequence
  Description of Artificial Sequence: Synthetic oligonucleotide
  Antisense strand to SEQ ID NO: 613364
uaguuaacaauuaauggcc

SEQ ID NO: 613366 - RNA, 19 nt, Artificial Sequence
  Description of Artificial Sequence: Synthetic oligonucleotide
  Sense strand starting at position 1248 of SEQ ID NO: 585102
gggugacuucaguaguuuc

SEQ ID NO: 613367 - RNA, 19 nt, Artificial Sequence
  Description of Artificial Sequence: Synthetic oligonucleotide
  Antisense strand to SEQ ID NO: 613366
gaaacuacugaagucaccc

SEQ ID NO: 613368 - RNA, 19 nt, Artificial Sequence
  Description of Artificial Sequence: Synthetic oligonucleotide
  Sense strand starting at position 1328 of SEQ ID NO: 585102
gaauaacuucuuggacugu

SEQ ID NO: 613369 - RNA, 19 nt, Artificial Sequence
  Description of Artificial Sequence: Synthetic oligonucleotide
  Antisense strand to SEQ ID NO: 613368
acaguccaagaaguuauuc

SEQ ID NO: 613370 - RNA, 19 nt, Artificial Sequence
  Description of Artificial Sequence: Synthetic oligonucleotide
  Sense strand starting at position 1339 of SEQ ID NO: 585102
uggacuguuaaguaagcua

SEQ ID NO: 613371 - RNA, 19 nt, Artificial Sequence
  Description of Artificial Sequence: Synthetic oligonucleotide
  Antisense strand to SEQ ID NO: 613370
uagcuuacuuaacagucca

SEQ ID NO: 613372 - RNA, 19 nt, Artificial Sequence
  Description of Artificial Sequence: Synthetic oligonucleotide
  Sense strand starting at position 1347 of SEQ ID NO: 585102
uaaguaagcuaaguguaga

SEQ ID NO: 613373 - RNA, 19 nt, Artificial Sequence
  Description of Artificial Sequence: Synthetic oligonucleotide
  Antisense strand to SEQ ID NO: 613372
ucuacacuuagcuuacuua

SEQ ID NO: 613374 - RNA, 19 nt, Artificial Sequence
  Description of Artificial Sequence: Synthetic oligonucleotide
  Sense strand starting at position 1375 of SEQ ID NO: 585102
agaguaagaaaguguugga

SEQ ID NO: 613375 - RNA, 19 nt, Artificial Sequence
  Description of Artificial Sequence: Synthetic oligonucleotide
  Antisense strand to SEQ ID NO: 613374
uccaacacuuucuuacucu

SEQ ID NO: 613376 - RNA, 19 nt, Artificial Sequence
  Description of Artificial Sequence: Synthetic oligonucleotide
  Sense strand starting at position 1510 of SEQ ID NO: 585102
cagagauagugucuuauac

SEQ ID NO: 613377 - RNA, 19 nt, Artificial Sequence
  Description of Artificial Sequence: Synthetic oligonucleotide
  Antisense strand to SEQ ID NO: 613376
guauaagacacuaucucug

SEQ ID NO: 613378 - RNA, 19 nt, Artificial Sequence
  Description of Artificial Sequence: Synthetic oligonucleotide
  Sense strand starting at position 1549 of SEQ ID NO: 585102
ucuacuguucuguauaaua

SEQ ID NO: 613379 - RNA, 19 nt, Artificial Sequence
  Description of Artificial Sequence: Synthetic oligonucleotide
  Antisense strand to SEQ ID NO: 613378
uauuauacagaacaguaga

SEQ ID NO: 613380 - RNA, 19 nt, Artificial Sequence
  Description of Artificial Sequence: Synthetic oligonucleotide
  Sense strand starting at position 1602 of SEQ ID NO: 585102
agguuuacuguccauucua

SEQ ID NO: 613381 - RNA, 19 nt, Artificial Sequence
  Description of Artificial Sequence: Synthetic oligonucleotide
  Antisense strand to SEQ ID NO: 613380
uagaauggacaguaaaccu

SEQ ID NO: 613382 - RNA, 19 nt, Artificial Sequence
  Description of Artificial Sequence: Synthetic oligonucleotide
  Sense strand starting at position 1647 of SEQ ID NO: 585102
guucuucuccuguaacaca

SEQ ID NO: 613383 - RNA, 19 nt, Artificial Sequence
  Description of Artificial Sequence: Synthetic oligonucleotide
  Antisense strand to SEQ ID NO: 613382
uguguuacaggagaagaac

SEQ ID NO: 613384 - RNA, 19 nt, Artificial Sequence
  Description of Artificial Sequence: Synthetic oligonucleotide
  Sense strand starting at position 1692 of SEQ ID NO: 585102
guacucuugcuagugcuau

SEQ ID NO: 613385 - RNA, 19 nt, Artificial Sequence
  Description of Artificial Sequence: Synthetic oligonucleotide
  Antisense strand to SEQ ID NO: 613384
auagcacuagcaagaguac

SEQ ID NO: 613386 - RNA, 19 nt, Artificial Sequence
  Description of Artificial Sequence: Synthetic oligonucleotide
  Sense strand starting at position 1704 of SEQ ID NO: 585102
gugcuaugagcauaaacaa

SEQ ID NO: 613387 - RNA, 19 nt, Artificial Sequence
  Description of Artificial Sequence: Synthetic oligonucleotide
  Antisense strand to SEQ ID NO: 613386
uuguuuaugcucauagcac

SEQ ID NO: 613388 - RNA, 19 nt, Artificial Sequence
  Description of Artificial Sequence: Synthetic oligonucleotide
  Sense strand starting at position 1846 of SEQ ID NO: 585102
auagaaauuuggcaaauac

SEQ ID NO: 613389 - RNA, 19 nt, Artificial Sequence
  Description of Artificial Sequence: Synthetic oligonucleotide
  Antisense strand to SEQ ID NO: 613388
guauuugccaaauuucuau

SEQ ID NO: 613390 - RNA, 19 nt, Artificial Sequence
  Description of Artificial Sequence: Synthetic oligonucleotide
  Sense strand starting at position 1855 of SEQ ID NO: 585102
uggcaaauacucgaaucua

SEQ ID NO: 613391 - RNA, 19 nt, Artificial Sequence
  Description of Artificial Sequence: Synthetic oligonucleotide
  Antisense strand to SEQ ID NO: 613390
uagauucgaguauuugcca

SEQ ID NO: 613392 - RNA, 19 nt, Artificial Sequence
  Description of Artificial Sequence: Synthetic oligonucleotide
  Sense strand starting at position 2107 of SEQ ID NO: 585102
aaagauauauguccuucga

SEQ ID NO: 613393 - RNA, 19 nt, Artificial Sequence
  Description of Artificial Sequence: Synthetic oligonucleotide
  Antisense strand to SEQ ID NO: 613392
ucgaaggacauauaucuuu

SEQ ID NO: 613394 - RNA, 19 nt, Artificial Sequence
  Description of Artificial Sequence: Synthetic oligonucleotide
  Sense strand starting at position 2109 of SEQ ID NO: 585102
agauauauguccuucgaag

SEQ ID NO: 613395 - RNA, 19 nt, Artificial Sequence
  Description of Artificial Sequence: Synthetic oligonucleotide
  Antisense strand to SEQ ID NO: 613394
cuucgaaggacauauaucu

SEQ ID NO: 613396 - RNA, 19 nt, Artificial Sequence
  Description of Artificial Sequence: Synthetic oligonucleotide
  Sense strand starting at position 2671 of SEQ ID NO: 585102
ugaguacguauauauguau

SEQ ID NO: 613397 - RNA, 19 nt, Artificial Sequence
  Description of Artificial Sequence: Synthetic oligonucleotide
  Antisense strand to SEQ ID NO: 613396
auacauauauacguacuca

SEQ ID NO: 613398 - RNA, 19 nt, Artificial Sequence
  Description of Artificial Sequence: Synthetic oligonucleotide
  Sense strand starting at position 2831 of SEQ ID NO: 585102
uuguccuugguauaauuau

SEQ ID NO: 613399 - RNA, 19 nt, Artificial Sequence
  Description of Artificial Sequence: Synthetic oligonucleotide
  Antisense strand to SEQ ID NO: 613398
auaauuauaccaaggacaa

SEQ ID NO: 613400 - RNA, 19 nt, Artificial Sequence
  Description of Artificial Sequence: Synthetic oligonucleotide
  Sense strand starting at position 2992 of SEQ ID NO: 585102
gguaacuauuucuaagauc

SEQ ID NO: 613401 - RNA, 19 nt, Artificial Sequence
  Description of Artificial Sequence: Synthetic oligonucleotide
  Antisense strand to SEQ ID NO: 613400
gaucuuagaaauaguuacc

SEQ ID NO: 613402 - RNA, 19 nt, Artificial Sequence
  Description of Artificial Sequence: Synthetic oligonucleotide
  Sense strand starting at position 3053 of SEQ ID NO: 585102
aaugaugucgaagauagcu

SEQ ID NO: 613403 - RNA, 19 nt, Artificial Sequence
  Description of Artificial Sequence: Synthetic oligonucleotide
  Antisense strand to SEQ ID NO: 613402
agcuaucuucgacaucauu

SEQ ID NO: 613404 - RNA, 19 nt, Artificial Sequence
  Description of Artificial Sequence: Synthetic oligonucleotide
  Sense strand starting at position 3062 of SEQ ID NO: 585102
gaagauagcuucuccugua

SEQ ID NO: 613405 - RNA, 19 nt, Artificial Sequence
  Description of Artificial Sequence: Synthetic oligonucleotide
  Antisense strand to SEQ ID NO: 613404
uacaggagaagcuaucuuc

SEQ ID NO: 613406 - RNA, 19 nt, Artificial Sequence
  Description of Artificial Sequence: Synthetic oligonucleotide
  Sense strand starting at position 3069 of SEQ ID NO: 585102
gcuucuccuguacauauau

SEQ ID NO: 613407 - RNA, 19 nt, Artificial Sequence
  Description of Artificial Sequence: Synthetic oligonucleotide
  Antisense strand to SEQ ID NO: 613406
auauauguacaggagaagc

SEQ ID NO: 613408 - RNA, 19 nt, Artificial Sequence
  Description of Artificial Sequence: Synthetic oligonucleotide
  Sense strand starting at position 3218 of SEQ ID NO: 585102
uaggcuaggaauuguagua

SEQ ID NO: 613409 - RNA, 19 nt, Artificial Sequence
  Description of Artificial Sequence: Synthetic oligonucleotide
  Antisense strand to SEQ ID NO: 613408
uacuacaauuccuagccua

SEQ ID NO: 613410 - RNA, 19 nt, Artificial Sequence
  Description of Artificial Sequence: Synthetic oligonucleotide
  Sense strand starting at position 3234 of SEQ ID NO: 585102
guaaguaugagguauagcu

SEQ ID NO: 613411 - RNA, 19 nt, Artificial Sequence
  Description of Artificial Sequence: Synthetic oligonucleotide
  Antisense strand to SEQ ID NO: 613410
agcuauaccucauacuuac

SEQ ID NO: 613412 - RNA, 19 nt, Artificial Sequence
  Description of Artificial Sequence: Synthetic oligonucleotide
  Sense strand starting at position 3236 of SEQ ID NO: 585102
aaguaugagguauagcuaa

SEQ ID NO: 613413 - RNA, 19 nt, Artificial Sequence
  Description of Artificial Sequence: Synthetic oligonucleotide
  Antisense strand to SEQ ID NO: 613412
uuagcuauaccucauacuu

SEQ ID NO: 613414 - RNA, 19 nt, Artificial Sequence
  Description of Artificial Sequence: Synthetic oligonucleotide
  Sense strand starting at position 3249 of SEQ ID NO: 585102
agcuaaguucuugaucuca

SEQ ID NO: 613415 - RNA, 19 nt, Artificial Sequence
  Description of Artificial Sequence: Synthetic oligonucleotide
  Antisense strand to SEQ ID NO: 613414
ugagaucaagaacuuagcu

SEQ ID NO: 613416 - RNA, 19 nt, Artificial Sequence
  Description of Artificial Sequence: Synthetic oligonucleotide
  Sense strand starting at position 3362 of SEQ ID NO: 585102
auaugaauagcauaaugcu

SEQ ID NO: 613417 - RNA, 19 nt, Artificial Sequence
  Description of Artificial Sequence: Synthetic oligonucleotide
  Antisense strand to SEQ ID NO: 613416
agcauuaugcuauucauau

SEQ ID NO: 613418 - RNA, 19 nt, Artificial Sequence
  Description of Artificial Sequence: Synthetic oligonucleotide
  Sense strand starting at position 3567 of SEQ ID NO: 585102
aaccacuguuauguggaaa

SEQ ID NO: 613419 - RNA, 19 nt, Artificial Sequence
  Description of Artificial Sequence: Synthetic oligonucleotide
  Antisense strand to SEQ ID NO: 613418
uuuccacauaacagugguu

SEQ ID NO: 613420 - RNA, 19 nt, Artificial Sequence
  Description of Artificial Sequence: Synthetic oligonucleotide
  Sense strand starting at position 3718 of SEQ ID NO: 585102
aagcaagaauuggcuaguu

SEQ ID NO: 613421 - RNA, 19 nt, Artificial Sequence
  Description of Artificial Sequence: Synthetic oligonucleotide
  Antisense strand to SEQ ID NO: 613420
aacuagccaauucuugcuu

SEQ ID NO: 613422 - RNA, 19 nt, Artificial Sequence
  Description of Artificial Sequence: Synthetic oligonucleotide
  Sense strand starting at position 3720 of SEQ ID NO: 585102
gcaagaauuggcuaguuug

SEQ ID NO: 613423 - RNA, 19 nt, Artificial Sequence
  Description of Artificial Sequence: Synthetic oligonucleotide
  Antisense strand to SEQ ID NO: 613422
caaacuagccaauucuugc

SEQ ID NO: 613424 - RNA, 19 nt, Artificial Sequence
  Description of Artificial Sequence: Synthetic oligonucleotide
  Sense strand starting at position 3753 of SEQ ID NO: 585102
aagaaauaaggccgcuuaa

SEQ ID NO: 613425 - RNA, 19 nt, Artificial Sequence
  Description of Artificial Sequence: Synthetic oligonucleotide
  Antisense strand to SEQ ID NO: 613424
uuaagcggccuuauuucuu

SEQ ID NO: 613426 - RNA, 19 nt, Artificial Sequence
  Description of Artificial Sequence: Synthetic oligonucleotide
  Sense strand starting at position 3856 of SEQ ID NO: 585102
ugcaguuaagauuagauua

SEQ ID NO: 613427 - RNA, 19 nt, Artificial Sequence
  Description of Artificial Sequence: Synthetic oligonucleotide
  Antisense strand to SEQ ID NO: 613426
uaaucuaaucuuaacugca

SEQ ID NO: 613428 - RNA, 19 nt, Artificial Sequence
  Description of Artificial Sequence: Synthetic oligonucleotide
  Sense strand starting at position 3939 of SEQ ID NO: 585102
gagggaugaggaugugcuu

SEQ ID NO: 613429 - RNA, 19 nt, Artificial Sequence
  Description of Artificial Sequence: Synthetic oligonucleotide
  Antisense strand to SEQ ID NO: 613428
aagcacauccucaucccuc

SEQ ID NO: 613430 - RNA, 19 nt, Artificial Sequence
  Description of Artificial Sequence: Synthetic oligonucleotide
  Sense strand starting at position 3942 of SEQ ID NO: 585102
ggaugaggaugugcuucau

SEQ ID NO: 613431 - RNA, 19 nt, Artificial Sequence
  Description of Artificial Sequence: Synthetic oligonucleotide
  Antisense strand to SEQ ID NO: 613430
augaagcacauccucaucc

SEQ ID NO: 613432 - RNA, 19 nt, Artificial Sequence
  Description of Artificial Sequence: Synthetic oligonucleotide
  Sense strand starting at position 32 of SEQ ID NO: 585103
ggugguggcuuacuuauuu

SEQ ID NO: 613433 - RNA, 19 nt, Artificial Sequence
  Description of Artificial Sequence: Synthetic oligonucleotide
  Antisense strand to SEQ ID NO: 613432
aaauaaguaagccaccacc

SEQ ID NO: 613434 - RNA, 19 nt, Artificial Sequence
  Description of Artificial Sequence: Synthetic oligonucleotide
  Sense strand starting at position 184 of SEQ ID NO: 585103
uaguuuggagucuauagau

SEQ ID NO: 613435 - RNA, 19 nt, Artificial Sequence
  Description of Artificial Sequence: Synthetic oligonucleotide
  Antisense strand to SEQ ID NO: 613434
aucuauagacuccaaacua

SEQ ID NO: 613436 - RNA, 19 nt, Artificial Sequence
  Description of Artificial Sequence: Synthetic oligonucleotide
  Sense strand starting at position 219 of SEQ ID NO: 585103
cuuagaaagugccucugua

SEQ ID NO: 613437 - RNA, 19 nt, Artificial Sequence
  Description of Artificial Sequence: Synthetic oligonucleotide
  Antisense strand to SEQ ID NO: 613436
uacagaggcacuuucuaag

SEQ ID NO: 613438 - RNA, 19 nt, Artificial Sequence
  Description of Artificial Sequence: Synthetic oligonucleotide
  Sense strand starting at position 229 of SEQ ID NO: 585103
gccucuguaguugaauaaa

SEQ ID NO: 613439 - RNA, 19 nt, Artificial Sequence
  Description of Artificial Sequence: Synthetic oligonucleotide
  Antisense strand to SEQ ID NO: 613438
uuuauucaacuacagaggc

SEQ ID NO: 613440 - RNA, 19 nt, Artificial Sequence
  Description of Artificial Sequence: Synthetic oligonucleotide
  Sense strand starting at position 232 of SEQ ID NO: 585103
ucuguaguugaauaaauac

SEQ ID NO: 613441 - RNA, 19 nt, Artificial Sequence
  Description of Artificial Sequence: Synthetic oligonucleotide
  Antisense strand to SEQ ID NO: 613440
guauuuauucaacuacaga

SEQ ID NO: 613442 - RNA, 19 nt, Artificial Sequence
  Description of Artificial Sequence: Synthetic oligonucleotide
  Sense strand starting at position 305 of SEQ ID NO: 585103
ggugacuugcuccaauaaa

SEQ ID NO: 613443 - RNA, 19 nt, Artificial Sequence
  Description of Artificial Sequence: Synthetic oligonucleotide
  Antisense strand to SEQ ID NO: 613442
uuuauuggagcaagucacc

SEQ ID NO: 613444 - RNA, 19 nt, Artificial Sequence
  Description of Artificial Sequence: Synthetic oligonucleotide
  Sense strand starting at position 404 of SEQ ID NO: 585103
augcuuugguaacugauaa

SEQ ID NO: 613445 - RNA, 19 nt, Artificial Sequence
  Description of Artificial Sequence: Synthetic oligonucleotide
  Antisense strand to SEQ ID NO: 613444
uuaucaguuaccaaagcau

SEQ ID NO: 613446 - RNA, 19 nt, Artificial Sequence
  Description of Artificial Sequence: Synthetic oligonucleotide
  Sense strand starting at position 472 of SEQ ID NO: 585103
gaaauauaggcccaguuuc

SEQ ID NO: 613447 - RNA, 19 nt, Artificial Sequence
  Description of Artificial Sequence: Synthetic oligonucleotide
  Antisense strand to SEQ ID NO: 613446
gaaacugggccuauauuuc

SEQ ID NO: 613448 - RNA, 19 nt, Artificial Sequence
  Description of Artificial Sequence: Synthetic oligonucleotide
  Sense strand starting at position 695 of SEQ ID NO: 585103
acagaaacuuuggaaagau

SEQ ID NO: 613449 - RNA, 19 nt, Artificial Sequence
  Description of Artificial Sequence: Synthetic oligonucleotide
  Antisense strand to SEQ ID NO: 613448
aucuuuccaaaguuucugu

SEQ ID NO: 613450 - RNA, 19 nt, Artificial Sequence
  Description of Artificial Sequence: Synthetic oligonucleotide
  Sense strand starting at position 777 of SEQ ID NO: 585103
gggaguuauuaguuugagu

SEQ ID NO: 613451 - RNA, 19 nt, Artificial Sequence
  Description of Artificial Sequence: Synthetic oligonucleotide
  Antisense strand to SEQ ID NO: 613450
acucaaacuaauaacuccc

SEQ ID NO: 613452 - RNA, 19 nt, Artificial Sequence
  Description of Artificial Sequence: Synthetic oligonucleotide
  Sense strand starting at position 779 of SEQ ID NO: 585103
gaguuauuaguuugaguuu

SEQ ID NO: 613453 - RNA, 19 nt, Artificial Sequence
  Description of Artificial Sequence: Synthetic oligonucleotide
  Antisense strand to SEQ ID NO: 613452
aaacucaaacuaauaacuc

SEQ ID NO: 613454 - RNA, 19 nt, Artificial Sequence
  Description of Artificial Sequence: Synthetic oligonucleotide
  Sense strand starting at position 857 of SEQ ID NO: 585103
gcgucccacccugaguaaa

SEQ ID NO: 613455 - RNA, 19 nt, Artificial Sequence
  Description of Artificial Sequence: Synthetic oligonucleotide
  Antisense strand to SEQ ID NO: 613454
uuuacucagggugggacgc

SEQ ID NO: 613456 - RNA, 19 nt, Artificial Sequence
  Description of Artificial Sequence: Synthetic oligonucleotide
  Sense strand starting at position 868 of SEQ ID NO: 585103
ugaguaaacccggagccua

SEQ ID NO: 613457 - RNA, 19 nt, Artificial Sequence
  Description of Artificial Sequence: Synthetic oligonucleotide
  Antisense strand to SEQ ID NO: 613456
uaggcuccggguuuacuca

SEQ ID NO: 613458 - RNA, 19 nt, Artificial Sequence
  Description of Artificial Sequence: Synthetic oligonucleotide
  Sense strand starting at position 1210 of SEQ ID NO: 585103
ucugcaaucucccuguaag

SEQ ID NO: 613459 - RNA, 19 nt, Artificial Sequence
  Description of Artificial Sequence: Synthetic oligonucleotide
  Antisense strand to SEQ ID NO: 613458
cuuacagggagauugcaga

SEQ ID NO: 613460 - RNA, 19 nt, Artificial Sequence
  Description of Artificial Sequence: Synthetic oligonucleotide
  Sense strand starting at position 1297 of SEQ ID NO: 585103
gugauauugcgaaguguug

SEQ ID NO: 613461 - RNA, 19 nt, Artificial Sequence
  Description of Artificial Sequence: Synthetic oligonucleotide
  Antisense strand to SEQ ID NO: 613460
caacacuucgcaauaucac

SEQ ID NO: 613462 - RNA, 19 nt, Artificial Sequence
  Description of Artificial Sequence: Synthetic oligonucleotide
  Sense strand starting at position 1435 of SEQ ID NO: 585103
cgggaucuccuccaucgau

SEQ ID NO: 613463 - RNA, 19 nt, Artificial Sequence
  Description of Artificial Sequence: Synthetic oligonucleotide
  Antisense strand to SEQ ID NO: 613462
aucgauggaggagaucccg

SEQ ID NO: 613464 - RNA, 19 nt, Artificial Sequence
  Description of Artificial Sequence: Synthetic oligonucleotide
  Sense strand starting at position 2081 of SEQ ID NO: 585103
ccugccucuguuugaaaca

SEQ ID NO: 613465 - RNA, 19 nt, Artificial Sequence
  Description of Artificial Sequence: Synthetic oligonucleotide
  Antisense strand to SEQ ID NO: 613464
uguuucaaacagaggcagg

SEQ ID NO: 613466 - RNA, 19 nt, Artificial Sequence
  Description of Artificial Sequence: Synthetic oligonucleotide
  Sense strand starting at position 2144 of SEQ ID NO: 585103
cuuuguauugaguagaaau

SEQ ID NO: 613467 - RNA, 19 nt, Artificial Sequence
  Description of Artificial Sequence: Synthetic oligonucleotide
  Antisense strand to SEQ ID NO: 613466
auuucuacucaauacaaag

SEQ ID NO: 613468 - RNA, 19 nt, Artificial Sequence
  Description of Artificial Sequence: Synthetic oligonucleotide
  Sense strand starting at position 2146 of SEQ ID NO: 585103
uuguauugaguagaaaugu

SEQ ID NO: 613469 - RNA, 19 nt, Artificial Sequence
  Description of Artificial Sequence: Synthetic oligonucleotide
  Antisense strand to SEQ ID NO: 613468
acauuucuacucaauacaa

SEQ ID NO: 613470 - RNA, 19 nt, Artificial Sequence
  Description of Artificial Sequence: Synthetic oligonucleotide
  Sense strand starting at position 2308 of SEQ ID NO: 585103
cuaacuucuggaugagauu

SEQ ID NO: 613471 - RNA, 19 nt, Artificial Sequence
  Description of Artificial Sequence: Synthetic oligonucleotide
  Antisense strand to SEQ ID NO: 613470
aaucucauccagaaguuag

SEQ ID NO: 613472 - RNA, 19 nt, Artificial Sequence
  Description of Artificial Sequence: Synthetic oligonucleotide
  Sense strand starting at position 3130 of SEQ ID NO: 585103
uuuacauaaccguguuaaa

SEQ ID NO: 613473 - RNA, 19 nt, Artificial Sequence
  Description of Artificial Sequence: Synthetic oligonucleotide
  Antisense strand to SEQ ID NO: 613472
uuuaacacgguuauguaaa

SEQ ID NO: 613474 - RNA, 19 nt, Artificial Sequence
  Description of Artificial Sequence: Synthetic oligonucleotide
  Sense strand starting at position 3161 of SEQ ID NO: 585103
gguuaauagcucugugaag

SEQ ID NO: 613475 - RNA, 19 nt, Artificial Sequence
  Description of Artificial Sequence: Synthetic oligonucleotide
  Antisense strand to SEQ ID NO: 613474
cuucacagagcuauuaacc

SEQ ID NO: 613476 - RNA, 19 nt, Artificial Sequence
  Description of Artificial Sequence: Synthetic oligonucleotide
  Sense strand starting at position 3162 of SEQ ID NO: 585103
guuaauagcucugugaaga

SEQ ID NO: 613477 - RNA, 19 nt, Artificial Sequence
  Description of Artificial Sequence: Synthetic oligonucleotide
  Antisense strand to SEQ ID NO: 613476
ucuucacagagcuauuaac

SEQ ID NO: 613478 - RNA, 19 nt, Artificial Sequence
  Description of Artificial Sequence: Synthetic oligonucleotide
  Sense strand starting at position 3163 of SEQ ID NO: 585103
uuaauagcucugugaagac

SEQ ID NO: 613479 - RNA, 19 nt, Artificial Sequence
  Description of Artificial Sequence: Synthetic oligonucleotide
  Antisense strand to SEQ ID NO: 613478
gucuucacagagcuauuaa

SEQ ID NO: 613480 - RNA, 19 nt, Artificial Sequence
  Description of Artificial Sequence: Synthetic oligonucleotide
  Sense strand starting at position 3267 of SEQ ID NO: 585103
gcacaaucaugagcaguaa

SEQ ID NO: 613481 - RNA, 19 nt, Artificial Sequence
  Description of Artificial Sequence: Synthetic oligonucleotide
  Antisense strand to SEQ ID NO: 613480
uuacugcucaugauugugc

SEQ ID NO: 613482 - RNA, 19 nt, Artificial Sequence
  Description of Artificial Sequence: Synthetic oligonucleotide
  Sense strand starting at position 3296 of SEQ ID NO: 585103
uuauaagucuuggucucuu

SEQ ID NO: 613483 - RNA, 19 nt, Artificial Sequence
  Description of Artificial Sequence: Synthetic oligonucleotide
  Antisense strand to SEQ ID NO: 613482
aagagaccaagacuuauaa

SEQ ID NO: 613484 - RNA, 19 nt, Artificial Sequence
  Description of Artificial Sequence: Synthetic oligonucleotide
  Sense strand starting at position 3629 of SEQ ID NO: 585103
cuaggagcucccugaccuu

SEQ ID NO: 613485 - RNA, 19 nt, Artificial Sequence
  Description of Artificial Sequence: Synthetic oligonucleotide
  Antisense strand to SEQ ID NO: 613484
aaggucagggagcuccuag

SEQ ID NO: 613486 - RNA, 19 nt, Artificial Sequence
  Description of Artificial Sequence: Synthetic oligonucleotide
  Sense strand starting at position 3649 of SEQ ID NO: 585103
aggaguugugauuauauuc

SEQ ID NO: 613487 - RNA, 19 nt, Artificial Sequence
  Description of Artificial Sequence: Synthetic oligonucleotide
  Antisense strand to SEQ ID NO: 613486
gaauauaaucacaacuccu

SEQ ID NO: 613488 - RNA, 19 nt, Artificial Sequence
  Description of Artificial Sequence: Synthetic oligonucleotide
  Sense strand starting at position 3654 of SEQ ID NO: 585103
uugugauuauauucccaag

SEQ ID NO: 613489 - RNA, 19 nt, Artificial Sequence
  Description of Artificial Sequence: Synthetic oligonucleotide
  Antisense strand to SEQ ID NO: 613488
cuugggaauauaaucacaa

SEQ ID NO: 613490 - RNA, 19 nt, Artificial Sequence
  Description of Artificial Sequence: Synthetic oligonucleotide
  Sense strand starting at position 3656 of SEQ ID NO: 585103
gugauuauauucccaagau

SEQ ID NO: 613491 - RNA, 19 nt, Artificial Sequence
  Description of Artificial Sequence: Synthetic oligonucleotide
  Antisense strand to SEQ ID NO: 613490
aucuugggaauauaaucac

SEQ ID NO: 613492 - RNA, 19 nt, Artificial Sequence
  Description of Artificial Sequence: Synthetic oligonucleotide
  Sense strand starting at position 3755 of SEQ ID NO: 585103
acagaauagucugcaccua

SEQ ID NO: 613493 - RNA, 19 nt, Artificial Sequence
  Description of Artificial Sequence: Synthetic oligonucleotide
  Antisense strand to SEQ ID NO: 613492
uaggugcagacuauucugu

SEQ ID NO: 613494 - RNA, 19 nt, Artificial Sequence
  Description of Artificial Sequence: Synthetic oligonucleotide
  Sense strand starting at position 3790 of SEQ ID NO: 585103
gacugagaugcuugaggac

SEQ ID NO: 613495 - RNA, 19 nt, Artificial Sequence
  Description of Artificial Sequence: Synthetic oligonucleotide
  Antisense strand to SEQ ID NO: 613494
guccucaagcaucucaguc

SEQ ID NO: 613496 - RNA, 19 nt, Artificial Sequence
  Description of Artificial Sequence: Synthetic oligonucleotide
  Sense strand starting at position 3803 of SEQ ID NO: 585103
gaggacauucuauguccuu

SEQ ID NO: 613497 - RNA, 19 nt, Artificial Sequence
  Description of Artificial Sequence: Synthetic oligonucleotide
  Antisense strand to SEQ ID NO: 613496
aaggacauagaauguccuc

SEQ ID NO: 613498 - RNA, 19 nt, Artificial Sequence
  Description of Artificial Sequence: Synthetic oligonucleotide
  Sense strand starting at position 3847 of SEQ ID NO: 585103
ucauguugcuuaccacaua

SEQ ID NO: 613499 - RNA, 19 nt, Artificial Sequence
  Description of Artificial Sequence: Synthetic oligonucleotide
  Antisense strand to SEQ ID NO: 613498
uaugugguaagcaacauga

SEQ ID NO: 613500 - RNA, 19 nt, Artificial Sequence
  Description of Artificial Sequence: Synthetic oligonucleotide
  Sense strand starting at position 3862 of SEQ ID NO: 585103
cauagcggucuccaaauaa

SEQ ID NO: 613501 - RNA, 19 nt, Artificial Sequence
  Description of Artificial Sequence: Synthetic oligonucleotide
  Antisense strand to SEQ ID NO: 613500
uuauuuggagaccgcuaug

SEQ ID NO: 613502 - RNA, 19 nt, Artificial Sequence
  Description of Artificial Sequence: Synthetic oligonucleotide
  Sense strand starting at position 3902 of SEQ ID NO: 585103
augaauuccugccugagaa

SEQ ID NO: 613503 - RNA, 19 nt, Artificial Sequence
  Description of Artificial Sequence: Synthetic oligonucleotide
  Antisense strand to SEQ ID NO: 613502
uucucaggcaggaauucau

SEQ ID NO: 613504 - RNA, 19 nt, Artificial Sequence
  Description of Artificial Sequence: Synthetic oligonucleotide
  Sense strand starting at position 3903 of SEQ ID NO: 585103
ugaauuccugccugagaaa

SEQ ID NO: 613505 - RNA, 19 nt, Artificial Sequence
  Description of Artificial Sequence: Synthetic oligonucleotide
  Antisense strand to SEQ ID NO: 613504
uuucucaggcaggaauuca

SEQ ID NO: 613506 - RNA, 19 nt, Artificial Sequence
  Description of Artificial Sequence: Synthetic oligonucleotide
  Sense strand starting at position 3914 of SEQ ID NO: 585103
cugagaaaguauguugcca

SEQ ID NO: 613507 - RNA, 19 nt, Artificial Sequence
  Description of Artificial Sequence: Synthetic oligonucleotide
  Antisense strand to SEQ ID NO: 613506
uggcaacauacuuucucag

SEQ ID NO: 613508 - RNA, 19 nt, Artificial Sequence
  Description of Artificial Sequence: Synthetic oligonucleotide
  Sense strand starting at position 3950 of SEQ ID NO: 585103
gcauuaugguacuugaaga

SEQ ID NO: 613509 - RNA, 19 nt, Artificial Sequence
  Description of Artificial Sequence: Synthetic oligonucleotide
  Antisense strand to SEQ ID NO: 613508
ucuucaaguaccauaaugc

SEQ ID NO: 613510 - RNA, 19 nt, Artificial Sequence
  Description of Artificial Sequence: Synthetic oligonucleotide
  Sense strand starting at position 3960 of SEQ ID NO: 585103
acuugaagauucuugcauu

SEQ ID NO: 613511 - RNA, 19 nt, Artificial Sequence
  Description of Artificial Sequence: Synthetic oligonucleotide
  Antisense strand to SEQ ID NO: 613510
aaugcaagaaucuucaagu

SEQ ID NO: 613512 - RNA, 19 nt, Artificial Sequence
  Description of Artificial Sequence: Synthetic oligonucleotide
  Sense strand starting at position 44 of SEQ ID NO: 585104
cauaguaguggcuggaaga

SEQ ID NO: 613513 - RNA, 19 nt, Artificial Sequence
  Description of Artificial Sequence: Synthetic oligonucleotide
  Antisense strand to SEQ ID NO: 613512
ucuuccagccacuacuaug

SEQ ID NO: 613514 - RNA, 19 nt, Artificial Sequence
  Description of Artificial Sequence: Synthetic oligonucleotide
  Sense strand starting at position 89 of SEQ ID NO: 585104
gugggucugaucgaugaua

SEQ ID NO: 613515 - RNA, 19 nt, Artificial Sequence
  Description of Artificial Sequence: Synthetic oligonucleotide
  Antisense strand to SEQ ID NO: 613514
uaucaucgaucagacccac

SEQ ID NO: 613516 - RNA, 19 nt, Artificial Sequence
  Description of Artificial Sequence: Synthetic oligonucleotide
  Sense strand starting at position 91 of SEQ ID NO: 585104
gggucugaucgaugauaca

SEQ ID NO: 613517 - RNA, 19 nt, Artificial Sequence
  Description of Artificial Sequence: Synthetic oligonucleotide
  Antisense strand to SEQ ID NO: 613516
uguaucaucgaucagaccc

SEQ ID NO: 613518 - RNA, 19 nt, Artificial Sequence
  Description of Artificial Sequence: Synthetic oligonucleotide
  Sense strand starting at position 102 of SEQ ID NO: 585104
augauacaaccugguauua

SEQ ID NO: 613519 - RNA, 19 nt, Artificial Sequence
  Description of Artificial Sequence: Synthetic oligonucleotide
  Antisense strand to SEQ ID NO: 613518
uaauaccagguuguaucau

SEQ ID NO: 613520 - RNA, 19 nt, Artificial Sequence
  Description of Artificial Sequence: Synthetic oligonucleotide
  Sense strand starting at position 272 of SEQ ID NO: 585104
ugauccuugcuugagucau

SEQ ID NO: 613521 - RNA, 19 nt, Artificial Sequence
  Description of Artificial Sequence: Synthetic oligonucleotide
  Antisense strand to SEQ ID NO: 613520
augacucaagcaaggauca

SEQ ID NO: 613522 - RNA, 19 nt, Artificial Sequence
  Description of Artificial Sequence: Synthetic oligonucleotide
  Sense strand starting at position 283 of SEQ ID NO: 585104
ugagucauagcagggauga

SEQ ID NO: 613523 - RNA, 19 nt, Artificial Sequence
  Description of Artificial Sequence: Synthetic oligonucleotide
  Antisense strand to SEQ ID NO: 613522
ucaucccugcuaugacuca

SEQ ID NO: 613524 - RNA, 19 nt, Artificial Sequence
  Description of Artificial Sequence: Synthetic oligonucleotide
  Sense strand starting at position 434 of SEQ ID NO: 585104
cgaacucagacuuguagga

SEQ ID NO: 613525 - RNA, 19 nt, Artificial Sequence
  Description of Artificial Sequence: Synthetic oligonucleotide
  Antisense strand to SEQ ID NO: 613524
uccuacaagucugaguucg

SEQ ID NO: 613526 - RNA, 19 nt, Artificial Sequence
  Description of Artificial Sequence: Synthetic oligonucleotide
  Sense strand starting at position 502 of SEQ ID NO: 585104
cuguaacaaucagccagaa

SEQ ID NO: 613527 - RNA, 19 nt, Artificial Sequence
  Description of Artificial Sequence: Synthetic oligonucleotide
  Antisense strand to SEQ ID NO: 613526
uucuggcugauuguuacag

SEQ ID NO: 613528 - RNA, 19 nt, Artificial Sequence
  Description of Artificial Sequence: Synthetic oligonucleotide
  Sense strand starting at position 1005 of SEQ ID NO: 585104
agcacuuuccugggaagga

SEQ ID NO: 613529 - RNA, 19 nt, Artificial Sequence
  Description of Artificial Sequence: Synthetic oligonucleotide
  Antisense strand to SEQ ID NO: 613528
uccuucccaggaaagugcu

SEQ ID NO: 613530 - RNA, 19 nt, Artificial Sequence
  Description of Artificial Sequence: Synthetic oligonucleotide
  Sense strand starting at position 1050 of SEQ ID NO: 585104
uggugaucuccugagugag

SEQ ID NO: 613531 - RNA, 19 nt, Artificial Sequence
  Description of Artificial Sequence: Synthetic oligonucleotide
  Antisense strand to SEQ ID NO: 613530
cucacucaggagaucacca

SEQ ID NO: 613532 - RNA, 19 nt, Artificial Sequence
  Description of Artificial Sequence: Synthetic oligonucleotide
  Sense strand starting at position 1191 of SEQ ID NO: 585104
acauucuucucagugauga

SEQ ID NO: 613533 - RNA, 19 nt, Artificial Sequence
  Description of Artificial Sequence: Synthetic oligonucleotide
  Antisense strand to SEQ ID NO: 613532
ucaucacugagaagaaugu

SEQ ID NO: 613534 - RNA, 19 nt, Artificial Sequence
  Description of Artificial Sequence: Synthetic oligonucleotide
  Sense strand starting at position 1556 of SEQ ID NO: 585104
cucagaaaguuggcaaacu

SEQ ID NO: 613535 - RNA, 19 nt, Artificial Sequence
  Description of Artificial Sequence: Synthetic oligonucleotide
  Antisense strand to SEQ ID NO: 613534
aguuugccaacuuucugag

SEQ ID NO: 613536 - RNA, 19 nt, Artificial Sequence
  Description of Artificial Sequence: Synthetic oligonucleotide
  Sense strand starting at position 1684 of SEQ ID NO: 585104
ucaggauucuuccugauca

SEQ ID NO: 613537 - RNA, 19 nt, Artificial Sequence
  Description of Artificial Sequence: Synthetic oligonucleotide
  Antisense strand to SEQ ID NO: 613536
ugaucaggaagaauccuga

SEQ ID NO: 613538 - RNA, 19 nt, Artificial Sequence
  Description of Artificial Sequence: Synthetic oligonucleotide
  Sense strand starting at position 1772 of SEQ ID NO: 585104
gcugucuucgcuuuguacu

SEQ ID NO: 613539 - RNA, 19 nt, Artificial Sequence
  Description of Artificial Sequence: Synthetic oligonucleotide
  Antisense strand to SEQ ID NO: 613538
aguacaaagcgaagacagc

SEQ ID NO: 613540 - RNA, 19 nt, Artificial Sequence
  Description of Artificial Sequence: Synthetic oligonucleotide
  Sense strand starting at position 1815 of SEQ ID NO: 585104
aauagucugccgguugcua

SEQ ID NO: 613541 - RNA, 19 nt, Artificial Sequence
  Description of Artificial Sequence: Synthetic oligonucleotide
  Antisense strand to SEQ ID NO: 613540
uagcaaccggcagacuauu

SEQ ID NO: 613542 - RNA, 19 nt, Artificial Sequence
  Description of Artificial Sequence: Synthetic oligonucleotide
  Sense strand starting at position 1872 of SEQ ID NO: 585104
ggaaaugucuuaccuaagc

SEQ ID NO: 613543 - RNA, 19 nt, Artificial Sequence
  Description of Artificial Sequence: Synthetic oligonucleotide
  Antisense strand to SEQ ID NO: 613542
gcuuagguaagacauuucc

SEQ ID NO: 613544 - RNA, 19 nt, Artificial Sequence
  Description of Artificial Sequence: Synthetic oligonucleotide
  Sense strand starting at position 1881 of SEQ ID NO: 585104
uuaccuaagcaugagugaa

SEQ ID NO: 613545 - RNA, 19 nt, Artificial Sequence
  Description of Artificial Sequence: Synthetic oligonucleotide
  Antisense strand to SEQ ID NO: 613544
uucacucaugcuuagguaa

SEQ ID NO: 613546 - RNA, 19 nt, Artificial Sequence
  Description of Artificial Sequence: Synthetic oligonucleotide
  Sense strand starting at position 1883 of SEQ ID NO: 585104
accuaagcaugagugaaau

SEQ ID NO: 613547 - RNA, 19 nt, Artificial Sequence
  Description of Artificial Sequence: Synthetic oligonucleotide
  Antisense strand to SEQ ID NO: 613546
auuucacucaugcuuaggu

SEQ ID NO: 613548 - RNA, 19 nt, Artificial Sequence
  Description of Artificial Sequence: Synthetic oligonucleotide
  Sense strand starting at position 2038 of SEQ ID NO: 585104
guugauuagucauuacaca

SEQ ID NO: 613549 - RNA, 19 nt, Artificial Sequence
  Description of Artificial Sequence: Synthetic oligonucleotide
  Antisense strand to SEQ ID NO: 613548
uguguaaugacuaaucaac

SEQ ID NO: 613550 - RNA, 19 nt, Artificial Sequence
  Description of Artificial Sequence: Synthetic oligonucleotide
  Sense strand starting at position 2120 of SEQ ID NO: 585104
ucucuuggcugauccaaau

SEQ ID NO: 613551 - RNA, 19 nt, Artificial Sequence
  Description of Artificial Sequence: Synthetic oligonucleotide
  Antisense strand to SEQ ID NO: 613550
auuuggaucagccaagaga

SEQ ID NO: 613552 - RNA, 19 nt, Artificial Sequence
  Description of Artificial Sequence: Synthetic oligonucleotide
  Sense strand starting at position 2175 of SEQ ID NO: 585104
aaaugagcacugugagauu

SEQ ID NO: 613553 - RNA, 19 nt, Artificial Sequence
  Description of Artificial Sequence: Synthetic oligonucleotide
  Antisense strand to SEQ ID NO: 613552
aaucucacagugcucauuu

SEQ ID NO: 613554 - RNA, 19 nt, Artificial Sequence
  Description of Artificial Sequence: Synthetic oligonucleotide
  Sense strand starting at position 2329 of SEQ ID NO: 585104
ccugaauccuggcucaacu

SEQ ID NO: 613555 - RNA, 19 nt, Artificial Sequence
  Description of Artificial Sequence: Synthetic oligonucleotide
  Antisense strand to SEQ ID NO: 613554
aguugagccaggauucagg

SEQ ID NO: 613556 - RNA, 19 nt, Artificial Sequence
  Description of Artificial Sequence: Synthetic oligonucleotide
  Sense strand starting at position 2448 of SEQ ID NO: 585104
gggacuaaaugagauaaug

SEQ ID NO: 613557 - RNA, 19 nt, Artificial Sequence
  Description of Artificial Sequence: Synthetic oligonucleotide
  Antisense strand to SEQ ID NO: 613556
cauuaucucauuuaguccc

SEQ ID NO: 613558 - RNA, 19 nt, Artificial Sequence
  Description of Artificial Sequence: Synthetic oligonucleotide
  Sense strand starting at position 2504 of SEQ ID NO: 585104
uauucuucugaguagagug

SEQ ID NO: 613559 - RNA, 19 nt, Artificial Sequence
  Description of Artificial Sequence: Synthetic oligonucleotide
  Antisense strand to SEQ ID NO: 613558
cacucuacucagaagaaua

SEQ ID NO: 613560 - RNA, 19 nt, Artificial Sequence
  Description of Artificial Sequence: Synthetic oligonucleotide
  Sense strand starting at position 2565 of SEQ ID NO: 585104
ggagaaaguuccucaugcu

SEQ ID NO: 613561 - RNA, 19 nt, Artificial Sequence
  Description of Artificial Sequence: Synthetic oligonucleotide
  Antisense strand to SEQ ID NO: 613560
agcaugaggaacuuucucc

SEQ ID NO: 613562 - RNA, 19 nt, Artificial Sequence
  Description of Artificial Sequence: Synthetic oligonucleotide
  Sense strand starting at position 2566 of SEQ ID NO: 585104
gagaaaguuccucaugcuc

SEQ ID NO: 613563 - RNA, 19 nt, Artificial Sequence
  Description of Artificial Sequence: Synthetic oligonucleotide
  Antisense strand to SEQ ID NO: 613562
gagcaugaggaacuuucuc

SEQ ID NO: 613564 - RNA, 19 nt, Artificial Sequence
  Description of Artificial Sequence: Synthetic oligonucleotide
  Sense strand starting at position 2589 of SEQ ID NO: 585104
ggaaaucucauguggugau

SEQ ID NO: 613565 - RNA, 19 nt, Artificial Sequence
  Description of Artificial Sequence: Synthetic oligonucleotide
  Antisense strand to SEQ ID NO: 613564
aucaccacaugagauuucc

SEQ ID NO: 613566 - RNA, 19 nt, Artificial Sequence
  Description of Artificial Sequence: Synthetic oligonucleotide
  Sense strand starting at position 2593 of SEQ ID NO: 585104
aucucauguggugauuaag

SEQ ID NO: 613567 - RNA, 19 nt, Artificial Sequence
  Description of Artificial Sequence: Synthetic oligonucleotide
  Antisense strand to SEQ ID NO: 613566
cuuaaucaccacaugagau

SEQ ID NO: 613568 - RNA, 19 nt, Artificial Sequence
  Description of Artificial Sequence: Synthetic oligonucleotide
  Sense strand starting at position 2602 of SEQ ID NO: 585104
ggugauuaagagcaugguu

SEQ ID NO: 613569 - RNA, 19 nt, Artificial Sequence
  Description of Artificial Sequence: Synthetic oligonucleotide
  Antisense strand to SEQ ID NO: 613568
aaccaugcucuuaaucacc

SEQ ID NO: 613570 - RNA, 19 nt, Artificial Sequence
  Description of Artificial Sequence: Synthetic oligonucleotide
  Sense strand starting at position 2661 of SEQ ID NO: 585104
aucuuuguaguagaugcaa

SEQ ID NO: 613571 - RNA, 19 nt, Artificial Sequence
  Description of Artificial Sequence: Synthetic oligonucleotide
  Antisense strand to SEQ ID NO: 613570
uugcaucuacuacaaagau

SEQ ID NO: 613572 - RNA, 19 nt, Artificial Sequence
  Description of Artificial Sequence: Synthetic oligonucleotide
  Sense strand starting at position 2723 of SEQ ID NO: 585104
uuguaaugucaguaaucau

SEQ ID NO: 613573 - RNA, 19 nt, Artificial Sequence
  Description of Artificial Sequence: Synthetic oligonucleotide
  Antisense strand to SEQ ID NO: 613572
augauuacugacauuacaa

SEQ ID NO: 613574 - RNA, 19 nt, Artificial Sequence
  Description of Artificial Sequence: Synthetic oligonucleotide
  Sense strand starting at position 3286 of SEQ ID NO: 585104
guaaauguucgacacuauu

SEQ ID NO: 613575 - RNA, 19 nt, Artificial Sequence
  Description of Artificial Sequence: Synthetic oligonucleotide
  Antisense strand to SEQ ID NO: 613574
aauagugucgaacauuuac

SEQ ID NO: 613576 - RNA, 19 nt, Artificial Sequence
  Description of Artificial Sequence: Synthetic oligonucleotide
  Sense strand starting at position 3658 of SEQ ID NO: 585104
aguagcuuugcacaggaau

SEQ ID NO: 613577 - RNA, 19 nt, Artificial Sequence
  Description of Artificial Sequence: Synthetic oligonucleotide
  Antisense strand to SEQ ID NO: 613576
auuccugugcaaagcuacu

SEQ ID NO: 613578 - RNA, 19 nt, Artificial Sequence
  Description of Artificial Sequence: Synthetic oligonucleotide
  Sense strand starting at position 3661 of SEQ ID NO: 585104
agcuuugcacaggaauauu

SEQ ID NO: 613579 - RNA, 19 nt, Artificial Sequence
  Description of Artificial Sequence: Synthetic oligonucleotide
  Antisense strand to SEQ ID NO: 613578
aauauuccugugcaaagcu

SEQ ID NO: 613580 - RNA, 19 nt, Artificial Sequence
  Description of Artificial Sequence: Synthetic oligonucleotide
  Sense strand starting at position 3729 of SEQ ID NO: 585104
gcuuaaacaugugcagaaa

SEQ ID NO: 613581 - RNA, 19 nt, Artificial Sequence
  Description of Artificial Sequence: Synthetic oligonucleotide
  Antisense strand to SEQ ID NO: 613580
uuucugcacauguuuaagc

SEQ ID NO: 613582 - RNA, 19 nt, Artificial Sequence
  Description of Artificial Sequence: Synthetic oligonucleotide
  Sense strand starting at position 3763 of SEQ ID NO: 585104
aaagcagauuucgaucaag

SEQ ID NO: 613583 - RNA, 19 nt, Artificial Sequence
  Description of Artificial Sequence: Synthetic oligonucleotide
  Antisense strand to SEQ ID NO: 613582
cuugaucgaaaucugcuuu

SEQ ID NO: 613584 - RNA, 19 nt, Artificial Sequence
  Description of Artificial Sequence: Synthetic oligonucleotide
  Sense strand starting at position 3834 of SEQ ID NO: 585104
uagaaaggccaguguauaa

SEQ ID NO: 613585 - RNA, 19 nt, Artificial Sequence
  Description of Artificial Sequence: Synthetic oligonucleotide
  Antisense strand to SEQ ID NO: 613584
uuauacacuggccuuucua

SEQ ID NO: 613586 - RNA, 19 nt, Artificial Sequence
  Description of Artificial Sequence: Synthetic oligonucleotide
  Sense strand starting at position 3885 of SEQ ID NO: 585104
agacaacacccgugauuac

SEQ ID NO: 613587 - RNA, 19 nt, Artificial Sequence
  Description of Artificial Sequence: Synthetic oligonucleotide
  Antisense strand to SEQ ID NO: 613586
guaaucacggguguugucu

SEQ ID NO: 613588 - RNA, 19 nt, Artificial Sequence
  Description of Artificial Sequence: Synthetic oligonucleotide
  Sense strand starting at position 3886 of SEQ ID NO: 585104
gacaacacccgugauuaca

SEQ ID NO: 613589 - RNA, 19 nt, Artificial Sequence
  Description of Artificial Sequence: Synthetic oligonucleotide
  Antisense strand to SEQ ID NO: 613588
uguaaucacggguguuguc

SEQ ID NO: 613590 - RNA, 19 nt, Artificial Sequence
  Description of Artificial Sequence: Synthetic oligonucleotide
  Sense strand starting at position 3924 of SEQ ID NO: 585104
augucagauccauggcuaa

SEQ ID NO: 613591 - RNA, 19 nt, Artificial Sequence
  Description of Artificial Sequence: Synthetic oligonucleotide
  Antisense strand to SEQ ID NO: 613590
uuagccauggaucugacau

SEQ ID NO: 613592 - RNA, 19 nt, Artificial Sequence
  Description of Artificial Sequence: Synthetic oligonucleotide
  Sense strand starting at position 27 of SEQ ID NO: 585105
guggauguuauggacacau

SEQ ID NO: 613593 - RNA, 19 nt, Artificial Sequence
  Description of Artificial Sequence: Synthetic oligonucleotide
  Antisense strand to SEQ ID NO: 613592
auguguccauaacauccac

SEQ ID NO: 613594 - RNA, 19 nt, Artificial Sequence
  Description of Artificial Sequence: Synthetic oligonucleotide
  Sense strand starting at position 139 of SEQ ID NO: 585105
acuccaaauguguaaaugu

SEQ ID NO: 613595 - RNA, 19 nt, Artificial Sequence
  Description of Artificial Sequence: Synthetic oligonucleotide
  Antisense strand to SEQ ID NO: 613594
acauuuacacauuuggagu

SEQ ID NO: 613596 - RNA, 19 nt, Artificial Sequence
  Description of Artificial Sequence: Synthetic oligonucleotide
  Sense strand starting at position 247 of SEQ ID NO: 585105
cuaacaauuucugagacag

SEQ ID NO: 613597 - RNA, 19 nt, Artificial Sequence
  Description of Artificial Sequence: Synthetic oligonucleotide
  Antisense strand to SEQ ID NO: 613596
cugucucagaaauuguuag

SEQ ID NO: 613598 - RNA, 19 nt, Artificial Sequence
  Description of Artificial Sequence: Synthetic oligonucleotide
  Sense strand starting at position 249 of SEQ ID NO: 585105
aacaauuucugagacagug

SEQ ID NO: 613599 - RNA, 19 nt, Artificial Sequence
  Description of Artificial Sequence: Synthetic oligonucleotide
  Antisense strand to SEQ ID NO: 613598
cacugucucagaaauuguu

SEQ ID NO: 613600 - RNA, 19 nt, Artificial Sequence
  Description of Artificial Sequence: Synthetic oligonucleotide
  Sense strand starting at position 537 of SEQ ID NO: 585105
augugagaacuuuacaguu

SEQ ID NO: 613601 - RNA, 19 nt, Artificial Sequence
  Description of Artificial Sequence: Synthetic oligonucleotide
  Antisense strand to SEQ ID NO: 613600
aacuguaaaguucucacau

SEQ ID NO: 613602 - RNA, 19 nt, Artificial Sequence
  Description of Artificial Sequence: Synthetic oligonucleotide
  Sense strand starting at position 632 of SEQ ID NO: 585105
gcuguuaggagacagcuua

SEQ ID NO: 613603 - RNA, 19 nt, Artificial Sequence
  Description of Artificial Sequence: Synthetic oligonucleotide
  Antisense strand to SEQ ID NO: 613602
uaagcugucuccuaacagc

SEQ ID NO: 613604 - RNA, 19 nt, Artificial Sequence
  Description of Artificial Sequence: Synthetic oligonucleotide
  Sense strand starting at position 646 of SEQ ID NO: 585105
gcuuaaacacauuaaggua

SEQ ID NO: 613605 - RNA, 19 nt, Artificial Sequence
  Description of Artificial Sequence: Synthetic oligonucleotide
  Antisense strand to SEQ ID NO: 613604
uaccuuaauguguuuaagc

SEQ ID NO: 613606 - RNA, 19 nt, Artificial Sequence
  Description of Artificial Sequence: Synthetic oligonucleotide
  Sense strand starting at position 699 of SEQ ID NO: 585105
acuucuuaccgauagguau

SEQ ID NO: 613607 - RNA, 19 nt, Artificial Sequence
  Description of Artificial Sequence: Synthetic oligonucleotide
  Antisense strand to SEQ ID NO: 613606
auaccuaucgguaagaagu

SEQ ID NO: 613608 - RNA, 19 nt, Artificial Sequence
  Description of Artificial Sequence: Synthetic oligonucleotide
  Sense strand starting at position 731 of SEQ ID NO: 585105
gugaguucuaagcagagca

SEQ ID NO: 613609 - RNA, 19 nt, Artificial Sequence
  Description of Artificial Sequence: Synthetic oligonucleotide
  Antisense strand to SEQ ID NO: 613608
ugcucugcuuagaacucac

SEQ ID NO: 613610 - RNA, 19 nt, Artificial Sequence
  Description of Artificial Sequence: Synthetic oligonucleotide
  Sense strand starting at position 733 of SEQ ID NO: 585105
gaguucuaagcagagcaau

SEQ ID NO: 613611 - RNA, 19 nt, Artificial Sequence
  Description of Artificial Sequence: Synthetic oligonucleotide
  Antisense strand to SEQ ID NO: 613610
auugcucugcuuagaacuc

SEQ ID NO: 613612 - RNA, 19 nt, Artificial Sequence
  Description of Artificial Sequence: Synthetic oligonucleotide
  Sense strand starting at position 736 of SEQ ID NO: 585105
uucuaagcagagcaauaua

SEQ ID NO: 613613 - RNA, 19 nt, Artificial Sequence
  Description of Artificial Sequence: Synthetic oligonucleotide
  Antisense strand to SEQ ID NO: 613612
uauauugcucugcuuagaa

SEQ ID NO: 613614 - RNA, 19 nt, Artificial Sequence
  Description of Artificial Sequence: Synthetic oligonucleotide
  Sense strand starting at position 1077 of SEQ ID NO: 585105
guaagauacuguuuaauuc

SEQ ID NO: 613615 - RNA, 19 nt, Artificial Sequence
  Description of Artificial Sequence: Synthetic oligonucleotide
  Antisense strand to SEQ ID NO: 613614
gaauuaaacaguaucuuac

SEQ ID NO: 613616 - RNA, 19 nt, Artificial Sequence
  Description of Artificial Sequence: Synthetic oligonucleotide
  Sense strand starting at position 1097 of SEQ ID NO: 585105
gagucauauuagguaaaua

SEQ ID NO: 613617 - RNA, 19 nt, Artificial Sequence
  Description of Artificial Sequence: Synthetic oligonucleotide
  Antisense strand to SEQ ID NO: 613616
uauuuaccuaauaugacuc

SEQ ID NO: 613618 - RNA, 19 nt, Artificial Sequence
  Description of Artificial Sequence: Synthetic oligonucleotide
  Sense strand starting at position 1107 of SEQ ID NO: 585105
agguaaauacgguacugua

SEQ ID NO: 613619 - RNA, 19 nt, Artificial Sequence
  Description of Artificial Sequence: Synthetic oligonucleotide
  Antisense strand to SEQ ID NO: 613618
uacaguaccguauuuaccu

SEQ ID NO: 613620 - RNA, 19 nt, Artificial Sequence
  Description of Artificial Sequence: Synthetic oligonucleotide
  Sense strand starting at position 1214 of SEQ ID NO: 585105
ggaacuaaauccuaauuug

SEQ ID NO: 613621 - RNA, 19 nt, Artificial Sequence
  Description of Artificial Sequence: Synthetic oligonucleotide
  Antisense strand to SEQ ID NO: 613620
caaauuaggauuuaguucc

SEQ ID NO: 613622 - RNA, 19 nt, Artificial Sequence
  Description of Artificial Sequence: Synthetic oligonucleotide
  Sense strand starting at position 1369 of SEQ ID NO: 585105
uugcuucggcggaggagua

SEQ ID NO: 613623 - RNA, 19 nt, Artificial Sequence
  Description of Artificial Sequence: Synthetic oligonucleotide
  Antisense strand to SEQ ID NO: 613622
uacuccuccgccgaagcaa

SEQ ID NO: 613624 - RNA, 19 nt, Artificial Sequence
  Description of Artificial Sequence: Synthetic oligonucleotide
  Sense strand starting at position 2479 of SEQ ID NO: 585105
uagugaaguagcgaggauu

SEQ ID NO: 613625 - RNA, 19 nt, Artificial Sequence
  Description of Artificial Sequence: Synthetic oligonucleotide
  Antisense strand to SEQ ID NO: 613624
aauccucgcuacuucacua

SEQ ID NO: 613626 - RNA, 19 nt, Artificial Sequence
  Description of Artificial Sequence: Synthetic oligonucleotide
  Sense strand starting at position 2694 of SEQ ID NO: 585105
gaaacuacuuggcuggaaa

SEQ ID NO: 613627 - RNA, 19 nt, Artificial Sequence
  Description of Artificial Sequence: Synthetic oligonucleotide
  Antisense strand to SEQ ID NO: 613626
uuuccagccaaguaguuuc

SEQ ID NO: 613628 - RNA, 19 nt, Artificial Sequence
  Description of Artificial Sequence: Synthetic oligonucleotide
  Sense strand starting at position 2722 of SEQ ID NO: 585105
auaggaucggagugaaagu

SEQ ID NO: 613629 - RNA, 19 nt, Artificial Sequence
  Description of Artificial Sequence: Synthetic oligonucleotide
  Antisense strand to SEQ ID NO: 613628
acuuucacuccgauccuau

SEQ ID NO: 613630 - RNA, 19 nt, Artificial Sequence
  Description of Artificial Sequence: Synthetic oligonucleotide
  Sense strand starting at position 2766 of SEQ ID NO: 585105
acaagacaucagugcuuua

SEQ ID NO: 613631 - RNA, 19 nt, Artificial Sequence
  Description of Artificial Sequence: Synthetic oligonucleotide
  Antisense strand to SEQ ID NO: 613630
uaaagcacugaugucuugu

SEQ ID NO: 613632 - RNA, 19 nt, Artificial Sequence
  Description of Artificial Sequence: Synthetic oligonucleotide
  Sense strand starting at position 2771 of SEQ ID NO: 585105
acaucagugcuuuaaggau

SEQ ID NO: 613633 - RNA, 19 nt, Artificial Sequence
  Description of Artificial Sequence: Synthetic oligonucleotide
  Antisense strand to SEQ ID NO: 613632
auccuuaaagcacugaugu

SEQ ID NO: 613634 - RNA, 19 nt, Artificial Sequence
  Description of Artificial Sequence: Synthetic oligonucleotide
  Sense strand starting at position 2836 of SEQ ID NO: 585105
auaaauguguuauucccua

SEQ ID NO: 613635 - RNA, 19 nt, Artificial Sequence
  Description of Artificial Sequence: Synthetic oligonucleotide
  Antisense strand to SEQ ID NO: 613634
uagggaauaacacauuuau

SEQ ID NO: 613636 - RNA, 19 nt, Artificial Sequence
  Description of Artificial Sequence: Synthetic oligonucleotide
  Sense strand starting at position 2841 of SEQ ID NO: 585105
uguguuauucccuacugau

SEQ ID NO: 613637 - RNA, 19 nt, Artificial Sequence
  Description of Artificial Sequence: Synthetic oligonucleotide
  Antisense strand to SEQ ID NO: 613636
aucaguagggaauaacaca

SEQ ID NO: 613638 - RNA, 19 nt, Artificial Sequence
  Description of Artificial Sequence: Synthetic oligonucleotide
  Sense strand starting at position 3104 of SEQ ID NO: 585105
agccgaauuuaacaaagau

SEQ ID NO: 613639 - RNA, 19 nt, Artificial Sequence
  Description of Artificial Sequence: Synthetic oligonucleotide
  Antisense strand to SEQ ID NO: 613638
aucuuuguuaaauucggcu

SEQ ID NO: 613640 - RNA, 19 nt, Artificial Sequence
  Description of Artificial Sequence: Synthetic oligonucleotide
  Sense strand starting at position 3113 of SEQ ID NO: 585105
uaacaaagauugucuggau

SEQ ID NO: 613641 - RNA, 19 nt, Artificial Sequence
  Description of Artificial Sequence: Synthetic oligonucleotide
  Antisense strand to SEQ ID NO: 613640
auccagacaaucuuuguua

SEQ ID NO: 613642 - RNA, 19 nt, Artificial Sequence
  Description of Artificial Sequence: Synthetic oligonucleotide
  Sense strand starting at position 3149 of SEQ ID NO: 585105
aggugaagguuuaaucgga

SEQ ID NO: 613643 - RNA, 19 nt, Artificial Sequence
  Description of Artificial Sequence: Synthetic oligonucleotide
  Antisense strand to SEQ ID NO: 613642
uccgauuaaaccuucaccu

SEQ ID NO: 613644 - RNA, 19 nt, Artificial Sequence
  Description of Artificial Sequence: Synthetic oligonucleotide
  Sense strand starting at position 3159 of SEQ ID NO: 585105
uuaaucggacccugaaaua

SEQ ID NO: 613645 - RNA, 19 nt, Artificial Sequence
  Description of Artificial Sequence: Synthetic oligonucleotide
  Antisense strand to SEQ ID NO: 613644
uauuucaggguccgauuaa

SEQ ID NO: 613646 - RNA, 19 nt, Artificial Sequence
  Description of Artificial Sequence: Synthetic oligonucleotide
  Sense strand starting at position 3177 of SEQ ID NO: 585105
acuuuaagaucuguuggaa

SEQ ID NO: 613647 - RNA, 19 nt, Artificial Sequence
  Description of Artificial Sequence: Synthetic oligonucleotide
  Antisense strand to SEQ ID NO: 613646
uuccaacagaucuuaaagu

SEQ ID NO: 613648 - RNA, 19 nt, Artificial Sequence
  Description of Artificial Sequence: Synthetic oligonucleotide
  Sense strand starting at position 3180 of SEQ ID NO: 585105
uuaagaucuguuggaauuc

SEQ ID NO: 613649 - RNA, 19 nt, Artificial Sequence
  Description of Artificial Sequence: Synthetic oligonucleotide
  Antisense strand to SEQ ID NO: 613648
gaauuccaacagaucuuaa

SEQ ID NO: 613650 - RNA, 19 nt, Artificial Sequence
  Description of Artificial Sequence: Synthetic oligonucleotide
  Sense strand starting at position 3399 of SEQ ID NO: 585105
aucaaauucuaggcaugga

SEQ ID NO: 613651 - RNA, 19 nt, Artificial Sequence
  Description of Artificial Sequence: Synthetic oligonucleotide
  Antisense strand to SEQ ID NO: 613650
uccaugccuagaauuugau

SEQ ID NO: 613652 - RNA, 19 nt, Artificial Sequence
  Description of Artificial Sequence: Synthetic oligonucleotide
  Sense strand starting at position 3403 of SEQ ID NO: 585105
aauucuaggcauggaagau

SEQ ID NO: 613653 - RNA, 19 nt, Artificial Sequence
  Description of Artificial Sequence: Synthetic oligonucleotide
  Antisense strand to SEQ ID NO: 613652
aucuuccaugccuagaauu

SEQ ID NO: 613654 - RNA, 19 nt, Artificial Sequence
  Description of Artificial Sequence: Synthetic oligonucleotide
  Sense strand starting at position 3451 of SEQ ID NO: 585105
acguucuaagcagaaaugu

SEQ ID NO: 613655 - RNA, 19 nt, Artificial Sequence
  Description of Artificial Sequence: Synthetic oligonucleotide
  Antisense strand to SEQ ID NO: 613654
acauuucugcuuagaacgu

SEQ ID NO: 613656 - RNA, 19 nt, Artificial Sequence
  Description of Artificial Sequence: Synthetic oligonucleotide
  Sense strand starting at position 3460 of SEQ ID NO: 585105
gcagaaauguaugcucaaa

SEQ ID NO: 613657 - RNA, 19 nt, Artificial Sequence
  Description of Artificial Sequence: Synthetic oligonucleotide
  Antisense strand to SEQ ID NO: 613656
uuugagcauacauuucugc

SEQ ID NO: 613658 - RNA, 19 nt, Artificial Sequence
  Description of Artificial Sequence: Synthetic oligonucleotide
  Sense strand starting at position 3509 of SEQ ID NO: 585105
caagucuugcuaggacaaa

SEQ ID NO: 613659 - RNA, 19 nt, Artificial Sequence
  Description of Artificial Sequence: Synthetic oligonucleotide
  Antisense strand to SEQ ID NO: 613658
uuuguccuagcaagacuug

SEQ ID NO: 613660 - RNA, 19 nt, Artificial Sequence
  Description of Artificial Sequence: Synthetic oligonucleotide
  Sense strand starting at position 3583 of SEQ ID NO: 585105
aggaaaugaauguguagca

SEQ ID NO: 613661 - RNA, 19 nt, Artificial Sequence
  Description of Artificial Sequence: Synthetic oligonucleotide
  Antisense strand to SEQ ID NO: 613660
ugcuacacauucauuuccu

SEQ ID NO: 613662 - RNA, 19 nt, Artificial Sequence
  Description of Artificial Sequence: Synthetic oligonucleotide
  Sense strand starting at position 3584 of SEQ ID NO: 585105
ggaaaugaauguguagcau

SEQ ID NO: 613663 - RNA, 19 nt, Artificial Sequence
  Description of Artificial Sequence: Synthetic oligonucleotide
  Antisense strand to SEQ ID NO: 613662
augcuacacauucauuucc

SEQ ID NO: 613664 - RNA, 19 nt, Artificial Sequence
  Description of Artificial Sequence: Synthetic oligonucleotide
  Sense strand starting at position 3737 of SEQ ID NO: 585105
ucacaugaguuuccaucau

SEQ ID NO: 613665 - RNA, 19 nt, Artificial Sequence
  Description of Artificial Sequence: Synthetic oligonucleotide
  Antisense strand to SEQ ID NO: 613664
augauggaaacucauguga

SEQ ID NO: 613666 - RNA, 19 nt, Artificial Sequence
  Description of Artificial Sequence: Synthetic oligonucleotide
  Sense strand starting at position 3741 of SEQ ID NO: 585105
augaguuuccaucaucacu

SEQ ID NO: 613667 - RNA, 19 nt, Artificial Sequence
  Description of Artificial Sequence: Synthetic oligonucleotide
  Antisense strand to SEQ ID NO: 613666
agugaugauggaaacucau

SEQ ID NO: 613668 - RNA, 19 nt, Artificial Sequence
  Description of Artificial Sequence: Synthetic oligonucleotide
  Sense strand starting at position 3912 of SEQ ID NO: 585105
uaauauacaggucgaguau

SEQ ID NO: 613669 - RNA, 19 nt, Artificial Sequence
  Description of Artificial Sequence: Synthetic oligonucleotide
  Antisense strand to SEQ ID NO: 613668
auacucgaccuguauauua

SEQ ID NO: 613670 - RNA, 19 nt, Artificial Sequence
  Description of Artificial Sequence: Synthetic oligonucleotide
  Sense strand starting at position 3923 of SEQ ID NO: 585105
ucgaguauccuuuauccaa

SEQ ID NO: 613671 - RNA, 19 nt, Artificial Sequence
  Description of Artificial Sequence: Synthetic oligonucleotide
  Antisense strand to SEQ ID NO: 613670
uuggauaaaggauacucga

SEQ ID NO: 613672 - RNA, 19 nt, Artificial Sequence
  Description of Artificial Sequence: Synthetic oligonucleotide
  Sense strand starting at position 125 of SEQ ID NO: 585106
gccauaccuccugagagau

SEQ ID NO: 613673 - RNA, 19 nt, Artificial Sequence
  Description of Artificial Sequence: Synthetic oligonucleotide
  Antisense strand to SEQ ID NO: 613672
aucucucaggagguauggc

SEQ ID NO: 613674 - RNA, 19 nt, Artificial Sequence
  Description of Artificial Sequence: Synthetic oligonucleotide
  Sense strand starting at position 131 of SEQ ID NO: 585106
ccuccugagagauguuuga

SEQ ID NO: 613675 - RNA, 19 nt, Artificial Sequence
  Description of Artificial Sequence: Synthetic oligonucleotide
  Antisense strand to SEQ ID NO: 613674
ucaaacaucucucaggagg

SEQ ID NO: 613676 - RNA, 19 nt, Artificial Sequence
  Description of Artificial Sequence: Synthetic oligonucleotide
  Sense strand starting at position 135 of SEQ ID NO: 585106
cugagagauguuugacaca

SEQ ID NO: 613677 - RNA, 19 nt, Artificial Sequence
  Description of Artificial Sequence: Synthetic oligonucleotide
  Antisense strand to SEQ ID NO: 613676
ugugucaaacaucucucag

SEQ ID NO: 613678 - RNA, 19 nt, Artificial Sequence
  Description of Artificial Sequence: Synthetic oligonucleotide
  Sense strand starting at position 316 of SEQ ID NO: 585106
guaagagaaugcuuagaaa

SEQ ID NO: 613679 - RNA, 19 nt, Artificial Sequence
  Description of Artificial Sequence: Synthetic oligonucleotide
  Antisense strand to SEQ ID NO: 613678
uuucuaagcauucucuuac

SEQ ID NO: 613680 - RNA, 19 nt, Artificial Sequence
  Description of Artificial Sequence: Synthetic oligonucleotide
  Sense strand starting at position 529 of SEQ ID NO: 585106
uauggugaauuaucuggaa

SEQ ID NO: 613681 - RNA, 19 nt, Artificial Sequence
  Description of Artificial Sequence: Synthetic oligonucleotide
  Antisense strand to SEQ ID NO: 613680
uuccagauaauucaccaua

SEQ ID NO: 613682 - RNA, 19 nt, Artificial Sequence
  Description of Artificial Sequence: Synthetic oligonucleotide
  Sense strand starting at position 531 of SEQ ID NO: 585106
uggugaauuaucuggaacu

SEQ ID NO: 613683 - RNA, 19 nt, Artificial Sequence
  Description of Artificial Sequence: Synthetic oligonucleotide
  Antisense strand to SEQ ID NO: 613682
aguuccagauaauucacca

SEQ ID NO: 613684 - RNA, 19 nt, Artificial Sequence
  Description of Artificial Sequence: Synthetic oligonucleotide
  Sense strand starting at position 794 of SEQ ID NO: 585106
uggauuaagguauggcuau

SEQ ID NO: 613685 - RNA, 19 nt, Artificial Sequence
  Description of Artificial Sequence: Synthetic oligonucleotide
  Antisense strand to SEQ ID NO: 613684
auagccauaccuuaaucca

SEQ ID NO: 613686 - RNA, 19 nt, Artificial Sequence
  Description of Artificial Sequence: Synthetic oligonucleotide
  Sense strand starting at position 801 of SEQ ID NO: 585106
agguauggcuaucuggaaa

SEQ ID NO: 613687 - RNA, 19 nt, Artificial Sequence
  Description of Artificial Sequence: Synthetic oligonucleotide
  Antisense strand to SEQ ID NO: 613686
uuuccagauagccauaccu

SEQ ID NO: 613688 - RNA, 19 nt, Artificial Sequence
  Description of Artificial Sequence: Synthetic oligonucleotide
  Sense strand starting at position 1151 of SEQ ID NO: 585106
cgcaguaaucggucuaucu

SEQ ID NO: 613689 - RNA, 19 nt, Artificial Sequence
  Description of Artificial Sequence: Synthetic oligonucleotide
  Antisense strand to SEQ ID NO: 613688
agauagaccgauuacugcg

SEQ ID NO: 613690 - RNA, 19 nt, Artificial Sequence
  Description of Artificial Sequence: Synthetic oligonucleotide
  Sense strand starting at position 1166 of SEQ ID NO: 585106
aucugcuaaucguuuacaa

SEQ ID NO: 613691 - RNA, 19 nt, Artificial Sequence
  Description of Artificial Sequence: Synthetic oligonucleotide
  Antisense strand to SEQ ID NO: 613690
uuguaaacgauuagcagau

SEQ ID NO: 613692 - RNA, 19 nt, Artificial Sequence
  Description of Artificial Sequence: Synthetic oligonucleotide
  Sense strand starting at position 1168 of SEQ ID NO: 585106
cugcuaaucguuuacaauu

SEQ ID NO: 613693 - RNA, 19 nt, Artificial Sequence
  Description of Artificial Sequence: Synthetic oligonucleotide
  Antisense strand to SEQ ID NO: 613692
aauuguaaacgauuagcag

SEQ ID NO: 613694 - RNA, 19 nt, Artificial Sequence
  Description of Artificial Sequence: Synthetic oligonucleotide
  Sense strand starting at position 2459 of SEQ ID NO: 585106
uacguaguccuccagacua

SEQ ID NO: 613695 - RNA, 19 nt, Artificial Sequence
  Description of Artificial Sequence: Synthetic oligonucleotide
  Antisense strand to SEQ ID NO: 613694
uagucuggaggacuacgua

SEQ ID NO: 613696 - RNA, 19 nt, Artificial Sequence
  Description of Artificial Sequence: Synthetic oligonucleotide
  Sense strand starting at position 2461 of SEQ ID NO: 585106
cguaguccuccagacuaag

SEQ ID NO: 613697 - RNA, 19 nt, Artificial Sequence
  Description of Artificial Sequence: Synthetic oligonucleotide
  Antisense strand to SEQ ID NO: 613696
cuuagucuggaggacuacg

SEQ ID NO: 613698 - RNA, 19 nt, Artificial Sequence
  Description of Artificial Sequence: Synthetic oligonucleotide
  Sense strand starting at position 2485 of SEQ ID NO: 585106
auauauacgcauugauaca

SEQ ID NO: 613699 - RNA, 19 nt, Artificial Sequence
  Description of Artificial Sequence: Synthetic oligonucleotide
  Antisense strand to SEQ ID NO: 613698
uguaucaaugcguauauau

SEQ ID NO: 613700 - RNA, 19 nt, Artificial Sequence
  Description of Artificial Sequence: Synthetic oligonucleotide
  Sense strand starting at position 2492 of SEQ ID NO: 585106
cgcauugauacaugugaag

SEQ ID NO: 613701 - RNA, 19 nt, Artificial Sequence
  Description of Artificial Sequence: Synthetic oligonucleotide
  Antisense strand to SEQ ID NO: 613700
cuucacauguaucaaugcg

SEQ ID NO: 613702 - RNA, 19 nt, Artificial Sequence
  Description of Artificial Sequence: Synthetic oligonucleotide
  Sense strand starting at position 2509 of SEQ ID NO: 585106
aguuauaucuaugcuugua

SEQ ID NO: 613703 - RNA, 19 nt, Artificial Sequence
  Description of Artificial Sequence: Synthetic oligonucleotide
  Antisense strand to SEQ ID NO: 613702
uacaagcauagauauaacu

SEQ ID NO: 613704 - RNA, 19 nt, Artificial Sequence
  Description of Artificial Sequence: Synthetic oligonucleotide
  Sense strand starting at position 2511 of SEQ ID NO: 585106
uuauaucuaugcuuguaca

SEQ ID NO: 613705 - RNA, 19 nt, Artificial Sequence
  Description of Artificial Sequence: Synthetic oligonucleotide
  Antisense strand to SEQ ID NO: 613704
uguacaagcauagauauaa

SEQ ID NO: 613706 - RNA, 19 nt, Artificial Sequence
  Description of Artificial Sequence: Synthetic oligonucleotide
  Sense strand starting at position 2549 of SEQ ID NO: 585106
gaggcauccuuguugacac

SEQ ID NO: 613707 - RNA, 19 nt, Artificial Sequence
  Description of Artificial Sequence: Synthetic oligonucleotide
  Antisense strand to SEQ ID NO: 613706
gugucaacaaggaugccuc

SEQ ID NO: 613708 - RNA, 19 nt, Artificial Sequence
  Description of Artificial Sequence: Synthetic oligonucleotide
  Sense strand starting at position 2594 of SEQ ID NO: 585106
cgucgucggccuuucaaua

SEQ ID NO: 613709 - RNA, 19 nt, Artificial Sequence
  Description of Artificial Sequence: Synthetic oligonucleotide
  Antisense strand to SEQ ID NO: 613708
uauugaaaggccgacgacg

SEQ ID NO: 613710 - RNA, 19 nt, Artificial Sequence
  Description of Artificial Sequence: Synthetic oligonucleotide
  Sense strand starting at position 2689 of SEQ ID NO: 585106
cgaaaugcauaucuccuau

SEQ ID NO: 613711 - RNA, 19 nt, Artificial Sequence
  Description of Artificial Sequence: Synthetic oligonucleotide
  Antisense strand to SEQ ID NO: 613710
auaggagauaugcauuucg

SEQ ID NO: 613712 - RNA, 19 nt, Artificial Sequence
  Description of Artificial Sequence: Synthetic oligonucleotide
  Sense strand starting at position 2749 of SEQ ID NO: 585106
cucucuaucuaguuagaua

SEQ ID NO: 613713 - RNA, 19 nt, Artificial Sequence
  Description of Artificial Sequence: Synthetic oligonucleotide
  Antisense strand to SEQ ID NO: 613712
uaucuaacuagauagagag

SEQ ID NO: 613714 - RNA, 19 nt, Artificial Sequence
  Description of Artificial Sequence: Synthetic oligonucleotide
  Sense strand starting at position 2960 of SEQ ID NO: 585106
cagguucuuugaucccuga

SEQ ID NO: 613715 - RNA, 19 nt, Artificial Sequence
  Description of Artificial Sequence: Synthetic oligonucleotide
  Antisense strand to SEQ ID NO: 613714
ucagggaucaaagaaccug

SEQ ID NO: 613716 - RNA, 19 nt, Artificial Sequence
  Description of Artificial Sequence: Synthetic oligonucleotide
  Sense strand starting at position 3083 of SEQ ID NO: 585106
cguuguuauuuacuucuuu

SEQ ID NO: 613717 - RNA, 19 nt, Artificial Sequence
  Description of Artificial Sequence: Synthetic oligonucleotide
  Antisense strand to SEQ ID NO: 613716
aaagaaguaaauaacaacg

SEQ ID NO: 613718 - RNA, 19 nt, Artificial Sequence
  Description of Artificial Sequence: Synthetic oligonucleotide
  Sense strand starting at position 3087 of SEQ ID NO: 585106
guuauuuacuucuuuguac

SEQ ID NO: 613719 - RNA, 19 nt, Artificial Sequence
  Description of Artificial Sequence: Synthetic oligonucleotide
  Antisense strand to SEQ ID NO: 613718
guacaaagaaguaaauaac

SEQ ID NO: 613720 - RNA, 19 nt, Artificial Sequence
  Description of Artificial Sequence: Synthetic oligonucleotide
  Sense strand starting at position 3267 of SEQ ID NO: 585106
aagcacaaucgauguaagu

SEQ ID NO: 613721 - RNA, 19 nt, Artificial Sequence
  Description of Artificial Sequence: Synthetic oligonucleotide
  Antisense strand to SEQ ID NO: 613720
acuuacaucgauugugcuu

SEQ ID NO: 613722 - RNA, 19 nt, Artificial Sequence
  Description of Artificial Sequence: Synthetic oligonucleotide
  Sense strand starting at position 3269 of SEQ ID NO: 585106
gcacaaucgauguaaguga

SEQ ID NO: 613723 - RNA, 19 nt, Artificial Sequence
  Description of Artificial Sequence: Synthetic oligonucleotide
  Antisense strand to SEQ ID NO: 613722
ucacuuacaucgauugugc

SEQ ID NO: 613724 - RNA, 19 nt, Artificial Sequence
  Description of Artificial Sequence: Synthetic oligonucleotide
  Sense strand starting at position 3273 of SEQ ID NO: 585106
aaucgauguaagugaacga

SEQ ID NO: 613725 - RNA, 19 nt, Artificial Sequence
  Description of Artificial Sequence: Synthetic oligonucleotide
  Antisense strand to SEQ ID NO: 613724
ucguucacuuacaucgauu

SEQ ID NO: 613726 - RNA, 19 nt, Artificial Sequence
  Description of Artificial Sequence: Synthetic oligonucleotide
  Sense strand starting at position 3277 of SEQ ID NO: 585106
gauguaagugaacgaacaa

SEQ ID NO: 613727 - RNA, 19 nt, Artificial Sequence
  Description of Artificial Sequence: Synthetic oligonucleotide
  Antisense strand to SEQ ID NO: 613726
uuguucguucacuuacauc

SEQ ID NO: 613728 - RNA, 19 nt, Artificial Sequence
  Description of Artificial Sequence: Synthetic oligonucleotide
  Sense strand starting at position 3294 of SEQ ID NO: 585106
aagauuugugcaggccuca

SEQ ID NO: 613729 - RNA, 19 nt, Artificial Sequence
  Description of Artificial Sequence: Synthetic oligonucleotide
  Antisense strand to SEQ ID NO: 613728
ugaggccugcacaaaucuu

SEQ ID NO: 613730 - RNA, 19 nt, Artificial Sequence
  Description of Artificial Sequence: Synthetic oligonucleotide
  Sense strand starting at position 3327 of SEQ ID NO: 585106
cuuggagguuucccuucua

SEQ ID NO: 613731 - RNA, 19 nt, Artificial Sequence
  Description of Artificial Sequence: Synthetic oligonucleotide
  Antisense strand to SEQ ID NO: 613730
uagaagggaaaccuccaag

SEQ ID NO: 613732 - RNA, 19 nt, Artificial Sequence
  Description of Artificial Sequence: Synthetic oligonucleotide
  Sense strand starting at position 3443 of SEQ ID NO: 585106
gcagccaucccuuagguau

SEQ ID NO: 613733 - RNA, 19 nt, Artificial Sequence
  Description of Artificial Sequence: Synthetic oligonucleotide
  Antisense strand to SEQ ID NO: 613732
auaccuaagggauggcugc

SEQ ID NO: 613734 - RNA, 19 nt, Artificial Sequence
  Description of Artificial Sequence: Synthetic oligonucleotide
  Sense strand starting at position 3540 of SEQ ID NO: 585106
gggcauacaucauuguuac

SEQ ID NO: 613735 - RNA, 19 nt, Artificial Sequence
  Description of Artificial Sequence: Synthetic oligonucleotide
  Antisense strand to SEQ ID NO: 613734
guaacaaugauguaugccc

SEQ ID NO: 613736 - RNA, 19 nt, Artificial Sequence
  Description of Artificial Sequence: Synthetic oligonucleotide
  Sense strand starting at position 3541 of SEQ ID NO: 585106
ggcauacaucauuguuacu

SEQ ID NO: 613737 - RNA, 19 nt, Artificial Sequence
  Description of Artificial Sequence: Synthetic oligonucleotide
  Antisense strand to SEQ ID NO: 613736
aguaacaaugauguaugcc

SEQ ID NO: 613738 - RNA, 19 nt, Artificial Sequence
  Description of Artificial Sequence: Synthetic oligonucleotide
  Sense strand starting at position 3552 of SEQ ID NO: 585106
uuguuacucuuccuguaau

SEQ ID NO: 613739 - RNA, 19 nt, Artificial Sequence
  Description of Artificial Sequence: Synthetic oligonucleotide
  Antisense strand to SEQ ID NO: 613738
auuacaggaagaguaacaa

SEQ ID NO: 613740 - RNA, 19 nt, Artificial Sequence
  Description of Artificial Sequence: Synthetic oligonucleotide
  Sense strand starting at position 3555 of SEQ ID NO: 585106
uuacucuuccuguaauagu

SEQ ID NO: 613741 - RNA, 19 nt, Artificial Sequence
  Description of Artificial Sequence: Synthetic oligonucleotide
  Antisense strand to SEQ ID NO: 613740
acuauuacaggaagaguaa

SEQ ID NO: 613742 - RNA, 19 nt, Artificial Sequence
  Description of Artificial Sequence: Synthetic oligonucleotide
  Sense strand starting at position 3652 of SEQ ID NO: 585106
cugauuguucaggaagugu

SEQ ID NO: 613743 - RNA, 19 nt, Artificial Sequence
  Description of Artificial Sequence: Synthetic oligonucleotide
  Antisense strand to SEQ ID NO: 613742
acacuuccugaacaaucag

SEQ ID NO: 613744 - RNA, 19 nt, Artificial Sequence
  Description of Artificial Sequence: Synthetic oligonucleotide
  Sense strand starting at position 3719 of SEQ ID NO: 585106
ugcugucuccuccaagauc

SEQ ID NO: 613745 - RNA, 19 nt, Artificial Sequence
  Description of Artificial Sequence: Synthetic oligonucleotide
  Antisense strand to SEQ ID NO: 613744
gaucuuggaggagacagca

SEQ ID NO: 613746 - RNA, 19 nt, Artificial Sequence
  Description of Artificial Sequence: Synthetic oligonucleotide
  Sense strand starting at position 3836 of SEQ ID NO: 585106
ggugauaucugcccauauu

SEQ ID NO: 613747 - RNA, 19 nt, Artificial Sequence
  Description of Artificial Sequence: Synthetic oligonucleotide
  Antisense strand to SEQ ID NO: 613746
aauaugggcagauaucacc

SEQ ID NO: 613748 - RNA, 19 nt, Artificial Sequence
  Description of Artificial Sequence: Synthetic oligonucleotide
  Sense strand starting at position 3837 of SEQ ID NO: 585106
gugauaucugcccauauuc

SEQ ID NO: 613749 - RNA, 19 nt, Artificial Sequence
  Description of Artificial Sequence: Synthetic oligonucleotide
  Antisense strand to SEQ ID NO: 613748
gaauaugggcagauaucac

SEQ ID NO: 613750 - RNA, 19 nt, Artificial Sequence
  Description of Artificial Sequence: Synthetic oligonucleotide
  Sense strand starting at position 3975 of SEQ ID NO: 585106
aggcauagugcugaacauu

SEQ ID NO: 613751 - RNA, 19 nt, Artificial Sequence
  Description of Artificial Sequence: Synthetic oligonucleotide
  Antisense strand to SEQ ID NO: 613750
aauguucagcacuaugccu

SEQ ID NO: 613752 - RNA, 19 nt, Artificial Sequence
  Description of Artificial Sequence: Synthetic oligonucleotide
  Sense strand starting at position 113 of SEQ ID NO: 585107
ggucuuguacuuuauccau

SEQ ID NO: 613753 - RNA, 19 nt, Artificial Sequence
  Description of Artificial Sequence: Synthetic oligonucleotide
  Antisense strand to SEQ ID NO: 613752
auggauaaaguacaagacc

SEQ ID NO: 613754 - RNA, 19 nt, Artificial Sequence
  Description of Artificial Sequence: Synthetic oligonucleotide
  Sense strand starting at position 274 of SEQ ID NO: 585107
cucuauuugcucuguaugu

SEQ ID NO: 613755 - RNA, 19 nt, Artificial Sequence
  Description of Artificial Sequence: Synthetic oligonucleotide
  Antisense strand to SEQ ID NO: 613754
acauacagagcaaauagag

SEQ ID NO: 613756 - RNA, 19 nt, Artificial Sequence
  Description of Artificial Sequence: Synthetic oligonucleotide
  Sense strand starting at position 275 of SEQ ID NO: 585107
ucuauuugcucuguauguu

SEQ ID NO: 613757 - RNA, 19 nt, Artificial Sequence
  Description of Artificial Sequence: Synthetic oligonucleotide
  Antisense strand to SEQ ID NO: 613756
aacauacagagcaaauaga

SEQ ID NO: 613758 - RNA, 19 nt, Artificial Sequence
  Description of Artificial Sequence: Synthetic oligonucleotide
  Sense strand starting at position 498 of SEQ ID NO: 585107
cagucugauucucuagaga

SEQ ID NO: 613759 - RNA, 19 nt, Artificial Sequence
  Description of Artificial Sequence: Synthetic oligonucleotide
  Antisense strand to SEQ ID NO: 613758
ucucuagagaaucagacug

SEQ ID NO: 613760 - RNA, 19 nt, Artificial Sequence
  Description of Artificial Sequence: Synthetic oligonucleotide
  Sense strand starting at position 506 of SEQ ID NO: 585107
uucucuagagacugaaguu

SEQ ID NO: 613761 - RNA, 19 nt, Artificial Sequence
  Description of Artificial Sequence: Synthetic oligonucleotide
  Antisense strand to SEQ ID NO: 613760
aacuucagucucuagagaa

SEQ ID NO: 613762 - RNA, 19 nt, Artificial Sequence
  Description of Artificial Sequence: Synthetic oligonucleotide
  Sense strand starting at position 526 of SEQ ID NO: 585107
uuaauaagauguguuagga

SEQ ID NO: 613763 - RNA, 19 nt, Artificial Sequence
  Description of Artificial Sequence: Synthetic oligonucleotide
  Antisense strand to SEQ ID NO: 613762
uccuaacacaucuuauuaa

SEQ ID NO: 613764 - RNA, 19 nt, Artificial Sequence
  Description of Artificial Sequence: Synthetic oligonucleotide
  Sense strand starting at position 1065 of SEQ ID NO: 585107
agaaguacuugaguucuua

SEQ ID NO: 613765 - RNA, 19 nt, Artificial Sequence
  Description of Artificial Sequence: Synthetic oligonucleotide
  Antisense strand to SEQ ID NO: 613764
uaagaacucaaguacuucu

SEQ ID NO: 613766 - RNA, 19 nt, Artificial Sequence
  Description of Artificial Sequence: Synthetic oligonucleotide
  Sense strand starting at position 1223 of SEQ ID NO: 585107
aguguuaaucucgugucuu

SEQ ID NO: 613767 - RNA, 19 nt, Artificial Sequence
  Description of Artificial Sequence: Synthetic oligonucleotide
  Antisense strand to SEQ ID NO: 613766
aagacacgagauuaacacu

SEQ ID NO: 613768 - RNA, 19 nt, Artificial Sequence
  Description of Artificial Sequence: Synthetic oligonucleotide
  Sense strand starting at position 1225 of SEQ ID NO: 585107
uguuaaucucgugucuucu

SEQ ID NO: 613769 - RNA, 19 nt, Artificial Sequence
  Description of Artificial Sequence: Synthetic oligonucleotide
  Antisense strand to SEQ ID NO: 613768
agaagacacgagauuaaca

SEQ ID NO: 613770 - RNA, 19 nt, Artificial Sequence
  Description of Artificial Sequence: Synthetic oligonucleotide
  Sense strand starting at position 1516 of SEQ ID NO: 585107
gugcccugacaugacuauu

SEQ ID NO: 613771 - RNA, 19 nt, Artificial Sequence
  Description of Artificial Sequence: Synthetic oligonucleotide
  Antisense strand to SEQ ID NO: 613770
aauagucaugucagggcac

SEQ ID NO: 613772 - RNA, 19 nt, Artificial Sequence
  Description of Artificial Sequence: Synthetic oligonucleotide
  Sense strand starting at position 1581 of SEQ ID NO: 585107
gaauaaagggcuuguugaa

SEQ ID NO: 613773 - RNA, 19 nt, Artificial Sequence
  Description of Artificial Sequence: Synthetic oligonucleotide
  Antisense strand to SEQ ID NO: 613772
uucaacaagcccuuuauuc

SEQ ID NO: 613774 - RNA, 19 nt, Artificial Sequence
  Description of Artificial Sequence: Synthetic oligonucleotide
  Sense strand starting at position 1588 of SEQ ID NO: 585107
gggcuuguugaacagagau

SEQ ID NO: 613775 - RNA, 19 nt, Artificial Sequence
  Description of Artificial Sequence: Synthetic oligonucleotide
  Antisense strand to SEQ ID NO: 613774
aucucuguucaacaagccc

SEQ ID NO: 613776 - RNA, 19 nt, Artificial Sequence
  Description of Artificial Sequence: Synthetic oligonucleotide
  Sense strand starting at position 1619 of SEQ ID NO: 585107
ucccguggaaucugaauaa

SEQ ID NO: 613777 - RNA, 19 nt, Artificial Sequence
  Description of Artificial Sequence: Synthetic oligonucleotide
  Antisense strand to SEQ ID NO: 613776
uuauucagauuccacggga

SEQ ID NO: 613778 - RNA, 19 nt, Artificial Sequence
  Description of Artificial Sequence: Synthetic oligonucleotide
  Sense strand starting at position 1704 of SEQ ID NO: 585107
acagcuuaacgacacauau

SEQ ID NO: 613779 - RNA, 19 nt, Artificial Sequence
  Description of Artificial Sequence: Synthetic oligonucleotide
  Antisense strand to SEQ ID NO: 613778
auaugugucguuaagcugu

SEQ ID NO: 613780 - RNA, 19 nt, Artificial Sequence
  Description of Artificial Sequence: Synthetic oligonucleotide
  Sense strand starting at position 2289 of SEQ ID NO: 585107
gcccauacgcaggaaauaa

SEQ ID NO: 613781 - RNA, 19 nt, Artificial Sequence
  Description of Artificial Sequence: Synthetic oligonucleotide
  Antisense strand to SEQ ID NO: 613780
uuauuuccugcguaugggc

SEQ ID NO: 613782 - RNA, 19 nt, Artificial Sequence
  Description of Artificial Sequence: Synthetic oligonucleotide
  Sense strand starting at position 2297 of SEQ ID NO: 585107
gcaggaaauaaucgacuug

SEQ ID NO: 613783 - RNA, 19 nt, Artificial Sequence
  Description of Artificial Sequence: Synthetic oligonucleotide
  Antisense strand to SEQ ID NO: 613782
caagucgauuauuuccugc

SEQ ID NO: 613784 - RNA, 19 nt, Artificial Sequence
  Description of Artificial Sequence: Synthetic oligonucleotide
  Sense strand starting at position 2323 of SEQ ID NO: 585107
aucugacccguuuaagaug

SEQ ID NO: 613785 - RNA, 19 nt, Artificial Sequence
  Description of Artificial Sequence: Synthetic oligonucleotide
  Antisense strand to SEQ ID NO: 613784
caucuuaaacgggucagau

SEQ ID NO: 613786 - RNA, 19 nt, Artificial Sequence
  Description of Artificial Sequence: Synthetic oligonucleotide
  Sense strand starting at position 2330 of SEQ ID NO: 585107
ccguuuaagaugcauggga

SEQ ID NO: 613787 - RNA, 19 nt, Artificial Sequence
  Description of Artificial Sequence: Synthetic oligonucleotide
  Antisense strand to SEQ ID NO: 613786
ucccaugcaucuuaaacgg

SEQ ID NO: 613788 - RNA, 19 nt, Artificial Sequence
  Description of Artificial Sequence: Synthetic oligonucleotide
  Sense strand starting at position 2332 of SEQ ID NO: 585107
guuuaagaugcaugggauc

SEQ ID NO: 613789 - RNA, 19 nt, Artificial Sequence
  Description of Artificial Sequence: Synthetic oligonucleotide
  Antisense strand to SEQ ID NO: 613788
gaucccaugcaucuuaaac

SEQ ID NO: 613790 - RNA, 19 nt, Artificial Sequence
  Description of Artificial Sequence: Synthetic oligonucleotide
  Sense strand starting at position 2334 of SEQ ID NO: 585107
uuaagaugcaugggaucuu

SEQ ID NO: 613791 - RNA, 19 nt, Artificial Sequence
  Description of Artificial Sequence: Synthetic oligonucleotide
  Antisense strand to SEQ ID NO: 613790
aagaucccaugcaucuuaa

SEQ ID NO: 613792 - RNA, 19 nt, Artificial Sequence
  Description of Artificial Sequence: Synthetic oligonucleotide
  Sense strand starting at position 2424 of SEQ ID NO: 585107
gcgaccuuagucuuaacgu

SEQ ID NO: 613793 - RNA, 19 nt, Artificial Sequence
  Description of Artificial Sequence: Synthetic oligonucleotide
  Antisense strand to SEQ ID NO: 613792
acguuaagacuaaggucgc

SEQ ID NO: 613794 - RNA, 19 nt, Artificial Sequence
  Description of Artificial Sequence: Synthetic oligonucleotide
  Sense strand starting at position 2466 of SEQ ID NO: 585107
ucuuuauugguguucgugu

SEQ ID NO: 613795 - RNA, 19 nt, Artificial Sequence
  Description of Artificial Sequence: Synthetic oligonucleotide
  Antisense strand to SEQ ID NO: 613794
acacgaacaccaauaaaga

SEQ ID NO: 613796 - RNA, 19 nt, Artificial Sequence
  Description of Artificial Sequence: Synthetic oligonucleotide
  Sense strand starting at position 2471 of SEQ ID NO: 585107
auugguguucgugugcaga

SEQ ID NO: 613797 - RNA, 19 nt, Artificial Sequence
  Description of Artificial Sequence: Synthetic oligonucleotide
  Antisense strand to SEQ ID NO: 613796
ucugcacacgaacaccaau

SEQ ID NO: 613798 - RNA, 19 nt, Artificial Sequence
  Description of Artificial Sequence: Synthetic oligonucleotide
  Sense strand starting at position 2496 of SEQ ID NO: 585107
agauuuguauaugggaaag

SEQ ID NO: 613799 - RNA, 19 nt, Artificial Sequence
  Description of Artificial Sequence: Synthetic oligonucleotide
  Antisense strand to SEQ ID NO: 613798
cuuucccauauacaaaucu

SEQ ID NO: 613800 - RNA, 19 nt, Artificial Sequence
  Description of Artificial Sequence: Synthetic oligonucleotide
  Sense strand starting at position 2498 of SEQ ID NO: 585107
auuuguauaugggaaagua

SEQ ID NO: 613801 - RNA, 19 nt, Artificial Sequence
  Description of Artificial Sequence: Synthetic oligonucleotide
  Antisense strand to SEQ ID NO: 613800
uacuuucccauauacaaau

SEQ ID NO: 613802 - RNA, 19 nt, Artificial Sequence
  Description of Artificial Sequence: Synthetic oligonucleotide
  Sense strand starting at position 2506 of SEQ ID NO: 585107
augggaaaguacuuuguaa

SEQ ID NO: 613803 - RNA, 19 nt, Artificial Sequence
  Description of Artificial Sequence: Synthetic oligonucleotide
  Antisense strand to SEQ ID NO: 613802
uuacaaaguacuuucccau

SEQ ID NO: 613804 - RNA, 19 nt, Artificial Sequence
  Description of Artificial Sequence: Synthetic oligonucleotide
  Sense strand starting at position 2626 of SEQ ID NO: 585107
acaguccuaugggugaaau

SEQ ID NO: 613805 - RNA, 19 nt, Artificial Sequence
  Description of Artificial Sequence: Synthetic oligonucleotide
  Antisense strand to SEQ ID NO: 613804
auuucacccauaggacugu

SEQ ID NO: 613806 - RNA, 19 nt, Artificial Sequence
  Description of Artificial Sequence: Synthetic oligonucleotide
  Sense strand starting at position 2627 of SEQ ID NO: 585107
caguccuaugggugaaauc

SEQ ID NO: 613807 - RNA, 19 nt, Artificial Sequence
  Description of Artificial Sequence: Synthetic oligonucleotide
  Antisense strand to SEQ ID NO: 613806
gauuucacccauaggacug

SEQ ID NO: 613808 - RNA, 19 nt, Artificial Sequence
  Description of Artificial Sequence: Synthetic oligonucleotide
  Sense strand starting at position 2885 of SEQ ID NO: 585107
auaagcagcuucuuuagaa

SEQ ID NO: 613809 - RNA, 19 nt, Artificial Sequence
  Description of Artificial Sequence: Synthetic oligonucleotide
  Antisense strand to SEQ ID NO: 613808
uucuaaagaagcugcuuau

SEQ ID NO: 613810 - RNA, 19 nt, Artificial Sequence
  Description of Artificial Sequence: Synthetic oligonucleotide
  Sense strand starting at position 2924 of SEQ ID NO: 585107
gggauuaaagucugucaca

SEQ ID NO: 613811 - RNA, 19 nt, Artificial Sequence
  Description of Artificial Sequence: Synthetic oligonucleotide
  Antisense strand to SEQ ID NO: 613810
ugugacagacuuuaauccc

SEQ ID NO: 613812 - RNA, 19 nt, Artificial Sequence
  Description of Artificial Sequence: Synthetic oligonucleotide
  Sense strand starting at position 2925 of SEQ ID NO: 585107
ggauuaaagucugucacag

SEQ ID NO: 613813 - RNA, 19 nt, Artificial Sequence
  Description of Artificial Sequence: Synthetic oligonucleotide
  Antisense strand to SEQ ID NO: 613812
cugugacagacuuuaaucc

SEQ ID NO: 613814 - RNA, 19 nt, Artificial Sequence
  Description of Artificial Sequence: Synthetic oligonucleotide
  Sense strand starting at position 3236 of SEQ ID NO: 585107
acauauaugcuguaaguau

SEQ ID NO: 613815 - RNA, 19 nt, Artificial Sequence
  Description of Artificial Sequence: Synthetic oligonucleotide
  Antisense strand to SEQ ID NO: 613814
auacuuacagcauauaugu

SEQ ID NO: 613816 - RNA, 19 nt, Artificial Sequence
  Description of Artificial Sequence: Synthetic oligonucleotide
  Sense strand starting at position 3314 of SEQ ID NO: 585107
gaguauauguaaguaccau

SEQ ID NO: 613817 - RNA, 19 nt, Artificial Sequence
  Description of Artificial Sequence: Synthetic oligonucleotide
  Antisense strand to SEQ ID NO: 613816
augguacuuacauauacuc

SEQ ID NO: 613818 - RNA, 19 nt, Artificial Sequence
  Description of Artificial Sequence: Synthetic oligonucleotide
  Sense strand starting at position 3320 of SEQ ID NO: 585107
auguaaguaccauauaugu

SEQ ID NO: 613819 - RNA, 19 nt, Artificial Sequence
  Description of Artificial Sequence: Synthetic oligonucleotide
  Antisense strand to SEQ ID NO: 613818
acauauaugguacuuacau

SEQ ID NO: 613820 - RNA, 19 nt, Artificial Sequence
  Description of Artificial Sequence: Synthetic oligonucleotide
  Sense strand starting at position 3353 of SEQ ID NO: 585107
uaauuuaaguugccguuua

SEQ ID NO: 613821 - RNA, 19 nt, Artificial Sequence
  Description of Artificial Sequence: Synthetic oligonucleotide
  Antisense strand to SEQ ID NO: 613820
uaaacggcaacuuaaauua

SEQ ID NO: 613822 - RNA, 19 nt, Artificial Sequence
  Description of Artificial Sequence: Synthetic oligonucleotide
  Sense strand starting at position 3369 of SEQ ID NO: 585107
uuaggauaucuccauaagc

SEQ ID NO: 613823 - RNA, 19 nt, Artificial Sequence
  Description of Artificial Sequence: Synthetic oligonucleotide
  Antisense strand to SEQ ID NO: 613822
gcuuauggagauauccuaa

SEQ ID NO: 613824 - RNA, 19 nt, Artificial Sequence
  Description of Artificial Sequence: Synthetic oligonucleotide
  Sense strand starting at position 3371 of SEQ ID NO: 585107
aggauaucuccauaagcuu

SEQ ID NO: 613825 - RNA, 19 nt, Artificial Sequence
  Description of Artificial Sequence: Synthetic oligonucleotide
  Antisense strand to SEQ ID NO: 613824
aagcuuauggagauauccu

SEQ ID NO: 613826 - RNA, 19 nt, Artificial Sequence
  Description of Artificial Sequence: Synthetic oligonucleotide
  Sense strand starting at position 3579 of SEQ ID NO: 585107
gggugaauuccagagucua

SEQ ID NO: 613827 - RNA, 19 nt, Artificial Sequence
  Description of Artificial Sequence: Synthetic oligonucleotide
  Antisense strand to SEQ ID NO: 613826
uagacucuggaauucaccc

SEQ ID NO: 613828 - RNA, 19 nt, Artificial Sequence
  Description of Artificial Sequence: Synthetic oligonucleotide
  Sense strand starting at position 3795 of SEQ ID NO: 585107
gaaguuaguuacuuuaaug

SEQ ID NO: 613829 - RNA, 19 nt, Artificial Sequence
  Description of Artificial Sequence: Synthetic oligonucleotide
  Antisense strand to SEQ ID NO: 613828
cauuaaaguaacuaacuuc

SEQ ID NO: 613830 - RNA, 19 nt, Artificial Sequence
  Description of Artificial Sequence: Synthetic oligonucleotide
  Sense strand starting at position 3951 of SEQ ID NO: 585107
ggcgcuucucuugcuaagu

SEQ ID NO: 613831 - RNA, 19 nt, Artificial Sequence
  Description of Artificial Sequence: Synthetic oligonucleotide
  Antisense strand to SEQ ID NO: 613830
acuuagcaagagaagcgcc

SEQ ID NO: 613832 - RNA, 19 nt, Artificial Sequence
  Description of Artificial Sequence: Synthetic oligonucleotide
  Sense strand starting at position 17 of SEQ ID NO: 585108
agggcaaaguaauugacaa

SEQ ID NO: 613833 - RNA, 19 nt, Artificial Sequence
  Description of Artificial Sequence: Synthetic oligonucleotide
  Antisense strand to SEQ ID NO: 613832
uugucaauuacuuugcccu

SEQ ID NO: 613834 - RNA, 19 nt, Artificial Sequence
  Description of Artificial Sequence: Synthetic oligonucleotide
  Sense strand starting at position 18 of SEQ ID NO: 585108
gggcaaaguaauugacaaa

SEQ ID NO: 613835 - RNA, 19 nt, Artificial Sequence
  Description of Artificial Sequence: Synthetic oligonucleotide
  Antisense strand to SEQ ID NO: 613834
uuugucaauuacuuugccc

SEQ ID NO: 613836 - RNA, 19 nt, Artificial Sequence
  Description of Artificial Sequence: Synthetic oligonucleotide
  Sense strand starting at position 42 of SEQ ID NO: 585108
uguucuucuugucuaggaa

SEQ ID NO: 613837 - RNA, 19 nt, Artificial Sequence
  Description of Artificial Sequence: Synthetic oligonucleotide
  Antisense strand to SEQ ID NO: 613836
uuccuagacaagaagaaca

SEQ ID NO: 613838 - RNA, 19 nt, Artificial Sequence
  Description of Artificial Sequence: Synthetic oligonucleotide
  Sense strand starting at position 43 of SEQ ID NO: 585108
guucuucuugucuaggaaa

SEQ ID NO: 613839 - RNA, 19 nt, Artificial Sequence
  Description of Artificial Sequence: Synthetic oligonucleotide
  Antisense strand to SEQ ID NO: 613838
uuuccuagacaagaagaac

SEQ ID NO: 613840 - RNA, 19 nt, Artificial Sequence
  Description of Artificial Sequence: Synthetic oligonucleotide
  Sense strand starting at position 45 of SEQ ID NO: 585108
ucuucuugucuaggaaauu

SEQ ID NO: 613841 - RNA, 19 nt, Artificial Sequence
  Description of Artificial Sequence: Synthetic oligonucleotide
  Antisense strand to SEQ ID NO: 613840
aauuuccuagacaagaaga

SEQ ID NO: 613842 - RNA, 19 nt, Artificial Sequence
  Description of Artificial Sequence: Synthetic oligonucleotide
  Sense strand starting at position 108 of SEQ ID NO: 585108
auaugagucucacuuuauc

SEQ ID NO: 613843 - RNA, 19 nt, Artificial Sequence
  Description of Artificial Sequence: Synthetic oligonucleotide
  Antisense strand to SEQ ID NO: 613842
gauaaagugagacucauau

SEQ ID NO: 613844 - RNA, 19 nt, Artificial Sequence
  Description of Artificial Sequence: Synthetic oligonucleotide
  Sense strand starting at position 111 of SEQ ID NO: 585108
ugagucucacuuuaucuau

SEQ ID NO: 613845 - RNA, 19 nt, Artificial Sequence
  Description of Artificial Sequence: Synthetic oligonucleotide
  Antisense strand to SEQ ID NO: 613844
auagauaaagugagacuca

SEQ ID NO: 613846 - RNA, 19 nt, Artificial Sequence
  Description of Artificial Sequence: Synthetic oligonucleotide
  Sense strand starting at position 113 of SEQ ID NO: 585108
agucucacuuuaucuauga

SEQ ID NO: 613847 - RNA, 19 nt, Artificial Sequence
  Description of Artificial Sequence: Synthetic oligonucleotide
  Antisense strand to SEQ ID NO: 613846
ucauagauaaagugagacu

SEQ ID NO: 613848 - RNA, 19 nt, Artificial Sequence
  Description of Artificial Sequence: Synthetic oligonucleotide
  Sense strand starting at position 231 of SEQ ID NO: 585108
uuaguaugcuaacuguaag

SEQ ID NO: 613849 - RNA, 19 nt, Artificial Sequence
  Description of Artificial Sequence: Synthetic oligonucleotide
  Antisense strand to SEQ ID NO: 613848
cuuacaguuagcauacuaa

SEQ ID NO: 613850 - RNA, 19 nt, Artificial Sequence
  Description of Artificial Sequence: Synthetic oligonucleotide
  Sense strand starting at position 234 of SEQ ID NO: 585108
guaugcuaacuguaaggua

SEQ ID NO: 613851 - RNA, 19 nt, Artificial Sequence
  Description of Artificial Sequence: Synthetic oligonucleotide
  Antisense strand to SEQ ID NO: 613850
uaccuuacaguuagcauac

SEQ ID NO: 613852 - RNA, 19 nt, Artificial Sequence
  Description of Artificial Sequence: Synthetic oligonucleotide
  Sense strand starting at position 351 of SEQ ID NO: 585108
gugaaaccacauuguuaau

SEQ ID NO: 613853 - RNA, 19 nt, Artificial Sequence
  Description of Artificial Sequence: Synthetic oligonucleotide
  Antisense strand to SEQ ID NO: 613852
auuaacaaugugguuucac

SEQ ID NO: 613854 - RNA, 19 nt, Artificial Sequence
  Description of Artificial Sequence: Synthetic oligonucleotide
  Sense strand starting at position 433 of SEQ ID NO: 585108
agaggaacgcuuugguaga

SEQ ID NO: 613855 - RNA, 19 nt, Artificial Sequence
  Description of Artificial Sequence: Synthetic oligonucleotide
  Antisense strand to SEQ ID NO: 613854
ucuaccaaagcguuccucu

SEQ ID NO: 613856 - RNA, 19 nt, Artificial Sequence
  Description of Artificial Sequence: Synthetic oligonucleotide
  Sense strand starting at position 479 of SEQ ID NO: 585108
aaaugauguugugcuacaa

SEQ ID NO: 613857 - RNA, 19 nt, Artificial Sequence
  Description of Artificial Sequence: Synthetic oligonucleotide
  Antisense strand to SEQ ID NO: 613856
uuguagcacaacaucauuu

SEQ ID NO: 613858 - RNA, 19 nt, Artificial Sequence
  Description of Artificial Sequence: Synthetic oligonucleotide
  Sense strand starting at position 504 of SEQ ID NO: 585108
guauuagguuucccuuuga

SEQ ID NO: 613859 - RNA, 19 nt, Artificial Sequence
  Description of Artificial Sequence: Synthetic oligonucleotide
  Antisense strand to SEQ ID NO: 613858
ucaaagggaaaccuaauac

SEQ ID NO: 613860 - RNA, 19 nt, Artificial Sequence
  Description of Artificial Sequence: Synthetic oligonucleotide
  Sense strand starting at position 654 of SEQ ID NO: 585108
caaagaauguuagcagaga

SEQ ID NO: 613861 - RNA, 19 nt, Artificial Sequence
  Description of Artificial Sequence: Synthetic oligonucleotide
  Antisense strand to SEQ ID NO: 613860
ucucugcuaacauucuuug

SEQ ID NO: 613862 - RNA, 19 nt, Artificial Sequence
  Description of Artificial Sequence: Synthetic oligonucleotide
  Sense strand starting at position 924 of SEQ ID NO: 585108
ucacaauucugggucuaag

SEQ ID NO: 613863 - RNA, 19 nt, Artificial Sequence
  Description of Artificial Sequence: Synthetic oligonucleotide
  Antisense strand to SEQ ID NO: 613862
cuuagacccagaauuguga

SEQ ID NO: 613864 - RNA, 19 nt, Artificial Sequence
  Description of Artificial Sequence: Synthetic oligonucleotide
  Sense strand starting at position 935 of SEQ ID NO: 585108
ggucuaagucuagauguaa

SEQ ID NO: 613865 - RNA, 19 nt, Artificial Sequence
  Description of Artificial Sequence: Synthetic oligonucleotide
  Antisense strand to SEQ ID NO: 613864
uuacaucuagacuuagacc

SEQ ID NO: 613866 - RNA, 19 nt, Artificial Sequence
  Description of Artificial Sequence: Synthetic oligonucleotide
  Sense strand starting at position 994 of SEQ ID NO: 585108
ucauaaugcugugcauaaa

SEQ ID NO: 613867 - RNA, 19 nt, Artificial Sequence
  Description of Artificial Sequence: Synthetic oligonucleotide
  Antisense strand to SEQ ID NO: 613866
uuuaugcacagcauuauga

SEQ ID NO: 613868 - RNA, 19 nt, Artificial Sequence
  Description of Artificial Sequence: Synthetic oligonucleotide
  Sense strand starting at position 1275 of SEQ ID NO: 585108
ugcugaugguccucucaaa

SEQ ID NO: 613869 - RNA, 19 nt, Artificial Sequence
  Description of Artificial Sequence: Synthetic oligonucleotide
  Antisense strand to SEQ ID NO: 613868
uuugagaggaccaucagca

SEQ ID NO: 613870 - RNA, 19 nt, Artificial Sequence
  Description of Artificial Sequence: Synthetic oligonucleotide
  Sense strand starting at position 1615 of SEQ ID NO: 585108
gugacucuguuaguuacaa

SEQ ID NO: 613871 - RNA, 19 nt, Artificial Sequence
  Description of Artificial Sequence: Synthetic oligonucleotide
  Antisense strand to SEQ ID NO: 613870
uuguaacuaacagagucac

SEQ ID NO: 613872 - RNA, 19 nt, Artificial Sequence
  Description of Artificial Sequence: Synthetic oligonucleotide
  Sense strand starting at position 1616 of SEQ ID NO: 585108
ugacucuguuaguuacaaa

SEQ ID NO: 613873 - RNA, 19 nt, Artificial Sequence
  Description of Artificial Sequence: Synthetic oligonucleotide
  Antisense strand to SEQ ID NO: 613872
uuuguaacuaacagaguca

SEQ ID NO: 613874 - RNA, 19 nt, Artificial Sequence
  Description of Artificial Sequence: Synthetic oligonucleotide
  Sense strand starting at position 1697 of SEQ ID NO: 585108
uugagaaauuagcuguuau

SEQ ID NO: 613875 - RNA, 19 nt, Artificial Sequence
  Description of Artificial Sequence: Synthetic oligonucleotide
  Antisense strand to SEQ ID NO: 613874
auaacagcuaauuucucaa

SEQ ID NO: 613876 - RNA, 19 nt, Artificial Sequence
  Description of Artificial Sequence: Synthetic oligonucleotide
  Sense strand starting at position 1750 of SEQ ID NO: 585108
guaggaaacccagguauug

SEQ ID NO: 613877 - RNA, 19 nt, Artificial Sequence
  Description of Artificial Sequence: Synthetic oligonucleotide
  Antisense strand to SEQ ID NO: 613876
caauaccuggguuuccuac

SEQ ID NO: 613878 - RNA, 19 nt, Artificial Sequence
  Description of Artificial Sequence: Synthetic oligonucleotide
  Sense strand starting at position 1793 of SEQ ID NO: 585108
uagugagauuugcaaccca

SEQ ID NO: 613879 - RNA, 19 nt, Artificial Sequence
  Description of Artificial Sequence: Synthetic oligonucleotide
  Antisense strand to SEQ ID NO: 613878
uggguugcaaaucucacua

SEQ ID NO: 613880 - RNA, 19 nt, Artificial Sequence
  Description of Artificial Sequence: Synthetic oligonucleotide
  Sense strand starting at position 2152 of SEQ ID NO: 585108
auuguaagagccuauugaa

SEQ ID NO: 613881 - RNA, 19 nt, Artificial Sequence
  Description of Artificial Sequence: Synthetic oligonucleotide
  Antisense strand to SEQ ID NO: 613880
uucaauaggcucuuacaau

SEQ ID NO: 613882 - RNA, 19 nt, Artificial Sequence
  Description of Artificial Sequence: Synthetic oligonucleotide
  Sense strand starting at position 2222 of SEQ ID NO: 585108
gugggagcccuugguaaac

SEQ ID NO: 613883 - RNA, 19 nt, Artificial Sequence
  Description of Artificial Sequence: Synthetic oligonucleotide
  Antisense strand to SEQ ID NO: 613882
guuuaccaagggcucccac

SEQ ID NO: 613884 - RNA, 19 nt, Artificial Sequence
  Description of Artificial Sequence: Synthetic oligonucleotide
  Sense strand starting at position 2245 of SEQ ID NO: 585108
auugaauuccauggaaguc

SEQ ID NO: 613885 - RNA, 19 nt, Artificial Sequence
  Description of Artificial Sequence: Synthetic oligonucleotide
  Antisense strand to SEQ ID NO: 613884
gacuuccauggaauucaau

SEQ ID NO: 613886 - RNA, 19 nt, Artificial Sequence
  Description of Artificial Sequence: Synthetic oligonucleotide
  Sense strand starting at position 2306 of SEQ ID NO: 585108
caguuagcugaaugucaga

SEQ ID NO: 613887 - RNA, 19 nt, Artificial Sequence
  Description of Artificial Sequence: Synthetic oligonucleotide
  Antisense strand to SEQ ID NO: 613886
ucugacauucagcuaacug

SEQ ID NO: 613888 - RNA, 19 nt, Artificial Sequence
  Description of Artificial Sequence: Synthetic oligonucleotide
  Sense strand starting at position 2609 of SEQ ID NO: 585108
uggucuauuccgcuuugua

SEQ ID NO: 613889 - RNA, 19 nt, Artificial Sequence
  Description of Artificial Sequence: Synthetic oligonucleotide
  Antisense strand to SEQ ID NO: 613888
uacaaagcggaauagacca

SEQ ID NO: 613890 - RNA, 19 nt, Artificial Sequence
  Description of Artificial Sequence: Synthetic oligonucleotide
  Sense strand starting at position 2610 of SEQ ID NO: 585108
ggucuauuccgcuuuguac

SEQ ID NO: 613891 - RNA, 19 nt, Artificial Sequence
  Description of Artificial Sequence: Synthetic oligonucleotide
  Antisense strand to SEQ ID NO: 613890
guacaaagcggaauagacc

SEQ ID NO: 613892 - RNA, 19 nt, Artificial Sequence
  Description of Artificial Sequence: Synthetic oligonucleotide
  Sense strand starting at position 2875 of SEQ ID NO: 585108
gguugauucuuaguaaauu

SEQ ID NO: 613893 - RNA, 19 nt, Artificial Sequence
  Description of Artificial Sequence: Synthetic oligonucleotide
  Antisense strand to SEQ ID NO: 613892
aauuuacuaagaaucaacc

SEQ ID NO: 613894 - RNA, 19 nt, Artificial Sequence
  Description of Artificial Sequence: Synthetic oligonucleotide
  Sense strand starting at position 2978 of SEQ ID NO: 585108
caagaaaucuggcugcaug

SEQ ID NO: 613895 - RNA, 19 nt, Artificial Sequence
  Description of Artificial Sequence: Synthetic oligonucleotide
  Antisense strand to SEQ ID NO: 613894
caugcagccagauuucuug

SEQ ID NO: 613896 - RNA, 19 nt, Artificial Sequence
  Description of Artificial Sequence: Synthetic oligonucleotide
  Sense strand starting at position 2979 of SEQ ID NO: 585108
aagaaaucuggcugcaugu

SEQ ID NO: 613897 - RNA, 19 nt, Artificial Sequence
  Description of Artificial Sequence: Synthetic oligonucleotide
  Antisense strand to SEQ ID NO: 613896
acaugcagccagauuucuu

SEQ ID NO: 613898 - RNA, 19 nt, Artificial Sequence
  Description of Artificial Sequence: Synthetic oligonucleotide
  Sense strand starting at position 3218 of SEQ ID NO: 585108
gaaucuuccggguauccca

SEQ ID NO: 613899 - RNA, 19 nt, Artificial Sequence
  Description of Artificial Sequence: Synthetic oligonucleotide
  Antisense strand to SEQ ID NO: 613898
ugggauacccggaagauuc

SEQ ID NO: 613900 - RNA, 19 nt, Artificial Sequence
  Description of Artificial Sequence: Synthetic oligonucleotide
  Sense strand starting at position 3228 of SEQ ID NO: 585108
gguaucccagcacaugaau

SEQ ID NO: 613901 - RNA, 19 nt, Artificial Sequence
  Description of Artificial Sequence: Synthetic oligonucleotide
  Antisense strand to SEQ ID NO: 613900
auucaugugcugggauacc

SEQ ID NO: 613902 - RNA, 19 nt, Artificial Sequence
  Description of Artificial Sequence: Synthetic oligonucleotide
  Sense strand starting at position 3263 of SEQ ID NO: 585108
cuuugcauugaagauuauu

SEQ ID NO: 613903 - RNA, 19 nt, Artificial Sequence
  Description of Artificial Sequence: Synthetic oligonucleotide
  Antisense strand to SEQ ID NO: 613902
aauaaucuucaaugcaaag

SEQ ID NO: 613904 - RNA, 19 nt, Artificial Sequence
  Description of Artificial Sequence: Synthetic oligonucleotide
  Sense strand starting at position 3268 of SEQ ID NO: 585108
cauugaagauuauugguuu

SEQ ID NO: 613905 - RNA, 19 nt, Artificial Sequence
  Description of Artificial Sequence: Synthetic oligonucleotide
  Antisense strand to SEQ ID NO: 613904
aaaccaauaaucuucaaug

SEQ ID NO: 613906 - RNA, 19 nt, Artificial Sequence
  Description of Artificial Sequence: Synthetic oligonucleotide
  Sense strand starting at position 3321 of SEQ ID NO: 585108
augugaaacugacuuauga

SEQ ID NO: 613907 - RNA, 19 nt, Artificial Sequence
  Description of Artificial Sequence: Synthetic oligonucleotide
  Antisense strand to SEQ ID NO: 613906
ucauaagucaguuucacau

SEQ ID NO: 613908 - RNA, 19 nt, Artificial Sequence
  Description of Artificial Sequence: Synthetic oligonucleotide
  Sense strand starting at position 3779 of SEQ ID NO: 585108
gggaaucuuuaauaaagaa

SEQ ID NO: 613909 - RNA, 19 nt, Artificial Sequence
  Description of Artificial Sequence: Synthetic oligonucleotide
  Antisense strand to SEQ ID NO: 613908
uucuuuauuaaagauuccc

SEQ ID NO: 613910 - RNA, 19 nt, Artificial Sequence
  Description of Artificial Sequence: Synthetic oligonucleotide
  Sense strand starting at position 3939 of SEQ ID NO: 585108
uugucccuccuugauguua

SEQ ID NO: 613911 - RNA, 19 nt, Artificial Sequence
  Description of Artificial Sequence: Synthetic oligonucleotide
  Antisense strand to SEQ ID NO: 613910
uaacaucaaggagggacaa

SEQ ID NO: 613912 - RNA, 19 nt, Artificial Sequence
  Description of Artificial Sequence: Synthetic oligonucleotide
  Sense strand starting at position 14 of SEQ ID NO: 585109
ugcaucuucccacaggaau

SEQ ID NO: 613913 - RNA, 19 nt, Artificial Sequence
  Description of Artificial Sequence: Synthetic oligonucleotide
  Antisense strand to SEQ ID NO: 613912
auuccugugggaagaugca

SEQ ID NO: 613914 - RNA, 19 nt, Artificial Sequence
  Description of Artificial Sequence: Synthetic oligonucleotide
  Sense strand starting at position 40 of SEQ ID NO: 585109
agguccuucucauucugau

SEQ ID NO: 613915 - RNA, 19 nt, Artificial Sequence
  Description of Artificial Sequence: Synthetic oligonucleotide
  Antisense strand to SEQ ID NO: 613914
aucagaaugagaaggaccu

SEQ ID NO: 613916 - RNA, 19 nt, Artificial Sequence
  Description of Artificial Sequence: Synthetic oligonucleotide
  Sense strand starting at position 59 of SEQ ID NO: 585109
gaagaaucagcaggucagu

SEQ ID NO: 613917 - RNA, 19 nt, Artificial Sequence
  Description of Artificial Sequence: Synthetic oligonucleotide
  Antisense strand to SEQ ID NO: 613916
acugaccugcugauucuuc

SEQ ID NO: 613918 - RNA, 19 nt, Artificial Sequence
  Description of Artificial Sequence: Synthetic oligonucleotide
  Sense strand starting at position 94 of SEQ ID NO: 585109
augacaugaugugcaagau

SEQ ID NO: 613919 - RNA, 19 nt, Artificial Sequence
  Description of Artificial Sequence: Synthetic oligonucleotide
  Antisense strand to SEQ ID NO: 613918
aucuugcacaucaugucau

SEQ ID NO: 613920 - RNA, 19 nt, Artificial Sequence
  Description of Artificial Sequence: Synthetic oligonucleotide
  Sense strand starting at position 95 of SEQ ID NO: 585109
ugacaugaugugcaagauu

SEQ ID NO: 613921 - RNA, 19 nt, Artificial Sequence
  Description of Artificial Sequence: Synthetic oligonucleotide
  Antisense strand to SEQ ID NO: 613920
aaucuugcacaucauguca

SEQ ID NO: 613922 - RNA, 19 nt, Artificial Sequence
  Description of Artificial Sequence: Synthetic oligonucleotide
  Sense strand starting at position 103 of SEQ ID NO: 585109
ugugcaagauuuccuugua

SEQ ID NO: 613923 - RNA, 19 nt, Artificial Sequence
  Description of Artificial Sequence: Synthetic oligonucleotide
  Antisense strand to SEQ ID NO: 613922
uacaaggaaaucuugcaca

SEQ ID NO: 613924 - RNA, 19 nt, Artificial Sequence
  Description of Artificial Sequence: Synthetic oligonucleotide
  Sense strand starting at position 104 of SEQ ID NO: 585109
gugcaagauuuccuuguac

SEQ ID NO: 613925 - RNA, 19 nt, Artificial Sequence
  Description of Artificial Sequence: Synthetic oligonucleotide
  Antisense strand to SEQ ID NO: 613924
guacaaggaaaucuugcac

SEQ ID NO: 613926 - RNA, 19 nt, Artificial Sequence
  Description of Artificial Sequence: Synthetic oligonucleotide
  Sense strand starting at position 106 of SEQ ID NO: 585109
gcaagauuuccuuguaccu

SEQ ID NO: 613927 - RNA, 19 nt, Artificial Sequence
  Description of Artificial Sequence: Synthetic oligonucleotide
  Antisense strand to SEQ ID NO: 613926
agguacaaggaaaucuugc

SEQ ID NO: 613928 - RNA, 19 nt, Artificial Sequence
  Description of Artificial Sequence: Synthetic oligonucleotide
  Sense strand starting at position 300 of SEQ ID NO: 585109
uaagaugugcuuuaugcau

SEQ ID NO: 613929 - RNA, 19 nt, Artificial Sequence
  Description of Artificial Sequence: Synthetic oligonucleotide
  Antisense strand to SEQ ID NO: 613928
augcauaaagcacaucuua

SEQ ID NO: 613930 - RNA, 19 nt, Artificial Sequence
  Description of Artificial Sequence: Synthetic oligonucleotide
  Sense strand starting at position 307 of SEQ ID NO: 585109
ugcuuuaugcauuaaagaa

SEQ ID NO: 613931 - RNA, 19 nt, Artificial Sequence
  Description of Artificial Sequence: Synthetic oligonucleotide
  Antisense strand to SEQ ID NO: 613930
uucuuuaaugcauaaagca

SEQ ID NO: 613932 - RNA, 19 nt, Artificial Sequence
  Description of Artificial Sequence: Synthetic oligonucleotide
  Sense strand starting at position 362 of SEQ ID NO: 585109
uuaugaagaguaugacuuu

SEQ ID NO: 613933 - RNA, 19 nt, Artificial Sequence
  Description of Artificial Sequence: Synthetic oligonucleotide
  Antisense strand to SEQ ID NO: 613932
aaagucauacucuucauaa

SEQ ID NO: 613934 - RNA, 19 nt, Artificial Sequence
  Description of Artificial Sequence: Synthetic oligonucleotide
  Sense strand starting at position 365 of SEQ ID NO: 585109
ugaagaguaugacuuuacu

SEQ ID NO: 613935 - RNA, 19 nt, Artificial Sequence
  Description of Artificial Sequence: Synthetic oligonucleotide
  Antisense strand to SEQ ID NO: 613934
aguaaagucauacucuuca

SEQ ID NO: 613936 - RNA, 19 nt, Artificial Sequence
  Description of Artificial Sequence: Synthetic oligonucleotide
  Sense strand starting at position 391 of SEQ ID NO: 585109
agcuuuggaguguaugauu

SEQ ID NO: 613937 - RNA, 19 nt, Artificial Sequence
  Description of Artificial Sequence: Synthetic oligonucleotide
  Antisense strand to SEQ ID NO: 613936
aaucauacacuccaaagcu

SEQ ID NO: 613938 - RNA, 19 nt, Artificial Sequence
  Description of Artificial Sequence: Synthetic oligonucleotide
  Sense strand starting at position 444 of SEQ ID NO: 585109
aaggcaaauccuugucgaa

SEQ ID NO: 613939 - RNA, 19 nt, Artificial Sequence
  Description of Artificial Sequence: Synthetic oligonucleotide
  Antisense strand to SEQ ID NO: 613938
uucgacaaggauuugccuu

SEQ ID NO: 613940 - RNA, 19 nt, Artificial Sequence
  Description of Artificial Sequence: Synthetic oligonucleotide
  Sense strand starting at position 474 of SEQ ID NO: 585109
augcuauuucugugccuuu

SEQ ID NO: 613941 - RNA, 19 nt, Artificial Sequence
  Description of Artificial Sequence: Synthetic oligonucleotide
  Antisense strand to SEQ ID NO: 613940
aaaggcacagaaauagcau

SEQ ID NO: 613942 - RNA, 19 nt, Artificial Sequence
  Description of Artificial Sequence: Synthetic oligonucleotide
  Sense strand starting at position 475 of SEQ ID NO: 585109
ugcuauuucugugccuuua

SEQ ID NO: 613943 - RNA, 19 nt, Artificial Sequence
  Description of Artificial Sequence: Synthetic oligonucleotide
  Antisense strand to SEQ ID NO: 613942
uaaaggcacagaaauagca

SEQ ID NO: 613944 - RNA, 19 nt, Artificial Sequence
  Description of Artificial Sequence: Synthetic oligonucleotide
  Sense strand starting at position 477 of SEQ ID NO: 585109
cuauuucugugccuuuauu

SEQ ID NO: 613945 - RNA, 19 nt, Artificial Sequence
  Description of Artificial Sequence: Synthetic oligonucleotide
  Antisense strand to SEQ ID NO: 613944
aauaaaggcacagaaauag

SEQ ID NO: 613946 - RNA, 19 nt, Artificial Sequence
  Description of Artificial Sequence: Synthetic oligonucleotide
  Sense strand starting at position 523 of SEQ ID NO: 585109
uguggaucugcuuaucaac

SEQ ID NO: 613947 - RNA, 19 nt, Artificial Sequence
  Description of Artificial Sequence: Synthetic oligonucleotide
  Antisense strand to SEQ ID NO: 613946
guugauaagcagauccaca

SEQ ID NO: 613948 - RNA, 19 nt, Artificial Sequence
  Description of Artificial Sequence: Synthetic oligonucleotide
  Sense strand starting at position 593 of SEQ ID NO: 585109
ggaaguuaguccuuccuaa

SEQ ID NO: 613949 - RNA, 19 nt, Artificial Sequence
  Description of Artificial Sequence: Synthetic oligonucleotide
  Antisense strand to SEQ ID NO: 613948
uuaggaaggacuaacuucc

SEQ ID NO: 613950 - RNA, 19 nt, Artificial Sequence
  Description of Artificial Sequence: Synthetic oligonucleotide
  Sense strand starting at position 622 of SEQ ID NO: 585109
cuggauuuguguucaugug

SEQ ID NO: 613951 - RNA, 19 nt, Artificial Sequence
  Description of Artificial Sequence: Synthetic oligonucleotide
  Antisense strand to SEQ ID NO: 613950
cacaugaacacaaauccag

SEQ ID NO: 613952 - RNA, 19 nt, Artificial Sequence
  Description of Artificial Sequence: Synthetic oligonucleotide
  Sense strand starting at position 644 of SEQ ID NO: 585109
ggaggaaugacaggcuacu

SEQ ID NO: 613953 - RNA, 19 nt, Artificial Sequence
  Description of Artificial Sequence: Synthetic oligonucleotide
  Antisense strand to SEQ ID NO: 613952
aguagccugucauuccucc

SEQ ID NO: 613954 - RNA, 19 nt, Artificial Sequence
  Description of Artificial Sequence: Synthetic oligonucleotide
  Sense strand starting at position 667 of SEQ ID NO: 585109
ugcaucaauuagguaaaga

SEQ ID NO: 613955 - RNA, 19 nt, Artificial Sequence
  Description of Artificial Sequence: Synthetic oligonucleotide
  Antisense strand to SEQ ID NO: 613954
ucuuuaccuaauugaugca

SEQ ID NO: 613956 - RNA, 19 nt, Artificial Sequence
  Description of Artificial Sequence: Synthetic oligonucleotide
  Sense strand starting at position 890 of SEQ ID NO: 585109
agagauagcaguugccaga

SEQ ID NO: 613957 - RNA, 19 nt, Artificial Sequence
  Description of Artificial Sequence: Synthetic oligonucleotide
  Antisense strand to SEQ ID NO: 613956
ucuggcaacugcuaucucu

SEQ ID NO: 613958 - RNA, 19 nt, Artificial Sequence
  Description of Artificial Sequence: Synthetic oligonucleotide
  Sense strand starting at position 1167 of SEQ ID NO: 585109
uggacaauccaguggauau

SEQ ID NO: 613959 - RNA, 19 nt, Artificial Sequence
  Description of Artificial Sequence: Synthetic oligonucleotide
  Antisense strand to SEQ ID NO: 613958
auauccacuggauugucca

SEQ ID NO: 613960 - RNA, 19 nt, Artificial Sequence
  Description of Artificial Sequence: Synthetic oligonucleotide
  Sense strand starting at position 1168 of SEQ ID NO: 585109
ggacaauccaguggauauu

SEQ ID NO: 613961 - RNA, 19 nt, Artificial Sequence
  Description of Artificial Sequence: Synthetic oligonucleotide
  Antisense strand to SEQ ID NO: 613960
aauauccacuggauugucc

SEQ ID NO: 613962 - RNA, 19 nt, Artificial Sequence
  Description of Artificial Sequence: Synthetic oligonucleotide
  Sense strand starting at position 1355 of SEQ ID NO: 585109
gagagaauacuucgagcuc

SEQ ID NO: 613963 - RNA, 19 nt, Artificial Sequence
  Description of Artificial Sequence: Synthetic oligonucleotide
  Antisense strand to SEQ ID NO: 613962
gagcucgaaguauucucuc

SEQ ID NO: 613964 - RNA, 19 nt, Artificial Sequence
  Description of Artificial Sequence: Synthetic oligonucleotide
  Sense strand starting at position 1367 of SEQ ID NO: 585109
cgagcucaugcugagagaa

SEQ ID NO: 613965 - RNA, 19 nt, Artificial Sequence
  Description of Artificial Sequence: Synthetic oligonucleotide
  Antisense strand to SEQ ID NO: 613964
uucucucagcaugagcucg

SEQ ID NO: 613966 - RNA, 19 nt, Artificial Sequence
  Description of Artificial Sequence: Synthetic oligonucleotide
  Sense strand starting at position 2131 of SEQ ID NO: 585109
ccuccuacugguggaaauu

SEQ ID NO: 613967 - RNA, 19 nt, Artificial Sequence
  Description of Artificial Sequence: Synthetic oligonucleotide
  Antisense strand to SEQ ID NO: 613966
aauuuccaccaguaggagg

SEQ ID NO: 613968 - RNA, 19 nt, Artificial Sequence
  Description of Artificial Sequence: Synthetic oligonucleotide
  Sense strand starting at position 2140 of SEQ ID NO: 585109
gguggaaauugggcuguga

SEQ ID NO: 613969 - RNA, 19 nt, Artificial Sequence
  Description of Artificial Sequence: Synthetic oligonucleotide
  Antisense strand to SEQ ID NO: 613968
ucacagcccaauuuccacc

SEQ ID NO: 613970 - RNA, 19 nt, Artificial Sequence
  Description of Artificial Sequence: Synthetic oligonucleotide
  Sense strand starting at position 2142 of SEQ ID NO: 585109
uggaaauugggcugugaua

SEQ ID NO: 613971 - RNA, 19 nt, Artificial Sequence
  Description of Artificial Sequence: Synthetic oligonucleotide
  Antisense strand to SEQ ID NO: 613970
uaucacagcccaauuucca

SEQ ID NO: 613972 - RNA, 19 nt, Artificial Sequence
  Description of Artificial Sequence: Synthetic oligonucleotide
  Sense strand starting at position 2144 of SEQ ID NO: 585109
gaaauugggcugugauacu

SEQ ID NO: 613973 - RNA, 19 nt, Artificial Sequence
  Description of Artificial Sequence: Synthetic oligonucleotide
  Antisense strand to SEQ ID NO: 613972
aguaucacagcccaauuuc

SEQ ID NO: 613974 - RNA, 19 nt, Artificial Sequence
  Description of Artificial Sequence: Synthetic oligonucleotide
  Sense strand starting at position 2165 of SEQ ID NO: 585109
agccuaaaugcugagaaua

SEQ ID NO: 613975 - RNA, 19 nt, Artificial Sequence
  Description of Artificial Sequence: Synthetic oligonucleotide
  Antisense strand to SEQ ID NO: 613974
uauucucagcauuuaggcu

SEQ ID NO: 613976 - RNA, 19 nt, Artificial Sequence
  Description of Artificial Sequence: Synthetic oligonucleotide
  Sense strand starting at position 2563 of SEQ ID NO: 585109
cacccaucaccggauaugu

SEQ ID NO: 613977 - RNA, 19 nt, Artificial Sequence
  Description of Artificial Sequence: Synthetic oligonucleotide
  Antisense strand to SEQ ID NO: 613976
acauauccggugaugggug

SEQ ID NO: 613978 - RNA, 19 nt, Artificial Sequence
  Description of Artificial Sequence: Synthetic oligonucleotide
  Sense strand starting at position 2565 of SEQ ID NO: 585109
cccaucaccggauauguau

SEQ ID NO: 613979 - RNA, 19 nt, Artificial Sequence
  Description of Artificial Sequence: Synthetic oligonucleotide
  Antisense strand to SEQ ID NO: 613978
auacauauccggugauggg

SEQ ID NO: 613980 - RNA, 19 nt, Artificial Sequence
  Description of Artificial Sequence: Synthetic oligonucleotide
  Sense strand starting at position 2574 of SEQ ID NO: 585109
ggauauguauguguaccca

SEQ ID NO: 613981 - RNA, 19 nt, Artificial Sequence
  Description of Artificial Sequence: Synthetic oligonucleotide
  Antisense strand to SEQ ID NO: 613980
uggguacacauacauaucc

SEQ ID NO: 613982 - RNA, 19 nt, Artificial Sequence
  Description of Artificial Sequence: Synthetic oligonucleotide
  Sense strand starting at position 2578 of SEQ ID NO: 585109
auguauguguacccaauau

SEQ ID NO: 613983 - RNA, 19 nt, Artificial Sequence
  Description of Artificial Sequence: Synthetic oligonucleotide
  Antisense strand to SEQ ID NO: 613982
auauuggguacacauacau

SEQ ID NO: 613984 - RNA, 19 nt, Artificial Sequence
  Description of Artificial Sequence: Synthetic oligonucleotide
  Sense strand starting at position 2582 of SEQ ID NO: 585109
auguguacccaauauguau

SEQ ID NO: 613985 - RNA, 19 nt, Artificial Sequence
  Description of Artificial Sequence: Synthetic oligonucleotide
  Antisense strand to SEQ ID NO: 613984
auacauauuggguacacau

SEQ ID NO: 613986 - RNA, 19 nt, Artificial Sequence
  Description of Artificial Sequence: Synthetic oligonucleotide
  Sense strand starting at position 3158 of SEQ ID NO: 585109
uggugaaucucccucucua

SEQ ID NO: 613987 - RNA, 19 nt, Artificial Sequence
  Description of Artificial Sequence: Synthetic oligonucleotide
  Antisense strand to SEQ ID NO: 613986
uagagagggagauucacca

SEQ ID NO: 613988 - RNA, 19 nt, Artificial Sequence
  Description of Artificial Sequence: Synthetic oligonucleotide
  Sense strand starting at position 3546 of SEQ ID NO: 585109
cccuaaugauuaguauguu

SEQ ID NO: 613989 - RNA, 19 nt, Artificial Sequence
  Description of Artificial Sequence: Synthetic oligonucleotide
  Antisense strand to SEQ ID NO: 613988
aacauacuaaucauuaggg

SEQ ID NO: 613990 - RNA, 19 nt, Artificial Sequence
  Description of Artificial Sequence: Synthetic oligonucleotide
  Sense strand starting at position 3623 of SEQ ID NO: 585109
ugaugucauuugcucacuu

SEQ ID NO: 613991 - RNA, 19 nt, Artificial Sequence
  Description of Artificial Sequence: Synthetic oligonucleotide
  Antisense strand to SEQ ID NO: 613990
aagugagcaaaugacauca

SEQ ID NO: 613992 - RNA, 19 nt, Artificial Sequence
  Description of Artificial Sequence: Synthetic oligonucleotide
  Sense strand starting at position 111 of SEQ ID NO: 585110
guaauuuaguuacuugguu

SEQ ID NO: 613993 - RNA, 19 nt, Artificial Sequence
  Description of Artificial Sequence: Synthetic oligonucleotide
  Antisense strand to SEQ ID NO: 613992
aaccaaguaacuaaauuac

SEQ ID NO: 613994 - RNA, 19 nt, Artificial Sequence
  Description of Artificial Sequence: Synthetic oligonucleotide
  Sense strand starting at position 175 of SEQ ID NO: 585110
gccaguuaugaugaugaac

SEQ ID NO: 613995 - RNA, 19 nt, Artificial Sequence
  Description of Artificial Sequence: Synthetic oligonucleotide
  Antisense strand to SEQ ID NO: 613994
guucaucaucauaacuggc

SEQ ID NO: 613996 - RNA, 19 nt, Artificial Sequence
  Description of Artificial Sequence: Synthetic oligonucleotide
  Sense strand starting at position 207 of SEQ ID NO: 585110
aggucuuaauuccuuaaga

SEQ ID NO: 613997 - RNA, 19 nt, Artificial Sequence
  Description of Artificial Sequence: Synthetic oligonucleotide
  Antisense strand to SEQ ID NO: 613996
ucuuaaggaauuaagaccu

SEQ ID NO: 613998 - RNA, 19 nt, Artificial Sequence
  Description of Artificial Sequence: Synthetic oligonucleotide
  Sense strand starting at position 208 of SEQ ID NO: 585110
ggucuuaauuccuuaagag

SEQ ID NO: 613999 - RNA, 19 nt, Artificial Sequence
  Description of Artificial Sequence: Synthetic oligonucleotide
  Antisense strand to SEQ ID NO: 613998
cucuuaaggaauuaagacc

SEQ ID NO: 614000 - RNA, 19 nt, Artificial Sequence
  Description of Artificial Sequence: Synthetic oligonucleotide
  Sense strand starting at position 209 of SEQ ID NO: 585110
gucuuaauuccuuaagagu

SEQ ID NO: 614001 - RNA, 19 nt, Artificial Sequence
  Description of Artificial Sequence: Synthetic oligonucleotide
  Antisense strand to SEQ ID NO: 614000
acucuuaaggaauuaagac

SEQ ID NO: 614002 - RNA, 19 nt, Artificial Sequence
  Description of Artificial Sequence: Synthetic oligonucleotide
  Sense strand starting at position 276 of SEQ ID NO: 585110
gaaagucaacuguagucca

SEQ ID NO: 614003 - RNA, 19 nt, Artificial Sequence
  Description of Artificial Sequence: Synthetic oligonucleotide
  Antisense strand to SEQ ID NO: 614002
uggacuacaguugacuuuc

SEQ ID NO: 614004 - RNA, 19 nt, Artificial Sequence
  Description of Artificial Sequence: Synthetic oligonucleotide
  Sense strand starting at position 281 of SEQ ID NO: 585110
ucaacuguaguccaaguua

SEQ ID NO: 614005 - RNA, 19 nt, Artificial Sequence
  Description of Artificial Sequence: Synthetic oligonucleotide
  Antisense strand to SEQ ID NO: 614004
uaacuuggacuacaguuga

SEQ ID NO: 614006 - RNA, 19 nt, Artificial Sequence
  Description of Artificial Sequence: Synthetic oligonucleotide
  Sense strand starting at position 304 of SEQ ID NO: 585110
cuaugauucugcccaggga

SEQ ID NO: 614007 - RNA, 19 nt, Artificial Sequence
  Description of Artificial Sequence: Synthetic oligonucleotide
  Antisense strand to SEQ ID NO: 614006
ucccugggcagaaucauag

SEQ ID NO: 614008 - RNA, 19 nt, Artificial Sequence
  Description of Artificial Sequence: Synthetic oligonucleotide
  Sense strand starting at position 364 of SEQ ID NO: 585110
cugcaaauccugggaaaga

SEQ ID NO: 614009 - RNA, 19 nt, Artificial Sequence
  Description of Artificial Sequence: Synthetic oligonucleotide
  Antisense strand to SEQ ID NO: 614008
ucuuucccaggauuugcag

SEQ ID NO: 614010 - RNA, 19 nt, Artificial Sequence
  Description of Artificial Sequence: Synthetic oligonucleotide
  Sense strand starting at position 426 of SEQ ID NO: 585110
uggcuuuagagccagacaa

SEQ ID NO: 614011 - RNA, 19 nt, Artificial Sequence
  Description of Artificial Sequence: Synthetic oligonucleotide
  Antisense strand to SEQ ID NO: 614010
uugucuggcucuaaagcca

SEQ ID NO: 614012 - RNA, 19 nt, Artificial Sequence
  Description of Artificial Sequence: Synthetic oligonucleotide
  Sense strand starting at position 513 of SEQ ID NO: 585110
uacuuagacucagugaagu

SEQ ID NO: 614013 - RNA, 19 nt, Artificial Sequence
  Description of Artificial Sequence: Synthetic oligonucleotide
  Antisense strand to SEQ ID NO: 614012
acuucacugagucuaagua

SEQ ID NO: 614014 - RNA, 19 nt, Artificial Sequence
  Description of Artificial Sequence: Synthetic oligonucleotide
  Sense strand starting at position 549 of SEQ ID NO: 585110
acgaaacuauuacuuguaa

SEQ ID NO: 614015 - RNA, 19 nt, Artificial Sequence
  Description of Artificial Sequence: Synthetic oligonucleotide
  Antisense strand to SEQ ID NO: 614014
uuacaaguaauaguuucgu

SEQ ID NO: 614016 - RNA, 19 nt, Artificial Sequence
  Description of Artificial Sequence: Synthetic oligonucleotide
  Sense strand starting at position 595 of SEQ ID NO: 585110
agagcuguugugagacgua

SEQ ID NO: 614017 - RNA, 19 nt, Artificial Sequence
  Description of Artificial Sequence: Synthetic oligonucleotide
  Antisense strand to SEQ ID NO: 614016
uacgucucacaacagcucu

SEQ ID NO: 614018 - RNA, 19 nt, Artificial Sequence
  Description of Artificial Sequence: Synthetic oligonucleotide
  Sense strand starting at position 755 of SEQ ID NO: 585110
agauauucucuugacggca

SEQ ID NO: 614019 - RNA, 19 nt, Artificial Sequence
  Description of Artificial Sequence: Synthetic oligonucleotide
  Antisense strand to SEQ ID NO: 614018
ugccgucaagagaauaucu

SEQ ID NO: 614020 - RNA, 19 nt, Artificial Sequence
  Description of Artificial Sequence: Synthetic oligonucleotide
  Sense strand starting at position 760 of SEQ ID NO: 585110
uucucuugacggcaaauua

SEQ ID NO: 614021 - RNA, 19 nt, Artificial Sequence
  Description of Artificial Sequence: Synthetic oligonucleotide
  Antisense strand to SEQ ID NO: 614020
uaauuugccgucaagagaa

SEQ ID NO: 614022 - RNA, 19 nt, Artificial Sequence
  Description of Artificial Sequence: Synthetic oligonucleotide
  Sense strand starting at position 809 of SEQ ID NO: 585110
gguacuguauaucuggaga

SEQ ID NO: 614023 - RNA, 19 nt, Artificial Sequence
  Description of Artificial Sequence: Synthetic oligonucleotide
  Antisense strand to SEQ ID NO: 614022
ucuccagauauacaguacc

SEQ ID NO: 614024 - RNA, 19 nt, Artificial Sequence
  Description of Artificial Sequence: Synthetic oligonucleotide
  Sense strand starting at position 1886 of SEQ ID NO: 585110
guuacuaagccagaucaca

SEQ ID NO: 614025 - RNA, 19 nt, Artificial Sequence
  Description of Artificial Sequence: Synthetic oligonucleotide
  Antisense strand to SEQ ID NO: 614024
ugugaucuggcuuaguaac

SEQ ID NO: 614026 - RNA, 19 nt, Artificial Sequence
  Description of Artificial Sequence: Synthetic oligonucleotide
  Sense strand starting at position 1931 of SEQ ID NO: 585110
ugauuacuuacgggaaaca

SEQ ID NO: 614027 - RNA, 19 nt, Artificial Sequence
  Description of Artificial Sequence: Synthetic oligonucleotide
  Antisense strand to SEQ ID NO: 614026
uguuucccguaaguaauca

SEQ ID NO: 614028 - RNA, 19 nt, Artificial Sequence
  Description of Artificial Sequence: Synthetic oligonucleotide
  Sense strand starting at position 2136 of SEQ ID NO: 585110
uguauugauuuacucguca

SEQ ID NO: 614029 - RNA, 19 nt, Artificial Sequence
  Description of Artificial Sequence: Synthetic oligonucleotide
  Antisense strand to SEQ ID NO: 614028
ugacgaguaaaucaauaca

SEQ ID NO: 614030 - RNA, 19 nt, Artificial Sequence
  Description of Artificial Sequence: Synthetic oligonucleotide
  Sense strand starting at position 2191 of SEQ ID NO: 585110
ugucaaugccuggaggaga

SEQ ID NO: 614031 - RNA, 19 nt, Artificial Sequence
  Description of Artificial Sequence: Synthetic oligonucleotide
  Antisense strand to SEQ ID NO: 614030
ucuccuccaggcauugaca

SEQ ID NO: 614032 - RNA, 19 nt, Artificial Sequence
  Description of Artificial Sequence: Synthetic oligonucleotide
  Sense strand starting at position 2426 of SEQ ID NO: 585110
ugaggugugcuugaaagaa

SEQ ID NO: 614033 - RNA, 19 nt, Artificial Sequence
  Description of Artificial Sequence: Synthetic oligonucleotide
  Antisense strand to SEQ ID NO: 614032
uucuuucaagcacaccuca

SEQ ID NO: 614034 - RNA, 19 nt, Artificial Sequence
  Description of Artificial Sequence: Synthetic oligonucleotide
  Sense strand starting at position 2573 of SEQ ID NO: 585110
gauugaguagcauauguaa

SEQ ID NO: 614035 - RNA, 19 nt, Artificial Sequence
  Description of Artificial Sequence: Synthetic oligonucleotide
  Antisense strand to SEQ ID NO: 614034
uuacauaugcuacucaauc

SEQ ID NO: 614036 - RNA, 19 nt, Artificial Sequence
  Description of Artificial Sequence: Synthetic oligonucleotide
  Sense strand starting at position 2605 of SEQ ID NO: 585110
auaggauaugucuguuaaa

SEQ ID NO: 614037 - RNA, 19 nt, Artificial Sequence
  Description of Artificial Sequence: Synthetic oligonucleotide
  Antisense strand to SEQ ID NO: 614036
uuuaacagacauauccuau

SEQ ID NO: 614038 - RNA, 19 nt, Artificial Sequence
  Description of Artificial Sequence: Synthetic oligonucleotide
  Sense strand starting at position 2606 of SEQ ID NO: 585110
uaggauaugucuguuaaau

SEQ ID NO: 614039 - RNA, 19 nt, Artificial Sequence
  Description of Artificial Sequence: Synthetic oligonucleotide
  Antisense strand to SEQ ID NO: 614038
auuuaacagacauauccua

SEQ ID NO: 614040 - RNA, 19 nt, Artificial Sequence
  Description of Artificial Sequence: Synthetic oligonucleotide
  Sense strand starting at position 2616 of SEQ ID NO: 585110
cuguuaaaugaaugaucag

SEQ ID NO: 614041 - RNA, 19 nt, Artificial Sequence
  Description of Artificial Sequence: Synthetic oligonucleotide
  Antisense strand to SEQ ID NO: 614040
cugaucauucauuuaacag

SEQ ID NO: 614042 - RNA, 19 nt, Artificial Sequence
  Description of Artificial Sequence: Synthetic oligonucleotide
  Sense strand starting at position 2619 of SEQ ID NO: 585110
uuaaaugaaugaucagugu

SEQ ID NO: 614043 - RNA, 19 nt, Artificial Sequence
  Description of Artificial Sequence: Synthetic oligonucleotide
  Antisense strand to SEQ ID NO: 614042
acacugaucauucauuuaa

SEQ ID NO: 614044 - RNA, 19 nt, Artificial Sequence
  Description of Artificial Sequence: Synthetic oligonucleotide
  Sense strand starting at position 2622 of SEQ ID NO: 585110
aaugaaugaucagugugag

SEQ ID NO: 614045 - RNA, 19 nt, Artificial Sequence
  Description of Artificial Sequence: Synthetic oligonucleotide
  Antisense strand to SEQ ID NO: 614044
cucacacugaucauucauu

SEQ ID NO: 614046 - RNA, 19 nt, Artificial Sequence
  Description of Artificial Sequence: Synthetic oligonucleotide
  Sense strand starting at position 2623 of SEQ ID NO: 585110
augaaugaucagugugaga

SEQ ID NO: 614047 - RNA, 19 nt, Artificial Sequence
  Description of Artificial Sequence: Synthetic oligonucleotide
  Antisense strand to SEQ ID NO: 614046
ucucacacugaucauucau

SEQ ID NO: 614048 - RNA, 19 nt, Artificial Sequence
  Description of Artificial Sequence: Synthetic oligonucleotide
  Sense strand starting at position 2625 of SEQ ID NO: 585110
gaaugaucagugugagagu

SEQ ID NO: 614049 - RNA, 19 nt, Artificial Sequence
  Description of Artificial Sequence: Synthetic oligonucleotide
  Antisense strand to SEQ ID NO: 614048
acucucacacugaucauuc

SEQ ID NO: 614050 - RNA, 19 nt, Artificial Sequence
  Description of Artificial Sequence: Synthetic oligonucleotide
  Sense strand starting at position 2759 of SEQ ID NO: 585110
aguauuaagugacucaaug

SEQ ID NO: 614051 - RNA, 19 nt, Artificial Sequence
  Description of Artificial Sequence: Synthetic oligonucleotide
  Antisense strand to SEQ ID NO: 614050
cauugagucacuuaauacu

SEQ ID NO: 614052 - RNA, 19 nt, Artificial Sequence
  Description of Artificial Sequence: Synthetic oligonucleotide
  Sense strand starting at position 2787 of SEQ ID NO: 585110
ccuuaagagaauuggugua

SEQ ID NO: 614053 - RNA, 19 nt, Artificial Sequence
  Description of Artificial Sequence: Synthetic oligonucleotide
  Antisense strand to SEQ ID NO: 614052
uacaccaauucucuuaagg

SEQ ID NO: 614054 - RNA, 19 nt, Artificial Sequence
  Description of Artificial Sequence: Synthetic oligonucleotide
  Sense strand starting at position 2789 of SEQ ID NO: 585110
uuaagagaauugguguaca

SEQ ID NO: 614055 - RNA, 19 nt, Artificial Sequence
  Description of Artificial Sequence: Synthetic oligonucleotide
  Antisense strand to SEQ ID NO: 614054
uguacaccaauucucuuaa

SEQ ID NO: 614056 - RNA, 19 nt, Artificial Sequence
  Description of Artificial Sequence: Synthetic oligonucleotide
  Sense strand starting at position 2794 of SEQ ID NO: 585110
agaauugguguacaccuua

SEQ ID NO: 614057 - RNA, 19 nt, Artificial Sequence
  Description of Artificial Sequence: Synthetic oligonucleotide
  Antisense strand to SEQ ID NO: 614056
uaagguguacaccaauucu

SEQ ID NO: 614058 - RNA, 19 nt, Artificial Sequence
  Description of Artificial Sequence: Synthetic oligonucleotide
  Sense strand starting at position 3128 of SEQ ID NO: 585110
agaugagggucuucauggu

SEQ ID NO: 614059 - RNA, 19 nt, Artificial Sequence
  Description of Artificial Sequence: Synthetic oligonucleotide
  Antisense strand to SEQ ID NO: 614058
accaugaagacccucaucu

SEQ ID NO: 614060 - RNA, 19 nt, Artificial Sequence
  Description of Artificial Sequence: Synthetic oligonucleotide
  Sense strand starting at position 3142 of SEQ ID NO: 585110
auggucaugcaggaaaguu

SEQ ID NO: 614061 - RNA, 19 nt, Artificial Sequence
  Description of Artificial Sequence: Synthetic oligonucleotide
  Antisense strand to SEQ ID NO: 614060
aacuuuccugcaugaccau

SEQ ID NO: 614062 - RNA, 19 nt, Artificial Sequence
  Description of Artificial Sequence: Synthetic oligonucleotide
  Sense strand starting at position 3436 of SEQ ID NO: 585110
ugcagauggcuuuauccaa

SEQ ID NO: 614063 - RNA, 19 nt, Artificial Sequence
  Description of Artificial Sequence: Synthetic oligonucleotide
  Antisense strand to SEQ ID NO: 614062
uuggauaaagccaucugca

SEQ ID NO: 614064 - RNA, 19 nt, Artificial Sequence
  Description of Artificial Sequence: Synthetic oligonucleotide
  Sense strand starting at position 3494 of SEQ ID NO: 585110
gucuucuugagugagauua

SEQ ID NO: 614065 - RNA, 19 nt, Artificial Sequence
  Description of Artificial Sequence: Synthetic oligonucleotide
  Antisense strand to SEQ ID NO: 614064
uaaucucacucaagaagac

SEQ ID NO: 614066 - RNA, 19 nt, Artificial Sequence
  Description of Artificial Sequence: Synthetic oligonucleotide
  Sense strand starting at position 3734 of SEQ ID NO: 585110
ggcuucuguuauuuaguca

SEQ ID NO: 614067 - RNA, 19 nt, Artificial Sequence
  Description of Artificial Sequence: Synthetic oligonucleotide
  Antisense strand to SEQ ID NO: 614066
ugacuaaauaacagaagcc

SEQ ID NO: 614068 - RNA, 19 nt, Artificial Sequence
  Description of Artificial Sequence: Synthetic oligonucleotide
  Sense strand starting at position 3924 of SEQ ID NO: 585110
cugguauugcuggauacaa

SEQ ID NO: 614069 - RNA, 19 nt, Artificial Sequence
  Description of Artificial Sequence: Synthetic oligonucleotide
  Antisense strand to SEQ ID NO: 614068
uuguauccagcaauaccag

SEQ ID NO: 614070 - RNA, 19 nt, Artificial Sequence
  Description of Artificial Sequence: Synthetic oligonucleotide
  Sense strand starting at position 3926 of SEQ ID NO: 585110
gguauugcuggauacaaca

SEQ ID NO: 614071 - RNA, 19 nt, Artificial Sequence
  Description of Artificial Sequence: Synthetic oligonucleotide
  Antisense strand to SEQ ID NO: 614070
uguuguauccagcaauacc

SEQ ID NO: 614072 - RNA, 19 nt, Artificial Sequence
  Description of Artificial Sequence: Synthetic oligonucleotide
  Sense strand starting at position 63 of SEQ ID NO: 585111
cggucuaauaggcacaaua

SEQ ID NO: 614073 - RNA, 19 nt, Artificial Sequence
  Description of Artificial Sequence: Synthetic oligonucleotide
  Antisense strand to SEQ ID NO: 614072
uauugugccuauuagaccg

SEQ ID NO: 614074 - RNA, 19 nt, Artificial Sequence
  Description of Artificial Sequence: Synthetic oligonucleotide
  Sense strand starting at position 65 of SEQ ID NO: 585111
gucuaauaggcacaauauu

SEQ ID NO: 614075 - RNA, 19 nt, Artificial Sequence
  Description of Artificial Sequence: Synthetic oligonucleotide
  Antisense strand to SEQ ID NO: 614074
aauauugugccuauuagac

SEQ ID NO: 614076 - RNA, 19 nt, Artificial Sequence
  Description of Artificial Sequence: Synthetic oligonucleotide
  Sense strand starting at position 670 of SEQ ID NO: 585111
gcgccaaagcaucaaguaa

SEQ ID NO: 614077 - RNA, 19 nt, Artificial Sequence
  Description of Artificial Sequence: Synthetic oligonucleotide
  Antisense strand to SEQ ID NO: 614076
uuacuugaugcuuuggcgc

SEQ ID NO: 614078 - RNA, 19 nt, Artificial Sequence
  Description of Artificial Sequence: Synthetic oligonucleotide
  Sense strand starting at position 769 of SEQ ID NO: 585111
acucgugauggccacagau

SEQ ID NO: 614079 - RNA, 19 nt, Artificial Sequence
  Description of Artificial Sequence: Synthetic oligonucleotide
  Antisense strand to SEQ ID NO: 614078
aucuguggccaucacgagu

SEQ ID NO: 614080 - RNA, 19 nt, Artificial Sequence
  Description of Artificial Sequence: Synthetic oligonucleotide
  Sense strand starting at position 771 of SEQ ID NO: 585111
ucgugauggccacagauuc

SEQ ID NO: 614081 - RNA, 19 nt, Artificial Sequence
  Description of Artificial Sequence: Synthetic oligonucleotide
  Antisense strand to SEQ ID NO: 614080
gaaucuguggccaucacga

SEQ ID NO: 614082 - RNA, 19 nt, Artificial Sequence
  Description of Artificial Sequence: Synthetic oligonucleotide
  Sense strand starting at position 947 of SEQ ID NO: 585111
gcacgacguccuucacagu

SEQ ID NO: 614083 - RNA, 19 nt, Artificial Sequence
  Description of Artificial Sequence: Synthetic oligonucleotide
  Antisense strand to SEQ ID NO: 614082
acugugaaggacgucgugc

SEQ ID NO: 614084 - RNA, 19 nt, Artificial Sequence
  Description of Artificial Sequence: Synthetic oligonucleotide
  Sense strand starting at position 1249 of SEQ ID NO: 585111
gccguagggcuuucgcaau

SEQ ID NO: 614085 - RNA, 19 nt, Artificial Sequence
  Description of Artificial Sequence: Synthetic oligonucleotide
  Antisense strand to SEQ ID NO: 614084
auugcgaaagcccuacggc

SEQ ID NO: 614086 - RNA, 19 nt, Artificial Sequence
  Description of Artificial Sequence: Synthetic oligonucleotide
  Sense strand starting at position 1385 of SEQ ID NO: 585111
ccagcucguccucagacau

SEQ ID NO: 614087 - RNA, 19 nt, Artificial Sequence
  Description of Artificial Sequence: Synthetic oligonucleotide
  Antisense strand to SEQ ID NO: 614086
augucugaggacgagcugg

SEQ ID NO: 614088 - RNA, 19 nt, Artificial Sequence
  Description of Artificial Sequence: Synthetic oligonucleotide
  Sense strand starting at position 1674 of SEQ ID NO: 585111
cucugaugcaucuggaaag

SEQ ID NO: 614089 - RNA, 19 nt, Artificial Sequence
  Description of Artificial Sequence: Synthetic oligonucleotide
  Antisense strand to SEQ ID NO: 614088
cuuuccagaugcaucagag

SEQ ID NO: 614090 - RNA, 19 nt, Artificial Sequence
  Description of Artificial Sequence: Synthetic oligonucleotide
  Sense strand starting at position 1698 of SEQ ID NO: 585111
gcgagagucccgucugugu

SEQ ID NO: 614091 - RNA, 19 nt, Artificial Sequence
  Description of Artificial Sequence: Synthetic oligonucleotide
  Antisense strand to SEQ ID NO: 614090
acacagacgggacucucgc

SEQ ID NO: 614092 - RNA, 19 nt, Artificial Sequence
  Description of Artificial Sequence: Synthetic oligonucleotide
  Sense strand starting at position 2189 of SEQ ID NO: 585111
cguagaugcguguauuuau

SEQ ID NO: 614093 - RNA, 19 nt, Artificial Sequence
  Description of Artificial Sequence: Synthetic oligonucleotide
  Antisense strand to SEQ ID NO: 614092
auaaauacacgcaucuacg

SEQ ID NO: 614094 - RNA, 19 nt, Artificial Sequence
  Description of Artificial Sequence: Synthetic oligonucleotide
  Sense strand starting at position 2192 of SEQ ID NO: 585111
agaugcguguauuuauaca

SEQ ID NO: 614095 - RNA, 19 nt, Artificial Sequence
  Description of Artificial Sequence: Synthetic oligonucleotide
  Antisense strand to SEQ ID NO: 614094
uguauaaauacacgcaucu

SEQ ID NO: 614096 - RNA, 19 nt, Artificial Sequence
  Description of Artificial Sequence: Synthetic oligonucleotide
  Sense strand starting at position 2286 of SEQ ID NO: 585111
aggaaucauaaguggucau

SEQ ID NO: 614097 - RNA, 19 nt, Artificial Sequence
  Description of Artificial Sequence: Synthetic oligonucleotide
  Antisense strand to SEQ ID NO: 614096
augaccacuuaugauuccu

SEQ ID NO: 614098 - RNA, 19 nt, Artificial Sequence
  Description of Artificial Sequence: Synthetic oligonucleotide
  Sense strand starting at position 2373 of SEQ ID NO: 585111
ucuuuagaucaucacgguu

SEQ ID NO: 614099 - RNA, 19 nt, Artificial Sequence
  Description of Artificial Sequence: Synthetic oligonucleotide
  Antisense strand to SEQ ID NO: 614098
aaccgugaugaucuaaaga

SEQ ID NO: 614100 - RNA, 19 nt, Artificial Sequence
  Description of Artificial Sequence: Synthetic oligonucleotide
  Sense strand starting at position 2468 of SEQ ID NO: 585111
gauccaaguguggacucau

SEQ ID NO: 614101 - RNA, 19 nt, Artificial Sequence
  Description of Artificial Sequence: Synthetic oligonucleotide
  Antisense strand to SEQ ID NO: 614100
augaguccacacuuggauc

SEQ ID NO: 614102 - RNA, 19 nt, Artificial Sequence
  Description of Artificial Sequence: Synthetic oligonucleotide
  Sense strand starting at position 2538 of SEQ ID NO: 585111
guugauaacuggguuucga

SEQ ID NO: 614103 - RNA, 19 nt, Artificial Sequence
  Description of Artificial Sequence: Synthetic oligonucleotide
  Antisense strand to SEQ ID NO: 614102
ucgaaacccaguuaucaac

SEQ ID NO: 614104 - RNA, 19 nt, Artificial Sequence
  Description of Artificial Sequence: Synthetic oligonucleotide
  Sense strand starting at position 2548 of SEQ ID NO: 585111
ggguuucgauucucgaaac

SEQ ID NO: 614105 - RNA, 19 nt, Artificial Sequence
  Description of Artificial Sequence: Synthetic oligonucleotide
  Antisense strand to SEQ ID NO: 614104
guuucgagaaucgaaaccc

SEQ ID NO: 614106 - RNA, 19 nt, Artificial Sequence
  Description of Artificial Sequence: Synthetic oligonucleotide
  Sense strand starting at position 2908 of SEQ ID NO: 585111
aucauagugucaguggaau

SEQ ID NO: 614107 - RNA, 19 nt, Artificial Sequence
  Description of Artificial Sequence: Synthetic oligonucleotide
  Antisense strand to SEQ ID NO: 614106
auuccacugacacuaugau

SEQ ID NO: 614108 - RNA, 19 nt, Artificial Sequence
  Description of Artificial Sequence: Synthetic oligonucleotide
  Sense strand starting at position 2914 of SEQ ID NO: 585111
gugucaguggaauacgauu

SEQ ID NO: 614109 - RNA, 19 nt, Artificial Sequence
  Description of Artificial Sequence: Synthetic oligonucleotide
  Antisense strand to SEQ ID NO: 614108
aaucguauuccacugacac

SEQ ID NO: 614110 - RNA, 19 nt, Artificial Sequence
  Description of Artificial Sequence: Synthetic oligonucleotide
  Sense strand starting at position 2997 of SEQ ID NO: 585111
ggugacuucggcagagcua

SEQ ID NO: 614111 - RNA, 19 nt, Artificial Sequence
  Description of Artificial Sequence: Synthetic oligonucleotide
  Antisense strand to SEQ ID NO: 614110
uagcucugccgaagucacc

SEQ ID NO: 614112 - RNA, 19 nt, Artificial Sequence
  Description of Artificial Sequence: Synthetic oligonucleotide
  Sense strand starting at position 2998 of SEQ ID NO: 585111
gugacuucggcagagcuaa

SEQ ID NO: 614113 - RNA, 19 nt, Artificial Sequence
  Description of Artificial Sequence: Synthetic oligonucleotide
  Antisense strand to SEQ ID NO: 614112
uuagcucugccgaagucac

SEQ ID NO: 614114 - RNA, 19 nt, Artificial Sequence
  Description of Artificial Sequence: Synthetic oligonucleotide
  Sense strand starting at position 3160 of SEQ ID NO: 585111
ggagaaugccagggucaca

SEQ ID NO: 614115 - RNA, 19 nt, Artificial Sequence
  Description of Artificial Sequence: Synthetic oligonucleotide
  Antisense strand to SEQ ID NO: 614114
ugugacccuggcauucucc

SEQ ID NO: 614116 - RNA, 19 nt, Artificial Sequence
  Description of Artificial Sequence: Synthetic oligonucleotide
  Sense strand starting at position 3388 of SEQ ID NO: 585111
gagaaauccgacugucucu

SEQ ID NO: 614117 - RNA, 19 nt, Artificial Sequence
  Description of Artificial Sequence: Synthetic oligonucleotide
  Antisense strand to SEQ ID NO: 614116
agagacagucggauuucuc

SEQ ID NO: 614118 - RNA, 19 nt, Artificial Sequence
  Description of Artificial Sequence: Synthetic oligonucleotide
  Sense strand starting at position 3540 of SEQ ID NO: 585111
ggcgcaugaaucuaucuua

SEQ ID NO: 614119 - RNA, 19 nt, Artificial Sequence
  Description of Artificial Sequence: Synthetic oligonucleotide
  Antisense strand to SEQ ID NO: 614118
uaagauagauucaugcgcc

SEQ ID NO: 614120 - RNA, 19 nt, Artificial Sequence
  Description of Artificial Sequence: Synthetic oligonucleotide
  Sense strand starting at position 3621 of SEQ ID NO: 585111
agcauuuagugaccuguua

SEQ ID NO: 614121 - RNA, 19 nt, Artificial Sequence
  Description of Artificial Sequence: Synthetic oligonucleotide
  Antisense strand to SEQ ID NO: 614120
uaacaggucacuaaaugcu

SEQ ID NO: 614122 - RNA, 19 nt, Artificial Sequence
  Description of Artificial Sequence: Synthetic oligonucleotide
  Sense strand starting at position 3653 of SEQ ID NO: 585111
aggcuaagugcugaagauu

SEQ ID NO: 614123 - RNA, 19 nt, Artificial Sequence
  Description of Artificial Sequence: Synthetic oligonucleotide
  Antisense strand to SEQ ID NO: 614122
aaucuucagcacuuagccu

SEQ ID NO: 614124 - RNA, 19 nt, Artificial Sequence
  Description of Artificial Sequence: Synthetic oligonucleotide
  Sense strand starting at position 3685 of SEQ ID NO: 585111
ucacguaaucuagagggca

SEQ ID NO: 614125 - RNA, 19 nt, Artificial Sequence
  Description of Artificial Sequence: Synthetic oligonucleotide
  Antisense strand to SEQ ID NO: 614124
ugcccucuagauuacguga

SEQ ID NO: 614126 - RNA, 19 nt, Artificial Sequence
  Description of Artificial Sequence: Synthetic oligonucleotide
  Sense strand starting at position 3687 of SEQ ID NO: 585111
acguaaucuagagggcaua

SEQ ID NO: 614127 - RNA, 19 nt, Artificial Sequence
  Description of Artificial Sequence: Synthetic oligonucleotide
  Antisense strand to SEQ ID NO: 614126
uaugcccucuagauuacgu

SEQ ID NO: 614128 - RNA, 19 nt, Artificial Sequence
  Description of Artificial Sequence: Synthetic oligonucleotide
  Sense strand starting at position 3875 of SEQ ID NO: 585111
ggagaagagcguuaucuac

SEQ ID NO: 614129 - RNA, 19 nt, Artificial Sequence
  Description of Artificial Sequence: Synthetic oligonucleotide
  Antisense strand to SEQ ID NO: 614128
guagauaacgcucuucucc

SEQ ID NO: 614130 - RNA, 19 nt, Artificial Sequence
  Description of Artificial Sequence: Synthetic oligonucleotide
  Sense strand starting at position 3877 of SEQ ID NO: 585111
agaagagcguuaucuacaa

SEQ ID NO: 614131 - RNA, 19 nt, Artificial Sequence
  Description of Artificial Sequence: Synthetic oligonucleotide
  Antisense strand to SEQ ID NO: 614130
uuguagauaacgcucuucu

SEQ ID NO: 614132 - RNA, 19 nt, Artificial Sequence
  Description of Artificial Sequence: Synthetic oligonucleotide
  Sense strand starting at position 3901 of SEQ ID NO: 585111
agcguauggaguuggagaa

SEQ ID NO: 614133 - RNA, 19 nt, Artificial Sequence
  Description of Artificial Sequence: Synthetic oligonucleotide
  Antisense strand to SEQ ID NO: 614132
uucuccaacuccauacgcu

SEQ ID NO: 614134 - RNA, 19 nt, Artificial Sequence
  Description of Artificial Sequence: Synthetic oligonucleotide
  Sense strand starting at position 3902 of SEQ ID NO: 585111
gcguauggaguuggagaau

SEQ ID NO: 614135 - RNA, 19 nt, Artificial Sequence
  Description of Artificial Sequence: Synthetic oligonucleotide
  Antisense strand to SEQ ID NO: 614134
auucuccaacuccauacgc

SEQ ID NO: 614136 - RNA, 19 nt, Artificial Sequence
  Description of Artificial Sequence: Synthetic oligonucleotide
  Sense strand starting at position 3908 of SEQ ID NO: 585111
ggaguuggagaauguuuga

SEQ ID NO: 614137 - RNA, 19 nt, Artificial Sequence
  Description of Artificial Sequence: Synthetic oligonucleotide
  Antisense strand to SEQ ID NO: 614136
ucaaacauucuccaacucc

SEQ ID NO: 614138 - RNA, 19 nt, Artificial Sequence
  Description of Artificial Sequence: Synthetic oligonucleotide
  Sense strand starting at position 3911 of SEQ ID NO: 585111
guuggagaauguuugagga

SEQ ID NO: 614139 - RNA, 19 nt, Artificial Sequence
  Description of Artificial Sequence: Synthetic oligonucleotide
  Antisense strand to SEQ ID NO: 614138
uccucaaacauucuccaac

SEQ ID NO: 614140 - RNA, 19 nt, Artificial Sequence
  Description of Artificial Sequence: Synthetic oligonucleotide
  Sense strand starting at position 3936 of SEQ ID NO: 585111
uguacacucccgugauuaa

SEQ ID NO: 614141 - RNA, 19 nt, Artificial Sequence
  Description of Artificial Sequence: Synthetic oligonucleotide
  Antisense strand to SEQ ID NO: 614140
uuaaucacgggaguguaca

SEQ ID NO: 614142 - RNA, 19 nt, Artificial Sequence
  Description of Artificial Sequence: Synthetic oligonucleotide
  Sense strand starting at position 3937 of SEQ ID NO: 585111
guacacucccgugauuaau

SEQ ID NO: 614143 - RNA, 19 nt, Artificial Sequence
  Description of Artificial Sequence: Synthetic oligonucleotide
  Antisense strand to SEQ ID NO: 614142
auuaaucacgggaguguac

SEQ ID NO: 614144 - RNA, 19 nt, Artificial Sequence
  Description of Artificial Sequence: Synthetic oligonucleotide
  Sense strand starting at position 3939 of SEQ ID NO: 585111
acacucccgugauuaauaa

SEQ ID NO: 614145 - RNA, 19 nt, Artificial Sequence
  Description of Artificial Sequence: Synthetic oligonucleotide
  Antisense strand to SEQ ID NO: 614144
uuauuaaucacgggagugu

SEQ ID NO: 614146 - RNA, 19 nt, Artificial Sequence
  Description of Artificial Sequence: Synthetic oligonucleotide
  Sense strand starting at position 3953 of SEQ ID NO: 585111
aauaaaugagauugguagu

SEQ ID NO: 614147 - RNA, 19 nt, Artificial Sequence
  Description of Artificial Sequence: Synthetic oligonucleotide
  Antisense strand to SEQ ID NO: 614146
acuaccaaucucauuuauu

SEQ ID NO: 614148 - RNA, 19 nt, Artificial Sequence
  Description of Artificial Sequence: Synthetic oligonucleotide
  Sense strand starting at position 3964 of SEQ ID NO: 585111
uugguagugccuugagaua

SEQ ID NO: 614149 - RNA, 19 nt, Artificial Sequence
  Description of Artificial Sequence: Synthetic oligonucleotide
  Antisense strand to SEQ ID NO: 614148
uaucucaaggcacuaccaa

SEQ ID NO: 614150 - RNA, 19 nt, Artificial Sequence
  Description of Artificial Sequence: Synthetic oligonucleotide
  Sense strand starting at position 3969 of SEQ ID NO: 585111
agugccuugagauaagguu

SEQ ID NO: 614151 - RNA, 19 nt, Artificial Sequence
  Description of Artificial Sequence: Synthetic oligonucleotide
  Antisense strand to SEQ ID NO: 614150
aaccuuaucucaaggcacu

SEQ ID NO: 614152 - RNA, 19 nt, Artificial Sequence
  Description of Artificial Sequence: Synthetic oligonucleotide
  Sense strand starting at position 20 of SEQ ID NO: 585112
gcccucaaaugguucugaa

SEQ ID NO: 614153 - RNA, 19 nt, Artificial Sequence
  Description of Artificial Sequence: Synthetic oligonucleotide
  Antisense strand to SEQ ID NO: 614152
uucagaaccauuugagggc

SEQ ID NO: 614154 - RNA, 19 nt, Artificial Sequence
  Description of Artificial Sequence: Synthetic oligonucleotide
  Sense strand starting at position 30 of SEQ ID NO: 585112
gguucugaacuaggucauu

SEQ ID NO: 614155 - RNA, 19 nt, Artificial Sequence
  Description of Artificial Sequence: Synthetic oligonucleotide
  Antisense strand to SEQ ID NO: 614154
aaugaccuaguucagaacc

SEQ ID NO: 614156 - RNA, 19 nt, Artificial Sequence
  Description of Artificial Sequence: Synthetic oligonucleotide
  Sense strand starting at position 1690 of SEQ ID NO: 585112
cagggcuuucggcagugau

SEQ ID NO: 614157 - RNA, 19 nt, Artificial Sequence
  Description of Artificial Sequence: Synthetic oligonucleotide
  Antisense strand to SEQ ID NO: 614156
aucacugccgaaagcccug

SEQ ID NO: 614158 - RNA, 19 nt, Artificial Sequence
  Description of Artificial Sequence: Synthetic oligonucleotide
  Sense strand starting at position 1691 of SEQ ID NO: 585112
agggcuuucggcagugaug

SEQ ID NO: 614159 - RNA, 19 nt, Artificial Sequence
  Description of Artificial Sequence: Synthetic oligonucleotide
  Antisense strand to SEQ ID NO: 614158
caucacugccgaaagcccu

SEQ ID NO: 614160 - RNA, 19 nt, Artificial Sequence
  Description of Artificial Sequence: Synthetic oligonucleotide
  Sense strand starting at position 1693 of SEQ ID NO: 585112
ggcuuucggcagugaugga

SEQ ID NO: 614161 - RNA, 19 nt, Artificial Sequence
  Description of Artificial Sequence: Synthetic oligonucleotide
  Antisense strand to SEQ ID NO: 614160
uccaucacugccgaaagcc

SEQ ID NO: 614162 - RNA, 19 nt, Artificial Sequence
  Description of Artificial Sequence: Synthetic oligonucleotide
  Sense strand starting at position 2378 of SEQ ID NO: 585112
cccagagagccuugcaaca

SEQ ID NO: 614163 - RNA, 19 nt, Artificial Sequence
  Description of Artificial Sequence: Synthetic oligonucleotide
  Antisense strand to SEQ ID NO: 614162
uguugcaaggcucucuggg

SEQ ID NO: 614164 - RNA, 19 nt, Artificial Sequence
  Description of Artificial Sequence: Synthetic oligonucleotide
  Sense strand starting at position 2442 of SEQ ID NO: 585112
cgcuguggcgucucgugaa

SEQ ID NO: 614165 - RNA, 19 nt, Artificial Sequence
  Description of Artificial Sequence: Synthetic oligonucleotide
  Antisense strand to SEQ ID NO: 614164
uucacgagacgccacagcg

SEQ ID NO: 614166 - RNA, 19 nt, Artificial Sequence
  Description of Artificial Sequence: Synthetic oligonucleotide
  Sense strand starting at position 2470 of SEQ ID NO: 585112
cgcaccacugccuguaauu

SEQ ID NO: 614167 - RNA, 19 nt, Artificial Sequence
  Description of Artificial Sequence: Synthetic oligonucleotide
  Antisense strand to SEQ ID NO: 614166
aauuacaggcaguggugcg

SEQ ID NO: 614168 - RNA, 19 nt, Artificial Sequence
  Description of Artificial Sequence: Synthetic oligonucleotide
  Sense strand starting at position 2606 of SEQ ID NO: 585112
gguucuaagcucuaauaac

SEQ ID NO: 614169 - RNA, 19 nt, Artificial Sequence
  Description of Artificial Sequence: Synthetic oligonucleotide
  Antisense strand to SEQ ID NO: 614168
guuauuagagcuuagaacc

SEQ ID NO: 614170 - RNA, 19 nt, Artificial Sequence
  Description of Artificial Sequence: Synthetic oligonucleotide
  Sense strand starting at position 2635 of SEQ ID NO: 585112
ugaguuaaaguguagcagu

SEQ ID NO: 614171 - RNA, 19 nt, Artificial Sequence
  Description of Artificial Sequence: Synthetic oligonucleotide
  Antisense strand to SEQ ID NO: 614170
acugcuacacuuuaacuca

SEQ ID NO: 614172 - RNA, 19 nt, Artificial Sequence
  Description of Artificial Sequence: Synthetic oligonucleotide
  Sense strand starting at position 2678 of SEQ ID NO: 585112
gccaguuuccacuguaacu

SEQ ID NO: 614173 - RNA, 19 nt, Artificial Sequence
  Description of Artificial Sequence: Synthetic oligonucleotide
  Antisense strand to SEQ ID NO: 614172
aguuacaguggaaacuggc

SEQ ID NO: 614174 - RNA, 19 nt, Artificial Sequence
  Description of Artificial Sequence: Synthetic oligonucleotide
  Sense strand starting at position 2714 of SEQ ID NO: 585112
accaguucauguuucguga

SEQ ID NO: 614175 - RNA, 19 nt, Artificial Sequence
  Description of Artificial Sequence: Synthetic oligonucleotide
  Antisense strand to SEQ ID NO: 614174
ucacgaaacaugaacuggu

SEQ ID NO: 614176 - RNA, 19 nt, Artificial Sequence
  Description of Artificial Sequence: Synthetic oligonucleotide
  Sense strand starting at position 2775 of SEQ ID NO: 585112
cagugcuuccugggaccua

SEQ ID NO: 614177 - RNA, 19 nt, Artificial Sequence
  Description of Artificial Sequence: Synthetic oligonucleotide
  Antisense strand to SEQ ID NO: 614176
uaggucccaggaagcacug

SEQ ID NO: 614178 - RNA, 19 nt, Artificial Sequence
  Description of Artificial Sequence: Synthetic oligonucleotide
  Sense strand starting at position 2852 of SEQ ID NO: 585112
caacaaugccugugagcau

SEQ ID NO: 614179 - RNA, 19 nt, Artificial Sequence
  Description of Artificial Sequence: Synthetic oligonucleotide
  Antisense strand to SEQ ID NO: 614178
augcucacaggcauuguug

SEQ ID NO: 614180 - RNA, 19 nt, Artificial Sequence
  Description of Artificial Sequence: Synthetic oligonucleotide
  Sense strand starting at position 2876 of SEQ ID NO: 585112
uaccaagaagcgugaauca

SEQ ID NO: 614181 - RNA, 19 nt, Artificial Sequence
  Description of Artificial Sequence: Synthetic oligonucleotide
  Antisense strand to SEQ ID NO: 614180
ugauucacgcuucuuggua

SEQ ID NO: 614182 - RNA, 19 nt, Artificial Sequence
  Description of Artificial Sequence: Synthetic oligonucleotide
  Sense strand starting at position 2881 of SEQ ID NO: 585112
agaagcgugaaucauauga

SEQ ID NO: 614183 - RNA, 19 nt, Artificial Sequence
  Description of Artificial Sequence: Synthetic oligonucleotide
  Antisense strand to SEQ ID NO: 614182
ucauaugauucacgcuucu

SEQ ID NO: 614184 - RNA, 19 nt, Artificial Sequence
  Description of Artificial Sequence: Synthetic oligonucleotide
  Sense strand starting at position 2885 of SEQ ID NO: 585112
gcgugaaucauaugauaau

SEQ ID NO: 614185 - RNA, 19 nt, Artificial Sequence
  Description of Artificial Sequence: Synthetic oligonucleotide
  Antisense strand to SEQ ID NO: 614184
auuaucauaugauucacgc

SEQ ID NO: 614186 - RNA, 19 nt, Artificial Sequence
  Description of Artificial Sequence: Synthetic oligonucleotide
  Sense strand starting at position 2968 of SEQ ID NO: 585112
gccagaaaccuaggccuuu

SEQ ID NO: 614187 - RNA, 19 nt, Artificial Sequence
  Description of Artificial Sequence: Synthetic oligonucleotide
  Antisense strand to SEQ ID NO: 614186
aaaggccuagguuucuggc

SEQ ID NO: 614188 - RNA, 19 nt, Artificial Sequence
  Description of Artificial Sequence: Synthetic oligonucleotide
  Sense strand starting at position 2996 of SEQ ID NO: 585112
gacguuccuccacagguaa

SEQ ID NO: 614189 - RNA, 19 nt, Artificial Sequence
  Description of Artificial Sequence: Synthetic oligonucleotide
  Antisense strand to SEQ ID NO: 614188
uuaccuguggaggaacguc

SEQ ID NO: 614190 - RNA, 19 nt, Artificial Sequence
  Description of Artificial Sequence: Synthetic oligonucleotide
  Sense strand starting at position 3010 of SEQ ID NO: 585112
gguaaucaauuacagaaga

SEQ ID NO: 614191 - RNA, 19 nt, Artificial Sequence
  Description of Artificial Sequence: Synthetic oligonucleotide
  Antisense strand to SEQ ID NO: 614190
ucuucuguaauugauuacc

SEQ ID NO: 614192 - RNA, 19 nt, Artificial Sequence
  Description of Artificial Sequence: Synthetic oligonucleotide
  Sense strand starting at position 3068 of SEQ ID NO: 585112
ugccuuaaucuaggaaauu

SEQ ID NO: 614193 - RNA, 19 nt, Artificial Sequence
  Description of Artificial Sequence: Synthetic oligonucleotide
  Antisense strand to SEQ ID NO: 614192
aauuuccuagauuaaggca

SEQ ID NO: 614194 - RNA, 19 nt, Artificial Sequence
  Description of Artificial Sequence: Synthetic oligonucleotide
  Sense strand starting at position 3069 of SEQ ID NO: 585112
gccuuaaucuaggaaauua

SEQ ID NO: 614195 - RNA, 19 nt, Artificial Sequence
  Description of Artificial Sequence: Synthetic oligonucleotide
  Antisense strand to SEQ ID NO: 614194
uaauuuccuagauuaaggc

SEQ ID NO: 614196 - RNA, 19 nt, Artificial Sequence
  Description of Artificial Sequence: Synthetic oligonucleotide
  Sense strand starting at position 3152 of SEQ ID NO: 585112
uuuauugagcucugggaua

SEQ ID NO: 614197 - RNA, 19 nt, Artificial Sequence
  Description of Artificial Sequence: Synthetic oligonucleotide
  Antisense strand to SEQ ID NO: 614196
uaucccagagcucaauaaa

SEQ ID NO: 614198 - RNA, 19 nt, Artificial Sequence
  Description of Artificial Sequence: Synthetic oligonucleotide
  Sense strand starting at position 3154 of SEQ ID NO: 585112
uauugagcucugggauacu

SEQ ID NO: 614199 - RNA, 19 nt, Artificial Sequence
  Description of Artificial Sequence: Synthetic oligonucleotide
  Antisense strand to SEQ ID NO: 614198
aguaucccagagcucaaua

SEQ ID NO: 614200 - RNA, 19 nt, Artificial Sequence
  Description of Artificial Sequence: Synthetic oligonucleotide
  Sense strand starting at position 3201 of SEQ ID NO: 585112
gaagauuuguggcaacaca

SEQ ID NO: 614201 - RNA, 19 nt, Artificial Sequence
  Description of Artificial Sequence: Synthetic oligonucleotide
  Antisense strand to SEQ ID NO: 614200
uguguugccacaaaucuuc

SEQ ID NO: 614202 - RNA, 19 nt, Artificial Sequence
  Description of Artificial Sequence: Synthetic oligonucleotide
  Sense strand starting at position 3268 of SEQ ID NO: 585112
cguguuccugugucacauu

SEQ ID NO: 614203 - RNA, 19 nt, Artificial Sequence
  Description of Artificial Sequence: Synthetic oligonucleotide
  Antisense strand to SEQ ID NO: 614202
aaugugacacaggaacacg

SEQ ID NO: 614204 - RNA, 19 nt, Artificial Sequence
  Description of Artificial Sequence: Synthetic oligonucleotide
  Sense strand starting at position 3323 of SEQ ID NO: 585112
ugauaucugcuauggugau

SEQ ID NO: 614205 - RNA, 19 nt, Artificial Sequence
  Description of Artificial Sequence: Synthetic oligonucleotide
  Antisense strand to SEQ ID NO: 614204
aucaccauagcagauauca

SEQ ID NO: 614206 - RNA, 19 nt, Artificial Sequence
  Description of Artificial Sequence: Synthetic oligonucleotide
  Sense strand starting at position 3336 of SEQ ID NO: 585112
ggugaucugugaucaucgu

SEQ ID NO: 614207 - RNA, 19 nt, Artificial Sequence
  Description of Artificial Sequence: Synthetic oligonucleotide
  Antisense strand to SEQ ID NO: 614206
acgaugaucacagaucacc

SEQ ID NO: 614208 - RNA, 19 nt, Artificial Sequence
  Description of Artificial Sequence: Synthetic oligonucleotide
  Sense strand starting at position 3337 of SEQ ID NO: 585112
gugaucugugaucaucguu

SEQ ID NO: 614209 - RNA, 19 nt, Artificial Sequence
  Description of Artificial Sequence: Synthetic oligonucleotide
  Antisense strand to SEQ ID NO: 614208
aacgaugaucacagaucac

SEQ ID NO: 614210 - RNA, 19 nt, Artificial Sequence
  Description of Artificial Sequence: Synthetic oligonucleotide
  Sense strand starting at position 3342 of SEQ ID NO: 585112
cugugaucaucguucugug

SEQ ID NO: 614211 - RNA, 19 nt, Artificial Sequence
  Description of Artificial Sequence: Synthetic oligonucleotide
  Antisense strand to SEQ ID NO: 614210
cacagaacgaugaucacag

SEQ ID NO: 614212 - RNA, 19 nt, Artificial Sequence
  Description of Artificial Sequence: Synthetic oligonucleotide
  Sense strand starting at position 3346 of SEQ ID NO: 585112
gaucaucguucugugaggu

SEQ ID NO: 614213 - RNA, 19 nt, Artificial Sequence
  Description of Artificial Sequence: Synthetic oligonucleotide
  Antisense strand to SEQ ID NO: 614212
accucacagaacgaugauc

SEQ ID NO: 614214 - RNA, 19 nt, Artificial Sequence
  Description of Artificial Sequence: Synthetic oligonucleotide
  Sense strand starting at position 3347 of SEQ ID NO: 585112
aucaucguucugugagguu

SEQ ID NO: 614215 - RNA, 19 nt, Artificial Sequence
  Description of Artificial Sequence: Synthetic oligonucleotide
  Antisense strand to SEQ ID NO: 614214
aaccucacagaacgaugau

SEQ ID NO: 614216 - RNA, 19 nt, Artificial Sequence
  Description of Artificial Sequence: Synthetic oligonucleotide
  Sense strand starting at position 3352 of SEQ ID NO: 585112
cguucugugagguuauugu

SEQ ID NO: 614217 - RNA, 19 nt, Artificial Sequence
  Description of Artificial Sequence: Synthetic oligonucleotide
  Antisense strand to SEQ ID NO: 614216
acaauaaccucacagaacg

SEQ ID NO: 614218 - RNA, 19 nt, Artificial Sequence
  Description of Artificial Sequence: Synthetic oligonucleotide
  Sense strand starting at position 3386 of SEQ ID NO: 585112
cuccgaagugugcaguaga

SEQ ID NO: 614219 - RNA, 19 nt, Artificial Sequence
  Description of Artificial Sequence: Synthetic oligonucleotide
  Antisense strand to SEQ ID NO: 614218
ucuacugcacacuucggag

SEQ ID NO: 614220 - RNA, 19 nt, Artificial Sequence
  Description of Artificial Sequence: Synthetic oligonucleotide
  Sense strand starting at position 3389 of SEQ ID NO: 585112
cgaagugugcaguagaaga

SEQ ID NO: 614221 - RNA, 19 nt, Artificial Sequence
  Description of Artificial Sequence: Synthetic oligonucleotide
  Antisense strand to SEQ ID NO: 614220
ucuucuacugcacacuucg

SEQ ID NO: 614222 - RNA, 19 nt, Artificial Sequence
  Description of Artificial Sequence: Synthetic oligonucleotide
  Sense strand starting at position 3402 of SEQ ID NO: 585112
agaagacaaagacguuuau

SEQ ID NO: 614223 - RNA, 19 nt, Artificial Sequence
  Description of Artificial Sequence: Synthetic oligonucleotide
  Antisense strand to SEQ ID NO: 614222
auaaacgucuuugucuucu

SEQ ID NO: 614224 - RNA, 19 nt, Artificial Sequence
  Description of Artificial Sequence: Synthetic oligonucleotide
  Sense strand starting at position 3502 of SEQ ID NO: 585112
uucccuagugccugagaca

SEQ ID NO: 614225 - RNA, 19 nt, Artificial Sequence
  Description of Artificial Sequence: Synthetic oligonucleotide
  Antisense strand to SEQ ID NO: 614224
ugucucaggcacuagggaa

SEQ ID NO: 614226 - RNA, 19 nt, Artificial Sequence
  Description of Artificial Sequence: Synthetic oligonucleotide
  Sense strand starting at position 3625 of SEQ ID NO: 585112
ugauucagcucagugagga

SEQ ID NO: 614227 - RNA, 19 nt, Artificial Sequence
  Description of Artificial Sequence: Synthetic oligonucleotide
  Antisense strand to SEQ ID NO: 614226
uccucacugagcugaauca

SEQ ID NO: 614228 - RNA, 19 nt, Artificial Sequence
  Description of Artificial Sequence: Synthetic oligonucleotide
  Sense strand starting at position 3742 of SEQ ID NO: 585112
gaaagcgcuuuccugguaa

SEQ ID NO: 614229 - RNA, 19 nt, Artificial Sequence
  Description of Artificial Sequence: Synthetic oligonucleotide
  Antisense strand to SEQ ID NO: 614228
uuaccaggaaagcgcuuuc

SEQ ID NO: 614230 - RNA, 19 nt, Artificial Sequence
  Description of Artificial Sequence: Synthetic oligonucleotide
  Sense strand starting at position 3744 of SEQ ID NO: 585112
aagcgcuuuccugguaaac

SEQ ID NO: 614231 - RNA, 19 nt, Artificial Sequence
  Description of Artificial Sequence: Synthetic oligonucleotide
  Antisense strand to SEQ ID NO: 614230
guuuaccaggaaagcgcuu

SEQ ID NO: 614232 - RNA, 19 nt, Artificial Sequence
  Description of Artificial Sequence: Synthetic oligonucleotide
  Sense strand starting at position 77 of SEQ ID NO: 585113
gagggaggugugggugaau

SEQ ID NO: 614233 - RNA, 19 nt, Artificial Sequence
  Description of Artificial Sequence: Synthetic oligonucleotide
  Antisense strand to SEQ ID NO: 614232
auucacccacaccucccuc

SEQ ID NO: 614234 - RNA, 19 nt, Artificial Sequence
  Description of Artificial Sequence: Synthetic oligonucleotide
  Sense strand starting at position 79 of SEQ ID NO: 585113
gggaggugugggugaauga

SEQ ID NO: 614235 - RNA, 19 nt, Artificial Sequence
  Description of Artificial Sequence: Synthetic oligonucleotide
  Antisense strand to SEQ ID NO: 614234
ucauucacccacaccuccc

SEQ ID NO: 614236 - RNA, 19 nt, Artificial Sequence
  Description of Artificial Sequence: Synthetic oligonucleotide
  Sense strand starting at position 80 of SEQ ID NO: 585113
ggaggugugggugaaugau

SEQ ID NO: 614237 - RNA, 19 nt, Artificial Sequence
  Description of Artificial Sequence: Synthetic oligonucleotide
  Antisense strand to SEQ ID NO: 614236
aucauucacccacaccucc

SEQ ID NO: 614238 - RNA, 19 nt, Artificial Sequence
  Description of Artificial Sequence: Synthetic oligonucleotide
  Sense strand starting at position 86 of SEQ ID NO: 585113
gugggugaaugauugccaa

SEQ ID NO: 614239 - RNA, 19 nt, Artificial Sequence
  Description of Artificial Sequence: Synthetic oligonucleotide
  Antisense strand to SEQ ID NO: 614238
uuggcaaucauucacccac

SEQ ID NO: 614240 - RNA, 19 nt, Artificial Sequence
  Description of Artificial Sequence: Synthetic oligonucleotide
  Sense strand starting at position 158 of SEQ ID NO: 585113
aagaguuaguaucuaagua

SEQ ID NO: 614241 - RNA, 19 nt, Artificial Sequence
  Description of Artificial Sequence: Synthetic oligonucleotide
  Antisense strand to SEQ ID NO: 614240
uacuuagauacuaacucuu

SEQ ID NO: 614242 - RNA, 19 nt, Artificial Sequence
  Description of Artificial Sequence: Synthetic oligonucleotide
  Sense strand starting at position 159 of SEQ ID NO: 585113
agaguuaguaucuaaguau

SEQ ID NO: 614243 - RNA, 19 nt, Artificial Sequence
  Description of Artificial Sequence: Synthetic oligonucleotide
  Antisense strand to SEQ ID NO: 614242
auacuuagauacuaacucu

SEQ ID NO: 614244 - RNA, 19 nt, Artificial Sequence
  Description of Artificial Sequence: Synthetic oligonucleotide
  Sense strand starting at position 190 of SEQ ID NO: 585113
uaagguguuugcuuaaaga

SEQ ID NO: 614245 - RNA, 19 nt, Artificial Sequence
  Description of Artificial Sequence: Synthetic oligonucleotide
  Antisense strand to SEQ ID NO: 614244
ucuuuaagcaaacaccuua

SEQ ID NO: 614246 - RNA, 19 nt, Artificial Sequence
  Description of Artificial Sequence: Synthetic oligonucleotide
  Sense strand starting at position 328 of SEQ ID NO: 585113
agcgaagcucaauagauau

SEQ ID NO: 614247 - RNA, 19 nt, Artificial Sequence
  Description of Artificial Sequence: Synthetic oligonucleotide
  Antisense strand to SEQ ID NO: 614246
auaucuauugagcuucgcu

SEQ ID NO: 614248 - RNA, 19 nt, Artificial Sequence
  Description of Artificial Sequence: Synthetic oligonucleotide
  Sense strand starting at position 480 of SEQ ID NO: 585113
gguucuuugcgacacucua

SEQ ID NO: 614249 - RNA, 19 nt, Artificial Sequence
  Description of Artificial Sequence: Synthetic oligonucleotide
  Antisense strand to SEQ ID NO: 614248
uagagugucgcaaagaacc

SEQ ID NO: 614250 - RNA, 19 nt, Artificial Sequence
  Description of Artificial Sequence: Synthetic oligonucleotide
  Sense strand starting at position 639 of SEQ ID NO: 585113
cgagauucuugaguccaaa

SEQ ID NO: 614251 - RNA, 19 nt, Artificial Sequence
  Description of Artificial Sequence: Synthetic oligonucleotide
  Antisense strand to SEQ ID NO: 614250
uuuggacucaagaaucucg

SEQ ID NO: 614252 - RNA, 19 nt, Artificial Sequence
  Description of Artificial Sequence: Synthetic oligonucleotide
  Sense strand starting at position 784 of SEQ ID NO: 585113
guuaaauuccaguggauag

SEQ ID NO: 614253 - RNA, 19 nt, Artificial Sequence
  Description of Artificial Sequence: Synthetic oligonucleotide
  Antisense strand to SEQ ID NO: 614252
cuauccacuggaauuuaac

SEQ ID NO: 614254 - RNA, 19 nt, Artificial Sequence
  Description of Artificial Sequence: Synthetic oligonucleotide
  Sense strand starting at position 881 of SEQ ID NO: 585113
aguaucccgacuugggaaa

SEQ ID NO: 614255 - RNA, 19 nt, Artificial Sequence
  Description of Artificial Sequence: Synthetic oligonucleotide
  Antisense strand to SEQ ID NO: 614254
uuucccaagucgggauacu

SEQ ID NO: 614256 - RNA, 19 nt, Artificial Sequence
  Description of Artificial Sequence: Synthetic oligonucleotide
  Sense strand starting at position 927 of SEQ ID NO: 585113
guuggagugccaaguaugu

SEQ ID NO: 614257 - RNA, 19 nt, Artificial Sequence
  Description of Artificial Sequence: Synthetic oligonucleotide
  Antisense strand to SEQ ID NO: 614256
acauacuuggcacuccaac

SEQ ID NO: 614258 - RNA, 19 nt, Artificial Sequence
  Description of Artificial Sequence: Synthetic oligonucleotide
  Sense strand starting at position 1449 of SEQ ID NO: 585113
gugacaggcuuuccuuaag

SEQ ID NO: 614259 - RNA, 19 nt, Artificial Sequence
  Description of Artificial Sequence: Synthetic oligonucleotide
  Antisense strand to SEQ ID NO: 614258
cuuaaggaaagccugucac

SEQ ID NO: 614260 - RNA, 19 nt, Artificial Sequence
  Description of Artificial Sequence: Synthetic oligonucleotide
  Sense strand starting at position 1759 of SEQ ID NO: 585113
agccuccugccagaaagau

SEQ ID NO: 614261 - RNA, 19 nt, Artificial Sequence
  Description of Artificial Sequence: Synthetic oligonucleotide
  Antisense strand to SEQ ID NO: 614260
aucuuucuggcaggaggcu

SEQ ID NO: 614262 - RNA, 19 nt, Artificial Sequence
  Description of Artificial Sequence: Synthetic oligonucleotide
  Sense strand starting at position 1819 of SEQ ID NO: 585113
ggagcuccucagcaucaaa

SEQ ID NO: 614263 - RNA, 19 nt, Artificial Sequence
  Description of Artificial Sequence: Synthetic oligonucleotide
  Antisense strand to SEQ ID NO: 614262
uuugaugcugaggagcucc

SEQ ID NO: 614264 - RNA, 19 nt, Artificial Sequence
  Description of Artificial Sequence: Synthetic oligonucleotide
  Sense strand starting at position 1966 of SEQ ID NO: 585113
cgcaucugcccugaagaaa

SEQ ID NO: 614265 - RNA, 19 nt, Artificial Sequence
  Description of Artificial Sequence: Synthetic oligonucleotide
  Antisense strand to SEQ ID NO: 614264
uuucuucagggcagaugcg

SEQ ID NO: 614266 - RNA, 19 nt, Artificial Sequence
  Description of Artificial Sequence: Synthetic oligonucleotide
  Sense strand starting at position 2014 of SEQ ID NO: 585113
gagccuugugaagagugaa

SEQ ID NO: 614267 - RNA, 19 nt, Artificial Sequence
  Description of Artificial Sequence: Synthetic oligonucleotide
  Antisense strand to SEQ ID NO: 614266
uucacucuucacaaggcuc

SEQ ID NO: 614268 - RNA, 19 nt, Artificial Sequence
  Description of Artificial Sequence: Synthetic oligonucleotide
  Sense strand starting at position 2042 of SEQ ID NO: 585113
ggguaauucucaccacuga

SEQ ID NO: 614269 - RNA, 19 nt, Artificial Sequence
  Description of Artificial Sequence: Synthetic oligonucleotide
  Antisense strand to SEQ ID NO: 614268
ucaguggugagaauuaccc

SEQ ID NO: 614270 - RNA, 19 nt, Artificial Sequence
  Description of Artificial Sequence: Synthetic oligonucleotide
  Sense strand starting at position 2125 of SEQ ID NO: 585113
gucugaaugcaaugaauuc

SEQ ID NO: 614271 - RNA, 19 nt, Artificial Sequence
  Description of Artificial Sequence: Synthetic oligonucleotide
  Antisense strand to SEQ ID NO: 614270
gaauucauugcauucagac

SEQ ID NO: 614272 - RNA, 19 nt, Artificial Sequence
  Description of Artificial Sequence: Synthetic oligonucleotide
  Sense strand starting at position 2178 of SEQ ID NO: 585113
gaggaaggugggugcuuaa

SEQ ID NO: 614273 - RNA, 19 nt, Artificial Sequence
  Description of Artificial Sequence: Synthetic oligonucleotide
  Antisense strand to SEQ ID NO: 614272
uuaagcacccaccuuccuc

SEQ ID NO: 614274 - RNA, 19 nt, Artificial Sequence
  Description of Artificial Sequence: Synthetic oligonucleotide
  Sense strand starting at position 2181 of SEQ ID NO: 585113
gaaggugggugcuuaacuu

SEQ ID NO: 614275 - RNA, 19 nt, Artificial Sequence
  Description of Artificial Sequence: Synthetic oligonucleotide
  Antisense strand to SEQ ID NO: 614274
aaguuaagcacccaccuuc

SEQ ID NO: 614276 - RNA, 19 nt, Artificial Sequence
  Description of Artificial Sequence: Synthetic oligonucleotide
  Sense strand starting at position 2204 of SEQ ID NO: 585113
gcuuaugaauuugaacaca

SEQ ID NO: 614277 - RNA, 19 nt, Artificial Sequence
  Description of Artificial Sequence: Synthetic oligonucleotide
  Antisense strand to SEQ ID NO: 614276
uguguucaaauucauaagc

SEQ ID NO: 614278 - RNA, 19 nt, Artificial Sequence
  Description of Artificial Sequence: Synthetic oligonucleotide
  Sense strand starting at position 2411 of SEQ ID NO: 585113
auuuaaggauuggaaacuu

SEQ ID NO: 614279 - RNA, 19 nt, Artificial Sequence
  Description of Artificial Sequence: Synthetic oligonucleotide
  Antisense strand to SEQ ID NO: 614278
aaguuuccaauccuuaaau

SEQ ID NO: 614280 - RNA, 19 nt, Artificial Sequence
  Description of Artificial Sequence: Synthetic oligonucleotide
  Sense strand starting at position 2621 of SEQ ID NO: 585113
augagugaacacugagcuu

SEQ ID NO: 614281 - RNA, 19 nt, Artificial Sequence
  Description of Artificial Sequence: Synthetic oligonucleotide
  Antisense strand to SEQ ID NO: 614280
aagcucaguguucacucau

SEQ ID NO: 614282 - RNA, 19 nt, Artificial Sequence
  Description of Artificial Sequence: Synthetic oligonucleotide
  Sense strand starting at position 2624 of SEQ ID NO: 585113
agugaacacugagcuucua

SEQ ID NO: 614283 - RNA, 19 nt, Artificial Sequence
  Description of Artificial Sequence: Synthetic oligonucleotide
  Antisense strand to SEQ ID NO: 614282
uagaagcucaguguucacu

SEQ ID NO: 614284 - RNA, 19 nt, Artificial Sequence
  Description of Artificial Sequence: Synthetic oligonucleotide
  Sense strand starting at position 2718 of SEQ ID NO: 585113
acacacaucucucugagua

SEQ ID NO: 614285 - RNA, 19 nt, Artificial Sequence
  Description of Artificial Sequence: Synthetic oligonucleotide
  Antisense strand to SEQ ID NO: 614284
uacucagagagaugugugu

SEQ ID NO: 614286 - RNA, 19 nt, Artificial Sequence
  Description of Artificial Sequence: Synthetic oligonucleotide
  Sense strand starting at position 2780 of SEQ ID NO: 585113
guuguaagaucucuuaggu

SEQ ID NO: 614287 - RNA, 19 nt, Artificial Sequence
  Description of Artificial Sequence: Synthetic oligonucleotide
  Antisense strand to SEQ ID NO: 614286
accuaagagaucuuacaac

SEQ ID NO: 614288 - RNA, 19 nt, Artificial Sequence
  Description of Artificial Sequence: Synthetic oligonucleotide
  Sense strand starting at position 2986 of SEQ ID NO: 585113
acaacaggguuggagaaau

SEQ ID NO: 614289 - RNA, 19 nt, Artificial Sequence
  Description of Artificial Sequence: Synthetic oligonucleotide
  Antisense strand to SEQ ID NO: 614288
auuucuccaacccuguugu

SEQ ID NO: 614290 - RNA, 19 nt, Artificial Sequence
  Description of Artificial Sequence: Synthetic oligonucleotide
  Sense strand starting at position 3054 of SEQ ID NO: 585113
aggguuaacugagcagcaa

SEQ ID NO: 614291 - RNA, 19 nt, Artificial Sequence
  Description of Artificial Sequence: Synthetic oligonucleotide
  Antisense strand to SEQ ID NO: 614290
uugcugcucaguuaacccu

SEQ ID NO: 614292 - RNA, 19 nt, Artificial Sequence
  Description of Artificial Sequence: Synthetic oligonucleotide
  Sense strand starting at position 3171 of SEQ ID NO: 585113
gaaccauccuuagaggaga

SEQ ID NO: 614293 - RNA, 19 nt, Artificial Sequence
  Description of Artificial Sequence: Synthetic oligonucleotide
  Antisense strand to SEQ ID NO: 614292
ucuccucuaaggaugguuc

SEQ ID NO: 614294 - RNA, 19 nt, Artificial Sequence
  Description of Artificial Sequence: Synthetic oligonucleotide
  Sense strand starting at position 3233 of SEQ ID NO: 585113
gguuauuacugguauuuaa

SEQ ID NO: 614295 - RNA, 19 nt, Artificial Sequence
  Description of Artificial Sequence: Synthetic oligonucleotide
  Antisense strand to SEQ ID NO: 614294
uuaaauaccaguaauaacc

SEQ ID NO: 614296 - RNA, 19 nt, Artificial Sequence
  Description of Artificial Sequence: Synthetic oligonucleotide
  Sense strand starting at position 3459 of SEQ ID NO: 585113
cuugaaugauguuucugga

SEQ ID NO: 614297 - RNA, 19 nt, Artificial Sequence
  Description of Artificial Sequence: Synthetic oligonucleotide
  Antisense strand to SEQ ID NO: 614296
uccagaaacaucauucaag

SEQ ID NO: 614298 - RNA, 19 nt, Artificial Sequence
  Description of Artificial Sequence: Synthetic oligonucleotide
  Sense strand starting at position 3466 of SEQ ID NO: 585113
gauguuucuggacaagggu

SEQ ID NO: 614299 - RNA, 19 nt, Artificial Sequence
  Description of Artificial Sequence: Synthetic oligonucleotide
  Antisense strand to SEQ ID NO: 614298
acccuuguccagaaacauc

SEQ ID NO: 614300 - RNA, 19 nt, Artificial Sequence
  Description of Artificial Sequence: Synthetic oligonucleotide
  Sense strand starting at position 3520 of SEQ ID NO: 585113
ggccuagguguaggaaauu

SEQ ID NO: 614301 - RNA, 19 nt, Artificial Sequence
  Description of Artificial Sequence: Synthetic oligonucleotide
  Antisense strand to SEQ ID NO: 614300
aauuuccuacaccuaggcc

SEQ ID NO: 614302 - RNA, 19 nt, Artificial Sequence
  Description of Artificial Sequence: Synthetic oligonucleotide
  Sense strand starting at position 3660 of SEQ ID NO: 585113
gggugcuauuaucccauuu

SEQ ID NO: 614303 - RNA, 19 nt, Artificial Sequence
  Description of Artificial Sequence: Synthetic oligonucleotide
  Antisense strand to SEQ ID NO: 614302
aaaugggauaauagcaccc

SEQ ID NO: 614304 - RNA, 19 nt, Artificial Sequence
  Description of Artificial Sequence: Synthetic oligonucleotide
  Sense strand starting at position 3742 of SEQ ID NO: 585113
aguggcagauuugacuaau

SEQ ID NO: 614305 - RNA, 19 nt, Artificial Sequence
  Description of Artificial Sequence: Synthetic oligonucleotide
  Antisense strand to SEQ ID NO: 614304
auuagucaaaucugccacu

SEQ ID NO: 614306 - RNA, 19 nt, Artificial Sequence
  Description of Artificial Sequence: Synthetic oligonucleotide
  Sense strand starting at position 3753 of SEQ ID NO: 585113
ugacuaauuccagagcuca

SEQ ID NO: 614307 - RNA, 19 nt, Artificial Sequence
  Description of Artificial Sequence: Synthetic oligonucleotide
  Antisense strand to SEQ ID NO: 614306
ugagcucuggaauuaguca

SEQ ID NO: 614308 - RNA, 19 nt, Artificial Sequence
  Description of Artificial Sequence: Synthetic oligonucleotide
  Sense strand starting at position 3777 of SEQ ID NO: 585113
uuaccucaugucuggacaa

SEQ ID NO: 614309 - RNA, 19 nt, Artificial Sequence
  Description of Artificial Sequence: Synthetic oligonucleotide
  Antisense strand to SEQ ID NO: 614308
uuguccagacaugagguaa

SEQ ID NO: 614310 - RNA, 19 nt, Artificial Sequence
  Description of Artificial Sequence: Synthetic oligonucleotide
  Sense strand starting at position 3779 of SEQ ID NO: 585113
accucaugucuggacaacu

SEQ ID NO: 614311 - RNA, 19 nt, Artificial Sequence
  Description of Artificial Sequence: Synthetic oligonucleotide
  Antisense strand to SEQ ID NO: 614310
aguuguccagacaugaggu

SEQ ID NO: 614312 - RNA, 19 nt, Artificial Sequence
  Description of Artificial Sequence: Synthetic oligonucleotide
  Sense strand starting at position 869 of SEQ ID NO: 585114
ucauauugaggccaaaugu

SEQ ID NO: 614313 - RNA, 19 nt, Artificial Sequence
  Description of Artificial Sequence: Synthetic oligonucleotide
  Antisense strand to SEQ ID NO: 614312
acauuuggccucaauauga

SEQ ID NO: 614314 - RNA, 19 nt, Artificial Sequence
  Description of Artificial Sequence: Synthetic oligonucleotide
  Sense strand starting at position 892 of SEQ ID NO: 585114
ugucauuuaucaucaugcu

SEQ ID NO: 614315 - RNA, 19 nt, Artificial Sequence
  Description of Artificial Sequence: Synthetic oligonucleotide
  Antisense strand to SEQ ID NO: 614314
agcaugaugauaaaugaca

SEQ ID NO: 614316 - RNA, 19 nt, Artificial Sequence
  Description of Artificial Sequence: Synthetic oligonucleotide
  Sense strand starting at position 1021 of SEQ ID NO: 585114
auuugaauuugcugacauc

SEQ ID NO: 614317 - RNA, 19 nt, Artificial Sequence
  Description of Artificial Sequence: Synthetic oligonucleotide
  Antisense strand to SEQ ID NO: 614316
gaugucagcaaauucaaau

SEQ ID NO: 614318 - RNA, 19 nt, Artificial Sequence
  Description of Artificial Sequence: Synthetic oligonucleotide
  Sense strand starting at position 1096 of SEQ ID NO: 585114
agaaauggucuuggcauac

SEQ ID NO: 614319 - RNA, 19 nt, Artificial Sequence
  Description of Artificial Sequence: Synthetic oligonucleotide
  Antisense strand to SEQ ID NO: 614318
guaugccaagaccauuucu

SEQ ID NO: 614320 - RNA, 19 nt, Artificial Sequence
  Description of Artificial Sequence: Synthetic oligonucleotide
  Sense strand starting at position 1102 of SEQ ID NO: 585114
ggucuuggcauacauagga

SEQ ID NO: 614321 - RNA, 19 nt, Artificial Sequence
  Description of Artificial Sequence: Synthetic oligonucleotide
  Antisense strand to SEQ ID NO: 614320
uccuauguaugccaagacc

SEQ ID NO: 614322 - RNA, 19 nt, Artificial Sequence
  Description of Artificial Sequence: Synthetic oligonucleotide
  Sense strand starting at position 1285 of SEQ ID NO: 585114
cugauaaccuguuugauuc

SEQ ID NO: 614323 - RNA, 19 nt, Artificial Sequence
  Description of Artificial Sequence: Synthetic oligonucleotide
  Antisense strand to SEQ ID NO: 614322
gaaucaaacagguuaucag

SEQ ID NO: 614324 - RNA, 19 nt, Artificial Sequence
  Description of Artificial Sequence: Synthetic oligonucleotide
  Sense strand starting at position 1351 of SEQ ID NO: 585114
acaugacuccuugaccgau

SEQ ID NO: 614325 - RNA, 19 nt, Artificial Sequence
  Description of Artificial Sequence: Synthetic oligonucleotide
  Antisense strand to SEQ ID NO: 614324
aucggucaaggagucaugu

SEQ ID NO: 614326 - RNA, 19 nt, Artificial Sequence
  Description of Artificial Sequence: Synthetic oligonucleotide
  Sense strand starting at position 1388 of SEQ ID NO: 585114
uuuccaucugguuggagaa

SEQ ID NO: 614327 - RNA, 19 nt, Artificial Sequence
  Description of Artificial Sequence: Synthetic oligonucleotide
  Antisense strand to SEQ ID NO: 614326
uucuccaaccagauggaaa

SEQ ID NO: 614328 - RNA, 19 nt, Artificial Sequence
  Description of Artificial Sequence: Synthetic oligonucleotide
  Sense strand starting at position 1389 of SEQ ID NO: 585114
uuccaucugguuggagaaa

SEQ ID NO: 614329 - RNA, 19 nt, Artificial Sequence
  Description of Artificial Sequence: Synthetic oligonucleotide
  Antisense strand to SEQ ID NO: 614328
uuucuccaaccagauggaa

SEQ ID NO: 614330 - RNA, 19 nt, Artificial Sequence
  Description of Artificial Sequence: Synthetic oligonucleotide
  Sense strand starting at position 1465 of SEQ ID NO: 585114
aguuaccucuaauuaggau

SEQ ID NO: 614331 - RNA, 19 nt, Artificial Sequence
  Description of Artificial Sequence: Synthetic oligonucleotide
  Antisense strand to SEQ ID NO: 614330
auccuaauuagagguaacu

SEQ ID NO: 614332 - RNA, 19 nt, Artificial Sequence
  Description of Artificial Sequence: Synthetic oligonucleotide
  Sense strand starting at position 1619 of SEQ ID NO: 585114
guguguugcgggaaagugu

SEQ ID NO: 614333 - RNA, 19 nt, Artificial Sequence
  Description of Artificial Sequence: Synthetic oligonucleotide
  Antisense strand to SEQ ID NO: 614332
acacuuucccgcaacacac

SEQ ID NO: 614334 - RNA, 19 nt, Artificial Sequence
  Description of Artificial Sequence: Synthetic oligonucleotide
  Sense strand starting at position 1735 of SEQ ID NO: 585114
guguaaucgcgaagguaac

SEQ ID NO: 614335 - RNA, 19 nt, Artificial Sequence
  Description of Artificial Sequence: Synthetic oligonucleotide
  Antisense strand to SEQ ID NO: 614334
guuaccuucgcgauuacac

SEQ ID NO: 614336 - RNA, 19 nt, Artificial Sequence
  Description of Artificial Sequence: Synthetic oligonucleotide
  Sense strand starting at position 1824 of SEQ ID NO: 585114
ggaaguuaaguccagacgu

SEQ ID NO: 614337 - RNA, 19 nt, Artificial Sequence
  Description of Artificial Sequence: Synthetic oligonucleotide
  Antisense strand to SEQ ID NO: 614336
acgucuggacuuaacuucc

SEQ ID NO: 614338 - RNA, 19 nt, Artificial Sequence
  Description of Artificial Sequence: Synthetic oligonucleotide
  Sense strand starting at position 1826 of SEQ ID NO: 585114
aaguuaaguccagacguau

SEQ ID NO: 614339 - RNA, 19 nt, Artificial Sequence
  Description of Artificial Sequence: Synthetic oligonucleotide
  Antisense strand to SEQ ID NO: 614338
auacgucuggacuuaacuu

SEQ ID NO: 614340 - RNA, 19 nt, Artificial Sequence
  Description of Artificial Sequence: Synthetic oligonucleotide
  Sense strand starting at position 2153 of SEQ ID NO: 585114
gcaggaaugggcugaaaug

SEQ ID NO: 614341 - RNA, 19 nt, Artificial Sequence
  Description of Artificial Sequence: Synthetic oligonucleotide
  Antisense strand to SEQ ID NO: 614340
cauuucagcccauuccugc

SEQ ID NO: 614342 - RNA, 19 nt, Artificial Sequence
  Description of Artificial Sequence: Synthetic oligonucleotide
  Sense strand starting at position 2307 of SEQ ID NO: 585114
uugguaggugagcaauaaa

SEQ ID NO: 614343 - RNA, 19 nt, Artificial Sequence
  Description of Artificial Sequence: Synthetic oligonucleotide
  Antisense strand to SEQ ID NO: 614342
uuuauugcucaccuaccaa

SEQ ID NO: 614344 - RNA, 19 nt, Artificial Sequence
  Description of Artificial Sequence: Synthetic oligonucleotide
  Sense strand starting at position 2338 of SEQ ID NO: 585114
gaaagaaugauucggugau

SEQ ID NO: 614345 - RNA, 19 nt, Artificial Sequence
  Description of Artificial Sequence: Synthetic oligonucleotide
  Antisense strand to SEQ ID NO: 614344
aucaccgaaucauucuuuc

SEQ ID NO: 614346 - RNA, 19 nt, Artificial Sequence
  Description of Artificial Sequence: Synthetic oligonucleotide
  Sense strand starting at position 2340 of SEQ ID NO: 585114
aagaaugauucggugauaa

SEQ ID NO: 614347 - RNA, 19 nt, Artificial Sequence
  Description of Artificial Sequence: Synthetic oligonucleotide
  Antisense strand to SEQ ID NO: 614346
uuaucaccgaaucauucuu

SEQ ID NO: 614348 - RNA, 19 nt, Artificial Sequence
  Description of Artificial Sequence: Synthetic oligonucleotide
  Sense strand starting at position 2519 of SEQ ID NO: 585114
ugaggcuuuccugaagcca

SEQ ID NO: 614349 - RNA, 19 nt, Artificial Sequence
  Description of Artificial Sequence: Synthetic oligonucleotide
  Antisense strand to SEQ ID NO: 614348
uggcuucaggaaagccuca

SEQ ID NO: 614350 - RNA, 19 nt, Artificial Sequence
  Description of Artificial Sequence: Synthetic oligonucleotide
  Sense strand starting at position 2592 of SEQ ID NO: 585114
gucugcacugcccaaauuu

SEQ ID NO: 614351 - RNA, 19 nt, Artificial Sequence
  Description of Artificial Sequence: Synthetic oligonucleotide
  Antisense strand to SEQ ID NO: 614350
aaauuugggcagugcagac

SEQ ID NO: 614352 - RNA, 19 nt, Artificial Sequence
  Description of Artificial Sequence: Synthetic oligonucleotide
  Sense strand starting at position 2844 of SEQ ID NO: 585114
ggaagaguucaagguugca

SEQ ID NO: 614353 - RNA, 19 nt, Artificial Sequence
  Description of Artificial Sequence: Synthetic oligonucleotide
  Antisense strand to SEQ ID NO: 614352
ugcaaccuugaacucuucc

SEQ ID NO: 614354 - RNA, 19 nt, Artificial Sequence
  Description of Artificial Sequence: Synthetic oligonucleotide
  Sense strand starting at position 2955 of SEQ ID NO: 585114
ucaaauacugaguaagcuu

SEQ ID NO: 614355 - RNA, 19 nt, Artificial Sequence
  Description of Artificial Sequence: Synthetic oligonucleotide
  Antisense strand to SEQ ID NO: 614354
aagcuuacucaguauuuga

SEQ ID NO: 614356 - RNA, 19 nt, Artificial Sequence
  Description of Artificial Sequence: Synthetic oligonucleotide
  Sense strand starting at position 2979 of SEQ ID NO: 585114
uggcgagaacuguauauuc

SEQ ID NO: 614357 - RNA, 19 nt, Artificial Sequence
  Description of Artificial Sequence: Synthetic oligonucleotide
  Antisense strand to SEQ ID NO: 614356
gaauauacaguucucgcca

SEQ ID NO: 614358 - RNA, 19 nt, Artificial Sequence
  Description of Artificial Sequence: Synthetic oligonucleotide
  Sense strand starting at position 3000 of SEQ ID NO: 585114
cuuucugagcugcaacaua

SEQ ID NO: 614359 - RNA, 19 nt, Artificial Sequence
  Description of Artificial Sequence: Synthetic oligonucleotide
  Antisense strand to SEQ ID NO: 614358
uauguugcagcucagaaag

SEQ ID NO: 614360 - RNA, 19 nt, Artificial Sequence
  Description of Artificial Sequence: Synthetic oligonucleotide
  Sense strand starting at position 3185 of SEQ ID NO: 585114
ccaaauauguggcugaaga

SEQ ID NO: 614361 - RNA, 19 nt, Artificial Sequence
  Description of Artificial Sequence: Synthetic oligonucleotide
  Antisense strand to SEQ ID NO: 614360
ucuucagccacauauuugg

SEQ ID NO: 614362 - RNA, 19 nt, Artificial Sequence
  Description of Artificial Sequence: Synthetic oligonucleotide
  Sense strand starting at position 3186 of SEQ ID NO: 585114
caaauauguggcugaagac

SEQ ID NO: 614363 - RNA, 19 nt, Artificial Sequence
  Description of Artificial Sequence: Synthetic oligonucleotide
  Antisense strand to SEQ ID NO: 614362
gucuucagccacauauuug

SEQ ID NO: 614364 - RNA, 19 nt, Artificial Sequence
  Description of Artificial Sequence: Synthetic oligonucleotide
  Sense strand starting at position 3196 of SEQ ID NO: 585114
gcugaagacucucuuacau

SEQ ID NO: 614365 - RNA, 19 nt, Artificial Sequence
  Description of Artificial Sequence: Synthetic oligonucleotide
  Antisense strand to SEQ ID NO: 614364
auguaagagagucuucagc

SEQ ID NO: 614366 - RNA, 19 nt, Artificial Sequence
  Description of Artificial Sequence: Synthetic oligonucleotide
  Sense strand starting at position 3242 of SEQ ID NO: 585114
ggaagcucaguacauugau

SEQ ID NO: 614367 - RNA, 19 nt, Artificial Sequence
  Description of Artificial Sequence: Synthetic oligonucleotide
  Antisense strand to SEQ ID NO: 614366
aucaauguacugagcuucc

SEQ ID NO: 614368 - RNA, 19 nt, Artificial Sequence
  Description of Artificial Sequence: Synthetic oligonucleotide
  Sense strand starting at position 3296 of SEQ ID NO: 585114
gucagauugcuccagagaa

SEQ ID NO: 614369 - RNA, 19 nt, Artificial Sequence
  Description of Artificial Sequence: Synthetic oligonucleotide
  Antisense strand to SEQ ID NO: 614368
uucucuggagcaaucugac

SEQ ID NO: 614370 - RNA, 19 nt, Artificial Sequence
  Description of Artificial Sequence: Synthetic oligonucleotide
  Sense strand starting at position 3344 of SEQ ID NO: 585114
uagucuugcccugaggaug

SEQ ID NO: 614371 - RNA, 19 nt, Artificial Sequence
  Description of Artificial Sequence: Synthetic oligonucleotide
  Antisense strand to SEQ ID NO: 614370
cauccucagggcaagacua

SEQ ID NO: 614372 - RNA, 19 nt, Artificial Sequence
  Description of Artificial Sequence: Synthetic oligonucleotide
  Sense strand starting at position 3638 of SEQ ID NO: 585114
ucaaguaacucuuuagaag

SEQ ID NO: 614373 - RNA, 19 nt, Artificial Sequence
  Description of Artificial Sequence: Synthetic oligonucleotide
  Antisense strand to SEQ ID NO: 614372
cuucuaaagaguuacuuga

SEQ ID NO: 614374 - RNA, 19 nt, Artificial Sequence
  Description of Artificial Sequence: Synthetic oligonucleotide
  Sense strand starting at position 3726 of SEQ ID NO: 585114
gagugcauuccagagcaga

SEQ ID NO: 614375 - RNA, 19 nt, Artificial Sequence
  Description of Artificial Sequence: Synthetic oligonucleotide
  Antisense strand to SEQ ID NO: 614374
ucugcucuggaaugcacuc

SEQ ID NO: 614376 - RNA, 19 nt, Artificial Sequence
  Description of Artificial Sequence: Synthetic oligonucleotide
  Sense strand starting at position 3729 of SEQ ID NO: 585114
ugcauuccagagcagaaau

SEQ ID NO: 614377 - RNA, 19 nt, Artificial Sequence
  Description of Artificial Sequence: Synthetic oligonucleotide
  Antisense strand to SEQ ID NO: 614376
auuucugcucuggaaugca

SEQ ID NO: 614378 - RNA, 19 nt, Artificial Sequence
  Description of Artificial Sequence: Synthetic oligonucleotide
  Sense strand starting at position 3764 of SEQ ID NO: 585114
guagcacccuauuuaguau

SEQ ID NO: 614379 - RNA, 19 nt, Artificial Sequence
  Description of Artificial Sequence: Synthetic oligonucleotide
  Antisense strand to SEQ ID NO: 614378
auacuaaauagggugcuac

SEQ ID NO: 614380 - RNA, 19 nt, Artificial Sequence
  Description of Artificial Sequence: Synthetic oligonucleotide
  Sense strand starting at position 3859 of SEQ ID NO: 585114
uaggguuaugcugaugacu

SEQ ID NO: 614381 - RNA, 19 nt, Artificial Sequence
  Description of Artificial Sequence: Synthetic oligonucleotide
  Antisense strand to SEQ ID NO: 614380
agucaucagcauaacccua

SEQ ID NO: 614382 - RNA, 19 nt, Artificial Sequence
  Description of Artificial Sequence: Synthetic oligonucleotide
  Sense strand starting at position 3898 of SEQ ID NO: 585114
aggacuaagacuuguguuu

SEQ ID NO: 614383 - RNA, 19 nt, Artificial Sequence
  Description of Artificial Sequence: Synthetic oligonucleotide
  Antisense strand to SEQ ID NO: 614382
aaacacaagucuuaguccu

SEQ ID NO: 614384 - RNA, 19 nt, Artificial Sequence
  Description of Artificial Sequence: Synthetic oligonucleotide
  Sense strand starting at position 3904 of SEQ ID NO: 585114
aagacuuguguuuagcaua

SEQ ID NO: 614385 - RNA, 19 nt, Artificial Sequence
  Description of Artificial Sequence: Synthetic oligonucleotide
  Antisense strand to SEQ ID NO: 614384
uaugcuaaacacaagucuu

SEQ ID NO: 614386 - RNA, 19 nt, Artificial Sequence
  Description of Artificial Sequence: Synthetic oligonucleotide
  Sense strand starting at position 3909 of SEQ ID NO: 585114
uuguguuuagcauagagga

SEQ ID NO: 614387 - RNA, 19 nt, Artificial Sequence
  Description of Artificial Sequence: Synthetic oligonucleotide
  Antisense strand to SEQ ID NO: 614386
uccucuaugcuaaacacaa

SEQ ID NO: 614388 - RNA, 19 nt, Artificial Sequence
  Description of Artificial Sequence: Synthetic oligonucleotide
  Sense strand starting at position 3911 of SEQ ID NO: 585114
guguuuagcauagaggaau

SEQ ID NO: 614389 - RNA, 19 nt, Artificial Sequence
  Description of Artificial Sequence: Synthetic oligonucleotide
  Antisense strand to SEQ ID NO: 614388
auuccucuaugcuaaacac

SEQ ID NO: 614390 - RNA, 19 nt, Artificial Sequence
  Description of Artificial Sequence: Synthetic oligonucleotide
  Sense strand starting at position 3973 of SEQ ID NO: 585114
ucaugaaaguuggcaaauu

SEQ ID NO: 614391 - RNA, 19 nt, Artificial Sequence
  Description of Artificial Sequence: Synthetic oligonucleotide
  Antisense strand to SEQ ID NO: 614390
aauuugccaacuuucauga

SEQ ID NO: 614392 - RNA, 19 nt, Artificial Sequence
  Description of Artificial Sequence: Synthetic oligonucleotide
  Sense strand starting at position 72 of SEQ ID NO: 585115
uagugagaggucuaugcau

SEQ ID NO: 614393 - RNA, 19 nt, Artificial Sequence
  Description of Artificial Sequence: Synthetic oligonucleotide
  Antisense strand to SEQ ID NO: 614392
augcauagaccucucacua

SEQ ID NO: 614394 - RNA, 19 nt, Artificial Sequence
  Description of Artificial Sequence: Synthetic oligonucleotide
  Sense strand starting at position 78 of SEQ ID NO: 585115
gaggucuaugcauauauca

SEQ ID NO: 614395 - RNA, 19 nt, Artificial Sequence
  Description of Artificial Sequence: Synthetic oligonucleotide
  Antisense strand to SEQ ID NO: 614394
ugauauaugcauagaccuc

SEQ ID NO: 614396 - RNA, 19 nt, Artificial Sequence
  Description of Artificial Sequence: Synthetic oligonucleotide
  Sense strand starting at position 292 of SEQ ID NO: 585115
gcugcaucccgggagagaa

SEQ ID NO: 614397 - RNA, 19 nt, Artificial Sequence
  Description of Artificial Sequence: Synthetic oligonucleotide
  Antisense strand to SEQ ID NO: 614396
uucucucccgggaugcagc

SEQ ID NO: 614398 - RNA, 19 nt, Artificial Sequence
  Description of Artificial Sequence: Synthetic oligonucleotide
  Sense strand starting at position 444 of SEQ ID NO: 585115
ucgguaguccuagaagaca

SEQ ID NO: 614399 - RNA, 19 nt, Artificial Sequence
  Description of Artificial Sequence: Synthetic oligonucleotide
  Antisense strand to SEQ ID NO: 614398
ugucuucuaggacuaccga

SEQ ID NO: 614400 - RNA, 19 nt, Artificial Sequence
  Description of Artificial Sequence: Synthetic oligonucleotide
  Sense strand starting at position 514 of SEQ ID NO: 585115
gcuugucaacaaugauaaa

SEQ ID NO: 614401 - RNA, 19 nt, Artificial Sequence
  Description of Artificial Sequence: Synthetic oligonucleotide
  Antisense strand to SEQ ID NO: 614400
uuuaucauuguugacaagc

SEQ ID NO: 614402 - RNA, 19 nt, Artificial Sequence
  Description of Artificial Sequence: Synthetic oligonucleotide
  Sense strand starting at position 536 of SEQ ID NO: 585115
uguaaaguaagccaugaga

SEQ ID NO: 614403 - RNA, 19 nt, Artificial Sequence
  Description of Artificial Sequence: Synthetic oligonucleotide
  Antisense strand to SEQ ID NO: 614402
ucucauggcuuacuuuaca

SEQ ID NO: 614404 - RNA, 19 nt, Artificial Sequence
  Description of Artificial Sequence: Synthetic oligonucleotide
  Sense strand starting at position 538 of SEQ ID NO: 585115
uaaaguaagccaugagacu

SEQ ID NO: 614405 - RNA, 19 nt, Artificial Sequence
  Description of Artificial Sequence: Synthetic oligonucleotide
  Antisense strand to SEQ ID NO: 614404
agucucauggcuuacuuua

SEQ ID NO: 614406 - RNA, 19 nt, Artificial Sequence
  Description of Artificial Sequence: Synthetic oligonucleotide
  Sense strand starting at position 544 of SEQ ID NO: 585115
aagccaugagacuguuaag

SEQ ID NO: 614407 - RNA, 19 nt, Artificial Sequence
  Description of Artificial Sequence: Synthetic oligonucleotide
  Antisense strand to SEQ ID NO: 614406
cuuaacagucucauggcuu

SEQ ID NO: 614408 - RNA, 19 nt, Artificial Sequence
  Description of Artificial Sequence: Synthetic oligonucleotide
  Sense strand starting at position 569 of SEQ ID NO: 585115
ugagguucuuuauuaugga

SEQ ID NO: 614409 - RNA, 19 nt, Artificial Sequence
  Description of Artificial Sequence: Synthetic oligonucleotide
  Antisense strand to SEQ ID NO: 614408
uccauaauaaagaaccuca

SEQ ID NO: 614410 - RNA, 19 nt, Artificial Sequence
  Description of Artificial Sequence: Synthetic oligonucleotide
  Sense strand starting at position 1153 of SEQ ID NO: 585115
agucuuaaggcggaauucu

SEQ ID NO: 614411 - RNA, 19 nt, Artificial Sequence
  Description of Artificial Sequence: Synthetic oligonucleotide
  Antisense strand to SEQ ID NO: 614410
agaauuccgccuuaagacu

SEQ ID NO: 614412 - RNA, 19 nt, Artificial Sequence
  Description of Artificial Sequence: Synthetic oligonucleotide
  Sense strand starting at position 1161 of SEQ ID NO: 585115
ggcggaauucuacaccuag

SEQ ID NO: 614413 - RNA, 19 nt, Artificial Sequence
  Description of Artificial Sequence: Synthetic oligonucleotide
  Antisense strand to SEQ ID NO: 614412
cuagguguagaauuccgcc

SEQ ID NO: 614414 - RNA, 19 nt, Artificial Sequence
  Description of Artificial Sequence: Synthetic oligonucleotide
  Sense strand starting at position 1332 of SEQ ID NO: 585115
ugugauaaucuagguuaga

SEQ ID NO: 614415 - RNA, 19 nt, Artificial Sequence
  Description of Artificial Sequence: Synthetic oligonucleotide
  Antisense strand to SEQ ID NO: 614414
ucuaaccuagauuaucaca

SEQ ID NO: 614416 - RNA, 19 nt, Artificial Sequence
  Description of Artificial Sequence: Synthetic oligonucleotide
  Sense strand starting at position 1333 of SEQ ID NO: 585115
gugauaaucuagguuagau

SEQ ID NO: 614417 - RNA, 19 nt, Artificial Sequence
  Description of Artificial Sequence: Synthetic oligonucleotide
  Antisense strand to SEQ ID NO: 614416
aucuaaccuagauuaucac

SEQ ID NO: 614418 - RNA, 19 nt, Artificial Sequence
  Description of Artificial Sequence: Synthetic oligonucleotide
  Sense strand starting at position 1649 of SEQ ID NO: 585115
aguuacugcccagauugaa

SEQ ID NO: 614419 - RNA, 19 nt, Artificial Sequence
  Description of Artificial Sequence: Synthetic oligonucleotide
  Antisense strand to SEQ ID NO: 614418
uucaaucugggcaguaacu

SEQ ID NO: 614420 - RNA, 19 nt, Artificial Sequence
  Description of Artificial Sequence: Synthetic oligonucleotide
  Sense strand starting at position 1684 of SEQ ID NO: 585115
gacaacaaaucgguauguu

SEQ ID NO: 614421 - RNA, 19 nt, Artificial Sequence
  Description of Artificial Sequence: Synthetic oligonucleotide
  Antisense strand to SEQ ID NO: 614420
aacauaccgauuuguuguc

SEQ ID NO: 614422 - RNA, 19 nt, Artificial Sequence
  Description of Artificial Sequence: Synthetic oligonucleotide
  Sense strand starting at position 1685 of SEQ ID NO: 585115
acaacaaaucgguauguuu

SEQ ID NO: 614423 - RNA, 19 nt, Artificial Sequence
  Description of Artificial Sequence: Synthetic oligonucleotide
  Antisense strand to SEQ ID NO: 614422
aaacauaccgauuuguugu

SEQ ID NO: 614424 - RNA, 19 nt, Artificial Sequence
  Description of Artificial Sequence: Synthetic oligonucleotide
  Sense strand starting at position 1780 of SEQ ID NO: 585115
guaguacauccagauguaa

SEQ ID NO: 614425 - RNA, 19 nt, Artificial Sequence
  Description of Artificial Sequence: Synthetic oligonucleotide
  Antisense strand to SEQ ID NO: 614424
uuacaucuggauguacuac

SEQ ID NO: 614426 - RNA, 19 nt, Artificial Sequence
  Description of Artificial Sequence: Synthetic oligonucleotide
  Sense strand starting at position 1976 of SEQ ID NO: 585115
guaugcauucuugcgaggu

SEQ ID NO: 614427 - RNA, 19 nt, Artificial Sequence
  Description of Artificial Sequence: Synthetic oligonucleotide
  Antisense strand to SEQ ID NO: 614426
accucgcaagaaugcauac

SEQ ID NO: 614428 - RNA, 19 nt, Artificial Sequence
  Description of Artificial Sequence: Synthetic oligonucleotide
  Sense strand starting at position 2040 of SEQ ID NO: 585115
cuuucaucugggugagaug

SEQ ID NO: 614429 - RNA, 19 nt, Artificial Sequence
  Description of Artificial Sequence: Synthetic oligonucleotide
  Antisense strand to SEQ ID NO: 614428
caucucacccagaugaaag

SEQ ID NO: 614430 - RNA, 19 nt, Artificial Sequence
  Description of Artificial Sequence: Synthetic oligonucleotide
  Sense strand starting at position 2162 of SEQ ID NO: 585115
gggcacaaaugguuagaca

SEQ ID NO: 614431 - RNA, 19 nt, Artificial Sequence
  Description of Artificial Sequence: Synthetic oligonucleotide
  Antisense strand to SEQ ID NO: 614430
ugucuaaccauuugugccc

SEQ ID NO: 614432 - RNA, 19 nt, Artificial Sequence
  Description of Artificial Sequence: Synthetic oligonucleotide
  Sense strand starting at position 2345 of SEQ ID NO: 585115
gcaacuuaugaauggagua

SEQ ID NO: 614433 - RNA, 19 nt, Artificial Sequence
  Description of Artificial Sequence: Synthetic oligonucleotide
  Antisense strand to SEQ ID NO: 614432
uacuccauucauaaguugc

SEQ ID NO: 614434 - RNA, 19 nt, Artificial Sequence
  Description of Artificial Sequence: Synthetic oligonucleotide
  Sense strand starting at position 2396 of SEQ ID NO: 585115
aggaguucuuauuccugaa

SEQ ID NO: 614435 - RNA, 19 nt, Artificial Sequence
  Description of Artificial Sequence: Synthetic oligonucleotide
  Antisense strand to SEQ ID NO: 614434
uucaggaauaagaacuccu

SEQ ID NO: 614436 - RNA, 19 nt, Artificial Sequence
  Description of Artificial Sequence: Synthetic oligonucleotide
  Sense strand starting at position 2400 of SEQ ID NO: 585115
guucuuauuccugaagcau

SEQ ID NO: 614437 - RNA, 19 nt, Artificial Sequence
  Description of Artificial Sequence: Synthetic oligonucleotide
  Antisense strand to SEQ ID NO: 614436
augcuucaggaauaagaac

SEQ ID NO: 614438 - RNA, 19 nt, Artificial Sequence
  Description of Artificial Sequence: Synthetic oligonucleotide
  Sense strand starting at position 2689 of SEQ ID NO: 585115
gggaaugcuguuuacugaa

SEQ ID NO: 614439 - RNA, 19 nt, Artificial Sequence
  Description of Artificial Sequence: Synthetic oligonucleotide
  Antisense strand to SEQ ID NO: 614438
uucaguaaacagcauuccc

SEQ ID NO: 614440 - RNA, 19 nt, Artificial Sequence
  Description of Artificial Sequence: Synthetic oligonucleotide
  Sense strand starting at position 2691 of SEQ ID NO: 585115
gaaugcuguuuacugaaac

SEQ ID NO: 614441 - RNA, 19 nt, Artificial Sequence
  Description of Artificial Sequence: Synthetic oligonucleotide
  Antisense strand to SEQ ID NO: 614440
guuucaguaaacagcauuc

SEQ ID NO: 614442 - RNA, 19 nt, Artificial Sequence
  Description of Artificial Sequence: Synthetic oligonucleotide
  Sense strand starting at position 2865 of SEQ ID NO: 585115
cugugcucucugcugguua

SEQ ID NO: 614443 - RNA, 19 nt, Artificial Sequence
  Description of Artificial Sequence: Synthetic oligonucleotide
  Antisense strand to SEQ ID NO: 614442
uaaccagcagagagcacag

SEQ ID NO: 614444 - RNA, 19 nt, Artificial Sequence
  Description of Artificial Sequence: Synthetic oligonucleotide
  Sense strand starting at position 2885 of SEQ ID NO: 585115
ugagaaaucugucuacauu

SEQ ID NO: 614445 - RNA, 19 nt, Artificial Sequence
  Description of Artificial Sequence: Synthetic oligonucleotide
  Antisense strand to SEQ ID NO: 614444
aauguagacagauuucuca

SEQ ID NO: 614446 - RNA, 19 nt, Artificial Sequence
  Description of Artificial Sequence: Synthetic oligonucleotide
  Sense strand starting at position 3046 of SEQ ID NO: 585115
gucucaauuuggcaaauuu

SEQ ID NO: 614447 - RNA, 19 nt, Artificial Sequence
  Description of Artificial Sequence: Synthetic oligonucleotide
  Antisense strand to SEQ ID NO: 614446
aaauuugccaaauugagac

SEQ ID NO: 614448 - RNA, 19 nt, Artificial Sequence
  Description of Artificial Sequence: Synthetic oligonucleotide
  Sense strand starting at position 3141 of SEQ ID NO: 585115
aacuuagaguauucgaaau

SEQ ID NO: 614449 - RNA, 19 nt, Artificial Sequence
  Description of Artificial Sequence: Synthetic oligonucleotide
  Antisense strand to SEQ ID NO: 614448
auuucgaauacucuaaguu

SEQ ID NO: 614450 - RNA, 19 nt, Artificial Sequence
  Description of Artificial Sequence: Synthetic oligonucleotide
  Sense strand starting at position 3229 of SEQ ID NO: 585115
auuggaucacgguaguuua

SEQ ID NO: 614451 - RNA, 19 nt, Artificial Sequence
  Description of Artificial Sequence: Synthetic oligonucleotide
  Antisense strand to SEQ ID NO: 614450
uaaacuaccgugauccaau

SEQ ID NO: 614452 - RNA, 19 nt, Artificial Sequence
  Description of Artificial Sequence: Synthetic oligonucleotide
  Sense strand starting at position 3273 of SEQ ID NO: 585115
ccaggcacuguuuaauuaa

SEQ ID NO: 614453 - RNA, 19 nt, Artificial Sequence
  Description of Artificial Sequence: Synthetic oligonucleotide
  Antisense strand to SEQ ID NO: 614452
uuaauuaaacagugccugg

SEQ ID NO: 614454 - RNA, 19 nt, Artificial Sequence
  Description of Artificial Sequence: Synthetic oligonucleotide
  Sense strand starting at position 3294 of SEQ ID NO: 585115
ugggauaucaccuggguau

SEQ ID NO: 614455 - RNA, 19 nt, Artificial Sequence
  Description of Artificial Sequence: Synthetic oligonucleotide
  Antisense strand to SEQ ID NO: 614454
auacccaggugauauccca

SEQ ID NO: 614456 - RNA, 19 nt, Artificial Sequence
  Description of Artificial Sequence: Synthetic oligonucleotide
  Sense strand starting at position 3295 of SEQ ID NO: 585115
gggauaucaccuggguaug

SEQ ID NO: 614457 - RNA, 19 nt, Artificial Sequence
  Description of Artificial Sequence: Synthetic oligonucleotide
  Antisense strand to SEQ ID NO: 614456
cauacccaggugauauccc

SEQ ID NO: 614458 - RNA, 19 nt, Artificial Sequence
  Description of Artificial Sequence: Synthetic oligonucleotide
  Sense strand starting at position 3511 of SEQ ID NO: 585115
ugaauuaaacgcuggagag

SEQ ID NO: 614459 - RNA, 19 nt, Artificial Sequence
  Description of Artificial Sequence: Synthetic oligonucleotide
  Antisense strand to SEQ ID NO: 614458
cucuccagcguuuaauuca

SEQ ID NO: 614460 - RNA, 19 nt, Artificial Sequence
  Description of Artificial Sequence: Synthetic oligonucleotide
  Sense strand starting at position 3512 of SEQ ID NO: 585115
gaauuaaacgcuggagagu

SEQ ID NO: 614461 - RNA, 19 nt, Artificial Sequence
  Description of Artificial Sequence: Synthetic oligonucleotide
  Antisense strand to SEQ ID NO: 614460
acucuccagcguuuaauuc

SEQ ID NO: 614462 - RNA, 19 nt, Artificial Sequence
  Description of Artificial Sequence: Synthetic oligonucleotide
  Sense strand starting at position 3513 of SEQ ID NO: 585115
aauuaaacgcuggagagua

SEQ ID NO: 614463 - RNA, 19 nt, Artificial Sequence
  Description of Artificial Sequence: Synthetic oligonucleotide
  Antisense strand to SEQ ID NO: 614462
uacucuccagcguuuaauu

SEQ ID NO: 614464 - RNA, 19 nt, Artificial Sequence
  Description of Artificial Sequence: Synthetic oligonucleotide
  Sense strand starting at position 3534 of SEQ ID NO: 585115
acauauguaccagauugua

SEQ ID NO: 614465 - RNA, 19 nt, Artificial Sequence
  Description of Artificial Sequence: Synthetic oligonucleotide
  Antisense strand to SEQ ID NO: 614464
uacaaucugguacauaugu

SEQ ID NO: 614466 - RNA, 19 nt, Artificial Sequence
  Description of Artificial Sequence: Synthetic oligonucleotide
  Sense strand starting at position 3612 of SEQ ID NO: 585115
acaaaugucuguccaggau

SEQ ID NO: 614467 - RNA, 19 nt, Artificial Sequence
  Description of Artificial Sequence: Synthetic oligonucleotide
  Antisense strand to SEQ ID NO: 614466
auccuggacagacauuugu

SEQ ID NO: 614468 - RNA, 19 nt, Artificial Sequence
  Description of Artificial Sequence: Synthetic oligonucleotide
  Sense strand starting at position 3616 of SEQ ID NO: 585115
augucuguccaggauccua

SEQ ID NO: 614469 - RNA, 19 nt, Artificial Sequence
  Description of Artificial Sequence: Synthetic oligonucleotide
  Antisense strand to SEQ ID NO: 614468
uaggauccuggacagacau

SEQ ID NO: 614470 - RNA, 19 nt, Artificial Sequence
  Description of Artificial Sequence: Synthetic oligonucleotide
  Sense strand starting at position 3627 of SEQ ID NO: 585115
ggauccuaagauugucaaa

SEQ ID NO: 614471 - RNA, 19 nt, Artificial Sequence
  Description of Artificial Sequence: Synthetic oligonucleotide
  Antisense strand to SEQ ID NO: 614470
uuugacaaucuuaggaucc

SEQ ID NO: 614472 - RNA, 19 nt, Artificial Sequence
  Description of Artificial Sequence: Synthetic oligonucleotide
  Sense strand starting at position 22 of SEQ ID NO: 585116
uccugagugcugggagaug

SEQ ID NO: 614473 - RNA, 19 nt, Artificial Sequence
  Description of Artificial Sequence: Synthetic oligonucleotide
  Antisense strand to SEQ ID NO: 614472
caucucccagcacucagga

SEQ ID NO: 614474 - RNA, 19 nt, Artificial Sequence
  Description of Artificial Sequence: Synthetic oligonucleotide
  Sense strand starting at position 149 of SEQ ID NO: 585116
ggagaauagccaugauggu

SEQ ID NO: 614475 - RNA, 19 nt, Artificial Sequence
  Description of Artificial Sequence: Synthetic oligonucleotide
  Antisense strand to SEQ ID NO: 614474
accaucauggcuauucucc

SEQ ID NO: 614476 - RNA, 19 nt, Artificial Sequence
  Description of Artificial Sequence: Synthetic oligonucleotide
  Sense strand starting at position 168 of SEQ ID NO: 585116
gcugguucucggagaguuc

SEQ ID NO: 614477 - RNA, 19 nt, Artificial Sequence
  Description of Artificial Sequence: Synthetic oligonucleotide
  Antisense strand to SEQ ID NO: 614476
gaacucuccgagaaccagc

SEQ ID NO: 614478 - RNA, 19 nt, Artificial Sequence
  Description of Artificial Sequence: Synthetic oligonucleotide
  Sense strand starting at position 306 of SEQ ID NO: 585116
aauugagugagugggaaua

SEQ ID NO: 614479 - RNA, 19 nt, Artificial Sequence
  Description of Artificial Sequence: Synthetic oligonucleotide
  Antisense strand to SEQ ID NO: 614478
uauucccacucacucaauu

SEQ ID NO: 614480 - RNA, 19 nt, Artificial Sequence
  Description of Artificial Sequence: Synthetic oligonucleotide
  Sense strand starting at position 392 of SEQ ID NO: 585116
ggaagaaaugauugugugu

SEQ ID NO: 614481 - RNA, 19 nt, Artificial Sequence
  Description of Artificial Sequence: Synthetic oligonucleotide
  Antisense strand to SEQ ID NO: 614480
acacacaaucauuucuucc

SEQ ID NO: 614482 - RNA, 19 nt, Artificial Sequence
  Description of Artificial Sequence: Synthetic oligonucleotide
  Sense strand starting at position 443 of SEQ ID NO: 585116
ugcccagucccauagagau

SEQ ID NO: 614483 - RNA, 19 nt, Artificial Sequence
  Description of Artificial Sequence: Synthetic oligonucleotide
  Antisense strand to SEQ ID NO: 614482
aucucuaugggacugggca

SEQ ID NO: 614484 - RNA, 19 nt, Artificial Sequence
  Description of Artificial Sequence: Synthetic oligonucleotide
  Sense strand starting at position 449 of SEQ ID NO: 585116
gucccauagagauggccaa

SEQ ID NO: 614485 - RNA, 19 nt, Artificial Sequence
  Description of Artificial Sequence: Synthetic oligonucleotide
  Antisense strand to SEQ ID NO: 614484
uuggccaucucuaugggac

SEQ ID NO: 614486 - RNA, 19 nt, Artificial Sequence
  Description of Artificial Sequence: Synthetic oligonucleotide
  Sense strand starting at position 489 of SEQ ID NO: 585116
ggcagugauuagucacaau

SEQ ID NO: 614487 - RNA, 19 nt, Artificial Sequence
  Description of Artificial Sequence: Synthetic oligonucleotide
  Antisense strand to SEQ ID NO: 614486
auugugacuaaucacugcc

SEQ ID NO: 614488 - RNA, 19 nt, Artificial Sequence
  Description of Artificial Sequence: Synthetic oligonucleotide
  Sense strand starting at position 906 of SEQ ID NO: 585116
uaucgucucgggcaagaga

SEQ ID NO: 614489 - RNA, 19 nt, Artificial Sequence
  Description of Artificial Sequence: Synthetic oligonucleotide
  Antisense strand to SEQ ID NO: 614488
ucucuugcccgagacgaua

SEQ ID NO: 614490 - RNA, 19 nt, Artificial Sequence
  Description of Artificial Sequence: Synthetic oligonucleotide
  Sense strand starting at position 2135 of SEQ ID NO: 585116
uuuggagugacccguggaa

SEQ ID NO: 614491 - RNA, 19 nt, Artificial Sequence
  Description of Artificial Sequence: Synthetic oligonucleotide
  Antisense strand to SEQ ID NO: 614490
uuccacgggucacuccaaa

SEQ ID NO: 614492 - RNA, 19 nt, Artificial Sequence
  Description of Artificial Sequence: Synthetic oligonucleotide
  Sense strand starting at position 2137 of SEQ ID NO: 585116
uggagugacccguggaauc

SEQ ID NO: 614493 - RNA, 19 nt, Artificial Sequence
  Description of Artificial Sequence: Synthetic oligonucleotide
  Antisense strand to SEQ ID NO: 614492
gauuccacgggucacucca

SEQ ID NO: 614494 - RNA, 19 nt, Artificial Sequence
  Description of Artificial Sequence: Synthetic oligonucleotide
  Sense strand starting at position 2467 of SEQ ID NO: 585116
ucugguggauuugaaugau

SEQ ID NO: 614495 - RNA, 19 nt, Artificial Sequence
  Description of Artificial Sequence: Synthetic oligonucleotide
  Antisense strand to SEQ ID NO: 614494
aucauucaaauccaccaga

SEQ ID NO: 614496 - RNA, 19 nt, Artificial Sequence
  Description of Artificial Sequence: Synthetic oligonucleotide
  Sense strand starting at position 2473 of SEQ ID NO: 585116
ggauuugaaugauaaaggu

SEQ ID NO: 614497 - RNA, 19 nt, Artificial Sequence
  Description of Artificial Sequence: Synthetic oligonucleotide
  Antisense strand to SEQ ID NO: 614496
accuuuaucauucaaaucc

SEQ ID NO: 614498 - RNA, 19 nt, Artificial Sequence
  Description of Artificial Sequence: Synthetic oligonucleotide
  Sense strand starting at position 2508 of SEQ ID NO: 585116
augggucugccugauagac

SEQ ID NO: 614499 - RNA, 19 nt, Artificial Sequence
  Description of Artificial Sequence: Synthetic oligonucleotide
  Antisense strand to SEQ ID NO: 614498
gucuaucaggcagacccau

SEQ ID NO: 614500 - RNA, 19 nt, Artificial Sequence
  Description of Artificial Sequence: Synthetic oligonucleotide
  Sense strand starting at position 2555 of SEQ ID NO: 585116
guggaaacuguauggaacu

SEQ ID NO: 614501 - RNA, 19 nt, Artificial Sequence
  Description of Artificial Sequence: Synthetic oligonucleotide
  Antisense strand to SEQ ID NO: 614500
aguuccauacaguuuccac

SEQ ID NO: 614502 - RNA, 19 nt, Artificial Sequence
  Description of Artificial Sequence: Synthetic oligonucleotide
  Sense strand starting at position 2655 of SEQ ID NO: 585116
cucaucuguuaagugauca

SEQ ID NO: 614503 - RNA, 19 nt, Artificial Sequence
  Description of Artificial Sequence: Synthetic oligonucleotide
  Antisense strand to SEQ ID NO: 614502
ugaucacuuaacagaugag

SEQ ID NO: 614504 - RNA, 19 nt, Artificial Sequence
  Description of Artificial Sequence: Synthetic oligonucleotide
  Sense strand starting at position 2659 of SEQ ID NO: 585116
ucuguuaagugaucauaau

SEQ ID NO: 614505 - RNA, 19 nt, Artificial Sequence
  Description of Artificial Sequence: Synthetic oligonucleotide
  Antisense strand to SEQ ID NO: 614504
auuaugaucacuuaacaga

SEQ ID NO: 614506 - RNA, 19 nt, Artificial Sequence
  Description of Artificial Sequence: Synthetic oligonucleotide
  Sense strand starting at position 2660 of SEQ ID NO: 585116
cuguuaagugaucauaaug

SEQ ID NO: 614507 - RNA, 19 nt, Artificial Sequence
  Description of Artificial Sequence: Synthetic oligonucleotide
  Antisense strand to SEQ ID NO: 614506
cauuaugaucacuuaacag

SEQ ID NO: 614508 - RNA, 19 nt, Artificial Sequence
  Description of Artificial Sequence: Synthetic oligonucleotide
  Sense strand starting at position 2778 of SEQ ID NO: 585116
caguaauaaucagugagcu

SEQ ID NO: 614509 - RNA, 19 nt, Artificial Sequence
  Description of Artificial Sequence: Synthetic oligonucleotide
  Antisense strand to SEQ ID NO: 614508
agcucacugauuauuacug

SEQ ID NO: 614510 - RNA, 19 nt, Artificial Sequence
  Description of Artificial Sequence: Synthetic oligonucleotide
  Sense strand starting at position 2780 of SEQ ID NO: 585116
guaauaaucagugagcuga

SEQ ID NO: 614511 - RNA, 19 nt, Artificial Sequence
  Description of Artificial Sequence: Synthetic oligonucleotide
  Antisense strand to SEQ ID NO: 614510
ucagcucacugauuauuac

SEQ ID NO: 614512 - RNA, 19 nt, Artificial Sequence
  Description of Artificial Sequence: Synthetic oligonucleotide
  Sense strand starting at position 2782 of SEQ ID NO: 585116
aauaaucagugagcugaga

SEQ ID NO: 614513 - RNA, 19 nt, Artificial Sequence
  Description of Artificial Sequence: Synthetic oligonucleotide
  Antisense strand to SEQ ID NO: 614512
ucucagcucacugauuauu

SEQ ID NO: 614514 - RNA, 19 nt, Artificial Sequence
  Description of Artificial Sequence: Synthetic oligonucleotide
  Sense strand starting at position 2811 of SEQ ID NO: 585116
aagggaacauccuaggaga

SEQ ID NO: 614515 - RNA, 19 nt, Artificial Sequence
  Description of Artificial Sequence: Synthetic oligonucleotide
  Antisense strand to SEQ ID NO: 614514
ucuccuaggauguucccuu

SEQ ID NO: 614516 - RNA, 19 nt, Artificial Sequence
  Description of Artificial Sequence: Synthetic oligonucleotide
  Sense strand starting at position 2902 of SEQ ID NO: 585116
ccagaaccaucgccugaua

SEQ ID NO: 614517 - RNA, 19 nt, Artificial Sequence
  Description of Artificial Sequence: Synthetic oligonucleotide
  Antisense strand to SEQ ID NO: 614516
uaucaggcgaugguucugg

SEQ ID NO: 614518 - RNA, 19 nt, Artificial Sequence
  Description of Artificial Sequence: Synthetic oligonucleotide
  Sense strand starting at position 2904 of SEQ ID NO: 585116
agaaccaucgccugauaaa

SEQ ID NO: 614519 - RNA, 19 nt, Artificial Sequence
  Description of Artificial Sequence: Synthetic oligonucleotide
  Antisense strand to SEQ ID NO: 614518
uuuaucaggcgaugguucu

SEQ ID NO: 614520 - RNA, 19 nt, Artificial Sequence
  Description of Artificial Sequence: Synthetic oligonucleotide
  Sense strand starting at position 2914 of SEQ ID NO: 585116
ccugauaaacugugucaua

SEQ ID NO: 614521 - RNA, 19 nt, Artificial Sequence
  Description of Artificial Sequence: Synthetic oligonucleotide
  Antisense strand to SEQ ID NO: 614520
uaugacacaguuuaucagg

SEQ ID NO: 614522 - RNA, 19 nt, Artificial Sequence
  Description of Artificial Sequence: Synthetic oligonucleotide
  Sense strand starting at position 2915 of SEQ ID NO: 585116
cugauaaacugugucauaa

SEQ ID NO: 614523 - RNA, 19 nt, Artificial Sequence
  Description of Artificial Sequence: Synthetic oligonucleotide
  Antisense strand to SEQ ID NO: 614522
uuaugacacaguuuaucag

SEQ ID NO: 614524 - RNA, 19 nt, Artificial Sequence
  Description of Artificial Sequence: Synthetic oligonucleotide
  Sense strand starting at position 2926 of SEQ ID NO: 585116
ugucauaacucaccuagga

SEQ ID NO: 614525 - RNA, 19 nt, Artificial Sequence
  Description of Artificial Sequence: Synthetic oligonucleotide
  Antisense strand to SEQ ID NO: 614524
uccuaggugaguuaugaca

SEQ ID NO: 614526 - RNA, 19 nt, Artificial Sequence
  Description of Artificial Sequence: Synthetic oligonucleotide
  Sense strand starting at position 2993 of SEQ ID NO: 585116
agagcaugccuuuacuaga

SEQ ID NO: 614527 - RNA, 19 nt, Artificial Sequence
  Description of Artificial Sequence: Synthetic oligonucleotide
  Antisense strand to SEQ ID NO: 614526
ucuaguaaaggcaugcucu

SEQ ID NO: 614528 - RNA, 19 nt, Artificial Sequence
  Description of Artificial Sequence: Synthetic oligonucleotide
  Sense strand starting at position 3033 of SEQ ID NO: 585116
accaucucugucugauaua

SEQ ID NO: 614529 - RNA, 19 nt, Artificial Sequence
  Description of Artificial Sequence: Synthetic oligonucleotide
  Antisense strand to SEQ ID NO: 614528
uauaucagacagagauggu

SEQ ID NO: 614530 - RNA, 19 nt, Artificial Sequence
  Description of Artificial Sequence: Synthetic oligonucleotide
  Sense strand starting at position 3327 of SEQ ID NO: 585116
uuuauagcaccuuaguuua

SEQ ID NO: 614531 - RNA, 19 nt, Artificial Sequence
  Description of Artificial Sequence: Synthetic oligonucleotide
  Antisense strand to SEQ ID NO: 614530
uaaacuaaggugcuauaaa

SEQ ID NO: 614532 - RNA, 19 nt, Artificial Sequence
  Description of Artificial Sequence: Synthetic oligonucleotide
  Sense strand starting at position 3338 of SEQ ID NO: 585116
uuaguuuacucuccagaug

SEQ ID NO: 614533 - RNA, 19 nt, Artificial Sequence
  Description of Artificial Sequence: Synthetic oligonucleotide
  Antisense strand to SEQ ID NO: 614532
caucuggagaguaaacuaa

SEQ ID NO: 614534 - RNA, 19 nt, Artificial Sequence
  Description of Artificial Sequence: Synthetic oligonucleotide
  Sense strand starting at position 3422 of SEQ ID NO: 585116
uuuacuggagucuggagaa

SEQ ID NO: 614535 - RNA, 19 nt, Artificial Sequence
  Description of Artificial Sequence: Synthetic oligonucleotide
  Antisense strand to SEQ ID NO: 614534
uucuccagacuccaguaaa

SEQ ID NO: 614536 - RNA, 19 nt, Artificial Sequence
  Description of Artificial Sequence: Synthetic oligonucleotide
  Sense strand starting at position 3459 of SEQ ID NO: 585116
acaaauaugcaguagaagu

SEQ ID NO: 614537 - RNA, 19 nt, Artificial Sequence
  Description of Artificial Sequence: Synthetic oligonucleotide
  Antisense strand to SEQ ID NO: 614536
acuucuacugcauauuugu

SEQ ID NO: 614538 - RNA, 19 nt, Artificial Sequence
  Description of Artificial Sequence: Synthetic oligonucleotide
  Sense strand starting at position 3507 of SEQ ID NO: 585116
ggauuagcacaguacuaau

SEQ ID NO: 614539 - RNA, 19 nt, Artificial Sequence
  Description of Artificial Sequence: Synthetic oligonucleotide
  Antisense strand to SEQ ID NO: 614538
auuaguacugugcuaaucc

SEQ ID NO: 614540 - RNA, 19 nt, Artificial Sequence
  Description of Artificial Sequence: Synthetic oligonucleotide
  Sense strand starting at position 3535 of SEQ ID NO: 585116
ggacgaaucuggagggaga

SEQ ID NO: 614541 - RNA, 19 nt, Artificial Sequence
  Description of Artificial Sequence: Synthetic oligonucleotide
  Antisense strand to SEQ ID NO: 614540
ucucccuccagauucgucc

SEQ ID NO: 614542 - RNA, 19 nt, Artificial Sequence
  Description of Artificial Sequence: Synthetic oligonucleotide
  Sense strand starting at position 3704 of SEQ ID NO: 585116
agaugauguuagguacuuu

SEQ ID NO: 614543 - RNA, 19 nt, Artificial Sequence
  Description of Artificial Sequence: Synthetic oligonucleotide
  Antisense strand to SEQ ID NO: 614542
aaaguaccuaacaucaucu

SEQ ID NO: 614544 - RNA, 19 nt, Artificial Sequence
  Description of Artificial Sequence: Synthetic oligonucleotide
  Sense strand starting at position 3708 of SEQ ID NO: 585116
gauguuagguacuuuauag

SEQ ID NO: 614545 - RNA, 19 nt, Artificial Sequence
  Description of Artificial Sequence: Synthetic oligonucleotide
  Antisense strand to SEQ ID NO: 614544
cuauaaaguaccuaacauc

SEQ ID NO: 614546 - RNA, 19 nt, Artificial Sequence
  Description of Artificial Sequence: Synthetic oligonucleotide
  Sense strand starting at position 3811 of SEQ ID NO: 585116
acaaguaacuuccugauga

SEQ ID NO: 614547 - RNA, 19 nt, Artificial Sequence
  Description of Artificial Sequence: Synthetic oligonucleotide
  Antisense strand to SEQ ID NO: 614546
ucaucaggaaguuacuugu

SEQ ID NO: 614548 - RNA, 19 nt, Artificial Sequence
  Description of Artificial Sequence: Synthetic oligonucleotide
  Sense strand starting at position 3846 of SEQ ID NO: 585116
aguguugaaagucagaugu

SEQ ID NO: 614549 - RNA, 19 nt, Artificial Sequence
  Description of Artificial Sequence: Synthetic oligonucleotide
  Antisense strand to SEQ ID NO: 614548
acaucugacuuucaacacu

SEQ ID NO: 614550 - RNA, 19 nt, Artificial Sequence
  Description of Artificial Sequence: Synthetic oligonucleotide
  Sense strand starting at position 3937 of SEQ ID NO: 585116
ggguaucuugcugagguuu

SEQ ID NO: 614551 - RNA, 19 nt, Artificial Sequence
  Description of Artificial Sequence: Synthetic oligonucleotide
  Antisense strand to SEQ ID NO: 614550
aaaccucagcaagauaccc

SEQ ID NO: 614552 - RNA, 19 nt, Artificial Sequence
  Description of Artificial Sequence: Synthetic oligonucleotide
  Sense strand starting at position 48 of SEQ ID NO: 585117
cucaguauuguauaaugua

SEQ ID NO: 614553 - RNA, 19 nt, Artificial Sequence
  Description of Artificial Sequence: Synthetic oligonucleotide
  Antisense strand to SEQ ID NO: 614552
uacauuauacaauacugag

SEQ ID NO: 614554 - RNA, 19 nt, Artificial Sequence
  Description of Artificial Sequence: Synthetic oligonucleotide
  Sense strand starting at position 102 of SEQ ID NO: 585117
gugagucauggucaagaaa

SEQ ID NO: 614555 - RNA, 19 nt, Artificial Sequence
  Description of Artificial Sequence: Synthetic oligonucleotide
  Antisense strand to SEQ ID NO: 614554
uuucuugaccaugacucac

SEQ ID NO: 614556 - RNA, 19 nt, Artificial Sequence
  Description of Artificial Sequence: Synthetic oligonucleotide
  Sense strand starting at position 830 of SEQ ID NO: 585117
guaaccuagcaagauguuu

SEQ ID NO: 614557 - RNA, 19 nt, Artificial Sequence
  Description of Artificial Sequence: Synthetic oligonucleotide
  Antisense strand to SEQ ID NO: 614556
aaacaucuugcuagguuac

SEQ ID NO: 614558 - RNA, 19 nt, Artificial Sequence
  Description of Artificial Sequence: Synthetic oligonucleotide
  Sense strand starting at position 841 of SEQ ID NO: 585117
agauguuuguaacugggaa

SEQ ID NO: 614559 - RNA, 19 nt, Artificial Sequence
  Description of Artificial Sequence: Synthetic oligonucleotide
  Antisense strand to SEQ ID NO: 614558
uucccaguuacaaacaucu

SEQ ID NO: 614560 - RNA, 19 nt, Artificial Sequence
  Description of Artificial Sequence: Synthetic oligonucleotide
  Sense strand starting at position 843 of SEQ ID NO: 585117
auguuuguaacugggaauu

SEQ ID NO: 614561 - RNA, 19 nt, Artificial Sequence
  Description of Artificial Sequence: Synthetic oligonucleotide
  Antisense strand to SEQ ID NO: 614560
aauucccaguuacaaacau

SEQ ID NO: 614562 - RNA, 19 nt, Artificial Sequence
  Description of Artificial Sequence: Synthetic oligonucleotide
  Sense strand starting at position 868 of SEQ ID NO: 585117
uaagcuguugagcauuaaa

SEQ ID NO: 614563 - RNA, 19 nt, Artificial Sequence
  Description of Artificial Sequence: Synthetic oligonucleotide
  Antisense strand to SEQ ID NO: 614562
uuuaaugcucaacagcuua

SEQ ID NO: 614564 - RNA, 19 nt, Artificial Sequence
  Description of Artificial Sequence: Synthetic oligonucleotide
  Sense strand starting at position 953 of SEQ ID NO: 585117
uuuccacuucuaggucaga

SEQ ID NO: 614565 - RNA, 19 nt, Artificial Sequence
  Description of Artificial Sequence: Synthetic oligonucleotide
  Antisense strand to SEQ ID NO: 614564
ucugaccuagaaguggaaa

SEQ ID NO: 614566 - RNA, 19 nt, Artificial Sequence
  Description of Artificial Sequence: Synthetic oligonucleotide
  Sense strand starting at position 1058 of SEQ ID NO: 585117
cgcuguugucucuuuacau

SEQ ID NO: 614567 - RNA, 19 nt, Artificial Sequence
  Description of Artificial Sequence: Synthetic oligonucleotide
  Antisense strand to SEQ ID NO: 614566
auguaaagagacaacagcg

SEQ ID NO: 614568 - RNA, 19 nt, Artificial Sequence
  Description of Artificial Sequence: Synthetic oligonucleotide
  Sense strand starting at position 1079 of SEQ ID NO: 585117
cuaugacuccugcaaugaa

SEQ ID NO: 614569 - RNA, 19 nt, Artificial Sequence
  Description of Artificial Sequence: Synthetic oligonucleotide
  Antisense strand to SEQ ID NO: 614568
uucauugcaggagucauag

SEQ ID NO: 614570 - RNA, 19 nt, Artificial Sequence
  Description of Artificial Sequence: Synthetic oligonucleotide
  Sense strand starting at position 1255 of SEQ ID NO: 585117
ucucaaacuuugguaggua

SEQ ID NO: 614571 - RNA, 19 nt, Artificial Sequence
  Description of Artificial Sequence: Synthetic oligonucleotide
  Antisense strand to SEQ ID NO: 614570
uaccuaccaaaguuugaga

SEQ ID NO: 614572 - RNA, 19 nt, Artificial Sequence
  Description of Artificial Sequence: Synthetic oligonucleotide
  Sense strand starting at position 1318 of SEQ ID NO: 585117
ggccgacccaaguaugaaa

SEQ ID NO: 614573 - RNA, 19 nt, Artificial Sequence
  Description of Artificial Sequence: Synthetic oligonucleotide
  Antisense strand to SEQ ID NO: 614572
uuucauacuugggucggcc

SEQ ID NO: 614574 - RNA, 19 nt, Artificial Sequence
  Description of Artificial Sequence: Synthetic oligonucleotide
  Sense strand starting at position 1369 of SEQ ID NO: 585117
cgggauccuguacaauuaa

SEQ ID NO: 614575 - RNA, 19 nt, Artificial Sequence
  Description of Artificial Sequence: Synthetic oligonucleotide
  Antisense strand to SEQ ID NO: 614574
uuaauuguacaggaucccg

SEQ ID NO: 614576 - RNA, 19 nt, Artificial Sequence
  Description of Artificial Sequence: Synthetic oligonucleotide
  Sense strand starting at position 1381 of SEQ ID NO: 585117
caauuaagagguuguguga

SEQ ID NO: 614577 - RNA, 19 nt, Artificial Sequence
  Description of Artificial Sequence: Synthetic oligonucleotide
  Antisense strand to SEQ ID NO: 614576
ucacacaaccucuuaauug

SEQ ID NO: 614578 - RNA, 19 nt, Artificial Sequence
  Description of Artificial Sequence: Synthetic oligonucleotide
  Sense strand starting at position 1756 of SEQ ID NO: 585117
cuuuacacccuguggaauu

SEQ ID NO: 614579 - RNA, 19 nt, Artificial Sequence
  Description of Artificial Sequence: Synthetic oligonucleotide
  Antisense strand to SEQ ID NO: 614578
aauuccacaggguguaaag

SEQ ID NO: 614580 - RNA, 19 nt, Artificial Sequence
  Description of Artificial Sequence: Synthetic oligonucleotide
  Sense strand starting at position 2338 of SEQ ID NO: 585117
ggagcgaucccggaggaca

SEQ ID NO: 614581 - RNA, 19 nt, Artificial Sequence
  Description of Artificial Sequence: Synthetic oligonucleotide
  Antisense strand to SEQ ID NO: 614580
uguccuccgggaucgcucc

SEQ ID NO: 614582 - RNA, 19 nt, Artificial Sequence
  Description of Artificial Sequence: Synthetic oligonucleotide
  Sense strand starting at position 2359 of SEQ ID NO: 585117
gacgcucaccugggaagaa

SEQ ID NO: 614583 - RNA, 19 nt, Artificial Sequence
  Description of Artificial Sequence: Synthetic oligonucleotide
  Antisense strand to SEQ ID NO: 614582
uucuucccaggugagcguc

SEQ ID NO: 614584 - RNA, 19 nt, Artificial Sequence
  Description of Artificial Sequence: Synthetic oligonucleotide
  Sense strand starting at position 2419 of SEQ ID NO: 585117
uuucccugggcucaagaau

SEQ ID NO: 614585 - RNA, 19 nt, Artificial Sequence
  Description of Artificial Sequence: Synthetic oligonucleotide
  Antisense strand to SEQ ID NO: 614584
auucuugagcccagggaaa

SEQ ID NO: 614586 - RNA, 19 nt, Artificial Sequence
  Description of Artificial Sequence: Synthetic oligonucleotide
  Sense strand starting at position 2569 of SEQ ID NO: 585117
aagagucuuuaggcuugga

SEQ ID NO: 614587 - RNA, 19 nt, Artificial Sequence
  Description of Artificial Sequence: Synthetic oligonucleotide
  Antisense strand to SEQ ID NO: 614586
uccaagccuaaagacucuu

SEQ ID NO: 614588 - RNA, 19 nt, Artificial Sequence
  Description of Artificial Sequence: Synthetic oligonucleotide
  Sense strand starting at position 2572 of SEQ ID NO: 585117
agucuuuaggcuuggagag

SEQ ID NO: 614589 - RNA, 19 nt, Artificial Sequence
  Description of Artificial Sequence: Synthetic oligonucleotide
  Antisense strand to SEQ ID NO: 614588
cucuccaagccuaaagacu

SEQ ID NO: 614590 - RNA, 19 nt, Artificial Sequence
  Description of Artificial Sequence: Synthetic oligonucleotide
  Sense strand starting at position 2620 of SEQ ID NO: 585117
agugcuugugccuuuacuu

SEQ ID NO: 614591 - RNA, 19 nt, Artificial Sequence
  Description of Artificial Sequence: Synthetic oligonucleotide
  Antisense strand to SEQ ID NO: 614590
aaguaaaggcacaagcacu

SEQ ID NO: 614592 - RNA, 19 nt, Artificial Sequence
  Description of Artificial Sequence: Synthetic oligonucleotide
  Sense strand starting at position 2621 of SEQ ID NO: 585117
gugcuugugccuuuacuuu

SEQ ID NO: 614593 - RNA, 19 nt, Artificial Sequence
  Description of Artificial Sequence: Synthetic oligonucleotide
  Antisense strand to SEQ ID NO: 614592
aaaguaaaggcacaagcac

SEQ ID NO: 614594 - RNA, 19 nt, Artificial Sequence
  Description of Artificial Sequence: Synthetic oligonucleotide
  Sense strand starting at position 2769 of SEQ ID NO: 585117
ugggauacugcggagcaau

SEQ ID NO: 614595 - RNA, 19 nt, Artificial Sequence
  Description of Artificial Sequence: Synthetic oligonucleotide
  Antisense strand to SEQ ID NO: 614594
auugcuccgcaguauccca

SEQ ID NO: 614596 - RNA, 19 nt, Artificial Sequence
  Description of Artificial Sequence: Synthetic oligonucleotide
  Sense strand starting at position 2869 of SEQ ID NO: 585117
cucaguaaaucugucauga

SEQ ID NO: 614597 - RNA, 19 nt, Artificial Sequence
  Description of Artificial Sequence: Synthetic oligonucleotide
  Antisense strand to SEQ ID NO: 614596
ucaugacagauuuacugag

SEQ ID NO: 614598 - RNA, 19 nt, Artificial Sequence
  Description of Artificial Sequence: Synthetic oligonucleotide
  Sense strand starting at position 2898 of SEQ ID NO: 585117
uaauuuguguaaucacgua

SEQ ID NO: 614599 - RNA, 19 nt, Artificial Sequence
  Description of Artificial Sequence: Synthetic oligonucleotide
  Antisense strand to SEQ ID NO: 614598
uacgugauuacacaaauua

SEQ ID NO: 614600 - RNA, 19 nt, Artificial Sequence
  Description of Artificial Sequence: Synthetic oligonucleotide
  Sense strand starting at position 2958 of SEQ ID NO: 585117
agccuaguacuguaagaau

SEQ ID NO: 614601 - RNA, 19 nt, Artificial Sequence
  Description of Artificial Sequence: Synthetic oligonucleotide
  Antisense strand to SEQ ID NO: 614600
auucuuacaguacuaggcu

SEQ ID NO: 614602 - RNA, 19 nt, Artificial Sequence
  Description of Artificial Sequence: Synthetic oligonucleotide
  Sense strand starting at position 2984 of SEQ ID NO: 585117
aggguaguaauaggcauau

SEQ ID NO: 614603 - RNA, 19 nt, Artificial Sequence
  Description of Artificial Sequence: Synthetic oligonucleotide
  Antisense strand to SEQ ID NO: 614602
auaugccuauuacuacccu

SEQ ID NO: 614604 - RNA, 19 nt, Artificial Sequence
  Description of Artificial Sequence: Synthetic oligonucleotide
  Sense strand starting at position 3103 of SEQ ID NO: 585117
augcuaagccauuaagguu

SEQ ID NO: 614605 - RNA, 19 nt, Artificial Sequence
  Description of Artificial Sequence: Synthetic oligonucleotide
  Antisense strand to SEQ ID NO: 614604
aaccuuaauggcuuagcau

SEQ ID NO: 614606 - RNA, 19 nt, Artificial Sequence
  Description of Artificial Sequence: Synthetic oligonucleotide
  Sense strand starting at position 3110 of SEQ ID NO: 585117
gccauuaagguuuggauga

SEQ ID NO: 614607 - RNA, 19 nt, Artificial Sequence
  Description of Artificial Sequence: Synthetic oligonucleotide
  Antisense strand to SEQ ID NO: 614606
ucauccaaaccuuaauggc

SEQ ID NO: 614608 - RNA, 19 nt, Artificial Sequence
  Description of Artificial Sequence: Synthetic oligonucleotide
  Sense strand starting at position 3163 of SEQ ID NO: 585117
ugaaauucgcauuagucua

SEQ ID NO: 614609 - RNA, 19 nt, Artificial Sequence
  Description of Artificial Sequence: Synthetic oligonucleotide
  Antisense strand to SEQ ID NO: 614608
uagacuaaugcgaauuuca

SEQ ID NO: 614610 - RNA, 19 nt, Artificial Sequence
  Description of Artificial Sequence: Synthetic oligonucleotide
  Sense strand starting at position 3225 of SEQ ID NO: 585117
agcaaauuccaggauuagu

SEQ ID NO: 614611 - RNA, 19 nt, Artificial Sequence
  Description of Artificial Sequence: Synthetic oligonucleotide
  Antisense strand to SEQ ID NO: 614610
acuaauccuggaauuugcu

SEQ ID NO: 614612 - RNA, 19 nt, Artificial Sequence
  Description of Artificial Sequence: Synthetic oligonucleotide
  Sense strand starting at position 3233 of SEQ ID NO: 585117
ccaggauuaguacaaagcu

SEQ ID NO: 614613 - RNA, 19 nt, Artificial Sequence
  Description of Artificial Sequence: Synthetic oligonucleotide
  Antisense strand to SEQ ID NO: 614612
agcuuuguacuaauccugg

SEQ ID NO: 614614 - RNA, 19 nt, Artificial Sequence
  Description of Artificial Sequence: Synthetic oligonucleotide
  Sense strand starting at position 3249 of SEQ ID NO: 585117
gcuaaucuuccagaucuug

SEQ ID NO: 614615 - RNA, 19 nt, Artificial Sequence
  Description of Artificial Sequence: Synthetic oligonucleotide
  Antisense strand to SEQ ID NO: 614614
caagaucuggaagauuagc

SEQ ID NO: 614616 - RNA, 19 nt, Artificial Sequence
  Description of Artificial Sequence: Synthetic oligonucleotide
  Sense strand starting at position 3461 of SEQ ID NO: 585117
uucuacagccuuugagaau

SEQ ID NO: 614617 - RNA, 19 nt, Artificial Sequence
  Description of Artificial Sequence: Synthetic oligonucleotide
  Antisense strand to SEQ ID NO: 614616
auucucaaaggcuguagaa

SEQ ID NO: 614618 - RNA, 19 nt, Artificial Sequence
  Description of Artificial Sequence: Synthetic oligonucleotide
  Sense strand starting at position 3467 of SEQ ID NO: 585117
agccuuugagaauaauucu

SEQ ID NO: 614619 - RNA, 19 nt, Artificial Sequence
  Description of Artificial Sequence: Synthetic oligonucleotide
  Antisense strand to SEQ ID NO: 614618
agaauuauucucaaaggcu

SEQ ID NO: 614620 - RNA, 19 nt, Artificial Sequence
  Description of Artificial Sequence: Synthetic oligonucleotide
  Sense strand starting at position 3482 of SEQ ID NO: 585117
uucugaaugucucuuaaag

SEQ ID NO: 614621 - RNA, 19 nt, Artificial Sequence
  Description of Artificial Sequence: Synthetic oligonucleotide
  Antisense strand to SEQ ID NO: 614620
cuuuaagagacauucagaa

SEQ ID NO: 614622 - RNA, 19 nt, Artificial Sequence
  Description of Artificial Sequence: Synthetic oligonucleotide
  Sense strand starting at position 3492 of SEQ ID NO: 585117
cucuuaaaggugcaauacu

SEQ ID NO: 614623 - RNA, 19 nt, Artificial Sequence
  Description of Artificial Sequence: Synthetic oligonucleotide
  Antisense strand to SEQ ID NO: 614622
aguauugcaccuuuaagag

SEQ ID NO: 614624 - RNA, 19 nt, Artificial Sequence
  Description of Artificial Sequence: Synthetic oligonucleotide
  Sense strand starting at position 3646 of SEQ ID NO: 585117
ggauauaucuacucgagug

SEQ ID NO: 614625 - RNA, 19 nt, Artificial Sequence
  Description of Artificial Sequence: Synthetic oligonucleotide
  Antisense strand to SEQ ID NO: 614624
cacucgaguagauauaucc

SEQ ID NO: 614626 - RNA, 19 nt, Artificial Sequence
  Description of Artificial Sequence: Synthetic oligonucleotide
  Sense strand starting at position 3874 of SEQ ID NO: 585117
ugagcaaacuugucaggag

SEQ ID NO: 614627 - RNA, 19 nt, Artificial Sequence
  Description of Artificial Sequence: Synthetic oligonucleotide
  Antisense strand to SEQ ID NO: 614626
cuccugacaaguuugcuca

SEQ ID NO: 614628 - RNA, 19 nt, Artificial Sequence
  Description of Artificial Sequence: Synthetic oligonucleotide
  Sense strand starting at position 3899 of SEQ ID NO: 585117
auugacaugugauuagaug

SEQ ID NO: 614629 - RNA, 19 nt, Artificial Sequence
  Description of Artificial Sequence: Synthetic oligonucleotide
  Antisense strand to SEQ ID NO: 614628
caucuaaucacaugucaau

SEQ ID NO: 614630 - RNA, 19 nt, Artificial Sequence
  Description of Artificial Sequence: Synthetic oligonucleotide
  Sense strand starting at position 3974 of SEQ ID NO: 585117
cugauuuggccaugggcau

SEQ ID NO: 614631 - RNA, 19 nt, Artificial Sequence
  Description of Artificial Sequence: Synthetic oligonucleotide
  Antisense strand to SEQ ID NO: 614630
augcccauggccaaaucag

SEQ ID NO: 614632 - RNA, 19 nt, Artificial Sequence
  Description of Artificial Sequence: Synthetic oligonucleotide
  Sense strand starting at position 315 of SEQ ID NO: 585118
gaauucuaaugaggagaau

SEQ ID NO: 614633 - RNA, 19 nt, Artificial Sequence
  Description of Artificial Sequence: Synthetic oligonucleotide
  Antisense strand to SEQ ID NO: 614632
auucuccucauuagaauuc

SEQ ID NO: 614634 - RNA, 19 nt, Artificial Sequence
  Description of Artificial Sequence: Synthetic oligonucleotide
  Sense strand starting at position 388 of SEQ ID NO: 585118
gguuaaauauuggcaauua

SEQ ID NO: 614635 - RNA, 19 nt, Artificial Sequence
  Description of Artificial Sequence: Synthetic oligonucleotide
  Antisense strand to SEQ ID NO: 614634
uaauugccaauauuuaacc

SEQ ID NO: 614636 - RNA, 19 nt, Artificial Sequence
  Description of Artificial Sequence: Synthetic oligonucleotide
  Sense strand starting at position 398 of SEQ ID NO: 585118
uggcaauuaguauaaagua

SEQ ID NO: 614637 - RNA, 19 nt, Artificial Sequence
  Description of Artificial Sequence: Synthetic oligonucleotide
  Antisense strand to SEQ ID NO: 614636
uacuuuauacuaauugcca

SEQ ID NO: 614638 - RNA, 19 nt, Artificial Sequence
  Description of Artificial Sequence: Synthetic oligonucleotide
  Sense strand starting at position 498 of SEQ ID NO: 585118
ccuaaauucugacugggau

SEQ ID NO: 614639 - RNA, 19 nt, Artificial Sequence
  Description of Artificial Sequence: Synthetic oligonucleotide
  Antisense strand to SEQ ID NO: 614638
aucccagucagaauuuagg

SEQ ID NO: 614640 - RNA, 19 nt, Artificial Sequence
  Description of Artificial Sequence: Synthetic oligonucleotide
  Sense strand starting at position 499 of SEQ ID NO: 585118
cuaaauucugacugggauc

SEQ ID NO: 614641 - RNA, 19 nt, Artificial Sequence
  Description of Artificial Sequence: Synthetic oligonucleotide
  Antisense strand to SEQ ID NO: 614640
gaucccagucagaauuuag

SEQ ID NO: 614642 - RNA, 19 nt, Artificial Sequence
  Description of Artificial Sequence: Synthetic oligonucleotide
  Sense strand starting at position 502 of SEQ ID NO: 585118
aauucugacugggaucaga

SEQ ID NO: 614643 - RNA, 19 nt, Artificial Sequence
  Description of Artificial Sequence: Synthetic oligonucleotide
  Antisense strand to SEQ ID NO: 614642
ucugaucccagucagaauu

SEQ ID NO: 614644 - RNA, 19 nt, Artificial Sequence
  Description of Artificial Sequence: Synthetic oligonucleotide
  Sense strand starting at position 540 of SEQ ID NO: 585118
cccaucuaucuguggcuaa

SEQ ID NO: 614645 - RNA, 19 nt, Artificial Sequence
  Description of Artificial Sequence: Synthetic oligonucleotide
  Antisense strand to SEQ ID NO: 614644
uuagccacagauagauggg

SEQ ID NO: 614646 - RNA, 19 nt, Artificial Sequence
  Description of Artificial Sequence: Synthetic oligonucleotide
  Sense strand starting at position 543 of SEQ ID NO: 585118
aucuaucuguggcuaacua

SEQ ID NO: 614647 - RNA, 19 nt, Artificial Sequence
  Description of Artificial Sequence: Synthetic oligonucleotide
  Antisense strand to SEQ ID NO: 614646
uaguuagccacagauagau

SEQ ID NO: 614648 - RNA, 19 nt, Artificial Sequence
  Description of Artificial Sequence: Synthetic oligonucleotide
  Sense strand starting at position 544 of SEQ ID NO: 585118
ucuaucuguggcuaacuaa

SEQ ID NO: 614649 - RNA, 19 nt, Artificial Sequence
  Description of Artificial Sequence: Synthetic oligonucleotide
  Antisense strand to SEQ ID NO: 614648
uuaguuagccacagauaga

SEQ ID NO: 614650 - RNA, 19 nt, Artificial Sequence
  Description of Artificial Sequence: Synthetic oligonucleotide
  Sense strand starting at position 767 of SEQ ID NO: 585118
cuaaguagccaaugucuga

SEQ ID NO: 614651 - RNA, 19 nt, Artificial Sequence
  Description of Artificial Sequence: Synthetic oligonucleotide
  Antisense strand to SEQ ID NO: 614650
ucagacauuggcuacuuag

SEQ ID NO: 614652 - RNA, 19 nt, Artificial Sequence
  Description of Artificial Sequence: Synthetic oligonucleotide
  Sense strand starting at position 770 of SEQ ID NO: 585118
aguagccaaugucugaaua

SEQ ID NO: 614653 - RNA, 19 nt, Artificial Sequence
  Description of Artificial Sequence: Synthetic oligonucleotide
  Antisense strand to SEQ ID NO: 614652
uauucagacauuggcuacu

SEQ ID NO: 614654 - RNA, 19 nt, Artificial Sequence
  Description of Artificial Sequence: Synthetic oligonucleotide
  Sense strand starting at position 771 of SEQ ID NO: 585118
guagccaaugucugaauaa

SEQ ID NO: 614655 - RNA, 19 nt, Artificial Sequence
  Description of Artificial Sequence: Synthetic oligonucleotide
  Antisense strand to SEQ ID NO: 614654
uuauucagacauuggcuac

SEQ ID NO: 614656 - RNA, 19 nt, Artificial Sequence
  Description of Artificial Sequence: Synthetic oligonucleotide
  Sense strand starting at position 824 of SEQ ID NO: 585118
ggguuugccauuugcgaau

SEQ ID NO: 614657 - RNA, 19 nt, Artificial Sequence
  Description of Artificial Sequence: Synthetic oligonucleotide
  Antisense strand to SEQ ID NO: 614656
auucgcaaauggcaaaccc

SEQ ID NO: 614658 - RNA, 19 nt, Artificial Sequence
  Description of Artificial Sequence: Synthetic oligonucleotide
  Sense strand starting at position 827 of SEQ ID NO: 585118
uuugccauuugcgaauuua

SEQ ID NO: 614659 - RNA, 19 nt, Artificial Sequence
  Description of Artificial Sequence: Synthetic oligonucleotide
  Antisense strand to SEQ ID NO: 614658
uaaauucgcaaauggcaaa

SEQ ID NO: 614660 - RNA, 19 nt, Artificial Sequence
  Description of Artificial Sequence: Synthetic oligonucleotide
  Sense strand starting at position 950 of SEQ ID NO: 585118
uuuggagugccaggucuaa

SEQ ID NO: 614661 - RNA, 19 nt, Artificial Sequence
  Description of Artificial Sequence: Synthetic oligonucleotide
  Antisense strand to SEQ ID NO: 614660
uuagaccuggcacuccaaa

SEQ ID NO: 614662 - RNA, 19 nt, Artificial Sequence
  Description of Artificial Sequence: Synthetic oligonucleotide
  Sense strand starting at position 1073 of SEQ ID NO: 585118
gcagcaguuacaggucuaa

SEQ ID NO: 614663 - RNA, 19 nt, Artificial Sequence
  Description of Artificial Sequence: Synthetic oligonucleotide
  Antisense strand to SEQ ID NO: 614662
uuagaccuguaacugcugc

SEQ ID NO: 614664 - RNA, 19 nt, Artificial Sequence
  Description of Artificial Sequence: Synthetic oligonucleotide
  Sense strand starting at position 2200 of SEQ ID NO: 585118
gggccuaguuguccuggga

SEQ ID NO: 614665 - RNA, 19 nt, Artificial Sequence
  Description of Artificial Sequence: Synthetic oligonucleotide
  Antisense strand to SEQ ID NO: 614664
ucccaggacaacuaggccc

SEQ ID NO: 614666 - RNA, 19 nt, Artificial Sequence
  Description of Artificial Sequence: Synthetic oligonucleotide
  Sense strand starting at position 2203 of SEQ ID NO: 585118
ccuaguuguccugggagaa

SEQ ID NO: 614667 - RNA, 19 nt, Artificial Sequence
  Description of Artificial Sequence: Synthetic oligonucleotide
  Antisense strand to SEQ ID NO: 614666
uucucccaggacaacuagg

SEQ ID NO: 614668 - RNA, 19 nt, Artificial Sequence
  Description of Artificial Sequence: Synthetic oligonucleotide
  Sense strand starting at position 2204 of SEQ ID NO: 585118
cuaguuguccugggagaaa

SEQ ID NO: 614669 - RNA, 19 nt, Artificial Sequence
  Description of Artificial Sequence: Synthetic oligonucleotide
  Antisense strand to SEQ ID NO: 614668
uuucucccaggacaacuag

SEQ ID NO: 614670 - RNA, 19 nt, Artificial Sequence
  Description of Artificial Sequence: Synthetic oligonucleotide
  Sense strand starting at position 2207 of SEQ ID NO: 585118
guuguccugggagaaacua

SEQ ID NO: 614671 - RNA, 19 nt, Artificial Sequence
  Description of Artificial Sequence: Synthetic oligonucleotide
  Antisense strand to SEQ ID NO: 614670
uaguuucucccaggacaac

SEQ ID NO: 614672 - RNA, 19 nt, Artificial Sequence
  Description of Artificial Sequence: Synthetic oligonucleotide
  Sense strand starting at position 2234 of SEQ ID NO: 585118
aggaguauuuccgagacag

SEQ ID NO: 614673 - RNA, 19 nt, Artificial Sequence
  Description of Artificial Sequence: Synthetic oligonucleotide
  Antisense strand to SEQ ID NO: 614672
cugucucggaaauacuccu

SEQ ID NO: 614674 - RNA, 19 nt, Artificial Sequence
  Description of Artificial Sequence: Synthetic oligonucleotide
  Sense strand starting at position 2341 of SEQ ID NO: 585118
ccaguuaaccauuaguacu

SEQ ID NO: 614675 - RNA, 19 nt, Artificial Sequence
  Description of Artificial Sequence: Synthetic oligonucleotide
  Antisense strand to SEQ ID NO: 614674
aguacuaaugguuaacugg

SEQ ID NO: 614676 - RNA, 19 nt, Artificial Sequence
  Description of Artificial Sequence: Synthetic oligonucleotide
  Sense strand starting at position 2347 of SEQ ID NO: 585118
aaccauuaguacucgagaa

SEQ ID NO: 614677 - RNA, 19 nt, Artificial Sequence
  Description of Artificial Sequence: Synthetic oligonucleotide
  Antisense strand to SEQ ID NO: 614676
uucucgaguacuaaugguu

SEQ ID NO: 614678 - RNA, 19 nt, Artificial Sequence
  Description of Artificial Sequence: Synthetic oligonucleotide
  Sense strand starting at position 2348 of SEQ ID NO: 585118
accauuaguacucgagaag

SEQ ID NO: 614679 - RNA, 19 nt, Artificial Sequence
  Description of Artificial Sequence: Synthetic oligonucleotide
  Antisense strand to SEQ ID NO: 614678
cuucucgaguacuaauggu

SEQ ID NO: 614680 - RNA, 19 nt, Artificial Sequence
  Description of Artificial Sequence: Synthetic oligonucleotide
  Sense strand starting at position 2351 of SEQ ID NO: 585118
auuaguacucgagaaggug

SEQ ID NO: 614681 - RNA, 19 nt, Artificial Sequence
  Description of Artificial Sequence: Synthetic oligonucleotide
  Antisense strand to SEQ ID NO: 614680
caccuucucgaguacuaau

SEQ ID NO: 614682 - RNA, 19 nt, Artificial Sequence
  Description of Artificial Sequence: Synthetic oligonucleotide
  Sense strand starting at position 2489 of SEQ ID NO: 585118
ugaggugcuauguauaauu

SEQ ID NO: 614683 - RNA, 19 nt, Artificial Sequence
  Description of Artificial Sequence: Synthetic oligonucleotide
  Antisense strand to SEQ ID NO: 614682
aauuauacauagcaccuca

SEQ ID NO: 614684 - RNA, 19 nt, Artificial Sequence
  Description of Artificial Sequence: Synthetic oligonucleotide
  Sense strand starting at position 2518 of SEQ ID NO: 585118
ggaaauuaugcaugggcca

SEQ ID NO: 614685 - RNA, 19 nt, Artificial Sequence
  Description of Artificial Sequence: Synthetic oligonucleotide
  Antisense strand to SEQ ID NO: 614684
uggcccaugcauaauuucc

SEQ ID NO: 614686 - RNA, 19 nt, Artificial Sequence
  Description of Artificial Sequence: Synthetic oligonucleotide
  Sense strand starting at position 2551 of SEQ ID NO: 585118
ggcuccaaagccugggaua

SEQ ID NO: 614687 - RNA, 19 nt, Artificial Sequence
  Description of Artificial Sequence: Synthetic oligonucleotide
  Antisense strand to SEQ ID NO: 614686
uaucccaggcuuuggagcc

SEQ ID NO: 614688 - RNA, 19 nt, Artificial Sequence
  Description of Artificial Sequence: Synthetic oligonucleotide
  Sense strand starting at position 2606 of SEQ ID NO: 585118
accuaaauuugagacuaga

SEQ ID NO: 614689 - RNA, 19 nt, Artificial Sequence
  Description of Artificial Sequence: Synthetic oligonucleotide
  Antisense strand to SEQ ID NO: 614688
ucuagucucaaauuuaggu

SEQ ID NO: 614690 - RNA, 19 nt, Artificial Sequence
  Description of Artificial Sequence: Synthetic oligonucleotide
  Sense strand starting at position 2769 of SEQ ID NO: 585118
aaaucucugcagcgauaug

SEQ ID NO: 614691 - RNA, 19 nt, Artificial Sequence
  Description of Artificial Sequence: Synthetic oligonucleotide
  Antisense strand to SEQ ID NO: 614690
cauaucgcugcagagauuu

SEQ ID NO: 614692 - RNA, 19 nt, Artificial Sequence
  Description of Artificial Sequence: Synthetic oligonucleotide
  Sense strand starting at position 2825 of SEQ ID NO: 585118
ggccaaauacugugggaau

SEQ ID NO: 614693 - RNA, 19 nt, Artificial Sequence
  Description of Artificial Sequence: Synthetic oligonucleotide
  Antisense strand to SEQ ID NO: 614692
auucccacaguauuuggcc

SEQ ID NO: 614694 - RNA, 19 nt, Artificial Sequence
  Description of Artificial Sequence: Synthetic oligonucleotide
  Sense strand starting at position 2827 of SEQ ID NO: 585118
ccaaauacugugggaauau

SEQ ID NO: 614695 - RNA, 19 nt, Artificial Sequence
  Description of Artificial Sequence: Synthetic oligonucleotide
  Antisense strand to SEQ ID NO: 614694
auauucccacaguauuugg

SEQ ID NO: 614696 - RNA, 19 nt, Artificial Sequence
  Description of Artificial Sequence: Synthetic oligonucleotide
  Sense strand starting at position 2903 of SEQ ID NO: 585118
uucugaaguuucgcugaaa

SEQ ID NO: 614697 - RNA, 19 nt, Artificial Sequence
  Description of Artificial Sequence: Synthetic oligonucleotide
  Antisense strand to SEQ ID NO: 614696
uuucagcgaaacuucagaa

SEQ ID NO: 614698 - RNA, 19 nt, Artificial Sequence
  Description of Artificial Sequence: Synthetic oligonucleotide
  Sense strand starting at position 2904 of SEQ ID NO: 585118
ucugaaguuucgcugaaag

SEQ ID NO: 614699 - RNA, 19 nt, Artificial Sequence
  Description of Artificial Sequence: Synthetic oligonucleotide
  Antisense strand to SEQ ID NO: 614698
cuuucagcgaaacuucaga

SEQ ID NO: 614700 - RNA, 19 nt, Artificial Sequence
  Description of Artificial Sequence: Synthetic oligonucleotide
  Sense strand starting at position 2906 of SEQ ID NO: 585118
ugaaguuucgcugaaaguc

SEQ ID NO: 614701 - RNA, 19 nt, Artificial Sequence
  Description of Artificial Sequence: Synthetic oligonucleotide
  Antisense strand to SEQ ID NO: 614700
gacuuucagcgaaacuuca

SEQ ID NO: 614702 - RNA, 19 nt, Artificial Sequence
  Description of Artificial Sequence: Synthetic oligonucleotide
  Sense strand starting at position 3028 of SEQ ID NO: 585118
gaaaucguguauuuguaug

SEQ ID NO: 614703 - RNA, 19 nt, Artificial Sequence
  Description of Artificial Sequence: Synthetic oligonucleotide
  Antisense strand to SEQ ID NO: 614702
cauacaaauacacgauuuc

SEQ ID NO: 614704 - RNA, 19 nt, Artificial Sequence
  Description of Artificial Sequence: Synthetic oligonucleotide
  Sense strand starting at position 3033 of SEQ ID NO: 585118
cguguauuuguaugcuuag

SEQ ID NO: 614705 - RNA, 19 nt, Artificial Sequence
  Description of Artificial Sequence: Synthetic oligonucleotide
  Antisense strand to SEQ ID NO: 614704
cuaagcauacaaauacacg

SEQ ID NO: 614706 - RNA, 19 nt, Artificial Sequence
  Description of Artificial Sequence: Synthetic oligonucleotide
  Sense strand starting at position 3036 of SEQ ID NO: 585118
guauuuguaugcuuagguu

SEQ ID NO: 614707 - RNA, 19 nt, Artificial Sequence
  Description of Artificial Sequence: Synthetic oligonucleotide
  Antisense strand to SEQ ID NO: 614706
aaccuaagcauacaaauac

SEQ ID NO: 614708 - RNA, 19 nt, Artificial Sequence
  Description of Artificial Sequence: Synthetic oligonucleotide
  Sense strand starting at position 3877 of SEQ ID NO: 585118
guccaauauuugcacagaa

SEQ ID NO: 614709 - RNA, 19 nt, Artificial Sequence
  Description of Artificial Sequence: Synthetic oligonucleotide
  Antisense strand to SEQ ID NO: 614708
uucugugcaaauauuggac

SEQ ID NO: 614710 - RNA, 19 nt, Artificial Sequence
  Description of Artificial Sequence: Synthetic oligonucleotide
  Sense strand starting at position 3932 of SEQ ID NO: 585118
uguggcuggcuuugggaaa

SEQ ID NO: 614711 - RNA, 19 nt, Artificial Sequence
  Description of Artificial Sequence: Synthetic oligonucleotide
  Antisense strand to SEQ ID NO: 614710
uuucccaaagccagccaca

SEQ ID NO: 614712 - RNA, 19 nt, Artificial Sequence
  Description of Artificial Sequence: Synthetic oligonucleotide
  Sense strand starting at position 403 of SEQ ID NO: 585119
gugccagagaccugugauc

SEQ ID NO: 614713 - RNA, 19 nt, Artificial Sequence
  Description of Artificial Sequence: Synthetic oligonucleotide
  Antisense strand to SEQ ID NO: 614712
gaucacaggucucuggcac

SEQ ID NO: 614714 - RNA, 19 nt, Artificial Sequence
  Description of Artificial Sequence: Synthetic oligonucleotide
  Sense strand starting at position 405 of SEQ ID NO: 585119
gccagagaccugugaucag

SEQ ID NO: 614715 - RNA, 19 nt, Artificial Sequence
  Description of Artificial Sequence: Synthetic oligonucleotide
  Antisense strand to SEQ ID NO: 614714
cugaucacaggucucuggc

SEQ ID NO: 614716 - RNA, 19 nt, Artificial Sequence
  Description of Artificial Sequence: Synthetic oligonucleotide
  Sense strand starting at position 414 of SEQ ID NO: 585119
cugugaucagaaugagugu

SEQ ID NO: 614717 - RNA, 19 nt, Artificial Sequence
  Description of Artificial Sequence: Synthetic oligonucleotide
  Antisense strand to SEQ ID NO: 614716
acacucauucugaucacag

SEQ ID NO: 614718 - RNA, 19 nt, Artificial Sequence
  Description of Artificial Sequence: Synthetic oligonucleotide
  Sense strand starting at position 415 of SEQ ID NO: 585119
ugugaucagaaugaguguu

SEQ ID NO: 614719 - RNA, 19 nt, Artificial Sequence
  Description of Artificial Sequence: Synthetic oligonucleotide
  Antisense strand to SEQ ID NO: 614718
aacacucauucugaucaca

SEQ ID NO: 614720 - RNA, 19 nt, Artificial Sequence
  Description of Artificial Sequence: Synthetic oligonucleotide
  Sense strand starting at position 417 of SEQ ID NO: 585119
ugaucagaaugaguguuaa

SEQ ID NO: 614721 - RNA, 19 nt, Artificial Sequence
  Description of Artificial Sequence: Synthetic oligonucleotide
  Antisense strand to SEQ ID NO: 614720
uuaacacucauucugauca

SEQ ID NO: 614722 - RNA, 19 nt, Artificial Sequence
  Description of Artificial Sequence: Synthetic oligonucleotide
  Sense strand starting at position 471 of SEQ ID NO: 585119
aucaauugugcugaaauac

SEQ ID NO: 614723 - RNA, 19 nt, Artificial Sequence
  Description of Artificial Sequence: Synthetic oligonucleotide
  Antisense strand to SEQ ID NO: 614722
guauuucagcacaauugau

SEQ ID NO: 614724 - RNA, 19 nt, Artificial Sequence
  Description of Artificial Sequence: Synthetic oligonucleotide
  Sense strand starting at position 550 of SEQ ID NO: 585119
ccagauagcugggcaaaca

SEQ ID NO: 614725 - RNA, 19 nt, Artificial Sequence
  Description of Artificial Sequence: Synthetic oligonucleotide
  Antisense strand to SEQ ID NO: 614724
uguuugcccagcuaucugg

SEQ ID NO: 614726 - RNA, 19 nt, Artificial Sequence
  Description of Artificial Sequence: Synthetic oligonucleotide
  Sense strand starting at position 551 of SEQ ID NO: 585119
cagauagcugggcaaacau

SEQ ID NO: 614727 - RNA, 19 nt, Artificial Sequence
  Description of Artificial Sequence: Synthetic oligonucleotide
  Antisense strand to SEQ ID NO: 614726
auguuugcccagcuaucug

SEQ ID NO: 614728 - RNA, 19 nt, Artificial Sequence
  Description of Artificial Sequence: Synthetic oligonucleotide
  Sense strand starting at position 722 of SEQ ID NO: 585119
ucuggaugguuuccagcau

SEQ ID NO: 614729 - RNA, 19 nt, Artificial Sequence
  Description of Artificial Sequence: Synthetic oligonucleotide
  Antisense strand to SEQ ID NO: 614728
augcuggaaaccauccaga

SEQ ID NO: 614730 - RNA, 19 nt, Artificial Sequence
  Description of Artificial Sequence: Synthetic oligonucleotide
  Sense strand starting at position 726 of SEQ ID NO: 585119
gaugguuuccagcauaaau

SEQ ID NO: 614731 - RNA, 19 nt, Artificial Sequence
  Description of Artificial Sequence: Synthetic oligonucleotide
  Antisense strand to SEQ ID NO: 614730
auuuaugcuggaaaccauc

SEQ ID NO: 614732 - RNA, 19 nt, Artificial Sequence
  Description of Artificial Sequence: Synthetic oligonucleotide
  Sense strand starting at position 728 of SEQ ID NO: 585119
ugguuuccagcauaaauua

SEQ ID NO: 614733 - RNA, 19 nt, Artificial Sequence
  Description of Artificial Sequence: Synthetic oligonucleotide
  Antisense strand to SEQ ID NO: 614732
uaauuuaugcuggaaacca

SEQ ID NO: 614734 - RNA, 19 nt, Artificial Sequence
  Description of Artificial Sequence: Synthetic oligonucleotide
  Sense strand starting at position 838 of SEQ ID NO: 585119
uaacuuugcuaguuaagug

SEQ ID NO: 614735 - RNA, 19 nt, Artificial Sequence
  Description of Artificial Sequence: Synthetic oligonucleotide
  Antisense strand to SEQ ID NO: 614734
cacuuaacuagcaaaguua

SEQ ID NO: 614736 - RNA, 19 nt, Artificial Sequence
  Description of Artificial Sequence: Synthetic oligonucleotide
  Sense strand starting at position 850 of SEQ ID NO: 585119
uuaagugcaucuguagaua

SEQ ID NO: 614737 - RNA, 19 nt, Artificial Sequence
  Description of Artificial Sequence: Synthetic oligonucleotide
  Antisense strand to SEQ ID NO: 614736
uaucuacagaugcacuuaa

SEQ ID NO: 614738 - RNA, 19 nt, Artificial Sequence
  Description of Artificial Sequence: Synthetic oligonucleotide
  Sense strand starting at position 945 of SEQ ID NO: 585119
uggagauaauaucaauaac

SEQ ID NO: 614739 - RNA, 19 nt, Artificial Sequence
  Description of Artificial Sequence: Synthetic oligonucleotide
  Antisense strand to SEQ ID NO: 614738
guuauugauauuaucucca

SEQ ID NO: 614740 - RNA, 19 nt, Artificial Sequence
  Description of Artificial Sequence: Synthetic oligonucleotide
  Sense strand starting at position 1125 of SEQ ID NO: 585119
gcaaucuugccuuaaagug
